United States Patent Application Publication US 2018/0305689 A1 - sequence listing, part 21

SEQ ID NO: 292413 - RNA, 19 nt, Artificial Sequence
  Description of Artificial Sequence: Synthetic oligonucleotide
  Antisense strand to SEQ ID NO: 292412
acuuguggagagcucgaau

SEQ ID NO: 292414 - RNA, 19 nt, Artificial Sequence
  Description of Artificial Sequence: Synthetic oligonucleotide
  Sense strand starting at position 197 of SEQ ID NO: 3759
cuccacaaguguccucaaa

SEQ ID NO: 292415 - RNA, 19 nt, Artificial Sequence
  Description of Artificial Sequence: Synthetic oligonucleotide
  Antisense strand to SEQ ID NO: 292414
uuugaggacacuuguggag

SEQ ID NO: 292416 - RNA, 19 nt, Artificial Sequence
  Description of Artificial Sequence: Synthetic oligonucleotide
  Sense strand starting at position 414 of SEQ ID NO: 3759
gaggcaagcaaguguagaa

SEQ ID NO: 292417 - RNA, 19 nt, Artificial Sequence
  Description of Artificial Sequence: Synthetic oligonucleotide
  Antisense strand to SEQ ID NO: 292416
uucuacacuugcuugccuc

SEQ ID NO: 292418 - RNA, 19 nt, Artificial Sequence
  Description of Artificial Sequence: Synthetic oligonucleotide
  Sense strand starting at position 418 of SEQ ID NO: 3759
caagcaaguguagaaacau

SEQ ID NO: 292419 - RNA, 19 nt, Artificial Sequence
  Description of Artificial Sequence: Synthetic oligonucleotide
  Antisense strand to SEQ ID NO: 292418
auguuucuacacuugcuug

SEQ ID NO: 292420 - RNA, 19 nt, Artificial Sequence
  Description of Artificial Sequence: Synthetic oligonucleotide
  Sense strand starting at position 427 of SEQ ID NO: 3759
guagaaacaugauuggcuu

SEQ ID NO: 292421 - RNA, 19 nt, Artificial Sequence
  Description of Artificial Sequence: Synthetic oligonucleotide
  Antisense strand to SEQ ID NO: 292420
aagccaaucauguuucuac

SEQ ID NO: 292422 - RNA, 19 nt, Artificial Sequence
  Description of Artificial Sequence: Synthetic oligonucleotide
  Sense strand starting at position 562 of SEQ ID NO: 3759
uggguaucaccaggcuuaa

SEQ ID NO: 292423 - RNA, 19 nt, Artificial Sequence
  Description of Artificial Sequence: Synthetic oligonucleotide
  Antisense strand to SEQ ID NO: 292422
uuaagccuggugauaccca

SEQ ID NO: 292424 - RNA, 19 nt, Artificial Sequence
  Description of Artificial Sequence: Synthetic oligonucleotide
  Sense strand starting at position 868 of SEQ ID NO: 3759
cgaguagcuugaaugcgau

SEQ ID NO: 292425 - RNA, 19 nt, Artificial Sequence
  Description of Artificial Sequence: Synthetic oligonucleotide
  Antisense strand to SEQ ID NO: 292424
aucgcauucaagcuacucg

SEQ ID NO: 292426 - RNA, 19 nt, Artificial Sequence
  Description of Artificial Sequence: Synthetic oligonucleotide
  Sense strand starting at position 910 of SEQ ID NO: 3759
ugacuuaggacuugguagu

SEQ ID NO: 292427 - RNA, 19 nt, Artificial Sequence
  Description of Artificial Sequence: Synthetic oligonucleotide
  Antisense strand to SEQ ID NO: 292426
acuaccaaguccuaaguca

SEQ ID NO: 292428 - RNA, 19 nt, Artificial Sequence
  Description of Artificial Sequence: Synthetic oligonucleotide
  Sense strand starting at position 911 of SEQ ID NO: 3759
gacuuaggacuugguaguu

SEQ ID NO: 292429 - RNA, 19 nt, Artificial Sequence
  Description of Artificial Sequence: Synthetic oligonucleotide
  Antisense strand to SEQ ID NO: 292428
aacuaccaaguccuaaguc

SEQ ID NO: 292430 - RNA, 19 nt, Artificial Sequence
  Description of Artificial Sequence: Synthetic oligonucleotide
  Sense strand starting at position 916 of SEQ ID NO: 3759
aggacuugguaguuagcua

SEQ ID NO: 292431 - RNA, 19 nt, Artificial Sequence
  Description of Artificial Sequence: Synthetic oligonucleotide
  Antisense strand to SEQ ID NO: 292430
uagcuaacuaccaaguccu

SEQ ID NO: 292432 - RNA, 19 nt, Artificial Sequence
  Description of Artificial Sequence: Synthetic oligonucleotide
  Sense strand starting at position 917 of SEQ ID NO: 3759
ggacuugguaguuagcuaa

SEQ ID NO: 292433 - RNA, 19 nt, Artificial Sequence
  Description of Artificial Sequence: Synthetic oligonucleotide
  Antisense strand to SEQ ID NO: 292432
uuagcuaacuaccaagucc

SEQ ID NO: 292434 - RNA, 19 nt, Artificial Sequence
  Description of Artificial Sequence: Synthetic oligonucleotide
  Sense strand starting at position 953 of SEQ ID NO: 3759
uuucuuuaucuggaugcuu

SEQ ID NO: 292435 - RNA, 19 nt, Artificial Sequence
  Description of Artificial Sequence: Synthetic oligonucleotide
  Antisense strand to SEQ ID NO: 292434
aagcauccagauaaagaaa

SEQ ID NO: 292436 - RNA, 19 nt, Artificial Sequence
  Description of Artificial Sequence: Synthetic oligonucleotide
  Sense strand starting at position 1163 of SEQ ID NO: 3759
ucugcuugccagcucgaua

SEQ ID NO: 292437 - RNA, 19 nt, Artificial Sequence
  Description of Artificial Sequence: Synthetic oligonucleotide
  Antisense strand to SEQ ID NO: 292436
uaucgagcuggcaagcaga

SEQ ID NO: 292438 - RNA, 19 nt, Artificial Sequence
  Description of Artificial Sequence: Synthetic oligonucleotide
  Sense strand starting at position 1584 of SEQ ID NO: 3759
auuccagauccucacaguu

SEQ ID NO: 292439 - RNA, 19 nt, Artificial Sequence
  Description of Artificial Sequence: Synthetic oligonucleotide
  Antisense strand to SEQ ID NO: 292438
aacugugaggaucuggaau

SEQ ID NO: 292440 - RNA, 19 nt, Artificial Sequence
  Description of Artificial Sequence: Synthetic oligonucleotide
  Sense strand starting at position 1646 of SEQ ID NO: 3759
uuucuugagaugugaugac

SEQ ID NO: 292441 - RNA, 19 nt, Artificial Sequence
  Description of Artificial Sequence: Synthetic oligonucleotide
  Antisense strand to SEQ ID NO: 292440
gucaucacaucucaagaaa

SEQ ID NO: 292442 - RNA, 19 nt, Artificial Sequence
  Description of Artificial Sequence: Synthetic oligonucleotide
  Sense strand starting at position 1676 of SEQ ID NO: 3759
acaugaaccgaucagcuau

SEQ ID NO: 292443 - RNA, 19 nt, Artificial Sequence
  Description of Artificial Sequence: Synthetic oligonucleotide
  Antisense strand to SEQ ID NO: 292442
auagcugaucgguucaugu

SEQ ID NO: 292444 - RNA, 19 nt, Artificial Sequence
  Description of Artificial Sequence: Synthetic oligonucleotide
  Sense strand starting at position 1682 of SEQ ID NO: 3759
accgaucagcuaugauaga

SEQ ID NO: 292445 - RNA, 19 nt, Artificial Sequence
  Description of Artificial Sequence: Synthetic oligonucleotide
  Antisense strand to SEQ ID NO: 292444
ucuaucauagcugaucggu

SEQ ID NO: 292446 - RNA, 19 nt, Artificial Sequence
  Description of Artificial Sequence: Synthetic oligonucleotide
  Sense strand starting at position 1812 of SEQ ID NO: 3759
acaguaauaugauccagua

SEQ ID NO: 292447 - RNA, 19 nt, Artificial Sequence
  Description of Artificial Sequence: Synthetic oligonucleotide
  Antisense strand to SEQ ID NO: 292446
uacuggaucauauuacugu

SEQ ID NO: 292448 - RNA, 19 nt, Artificial Sequence
  Description of Artificial Sequence: Synthetic oligonucleotide
  Sense strand starting at position 1873 of SEQ ID NO: 3759
gcaauuacaugguccacau

SEQ ID NO: 292449 - RNA, 19 nt, Artificial Sequence
  Description of Artificial Sequence: Synthetic oligonucleotide
  Antisense strand to SEQ ID NO: 292448
auguggaccauguaauugc

SEQ ID NO: 292450 - RNA, 19 nt, Artificial Sequence
  Description of Artificial Sequence: Synthetic oligonucleotide
  Sense strand starting at position 1952 of SEQ ID NO: 3759
gacuuaaucgccgcauguu

SEQ ID NO: 292451 - RNA, 19 nt, Artificial Sequence
  Description of Artificial Sequence: Synthetic oligonucleotide
  Antisense strand to SEQ ID NO: 292450
aacaugcggcgauuaaguc

SEQ ID NO: 292452 - RNA, 19 nt, Artificial Sequence
  Description of Artificial Sequence: Synthetic oligonucleotide
  Sense strand starting at position 2036 of SEQ ID NO: 3759
aagucaugucauuagagcu

SEQ ID NO: 292453 - RNA, 19 nt, Artificial Sequence
  Description of Artificial Sequence: Synthetic oligonucleotide
  Antisense strand to SEQ ID NO: 292452
agcucuaaugacaugacuu

SEQ ID NO: 292454 - RNA, 19 nt, Artificial Sequence
  Description of Artificial Sequence: Synthetic oligonucleotide
  Sense strand starting at position 2165 of SEQ ID NO: 3759
ggugaaugauuguucuaag

SEQ ID NO: 292455 - RNA, 19 nt, Artificial Sequence
  Description of Artificial Sequence: Synthetic oligonucleotide
  Antisense strand to SEQ ID NO: 292454
cuuagaacaaucauucacc

SEQ ID NO: 292456 - RNA, 19 nt, Artificial Sequence
  Description of Artificial Sequence: Synthetic oligonucleotide
  Sense strand starting at position 2166 of SEQ ID NO: 3759
gugaaugauuguucuaaga

SEQ ID NO: 292457 - RNA, 19 nt, Artificial Sequence
  Description of Artificial Sequence: Synthetic oligonucleotide
  Antisense strand to SEQ ID NO: 292456
ucuuagaacaaucauucac

SEQ ID NO: 292458 - RNA, 19 nt, Artificial Sequence
  Description of Artificial Sequence: Synthetic oligonucleotide
  Sense strand starting at position 2176 of SEQ ID NO: 3759
guucuaagacuccaucagu

SEQ ID NO: 292459 - RNA, 19 nt, Artificial Sequence
  Description of Artificial Sequence: Synthetic oligonucleotide
  Antisense strand to SEQ ID NO: 292458
acugauggagucuuagaac

SEQ ID NO: 292460 - RNA, 19 nt, Artificial Sequence
  Description of Artificial Sequence: Synthetic oligonucleotide
  Sense strand starting at position 2182 of SEQ ID NO: 3759
agacuccaucagugacuaa

SEQ ID NO: 292461 - RNA, 19 nt, Artificial Sequence
  Description of Artificial Sequence: Synthetic oligonucleotide
  Antisense strand to SEQ ID NO: 292460
uuagucacugauggagucu

SEQ ID NO: 292462 - RNA, 19 nt, Artificial Sequence
  Description of Artificial Sequence: Synthetic oligonucleotide
  Sense strand starting at position 2207 of SEQ ID NO: 3759
cuuuguaaaguuuacaacu

SEQ ID NO: 292463 - RNA, 19 nt, Artificial Sequence
  Description of Artificial Sequence: Synthetic oligonucleotide
  Antisense strand to SEQ ID NO: 292462
aguuguaaacuuuacaaag

SEQ ID NO: 292464 - RNA, 19 nt, Artificial Sequence
  Description of Artificial Sequence: Synthetic oligonucleotide
  Sense strand starting at position 2522 of SEQ ID NO: 3759
aacacaaggccuggugauu

SEQ ID NO: 292465 - RNA, 19 nt, Artificial Sequence
  Description of Artificial Sequence: Synthetic oligonucleotide
  Antisense strand to SEQ ID NO: 292464
aaucaccaggccuuguguu

SEQ ID NO: 292466 - RNA, 19 nt, Artificial Sequence
  Description of Artificial Sequence: Synthetic oligonucleotide
  Sense strand starting at position 2528 of SEQ ID NO: 3759
aggccuggugauuaucuua

SEQ ID NO: 292467 - RNA, 19 nt, Artificial Sequence
  Description of Artificial Sequence: Synthetic oligonucleotide
  Antisense strand to SEQ ID NO: 292466
uaagauaaucaccaggccu

SEQ ID NO: 292468 - RNA, 19 nt, Artificial Sequence
  Description of Artificial Sequence: Synthetic oligonucleotide
  Sense strand starting at position 2531 of SEQ ID NO: 3759
ccuggugauuaucuuaaac

SEQ ID NO: 292469 - RNA, 19 nt, Artificial Sequence
  Description of Artificial Sequence: Synthetic oligonucleotide
  Antisense strand to SEQ ID NO: 292468
guuuaagauaaucaccagg

SEQ ID NO: 292470 - RNA, 19 nt, Artificial Sequence
  Description of Artificial Sequence: Synthetic oligonucleotide
  Sense strand starting at position 2577 of SEQ ID NO: 3759
augaaaucauguccuauug

SEQ ID NO: 292471 - RNA, 19 nt, Artificial Sequence
  Description of Artificial Sequence: Synthetic oligonucleotide
  Antisense strand to SEQ ID NO: 292470
caauaggacaugauuucau

SEQ ID NO: 292472 - RNA, 19 nt, Artificial Sequence
  Description of Artificial Sequence: Synthetic oligonucleotide
  Sense strand starting at position 2622 of SEQ ID NO: 3759
ucaagcuugccugaaauca

SEQ ID NO: 292473 - RNA, 19 nt, Artificial Sequence
  Description of Artificial Sequence: Synthetic oligonucleotide
  Antisense strand to SEQ ID NO: 292472
ugauuucaggcaagcuuga

SEQ ID NO: 292474 - RNA, 19 nt, Artificial Sequence
  Description of Artificial Sequence: Synthetic oligonucleotide
  Sense strand starting at position 2637 of SEQ ID NO: 3759
aucaaagcucaauggcauu

SEQ ID NO: 292475 - RNA, 19 nt, Artificial Sequence
  Description of Artificial Sequence: Synthetic oligonucleotide
  Antisense strand to SEQ ID NO: 292474
aaugccauugagcuuugau

SEQ ID NO: 292476 - RNA, 19 nt, Artificial Sequence
  Description of Artificial Sequence: Synthetic oligonucleotide
  Sense strand starting at position 2946 of SEQ ID NO: 3759
cucggugucggucauauuu

SEQ ID NO: 292477 - RNA, 19 nt, Artificial Sequence
  Description of Artificial Sequence: Synthetic oligonucleotide
  Antisense strand to SEQ ID NO: 292476
aaauaugaccgacaccgag

SEQ ID NO: 292478 - RNA, 19 nt, Artificial Sequence
  Description of Artificial Sequence: Synthetic oligonucleotide
  Sense strand starting at position 3281 of SEQ ID NO: 3759
agaggaaggucugcuccaa

SEQ ID NO: 292479 - RNA, 19 nt, Artificial Sequence
  Description of Artificial Sequence: Synthetic oligonucleotide
  Antisense strand to SEQ ID NO: 292478
uuggagcagaccuuccucu

SEQ ID NO: 292480 - RNA, 19 nt, Artificial Sequence
  Description of Artificial Sequence: Synthetic oligonucleotide
  Sense strand starting at position 3285 of SEQ ID NO: 3759
gaaggucugcuccaaguca

SEQ ID NO: 292481 - RNA, 19 nt, Artificial Sequence
  Description of Artificial Sequence: Synthetic oligonucleotide
  Antisense strand to SEQ ID NO: 292480
ugacuuggagcagaccuuc

SEQ ID NO: 292482 - RNA, 19 nt, Artificial Sequence
  Description of Artificial Sequence: Synthetic oligonucleotide
  Sense strand starting at position 3624 of SEQ ID NO: 3759
agauaagcuucuuugacau

SEQ ID NO: 292483 - RNA, 19 nt, Artificial Sequence
  Description of Artificial Sequence: Synthetic oligonucleotide
  Antisense strand to SEQ ID NO: 292482
augucaaagaagcuuaucu

SEQ ID NO: 292484 - RNA, 19 nt, Artificial Sequence
  Description of Artificial Sequence: Synthetic oligonucleotide
  Sense strand starting at position 3671 of SEQ ID NO: 3759
ggguuauagcaguagaauu

SEQ ID NO: 292485 - RNA, 19 nt, Artificial Sequence
  Description of Artificial Sequence: Synthetic oligonucleotide
  Antisense strand to SEQ ID NO: 292484
aauucuacugcuauaaccc

SEQ ID NO: 292486 - RNA, 19 nt, Artificial Sequence
  Description of Artificial Sequence: Synthetic oligonucleotide
  Sense strand starting at position 3756 of SEQ ID NO: 3759
guaugucugcuuguucagu

SEQ ID NO: 292487 - RNA, 19 nt, Artificial Sequence
  Description of Artificial Sequence: Synthetic oligonucleotide
  Antisense strand to SEQ ID NO: 292486
acugaacaagcagacauac

SEQ ID NO: 292488 - RNA, 19 nt, Artificial Sequence
  Description of Artificial Sequence: Synthetic oligonucleotide
  Sense strand starting at position 3776 of SEQ ID NO: 3759
uuugaaaggcuuugagauu

SEQ ID NO: 292489 - RNA, 19 nt, Artificial Sequence
  Description of Artificial Sequence: Synthetic oligonucleotide
  Antisense strand to SEQ ID NO: 292488
aaucucaaagccuuucaaa

SEQ ID NO: 292490 - RNA, 19 nt, Artificial Sequence
  Description of Artificial Sequence: Synthetic oligonucleotide
  Sense strand starting at position 3777 of SEQ ID NO: 3759
uugaaaggcuuugagauuu

SEQ ID NO: 292491 - RNA, 19 nt, Artificial Sequence
  Description of Artificial Sequence: Synthetic oligonucleotide
  Antisense strand to SEQ ID NO: 292490
aaaucucaaagccuuucaa

SEQ ID NO: 292492 - RNA, 19 nt, Artificial Sequence
  Description of Artificial Sequence: Synthetic oligonucleotide
  Sense strand starting at position 13 of SEQ ID NO: 3760
agaagauaguagcugauau

SEQ ID NO: 292493 - RNA, 19 nt, Artificial Sequence
  Description of Artificial Sequence: Synthetic oligonucleotide
  Antisense strand to SEQ ID NO: 292492
auaucagcuacuaucuucu

SEQ ID NO: 292494 - RNA, 19 nt, Artificial Sequence
  Description of Artificial Sequence: Synthetic oligonucleotide
  Sense strand starting at position 384 of SEQ ID NO: 3760
agaauaauuugauggaaac

SEQ ID NO: 292495 - RNA, 19 nt, Artificial Sequence
  Description of Artificial Sequence: Synthetic oligonucleotide
  Antisense strand to SEQ ID NO: 292494
guuuccaucaaauuauucu

SEQ ID NO: 292496 - RNA, 19 nt, Artificial Sequence
  Description of Artificial Sequence: Synthetic oligonucleotide
  Sense strand starting at position 396 of SEQ ID NO: 3760
uggaaacaaucccuuagua

SEQ ID NO: 292497 - RNA, 19 nt, Artificial Sequence
  Description of Artificial Sequence: Synthetic oligonucleotide
  Antisense strand to SEQ ID NO: 292496
uacuaagggauuguuucca

SEQ ID NO: 292498 - RNA, 19 nt, Artificial Sequence
  Description of Artificial Sequence: Synthetic oligonucleotide
  Sense strand starting at position 588 of SEQ ID NO: 3760
cagagaacaucuccuuggu

SEQ ID NO: 292499 - RNA, 19 nt, Artificial Sequence
  Description of Artificial Sequence: Synthetic oligonucleotide
  Antisense strand to SEQ ID NO: 292498
accaaggagauguucucug

SEQ ID NO: 292500 - RNA, 19 nt, Artificial Sequence
  Description of Artificial Sequence: Synthetic oligonucleotide
  Sense strand starting at position 590 of SEQ ID NO: 3760
gagaacaucuccuugguca

SEQ ID NO: 292501 - RNA, 19 nt, Artificial Sequence
  Description of Artificial Sequence: Synthetic oligonucleotide
  Antisense strand to SEQ ID NO: 292500
ugaccaaggagauguucuc

SEQ ID NO: 292502 - RNA, 19 nt, Artificial Sequence
  Description of Artificial Sequence: Synthetic oligonucleotide
  Sense strand starting at position 598 of SEQ ID NO: 3760
cuccuuggucaguauuaca

SEQ ID NO: 292503 - RNA, 19 nt, Artificial Sequence
  Description of Artificial Sequence: Synthetic oligonucleotide
  Antisense strand to SEQ ID NO: 292502
uguaauacugaccaaggag

SEQ ID NO: 292504 - RNA, 19 nt, Artificial Sequence
  Description of Artificial Sequence: Synthetic oligonucleotide
  Sense strand starting at position 663 of SEQ ID NO: 3760
caugucugucaucagagaa

SEQ ID NO: 292505 - RNA, 19 nt, Artificial Sequence
  Description of Artificial Sequence: Synthetic oligonucleotide
  Antisense strand to SEQ ID NO: 292504
uucucugaugacagacaug

SEQ ID NO: 292506 - RNA, 19 nt, Artificial Sequence
  Description of Artificial Sequence: Synthetic oligonucleotide
  Sense strand starting at position 984 of SEQ ID NO: 3760
acuacaauuugguaauuag

SEQ ID NO: 292507 - RNA, 19 nt, Artificial Sequence
  Description of Artificial Sequence: Synthetic oligonucleotide
  Antisense strand to SEQ ID NO: 292506
cuaauuaccaaauuguagu

SEQ ID NO: 292508 - RNA, 19 nt, Artificial Sequence
  Description of Artificial Sequence: Synthetic oligonucleotide
  Sense strand starting at position 1069 of SEQ ID NO: 3760
aggacagucguauagauac

SEQ ID NO: 292509 - RNA, 19 nt, Artificial Sequence
  Description of Artificial Sequence: Synthetic oligonucleotide
  Antisense strand to SEQ ID NO: 292508
guaucuauacgacuguccu

SEQ ID NO: 292510 - RNA, 19 nt, Artificial Sequence
  Description of Artificial Sequence: Synthetic oligonucleotide
  Sense strand starting at position 1125 of SEQ ID NO: 3760
ugcaucauuccugagacac

SEQ ID NO: 292511 - RNA, 19 nt, Artificial Sequence
  Description of Artificial Sequence: Synthetic oligonucleotide
  Antisense strand to SEQ ID NO: 292510
gugucucaggaaugaugca

SEQ ID NO: 292512 - RNA, 19 nt, Artificial Sequence
  Description of Artificial Sequence: Synthetic oligonucleotide
  Sense strand starting at position 1369 of SEQ ID NO: 3760
cuuugaacaggauguaauc

SEQ ID NO: 292513 - RNA, 19 nt, Artificial Sequence
  Description of Artificial Sequence: Synthetic oligonucleotide
  Antisense strand to SEQ ID NO: 292512
gauuacauccuguucaaag

SEQ ID NO: 292514 - RNA, 19 nt, Artificial Sequence
  Description of Artificial Sequence: Synthetic oligonucleotide
  Sense strand starting at position 1391 of SEQ ID NO: 3760
cuccgaacugcugagaaau

SEQ ID NO: 292515 - RNA, 19 nt, Artificial Sequence
  Description of Artificial Sequence: Synthetic oligonucleotide
  Antisense strand to SEQ ID NO: 292514
auuucucagcaguucggag

SEQ ID NO: 292516 - RNA, 19 nt, Artificial Sequence
  Description of Artificial Sequence: Synthetic oligonucleotide
  Sense strand starting at position 1459 of SEQ ID NO: 3760
ucuuccuaugucuaaggaa

SEQ ID NO: 292517 - RNA, 19 nt, Artificial Sequence
  Description of Artificial Sequence: Synthetic oligonucleotide
  Antisense strand to SEQ ID NO: 292516
uuccuuagacauaggaaga

SEQ ID NO: 292518 - RNA, 19 nt, Artificial Sequence
  Description of Artificial Sequence: Synthetic oligonucleotide
  Sense strand starting at position 1581 of SEQ ID NO: 3760
gcggaagcuguggcucauu

SEQ ID NO: 292519 - RNA, 19 nt, Artificial Sequence
  Description of Artificial Sequence: Synthetic oligonucleotide
  Antisense strand to SEQ ID NO: 292518
aaugagccacagcuuccgc

SEQ ID NO: 292520 - RNA, 19 nt, Artificial Sequence
  Description of Artificial Sequence: Synthetic oligonucleotide
  Sense strand starting at position 1586 of SEQ ID NO: 3760
agcuguggcucauuucuaa

SEQ ID NO: 292521 - RNA, 19 nt, Artificial Sequence
  Description of Artificial Sequence: Synthetic oligonucleotide
  Antisense strand to SEQ ID NO: 292520
uuagaaaugagccacagcu

SEQ ID NO: 292522 - RNA, 19 nt, Artificial Sequence
  Description of Artificial Sequence: Synthetic oligonucleotide
  Sense strand starting at position 1653 of SEQ ID NO: 3760
guaagugacccaggacaga

SEQ ID NO: 292523 - RNA, 19 nt, Artificial Sequence
  Description of Artificial Sequence: Synthetic oligonucleotide
  Antisense strand to SEQ ID NO: 292522
ucuguccugggucacuuac

SEQ ID NO: 292524 - RNA, 19 nt, Artificial Sequence
  Description of Artificial Sequence: Synthetic oligonucleotide
  Sense strand starting at position 1822 of SEQ ID NO: 3760
ggcaccuucccuuaaagga

SEQ ID NO: 292525 - RNA, 19 nt, Artificial Sequence
  Description of Artificial Sequence: Synthetic oligonucleotide
  Antisense strand to SEQ ID NO: 292524
uccuuuaagggaaggugcc

SEQ ID NO: 292526 - RNA, 19 nt, Artificial Sequence
  Description of Artificial Sequence: Synthetic oligonucleotide
  Sense strand starting at position 2077 of SEQ ID NO: 3760
uucggcuuucgcuuccaua

SEQ ID NO: 292527 - RNA, 19 nt, Artificial Sequence
  Description of Artificial Sequence: Synthetic oligonucleotide
  Antisense strand to SEQ ID NO: 292526
uauggaagcgaaagccgaa

SEQ ID NO: 292528 - RNA, 19 nt, Artificial Sequence
  Description of Artificial Sequence: Synthetic oligonucleotide
  Sense strand starting at position 2079 of SEQ ID NO: 3760
cggcuuucgcuuccauaca

SEQ ID NO: 292529 - RNA, 19 nt, Artificial Sequence
  Description of Artificial Sequence: Synthetic oligonucleotide
  Antisense strand to SEQ ID NO: 292528
uguauggaagcgaaagccg

SEQ ID NO: 292530 - RNA, 19 nt, Artificial Sequence
  Description of Artificial Sequence: Synthetic oligonucleotide
  Sense strand starting at position 2357 of SEQ ID NO: 3760
uggguucgccuagcuuuau

SEQ ID NO: 292531 - RNA, 19 nt, Artificial Sequence
  Description of Artificial Sequence: Synthetic oligonucleotide
  Antisense strand to SEQ ID NO: 292530
auaaagcuaggcgaaccca

SEQ ID NO: 292532 - RNA, 19 nt, Artificial Sequence
  Description of Artificial Sequence: Synthetic oligonucleotide
  Sense strand starting at position 2386 of SEQ ID NO: 3760
agacaauuaugguuccuua

SEQ ID NO: 292533 - RNA, 19 nt, Artificial Sequence
  Description of Artificial Sequence: Synthetic oligonucleotide
  Antisense strand to SEQ ID NO: 292532
uaaggaaccauaauugucu

SEQ ID NO: 292534 - RNA, 19 nt, Artificial Sequence
  Description of Artificial Sequence: Synthetic oligonucleotide
  Sense strand starting at position 2442 of SEQ ID NO: 3760
guauaugggaccugugaaa

SEQ ID NO: 292535 - RNA, 19 nt, Artificial Sequence
  Description of Artificial Sequence: Synthetic oligonucleotide
  Antisense strand to SEQ ID NO: 292534
uuucacaggucccauauac

SEQ ID NO: 292536 - RNA, 19 nt, Artificial Sequence
  Description of Artificial Sequence: Synthetic oligonucleotide
  Sense strand starting at position 2449 of SEQ ID NO: 3760
ggaccugugaaauguuuaa

SEQ ID NO: 292537 - RNA, 19 nt, Artificial Sequence
  Description of Artificial Sequence: Synthetic oligonucleotide
  Antisense strand to SEQ ID NO: 292536
uuaaacauuucacaggucc

SEQ ID NO: 292538 - RNA, 19 nt, Artificial Sequence
  Description of Artificial Sequence: Synthetic oligonucleotide
  Sense strand starting at position 2502 of SEQ ID NO: 3760
gaugaauaacacuguaugu

SEQ ID NO: 292539 - RNA, 19 nt, Artificial Sequence
  Description of Artificial Sequence: Synthetic oligonucleotide
  Antisense strand to SEQ ID NO: 292538
acauacaguguuauucauc

SEQ ID NO: 292540 - RNA, 19 nt, Artificial Sequence
  Description of Artificial Sequence: Synthetic oligonucleotide
  Sense strand starting at position 2557 of SEQ ID NO: 3760
ugggaauagugguuaacau

SEQ ID NO: 292541 - RNA, 19 nt, Artificial Sequence
  Description of Artificial Sequence: Synthetic oligonucleotide
  Antisense strand to SEQ ID NO: 292540
auguuaaccacuauuccca

SEQ ID NO: 292542 - RNA, 19 nt, Artificial Sequence
  Description of Artificial Sequence: Synthetic oligonucleotide
  Sense strand starting at position 2683 of SEQ ID NO: 3760
ggcaguucccauuaaacua

SEQ ID NO: 292543 - RNA, 19 nt, Artificial Sequence
  Description of Artificial Sequence: Synthetic oligonucleotide
  Antisense strand to SEQ ID NO: 292542
uaguuuaaugggaacugcc

SEQ ID NO: 292544 - RNA, 19 nt, Artificial Sequence
  Description of Artificial Sequence: Synthetic oligonucleotide
  Sense strand starting at position 2793 of SEQ ID NO: 3760
ugucaaggauaguuuaaau

SEQ ID NO: 292545 - RNA, 19 nt, Artificial Sequence
  Description of Artificial Sequence: Synthetic oligonucleotide
  Antisense strand to SEQ ID NO: 292544
auuuaaacuauccuugaca

SEQ ID NO: 292546 - RNA, 19 nt, Artificial Sequence
  Description of Artificial Sequence: Synthetic oligonucleotide
  Sense strand starting at position 2812 of SEQ ID NO: 3760
gacagauaucugugaccua

SEQ ID NO: 292547 - RNA, 19 nt, Artificial Sequence
  Description of Artificial Sequence: Synthetic oligonucleotide
  Antisense strand to SEQ ID NO: 292546
uaggucacagauaucuguc

SEQ ID NO: 292548 - RNA, 19 nt, Artificial Sequence
  Description of Artificial Sequence: Synthetic oligonucleotide
  Sense strand starting at position 2815 of SEQ ID NO: 3760
agauaucugugaccuaaau

SEQ ID NO: 292549 - RNA, 19 nt, Artificial Sequence
  Description of Artificial Sequence: Synthetic oligonucleotide
  Antisense strand to SEQ ID NO: 292548
auuuaggucacagauaucu

SEQ ID NO: 292550 - RNA, 19 nt, Artificial Sequence
  Description of Artificial Sequence: Synthetic oligonucleotide
  Sense strand starting at position 2974 of SEQ ID NO: 3760
guuaaucuugugcaacaag

SEQ ID NO: 292551 - RNA, 19 nt, Artificial Sequence
  Description of Artificial Sequence: Synthetic oligonucleotide
  Antisense strand to SEQ ID NO: 292550
cuuguugcacaagauuaac

SEQ ID NO: 292552 - RNA, 19 nt, Artificial Sequence
  Description of Artificial Sequence: Synthetic oligonucleotide
  Sense strand starting at position 3082 of SEQ ID NO: 3760
aaguuauucuguuugaaga

SEQ ID NO: 292553 - RNA, 19 nt, Artificial Sequence
  Description of Artificial Sequence: Synthetic oligonucleotide
  Antisense strand to SEQ ID NO: 292552
ucuucaaacagaauaacuu

SEQ ID NO: 292554 - RNA, 19 nt, Artificial Sequence
  Description of Artificial Sequence: Synthetic oligonucleotide
  Sense strand starting at position 3083 of SEQ ID NO: 3760
aguuauucuguuugaagaa

SEQ ID NO: 292555 - RNA, 19 nt, Artificial Sequence
  Description of Artificial Sequence: Synthetic oligonucleotide
  Antisense strand to SEQ ID NO: 292554
uucuucaaacagaauaacu

SEQ ID NO: 292556 - RNA, 19 nt, Artificial Sequence
  Description of Artificial Sequence: Synthetic oligonucleotide
  Sense strand starting at position 3142 of SEQ ID NO: 3760
uuugguguggcagaaauga

SEQ ID NO: 292557 - RNA, 19 nt, Artificial Sequence
  Description of Artificial Sequence: Synthetic oligonucleotide
  Antisense strand to SEQ ID NO: 292556
ucauuucugccacaccaaa

SEQ ID NO: 292558 - RNA, 19 nt, Artificial Sequence
  Description of Artificial Sequence: Synthetic oligonucleotide
  Sense strand starting at position 3151 of SEQ ID NO: 3760
gcagaaaugaaaugaguuu

SEQ ID NO: 292559 - RNA, 19 nt, Artificial Sequence
  Description of Artificial Sequence: Synthetic oligonucleotide
  Antisense strand to SEQ ID NO: 292558
aaacucauuucauuucugc

SEQ ID NO: 292560 - RNA, 19 nt, Artificial Sequence
  Description of Artificial Sequence: Synthetic oligonucleotide
  Sense strand starting at position 3242 of SEQ ID NO: 3760
gugguugauagguacauag

SEQ ID NO: 292561 - RNA, 19 nt, Artificial Sequence
  Description of Artificial Sequence: Synthetic oligonucleotide
  Antisense strand to SEQ ID NO: 292560
cuauguaccuaucaaccac

SEQ ID NO: 292562 - RNA, 19 nt, Artificial Sequence
  Description of Artificial Sequence: Synthetic oligonucleotide
  Sense strand starting at position 3381 of SEQ ID NO: 3760
ggauguauuaauggcaaau

SEQ ID NO: 292563 - RNA, 19 nt, Artificial Sequence
  Description of Artificial Sequence: Synthetic oligonucleotide
  Antisense strand to SEQ ID NO: 292562
auuugccauuaauacaucc

SEQ ID NO: 292564 - RNA, 19 nt, Artificial Sequence
  Description of Artificial Sequence: Synthetic oligonucleotide
  Sense strand starting at position 3396 of SEQ ID NO: 3760
aaaugugaguauuccuaga

SEQ ID NO: 292565 - RNA, 19 nt, Artificial Sequence
  Description of Artificial Sequence: Synthetic oligonucleotide
  Antisense strand to SEQ ID NO: 292564
ucuaggaauacucacauuu

SEQ ID NO: 292566 - RNA, 19 nt, Artificial Sequence
  Description of Artificial Sequence: Synthetic oligonucleotide
  Sense strand starting at position 3456 of SEQ ID NO: 3760
aagggaugagacuguguuu

SEQ ID NO: 292567 - RNA, 19 nt, Artificial Sequence
  Description of Artificial Sequence: Synthetic oligonucleotide
  Antisense strand to SEQ ID NO: 292566
aaacacagucucaucccuu

SEQ ID NO: 292568 - RNA, 19 nt, Artificial Sequence
  Description of Artificial Sequence: Synthetic oligonucleotide
  Sense strand starting at position 3774 of SEQ ID NO: 3760
gugggacuucaggaaagcu

SEQ ID NO: 292569 - RNA, 19 nt, Artificial Sequence
  Description of Artificial Sequence: Synthetic oligonucleotide
  Antisense strand to SEQ ID NO: 292568
agcuuuccugaagucccac

SEQ ID NO: 292570 - RNA, 19 nt, Artificial Sequence
  Description of Artificial Sequence: Synthetic oligonucleotide
  Sense strand starting at position 3893 of SEQ ID NO: 3760
cugaaauugcagcacucau

SEQ ID NO: 292571 - RNA, 19 nt, Artificial Sequence
  Description of Artificial Sequence: Synthetic oligonucleotide
  Antisense strand to SEQ ID NO: 292570
augagugcugcaauuucag

SEQ ID NO: 292572 - RNA, 19 nt, Artificial Sequence
  Description of Artificial Sequence: Synthetic oligonucleotide
  Sense strand starting at position 21 of SEQ ID NO: 3761
ucaguaagcucccugagga

SEQ ID NO: 292573 - RNA, 19 nt, Artificial Sequence
  Description of Artificial Sequence: Synthetic oligonucleotide
  Antisense strand to SEQ ID NO: 292572
uccucagggagcuuacuga

SEQ ID NO: 292574 - RNA, 19 nt, Artificial Sequence
  Description of Artificial Sequence: Synthetic oligonucleotide
  Sense strand starting at position 22 of SEQ ID NO: 3761
caguaagcucccugaggau

SEQ ID NO: 292575 - RNA, 19 nt, Artificial Sequence
  Description of Artificial Sequence: Synthetic oligonucleotide
  Antisense strand to SEQ ID NO: 292574
auccucagggagcuuacug

SEQ ID NO: 292576 - RNA, 19 nt, Artificial Sequence
  Description of Artificial Sequence: Synthetic oligonucleotide
  Sense strand starting at position 68 of SEQ ID NO: 3761
auggaaaucugccucaucu

SEQ ID NO: 292577 - RNA, 19 nt, Artificial Sequence
  Description of Artificial Sequence: Synthetic oligonucleotide
  Antisense strand to SEQ ID NO: 292576
agaugaggcagauuuccau

SEQ ID NO: 292578 - RNA, 19 nt, Artificial Sequence
  Description of Artificial Sequence: Synthetic oligonucleotide
  Sense strand starting at position 70 of SEQ ID NO: 3761
ggaaaucugccucaucuca

SEQ ID NO: 292579 - RNA, 19 nt, Artificial Sequence
  Description of Artificial Sequence: Synthetic oligonucleotide
  Antisense strand to SEQ ID NO: 292578
ugagaugaggcagauuucc

SEQ ID NO: 292580 - RNA, 19 nt, Artificial Sequence
  Description of Artificial Sequence: Synthetic oligonucleotide
  Sense strand starting at position 228 of SEQ ID NO: 3761
ugcucauaacaugaaaguu

SEQ ID NO: 292581 - RNA, 19 nt, Artificial Sequence
  Description of Artificial Sequence: Synthetic oligonucleotide
  Antisense strand to SEQ ID NO: 292580
aacuuucauguuaugagca

SEQ ID NO: 292582 - RNA, 19 nt, Artificial Sequence
  Description of Artificial Sequence: Synthetic oligonucleotide
  Sense strand starting at position 303 of SEQ ID NO: 3761
augagaguuaaagguagua

SEQ ID NO: 292583 - RNA, 19 nt, Artificial Sequence
  Description of Artificial Sequence: Synthetic oligonucleotide
  Antisense strand to SEQ ID NO: 292582
uacuaccuuuaacucucau

SEQ ID NO: 292584 - RNA, 19 nt, Artificial Sequence
  Description of Artificial Sequence: Synthetic oligonucleotide
  Sense strand starting at position 316 of SEQ ID NO: 3761
guaguaugaaaguggguaa

SEQ ID NO: 292585 - RNA, 19 nt, Artificial Sequence
  Description of Artificial Sequence: Synthetic oligonucleotide
  Antisense strand to SEQ ID NO: 292584
uuacccacuuucauacuac

SEQ ID NO: 292586 - RNA, 19 nt, Artificial Sequence
  Description of Artificial Sequence: Synthetic oligonucleotide
  Sense strand starting at position 317 of SEQ ID NO: 3761
uaguaugaaaguggguaau

SEQ ID NO: 292587 - RNA, 19 nt, Artificial Sequence
  Description of Artificial Sequence: Synthetic oligonucleotide
  Antisense strand to SEQ ID NO: 292586
auuacccacuuucauacua

SEQ ID NO: 292588 - RNA, 19 nt, Artificial Sequence
  Description of Artificial Sequence: Synthetic oligonucleotide
  Sense strand starting at position 424 of SEQ ID NO: 3761
ccgcaaccuccugaguuua

SEQ ID NO: 292589 - RNA, 19 nt, Artificial Sequence
  Description of Artificial Sequence: Synthetic oligonucleotide
  Antisense strand to SEQ ID NO: 292588
uaaacucaggagguugcgg

SEQ ID NO: 292590 - RNA, 19 nt, Artificial Sequence
  Description of Artificial Sequence: Synthetic oligonucleotide
  Sense strand starting at position 426 of SEQ ID NO: 3761
gcaaccuccugaguuuaag

SEQ ID NO: 292591 - RNA, 19 nt, Artificial Sequence
  Description of Artificial Sequence: Synthetic oligonucleotide
  Antisense strand to SEQ ID NO: 292590
cuuaaacucaggagguugc

SEQ ID NO: 292592 - RNA, 19 nt, Artificial Sequence
  Description of Artificial Sequence: Synthetic oligonucleotide
  Sense strand starting at position 731 of SEQ ID NO: 3761
ucaccauguugaucaguga

SEQ ID NO: 292593 - RNA, 19 nt, Artificial Sequence
  Description of Artificial Sequence: Synthetic oligonucleotide
  Antisense strand to SEQ ID NO: 292592
ucacugaucaacaugguga

SEQ ID NO: 292594 - RNA, 19 nt, Artificial Sequence
  Description of Artificial Sequence: Synthetic oligonucleotide
  Sense strand starting at position 732 of SEQ ID NO: 3761
caccauguugaucagugau

SEQ ID NO: 292595 - RNA, 19 nt, Artificial Sequence
  Description of Artificial Sequence: Synthetic oligonucleotide
  Antisense strand to SEQ ID NO: 292594
aucacugaucaacauggug

SEQ ID NO: 292596 - RNA, 19 nt, Artificial Sequence
  Description of Artificial Sequence: Synthetic oligonucleotide
  Sense strand starting at position 735 of SEQ ID NO: 3761
cauguugaucagugauccu

SEQ ID NO: 292597 - RNA, 19 nt, Artificial Sequence
  Description of Artificial Sequence: Synthetic oligonucleotide
  Antisense strand to SEQ ID NO: 292596
aggaucacugaucaacaug

SEQ ID NO: 292598 - RNA, 19 nt, Artificial Sequence
  Description of Artificial Sequence: Synthetic oligonucleotide
  Sense strand starting at position 1106 of SEQ ID NO: 3761
ccaugcaccucauuaguca

SEQ ID NO: 292599 - RNA, 19 nt, Artificial Sequence
  Description of Artificial Sequence: Synthetic oligonucleotide
  Antisense strand to SEQ ID NO: 292598
ugacuaaugaggugcaugg

SEQ ID NO: 292600 - RNA, 19 nt, Artificial Sequence
  Description of Artificial Sequence: Synthetic oligonucleotide
  Sense strand starting at position 1310 of SEQ ID NO: 3761
ggcagaaguaagcagcaau

SEQ ID NO: 292601 - RNA, 19 nt, Artificial Sequence
  Description of Artificial Sequence: Synthetic oligonucleotide
  Antisense strand to SEQ ID NO: 292600
auugcugcuuacuucugcc

SEQ ID NO: 292602 - RNA, 19 nt, Artificial Sequence
  Description of Artificial Sequence: Synthetic oligonucleotide
  Sense strand starting at position 1367 of SEQ ID NO: 3761
ggccaauguucccuuaaga

SEQ ID NO: 292603 - RNA, 19 nt, Artificial Sequence
  Description of Artificial Sequence: Synthetic oligonucleotide
  Antisense strand to SEQ ID NO: 292602
ucuuaagggaacauuggcc

SEQ ID NO: 292604 - RNA, 19 nt, Artificial Sequence
  Description of Artificial Sequence: Synthetic oligonucleotide
  Sense strand starting at position 1475 of SEQ ID NO: 3761
ggucacuaucuagagguca

SEQ ID NO: 292605 - RNA, 19 nt, Artificial Sequence
  Description of Artificial Sequence: Synthetic oligonucleotide
  Antisense strand to SEQ ID NO: 292604
ugaccucuagauagugacc

SEQ ID NO: 292606 - RNA, 19 nt, Artificial Sequence
  Description of Artificial Sequence: Synthetic oligonucleotide
  Sense strand starting at position 2371 of SEQ ID NO: 3761
agcgaacuguggguggaau

SEQ ID NO: 292607 - RNA, 19 nt, Artificial Sequence
  Description of Artificial Sequence: Synthetic oligonucleotide
  Antisense strand to SEQ ID NO: 292606
auuccacccacaguucgcu

SEQ ID NO: 292608 - RNA, 19 nt, Artificial Sequence
  Description of Artificial Sequence: Synthetic oligonucleotide
  Sense strand starting at position 2445 of SEQ ID NO: 3761
acguccauccagugaagga

SEQ ID NO: 292609 - RNA, 19 nt, Artificial Sequence
  Description of Artificial Sequence: Synthetic oligonucleotide
  Antisense strand to SEQ ID NO: 292608
uccuucacuggauggacgu

SEQ ID NO: 292610 - RNA, 19 nt, Artificial Sequence
  Description of Artificial Sequence: Synthetic oligonucleotide
  Sense strand starting at position 2446 of SEQ ID NO: 3761
cguccauccagugaaggaa

SEQ ID NO: 292611 - RNA, 19 nt, Artificial Sequence
  Description of Artificial Sequence: Synthetic oligonucleotide
  Antisense strand to SEQ ID NO: 292610
uuccuucacuggauggacg

SEQ ID NO: 292612 - RNA, 19 nt, Artificial Sequence
  Description of Artificial Sequence: Synthetic oligonucleotide
  Sense strand starting at position 2696 of SEQ ID NO: 3761
uuuccuuuccgagaguuau

SEQ ID NO: 292613 - RNA, 19 nt, Artificial Sequence
  Description of Artificial Sequence: Synthetic oligonucleotide
  Antisense strand to SEQ ID NO: 292612
auaacucucggaaaggaaa

SEQ ID NO: 292614 - RNA, 19 nt, Artificial Sequence
  Description of Artificial Sequence: Synthetic oligonucleotide
  Sense strand starting at position 2702 of SEQ ID NO: 3761
uuccgagaguuaucaacuc

SEQ ID NO: 292615 - RNA, 19 nt, Artificial Sequence
  Description of Artificial Sequence: Synthetic oligonucleotide
  Antisense strand to SEQ ID NO: 292614
gaguugauaacucucggaa

SEQ ID NO: 292616 - RNA, 19 nt, Artificial Sequence
  Description of Artificial Sequence: Synthetic oligonucleotide
  Sense strand starting at position 2914 of SEQ ID NO: 3761
uaggcuuagagguguacau

SEQ ID NO: 292617 - RNA, 19 nt, Artificial Sequence
  Description of Artificial Sequence: Synthetic oligonucleotide
  Antisense strand to SEQ ID NO: 292616
auguacaccucuaagccua

SEQ ID NO: 292618 - RNA, 19 nt, Artificial Sequence
  Description of Artificial Sequence: Synthetic oligonucleotide
  Sense strand starting at position 2916 of SEQ ID NO: 3761
ggcuuagagguguacaugu

SEQ ID NO: 292619 - RNA, 19 nt, Artificial Sequence
  Description of Artificial Sequence: Synthetic oligonucleotide
  Antisense strand to SEQ ID NO: 292618
acauguacaccucuaagcc

SEQ ID NO: 292620 - RNA, 19 nt, Artificial Sequence
  Description of Artificial Sequence: Synthetic oligonucleotide
  Sense strand starting at position 2927 of SEQ ID NO: 3761
guacauguccaagagcaua

SEQ ID NO: 292621 - RNA, 19 nt, Artificial Sequence
  Description of Artificial Sequence: Synthetic oligonucleotide
  Antisense strand to SEQ ID NO: 292620
uaugcucuuggacauguac

SEQ ID NO: 292622 - RNA, 19 nt, Artificial Sequence
  Description of Artificial Sequence: Synthetic oligonucleotide
  Sense strand starting at position 2973 of SEQ ID NO: 3761
agugauuugccucgcucag

SEQ ID NO: 292623 - RNA, 19 nt, Artificial Sequence
  Description of Artificial Sequence: Synthetic oligonucleotide
  Antisense strand to SEQ ID NO: 292622
cugagcgaggcaaaucacu

SEQ ID NO: 292624 - RNA, 19 nt, Artificial Sequence
  Description of Artificial Sequence: Synthetic oligonucleotide
  Sense strand starting at position 2975 of SEQ ID NO: 3761
ugauuugccucgcucagau

SEQ ID NO: 292625 - RNA, 19 nt, Artificial Sequence
  Description of Artificial Sequence: Synthetic oligonucleotide
  Antisense strand to SEQ ID NO: 292624
aucugagcgaggcaaauca

SEQ ID NO: 292626 - RNA, 19 nt, Artificial Sequence
  Description of Artificial Sequence: Synthetic oligonucleotide
  Sense strand starting at position 3017 of SEQ ID NO: 3761
acaggcuguggucaggaaa

SEQ ID NO: 292627 - RNA, 19 nt, Artificial Sequence
  Description of Artificial Sequence: Synthetic oligonucleotide
  Antisense strand to SEQ ID NO: 292626
uuuccugaccacagccugu

SEQ ID NO: 292628 - RNA, 19 nt, Artificial Sequence
  Description of Artificial Sequence: Synthetic oligonucleotide
  Sense strand starting at position 3034 of SEQ ID NO: 3761
aaagaaaggaagcgugauu

SEQ ID NO: 292629 - RNA, 19 nt, Artificial Sequence
  Description of Artificial Sequence: Synthetic oligonucleotide
  Antisense strand to SEQ ID NO: 292628
aaucacgcuuccuuucuuu

SEQ ID NO: 292630 - RNA, 19 nt, Artificial Sequence
  Description of Artificial Sequence: Synthetic oligonucleotide
  Sense strand starting at position 3046 of SEQ ID NO: 3761
cgugauucuucuucuggau

SEQ ID NO: 292631 - RNA, 19 nt, Artificial Sequence
  Description of Artificial Sequence: Synthetic oligonucleotide
  Antisense strand to SEQ ID NO: 292630
auccagaagaagaaucacg

SEQ ID NO: 292632 - RNA, 19 nt, Artificial Sequence
  Description of Artificial Sequence: Synthetic oligonucleotide
  Sense strand starting at position 3131 of SEQ ID NO: 3761
gaucucacuguuugagcau

SEQ ID NO: 292633 - RNA, 19 nt, Artificial Sequence
  Description of Artificial Sequence: Synthetic oligonucleotide
  Antisense strand to SEQ ID NO: 292632
augcucaaacagugagauc

SEQ ID NO: 292634 - RNA, 19 nt, Artificial Sequence
  Description of Artificial Sequence: Synthetic oligonucleotide
  Sense strand starting at position 3463 of SEQ ID NO: 3761
gggacaaguccaggcuaaa

SEQ ID NO: 292635 - RNA, 19 nt, Artificial Sequence
  Description of Artificial Sequence: Synthetic oligonucleotide
  Antisense strand to SEQ ID NO: 292634
uuuagccuggacuuguccc

SEQ ID NO: 292636 - RNA, 19 nt, Artificial Sequence
  Description of Artificial Sequence: Synthetic oligonucleotide
  Sense strand starting at position 3485 of SEQ ID NO: 3761
agagaagaauucugggaga

SEQ ID NO: 292637 - RNA, 19 nt, Artificial Sequence
  Description of Artificial Sequence: Synthetic oligonucleotide
  Antisense strand to SEQ ID NO: 292636
ucucccagaauucuucucu

SEQ ID NO: 292638 - RNA, 19 nt, Artificial Sequence
  Description of Artificial Sequence: Synthetic oligonucleotide
  Sense strand starting at position 3653 of SEQ ID NO: 3761
aaagguaugugccuaacau

SEQ ID NO: 292639 - RNA, 19 nt, Artificial Sequence
  Description of Artificial Sequence: Synthetic oligonucleotide
  Antisense strand to SEQ ID NO: 292638
auguuaggcacauaccuuu

SEQ ID NO: 292640 - RNA, 19 nt, Artificial Sequence
  Description of Artificial Sequence: Synthetic oligonucleotide
  Sense strand starting at position 3654 of SEQ ID NO: 3761
aagguaugugccuaacaua

SEQ ID NO: 292641 - RNA, 19 nt, Artificial Sequence
  Description of Artificial Sequence: Synthetic oligonucleotide
  Antisense strand to SEQ ID NO: 292640
uauguuaggcacauaccuu

SEQ ID NO: 292642 - RNA, 19 nt, Artificial Sequence
  Description of Artificial Sequence: Synthetic oligonucleotide
  Sense strand starting at position 3713 of SEQ ID NO: 3761
uugaguaucugucucuaca

SEQ ID NO: 292643 - RNA, 19 nt, Artificial Sequence
  Description of Artificial Sequence: Synthetic oligonucleotide
  Antisense strand to SEQ ID NO: 292642
uguagagacagauacucaa

SEQ ID NO: 292644 - RNA, 19 nt, Artificial Sequence
  Description of Artificial Sequence: Synthetic oligonucleotide
  Sense strand starting at position 3715 of SEQ ID NO: 3761
gaguaucugucucuacaug

SEQ ID NO: 292645 - RNA, 19 nt, Artificial Sequence
  Description of Artificial Sequence: Synthetic oligonucleotide
  Antisense strand to SEQ ID NO: 292644
cauguagagacagauacuc

SEQ ID NO: 292646 - RNA, 19 nt, Artificial Sequence
  Description of Artificial Sequence: Synthetic oligonucleotide
  Sense strand starting at position 3934 of SEQ ID NO: 3761
gguaucaucucacccucua

SEQ ID NO: 292647 - RNA, 19 nt, Artificial Sequence
  Description of Artificial Sequence: Synthetic oligonucleotide
  Antisense strand to SEQ ID NO: 292646
uagagggugagaugauacc

SEQ ID NO: 292648 - RNA, 19 nt, Artificial Sequence
  Description of Artificial Sequence: Synthetic oligonucleotide
  Sense strand starting at position 3957 of SEQ ID NO: 3761
augacuaguugcccauaaa

SEQ ID NO: 292649 - RNA, 19 nt, Artificial Sequence
  Description of Artificial Sequence: Synthetic oligonucleotide
  Antisense strand to SEQ ID NO: 292648
uuuaugggcaacuagucau

SEQ ID NO: 292650 - RNA, 19 nt, Artificial Sequence
  Description of Artificial Sequence: Synthetic oligonucleotide
  Sense strand starting at position 3958 of SEQ ID NO: 3761
ugacuaguugcccauaaac

SEQ ID NO: 292651 - RNA, 19 nt, Artificial Sequence
  Description of Artificial Sequence: Synthetic oligonucleotide
  Antisense strand to SEQ ID NO: 292650
guuuaugggcaacuaguca

SEQ ID NO: 292652 - RNA, 19 nt, Artificial Sequence
  Description of Artificial Sequence: Synthetic oligonucleotide
  Sense strand starting at position 19 of SEQ ID NO: 3762
guaagaucaccuugaacac

SEQ ID NO: 292653 - RNA, 19 nt, Artificial Sequence
  Description of Artificial Sequence: Synthetic oligonucleotide
  Antisense strand to SEQ ID NO: 292652
guguucaaggugaucuuac

SEQ ID NO: 292654 - RNA, 19 nt, Artificial Sequence
  Description of Artificial Sequence: Synthetic oligonucleotide
  Sense strand starting at position 36 of SEQ ID NO: 3762
acaaucagugucuauauga

SEQ ID NO: 292655 - RNA, 19 nt, Artificial Sequence
  Description of Artificial Sequence: Synthetic oligonucleotide
  Antisense strand to SEQ ID NO: 292654
ucauauagacacugauugu

SEQ ID NO: 292656 - RNA, 19 nt, Artificial Sequence
  Description of Artificial Sequence: Synthetic oligonucleotide
  Sense strand starting at position 144 of SEQ ID NO: 3762
agauccuuuguguaacuua

SEQ ID NO: 292657 - RNA, 19 nt, Artificial Sequence
  Description of Artificial Sequence: Synthetic oligonucleotide
  Antisense strand to SEQ ID NO: 292656
uaaguuacacaaaggaucu

SEQ ID NO: 292658 - RNA, 19 nt, Artificial Sequence
  Description of Artificial Sequence: Synthetic oligonucleotide
  Sense strand starting at position 311 of SEQ ID NO: 3762
agugaauagccagagcaca

SEQ ID NO: 292659 - RNA, 19 nt, Artificial Sequence
  Description of Artificial Sequence: Synthetic oligonucleotide
  Antisense strand to SEQ ID NO: 292658
ugugcucuggcuauucacu

SEQ ID NO: 292660 - RNA, 19 nt, Artificial Sequence
  Description of Artificial Sequence: Synthetic oligonucleotide
  Sense strand starting at position 471 of SEQ ID NO: 3762
aaguuuauagcugaggcaa

SEQ ID NO: 292661 - RNA, 19 nt, Artificial Sequence
  Description of Artificial Sequence: Synthetic oligonucleotide
  Antisense strand to SEQ ID NO: 292660
uugccucagcuauaaacuu

SEQ ID NO: 292662 - RNA, 19 nt, Artificial Sequence
  Description of Artificial Sequence: Synthetic oligonucleotide
  Sense strand starting at position 500 of SEQ ID NO: 3762
gugcuuagcauuugagaua

SEQ ID NO: 292663 - RNA, 19 nt, Artificial Sequence
  Description of Artificial Sequence: Synthetic oligonucleotide
  Antisense strand to SEQ ID NO: 292662
uaucucaaaugcuaagcac

SEQ ID NO: 292664 - RNA, 19 nt, Artificial Sequence
  Description of Artificial Sequence: Synthetic oligonucleotide
  Sense strand starting at position 628 of SEQ ID NO: 3762
agaucccuugauuggaauu

SEQ ID NO: 292665 - RNA, 19 nt, Artificial Sequence
  Description of Artificial Sequence: Synthetic oligonucleotide
  Antisense strand to SEQ ID NO: 292664
aauuccaaucaagggaucu

SEQ ID NO: 292666 - RNA, 19 nt, Artificial Sequence
  Description of Artificial Sequence: Synthetic oligonucleotide
  Sense strand starting at position 630 of SEQ ID NO: 3762
aucccuugauuggaauuua

SEQ ID NO: 292667 - RNA, 19 nt, Artificial Sequence
  Description of Artificial Sequence: Synthetic oligonucleotide
  Antisense strand to SEQ ID NO: 292666
uaaauuccaaucaagggau

SEQ ID NO: 292668 - RNA, 19 nt, Artificial Sequence
  Description of Artificial Sequence: Synthetic oligonucleotide
  Sense strand starting at position 682 of SEQ ID NO: 3762
ggaaauuagaggugccuca

SEQ ID NO: 292669 - RNA, 19 nt, Artificial Sequence
  Description of Artificial Sequence: Synthetic oligonucleotide
  Antisense strand to SEQ ID NO: 292668
ugaggcaccucuaauuucc

SEQ ID NO: 292670 - RNA, 19 nt, Artificial Sequence
  Description of Artificial Sequence: Synthetic oligonucleotide
  Sense strand starting at position 706 of SEQ ID NO: 3762
cccacuugguagguauaaa

SEQ ID NO: 292671 - RNA, 19 nt, Artificial Sequence
  Description of Artificial Sequence: Synthetic oligonucleotide
  Antisense strand to SEQ ID NO: 292670
uuuauaccuaccaaguggg

SEQ ID NO: 292672 - RNA, 19 nt, Artificial Sequence
  Description of Artificial Sequence: Synthetic oligonucleotide
  Sense strand starting at position 958 of SEQ ID NO: 3762
ggucuacgugcuuuauucu

SEQ ID NO: 292673 - RNA, 19 nt, Artificial Sequence
  Description of Artificial Sequence: Synthetic oligonucleotide
  Antisense strand to SEQ ID NO: 292672
agaauaaagcacguagacc

SEQ ID NO: 292674 - RNA, 19 nt, Artificial Sequence
  Description of Artificial Sequence: Synthetic oligonucleotide
  Sense strand starting at position 1030 of SEQ ID NO: 3762
gguugucacccugaaauga

SEQ ID NO: 292675 - RNA, 19 nt, Artificial Sequence
  Description of Artificial Sequence: Synthetic oligonucleotide
  Antisense strand to SEQ ID NO: 292674
ucauuucagggugacaacc

SEQ ID NO: 292676 - RNA, 19 nt, Artificial Sequence
  Description of Artificial Sequence: Synthetic oligonucleotide
  Sense strand starting at position 1073 of SEQ ID NO: 3762
ccagaaguaugcucucaaa

SEQ ID NO: 292677 - RNA, 19 nt, Artificial Sequence
  Description of Artificial Sequence: Synthetic oligonucleotide
  Antisense strand to SEQ ID NO: 292676
uuugagagcauacuucugg

SEQ ID NO: 292678 - RNA, 19 nt, Artificial Sequence
  Description of Artificial Sequence: Synthetic oligonucleotide
  Sense strand starting at position 1136 of SEQ ID NO: 3762
aguuaugacuuucccuuga

SEQ ID NO: 292679 - RNA, 19 nt, Artificial Sequence
  Description of Artificial Sequence: Synthetic oligonucleotide
  Antisense strand to SEQ ID NO: 292678
ucaagggaaagucauaacu

SEQ ID NO: 292680 - RNA, 19 nt, Artificial Sequence
  Description of Artificial Sequence: Synthetic oligonucleotide
  Sense strand starting at position 1140 of SEQ ID NO: 3762
augacuuucccuugacuga

SEQ ID NO: 292681 - RNA, 19 nt, Artificial Sequence
  Description of Artificial Sequence: Synthetic oligonucleotide
  Antisense strand to SEQ ID NO: 292680
ucagucaagggaaagucau

SEQ ID NO: 292682 - RNA, 19 nt, Artificial Sequence
  Description of Artificial Sequence: Synthetic oligonucleotide
  Sense strand starting at position 1176 of SEQ ID NO: 3762
auguaauagcaguaacagu

SEQ ID NO: 292683 - RNA, 19 nt, Artificial Sequence
  Description of Artificial Sequence: Synthetic oligonucleotide
  Antisense strand to SEQ ID NO: 292682
acuguuacugcuauuacau

SEQ ID NO: 292684 - RNA, 19 nt, Artificial Sequence
  Description of Artificial Sequence: Synthetic oligonucleotide
  Sense strand starting at position 1984 of SEQ ID NO: 3762
aggaaaccuucccugucua

SEQ ID NO: 292685 - RNA, 19 nt, Artificial Sequence
  Description of Artificial Sequence: Synthetic oligonucleotide
  Antisense strand to SEQ ID NO: 292684
uagacagggaagguuuccu

SEQ ID NO: 292686 - RNA, 19 nt, Artificial Sequence
  Description of Artificial Sequence: Synthetic oligonucleotide
  Sense strand starting at position 2144 of SEQ ID NO: 3762
aaauccuuucucugagggu

SEQ ID NO: 292687 - RNA, 19 nt, Artificial Sequence
  Description of Artificial Sequence: Synthetic oligonucleotide
  Antisense strand to SEQ ID NO: 292686
acccucagagaaaggauuu

SEQ ID NO: 292688 - RNA, 19 nt, Artificial Sequence
  Description of Artificial Sequence: Synthetic oligonucleotide
  Sense strand starting at position 2157 of SEQ ID NO: 3762
gaggguucucuggagguca

SEQ ID NO: 292689 - RNA, 19 nt, Artificial Sequence
  Description of Artificial Sequence: Synthetic oligonucleotide
  Antisense strand to SEQ ID NO: 292688
ugaccuccagagaacccuc

SEQ ID NO: 292690 - RNA, 19 nt, Artificial Sequence
  Description of Artificial Sequence: Synthetic oligonucleotide
  Sense strand starting at position 2235 of SEQ ID NO: 3762
cguuaaggugaccaugaaa

SEQ ID NO: 292691 - RNA, 19 nt, Artificial Sequence
  Description of Artificial Sequence: Synthetic oligonucleotide
  Antisense strand to SEQ ID NO: 292690
uuucauggucaccuuaacg

SEQ ID NO: 292692 - RNA, 19 nt, Artificial Sequence
  Description of Artificial Sequence: Synthetic oligonucleotide
  Sense strand starting at position 2319 of SEQ ID NO: 3762
accagaauuguccagcaaa

SEQ ID NO: 292693 - RNA, 19 nt, Artificial Sequence
  Description of Artificial Sequence: Synthetic oligonucleotide
  Antisense strand to SEQ ID NO: 292692
uuugcuggacaauucuggu

SEQ ID NO: 292694 - RNA, 19 nt, Artificial Sequence
  Description of Artificial Sequence: Synthetic oligonucleotide
  Sense strand starting at position 2322 of SEQ ID NO: 3762
agaauuguccagcaaacug

SEQ ID NO: 292695 - RNA, 19 nt, Artificial Sequence
  Description of Artificial Sequence: Synthetic oligonucleotide
  Antisense strand to SEQ ID NO: 292694
caguuugcuggacaauucu

SEQ ID NO: 292696 - RNA, 19 nt, Artificial Sequence
  Description of Artificial Sequence: Synthetic oligonucleotide
  Sense strand starting at position 2342 of SEQ ID NO: 3762
cuuauauggucucuauaca

SEQ ID NO: 292697 - RNA, 19 nt, Artificial Sequence
  Description of Artificial Sequence: Synthetic oligonucleotide
  Antisense strand to SEQ ID NO: 292696
uguauagagaccauauaag

SEQ ID NO: 292698 - RNA, 19 nt, Artificial Sequence
  Description of Artificial Sequence: Synthetic oligonucleotide
  Sense strand starting at position 2343 of SEQ ID NO: 3762
uuauauggucucuauacau

SEQ ID NO: 292699 - RNA, 19 nt, Artificial Sequence
  Description of Artificial Sequence: Synthetic oligonucleotide
  Antisense strand to SEQ ID NO: 292698
auguauagagaccauauaa

SEQ ID NO: 292700 - RNA, 19 nt, Artificial Sequence
  Description of Artificial Sequence: Synthetic oligonucleotide
  Sense strand starting at position 2349 of SEQ ID NO: 3762
ggucucuauacaugaggaa

SEQ ID NO: 292701 - RNA, 19 nt, Artificial Sequence
  Description of Artificial Sequence: Synthetic oligonucleotide
  Antisense strand to SEQ ID NO: 292700
uuccucauguauagagacc

SEQ ID NO: 292702 - RNA, 19 nt, Artificial Sequence
  Description of Artificial Sequence: Synthetic oligonucleotide
  Sense strand starting at position 2470 of SEQ ID NO: 3762
aguuccagaucucuaugaa

SEQ ID NO: 292703 - RNA, 19 nt, Artificial Sequence
  Description of Artificial Sequence: Synthetic oligonucleotide
  Antisense strand to SEQ ID NO: 292702
uucauagagaucuggaacu

SEQ ID NO: 292704 - RNA, 19 nt, Artificial Sequence
  Description of Artificial Sequence: Synthetic oligonucleotide
  Sense strand starting at position 2471 of SEQ ID NO: 3762
guuccagaucucuaugaac

SEQ ID NO: 292705 - RNA, 19 nt, Artificial Sequence
  Description of Artificial Sequence: Synthetic oligonucleotide
  Antisense strand to SEQ ID NO: 292704
guucauagagaucuggaac

SEQ ID NO: 292706 - RNA, 19 nt, Artificial Sequence
  Description of Artificial Sequence: Synthetic oligonucleotide
  Sense strand starting at position 3098 of SEQ ID NO: 3762
agcuaacaucacugggaaa

SEQ ID NO: 292707 - RNA, 19 nt, Artificial Sequence
  Description of Artificial Sequence: Synthetic oligonucleotide
  Antisense strand to SEQ ID NO: 292706
uuucccagugauguuagcu

SEQ ID NO: 292708 - RNA, 19 nt, Artificial Sequence
  Description of Artificial Sequence: Synthetic oligonucleotide
  Sense strand starting at position 3140 of SEQ ID NO: 3762
ggcuaacaccuagaugcaa

SEQ ID NO: 292709 - RNA, 19 nt, Artificial Sequence
  Description of Artificial Sequence: Synthetic oligonucleotide
  Antisense strand to SEQ ID NO: 292708
uugcaucuagguguuagcc

SEQ ID NO: 292710 - RNA, 19 nt, Artificial Sequence
  Description of Artificial Sequence: Synthetic oligonucleotide
  Sense strand starting at position 3285 of SEQ ID NO: 3762
uacacauauugagucgauu

SEQ ID NO: 292711 - RNA, 19 nt, Artificial Sequence
  Description of Artificial Sequence: Synthetic oligonucleotide
  Antisense strand to SEQ ID NO: 292710
aaucgacucaauaugugua

SEQ ID NO: 292712 - RNA, 19 nt, Artificial Sequence
  Description of Artificial Sequence: Synthetic oligonucleotide
  Sense strand starting at position 3288 of SEQ ID NO: 3762
acauauugagucgauuauu

SEQ ID NO: 292713 - RNA, 19 nt, Artificial Sequence
  Description of Artificial Sequence: Synthetic oligonucleotide
  Antisense strand to SEQ ID NO: 292712
aauaaucgacucaauaugu

SEQ ID NO: 292714 - RNA, 19 nt, Artificial Sequence
  Description of Artificial Sequence: Synthetic oligonucleotide
  Sense strand starting at position 3337 of SEQ ID NO: 3762
auagaaagcugcuuuauaa

SEQ ID NO: 292715 - RNA, 19 nt, Artificial Sequence
  Description of Artificial Sequence: Synthetic oligonucleotide
  Antisense strand to SEQ ID NO: 292714
uuauaaagcagcuuucuau

SEQ ID NO: 292716 - RNA, 19 nt, Artificial Sequence
  Description of Artificial Sequence: Synthetic oligonucleotide
  Sense strand starting at position 3464 of SEQ ID NO: 3762
agacuuauguacucagaca

SEQ ID NO: 292717 - RNA, 19 nt, Artificial Sequence
  Description of Artificial Sequence: Synthetic oligonucleotide
  Antisense strand to SEQ ID NO: 292716
ugucugaguacauaagucu

SEQ ID NO: 292718 - RNA, 19 nt, Artificial Sequence
  Description of Artificial Sequence: Synthetic oligonucleotide
  Sense strand starting at position 3472 of SEQ ID NO: 3762
guacucagacauuaguuau

SEQ ID NO: 292719 - RNA, 19 nt, Artificial Sequence
  Description of Artificial Sequence: Synthetic oligonucleotide
  Antisense strand to SEQ ID NO: 292718
auaacuaaugucugaguac

SEQ ID NO: 292720 - RNA, 19 nt, Artificial Sequence
  Description of Artificial Sequence: Synthetic oligonucleotide
  Sense strand starting at position 3478 of SEQ ID NO: 3762
agacauuaguuaucugauu

SEQ ID NO: 292721 - RNA, 19 nt, Artificial Sequence
  Description of Artificial Sequence: Synthetic oligonucleotide
  Antisense strand to SEQ ID NO: 292720
aaucagauaacuaaugucu

SEQ ID NO: 292722 - RNA, 19 nt, Artificial Sequence
  Description of Artificial Sequence: Synthetic oligonucleotide
  Sense strand starting at position 3479 of SEQ ID NO: 3762
gacauuaguuaucugauug

SEQ ID NO: 292723 - RNA, 19 nt, Artificial Sequence
  Description of Artificial Sequence: Synthetic oligonucleotide
  Antisense strand to SEQ ID NO: 292722
caaucagauaacuaauguc

SEQ ID NO: 292724 - RNA, 19 nt, Artificial Sequence
  Description of Artificial Sequence: Synthetic oligonucleotide
  Sense strand starting at position 3847 of SEQ ID NO: 3762
augauuucuuaguauaagg

SEQ ID NO: 292725 - RNA, 19 nt, Artificial Sequence
  Description of Artificial Sequence: Synthetic oligonucleotide
  Antisense strand to SEQ ID NO: 292724
ccuuauacuaagaaaucau

SEQ ID NO: 292726 - RNA, 19 nt, Artificial Sequence
  Description of Artificial Sequence: Synthetic oligonucleotide
  Sense strand starting at position 3869 of SEQ ID NO: 3762
ccagaaaguguaugugaga

SEQ ID NO: 292727 - RNA, 19 nt, Artificial Sequence
  Description of Artificial Sequence: Synthetic oligonucleotide
  Antisense strand to SEQ ID NO: 292726
ucucacauacacuuucugg

SEQ ID NO: 292728 - RNA, 19 nt, Artificial Sequence
  Description of Artificial Sequence: Synthetic oligonucleotide
  Sense strand starting at position 3888 of SEQ ID NO: 3762
caaagcuuccaugagaagu

SEQ ID NO: 292729 - RNA, 19 nt, Artificial Sequence
  Description of Artificial Sequence: Synthetic oligonucleotide
  Antisense strand to SEQ ID NO: 292728
acuucucauggaagcuuug

SEQ ID NO: 292730 - RNA, 19 nt, Artificial Sequence
  Description of Artificial Sequence: Synthetic oligonucleotide
  Sense strand starting at position 3948 of SEQ ID NO: 3762
aggagaagcucuucuagaa

SEQ ID NO: 292731 - RNA, 19 nt, Artificial Sequence
  Description of Artificial Sequence: Synthetic oligonucleotide
  Antisense strand to SEQ ID NO: 292730
uucuagaagagcuucuccu

SEQ ID NO: 292732 - RNA, 19 nt, Artificial Sequence
  Description of Artificial Sequence: Synthetic oligonucleotide
  Sense strand starting at position 391 of SEQ ID NO: 3764
cagccaaggugaguuauca

SEQ ID NO: 292733 - RNA, 19 nt, Artificial Sequence
  Description of Artificial Sequence: Synthetic oligonucleotide
  Antisense strand to SEQ ID NO: 292732
ugauaacucaccuuggcug

SEQ ID NO: 292734 - RNA, 19 nt, Artificial Sequence
  Description of Artificial Sequence: Synthetic oligonucleotide
  Sense strand starting at position 395 of SEQ ID NO: 3764
caaggugaguuaucagaac

SEQ ID NO: 292735 - RNA, 19 nt, Artificial Sequence
  Description of Artificial Sequence: Synthetic oligonucleotide
  Antisense strand to SEQ ID NO: 292734
guucugauaacucaccuug

SEQ ID NO: 292736 - RNA, 19 nt, Artificial Sequence
  Description of Artificial Sequence: Synthetic oligonucleotide
  Sense strand starting at position 878 of SEQ ID NO: 3764
uagaguauauaguucggau

SEQ ID NO: 292737 - RNA, 19 nt, Artificial Sequence
  Description of Artificial Sequence: Synthetic oligonucleotide
  Antisense strand to SEQ ID NO: 292736
auccgaacuauauacucua

SEQ ID NO: 292738 - RNA, 19 nt, Artificial Sequence
  Description of Artificial Sequence: Synthetic oligonucleotide
  Sense strand starting at position 919 of SEQ ID NO: 3764
ggcacauauuuaggagaua

SEQ ID NO: 292739 - RNA, 19 nt, Artificial Sequence
  Description of Artificial Sequence: Synthetic oligonucleotide
  Antisense strand to SEQ ID NO: 292738
uaucuccuaaauaugugcc

SEQ ID NO: 292740 - RNA, 19 nt, Artificial Sequence
  Description of Artificial Sequence: Synthetic oligonucleotide
  Sense strand starting at position 920 of SEQ ID NO: 3764
gcacauauuuaggagauau

SEQ ID NO: 292741 - RNA, 19 nt, Artificial Sequence
  Description of Artificial Sequence: Synthetic oligonucleotide
  Antisense strand to SEQ ID NO: 292740
auaucuccuaaauaugugc

SEQ ID NO: 292742 - RNA, 19 nt, Artificial Sequence
  Description of Artificial Sequence: Synthetic oligonucleotide
  Sense strand starting at position 1027 of SEQ ID NO: 3764
uuccuaugagcugagacau

SEQ ID NO: 292743 - RNA, 19 nt, Artificial Sequence
  Description of Artificial Sequence: Synthetic oligonucleotide
  Antisense strand to SEQ ID NO: 292742
augucucagcucauaggaa

SEQ ID NO: 292744 - RNA, 19 nt, Artificial Sequence
  Description of Artificial Sequence: Synthetic oligonucleotide
  Sense strand starting at position 1033 of SEQ ID NO: 3764
ugagcugagacauguuuac

SEQ ID NO: 292745 - RNA, 19 nt, Artificial Sequence
  Description of Artificial Sequence: Synthetic oligonucleotide
  Antisense strand to SEQ ID NO: 292744
guaaacaugucucagcuca

SEQ ID NO: 292746 - RNA, 19 nt, Artificial Sequence
  Description of Artificial Sequence: Synthetic oligonucleotide
  Sense strand starting at position 1078 of SEQ ID NO: 3764
acaccaauuugucuggcuu

SEQ ID NO: 292747 - RNA, 19 nt, Artificial Sequence
  Description of Artificial Sequence: Synthetic oligonucleotide
  Antisense strand to SEQ ID NO: 292746
aagccagacaaauuggugu

SEQ ID NO: 292748 - RNA, 19 nt, Artificial Sequence
  Description of Artificial Sequence: Synthetic oligonucleotide
  Sense strand starting at position 1082 of SEQ ID NO: 3764
caauuugucuggcuugguu

SEQ ID NO: 292749 - RNA, 19 nt, Artificial Sequence
  Description of Artificial Sequence: Synthetic oligonucleotide
  Antisense strand to SEQ ID NO: 292748
aaccaagccagacaaauug

SEQ ID NO: 292750 - RNA, 19 nt, Artificial Sequence
  Description of Artificial Sequence: Synthetic oligonucleotide
  Sense strand starting at position 1105 of SEQ ID NO: 3764
cuaaauaggcugcaucuaa

SEQ ID NO: 292751 - RNA, 19 nt, Artificial Sequence
  Description of Artificial Sequence: Synthetic oligonucleotide
  Antisense strand to SEQ ID NO: 292750
uuagaugcagccuauuuag

SEQ ID NO: 292752 - RNA, 19 nt, Artificial Sequence
  Description of Artificial Sequence: Synthetic oligonucleotide
  Sense strand starting at position 1131 of SEQ ID NO: 3764
cuguguaacgguuacaaug

SEQ ID NO: 292753 - RNA, 19 nt, Artificial Sequence
  Description of Artificial Sequence: Synthetic oligonucleotide
  Antisense strand to SEQ ID NO: 292752
cauuguaaccguuacacag

SEQ ID NO: 292754 - RNA, 19 nt, Artificial Sequence
  Description of Artificial Sequence: Synthetic oligonucleotide
  Sense strand starting at position 1376 of SEQ ID NO: 3764
ucagucucucuggguaaca

SEQ ID NO: 292755 - RNA, 19 nt, Artificial Sequence
  Description of Artificial Sequence: Synthetic oligonucleotide
  Antisense strand to SEQ ID NO: 292754
uguuacccagagagacuga

SEQ ID NO: 292756 - RNA, 19 nt, Artificial Sequence
  Description of Artificial Sequence: Synthetic oligonucleotide
  Sense strand starting at position 1479 of SEQ ID NO: 3764
cagagagacucggccauaa

SEQ ID NO: 292757 - RNA, 19 nt, Artificial Sequence
  Description of Artificial Sequence: Synthetic oligonucleotide
  Antisense strand to SEQ ID NO: 292756
uuauggccgagucucucug

SEQ ID NO: 292758 - RNA, 19 nt, Artificial Sequence
  Description of Artificial Sequence: Synthetic oligonucleotide
  Sense strand starting at position 1992 of SEQ ID NO: 3764
uaagaaugaugagacgaga

SEQ ID NO: 292759 - RNA, 19 nt, Artificial Sequence
  Description of Artificial Sequence: Synthetic oligonucleotide
  Antisense strand to SEQ ID NO: 292758
ucucgucucaucauucuua

SEQ ID NO: 292760 - RNA, 19 nt, Artificial Sequence
  Description of Artificial Sequence: Synthetic oligonucleotide
  Sense strand starting at position 2031 of SEQ ID NO: 3764
ucuucugggauuuguaguu

SEQ ID NO: 292761 - RNA, 19 nt, Artificial Sequence
  Description of Artificial Sequence: Synthetic oligonucleotide
  Antisense strand to SEQ ID NO: 292760
aacuacaaaucccagaaga

SEQ ID NO: 292762 - RNA, 19 nt, Artificial Sequence
  Description of Artificial Sequence: Synthetic oligonucleotide
  Sense strand starting at position 2120 of SEQ ID NO: 3764
guuguaguucuccagaggu

SEQ ID NO: 292763 - RNA, 19 nt, Artificial Sequence
  Description of Artificial Sequence: Synthetic oligonucleotide
  Antisense strand to SEQ ID NO: 292762
accucuggagaacuacaac

SEQ ID NO: 292764 - RNA, 19 nt, Artificial Sequence
  Description of Artificial Sequence: Synthetic oligonucleotide
  Sense strand starting at position 2122 of SEQ ID NO: 3764
uguaguucuccagagguuu

SEQ ID NO: 292765 - RNA, 19 nt, Artificial Sequence
  Description of Artificial Sequence: Synthetic oligonucleotide
  Antisense strand to SEQ ID NO: 292764
aaaccucuggagaacuaca

SEQ ID NO: 292766 - RNA, 19 nt, Artificial Sequence
  Description of Artificial Sequence: Synthetic oligonucleotide
  Sense strand starting at position 2339 of SEQ ID NO: 3764
cauuguagucaucagucau

SEQ ID NO: 292767 - RNA, 19 nt, Artificial Sequence
  Description of Artificial Sequence: Synthetic oligonucleotide
  Antisense strand to SEQ ID NO: 292766
augacugaugacuacaaug

SEQ ID NO: 292768 - RNA, 19 nt, Artificial Sequence
  Description of Artificial Sequence: Synthetic oligonucleotide
  Sense strand starting at position 2352 of SEQ ID NO: 3764
agucauuguguuuagcaua

SEQ ID NO: 292769 - RNA, 19 nt, Artificial Sequence
  Description of Artificial Sequence: Synthetic oligonucleotide
  Antisense strand to SEQ ID NO: 292768
uaugcuaaacacaaugacu

SEQ ID NO: 292770 - RNA, 19 nt, Artificial Sequence
  Description of Artificial Sequence: Synthetic oligonucleotide
  Sense strand starting at position 2366 of SEQ ID NO: 3764
gcauaaauaugaguuaccu

SEQ ID NO: 292771 - RNA, 19 nt, Artificial Sequence
  Description of Artificial Sequence: Synthetic oligonucleotide
  Antisense strand to SEQ ID NO: 292770
agguaacucauauuuaugc

SEQ ID NO: 292772 - RNA, 19 nt, Artificial Sequence
  Description of Artificial Sequence: Synthetic oligonucleotide
  Sense strand starting at position 2468 of SEQ ID NO: 3764
uucucaaggcuuuauuaag

SEQ ID NO: 292773 - RNA, 19 nt, Artificial Sequence
  Description of Artificial Sequence: Synthetic oligonucleotide
  Antisense strand to SEQ ID NO: 292772
cuuaauaaagccuugagaa

SEQ ID NO: 292774 - RNA, 19 nt, Artificial Sequence
  Description of Artificial Sequence: Synthetic oligonucleotide
  Sense strand starting at position 2585 of SEQ ID NO: 3764
gagccauccugagcaccau

SEQ ID NO: 292775 - RNA, 19 nt, Artificial Sequence
  Description of Artificial Sequence: Synthetic oligonucleotide
  Antisense strand to SEQ ID NO: 292774
auggugcucaggauggcuc

SEQ ID NO: 292776 - RNA, 19 nt, Artificial Sequence
  Description of Artificial Sequence: Synthetic oligonucleotide
  Sense strand starting at position 2594 of SEQ ID NO: 3764
ugagcaccauuggugauaa

SEQ ID NO: 292777 - RNA, 19 nt, Artificial Sequence
  Description of Artificial Sequence: Synthetic oligonucleotide
  Antisense strand to SEQ ID NO: 292776
uuaucaccaauggugcuca

SEQ ID NO: 292778 - RNA, 19 nt, Artificial Sequence
  Description of Artificial Sequence: Synthetic oligonucleotide
  Sense strand starting at position 2596 of SEQ ID NO: 3764
agcaccauuggugauaaau

SEQ ID NO: 292779 - RNA, 19 nt, Artificial Sequence
  Description of Artificial Sequence: Synthetic oligonucleotide
  Antisense strand to SEQ ID NO: 292778
auuuaucaccaauggugcu

SEQ ID NO: 292780 - RNA, 19 nt, Artificial Sequence
  Description of Artificial Sequence: Synthetic oligonucleotide
  Sense strand starting at position 2645 of SEQ ID NO: 3764
uguugcuauuguucuauuu

SEQ ID NO: 292781 - RNA, 19 nt, Artificial Sequence
  Description of Artificial Sequence: Synthetic oligonucleotide
  Antisense strand to SEQ ID NO: 292780
aaauagaacaauagcaaca

SEQ ID NO: 292782 - RNA, 19 nt, Artificial Sequence
  Description of Artificial Sequence: Synthetic oligonucleotide
  Sense strand starting at position 2854 of SEQ ID NO: 3764
agcagaguggcaugaaaua

SEQ ID NO: 292783 - RNA, 19 nt, Artificial Sequence
  Description of Artificial Sequence: Synthetic oligonucleotide
  Antisense strand to SEQ ID NO: 292782
uauuucaugccacucugcu

SEQ ID NO: 292784 - RNA, 19 nt, Artificial Sequence
  Description of Artificial Sequence: Synthetic oligonucleotide
  Sense strand starting at position 2933 of SEQ ID NO: 3764
guagaauuugugugacuuu

SEQ ID NO: 292785 - RNA, 19 nt, Artificial Sequence
  Description of Artificial Sequence: Synthetic oligonucleotide
  Antisense strand to SEQ ID NO: 292784
aaagucacacaaauucuac

SEQ ID NO: 292786 - RNA, 19 nt, Artificial Sequence
  Description of Artificial Sequence: Synthetic oligonucleotide
  Sense strand starting at position 3354 of SEQ ID NO: 3764
gguuuaguaguagaaagua

SEQ ID NO: 292787 - RNA, 19 nt, Artificial Sequence
  Description of Artificial Sequence: Synthetic oligonucleotide
  Antisense strand to SEQ ID NO: 292786
uacuuucuacuacuaaacc

SEQ ID NO: 292788 - RNA, 19 nt, Artificial Sequence
  Description of Artificial Sequence: Synthetic oligonucleotide
  Sense strand starting at position 3405 of SEQ ID NO: 3764
ugacauacccagugauugu

SEQ ID NO: 292789 - RNA, 19 nt, Artificial Sequence
  Description of Artificial Sequence: Synthetic oligonucleotide
  Antisense strand to SEQ ID NO: 292788
acaaucacuggguauguca

SEQ ID NO: 292790 - RNA, 19 nt, Artificial Sequence
  Description of Artificial Sequence: Synthetic oligonucleotide
  Sense strand starting at position 3472 of SEQ ID NO: 3764
ugguaaaucuuguuauuag

SEQ ID NO: 292791 - RNA, 19 nt, Artificial Sequence
  Description of Artificial Sequence: Synthetic oligonucleotide
  Antisense strand to SEQ ID NO: 292790
cuaauaacaagauuuacca

SEQ ID NO: 292792 - RNA, 19 nt, Artificial Sequence
  Description of Artificial Sequence: Synthetic oligonucleotide
  Sense strand starting at position 3519 of SEQ ID NO: 3764
ugcuuagugaacugugaaa

SEQ ID NO: 292793 - RNA, 19 nt, Artificial Sequence
  Description of Artificial Sequence: Synthetic oligonucleotide
  Antisense strand to SEQ ID NO: 292792
uuucacaguucacuaagca

SEQ ID NO: 292794 - RNA, 19 nt, Artificial Sequence
  Description of Artificial Sequence: Synthetic oligonucleotide
  Sense strand starting at position 3521 of SEQ ID NO: 3764
cuuagugaacugugaaauc

SEQ ID NO: 292795 - RNA, 19 nt, Artificial Sequence
  Description of Artificial Sequence: Synthetic oligonucleotide
  Antisense strand to SEQ ID NO: 292794
gauuucacaguucacuaag

SEQ ID NO: 292796 - RNA, 19 nt, Artificial Sequence
  Description of Artificial Sequence: Synthetic oligonucleotide
  Sense strand starting at position 3549 of SEQ ID NO: 3764
guaagagagggauguuguu

SEQ ID NO: 292797 - RNA, 19 nt, Artificial Sequence
  Description of Artificial Sequence: Synthetic oligonucleotide
  Antisense strand to SEQ ID NO: 292796
aacaacaucccucucuuac

SEQ ID NO: 292798 - RNA, 19 nt, Artificial Sequence
  Description of Artificial Sequence: Synthetic oligonucleotide
  Sense strand starting at position 3561 of SEQ ID NO: 3764
uguuguuauuauuugaggu

SEQ ID NO: 292799 - RNA, 19 nt, Artificial Sequence
  Description of Artificial Sequence: Synthetic oligonucleotide
  Antisense strand to SEQ ID NO: 292798
accucaaauaauaacaaca

SEQ ID NO: 292800 - RNA, 19 nt, Artificial Sequence
  Description of Artificial Sequence: Synthetic oligonucleotide
  Sense strand starting at position 3562 of SEQ ID NO: 3764
guuguuauuauuugaggua

SEQ ID NO: 292801 - RNA, 19 nt, Artificial Sequence
  Description of Artificial Sequence: Synthetic oligonucleotide
  Antisense strand to SEQ ID NO: 292800
uaccucaaauaauaacaac

SEQ ID NO: 292802 - RNA, 19 nt, Artificial Sequence
  Description of Artificial Sequence: Synthetic oligonucleotide
  Sense strand starting at position 3574 of SEQ ID NO: 3764
ugagguaaaucucuuauau

SEQ ID NO: 292803 - RNA, 19 nt, Artificial Sequence
  Description of Artificial Sequence: Synthetic oligonucleotide
  Antisense strand to SEQ ID NO: 292802
auauaagagauuuaccuca

SEQ ID NO: 292804 - RNA, 19 nt, Artificial Sequence
  Description of Artificial Sequence: Synthetic oligonucleotide
  Sense strand starting at position 3682 of SEQ ID NO: 3764
ucccaacagucaguuaauu

SEQ ID NO: 292805 - RNA, 19 nt, Artificial Sequence
  Description of Artificial Sequence: Synthetic oligonucleotide
  Antisense strand to SEQ ID NO: 292804
aauuaacugacuguuggga

SEQ ID NO: 292806 - RNA, 19 nt, Artificial Sequence
  Description of Artificial Sequence: Synthetic oligonucleotide
  Sense strand starting at position 3800 of SEQ ID NO: 3764
augauacccugcuuugaca

SEQ ID NO: 292807 - RNA, 19 nt, Artificial Sequence
  Description of Artificial Sequence: Synthetic oligonucleotide
  Antisense strand to SEQ ID NO: 292806
ugucaaagcaggguaucau

SEQ ID NO: 292808 - RNA, 19 nt, Artificial Sequence
  Description of Artificial Sequence: Synthetic oligonucleotide
  Sense strand starting at position 3924 of SEQ ID NO: 3764
ugaguuagaagaugugauu

SEQ ID NO: 292809 - RNA, 19 nt, Artificial Sequence
  Description of Artificial Sequence: Synthetic oligonucleotide
  Antisense strand to SEQ ID NO: 292808
aaucacaucuucuaacuca

SEQ ID NO: 292810 - RNA, 19 nt, Artificial Sequence
  Description of Artificial Sequence: Synthetic oligonucleotide
  Sense strand starting at position 3933 of SEQ ID NO: 3764
agaugugauuaccuuucua

SEQ ID NO: 292811 - RNA, 19 nt, Artificial Sequence
  Description of Artificial Sequence: Synthetic oligonucleotide
  Antisense strand to SEQ ID NO: 292810
uagaaagguaaucacaucu

SEQ ID NO: 292812 - RNA, 19 nt, Artificial Sequence
  Description of Artificial Sequence: Synthetic oligonucleotide
  Sense strand starting at position 109 of SEQ ID NO: 3763
ggaagaaaguaagaagaau

SEQ ID NO: 292813 - RNA, 19 nt, Artificial Sequence
  Description of Artificial Sequence: Synthetic oligonucleotide
  Antisense strand to SEQ ID NO: 292812
auucuucuuacuuucuucc

SEQ ID NO: 292814 - RNA, 19 nt, Artificial Sequence
  Description of Artificial Sequence: Synthetic oligonucleotide
  Sense strand starting at position 255 of SEQ ID NO: 3763
ugaaauaguaggcagcaua

SEQ ID NO: 292815 - RNA, 19 nt, Artificial Sequence
  Description of Artificial Sequence: Synthetic oligonucleotide
  Antisense strand to SEQ ID NO: 292814
uaugcugccuacuauuuca

SEQ ID NO: 292816 - RNA, 19 nt, Artificial Sequence
  Description of Artificial Sequence: Synthetic oligonucleotide
  Sense strand starting at position 266 of SEQ ID NO: 3763
gcagcauaugcugaaauaa

SEQ ID NO: 292817 - RNA, 19 nt, Artificial Sequence
  Description of Artificial Sequence: Synthetic oligonucleotide
  Antisense strand to SEQ ID NO: 292816
uuauuucagcauaugcugc

SEQ ID NO: 292818 - RNA, 19 nt, Artificial Sequence
  Description of Artificial Sequence: Synthetic oligonucleotide
  Sense strand starting at position 727 of SEQ ID NO: 3763
cagccaaggugaguuauca

SEQ ID NO: 292819 - RNA, 19 nt, Artificial Sequence
  Description of Artificial Sequence: Synthetic oligonucleotide
  Antisense strand to SEQ ID NO: 292818
ugauaacucaccuuggcug

SEQ ID NO: 292820 - RNA, 19 nt, Artificial Sequence
  Description of Artificial Sequence: Synthetic oligonucleotide
  Sense strand starting at position 731 of SEQ ID NO: 3763
caaggugaguuaucagaac

SEQ ID NO: 292821 - RNA, 19 nt, Artificial Sequence
  Description of Artificial Sequence: Synthetic oligonucleotide
  Antisense strand to SEQ ID NO: 292820
guucugauaacucaccuug

SEQ ID NO: 292822 - RNA, 19 nt, Artificial Sequence
  Description of Artificial Sequence: Synthetic oligonucleotide
  Sense strand starting at position 781 of SEQ ID NO: 3763
aucagauaaugagaaaggu

SEQ ID NO: 292823 - RNA, 19 nt, Artificial Sequence
  Description of Artificial Sequence: Synthetic oligonucleotide
  Antisense strand to SEQ ID NO: 292822
accuuucucauuaucugau

SEQ ID NO: 292824 - RNA, 19 nt, Artificial Sequence
  Description of Artificial Sequence: Synthetic oligonucleotide
  Sense strand starting at position 1214 of SEQ ID NO: 3763
uagaguauauaguucggau

SEQ ID NO: 292825 - RNA, 19 nt, Artificial Sequence
  Description of Artificial Sequence: Synthetic oligonucleotide
  Antisense strand to SEQ ID NO: 292824
auccgaacuauauacucua

SEQ ID NO: 292826 - RNA, 19 nt, Artificial Sequence
  Description of Artificial Sequence: Synthetic oligonucleotide
  Sense strand starting at position 1255 of SEQ ID NO: 3763
ggcacauauuuaggagaua

SEQ ID NO: 292827 - RNA, 19 nt, Artificial Sequence
  Description of Artificial Sequence: Synthetic oligonucleotide
  Antisense strand to SEQ ID NO: 292826
uaucuccuaaauaugugcc

SEQ ID NO: 292828 - RNA, 19 nt, Artificial Sequence
  Description of Artificial Sequence: Synthetic oligonucleotide
  Sense strand starting at position 1256 of SEQ ID NO: 3763
gcacauauuuaggagauau

SEQ ID NO: 292829 - RNA, 19 nt, Artificial Sequence
  Description of Artificial Sequence: Synthetic oligonucleotide
  Antisense strand to SEQ ID NO: 292828
auaucuccuaaauaugugc

SEQ ID NO: 292830 - RNA, 19 nt, Artificial Sequence
  Description of Artificial Sequence: Synthetic oligonucleotide
  Sense strand starting at position 1363 of SEQ ID NO: 3763
uuccuaugagcugagacau

SEQ ID NO: 292831 - RNA, 19 nt, Artificial Sequence
  Description of Artificial Sequence: Synthetic oligonucleotide
  Antisense strand to SEQ ID NO: 292830
augucucagcucauaggaa

SEQ ID NO: 292832 - RNA, 19 nt, Artificial Sequence
  Description of Artificial Sequence: Synthetic oligonucleotide
  Sense strand starting at position 1369 of SEQ ID NO: 3763
ugagcugagacauguuuac

SEQ ID NO: 292833 - RNA, 19 nt, Artificial Sequence
  Description of Artificial Sequence: Synthetic oligonucleotide
  Antisense strand to SEQ ID NO: 292832
guaaacaugucucagcuca

SEQ ID NO: 292834 - RNA, 19 nt, Artificial Sequence
  Description of Artificial Sequence: Synthetic oligonucleotide
  Sense strand starting at position 1414 of SEQ ID NO: 3763
acaccaauuugucuggcuu

SEQ ID NO: 292835 - RNA, 19 nt, Artificial Sequence
  Description of Artificial Sequence: Synthetic oligonucleotide
  Antisense strand to SEQ ID NO: 292834
aagccagacaaauuggugu

SEQ ID NO: 292836 - RNA, 19 nt, Artificial Sequence
  Description of Artificial Sequence: Synthetic oligonucleotide
  Sense strand starting at position 1418 of SEQ ID NO: 3763
caauuugucuggcuugguu

SEQ ID NO: 292837 - RNA, 19 nt, Artificial Sequence
  Description of Artificial Sequence: Synthetic oligonucleotide
  Antisense strand to SEQ ID NO: 292836
aaccaagccagacaaauug

SEQ ID NO: 292838 - RNA, 19 nt, Artificial Sequence
  Description of Artificial Sequence: Synthetic oligonucleotide
  Sense strand starting at position 1441 of SEQ ID NO: 3763
cuaaauaggcugcaucuaa

SEQ ID NO: 292839 - RNA, 19 nt, Artificial Sequence
  Description of Artificial Sequence: Synthetic oligonucleotide
  Antisense strand to SEQ ID NO: 292838
uuagaugcagccuauuuag

SEQ ID NO: 292840 - RNA, 19 nt, Artificial Sequence
  Description of Artificial Sequence: Synthetic oligonucleotide
  Sense strand starting at position 1467 of SEQ ID NO: 3763
cuguguaacgguuacaaug

SEQ ID NO: 292841 - RNA, 19 nt, Artificial Sequence
  Description of Artificial Sequence: Synthetic oligonucleotide
  Antisense strand to SEQ ID NO: 292840
cauuguaaccguuacacag

SEQ ID NO: 292842 - RNA, 19 nt, Artificial Sequence
  Description of Artificial Sequence: Synthetic oligonucleotide
  Sense strand starting at position 1712 of SEQ ID NO: 3763
ucagucucucuggguaaca

SEQ ID NO: 292843 - RNA, 19 nt, Artificial Sequence
  Description of Artificial Sequence: Synthetic oligonucleotide
  Antisense strand to SEQ ID NO: 292842
uguuacccagagagacuga

SEQ ID NO: 292844 - RNA, 19 nt, Artificial Sequence
  Description of Artificial Sequence: Synthetic oligonucleotide
  Sense strand starting at position 1815 of SEQ ID NO: 3763
cagagagacucggccauaa

SEQ ID NO: 292845 - RNA, 19 nt, Artificial Sequence
  Description of Artificial Sequence: Synthetic oligonucleotide
  Antisense strand to SEQ ID NO: 292844
uuauggccgagucucucug

SEQ ID NO: 292846 - RNA, 19 nt, Artificial Sequence
  Description of Artificial Sequence: Synthetic oligonucleotide
  Sense strand starting at position 2328 of SEQ ID NO: 3763
uaagaaugaugagacgaga

SEQ ID NO: 292847 - RNA, 19 nt, Artificial Sequence
  Description of Artificial Sequence: Synthetic oligonucleotide
  Antisense strand to SEQ ID NO: 292846
ucucgucucaucauucuua

SEQ ID NO: 292848 - RNA, 19 nt, Artificial Sequence
  Description of Artificial Sequence: Synthetic oligonucleotide
  Sense strand starting at position 2367 of SEQ ID NO: 3763
ucuucugggauuuguaguu

SEQ ID NO: 292849 - RNA, 19 nt, Artificial Sequence
  Description of Artificial Sequence: Synthetic oligonucleotide
  Antisense strand to SEQ ID NO: 292848
aacuacaaaucccagaaga

SEQ ID NO: 292850 - RNA, 19 nt, Artificial Sequence
  Description of Artificial Sequence: Synthetic oligonucleotide
  Sense strand starting at position 2456 of SEQ ID NO: 3763
guuguaguucuccagaggu

SEQ ID NO: 292851 - RNA, 19 nt, Artificial Sequence
  Description of Artificial Sequence: Synthetic oligonucleotide
  Antisense strand to SEQ ID NO: 292850
accucuggagaacuacaac

SEQ ID NO: 292852 - RNA, 19 nt, Artificial Sequence
  Description of Artificial Sequence: Synthetic oligonucleotide
  Sense strand starting at position 2458 of SEQ ID NO: 3763
uguaguucuccagagguuu

SEQ ID NO: 292853 - RNA, 19 nt, Artificial Sequence
  Description of Artificial Sequence: Synthetic oligonucleotide
  Antisense strand to SEQ ID NO: 292852
aaaccucuggagaacuaca

SEQ ID NO: 292854 - RNA, 19 nt, Artificial Sequence
  Description of Artificial Sequence: Synthetic oligonucleotide
  Sense strand starting at position 2675 of SEQ ID NO: 3763
cauuguagucaucagucau

SEQ ID NO: 292855 - RNA, 19 nt, Artificial Sequence
  Description of Artificial Sequence: Synthetic oligonucleotide
  Antisense strand to SEQ ID NO: 292854
augacugaugacuacaaug

SEQ ID NO: 292856 - RNA, 19 nt, Artificial Sequence
  Description of Artificial Sequence: Synthetic oligonucleotide
  Sense strand starting at position 2688 of SEQ ID NO: 3763
agucauuguguuuagcaua

SEQ ID NO: 292857 - RNA, 19 nt, Artificial Sequence
  Description of Artificial Sequence: Synthetic oligonucleotide
  Antisense strand to SEQ ID NO: 292856
uaugcuaaacacaaugacu

SEQ ID NO: 292858 - RNA, 19 nt, Artificial Sequence
  Description of Artificial Sequence: Synthetic oligonucleotide
  Sense strand starting at position 2702 of SEQ ID NO: 3763
gcauaaauaugaguuaccu

SEQ ID NO: 292859 - RNA, 19 nt, Artificial Sequence
  Description of Artificial Sequence: Synthetic oligonucleotide
  Antisense strand to SEQ ID NO: 292858
agguaacucauauuuaugc

SEQ ID NO: 292860 - RNA, 19 nt, Artificial Sequence
  Description of Artificial Sequence: Synthetic oligonucleotide
  Sense strand starting at position 2804 of SEQ ID NO: 3763
uucucaaggcuuuauuaag

SEQ ID NO: 292861 - RNA, 19 nt, Artificial Sequence
  Description of Artificial Sequence: Synthetic oligonucleotide
  Antisense strand to SEQ ID NO: 292860
cuuaauaaagccuugagaa

SEQ ID NO: 292862 - RNA, 19 nt, Artificial Sequence
  Description of Artificial Sequence: Synthetic oligonucleotide
  Sense strand starting at position 2921 of SEQ ID NO: 3763
gagccauccugagcaccau

SEQ ID NO: 292863 - RNA, 19 nt, Artificial Sequence
  Description of Artificial Sequence: Synthetic oligonucleotide
  Antisense strand to SEQ ID NO: 292862
auggugcucaggauggcuc

SEQ ID NO: 292864 - RNA, 19 nt, Artificial Sequence
  Description of Artificial Sequence: Synthetic oligonucleotide
  Sense strand starting at position 2930 of SEQ ID NO: 3763
ugagcaccauuggugauaa

SEQ ID NO: 292865 - RNA, 19 nt, Artificial Sequence
  Description of Artificial Sequence: Synthetic oligonucleotide
  Antisense strand to SEQ ID NO: 292864
uuaucaccaauggugcuca

SEQ ID NO: 292866 - RNA, 19 nt, Artificial Sequence
  Description of Artificial Sequence: Synthetic oligonucleotide
  Sense strand starting at position 2932 of SEQ ID NO: 3763
agcaccauuggugauaaau

SEQ ID NO: 292867 - RNA, 19 nt, Artificial Sequence
  Description of Artificial Sequence: Synthetic oligonucleotide
  Antisense strand to SEQ ID NO: 292866
auuuaucaccaauggugcu

SEQ ID NO: 292868 - RNA, 19 nt, Artificial Sequence
  Description of Artificial Sequence: Synthetic oligonucleotide
  Sense strand starting at position 2981 of SEQ ID NO: 3763
uguugcuauuguucuauuu

SEQ ID NO: 292869 - RNA, 19 nt, Artificial Sequence
  Description of Artificial Sequence: Synthetic oligonucleotide
  Antisense strand to SEQ ID NO: 292868
aaauagaacaauagcaaca

SEQ ID NO: 292870 - RNA, 19 nt, Artificial Sequence
  Description of Artificial Sequence: Synthetic oligonucleotide
  Sense strand starting at position 3190 of SEQ ID NO: 3763
agcagaguggcaugaaaua

SEQ ID NO: 292871 - RNA, 19 nt, Artificial Sequence
  Description of Artificial Sequence: Synthetic oligonucleotide
  Antisense strand to SEQ ID NO: 292870
uauuucaugccacucugcu

SEQ ID NO: 292872 - RNA, 19 nt, Artificial Sequence
  Description of Artificial Sequence: Synthetic oligonucleotide
  Sense strand starting at position 3269 of SEQ ID NO: 3763
guagaauuugugugacuuu

SEQ ID NO: 292873 - RNA, 19 nt, Artificial Sequence
  Description of Artificial Sequence: Synthetic oligonucleotide
  Antisense strand to SEQ ID NO: 292872
aaagucacacaaauucuac

SEQ ID NO: 292874 - RNA, 19 nt, Artificial Sequence
  Description of Artificial Sequence: Synthetic oligonucleotide
  Sense strand starting at position 3690 of SEQ ID NO: 3763
gguuuaguaguagaaagua

SEQ ID NO: 292875 - RNA, 19 nt, Artificial Sequence
  Description of Artificial Sequence: Synthetic oligonucleotide
  Antisense strand to SEQ ID NO: 292874
uacuuucuacuacuaaacc

SEQ ID NO: 292876 - RNA, 19 nt, Artificial Sequence
  Description of Artificial Sequence: Synthetic oligonucleotide
  Sense strand starting at position 3741 of SEQ ID NO: 3763
ugacauacccagugauugu

SEQ ID NO: 292877 - RNA, 19 nt, Artificial Sequence
  Description of Artificial Sequence: Synthetic oligonucleotide
  Antisense strand to SEQ ID NO: 292876
acaaucacuggguauguca

SEQ ID NO: 292878 - RNA, 19 nt, Artificial Sequence
  Description of Artificial Sequence: Synthetic oligonucleotide
  Sense strand starting at position 3808 of SEQ ID NO: 3763
ugguaaaucuuguuauuag

SEQ ID NO: 292879 - RNA, 19 nt, Artificial Sequence
  Description of Artificial Sequence: Synthetic oligonucleotide
  Antisense strand to SEQ ID NO: 292878
cuaauaacaagauuuacca

SEQ ID NO: 292880 - RNA, 19 nt, Artificial Sequence
  Description of Artificial Sequence: Synthetic oligonucleotide
  Sense strand starting at position 3855 of SEQ ID NO: 3763
ugcuuagugaacugugaaa

SEQ ID NO: 292881 - RNA, 19 nt, Artificial Sequence
  Description of Artificial Sequence: Synthetic oligonucleotide
  Antisense strand to SEQ ID NO: 292880
uuucacaguucacuaagca

SEQ ID NO: 292882 - RNA, 19 nt, Artificial Sequence
  Description of Artificial Sequence: Synthetic oligonucleotide
  Sense strand starting at position 3857 of SEQ ID NO: 3763
cuuagugaacugugaaauc

SEQ ID NO: 292883 - RNA, 19 nt, Artificial Sequence
  Description of Artificial Sequence: Synthetic oligonucleotide
  Antisense strand to SEQ ID NO: 292882
gauuucacaguucacuaag

SEQ ID NO: 292884 - RNA, 19 nt, Artificial Sequence
  Description of Artificial Sequence: Synthetic oligonucleotide
  Sense strand starting at position 3885 of SEQ ID NO: 3763
guaagagagggauguuguu

SEQ ID NO: 292885 - RNA, 19 nt, Artificial Sequence
  Description of Artificial Sequence: Synthetic oligonucleotide
  Antisense strand to SEQ ID NO: 292884
aacaacaucccucucuuac

SEQ ID NO: 292886 - RNA, 19 nt, Artificial Sequence
  Description of Artificial Sequence: Synthetic oligonucleotide
  Sense strand starting at position 3897 of SEQ ID NO: 3763
uguuguuauuauuugaggu

SEQ ID NO: 292887 - RNA, 19 nt, Artificial Sequence
  Description of Artificial Sequence: Synthetic oligonucleotide
  Antisense strand to SEQ ID NO: 292886
accucaaauaauaacaaca

SEQ ID NO: 292888 - RNA, 19 nt, Artificial Sequence
  Description of Artificial Sequence: Synthetic oligonucleotide
  Sense strand starting at position 3898 of SEQ ID NO: 3763
guuguuauuauuugaggua

SEQ ID NO: 292889 - RNA, 19 nt, Artificial Sequence
  Description of Artificial Sequence: Synthetic oligonucleotide
  Antisense strand to SEQ ID NO: 292888
uaccucaaauaauaacaac

SEQ ID NO: 292890 - RNA, 19 nt, Artificial Sequence
  Description of Artificial Sequence: Synthetic oligonucleotide
  Sense strand starting at position 3910 of SEQ ID NO: 3763
ugagguaaaucucuuauau

SEQ ID NO: 292891 - RNA, 19 nt, Artificial Sequence
  Description of Artificial Sequence: Synthetic oligonucleotide
  Antisense strand to SEQ ID NO: 292890
auauaagagauuuaccuca

SEQ ID NO: 292892 - RNA, 19 nt, Artificial Sequence
  Description of Artificial Sequence: Synthetic oligonucleotide
  Sense strand starting at position 197 of SEQ ID NO: 3765
gcucaauacuaacugguuu

SEQ ID NO: 292893 - RNA, 19 nt, Artificial Sequence
  Description of Artificial Sequence: Synthetic oligonucleotide
  Antisense strand to SEQ ID NO: 292892
aaaccaguuaguauugagc

SEQ ID NO: 292894 - RNA, 19 nt, Artificial Sequence
  Description of Artificial Sequence: Synthetic oligonucleotide
  Sense strand starting at position 209 of SEQ ID NO: 3765
cugguuuauacggauugca

SEQ ID NO: 292895 - RNA, 19 nt, Artificial Sequence
  Description of Artificial Sequence: Synthetic oligonucleotide
  Antisense strand to SEQ ID NO: 292894
ugcaauccguauaaaccag

SEQ ID NO: 292896 - RNA, 19 nt, Artificial Sequence
  Description of Artificial Sequence: Synthetic oligonucleotide
  Sense strand starting at position 222 of SEQ ID NO: 3765
auugcagacagaugucgau

SEQ ID NO: 292897 - RNA, 19 nt, Artificial Sequence
  Description of Artificial Sequence: Synthetic oligonucleotide
  Antisense strand to SEQ ID NO: 292896
aucgacaucugucugcaau

SEQ ID NO: 292898 - RNA, 19 nt, Artificial Sequence
  Description of Artificial Sequence: Synthetic oligonucleotide
  Sense strand starting at position 235 of SEQ ID NO: 3765
gucgauauauaacuacaua

SEQ ID NO: 292899 - RNA, 19 nt, Artificial Sequence
  Description of Artificial Sequence: Synthetic oligonucleotide
  Antisense strand to SEQ ID NO: 292898
uauguaguuauauaucgac

SEQ ID NO: 292900 - RNA, 19 nt, Artificial Sequence
  Description of Artificial Sequence: Synthetic oligonucleotide
  Sense strand starting at position 264 of SEQ ID NO: 3765
ccucucuguguccacauau

SEQ ID NO: 292901 - RNA, 19 nt, Artificial Sequence
  Description of Artificial Sequence: Synthetic oligonucleotide
  Antisense strand to SEQ ID NO: 292900
auauguggacacagagagg

SEQ ID NO: 292902 - RNA, 19 nt, Artificial Sequence
  Description of Artificial Sequence: Synthetic oligonucleotide
  Sense strand starting at position 314 of SEQ ID NO: 3765
cccuaagaauugguuccaa

SEQ ID NO: 292903 - RNA, 19 nt, Artificial Sequence
  Description of Artificial Sequence: Synthetic oligonucleotide
  Antisense strand to SEQ ID NO: 292902
uuggaaccaauucuuaggg

SEQ ID NO: 292904 - RNA, 19 nt, Artificial Sequence
  Description of Artificial Sequence: Synthetic oligonucleotide
  Sense strand starting at position 584 of SEQ ID NO: 3765
cuugauugaguccacggau

SEQ ID NO: 292905 - RNA, 19 nt, Artificial Sequence
  Description of Artificial Sequence: Synthetic oligonucleotide
  Antisense strand to SEQ ID NO: 292904
auccguggacucaaucaag

SEQ ID NO: 292906 - RNA, 19 nt, Artificial Sequence
  Description of Artificial Sequence: Synthetic oligonucleotide
  Sense strand starting at position 673 of SEQ ID NO: 3765
guaccaaccugcucagagu

SEQ ID NO: 292907 - RNA, 19 nt, Artificial Sequence
  Description of Artificial Sequence: Synthetic oligonucleotide
  Antisense strand to SEQ ID NO: 292906
acucugagcagguugguac

SEQ ID NO: 292908 - RNA, 19 nt, Artificial Sequence
  Description of Artificial Sequence: Synthetic oligonucleotide
  Sense strand starting at position 1012 of SEQ ID NO: 3765
uacugagaaguuugccuuu

SEQ ID NO: 292909 - RNA, 19 nt, Artificial Sequence
  Description of Artificial Sequence: Synthetic oligonucleotide
  Antisense strand to SEQ ID NO: 292908
aaaggcaaacuucucagua

SEQ ID NO: 292910 - RNA, 19 nt, Artificial Sequence
  Description of Artificial Sequence: Synthetic oligonucleotide
  Sense strand starting at position 1014 of SEQ ID NO: 3765
cugagaaguuugccuuuaa

SEQ ID NO: 292911 - RNA, 19 nt, Artificial Sequence
  Description of Artificial Sequence: Synthetic oligonucleotide
  Antisense strand to SEQ ID NO: 292910
uuaaaggcaaacuucucag

SEQ ID NO: 292912 - RNA, 19 nt, Artificial Sequence
  Description of Artificial Sequence: Synthetic oligonucleotide
  Sense strand starting at position 1015 of SEQ ID NO: 3765
ugagaaguuugccuuuaaa

SEQ ID NO: 292913 - RNA, 19 nt, Artificial Sequence
  Description of Artificial Sequence: Synthetic oligonucleotide
  Antisense strand to SEQ ID NO: 292912
uuuaaaggcaaacuucuca

SEQ ID NO: 292914 - RNA, 19 nt, Artificial Sequence
  Description of Artificial Sequence: Synthetic oligonucleotide
  Sense strand starting at position 1048 of SEQ ID NO: 3765
ucuacuacucgugacauau

SEQ ID NO: 292915 - RNA, 19 nt, Artificial Sequence
  Description of Artificial Sequence: Synthetic oligonucleotide
  Antisense strand to SEQ ID NO: 292914
auaugucacgaguaguaga

SEQ ID NO: 292916 - RNA, 19 nt, Artificial Sequence
  Description of Artificial Sequence: Synthetic oligonucleotide
  Sense strand starting at position 1056 of SEQ ID NO: 3765
ucgugacauaugcagagua

SEQ ID NO: 292917 - RNA, 19 nt, Artificial Sequence
  Description of Artificial Sequence: Synthetic oligonucleotide
  Antisense strand to SEQ ID NO: 292916
uacucugcauaugucacga

SEQ ID NO: 292918 - RNA, 19 nt, Artificial Sequence
  Description of Artificial Sequence: Synthetic oligonucleotide
  Sense strand starting at position 1058 of SEQ ID NO: 3765
gugacauaugcagaguaau

SEQ ID NO: 292919 - RNA, 19 nt, Artificial Sequence
  Description of Artificial Sequence: Synthetic oligonucleotide
  Antisense strand to SEQ ID NO: 292918
auuacucugcauaugucac

SEQ ID NO: 292920 - RNA, 19 nt, Artificial Sequence
  Description of Artificial Sequence: Synthetic oligonucleotide
  Sense strand starting at position 1113 of SEQ ID NO: 3765
accaaaugauugcucuaag

SEQ ID NO: 292921 - RNA, 19 nt, Artificial Sequence
  Description of Artificial Sequence: Synthetic oligonucleotide
  Antisense strand to SEQ ID NO: 292920
cuuagagcaaucauuuggu

SEQ ID NO: 292922 - RNA, 19 nt, Artificial Sequence
  Description of Artificial Sequence: Synthetic oligonucleotide
  Sense strand starting at position 1114 of SEQ ID NO: 3765
ccaaaugauugcucuaaga

SEQ ID NO: 292923 - RNA, 19 nt, Artificial Sequence
  Description of Artificial Sequence: Synthetic oligonucleotide
  Antisense strand to SEQ ID NO: 292922
ucuuagagcaaucauuugg

SEQ ID NO: 292924 - RNA, 19 nt, Artificial Sequence
  Description of Artificial Sequence: Synthetic oligonucleotide
  Sense strand starting at position 1214 of SEQ ID NO: 3765
gggauucuucuccgguuca

SEQ ID NO: 292925 - RNA, 19 nt, Artificial Sequence
  Description of Artificial Sequence: Synthetic oligonucleotide
  Antisense strand to SEQ ID NO: 292924
ugaaccggagaagaauccc

SEQ ID NO: 292926 - RNA, 19 nt, Artificial Sequence
  Description of Artificial Sequence: Synthetic oligonucleotide
  Sense strand starting at position 1396 of SEQ ID NO: 3765
gcgagauaucaucagacuc

SEQ ID NO: 292927 - RNA, 19 nt, Artificial Sequence
  Description of Artificial Sequence: Synthetic oligonucleotide
  Antisense strand to SEQ ID NO: 292926
gagucugaugauaucucgc

SEQ ID NO: 292928 - RNA, 19 nt, Artificial Sequence
  Description of Artificial Sequence: Synthetic oligonucleotide
  Sense strand starting at position 2139 of SEQ ID NO: 3765
gugagugauuugccuaagu

SEQ ID NO: 292929 - RNA, 19 nt, Artificial Sequence
  Description of Artificial Sequence: Synthetic oligonucleotide
  Antisense strand to SEQ ID NO: 292928
acuuaggcaaaucacucac

SEQ ID NO: 292930 - RNA, 19 nt, Artificial Sequence
  Description of Artificial Sequence: Synthetic oligonucleotide
  Sense strand starting at position 2502 of SEQ ID NO: 3765
ggaaggguuguccggguaa

SEQ ID NO: 292931 - RNA, 19 nt, Artificial Sequence
  Description of Artificial Sequence: Synthetic oligonucleotide
  Antisense strand to SEQ ID NO: 292930
uuacccggacaacccuucc

SEQ ID NO: 292932 - RNA, 19 nt, Artificial Sequence
  Description of Artificial Sequence: Synthetic oligonucleotide
  Sense strand starting at position 2892 of SEQ ID NO: 3765
ccguguuaaccuuguauuu

SEQ ID NO: 292933 - RNA, 19 nt, Artificial Sequence
  Description of Artificial Sequence: Synthetic oligonucleotide
  Antisense strand to SEQ ID NO: 292932
aaauacaagguuaacacgg

SEQ ID NO: 292934 - RNA, 19 nt, Artificial Sequence
  Description of Artificial Sequence: Synthetic oligonucleotide
  Sense strand starting at position 2912 of SEQ ID NO: 3765
ggauauaguucuguuauag

SEQ ID NO: 292935 - RNA, 19 nt, Artificial Sequence
  Description of Artificial Sequence: Synthetic oligonucleotide
  Antisense strand to SEQ ID NO: 292934
cuauaacagaacuauaucc

SEQ ID NO: 292936 - RNA, 19 nt, Artificial Sequence
  Description of Artificial Sequence: Synthetic oligonucleotide
  Sense strand starting at position 2976 of SEQ ID NO: 3765
cacgguaaccuagagugua

SEQ ID NO: 292937 - RNA, 19 nt, Artificial Sequence
  Description of Artificial Sequence: Synthetic oligonucleotide
  Antisense strand to SEQ ID NO: 292936
uacacucuagguuaccgug

SEQ ID NO: 292938 - RNA, 19 nt, Artificial Sequence
  Description of Artificial Sequence: Synthetic oligonucleotide
  Sense strand starting at position 3001 of SEQ ID NO: 3765
cuaaauaaacgucagaagu

SEQ ID NO: 292939 - RNA, 19 nt, Artificial Sequence
  Description of Artificial Sequence: Synthetic oligonucleotide
  Antisense strand to SEQ ID NO: 292938
acuucugacguuuauuuag

SEQ ID NO: 292940 - RNA, 19 nt, Artificial Sequence
  Description of Artificial Sequence: Synthetic oligonucleotide
  Sense strand starting at position 3011 of SEQ ID NO: 3765
gucagaaguaaugaagucu

SEQ ID NO: 292941 - RNA, 19 nt, Artificial Sequence
  Description of Artificial Sequence: Synthetic oligonucleotide
  Antisense strand to SEQ ID NO: 292940
agacuucauuacuucugac

SEQ ID NO: 292942 - RNA, 19 nt, Artificial Sequence
  Description of Artificial Sequence: Synthetic oligonucleotide
  Sense strand starting at position 3105 of SEQ ID NO: 3765
ugaauaugcugaccuaaca

SEQ ID NO: 292943 - RNA, 19 nt, Artificial Sequence
  Description of Artificial Sequence: Synthetic oligonucleotide
  Antisense strand to SEQ ID NO: 292942
uguuaggucagcauauuca

SEQ ID NO: 292944 - RNA, 19 nt, Artificial Sequence
  Description of Artificial Sequence: Synthetic oligonucleotide
  Sense strand starting at position 3309 of SEQ ID NO: 3765
ggcccuugccauggaucaa

SEQ ID NO: 292945 - RNA, 19 nt, Artificial Sequence
  Description of Artificial Sequence: Synthetic oligonucleotide
  Antisense strand to SEQ ID NO: 292944
uugauccauggcaagggcc

SEQ ID NO: 292946 - RNA, 19 nt, Artificial Sequence
  Description of Artificial Sequence: Synthetic oligonucleotide
  Sense strand starting at position 3371 of SEQ ID NO: 3765
uguuguaaccaaugggaaa

SEQ ID NO: 292947 - RNA, 19 nt, Artificial Sequence
  Description of Artificial Sequence: Synthetic oligonucleotide
  Antisense strand to SEQ ID NO: 292946
uuucccauugguuacaaca

SEQ ID NO: 292948 - RNA, 19 nt, Artificial Sequence
  Description of Artificial Sequence: Synthetic oligonucleotide
  Sense strand starting at position 3372 of SEQ ID NO: 3765
guuguaaccaaugggaaac

SEQ ID NO: 292949 - RNA, 19 nt, Artificial Sequence
  Description of Artificial Sequence: Synthetic oligonucleotide
  Antisense strand to SEQ ID NO: 292948
guuucccauugguuacaac

SEQ ID NO: 292950 - RNA, 19 nt, Artificial Sequence
  Description of Artificial Sequence: Synthetic oligonucleotide
  Sense strand starting at position 3427 of SEQ ID NO: 3765
caggaaccguuccuugauu

SEQ ID NO: 292951 - RNA, 19 nt, Artificial Sequence
  Description of Artificial Sequence: Synthetic oligonucleotide
  Antisense strand to SEQ ID NO: 292950
aaucaaggaacgguuccug

SEQ ID NO: 292952 - RNA, 19 nt, Artificial Sequence
  Description of Artificial Sequence: Synthetic oligonucleotide
  Sense strand starting at position 3432 of SEQ ID NO: 3765
accguuccuugauuccuaa

SEQ ID NO: 292953 - RNA, 19 nt, Artificial Sequence
  Description of Artificial Sequence: Synthetic oligonucleotide
  Antisense strand to SEQ ID NO: 292952
uuaggaaucaaggaacggu

SEQ ID NO: 292954 - RNA, 19 nt, Artificial Sequence
  Description of Artificial Sequence: Synthetic oligonucleotide
  Sense strand starting at position 3532 of SEQ ID NO: 3765
cuacuaaggucuuuaaaug

SEQ ID NO: 292955 - RNA, 19 nt, Artificial Sequence
  Description of Artificial Sequence: Synthetic oligonucleotide
  Antisense strand to SEQ ID NO: 292954
cauuuaaagaccuuaguag

SEQ ID NO: 292956 - RNA, 19 nt, Artificial Sequence
  Description of Artificial Sequence: Synthetic oligonucleotide
  Sense strand starting at position 3552 of SEQ ID NO: 3765
agggcuugaucuuccauua

SEQ ID NO: 292957 - RNA, 19 nt, Artificial Sequence
  Description of Artificial Sequence: Synthetic oligonucleotide
  Antisense strand to SEQ ID NO: 292956
uaauggaagaucaagcccu

SEQ ID NO: 292958 - RNA, 19 nt, Artificial Sequence
  Description of Artificial Sequence: Synthetic oligonucleotide
  Sense strand starting at position 3557 of SEQ ID NO: 3765
uugaucuuccauuauugua

SEQ ID NO: 292959 - RNA, 19 nt, Artificial Sequence
  Description of Artificial Sequence: Synthetic oligonucleotide
  Antisense strand to SEQ ID NO: 292958
uacaauaauggaagaucaa

SEQ ID NO: 292960 - RNA, 19 nt, Artificial Sequence
  Description of Artificial Sequence: Synthetic oligonucleotide
  Sense strand starting at position 3627 of SEQ ID NO: 3765
uuuauugauaaacgugaag

SEQ ID NO: 292961 - RNA, 19 nt, Artificial Sequence
  Description of Artificial Sequence: Synthetic oligonucleotide
  Antisense strand to SEQ ID NO: 292960
cuucacguuuaucaauaaa

SEQ ID NO: 292962 - RNA, 19 nt, Artificial Sequence
  Description of Artificial Sequence: Synthetic oligonucleotide
  Sense strand starting at position 3630 of SEQ ID NO: 3765
auugauaaacgugaaguau

SEQ ID NO: 292963 - RNA, 19 nt, Artificial Sequence
  Description of Artificial Sequence: Synthetic oligonucleotide
  Antisense strand to SEQ ID NO: 292962
auacuucacguuuaucaau

SEQ ID NO: 292964 - RNA, 19 nt, Artificial Sequence
  Description of Artificial Sequence: Synthetic oligonucleotide
  Sense strand starting at position 3641 of SEQ ID NO: 3765
ugaaguaugccucaacguu

SEQ ID NO: 292965 - RNA, 19 nt, Artificial Sequence
  Description of Artificial Sequence: Synthetic oligonucleotide
  Antisense strand to SEQ ID NO: 292964
aacguugaggcauacuuca

SEQ ID NO: 292966 - RNA, 19 nt, Artificial Sequence
  Description of Artificial Sequence: Synthetic oligonucleotide
  Sense strand starting at position 3708 of SEQ ID NO: 3765
cagcauuaguuacugagau

SEQ ID NO: 292967 - RNA, 19 nt, Artificial Sequence
  Description of Artificial Sequence: Synthetic oligonucleotide
  Antisense strand to SEQ ID NO: 292966
aucucaguaacuaaugcug

SEQ ID NO: 292968 - RNA, 19 nt, Artificial Sequence
  Description of Artificial Sequence: Synthetic oligonucleotide
  Sense strand starting at position 3718 of SEQ ID NO: 3765
uacugagauuaugugguaa

SEQ ID NO: 292969 - RNA, 19 nt, Artificial Sequence
  Description of Artificial Sequence: Synthetic oligonucleotide
  Antisense strand to SEQ ID NO: 292968
uuaccacauaaucucagua

SEQ ID NO: 292970 - RNA, 19 nt, Artificial Sequence
  Description of Artificial Sequence: Synthetic oligonucleotide
  Sense strand starting at position 3778 of SEQ ID NO: 3765
uuuaccagucuuuauauga

SEQ ID NO: 292971 - RNA, 19 nt, Artificial Sequence
  Description of Artificial Sequence: Synthetic oligonucleotide
  Antisense strand to SEQ ID NO: 292970
ucauauaaagacugguaaa

SEQ ID NO: 292972 - RNA, 19 nt, Artificial Sequence
  Description of Artificial Sequence: Synthetic oligonucleotide
  Sense strand starting at position 33 of SEQ ID NO: 3766
aggagaaucgcuugagaga

SEQ ID NO: 292973 - RNA, 19 nt, Artificial Sequence
  Description of Artificial Sequence: Synthetic oligonucleotide
  Antisense strand to SEQ ID NO: 292972
ucucucaagcgauucuccu

SEQ ID NO: 292974 - RNA, 19 nt, Artificial Sequence
  Description of Artificial Sequence: Synthetic oligonucleotide
  Sense strand starting at position 207 of SEQ ID NO: 3766
uaccgaguuggacaucuua

SEQ ID NO: 292975 - RNA, 19 nt, Artificial Sequence
  Description of Artificial Sequence: Synthetic oligonucleotide
  Antisense strand to SEQ ID NO: 292974
uaagauguccaacucggua

SEQ ID NO: 292976 - RNA, 19 nt, Artificial Sequence
  Description of Artificial Sequence: Synthetic oligonucleotide
  Sense strand starting at position 504 of SEQ ID NO: 3766
gggauuaaauacuuaguau

SEQ ID NO: 292977 - RNA, 19 nt, Artificial Sequence
  Description of Artificial Sequence: Synthetic oligonucleotide
  Antisense strand to SEQ ID NO: 292976
auacuaaguauuuaauccc

SEQ ID NO: 292978 - RNA, 19 nt, Artificial Sequence
  Description of Artificial Sequence: Synthetic oligonucleotide
  Sense strand starting at position 570 of SEQ ID NO: 3766
acaccuucuguagaaguga

SEQ ID NO: 292979 - RNA, 19 nt, Artificial Sequence
  Description of Artificial Sequence: Synthetic oligonucleotide
  Antisense strand to SEQ ID NO: 292978
ucacuucuacagaaggugu

SEQ ID NO: 292980 - RNA, 19 nt, Artificial Sequence
  Description of Artificial Sequence: Synthetic oligonucleotide
  Sense strand starting at position 803 of SEQ ID NO: 3766
gucccaacuugcuuagauu

SEQ ID NO: 292981 - RNA, 19 nt, Artificial Sequence
  Description of Artificial Sequence: Synthetic oligonucleotide
  Antisense strand to SEQ ID NO: 292980
aaucuaagcaaguugggac

SEQ ID NO: 292982 - RNA, 19 nt, Artificial Sequence
  Description of Artificial Sequence: Synthetic oligonucleotide
  Sense strand starting at position 874 of SEQ ID NO: 3766
gcagacuacagauguaugu

SEQ ID NO: 292983 - RNA, 19 nt, Artificial Sequence
  Description of Artificial Sequence: Synthetic oligonucleotide
  Antisense strand to SEQ ID NO: 292982
acauacaucuguagucugc

SEQ ID NO: 292984 - RNA, 19 nt, Artificial Sequence
  Description of Artificial Sequence: Synthetic oligonucleotide
  Sense strand starting at position 1050 of SEQ ID NO: 3766
uuguacuagacguauaaug

SEQ ID NO: 292985 - RNA, 19 nt, Artificial Sequence
  Description of Artificial Sequence: Synthetic oligonucleotide
  Antisense strand to SEQ ID NO: 292984
cauuauacgucuaguacaa

SEQ ID NO: 292986 - RNA, 19 nt, Artificial Sequence
  Description of Artificial Sequence: Synthetic oligonucleotide
  Sense strand starting at position 1052 of SEQ ID NO: 3766
guacuagacguauaaugga

SEQ ID NO: 292987 - RNA, 19 nt, Artificial Sequence
  Description of Artificial Sequence: Synthetic oligonucleotide
  Antisense strand to SEQ ID NO: 292986
uccauuauacgucuaguac

SEQ ID NO: 292988 - RNA, 19 nt, Artificial Sequence
  Description of Artificial Sequence: Synthetic oligonucleotide
  Sense strand starting at position 1194 of SEQ ID NO: 3766
ggaguccaauccuuaagag

SEQ ID NO: 292989 - RNA, 19 nt, Artificial Sequence
  Description of Artificial Sequence: Synthetic oligonucleotide
  Antisense strand to SEQ ID NO: 292988
cucuuaaggauuggacucc

SEQ ID NO: 292990 - RNA, 19 nt, Artificial Sequence
  Description of Artificial Sequence: Synthetic oligonucleotide
  Sense strand starting at position 1235 of SEQ ID NO: 3766
cucggucuccgaggauaag

SEQ ID NO: 292991 - RNA, 19 nt, Artificial Sequence
  Description of Artificial Sequence: Synthetic oligonucleotide
  Antisense strand to SEQ ID NO: 292990
cuuauccucggagaccgag

SEQ ID NO: 292992 - RNA, 19 nt, Artificial Sequence
  Description of Artificial Sequence: Synthetic oligonucleotide
  Sense strand starting at position 1236 of SEQ ID NO: 3766
ucggucuccgaggauaagu

SEQ ID NO: 292993 - RNA, 19 nt, Artificial Sequence
  Description of Artificial Sequence: Synthetic oligonucleotide
  Antisense strand to SEQ ID NO: 292992
acuuauccucggagaccga

SEQ ID NO: 292994 - RNA, 19 nt, Artificial Sequence
  Description of Artificial Sequence: Synthetic oligonucleotide
  Sense strand starting at position 1244 of SEQ ID NO: 3766
cgaggauaaguccagucaa

SEQ ID NO: 292995 - RNA, 19 nt, Artificial Sequence
  Description of Artificial Sequence: Synthetic oligonucleotide
  Antisense strand to SEQ ID NO: 292994
uugacuggacuuauccucg

SEQ ID NO: 292996 - RNA, 19 nt, Artificial Sequence
  Description of Artificial Sequence: Synthetic oligonucleotide
  Sense strand starting at position 1312 of SEQ ID NO: 3766
cgcgcugucccgaaggagu

SEQ ID NO: 292997 - RNA, 19 nt, Artificial Sequence
  Description of Artificial Sequence: Synthetic oligonucleotide
  Antisense strand to SEQ ID NO: 292996
acuccuucgggacagcgcg

SEQ ID NO: 292998 - RNA, 19 nt, Artificial Sequence
  Description of Artificial Sequence: Synthetic oligonucleotide
  Sense strand starting at position 1622 of SEQ ID NO: 3766
acucuuaggagacgguaaa

SEQ ID NO: 292999 - RNA, 19 nt, Artificial Sequence
  Description of Artificial Sequence: Synthetic oligonucleotide
  Antisense strand to SEQ ID NO: 292998
uuuaccgucuccuaagagu

SEQ ID NO: 293000 - RNA, 19 nt, Artificial Sequence
  Description of Artificial Sequence: Synthetic oligonucleotide
  Sense strand starting at position 2040 of SEQ ID NO: 3766
gaguacuucggcgagacuu

SEQ ID NO: 293001 - RNA, 19 nt, Artificial Sequence
  Description of Artificial Sequence: Synthetic oligonucleotide
  Antisense strand to SEQ ID NO: 293000
aagucucgccgaaguacuc

SEQ ID NO: 293002 - RNA, 19 nt, Artificial Sequence
  Description of Artificial Sequence: Synthetic oligonucleotide
  Sense strand starting at position 2243 of SEQ ID NO: 3766
ggaacuuagcucugaggaa

SEQ ID NO: 293003 - RNA, 19 nt, Artificial Sequence
  Description of Artificial Sequence: Synthetic oligonucleotide
  Antisense strand to SEQ ID NO: 293002
uuccucagagcuaaguucc

SEQ ID NO: 293004 - RNA, 19 nt, Artificial Sequence
  Description of Artificial Sequence: Synthetic oligonucleotide
  Sense strand starting at position 2279 of SEQ ID NO: 3766
ggaaguacguagccuugaa

SEQ ID NO: 293005 - RNA, 19 nt, Artificial Sequence
  Description of Artificial Sequence: Synthetic oligonucleotide
  Antisense strand to SEQ ID NO: 293004
uucaaggcuacguacuucc

SEQ ID NO: 293006 - RNA, 19 nt, Artificial Sequence
  Description of Artificial Sequence: Synthetic oligonucleotide
  Sense strand starting at position 2387 of SEQ ID NO: 3766
guuuaaaccuuucugugaa

SEQ ID NO: 293007 - RNA, 19 nt, Artificial Sequence
  Description of Artificial Sequence: Synthetic oligonucleotide
  Antisense strand to SEQ ID NO: 293006
uucacagaaagguuuaaac

SEQ ID NO: 293008 - RNA, 19 nt, Artificial Sequence
  Description of Artificial Sequence: Synthetic oligonucleotide
  Sense strand starting at position 2418 of SEQ ID NO: 3766
gcccuuucugccgaaugga

SEQ ID NO: 293009 - RNA, 19 nt, Artificial Sequence
  Description of Artificial Sequence: Synthetic oligonucleotide
  Antisense strand to SEQ ID NO: 293008
uccauucggcagaaagggc

SEQ ID NO: 293010 - RNA, 19 nt, Artificial Sequence
  Description of Artificial Sequence: Synthetic oligonucleotide
  Sense strand starting at position 2456 of SEQ ID NO: 3766
uggagucugcuacaauuaa

SEQ ID NO: 293011 - RNA, 19 nt, Artificial Sequence
  Description of Artificial Sequence: Synthetic oligonucleotide
  Antisense strand to SEQ ID NO: 293010
uuaauuguagcagacucca

SEQ ID NO: 293012 - RNA, 19 nt, Artificial Sequence
  Description of Artificial Sequence: Synthetic oligonucleotide
  Sense strand starting at position 2475 of SEQ ID NO: 3766
gcaucuaaccaggaauugu

SEQ ID NO: 293013 - RNA, 19 nt, Artificial Sequence
  Description of Artificial Sequence: Synthetic oligonucleotide
  Antisense strand to SEQ ID NO: 293012
acaauuccugguuagaugc

SEQ ID NO: 293014 - RNA, 19 nt, Artificial Sequence
  Description of Artificial Sequence: Synthetic oligonucleotide
  Sense strand starting at position 2485 of SEQ ID NO: 3766
aggaauugucuauggacac

SEQ ID NO: 293015 - RNA, 19 nt, Artificial Sequence
  Description of Artificial Sequence: Synthetic oligonucleotide
  Antisense strand to SEQ ID NO: 293014
guguccauagacaauuccu

SEQ ID NO: 293016 - RNA, 19 nt, Artificial Sequence
  Description of Artificial Sequence: Synthetic oligonucleotide
  Sense strand starting at position 2641 of SEQ ID NO: 3766
guuuguaaccuuggaaagu

SEQ ID NO: 293017 - RNA, 19 nt, Artificial Sequence
  Description of Artificial Sequence: Synthetic oligonucleotide
  Antisense strand to SEQ ID NO: 293016
acuuuccaagguuacaaac

SEQ ID NO: 293018 - RNA, 19 nt, Artificial Sequence
  Description of Artificial Sequence: Synthetic oligonucleotide
  Sense strand starting at position 2654 of SEQ ID NO: 3766
gaaaguaagucugcuauga

SEQ ID NO: 293019 - RNA, 19 nt, Artificial Sequence
  Description of Artificial Sequence: Synthetic oligonucleotide
  Antisense strand to SEQ ID NO: 293018
ucauagcagacuuacuuuc

SEQ ID NO: 293020 - RNA, 19 nt, Artificial Sequence
  Description of Artificial Sequence: Synthetic oligonucleotide
  Sense strand starting at position 2658 of SEQ ID NO: 3766
guaagucugcuaugauaag

SEQ ID NO: 293021 - RNA, 19 nt, Artificial Sequence
  Description of Artificial Sequence: Synthetic oligonucleotide
  Antisense strand to SEQ ID NO: 293020
cuuaucauagcagacuuac

SEQ ID NO: 293022 - RNA, 19 nt, Artificial Sequence
  Description of Artificial Sequence: Synthetic oligonucleotide
  Sense strand starting at position 2692 of SEQ ID NO: 3766
gggagcuacuuuccuaaca

SEQ ID NO: 293023 - RNA, 19 nt, Artificial Sequence
  Description of Artificial Sequence: Synthetic oligonucleotide
  Antisense strand to SEQ ID NO: 293022
uguuaggaaaguagcuccc

SEQ ID NO: 293024 - RNA, 19 nt, Artificial Sequence
  Description of Artificial Sequence: Synthetic oligonucleotide
  Sense strand starting at position 2693 of SEQ ID NO: 3766
ggagcuacuuuccuaacau

SEQ ID NO: 293025 - RNA, 19 nt, Artificial Sequence
  Description of Artificial Sequence: Synthetic oligonucleotide
  Antisense strand to SEQ ID NO: 293024
auguuaggaaaguagcucc

SEQ ID NO: 293026 - RNA, 19 nt, Artificial Sequence
  Description of Artificial Sequence: Synthetic oligonucleotide
  Sense strand starting at position 2705 of SEQ ID NO: 3766
cuaacauaucugugauugu

SEQ ID NO: 293027 - RNA, 19 nt, Artificial Sequence
  Description of Artificial Sequence: Synthetic oligonucleotide
  Antisense strand to SEQ ID NO: 293026
acaaucacagauauguuag

SEQ ID NO: 293028 - RNA, 19 nt, Artificial Sequence
  Description of Artificial Sequence: Synthetic oligonucleotide
  Sense strand starting at position 2798 of SEQ ID NO: 3766
aggaauucucucugcauug

SEQ ID NO: 293029 - RNA, 19 nt, Artificial Sequence
  Description of Artificial Sequence: Synthetic oligonucleotide
  Antisense strand to SEQ ID NO: 293028
caaugcagagagaauuccu

SEQ ID NO: 293030 - RNA, 19 nt, Artificial Sequence
  Description of Artificial Sequence: Synthetic oligonucleotide
  Sense strand starting at position 2799 of SEQ ID NO: 3766
ggaauucucucugcauuga

SEQ ID NO: 293031 - RNA, 19 nt, Artificial Sequence
  Description of Artificial Sequence: Synthetic oligonucleotide
  Antisense strand to SEQ ID NO: 293030
ucaaugcagagagaauucc

SEQ ID NO: 293032 - RNA, 19 nt, Artificial Sequence
  Description of Artificial Sequence: Synthetic oligonucleotide
  Sense strand starting at position 2890 of SEQ ID NO: 3766
cagcucacucuugguagaa

SEQ ID NO: 293033 - RNA, 19 nt, Artificial Sequence
  Description of Artificial Sequence: Synthetic oligonucleotide
  Antisense strand to SEQ ID NO: 293032
uucuaccaagagugagcug

SEQ ID NO: 293034 - RNA, 19 nt, Artificial Sequence
  Description of Artificial Sequence: Synthetic oligonucleotide
  Sense strand starting at position 2891 of SEQ ID NO: 3766
agcucacucuugguagaau

SEQ ID NO: 293035 - RNA, 19 nt, Artificial Sequence
  Description of Artificial Sequence: Synthetic oligonucleotide
  Antisense strand to SEQ ID NO: 293034
auucuaccaagagugagcu

SEQ ID NO: 293036 - RNA, 19 nt, Artificial Sequence
  Description of Artificial Sequence: Synthetic oligonucleotide
  Sense strand starting at position 2900 of SEQ ID NO: 3766
uugguagaaucccuuuauu

SEQ ID NO: 293037 - RNA, 19 nt, Artificial Sequence
  Description of Artificial Sequence: Synthetic oligonucleotide
  Antisense strand to SEQ ID NO: 293036
aauaaagggauucuaccaa

SEQ ID NO: 293038 - RNA, 19 nt, Artificial Sequence
  Description of Artificial Sequence: Synthetic oligonucleotide
  Sense strand starting at position 2903 of SEQ ID NO: 3766
guagaaucccuuuauucgu

SEQ ID NO: 293039 - RNA, 19 nt, Artificial Sequence
  Description of Artificial Sequence: Synthetic oligonucleotide
  Antisense strand to SEQ ID NO: 293038
acgaauaaagggauucuac

SEQ ID NO: 293040 - RNA, 19 nt, Artificial Sequence
  Description of Artificial Sequence: Synthetic oligonucleotide
  Sense strand starting at position 3134 of SEQ ID NO: 3766
auuagccugaucggugaaa

SEQ ID NO: 293041 - RNA, 19 nt, Artificial Sequence
  Description of Artificial Sequence: Synthetic oligonucleotide
  Antisense strand to SEQ ID NO: 293040
uuucaccgaucaggcuaau

SEQ ID NO: 293042 - RNA, 19 nt, Artificial Sequence
  Description of Artificial Sequence: Synthetic oligonucleotide
  Sense strand starting at position 3192 of SEQ ID NO: 3766
gggaguuguagucauaacu

SEQ ID NO: 293043 - RNA, 19 nt, Artificial Sequence
  Description of Artificial Sequence: Synthetic oligonucleotide
  Antisense strand to SEQ ID NO: 293042
aguuaugacuacaacuccc

SEQ ID NO: 293044 - RNA, 19 nt, Artificial Sequence
  Description of Artificial Sequence: Synthetic oligonucleotide
  Sense strand starting at position 3632 of SEQ ID NO: 3766
uggcguuugggauagggaa

SEQ ID NO: 293045 - RNA, 19 nt, Artificial Sequence
  Description of Artificial Sequence: Synthetic oligonucleotide
  Antisense strand to SEQ ID NO: 293044
uucccuaucccaaacgcca

SEQ ID NO: 293046 - RNA, 19 nt, Artificial Sequence
  Description of Artificial Sequence: Synthetic oligonucleotide
  Sense strand starting at position 3634 of SEQ ID NO: 3766
gcguuugggauagggaaua

SEQ ID NO: 293047 - RNA, 19 nt, Artificial Sequence
  Description of Artificial Sequence: Synthetic oligonucleotide
  Antisense strand to SEQ ID NO: 293046
uauucccuaucccaaacgc

SEQ ID NO: 293048 - RNA, 19 nt, Artificial Sequence
  Description of Artificial Sequence: Synthetic oligonucleotide
  Sense strand starting at position 3748 of SEQ ID NO: 3766
gggcucagugcuuauccaa

SEQ ID NO: 293049 - RNA, 19 nt, Artificial Sequence
  Description of Artificial Sequence: Synthetic oligonucleotide
  Antisense strand to SEQ ID NO: 293048
uuggauaagcacugagccc

SEQ ID NO: 293050 - RNA, 19 nt, Artificial Sequence
  Description of Artificial Sequence: Synthetic oligonucleotide
  Sense strand starting at position 3816 of SEQ ID NO: 3766
ucaggcagucaucaaaguu

SEQ ID NO: 293051 - RNA, 19 nt, Artificial Sequence
  Description of Artificial Sequence: Synthetic oligonucleotide
  Antisense strand to SEQ ID NO: 293050
aacuuugaugacugccuga

SEQ ID NO: 293052 - RNA, 19 nt, Artificial Sequence
  Description of Artificial Sequence: Synthetic oligonucleotide
  Sense strand starting at position 163 of SEQ ID NO: 3767
agagauuacagacgugagu

SEQ ID NO: 293053 - RNA, 19 nt, Artificial Sequence
  Description of Artificial Sequence: Synthetic oligonucleotide
  Antisense strand to SEQ ID NO: 293052
acucacgucuguaaucucu

SEQ ID NO: 293054 - RNA, 19 nt, Artificial Sequence
  Description of Artificial Sequence: Synthetic oligonucleotide
  Sense strand starting at position 867 of SEQ ID NO: 3767
uaaggcacuuggucaagaa

SEQ ID NO: 293055 - RNA, 19 nt, Artificial Sequence
  Description of Artificial Sequence: Synthetic oligonucleotide
  Antisense strand to SEQ ID NO: 293054
uucuugaccaagugccuua

SEQ ID NO: 293056 - RNA, 19 nt, Artificial Sequence
  Description of Artificial Sequence: Synthetic oligonucleotide
  Sense strand starting at position 917 of SEQ ID NO: 3767
gcauuaaacuguggacugu

SEQ ID NO: 293057 - RNA, 19 nt, Artificial Sequence
  Description of Artificial Sequence: Synthetic oligonucleotide
  Antisense strand to SEQ ID NO: 293056
acaguccacaguuuaaugc

SEQ ID NO: 293058 - RNA, 19 nt, Artificial Sequence
  Description of Artificial Sequence: Synthetic oligonucleotide
  Sense strand starting at position 926 of SEQ ID NO: 3767
uguggacuguucgguaagu

SEQ ID NO: 293059 - RNA, 19 nt, Artificial Sequence
  Description of Artificial Sequence: Synthetic oligonucleotide
  Antisense strand to SEQ ID NO: 293058
acuuaccgaacaguccaca

SEQ ID NO: 293060 - RNA, 19 nt, Artificial Sequence
  Description of Artificial Sequence: Synthetic oligonucleotide
  Sense strand starting at position 937 of SEQ ID NO: 3767
cgguaagugcggagcucua

SEQ ID NO: 293061 - RNA, 19 nt, Artificial Sequence
  Description of Artificial Sequence: Synthetic oligonucleotide
  Antisense strand to SEQ ID NO: 293060
uagagcuccgcacuuaccg

SEQ ID NO: 293062 - RNA, 19 nt, Artificial Sequence
  Description of Artificial Sequence: Synthetic oligonucleotide
  Sense strand starting at position 948 of SEQ ID NO: 3767
gagcucuagagacgaugaa

SEQ ID NO: 293063 - RNA, 19 nt, Artificial Sequence
  Description of Artificial Sequence: Synthetic oligonucleotide
  Antisense strand to SEQ ID NO: 293062
uucaucgucucuagagcuc

SEQ ID NO: 293064 - RNA, 19 nt, Artificial Sequence
  Description of Artificial Sequence: Synthetic oligonucleotide
  Sense strand starting at position 970 of SEQ ID NO: 3767
gagagcaucucugcucaga

SEQ ID NO: 293065 - RNA, 19 nt, Artificial Sequence
  Description of Artificial Sequence: Synthetic oligonucleotide
  Antisense strand to SEQ ID NO: 293064
ucugagcagagaugcucuc

SEQ ID NO: 293066 - RNA, 19 nt, Artificial Sequence
  Description of Artificial Sequence: Synthetic oligonucleotide
  Sense strand starting at position 972 of SEQ ID NO: 3767
gagcaucucugcucagaag

SEQ ID NO: 293067 - RNA, 19 nt, Artificial Sequence
  Description of Artificial Sequence: Synthetic oligonucleotide
  Antisense strand to SEQ ID NO: 293066
cuucugagcagagaugcuc

SEQ ID NO: 293068 - RNA, 19 nt, Artificial Sequence
  Description of Artificial Sequence: Synthetic oligonucleotide
  Sense strand starting at position 973 of SEQ ID NO: 3767
agcaucucugcucagaaga

SEQ ID NO: 293069 - RNA, 19 nt, Artificial Sequence
  Description of Artificial Sequence: Synthetic oligonucleotide
  Antisense strand to SEQ ID NO: 293068
ucuucugagcagagaugcu

SEQ ID NO: 293070 - RNA, 19 nt, Artificial Sequence
  Description of Artificial Sequence: Synthetic oligonucleotide
  Sense strand starting at position 1273 of SEQ ID NO: 3767
cgcuaaucauuccaagcaa

SEQ ID NO: 293071 - RNA, 19 nt, Artificial Sequence
  Description of Artificial Sequence: Synthetic oligonucleotide
  Antisense strand to SEQ ID NO: 293070
uugcuuggaaugauuagcg

SEQ ID NO: 293072 - RNA, 19 nt, Artificial Sequence
  Description of Artificial Sequence: Synthetic oligonucleotide
  Sense strand starting at position 1287 of SEQ ID NO: 3767
agcaaauucugucaugcca

SEQ ID NO: 293073 - RNA, 19 nt, Artificial Sequence
  Description of Artificial Sequence: Synthetic oligonucleotide
  Antisense strand to SEQ ID NO: 293072
uggcaugacagaauuugcu

SEQ ID NO: 293074 - RNA, 19 nt, Artificial Sequence
  Description of Artificial Sequence: Synthetic oligonucleotide
  Sense strand starting at position 1788 of SEQ ID NO: 3767
cgucgcucgccucagagau

SEQ ID NO: 293075 - RNA, 19 nt, Artificial Sequence
  Description of Artificial Sequence: Synthetic oligonucleotide
  Antisense strand to SEQ ID NO: 293074
aucucugaggcgagcgacg

SEQ ID NO: 293076 - RNA, 19 nt, Artificial Sequence
  Description of Artificial Sequence: Synthetic oligonucleotide
  Sense strand starting at position 1789 of SEQ ID NO: 3767
gucgcucgccucagagaug

SEQ ID NO: 293077 - RNA, 19 nt, Artificial Sequence
  Description of Artificial Sequence: Synthetic oligonucleotide
  Antisense strand to SEQ ID NO: 293076
caucucugaggcgagcgac

SEQ ID NO: 293078 - RNA, 19 nt, Artificial Sequence
  Description of Artificial Sequence: Synthetic oligonucleotide
  Sense strand starting at position 1792 of SEQ ID NO: 3767
gcucgccucagagauggaa

SEQ ID NO: 293079 - RNA, 19 nt, Artificial Sequence
  Description of Artificial Sequence: Synthetic oligonucleotide
  Antisense strand to SEQ ID NO: 293078
uuccaucucugaggcgagc

SEQ ID NO: 293080 - RNA, 19 nt, Artificial Sequence
  Description of Artificial Sequence: Synthetic oligonucleotide
  Sense strand starting at position 1829 of SEQ ID NO: 3767
cgccgaaagucgucaucaa

SEQ ID NO: 293081 - RNA, 19 nt, Artificial Sequence
  Description of Artificial Sequence: Synthetic oligonucleotide
  Antisense strand to SEQ ID NO: 293080
uugaugacgacuuucggcg

SEQ ID NO: 293082 - RNA, 19 nt, Artificial Sequence
  Description of Artificial Sequence: Synthetic oligonucleotide
  Sense strand starting at position 1830 of SEQ ID NO: 3767
gccgaaagucgucaucaag

SEQ ID NO: 293083 - RNA, 19 nt, Artificial Sequence
  Description of Artificial Sequence: Synthetic oligonucleotide
  Antisense strand to SEQ ID NO: 293082
cuugaugacgacuuucggc

SEQ ID NO: 293084 - RNA, 19 nt, Artificial Sequence
  Description of Artificial Sequence: Synthetic oligonucleotide
  Sense strand starting at position 1986 of SEQ ID NO: 3767
gggagugguccuuagcuga

SEQ ID NO: 293085 - RNA, 19 nt, Artificial Sequence
  Description of Artificial Sequence: Synthetic oligonucleotide
  Antisense strand to SEQ ID NO: 293084
ucagcuaaggaccacuccc

SEQ ID NO: 293086 - RNA, 19 nt, Artificial Sequence
  Description of Artificial Sequence: Synthetic oligonucleotide
  Sense strand starting at position 2070 of SEQ ID NO: 3767
gcgcguaagcaguauuguu

SEQ ID NO: 293087 - RNA, 19 nt, Artificial Sequence
  Description of Artificial Sequence: Synthetic oligonucleotide
  Antisense strand to SEQ ID NO: 293086
aacaauacugcuuacgcgc

SEQ ID NO: 293088 - RNA, 19 nt, Artificial Sequence
  Description of Artificial Sequence: Synthetic oligonucleotide
  Sense strand starting at position 2072 of SEQ ID NO: 3767
gcguaagcaguauuguuga

SEQ ID NO: 293089 - RNA, 19 nt, Artificial Sequence
  Description of Artificial Sequence: Synthetic oligonucleotide
  Antisense strand to SEQ ID NO: 293088
ucaacaauacugcuuacgc

SEQ ID NO: 293090 - RNA, 19 nt, Artificial Sequence
  Description of Artificial Sequence: Synthetic oligonucleotide
  Sense strand starting at position 2077 of SEQ ID NO: 3767
agcaguauuguugauuagu

SEQ ID NO: 293091 - RNA, 19 nt, Artificial Sequence
  Description of Artificial Sequence: Synthetic oligonucleotide
  Antisense strand to SEQ ID NO: 293090
acuaaucaacaauacugcu

SEQ ID NO: 293092 - RNA, 19 nt, Artificial Sequence
  Description of Artificial Sequence: Synthetic oligonucleotide
  Sense strand starting at position 2162 of SEQ ID NO: 3767
auugcacgcuuucuugaaa

SEQ ID NO: 293093 - RNA, 19 nt, Artificial Sequence
  Description of Artificial Sequence: Synthetic oligonucleotide
  Antisense strand to SEQ ID NO: 293092
uuucaagaaagcgugcaau

SEQ ID NO: 293094 - RNA, 19 nt, Artificial Sequence
  Description of Artificial Sequence: Synthetic oligonucleotide
  Sense strand starting at position 2165 of SEQ ID NO: 3767
gcacgcuuucuugaaagag

SEQ ID NO: 293095 - RNA, 19 nt, Artificial Sequence
  Description of Artificial Sequence: Synthetic oligonucleotide
  Antisense strand to SEQ ID NO: 293094
cucuuucaagaaagcgugc

SEQ ID NO: 293096 - RNA, 19 nt, Artificial Sequence
  Description of Artificial Sequence: Synthetic oligonucleotide
  Sense strand starting at position 2169 of SEQ ID NO: 3767
gcuuucuugaaagaggcau

SEQ ID NO: 293097 - RNA, 19 nt, Artificial Sequence
  Description of Artificial Sequence: Synthetic oligonucleotide
  Antisense strand to SEQ ID NO: 293096
augccucuuucaagaaagc

SEQ ID NO: 293098 - RNA, 19 nt, Artificial Sequence
  Description of Artificial Sequence: Synthetic oligonucleotide
  Sense strand starting at position 3350 of SEQ ID NO: 3767
cgccuauaaucuuugggac

SEQ ID NO: 293099 - RNA, 19 nt, Artificial Sequence
  Description of Artificial Sequence: Synthetic oligonucleotide
  Antisense strand to SEQ ID NO: 293098
gucccaaagauuauaggcg

SEQ ID NO: 293100 - RNA, 19 nt, Artificial Sequence
  Description of Artificial Sequence: Synthetic oligonucleotide
  Sense strand starting at position 3464 of SEQ ID NO: 3767
cgaucucuguccuguggua

SEQ ID NO: 293101 - RNA, 19 nt, Artificial Sequence
  Description of Artificial Sequence: Synthetic oligonucleotide
  Antisense strand to SEQ ID NO: 293100
uaccacaggacagagaucg

SEQ ID NO: 293102 - RNA, 19 nt, Artificial Sequence
  Description of Artificial Sequence: Synthetic oligonucleotide
  Sense strand starting at position 3466 of SEQ ID NO: 3767
aucucuguccugugguaua

SEQ ID NO: 293103 - RNA, 19 nt, Artificial Sequence
  Description of Artificial Sequence: Synthetic oligonucleotide
  Antisense strand to SEQ ID NO: 293102
uauaccacaggacagagau

SEQ ID NO: 293104 - RNA, 19 nt, Artificial Sequence
  Description of Artificial Sequence: Synthetic oligonucleotide
  Sense strand starting at position 3587 of SEQ ID NO: 3767
agcuuucccucugaugacu

SEQ ID NO: 293105 - RNA, 19 nt, Artificial Sequence
  Description of Artificial Sequence: Synthetic oligonucleotide
  Antisense strand to SEQ ID NO: 293104
agucaucagagggaaagcu

SEQ ID NO: 293106 - RNA, 19 nt, Artificial Sequence
  Description of Artificial Sequence: Synthetic oligonucleotide
  Sense strand starting at position 36 of SEQ ID NO: 3768
acauguuaagagugguuau

SEQ ID NO: 293107 - RNA, 19 nt, Artificial Sequence
  Description of Artificial Sequence: Synthetic oligonucleotide
  Antisense strand to SEQ ID NO: 293106
auaaccacucuuaacaugu

SEQ ID NO: 293108 - RNA, 19 nt, Artificial Sequence
  Description of Artificial Sequence: Synthetic oligonucleotide
  Sense strand starting at position 47 of SEQ ID NO: 3768
gugguuaucgcugugugau

SEQ ID NO: 293109 - RNA, 19 nt, Artificial Sequence
  Description of Artificial Sequence: Synthetic oligonucleotide
  Antisense strand to SEQ ID NO: 293108
aucacacagcgauaaccac

SEQ ID NO: 293110 - RNA, 19 nt, Artificial Sequence
  Description of Artificial Sequence: Synthetic oligonucleotide
  Sense strand starting at position 55 of SEQ ID NO: 3768
cgcugugugaugucuuauc

SEQ ID NO: 293111 - RNA, 19 nt, Artificial Sequence
  Description of Artificial Sequence: Synthetic oligonucleotide
  Antisense strand to SEQ ID NO: 293110
gauaagacaucacacagcg

SEQ ID NO: 293112 - RNA, 19 nt, Artificial Sequence
  Description of Artificial Sequence: Synthetic oligonucleotide
  Sense strand starting at position 151 of SEQ ID NO: 3768
uggaacugauuggcuagau

SEQ ID NO: 293113 - RNA, 19 nt, Artificial Sequence
  Description of Artificial Sequence: Synthetic oligonucleotide
  Antisense strand to SEQ ID NO: 293112
aucuagccaaucaguucca

SEQ ID NO: 293114 - RNA, 19 nt, Artificial Sequence
  Description of Artificial Sequence: Synthetic oligonucleotide
  Sense strand starting at position 152 of SEQ ID NO: 3768
ggaacugauuggcuagauu

SEQ ID NO: 293115 - RNA, 19 nt, Artificial Sequence
  Description of Artificial Sequence: Synthetic oligonucleotide
  Antisense strand to SEQ ID NO: 293114
aaucuagccaaucaguucc

SEQ ID NO: 293116 - RNA, 19 nt, Artificial Sequence
  Description of Artificial Sequence: Synthetic oligonucleotide
  Sense strand starting at position 191 of SEQ ID NO: 3768
agcaaauggagauguucuu

SEQ ID NO: 293117 - RNA, 19 nt, Artificial Sequence
  Description of Artificial Sequence: Synthetic oligonucleotide
  Antisense strand to SEQ ID NO: 293116
aagaacaucuccauuugcu

SEQ ID NO: 293118 - RNA, 19 nt, Artificial Sequence
  Description of Artificial Sequence: Synthetic oligonucleotide
  Sense strand starting at position 476 of SEQ ID NO: 3768
acaagagaaugugaauacu

SEQ ID NO: 293119 - RNA, 19 nt, Artificial Sequence
  Description of Artificial Sequence: Synthetic oligonucleotide
  Antisense strand to SEQ ID NO: 293118
aguauucacauucucuugu

SEQ ID NO: 293120 - RNA, 19 nt, Artificial Sequence
  Description of Artificial Sequence: Synthetic oligonucleotide
  Sense strand starting at position 485 of SEQ ID NO: 3768
ugugaauacuaaucaaguu

SEQ ID NO: 293121 - RNA, 19 nt, Artificial Sequence
  Description of Artificial Sequence: Synthetic oligonucleotide
  Antisense strand to SEQ ID NO: 293120
aacuugauuaguauucaca

SEQ ID NO: 293122 - RNA, 19 nt, Artificial Sequence
  Description of Artificial Sequence: Synthetic oligonucleotide
  Sense strand starting at position 497 of SEQ ID NO: 3768
ucaaguuaucugugggaag

SEQ ID NO: 293123 - RNA, 19 nt, Artificial Sequence
  Description of Artificial Sequence: Synthetic oligonucleotide
  Antisense strand to SEQ ID NO: 293122
cuucccacagauaacuuga

SEQ ID NO: 293124 - RNA, 19 nt, Artificial Sequence
  Description of Artificial Sequence: Synthetic oligonucleotide
  Sense strand starting at position 499 of SEQ ID NO: 3768
aaguuaucugugggaagca

SEQ ID NO: 293125 - RNA, 19 nt, Artificial Sequence
  Description of Artificial Sequence: Synthetic oligonucleotide
  Antisense strand to SEQ ID NO: 293124
ugcuucccacagauaacuu

SEQ ID NO: 293126 - RNA, 19 nt, Artificial Sequence
  Description of Artificial Sequence: Synthetic oligonucleotide
  Sense strand starting at position 559 of SEQ ID NO: 3768
aagccuagguuaucagacu

SEQ ID NO: 293127 - RNA, 19 nt, Artificial Sequence
  Description of Artificial Sequence: Synthetic oligonucleotide
  Antisense strand to SEQ ID NO: 293126
agucugauaaccuaggcuu

SEQ ID NO: 293128 - RNA, 19 nt, Artificial Sequence
  Description of Artificial Sequence: Synthetic oligonucleotide
  Sense strand starting at position 640 of SEQ ID NO: 3768
auguaaucaccauguaggu

SEQ ID NO: 293129 - RNA, 19 nt, Artificial Sequence
  Description of Artificial Sequence: Synthetic oligonucleotide
  Antisense strand to SEQ ID NO: 293128
accuacauggugauuacau

SEQ ID NO: 293130 - RNA, 19 nt, Artificial Sequence
  Description of Artificial Sequence: Synthetic oligonucleotide
  Sense strand starting at position 649 of SEQ ID NO: 3768
ccauguagguuuguuuaaa

SEQ ID NO: 293131 - RNA, 19 nt, Artificial Sequence
  Description of Artificial Sequence: Synthetic oligonucleotide
  Antisense strand to SEQ ID NO: 293130
uuuaaacaaaccuacaugg

SEQ ID NO: 293132 - RNA, 19 nt, Artificial Sequence
  Description of Artificial Sequence: Synthetic oligonucleotide
  Sense strand starting at position 813 of SEQ ID NO: 3768
aguccugugcccuggagaa

SEQ ID NO: 293133 - RNA, 19 nt, Artificial Sequence
  Description of Artificial Sequence: Synthetic oligonucleotide
  Antisense strand to SEQ ID NO: 293132
uucuccagggcacaggacu

SEQ ID NO: 293134 - RNA, 19 nt, Artificial Sequence
  Description of Artificial Sequence: Synthetic oligonucleotide
  Sense strand starting at position 938 of SEQ ID NO: 3768
gucauauauuuauaggaug

SEQ ID NO: 293135 - RNA, 19 nt, Artificial Sequence
  Description of Artificial Sequence: Synthetic oligonucleotide
  Antisense strand to SEQ ID NO: 293134
cauccuauaaauauaugac

SEQ ID NO: 293136 - RNA, 19 nt, Artificial Sequence
  Description of Artificial Sequence: Synthetic oligonucleotide
  Sense strand starting at position 1000 of SEQ ID NO: 3768
cuauauggauagcucuaua

SEQ ID NO: 293137 - RNA, 19 nt, Artificial Sequence
  Description of Artificial Sequence: Synthetic oligonucleotide
  Antisense strand to SEQ ID NO: 293136
uauagagcuauccauauag

SEQ ID NO: 293138 - RNA, 19 nt, Artificial Sequence
  Description of Artificial Sequence: Synthetic oligonucleotide
  Sense strand starting at position 1089 of SEQ ID NO: 3768
aaacguguuguuuagggaa

SEQ ID NO: 293139 - RNA, 19 nt, Artificial Sequence
  Description of Artificial Sequence: Synthetic oligonucleotide
  Antisense strand to SEQ ID NO: 293138
uucccuaaacaacacguuu

SEQ ID NO: 293140 - RNA, 19 nt, Artificial Sequence
  Description of Artificial Sequence: Synthetic oligonucleotide
  Sense strand starting at position 1189 of SEQ ID NO: 3768
ccaucuuguuaagugcaga

SEQ ID NO: 293141 - RNA, 19 nt, Artificial Sequence
  Description of Artificial Sequence: Synthetic oligonucleotide
  Antisense strand to SEQ ID NO: 293140
ucugcacuuaacaagaugg

SEQ ID NO: 293142 - RNA, 19 nt, Artificial Sequence
  Description of Artificial Sequence: Synthetic oligonucleotide
  Sense strand starting at position 1192 of SEQ ID NO: 3768
ucuuguuaagugcagauau

SEQ ID NO: 293143 - RNA, 19 nt, Artificial Sequence
  Description of Artificial Sequence: Synthetic oligonucleotide
  Antisense strand to SEQ ID NO: 293142
auaucugcacuuaacaaga

SEQ ID NO: 293144 - RNA, 19 nt, Artificial Sequence
  Description of Artificial Sequence: Synthetic oligonucleotide
  Sense strand starting at position 1194 of SEQ ID NO: 3768
uuguuaagugcagauauau

SEQ ID NO: 293145 - RNA, 19 nt, Artificial Sequence
  Description of Artificial Sequence: Synthetic oligonucleotide
  Antisense strand to SEQ ID NO: 293144
auauaucugcacuuaacaa

SEQ ID NO: 293146 - RNA, 19 nt, Artificial Sequence
  Description of Artificial Sequence: Synthetic oligonucleotide
  Sense strand starting at position 1330 of SEQ ID NO: 3768
aguggauuccuggguuauu

SEQ ID NO: 293147 - RNA, 19 nt, Artificial Sequence
  Description of Artificial Sequence: Synthetic oligonucleotide
  Antisense strand to SEQ ID NO: 293146
aauaacccaggaauccacu

SEQ ID NO: 293148 - RNA, 19 nt, Artificial Sequence
  Description of Artificial Sequence: Synthetic oligonucleotide
  Sense strand starting at position 1331 of SEQ ID NO: 3768
guggauuccuggguuauuc

SEQ ID NO: 293149 - RNA, 19 nt, Artificial Sequence
  Description of Artificial Sequence: Synthetic oligonucleotide
  Antisense strand to SEQ ID NO: 293148
gaauaacccaggaauccac

SEQ ID NO: 293150 - RNA, 19 nt, Artificial Sequence
  Description of Artificial Sequence: Synthetic oligonucleotide
  Sense strand starting at position 1393 of SEQ ID NO: 3768
gcaauuacuuuaucuggua

SEQ ID NO: 293151 - RNA, 19 nt, Artificial Sequence
  Description of Artificial Sequence: Synthetic oligonucleotide
  Antisense strand to SEQ ID NO: 293150
uaccagauaaaguaauugc

SEQ ID NO: 293152 - RNA, 19 nt, Artificial Sequence
  Description of Artificial Sequence: Synthetic oligonucleotide
  Sense strand starting at position 1513 of SEQ ID NO: 3768
agccaaguuggccaguauu

SEQ ID NO: 293153 - RNA, 19 nt, Artificial Sequence
  Description of Artificial Sequence: Synthetic oligonucleotide
  Antisense strand to SEQ ID NO: 293152
aauacuggccaacuuggcu

SEQ ID NO: 293154 - RNA, 19 nt, Artificial Sequence
  Description of Artificial Sequence: Synthetic oligonucleotide
  Sense strand starting at position 1587 of SEQ ID NO: 3768
agcaaaucacacuggcaau

SEQ ID NO: 293155 - RNA, 19 nt, Artificial Sequence
  Description of Artificial Sequence: Synthetic oligonucleotide
  Antisense strand to SEQ ID NO: 293154
auugccagugugauuugcu

SEQ ID NO: 293156 - RNA, 19 nt, Artificial Sequence
  Description of Artificial Sequence: Synthetic oligonucleotide
  Sense strand starting at position 2232 of SEQ ID NO: 3768
agcagaagcuaucuguaug

SEQ ID NO: 293157 - RNA, 19 nt, Artificial Sequence
  Description of Artificial Sequence: Synthetic oligonucleotide
  Antisense strand to SEQ ID NO: 293156
cauacagauagcuucugcu

SEQ ID NO: 293158 - RNA, 19 nt, Artificial Sequence
  Description of Artificial Sequence: Synthetic oligonucleotide
  Sense strand starting at position 2256 of SEQ ID NO: 3768
aguucugaacugcaacaau

SEQ ID NO: 293159 - RNA, 19 nt, Artificial Sequence
  Description of Artificial Sequence: Synthetic oligonucleotide
  Antisense strand to SEQ ID NO: 293158
auuguugcaguucagaacu

SEQ ID NO: 293160 - RNA, 19 nt, Artificial Sequence
  Description of Artificial Sequence: Synthetic oligonucleotide
  Sense strand starting at position 2331 of SEQ ID NO: 3768
ccagaugccucugucaauc

SEQ ID NO: 293161 - RNA, 19 nt, Artificial Sequence
  Description of Artificial Sequence: Synthetic oligonucleotide
  Antisense strand to SEQ ID NO: 293160
gauugacagaggcaucugg

SEQ ID NO: 293162 - RNA, 19 nt, Artificial Sequence
  Description of Artificial Sequence: Synthetic oligonucleotide
  Sense strand starting at position 2384 of SEQ ID NO: 3768
aggugauauuugcugcucu

SEQ ID NO: 293163 - RNA, 19 nt, Artificial Sequence
  Description of Artificial Sequence: Synthetic oligonucleotide
  Antisense strand to SEQ ID NO: 293162
agagcagcaaauaucaccu

SEQ ID NO: 293164 - RNA, 19 nt, Artificial Sequence
  Description of Artificial Sequence: Synthetic oligonucleotide
  Sense strand starting at position 2862 of SEQ ID NO: 3768
uuggcauauacguaacagu

SEQ ID NO: 293165 - RNA, 19 nt, Artificial Sequence
  Description of Artificial Sequence: Synthetic oligonucleotide
  Antisense strand to SEQ ID NO: 293164
acuguuacguauaugccaa

SEQ ID NO: 293166 - RNA, 19 nt, Artificial Sequence
  Description of Artificial Sequence: Synthetic oligonucleotide
  Sense strand starting at position 3254 of SEQ ID NO: 3768
gcuugacuuccauguaaga

SEQ ID NO: 293167 - RNA, 19 nt, Artificial Sequence
  Description of Artificial Sequence: Synthetic oligonucleotide
  Antisense strand to SEQ ID NO: 293166
ucuuacauggaagucaagc

SEQ ID NO: 293168 - RNA, 19 nt, Artificial Sequence
  Description of Artificial Sequence: Synthetic oligonucleotide
  Sense strand starting at position 3372 of SEQ ID NO: 3768
cugaguguaugguuucuga

SEQ ID NO: 293169 - RNA, 19 nt, Artificial Sequence
  Description of Artificial Sequence: Synthetic oligonucleotide
  Antisense strand to SEQ ID NO: 293168
ucagaaaccauacacucag

SEQ ID NO: 293170 - RNA, 19 nt, Artificial Sequence
  Description of Artificial Sequence: Synthetic oligonucleotide
  Sense strand starting at position 3379 of SEQ ID NO: 3768
uaugguuucugagucagau

SEQ ID NO: 293171 - RNA, 19 nt, Artificial Sequence
  Description of Artificial Sequence: Synthetic oligonucleotide
  Antisense strand to SEQ ID NO: 293170
aucugacucagaaaccaua

SEQ ID NO: 293172 - RNA, 19 nt, Artificial Sequence
  Description of Artificial Sequence: Synthetic oligonucleotide
  Sense strand starting at position 3381 of SEQ ID NO: 3768
ugguuucugagucagauga

SEQ ID NO: 293173 - RNA, 19 nt, Artificial Sequence
  Description of Artificial Sequence: Synthetic oligonucleotide
  Antisense strand to SEQ ID NO: 293172
ucaucugacucagaaacca

SEQ ID NO: 293174 - RNA, 19 nt, Artificial Sequence
  Description of Artificial Sequence: Synthetic oligonucleotide
  Sense strand starting at position 3391 of SEQ ID NO: 3768
gucagaugaaucugaguuu

SEQ ID NO: 293175 - RNA, 19 nt, Artificial Sequence
  Description of Artificial Sequence: Synthetic oligonucleotide
  Antisense strand to SEQ ID NO: 293174
aaacucagauucaucugac

SEQ ID NO: 293176 - RNA, 19 nt, Artificial Sequence
  Description of Artificial Sequence: Synthetic oligonucleotide
  Sense strand starting at position 3397 of SEQ ID NO: 3768
ugaaucugaguuugaauuc

SEQ ID NO: 293177 - RNA, 19 nt, Artificial Sequence
  Description of Artificial Sequence: Synthetic oligonucleotide
  Antisense strand to SEQ ID NO: 293176
gaauucaaacucagauuca

SEQ ID NO: 293178 - RNA, 19 nt, Artificial Sequence
  Description of Artificial Sequence: Synthetic oligonucleotide
  Sense strand starting at position 3446 of SEQ ID NO: 3768
cugugaaacaagggugaua

SEQ ID NO: 293179 - RNA, 19 nt, Artificial Sequence
  Description of Artificial Sequence: Synthetic oligonucleotide
  Antisense strand to SEQ ID NO: 293178
uaucacccuuguuucacag

SEQ ID NO: 293180 - RNA, 19 nt, Artificial Sequence
  Description of Artificial Sequence: Synthetic oligonucleotide
  Sense strand starting at position 3458 of SEQ ID NO: 3768
ggugauaauuucuaccuca

SEQ ID NO: 293181 - RNA, 19 nt, Artificial Sequence
  Description of Artificial Sequence: Synthetic oligonucleotide
  Antisense strand to SEQ ID NO: 293180
ugagguagaaauuaucacc

SEQ ID NO: 293182 - RNA, 19 nt, Artificial Sequence
  Description of Artificial Sequence: Synthetic oligonucleotide
  Sense strand starting at position 3471 of SEQ ID NO: 3768
accucacuggauugugaga

SEQ ID NO: 293183 - RNA, 19 nt, Artificial Sequence
  Description of Artificial Sequence: Synthetic oligonucleotide
  Antisense strand to SEQ ID NO: 293182
ucucacaauccagugaggu

SEQ ID NO: 293184 - RNA, 19 nt, Artificial Sequence
  Description of Artificial Sequence: Synthetic oligonucleotide
  Sense strand starting at position 3741 of SEQ ID NO: 3768
agagaauaucucugcagcu

SEQ ID NO: 293185 - RNA, 19 nt, Artificial Sequence
  Description of Artificial Sequence: Synthetic oligonucleotide
  Antisense strand to SEQ ID NO: 293184
agcugcagagauauucucu

SEQ ID NO: 293186 - RNA, 19 nt, Artificial Sequence
  Description of Artificial Sequence: Synthetic oligonucleotide
  Sense strand starting at position 82 of SEQ ID NO: 3769
ugagguuucuguucugacu

SEQ ID NO: 293187 - RNA, 19 nt, Artificial Sequence
  Description of Artificial Sequence: Synthetic oligonucleotide
  Antisense strand to SEQ ID NO: 293186
agucagaacagaaaccuca

SEQ ID NO: 293188 - RNA, 19 nt, Artificial Sequence
  Description of Artificial Sequence: Synthetic oligonucleotide
  Sense strand starting at position 88 of SEQ ID NO: 3769
uucuguucugacuggucau

SEQ ID NO: 293189 - RNA, 19 nt, Artificial Sequence
  Description of Artificial Sequence: Synthetic oligonucleotide
  Antisense strand to SEQ ID NO: 293188
augaccagucagaacagaa

SEQ ID NO: 293190 - RNA, 19 nt, Artificial Sequence
  Description of Artificial Sequence: Synthetic oligonucleotide
  Sense strand starting at position 99 of SEQ ID NO: 3769
cuggucaugucucuggcau

SEQ ID NO: 293191 - RNA, 19 nt, Artificial Sequence
  Description of Artificial Sequence: Synthetic oligonucleotide
  Antisense strand to SEQ ID NO: 293190
augccagagacaugaccag

SEQ ID NO: 293192 - RNA, 19 nt, Artificial Sequence
  Description of Artificial Sequence: Synthetic oligonucleotide
  Sense strand starting at position 100 of SEQ ID NO: 3769
uggucaugucucuggcaua

SEQ ID NO: 293193 - RNA, 19 nt, Artificial Sequence
  Description of Artificial Sequence: Synthetic oligonucleotide
  Antisense strand to SEQ ID NO: 293192
uaugccagagacaugacca

SEQ ID NO: 293194 - RNA, 19 nt, Artificial Sequence
  Description of Artificial Sequence: Synthetic oligonucleotide
  Sense strand starting at position 105 of SEQ ID NO: 3769
augucucuggcauaauagu

SEQ ID NO: 293195 - RNA, 19 nt, Artificial Sequence
  Description of Artificial Sequence: Synthetic oligonucleotide
  Antisense strand to SEQ ID NO: 293194
acuauuaugccagagacau

SEQ ID NO: 293196 - RNA, 19 nt, Artificial Sequence
  Description of Artificial Sequence: Synthetic oligonucleotide
  Sense strand starting at position 111 of SEQ ID NO: 3769
cuggcauaauaguugauaa

SEQ ID NO: 293197 - RNA, 19 nt, Artificial Sequence
  Description of Artificial Sequence: Synthetic oligonucleotide
  Antisense strand to SEQ ID NO: 293196
uuaucaacuauuaugccag

SEQ ID NO: 293198 - RNA, 19 nt, Artificial Sequence
  Description of Artificial Sequence: Synthetic oligonucleotide
  Sense strand starting at position 140 of SEQ ID NO: 3769
agucauuccuauccacaga

SEQ ID NO: 293199 - RNA, 19 nt, Artificial Sequence
  Description of Artificial Sequence: Synthetic oligonucleotide
  Antisense strand to SEQ ID NO: 293198
ucuguggauaggaaugacu

SEQ ID NO: 293200 - RNA, 19 nt, Artificial Sequence
  Description of Artificial Sequence: Synthetic oligonucleotide
  Sense strand starting at position 457 of SEQ ID NO: 3769
gcagaucagauguaggcaa

SEQ ID NO: 293201 - RNA, 19 nt, Artificial Sequence
  Description of Artificial Sequence: Synthetic oligonucleotide
  Antisense strand to SEQ ID NO: 293200
uugccuacaucugaucugc

SEQ ID NO: 293202 - RNA, 19 nt, Artificial Sequence
  Description of Artificial Sequence: Synthetic oligonucleotide
  Sense strand starting at position 488 of SEQ ID NO: 3769
cagcuagggccuugauaga

SEQ ID NO: 293203 - RNA, 19 nt, Artificial Sequence
  Description of Artificial Sequence: Synthetic oligonucleotide
  Antisense strand to SEQ ID NO: 293202
ucuaucaaggcccuagcug

SEQ ID NO: 293204 - RNA, 19 nt, Artificial Sequence
  Description of Artificial Sequence: Synthetic oligonucleotide
  Sense strand starting at position 758 of SEQ ID NO: 3769
ggagcaaacugcuccagau

SEQ ID NO: 293205 - RNA, 19 nt, Artificial Sequence
  Description of Artificial Sequence: Synthetic oligonucleotide
  Antisense strand to SEQ ID NO: 293204
aucuggagcaguuugcucc

SEQ ID NO: 293206 - RNA, 19 nt, Artificial Sequence
  Description of Artificial Sequence: Synthetic oligonucleotide
  Sense strand starting at position 770 of SEQ ID NO: 3769
uccagauaccucuagagca

SEQ ID NO: 293207 - RNA, 19 nt, Artificial Sequence
  Description of Artificial Sequence: Synthetic oligonucleotide
  Antisense strand to SEQ ID NO: 293206
ugcucuagagguaucugga

SEQ ID NO: 293208 - RNA, 19 nt, Artificial Sequence
  Description of Artificial Sequence: Synthetic oligonucleotide
  Sense strand starting at position 1251 of SEQ ID NO: 3769
acguacucaucuuugcaca

SEQ ID NO: 293209 - RNA, 19 nt, Artificial Sequence
  Description of Artificial Sequence: Synthetic oligonucleotide
  Antisense strand to SEQ ID NO: 293208
ugugcaaagaugaguacgu

SEQ ID NO: 293210 - RNA, 19 nt, Artificial Sequence
  Description of Artificial Sequence: Synthetic oligonucleotide
  Sense strand starting at position 1252 of SEQ ID NO: 3769
cguacucaucuuugcacaa

SEQ ID NO: 293211 - RNA, 19 nt, Artificial Sequence
  Description of Artificial Sequence: Synthetic oligonucleotide
  Antisense strand to SEQ ID NO: 293210
uugugcaaagaugaguacg

SEQ ID NO: 293212 - RNA, 19 nt, Artificial Sequence
  Description of Artificial Sequence: Synthetic oligonucleotide
  Sense strand starting at position 1272 of SEQ ID NO: 3769
uauagaaguaugggugauu

SEQ ID NO: 293213 - RNA, 19 nt, Artificial Sequence
  Description of Artificial Sequence: Synthetic oligonucleotide
  Antisense strand to SEQ ID NO: 293212
aaucacccauacuucuaua

SEQ ID NO: 293214 - RNA, 19 nt, Artificial Sequence
  Description of Artificial Sequence: Synthetic oligonucleotide
  Sense strand starting at position 1413 of SEQ ID NO: 3769
uuuggacucugguccaaau

SEQ ID NO: 293215 - RNA, 19 nt, Artificial Sequence
  Description of Artificial Sequence: Synthetic oligonucleotide
  Antisense strand to SEQ ID NO: 293214
auuuggaccagaguccaaa

SEQ ID NO: 293216 - RNA, 19 nt, Artificial Sequence
  Description of Artificial Sequence: Synthetic oligonucleotide
  Sense strand starting at position 1457 of SEQ ID NO: 3769
gaaggaucuuggccucucu

SEQ ID NO: 293217 - RNA, 19 nt, Artificial Sequence
  Description of Artificial Sequence: Synthetic oligonucleotide
  Antisense strand to SEQ ID NO: 293216
agagaggccaagauccuuc

SEQ ID NO: 293218 - RNA, 19 nt, Artificial Sequence
  Description of Artificial Sequence: Synthetic oligonucleotide
  Sense strand starting at position 1502 of SEQ ID NO: 3769
caugaaguucgugaggacu

SEQ ID NO: 293219 - RNA, 19 nt, Artificial Sequence
  Description of Artificial Sequence: Synthetic oligonucleotide
  Antisense strand to SEQ ID NO: 293218
aguccucacgaacuucaug

SEQ ID NO: 293220 - RNA, 19 nt, Artificial Sequence
  Description of Artificial Sequence: Synthetic oligonucleotide
  Sense strand starting at position 1641 of SEQ ID NO: 3769
ccgaauuccgcugggagga

SEQ ID NO: 293221 - RNA, 19 nt, Artificial Sequence
  Description of Artificial Sequence: Synthetic oligonucleotide
  Antisense strand to SEQ ID NO: 293220
uccucccagcggaauucgg

SEQ ID NO: 293222 - RNA, 19 nt, Artificial Sequence
  Description of Artificial Sequence: Synthetic oligonucleotide
  Sense strand starting at position 1642 of SEQ ID NO: 3769
cgaauuccgcugggaggaa

SEQ ID NO: 293223 - RNA, 19 nt, Artificial Sequence
  Description of Artificial Sequence: Synthetic oligonucleotide
  Antisense strand to SEQ ID NO: 293222
uuccucccagcggaauucg

SEQ ID NO: 293224 - RNA, 19 nt, Artificial Sequence
  Description of Artificial Sequence: Synthetic oligonucleotide
  Sense strand starting at position 2113 of SEQ ID NO: 3769
guuuguugacgggagugua

SEQ ID NO: 293225 - RNA, 19 nt, Artificial Sequence
  Description of Artificial Sequence: Synthetic oligonucleotide
  Antisense strand to SEQ ID NO: 293224
uacacucccgucaacaaac

SEQ ID NO: 293226 - RNA, 19 nt, Artificial Sequence
  Description of Artificial Sequence: Synthetic oligonucleotide
  Sense strand starting at position 2174 of SEQ ID NO: 3769
ucuguaccucuguaucaga

SEQ ID NO: 293227 - RNA, 19 nt, Artificial Sequence
  Description of Artificial Sequence: Synthetic oligonucleotide
  Antisense strand to SEQ ID NO: 293226
ucugauacagagguacaga

SEQ ID NO: 293228 - RNA, 19 nt, Artificial Sequence
  Description of Artificial Sequence: Synthetic oligonucleotide
  Sense strand starting at position 2216 of SEQ ID NO: 3769
auguguguaucuuugaguc

SEQ ID NO: 293229 - RNA, 19 nt, Artificial Sequence
  Description of Artificial Sequence: Synthetic oligonucleotide
  Antisense strand to SEQ ID NO: 293228
gacucaaagauacacacau

SEQ ID NO: 293230 - RNA, 19 nt, Artificial Sequence
  Description of Artificial Sequence: Synthetic oligonucleotide
  Sense strand starting at position 2545 of SEQ ID NO: 3769
cgaugcauguuucuaugua

SEQ ID NO: 293231 - RNA, 19 nt, Artificial Sequence
  Description of Artificial Sequence: Synthetic oligonucleotide
  Antisense strand to SEQ ID NO: 293230
uacauagaaacaugcaucg

SEQ ID NO: 293232 - RNA, 19 nt, Artificial Sequence
  Description of Artificial Sequence: Synthetic oligonucleotide
  Sense strand starting at position 2800 of SEQ ID NO: 3769
acuugugccucugucagau

SEQ ID NO: 293233 - RNA, 19 nt, Artificial Sequence
  Description of Artificial Sequence: Synthetic oligonucleotide
  Antisense strand to SEQ ID NO: 293232
aucugacagaggcacaagu

SEQ ID NO: 293234 - RNA, 19 nt, Artificial Sequence
  Description of Artificial Sequence: Synthetic oligonucleotide
  Sense strand starting at position 2882 of SEQ ID NO: 3769
cugagaaccucugaaacug

SEQ ID NO: 293235 - RNA, 19 nt, Artificial Sequence
  Description of Artificial Sequence: Synthetic oligonucleotide
  Antisense strand to SEQ ID NO: 293234
caguuucagagguucucag

SEQ ID NO: 293236 - RNA, 19 nt, Artificial Sequence
  Description of Artificial Sequence: Synthetic oligonucleotide
  Sense strand starting at position 3086 of SEQ ID NO: 3769
ucgcuuugucgcccauacu

SEQ ID NO: 293237 - RNA, 19 nt, Artificial Sequence
  Description of Artificial Sequence: Synthetic oligonucleotide
  Antisense strand to SEQ ID NO: 293236
aguaugggcgacaaagcga

SEQ ID NO: 293238 - RNA, 19 nt, Artificial Sequence
  Description of Artificial Sequence: Synthetic oligonucleotide
  Sense strand starting at position 3215 of SEQ ID NO: 3769
uggugaugcgugggaggau

SEQ ID NO: 293239 - RNA, 19 nt, Artificial Sequence
  Description of Artificial Sequence: Synthetic oligonucleotide
  Antisense strand to SEQ ID NO: 293238
auccucccacgcaucacca

SEQ ID NO: 293240 - RNA, 19 nt, Artificial Sequence
  Description of Artificial Sequence: Synthetic oligonucleotide
  Sense strand starting at position 3270 of SEQ ID NO: 3769
gugaucaagccacaauuau

SEQ ID NO: 293241 - RNA, 19 nt, Artificial Sequence
  Description of Artificial Sequence: Synthetic oligonucleotide
  Antisense strand to SEQ ID NO: 293240
auaauuguggcuugaucac

SEQ ID NO: 293242 - RNA, 19 nt, Artificial Sequence
  Description of Artificial Sequence: Synthetic oligonucleotide
  Sense strand starting at position 3313 of SEQ ID NO: 3769
gauaguuggcagggacaga

SEQ ID NO: 293243 - RNA, 19 nt, Artificial Sequence
  Description of Artificial Sequence: Synthetic oligonucleotide
  Antisense strand to SEQ ID NO: 293242
ucugucccugccaacuauc

SEQ ID NO: 293244 - RNA, 19 nt, Artificial Sequence
  Description of Artificial Sequence: Synthetic oligonucleotide
  Sense strand starting at position 3379 of SEQ ID NO: 3769
gugucaaggagcgaauagu

SEQ ID NO: 293245 - RNA, 19 nt, Artificial Sequence
  Description of Artificial Sequence: Synthetic oligonucleotide
  Antisense strand to SEQ ID NO: 293244
acuauucgcuccuugacac

SEQ ID NO: 293246 - RNA, 19 nt, Artificial Sequence
  Description of Artificial Sequence: Synthetic oligonucleotide
  Sense strand starting at position 3389 of SEQ ID NO: 3769
gcgaauaguccacggacuu

SEQ ID NO: 293247 - RNA, 19 nt, Artificial Sequence
  Description of Artificial Sequence: Synthetic oligonucleotide
  Antisense strand to SEQ ID NO: 293246
aaguccguggacuauucgc

SEQ ID NO: 293248 - RNA, 19 nt, Artificial Sequence
  Description of Artificial Sequence: Synthetic oligonucleotide
  Sense strand starting at position 3615 of SEQ ID NO: 3769
auucuagaaucugaauggu

SEQ ID NO: 293249 - RNA, 19 nt, Artificial Sequence
  Description of Artificial Sequence: Synthetic oligonucleotide
  Antisense strand to SEQ ID NO: 293248
accauucagauucuagaau

SEQ ID NO: 293250 - RNA, 19 nt, Artificial Sequence
  Description of Artificial Sequence: Synthetic oligonucleotide
  Sense strand starting at position 3623 of SEQ ID NO: 3769
aucugaauggucugugcua

SEQ ID NO: 293251 - RNA, 19 nt, Artificial Sequence
  Description of Artificial Sequence: Synthetic oligonucleotide
  Antisense strand to SEQ ID NO: 293250
uagcacagaccauucagau

SEQ ID NO: 293252 - RNA, 19 nt, Artificial Sequence
  Description of Artificial Sequence: Synthetic oligonucleotide
  Sense strand starting at position 3625 of SEQ ID NO: 3769
cugaauggucugugcuaca

SEQ ID NO: 293253 - RNA, 19 nt, Artificial Sequence
  Description of Artificial Sequence: Synthetic oligonucleotide
  Antisense strand to SEQ ID NO: 293252
uguagcacagaccauucag

SEQ ID NO: 293254 - RNA, 19 nt, Artificial Sequence
  Description of Artificial Sequence: Synthetic oligonucleotide
  Sense strand starting at position 3630 of SEQ ID NO: 3769
uggucugugcuacagaaau

SEQ ID NO: 293255 - RNA, 19 nt, Artificial Sequence
  Description of Artificial Sequence: Synthetic oligonucleotide
  Antisense strand to SEQ ID NO: 293254
auuucuguagcacagacca

SEQ ID NO: 293256 - RNA, 19 nt, Artificial Sequence
  Description of Artificial Sequence: Synthetic oligonucleotide
  Sense strand starting at position 3643 of SEQ ID NO: 3769
agaaaucagcucugcaaau

SEQ ID NO: 293257 - RNA, 19 nt, Artificial Sequence
  Description of Artificial Sequence: Synthetic oligonucleotide
  Antisense strand to SEQ ID NO: 293256
auuugcagagcugauuucu

SEQ ID NO: 293258 - RNA, 19 nt, Artificial Sequence
  Description of Artificial Sequence: Synthetic oligonucleotide
  Sense strand starting at position 3689 of SEQ ID NO: 3769
ucgagcacauucuugagaa

SEQ ID NO: 293259 - RNA, 19 nt, Artificial Sequence
  Description of Artificial Sequence: Synthetic oligonucleotide
  Antisense strand to SEQ ID NO: 293258
uucucaagaaugugcucga

SEQ ID NO: 293260 - RNA, 19 nt, Artificial Sequence
  Description of Artificial Sequence: Synthetic oligonucleotide
  Sense strand starting at position 3693 of SEQ ID NO: 3769
gcacauucuugagaagaaa

SEQ ID NO: 293261 - RNA, 19 nt, Artificial Sequence
  Description of Artificial Sequence: Synthetic oligonucleotide
  Antisense strand to SEQ ID NO: 293260
uuucuucucaagaaugugc

SEQ ID NO: 293262 - RNA, 19 nt, Artificial Sequence
  Description of Artificial Sequence: Synthetic oligonucleotide
  Sense strand starting at position 3741 of SEQ ID NO: 3769
gggaaauuauaacuguccu

SEQ ID NO: 293263 - RNA, 19 nt, Artificial Sequence
  Description of Artificial Sequence: Synthetic oligonucleotide
  Antisense strand to SEQ ID NO: 293262
aggacaguuauaauuuccc

SEQ ID NO: 293264 - RNA, 19 nt, Artificial Sequence
  Description of Artificial Sequence: Synthetic oligonucleotide
  Sense strand starting at position 3856 of SEQ ID NO: 3769
ccacuugaagccuggaauu

SEQ ID NO: 293265 - RNA, 19 nt, Artificial Sequence
  Description of Artificial Sequence: Synthetic oligonucleotide
  Antisense strand to SEQ ID NO: 293264
aauuccaggcuucaagugg

SEQ ID NO: 293266 - RNA, 19 nt, Artificial Sequence
  Description of Artificial Sequence: Synthetic oligonucleotide
  Sense strand starting at position 135 of SEQ ID NO: 3770
cagaucuucccacguuaga

SEQ ID NO: 293267 - RNA, 19 nt, Artificial Sequence
  Description of Artificial Sequence: Synthetic oligonucleotide
  Antisense strand to SEQ ID NO: 293266
ucuaacgugggaagaucug

SEQ ID NO: 293268 - RNA, 19 nt, Artificial Sequence
  Description of Artificial Sequence: Synthetic oligonucleotide
  Sense strand starting at position 197 of SEQ ID NO: 3770
gaggcuguuaaguggguua

SEQ ID NO: 293269 - RNA, 19 nt, Artificial Sequence
  Description of Artificial Sequence: Synthetic oligonucleotide
  Antisense strand to SEQ ID NO: 293268
uaacccacuuaacagccuc

SEQ ID NO: 293270 - RNA, 19 nt, Artificial Sequence
  Description of Artificial Sequence: Synthetic oligonucleotide
  Sense strand starting at position 202 of SEQ ID NO: 3770
uguuaaguggguuaaccau

SEQ ID NO: 293271 - RNA, 19 nt, Artificial Sequence
  Description of Artificial Sequence: Synthetic oligonucleotide
  Antisense strand to SEQ ID NO: 293270
augguuaacccacuuaaca

SEQ ID NO: 293272 - RNA, 19 nt, Artificial Sequence
  Description of Artificial Sequence: Synthetic oligonucleotide
  Sense strand starting at position 239 of SEQ ID NO: 3770
ugugacugugagugggaaa

SEQ ID NO: 293273 - RNA, 19 nt, Artificial Sequence
  Description of Artificial Sequence: Synthetic oligonucleotide
  Antisense strand to SEQ ID NO: 293272
uuucccacucacagucaca

SEQ ID NO: 293274 - RNA, 19 nt, Artificial Sequence
  Description of Artificial Sequence: Synthetic oligonucleotide
  Sense strand starting at position 316 of SEQ ID NO: 3770
gugagugucccauaccuca

SEQ ID NO: 293275 - RNA, 19 nt, Artificial Sequence
  Description of Artificial Sequence: Synthetic oligonucleotide
  Antisense strand to SEQ ID NO: 293274
ugagguaugggacacucac

SEQ ID NO: 293276 - RNA, 19 nt, Artificial Sequence
  Description of Artificial Sequence: Synthetic oligonucleotide
  Sense strand starting at position 392 of SEQ ID NO: 3770
uucguacuuccaggaguca

SEQ ID NO: 293277 - RNA, 19 nt, Artificial Sequence
  Description of Artificial Sequence: Synthetic oligonucleotide
  Antisense strand to SEQ ID NO: 293276
ugacuccuggaaguacgaa

SEQ ID NO: 293278 - RNA, 19 nt, Artificial Sequence
  Description of Artificial Sequence: Synthetic oligonucleotide
  Sense strand starting at position 641 of SEQ ID NO: 3770
gagggaugaugacaaccau

SEQ ID NO: 293279 - RNA, 19 nt, Artificial Sequence
  Description of Artificial Sequence: Synthetic oligonucleotide
  Antisense strand to SEQ ID NO: 293278
augguugucaucaucccuc

SEQ ID NO: 293280 - RNA, 19 nt, Artificial Sequence
  Description of Artificial Sequence: Synthetic oligonucleotide
  Sense strand starting at position 750 of SEQ ID NO: 3770
gugguguugacggaggagu

SEQ ID NO: 293281 - RNA, 19 nt, Artificial Sequence
  Description of Artificial Sequence: Synthetic oligonucleotide
  Antisense strand to SEQ ID NO: 293280
acuccuccgucaacaccac

SEQ ID NO: 293282 - RNA, 19 nt, Artificial Sequence
  Description of Artificial Sequence: Synthetic oligonucleotide
  Sense strand starting at position 782 of SEQ ID NO: 3770
gguguuacuccgggcagca

SEQ ID NO: 293283 - RNA, 19 nt, Artificial Sequence
  Description of Artificial Sequence: Synthetic oligonucleotide
  Antisense strand to SEQ ID NO: 293282
ugcugcccggaguaacacc

SEQ ID NO: 293284 - RNA, 19 nt, Artificial Sequence
  Description of Artificial Sequence: Synthetic oligonucleotide
  Sense strand starting at position 997 of SEQ ID NO: 3770
gcgagugcuccaugcaguu

SEQ ID NO: 293285 - RNA, 19 nt, Artificial Sequence
  Description of Artificial Sequence: Synthetic oligonucleotide
  Antisense strand to SEQ ID NO: 293284
aacugcauggagcacucgc

SEQ ID NO: 293286 - RNA, 19 nt, Artificial Sequence
  Description of Artificial Sequence: Synthetic oligonucleotide
  Sense strand starting at position 1010 of SEQ ID NO: 3770
gcaguuaccaggugcauuu

SEQ ID NO: 293287 - RNA, 19 nt, Artificial Sequence
  Description of Artificial Sequence: Synthetic oligonucleotide
  Antisense strand to SEQ ID NO: 293286
aaaugcaccugguaacugc

SEQ ID NO: 293288 - RNA, 19 nt, Artificial Sequence
  Description of Artificial Sequence: Synthetic oligonucleotide
  Sense strand starting at position 1164 of SEQ ID NO: 3770
gggaguccuguuuggagag

SEQ ID NO: 293289 - RNA, 19 nt, Artificial Sequence
  Description of Artificial Sequence: Synthetic oligonucleotide
  Antisense strand to SEQ ID NO: 293288
cucuccaaacaggacuccc

SEQ ID NO: 293290 - RNA, 19 nt, Artificial Sequence
  Description of Artificial Sequence: Synthetic oligonucleotide
  Sense strand starting at position 1439 of SEQ ID NO: 3770
gccacauugccauguguga

SEQ ID NO: 293291 - RNA, 19 nt, Artificial Sequence
  Description of Artificial Sequence: Synthetic oligonucleotide
  Antisense strand to SEQ ID NO: 293290
ucacacauggcaauguggc

SEQ ID NO: 293292 - RNA, 19 nt, Artificial Sequence
  Description of Artificial Sequence: Synthetic oligonucleotide
  Sense strand starting at position 1778 of SEQ ID NO: 3770
ggguuacucacguagaguc

SEQ ID NO: 293293 - RNA, 19 nt, Artificial Sequence
  Description of Artificial Sequence: Synthetic oligonucleotide
  Antisense strand to SEQ ID NO: 293292
gacucuacgugaguaaccc

SEQ ID NO: 293294 - RNA, 19 nt, Artificial Sequence
  Description of Artificial Sequence: Synthetic oligonucleotide
  Sense strand starting at position 2287 of SEQ ID NO: 3770
gcaaaucgggcgucucuua

SEQ ID NO: 293295 - RNA, 19 nt, Artificial Sequence
  Description of Artificial Sequence: Synthetic oligonucleotide
  Antisense strand to SEQ ID NO: 293294
uaagagacgcccgauuugc

SEQ ID NO: 293296 - RNA, 19 nt, Artificial Sequence
  Description of Artificial Sequence: Synthetic oligonucleotide
  Sense strand starting at position 2555 of SEQ ID NO: 3770
caggcagugccugaaugaa

SEQ ID NO: 293297 - RNA, 19 nt, Artificial Sequence
  Description of Artificial Sequence: Synthetic oligonucleotide
  Antisense strand to SEQ ID NO: 293296
uucauucaggcacugccug

SEQ ID NO: 293298 - RNA, 19 nt, Artificial Sequence
  Description of Artificial Sequence: Synthetic oligonucleotide
  Sense strand starting at position 2711 of SEQ ID NO: 3770
ggaacaaaguguuugcauc

SEQ ID NO: 293299 - RNA, 19 nt, Artificial Sequence
  Description of Artificial Sequence: Synthetic oligonucleotide
  Antisense strand to SEQ ID NO: 293298
gaugcaaacacuuuguucc

SEQ ID NO: 293300 - RNA, 19 nt, Artificial Sequence
  Description of Artificial Sequence: Synthetic oligonucleotide
  Sense strand starting at position 2712 of SEQ ID NO: 3770
gaacaaaguguuugcaucu

SEQ ID NO: 293301 - RNA, 19 nt, Artificial Sequence
  Description of Artificial Sequence: Synthetic oligonucleotide
  Antisense strand to SEQ ID NO: 293300
agaugcaaacacuuuguuc

SEQ ID NO: 293302 - RNA, 19 nt, Artificial Sequence
  Description of Artificial Sequence: Synthetic oligonucleotide
  Sense strand starting at position 2746 of SEQ ID NO: 3770
gagaaauuccugggaggcu

SEQ ID NO: 293303 - RNA, 19 nt, Artificial Sequence
  Description of Artificial Sequence: Synthetic oligonucleotide
  Antisense strand to SEQ ID NO: 293302
agccucccaggaauuucuc

SEQ ID NO: 293304 - RNA, 19 nt, Artificial Sequence
  Description of Artificial Sequence: Synthetic oligonucleotide
  Sense strand starting at position 2877 of SEQ ID NO: 3770
gacucugagucccaguauu

SEQ ID NO: 293305 - RNA, 19 nt, Artificial Sequence
  Description of Artificial Sequence: Synthetic oligonucleotide
  Antisense strand to SEQ ID NO: 293304
aauacugggacucagaguc

SEQ ID NO: 293306 - RNA, 19 nt, Artificial Sequence
  Description of Artificial Sequence: Synthetic oligonucleotide
  Sense strand starting at position 3027 of SEQ ID NO: 3770
gggucugauuccuggaacu

SEQ ID NO: 293307 - RNA, 19 nt, Artificial Sequence
  Description of Artificial Sequence: Synthetic oligonucleotide
  Antisense strand to SEQ ID NO: 293306
aguuccaggaaucagaccc

SEQ ID NO: 293308 - RNA, 19 nt, Artificial Sequence
  Description of Artificial Sequence: Synthetic oligonucleotide
  Sense strand starting at position 3029 of SEQ ID NO: 3770
gucugauuccuggaacuca

SEQ ID NO: 293309 - RNA, 19 nt, Artificial Sequence
  Description of Artificial Sequence: Synthetic oligonucleotide
  Antisense strand to SEQ ID NO: 293308
ugaguuccaggaaucagac

SEQ ID NO: 293310 - RNA, 19 nt, Artificial Sequence
  Description of Artificial Sequence: Synthetic oligonucleotide
  Sense strand starting at position 3058 of SEQ ID NO: 3770
cguggucucuucucuuaga

SEQ ID NO: 293311 - RNA, 19 nt, Artificial Sequence
  Description of Artificial Sequence: Synthetic oligonucleotide
  Antisense strand to SEQ ID NO: 293310
ucuaagagaagagaccacg

SEQ ID NO: 293312 - RNA, 19 nt, Artificial Sequence
  Description of Artificial Sequence: Synthetic oligonucleotide
  Sense strand starting at position 3211 of SEQ ID NO: 3770
uuugucuuugcguuuguau

SEQ ID NO: 293313 - RNA, 19 nt, Artificial Sequence
  Description of Artificial Sequence: Synthetic oligonucleotide
  Antisense strand to SEQ ID NO: 293312
auacaaacgcaaagacaaa

SEQ ID NO: 293314 - RNA, 19 nt, Artificial Sequence
  Description of Artificial Sequence: Synthetic oligonucleotide
  Sense strand starting at position 3218 of SEQ ID NO: 3770
uugcguuuguaucuucuga

SEQ ID NO: 293315 - RNA, 19 nt, Artificial Sequence
  Description of Artificial Sequence: Synthetic oligonucleotide
  Antisense strand to SEQ ID NO: 293314
ucagaagauacaaacgcaa

SEQ ID NO: 293316 - RNA, 19 nt, Artificial Sequence
  Description of Artificial Sequence: Synthetic oligonucleotide
  Sense strand starting at position 3220 of SEQ ID NO: 3770
gcguuuguaucuucugaaa

SEQ ID NO: 293317 - RNA, 19 nt, Artificial Sequence
  Description of Artificial Sequence: Synthetic oligonucleotide
  Antisense strand to SEQ ID NO: 293316
uuucagaagauacaaacgc

SEQ ID NO: 293318 - RNA, 19 nt, Artificial Sequence
  Description of Artificial Sequence: Synthetic oligonucleotide
  Sense strand starting at position 3232 of SEQ ID NO: 3770
ucugaaauaucucaaguga

SEQ ID NO: 293319 - RNA, 19 nt, Artificial Sequence
  Description of Artificial Sequence: Synthetic oligonucleotide
  Antisense strand to SEQ ID NO: 293318
ucacuugagauauuucaga

SEQ ID NO: 293320 - RNA, 19 nt, Artificial Sequence
  Description of Artificial Sequence: Synthetic oligonucleotide
  Sense strand starting at position 3245 of SEQ ID NO: 3770
aagugagcacguguuguuu

SEQ ID NO: 293321 - RNA, 19 nt, Artificial Sequence
  Description of Artificial Sequence: Synthetic oligonucleotide
  Antisense strand to SEQ ID NO: 293320
aaacaacacgugcucacuu

SEQ ID NO: 293322 - RNA, 19 nt, Artificial Sequence
  Description of Artificial Sequence: Synthetic oligonucleotide
  Sense strand starting at position 3277 of SEQ ID NO: 3770
aggcacagucaauguuauu

SEQ ID NO: 293323 - RNA, 19 nt, Artificial Sequence
  Description of Artificial Sequence: Synthetic oligonucleotide
  Antisense strand to SEQ ID NO: 293322
aauaacauugacugugccu

SEQ ID NO: 293324 - RNA, 19 nt, Artificial Sequence
  Description of Artificial Sequence: Synthetic oligonucleotide
  Sense strand starting at position 3310 of SEQ ID NO: 3770
gaggguucucugcguguga

SEQ ID NO: 293325 - RNA, 19 nt, Artificial Sequence
  Description of Artificial Sequence: Synthetic oligonucleotide
  Antisense strand to SEQ ID NO: 293324
ucacacgcagagaacccuc

SEQ ID NO: 293326 - RNA, 19 nt, Artificial Sequence
  Description of Artificial Sequence: Synthetic oligonucleotide
  Sense strand starting at position 3312 of SEQ ID NO: 3770
ggguucucugcgugugacu

SEQ ID NO: 293327 - RNA, 19 nt, Artificial Sequence
  Description of Artificial Sequence: Synthetic oligonucleotide
  Antisense strand to SEQ ID NO: 293326
agucacacgcagagaaccc

SEQ ID NO: 293328 - RNA, 19 nt, Artificial Sequence
  Description of Artificial Sequence: Synthetic oligonucleotide
  Sense strand starting at position 3332 of SEQ ID NO: 3770
gguguugccgguucucaca

SEQ ID NO: 293329 - RNA, 19 nt, Artificial Sequence
  Description of Artificial Sequence: Synthetic oligonucleotide
  Antisense strand to SEQ ID NO: 293328
ugugagaaccggcaacacc

SEQ ID NO: 293330 - RNA, 19 nt, Artificial Sequence
  Description of Artificial Sequence: Synthetic oligonucleotide
  Sense strand starting at position 3388 of SEQ ID NO: 3770
cccuuuagacuugguguca

SEQ ID NO: 293331 - RNA, 19 nt, Artificial Sequence
  Description of Artificial Sequence: Synthetic oligonucleotide
  Antisense strand to SEQ ID NO: 293330
ugacaccaagucuaaaggg

SEQ ID NO: 293332 - RNA, 19 nt, Artificial Sequence
  Description of Artificial Sequence: Synthetic oligonucleotide
  Sense strand starting at position 3413 of SEQ ID NO: 3770
ggugcagaauuguuaagga

SEQ ID NO: 293333 - RNA, 19 nt, Artificial Sequence
  Description of Artificial Sequence: Synthetic oligonucleotide
  Antisense strand to SEQ ID NO: 293332
uccuuaacaauucugcacc

SEQ ID NO: 293334 - RNA, 19 nt, Artificial Sequence
  Description of Artificial Sequence: Synthetic oligonucleotide
  Sense strand starting at position 3496 of SEQ ID NO: 3770
gguggcaauucuguuugca

SEQ ID NO: 293335 - RNA, 19 nt, Artificial Sequence
  Description of Artificial Sequence: Synthetic oligonucleotide
  Antisense strand to SEQ ID NO: 293334
ugcaaacagaauugccacc

SEQ ID NO: 293336 - RNA, 19 nt, Artificial Sequence
  Description of Artificial Sequence: Synthetic oligonucleotide
  Sense strand starting at position 3498 of SEQ ID NO: 3770
uggcaauucuguuugcaga

SEQ ID NO: 293337 - RNA, 19 nt, Artificial Sequence
  Description of Artificial Sequence: Synthetic oligonucleotide
  Antisense strand to SEQ ID NO: 293336
ucugcaaacagaauugcca

SEQ ID NO: 293338 - RNA, 19 nt, Artificial Sequence
  Description of Artificial Sequence: Synthetic oligonucleotide
  Sense strand starting at position 3499 of SEQ ID NO: 3770
ggcaauucuguuugcagag

SEQ ID NO: 293339 - RNA, 19 nt, Artificial Sequence
  Description of Artificial Sequence: Synthetic oligonucleotide
  Antisense strand to SEQ ID NO: 293338
cucugcaaacagaauugcc

SEQ ID NO: 293340 - RNA, 19 nt, Artificial Sequence
  Description of Artificial Sequence: Synthetic oligonucleotide
  Sense strand starting at position 3500 of SEQ ID NO: 3770
gcaauucuguuugcagaga

SEQ ID NO: 293341 - RNA, 19 nt, Artificial Sequence
  Description of Artificial Sequence: Synthetic oligonucleotide
  Antisense strand to SEQ ID NO: 293340
ucucugcaaacagaauugc

SEQ ID NO: 293342 - RNA, 19 nt, Artificial Sequence
  Description of Artificial Sequence: Synthetic oligonucleotide
  Sense strand starting at position 3543 of SEQ ID NO: 3770
gggcucugucccgcaguua

SEQ ID NO: 293343 - RNA, 19 nt, Artificial Sequence
  Description of Artificial Sequence: Synthetic oligonucleotide
  Antisense strand to SEQ ID NO: 293342
uaacugcgggacagagccc

SEQ ID NO: 293344 - RNA, 19 nt, Artificial Sequence
  Description of Artificial Sequence: Synthetic oligonucleotide
  Sense strand starting at position 3555 of SEQ ID NO: 3770
gcaguuagcccuuagguca

SEQ ID NO: 293345 - RNA, 19 nt, Artificial Sequence
  Description of Artificial Sequence: Synthetic oligonucleotide
  Antisense strand to SEQ ID NO: 293344
ugaccuaagggcuaacugc

SEQ ID NO: 293346 - RNA, 19 nt, Artificial Sequence
  Description of Artificial Sequence: Synthetic oligonucleotide
  Sense strand starting at position 5 of SEQ ID NO: 3771
ugagauguuucucauuuaa

SEQ ID NO: 293347 - RNA, 19 nt, Artificial Sequence
  Description of Artificial Sequence: Synthetic oligonucleotide
  Antisense strand to SEQ ID NO: 293346
uuaaaugagaaacaucuca

SEQ ID NO: 293348 - RNA, 19 nt, Artificial Sequence
  Description of Artificial Sequence: Synthetic oligonucleotide
  Sense strand starting at position 349 of SEQ ID NO: 3771
ucauacauuguaugagacu

SEQ ID NO: 293349 - RNA, 19 nt, Artificial Sequence
  Description of Artificial Sequence: Synthetic oligonucleotide
  Antisense strand to SEQ ID NO: 293348
agucucauacaauguauga

SEQ ID NO: 293350 - RNA, 19 nt, Artificial Sequence
  Description of Artificial Sequence: Synthetic oligonucleotide
  Sense strand starting at position 414 of SEQ ID NO: 3771
uucccuuucuagcuagaga

SEQ ID NO: 293351 - RNA, 19 nt, Artificial Sequence
  Description of Artificial Sequence: Synthetic oligonucleotide
  Antisense strand to SEQ ID NO: 293350
ucucuagcuagaaagggaa

SEQ ID NO: 293352 - RNA, 19 nt, Artificial Sequence
  Description of Artificial Sequence: Synthetic oligonucleotide
  Sense strand starting at position 730 of SEQ ID NO: 3771
ucauacuauggaugcuuaa

SEQ ID NO: 293353 - RNA, 19 nt, Artificial Sequence
  Description of Artificial Sequence: Synthetic oligonucleotide
  Antisense strand to SEQ ID NO: 293352
uuaagcauccauaguauga

SEQ ID NO: 293354 - RNA, 19 nt, Artificial Sequence
  Description of Artificial Sequence: Synthetic oligonucleotide
  Sense strand starting at position 894 of SEQ ID NO: 3771
aagaucugucuauggacca

SEQ ID NO: 293355 - RNA, 19 nt, Artificial Sequence
  Description of Artificial Sequence: Synthetic oligonucleotide
  Antisense strand to SEQ ID NO: 293354
ugguccauagacagaucuu

SEQ ID NO: 293356 - RNA, 19 nt, Artificial Sequence
  Description of Artificial Sequence: Synthetic oligonucleotide
  Sense strand starting at position 957 of SEQ ID NO: 3771
uugagaugcacuuguuaag

SEQ ID NO: 293357 - RNA, 19 nt, Artificial Sequence
  Description of Artificial Sequence: Synthetic oligonucleotide
  Antisense strand to SEQ ID NO: 293356
cuuaacaagugcaucucaa

SEQ ID NO: 293358 - RNA, 19 nt, Artificial Sequence
  Description of Artificial Sequence: Synthetic oligonucleotide
  Sense strand starting at position 1251 of SEQ ID NO: 3771
ggguccggucaaugagaga

SEQ ID NO: 293359 - RNA, 19 nt, Artificial Sequence
  Description of Artificial Sequence: Synthetic oligonucleotide
  Antisense strand to SEQ ID NO: 293358
ucucucauugaccggaccc

SEQ ID NO: 293360 - RNA, 19 nt, Artificial Sequence
  Description of Artificial Sequence: Synthetic oligonucleotide
  Sense strand starting at position 1275 of SEQ ID NO: 3771
cagcuuggagcacaagauu

SEQ ID NO: 293361 - RNA, 19 nt, Artificial Sequence
  Description of Artificial Sequence: Synthetic oligonucleotide
  Antisense strand to SEQ ID NO: 293360
aaucuugugcuccaagcug

SEQ ID NO: 293362 - RNA, 19 nt, Artificial Sequence
  Description of Artificial Sequence: Synthetic oligonucleotide
  Sense strand starting at position 1482 of SEQ ID NO: 3771
aagucuuaugcgcugucga

SEQ ID NO: 293363 - RNA, 19 nt, Artificial Sequence
  Description of Artificial Sequence: Synthetic oligonucleotide
  Antisense strand to SEQ ID NO: 293362
ucgacagcgcauaagacuu

SEQ ID NO: 293364 - RNA, 19 nt, Artificial Sequence
  Description of Artificial Sequence: Synthetic oligonucleotide
  Sense strand starting at position 1484 of SEQ ID NO: 3771
gucuuaugcgcugucgaau

SEQ ID NO: 293365 - RNA, 19 nt, Artificial Sequence
  Description of Artificial Sequence: Synthetic oligonucleotide
  Antisense strand to SEQ ID NO: 293364
auucgacagcgcauaagac

SEQ ID NO: 293366 - RNA, 19 nt, Artificial Sequence
  Description of Artificial Sequence: Synthetic oligonucleotide
  Sense strand starting at position 1485 of SEQ ID NO: 3771
ucuuaugcgcugucgaauc

SEQ ID NO: 293367 - RNA, 19 nt, Artificial Sequence
  Description of Artificial Sequence: Synthetic oligonucleotide
  Antisense strand to SEQ ID NO: 293366
gauucgacagcgcauaaga

SEQ ID NO: 293368 - RNA, 19 nt, Artificial Sequence
  Description of Artificial Sequence: Synthetic oligonucleotide
  Sense strand starting at position 1490 of SEQ ID NO: 3771
ugcgcugucgaaucagcua

SEQ ID NO: 293369 - RNA, 19 nt, Artificial Sequence
  Description of Artificial Sequence: Synthetic oligonucleotide
  Antisense strand to SEQ ID NO: 293368
uagcugauucgacagcgca

SEQ ID NO: 293370 - RNA, 19 nt, Artificial Sequence
  Description of Artificial Sequence: Synthetic oligonucleotide
  Sense strand starting at position 1604 of SEQ ID NO: 3771
guugaagguacucgagaaa

SEQ ID NO: 293371 - RNA, 19 nt, Artificial Sequence
  Description of Artificial Sequence: Synthetic oligonucleotide
  Antisense strand to SEQ ID NO: 293370
uuucucgaguaccuucaac

SEQ ID NO: 293372 - RNA, 19 nt, Artificial Sequence
  Description of Artificial Sequence: Synthetic oligonucleotide
  Sense strand starting at position 1615 of SEQ ID NO: 3771
ucgagaaacuccuccuaga

SEQ ID NO: 293373 - RNA, 19 nt, Artificial Sequence
  Description of Artificial Sequence: Synthetic oligonucleotide
  Antisense strand to SEQ ID NO: 293372
ucuaggaggaguuucucga

SEQ ID NO: 293374 - RNA, 19 nt, Artificial Sequence
  Description of Artificial Sequence: Synthetic oligonucleotide
  Sense strand starting at position 2305 of SEQ ID NO: 3771
gcaacagucccaugaggua

SEQ ID NO: 293375 - RNA, 19 nt, Artificial Sequence
  Description of Artificial Sequence: Synthetic oligonucleotide
  Antisense strand to SEQ ID NO: 293374
uaccucaugggacuguugc

SEQ ID NO: 293376 - RNA, 19 nt, Artificial Sequence
  Description of Artificial Sequence: Synthetic oligonucleotide
  Sense strand starting at position 2348 of SEQ ID NO: 3771
cccauuuccguuugaggua

SEQ ID NO: 293377 - RNA, 19 nt, Artificial Sequence
  Description of Artificial Sequence: Synthetic oligonucleotide
  Antisense strand to SEQ ID NO: 293376
uaccucaaacggaaauggg

SEQ ID NO: 293378 - RNA, 19 nt, Artificial Sequence
  Description of Artificial Sequence: Synthetic oligonucleotide
  Sense strand starting at position 2353 of SEQ ID NO: 3771
uuccguuugagguaacuaa

SEQ ID NO: 293379 - RNA, 19 nt, Artificial Sequence
  Description of Artificial Sequence: Synthetic oligonucleotide
  Antisense strand to SEQ ID NO: 293378
uuaguuaccucaaacggaa

SEQ ID NO: 293380 - RNA, 19 nt, Artificial Sequence
  Description of Artificial Sequence: Synthetic oligonucleotide
  Sense strand starting at position 2357 of SEQ ID NO: 3771
guuugagguaacuaaagua

SEQ ID NO: 293381 - RNA, 19 nt, Artificial Sequence
  Description of Artificial Sequence: Synthetic oligonucleotide
  Antisense strand to SEQ ID NO: 293380
uacuuuaguuaccucaaac

SEQ ID NO: 293382 - RNA, 19 nt, Artificial Sequence
  Description of Artificial Sequence: Synthetic oligonucleotide
  Sense strand starting at position 2572 of SEQ ID NO: 3771
cccacuugucgguaacauu

SEQ ID NO: 293383 - RNA, 19 nt, Artificial Sequence
  Description of Artificial Sequence: Synthetic oligonucleotide
  Antisense strand to SEQ ID NO: 293382
aauguuaccgacaaguggg

SEQ ID NO: 293384 - RNA, 19 nt, Artificial Sequence
  Description of Artificial Sequence: Synthetic oligonucleotide
  Sense strand starting at position 2636 of SEQ ID NO: 3771
gggccaaauccuuggugac

SEQ ID NO: 293385 - RNA, 19 nt, Artificial Sequence
  Description of Artificial Sequence: Synthetic oligonucleotide
  Antisense strand to SEQ ID NO: 293384
gucaccaaggauuuggccc

SEQ ID NO: 293386 - RNA, 19 nt, Artificial Sequence
  Description of Artificial Sequence: Synthetic oligonucleotide
  Sense strand starting at position 2637 of SEQ ID NO: 3771
ggccaaauccuuggugacu

SEQ ID NO: 293387 - RNA, 19 nt, Artificial Sequence
  Description of Artificial Sequence: Synthetic oligonucleotide
  Antisense strand to SEQ ID NO: 293386
agucaccaaggauuuggcc

SEQ ID NO: 293388 - RNA, 19 nt, Artificial Sequence
  Description of Artificial Sequence: Synthetic oligonucleotide
  Sense strand starting at position 2638 of SEQ ID NO: 3771
gccaaauccuuggugacua

SEQ ID NO: 293389 - RNA, 19 nt, Artificial Sequence
  Description of Artificial Sequence: Synthetic oligonucleotide
  Antisense strand to SEQ ID NO: 293388
uagucaccaaggauuuggc

SEQ ID NO: 293390 - RNA, 19 nt, Artificial Sequence
  Description of Artificial Sequence: Synthetic oligonucleotide
  Sense strand starting at position 2648 of SEQ ID NO: 3771
uggugacuaugacuuaauu

SEQ ID NO: 293391 - RNA, 19 nt, Artificial Sequence
  Description of Artificial Sequence: Synthetic oligonucleotide
  Antisense strand to SEQ ID NO: 293390
aauuaagucauagucacca

SEQ ID NO: 293392 - RNA, 19 nt, Artificial Sequence
  Description of Artificial Sequence: Synthetic oligonucleotide
  Sense strand starting at position 2707 of SEQ ID NO: 3771
accacuucucgccaguaga

SEQ ID NO: 293393 - RNA, 19 nt, Artificial Sequence
  Description of Artificial Sequence: Synthetic oligonucleotide
  Antisense strand to SEQ ID NO: 293392
ucuacuggcgagaaguggu

SEQ ID NO: 293394 - RNA, 19 nt, Artificial Sequence
  Description of Artificial Sequence: Synthetic oligonucleotide
  Sense strand starting at position 2710 of SEQ ID NO: 3771
acuucucgccaguagaaug

SEQ ID NO: 293395 - RNA, 19 nt, Artificial Sequence
  Description of Artificial Sequence: Synthetic oligonucleotide
  Antisense strand to SEQ ID NO: 293394
cauucuacuggcgagaagu

SEQ ID NO: 293396 - RNA, 19 nt, Artificial Sequence
  Description of Artificial Sequence: Synthetic oligonucleotide
  Sense strand starting at position 2861 of SEQ ID NO: 3771
ucuguagugguaucguguu

SEQ ID NO: 293397 - RNA, 19 nt, Artificial Sequence
  Description of Artificial Sequence: Synthetic oligonucleotide
  Antisense strand to SEQ ID NO: 293396
aacacgauaccacuacaga

SEQ ID NO: 293398 - RNA, 19 nt, Artificial Sequence
  Description of Artificial Sequence: Synthetic oligonucleotide
  Sense strand starting at position 2866 of SEQ ID NO: 3771
agugguaucguguuuggcu

SEQ ID NO: 293399 - RNA, 19 nt, Artificial Sequence
  Description of Artificial Sequence: Synthetic oligonucleotide
  Antisense strand to SEQ ID NO: 293398
agccaaacacgauaccacu

SEQ ID NO: 293400 - RNA, 19 nt, Artificial Sequence
  Description of Artificial Sequence: Synthetic oligonucleotide
  Sense strand starting at position 3549 of SEQ ID NO: 3771
gagugagacucuuugucuu

SEQ ID NO: 293401 - RNA, 19 nt, Artificial Sequence
  Description of Artificial Sequence: Synthetic oligonucleotide
  Antisense strand to SEQ ID NO: 293400
aagacaaagagucucacuc

SEQ ID NO: 293402 - RNA, 19 nt, Artificial Sequence
  Description of Artificial Sequence: Synthetic oligonucleotide
  Sense strand starting at position 3551 of SEQ ID NO: 3771
gugagacucuuugucuuaa

SEQ ID NO: 293403 - RNA, 19 nt, Artificial Sequence
  Description of Artificial Sequence: Synthetic oligonucleotide
  Antisense strand to SEQ ID NO: 293402
uuaagacaaagagucucac

SEQ ID NO: 293404 - RNA, 19 nt, Artificial Sequence
  Description of Artificial Sequence: Synthetic oligonucleotide
  Sense strand starting at position 3552 of SEQ ID NO: 3771
ugagacucuuugucuuaaa

SEQ ID NO: 293405 - RNA, 19 nt, Artificial Sequence
  Description of Artificial Sequence: Synthetic oligonucleotide
  Antisense strand to SEQ ID NO: 293404
uuuaagacaaagagucuca

SEQ ID NO: 293406 - RNA, 19 nt, Artificial Sequence
  Description of Artificial Sequence: Synthetic oligonucleotide
  Sense strand starting at position 3600 of SEQ ID NO: 3771
cucccauugugauuaaaug

SEQ ID NO: 293407 - RNA, 19 nt, Artificial Sequence
  Description of Artificial Sequence: Synthetic oligonucleotide
  Antisense strand to SEQ ID NO: 293406
cauuuaaucacaaugggag

SEQ ID NO: 293408 - RNA, 19 nt, Artificial Sequence
  Description of Artificial Sequence: Synthetic oligonucleotide
  Sense strand starting at position 3607 of SEQ ID NO: 3771
ugugauuaaaugggauagu

SEQ ID NO: 293409 - RNA, 19 nt, Artificial Sequence
  Description of Artificial Sequence: Synthetic oligonucleotide
  Antisense strand to SEQ ID NO: 293408
acuaucccauuuaaucaca

SEQ ID NO: 293410 - RNA, 19 nt, Artificial Sequence
  Description of Artificial Sequence: Synthetic oligonucleotide
  Sense strand starting at position 3616 of SEQ ID NO: 3771
augggauaguguguuuaaa

SEQ ID NO: 293411 - RNA, 19 nt, Artificial Sequence
  Description of Artificial Sequence: Synthetic oligonucleotide
  Antisense strand to SEQ ID NO: 293410
uuuaaacacacuaucccau

SEQ ID NO: 293412 - RNA, 19 nt, Artificial Sequence
  Description of Artificial Sequence: Synthetic oligonucleotide
  Sense strand starting at position 3642 of SEQ ID NO: 3771
agcaaagugccugacucaa

SEQ ID NO: 293413 - RNA, 19 nt, Artificial Sequence
  Description of Artificial Sequence: Synthetic oligonucleotide
  Antisense strand to SEQ ID NO: 293412
uugagucaggcacuuugcu

SEQ ID NO: 293414 - RNA, 19 nt, Artificial Sequence
  Description of Artificial Sequence: Synthetic oligonucleotide
  Sense strand starting at position 3759 of SEQ ID NO: 3771
aaagguauuucggagauuc

SEQ ID NO: 293415 - RNA, 19 nt, Artificial Sequence
  Description of Artificial Sequence: Synthetic oligonucleotide
  Antisense strand to SEQ ID NO: 293414
gaaucuccgaaauaccuuu

SEQ ID NO: 293416 - RNA, 19 nt, Artificial Sequence
  Description of Artificial Sequence: Synthetic oligonucleotide
  Sense strand starting at position 3778 of SEQ ID NO: 3771
cacucuguuucuguagaag

SEQ ID NO: 293417 - RNA, 19 nt, Artificial Sequence
  Description of Artificial Sequence: Synthetic oligonucleotide
  Antisense strand to SEQ ID NO: 293416
cuucuacagaaacagagug

SEQ ID NO: 293418 - RNA, 19 nt, Artificial Sequence
  Description of Artificial Sequence: Synthetic oligonucleotide
  Sense strand starting at position 3936 of SEQ ID NO: 3771
acuuauaaguuuccauagu

SEQ ID NO: 293419 - RNA, 19 nt, Artificial Sequence
  Description of Artificial Sequence: Synthetic oligonucleotide
  Antisense strand to SEQ ID NO: 293418
acuauggaaacuuauaagu

SEQ ID NO: 293420 - RNA, 19 nt, Artificial Sequence
  Description of Artificial Sequence: Synthetic oligonucleotide
  Sense strand starting at position 3954 of SEQ ID NO: 3771
uauguuagaccugguagga

SEQ ID NO: 293421 - RNA, 19 nt, Artificial Sequence
  Description of Artificial Sequence: Synthetic oligonucleotide
  Antisense strand to SEQ ID NO: 293420
uccuaccaggucuaacaua

SEQ ID NO: 293422 - RNA, 19 nt, Artificial Sequence
  Description of Artificial Sequence: Synthetic oligonucleotide
  Sense strand starting at position 3971 of SEQ ID NO: 3771
gagccuuagagauggagua

SEQ ID NO: 293423 - RNA, 19 nt, Artificial Sequence
  Description of Artificial Sequence: Synthetic oligonucleotide
  Antisense strand to SEQ ID NO: 293422
uacuccaucucuaaggcuc

SEQ ID NO: 293424 - RNA, 19 nt, Artificial Sequence
  Description of Artificial Sequence: Synthetic oligonucleotide
  Sense strand starting at position 3973 of SEQ ID NO: 3771
gccuuagagauggaguagu

SEQ ID NO: 293425 - RNA, 19 nt, Artificial Sequence
  Description of Artificial Sequence: Synthetic oligonucleotide
  Antisense strand to SEQ ID NO: 293424
acuacuccaucucuaaggc

SEQ ID NO: 293426 - RNA, 19 nt, Artificial Sequence
  Description of Artificial Sequence: Synthetic oligonucleotide
  Sense strand starting at position 527 of SEQ ID NO: 3772
ucaagacaacuuugugaug

SEQ ID NO: 293427 - RNA, 19 nt, Artificial Sequence
  Description of Artificial Sequence: Synthetic oligonucleotide
  Antisense strand to SEQ ID NO: 293426
caucacaaaguugucuuga

SEQ ID NO: 293428 - RNA, 19 nt, Artificial Sequence
  Description of Artificial Sequence: Synthetic oligonucleotide
  Sense strand starting at position 536 of SEQ ID NO: 3772
cuuugugauguagaguacu

SEQ ID NO: 293429 - RNA, 19 nt, Artificial Sequence
  Description of Artificial Sequence: Synthetic oligonucleotide
  Antisense strand to SEQ ID NO: 293428
aguacucuacaucacaaag

SEQ ID NO: 293430 - RNA, 19 nt, Artificial Sequence
  Description of Artificial Sequence: Synthetic oligonucleotide
  Sense strand starting at position 539 of SEQ ID NO: 3772
ugugauguagaguacuauu

SEQ ID NO: 293431 - RNA, 19 nt, Artificial Sequence
  Description of Artificial Sequence: Synthetic oligonucleotide
  Antisense strand to SEQ ID NO: 293430
aauaguacucuacaucaca

SEQ ID NO: 293432 - RNA, 19 nt, Artificial Sequence
  Description of Artificial Sequence: Synthetic oligonucleotide
  Sense strand starting at position 547 of SEQ ID NO: 3772
agaguacuauuagcaccau

SEQ ID NO: 293433 - RNA, 19 nt, Artificial Sequence
  Description of Artificial Sequence: Synthetic oligonucleotide
  Antisense strand to SEQ ID NO: 293432
auggugcuaauaguacucu

SEQ ID NO: 293434 - RNA, 19 nt, Artificial Sequence
  Description of Artificial Sequence: Synthetic oligonucleotide
  Sense strand starting at position 573 of SEQ ID NO: 3772
aggugaauguuagcuuuag

SEQ ID NO: 293435 - RNA, 19 nt, Artificial Sequence
  Description of Artificial Sequence: Synthetic oligonucleotide
  Antisense strand to SEQ ID NO: 293434
cuaaagcuaacauucaccu

SEQ ID NO: 293436 - RNA, 19 nt, Artificial Sequence
  Description of Artificial Sequence: Synthetic oligonucleotide
  Sense strand starting at position 574 of SEQ ID NO: 3772
ggugaauguuagcuuuaga

SEQ ID NO: 293437 - RNA, 19 nt, Artificial Sequence
  Description of Artificial Sequence: Synthetic oligonucleotide
  Antisense strand to SEQ ID NO: 293436
ucuaaagcuaacauucacc

SEQ ID NO: 293438 - RNA, 19 nt, Artificial Sequence
  Description of Artificial Sequence: Synthetic oligonucleotide
  Sense strand starting at position 577 of SEQ ID NO: 3772
gaauguuagcuuuagaaua

SEQ ID NO: 293439 - RNA, 19 nt, Artificial Sequence
  Description of Artificial Sequence: Synthetic oligonucleotide
  Antisense strand to SEQ ID NO: 293438
uauucuaaagcuaacauuc

SEQ ID NO: 293440 - RNA, 19 nt, Artificial Sequence
  Description of Artificial Sequence: Synthetic oligonucleotide
  Sense strand starting at position 582 of SEQ ID NO: 3772
uuagcuuuagaauaagguu

SEQ ID NO: 293441 - RNA, 19 nt, Artificial Sequence
  Description of Artificial Sequence: Synthetic oligonucleotide
  Antisense strand to SEQ ID NO: 293440
aaccuuauucuaaagcuaa

SEQ ID NO: 293442 - RNA, 19 nt, Artificial Sequence
  Description of Artificial Sequence: Synthetic oligonucleotide
  Sense strand starting at position 590 of SEQ ID NO: 3772
agaauaagguuggauuaag

SEQ ID NO: 293443 - RNA, 19 nt, Artificial Sequence
  Description of Artificial Sequence: Synthetic oligonucleotide
  Antisense strand to SEQ ID NO: 293442
cuuaauccaaccuuauucu

SEQ ID NO: 293444 - RNA, 19 nt, Artificial Sequence
  Description of Artificial Sequence: Synthetic oligonucleotide
  Sense strand starting at position 600 of SEQ ID NO: 3772
uggauuaaguuuccuccau

SEQ ID NO: 293445 - RNA, 19 nt, Artificial Sequence
  Description of Artificial Sequence: Synthetic oligonucleotide
  Antisense strand to SEQ ID NO: 293444
auggaggaaacuuaaucca

SEQ ID NO: 293446 - RNA, 19 nt, Artificial Sequence
  Description of Artificial Sequence: Synthetic oligonucleotide
  Sense strand starting at position 601 of SEQ ID NO: 3772
ggauuaaguuuccuccauu

SEQ ID NO: 293447 - RNA, 19 nt, Artificial Sequence
  Description of Artificial Sequence: Synthetic oligonucleotide
  Antisense strand to SEQ ID NO: 293446
aauggaggaaacuuaaucc

SEQ ID NO: 293448 - RNA, 19 nt, Artificial Sequence
  Description of Artificial Sequence: Synthetic oligonucleotide
  Sense strand starting at position 670 of SEQ ID NO: 3772
gcgaccaguuucuuaggga

SEQ ID NO: 293449 - RNA, 19 nt, Artificial Sequence
  Description of Artificial Sequence: Synthetic oligonucleotide
  Antisense strand to SEQ ID NO: 293448
ucccuaagaaacuggucgc

SEQ ID NO: 293450 - RNA, 19 nt, Artificial Sequence
  Description of Artificial Sequence: Synthetic oligonucleotide
  Sense strand starting at position 683 of SEQ ID NO: 3772
uagggacuuucgguaaaua

SEQ ID NO: 293451 - RNA, 19 nt, Artificial Sequence
  Description of Artificial Sequence: Synthetic oligonucleotide
  Antisense strand to SEQ ID NO: 293450
uauuuaccgaaagucccua

SEQ ID NO: 293452 - RNA, 19 nt, Artificial Sequence
  Description of Artificial Sequence: Synthetic oligonucleotide
  Sense strand starting at position 1299 of SEQ ID NO: 3772
gagggucuaaguuagaucu

SEQ ID NO: 293453 - RNA, 19 nt, Artificial Sequence
  Description of Artificial Sequence: Synthetic oligonucleotide
  Antisense strand to SEQ ID NO: 293452
agaucuaacuuagacccuc

SEQ ID NO: 293454 - RNA, 19 nt, Artificial Sequence
  Description of Artificial Sequence: Synthetic oligonucleotide
  Sense strand starting at position 1444 of SEQ ID NO: 3772
gcaggaaucuaacauuuau

SEQ ID NO: 293455 - RNA, 19 nt, Artificial Sequence
  Description of Artificial Sequence: Synthetic oligonucleotide
  Antisense strand to SEQ ID NO: 293454
auaaauguuagauuccugc

SEQ ID NO: 293456 - RNA, 19 nt, Artificial Sequence
  Description of Artificial Sequence: Synthetic oligonucleotide
  Sense strand starting at position 1499 of SEQ ID NO: 3772
uguuaugggaugugacauu

SEQ ID NO: 293457 - RNA, 19 nt, Artificial Sequence
  Description of Artificial Sequence: Synthetic oligonucleotide
  Antisense strand to SEQ ID NO: 293456
aaugucacaucccauaaca

SEQ ID NO: 293458 - RNA, 19 nt, Artificial Sequence
  Description of Artificial Sequence: Synthetic oligonucleotide
  Sense strand starting at position 1561 of SEQ ID NO: 3772
ugacucauucugggaauuc

SEQ ID NO: 293459 - RNA, 19 nt, Artificial Sequence
  Description of Artificial Sequence: Synthetic oligonucleotide
  Antisense strand to SEQ ID NO: 293458
gaauucccagaaugaguca

SEQ ID NO: 293460 - RNA, 19 nt, Artificial Sequence
  Description of Artificial Sequence: Synthetic oligonucleotide
  Sense strand starting at position 1582 of SEQ ID NO: 3772
uucagaaaggcugaguagu

SEQ ID NO: 293461 - RNA, 19 nt, Artificial Sequence
  Description of Artificial Sequence: Synthetic oligonucleotide
  Antisense strand to SEQ ID NO: 293460
acuacucagccuuucugaa

SEQ ID NO: 293462 - RNA, 19 nt, Artificial Sequence
  Description of Artificial Sequence: Synthetic oligonucleotide
  Sense strand starting at position 1660 of SEQ ID NO: 3772
ccggccacaguguaauaaa

SEQ ID NO: 293463 - RNA, 19 nt, Artificial Sequence
  Description of Artificial Sequence: Synthetic oligonucleotide
  Antisense strand to SEQ ID NO: 293462
uuuauuacacuguggccgg

SEQ ID NO: 293464 - RNA, 19 nt, Artificial Sequence
  Description of Artificial Sequence: Synthetic oligonucleotide
  Sense strand starting at position 2095 of SEQ ID NO: 3772
acaugcgauuugguguuau

SEQ ID NO: 293465 - RNA, 19 nt, Artificial Sequence
  Description of Artificial Sequence: Synthetic oligonucleotide
  Antisense strand to SEQ ID NO: 293464
auaacaccaaaucgcaugu

SEQ ID NO: 293466 - RNA, 19 nt, Artificial Sequence
  Description of Artificial Sequence: Synthetic oligonucleotide
  Sense strand starting at position 2138 of SEQ ID NO: 3772
ccguauacccauuauccua

SEQ ID NO: 293467 - RNA, 19 nt, Artificial Sequence
  Description of Artificial Sequence: Synthetic oligonucleotide
  Antisense strand to SEQ ID NO: 293466
uaggauaauggguauacgg

SEQ ID NO: 293468 - RNA, 19 nt, Artificial Sequence
  Description of Artificial Sequence: Synthetic oligonucleotide
  Sense strand starting at position 2423 of SEQ ID NO: 3772
ugccucuguccucagggaa

SEQ ID NO: 293469 - RNA, 19 nt, Artificial Sequence
  Description of Artificial Sequence: Synthetic oligonucleotide
  Antisense strand to SEQ ID NO: 293468
uucccugaggacagaggca

SEQ ID NO: 293470 - RNA, 19 nt, Artificial Sequence
  Description of Artificial Sequence: Synthetic oligonucleotide
  Sense strand starting at position 2529 of SEQ ID NO: 3772
ugugguagagcauaaauau

SEQ ID NO: 293471 - RNA, 19 nt, Artificial Sequence
  Description of Artificial Sequence: Synthetic oligonucleotide
  Antisense strand to SEQ ID NO: 293470
auauuuaugcucuaccaca

SEQ ID NO: 293472 - RNA, 19 nt, Artificial Sequence
  Description of Artificial Sequence: Synthetic oligonucleotide
  Sense strand starting at position 2538 of SEQ ID NO: 3772
gcauaaauaugcuuaccag

SEQ ID NO: 293473 - RNA, 19 nt, Artificial Sequence
  Description of Artificial Sequence: Synthetic oligonucleotide
  Antisense strand to SEQ ID NO: 293472
cugguaagcauauuuaugc

SEQ ID NO: 293474 - RNA, 19 nt, Artificial Sequence
  Description of Artificial Sequence: Synthetic oligonucleotide
  Sense strand starting at position 2544 of SEQ ID NO: 3772
auaugcuuaccaggaaaga

SEQ ID NO: 293475 - RNA, 19 nt, Artificial Sequence
  Description of Artificial Sequence: Synthetic oligonucleotide
  Antisense strand to SEQ ID NO: 293474
ucuuuccugguaagcauau

SEQ ID NO: 293476 - RNA, 19 nt, Artificial Sequence
  Description of Artificial Sequence: Synthetic oligonucleotide
  Sense strand starting at position 2653 of SEQ ID NO: 3772
ggugguucgcuacaccuau

SEQ ID NO: 293477 - RNA, 19 nt, Artificial Sequence
  Description of Artificial Sequence: Synthetic oligonucleotide
  Antisense strand to SEQ ID NO: 293476
auagguguagcgaaccacc

SEQ ID NO: 293478 - RNA, 19 nt, Artificial Sequence
  Description of Artificial Sequence: Synthetic oligonucleotide
  Sense strand starting at position 3040 of SEQ ID NO: 3772
cgugcaaguaucuucguaa

SEQ ID NO: 293479 - RNA, 19 nt, Artificial Sequence
  Description of Artificial Sequence: Synthetic oligonucleotide
  Antisense strand to SEQ ID NO: 293478
uuacgaagauacuugcacg

SEQ ID NO: 293480 - RNA, 19 nt, Artificial Sequence
  Description of Artificial Sequence: Synthetic oligonucleotide
  Sense strand starting at position 3043 of SEQ ID NO: 3772
gcaaguaucuucguaauaa

SEQ ID NO: 293481 - RNA, 19 nt, Artificial Sequence
  Description of Artificial Sequence: Synthetic oligonucleotide
  Antisense strand to SEQ ID NO: 293480
uuauuacgaagauacuugc

SEQ ID NO: 293482 - RNA, 19 nt, Artificial Sequence
  Description of Artificial Sequence: Synthetic oligonucleotide
  Sense strand starting at position 3205 of SEQ ID NO: 3772
uguugaaccucuguuucua

SEQ ID NO: 293483 - RNA, 19 nt, Artificial Sequence
  Description of Artificial Sequence: Synthetic oligonucleotide
  Antisense strand to SEQ ID NO: 293482
uagaaacagagguucaaca

SEQ ID NO: 293484 - RNA, 19 nt, Artificial Sequence
  Description of Artificial Sequence: Synthetic oligonucleotide
  Sense strand starting at position 3314 of SEQ ID NO: 3772
ggacuuuauuagguuggaa

SEQ ID NO: 293485 - RNA, 19 nt, Artificial Sequence
  Description of Artificial Sequence: Synthetic oligonucleotide
  Antisense strand to SEQ ID NO: 293484
uuccaaccuaauaaagucc

SEQ ID NO: 293486 - RNA, 19 nt, Artificial Sequence
  Description of Artificial Sequence: Synthetic oligonucleotide
  Sense strand starting at position 3467 of SEQ ID NO: 3772
cccagaugccuuuggaauu

SEQ ID NO: 293487 - RNA, 19 nt, Artificial Sequence
  Description of Artificial Sequence: Synthetic oligonucleotide
  Antisense strand to SEQ ID NO: 293486
aauuccaaaggcaucuggg

SEQ ID NO: 293488 - RNA, 19 nt, Artificial Sequence
  Description of Artificial Sequence: Synthetic oligonucleotide
  Sense strand starting at position 3478 of SEQ ID NO: 3772
uuggaauuacccuggcaaa

SEQ ID NO: 293489 - RNA, 19 nt, Artificial Sequence
  Description of Artificial Sequence: Synthetic oligonucleotide
  Antisense strand to SEQ ID NO: 293488
uuugccaggguaauuccaa

SEQ ID NO: 293490 - RNA, 19 nt, Artificial Sequence
  Description of Artificial Sequence: Synthetic oligonucleotide
  Sense strand starting at position 3479 of SEQ ID NO: 3772
uggaauuacccuggcaaag

SEQ ID NO: 293491 - RNA, 19 nt, Artificial Sequence
  Description of Artificial Sequence: Synthetic oligonucleotide
  Antisense strand to SEQ ID NO: 293490
cuuugccaggguaauucca

SEQ ID NO: 293492 - RNA, 19 nt, Artificial Sequence
  Description of Artificial Sequence: Synthetic oligonucleotide
  Sense strand starting at position 3497 of SEQ ID NO: 3772
gcaugcacuagguguagaa

SEQ ID NO: 293493 - RNA, 19 nt, Artificial Sequence
  Description of Artificial Sequence: Synthetic oligonucleotide
  Antisense strand to SEQ ID NO: 293492
uucuacaccuagugcaugc

SEQ ID NO: 293494 - RNA, 19 nt, Artificial Sequence
  Description of Artificial Sequence: Synthetic oligonucleotide
  Sense strand starting at position 3548 of SEQ ID NO: 3772
gaagaagauuuagggacau

SEQ ID NO: 293495 - RNA, 19 nt, Artificial Sequence
  Description of Artificial Sequence: Synthetic oligonucleotide
  Antisense strand to SEQ ID NO: 293494
augucccuaaaucuucuuc

SEQ ID NO: 293496 - RNA, 19 nt, Artificial Sequence
  Description of Artificial Sequence: Synthetic oligonucleotide
  Sense strand starting at position 3560 of SEQ ID NO: 3772
gggacaucauuggagaaac

SEQ ID NO: 293497 - RNA, 19 nt, Artificial Sequence
  Description of Artificial Sequence: Synthetic oligonucleotide
  Antisense strand to SEQ ID NO: 293496
guuucuccaaugauguccc

SEQ ID NO: 293498 - RNA, 19 nt, Artificial Sequence
  Description of Artificial Sequence: Synthetic oligonucleotide
  Sense strand starting at position 3832 of SEQ ID NO: 3772
ggguauguacuagaugugu

SEQ ID NO: 293499 - RNA, 19 nt, Artificial Sequence
  Description of Artificial Sequence: Synthetic oligonucleotide
  Antisense strand to SEQ ID NO: 293498
acacaucuaguacauaccc

SEQ ID NO: 293500 - RNA, 19 nt, Artificial Sequence
  Description of Artificial Sequence: Synthetic oligonucleotide
  Sense strand starting at position 3834 of SEQ ID NO: 3772
guauguacuagauguguaa

SEQ ID NO: 293501 - RNA, 19 nt, Artificial Sequence
  Description of Artificial Sequence: Synthetic oligonucleotide
  Antisense strand to SEQ ID NO: 293500
uuacacaucuaguacauac

SEQ ID NO: 293502 - RNA, 19 nt, Artificial Sequence
  Description of Artificial Sequence: Synthetic oligonucleotide
  Sense strand starting at position 3836 of SEQ ID NO: 3772
auguacuagauguguaaga

SEQ ID NO: 293503 - RNA, 19 nt, Artificial Sequence
  Description of Artificial Sequence: Synthetic oligonucleotide
  Antisense strand to SEQ ID NO: 293502
ucuuacacaucuaguacau

SEQ ID NO: 293504 - RNA, 19 nt, Artificial Sequence
  Description of Artificial Sequence: Synthetic oligonucleotide
  Sense strand starting at position 3838 of SEQ ID NO: 3772
guacuagauguguaagaga

SEQ ID NO: 293505 - RNA, 19 nt, Artificial Sequence
  Description of Artificial Sequence: Synthetic oligonucleotide
  Antisense strand to SEQ ID NO: 293504
ucucuuacacaucuaguac

SEQ ID NO: 293506 - RNA, 19 nt, Artificial Sequence
  Description of Artificial Sequence: Synthetic oligonucleotide
  Sense strand starting at position 115 of SEQ ID NO: 3773
ucaccagucccugaugaau

SEQ ID NO: 293507 - RNA, 19 nt, Artificial Sequence
  Description of Artificial Sequence: Synthetic oligonucleotide
  Antisense strand to SEQ ID NO: 293506
auucaucagggacugguga

SEQ ID NO: 293508 - RNA, 19 nt, Artificial Sequence
  Description of Artificial Sequence: Synthetic oligonucleotide
  Sense strand starting at position 949 of SEQ ID NO: 3773
cuuccaugggccugguaau

SEQ ID NO: 293509 - RNA, 19 nt, Artificial Sequence
  Description of Artificial Sequence: Synthetic oligonucleotide
  Antisense strand to SEQ ID NO: 293508
auuaccaggcccauggaag

SEQ ID NO: 293510 - RNA, 19 nt, Artificial Sequence
  Description of Artificial Sequence: Synthetic oligonucleotide
  Sense strand starting at position 950 of SEQ ID NO: 3773
uuccaugggccugguaaua

SEQ ID NO: 293511 - RNA, 19 nt, Artificial Sequence
  Description of Artificial Sequence: Synthetic oligonucleotide
  Antisense strand to SEQ ID NO: 293510
uauuaccaggcccauggaa

SEQ ID NO: 293512 - RNA, 19 nt, Artificial Sequence
  Description of Artificial Sequence: Synthetic oligonucleotide
  Sense strand starting at position 1034 of SEQ ID NO: 3773
uuugcauccuuugugcaau

SEQ ID NO: 293513 - RNA, 19 nt, Artificial Sequence
  Description of Artificial Sequence: Synthetic oligonucleotide
  Antisense strand to SEQ ID NO: 293512
auugcacaaaggaugcaaa

SEQ ID NO: 293514 - RNA, 19 nt, Artificial Sequence
  Description of Artificial Sequence: Synthetic oligonucleotide
  Sense strand starting at position 1037 of SEQ ID NO: 3773
gcauccuuugugcaaucca

SEQ ID NO: 293515 - RNA, 19 nt, Artificial Sequence
  Description of Artificial Sequence: Synthetic oligonucleotide
  Antisense strand to SEQ ID NO: 293514
uggauugcacaaaggaugc

SEQ ID NO: 293516 - RNA, 19 nt, Artificial Sequence
  Description of Artificial Sequence: Synthetic oligonucleotide
  Sense strand starting at position 1066 of SEQ ID NO: 3773
guagaauuccagcaucagg

SEQ ID NO: 293517 - RNA, 19 nt, Artificial Sequence
  Description of Artificial Sequence: Synthetic oligonucleotide
  Antisense strand to SEQ ID NO: 293516
ccugaugcuggaauucuac

SEQ ID NO: 293518 - RNA, 19 nt, Artificial Sequence
  Description of Artificial Sequence: Synthetic oligonucleotide
  Sense strand starting at position 1098 of SEQ ID NO: 3773
acagaaacguagucaggaa

SEQ ID NO: 293519 - RNA, 19 nt, Artificial Sequence
  Description of Artificial Sequence: Synthetic oligonucleotide
  Antisense strand to SEQ ID NO: 293518
uuccugacuacguuucugu

SEQ ID NO: 293520 - RNA, 19 nt, Artificial Sequence
  Description of Artificial Sequence: Synthetic oligonucleotide
  Sense strand starting at position 1124 of SEQ ID NO: 3773
accuguuaaguccacucaa

SEQ ID NO: 293521 - RNA, 19 nt, Artificial Sequence
  Description of Artificial Sequence: Synthetic oligonucleotide
  Antisense strand to SEQ ID NO: 293520
uugaguggacuuaacaggu

SEQ ID NO: 293522 - RNA, 19 nt, Artificial Sequence
  Description of Artificial Sequence: Synthetic oligonucleotide
  Sense strand starting at position 1191 of SEQ ID NO: 3773
aggcucuccuacuuaaagu

SEQ ID NO: 293523 - RNA, 19 nt, Artificial Sequence
  Description of Artificial Sequence: Synthetic oligonucleotide
  Antisense strand to SEQ ID NO: 293522
acuuuaaguaggagagccu

SEQ ID NO: 293524 - RNA, 19 nt, Artificial Sequence
  Description of Artificial Sequence: Synthetic oligonucleotide
  Sense strand starting at position 1201 of SEQ ID NO: 3773
acuuaaaguuguuugacuu

SEQ ID NO: 293525 - RNA, 19 nt, Artificial Sequence
  Description of Artificial Sequence: Synthetic oligonucleotide
  Antisense strand to SEQ ID NO: 293524
aagucaaacaacuuuaagu

SEQ ID NO: 293526 - RNA, 19 nt, Artificial Sequence
  Description of Artificial Sequence: Synthetic oligonucleotide
  Sense strand starting at position 1202 of SEQ ID NO: 3773
cuuaaaguuguuugacuuu

SEQ ID NO: 293527 - RNA, 19 nt, Artificial Sequence
  Description of Artificial Sequence: Synthetic oligonucleotide
  Antisense strand to SEQ ID NO: 293526
aaagucaaacaacuuuaag

SEQ ID NO: 293528 - RNA, 19 nt, Artificial Sequence
  Description of Artificial Sequence: Synthetic oligonucleotide
  Sense strand starting at position 1214 of SEQ ID NO: 3773
ugacuuuacugggugugua

SEQ ID NO: 293529 - RNA, 19 nt, Artificial Sequence
  Description of Artificial Sequence: Synthetic oligonucleotide
  Antisense strand to SEQ ID NO: 293528
uacacacccaguaaaguca

SEQ ID NO: 293530 - RNA, 19 nt, Artificial Sequence
  Description of Artificial Sequence: Synthetic oligonucleotide
  Sense strand starting at position 1217 of SEQ ID NO: 3773
cuuuacuggguguguagaa

SEQ ID NO: 293531 - RNA, 19 nt, Artificial Sequence
  Description of Artificial Sequence: Synthetic oligonucleotide
  Antisense strand to SEQ ID NO: 293530
uucuacacacccaguaaag

SEQ ID NO: 293532 - RNA, 19 nt, Artificial Sequence
  Description of Artificial Sequence: Synthetic oligonucleotide
  Sense strand starting at position 1218 of SEQ ID NO: 3773
uuuacuggguguguagaaa

SEQ ID NO: 293533 - RNA, 19 nt, Artificial Sequence
  Description of Artificial Sequence: Synthetic oligonucleotide
  Antisense strand to SEQ ID NO: 293532
uuucuacacacccaguaaa

SEQ ID NO: 293534 - RNA, 19 nt, Artificial Sequence
  Description of Artificial Sequence: Synthetic oligonucleotide
  Sense strand starting at position 1252 of SEQ ID NO: 3773
agccuucucugacuagaaa

SEQ ID NO: 293535 - RNA, 19 nt, Artificial Sequence
  Description of Artificial Sequence: Synthetic oligonucleotide
  Antisense strand to SEQ ID NO: 293534
uuucuagucagagaaggcu

SEQ ID NO: 293536 - RNA, 19 nt, Artificial Sequence
  Description of Artificial Sequence: Synthetic oligonucleotide
  Sense strand starting at position 1381 of SEQ ID NO: 3773
gaaugagguuucuaaguaa

SEQ ID NO: 293537 - RNA, 19 nt, Artificial Sequence
  Description of Artificial Sequence: Synthetic oligonucleotide
  Antisense strand to SEQ ID NO: 293536
uuacuuagaaaccucauuc

SEQ ID NO: 293538 - RNA, 19 nt, Artificial Sequence
  Description of Artificial Sequence: Synthetic oligonucleotide
  Sense strand starting at position 1545 of SEQ ID NO: 3773
acaugauacuauucgagau

SEQ ID NO: 293539 - RNA, 19 nt, Artificial Sequence
  Description of Artificial Sequence: Synthetic oligonucleotide
  Antisense strand to SEQ ID NO: 293538
aucucgaauaguaucaugu

SEQ ID NO: 293540 - RNA, 19 nt, Artificial Sequence
  Description of Artificial Sequence: Synthetic oligonucleotide
  Sense strand starting at position 1547 of SEQ ID NO: 3773
augauacuauucgagaugu

SEQ ID NO: 293541 - RNA, 19 nt, Artificial Sequence
  Description of Artificial Sequence: Synthetic oligonucleotide
  Antisense strand to SEQ ID NO: 293540
acaucucgaauaguaucau

SEQ ID NO: 293542 - RNA, 19 nt, Artificial Sequence
  Description of Artificial Sequence: Synthetic oligonucleotide
  Sense strand starting at position 1549 of SEQ ID NO: 3773
gauacuauucgagauguuc

SEQ ID NO: 293543 - RNA, 19 nt, Artificial Sequence
  Description of Artificial Sequence: Synthetic oligonucleotide
  Antisense strand to SEQ ID NO: 293542
gaacaucucgaauaguauc

SEQ ID NO: 293544 - RNA, 19 nt, Artificial Sequence
  Description of Artificial Sequence: Synthetic oligonucleotide
  Sense strand starting at position 1794 of SEQ ID NO: 3773
aagacauucggcuaacgga

SEQ ID NO: 293545 - RNA, 19 nt, Artificial Sequence
  Description of Artificial Sequence: Synthetic oligonucleotide
  Antisense strand to SEQ ID NO: 293544
uccguuagccgaaugucuu

SEQ ID NO: 293546 - RNA, 19 nt, Artificial Sequence
  Description of Artificial Sequence: Synthetic oligonucleotide
  Sense strand starting at position 2001 of SEQ ID NO: 3773
ggcgucaucgaccucguua

SEQ ID NO: 293547 - RNA, 19 nt, Artificial Sequence
  Description of Artificial Sequence: Synthetic oligonucleotide
  Antisense strand to SEQ ID NO: 293546
uaacgaggucgaugacgcc

SEQ ID NO: 293548 - RNA, 19 nt, Artificial Sequence
  Description of Artificial Sequence: Synthetic oligonucleotide
  Sense strand starting at position 2023 of SEQ ID NO: 3773
aauggauuguuggcaguuu

SEQ ID NO: 293549 - RNA, 19 nt, Artificial Sequence
  Description of Artificial Sequence: Synthetic oligonucleotide
  Antisense strand to SEQ ID NO: 293548
aaacugccaacaauccauu

SEQ ID NO: 293550 - RNA, 19 nt, Artificial Sequence
  Description of Artificial Sequence: Synthetic oligonucleotide
  Sense strand starting at position 2090 of SEQ ID NO: 3773
ccgguuauguccucagcga

SEQ ID NO: 293551 - RNA, 19 nt, Artificial Sequence
  Description of Artificial Sequence: Synthetic oligonucleotide
  Antisense strand to SEQ ID NO: 293550
ucgcugaggacauaaccgg

SEQ ID NO: 293552 - RNA, 19 nt, Artificial Sequence
  Description of Artificial Sequence: Synthetic oligonucleotide
  Sense strand starting at position 2091 of SEQ ID NO: 3773
cgguuauguccucagcgau

SEQ ID NO: 293553 - RNA, 19 nt, Artificial Sequence
  Description of Artificial Sequence: Synthetic oligonucleotide
  Antisense strand to SEQ ID NO: 293552
aucgcugaggacauaaccg

SEQ ID NO: 293554 - RNA, 19 nt, Artificial Sequence
  Description of Artificial Sequence: Synthetic oligonucleotide
  Sense strand starting at position 2135 of SEQ ID NO: 3773
cuaggcaccuuucugaauu

SEQ ID NO: 293555 - RNA, 19 nt, Artificial Sequence
  Description of Artificial Sequence: Synthetic oligonucleotide
  Antisense strand to SEQ ID NO: 293554
aauucagaaaggugccuag

SEQ ID NO: 293556 - RNA, 19 nt, Artificial Sequence
  Description of Artificial Sequence: Synthetic oligonucleotide
  Sense strand starting at position 2517 of SEQ ID NO: 3773
ccugcucuugucuauggaa

SEQ ID NO: 293557 - RNA, 19 nt, Artificial Sequence
  Description of Artificial Sequence: Synthetic oligonucleotide
  Antisense strand to SEQ ID NO: 293556
uuccauagacaagagcagg

SEQ ID NO: 293558 - RNA, 19 nt, Artificial Sequence
  Description of Artificial Sequence: Synthetic oligonucleotide
  Sense strand starting at position 2519 of SEQ ID NO: 3773
ugcucuugucuauggaaca

SEQ ID NO: 293559 - RNA, 19 nt, Artificial Sequence
  Description of Artificial Sequence: Synthetic oligonucleotide
  Antisense strand to SEQ ID NO: 293558
uguuccauagacaagagca

SEQ ID NO: 293560 - RNA, 19 nt, Artificial Sequence
  Description of Artificial Sequence: Synthetic oligonucleotide
  Sense strand starting at position 2583 of SEQ ID NO: 3773
ccguaaaucccagaacuuu

SEQ ID NO: 293561 - RNA, 19 nt, Artificial Sequence
  Description of Artificial Sequence: Synthetic oligonucleotide
  Antisense strand to SEQ ID NO: 293560
aaaguucugggauuuacgg

SEQ ID NO: 293562 - RNA, 19 nt, Artificial Sequence
  Description of Artificial Sequence: Synthetic oligonucleotide
  Sense strand starting at position 2742 of SEQ ID NO: 3773
guggaucguaucgcuuauu

SEQ ID NO: 293563 - RNA, 19 nt, Artificial Sequence
  Description of Artificial Sequence: Synthetic oligonucleotide
  Antisense strand to SEQ ID NO: 293562
aauaagcgauacgauccac

SEQ ID NO: 293564 - RNA, 19 nt, Artificial Sequence
  Description of Artificial Sequence: Synthetic oligonucleotide
  Sense strand starting at position 2743 of SEQ ID NO: 3773
uggaucguaucgcuuauuu

SEQ ID NO: 293565 - RNA, 19 nt, Artificial Sequence
  Description of Artificial Sequence: Synthetic oligonucleotide
  Antisense strand to SEQ ID NO: 293564
aaauaagcgauacgaucca

SEQ ID NO: 293566 - RNA, 19 nt, Artificial Sequence
  Description of Artificial Sequence: Synthetic oligonucleotide
  Sense strand starting at position 3203 of SEQ ID NO: 3773
ucugaaccauuguagagua

SEQ ID NO: 293567 - RNA, 19 nt, Artificial Sequence
  Description of Artificial Sequence: Synthetic oligonucleotide
  Antisense strand to SEQ ID NO: 293566
uacucuacaaugguucaga

SEQ ID NO: 293568 - RNA, 19 nt, Artificial Sequence
  Description of Artificial Sequence: Synthetic oligonucleotide
  Sense strand starting at position 3249 of SEQ ID NO: 3773
ugaaucuauuucugacuga

SEQ ID NO: 293569 - RNA, 19 nt, Artificial Sequence
  Description of Artificial Sequence: Synthetic oligonucleotide
  Antisense strand to SEQ ID NO: 293568
ucagucagaaauagauuca

SEQ ID NO: 293570 - RNA, 19 nt, Artificial Sequence
  Description of Artificial Sequence: Synthetic oligonucleotide
  Sense strand starting at position 3325 of SEQ ID NO: 3773
gggagcauggugugaucau

SEQ ID NO: 293571 - RNA, 19 nt, Artificial Sequence
  Description of Artificial Sequence: Synthetic oligonucleotide
  Antisense strand to SEQ ID NO: 293570
augaucacaccaugcuccc

SEQ ID NO: 293572 - RNA, 19 nt, Artificial Sequence
  Description of Artificial Sequence: Synthetic oligonucleotide
  Sense strand starting at position 3554 of SEQ ID NO: 3773
gccagcaugccugggaauu

SEQ ID NO: 293573 - RNA, 19 nt, Artificial Sequence
  Description of Artificial Sequence: Synthetic oligonucleotide
  Antisense strand to SEQ ID NO: 293572
aauucccaggcaugcuggc

SEQ ID NO: 293574 - RNA, 19 nt, Artificial Sequence
  Description of Artificial Sequence: Synthetic oligonucleotide
  Sense strand starting at position 3761 of SEQ ID NO: 3773
agaauaccuuguguuuaaa

SEQ ID NO: 293575 - RNA, 19 nt, Artificial Sequence
  Description of Artificial Sequence: Synthetic oligonucleotide
  Antisense strand to SEQ ID NO: 293574
uuuaaacacaagguauucu

SEQ ID NO: 293576 - RNA, 19 nt, Artificial Sequence
  Description of Artificial Sequence: Synthetic oligonucleotide
  Sense strand starting at position 3764 of SEQ ID NO: 3773
auaccuuguguuuaaauag

SEQ ID NO: 293577 - RNA, 19 nt, Artificial Sequence
  Description of Artificial Sequence: Synthetic oligonucleotide
  Antisense strand to SEQ ID NO: 293576
cuauuuaaacacaagguau

SEQ ID NO: 293578 - RNA, 19 nt, Artificial Sequence
  Description of Artificial Sequence: Synthetic oligonucleotide
  Sense strand starting at position 3926 of SEQ ID NO: 3773
gggucauagcuuuguaccu

SEQ ID NO: 293579 - RNA, 19 nt, Artificial Sequence
  Description of Artificial Sequence: Synthetic oligonucleotide
  Antisense strand to SEQ ID NO: 293578
agguacaaagcuaugaccc

SEQ ID NO: 293580 - RNA, 19 nt, Artificial Sequence
  Description of Artificial Sequence: Synthetic oligonucleotide
  Sense strand starting at position 3927 of SEQ ID NO: 3773
ggucauagcuuuguaccuu

SEQ ID NO: 293581 - RNA, 19 nt, Artificial Sequence
  Description of Artificial Sequence: Synthetic oligonucleotide
  Antisense strand to SEQ ID NO: 293580
aagguacaaagcuaugacc

SEQ ID NO: 293582 - RNA, 19 nt, Artificial Sequence
  Description of Artificial Sequence: Synthetic oligonucleotide
  Sense strand starting at position 3957 of SEQ ID NO: 3773
gcuauuaguguuuaguuga

SEQ ID NO: 293583 - RNA, 19 nt, Artificial Sequence
  Description of Artificial Sequence: Synthetic oligonucleotide
  Antisense strand to SEQ ID NO: 293582
ucaacuaaacacuaauagc

SEQ ID NO: 293584 - RNA, 19 nt, Artificial Sequence
  Description of Artificial Sequence: Synthetic oligonucleotide
  Sense strand starting at position 3962 of SEQ ID NO: 3773
uaguguuuaguugaagcua

SEQ ID NO: 293585 - RNA, 19 nt, Artificial Sequence
  Description of Artificial Sequence: Synthetic oligonucleotide
  Antisense strand to SEQ ID NO: 293584
uagcuucaacuaaacacua

SEQ ID NO: 293586 - RNA, 19 nt, Artificial Sequence
  Description of Artificial Sequence: Synthetic oligonucleotide
  Sense strand starting at position 86 of SEQ ID NO: 3774
ugcacuggugucuaaggua

SEQ ID NO: 293587 - RNA, 19 nt, Artificial Sequence
  Description of Artificial Sequence: Synthetic oligonucleotide
  Antisense strand to SEQ ID NO: 293586
uaccuuagacaccagugca

SEQ ID NO: 293588 - RNA, 19 nt, Artificial Sequence
  Description of Artificial Sequence: Synthetic oligonucleotide
  Sense strand starting at position 122 of SEQ ID NO: 3774
auuacuuaugacugcaaag

SEQ ID NO: 293589 - RNA, 19 nt, Artificial Sequence
  Description of Artificial Sequence: Synthetic oligonucleotide
  Antisense strand to SEQ ID NO: 293588
cuuugcagucauaaguaau

SEQ ID NO: 293590 - RNA, 19 nt, Artificial Sequence
  Description of Artificial Sequence: Synthetic oligonucleotide
  Sense strand starting at position 141 of SEQ ID NO: 3774
uuaggagucuugcucuuaa

SEQ ID NO: 293591 - RNA, 19 nt, Artificial Sequence
  Description of Artificial Sequence: Synthetic oligonucleotide
  Antisense strand to SEQ ID NO: 293590
uuaagagcaagacuccuaa

SEQ ID NO: 293592 - RNA, 19 nt, Artificial Sequence
  Description of Artificial Sequence: Synthetic oligonucleotide
  Sense strand starting at position 175 of SEQ ID NO: 3774
uguaauacuuggccuccaa

SEQ ID NO: 293593 - RNA, 19 nt, Artificial Sequence
  Description of Artificial Sequence: Synthetic oligonucleotide
  Antisense strand to SEQ ID NO: 293592
uuggaggccaaguauuaca

SEQ ID NO: 293594 - RNA, 19 nt, Artificial Sequence
  Description of Artificial Sequence: Synthetic oligonucleotide
  Sense strand starting at position 305 of SEQ ID NO: 3774
ggccacucuugacuggaaa

SEQ ID NO: 293595 - RNA, 19 nt, Artificial Sequence
  Description of Artificial Sequence: Synthetic oligonucleotide
  Antisense strand to SEQ ID NO: 293594
uuuccagucaagaguggcc

SEQ ID NO: 293596 - RNA, 19 nt, Artificial Sequence
  Description of Artificial Sequence: Synthetic oligonucleotide
  Sense strand starting at position 391 of SEQ ID NO: 3774
gcuuuauuuguugacguua

SEQ ID NO: 293597 - RNA, 19 nt, Artificial Sequence
  Description of Artificial Sequence: Synthetic oligonucleotide
  Antisense strand to SEQ ID NO: 293596
uaacgucaacaaauaaagc

SEQ ID NO: 293598 - RNA, 19 nt, Artificial Sequence
  Description of Artificial Sequence: Synthetic oligonucleotide
  Sense strand starting at position 405 of SEQ ID NO: 3774
cguuauugccaauaacuca

SEQ ID NO: 293599 - RNA, 19 nt, Artificial Sequence
  Description of Artificial Sequence: Synthetic oligonucleotide
  Antisense strand to SEQ ID NO: 293598
ugaguuauuggcaauaacg

SEQ ID NO: 293600 - RNA, 19 nt, Artificial Sequence
  Description of Artificial Sequence: Synthetic oligonucleotide
  Sense strand starting at position 412 of SEQ ID NO: 3774
gccaauaacucaucaagug

SEQ ID NO: 293601 - RNA, 19 nt, Artificial Sequence
  Description of Artificial Sequence: Synthetic oligonucleotide
  Antisense strand to SEQ ID NO: 293600
cacuugaugaguuauuggc

SEQ ID NO: 293602 - RNA, 19 nt, Artificial Sequence
  Description of Artificial Sequence: Synthetic oligonucleotide
  Sense strand starting at position 419 of SEQ ID NO: 3774
acucaucaagugggucaau

SEQ ID NO: 293603 - RNA, 19 nt, Artificial Sequence
  Description of Artificial Sequence: Synthetic oligonucleotide
  Antisense strand to SEQ ID NO: 293602
auugacccacuugaugagu

SEQ ID NO: 293604 - RNA, 19 nt, Artificial Sequence
  Description of Artificial Sequence: Synthetic oligonucleotide
  Sense strand starting at position 422 of SEQ ID NO: 3774
caucaagugggucaaucau

SEQ ID NO: 293605 - RNA, 19 nt, Artificial Sequence
  Description of Artificial Sequence: Synthetic oligonucleotide
  Antisense strand to SEQ ID NO: 293604
augauugacccacuugaug

SEQ ID NO: 293606 - RNA, 19 nt, Artificial Sequence
  Description of Artificial Sequence: Synthetic oligonucleotide
  Sense strand starting at position 544 of SEQ ID NO: 3774
gugggagggcaucauuaua

SEQ ID NO: 293607 - RNA, 19 nt, Artificial Sequence
  Description of Artificial Sequence: Synthetic oligonucleotide
  Antisense strand to SEQ ID NO: 293606
uauaaugaugcccucccac

SEQ ID NO: 293608 - RNA, 19 nt, Artificial Sequence
  Description of Artificial Sequence: Synthetic oligonucleotide
  Sense strand starting at position 586 of SEQ ID NO: 3774
gaaagccugugauuccaca

SEQ ID NO: 293609 - RNA, 19 nt, Artificial Sequence
  Description of Artificial Sequence: Synthetic oligonucleotide
  Antisense strand to SEQ ID NO: 293608
uguggaaucacaggcuuuc

SEQ ID NO: 293610 - RNA, 19 nt, Artificial Sequence
  Description of Artificial Sequence: Synthetic oligonucleotide
  Sense strand starting at position 622 of SEQ ID NO: 3774
ugcgguuuauuuccaggua

SEQ ID NO: 293611 - RNA, 19 nt, Artificial Sequence
  Description of Artificial Sequence: Synthetic oligonucleotide
  Antisense strand to SEQ ID NO: 293610
uaccuggaaauaaaccgca

SEQ ID NO: 293612 - RNA, 19 nt, Artificial Sequence
  Description of Artificial Sequence: Synthetic oligonucleotide
  Sense strand starting at position 661 of SEQ ID NO: 3774
guuugauuaccaugggcaa

SEQ ID NO: 293613 - RNA, 19 nt, Artificial Sequence
  Description of Artificial Sequence: Synthetic oligonucleotide
  Antisense strand to SEQ ID NO: 293612
uugcccaugguaaucaaac

SEQ ID NO: 293614 - RNA, 19 nt, Artificial Sequence
  Description of Artificial Sequence: Synthetic oligonucleotide
  Sense strand starting at position 676 of SEQ ID NO: 3774
gcaacagugggauagcuau

SEQ ID NO: 293615 - RNA, 19 nt, Artificial Sequence
  Description of Artificial Sequence: Synthetic oligonucleotide
  Antisense strand to SEQ ID NO: 293614
auagcuaucccacuguugc

SEQ ID NO: 293616 - RNA, 19 nt, Artificial Sequence
  Description of Artificial Sequence: Synthetic oligonucleotide
  Sense strand starting at position 780 of SEQ ID NO: 3774
gugcuacuugaaugaagau

SEQ ID NO: 293617 - RNA, 19 nt, Artificial Sequence
  Description of Artificial Sequence: Synthetic oligonucleotide
  Antisense strand to SEQ ID NO: 293616
aucuucauucaaguagcac

SEQ ID NO: 293618 - RNA, 19 nt, Artificial Sequence
  Description of Artificial Sequence: Synthetic oligonucleotide
  Sense strand starting at position 797 of SEQ ID NO: 3774
augcaccugucucuacaua

SEQ ID NO: 293619 - RNA, 19 nt, Artificial Sequence
  Description of Artificial Sequence: Synthetic oligonucleotide
  Antisense strand to SEQ ID NO: 293618
uauguagagacaggugcau

SEQ ID NO: 293620 - RNA, 19 nt, Artificial Sequence
  Description of Artificial Sequence: Synthetic oligonucleotide
  Sense strand starting at position 1007 of SEQ ID NO: 3774
agugguugucaaugcauuu

SEQ ID NO: 293621 - RNA, 19 nt, Artificial Sequence
  Description of Artificial Sequence: Synthetic oligonucleotide
  Antisense strand to SEQ ID NO: 293620
aaaugcauugacaaccacu

SEQ ID NO: 293622 - RNA, 19 nt, Artificial Sequence
  Description of Artificial Sequence: Synthetic oligonucleotide
  Sense strand starting at position 1124 of SEQ ID NO: 3774
acuugaagguuuccaagaa

SEQ ID NO: 293623 - RNA, 19 nt, Artificial Sequence
  Description of Artificial Sequence: Synthetic oligonucleotide
  Antisense strand to SEQ ID NO: 293622
uucuuggaaaccuucaagu

SEQ ID NO: 293624 - RNA, 19 nt, Artificial Sequence
  Description of Artificial Sequence: Synthetic oligonucleotide
  Sense strand starting at position 1177 of SEQ ID NO: 3774
ucugucaaucaauaguuua

SEQ ID NO: 293625 - RNA, 19 nt, Artificial Sequence
  Description of Artificial Sequence: Synthetic oligonucleotide
  Antisense strand to SEQ ID NO: 293624
uaaacuauugauugacaga

SEQ ID NO: 293626 - RNA, 19 nt, Artificial Sequence
  Description of Artificial Sequence: Synthetic oligonucleotide
  Sense strand starting at position 1180 of SEQ ID NO: 3774
gucaaucaauaguuuaguu

SEQ ID NO: 293627 - RNA, 19 nt, Artificial Sequence
  Description of Artificial Sequence: Synthetic oligonucleotide
  Antisense strand to SEQ ID NO: 293626
aacuaaacuauugauugac

SEQ ID NO: 293628 - RNA, 19 nt, Artificial Sequence
  Description of Artificial Sequence: Synthetic oligonucleotide
  Sense strand starting at position 1563 of SEQ ID NO: 3774
gagcaaagccugcaaguuu

SEQ ID NO: 293629 - RNA, 19 nt, Artificial Sequence
  Description of Artificial Sequence: Synthetic oligonucleotide
  Antisense strand to SEQ ID NO: 293628
aaacuugcaggcuuugcuc

SEQ ID NO: 293630 - RNA, 19 nt, Artificial Sequence
  Description of Artificial Sequence: Synthetic oligonucleotide
  Sense strand starting at position 1574 of SEQ ID NO: 3774
gcaaguuuccaguaagaca

SEQ ID NO: 293631 - RNA, 19 nt, Artificial Sequence
  Description of Artificial Sequence: Synthetic oligonucleotide
  Antisense strand to SEQ ID NO: 293630
ugucuuacuggaaacuugc

SEQ ID NO: 293632 - RNA, 19 nt, Artificial Sequence
  Description of Artificial Sequence: Synthetic oligonucleotide
  Sense strand starting at position 2459 of SEQ ID NO: 3774
gcuucuaaucagggacauu

SEQ ID NO: 293633 - RNA, 19 nt, Artificial Sequence
  Description of Artificial Sequence: Synthetic oligonucleotide
  Antisense strand to SEQ ID NO: 293632
aaugucccugauuagaagc

SEQ ID NO: 293634 - RNA, 19 nt, Artificial Sequence
  Description of Artificial Sequence: Synthetic oligonucleotide
  Sense strand starting at position 2909 of SEQ ID NO: 3774
caguauuggguuugguaga

SEQ ID NO: 293635 - RNA, 19 nt, Artificial Sequence
  Description of Artificial Sequence: Synthetic oligonucleotide
  Antisense strand to SEQ ID NO: 293634
ucuaccaaacccaauacug

SEQ ID NO: 293636 - RNA, 19 nt, Artificial Sequence
  Description of Artificial Sequence: Synthetic oligonucleotide
  Sense strand starting at position 2914 of SEQ ID NO: 3774
uuggguuugguagacucaa

SEQ ID NO: 293637 - RNA, 19 nt, Artificial Sequence
  Description of Artificial Sequence: Synthetic oligonucleotide
  Antisense strand to SEQ ID NO: 293636
uugagucuaccaaacccaa

SEQ ID NO: 293638 - RNA, 19 nt, Artificial Sequence
  Description of Artificial Sequence: Synthetic oligonucleotide
  Sense strand starting at position 3151 of SEQ ID NO: 3774
aucugaggucuucagaggu

SEQ ID NO: 293639 - RNA, 19 nt, Artificial Sequence
  Description of Artificial Sequence: Synthetic oligonucleotide
  Antisense strand to SEQ ID NO: 293638
accucugaagaccucagau

SEQ ID NO: 293640 - RNA, 19 nt, Artificial Sequence
  Description of Artificial Sequence: Synthetic oligonucleotide
  Sense strand starting at position 3186 of SEQ ID NO: 3774
cagaaugugacgcauugua

SEQ ID NO: 293641 - RNA, 19 nt, Artificial Sequence
  Description of Artificial Sequence: Synthetic oligonucleotide
  Antisense strand to SEQ ID NO: 293640
uacaaugcgucacauucug

SEQ ID NO: 293642 - RNA, 19 nt, Artificial Sequence
  Description of Artificial Sequence: Synthetic oligonucleotide
  Sense strand starting at position 3449 of SEQ ID NO: 3774
uaugcuucuugggugaauu

SEQ ID NO: 293643 - RNA, 19 nt, Artificial Sequence
  Description of Artificial Sequence: Synthetic oligonucleotide
  Antisense strand to SEQ ID NO: 293642
aauucacccaagaagcaua

SEQ ID NO: 293644 - RNA, 19 nt, Artificial Sequence
  Description of Artificial Sequence: Synthetic oligonucleotide
  Sense strand starting at position 3450 of SEQ ID NO: 3774
augcuucuugggugaauug

SEQ ID NO: 293645 - RNA, 19 nt, Artificial Sequence
  Description of Artificial Sequence: Synthetic oligonucleotide
  Antisense strand to SEQ ID NO: 293644
caauucacccaagaagcau

SEQ ID NO: 293646 - RNA, 19 nt, Artificial Sequence
  Description of Artificial Sequence: Synthetic oligonucleotide
  Sense strand starting at position 3526 of SEQ ID NO: 3774
aagagauuauuguuugccu

SEQ ID NO: 293647 - RNA, 19 nt, Artificial Sequence
  Description of Artificial Sequence: Synthetic oligonucleotide
  Antisense strand to SEQ ID NO: 293646
aggcaaacaauaaucucuu

SEQ ID NO: 293648 - RNA, 19 nt, Artificial Sequence
  Description of Artificial Sequence: Synthetic oligonucleotide
  Sense strand starting at position 3527 of SEQ ID NO: 3774
agagauuauuguuugccuu

SEQ ID NO: 293649 - RNA, 19 nt, Artificial Sequence
  Description of Artificial Sequence: Synthetic oligonucleotide
  Antisense strand to SEQ ID NO: 293648
aaggcaaacaauaaucucu

SEQ ID NO: 293650 - RNA, 19 nt, Artificial Sequence
  Description of Artificial Sequence: Synthetic oligonucleotide
  Sense strand starting at position 3529 of SEQ ID NO: 3774
agauuauuguuugccuuua

SEQ ID NO: 293651 - RNA, 19 nt, Artificial Sequence
  Description of Artificial Sequence: Synthetic oligonucleotide
  Antisense strand to SEQ ID NO: 293650
uaaaggcaaacaauaaucu

SEQ ID NO: 293652 - RNA, 19 nt, Artificial Sequence
  Description of Artificial Sequence: Synthetic oligonucleotide
  Sense strand starting at position 3569 of SEQ ID NO: 3774
ugcauauaaucucugagaa

SEQ ID NO: 293653 - RNA, 19 nt, Artificial Sequence
  Description of Artificial Sequence: Synthetic oligonucleotide
  Antisense strand to SEQ ID NO: 293652
uucucagagauuauaugca

SEQ ID NO: 293654 - RNA, 19 nt, Artificial Sequence
  Description of Artificial Sequence: Synthetic oligonucleotide
  Sense strand starting at position 3570 of SEQ ID NO: 3774
gcauauaaucucugagaaa

SEQ ID NO: 293655 - RNA, 19 nt, Artificial Sequence
  Description of Artificial Sequence: Synthetic oligonucleotide
  Antisense strand to SEQ ID NO: 293654
uuucucagagauuauaugc

SEQ ID NO: 293656 - RNA, 19 nt, Artificial Sequence
  Description of Artificial Sequence: Synthetic oligonucleotide
  Sense strand starting at position 3619 of SEQ ID NO: 3774
gucucauuaccuugcaaag

SEQ ID NO: 293657 - RNA, 19 nt, Artificial Sequence
  Description of Artificial Sequence: Synthetic oligonucleotide
  Antisense strand to SEQ ID NO: 293656
cuuugcaagguaaugagac

SEQ ID NO: 293658 - RNA, 19 nt, Artificial Sequence
  Description of Artificial Sequence: Synthetic oligonucleotide
  Sense strand starting at position 3766 of SEQ ID NO: 3774
gaccaaagguaauuguuaa

SEQ ID NO: 293659 - RNA, 19 nt, Artificial Sequence
  Description of Artificial Sequence: Synthetic oligonucleotide
  Antisense strand to SEQ ID NO: 293658
uuaacaauuaccuuugguc

SEQ ID NO: 293660 - RNA, 19 nt, Artificial Sequence
  Description of Artificial Sequence: Synthetic oligonucleotide
  Sense strand starting at position 3810 of SEQ ID NO: 3774
ggcuaacaaucucuggaau

SEQ ID NO: 293661 - RNA, 19 nt, Artificial Sequence
  Description of Artificial Sequence: Synthetic oligonucleotide
  Antisense strand to SEQ ID NO: 293660
auuccagagauuguuagcc

SEQ ID NO: 293662 - RNA, 19 nt, Artificial Sequence
  Description of Artificial Sequence: Synthetic oligonucleotide
  Sense strand starting at position 3811 of SEQ ID NO: 3774
gcuaacaaucucuggaauc

SEQ ID NO: 293663 - RNA, 19 nt, Artificial Sequence
  Description of Artificial Sequence: Synthetic oligonucleotide
  Antisense strand to SEQ ID NO: 293662
gauuccagagauuguuagc

SEQ ID NO: 293664 - RNA, 19 nt, Artificial Sequence
  Description of Artificial Sequence: Synthetic oligonucleotide
  Sense strand starting at position 3983 of SEQ ID NO: 3774
aggguucuacugcaauaac

SEQ ID NO: 293665 - RNA, 19 nt, Artificial Sequence
  Description of Artificial Sequence: Synthetic oligonucleotide
  Antisense strand to SEQ ID NO: 293664
guuauugcaguagaacccu

SEQ ID NO: 293666 - RNA, 19 nt, Artificial Sequence
  Description of Artificial Sequence: Synthetic oligonucleotide
  Sense strand starting at position 46 of SEQ ID NO: 3775
ggagcuguccuagauauaa

SEQ ID NO: 293667 - RNA, 19 nt, Artificial Sequence
  Description of Artificial Sequence: Synthetic oligonucleotide
  Antisense strand to SEQ ID NO: 293666
uuauaucuaggacagcucc

SEQ ID NO: 293668 - RNA, 19 nt, Artificial Sequence
  Description of Artificial Sequence: Synthetic oligonucleotide
  Sense strand starting at position 58 of SEQ ID NO: 3775
gauauaaguugugcucuau

SEQ ID NO: 293669 - RNA, 19 nt, Artificial Sequence
  Description of Artificial Sequence: Synthetic oligonucleotide
  Antisense strand to SEQ ID NO: 293668
auagagcacaacuuauauc

SEQ ID NO: 293670 - RNA, 19 nt, Artificial Sequence
  Description of Artificial Sequence: Synthetic oligonucleotide
  Sense strand starting at position 201 of SEQ ID NO: 3775
uuauaaagugcacaguuaa

SEQ ID NO: 293671 - RNA, 19 nt, Artificial Sequence
  Description of Artificial Sequence: Synthetic oligonucleotide
  Antisense strand to SEQ ID NO: 293670
uuaacugugcacuuuauaa

SEQ ID NO: 293672 - RNA, 19 nt, Artificial Sequence
  Description of Artificial Sequence: Synthetic oligonucleotide
  Sense strand starting at position 609 of SEQ ID NO: 3775
agguaacuuguucaggguu

SEQ ID NO: 293673 - RNA, 19 nt, Artificial Sequence
  Description of Artificial Sequence: Synthetic oligonucleotide
  Antisense strand to SEQ ID NO: 293672
aacccugaacaaguuaccu

SEQ ID NO: 293674 - RNA, 19 nt, Artificial Sequence
  Description of Artificial Sequence: Synthetic oligonucleotide
  Sense strand starting at position 633 of SEQ ID NO: 3775
acuaauuaucaguggagcu

SEQ ID NO: 293675 - RNA, 19 nt, Artificial Sequence
  Description of Artificial Sequence: Synthetic oligonucleotide
  Antisense strand to SEQ ID NO: 293674
agcuccacugauaauuagu

SEQ ID NO: 293676 - RNA, 19 nt, Artificial Sequence
  Description of Artificial Sequence: Synthetic oligonucleotide
  Sense strand starting at position 645 of SEQ ID NO: 3775
uggagcucuacugaguuaa

SEQ ID NO: 293677 - RNA, 19 nt, Artificial Sequence
  Description of Artificial Sequence: Synthetic oligonucleotide
  Antisense strand to SEQ ID NO: 293676
uuaacucaguagagcucca

SEQ ID NO: 293678 - RNA, 19 nt, Artificial Sequence
  Description of Artificial Sequence: Synthetic oligonucleotide
  Sense strand starting at position 647 of SEQ ID NO: 3775
gagcucuacugaguuaaau

SEQ ID NO: 293679 - RNA, 19 nt, Artificial Sequence
  Description of Artificial Sequence: Synthetic oligonucleotide
  Antisense strand to SEQ ID NO: 293678
auuuaacucaguagagcuc

SEQ ID NO: 293680 - RNA, 19 nt, Artificial Sequence
  Description of Artificial Sequence: Synthetic oligonucleotide
  Sense strand starting at position 720 of SEQ ID NO: 3775
cgauaauuggcacagcuaa

SEQ ID NO: 293681 - RNA, 19 nt, Artificial Sequence
  Description of Artificial Sequence: Synthetic oligonucleotide
  Antisense strand to SEQ ID NO: 293680
uuagcugugccaauuaucg

SEQ ID NO: 293682 - RNA, 19 nt, Artificial Sequence
  Description of Artificial Sequence: Synthetic oligonucleotide
  Sense strand starting at position 743 of SEQ ID NO: 3775
acugaaaugagccgaagaa

SEQ ID NO: 293683 - RNA, 19 nt, Artificial Sequence
  Description of Artificial Sequence: Synthetic oligonucleotide
  Antisense strand to SEQ ID NO: 293682
uucuucggcucauuucagu

SEQ ID NO: 293684 - RNA, 19 nt, Artificial Sequence
  Description of Artificial Sequence: Synthetic oligonucleotide
  Sense strand starting at position 767 of SEQ ID NO: 3775
aaggaaaucggugaaucgu

SEQ ID NO: 293685 - RNA, 19 nt, Artificial Sequence
  Description of Artificial Sequence: Synthetic oligonucleotide
  Antisense strand to SEQ ID NO: 293684
acgauucaccgauuuccuu

SEQ ID NO: 293686 - RNA, 19 nt, Artificial Sequence
  Description of Artificial Sequence: Synthetic oligonucleotide
  Sense strand starting at position 776 of SEQ ID NO: 3775
ggugaaucguuuguauaag

SEQ ID NO: 293687 - RNA, 19 nt, Artificial Sequence
  Description of Artificial Sequence: Synthetic oligonucleotide
  Antisense strand to SEQ ID NO: 293686
cuuauacaaacgauucacc

SEQ ID NO: 293688 - RNA, 19 nt, Artificial Sequence
  Description of Artificial Sequence: Synthetic oligonucleotide
  Sense strand starting at position 810 of SEQ ID NO: 3775
caaguugccgcucagauga

SEQ ID NO: 293689 - RNA, 19 nt, Artificial Sequence
  Description of Artificial Sequence: Synthetic oligonucleotide
  Antisense strand to SEQ ID NO: 293688
ucaucugagcggcaacuug

SEQ ID NO: 293690 - RNA, 19 nt, Artificial Sequence
  Description of Artificial Sequence: Synthetic oligonucleotide
  Sense strand starting at position 831 of SEQ ID NO: 3775
gaaggaaugugcuuugaca

SEQ ID NO: 293691 - RNA, 19 nt, Artificial Sequence
  Description of Artificial Sequence: Synthetic oligonucleotide
  Antisense strand to SEQ ID NO: 293690
ugucaaagcacauuccuuc

SEQ ID NO: 293692 - RNA, 19 nt, Artificial Sequence
  Description of Artificial Sequence: Synthetic oligonucleotide
  Sense strand starting at position 904 of SEQ ID NO: 3775
cuacuagagcaguaagacu

SEQ ID NO: 293693 - RNA, 19 nt, Artificial Sequence
  Description of Artificial Sequence: Synthetic oligonucleotide
  Antisense strand to SEQ ID NO: 293692
agucuuacugcucuaguag

SEQ ID NO: 293694 - RNA, 19 nt, Artificial Sequence
  Description of Artificial Sequence: Synthetic oligonucleotide
  Sense strand starting at position 911 of SEQ ID NO: 3775
agcaguaagacuggacaga

SEQ ID NO: 293695 - RNA, 19 nt, Artificial Sequence
  Description of Artificial Sequence: Synthetic oligonucleotide
  Antisense strand to SEQ ID NO: 293694
ucuguccagucuuacugcu

SEQ ID NO: 293696 - RNA, 19 nt, Artificial Sequence
  Description of Artificial Sequence: Synthetic oligonucleotide
  Sense strand starting at position 971 of SEQ ID NO: 3775
acauuaagcuucuuaggga

SEQ ID NO: 293697 - RNA, 19 nt, Artificial Sequence
  Description of Artificial Sequence: Synthetic oligonucleotide
  Antisense strand to SEQ ID NO: 293696
ucccuaagaagcuuaaugu

SEQ ID NO: 293698 - RNA, 19 nt, Artificial Sequence
  Description of Artificial Sequence: Synthetic oligonucleotide
  Sense strand starting at position 984 of SEQ ID NO: 3775
uagggaguucccggaaaug

SEQ ID NO: 293699 - RNA, 19 nt, Artificial Sequence
  Description of Artificial Sequence: Synthetic oligonucleotide
  Antisense strand to SEQ ID NO: 293698
cauuuccgggaacucccua

SEQ ID NO: 293700 - RNA, 19 nt, Artificial Sequence
  Description of Artificial Sequence: Synthetic oligonucleotide
  Sense strand starting at position 1214 of SEQ ID NO: 3775
gugaauguuauaggccuga

SEQ ID NO: 293701 - RNA, 19 nt, Artificial Sequence
  Description of Artificial Sequence: Synthetic oligonucleotide
  Antisense strand to SEQ ID NO: 293700
ucaggccuauaacauucac

SEQ ID NO: 293702 - RNA, 19 nt, Artificial Sequence
  Description of Artificial Sequence: Synthetic oligonucleotide
  Sense strand starting at position 1218 of SEQ ID NO: 3775
auguuauaggccugaggac

SEQ ID NO: 293703 - RNA, 19 nt, Artificial Sequence
  Description of Artificial Sequence: Synthetic oligonucleotide
  Antisense strand to SEQ ID NO: 293702
guccucaggccuauaacau

SEQ ID NO: 293704 - RNA, 19 nt, Artificial Sequence
  Description of Artificial Sequence: Synthetic oligonucleotide
  Sense strand starting at position 1219 of SEQ ID NO: 3775
uguuauaggccugaggaca

SEQ ID NO: 293705 - RNA, 19 nt, Artificial Sequence
  Description of Artificial Sequence: Synthetic oligonucleotide
  Antisense strand to SEQ ID NO: 293704
uguccucaggccuauaaca

SEQ ID NO: 293706 - RNA, 19 nt, Artificial Sequence
  Description of Artificial Sequence: Synthetic oligonucleotide
  Sense strand starting at position 1318 of SEQ ID NO: 3775
cggaguaacgcgcuaaucu

SEQ ID NO: 293707 - RNA, 19 nt, Artificial Sequence
  Description of Artificial Sequence: Synthetic oligonucleotide
  Antisense strand to SEQ ID NO: 293706
agauuagcgcguuacuccg

SEQ ID NO: 293708 - RNA, 19 nt, Artificial Sequence
  Description of Artificial Sequence: Synthetic oligonucleotide
  Sense strand starting at position 1328 of SEQ ID NO: 3775
cgcuaaucucccgagggau

SEQ ID NO: 293709 - RNA, 19 nt, Artificial Sequence
  Description of Artificial Sequence: Synthetic oligonucleotide
  Antisense strand to SEQ ID NO: 293708
aucccucgggagauuagcg

SEQ ID NO: 293710 - RNA, 19 nt, Artificial Sequence
  Description of Artificial Sequence: Synthetic oligonucleotide
  Sense strand starting at position 1330 of SEQ ID NO: 3775
cuaaucucccgagggauag

SEQ ID NO: 293711 - RNA, 19 nt, Artificial Sequence
  Description of Artificial Sequence: Synthetic oligonucleotide
  Antisense strand to SEQ ID NO: 293710
cuaucccucgggagauuag

SEQ ID NO: 293712 - RNA, 19 nt, Artificial Sequence
  Description of Artificial Sequence: Synthetic oligonucleotide
  Sense strand starting at position 1331 of SEQ ID NO: 3775
uaaucucccgagggauagu

SEQ ID NO: 293713 - RNA, 19 nt, Artificial Sequence
  Description of Artificial Sequence: Synthetic oligonucleotide
  Antisense strand to SEQ ID NO: 293712
acuaucccucgggagauua

SEQ ID NO: 293714 - RNA, 19 nt, Artificial Sequence
  Description of Artificial Sequence: Synthetic oligonucleotide
  Sense strand starting at position 1986 of SEQ ID NO: 3775
ggaguuggcccucauugca

SEQ ID NO: 293715 - RNA, 19 nt, Artificial Sequence
  Description of Artificial Sequence: Synthetic oligonucleotide
  Antisense strand to SEQ ID NO: 293714
ugcaaugagggccaacucc

SEQ ID NO: 293716 - RNA, 19 nt, Artificial Sequence
  Description of Artificial Sequence: Synthetic oligonucleotide
  Sense strand starting at position 2038 of SEQ ID NO: 3775
cggaaauuguaguccgauu

SEQ ID NO: 293717 - RNA, 19 nt, Artificial Sequence
  Description of Artificial Sequence: Synthetic oligonucleotide
  Antisense strand to SEQ ID NO: 293716
aaucggacuacaauuuccg

SEQ ID NO: 293718 - RNA, 19 nt, Artificial Sequence
  Description of Artificial Sequence: Synthetic oligonucleotide
  Sense strand starting at position 2708 of SEQ ID NO: 3775
gucgguuuauuucucagua

SEQ ID NO: 293719 - RNA, 19 nt, Artificial Sequence
  Description of Artificial Sequence: Synthetic oligonucleotide
  Antisense strand to SEQ ID NO: 293718
uacugagaaauaaaccgac

SEQ ID NO: 293720 - RNA, 19 nt, Artificial Sequence
  Description of Artificial Sequence: Synthetic oligonucleotide
  Sense strand starting at position 2709 of SEQ ID NO: 3775
ucgguuuauuucucaguaa

SEQ ID NO: 293721 - RNA, 19 nt, Artificial Sequence
  Description of Artificial Sequence: Synthetic oligonucleotide
  Antisense strand to SEQ ID NO: 293720
uuacugagaaauaaaccga

SEQ ID NO: 293722 - RNA, 19 nt, Artificial Sequence
  Description of Artificial Sequence: Synthetic oligonucleotide
  Sense strand starting at position 2750 of SEQ ID NO: 3775
cuugcaacccuagggauau

SEQ ID NO: 293723 - RNA, 19 nt, Artificial Sequence
  Description of Artificial Sequence: Synthetic oligonucleotide
  Antisense strand to SEQ ID NO: 293722
auaucccuaggguugcaag

SEQ ID NO: 293724 - RNA, 19 nt, Artificial Sequence
  Description of Artificial Sequence: Synthetic oligonucleotide
  Sense strand starting at position 2767 of SEQ ID NO: 3775
auaugauucugucccugga

SEQ ID NO: 293725 - RNA, 19 nt, Artificial Sequence
  Description of Artificial Sequence: Synthetic oligonucleotide
  Antisense strand to SEQ ID NO: 293724
uccagggacagaaucauau

SEQ ID NO: 293726 - RNA, 19 nt, Artificial Sequence
  Description of Artificial Sequence: Synthetic oligonucleotide
  Sense strand starting at position 2770 of SEQ ID NO: 3775
ugauucugucccuggagga

SEQ ID NO: 293727 - RNA, 19 nt, Artificial Sequence
  Description of Artificial Sequence: Synthetic oligonucleotide
  Antisense strand to SEQ ID NO: 293726
uccuccagggacagaauca

SEQ ID NO: 293728 - RNA, 19 nt, Artificial Sequence
  Description of Artificial Sequence: Synthetic oligonucleotide
  Sense strand starting at position 2855 of SEQ ID NO: 3775
auuuaaccauguggaaauc

SEQ ID NO: 293729 - RNA, 19 nt, Artificial Sequence
  Description of Artificial Sequence: Synthetic oligonucleotide
  Antisense strand to SEQ ID NO: 293728
gauuuccacaugguuaaau

SEQ ID NO: 293730 - RNA, 19 nt, Artificial Sequence
  Description of Artificial Sequence: Synthetic oligonucleotide
  Sense strand starting at position 2876 of SEQ ID NO: 3775
guaagcauccaauaguauu

SEQ ID NO: 293731 - RNA, 19 nt, Artificial Sequence
  Description of Artificial Sequence: Synthetic oligonucleotide
  Antisense strand to SEQ ID NO: 293730
aauacuauuggaugcuuac

SEQ ID NO: 293732 - RNA, 19 nt, Artificial Sequence
  Description of Artificial Sequence: Synthetic oligonucleotide
  Sense strand starting at position 3324 of SEQ ID NO: 3775
ugggcacuccucgggagaa

SEQ ID NO: 293733 - RNA, 19 nt, Artificial Sequence
  Description of Artificial Sequence: Synthetic oligonucleotide
  Antisense strand to SEQ ID NO: 293732
uucucccgaggagugccca

SEQ ID NO: 293734 - RNA, 19 nt, Artificial Sequence
  Description of Artificial Sequence: Synthetic oligonucleotide
  Sense strand starting at position 3544 of SEQ ID NO: 3775
caggcugcccaauaguaaa

SEQ ID NO: 293735 - RNA, 19 nt, Artificial Sequence
  Description of Artificial Sequence: Synthetic oligonucleotide
  Antisense strand to SEQ ID NO: 293734
uuuacuauugggcagccug

SEQ ID NO: 293736 - RNA, 19 nt, Artificial Sequence
  Description of Artificial Sequence: Synthetic oligonucleotide
  Sense strand starting at position 3597 of SEQ ID NO: 3775
ucugaauuguuccugcaac

SEQ ID NO: 293737 - RNA, 19 nt, Artificial Sequence
  Description of Artificial Sequence: Synthetic oligonucleotide
  Antisense strand to SEQ ID NO: 293736
guugcaggaacaauucaga

SEQ ID NO: 293738 - RNA, 19 nt, Artificial Sequence
  Description of Artificial Sequence: Synthetic oligonucleotide
  Sense strand starting at position 3725 of SEQ ID NO: 3775
gaccuacaguguccugaaa

SEQ ID NO: 293739 - RNA, 19 nt, Artificial Sequence
  Description of Artificial Sequence: Synthetic oligonucleotide
  Antisense strand to SEQ ID NO: 293738
uuucaggacacuguagguc

SEQ ID NO: 293740 - RNA, 19 nt, Artificial Sequence
  Description of Artificial Sequence: Synthetic oligonucleotide
  Sense strand starting at position 3856 of SEQ ID NO: 3775
uuuggugccuggcuagaaa

SEQ ID NO: 293741 - RNA, 19 nt, Artificial Sequence
  Description of Artificial Sequence: Synthetic oligonucleotide
  Antisense strand to SEQ ID NO: 293740
uuucuagccaggcaccaaa

SEQ ID NO: 293742 - RNA, 19 nt, Artificial Sequence
  Description of Artificial Sequence: Synthetic oligonucleotide
  Sense strand starting at position 3932 of SEQ ID NO: 3775
aggugcuugggucagagua

SEQ ID NO: 293743 - RNA, 19 nt, Artificial Sequence
  Description of Artificial Sequence: Synthetic oligonucleotide
  Antisense strand to SEQ ID NO: 293742
uacucugacccaagcaccu

SEQ ID NO: 293744 - RNA, 19 nt, Artificial Sequence
  Description of Artificial Sequence: Synthetic oligonucleotide
  Sense strand starting at position 3940 of SEQ ID NO: 3775
gggucagaguagucuuacu

SEQ ID NO: 293745 - RNA, 19 nt, Artificial Sequence
  Description of Artificial Sequence: Synthetic oligonucleotide
  Antisense strand to SEQ ID NO: 293744
aguaagacuacucugaccc

SEQ ID NO: 293746 - RNA, 19 nt, Artificial Sequence
  Description of Artificial Sequence: Synthetic oligonucleotide
  Sense strand starting at position 64 of SEQ ID NO: 3776
cguaaaguacgcuacaaau

SEQ ID NO: 293747 - RNA, 19 nt, Artificial Sequence
  Description of Artificial Sequence: Synthetic oligonucleotide
  Antisense strand to SEQ ID NO: 293746
auuuguagcguacuuuacg

SEQ ID NO: 293748 - RNA, 19 nt, Artificial Sequence
  Description of Artificial Sequence: Synthetic oligonucleotide
  Sense strand starting at position 127 of SEQ ID NO: 3776
gauuaaagaucucagugaa

SEQ ID NO: 293749 - RNA, 19 nt, Artificial Sequence
  Description of Artificial Sequence: Synthetic oligonucleotide
  Antisense strand to SEQ ID NO: 293748
uucacugagaucuuuaauc

SEQ ID NO: 293750 - RNA, 19 nt, Artificial Sequence
  Description of Artificial Sequence: Synthetic oligonucleotide
  Sense strand starting at position 197 of SEQ ID NO: 3776
gccuaaacccggugugcau

SEQ ID NO: 293751 - RNA, 19 nt, Artificial Sequence
  Description of Artificial Sequence: Synthetic oligonucleotide
  Antisense strand to SEQ ID NO: 293750
augcacaccggguuuaggc

SEQ ID NO: 293752 - RNA, 19 nt, Artificial Sequence
  Description of Artificial Sequence: Synthetic oligonucleotide
  Sense strand starting at position 219 of SEQ ID NO: 3776
cuauguucucaagagugcu

SEQ ID NO: 293753 - RNA, 19 nt, Artificial Sequence
  Description of Artificial Sequence: Synthetic oligonucleotide
  Antisense strand to SEQ ID NO: 293752
agcacucuugagaacauag

SEQ ID NO: 293754 - RNA, 19 nt, Artificial Sequence
  Description of Artificial Sequence: Synthetic oligonucleotide
  Sense strand starting at position 222 of SEQ ID NO: 3776
uguucucaagagugcuaua

SEQ ID NO: 293755 - RNA, 19 nt, Artificial Sequence
  Description of Artificial Sequence: Synthetic oligonucleotide
  Antisense strand to SEQ ID NO: 293754
uauagcacucuugagaaca

SEQ ID NO: 293756 - RNA, 19 nt, Artificial Sequence
  Description of Artificial Sequence: Synthetic oligonucleotide
  Sense strand starting at position 225 of SEQ ID NO: 3776
ucucaagagugcuauauaa

SEQ ID NO: 293757 - RNA, 19 nt, Artificial Sequence
  Description of Artificial Sequence: Synthetic oligonucleotide
  Antisense strand to SEQ ID NO: 293756
uuauauagcacucuugaga

SEQ ID NO: 293758 - RNA, 19 nt, Artificial Sequence
  Description of Artificial Sequence: Synthetic oligonucleotide
  Sense strand starting at position 413 of SEQ ID NO: 3776
ugcaucaucuuguagagaa

SEQ ID NO: 293759 - RNA, 19 nt, Artificial Sequence
  Description of Artificial Sequence: Synthetic oligonucleotide
  Antisense strand to SEQ ID NO: 293758
uucucuacaagaugaugca

SEQ ID NO: 293760 - RNA, 19 nt, Artificial Sequence
  Description of Artificial Sequence: Synthetic oligonucleotide
  Sense strand starting at position 456 of SEQ ID NO: 3776
gugaauuacuuauuagucu

SEQ ID NO: 293761 - RNA, 19 nt, Artificial Sequence
  Description of Artificial Sequence: Synthetic oligonucleotide
  Antisense strand to SEQ ID NO: 293760
agacuaauaaguaauucac

SEQ ID NO: 293762 - RNA, 19 nt, Artificial Sequence
  Description of Artificial Sequence: Synthetic oligonucleotide
  Sense strand starting at position 519 of SEQ ID NO: 3776
aacguuaaauagggaagaa

SEQ ID NO: 293763 - RNA, 19 nt, Artificial Sequence
  Description of Artificial Sequence: Synthetic oligonucleotide
  Antisense strand to SEQ ID NO: 293762
uucuucccuauuuaacguu

SEQ ID NO: 293764 - RNA, 19 nt, Artificial Sequence
  Description of Artificial Sequence: Synthetic oligonucleotide
  Sense strand starting at position 581 of SEQ ID NO: 3776
agguguaguuaugauaauu

SEQ ID NO: 293765 - RNA, 19 nt, Artificial Sequence
  Description of Artificial Sequence: Synthetic oligonucleotide
  Antisense strand to SEQ ID NO: 293764
aauuaucauaacuacaccu

SEQ ID NO: 293766 - RNA, 19 nt, Artificial Sequence
  Description of Artificial Sequence: Synthetic oligonucleotide
  Sense strand starting at position 609 of SEQ ID NO: 3776
acuugugacugauagaaua

SEQ ID NO: 293767 - RNA, 19 nt, Artificial Sequence
  Description of Artificial Sequence: Synthetic oligonucleotide
  Antisense strand to SEQ ID NO: 293766
uauucuaucagucacaagu

SEQ ID NO: 293768 - RNA, 19 nt, Artificial Sequence
  Description of Artificial Sequence: Synthetic oligonucleotide
  Sense strand starting at position 2307 of SEQ ID NO: 3776
gugagugccgaguaggaaa

SEQ ID NO: 293769 - RNA, 19 nt, Artificial Sequence
  Description of Artificial Sequence: Synthetic oligonucleotide
  Antisense strand to SEQ ID NO: 293768
uuuccuacucggcacucac

SEQ ID NO: 293770 - RNA, 19 nt, Artificial Sequence
  Description of Artificial Sequence: Synthetic oligonucleotide
  Sense strand starting at position 2379 of SEQ ID NO: 3776
uuccaagauccacgggaaa

SEQ ID NO: 293771 - RNA, 19 nt, Artificial Sequence
  Description of Artificial Sequence: Synthetic oligonucleotide
  Antisense strand to SEQ ID NO: 293770
uuucccguggaucuuggaa

SEQ ID NO: 293772 - RNA, 19 nt, Artificial Sequence
  Description of Artificial Sequence: Synthetic oligonucleotide
  Sense strand starting at position 2789 of SEQ ID NO: 3776
ucuuaaguguuagacauaa

SEQ ID NO: 293773 - RNA, 19 nt, Artificial Sequence
  Description of Artificial Sequence: Synthetic oligonucleotide
  Antisense strand to SEQ ID NO: 293772
uuaugucuaacacuuaaga

SEQ ID NO: 293774 - RNA, 19 nt, Artificial Sequence
  Description of Artificial Sequence: Synthetic oligonucleotide
  Sense strand starting at position 2846 of SEQ ID NO: 3776
aaagcucuccugugagacu

SEQ ID NO: 293775 - RNA, 19 nt, Artificial Sequence
  Description of Artificial Sequence: Synthetic oligonucleotide
  Antisense strand to SEQ ID NO: 293774
agucucacaggagagcuuu

SEQ ID NO: 293776 - RNA, 19 nt, Artificial Sequence
  Description of Artificial Sequence: Synthetic oligonucleotide
  Sense strand starting at position 2859 of SEQ ID NO: 3776
gagacugucuagcucucau

SEQ ID NO: 293777 - RNA, 19 nt, Artificial Sequence
  Description of Artificial Sequence: Synthetic oligonucleotide
  Antisense strand to SEQ ID NO: 293776
augagagcuagacagucuc

SEQ ID NO: 293778 - RNA, 19 nt, Artificial Sequence
  Description of Artificial Sequence: Synthetic oligonucleotide
  Sense strand starting at position 2898 of SEQ ID NO: 3776
ucaaguacuggcuaaguua

SEQ ID NO: 293779 - RNA, 19 nt, Artificial Sequence
  Description of Artificial Sequence: Synthetic oligonucleotide
  Antisense strand to SEQ ID NO: 293778
uaacuuagccaguacuuga

SEQ ID NO: 293780 - RNA, 19 nt, Artificial Sequence
  Description of Artificial Sequence: Synthetic oligonucleotide
  Sense strand starting at position 2968 of SEQ ID NO: 3776
cccguaugaccggguucaa

SEQ ID NO: 293781 - RNA, 19 nt, Artificial Sequence
  Description of Artificial Sequence: Synthetic oligonucleotide
  Antisense strand to SEQ ID NO: 293780
uugaacccggucauacggg

SEQ ID NO: 293782 - RNA, 19 nt, Artificial Sequence
  Description of Artificial Sequence: Synthetic oligonucleotide
  Sense strand starting at position 2986 of SEQ ID NO: 3776
aaggucgauuuguagucau

SEQ ID NO: 293783 - RNA, 19 nt, Artificial Sequence
  Description of Artificial Sequence: Synthetic oligonucleotide
  Antisense strand to SEQ ID NO: 293782
augacuacaaaucgaccuu

SEQ ID NO: 293784 - RNA, 19 nt, Artificial Sequence
  Description of Artificial Sequence: Synthetic oligonucleotide
  Sense strand starting at position 2989 of SEQ ID NO: 3776
gucgauuuguagucauccu

SEQ ID NO: 293785 - RNA, 19 nt, Artificial Sequence
  Description of Artificial Sequence: Synthetic oligonucleotide
  Antisense strand to SEQ ID NO: 293784
aggaugacuacaaaucgac

SEQ ID NO: 293786 - RNA, 19 nt, Artificial Sequence
  Description of Artificial Sequence: Synthetic oligonucleotide
  Sense strand starting at position 3101 of SEQ ID NO: 3776
cucagauugucuuucuguu

SEQ ID NO: 293787 - RNA, 19 nt, Artificial Sequence
  Description of Artificial Sequence: Synthetic oligonucleotide
  Antisense strand to SEQ ID NO: 293786
aacagaaagacaaucugag

SEQ ID NO: 293788 - RNA, 19 nt, Artificial Sequence
  Description of Artificial Sequence: Synthetic oligonucleotide
  Sense strand starting at position 3130 of SEQ ID NO: 3776
uucuaaaucuguucucugu

SEQ ID NO: 293789 - RNA, 19 nt, Artificial Sequence
  Description of Artificial Sequence: Synthetic oligonucleotide
  Antisense strand to SEQ ID NO: 293788
acagagaacagauuuagaa

SEQ ID NO: 293790 - RNA, 19 nt, Artificial Sequence
  Description of Artificial Sequence: Synthetic oligonucleotide
  Sense strand starting at position 3223 of SEQ ID NO: 3776
gggugaucugaccauucug

SEQ ID NO: 293791 - RNA, 19 nt, Artificial Sequence
  Description of Artificial Sequence: Synthetic oligonucleotide
  Antisense strand to SEQ ID NO: 293790
cagaauggucagaucaccc

SEQ ID NO: 293792 - RNA, 19 nt, Artificial Sequence
  Description of Artificial Sequence: Synthetic oligonucleotide
  Sense strand starting at position 3234 of SEQ ID NO: 3776
ccauucugauggcucaaca

SEQ ID NO: 293793 - RNA, 19 nt, Artificial Sequence
  Description of Artificial Sequence: Synthetic oligonucleotide
  Antisense strand to SEQ ID NO: 293792
uguugagccaucagaaugg

SEQ ID NO: 293794 - RNA, 19 nt, Artificial Sequence
  Description of Artificial Sequence: Synthetic oligonucleotide
  Sense strand starting at position 3244 of SEQ ID NO: 3776
ggcucaacagcugaaugua

SEQ ID NO: 293795 - RNA, 19 nt, Artificial Sequence
  Description of Artificial Sequence: Synthetic oligonucleotide
  Antisense strand to SEQ ID NO: 293794
uacauucagcuguugagcc

SEQ ID NO: 293796 - RNA, 19 nt, Artificial Sequence
  Description of Artificial Sequence: Synthetic oligonucleotide
  Sense strand starting at position 3254 of SEQ ID NO: 3776
cugaauguauguuuaauga

SEQ ID NO: 293797 - RNA, 19 nt, Artificial Sequence
  Description of Artificial Sequence: Synthetic oligonucleotide
  Antisense strand to SEQ ID NO: 293796
ucauuaaacauacauucag

SEQ ID NO: 293798 - RNA, 19 nt, Artificial Sequence
  Description of Artificial Sequence: Synthetic oligonucleotide
  Sense strand starting at position 3273 of SEQ ID NO: 3776
cguccagaucugcagguau

SEQ ID NO: 293799 - RNA, 19 nt, Artificial Sequence
  Description of Artificial Sequence: Synthetic oligonucleotide
  Antisense strand to SEQ ID NO: 293798
auaccugcagaucuggacg

SEQ ID NO: 293800 - RNA, 19 nt, Artificial Sequence
  Description of Artificial Sequence: Synthetic oligonucleotide
  Sense strand starting at position 3345 of SEQ ID NO: 3776
ucauauacccucugagguu

SEQ ID NO: 293801 - RNA, 19 nt, Artificial Sequence
  Description of Artificial Sequence: Synthetic oligonucleotide
  Antisense strand to SEQ ID NO: 293800
aaccucagaggguauauga

SEQ ID NO: 293802 - RNA, 19 nt, Artificial Sequence
  Description of Artificial Sequence: Synthetic oligonucleotide
  Sense strand starting at position 3500 of SEQ ID NO: 3776
cuucuaacuuuaucguguu

SEQ ID NO: 293803 - RNA, 19 nt, Artificial Sequence
  Description of Artificial Sequence: Synthetic oligonucleotide
  Antisense strand to SEQ ID NO: 293802
aacacgauaaaguuagaag

SEQ ID NO: 293804 - RNA, 19 nt, Artificial Sequence
  Description of Artificial Sequence: Synthetic oligonucleotide
  Sense strand starting at position 3507 of SEQ ID NO: 3776
cuuuaucguguugguaaua

SEQ ID NO: 293805 - RNA, 19 nt, Artificial Sequence
  Description of Artificial Sequence: Synthetic oligonucleotide
  Antisense strand to SEQ ID NO: 293804
uauuaccaacacgauaaag

SEQ ID NO: 293806 - RNA, 19 nt, Artificial Sequence
  Description of Artificial Sequence: Synthetic oligonucleotide
  Sense strand starting at position 3508 of SEQ ID NO: 3776
uuuaucguguugguaauau

SEQ ID NO: 293807 - RNA, 19 nt, Artificial Sequence
  Description of Artificial Sequence: Synthetic oligonucleotide
  Antisense strand to SEQ ID NO: 293806
auauuaccaacacgauaaa

SEQ ID NO: 293808 - RNA, 19 nt, Artificial Sequence
  Description of Artificial Sequence: Synthetic oligonucleotide
  Sense strand starting at position 3512 of SEQ ID NO: 3776
ucguguugguaauauuuac

SEQ ID NO: 293809 - RNA, 19 nt, Artificial Sequence
  Description of Artificial Sequence: Synthetic oligonucleotide
  Antisense strand to SEQ ID NO: 293808
guaaauauuaccaacacga

SEQ ID NO: 293810 - RNA, 19 nt, Artificial Sequence
  Description of Artificial Sequence: Synthetic oligonucleotide
  Sense strand starting at position 3591 of SEQ ID NO: 3776
uuauuaggccaguacuuaa

SEQ ID NO: 293811 - RNA, 19 nt, Artificial Sequence
  Description of Artificial Sequence: Synthetic oligonucleotide
  Antisense strand to SEQ ID NO: 293810
uuaaguacuggccuaauaa

SEQ ID NO: 293812 - RNA, 19 nt, Artificial Sequence
  Description of Artificial Sequence: Synthetic oligonucleotide
  Sense strand starting at position 3598 of SEQ ID NO: 3776
gccaguacuuaacugagca

SEQ ID NO: 293813 - RNA, 19 nt, Artificial Sequence
  Description of Artificial Sequence: Synthetic oligonucleotide
  Antisense strand to SEQ ID NO: 293812
ugcucaguuaaguacuggc

SEQ ID NO: 293814 - RNA, 19 nt, Artificial Sequence
  Description of Artificial Sequence: Synthetic oligonucleotide
  Sense strand starting at position 3629 of SEQ ID NO: 3776
ccaggcauuguuugagaug

SEQ ID NO: 293815 - RNA, 19 nt, Artificial Sequence
  Description of Artificial Sequence: Synthetic oligonucleotide
  Antisense strand to SEQ ID NO: 293814
caucucaaacaaugccugg

SEQ ID NO: 293816 - RNA, 19 nt, Artificial Sequence
  Description of Artificial Sequence: Synthetic oligonucleotide
  Sense strand starting at position 3638 of SEQ ID NO: 3776
guuugagaugcucaggaug

SEQ ID NO: 293817 - RNA, 19 nt, Artificial Sequence
  Description of Artificial Sequence: Synthetic oligonucleotide
  Antisense strand to SEQ ID NO: 293816
cauccugagcaucucaaac

SEQ ID NO: 293818 - RNA, 19 nt, Artificial Sequence
  Description of Artificial Sequence: Synthetic oligonucleotide
  Sense strand starting at position 3677 of SEQ ID NO: 3776
aaaguuccugagugggaca

SEQ ID NO: 293819 - RNA, 19 nt, Artificial Sequence
  Description of Artificial Sequence: Synthetic oligonucleotide
  Antisense strand to SEQ ID NO: 293818
ugucccacucaggaacuuu

SEQ ID NO: 293820 - RNA, 19 nt, Artificial Sequence
  Description of Artificial Sequence: Synthetic oligonucleotide
  Sense strand starting at position 3745 of SEQ ID NO: 3776
ugauaaguauuaugaagac

SEQ ID NO: 293821 - RNA, 19 nt, Artificial Sequence
  Description of Artificial Sequence: Synthetic oligonucleotide
  Antisense strand to SEQ ID NO: 293820
gucuucauaauacuuauca

SEQ ID NO: 293822 - RNA, 19 nt, Artificial Sequence
  Description of Artificial Sequence: Synthetic oligonucleotide
  Sense strand starting at position 3860 of SEQ ID NO: 3776
agaagaaauugccuugauc

SEQ ID NO: 293823 - RNA, 19 nt, Artificial Sequence
  Description of Artificial Sequence: Synthetic oligonucleotide
  Antisense strand to SEQ ID NO: 293822
gaucaaggcaauuucuucu

SEQ ID NO: 293824 - RNA, 19 nt, Artificial Sequence
  Description of Artificial Sequence: Synthetic oligonucleotide
  Sense strand starting at position 3863 of SEQ ID NO: 3776
agaaauugccuugauccuu

SEQ ID NO: 293825 - RNA, 19 nt, Artificial Sequence
  Description of Artificial Sequence: Synthetic oligonucleotide
  Antisense strand to SEQ ID NO: 293824
aaggaucaaggcaauuucu

SEQ ID NO: 293826 - RNA, 19 nt, Artificial Sequence
  Description of Artificial Sequence: Synthetic oligonucleotide
  Sense strand starting at position 2 of SEQ ID NO: 3777
ugccauagaugauucucaa

SEQ ID NO: 293827 - RNA, 19 nt, Artificial Sequence
  Description of Artificial Sequence: Synthetic oligonucleotide
  Antisense strand to SEQ ID NO: 293826
uugagaaucaucuauggca

SEQ ID NO: 293828 - RNA, 19 nt, Artificial Sequence
  Description of Artificial Sequence: Synthetic oligonucleotide
  Sense strand starting at position 5 of SEQ ID NO: 3777
cauagaugauucucaaggu

SEQ ID NO: 293829 - RNA, 19 nt, Artificial Sequence
  Description of Artificial Sequence: Synthetic oligonucleotide
  Antisense strand to SEQ ID NO: 293828
accuugagaaucaucuaug

SEQ ID NO: 293830 - RNA, 19 nt, Artificial Sequence
  Description of Artificial Sequence: Synthetic oligonucleotide
  Sense strand starting at position 9 of SEQ ID NO: 3777
gaugauucucaaggugaau

SEQ ID NO: 293831 - RNA, 19 nt, Artificial Sequence
  Description of Artificial Sequence: Synthetic oligonucleotide
  Antisense strand to SEQ ID NO: 293830
auucaccuugagaaucauc

SEQ ID NO: 293832 - RNA, 19 nt, Artificial Sequence
  Description of Artificial Sequence: Synthetic oligonucleotide
  Sense strand starting at position 18 of SEQ ID NO: 3777
caaggugaauaauguagaa

SEQ ID NO: 293833 - RNA, 19 nt, Artificial Sequence
  Description of Artificial Sequence: Synthetic oligonucleotide
  Antisense strand to SEQ ID NO: 293832
uucuacauuauucaccuug

SEQ ID NO: 293834 - RNA, 19 nt, Artificial Sequence
  Description of Artificial Sequence: Synthetic oligonucleotide
  Sense strand starting at position 22 of SEQ ID NO: 3777
gugaauaauguagaagcua

SEQ ID NO: 293835 - RNA, 19 nt, Artificial Sequence
  Description of Artificial Sequence: Synthetic oligonucleotide
  Antisense strand to SEQ ID NO: 293834
uagcuucuacauuauucac

SEQ ID NO: 293836 - RNA, 19 nt, Artificial Sequence
  Description of Artificial Sequence: Synthetic oligonucleotide
  Sense strand starting at position 81 of SEQ ID NO: 3777
acuguauuguaagccagua

SEQ ID NO: 293837 - RNA, 19 nt, Artificial Sequence
  Description of Artificial Sequence: Synthetic oligonucleotide
  Antisense strand to SEQ ID NO: 293836
uacuggcuuacaauacagu

SEQ ID NO: 293838 - RNA, 19 nt, Artificial Sequence
  Description of Artificial Sequence: Synthetic oligonucleotide
  Sense strand starting at position 83 of SEQ ID NO: 3777
uguauuguaagccaguaca

SEQ ID NO: 293839 - RNA, 19 nt, Artificial Sequence
  Description of Artificial Sequence: Synthetic oligonucleotide
  Antisense strand to SEQ ID NO: 293838
uguacuggcuuacaauaca

SEQ ID NO: 293840 - RNA, 19 nt, Artificial Sequence
  Description of Artificial Sequence: Synthetic oligonucleotide
  Sense strand starting at position 96 of SEQ ID NO: 3777
aguacauucucccugagga

SEQ ID NO: 293841 - RNA, 19 nt, Artificial Sequence
  Description of Artificial Sequence: Synthetic oligonucleotide
  Antisense strand to SEQ ID NO: 293840
uccucagggagaauguacu

SEQ ID NO: 293842 - RNA, 19 nt, Artificial Sequence
  Description of Artificial Sequence: Synthetic oligonucleotide
  Sense strand starting at position 97 of SEQ ID NO: 3777
guacauucucccugaggac

SEQ ID NO: 293843 - RNA, 19 nt, Artificial Sequence
  Description of Artificial Sequence: Synthetic oligonucleotide
  Antisense strand to SEQ ID NO: 293842
guccucagggagaauguac

SEQ ID NO: 293844 - RNA, 19 nt, Artificial Sequence
  Description of Artificial Sequence: Synthetic oligonucleotide
  Sense strand starting at position 314 of SEQ ID NO: 3777
cguaaaguacgcuacaaau

SEQ ID NO: 293845 - RNA, 19 nt, Artificial Sequence
  Description of Artificial Sequence: Synthetic oligonucleotide
  Antisense strand to SEQ ID NO: 293844
auuuguagcguacuuuacg

SEQ ID NO: 293846 - RNA, 19 nt, Artificial Sequence
  Description of Artificial Sequence: Synthetic oligonucleotide
  Sense strand starting at position 377 of SEQ ID NO: 3777
gauuaaagaucucagugaa

SEQ ID NO: 293847 - RNA, 19 nt, Artificial Sequence
  Description of Artificial Sequence: Synthetic oligonucleotide
  Antisense strand to SEQ ID NO: 293846
uucacugagaucuuuaauc

SEQ ID NO: 293848 - RNA, 19 nt, Artificial Sequence
  Description of Artificial Sequence: Synthetic oligonucleotide
  Sense strand starting at position 469 of SEQ ID NO: 3777
cuauguucucaagagugcu

SEQ ID NO: 293849 - RNA, 19 nt, Artificial Sequence
  Description of Artificial Sequence: Synthetic oligonucleotide
  Antisense strand to SEQ ID NO: 293848
agcacucuugagaacauag

SEQ ID NO: 293850 - RNA, 19 nt, Artificial Sequence
  Description of Artificial Sequence: Synthetic oligonucleotide
  Sense strand starting at position 472 of SEQ ID NO: 3777
uguucucaagagugcuaua

SEQ ID NO: 293851 - RNA, 19 nt, Artificial Sequence
  Description of Artificial Sequence: Synthetic oligonucleotide
  Antisense strand to SEQ ID NO: 293850
uauagcacucuugagaaca

SEQ ID NO: 293852 - RNA, 19 nt, Artificial Sequence
  Description of Artificial Sequence: Synthetic oligonucleotide
  Sense strand starting at position 706 of SEQ ID NO: 3777
gugaauuacuuauuagucu

SEQ ID NO: 293853 - RNA, 19 nt, Artificial Sequence
  Description of Artificial Sequence: Synthetic oligonucleotide
  Antisense strand to SEQ ID NO: 293852
agacuaauaaguaauucac

SEQ ID NO: 293854 - RNA, 19 nt, Artificial Sequence
  Description of Artificial Sequence: Synthetic oligonucleotide
  Sense strand starting at position 769 of SEQ ID NO: 3777
aacguuaaauagggaagaa

SEQ ID NO: 293855 - RNA, 19 nt, Artificial Sequence
  Description of Artificial Sequence: Synthetic oligonucleotide
  Antisense strand to SEQ ID NO: 293854
uucuucccuauuuaacguu

SEQ ID NO: 293856 - RNA, 19 nt, Artificial Sequence
  Description of Artificial Sequence: Synthetic oligonucleotide
  Sense strand starting at position 859 of SEQ ID NO: 3777
acuugugacugauagaaua

SEQ ID NO: 293857 - RNA, 19 nt, Artificial Sequence
  Description of Artificial Sequence: Synthetic oligonucleotide
  Antisense strand to SEQ ID NO: 293856
uauucuaucagucacaagu

SEQ ID NO: 293858 - RNA, 19 nt, Artificial Sequence
  Description of Artificial Sequence: Synthetic oligonucleotide
  Sense strand starting at position 2557 of SEQ ID NO: 3777
gugagugccgaguaggaaa

SEQ ID NO: 293859 - RNA, 19 nt, Artificial Sequence
  Description of Artificial Sequence: Synthetic oligonucleotide
  Antisense strand to SEQ ID NO: 293858
uuuccuacucggcacucac

SEQ ID NO: 293860 - RNA, 19 nt, Artificial Sequence
  Description of Artificial Sequence: Synthetic oligonucleotide
  Sense strand starting at position 2629 of SEQ ID NO: 3777
uuccaagauccacgggaaa

SEQ ID NO: 293861 - RNA, 19 nt, Artificial Sequence
  Description of Artificial Sequence: Synthetic oligonucleotide
  Antisense strand to SEQ ID NO: 293860
uuucccguggaucuuggaa

SEQ ID NO: 293862 - RNA, 19 nt, Artificial Sequence
  Description of Artificial Sequence: Synthetic oligonucleotide
  Sense strand starting at position 3096 of SEQ ID NO: 3777
aaagcucuccugugagacu

SEQ ID NO: 293863 - RNA, 19 nt, Artificial Sequence
  Description of Artificial Sequence: Synthetic oligonucleotide
  Antisense strand to SEQ ID NO: 293862
agucucacaggagagcuuu

SEQ ID NO: 293864 - RNA, 19 nt, Artificial Sequence
  Description of Artificial Sequence: Synthetic oligonucleotide
  Sense strand starting at position 3109 of SEQ ID NO: 3777
gagacugucuagcucucau

SEQ ID NO: 293865 - RNA, 19 nt, Artificial Sequence
  Description of Artificial Sequence: Synthetic oligonucleotide
  Antisense strand to SEQ ID NO: 293864
augagagcuagacagucuc

SEQ ID NO: 293866 - RNA, 19 nt, Artificial Sequence
  Description of Artificial Sequence: Synthetic oligonucleotide
  Sense strand starting at position 3148 of SEQ ID NO: 3777
ucaaguacuggcuaaguua

SEQ ID NO: 293867 - RNA, 19 nt, Artificial Sequence
  Description of Artificial Sequence: Synthetic oligonucleotide
  Antisense strand to SEQ ID NO: 293866
uaacuuagccaguacuuga

SEQ ID NO: 293868 - RNA, 19 nt, Artificial Sequence
  Description of Artificial Sequence: Synthetic oligonucleotide
  Sense strand starting at position 3218 of SEQ ID NO: 3777
cccguaugaccggguucaa

SEQ ID NO: 293869 - RNA, 19 nt, Artificial Sequence
  Description of Artificial Sequence: Synthetic oligonucleotide
  Antisense strand to SEQ ID NO: 293868
uugaacccggucauacggg

SEQ ID NO: 293870 - RNA, 19 nt, Artificial Sequence
  Description of Artificial Sequence: Synthetic oligonucleotide
  Sense strand starting at position 3236 of SEQ ID NO: 3777
aaggucgauuuguagucau

SEQ ID NO: 293871 - RNA, 19 nt, Artificial Sequence
  Description of Artificial Sequence: Synthetic oligonucleotide
  Antisense strand to SEQ ID NO: 293870
augacuacaaaucgaccuu

SEQ ID NO: 293872 - RNA, 19 nt, Artificial Sequence
  Description of Artificial Sequence: Synthetic oligonucleotide
  Sense strand starting at position 3239 of SEQ ID NO: 3777
gucgauuuguagucauccu

SEQ ID NO: 293873 - RNA, 19 nt, Artificial Sequence
  Description of Artificial Sequence: Synthetic oligonucleotide
  Antisense strand to SEQ ID NO: 293872
aggaugacuacaaaucgac

SEQ ID NO: 293874 - RNA, 19 nt, Artificial Sequence
  Description of Artificial Sequence: Synthetic oligonucleotide
  Sense strand starting at position 3351 of SEQ ID NO: 3777
cucagauugucuuucuguu

SEQ ID NO: 293875 - RNA, 19 nt, Artificial Sequence
  Description of Artificial Sequence: Synthetic oligonucleotide
  Antisense strand to SEQ ID NO: 293874
aacagaaagacaaucugag

SEQ ID NO: 293876 - RNA, 19 nt, Artificial Sequence
  Description of Artificial Sequence: Synthetic oligonucleotide
  Sense strand starting at position 3380 of SEQ ID NO: 3777
uucuaaaucuguucucugu

SEQ ID NO: 293877 - RNA, 19 nt, Artificial Sequence
  Description of Artificial Sequence: Synthetic oligonucleotide
  Antisense strand to SEQ ID NO: 293876
acagagaacagauuuagaa

SEQ ID NO: 293878 - RNA, 19 nt, Artificial Sequence
  Description of Artificial Sequence: Synthetic oligonucleotide
  Sense strand starting at position 3473 of SEQ ID NO: 3777
gggugaucugaccauucug

SEQ ID NO: 293879 - RNA, 19 nt, Artificial Sequence
  Description of Artificial Sequence: Synthetic oligonucleotide
  Antisense strand to SEQ ID NO: 293878
cagaauggucagaucaccc

SEQ ID NO: 293880 - RNA, 19 nt, Artificial Sequence
  Description of Artificial Sequence: Synthetic oligonucleotide
  Sense strand starting at position 3484 of SEQ ID NO: 3777
ccauucugauggcucaaca

SEQ ID NO: 293881 - RNA, 19 nt, Artificial Sequence
  Description of Artificial Sequence: Synthetic oligonucleotide
  Antisense strand to SEQ ID NO: 293880
uguugagccaucagaaugg

SEQ ID NO: 293882 - RNA, 19 nt, Artificial Sequence
  Description of Artificial Sequence: Synthetic oligonucleotide
  Sense strand starting at position 3494 of SEQ ID NO: 3777
ggcucaacagcugaaugua

SEQ ID NO: 293883 - RNA, 19 nt, Artificial Sequence
  Description of Artificial Sequence: Synthetic oligonucleotide
  Antisense strand to SEQ ID NO: 293882
uacauucagcuguugagcc

SEQ ID NO: 293884 - RNA, 19 nt, Artificial Sequence
  Description of Artificial Sequence: Synthetic oligonucleotide
  Sense strand starting at position 3504 of SEQ ID NO: 3777
cugaauguauguuuaauga

SEQ ID NO: 293885 - RNA, 19 nt, Artificial Sequence
  Description of Artificial Sequence: Synthetic oligonucleotide
  Antisense strand to SEQ ID NO: 293884
ucauuaaacauacauucag

SEQ ID NO: 293886 - RNA, 19 nt, Artificial Sequence
  Description of Artificial Sequence: Synthetic oligonucleotide
  Sense strand starting at position 3523 of SEQ ID NO: 3777
cguccagaucugcagguau

SEQ ID NO: 293887 - RNA, 19 nt, Artificial Sequence
  Description of Artificial Sequence: Synthetic oligonucleotide
  Antisense strand to SEQ ID NO: 293886
auaccugcagaucuggacg

SEQ ID NO: 293888 - RNA, 19 nt, Artificial Sequence
  Description of Artificial Sequence: Synthetic oligonucleotide
  Sense strand starting at position 3595 of SEQ ID NO: 3777
ucauauacccucugagguu

SEQ ID NO: 293889 - RNA, 19 nt, Artificial Sequence
  Description of Artificial Sequence: Synthetic oligonucleotide
  Antisense strand to SEQ ID NO: 293888
aaccucagaggguauauga

SEQ ID NO: 293890 - RNA, 19 nt, Artificial Sequence
  Description of Artificial Sequence: Synthetic oligonucleotide
  Sense strand starting at position 3750 of SEQ ID NO: 3777
cuucuaacuuuaucguguu

SEQ ID NO: 293891 - RNA, 19 nt, Artificial Sequence
  Description of Artificial Sequence: Synthetic oligonucleotide
  Antisense strand to SEQ ID NO: 293890
aacacgauaaaguuagaag

SEQ ID NO: 293892 - RNA, 19 nt, Artificial Sequence
  Description of Artificial Sequence: Synthetic oligonucleotide
  Sense strand starting at position 3757 of SEQ ID NO: 3777
cuuuaucguguugguaaua

SEQ ID NO: 293893 - RNA, 19 nt, Artificial Sequence
  Description of Artificial Sequence: Synthetic oligonucleotide
  Antisense strand to SEQ ID NO: 293892
uauuaccaacacgauaaag

SEQ ID NO: 293894 - RNA, 19 nt, Artificial Sequence
  Description of Artificial Sequence: Synthetic oligonucleotide
  Sense strand starting at position 3758 of SEQ ID NO: 3777
uuuaucguguugguaauau

SEQ ID NO: 293895 - RNA, 19 nt, Artificial Sequence
  Description of Artificial Sequence: Synthetic oligonucleotide
  Antisense strand to SEQ ID NO: 293894
auauuaccaacacgauaaa

SEQ ID NO: 293896 - RNA, 19 nt, Artificial Sequence
  Description of Artificial Sequence: Synthetic oligonucleotide
  Sense strand starting at position 3841 of SEQ ID NO: 3777
uuauuaggccaguacuuaa

SEQ ID NO: 293897 - RNA, 19 nt, Artificial Sequence
  Description of Artificial Sequence: Synthetic oligonucleotide
  Antisense strand to SEQ ID NO: 293896
uuaaguacuggccuaauaa

SEQ ID NO: 293898 - RNA, 19 nt, Artificial Sequence
  Description of Artificial Sequence: Synthetic oligonucleotide
  Sense strand starting at position 3848 of SEQ ID NO: 3777
gccaguacuuaacugagca

SEQ ID NO: 293899 - RNA, 19 nt, Artificial Sequence
  Description of Artificial Sequence: Synthetic oligonucleotide
  Antisense strand to SEQ ID NO: 293898
ugcucaguuaaguacuggc

SEQ ID NO: 293900 - RNA, 19 nt, Artificial Sequence
  Description of Artificial Sequence: Synthetic oligonucleotide
  Sense strand starting at position 3879 of SEQ ID NO: 3777
ccaggcauuguuugagaug

SEQ ID NO: 293901 - RNA, 19 nt, Artificial Sequence
  Description of Artificial Sequence: Synthetic oligonucleotide
  Antisense strand to SEQ ID NO: 293900
caucucaaacaaugccugg

SEQ ID NO: 293902 - RNA, 19 nt, Artificial Sequence
  Description of Artificial Sequence: Synthetic oligonucleotide
  Sense strand starting at position 3888 of SEQ ID NO: 3777
guuugagaugcucaggaug

SEQ ID NO: 293903 - RNA, 19 nt, Artificial Sequence
  Description of Artificial Sequence: Synthetic oligonucleotide
  Antisense strand to SEQ ID NO: 293902
cauccugagcaucucaaac

SEQ ID NO: 293904 - RNA, 19 nt, Artificial Sequence
  Description of Artificial Sequence: Synthetic oligonucleotide
  Sense strand starting at position 3927 of SEQ ID NO: 3777
aaaguuccugagugggaca

SEQ ID NO: 293905 - RNA, 19 nt, Artificial Sequence
  Description of Artificial Sequence: Synthetic oligonucleotide
  Antisense strand to SEQ ID NO: 293904
ugucccacucaggaacuuu

SEQ ID NO: 293906 - RNA, 19 nt, Artificial Sequence
  Description of Artificial Sequence: Synthetic oligonucleotide
  Sense strand starting at position 382 of SEQ ID NO: 3778
accaguguggcagaauuaa

SEQ ID NO: 293907 - RNA, 19 nt, Artificial Sequence
  Description of Artificial Sequence: Synthetic oligonucleotide
  Antisense strand to SEQ ID NO: 293906
uuaauucugccacacuggu

SEQ ID NO: 293908 - RNA, 19 nt, Artificial Sequence
  Description of Artificial Sequence: Synthetic oligonucleotide
  Sense strand starting at position 453 of SEQ ID NO: 3778
agcugauaccuuggugauu

SEQ ID NO: 293909 - RNA, 19 nt, Artificial Sequence
  Description of Artificial Sequence: Synthetic oligonucleotide
  Antisense strand to SEQ ID NO: 293908
aaucaccaagguaucagcu

SEQ ID NO: 293910 - RNA, 19 nt, Artificial Sequence
  Description of Artificial Sequence: Synthetic oligonucleotide
  Sense strand starting at position 514 of SEQ ID NO: 3778
ccuauuuggcaaugcuuua

SEQ ID NO: 293911 - RNA, 19 nt, Artificial Sequence
  Description of Artificial Sequence: Synthetic oligonucleotide
  Antisense strand to SEQ ID NO: 293910
uaaagcauugccaaauagg

SEQ ID NO: 293912 - RNA, 19 nt, Artificial Sequence
  Description of Artificial Sequence: Synthetic oligonucleotide
  Sense strand starting at position 519 of SEQ ID NO: 3778
uuggcaaugcuuuaugagu

SEQ ID NO: 293913 - RNA, 19 nt, Artificial Sequence
  Description of Artificial Sequence: Synthetic oligonucleotide
  Antisense strand to SEQ ID NO: 293912
acucauaaagcauugccaa

SEQ ID NO: 293914 - RNA, 19 nt, Artificial Sequence
  Description of Artificial Sequence: Synthetic oligonucleotide
  Sense strand starting at position 528 of SEQ ID NO: 3778
cuuuaugaguuccuuuaca

SEQ ID NO: 293915 - RNA, 19 nt, Artificial Sequence
  Description of Artificial Sequence: Synthetic oligonucleotide
  Antisense strand to SEQ ID NO: 293914
uguaaaggaacucauaaag

SEQ ID NO: 293916 - RNA, 19 nt, Artificial Sequence
  Description of Artificial Sequence: Synthetic oligonucleotide
  Sense strand starting at position 676 of SEQ ID NO: 3778
gugagagccugaagggauu

SEQ ID NO: 293917 - RNA, 19 nt, Artificial Sequence
  Description of Artificial Sequence: Synthetic oligonucleotide
  Antisense strand to SEQ ID NO: 293916
aaucccuucaggcucucac

SEQ ID NO: 293918 - RNA, 19 nt, Artificial Sequence
  Description of Artificial Sequence: Synthetic oligonucleotide
  Sense strand starting at position 688 of SEQ ID NO: 3778
agggauuucuaaggaguaa

SEQ ID NO: 293919 - RNA, 19 nt, Artificial Sequence
  Description of Artificial Sequence: Synthetic oligonucleotide
  Antisense strand to SEQ ID NO: 293918
uuacuccuuagaaaucccu

SEQ ID NO: 293920 - RNA, 19 nt, Artificial Sequence
  Description of Artificial Sequence: Synthetic oligonucleotide
  Sense strand starting at position 699 of SEQ ID NO: 3778
aggaguaaaguauguaaga

SEQ ID NO: 293921 - RNA, 19 nt, Artificial Sequence
  Description of Artificial Sequence: Synthetic oligonucleotide
  Antisense strand to SEQ ID NO: 293920
ucuuacauacuuuacuccu

SEQ ID NO: 293922 - RNA, 19 nt, Artificial Sequence
  Description of Artificial Sequence: Synthetic oligonucleotide
  Sense strand starting at position 700 of SEQ ID NO: 3778
ggaguaaaguauguaagau

SEQ ID NO: 293923 - RNA, 19 nt, Artificial Sequence
  Description of Artificial Sequence: Synthetic oligonucleotide
  Antisense strand to SEQ ID NO: 293922
aucuuacauacuuuacucc

SEQ ID NO: 293924 - RNA, 19 nt, Artificial Sequence
  Description of Artificial Sequence: Synthetic oligonucleotide
  Sense strand starting at position 708 of SEQ ID NO: 3778
guauguaagauauauggca

SEQ ID NO: 293925 - RNA, 19 nt, Artificial Sequence
  Description of Artificial Sequence: Synthetic oligonucleotide
  Antisense strand to SEQ ID NO: 293924
ugccauauaucuuacauac

SEQ ID NO: 293926 - RNA, 19 nt, Artificial Sequence
  Description of Artificial Sequence: Synthetic oligonucleotide
  Sense strand starting at position 754 of SEQ ID NO: 3778
uacauagauguuugugacu

SEQ ID NO: 293927 - RNA, 19 nt, Artificial Sequence
  Description of Artificial Sequence: Synthetic oligonucleotide
  Antisense strand to SEQ ID NO: 293926
agucacaaacaucuaugua

SEQ ID NO: 293928 - RNA, 19 nt, Artificial Sequence
  Description of Artificial Sequence: Synthetic oligonucleotide
  Sense strand starting at position 760 of SEQ ID NO: 3778
gauguuugugacuagucag

SEQ ID NO: 293929 - RNA, 19 nt, Artificial Sequence
  Description of Artificial Sequence: Synthetic oligonucleotide
  Antisense strand to SEQ ID NO: 293928
cugacuagucacaaacauc

SEQ ID NO: 293930 - RNA, 19 nt, Artificial Sequence
  Description of Artificial Sequence: Synthetic oligonucleotide
  Sense strand starting at position 763 of SEQ ID NO: 3778
guuugugacuagucagaca

SEQ ID NO: 293931 - RNA, 19 nt, Artificial Sequence
  Description of Artificial Sequence: Synthetic oligonucleotide
  Antisense strand to SEQ ID NO: 293930
ugucugacuagucacaaac

SEQ ID NO: 293932 - RNA, 19 nt, Artificial Sequence
  Description of Artificial Sequence: Synthetic oligonucleotide
  Sense strand starting at position 821 of SEQ ID NO: 3778
augagcaaauucuccugaa

SEQ ID NO: 293933 - RNA, 19 nt, Artificial Sequence
  Description of Artificial Sequence: Synthetic oligonucleotide
  Antisense strand to SEQ ID NO: 293932
uucaggagaauuugcucau

SEQ ID NO: 293934 - RNA, 19 nt, Artificial Sequence
  Description of Artificial Sequence: Synthetic oligonucleotide
  Sense strand starting at position 822 of SEQ ID NO: 3778
ugagcaaauucuccugaaa

SEQ ID NO: 293935 - RNA, 19 nt, Artificial Sequence
  Description of Artificial Sequence: Synthetic oligonucleotide
  Antisense strand to SEQ ID NO: 293934
uuucaggagaauuugcuca

SEQ ID NO: 293936 - RNA, 19 nt, Artificial Sequence
  Description of Artificial Sequence: Synthetic oligonucleotide
  Sense strand starting at position 972 of SEQ ID NO: 3778
ucuccauucuuaguagaag

SEQ ID NO: 293937 - RNA, 19 nt, Artificial Sequence
  Description of Artificial Sequence: Synthetic oligonucleotide
  Antisense strand to SEQ ID NO: 293936
cuucuacuaagaauggaga

SEQ ID NO: 293938 - RNA, 19 nt, Artificial Sequence
  Description of Artificial Sequence: Synthetic oligonucleotide
  Sense strand starting at position 989 of SEQ ID NO: 3778
agcaguuagcaugaaacau

SEQ ID NO: 293939 - RNA, 19 nt, Artificial Sequence
  Description of Artificial Sequence: Synthetic oligonucleotide
  Antisense strand to SEQ ID NO: 293938
auguuucaugcuaacugcu

SEQ ID NO: 293940 - RNA, 19 nt, Artificial Sequence
  Description of Artificial Sequence: Synthetic oligonucleotide
  Sense strand starting at position 1007 of SEQ ID NO: 3778
uucuuugagcagcaagaaa

SEQ ID NO: 293941 - RNA, 19 nt, Artificial Sequence
  Description of Artificial Sequence: Synthetic oligonucleotide
  Antisense strand to SEQ ID NO: 293940
uuucuugcugcucaaagaa

SEQ ID NO: 293942 - RNA, 19 nt, Artificial Sequence
  Description of Artificial Sequence: Synthetic oligonucleotide
  Sense strand starting at position 1018 of SEQ ID NO: 3778
gcaagaaacugggauuuag

SEQ ID NO: 293943 - RNA, 19 nt, Artificial Sequence
  Description of Artificial Sequence: Synthetic oligonucleotide
  Antisense strand to SEQ ID NO: 293942
cuaaaucccaguuucuugc

SEQ ID NO: 293944 - RNA, 19 nt, Artificial Sequence
  Description of Artificial Sequence: Synthetic oligonucleotide
  Sense strand starting at position 1422 of SEQ ID NO: 3778
gcgagcucgcaauuccuuu

SEQ ID NO: 293945 - RNA, 19 nt, Artificial Sequence
  Description of Artificial Sequence: Synthetic oligonucleotide
  Antisense strand to SEQ ID NO: 293944
aaaggaauugcgagcucgc

SEQ ID NO: 293946 - RNA, 19 nt, Artificial Sequence
  Description of Artificial Sequence: Synthetic oligonucleotide
  Sense strand starting at position 1593 of SEQ ID NO: 3778
guuguuguccuggaaucaa

SEQ ID NO: 293947 - RNA, 19 nt, Artificial Sequence
  Description of Artificial Sequence: Synthetic oligonucleotide
  Antisense strand to SEQ ID NO: 293946
uugauuccaggacaacaac

SEQ ID NO: 293948 - RNA, 19 nt, Artificial Sequence
  Description of Artificial Sequence: Synthetic oligonucleotide
  Sense strand starting at position 2785 of SEQ ID NO: 3778
gugggugaugacuagggua

SEQ ID NO: 293949 - RNA, 19 nt, Artificial Sequence
  Description of Artificial Sequence: Synthetic oligonucleotide
  Antisense strand to SEQ ID NO: 293948
uacccuagucaucacccac

SEQ ID NO: 293950 - RNA, 19 nt, Artificial Sequence
  Description of Artificial Sequence: Synthetic oligonucleotide
  Sense strand starting at position 2889 of SEQ ID NO: 3778
uguacuuuguuccugaaca

SEQ ID NO: 293951 - RNA, 19 nt, Artificial Sequence
  Description of Artificial Sequence: Synthetic oligonucleotide
  Antisense strand to SEQ ID NO: 293950
uguucaggaacaaaguaca

SEQ ID NO: 293952 - RNA, 19 nt, Artificial Sequence
  Description of Artificial Sequence: Synthetic oligonucleotide
  Sense strand starting at position 2994 of SEQ ID NO: 3778
guaucugcugaguaguaga

SEQ ID NO: 293953 - RNA, 19 nt, Artificial Sequence
  Description of Artificial Sequence: Synthetic oligonucleotide
  Antisense strand to SEQ ID NO: 293952
ucuacuacucagcagauac

SEQ ID NO: 293954 - RNA, 19 nt, Artificial Sequence
  Description of Artificial Sequence: Synthetic oligonucleotide
  Sense strand starting at position 2999 of SEQ ID NO: 3778
ugcugaguaguagaaguga

SEQ ID NO: 293955 - RNA, 19 nt, Artificial Sequence
  Description of Artificial Sequence: Synthetic oligonucleotide
  Antisense strand to SEQ ID NO: 293954
ucacuucuacuacucagca

SEQ ID NO: 293956 - RNA, 19 nt, Artificial Sequence
  Description of Artificial Sequence: Synthetic oligonucleotide
  Sense strand starting at position 3147 of SEQ ID NO: 3778
acuuuccuccaguggauau

SEQ ID NO: 293957 - RNA, 19 nt, Artificial Sequence
  Description of Artificial Sequence: Synthetic oligonucleotide
  Antisense strand to SEQ ID NO: 293956
auauccacuggaggaaagu

SEQ ID NO: 293958 - RNA, 19 nt, Artificial Sequence
  Description of Artificial Sequence: Synthetic oligonucleotide
  Sense strand starting at position 3157 of SEQ ID NO: 3778
aguggauaucgagaccucu

SEQ ID NO: 293959 - RNA, 19 nt, Artificial Sequence
  Description of Artificial Sequence: Synthetic oligonucleotide
  Antisense strand to SEQ ID NO: 293958
agaggucucgauauccacu

SEQ ID NO: 293960 - RNA, 19 nt, Artificial Sequence
  Description of Artificial Sequence: Synthetic oligonucleotide
  Sense strand starting at position 3216 of SEQ ID NO: 3778
gcguucagucuauuguguu

SEQ ID NO: 293961 - RNA, 19 nt, Artificial Sequence
  Description of Artificial Sequence: Synthetic oligonucleotide
  Antisense strand to SEQ ID NO: 293960
aacacaauagacugaacgc

SEQ ID NO: 293962 - RNA, 19 nt, Artificial Sequence
  Description of Artificial Sequence: Synthetic oligonucleotide
  Sense strand starting at position 3249 of SEQ ID NO: 3778
gguucuuucgacuagauaa

SEQ ID NO: 293963 - RNA, 19 nt, Artificial Sequence
  Description of Artificial Sequence: Synthetic oligonucleotide
  Antisense strand to SEQ ID NO: 293962
uuaucuagucgaaagaacc

SEQ ID NO: 293964 - RNA, 19 nt, Artificial Sequence
  Description of Artificial Sequence: Synthetic oligonucleotide
  Sense strand starting at position 3325 of SEQ ID NO: 3778
cagucaauguuaguggaau

SEQ ID NO: 293965 - RNA, 19 nt, Artificial Sequence
  Description of Artificial Sequence: Synthetic oligonucleotide
  Antisense strand to SEQ ID NO: 293964
auuccacuaacauugacug

SEQ ID NO: 293966 - RNA, 19 nt, Artificial Sequence
  Description of Artificial Sequence: Synthetic oligonucleotide
  Sense strand starting at position 3331 of SEQ ID NO: 3778
auguuaguggaaugcuaaa

SEQ ID NO: 293967 - RNA, 19 nt, Artificial Sequence
  Description of Artificial Sequence: Synthetic oligonucleotide
  Antisense strand to SEQ ID NO: 293966
uuuagcauuccacuaacau

SEQ ID NO: 293968 - RNA, 19 nt, Artificial Sequence
  Description of Artificial Sequence: Synthetic oligonucleotide
  Sense strand starting at position 3342 of SEQ ID NO: 3778
augcuaaaggagcaguauu

SEQ ID NO: 293969 - RNA, 19 nt, Artificial Sequence
  Description of Artificial Sequence: Synthetic oligonucleotide
  Antisense strand to SEQ ID NO: 293968
aauacugcuccuuuagcau

SEQ ID NO: 293970 - RNA, 19 nt, Artificial Sequence
  Description of Artificial Sequence: Synthetic oligonucleotide
  Sense strand starting at position 3500 of SEQ ID NO: 3778
ccgauaagaaggcaguuua

SEQ ID NO: 293971 - RNA, 19 nt, Artificial Sequence
  Description of Artificial Sequence: Synthetic oligonucleotide
  Antisense strand to SEQ ID NO: 293970
uaaacugccuucuuaucgg

SEQ ID NO: 293972 - RNA, 19 nt, Artificial Sequence
  Description of Artificial Sequence: Synthetic oligonucleotide
  Sense strand starting at position 3519 of SEQ ID NO: 3778
gaggaacuagccuggguua

SEQ ID NO: 293973 - RNA, 19 nt, Artificial Sequence
  Description of Artificial Sequence: Synthetic oligonucleotide
  Antisense strand to SEQ ID NO: 293972
uaacccaggcuaguuccuc

SEQ ID NO: 293974 - RNA, 19 nt, Artificial Sequence
  Description of Artificial Sequence: Synthetic oligonucleotide
  Sense strand starting at position 3520 of SEQ ID NO: 3778
aggaacuagccuggguuaa

SEQ ID NO: 293975 - RNA, 19 nt, Artificial Sequence
  Description of Artificial Sequence: Synthetic oligonucleotide
  Antisense strand to SEQ ID NO: 293974
uuaacccaggcuaguuccu

SEQ ID NO: 293976 - RNA, 19 nt, Artificial Sequence
  Description of Artificial Sequence: Synthetic oligonucleotide
  Sense strand starting at position 3521 of SEQ ID NO: 3778
ggaacuagccuggguuaaa

SEQ ID NO: 293977 - RNA, 19 nt, Artificial Sequence
  Description of Artificial Sequence: Synthetic oligonucleotide
  Antisense strand to SEQ ID NO: 293976
uuuaacccaggcuaguucc

SEQ ID NO: 293978 - RNA, 19 nt, Artificial Sequence
  Description of Artificial Sequence: Synthetic oligonucleotide
  Sense strand starting at position 3522 of SEQ ID NO: 3778
gaacuagccuggguuaaag

SEQ ID NO: 293979 - RNA, 19 nt, Artificial Sequence
  Description of Artificial Sequence: Synthetic oligonucleotide
  Antisense strand to SEQ ID NO: 293978
cuuuaacccaggcuaguuc

SEQ ID NO: 293980 - RNA, 19 nt, Artificial Sequence
  Description of Artificial Sequence: Synthetic oligonucleotide
  Sense strand starting at position 3530 of SEQ ID NO: 3778
cuggguuaaagcugacauu

SEQ ID NO: 293981 - RNA, 19 nt, Artificial Sequence
  Description of Artificial Sequence: Synthetic oligonucleotide
  Antisense strand to SEQ ID NO: 293980
aaugucagcuuuaacccag

SEQ ID NO: 293982 - RNA, 19 nt, Artificial Sequence
  Description of Artificial Sequence: Synthetic oligonucleotide
  Sense strand starting at position 3553 of SEQ ID NO: 3778
ccugcuauuccugagaaca

SEQ ID NO: 293983 - RNA, 19 nt, Artificial Sequence
  Description of Artificial Sequence: Synthetic oligonucleotide
  Antisense strand to SEQ ID NO: 293982
uguucucaggaauagcagg

SEQ ID NO: 293984 - RNA, 19 nt, Artificial Sequence
  Description of Artificial Sequence: Synthetic oligonucleotide
  Sense strand starting at position 3607 of SEQ ID NO: 3778
guucuuaaucuuuacagga

SEQ ID NO: 293985 - RNA, 19 nt, Artificial Sequence
  Description of Artificial Sequence: Synthetic oligonucleotide
  Antisense strand to SEQ ID NO: 293984
uccuguaaagauuaagaac

SEQ ID NO: 293986 - RNA, 19 nt, Artificial Sequence
  Description of Artificial Sequence: Synthetic oligonucleotide
  Sense strand starting at position 2794 of SEQ ID NO: 3779
gaacgacuucccggucuuu

SEQ ID NO: 293987 - RNA, 19 nt, Artificial Sequence
  Description of Artificial Sequence: Synthetic oligonucleotide
  Antisense strand to SEQ ID NO: 293986
aaagaccgggaagucguuc

SEQ ID NO: 293988 - RNA, 19 nt, Artificial Sequence
  Description of Artificial Sequence: Synthetic oligonucleotide
  Sense strand starting at position 2842 of SEQ ID NO: 3779
ugggucucuuacggcuaua

SEQ ID NO: 293989 - RNA, 19 nt, Artificial Sequence
  Description of Artificial Sequence: Synthetic oligonucleotide
  Antisense strand to SEQ ID NO: 293988
uauagccguaagagaccca

SEQ ID NO: 293990 - RNA, 19 nt, Artificial Sequence
  Description of Artificial Sequence: Synthetic oligonucleotide
  Sense strand starting at position 2889 of SEQ ID NO: 3779
uugaauagcggucaucuuu

SEQ ID NO: 293991 - RNA, 19 nt, Artificial Sequence
  Description of Artificial Sequence: Synthetic oligonucleotide
  Antisense strand to SEQ ID NO: 293990
aaagaugaccgcuauucaa

SEQ ID NO: 293992 - RNA, 19 nt, Artificial Sequence
  Description of Artificial Sequence: Synthetic oligonucleotide
  Sense strand starting at position 2992 of SEQ ID NO: 3779
cgaugguguggucguccaa

SEQ ID NO: 293993 - RNA, 19 nt, Artificial Sequence
  Description of Artificial Sequence: Synthetic oligonucleotide
  Antisense strand to SEQ ID NO: 293992
uuggacgaccacaccaucg

SEQ ID NO: 293994 - RNA, 19 nt, Artificial Sequence
  Description of Artificial Sequence: Synthetic oligonucleotide
  Sense strand starting at position 2994 of SEQ ID NO: 3779
augguguggucguccaagu

SEQ ID NO: 293995 - RNA, 19 nt, Artificial Sequence
  Description of Artificial Sequence: Synthetic oligonucleotide
  Antisense strand to SEQ ID NO: 293994
acuuggacgaccacaccau

SEQ ID NO: 293996 - RNA, 19 nt, Artificial Sequence
  Description of Artificial Sequence: Synthetic oligonucleotide
  Sense strand starting at position 2995 of SEQ ID NO: 3779
ugguguggucguccaaguu

SEQ ID NO: 293997 - RNA, 19 nt, Artificial Sequence
  Description of Artificial Sequence: Synthetic oligonucleotide
  Antisense strand to SEQ ID NO: 293996
aacuuggacgaccacacca

SEQ ID NO: 293998 - RNA, 19 nt, Artificial Sequence
  Description of Artificial Sequence: Synthetic oligonucleotide
  Sense strand starting at position 2996 of SEQ ID NO: 3779
gguguggucguccaaguuu

SEQ ID NO: 293999 - RNA, 19 nt, Artificial Sequence
  Description of Artificial Sequence: Synthetic oligonucleotide
  Antisense strand to SEQ ID NO: 293998
aaacuuggacgaccacacc

SEQ ID NO: 294000 - RNA, 19 nt, Artificial Sequence
  Description of Artificial Sequence: Synthetic oligonucleotide
  Sense strand starting at position 3115 of SEQ ID NO: 3779
guagauuuaucucgcuugu

SEQ ID NO: 294001 - RNA, 19 nt, Artificial Sequence
  Description of Artificial Sequence: Synthetic oligonucleotide
  Antisense strand to SEQ ID NO: 294000
acaagcgagauaaaucuac

SEQ ID NO: 294002 - RNA, 19 nt, Artificial Sequence
  Description of Artificial Sequence: Synthetic oligonucleotide
  Sense strand starting at position 3117 of SEQ ID NO: 3779
agauuuaucucgcuuguua

SEQ ID NO: 294003 - RNA, 19 nt, Artificial Sequence
  Description of Artificial Sequence: Synthetic oligonucleotide
  Antisense strand to SEQ ID NO: 294002
uaacaagcgagauaaaucu

SEQ ID NO: 294004 - RNA, 19 nt, Artificial Sequence
  Description of Artificial Sequence: Synthetic oligonucleotide
  Sense strand starting at position 3119 of SEQ ID NO: 3779
auuuaucucgcuuguuagu

SEQ ID NO: 294005 - RNA, 19 nt, Artificial Sequence
  Description of Artificial Sequence: Synthetic oligonucleotide
  Antisense strand to SEQ ID NO: 294004
acuaacaagcgagauaaau

SEQ ID NO: 294006 - RNA, 19 nt, Artificial Sequence
  Description of Artificial Sequence: Synthetic oligonucleotide
  Sense strand starting at position 3121 of SEQ ID NO: 3779
uuaucucgcuuguuaguaa

SEQ ID NO: 294007 - RNA, 19 nt, Artificial Sequence
  Description of Artificial Sequence: Synthetic oligonucleotide
  Antisense strand to SEQ ID NO: 294006
uuacuaacaagcgagauaa

SEQ ID NO: 294008 - RNA, 19 nt, Artificial Sequence
  Description of Artificial Sequence: Synthetic oligonucleotide
  Sense strand starting at position 3132 of SEQ ID NO: 3779
guuaguaagccagcgguuu

SEQ ID NO: 294009 - RNA, 19 nt, Artificial Sequence
  Description of Artificial Sequence: Synthetic oligonucleotide
  Antisense strand to SEQ ID NO: 294008
aaaccgcuggcuuacuaac

SEQ ID NO: 294010 - RNA, 19 nt, Artificial Sequence
  Description of Artificial Sequence: Synthetic oligonucleotide
  Sense strand starting at position 3150 of SEQ ID NO: 3779
uuccaagugugguuacaac

SEQ ID NO: 294011 - RNA, 19 nt, Artificial Sequence
  Description of Artificial Sequence: Synthetic oligonucleotide
  Antisense strand to SEQ ID NO: 294010
guuguaaccacacuuggaa

SEQ ID NO: 294012 - RNA, 19 nt, Artificial Sequence
  Description of Artificial Sequence: Synthetic oligonucleotide
  Sense strand starting at position 3183 of SEQ ID NO: 3779
guaccaaggucguguacau

SEQ ID NO: 294013 - RNA, 19 nt, Artificial Sequence
  Description of Artificial Sequence: Synthetic oligonucleotide
  Antisense strand to SEQ ID NO: 294012
auguacacgaccuugguac

SEQ ID NO: 294014 - RNA, 19 nt, Artificial Sequence
  Description of Artificial Sequence: Synthetic oligonucleotide
  Sense strand starting at position 3190 of SEQ ID NO: 3779
ggucguguacaucgaguuu

SEQ ID NO: 294015 - RNA, 19 nt, Artificial Sequence
  Description of Artificial Sequence: Synthetic oligonucleotide
  Antisense strand to SEQ ID NO: 294014
aaacucgauguacacgacc

SEQ ID NO: 294016 - RNA, 19 nt, Artificial Sequence
  Description of Artificial Sequence: Synthetic oligonucleotide
  Sense strand starting at position 3221 of SEQ ID NO: 3779
augguauggagugaucuca

SEQ ID NO: 294017 - RNA, 19 nt, Artificial Sequence
  Description of Artificial Sequence: Synthetic oligonucleotide
  Antisense strand to SEQ ID NO: 294016
ugagaucacuccauaccau

SEQ ID NO: 294018 - RNA, 19 nt, Artificial Sequence
  Description of Artificial Sequence: Synthetic oligonucleotide
  Sense strand starting at position 3229 of SEQ ID NO: 3779
gagugaucucaccgccguu

SEQ ID NO: 294019 - RNA, 19 nt, Artificial Sequence
  Description of Artificial Sequence: Synthetic oligonucleotide
  Antisense strand to SEQ ID NO: 294018
aacggcggugagaucacuc

SEQ ID NO: 294020 - RNA, 19 nt, Artificial Sequence
  Description of Artificial Sequence: Synthetic oligonucleotide
  Sense strand starting at position 3253 of SEQ ID NO: 3779
gcccgaugccuguguauuc

SEQ ID NO: 294021 - RNA, 19 nt, Artificial Sequence
  Description of Artificial Sequence: Synthetic oligonucleotide
  Antisense strand to SEQ ID NO: 294020
gaauacacaggcaucgggc

SEQ ID NO: 294022 - RNA, 19 nt, Artificial Sequence
  Description of Artificial Sequence: Synthetic oligonucleotide
  Sense strand starting at position 3258 of SEQ ID NO: 3779
augccuguguauucuuaaa

SEQ ID NO: 294023 - RNA, 19 nt, Artificial Sequence
  Description of Artificial Sequence: Synthetic oligonucleotide
  Antisense strand to SEQ ID NO: 294022
uuuaagaauacacaggcau

SEQ ID NO: 294024 - RNA, 19 nt, Artificial Sequence
  Description of Artificial Sequence: Synthetic oligonucleotide
  Sense strand starting at position 3302 of SEQ ID NO: 3779
auaguaaacauuggugguu

SEQ ID NO: 294025 - RNA, 19 nt, Artificial Sequence
  Description of Artificial Sequence: Synthetic oligonucleotide
  Antisense strand to SEQ ID NO: 294024
aaccaccaauguuuacuau

SEQ ID NO: 294026 - RNA, 19 nt, Artificial Sequence
  Description of Artificial Sequence: Synthetic oligonucleotide
  Sense strand starting at position 3391 of SEQ ID NO: 3779
ccuccuacaugagaaguuu

SEQ ID NO: 294027 - RNA, 19 nt, Artificial Sequence
  Description of Artificial Sequence: Synthetic oligonucleotide
  Antisense strand to SEQ ID NO: 294026
aaacuucucauguaggagg

SEQ ID NO: 294028 - RNA, 19 nt, Artificial Sequence
  Description of Artificial Sequence: Synthetic oligonucleotide
  Sense strand starting at position 3427 of SEQ ID NO: 3779
cagauugcaggcugagaga

SEQ ID NO: 294029 - RNA, 19 nt, Artificial Sequence
  Description of Artificial Sequence: Synthetic oligonucleotide
  Antisense strand to SEQ ID NO: 294028
ucucucagccugcaaucug

SEQ ID NO: 294030 - RNA, 19 nt, Artificial Sequence
  Description of Artificial Sequence: Synthetic oligonucleotide
  Sense strand starting at position 3430 of SEQ ID NO: 3779
auugcaggcugagagauua

SEQ ID NO: 294031 - RNA, 19 nt, Artificial Sequence
  Description of Artificial Sequence: Synthetic oligonucleotide
  Antisense strand to SEQ ID NO: 294030
uaaucucucagccugcaau

SEQ ID NO: 294032 - RNA, 19 nt, Artificial Sequence
  Description of Artificial Sequence: Synthetic oligonucleotide
  Sense strand starting at position 3445 of SEQ ID NO: 3779
auuagaggauccguccaaa

SEQ ID NO: 294033 - RNA, 19 nt, Artificial Sequence
  Description of Artificial Sequence: Synthetic oligonucleotide
  Antisense strand to SEQ ID NO: 294032
uuuggacggauccucuaau

SEQ ID NO: 294034 - RNA, 19 nt, Artificial Sequence
  Description of Artificial Sequence: Synthetic oligonucleotide
  Sense strand starting at position 3609 of SEQ ID NO: 3779
gcaugugugagugagggaa

SEQ ID NO: 294035 - RNA, 19 nt, Artificial Sequence
  Description of Artificial Sequence: Synthetic oligonucleotide
  Antisense strand to SEQ ID NO: 294034
uucccucacucacacaugc

SEQ ID NO: 294036 - RNA, 19 nt, Artificial Sequence
  Description of Artificial Sequence: Synthetic oligonucleotide
  Sense strand starting at position 3719 of SEQ ID NO: 3779
ucauuuagcugauguuaga

SEQ ID NO: 294037 - RNA, 19 nt, Artificial Sequence
  Description of Artificial Sequence: Synthetic oligonucleotide
  Antisense strand to SEQ ID NO: 294036
ucuaacaucagcuaaauga

SEQ ID NO: 294038 - RNA, 19 nt, Artificial Sequence
  Description of Artificial Sequence: Synthetic oligonucleotide
  Sense strand starting at position 3722 of SEQ ID NO: 3779
uuuagcugauguuagauuu

SEQ ID NO: 294039 - RNA, 19 nt, Artificial Sequence
  Description of Artificial Sequence: Synthetic oligonucleotide
  Antisense strand to SEQ ID NO: 294038
aaaucuaacaucagcuaaa

SEQ ID NO: 294040 - RNA, 19 nt, Artificial Sequence
  Description of Artificial Sequence: Synthetic oligonucleotide
  Sense strand starting at position 3755 of SEQ ID NO: 3779
uuaauuugcuuugaggcua

SEQ ID NO: 294041 - RNA, 19 nt, Artificial Sequence
  Description of Artificial Sequence: Synthetic oligonucleotide
  Antisense strand to SEQ ID NO: 294040
uagccucaaagcaaauuaa

SEQ ID NO: 294042 - RNA, 19 nt, Artificial Sequence
  Description of Artificial Sequence: Synthetic oligonucleotide
  Sense strand starting at position 3766 of SEQ ID NO: 3779
ugaggcuaacuuuacuuau

SEQ ID NO: 294043 - RNA, 19 nt, Artificial Sequence
  Description of Artificial Sequence: Synthetic oligonucleotide
  Antisense strand to SEQ ID NO: 294042
auaaguaaaguuagccuca

SEQ ID NO: 294044 - RNA, 19 nt, Artificial Sequence
  Description of Artificial Sequence: Synthetic oligonucleotide
  Sense strand starting at position 3804 of SEQ ID NO: 3779
uugcguuaauuguagauua

SEQ ID NO: 294045 - RNA, 19 nt, Artificial Sequence
  Description of Artificial Sequence: Synthetic oligonucleotide
  Antisense strand to SEQ ID NO: 294044
uaaucuacaauuaacgcaa

SEQ ID NO: 294046 - RNA, 19 nt, Artificial Sequence
  Description of Artificial Sequence: Synthetic oligonucleotide
  Sense strand starting at position 3806 of SEQ ID NO: 3779
gcguuaauuguagauuaau

SEQ ID NO: 294047 - RNA, 19 nt, Artificial Sequence
  Description of Artificial Sequence: Synthetic oligonucleotide
  Antisense strand to SEQ ID NO: 294046
auuaaucuacaauuaacgc

SEQ ID NO: 294048 - RNA, 19 nt, Artificial Sequence
  Description of Artificial Sequence: Synthetic oligonucleotide
  Sense strand starting at position 3842 of SEQ ID NO: 3779
aauacaguauagugagaac

SEQ ID NO: 294049 - RNA, 19 nt, Artificial Sequence
  Description of Artificial Sequence: Synthetic oligonucleotide
  Antisense strand to SEQ ID NO: 294048
guucucacuauacuguauu

SEQ ID NO: 294050 - RNA, 19 nt, Artificial Sequence
  Description of Artificial Sequence: Synthetic oligonucleotide
  Sense strand starting at position 3853 of SEQ ID NO: 3779
gugagaacccuguacccuu

SEQ ID NO: 294051 - RNA, 19 nt, Artificial Sequence
  Description of Artificial Sequence: Synthetic oligonucleotide
  Antisense strand to SEQ ID NO: 294050
aaggguacaggguucucac

SEQ ID NO: 294052 - RNA, 19 nt, Artificial Sequence
  Description of Artificial Sequence: Synthetic oligonucleotide
  Sense strand starting at position 3885 of SEQ ID NO: 3779
acaauaagaucuggcaaac

SEQ ID NO: 294053 - RNA, 19 nt, Artificial Sequence
  Description of Artificial Sequence: Synthetic oligonucleotide
  Antisense strand to SEQ ID NO: 294052
guuugccagaucuuauugu

SEQ ID NO: 294054 - RNA, 19 nt, Artificial Sequence
  Description of Artificial Sequence: Synthetic oligonucleotide
  Sense strand starting at position 3903 of SEQ ID NO: 3779
cccauaguacgauaucaca

SEQ ID NO: 294055 - RNA, 19 nt, Artificial Sequence
  Description of Artificial Sequence: Synthetic oligonucleotide
  Antisense strand to SEQ ID NO: 294054
ugugauaucguacuauggg

SEQ ID NO: 294056 - RNA, 19 nt, Artificial Sequence
  Description of Artificial Sequence: Synthetic oligonucleotide
  Sense strand starting at position 3922 of SEQ ID NO: 3779
accagcauauugucauuga

SEQ ID NO: 294057 - RNA, 19 nt, Artificial Sequence
  Description of Artificial Sequence: Synthetic oligonucleotide
  Antisense strand to SEQ ID NO: 294056
ucaaugacaauaugcuggu

SEQ ID NO: 294058 - RNA, 19 nt, Artificial Sequence
  Description of Artificial Sequence: Synthetic oligonucleotide
  Sense strand starting at position 3923 of SEQ ID NO: 3779
ccagcauauugucauugau

SEQ ID NO: 294059 - RNA, 19 nt, Artificial Sequence
  Description of Artificial Sequence: Synthetic oligonucleotide
  Antisense strand to SEQ ID NO: 294058
aucaaugacaauaugcugg

SEQ ID NO: 294060 - RNA, 19 nt, Artificial Sequence
  Description of Artificial Sequence: Synthetic oligonucleotide
  Sense strand starting at position 3925 of SEQ ID NO: 3779
agcauauugucauugauug

SEQ ID NO: 294061 - RNA, 19 nt, Artificial Sequence
  Description of Artificial Sequence: Synthetic oligonucleotide
  Antisense strand to SEQ ID NO: 294060
caaucaaugacaauaugcu

SEQ ID NO: 294062 - RNA, 19 nt, Artificial Sequence
  Description of Artificial Sequence: Synthetic oligonucleotide
  Sense strand starting at position 3926 of SEQ ID NO: 3779
gcauauugucauugauuga

SEQ ID NO: 294063 - RNA, 19 nt, Artificial Sequence
  Description of Artificial Sequence: Synthetic oligonucleotide
  Antisense strand to SEQ ID NO: 294062
ucaaucaaugacaauaugc

SEQ ID NO: 294064 - RNA, 19 nt, Artificial Sequence
  Description of Artificial Sequence: Synthetic oligonucleotide
  Sense strand starting at position 3930 of SEQ ID NO: 3779
auugucauugauugauaca

SEQ ID NO: 294065 - RNA, 19 nt, Artificial Sequence
  Description of Artificial Sequence: Synthetic oligonucleotide
  Antisense strand to SEQ ID NO: 294064
uguaucaaucaaugacaau

SEQ ID NO: 294066 - RNA, 19 nt, Artificial Sequence
  Description of Artificial Sequence: Synthetic oligonucleotide
  Sense strand starting at position 2308 of SEQ ID NO: 3780
acuaguuaucaggguguca

SEQ ID NO: 294067 - RNA, 19 nt, Artificial Sequence
  Description of Artificial Sequence: Synthetic oligonucleotide
  Antisense strand to SEQ ID NO: 294066
ugacacccugauaacuagu

SEQ ID NO: 294068 - RNA, 19 nt, Artificial Sequence
  Description of Artificial Sequence: Synthetic oligonucleotide
  Sense strand starting at position 2310 of SEQ ID NO: 3780
uaguuaucagggugucaua

SEQ ID NO: 294069 - RNA, 19 nt, Artificial Sequence
  Description of Artificial Sequence: Synthetic oligonucleotide
  Antisense strand to SEQ ID NO: 294068
uaugacacccugauaacua

SEQ ID NO: 294070 - RNA, 19 nt, Artificial Sequence
  Description of Artificial Sequence: Synthetic oligonucleotide
  Sense strand starting at position 2317 of SEQ ID NO: 3780
cagggugucauauggguga

SEQ ID NO: 294071 - RNA, 19 nt, Artificial Sequence
  Description of Artificial Sequence: Synthetic oligonucleotide
  Antisense strand to SEQ ID NO: 294070
ucacccauaugacacccug

SEQ ID NO: 294072 - RNA, 19 nt, Artificial Sequence
  Description of Artificial Sequence: Synthetic oligonucleotide
  Sense strand starting at position 2319 of SEQ ID NO: 3780
gggugucauaugggugaca

SEQ ID NO: 294073 - RNA, 19 nt, Artificial Sequence
  Description of Artificial Sequence: Synthetic oligonucleotide
  Antisense strand to SEQ ID NO: 294072
ugucacccauaugacaccc

SEQ ID NO: 294074 - RNA, 19 nt, Artificial Sequence
  Description of Artificial Sequence: Synthetic oligonucleotide
  Sense strand starting at position 2320 of SEQ ID NO: 3780
ggugucauaugggugacau

SEQ ID NO: 294075 - RNA, 19 nt, Artificial Sequence
  Description of Artificial Sequence: Synthetic oligonucleotide
  Antisense strand to SEQ ID NO: 294074
augucacccauaugacacc

SEQ ID NO: 294076 - RNA, 19 nt, Artificial Sequence
  Description of Artificial Sequence: Synthetic oligonucleotide
  Sense strand starting at position 2321 of SEQ ID NO: 3780
gugucauaugggugacauc

SEQ ID NO: 294077 - RNA, 19 nt, Artificial Sequence
  Description of Artificial Sequence: Synthetic oligonucleotide
  Antisense strand to SEQ ID NO: 294076
gaugucacccauaugacac

SEQ ID NO: 294078 - RNA, 19 nt, Artificial Sequence
  Description of Artificial Sequence: Synthetic oligonucleotide
  Sense strand starting at position 2322 of SEQ ID NO: 3780
ugucauaugggugacauca

SEQ ID NO: 294079 - RNA, 19 nt, Artificial Sequence
  Description of Artificial Sequence: Synthetic oligonucleotide
  Antisense strand to SEQ ID NO: 294078
ugaugucacccauaugaca

SEQ ID NO: 294080 - RNA, 19 nt, Artificial Sequence
  Description of Artificial Sequence: Synthetic oligonucleotide
  Sense strand starting at position 2426 of SEQ ID NO: 3780
cgggcugcuuugcaaagau

SEQ ID NO: 294081 - RNA, 19 nt, Artificial Sequence
  Description of Artificial Sequence: Synthetic oligonucleotide
  Antisense strand to SEQ ID NO: 294080
aucuuugcaaagcagcccg

SEQ ID NO: 294082 - RNA, 19 nt, Artificial Sequence
  Description of Artificial Sequence: Synthetic oligonucleotide
  Sense strand starting at position 3407 of SEQ ID NO: 3780
gcagccucguccugaaauc

SEQ ID NO: 294083 - RNA, 19 nt, Artificial Sequence
  Description of Artificial Sequence: Synthetic oligonucleotide
  Antisense strand to SEQ ID NO: 294082
gauuucaggacgaggcugc

SEQ ID NO: 294084 - RNA, 19 nt, Artificial Sequence
  Description of Artificial Sequence: Synthetic oligonucleotide
  Sense strand starting at position 3414 of SEQ ID NO: 3780
cguccugaaaucgugcgau

SEQ ID NO: 294085 - RNA, 19 nt, Artificial Sequence
  Description of Artificial Sequence: Synthetic oligonucleotide
  Antisense strand to SEQ ID NO: 294084
aucgcacgauuucaggacg

SEQ ID NO: 294086 - RNA, 19 nt, Artificial Sequence
  Description of Artificial Sequence: Synthetic oligonucleotide
  Sense strand starting at position 3417 of SEQ ID NO: 3780
ccugaaaucgugcgauugu

SEQ ID NO: 294087 - RNA, 19 nt, Artificial Sequence
  Description of Artificial Sequence: Synthetic oligonucleotide
  Antisense strand to SEQ ID NO: 294086
acaaucgcacgauuucagg

SEQ ID NO: 294088 - RNA, 19 nt, Artificial Sequence
  Description of Artificial Sequence: Synthetic oligonucleotide
  Sense strand starting at position 3418 of SEQ ID NO: 3780
cugaaaucgugcgauugug

SEQ ID NO: 294089 - RNA, 19 nt, Artificial Sequence
  Description of Artificial Sequence: Synthetic oligonucleotide
  Antisense strand to SEQ ID NO: 294088
cacaaucgcacgauuucag

SEQ ID NO: 294090 - RNA, 19 nt, Artificial Sequence
  Description of Artificial Sequence: Synthetic oligonucleotide
  Sense strand starting at position 3426 of SEQ ID NO: 3780
gugcgauugugagcuagaa

SEQ ID NO: 294091 - RNA, 19 nt, Artificial Sequence
  Description of Artificial Sequence: Synthetic oligonucleotide
  Antisense strand to SEQ ID NO: 294090
uucuagcucacaaucgcac

SEQ ID NO: 294092 - RNA, 19 nt, Artificial Sequence
  Description of Artificial Sequence: Synthetic oligonucleotide
  Sense strand starting at position 3446 of SEQ ID NO: 3780
ccuucugggucacucauaa

SEQ ID NO: 294093 - RNA, 19 nt, Artificial Sequence
  Description of Artificial Sequence: Synthetic oligonucleotide
  Antisense strand to SEQ ID NO: 294092
uuaugagugacccagaagg

SEQ ID NO: 294094 - RNA, 19 nt, Artificial Sequence
  Description of Artificial Sequence: Synthetic oligonucleotide
  Sense strand starting at position 3450 of SEQ ID NO: 3780
cugggucacucauaaacca

SEQ ID NO: 294095 - RNA, 19 nt, Artificial Sequence
  Description of Artificial Sequence: Synthetic oligonucleotide
  Antisense strand to SEQ ID NO: 294094
ugguuuaugagugacccag

SEQ ID NO: 294096 - RNA, 19 nt, Artificial Sequence
  Description of Artificial Sequence: Synthetic oligonucleotide
  Sense strand starting at position 3486 of SEQ ID NO: 3780
acucgaguuucccgucuaa

SEQ ID NO: 294097 - RNA, 19 nt, Artificial Sequence
  Description of Artificial Sequence: Synthetic oligonucleotide
  Antisense strand to SEQ ID NO: 294096
uuagacgggaaacucgagu

SEQ ID NO: 294098 - RNA, 19 nt, Artificial Sequence
  Description of Artificial Sequence: Synthetic oligonucleotide
  Sense strand starting at position 3490 of SEQ ID NO: 3780
gaguuucccgucuaaauau

SEQ ID NO: 294099 - RNA, 19 nt, Artificial Sequence
  Description of Artificial Sequence: Synthetic oligonucleotide
  Antisense strand to SEQ ID NO: 294098
auauuuagacgggaaacuc

SEQ ID NO: 294100 - RNA, 19 nt, Artificial Sequence
  Description of Artificial Sequence: Synthetic oligonucleotide
  Sense strand starting at position 3608 of SEQ ID NO: 3780
guucgucuccuuuguguuu

SEQ ID NO: 294101 - RNA, 19 nt, Artificial Sequence
  Description of Artificial Sequence: Synthetic oligonucleotide
  Antisense strand to SEQ ID NO: 294100
aaacacaaaggagacgaac

SEQ ID NO: 294102 - RNA, 19 nt, Artificial Sequence
  Description of Artificial Sequence: Synthetic oligonucleotide
  Sense strand starting at position 3615 of SEQ ID NO: 3780
uccuuuguguuucuuuauu

SEQ ID NO: 294103 - RNA, 19 nt, Artificial Sequence
  Description of Artificial Sequence: Synthetic oligonucleotide
  Antisense strand to SEQ ID NO: 294102
aauaaagaaacacaaagga

SEQ ID NO: 294104 - RNA, 19 nt, Artificial Sequence
  Description of Artificial Sequence: Synthetic oligonucleotide
  Sense strand starting at position 3617 of SEQ ID NO: 3780
cuuuguguuucuuuauuga

SEQ ID NO: 294105 - RNA, 19 nt, Artificial Sequence
  Description of Artificial Sequence: Synthetic oligonucleotide
  Antisense strand to SEQ ID NO: 294104
ucaauaaagaaacacaaag

SEQ ID NO: 294106 - RNA, 19 nt, Artificial Sequence
  Description of Artificial Sequence: Synthetic oligonucleotide
  Sense strand starting at position 3624 of SEQ ID NO: 3780
uuucuuuauugagucccua

SEQ ID NO: 294107 - RNA, 19 nt, Artificial Sequence
  Description of Artificial Sequence: Synthetic oligonucleotide
  Antisense strand to SEQ ID NO: 294106
uagggacucaauaaagaaa

SEQ ID NO: 294108 - RNA, 19 nt, Artificial Sequence
  Description of Artificial Sequence: Synthetic oligonucleotide
  Sense strand starting at position 3640 of SEQ ID NO: 3780
cuacuaccucuacggauau

SEQ ID NO: 294109 - RNA, 19 nt, Artificial Sequence
  Description of Artificial Sequence: Synthetic oligonucleotide
  Antisense strand to SEQ ID NO: 294108
auauccguagagguaguag

SEQ ID NO: 294110 - RNA, 19 nt, Artificial Sequence
  Description of Artificial Sequence: Synthetic oligonucleotide
  Sense strand starting at position 3737 of SEQ ID NO: 3780
cuggguaucugggaacuuu

SEQ ID NO: 294111 - RNA, 19 nt, Artificial Sequence
  Description of Artificial Sequence: Synthetic oligonucleotide
  Antisense strand to SEQ ID NO: 294110
aaaguucccagauacccag

SEQ ID NO: 294112 - RNA, 19 nt, Artificial Sequence
  Description of Artificial Sequence: Synthetic oligonucleotide
  Sense strand starting at position 3754 of SEQ ID NO: 3780
uugagcaguuccuaagaca

SEQ ID NO: 294113 - RNA, 19 nt, Artificial Sequence
  Description of Artificial Sequence: Synthetic oligonucleotide
  Antisense strand to SEQ ID NO: 294112
ugucuuaggaacugcucaa

SEQ ID NO: 294114 - RNA, 19 nt, Artificial Sequence
  Description of Artificial Sequence: Synthetic oligonucleotide
  Sense strand starting at position 3792 of SEQ ID NO: 3780
agagaaaucagccguguag

SEQ ID NO: 294115 - RNA, 19 nt, Artificial Sequence
  Description of Artificial Sequence: Synthetic oligonucleotide
  Antisense strand to SEQ ID NO: 294114
cuacacggcugauuucucu

SEQ ID NO: 294116 - RNA, 19 nt, Artificial Sequence
  Description of Artificial Sequence: Synthetic oligonucleotide
  Sense strand starting at position 3794 of SEQ ID NO: 3780
agaaaucagccguguagga

SEQ ID NO: 294117 - RNA, 19 nt, Artificial Sequence
  Description of Artificial Sequence: Synthetic oligonucleotide
  Antisense strand to SEQ ID NO: 294116
uccuacacggcugauuucu

SEQ ID NO: 294118 - RNA, 19 nt, Artificial Sequence
  Description of Artificial Sequence: Synthetic oligonucleotide
  Sense strand starting at position 3802 of SEQ ID NO: 3780
gccguguaggacugggaaa

SEQ ID NO: 294119 - RNA, 19 nt, Artificial Sequence
  Description of Artificial Sequence: Synthetic oligonucleotide
  Antisense strand to SEQ ID NO: 294118
uuucccaguccuacacggc

SEQ ID NO: 294120 - RNA, 19 nt, Artificial Sequence
  Description of Artificial Sequence: Synthetic oligonucleotide
  Sense strand starting at position 3845 of SEQ ID NO: 3780
ggugcccuccugcaauuaa

SEQ ID NO: 294121 - RNA, 19 nt, Artificial Sequence
  Description of Artificial Sequence: Synthetic oligonucleotide
  Antisense strand to SEQ ID NO: 294120
uuaauugcaggagggcacc

SEQ ID NO: 294122 - RNA, 19 nt, Artificial Sequence
  Description of Artificial Sequence: Synthetic oligonucleotide
  Sense strand starting at position 3878 of SEQ ID NO: 3780
aguauuggaucuucucuga

SEQ ID NO: 294123 - RNA, 19 nt, Artificial Sequence
  Description of Artificial Sequence: Synthetic oligonucleotide
  Antisense strand to SEQ ID NO: 294122
ucagagaagauccaauacu

SEQ ID NO: 294124 - RNA, 19 nt, Artificial Sequence
  Description of Artificial Sequence: Synthetic oligonucleotide
  Sense strand starting at position 3881 of SEQ ID NO: 3780
auuggaucuucucugagga

SEQ ID NO: 294125 - RNA, 19 nt, Artificial Sequence
  Description of Artificial Sequence: Synthetic oligonucleotide
  Antisense strand to SEQ ID NO: 294124
uccucagagaagauccaau

SEQ ID NO: 294126 - RNA, 19 nt, Artificial Sequence
  Description of Artificial Sequence: Synthetic oligonucleotide
  Sense strand starting at position 3882 of SEQ ID NO: 3780
uuggaucuucucugaggau

SEQ ID NO: 294127 - RNA, 19 nt, Artificial Sequence
  Description of Artificial Sequence: Synthetic oligonucleotide
  Antisense strand to SEQ ID NO: 294126
auccucagagaagauccaa

SEQ ID NO: 294128 - RNA, 19 nt, Artificial Sequence
  Description of Artificial Sequence: Synthetic oligonucleotide
  Sense strand starting at position 3883 of SEQ ID NO: 3780
uggaucuucucugaggauu

SEQ ID NO: 294129 - RNA, 19 nt, Artificial Sequence
  Description of Artificial Sequence: Synthetic oligonucleotide
  Antisense strand to SEQ ID NO: 294128
aauccucagagaagaucca

SEQ ID NO: 294130 - RNA, 19 nt, Artificial Sequence
  Description of Artificial Sequence: Synthetic oligonucleotide
  Sense strand starting at position 3885 of SEQ ID NO: 3780
gaucuucucugaggauucu

SEQ ID NO: 294131 - RNA, 19 nt, Artificial Sequence
  Description of Artificial Sequence: Synthetic oligonucleotide
  Antisense strand to SEQ ID NO: 294130
agaauccucagagaagauc

SEQ ID NO: 294132 - RNA, 19 nt, Artificial Sequence
  Description of Artificial Sequence: Synthetic oligonucleotide
  Sense strand starting at position 3891 of SEQ ID NO: 3780
cucugaggauucuaauauc

SEQ ID NO: 294133 - RNA, 19 nt, Artificial Sequence
  Description of Artificial Sequence: Synthetic oligonucleotide
  Antisense strand to SEQ ID NO: 294132
gauauuagaauccucagag

SEQ ID NO: 294134 - RNA, 19 nt, Artificial Sequence
  Description of Artificial Sequence: Synthetic oligonucleotide
  Sense strand starting at position 3894 of SEQ ID NO: 3780
ugaggauucuaauaucaua

SEQ ID NO: 294135 - RNA, 19 nt, Artificial Sequence
  Description of Artificial Sequence: Synthetic oligonucleotide
  Antisense strand to SEQ ID NO: 294134
uaugauauuagaauccuca

SEQ ID NO: 294136 - RNA, 19 nt, Artificial Sequence
  Description of Artificial Sequence: Synthetic oligonucleotide
  Sense strand starting at position 5 of SEQ ID NO: 3781
guggcuccaauguaagaau

SEQ ID NO: 294137 - RNA, 19 nt, Artificial Sequence
  Description of Artificial Sequence: Synthetic oligonucleotide
  Antisense strand to SEQ ID NO: 294136
auucuuacauuggagccac

SEQ ID NO: 294138 - RNA, 19 nt, Artificial Sequence
  Description of Artificial Sequence: Synthetic oligonucleotide
  Sense strand starting at position 131 of SEQ ID NO: 3781
aacuaagagugcucacaga

SEQ ID NO: 294139 - RNA, 19 nt, Artificial Sequence
  Description of Artificial Sequence: Synthetic oligonucleotide
  Antisense strand to SEQ ID NO: 294138
ucugugagcacucuuaguu

SEQ ID NO: 294140 - RNA, 19 nt, Artificial Sequence
  Description of Artificial Sequence: Synthetic oligonucleotide
  Sense strand starting at position 155 of SEQ ID NO: 3781
ucagcaucaccucguuuau

SEQ ID NO: 294141 - RNA, 19 nt, Artificial Sequence
  Description of Artificial Sequence: Synthetic oligonucleotide
  Antisense strand to SEQ ID NO: 294140
auaaacgaggugaugcuga

SEQ ID NO: 294142 - RNA, 19 nt, Artificial Sequence
  Description of Artificial Sequence: Synthetic oligonucleotide
  Sense strand starting at position 157 of SEQ ID NO: 3781
agcaucaccucguuuauaa

SEQ ID NO: 294143 - RNA, 19 nt, Artificial Sequence
  Description of Artificial Sequence: Synthetic oligonucleotide
  Antisense strand to SEQ ID NO: 294142
uuauaaacgaggugaugcu

SEQ ID NO: 294144 - RNA, 19 nt, Artificial Sequence
  Description of Artificial Sequence: Synthetic oligonucleotide
  Sense strand starting at position 207 of SEQ ID NO: 3781
ucacaagaggccuauaugu

SEQ ID NO: 294145 - RNA, 19 nt, Artificial Sequence
  Description of Artificial Sequence: Synthetic oligonucleotide
  Antisense strand to SEQ ID NO: 294144
acauauaggccucuuguga

SEQ ID NO: 294146 - RNA, 19 nt, Artificial Sequence
  Description of Artificial Sequence: Synthetic oligonucleotide
  Sense strand starting at position 209 of SEQ ID NO: 3781
acaagaggccuauauguua

SEQ ID NO: 294147 - RNA, 19 nt, Artificial Sequence
  Description of Artificial Sequence: Synthetic oligonucleotide
  Antisense strand to SEQ ID NO: 294146
uaacauauaggccucuugu

SEQ ID NO: 294148 - RNA, 19 nt, Artificial Sequence
  Description of Artificial Sequence: Synthetic oligonucleotide
  Sense strand starting at position 377 of SEQ ID NO: 3781
acaagcaauuuauagaaga

SEQ ID NO: 294149 - RNA, 19 nt, Artificial Sequence
  Description of Artificial Sequence: Synthetic oligonucleotide
  Antisense strand to SEQ ID NO: 294148
ucuucuauaaauugcuugu

SEQ ID NO: 294150 - RNA, 19 nt, Artificial Sequence
  Description of Artificial Sequence: Synthetic oligonucleotide
  Sense strand starting at position 699 of SEQ ID NO: 3781
uaugauagcuuauugguaa

SEQ ID NO: 294151 - RNA, 19 nt, Artificial Sequence
  Description of Artificial Sequence: Synthetic oligonucleotide
  Antisense strand to SEQ ID NO: 294150
uuaccaauaagcuaucaua

SEQ ID NO: 294152 - RNA, 19 nt, Artificial Sequence
  Description of Artificial Sequence: Synthetic oligonucleotide
  Sense strand starting at position 702 of SEQ ID NO: 3781
gauagcuuauugguaaaug

SEQ ID NO: 294153 - RNA, 19 nt, Artificial Sequence
  Description of Artificial Sequence: Synthetic oligonucleotide
  Antisense strand to SEQ ID NO: 294152
cauuuaccaauaagcuauc

SEQ ID NO: 294154 - RNA, 19 nt, Artificial Sequence
  Description of Artificial Sequence: Synthetic oligonucleotide
  Sense strand starting at position 787 of SEQ ID NO: 3781
uauggaauagcauguauaa

SEQ ID NO: 294155 - RNA, 19 nt, Artificial Sequence
  Description of Artificial Sequence: Synthetic oligonucleotide
  Antisense strand to SEQ ID NO: 294154
uuauacaugcuauuccaua

SEQ ID NO: 294156 - RNA, 19 nt, Artificial Sequence
  Description of Artificial Sequence: Synthetic oligonucleotide
  Sense strand starting at position 813 of SEQ ID NO: 3781
gaggcagaucuauauguau

SEQ ID NO: 294157 - RNA, 19 nt, Artificial Sequence
  Description of Artificial Sequence: Synthetic oligonucleotide
  Antisense strand to SEQ ID NO: 294156
auacauauagaucugccuc

SEQ ID NO: 294158 - RNA, 19 nt, Artificial Sequence
  Description of Artificial Sequence: Synthetic oligonucleotide
  Sense strand starting at position 886 of SEQ ID NO: 3781
ugcagacuagcacauguaa

SEQ ID NO: 294159 - RNA, 19 nt, Artificial Sequence
  Description of Artificial Sequence: Synthetic oligonucleotide
  Antisense strand to SEQ ID NO: 294158
uuacaugugcuagucugca

SEQ ID NO: 294160 - RNA, 19 nt, Artificial Sequence
  Description of Artificial Sequence: Synthetic oligonucleotide
  Sense strand starting at position 1421 of SEQ ID NO: 3781
gguguuuacccuggagugu

SEQ ID NO: 294161 - RNA, 19 nt, Artificial Sequence
  Description of Artificial Sequence: Synthetic oligonucleotide
  Antisense strand to SEQ ID NO: 294160
acacuccaggguaaacacc

SEQ ID NO: 294162 - RNA, 19 nt, Artificial Sequence
  Description of Artificial Sequence: Synthetic oligonucleotide
  Sense strand starting at position 1422 of SEQ ID NO: 3781
guguuuacccuggaguguu

SEQ ID NO: 294163 - RNA, 19 nt, Artificial Sequence
  Description of Artificial Sequence: Synthetic oligonucleotide
  Antisense strand to SEQ ID NO: 294162
aacacuccaggguaaacac

SEQ ID NO: 294164 - RNA, 19 nt, Artificial Sequence
  Description of Artificial Sequence: Synthetic oligonucleotide
  Sense strand starting at position 1465 of SEQ ID NO: 3781
caugacauauuugaaggua

SEQ ID NO: 294165 - RNA, 19 nt, Artificial Sequence
  Description of Artificial Sequence: Synthetic oligonucleotide
  Antisense strand to SEQ ID NO: 294164
uaccuucaaauaugucaug

SEQ ID NO: 294166 - RNA, 19 nt, Artificial Sequence
  Description of Artificial Sequence: Synthetic oligonucleotide
  Sense strand starting at position 1570 of SEQ ID NO: 3781
cggucagcugagcaguaaa

SEQ ID NO: 294167 - RNA, 19 nt, Artificial Sequence
  Description of Artificial Sequence: Synthetic oligonucleotide
  Antisense strand to SEQ ID NO: 294166
uuuacugcucagcugaccg

SEQ ID NO: 294168 - RNA, 19 nt, Artificial Sequence
  Description of Artificial Sequence: Synthetic oligonucleotide
  Sense strand starting at position 1597 of SEQ ID NO: 3781
aagaaagucacguguguua

SEQ ID NO: 294169 - RNA, 19 nt, Artificial Sequence
  Description of Artificial Sequence: Synthetic oligonucleotide
  Antisense strand to SEQ ID NO: 294168
uaacacacgugacuuucuu

SEQ ID NO: 294170 - RNA, 19 nt, Artificial Sequence
  Description of Artificial Sequence: Synthetic oligonucleotide
  Sense strand starting at position 1599 of SEQ ID NO: 3781
gaaagucacguguguuaug

SEQ ID NO: 294171 - RNA, 19 nt, Artificial Sequence
  Description of Artificial Sequence: Synthetic oligonucleotide
  Antisense strand to SEQ ID NO: 294170
cauaacacacgugacuuuc

SEQ ID NO: 294172 - RNA, 19 nt, Artificial Sequence
  Description of Artificial Sequence: Synthetic oligonucleotide
  Sense strand starting at position 1606 of SEQ ID NO: 3781
acguguguuauggcaaguu

SEQ ID NO: 294173 - RNA, 19 nt, Artificial Sequence
  Description of Artificial Sequence: Synthetic oligonucleotide
  Antisense strand to SEQ ID NO: 294172
aacuugccauaacacacgu

SEQ ID NO: 294174 - RNA, 19 nt, Artificial Sequence
  Description of Artificial Sequence: Synthetic oligonucleotide
  Sense strand starting at position 1705 of SEQ ID NO: 3781
aucgcauaccuauguucuu

SEQ ID NO: 294175 - RNA, 19 nt, Artificial Sequence
  Description of Artificial Sequence: Synthetic oligonucleotide
  Antisense strand to SEQ ID NO: 294174
aagaacauagguaugcgau

SEQ ID NO: 294176 - RNA, 19 nt, Artificial Sequence
  Description of Artificial Sequence: Synthetic oligonucleotide
  Sense strand starting at position 1717 of SEQ ID NO: 3781
uguucuugcaaagaaggau

SEQ ID NO: 294177 - RNA, 19 nt, Artificial Sequence
  Description of Artificial Sequence: Synthetic oligonucleotide
  Antisense strand to SEQ ID NO: 294176
auccuucuuugcaagaaca

SEQ ID NO: 294178 - RNA, 19 nt, Artificial Sequence
  Description of Artificial Sequence: Synthetic oligonucleotide
  Sense strand starting at position 1770 of SEQ ID NO: 3781
gcaugaaagcugcaauaua

SEQ ID NO: 294179 - RNA, 19 nt, Artificial Sequence
  Description of Artificial Sequence: Synthetic oligonucleotide
  Antisense strand to SEQ ID NO: 294178
uauauugcagcuuucaugc

SEQ ID NO: 294180 - RNA, 19 nt, Artificial Sequence
  Description of Artificial Sequence: Synthetic oligonucleotide
  Sense strand starting at position 1778 of SEQ ID NO: 3781
gcugcaauauagccagaga

SEQ ID NO: 294181 - RNA, 19 nt, Artificial Sequence
  Description of Artificial Sequence: Synthetic oligonucleotide
  Antisense strand to SEQ ID NO: 294180
ucucuggcuauauugcagc

SEQ ID NO: 294182 - RNA, 19 nt, Artificial Sequence
  Description of Artificial Sequence: Synthetic oligonucleotide
  Sense strand starting at position 1789 of SEQ ID NO: 3781
gccagagauaaagguuaaa

SEQ ID NO: 294183 - RNA, 19 nt, Artificial Sequence
  Description of Artificial Sequence: Synthetic oligonucleotide
  Antisense strand to SEQ ID NO: 294182
uuuaaccuuuaucucuggc

SEQ ID NO: 294184 - RNA, 19 nt, Artificial Sequence
  Description of Artificial Sequence: Synthetic oligonucleotide
  Sense strand starting at position 2095 of SEQ ID NO: 3781
ugaaauguggcagaggguu

SEQ ID NO: 294185 - RNA, 19 nt, Artificial Sequence
  Description of Artificial Sequence: Synthetic oligonucleotide
  Antisense strand to SEQ ID NO: 294184
aacccucugccacauuuca

SEQ ID NO: 294186 - RNA, 19 nt, Artificial Sequence
  Description of Artificial Sequence: Synthetic oligonucleotide
  Sense strand starting at position 2197 of SEQ ID NO: 3781
ccacuuguuugugcaauac

SEQ ID NO: 294187 - RNA, 19 nt, Artificial Sequence
  Description of Artificial Sequence: Synthetic oligonucleotide
  Antisense strand to SEQ ID NO: 294186
guauugcacaaacaagugg

SEQ ID NO: 294188 - RNA, 19 nt, Artificial Sequence
  Description of Artificial Sequence: Synthetic oligonucleotide
  Sense strand starting at position 2498 of SEQ ID NO: 3781
ugcuuagccuuccuggaaa

SEQ ID NO: 294189 - RNA, 19 nt, Artificial Sequence
  Description of Artificial Sequence: Synthetic oligonucleotide
  Antisense strand to SEQ ID NO: 294188
uuuccaggaaggcuaagca

SEQ ID NO: 294190 - RNA, 19 nt, Artificial Sequence
  Description of Artificial Sequence: Synthetic oligonucleotide
  Sense strand starting at position 2660 of SEQ ID NO: 3781
acaccuaagcuucggagaa

SEQ ID NO: 294191 - RNA, 19 nt, Artificial Sequence
  Description of Artificial Sequence: Synthetic oligonucleotide
  Antisense strand to SEQ ID NO: 294190
uucuccgaagcuuaggugu

SEQ ID NO: 294192 - RNA, 19 nt, Artificial Sequence
  Description of Artificial Sequence: Synthetic oligonucleotide
  Sense strand starting at position 2664 of SEQ ID NO: 3781
cuaagcuucggagaaguca

SEQ ID NO: 294193 - RNA, 19 nt, Artificial Sequence
  Description of Artificial Sequence: Synthetic oligonucleotide
  Antisense strand to SEQ ID NO: 294192
ugacuucuccgaagcuuag

SEQ ID NO: 294194 - RNA, 19 nt, Artificial Sequence
  Description of Artificial Sequence: Synthetic oligonucleotide
  Sense strand starting at position 2780 of SEQ ID NO: 3781
gguucuaucucugcccaga

SEQ ID NO: 294195 - RNA, 19 nt, Artificial Sequence
  Description of Artificial Sequence: Synthetic oligonucleotide
  Antisense strand to SEQ ID NO: 294194
ucugggcagagauagaacc

SEQ ID NO: 294196 - RNA, 19 nt, Artificial Sequence
  Description of Artificial Sequence: Synthetic oligonucleotide
  Sense strand starting at position 3118 of SEQ ID NO: 3781
uccagcugugaauaaggau

SEQ ID NO: 294197 - RNA, 19 nt, Artificial Sequence
  Description of Artificial Sequence: Synthetic oligonucleotide
  Antisense strand to SEQ ID NO: 294196
auccuuauucacagcugga

SEQ ID NO: 294198 - RNA, 19 nt, Artificial Sequence
  Description of Artificial Sequence: Synthetic oligonucleotide
  Sense strand starting at position 3131 of SEQ ID NO: 3781
aaggaugcuuguccaggua

SEQ ID NO: 294199 - RNA, 19 nt, Artificial Sequence
  Description of Artificial Sequence: Synthetic oligonucleotide
  Antisense strand to SEQ ID NO: 294198
uaccuggacaagcauccuu

SEQ ID NO: 294200 - RNA, 19 nt, Artificial Sequence
  Description of Artificial Sequence: Synthetic oligonucleotide
  Sense strand starting at position 3134 of SEQ ID NO: 3781
gaugcuuguccagguacau

SEQ ID NO: 294201 - RNA, 19 nt, Artificial Sequence
  Description of Artificial Sequence: Synthetic oligonucleotide
  Antisense strand to SEQ ID NO: 294200
auguaccuggacaagcauc

SEQ ID NO: 294202 - RNA, 19 nt, Artificial Sequence
  Description of Artificial Sequence: Synthetic oligonucleotide
  Sense strand starting at position 3266 of SEQ ID NO: 3781
gaaggucacuguuucuauc

SEQ ID NO: 294203 - RNA, 19 nt, Artificial Sequence
  Description of Artificial Sequence: Synthetic oligonucleotide
  Antisense strand to SEQ ID NO: 294202
gauagaaacagugaccuuc

SEQ ID NO: 294204 - RNA, 19 nt, Artificial Sequence
  Description of Artificial Sequence: Synthetic oligonucleotide
  Sense strand starting at position 3556 of SEQ ID NO: 3781
uugaguggcacugacauaa

SEQ ID NO: 294205 - RNA, 19 nt, Artificial Sequence
  Description of Artificial Sequence: Synthetic oligonucleotide
  Antisense strand to SEQ ID NO: 294204
uuaugucagugccacucaa

SEQ ID NO: 294206 - RNA, 19 nt, Artificial Sequence
  Description of Artificial Sequence: Synthetic oligonucleotide
  Sense strand starting at position 3656 of SEQ ID NO: 3781
cagggaauuccuuacgggu

SEQ ID NO: 294207 - RNA, 19 nt, Artificial Sequence
  Description of Artificial Sequence: Synthetic oligonucleotide
  Antisense strand to SEQ ID NO: 294206
acccguaaggaauucccug

SEQ ID NO: 294208 - RNA, 19 nt, Artificial Sequence
  Description of Artificial Sequence: Synthetic oligonucleotide
  Sense strand starting at position 3727 of SEQ ID NO: 3781
aggagauguucucaucaga

SEQ ID NO: 294209 - RNA, 19 nt, Artificial Sequence
  Description of Artificial Sequence: Synthetic oligonucleotide
  Antisense strand to SEQ ID NO: 294208
ucugaugagaacaucuccu

SEQ ID NO: 294210 - RNA, 19 nt, Artificial Sequence
  Description of Artificial Sequence: Synthetic oligonucleotide
  Sense strand starting at position 3734 of SEQ ID NO: 3781
guucucaucagaugagguu

SEQ ID NO: 294211 - RNA, 19 nt, Artificial Sequence
  Description of Artificial Sequence: Synthetic oligonucleotide
  Antisense strand to SEQ ID NO: 294210
aaccucaucugaugagaac

SEQ ID NO: 294212 - RNA, 19 nt, Artificial Sequence
  Description of Artificial Sequence: Synthetic oligonucleotide
  Sense strand starting at position 3797 of SEQ ID NO: 3781
ucuguaggccucugugaag

SEQ ID NO: 294213 - RNA, 19 nt, Artificial Sequence
  Description of Artificial Sequence: Synthetic oligonucleotide
  Antisense strand to SEQ ID NO: 294212
cuucacagaggccuacaga

SEQ ID NO: 294214 - RNA, 19 nt, Artificial Sequence
  Description of Artificial Sequence: Synthetic oligonucleotide
  Sense strand starting at position 3914 of SEQ ID NO: 3781
cuggacuguuuagaaggaa

SEQ ID NO: 294215 - RNA, 19 nt, Artificial Sequence
  Description of Artificial Sequence: Synthetic oligonucleotide
  Antisense strand to SEQ ID NO: 294214
uuccuucuaaacaguccag

SEQ ID NO: 294216 - RNA, 19 nt, Artificial Sequence
  Description of Artificial Sequence: Synthetic oligonucleotide
  Sense strand starting at position 43 of SEQ ID NO: 3782
uuaaucaaucaacggugaa

SEQ ID NO: 294217 - RNA, 19 nt, Artificial Sequence
  Description of Artificial Sequence: Synthetic oligonucleotide
  Antisense strand to SEQ ID NO: 294216
uucaccguugauugauuaa

SEQ ID NO: 294218 - RNA, 19 nt, Artificial Sequence
  Description of Artificial Sequence: Synthetic oligonucleotide
  Sense strand starting at position 175 of SEQ ID NO: 3782
uccagauuaugacuaagca

SEQ ID NO: 294219 - RNA, 19 nt, Artificial Sequence
  Description of Artificial Sequence: Synthetic oligonucleotide
  Antisense strand to SEQ ID NO: 294218
ugcuuagucauaaucugga

SEQ ID NO: 294220 - RNA, 19 nt, Artificial Sequence
  Description of Artificial Sequence: Synthetic oligonucleotide
  Sense strand starting at position 316 of SEQ ID NO: 3782
aggagaauaucccaaaguu

SEQ ID NO: 294221 - RNA, 19 nt, Artificial Sequence
  Description of Artificial Sequence: Synthetic oligonucleotide
  Antisense strand to SEQ ID NO: 294220
aacuuugggauauucuccu

SEQ ID NO: 294222 - RNA, 19 nt, Artificial Sequence
  Description of Artificial Sequence: Synthetic oligonucleotide
  Sense strand starting at position 498 of SEQ ID NO: 3782
gaagguaaauaauugucau

SEQ ID NO: 294223 - RNA, 19 nt, Artificial Sequence
  Description of Artificial Sequence: Synthetic oligonucleotide
  Antisense strand to SEQ ID NO: 294222
augacaauuauuuaccuuc

SEQ ID NO: 294224 - RNA, 19 nt, Artificial Sequence
  Description of Artificial Sequence: Synthetic oligonucleotide
  Sense strand starting at position 501 of SEQ ID NO: 3782
gguaaauaauugucaugga

SEQ ID NO: 294225 - RNA, 19 nt, Artificial Sequence
  Description of Artificial Sequence: Synthetic oligonucleotide
  Antisense strand to SEQ ID NO: 294224
uccaugacaauuauuuacc

SEQ ID NO: 294226 - RNA, 19 nt, Artificial Sequence
  Description of Artificial Sequence: Synthetic oligonucleotide
  Sense strand starting at position 529 of SEQ ID NO: 3782
ugagacaacuauuaugaac

SEQ ID NO: 294227 - RNA, 19 nt, Artificial Sequence
  Description of Artificial Sequence: Synthetic oligonucleotide
  Antisense strand to SEQ ID NO: 294226
guucauaauaguugucuca

SEQ ID NO: 294228 - RNA, 19 nt, Artificial Sequence
  Description of Artificial Sequence: Synthetic oligonucleotide
  Sense strand starting at position 605 of SEQ ID NO: 3782
guggcuccaauguaagaau

SEQ ID NO: 294229 - RNA, 19 nt, Artificial Sequence
  Description of Artificial Sequence: Synthetic oligonucleotide
  Antisense strand to SEQ ID NO: 294228
auucuuacauuggagccac

SEQ ID NO: 294230 - RNA, 19 nt, Artificial Sequence
  Description of Artificial Sequence: Synthetic oligonucleotide
  Sense strand starting at position 731 of SEQ ID NO: 3782
aacuaagagugcucacaga

SEQ ID NO: 294231 - RNA, 19 nt, Artificial Sequence
  Description of Artificial Sequence: Synthetic oligonucleotide
  Antisense strand to SEQ ID NO: 294230
ucugugagcacucuuaguu

SEQ ID NO: 294232 - RNA, 19 nt, Artificial Sequence
  Description of Artificial Sequence: Synthetic oligonucleotide
  Sense strand starting at position 755 of SEQ ID NO: 3782
ucagcaucaccucguuuau

SEQ ID NO: 294233 - RNA, 19 nt, Artificial Sequence
  Description of Artificial Sequence: Synthetic oligonucleotide
  Antisense strand to SEQ ID NO: 294232
auaaacgaggugaugcuga

SEQ ID NO: 294234 - RNA, 19 nt, Artificial Sequence
  Description of Artificial Sequence: Synthetic oligonucleotide
  Sense strand starting at position 757 of SEQ ID NO: 3782
agcaucaccucguuuauaa

SEQ ID NO: 294235 - RNA, 19 nt, Artificial Sequence
  Description of Artificial Sequence: Synthetic oligonucleotide
  Antisense strand to SEQ ID NO: 294234
uuauaaacgaggugaugcu

SEQ ID NO: 294236 - RNA, 19 nt, Artificial Sequence
  Description of Artificial Sequence: Synthetic oligonucleotide
  Sense strand starting at position 807 of SEQ ID NO: 3782
ucacaagaggccuauaugu

SEQ ID NO: 294237 - RNA, 19 nt, Artificial Sequence
  Description of Artificial Sequence: Synthetic oligonucleotide
  Antisense strand to SEQ ID NO: 294236
acauauaggccucuuguga

SEQ ID NO: 294238 - RNA, 19 nt, Artificial Sequence
  Description of Artificial Sequence: Synthetic oligonucleotide
  Sense strand starting at position 809 of SEQ ID NO: 3782
acaagaggccuauauguua

SEQ ID NO: 294239 - RNA, 19 nt, Artificial Sequence
  Description of Artificial Sequence: Synthetic oligonucleotide
  Antisense strand to SEQ ID NO: 294238
uaacauauaggccucuugu

SEQ ID NO: 294240 - RNA, 19 nt, Artificial Sequence
  Description of Artificial Sequence: Synthetic oligonucleotide
  Sense strand starting at position 977 of SEQ ID NO: 3782
acaagcaauuuauagaaga

SEQ ID NO: 294241 - RNA, 19 nt, Artificial Sequence
  Description of Artificial Sequence: Synthetic oligonucleotide
  Antisense strand to SEQ ID NO: 294240
ucuucuauaaauugcuugu

SEQ ID NO: 294242 - RNA, 19 nt, Artificial Sequence
  Description of Artificial Sequence: Synthetic oligonucleotide
  Sense strand starting at position 1299 of SEQ ID NO: 3782
uaugauagcuuauugguaa

SEQ ID NO: 294243 - RNA, 19 nt, Artificial Sequence
  Description of Artificial Sequence: Synthetic oligonucleotide
  Antisense strand to SEQ ID NO: 294242
uuaccaauaagcuaucaua

SEQ ID NO: 294244 - RNA, 19 nt, Artificial Sequence
  Description of Artificial Sequence: Synthetic oligonucleotide
  Sense strand starting at position 1302 of SEQ ID NO: 3782
gauagcuuauugguaaaug

SEQ ID NO: 294245 - RNA, 19 nt, Artificial Sequence
  Description of Artificial Sequence: Synthetic oligonucleotide
  Antisense strand to SEQ ID NO: 294244
cauuuaccaauaagcuauc

SEQ ID NO: 294246 - RNA, 19 nt, Artificial Sequence
  Description of Artificial Sequence: Synthetic oligonucleotide
  Sense strand starting at position 1387 of SEQ ID NO: 3782
uauggaauagcauguauaa

SEQ ID NO: 294247 - RNA, 19 nt, Artificial Sequence
  Description of Artificial Sequence: Synthetic oligonucleotide
  Antisense strand to SEQ ID NO: 294246
uuauacaugcuauuccaua

SEQ ID NO: 294248 - RNA, 19 nt, Artificial Sequence
  Description of Artificial Sequence: Synthetic oligonucleotide
  Sense strand starting at position 1413 of SEQ ID NO: 3782
gaggcagaucuauauguau

SEQ ID NO: 294249 - RNA, 19 nt, Artificial Sequence
  Description of Artificial Sequence: Synthetic oligonucleotide
  Antisense strand to SEQ ID NO: 294248
auacauauagaucugccuc

SEQ ID NO: 294250 - RNA, 19 nt, Artificial Sequence
  Description of Artificial Sequence: Synthetic oligonucleotide
  Sense strand starting at position 1486 of SEQ ID NO: 3782
ugcagacuagcacauguaa

SEQ ID NO: 294251 - RNA, 19 nt, Artificial Sequence
  Description of Artificial Sequence: Synthetic oligonucleotide
  Antisense strand to SEQ ID NO: 294250
uuacaugugcuagucugca

SEQ ID NO: 294252 - RNA, 19 nt, Artificial Sequence
  Description of Artificial Sequence: Synthetic oligonucleotide
  Sense strand starting at position 2021 of SEQ ID NO: 3782
gguguuuacccuggagugu

SEQ ID NO: 294253 - RNA, 19 nt, Artificial Sequence
  Description of Artificial Sequence: Synthetic oligonucleotide
  Antisense strand to SEQ ID NO: 294252
acacuccaggguaaacacc

SEQ ID NO: 294254 - RNA, 19 nt, Artificial Sequence
  Description of Artificial Sequence: Synthetic oligonucleotide
  Sense strand starting at position 2022 of SEQ ID NO: 3782
guguuuacccuggaguguu

SEQ ID NO: 294255 - RNA, 19 nt, Artificial Sequence
  Description of Artificial Sequence: Synthetic oligonucleotide
  Antisense strand to SEQ ID NO: 294254
aacacuccaggguaaacac

SEQ ID NO: 294256 - RNA, 19 nt, Artificial Sequence
  Description of Artificial Sequence: Synthetic oligonucleotide
  Sense strand starting at position 2065 of SEQ ID NO: 3782
caugacauauuugaaggua

SEQ ID NO: 294257 - RNA, 19 nt, Artificial Sequence
  Description of Artificial Sequence: Synthetic oligonucleotide
  Antisense strand to SEQ ID NO: 294256
uaccuucaaauaugucaug

SEQ ID NO: 294258 - RNA, 19 nt, Artificial Sequence
  Description of Artificial Sequence: Synthetic oligonucleotide
  Sense strand starting at position 2170 of SEQ ID NO: 3782
cggucagcugagcaguaaa

SEQ ID NO: 294259 - RNA, 19 nt, Artificial Sequence
  Description of Artificial Sequence: Synthetic oligonucleotide
  Antisense strand to SEQ ID NO: 294258
uuuacugcucagcugaccg

SEQ ID NO: 294260 - RNA, 19 nt, Artificial Sequence
  Description of Artificial Sequence: Synthetic oligonucleotide
  Sense strand starting at position 2197 of SEQ ID NO: 3782
aagaaagucacguguguua

SEQ ID NO: 294261 - RNA, 19 nt, Artificial Sequence
  Description of Artificial Sequence: Synthetic oligonucleotide
  Antisense strand to SEQ ID NO: 294260
uaacacacgugacuuucuu

SEQ ID NO: 294262 - RNA, 19 nt, Artificial Sequence
  Description of Artificial Sequence: Synthetic oligonucleotide
  Sense strand starting at position 2199 of SEQ ID NO: 3782
gaaagucacguguguuaug

SEQ ID NO: 294263 - RNA, 19 nt, Artificial Sequence
  Description of Artificial Sequence: Synthetic oligonucleotide
  Antisense strand to SEQ ID NO: 294262
cauaacacacgugacuuuc

SEQ ID NO: 294264 - RNA, 19 nt, Artificial Sequence
  Description of Artificial Sequence: Synthetic oligonucleotide
  Sense strand starting at position 2206 of SEQ ID NO: 3782
acguguguuauggcaaguu

SEQ ID NO: 294265 - RNA, 19 nt, Artificial Sequence
  Description of Artificial Sequence: Synthetic oligonucleotide
  Antisense strand to SEQ ID NO: 294264
aacuugccauaacacacgu

SEQ ID NO: 294266 - RNA, 19 nt, Artificial Sequence
  Description of Artificial Sequence: Synthetic oligonucleotide
  Sense strand starting at position 2305 of SEQ ID NO: 3782
aucgcauaccuauguucuu

SEQ ID NO: 294267 - RNA, 19 nt, Artificial Sequence
  Description of Artificial Sequence: Synthetic oligonucleotide
  Antisense strand to SEQ ID NO: 294266
aagaacauagguaugcgau

SEQ ID NO: 294268 - RNA, 19 nt, Artificial Sequence
  Description of Artificial Sequence: Synthetic oligonucleotide
  Sense strand starting at position 2317 of SEQ ID NO: 3782
uguucuugcaaagaaggau

SEQ ID NO: 294269 - RNA, 19 nt, Artificial Sequence
  Description of Artificial Sequence: Synthetic oligonucleotide
  Antisense strand to SEQ ID NO: 294268
auccuucuuugcaagaaca

SEQ ID NO: 294270 - RNA, 19 nt, Artificial Sequence
  Description of Artificial Sequence: Synthetic oligonucleotide
  Sense strand starting at position 2370 of SEQ ID NO: 3782
gcaugaaagcugcaauaua

SEQ ID NO: 294271 - RNA, 19 nt, Artificial Sequence
  Description of Artificial Sequence: Synthetic oligonucleotide
  Antisense strand to SEQ ID NO: 294270
uauauugcagcuuucaugc

SEQ ID NO: 294272 - RNA, 19 nt, Artificial Sequence
  Description of Artificial Sequence: Synthetic oligonucleotide
  Sense strand starting at position 2378 of SEQ ID NO: 3782
gcugcaauauagccagaga

SEQ ID NO: 294273 - RNA, 19 nt, Artificial Sequence
  Description of Artificial Sequence: Synthetic oligonucleotide
  Antisense strand to SEQ ID NO: 294272
ucucuggcuauauugcagc

SEQ ID NO: 294274 - RNA, 19 nt, Artificial Sequence
  Description of Artificial Sequence: Synthetic oligonucleotide
  Sense strand starting at position 2389 of SEQ ID NO: 3782
gccagagauaaagguuaaa

SEQ ID NO: 294275 - RNA, 19 nt, Artificial Sequence
  Description of Artificial Sequence: Synthetic oligonucleotide
  Antisense strand to SEQ ID NO: 294274
uuuaaccuuuaucucuggc

SEQ ID NO: 294276 - RNA, 19 nt, Artificial Sequence
  Description of Artificial Sequence: Synthetic oligonucleotide
  Sense strand starting at position 2695 of SEQ ID NO: 3782
ugaaauguggcagaggguu

SEQ ID NO: 294277 - RNA, 19 nt, Artificial Sequence
  Description of Artificial Sequence: Synthetic oligonucleotide
  Antisense strand to SEQ ID NO: 294276
aacccucugccacauuuca

SEQ ID NO: 294278 - RNA, 19 nt, Artificial Sequence
  Description of Artificial Sequence: Synthetic oligonucleotide
  Sense strand starting at position 2797 of SEQ ID NO: 3782
ccacuuguuugugcaauac

SEQ ID NO: 294279 - RNA, 19 nt, Artificial Sequence
  Description of Artificial Sequence: Synthetic oligonucleotide
  Antisense strand to SEQ ID NO: 294278
guauugcacaaacaagugg

SEQ ID NO: 294280 - RNA, 19 nt, Artificial Sequence
  Description of Artificial Sequence: Synthetic oligonucleotide
  Sense strand starting at position 3098 of SEQ ID NO: 3782
ugcuuagccuuccuggaaa

SEQ ID NO: 294281 - RNA, 19 nt, Artificial Sequence
  Description of Artificial Sequence: Synthetic oligonucleotide
  Antisense strand to SEQ ID NO: 294280
uuuccaggaaggcuaagca

SEQ ID NO: 294282 - RNA, 19 nt, Artificial Sequence
  Description of Artificial Sequence: Synthetic oligonucleotide
  Sense strand starting at position 3260 of SEQ ID NO: 3782
acaccuaagcuucggagaa

SEQ ID NO: 294283 - RNA, 19 nt, Artificial Sequence
  Description of Artificial Sequence: Synthetic oligonucleotide
  Antisense strand to SEQ ID NO: 294282
uucuccgaagcuuaggugu

SEQ ID NO: 294284 - RNA, 19 nt, Artificial Sequence
  Description of Artificial Sequence: Synthetic oligonucleotide
  Sense strand starting at position 3264 of SEQ ID NO: 3782
cuaagcuucggagaaguca

SEQ ID NO: 294285 - RNA, 19 nt, Artificial Sequence
  Description of Artificial Sequence: Synthetic oligonucleotide
  Antisense strand to SEQ ID NO: 294284
ugacuucuccgaagcuuag

SEQ ID NO: 294286 - RNA, 19 nt, Artificial Sequence
  Description of Artificial Sequence: Synthetic oligonucleotide
  Sense strand starting at position 3380 of SEQ ID NO: 3782
gguucuaucucugcccaga

SEQ ID NO: 294287 - RNA, 19 nt, Artificial Sequence
  Description of Artificial Sequence: Synthetic oligonucleotide
  Antisense strand to SEQ ID NO: 294286
ucugggcagagauagaacc

SEQ ID NO: 294288 - RNA, 19 nt, Artificial Sequence
  Description of Artificial Sequence: Synthetic oligonucleotide
  Sense strand starting at position 3718 of SEQ ID NO: 3782
uccagcugugaauaaggau

SEQ ID NO: 294289 - RNA, 19 nt, Artificial Sequence
  Description of Artificial Sequence: Synthetic oligonucleotide
  Antisense strand to SEQ ID NO: 294288
auccuuauucacagcugga

SEQ ID NO: 294290 - RNA, 19 nt, Artificial Sequence
  Description of Artificial Sequence: Synthetic oligonucleotide
  Sense strand starting at position 3731 of SEQ ID NO: 3782
aaggaugcuuguccaggua

SEQ ID NO: 294291 - RNA, 19 nt, Artificial Sequence
  Description of Artificial Sequence: Synthetic oligonucleotide
  Antisense strand to SEQ ID NO: 294290
uaccuggacaagcauccuu

SEQ ID NO: 294292 - RNA, 19 nt, Artificial Sequence
  Description of Artificial Sequence: Synthetic oligonucleotide
  Sense strand starting at position 3734 of SEQ ID NO: 3782
gaugcuuguccagguacau

SEQ ID NO: 294293 - RNA, 19 nt, Artificial Sequence
  Description of Artificial Sequence: Synthetic oligonucleotide
  Antisense strand to SEQ ID NO: 294292
auguaccuggacaagcauc

SEQ ID NO: 294294 - RNA, 19 nt, Artificial Sequence
  Description of Artificial Sequence: Synthetic oligonucleotide
  Sense strand starting at position 3866 of SEQ ID NO: 3782
gaaggucacuguuucuauc

SEQ ID NO: 294295 - RNA, 19 nt, Artificial Sequence
  Description of Artificial Sequence: Synthetic oligonucleotide
  Antisense strand to SEQ ID NO: 294294
gauagaaacagugaccuuc

SEQ ID NO: 294296 - RNA, 19 nt, Artificial Sequence
  Description of Artificial Sequence: Synthetic oligonucleotide
  Sense strand starting at position 5 of SEQ ID NO: 3784
uugacaaauugucaagaaa

SEQ ID NO: 294297 - RNA, 19 nt, Artificial Sequence
  Description of Artificial Sequence: Synthetic oligonucleotide
  Antisense strand to SEQ ID NO: 294296
uuucuugacaauuugucaa

SEQ ID NO: 294298 - RNA, 19 nt, Artificial Sequence
  Description of Artificial Sequence: Synthetic oligonucleotide
  Sense strand starting at position 252 of SEQ ID NO: 3784
uccgcaaucgcauaggaaa

SEQ ID NO: 294299 - RNA, 19 nt, Artificial Sequence
  Description of Artificial Sequence: Synthetic oligonucleotide
  Antisense strand to SEQ ID NO: 294298
uuuccuaugcgauugcgga

SEQ ID NO: 294300 - RNA, 19 nt, Artificial Sequence
  Description of Artificial Sequence: Synthetic oligonucleotide
  Sense strand starting at position 379 of SEQ ID NO: 3784
gugcaaagaucagugcaaa

SEQ ID NO: 294301 - RNA, 19 nt, Artificial Sequence
  Description of Artificial Sequence: Synthetic oligonucleotide
  Antisense strand to SEQ ID NO: 294300
uuugcacugaucuuugcac

SEQ ID NO: 294302 - RNA, 19 nt, Artificial Sequence
  Description of Artificial Sequence: Synthetic oligonucleotide
  Sense strand starting at position 380 of SEQ ID NO: 3784
ugcaaagaucagugcaaag

SEQ ID NO: 294303 - RNA, 19 nt, Artificial Sequence
  Description of Artificial Sequence: Synthetic oligonucleotide
  Antisense strand to SEQ ID NO: 294302
cuuugcacugaucuuugca

SEQ ID NO: 294304 - RNA, 19 nt, Artificial Sequence
  Description of Artificial Sequence: Synthetic oligonucleotide
  Sense strand starting at position 596 of SEQ ID NO: 3784
gagcuugucugacucuaaa

SEQ ID NO: 294305 - RNA, 19 nt, Artificial Sequence
  Description of Artificial Sequence: Synthetic oligonucleotide
  Antisense strand to SEQ ID NO: 294304
uuuagagucagacaagcuc

SEQ ID NO: 294306 - RNA, 19 nt, Artificial Sequence
  Description of Artificial Sequence: Synthetic oligonucleotide
  Sense strand starting at position 616 of SEQ ID NO: 3784
cccuguuucuuucuaugca

SEQ ID NO: 294307 - RNA, 19 nt, Artificial Sequence
  Description of Artificial Sequence: Synthetic oligonucleotide
  Antisense strand to SEQ ID NO: 294306
ugcauagaaagaaacaggg

SEQ ID NO: 294308 - RNA, 19 nt, Artificial Sequence
  Description of Artificial Sequence: Synthetic oligonucleotide
  Sense strand starting at position 619 of SEQ ID NO: 3784
uguuucuuucuaugcaaga

SEQ ID NO: 294309 - RNA, 19 nt, Artificial Sequence
  Description of Artificial Sequence: Synthetic oligonucleotide
  Antisense strand to SEQ ID NO: 294308
ucuugcauagaaagaaaca

SEQ ID NO: 294310 - RNA, 19 nt, Artificial Sequence
  Description of Artificial Sequence: Synthetic oligonucleotide
  Sense strand starting at position 620 of SEQ ID NO: 3784
guuucuuucuaugcaagau

SEQ ID NO: 294311 - RNA, 19 nt, Artificial Sequence
  Description of Artificial Sequence: Synthetic oligonucleotide
  Antisense strand to SEQ ID NO: 294310
aucuugcauagaaagaaac

SEQ ID NO: 294312 - RNA, 19 nt, Artificial Sequence
  Description of Artificial Sequence: Synthetic oligonucleotide
  Sense strand starting at position 771 of SEQ ID NO: 3784
ccaaaugugcaaugaauaa

SEQ ID NO: 294313 - RNA, 19 nt, Artificial Sequence
  Description of Artificial Sequence: Synthetic oligonucleotide
  Antisense strand to SEQ ID NO: 294312
uuauucauugcacauuugg

SEQ ID NO: 294314 - RNA, 19 nt, Artificial Sequence
  Description of Artificial Sequence: Synthetic oligonucleotide
  Sense strand starting at position 789 of SEQ ID NO: 3784
auacgauaagcauguuaac

SEQ ID NO: 294315 - RNA, 19 nt, Artificial Sequence
  Description of Artificial Sequence: Synthetic oligonucleotide
  Antisense strand to SEQ ID NO: 294314
guuaacaugcuuaucguau

SEQ ID NO: 294316 - RNA, 19 nt, Artificial Sequence
  Description of Artificial Sequence: Synthetic oligonucleotide
  Sense strand starting at position 1249 of SEQ ID NO: 3784
aaauguucugaaggcugau

SEQ ID NO: 294317 - RNA, 19 nt, Artificial Sequence
  Description of Artificial Sequence: Synthetic oligonucleotide
  Antisense strand to SEQ ID NO: 294316
aucagccuucagaacauuu

SEQ ID NO: 294318 - RNA, 19 nt, Artificial Sequence
  Description of Artificial Sequence: Synthetic oligonucleotide
  Sense strand starting at position 1267 of SEQ ID NO: 3784
uuuaguaaucagugucaaa

SEQ ID NO: 294319 - RNA, 19 nt, Artificial Sequence
  Description of Artificial Sequence: Synthetic oligonucleotide
  Antisense strand to SEQ ID NO: 294318
uuugacacugauuacuaaa

SEQ ID NO: 294320 - RNA, 19 nt, Artificial Sequence
  Description of Artificial Sequence: Synthetic oligonucleotide
  Sense strand starting at position 1492 of SEQ ID NO: 3784
acugaaggaucagagcuua

SEQ ID NO: 294321 - RNA, 19 nt, Artificial Sequence
  Description of Artificial Sequence: Synthetic oligonucleotide
  Antisense strand to SEQ ID NO: 294320
uaagcucugauccuucagu

SEQ ID NO: 294322 - RNA, 19 nt, Artificial Sequence
  Description of Artificial Sequence: Synthetic oligonucleotide
  Sense strand starting at position 1523 of SEQ ID NO: 3784
gggcaaaucucggcuccau

SEQ ID NO: 294323 - RNA, 19 nt, Artificial Sequence
  Description of Artificial Sequence: Synthetic oligonucleotide
  Antisense strand to SEQ ID NO: 294322
auggagccgagauuugccc

SEQ ID NO: 294324 - RNA, 19 nt, Artificial Sequence
  Description of Artificial Sequence: Synthetic oligonucleotide
  Sense strand starting at position 1628 of SEQ ID NO: 3784
ccacaugucugagcucuga

SEQ ID NO: 294325 - RNA, 19 nt, Artificial Sequence
  Description of Artificial Sequence: Synthetic oligonucleotide
  Antisense strand to SEQ ID NO: 294324
ucagagcucagacaugugg

SEQ ID NO: 294326 - RNA, 19 nt, Artificial Sequence
  Description of Artificial Sequence: Synthetic oligonucleotide
  Sense strand starting at position 1632 of SEQ ID NO: 3784
augucugagcucugagaga

SEQ ID NO: 294327 - RNA, 19 nt, Artificial Sequence
  Description of Artificial Sequence: Synthetic oligonucleotide
  Antisense strand to SEQ ID NO: 294326
ucucucagagcucagacau

SEQ ID NO: 294328 - RNA, 19 nt, Artificial Sequence
  Description of Artificial Sequence: Synthetic oligonucleotide
  Sense strand starting at position 1643 of SEQ ID NO: 3784
cugagagagccucagaguu

SEQ ID NO: 294329 - RNA, 19 nt, Artificial Sequence
  Description of Artificial Sequence: Synthetic oligonucleotide
  Antisense strand to SEQ ID NO: 294328
aacucugaggcucucucag

SEQ ID NO: 294330 - RNA, 19 nt, Artificial Sequence
  Description of Artificial Sequence: Synthetic oligonucleotide
  Sense strand starting at position 1657 of SEQ ID NO: 3784
gaguuuaaauaguugaacu

SEQ ID NO: 294331 - RNA, 19 nt, Artificial Sequence
  Description of Artificial Sequence: Synthetic oligonucleotide
  Antisense strand to SEQ ID NO: 294330
aguucaacuauuuaaacuc

SEQ ID NO: 294332 - RNA, 19 nt, Artificial Sequence
  Description of Artificial Sequence: Synthetic oligonucleotide
  Sense strand starting at position 1696 of SEQ ID NO: 3784
cgaaguuaacucuaagagc

SEQ ID NO: 294333 - RNA, 19 nt, Artificial Sequence
  Description of Artificial Sequence: Synthetic oligonucleotide
  Antisense strand to SEQ ID NO: 294332
gcucuuagaguuaacuucg

SEQ ID NO: 294334 - RNA, 19 nt, Artificial Sequence
  Description of Artificial Sequence: Synthetic oligonucleotide
  Sense strand starting at position 1818 of SEQ ID NO: 3784
ccucaagauugggagaguu

SEQ ID NO: 294335 - RNA, 19 nt, Artificial Sequence
  Description of Artificial Sequence: Synthetic oligonucleotide
  Antisense strand to SEQ ID NO: 294334
aacucucccaaucuugagg

SEQ ID NO: 294336 - RNA, 19 nt, Artificial Sequence
  Description of Artificial Sequence: Synthetic oligonucleotide
  Sense strand starting at position 1861 of SEQ ID NO: 3784
caggaagucugugcuuuga

SEQ ID NO: 294337 - RNA, 19 nt, Artificial Sequence
  Description of Artificial Sequence: Synthetic oligonucleotide
  Antisense strand to SEQ ID NO: 294336
ucaaagcacagacuuccug

SEQ ID NO: 294338 - RNA, 19 nt, Artificial Sequence
  Description of Artificial Sequence: Synthetic oligonucleotide
  Sense strand starting at position 1863 of SEQ ID NO: 3784
ggaagucugugcuuugaca

SEQ ID NO: 294339 - RNA, 19 nt, Artificial Sequence
  Description of Artificial Sequence: Synthetic oligonucleotide
  Antisense strand to SEQ ID NO: 294338
ugucaaagcacagacuucc

SEQ ID NO: 294340 - RNA, 19 nt, Artificial Sequence
  Description of Artificial Sequence: Synthetic oligonucleotide
  Sense strand starting at position 1865 of SEQ ID NO: 3784
aagucugugcuuugacaaa

SEQ ID NO: 294341 - RNA, 19 nt, Artificial Sequence
  Description of Artificial Sequence: Synthetic oligonucleotide
  Antisense strand to SEQ ID NO: 294340
uuugucaaagcacagacuu

SEQ ID NO: 294342 - RNA, 19 nt, Artificial Sequence
  Description of Artificial Sequence: Synthetic oligonucleotide
  Sense strand starting at position 2044 of SEQ ID NO: 3784
gcguguugccaguugggau

SEQ ID NO: 294343 - RNA, 19 nt, Artificial Sequence
  Description of Artificial Sequence: Synthetic oligonucleotide
  Antisense strand to SEQ ID NO: 294342
aucccaacuggcaacacgc

SEQ ID NO: 294344 - RNA, 19 nt, Artificial Sequence
  Description of Artificial Sequence: Synthetic oligonucleotide
  Sense strand starting at position 2169 of SEQ ID NO: 3784
ucccaugacuuguccucau

SEQ ID NO: 294345 - RNA, 19 nt, Artificial Sequence
  Description of Artificial Sequence: Synthetic oligonucleotide
  Antisense strand to SEQ ID NO: 294344
augaggacaagucauggga

SEQ ID NO: 294346 - RNA, 19 nt, Artificial Sequence
  Description of Artificial Sequence: Synthetic oligonucleotide
  Sense strand starting at position 2266 of SEQ ID NO: 3784
auuuauccaguguguuauc

SEQ ID NO: 294347 - RNA, 19 nt, Artificial Sequence
  Description of Artificial Sequence: Synthetic oligonucleotide
  Antisense strand to SEQ ID NO: 294346
gauaacacacuggauaaau

SEQ ID NO: 294348 - RNA, 19 nt, Artificial Sequence
  Description of Artificial Sequence: Synthetic oligonucleotide
  Sense strand starting at position 2271 of SEQ ID NO: 3784
uccaguguguuaucaaacu

SEQ ID NO: 294349 - RNA, 19 nt, Artificial Sequence
  Description of Artificial Sequence: Synthetic oligonucleotide
  Antisense strand to SEQ ID NO: 294348
aguuugauaacacacugga

SEQ ID NO: 294350 - RNA, 19 nt, Artificial Sequence
  Description of Artificial Sequence: Synthetic oligonucleotide
  Sense strand starting at position 2311 of SEQ ID NO: 3784
aagagaaugugccagaaau

SEQ ID NO: 294351 - RNA, 19 nt, Artificial Sequence
  Description of Artificial Sequence: Synthetic oligonucleotide
  Antisense strand to SEQ ID NO: 294350
auuucuggcacauucucuu

SEQ ID NO: 294352 - RNA, 19 nt, Artificial Sequence
  Description of Artificial Sequence: Synthetic oligonucleotide
  Sense strand starting at position 2321 of SEQ ID NO: 3784
gccagaaaugccuagaacu

SEQ ID NO: 294353 - RNA, 19 nt, Artificial Sequence
  Description of Artificial Sequence: Synthetic oligonucleotide
  Antisense strand to SEQ ID NO: 294352
aguucuaggcauuucuggc

SEQ ID NO: 294354 - RNA, 19 nt, Artificial Sequence
  Description of Artificial Sequence: Synthetic oligonucleotide
  Sense strand starting at position 2345 of SEQ ID NO: 3784
ggauaagauuauuacagga

SEQ ID NO: 294355 - RNA, 19 nt, Artificial Sequence
  Description of Artificial Sequence: Synthetic oligonucleotide
  Antisense strand to SEQ ID NO: 294354
uccuguaauaaucuuaucc

SEQ ID NO: 294356 - RNA, 19 nt, Artificial Sequence
  Description of Artificial Sequence: Synthetic oligonucleotide
  Sense strand starting at position 2347 of SEQ ID NO: 3784
auaagauuauuacaggaag

SEQ ID NO: 294357 - RNA, 19 nt, Artificial Sequence
  Description of Artificial Sequence: Synthetic oligonucleotide
  Antisense strand to SEQ ID NO: 294356
cuuccuguaauaaucuuau

SEQ ID NO: 294358 - RNA, 19 nt, Artificial Sequence
  Description of Artificial Sequence: Synthetic oligonucleotide
  Sense strand starting at position 2495 of SEQ ID NO: 3784
gcugauuccagagagcagu

SEQ ID NO: 294359 - RNA, 19 nt, Artificial Sequence
  Description of Artificial Sequence: Synthetic oligonucleotide
  Antisense strand to SEQ ID NO: 294358
acugcucucuggaaucagc

SEQ ID NO: 294360 - RNA, 19 nt, Artificial Sequence
  Description of Artificial Sequence: Synthetic oligonucleotide
  Sense strand starting at position 2855 of SEQ ID NO: 3784
gcaccacugcacuauagaa

SEQ ID NO: 294361 - RNA, 19 nt, Artificial Sequence
  Description of Artificial Sequence: Synthetic oligonucleotide
  Antisense strand to SEQ ID NO: 294360
uucuauagugcaguggugc

SEQ ID NO: 294362 - RNA, 19 nt, Artificial Sequence
  Description of Artificial Sequence: Synthetic oligonucleotide
  Sense strand starting at position 2868 of SEQ ID NO: 3784
auagaaaucuguguaacuu

SEQ ID NO: 294363 - RNA, 19 nt, Artificial Sequence
  Description of Artificial Sequence: Synthetic oligonucleotide
  Antisense strand to SEQ ID NO: 294362
aaguuacacagauuucuau

SEQ ID NO: 294364 - RNA, 19 nt, Artificial Sequence
  Description of Artificial Sequence: Synthetic oligonucleotide
  Sense strand starting at position 3304 of SEQ ID NO: 3784
uuaagaagcuuugaaacca

SEQ ID NO: 294365 - RNA, 19 nt, Artificial Sequence
  Description of Artificial Sequence: Synthetic oligonucleotide
  Antisense strand to SEQ ID NO: 294364
ugguuucaaagcuucuuaa

SEQ ID NO: 294366 - RNA, 19 nt, Artificial Sequence
  Description of Artificial Sequence: Synthetic oligonucleotide
  Sense strand starting at position 3412 of SEQ ID NO: 3784
ggguaauggcuguggguga

SEQ ID NO: 294367 - RNA, 19 nt, Artificial Sequence
  Description of Artificial Sequence: Synthetic oligonucleotide
  Antisense strand to SEQ ID NO: 294366
ucacccacagccauuaccc

SEQ ID NO: 294368 - RNA, 19 nt, Artificial Sequence
  Description of Artificial Sequence: Synthetic oligonucleotide
  Sense strand starting at position 3500 of SEQ ID NO: 3784
cucagcaugcaguaacaua

SEQ ID NO: 294369 - RNA, 19 nt, Artificial Sequence
  Description of Artificial Sequence: Synthetic oligonucleotide
  Antisense strand to SEQ ID NO: 294368
uauguuacugcaugcugag

SEQ ID NO: 294370 - RNA, 19 nt, Artificial Sequence
  Description of Artificial Sequence: Synthetic oligonucleotide
  Sense strand starting at position 3540 of SEQ ID NO: 3784
ggcggugguaaaggaauua

SEQ ID NO: 294371 - RNA, 19 nt, Artificial Sequence
  Description of Artificial Sequence: Synthetic oligonucleotide
  Antisense strand to SEQ ID NO: 294370
uaauuccuuuaccaccgcc

SEQ ID NO: 294372 - RNA, 19 nt, Artificial Sequence
  Description of Artificial Sequence: Synthetic oligonucleotide
  Sense strand starting at position 3797 of SEQ ID NO: 3784
gaugaaagauguuuauucu

SEQ ID NO: 294373 - RNA, 19 nt, Artificial Sequence
  Description of Artificial Sequence: Synthetic oligonucleotide
  Antisense strand to SEQ ID NO: 294372
agaauaaacaucuuucauc

SEQ ID NO: 294374 - RNA, 19 nt, Artificial Sequence
  Description of Artificial Sequence: Synthetic oligonucleotide
  Sense strand starting at position 3800 of SEQ ID NO: 3784
gaaagauguuuauucuaag

SEQ ID NO: 294375 - RNA, 19 nt, Artificial Sequence
  Description of Artificial Sequence: Synthetic oligonucleotide
  Antisense strand to SEQ ID NO: 294374
cuuagaauaaacaucuuuc

SEQ ID NO: 294376 - RNA, 19 nt, Artificial Sequence
  Description of Artificial Sequence: Synthetic oligonucleotide
  Sense strand starting at position 18 of SEQ ID NO: 3783
acuggauugugaucaagac

SEQ ID NO: 294377 - RNA, 19 nt, Artificial Sequence
  Description of Artificial Sequence: Synthetic oligonucleotide
  Antisense strand to SEQ ID NO: 294376
gucuugaucacaauccagu

SEQ ID NO: 294378 - RNA, 19 nt, Artificial Sequence
  Description of Artificial Sequence: Synthetic oligonucleotide
  Sense strand starting at position 146 of SEQ ID NO: 3783
ugaccuacuuggccuaaau

SEQ ID NO: 294379 - RNA, 19 nt, Artificial Sequence
  Description of Artificial Sequence: Synthetic oligonucleotide
  Antisense strand to SEQ ID NO: 294378
auuuaggccaaguagguca

SEQ ID NO: 294380 - RNA, 19 nt, Artificial Sequence
  Description of Artificial Sequence: Synthetic oligonucleotide
  Sense strand starting at position 300 of SEQ ID NO: 3783
aggagagguucuguaguga

SEQ ID NO: 294381 - RNA, 19 nt, Artificial Sequence
  Description of Artificial Sequence: Synthetic oligonucleotide
  Antisense strand to SEQ ID NO: 294380
ucacuacagaaccucuccu

SEQ ID NO: 294382 - RNA, 19 nt, Artificial Sequence
  Description of Artificial Sequence: Synthetic oligonucleotide
  Sense strand starting at position 301 of SEQ ID NO: 3783
ggagagguucuguagugag

SEQ ID NO: 294383 - RNA, 19 nt, Artificial Sequence
  Description of Artificial Sequence: Synthetic oligonucleotide
  Antisense strand to SEQ ID NO: 294382
cucacuacagaaccucucc

SEQ ID NO: 294384 - RNA, 19 nt, Artificial Sequence
  Description of Artificial Sequence: Synthetic oligonucleotide
  Sense strand starting at position 305 of SEQ ID NO: 3783
agguucuguagugagcaua

SEQ ID NO: 294385 - RNA, 19 nt, Artificial Sequence
  Description of Artificial Sequence: Synthetic oligonucleotide
  Antisense strand to SEQ ID NO: 294384
uaugcucacuacagaaccu

SEQ ID NO: 294386 - RNA, 19 nt, Artificial Sequence
  Description of Artificial Sequence: Synthetic oligonucleotide
  Sense strand starting at position 448 of SEQ ID NO: 3783
ccaccagucagcugaggaa

SEQ ID NO: 294387 - RNA, 19 nt, Artificial Sequence
  Description of Artificial Sequence: Synthetic oligonucleotide
  Antisense strand to SEQ ID NO: 294386
uuccucagcugacuggugg

SEQ ID NO: 294388 - RNA, 19 nt, Artificial Sequence
  Description of Artificial Sequence: Synthetic oligonucleotide
  Sense strand starting at position 644 of SEQ ID NO: 3783
agaggacagcugugucuaa

SEQ ID NO: 294389 - RNA, 19 nt, Artificial Sequence
  Description of Artificial Sequence: Synthetic oligonucleotide
  Antisense strand to SEQ ID NO: 294388
uuagacacagcuguccucu

SEQ ID NO: 294390 - RNA, 19 nt, Artificial Sequence
  Description of Artificial Sequence: Synthetic oligonucleotide
  Sense strand starting at position 648 of SEQ ID NO: 3783
gacagcugugucuaacaga

SEQ ID NO: 294391 - RNA, 19 nt, Artificial Sequence
  Description of Artificial Sequence: Synthetic oligonucleotide
  Antisense strand to SEQ ID NO: 294390
ucuguuagacacagcuguc

SEQ ID NO: 294392 - RNA, 19 nt, Artificial Sequence
  Description of Artificial Sequence: Synthetic oligonucleotide
  Sense strand starting at position 838 of SEQ ID NO: 3783
aucaguguucuagaguuug

SEQ ID NO: 294393 - RNA, 19 nt, Artificial Sequence
  Description of Artificial Sequence: Synthetic oligonucleotide
  Antisense strand to SEQ ID NO: 294392
caaacucuagaacacugau

SEQ ID NO: 294394 - RNA, 19 nt, Artificial Sequence
  Description of Artificial Sequence: Synthetic oligonucleotide
  Sense strand starting at position 964 of SEQ ID NO: 3783
cuugcauauguguaaugaa

SEQ ID NO: 294395 - RNA, 19 nt, Artificial Sequence
  Description of Artificial Sequence: Synthetic oligonucleotide
  Antisense strand to SEQ ID NO: 294394
uucauuacacauaugcaag

SEQ ID NO: 294396 - RNA, 19 nt, Artificial Sequence
  Description of Artificial Sequence: Synthetic oligonucleotide
  Sense strand starting at position 1176 of SEQ ID NO: 3783
ugcuuccauuuguuuauca

SEQ ID NO: 294397 - RNA, 19 nt, Artificial Sequence
  Description of Artificial Sequence: Synthetic oligonucleotide
  Antisense strand to SEQ ID NO: 294396
ugauaaacaaauggaagca

SEQ ID NO: 294398 - RNA, 19 nt, Artificial Sequence
  Description of Artificial Sequence: Synthetic oligonucleotide
  Sense strand starting at position 1186 of SEQ ID NO: 3783
uguuuaucacucgacuuua

SEQ ID NO: 294399 - RNA, 19 nt, Artificial Sequence
  Description of Artificial Sequence: Synthetic oligonucleotide
  Antisense strand to SEQ ID NO: 294398
uaaagucgagugauaaaca

SEQ ID NO: 294400 - RNA, 19 nt, Artificial Sequence
  Description of Artificial Sequence: Synthetic oligonucleotide
  Sense strand starting at position 1197 of SEQ ID NO: 3783
cgacuuuaugcugauauag

SEQ ID NO: 294401 - RNA, 19 nt, Artificial Sequence
  Description of Artificial Sequence: Synthetic oligonucleotide
  Antisense strand to SEQ ID NO: 294400
cuauaucagcauaaagucg

SEQ ID NO: 294402 - RNA, 19 nt, Artificial Sequence
  Description of Artificial Sequence: Synthetic oligonucleotide
  Sense strand starting at position 1249 of SEQ ID NO: 3783
gaaugagggcuggguauaa

SEQ ID NO: 294403 - RNA, 19 nt, Artificial Sequence
  Description of Artificial Sequence: Synthetic oligonucleotide
  Antisense strand to SEQ ID NO: 294402
uuauacccagcccucauuc

SEQ ID NO: 294404 - RNA, 19 nt, Artificial Sequence
  Description of Artificial Sequence: Synthetic oligonucleotide
  Sense strand starting at position 1302 of SEQ ID NO: 3783
gcuauccuccuguaucaua

SEQ ID NO: 294405 - RNA, 19 nt, Artificial Sequence
  Description of Artificial Sequence: Synthetic oligonucleotide
  Antisense strand to SEQ ID NO: 294404
uaugauacaggaggauagc

SEQ ID NO: 294406 - RNA, 19 nt, Artificial Sequence
  Description of Artificial Sequence: Synthetic oligonucleotide
  Sense strand starting at position 1313 of SEQ ID NO: 3783
guaucauauuguccuugaa

SEQ ID NO: 294407 - RNA, 19 nt, Artificial Sequence
  Description of Artificial Sequence: Synthetic oligonucleotide
  Antisense strand to SEQ ID NO: 294406
uucaaggacaauaugauac

SEQ ID NO: 294408 - RNA, 19 nt, Artificial Sequence
  Description of Artificial Sequence: Synthetic oligonucleotide
  Sense strand starting at position 1401 of SEQ ID NO: 3783
cagugaaaugguugaagcu

SEQ ID NO: 294409 - RNA, 19 nt, Artificial Sequence
  Description of Artificial Sequence: Synthetic oligonucleotide
  Antisense strand to SEQ ID NO: 294408
agcuucaaccauuucacug

SEQ ID NO: 294410 - RNA, 19 nt, Artificial Sequence
  Description of Artificial Sequence: Synthetic oligonucleotide
  Sense strand starting at position 1450 of SEQ ID NO: 3783
uuguaaagugcccacauau

SEQ ID NO: 294411 - RNA, 19 nt, Artificial Sequence
  Description of Artificial Sequence: Synthetic oligonucleotide
  Antisense strand to SEQ ID NO: 294410
auaugugggcacuuuacaa

SEQ ID NO: 294412 - RNA, 19 nt, Artificial Sequence
  Description of Artificial Sequence: Synthetic oligonucleotide
  Sense strand starting at position 1701 of SEQ ID NO: 3783
gacugaagauuugaaaugu

SEQ ID NO: 294413 - RNA, 19 nt, Artificial Sequence
  Description of Artificial Sequence: Synthetic oligonucleotide
  Antisense strand to SEQ ID NO: 294412
acauuucaaaucuucaguc

SEQ ID NO: 294414 - RNA, 19 nt, Artificial Sequence
  Description of Artificial Sequence: Synthetic oligonucleotide
  Sense strand starting at position 1773 of SEQ ID NO: 3783
agaguuuacuuccuccuca

SEQ ID NO: 294415 - RNA, 19 nt, Artificial Sequence
  Description of Artificial Sequence: Synthetic oligonucleotide
  Antisense strand to SEQ ID NO: 294414
ugaggaggaaguaaacucu

SEQ ID NO: 294416 - RNA, 19 nt, Artificial Sequence
  Description of Artificial Sequence: Synthetic oligonucleotide
  Sense strand starting at position 1817 of SEQ ID NO: 3783
uuugaucugcuugaguuga

SEQ ID NO: 294417 - RNA, 19 nt, Artificial Sequence
  Description of Artificial Sequence: Synthetic oligonucleotide
  Antisense strand to SEQ ID NO: 294416
ucaacucaagcagaucaaa

SEQ ID NO: 294418 - RNA, 19 nt, Artificial Sequence
  Description of Artificial Sequence: Synthetic oligonucleotide
  Sense strand starting at position 1821 of SEQ ID NO: 3783
aucugcuugaguugaauga

SEQ ID NO: 294419 - RNA, 19 nt, Artificial Sequence
  Description of Artificial Sequence: Synthetic oligonucleotide
  Antisense strand to SEQ ID NO: 294418
ucauucaacucaagcagau

SEQ ID NO: 294420 - RNA, 19 nt, Artificial Sequence
  Description of Artificial Sequence: Synthetic oligonucleotide
  Sense strand starting at position 1926 of SEQ ID NO: 3783
gagagacgucauggagauu

SEQ ID NO: 294421 - RNA, 19 nt, Artificial Sequence
  Description of Artificial Sequence: Synthetic oligonucleotide
  Antisense strand to SEQ ID NO: 294420
aaucuccaugacgucucuc

SEQ ID NO: 294422 - RNA, 19 nt, Artificial Sequence
  Description of Artificial Sequence: Synthetic oligonucleotide
  Sense strand starting at position 2406 of SEQ ID NO: 3783
acuggagcuguuugaacau

SEQ ID NO: 294423 - RNA, 19 nt, Artificial Sequence
  Description of Artificial Sequence: Synthetic oligonucleotide
  Antisense strand to SEQ ID NO: 294422
auguucaaacagcuccagu

SEQ ID NO: 294424 - RNA, 19 nt, Artificial Sequence
  Description of Artificial Sequence: Synthetic oligonucleotide
  Sense strand starting at position 2436 of SEQ ID NO: 3783
ugaggcuuuguguaggauu

SEQ ID NO: 294425 - RNA, 19 nt, Artificial Sequence
  Description of Artificial Sequence: Synthetic oligonucleotide
  Antisense strand to SEQ ID NO: 294424
aauccuacacaaagccuca

SEQ ID NO: 294426 - RNA, 19 nt, Artificial Sequence
  Description of Artificial Sequence: Synthetic oligonucleotide
  Sense strand starting at position 2443 of SEQ ID NO: 3783
uuguguaggauuggaugau

SEQ ID NO: 294427 - RNA, 19 nt, Artificial Sequence
  Description of Artificial Sequence: Synthetic oligonucleotide
  Antisense strand to SEQ ID NO: 294426
aucauccaauccuacacaa

SEQ ID NO: 294428 - RNA, 19 nt, Artificial Sequence
  Description of Artificial Sequence: Synthetic oligonucleotide
  Sense strand starting at position 2637 of SEQ ID NO: 3783
ggcucuuagcccuagaauc

SEQ ID NO: 294429 - RNA, 19 nt, Artificial Sequence
  Description of Artificial Sequence: Synthetic oligonucleotide
  Antisense strand to SEQ ID NO: 294428
gauucuagggcuaagagcc

SEQ ID NO: 294430 - RNA, 19 nt, Artificial Sequence
  Description of Artificial Sequence: Synthetic oligonucleotide
  Sense strand starting at position 2666 of SEQ ID NO: 3783
cucugaauacuugguagga

SEQ ID NO: 294431 - RNA, 19 nt, Artificial Sequence
  Description of Artificial Sequence: Synthetic oligonucleotide
  Antisense strand to SEQ ID NO: 294430
uccuaccaaguauucagag

SEQ ID NO: 294432 - RNA, 19 nt, Artificial Sequence
  Description of Artificial Sequence: Synthetic oligonucleotide
  Sense strand starting at position 2733 of SEQ ID NO: 3783
gugagugcugcuucugcuu

SEQ ID NO: 294433 - RNA, 19 nt, Artificial Sequence
  Description of Artificial Sequence: Synthetic oligonucleotide
  Antisense strand to SEQ ID NO: 294432
aagcagaagcagcacucac

SEQ ID NO: 294434 - RNA, 19 nt, Artificial Sequence
  Description of Artificial Sequence: Synthetic oligonucleotide
  Sense strand starting at position 2778 of SEQ ID NO: 3783
uuacauaucuggucagaga

SEQ ID NO: 294435 - RNA, 19 nt, Artificial Sequence
  Description of Artificial Sequence: Synthetic oligonucleotide
  Antisense strand to SEQ ID NO: 294434
ucucugaccagauauguaa

SEQ ID NO: 294436 - RNA, 19 nt, Artificial Sequence
  Description of Artificial Sequence: Synthetic oligonucleotide
  Sense strand starting at position 3093 of SEQ ID NO: 3783
uucuguauccauggaucua

SEQ ID NO: 294437 - RNA, 19 nt, Artificial Sequence
  Description of Artificial Sequence: Synthetic oligonucleotide
  Antisense strand to SEQ ID NO: 294436
uagauccauggauacagaa

SEQ ID NO: 294438 - RNA, 19 nt, Artificial Sequence
  Description of Artificial Sequence: Synthetic oligonucleotide
  Sense strand starting at position 3431 of SEQ ID NO: 3783
auggaaacuugucuaauug

SEQ ID NO: 294439 - RNA, 19 nt, Artificial Sequence
  Description of Artificial Sequence: Synthetic oligonucleotide
  Antisense strand to SEQ ID NO: 294438
caauuagacaaguuuccau

SEQ ID NO: 294440 - RNA, 19 nt, Artificial Sequence
  Description of Artificial Sequence: Synthetic oligonucleotide
  Sense strand starting at position 3596 of SEQ ID NO: 3783
ucacuugcucucuagugaa

SEQ ID NO: 294441 - RNA, 19 nt, Artificial Sequence
  Description of Artificial Sequence: Synthetic oligonucleotide
  Antisense strand to SEQ ID NO: 294440
uucacuagagagcaaguga

SEQ ID NO: 294442 - RNA, 19 nt, Artificial Sequence
  Description of Artificial Sequence: Synthetic oligonucleotide
  Sense strand starting at position 3678 of SEQ ID NO: 3783
ggcacugagaggugacaau

SEQ ID NO: 294443 - RNA, 19 nt, Artificial Sequence
  Description of Artificial Sequence: Synthetic oligonucleotide
  Antisense strand to SEQ ID NO: 294442
auugucaccucucagugcc

SEQ ID NO: 294444 - RNA, 19 nt, Artificial Sequence
  Description of Artificial Sequence: Synthetic oligonucleotide
  Sense strand starting at position 3698 of SEQ ID NO: 3783
ggcuaaugcuaaccucaaa

SEQ ID NO: 294445 - RNA, 19 nt, Artificial Sequence
  Description of Artificial Sequence: Synthetic oligonucleotide
  Antisense strand to SEQ ID NO: 294444
uuugagguuagcauuagcc

SEQ ID NO: 294446 - RNA, 19 nt, Artificial Sequence
  Description of Artificial Sequence: Synthetic oligonucleotide
  Sense strand starting at position 3766 of SEQ ID NO: 3783
ggaggaugaugucauuucu

SEQ ID NO: 294447 - RNA, 19 nt, Artificial Sequence
  Description of Artificial Sequence: Synthetic oligonucleotide
  Antisense strand to SEQ ID NO: 294446
agaaaugacaucauccucc

SEQ ID NO: 294448 - RNA, 19 nt, Artificial Sequence
  Description of Artificial Sequence: Synthetic oligonucleotide
  Sense strand starting at position 3802 of SEQ ID NO: 3783
ggauuagcuagugauacca

SEQ ID NO: 294449 - RNA, 19 nt, Artificial Sequence
  Description of Artificial Sequence: Synthetic oligonucleotide
  Antisense strand to SEQ ID NO: 294448
ugguaucacuagcuaaucc

SEQ ID NO: 294450 - RNA, 19 nt, Artificial Sequence
  Description of Artificial Sequence: Synthetic oligonucleotide
  Sense strand starting at position 3846 of SEQ ID NO: 3783
gagggcuauuaauuaucga

SEQ ID NO: 294451 - RNA, 19 nt, Artificial Sequence
  Description of Artificial Sequence: Synthetic oligonucleotide
  Antisense strand to SEQ ID NO: 294450
ucgauaauuaauagcccuc

SEQ ID NO: 294452 - RNA, 19 nt, Artificial Sequence
  Description of Artificial Sequence: Synthetic oligonucleotide
  Sense strand starting at position 3847 of SEQ ID NO: 3783
agggcuauuaauuaucgau

SEQ ID NO: 294453 - RNA, 19 nt, Artificial Sequence
  Description of Artificial Sequence: Synthetic oligonucleotide
  Antisense strand to SEQ ID NO: 294452
aucgauaauuaauagcccu

SEQ ID NO: 294454 - RNA, 19 nt, Artificial Sequence
  Description of Artificial Sequence: Synthetic oligonucleotide
  Sense strand starting at position 3976 of SEQ ID NO: 3783
agguguagaguccauaguu

SEQ ID NO: 294455 - RNA, 19 nt, Artificial Sequence
  Description of Artificial Sequence: Synthetic oligonucleotide
  Antisense strand to SEQ ID NO: 294454
aacuauggacucuacaccu

SEQ ID NO: 294456 - RNA, 19 nt, Artificial Sequence
  Description of Artificial Sequence: Synthetic oligonucleotide
  Sense strand starting at position 28 of SEQ ID NO: 3785
caaauuuggucacagauga

SEQ ID NO: 294457 - RNA, 19 nt, Artificial Sequence
  Description of Artificial Sequence: Synthetic oligonucleotide
  Antisense strand to SEQ ID NO: 294456
ucaucugugaccaaauuug

SEQ ID NO: 294458 - RNA, 19 nt, Artificial Sequence
  Description of Artificial Sequence: Synthetic oligonucleotide
  Sense strand starting at position 32 of SEQ ID NO: 3785
uuuggucacagaugaaaug

SEQ ID NO: 294459 - RNA, 19 nt, Artificial Sequence
  Description of Artificial Sequence: Synthetic oligonucleotide
  Antisense strand to SEQ ID NO: 294458
cauuucaucugugaccaaa

SEQ ID NO: 294460 - RNA, 19 nt, Artificial Sequence
  Description of Artificial Sequence: Synthetic oligonucleotide
  Sense strand starting at position 91 of SEQ ID NO: 3785
agagauagguugucugaau

SEQ ID NO: 294461 - RNA, 19 nt, Artificial Sequence
  Description of Artificial Sequence: Synthetic oligonucleotide
  Antisense strand to SEQ ID NO: 294460
auucagacaaccuaucucu

SEQ ID NO: 294462 - RNA, 19 nt, Artificial Sequence
  Description of Artificial Sequence: Synthetic oligonucleotide
  Sense strand starting at position 92 of SEQ ID NO: 3785
gagauagguugucugaaua

SEQ ID NO: 294463 - RNA, 19 nt, Artificial Sequence
  Description of Artificial Sequence: Synthetic oligonucleotide
  Antisense strand to SEQ ID NO: 294462
uauucagacaaccuaucuc

SEQ ID NO: 294464 - RNA, 19 nt, Artificial Sequence
  Description of Artificial Sequence: Synthetic oligonucleotide
  Sense strand starting at position 168 of SEQ ID NO: 3785
guacuaggcccagauggua

SEQ ID NO: 294465 - RNA, 19 nt, Artificial Sequence
  Description of Artificial Sequence: Synthetic oligonucleotide
  Antisense strand to SEQ ID NO: 294464
uaccaucugggccuaguac

SEQ ID NO: 294466 - RNA, 19 nt, Artificial Sequence
  Description of Artificial Sequence: Synthetic oligonucleotide
  Sense strand starting at position 282 of SEQ ID NO: 3785
auucuuugagguuagcauu

SEQ ID NO: 294467 - RNA, 19 nt, Artificial Sequence
  Description of Artificial Sequence: Synthetic oligonucleotide
  Antisense strand to SEQ ID NO: 294466
aaugcuaaccucaaagaau

SEQ ID NO: 294468 - RNA, 19 nt, Artificial Sequence
  Description of Artificial Sequence: Synthetic oligonucleotide
  Sense strand starting at position 484 of SEQ ID NO: 3785
ugauaauagcaauagcuuu

SEQ ID NO: 294469 - RNA, 19 nt, Artificial Sequence
  Description of Artificial Sequence: Synthetic oligonucleotide
  Antisense strand to SEQ ID NO: 294468
aaagcuauugcuauuauca

SEQ ID NO: 294470 - RNA, 19 nt, Artificial Sequence
  Description of Artificial Sequence: Synthetic oligonucleotide
  Sense strand starting at position 885 of SEQ ID NO: 3785
guugguuagauccauggau

SEQ ID NO: 294471 - RNA, 19 nt, Artificial Sequence
  Description of Artificial Sequence: Synthetic oligonucleotide
  Antisense strand to SEQ ID NO: 294470
auccauggaucuaaccaac

SEQ ID NO: 294472 - RNA, 19 nt, Artificial Sequence
  Description of Artificial Sequence: Synthetic oligonucleotide
  Sense strand starting at position 887 of SEQ ID NO: 3785
ugguuagauccauggauac

SEQ ID NO: 294473 - RNA, 19 nt, Artificial Sequence
  Description of Artificial Sequence: Synthetic oligonucleotide
  Antisense strand to SEQ ID NO: 294472
guauccauggaucuaacca

SEQ ID NO: 294474 - RNA, 19 nt, Artificial Sequence
  Description of Artificial Sequence: Synthetic oligonucleotide
  Sense strand starting at position 1201 of SEQ ID NO: 3785
aggcuucucugaccagaua

SEQ ID NO: 294475 - RNA, 19 nt, Artificial Sequence
  Description of Artificial Sequence: Synthetic oligonucleotide
  Antisense strand to SEQ ID NO: 294474
uaucuggucagagaagccu

SEQ ID NO: 294476 - RNA, 19 nt, Artificial Sequence
  Description of Artificial Sequence: Synthetic oligonucleotide
  Sense strand starting at position 1202 of SEQ ID NO: 3785
ggcuucucugaccagauau

SEQ ID NO: 294477 - RNA, 19 nt, Artificial Sequence
  Description of Artificial Sequence: Synthetic oligonucleotide
  Antisense strand to SEQ ID NO: 294476
auaucuggucagagaagcc

SEQ ID NO: 294478 - RNA, 19 nt, Artificial Sequence
  Description of Artificial Sequence: Synthetic oligonucleotide
  Sense strand starting at position 1204 of SEQ ID NO: 3785
cuucucugaccagauaugu

SEQ ID NO: 294479 - RNA, 19 nt, Artificial Sequence
  Description of Artificial Sequence: Synthetic oligonucleotide
  Antisense strand to SEQ ID NO: 294478
acauaucuggucagagaag

SEQ ID NO: 294480 - RNA, 19 nt, Artificial Sequence
  Description of Artificial Sequence: Synthetic oligonucleotide
  Sense strand starting at position 1355 of SEQ ID NO: 3785
ggcuaagagccacauagau

SEQ ID NO: 294481 - RNA, 19 nt, Artificial Sequence
  Description of Artificial Sequence: Synthetic oligonucleotide
  Antisense strand to SEQ ID NO: 294480
aucuauguggcucuuagcc

SEQ ID NO: 294482 - RNA, 19 nt, Artificial Sequence
  Description of Artificial Sequence: Synthetic oligonucleotide
  Sense strand starting at position 1564 of SEQ ID NO: 3785
ucagaacaggcaugauguu

SEQ ID NO: 294483 - RNA, 19 nt, Artificial Sequence
  Description of Artificial Sequence: Synthetic oligonucleotide
  Antisense strand to SEQ ID NO: 294482
aacaucaugccuguucuga

SEQ ID NO: 294484 - RNA, 19 nt, Artificial Sequence
  Description of Artificial Sequence: Synthetic oligonucleotide
  Sense strand starting at position 1648 of SEQ ID NO: 3785
ccuugaguuucuccaacag

SEQ ID NO: 294485 - RNA, 19 nt, Artificial Sequence
  Description of Artificial Sequence: Synthetic oligonucleotide
  Antisense strand to SEQ ID NO: 294484
cuguuggagaaacucaagg

SEQ ID NO: 294486 - RNA, 19 nt, Artificial Sequence
  Description of Artificial Sequence: Synthetic oligonucleotide
  Sense strand starting at position 1690 of SEQ ID NO: 3785
cugauugccucguuauuua

SEQ ID NO: 294487 - RNA, 19 nt, Artificial Sequence
  Description of Artificial Sequence: Synthetic oligonucleotide
  Antisense strand to SEQ ID NO: 294486
uaaauaacgaggcaaucag

SEQ ID NO: 294488 - RNA, 19 nt, Artificial Sequence
  Description of Artificial Sequence: Synthetic oligonucleotide
  Sense strand starting at position 1722 of SEQ ID NO: 3785
ucuauuguauaccuguaga

SEQ ID NO: 294489 - RNA, 19 nt, Artificial Sequence
  Description of Artificial Sequence: Synthetic oligonucleotide
  Antisense strand to SEQ ID NO: 294488
ucuacagguauacaauaga

SEQ ID NO: 294490 - RNA, 19 nt, Artificial Sequence
  Description of Artificial Sequence: Synthetic oligonucleotide
  Sense strand starting at position 1725 of SEQ ID NO: 3785
auuguauaccuguagagug

SEQ ID NO: 294491 - RNA, 19 nt, Artificial Sequence
  Description of Artificial Sequence: Synthetic oligonucleotide
  Antisense strand to SEQ ID NO: 294490
cacucuacagguauacaau

SEQ ID NO: 294492 - RNA, 19 nt, Artificial Sequence
  Description of Artificial Sequence: Synthetic oligonucleotide
  Sense strand starting at position 1727 of SEQ ID NO: 3785
uguauaccuguagagugaa

SEQ ID NO: 294493 - RNA, 19 nt, Artificial Sequence
  Description of Artificial Sequence: Synthetic oligonucleotide
  Antisense strand to SEQ ID NO: 294492
uucacucuacagguauaca

SEQ ID NO: 294494 - RNA, 19 nt, Artificial Sequence
  Description of Artificial Sequence: Synthetic oligonucleotide
  Sense strand starting at position 1740 of SEQ ID NO: 3785
agugaagcuggguagacau

SEQ ID NO: 294495 - RNA, 19 nt, Artificial Sequence
  Description of Artificial Sequence: Synthetic oligonucleotide
  Antisense strand to SEQ ID NO: 294494
augucuacccagcuucacu

SEQ ID NO: 294496 - RNA, 19 nt, Artificial Sequence
  Description of Artificial Sequence: Synthetic oligonucleotide
  Sense strand starting at position 1817 of SEQ ID NO: 3785
cgaugacccaccugaaguu

SEQ ID NO: 294497 - RNA, 19 nt, Artificial Sequence
  Description of Artificial Sequence: Synthetic oligonucleotide
  Antisense strand to SEQ ID NO: 294496
aacuucaggugggucaucg

SEQ ID NO: 294498 - RNA, 19 nt, Artificial Sequence
  Description of Artificial Sequence: Synthetic oligonucleotide
  Sense strand starting at position 1999 of SEQ ID NO: 3785
agugaaauugccuaacuag

SEQ ID NO: 294499 - RNA, 19 nt, Artificial Sequence
  Description of Artificial Sequence: Synthetic oligonucleotide
  Antisense strand to SEQ ID NO: 294498
cuaguuaggcaauuucacu

SEQ ID NO: 294500 - RNA, 19 nt, Artificial Sequence
  Description of Artificial Sequence: Synthetic oligonucleotide
  Sense strand starting at position 2383 of SEQ ID NO: 3785
acugaaauagcaugcauua

SEQ ID NO: 294501 - RNA, 19 nt, Artificial Sequence
  Description of Artificial Sequence: Synthetic oligonucleotide
  Antisense strand to SEQ ID NO: 294500
uaaugcaugcuauuucagu

SEQ ID NO: 294502 - RNA, 19 nt, Artificial Sequence
  Description of Artificial Sequence: Synthetic oligonucleotide
  Sense strand starting at position 2501 of SEQ ID NO: 3785
agagaaaugaggugcaauu

SEQ ID NO: 294503 - RNA, 19 nt, Artificial Sequence
  Description of Artificial Sequence: Synthetic oligonucleotide
  Antisense strand to SEQ ID NO: 294502
aauugcaccucauuucucu

SEQ ID NO: 294504 - RNA, 19 nt, Artificial Sequence
  Description of Artificial Sequence: Synthetic oligonucleotide
  Sense strand starting at position 2531 of SEQ ID NO: 3785
caaauaugugggcacuuua

SEQ ID NO: 294505 - RNA, 19 nt, Artificial Sequence
  Description of Artificial Sequence: Synthetic oligonucleotide
  Antisense strand to SEQ ID NO: 294504
uaaagugcccacauauuug

SEQ ID NO: 294506 - RNA, 19 nt, Artificial Sequence
  Description of Artificial Sequence: Synthetic oligonucleotide
  Sense strand starting at position 2643 of SEQ ID NO: 3785
aggguuuggagcugagauu

SEQ ID NO: 294507 - RNA, 19 nt, Artificial Sequence
  Description of Artificial Sequence: Synthetic oligonucleotide
  Antisense strand to SEQ ID NO: 294506
aaucucagcuccaaacccu

SEQ ID NO: 294508 - RNA, 19 nt, Artificial Sequence
  Description of Artificial Sequence: Synthetic oligonucleotide
  Sense strand starting at position 2644 of SEQ ID NO: 3785
ggguuuggagcugagauua

SEQ ID NO: 294509 - RNA, 19 nt, Artificial Sequence
  Description of Artificial Sequence: Synthetic oligonucleotide
  Antisense strand to SEQ ID NO: 294508
uaaucucagcuccaaaccc

SEQ ID NO: 294510 - RNA, 19 nt, Artificial Sequence
  Description of Artificial Sequence: Synthetic oligonucleotide
  Sense strand starting at position 2688 of SEQ ID NO: 3785
acaggaggauagcuguauu

SEQ ID NO: 294511 - RNA, 19 nt, Artificial Sequence
  Description of Artificial Sequence: Synthetic oligonucleotide
  Antisense strand to SEQ ID NO: 294510
aauacagcuauccuccugu

SEQ ID NO: 294512 - RNA, 19 nt, Artificial Sequence
  Description of Artificial Sequence: Synthetic oligonucleotide
  Sense strand starting at position 2744 of SEQ ID NO: 3785
gcccucauucuguaaagga

SEQ ID NO: 294513 - RNA, 19 nt, Artificial Sequence
  Description of Artificial Sequence: Synthetic oligonucleotide
  Antisense strand to SEQ ID NO: 294512
uccuuuacagaaugagggc

SEQ ID NO: 294514 - RNA, 19 nt, Artificial Sequence
  Description of Artificial Sequence: Synthetic oligonucleotide
  Sense strand starting at position 2754 of SEQ ID NO: 3785
uguaaaggauuugaaacaa

SEQ ID NO: 294515 - RNA, 19 nt, Artificial Sequence
  Description of Artificial Sequence: Synthetic oligonucleotide
  Antisense strand to SEQ ID NO: 294514
uuguuucaaauccuuuaca

SEQ ID NO: 294516 - RNA, 19 nt, Artificial Sequence
  Description of Artificial Sequence: Synthetic oligonucleotide
  Sense strand starting at position 2793 of SEQ ID NO: 3785
cagcauaaagucgagugau

SEQ ID NO: 294517 - RNA, 19 nt, Artificial Sequence
  Description of Artificial Sequence: Synthetic oligonucleotide
  Antisense strand to SEQ ID NO: 294516
aucacucgacuuuaugcug

SEQ ID NO: 294518 - RNA, 19 nt, Artificial Sequence
  Description of Artificial Sequence: Synthetic oligonucleotide
  Sense strand starting at position 2796 of SEQ ID NO: 3785
cauaaagucgagugauaaa

SEQ ID NO: 294519 - RNA, 19 nt, Artificial Sequence
  Description of Artificial Sequence: Synthetic oligonucleotide
  Antisense strand to SEQ ID NO: 294518
uuuaucacucgacuuuaug

SEQ ID NO: 294520 - RNA, 19 nt, Artificial Sequence
  Description of Artificial Sequence: Synthetic oligonucleotide
  Sense strand starting at position 2917 of SEQ ID NO: 3785
gguagaauccagggccagu

SEQ ID NO: 294521 - RNA, 19 nt, Artificial Sequence
  Description of Artificial Sequence: Synthetic oligonucleotide
  Antisense strand to SEQ ID NO: 294520
acuggcccuggauucuacc

SEQ ID NO: 294522 - RNA, 19 nt, Artificial Sequence
  Description of Artificial Sequence: Synthetic oligonucleotide
  Sense strand starting at position 2990 of SEQ ID NO: 3785
acaugugcuccugaauccu

SEQ ID NO: 294523 - RNA, 19 nt, Artificial Sequence
  Description of Artificial Sequence: Synthetic oligonucleotide
  Antisense strand to SEQ ID NO: 294522
aggauucaggagcacaugu

SEQ ID NO: 294524 - RNA, 19 nt, Artificial Sequence
  Description of Artificial Sequence: Synthetic oligonucleotide
  Sense strand starting at position 3128 of SEQ ID NO: 3785
acaccaaucugguugagac

SEQ ID NO: 294525 - RNA, 19 nt, Artificial Sequence
  Description of Artificial Sequence: Synthetic oligonucleotide
  Antisense strand to SEQ ID NO: 294524
gucucaaccagauuggugu

SEQ ID NO: 294526 - RNA, 19 nt, Artificial Sequence
  Description of Artificial Sequence: Synthetic oligonucleotide
  Sense strand starting at position 3129 of SEQ ID NO: 3785
caccaaucugguugagaca

SEQ ID NO: 294527 - RNA, 19 nt, Artificial Sequence
  Description of Artificial Sequence: Synthetic oligonucleotide
  Antisense strand to SEQ ID NO: 294526
ugucucaaccagauuggug

SEQ ID NO: 294528 - RNA, 19 nt, Artificial Sequence
  Description of Artificial Sequence: Synthetic oligonucleotide
  Sense strand starting at position 3386 of SEQ ID NO: 3785
aggccugguacagacuaua

SEQ ID NO: 294529 - RNA, 19 nt, Artificial Sequence
  Description of Artificial Sequence: Synthetic oligonucleotide
  Antisense strand to SEQ ID NO: 294528
uauagucuguaccaggccu

SEQ ID NO: 294530 - RNA, 19 nt, Artificial Sequence
  Description of Artificial Sequence: Synthetic oligonucleotide
  Sense strand starting at position 3613 of SEQ ID NO: 3785
caugcauuagcccagguaa

SEQ ID NO: 294531 - RNA, 19 nt, Artificial Sequence
  Description of Artificial Sequence: Synthetic oligonucleotide
  Antisense strand to SEQ ID NO: 294530
uuaccugggcuaaugcaug

SEQ ID NO: 294532 - RNA, 19 nt, Artificial Sequence
  Description of Artificial Sequence: Synthetic oligonucleotide
  Sense strand starting at position 3626 of SEQ ID NO: 3785
agguaaggauagccugaaa

SEQ ID NO: 294533 - RNA, 19 nt, Artificial Sequence
  Description of Artificial Sequence: Synthetic oligonucleotide
  Antisense strand to SEQ ID NO: 294532
uuucaggcuauccuuaccu

SEQ ID NO: 294534 - RNA, 19 nt, Artificial Sequence
  Description of Artificial Sequence: Synthetic oligonucleotide
  Sense strand starting at position 3843 of SEQ ID NO: 3785
ggccaaguaggucauaauc

SEQ ID NO: 294535 - RNA, 19 nt, Artificial Sequence
  Description of Artificial Sequence: Synthetic oligonucleotide
  Antisense strand to SEQ ID NO: 294534
gauuaugaccuacuuggcc

SEQ ID NO: 294536 - RNA, 19 nt, Artificial Sequence
  Description of Artificial Sequence: Synthetic oligonucleotide
  Sense strand starting at position 24 of SEQ ID NO: 3786
cacuauuuauaaugagggu

SEQ ID NO: 294537 - RNA, 19 nt, Artificial Sequence
  Description of Artificial Sequence: Synthetic oligonucleotide
  Antisense strand to SEQ ID NO: 294536
acccucauuauaaauagug

SEQ ID NO: 294538 - RNA, 19 nt, Artificial Sequence
  Description of Artificial Sequence: Synthetic oligonucleotide
  Sense strand starting at position 66 of SEQ ID NO: 3786
ucguaagauguuuauacau

SEQ ID NO: 294539 - RNA, 19 nt, Artificial Sequence
  Description of Artificial Sequence: Synthetic oligonucleotide
  Antisense strand to SEQ ID NO: 294538
auguauaaacaucuuacga

SEQ ID NO: 294540 - RNA, 19 nt, Artificial Sequence
  Description of Artificial Sequence: Synthetic oligonucleotide
  Sense strand starting at position 212 of SEQ ID NO: 3786
acugaaucacauuggcaaa

SEQ ID NO: 294541 - RNA, 19 nt, Artificial Sequence
  Description of Artificial Sequence: Synthetic oligonucleotide
  Antisense strand to SEQ ID NO: 294540
uuugccaaugugauucagu

SEQ ID NO: 294542 - RNA, 19 nt, Artificial Sequence
  Description of Artificial Sequence: Synthetic oligonucleotide
  Sense strand starting at position 675 of SEQ ID NO: 3786
gagguagaucuauaugcau

SEQ ID NO: 294543 - RNA, 19 nt, Artificial Sequence
  Description of Artificial Sequence: Synthetic oligonucleotide
  Antisense strand to SEQ ID NO: 294542
augcauauagaucuaccuc

SEQ ID NO: 294544 - RNA, 19 nt, Artificial Sequence
  Description of Artificial Sequence: Synthetic oligonucleotide
  Sense strand starting at position 678 of SEQ ID NO: 3786
guagaucuauaugcauuaa

SEQ ID NO: 294545 - RNA, 19 nt, Artificial Sequence
  Description of Artificial Sequence: Synthetic oligonucleotide
  Antisense strand to SEQ ID NO: 294544
uuaaugcauauagaucuac

SEQ ID NO: 294546 - RNA, 19 nt, Artificial Sequence
  Description of Artificial Sequence: Synthetic oligonucleotide
  Sense strand starting at position 858 of SEQ ID NO: 3786
aguuaugccgaagacucuu

SEQ ID NO: 294547 - RNA, 19 nt, Artificial Sequence
  Description of Artificial Sequence: Synthetic oligonucleotide
  Antisense strand to SEQ ID NO: 294546
aagagucuucggcauaacu

SEQ ID NO: 294548 - RNA, 19 nt, Artificial Sequence
  Description of Artificial Sequence: Synthetic oligonucleotide
  Sense strand starting at position 902 of SEQ ID NO: 3786
aggcgaagugaguggugaa

SEQ ID NO: 294549 - RNA, 19 nt, Artificial Sequence
  Description of Artificial Sequence: Synthetic oligonucleotide
  Antisense strand to SEQ ID NO: 294548
uucaccacucacuucgccu

SEQ ID NO: 294550 - RNA, 19 nt, Artificial Sequence
  Description of Artificial Sequence: Synthetic oligonucleotide
  Sense strand starting at position 939 of SEQ ID NO: 3786
acacuucuccacuguuuga

SEQ ID NO: 294551 - RNA, 19 nt, Artificial Sequence
  Description of Artificial Sequence: Synthetic oligonucleotide
  Antisense strand to SEQ ID NO: 294550
ucaaacaguggagaagugu

SEQ ID NO: 294552 - RNA, 19 nt, Artificial Sequence
  Description of Artificial Sequence: Synthetic oligonucleotide
  Sense strand starting at position 1143 of SEQ ID NO: 3786
uuuauaaacucguuacuag

SEQ ID NO: 294553 - RNA, 19 nt, Artificial Sequence
  Description of Artificial Sequence: Synthetic oligonucleotide
  Antisense strand to SEQ ID NO: 294552
cuaguaacgaguuuauaaa

SEQ ID NO: 294554 - RNA, 19 nt, Artificial Sequence
  Description of Artificial Sequence: Synthetic oligonucleotide
  Sense strand starting at position 1144 of SEQ ID NO: 3786
uuauaaacucguuacuaga

SEQ ID NO: 294555 - RNA, 19 nt, Artificial Sequence
  Description of Artificial Sequence: Synthetic oligonucleotide
  Antisense strand to SEQ ID NO: 294554
ucuaguaacgaguuuauaa

SEQ ID NO: 294556 - RNA, 19 nt, Artificial Sequence
  Description of Artificial Sequence: Synthetic oligonucleotide
  Sense strand starting at position 1146 of SEQ ID NO: 3786
auaaacucguuacuagaga

SEQ ID NO: 294557 - RNA, 19 nt, Artificial Sequence
  Description of Artificial Sequence: Synthetic oligonucleotide
  Antisense strand to SEQ ID NO: 294556
ucucuaguaacgaguuuau

SEQ ID NO: 294558 - RNA, 19 nt, Artificial Sequence
  Description of Artificial Sequence: Synthetic oligonucleotide
  Sense strand starting at position 1323 of SEQ ID NO: 3786
ugagucagucaaggaaaua

SEQ ID NO: 294559 - RNA, 19 nt, Artificial Sequence
  Description of Artificial Sequence: Synthetic oligonucleotide
  Antisense strand to SEQ ID NO: 294558
uauuuccuugacugacuca

SEQ ID NO: 294560 - RNA, 19 nt, Artificial Sequence
  Description of Artificial Sequence: Synthetic oligonucleotide
  Sense strand starting at position 1427 of SEQ ID NO: 3786
agugucuauuuccaaacua

SEQ ID NO: 294561 - RNA, 19 nt, Artificial Sequence
  Description of Artificial Sequence: Synthetic oligonucleotide
  Antisense strand to SEQ ID NO: 294560
uaguuuggaaauagacacu

SEQ ID NO: 294562 - RNA, 19 nt, Artificial Sequence
  Description of Artificial Sequence: Synthetic oligonucleotide
  Sense strand starting at position 1455 of SEQ ID NO: 3786
acaugacauaugugaaggu

SEQ ID NO: 294563 - RNA, 19 nt, Artificial Sequence
  Description of Artificial Sequence: Synthetic oligonucleotide
  Antisense strand to SEQ ID NO: 294562
accuucacauaugucaugu

SEQ ID NO: 294564 - RNA, 19 nt, Artificial Sequence
  Description of Artificial Sequence: Synthetic oligonucleotide
  Sense strand starting at position 1459 of SEQ ID NO: 3786
gacauaugugaagguagag

SEQ ID NO: 294565 - RNA, 19 nt, Artificial Sequence
  Description of Artificial Sequence: Synthetic oligonucleotide
  Antisense strand to SEQ ID NO: 294564
cucuaccuucacauauguc

SEQ ID NO: 294566 - RNA, 19 nt, Artificial Sequence
  Description of Artificial Sequence: Synthetic oligonucleotide
  Sense strand starting at position 1490 of SEQ ID NO: 3786
ugugaaaggguugggagau

SEQ ID NO: 294567 - RNA, 19 nt, Artificial Sequence
  Description of Artificial Sequence: Synthetic oligonucleotide
  Antisense strand to SEQ ID NO: 294566
aucucccaacccuuucaca

SEQ ID NO: 294568 - RNA, 19 nt, Artificial Sequence
  Description of Artificial Sequence: Synthetic oligonucleotide
  Sense strand starting at position 1512 of SEQ ID NO: 3786
gaggaaauguuuguugaaa

SEQ ID NO: 294569 - RNA, 19 nt, Artificial Sequence
  Description of Artificial Sequence: Synthetic oligonucleotide
  Antisense strand to SEQ ID NO: 294568
uuucaacaaacauuuccuc

SEQ ID NO: 294570 - RNA, 19 nt, Artificial Sequence
  Description of Artificial Sequence: Synthetic oligonucleotide
  Sense strand starting at position 1595 of SEQ ID NO: 3786
ugaaacgacuguucagagu

SEQ ID NO: 294571 - RNA, 19 nt, Artificial Sequence
  Description of Artificial Sequence: Synthetic oligonucleotide
  Antisense strand to SEQ ID NO: 294570
acucugaacagucguuuca

SEQ ID NO: 294572 - RNA, 19 nt, Artificial Sequence
  Description of Artificial Sequence: Synthetic oligonucleotide
  Sense strand starting at position 1691 of SEQ ID NO: 3786
uguccugcugcaguuguaa

SEQ ID NO: 294573 - RNA, 19 nt, Artificial Sequence
  Description of Artificial Sequence: Synthetic oligonucleotide
  Antisense strand to SEQ ID NO: 294572
uuacaacugcagcaggaca

SEQ ID NO: 294574 - RNA, 19 nt, Artificial Sequence
  Description of Artificial Sequence: Synthetic oligonucleotide
  Sense strand starting at position 1820 of SEQ ID NO: 3786
gcaugaaagcuccaauacu

SEQ ID NO: 294575 - RNA, 19 nt, Artificial Sequence
  Description of Artificial Sequence: Synthetic oligonucleotide
  Antisense strand to SEQ ID NO: 294574
aguauuggagcuuucaugc

SEQ ID NO: 294576 - RNA, 19 nt, Artificial Sequence
  Description of Artificial Sequence: Synthetic oligonucleotide
  Sense strand starting at position 2153 of SEQ ID NO: 3786
ugaaauguggcagacgguu

SEQ ID NO: 294577 - RNA, 19 nt, Artificial Sequence
  Description of Artificial Sequence: Synthetic oligonucleotide
  Antisense strand to SEQ ID NO: 294576
aaccgucugccacauuuca

SEQ ID NO: 294578 - RNA, 19 nt, Artificial Sequence
  Description of Artificial Sequence: Synthetic oligonucleotide
  Sense strand starting at position 2254 of SEQ ID NO: 3786
guccacuugcuugugcaau

SEQ ID NO: 294579 - RNA, 19 nt, Artificial Sequence
  Description of Artificial Sequence: Synthetic oligonucleotide
  Antisense strand to SEQ ID NO: 294578
auugcacaagcaaguggac

SEQ ID NO: 294580 - RNA, 19 nt, Artificial Sequence
  Description of Artificial Sequence: Synthetic oligonucleotide
  Sense strand starting at position 2554 of SEQ ID NO: 3786
gggagaguguucuuagccu

SEQ ID NO: 294581 - RNA, 19 nt, Artificial Sequence
  Description of Artificial Sequence: Synthetic oligonucleotide
  Antisense strand to SEQ ID NO: 294580
aggcuaagaacacucuccc

SEQ ID NO: 294582 - RNA, 19 nt, Artificial Sequence
  Description of Artificial Sequence: Synthetic oligonucleotide
  Sense strand starting at position 2563 of SEQ ID NO: 3786
uucuuagccuuccuggaaa

SEQ ID NO: 294583 - RNA, 19 nt, Artificial Sequence
  Description of Artificial Sequence: Synthetic oligonucleotide
  Antisense strand to SEQ ID NO: 294582
uuuccaggaaggcuaagaa

SEQ ID NO: 294584 - RNA, 19 nt, Artificial Sequence
  Description of Artificial Sequence: Synthetic oligonucleotide
  Sense strand starting at position 2718 of SEQ ID NO: 3786
ugaagagagcuucggagaa

SEQ ID NO: 294585 - RNA, 19 nt, Artificial Sequence
  Description of Artificial Sequence: Synthetic oligonucleotide
  Antisense strand to SEQ ID NO: 294584
uucuccgaagcucucuuca

SEQ ID NO: 294586 - RNA, 19 nt, Artificial Sequence
  Description of Artificial Sequence: Synthetic oligonucleotide
  Sense strand starting at position 2722 of SEQ ID NO: 3786
gagagcuucggagaaguca

SEQ ID NO: 294587 - RNA, 19 nt, Artificial Sequence
  Description of Artificial Sequence: Synthetic oligonucleotide
  Antisense strand to SEQ ID NO: 294586
ugacuucuccgaagcucuc

SEQ ID NO: 294588 - RNA, 19 nt, Artificial Sequence
  Description of Artificial Sequence: Synthetic oligonucleotide
  Sense strand starting at position 2838 of SEQ ID NO: 3786
gguucuaucucuucccaga

SEQ ID NO: 294589 - RNA, 19 nt, Artificial Sequence
  Description of Artificial Sequence: Synthetic oligonucleotide
  Antisense strand to SEQ ID NO: 294588
ucugggaagagauagaacc

SEQ ID NO: 294590 - RNA, 19 nt, Artificial Sequence
  Description of Artificial Sequence: Synthetic oligonucleotide
  Sense strand starting at position 3122 of SEQ ID NO: 3786
gauggugcuccagagccau

SEQ ID NO: 294591 - RNA, 19 nt, Artificial Sequence
  Description of Artificial Sequence: Synthetic oligonucleotide
  Antisense strand to SEQ ID NO: 294590
auggcucuggagcaccauc

SEQ ID NO: 294592 - RNA, 19 nt, Artificial Sequence
  Description of Artificial Sequence: Synthetic oligonucleotide
  Sense strand starting at position 3317 of SEQ ID NO: 3786
cuguuuauugcacaauagu

SEQ ID NO: 294593 - RNA, 19 nt, Artificial Sequence
  Description of Artificial Sequence: Synthetic oligonucleotide
  Antisense strand to SEQ ID NO: 294592
acuauugugcaauaaacag

SEQ ID NO: 294594 - RNA, 19 nt, Artificial Sequence
  Description of Artificial Sequence: Synthetic oligonucleotide
  Sense strand starting at position 3331 of SEQ ID NO: 3786
auaguuggaagcugugaau

SEQ ID NO: 294595 - RNA, 19 nt, Artificial Sequence
  Description of Artificial Sequence: Synthetic oligonucleotide
  Antisense strand to SEQ ID NO: 294594
auucacagcuuccaacuau

SEQ ID NO: 294596 - RNA, 19 nt, Artificial Sequence
  Description of Artificial Sequence: Synthetic oligonucleotide
  Sense strand starting at position 3385 of SEQ ID NO: 3786
ggguuucuacccugauucu

SEQ ID NO: 294597 - RNA, 19 nt, Artificial Sequence
  Description of Artificial Sequence: Synthetic oligonucleotide
  Antisense strand to SEQ ID NO: 294596
agaaucaggguagaaaccc

SEQ ID NO: 294598 - RNA, 19 nt, Artificial Sequence
  Description of Artificial Sequence: Synthetic oligonucleotide
  Sense strand starting at position 3386 of SEQ ID NO: 3786
gguuucuacccugauucua

SEQ ID NO: 294599 - RNA, 19 nt, Artificial Sequence
  Description of Artificial Sequence: Synthetic oligonucleotide
  Antisense strand to SEQ ID NO: 294598
uagaaucaggguagaaacc

SEQ ID NO: 294600 - RNA, 19 nt, Artificial Sequence
  Description of Artificial Sequence: Synthetic oligonucleotide
  Sense strand starting at position 3804 of SEQ ID NO: 3786
caaugagcuggcuggaaau

SEQ ID NO: 294601 - RNA, 19 nt, Artificial Sequence
  Description of Artificial Sequence: Synthetic oligonucleotide
  Antisense strand to SEQ ID NO: 294600
auuuccagccagcucauug

SEQ ID NO: 294602 - RNA, 19 nt, Artificial Sequence
  Description of Artificial Sequence: Synthetic oligonucleotide
  Sense strand starting at position 3814 of SEQ ID NO: 3786
gcuggaaaucugcaagugu

SEQ ID NO: 294603 - RNA, 19 nt, Artificial Sequence
  Description of Artificial Sequence: Synthetic oligonucleotide
  Antisense strand to SEQ ID NO: 294602
acacuugcagauuuccagc

SEQ ID NO: 294604 - RNA, 19 nt, Artificial Sequence
  Description of Artificial Sequence: Synthetic oligonucleotide
  Sense strand starting at position 3828 of SEQ ID NO: 3786
aguguugaccuuuacaggu

SEQ ID NO: 294605 - RNA, 19 nt, Artificial Sequence
  Description of Artificial Sequence: Synthetic oligonucleotide
  Antisense strand to SEQ ID NO: 294604
accuguaaaggucaacacu

SEQ ID NO: 294606 - RNA, 19 nt, Artificial Sequence
  Description of Artificial Sequence: Synthetic oligonucleotide
  Sense strand starting at position 3879 of SEQ ID NO: 3786
cagggaaggagauguucuu

SEQ ID NO: 294607 - RNA, 19 nt, Artificial Sequence
  Description of Artificial Sequence: Synthetic oligonucleotide
  Antisense strand to SEQ ID NO: 294606
aagaacaucuccuucccug

SEQ ID NO: 294608 - RNA, 19 nt, Artificial Sequence
  Description of Artificial Sequence: Synthetic oligonucleotide
  Sense strand starting at position 3892 of SEQ ID NO: 3786
guucuugucagacaggguu

SEQ ID NO: 294609 - RNA, 19 nt, Artificial Sequence
  Description of Artificial Sequence: Synthetic oligonucleotide
  Antisense strand to SEQ ID NO: 294608
aacccugucugacaagaac

SEQ ID NO: 294610 - RNA, 19 nt, Artificial Sequence
  Description of Artificial Sequence: Synthetic oligonucleotide
  Sense strand starting at position 3944 of SEQ ID NO: 3786
agcaaugccaguuaaugga

SEQ ID NO: 294611 - RNA, 19 nt, Artificial Sequence
  Description of Artificial Sequence: Synthetic oligonucleotide
  Antisense strand to SEQ ID NO: 294610
uccauuaacuggcauugcu

SEQ ID NO: 294612 - RNA, 19 nt, Artificial Sequence
  Description of Artificial Sequence: Synthetic oligonucleotide
  Sense strand starting at position 3948 of SEQ ID NO: 3786
augccaguuaauggagaau

SEQ ID NO: 294613 - RNA, 19 nt, Artificial Sequence
  Description of Artificial Sequence: Synthetic oligonucleotide
  Antisense strand to SEQ ID NO: 294612
auucuccauuaacuggcau

SEQ ID NO: 294614 - RNA, 19 nt, Artificial Sequence
  Description of Artificial Sequence: Synthetic oligonucleotide
  Sense strand starting at position 3960 of SEQ ID NO: 3786
ggagaaucucuaggcuucu

SEQ ID NO: 294615 - RNA, 19 nt, Artificial Sequence
  Description of Artificial Sequence: Synthetic oligonucleotide
  Antisense strand to SEQ ID NO: 294614
agaagccuagagauucucc

SEQ ID NO: 294616 - RNA, 19 nt, Artificial Sequence
  Description of Artificial Sequence: Synthetic oligonucleotide
  Sense strand starting at position 258 of SEQ ID NO: 3787
cguaccaauccauaaaugu

SEQ ID NO: 294617 - RNA, 19 nt, Artificial Sequence
  Description of Artificial Sequence: Synthetic oligonucleotide
  Antisense strand to SEQ ID NO: 294616
acauuuauggauugguacg

SEQ ID NO: 294618 - RNA, 19 nt, Artificial Sequence
  Description of Artificial Sequence: Synthetic oligonucleotide
  Sense strand starting at position 316 of SEQ ID NO: 3787
acauguuaaucugcuuaug

SEQ ID NO: 294619 - RNA, 19 nt, Artificial Sequence
  Description of Artificial Sequence: Synthetic oligonucleotide
  Antisense strand to SEQ ID NO: 294618
cauaagcagauuaacaugu

SEQ ID NO: 294620 - RNA, 19 nt, Artificial Sequence
  Description of Artificial Sequence: Synthetic oligonucleotide
  Sense strand starting at position 318 of SEQ ID NO: 3787
auguuaaucugcuuaugaa

SEQ ID NO: 294621 - RNA, 19 nt, Artificial Sequence
  Description of Artificial Sequence: Synthetic oligonucleotide
  Antisense strand to SEQ ID NO: 294620
uucauaagcagauuaacau

SEQ ID NO: 294622 - RNA, 19 nt, Artificial Sequence
  Description of Artificial Sequence: Synthetic oligonucleotide
  Sense strand starting at position 319 of SEQ ID NO: 3787
uguuaaucugcuuaugaaa

SEQ ID NO: 294623 - RNA, 19 nt, Artificial Sequence
  Description of Artificial Sequence: Synthetic oligonucleotide
  Antisense strand to SEQ ID NO: 294622
uuucauaagcagauuaaca

SEQ ID NO: 294624 - RNA, 19 nt, Artificial Sequence
  Description of Artificial Sequence: Synthetic oligonucleotide
  Sense strand starting at position 406 of SEQ ID NO: 3787
auagcuuaacauugguuua

SEQ ID NO: 294625 - RNA, 19 nt, Artificial Sequence
  Description of Artificial Sequence: Synthetic oligonucleotide
  Antisense strand to SEQ ID NO: 294624
uaaaccaauguuaagcuau

SEQ ID NO: 294626 - RNA, 19 nt, Artificial Sequence
  Description of Artificial Sequence: Synthetic oligonucleotide
  Sense strand starting at position 409 of SEQ ID NO: 3787
gcuuaacauugguuuaacu

SEQ ID NO: 294627 - RNA, 19 nt, Artificial Sequence
  Description of Artificial Sequence: Synthetic oligonucleotide
  Antisense strand to SEQ ID NO: 294626
aguuaaaccaauguuaagc

SEQ ID NO: 294628 - RNA, 19 nt, Artificial Sequence
  Description of Artificial Sequence: Synthetic oligonucleotide
  Sense strand starting at position 455 of SEQ ID NO: 3787
aagcauuuguuguagacua

SEQ ID NO: 294629 - RNA, 19 nt, Artificial Sequence
  Description of Artificial Sequence: Synthetic oligonucleotide
  Antisense strand to SEQ ID NO: 294628
uagucuacaacaaaugcuu

SEQ ID NO: 294630 - RNA, 19 nt, Artificial Sequence
  Description of Artificial Sequence: Synthetic oligonucleotide
  Sense strand starting at position 462 of SEQ ID NO: 3787
uguuguagacuauaccaaa

SEQ ID NO: 294631 - RNA, 19 nt, Artificial Sequence
  Description of Artificial Sequence: Synthetic oligonucleotide
  Antisense strand to SEQ ID NO: 294630
uuugguauagucuacaaca

SEQ ID NO: 294632 - RNA, 19 nt, Artificial Sequence
  Description of Artificial Sequence: Synthetic oligonucleotide
  Sense strand starting at position 653 of SEQ ID NO: 3787
uuccuauccuauugguauu

SEQ ID NO: 294633 - RNA, 19 nt, Artificial Sequence
  Description of Artificial Sequence: Synthetic oligonucleotide
  Antisense strand to SEQ ID NO: 294632
aauaccaauaggauaggaa

SEQ ID NO: 294634 - RNA, 19 nt, Artificial Sequence
  Description of Artificial Sequence: Synthetic oligonucleotide
  Sense strand starting at position 753 of SEQ ID NO: 3787
cugacuagcagucguaaua

SEQ ID NO: 294635 - RNA, 19 nt, Artificial Sequence
  Description of Artificial Sequence: Synthetic oligonucleotide
  Antisense strand to SEQ ID NO: 294634
uauuacgacugcuagucag

SEQ ID NO: 294636 - RNA, 19 nt, Artificial Sequence
  Description of Artificial Sequence: Synthetic oligonucleotide
  Sense strand starting at position 803 of SEQ ID NO: 3787
agcuauaaguauuguacua

SEQ ID NO: 294637 - RNA, 19 nt, Artificial Sequence
  Description of Artificial Sequence: Synthetic oligonucleotide
  Antisense strand to SEQ ID NO: 294636
uaguacaauacuuauagcu

SEQ ID NO: 294638 - RNA, 19 nt, Artificial Sequence
  Description of Artificial Sequence: Synthetic oligonucleotide
  Sense strand starting at position 805 of SEQ ID NO: 3787
cuauaaguauuguacuacu

SEQ ID NO: 294639 - RNA, 19 nt, Artificial Sequence
  Description of Artificial Sequence: Synthetic oligonucleotide
  Antisense strand to SEQ ID NO: 294638
aguaguacaauacuuauag

SEQ ID NO: 294640 - RNA, 19 nt, Artificial Sequence
  Description of Artificial Sequence: Synthetic oligonucleotide
  Sense strand starting at position 1106 of SEQ ID NO: 3787
gcaguaagauccuguaacg

SEQ ID NO: 294641 - RNA, 19 nt, Artificial Sequence
  Description of Artificial Sequence: Synthetic oligonucleotide
  Antisense strand to SEQ ID NO: 294640
cguuacaggaucuuacugc

SEQ ID NO: 294642 - RNA, 19 nt, Artificial Sequence
  Description of Artificial Sequence: Synthetic oligonucleotide
  Sense strand starting at position 1115 of SEQ ID NO: 3787
uccuguaacguccaacaga

SEQ ID NO: 294643 - RNA, 19 nt, Artificial Sequence
  Description of Artificial Sequence: Synthetic oligonucleotide
  Antisense strand to SEQ ID NO: 294642
ucuguuggacguuacagga

SEQ ID NO: 294644 - RNA, 19 nt, Artificial Sequence
  Description of Artificial Sequence: Synthetic oligonucleotide
  Sense strand starting at position 1177 of SEQ ID NO: 3787
ucuaguugauacuaucuau

SEQ ID NO: 294645 - RNA, 19 nt, Artificial Sequence
  Description of Artificial Sequence: Synthetic oligonucleotide
  Antisense strand to SEQ ID NO: 294644
auagauaguaucaacuaga

SEQ ID NO: 294646 - RNA, 19 nt, Artificial Sequence
  Description of Artificial Sequence: Synthetic oligonucleotide
  Sense strand starting at position 1184 of SEQ ID NO: 3787
gauacuaucuauggccgau

SEQ ID NO: 294647 - RNA, 19 nt, Artificial Sequence
  Description of Artificial Sequence: Synthetic oligonucleotide
  Antisense strand to SEQ ID NO: 294646
aucggccauagauaguauc

SEQ ID NO: 294648 - RNA, 19 nt, Artificial Sequence
  Description of Artificial Sequence: Synthetic oligonucleotide
  Sense strand starting at position 1198 of SEQ ID NO: 3787
ccgauaggcugugcuugaa

SEQ ID NO: 294649 - RNA, 19 nt, Artificial Sequence
  Description of Artificial Sequence: Synthetic oligonucleotide
  Antisense strand to SEQ ID NO: 294648
uucaagcacagccuaucgg

SEQ ID NO: 294650 - RNA, 19 nt, Artificial Sequence
  Description of Artificial Sequence: Synthetic oligonucleotide
  Sense strand starting at position 1222 of SEQ ID NO: 3787
uguaguguuaagcgaagga

SEQ ID NO: 294651 - RNA, 19 nt, Artificial Sequence
  Description of Artificial Sequence: Synthetic oligonucleotide
  Antisense strand to SEQ ID NO: 294650
uccuucgcuuaacacuaca

SEQ ID NO: 294652 - RNA, 19 nt, Artificial Sequence
  Description of Artificial Sequence: Synthetic oligonucleotide
  Sense strand starting at position 1226 of SEQ ID NO: 3787
guguuaagcgaaggaguuu

SEQ ID NO: 294653 - RNA, 19 nt, Artificial Sequence
  Description of Artificial Sequence: Synthetic oligonucleotide
  Antisense strand to SEQ ID NO: 294652
aaacuccuucgcuuaacac

SEQ ID NO: 294654 - RNA, 19 nt, Artificial Sequence
  Description of Artificial Sequence: Synthetic oligonucleotide
  Sense strand starting at position 1252 of SEQ ID NO: 3787
ugauaugaauugcucaaac

SEQ ID NO: 294655 - RNA, 19 nt, Artificial Sequence
  Description of Artificial Sequence: Synthetic oligonucleotide
  Antisense strand to SEQ ID NO: 294654
guuugagcaauucauauca

SEQ ID NO: 294656 - RNA, 19 nt, Artificial Sequence
  Description of Artificial Sequence: Synthetic oligonucleotide
  Sense strand starting at position 1332 of SEQ ID NO: 3787
aggugcugcagugacaauu

SEQ ID NO: 294657 - RNA, 19 nt, Artificial Sequence
  Description of Artificial Sequence: Synthetic oligonucleotide
  Antisense strand to SEQ ID NO: 294656
aauugucacugcagcaccu

SEQ ID NO: 294658 - RNA, 19 nt, Artificial Sequence
  Description of Artificial Sequence: Synthetic oligonucleotide
  Sense strand starting at position 1340 of SEQ ID NO: 3787
cagugacaauuucgagaaa

SEQ ID NO: 294659 - RNA, 19 nt, Artificial Sequence
  Description of Artificial Sequence: Synthetic oligonucleotide
  Antisense strand to SEQ ID NO: 294658
uuucucgaaauugucacug

SEQ ID NO: 294660 - RNA, 19 nt, Artificial Sequence
  Description of Artificial Sequence: Synthetic oligonucleotide
  Sense strand starting at position 1341 of SEQ ID NO: 3787
agugacaauuucgagaaag

SEQ ID NO: 294661 - RNA, 19 nt, Artificial Sequence
  Description of Artificial Sequence: Synthetic oligonucleotide
  Antisense strand to SEQ ID NO: 294660
cuuucucgaaauugucacu

SEQ ID NO: 294662 - RNA, 19 nt, Artificial Sequence
  Description of Artificial Sequence: Synthetic oligonucleotide
  Sense strand starting at position 1729 of SEQ ID NO: 3787
gccuuucgcacaggaagua

SEQ ID NO: 294663 - RNA, 19 nt, Artificial Sequence
  Description of Artificial Sequence: Synthetic oligonucleotide
  Antisense strand to SEQ ID NO: 294662
uacuuccugugcgaaaggc

SEQ ID NO: 294664 - RNA, 19 nt, Artificial Sequence
  Description of Artificial Sequence: Synthetic oligonucleotide
  Sense strand starting at position 2926 of SEQ ID NO: 3787
gcucucucggcuuuacgua

SEQ ID NO: 294665 - RNA, 19 nt, Artificial Sequence
  Description of Artificial Sequence: Synthetic oligonucleotide
  Antisense strand to SEQ ID NO: 294664
uacguaaagccgagagagc

SEQ ID NO: 294666 - RNA, 19 nt, Artificial Sequence
  Description of Artificial Sequence: Synthetic oligonucleotide
  Sense strand starting at position 2935 of SEQ ID NO: 3787
gcuuuacguaccggucaua

SEQ ID NO: 294667 - RNA, 19 nt, Artificial Sequence
  Description of Artificial Sequence: Synthetic oligonucleotide
  Antisense strand to SEQ ID NO: 294666
uaugaccgguacguaaagc

SEQ ID NO: 294668 - RNA, 19 nt, Artificial Sequence
  Description of Artificial Sequence: Synthetic oligonucleotide
  Sense strand starting at position 3522 of SEQ ID NO: 3787
gcagcagucuuggccggau

SEQ ID NO: 294669 - RNA, 19 nt, Artificial Sequence
  Description of Artificial Sequence: Synthetic oligonucleotide
  Antisense strand to SEQ ID NO: 294668
auccggccaagacugcugc

SEQ ID NO: 294670 - RNA, 19 nt, Artificial Sequence
  Description of Artificial Sequence: Synthetic oligonucleotide
  Sense strand starting at position 3936 of SEQ ID NO: 3787
uuacuugugguauguguau

SEQ ID NO: 294671 - RNA, 19 nt, Artificial Sequence
  Description of Artificial Sequence: Synthetic oligonucleotide
  Antisense strand to SEQ ID NO: 294670
auacacauaccacaaguaa

SEQ ID NO: 294672 - RNA, 19 nt, Artificial Sequence
  Description of Artificial Sequence: Synthetic oligonucleotide
  Sense strand starting at position 3942 of SEQ ID NO: 3787
gugguauguguauguauuc

SEQ ID NO: 294673 - RNA, 19 nt, Artificial Sequence
  Description of Artificial Sequence: Synthetic oligonucleotide
  Antisense strand to SEQ ID NO: 294672
gaauacauacacauaccac

SEQ ID NO: 294674 - RNA, 19 nt, Artificial Sequence
  Description of Artificial Sequence: Synthetic oligonucleotide
  Sense strand starting at position 3943 of SEQ ID NO: 3787
ugguauguguauguauuca

SEQ ID NO: 294675 - RNA, 19 nt, Artificial Sequence
  Description of Artificial Sequence: Synthetic oligonucleotide
  Antisense strand to SEQ ID NO: 294674
ugaauacauacacauacca

SEQ ID NO: 294676 - RNA, 19 nt, Artificial Sequence
  Description of Artificial Sequence: Synthetic oligonucleotide
  Sense strand starting at position 246 of SEQ ID NO: 3788
gccuuucgcacaggaagua

SEQ ID NO: 294677 - RNA, 19 nt, Artificial Sequence
  Description of Artificial Sequence: Synthetic oligonucleotide
  Antisense strand to SEQ ID NO: 294676
uacuuccugugcgaaaggc

SEQ ID NO: 294678 - RNA, 19 nt, Artificial Sequence
  Description of Artificial Sequence: Synthetic oligonucleotide
  Sense strand starting at position 1443 of SEQ ID NO: 3788
gcucucucggcuuuacgua

SEQ ID NO: 294679 - RNA, 19 nt, Artificial Sequence
  Description of Artificial Sequence: Synthetic oligonucleotide
  Antisense strand to SEQ ID NO: 294678
uacguaaagccgagagagc

SEQ ID NO: 294680 - RNA, 19 nt, Artificial Sequence
  Description of Artificial Sequence: Synthetic oligonucleotide
  Sense strand starting at position 2460 of SEQ ID NO: 3788
ugguauguguauguauuca

SEQ ID NO: 294681 - RNA, 19 nt, Artificial Sequence
  Description of Artificial Sequence: Synthetic oligonucleotide
  Antisense strand to SEQ ID NO: 294680
ugaauacauacacauacca

SEQ ID NO: 294682 - RNA, 19 nt, Artificial Sequence
  Description of Artificial Sequence: Synthetic oligonucleotide
  Sense strand starting at position 2686 of SEQ ID NO: 3788
uuguuucucuuacuggauu

SEQ ID NO: 294683 - RNA, 19 nt, Artificial Sequence
  Description of Artificial Sequence: Synthetic oligonucleotide
  Antisense strand to SEQ ID NO: 294682
aauccaguaagagaaacaa

SEQ ID NO: 294684 - RNA, 19 nt, Artificial Sequence
  Description of Artificial Sequence: Synthetic oligonucleotide
  Sense strand starting at position 2798 of SEQ ID NO: 3788
agagacaucucucccuguu

SEQ ID NO: 294685 - RNA, 19 nt, Artificial Sequence
  Description of Artificial Sequence: Synthetic oligonucleotide
  Antisense strand to SEQ ID NO: 294684
aacagggagagaugucucu

SEQ ID NO: 294686 - RNA, 19 nt, Artificial Sequence
  Description of Artificial Sequence: Synthetic oligonucleotide
  Sense strand starting at position 2822 of SEQ ID NO: 3788
caaguauaguugccaagaa

SEQ ID NO: 294687 - RNA, 19 nt, Artificial Sequence
  Description of Artificial Sequence: Synthetic oligonucleotide
  Antisense strand to SEQ ID NO: 294686
uucuuggcaacuauacuug

SEQ ID NO: 294688 - RNA, 19 nt, Artificial Sequence
  Description of Artificial Sequence: Synthetic oligonucleotide
  Sense strand starting at position 2860 of SEQ ID NO: 3788
uggaaacacuguccacaau

SEQ ID NO: 294689 - RNA, 19 nt, Artificial Sequence
  Description of Artificial Sequence: Synthetic oligonucleotide
  Antisense strand to SEQ ID NO: 294688
auuguggacaguguuucca

SEQ ID NO: 294690 - RNA, 19 nt, Artificial Sequence
  Description of Artificial Sequence: Synthetic oligonucleotide
  Sense strand starting at position 2888 of SEQ ID NO: 3788
uuagaaaucuggcucaaga

SEQ ID NO: 294691 - RNA, 19 nt, Artificial Sequence
  Description of Artificial Sequence: Synthetic oligonucleotide
  Antisense strand to SEQ ID NO: 294690
ucuugagccagauuucuaa

SEQ ID NO: 294692 - RNA, 19 nt, Artificial Sequence
  Description of Artificial Sequence: Synthetic oligonucleotide
  Sense strand starting at position 2914 of SEQ ID NO: 3788
uucccauuacugugauuau

SEQ ID NO: 294693 - RNA, 19 nt, Artificial Sequence
  Description of Artificial Sequence: Synthetic oligonucleotide
  Antisense strand to SEQ ID NO: 294692
auaaucacaguaaugggaa

SEQ ID NO: 294694 - RNA, 19 nt, Artificial Sequence
  Description of Artificial Sequence: Synthetic oligonucleotide
  Sense strand starting at position 2917 of SEQ ID NO: 3788
ccauuacugugauuauuau

SEQ ID NO: 294695 - RNA, 19 nt, Artificial Sequence
  Description of Artificial Sequence: Synthetic oligonucleotide
  Antisense strand to SEQ ID NO: 294694
auaauaaucacaguaaugg

SEQ ID NO: 294696 - RNA, 19 nt, Artificial Sequence
  Description of Artificial Sequence: Synthetic oligonucleotide
  Sense strand starting at position 2948 of SEQ ID NO: 3788
augugaugugcugguggau

SEQ ID NO: 294697 - RNA, 19 nt, Artificial Sequence
  Description of Artificial Sequence: Synthetic oligonucleotide
  Antisense strand to SEQ ID NO: 294696
auccaccagcacaucacau

SEQ ID NO: 294698 - RNA, 19 nt, Artificial Sequence
  Description of Artificial Sequence: Synthetic oligonucleotide
  Sense strand starting at position 3021 of SEQ ID NO: 3788
guaauccauuugugagaua

SEQ ID NO: 294699 - RNA, 19 nt, Artificial Sequence
  Description of Artificial Sequence: Synthetic oligonucleotide
  Antisense strand to SEQ ID NO: 294698
uaucucacaaauggauuac

SEQ ID NO: 294700 - RNA, 19 nt, Artificial Sequence
  Description of Artificial Sequence: Synthetic oligonucleotide
  Sense strand starting at position 3024 of SEQ ID NO: 3788
auccauuugugagauacug

SEQ ID NO: 294701 - RNA, 19 nt, Artificial Sequence
  Description of Artificial Sequence: Synthetic oligonucleotide
  Antisense strand to SEQ ID NO: 294700
caguaucucacaaauggau

SEQ ID NO: 294702 - RNA, 19 nt, Artificial Sequence
  Description of Artificial Sequence: Synthetic oligonucleotide
  Sense strand starting at position 3030 of SEQ ID NO: 3788
uugugagauacugaguuua

SEQ ID NO: 294703 - RNA, 19 nt, Artificial Sequence
  Description of Artificial Sequence: Synthetic oligonucleotide
  Antisense strand to SEQ ID NO: 294702
uaaacucaguaucucacaa

SEQ ID NO: 294704 - RNA, 19 nt, Artificial Sequence
  Description of Artificial Sequence: Synthetic oligonucleotide
  Sense strand starting at position 3032 of SEQ ID NO: 3788
gugagauacugaguuuaca

SEQ ID NO: 294705 - RNA, 19 nt, Artificial Sequence
  Description of Artificial Sequence: Synthetic oligonucleotide
  Antisense strand to SEQ ID NO: 294704
uguaaacucaguaucucac

SEQ ID NO: 294706 - RNA, 19 nt, Artificial Sequence
  Description of Artificial Sequence: Synthetic oligonucleotide
  Sense strand starting at position 3081 of SEQ ID NO: 3788
cugacaggaucagaaacau

SEQ ID NO: 294707 - RNA, 19 nt, Artificial Sequence
  Description of Artificial Sequence: Synthetic oligonucleotide
  Antisense strand to SEQ ID NO: 294706
auguuucugauccugucag

SEQ ID NO: 294708 - RNA, 19 nt, Artificial Sequence
  Description of Artificial Sequence: Synthetic oligonucleotide
  Sense strand starting at position 3103 of SEQ ID NO: 3788
augguuacuuugcucuuaa

SEQ ID NO: 294709 - RNA, 19 nt, Artificial Sequence
  Description of Artificial Sequence: Synthetic oligonucleotide
  Antisense strand to SEQ ID NO: 294708
uuaagagcaaaguaaccau

SEQ ID NO: 294710 - RNA, 19 nt, Artificial Sequence
  Description of Artificial Sequence: Synthetic oligonucleotide
  Sense strand starting at position 3104 of SEQ ID NO: 3788
ugguuacuuugcucuuaau

SEQ ID NO: 294711 - RNA, 19 nt, Artificial Sequence
  Description of Artificial Sequence: Synthetic oligonucleotide
  Antisense strand to SEQ ID NO: 294710
auuaagagcaaaguaacca

SEQ ID NO: 294712 - RNA, 19 nt, Artificial Sequence
  Description of Artificial Sequence: Synthetic oligonucleotide
  Sense strand starting at position 3218 of SEQ ID NO: 3788
uucuaauaguccuuguagu

SEQ ID NO: 294713 - RNA, 19 nt, Artificial Sequence
  Description of Artificial Sequence: Synthetic oligonucleotide
  Antisense strand to SEQ ID NO: 294712
acuacaaggacuauuagaa

SEQ ID NO: 294714 - RNA, 19 nt, Artificial Sequence
  Description of Artificial Sequence: Synthetic oligonucleotide
  Sense strand starting at position 3219 of SEQ ID NO: 3788
ucuaauaguccuuguaguc

SEQ ID NO: 294715 - RNA, 19 nt, Artificial Sequence
  Description of Artificial Sequence: Synthetic oligonucleotide
  Antisense strand to SEQ ID NO: 294714
gacuacaaggacuauuaga

SEQ ID NO: 294716 - RNA, 19 nt, Artificial Sequence
  Description of Artificial Sequence: Synthetic oligonucleotide
  Sense strand starting at position 3224 of SEQ ID NO: 3788
uaguccuuguagucucaua

SEQ ID NO: 294717 - RNA, 19 nt, Artificial Sequence
  Description of Artificial Sequence: Synthetic oligonucleotide
  Antisense strand to SEQ ID NO: 294716
uaugagacuacaaggacua

SEQ ID NO: 294718 - RNA, 19 nt, Artificial Sequence
  Description of Artificial Sequence: Synthetic oligonucleotide
  Sense strand starting at position 3229 of SEQ ID NO: 3788
cuuguagucucauauuuaa

SEQ ID NO: 294719 - RNA, 19 nt, Artificial Sequence
  Description of Artificial Sequence: Synthetic oligonucleotide
  Antisense strand to SEQ ID NO: 294718
uuaaauaugagacuacaag

SEQ ID NO: 294720 - RNA, 19 nt, Artificial Sequence
  Description of Artificial Sequence: Synthetic oligonucleotide
  Sense strand starting at position 3267 of SEQ ID NO: 3788
aguugagucguauaaccua

SEQ ID NO: 294721 - RNA, 19 nt, Artificial Sequence
  Description of Artificial Sequence: Synthetic oligonucleotide
  Antisense strand to SEQ ID NO: 294720
uagguuauacgacucaacu

SEQ ID NO: 294722 - RNA, 19 nt, Artificial Sequence
  Description of Artificial Sequence: Synthetic oligonucleotide
  Sense strand starting at position 3272 of SEQ ID NO: 3788
agucguauaaccuauguac

SEQ ID NO: 294723 - RNA, 19 nt, Artificial Sequence
  Description of Artificial Sequence: Synthetic oligonucleotide
  Antisense strand to SEQ ID NO: 294722
guacauagguuauacgacu

SEQ ID NO: 294724 - RNA, 19 nt, Artificial Sequence
  Description of Artificial Sequence: Synthetic oligonucleotide
  Sense strand starting at position 3274 of SEQ ID NO: 3788
ucguauaaccuauguacua

SEQ ID NO: 294725 - RNA, 19 nt, Artificial Sequence
  Description of Artificial Sequence: Synthetic oligonucleotide
  Antisense strand to SEQ ID NO: 294724
uaguacauagguuauacga

SEQ ID NO: 294726 - RNA, 19 nt, Artificial Sequence
  Description of Artificial Sequence: Synthetic oligonucleotide
  Sense strand starting at position 3275 of SEQ ID NO: 3788
cguauaaccuauguacuau

SEQ ID NO: 294727 - RNA, 19 nt, Artificial Sequence
  Description of Artificial Sequence: Synthetic oligonucleotide
  Antisense strand to SEQ ID NO: 294726
auaguacauagguuauacg

SEQ ID NO: 294728 - RNA, 19 nt, Artificial Sequence
  Description of Artificial Sequence: Synthetic oligonucleotide
  Sense strand starting at position 3451 of SEQ ID NO: 3788
cccggaucucuugggugga

SEQ ID NO: 294729 - RNA, 19 nt, Artificial Sequence
  Description of Artificial Sequence: Synthetic oligonucleotide
  Antisense strand to SEQ ID NO: 294728
uccacccaagagauccggg

SEQ ID NO: 294730 - RNA, 19 nt, Artificial Sequence
  Description of Artificial Sequence: Synthetic oligonucleotide
  Sense strand starting at position 3468 of SEQ ID NO: 3788
gaagguagcucuuucccua

SEQ ID NO: 294731 - RNA, 19 nt, Artificial Sequence
  Description of Artificial Sequence: Synthetic oligonucleotide
  Antisense strand to SEQ ID NO: 294730
uagggaaagagcuaccuuc

SEQ ID NO: 294732 - RNA, 19 nt, Artificial Sequence
  Description of Artificial Sequence: Synthetic oligonucleotide
  Sense strand starting at position 3471 of SEQ ID NO: 3788
gguagcucuuucccuagaa

SEQ ID NO: 294733 - RNA, 19 nt, Artificial Sequence
  Description of Artificial Sequence: Synthetic oligonucleotide
  Antisense strand to SEQ ID NO: 294732
uucuagggaaagagcuacc

SEQ ID NO: 294734 - RNA, 19 nt, Artificial Sequence
  Description of Artificial Sequence: Synthetic oligonucleotide
  Sense strand starting at position 3472 of SEQ ID NO: 3788
guagcucuuucccuagaaa

SEQ ID NO: 294735 - RNA, 19 nt, Artificial Sequence
  Description of Artificial Sequence: Synthetic oligonucleotide
  Antisense strand to SEQ ID NO: 294734
uuucuagggaaagagcuac

SEQ ID NO: 294736 - RNA, 19 nt, Artificial Sequence
  Description of Artificial Sequence: Synthetic oligonucleotide
  Sense strand starting at position 3475 of SEQ ID NO: 3788
gcucuuucccuagaaagga

SEQ ID NO: 294737 - RNA, 19 nt, Artificial Sequence
  Description of Artificial Sequence: Synthetic oligonucleotide
  Antisense strand to SEQ ID NO: 294736
uccuuucuagggaaagagc

SEQ ID NO: 294738 - RNA, 19 nt, Artificial Sequence
  Description of Artificial Sequence: Synthetic oligonucleotide
  Sense strand starting at position 3541 of SEQ ID NO: 3788
ggauauguucuacgcuauc

SEQ ID NO: 294739 - RNA, 19 nt, Artificial Sequence
  Description of Artificial Sequence: Synthetic oligonucleotide
  Antisense strand to SEQ ID NO: 294738
gauagcguagaacauaucc

SEQ ID NO: 294740 - RNA, 19 nt, Artificial Sequence
  Description of Artificial Sequence: Synthetic oligonucleotide
  Sense strand starting at position 3591 of SEQ ID NO: 3788
ccaccuugagagcaaagua

SEQ ID NO: 294741 - RNA, 19 nt, Artificial Sequence
  Description of Artificial Sequence: Synthetic oligonucleotide
  Antisense strand to SEQ ID NO: 294740
uacuuugcucucaaggugg

SEQ ID NO: 294742 - RNA, 19 nt, Artificial Sequence
  Description of Artificial Sequence: Synthetic oligonucleotide
  Sense strand starting at position 3619 of SEQ ID NO: 3788
aggaguuaaauucguuucu

SEQ ID NO: 294743 - RNA, 19 nt, Artificial Sequence
  Description of Artificial Sequence: Synthetic oligonucleotide
  Antisense strand to SEQ ID NO: 294742
agaaacgaauuuaacuccu

SEQ ID NO: 294744 - RNA, 19 nt, Artificial Sequence
  Description of Artificial Sequence: Synthetic oligonucleotide
  Sense strand starting at position 3620 of SEQ ID NO: 3788
ggaguuaaauucguuucuu

SEQ ID NO: 294745 - RNA, 19 nt, Artificial Sequence
  Description of Artificial Sequence: Synthetic oligonucleotide
  Antisense strand to SEQ ID NO: 294744
aagaaacgaauuuaacucc

SEQ ID NO: 294746 - RNA, 19 nt, Artificial Sequence
  Description of Artificial Sequence: Synthetic oligonucleotide
  Sense strand starting at position 3621 of SEQ ID NO: 3788
gaguuaaauucguuucuuc

SEQ ID NO: 294747 - RNA, 19 nt, Artificial Sequence
  Description of Artificial Sequence: Synthetic oligonucleotide
  Antisense strand to SEQ ID NO: 294746
gaagaaacgaauuuaacuc

SEQ ID NO: 294748 - RNA, 19 nt, Artificial Sequence
  Description of Artificial Sequence: Synthetic oligonucleotide
  Sense strand starting at position 3650 of SEQ ID NO: 3788
auuggcaaaugauaugaga

SEQ ID NO: 294749 - RNA, 19 nt, Artificial Sequence
  Description of Artificial Sequence: Synthetic oligonucleotide
  Antisense strand to SEQ ID NO: 294748
ucucauaucauuugccaau

SEQ ID NO: 294750 - RNA, 19 nt, Artificial Sequence
  Description of Artificial Sequence: Synthetic oligonucleotide
  Sense strand starting at position 3653 of SEQ ID NO: 3788
ggcaaaugauaugagacau

SEQ ID NO: 294751 - RNA, 19 nt, Artificial Sequence
  Description of Artificial Sequence: Synthetic oligonucleotide
  Antisense strand to SEQ ID NO: 294750
augucucauaucauuugcc

SEQ ID NO: 294752 - RNA, 19 nt, Artificial Sequence
  Description of Artificial Sequence: Synthetic oligonucleotide
  Sense strand starting at position 3860 of SEQ ID NO: 3788
gccugauugccauggugaa

SEQ ID NO: 294753 - RNA, 19 nt, Artificial Sequence
  Description of Artificial Sequence: Synthetic oligonucleotide
  Antisense strand to SEQ ID NO: 294752
uucaccauggcaaucaggc

SEQ ID NO: 294754 - RNA, 19 nt, Artificial Sequence
  Description of Artificial Sequence: Synthetic oligonucleotide
  Sense strand starting at position 3861 of SEQ ID NO: 3788
ccugauugccauggugaaa

SEQ ID NO: 294755 - RNA, 19 nt, Artificial Sequence
  Description of Artificial Sequence: Synthetic oligonucleotide
  Antisense strand to SEQ ID NO: 294754
uuucaccauggcaaucagg

SEQ ID NO: 294756 - RNA, 19 nt, Artificial Sequence
  Description of Artificial Sequence: Synthetic oligonucleotide
  Sense strand starting at position 1293 of SEQ ID NO: 3789
ccgcgagcgcuucuugcua

SEQ ID NO: 294757 - RNA, 19 nt, Artificial Sequence
  Description of Artificial Sequence: Synthetic oligonucleotide
  Antisense strand to SEQ ID NO: 294756
uagcaagaagcgcucgcgg

SEQ ID NO: 294758 - RNA, 19 nt, Artificial Sequence
  Description of Artificial Sequence: Synthetic oligonucleotide
  Sense strand starting at position 1295 of SEQ ID NO: 3789
gcgagcgcuucuugcuaaa

SEQ ID NO: 294759 - RNA, 19 nt, Artificial Sequence
  Description of Artificial Sequence: Synthetic oligonucleotide
  Antisense strand to SEQ ID NO: 294758
uuuagcaagaagcgcucgc

SEQ ID NO: 294760 - RNA, 19 nt, Artificial Sequence
  Description of Artificial Sequence: Synthetic oligonucleotide
  Sense strand starting at position 1297 of SEQ ID NO: 3789
gagcgcuucuugcuaaacu

SEQ ID NO: 294761 - RNA, 19 nt, Artificial Sequence
  Description of Artificial Sequence: Synthetic oligonucleotide
  Antisense strand to SEQ ID NO: 294760
aguuuagcaagaagcgcuc

SEQ ID NO: 294762 - RNA, 19 nt, Artificial Sequence
  Description of Artificial Sequence: Synthetic oligonucleotide
  Sense strand starting at position 1298 of SEQ ID NO: 3789
agcgcuucuugcuaaacua

SEQ ID NO: 294763 - RNA, 19 nt, Artificial Sequence
  Description of Artificial Sequence: Synthetic oligonucleotide
  Antisense strand to SEQ ID NO: 294762
uaguuuagcaagaagcgcu

SEQ ID NO: 294764 - RNA, 19 nt, Artificial Sequence
  Description of Artificial Sequence: Synthetic oligonucleotide
  Sense strand starting at position 1397 of SEQ ID NO: 3789
ggcuccguggucaguaaga

SEQ ID NO: 294765 - RNA, 19 nt, Artificial Sequence
  Description of Artificial Sequence: Synthetic oligonucleotide
  Antisense strand to SEQ ID NO: 294764
ucuuacugaccacggagcc

SEQ ID NO: 294766 - RNA, 19 nt, Artificial Sequence
  Description of Artificial Sequence: Synthetic oligonucleotide
  Sense strand starting at position 1399 of SEQ ID NO: 3789
cuccguggucaguaagagu

SEQ ID NO: 294767 - RNA, 19 nt, Artificial Sequence
  Description of Artificial Sequence: Synthetic oligonucleotide
  Antisense strand to SEQ ID NO: 294766
acucuuacugaccacggag

SEQ ID NO: 294768 - RNA, 19 nt, Artificial Sequence
  Description of Artificial Sequence: Synthetic oligonucleotide
  Sense strand starting at position 1406 of SEQ ID NO: 3789
gucaguaagagucgggaaa

SEQ ID NO: 294769 - RNA, 19 nt, Artificial Sequence
  Description of Artificial Sequence: Synthetic oligonucleotide
  Antisense strand to SEQ ID NO: 294768
uuucccgacucuuacugac

SEQ ID NO: 294770 - RNA, 19 nt, Artificial Sequence
  Description of Artificial Sequence: Synthetic oligonucleotide
  Sense strand starting at position 1408 of SEQ ID NO: 3789
caguaagagucgggaaaca

SEQ ID NO: 294771 - RNA, 19 nt, Artificial Sequence
  Description of Artificial Sequence: Synthetic oligonucleotide
  Antisense strand to SEQ ID NO: 294770
uguuucccgacucuuacug

SEQ ID NO: 294772 - RNA, 19 nt, Artificial Sequence
  Description of Artificial Sequence: Synthetic oligonucleotide
  Sense strand starting at position 1625 of SEQ ID NO: 3789
ccggauuaggugugaaguu

SEQ ID NO: 294773 - RNA, 19 nt, Artificial Sequence
  Description of Artificial Sequence: Synthetic oligonucleotide
  Antisense strand to SEQ ID NO: 294772
aacuucacaccuaauccgg

SEQ ID NO: 294774 - RNA, 19 nt, Artificial Sequence
  Description of Artificial Sequence: Synthetic oligonucleotide
  Sense strand starting at position 1775 of SEQ ID NO: 3789
cggcccugaccuggagaaa

SEQ ID NO: 294775 - RNA, 19 nt, Artificial Sequence
  Description of Artificial Sequence: Synthetic oligonucleotide
  Antisense strand to SEQ ID NO: 294774
uuucuccaggucagggccg

SEQ ID NO: 294776 - RNA, 19 nt, Artificial Sequence
  Description of Artificial Sequence: Synthetic oligonucleotide
  Sense strand starting at position 2034 of SEQ ID NO: 3789
agaauuugauaaggacuuu

SEQ ID NO: 294777 - RNA, 19 nt, Artificial Sequence
  Description of Artificial Sequence: Synthetic oligonucleotide
  Antisense strand to SEQ ID NO: 294776
aaaguccuuaucaaauucu

SEQ ID NO: 294778 - RNA, 19 nt, Artificial Sequence
  Description of Artificial Sequence: Synthetic oligonucleotide
  Sense strand starting at position 2074 of SEQ ID NO: 3789
agggaagauuuauggcuuu

SEQ ID NO: 294779 - RNA, 19 nt, Artificial Sequence
  Description of Artificial Sequence: Synthetic oligonucleotide
  Antisense strand to SEQ ID NO: 294778
aaagccauaaaucuucccu

SEQ ID NO: 294780 - RNA, 19 nt, Artificial Sequence
  Description of Artificial Sequence: Synthetic oligonucleotide
  Sense strand starting at position 2081 of SEQ ID NO: 3789
auuuauggcuuugaaguuu

SEQ ID NO: 294781 - RNA, 19 nt, Artificial Sequence
  Description of Artificial Sequence: Synthetic oligonucleotide
  Antisense strand to SEQ ID NO: 294780
aaacuucaaagccauaaau

SEQ ID NO: 294782 - RNA, 19 nt, Artificial Sequence
  Description of Artificial Sequence: Synthetic oligonucleotide
  Sense strand starting at position 2093 of SEQ ID NO: 3789
gaaguuugccgcuacccaa

SEQ ID NO: 294783 - RNA, 19 nt, Artificial Sequence
  Description of Artificial Sequence: Synthetic oligonucleotide
  Antisense strand to SEQ ID NO: 294782
uuggguagcggcaaacuuc

SEQ ID NO: 294784 - RNA, 19 nt, Artificial Sequence
  Description of Artificial Sequence: Synthetic oligonucleotide
  Sense strand starting at position 2125 of SEQ ID NO: 3789
gcggcucuuucagaagcga

SEQ ID NO: 294785 - RNA, 19 nt, Artificial Sequence
  Description of Artificial Sequence: Synthetic oligonucleotide
  Antisense strand to SEQ ID NO: 294784
ucgcuucugaaagagccgc

SEQ ID NO: 294786 - RNA, 19 nt, Artificial Sequence
  Description of Artificial Sequence: Synthetic oligonucleotide
  Sense strand starting at position 2177 of SEQ ID NO: 3789
guguguuuguuggucugga

SEQ ID NO: 294787 - RNA, 19 nt, Artificial Sequence
  Description of Artificial Sequence: Synthetic oligonucleotide
  Antisense strand to SEQ ID NO: 294786
uccagaccaacaaacacac

SEQ ID NO: 294788 - RNA, 19 nt, Artificial Sequence
  Description of Artificial Sequence: Synthetic oligonucleotide
  Sense strand starting at position 2178 of SEQ ID NO: 3789
uguguuuguuggucuggau

SEQ ID NO: 294789 - RNA, 19 nt, Artificial Sequence
  Description of Artificial Sequence: Synthetic oligonucleotide
  Antisense strand to SEQ ID NO: 294788
auccagaccaacaaacaca

SEQ ID NO: 294790 - RNA, 19 nt, Artificial Sequence
  Description of Artificial Sequence: Synthetic oligonucleotide
  Sense strand starting at position 2181 of SEQ ID NO: 3789
guuuguuggucuggauaaa

SEQ ID NO: 294791 - RNA, 19 nt, Artificial Sequence
  Description of Artificial Sequence: Synthetic oligonucleotide
  Antisense strand to SEQ ID NO: 294790
uuuauccagaccaacaaac

SEQ ID NO: 294792 - RNA, 19 nt, Artificial Sequence
  Description of Artificial Sequence: Synthetic oligonucleotide
  Sense strand starting at position 2242 of SEQ ID NO: 3789
cgggacaauuaaugaagua

SEQ ID NO: 294793 - RNA, 19 nt, Artificial Sequence
  Description of Artificial Sequence: Synthetic oligonucleotide
  Antisense strand to SEQ ID NO: 294792
uacuucauuaauugucccg

SEQ ID NO: 294794 - RNA, 19 nt, Artificial Sequence
  Description of Artificial Sequence: Synthetic oligonucleotide
  Sense strand starting at position 2256 of SEQ ID NO: 3789
aaguaaucacuauguggga

SEQ ID NO: 294795 - RNA, 19 nt, Artificial Sequence
  Description of Artificial Sequence: Synthetic oligonucleotide
  Antisense strand to SEQ ID NO: 294794
ucccacauagugauuacuu

SEQ ID NO: 294796 - RNA, 19 nt, Artificial Sequence
  Description of Artificial Sequence: Synthetic oligonucleotide
  Sense strand starting at position 2257 of SEQ ID NO: 3789
aguaaucacuaugugggaa

SEQ ID NO: 294797 - RNA, 19 nt, Artificial Sequence
  Description of Artificial Sequence: Synthetic oligonucleotide
  Antisense strand to SEQ ID NO: 294796
uucccacauagugauuacu

SEQ ID NO: 294798 - RNA, 19 nt, Artificial Sequence
  Description of Artificial Sequence: Synthetic oligonucleotide
  Sense strand starting at position 2258 of SEQ ID NO: 3789
guaaucacuaugugggaaa

SEQ ID NO: 294799 - RNA, 19 nt, Artificial Sequence
  Description of Artificial Sequence: Synthetic oligonucleotide
  Antisense strand to SEQ ID NO: 294798
uuucccacauagugauuac

SEQ ID NO: 294800 - RNA, 19 nt, Artificial Sequence
  Description of Artificial Sequence: Synthetic oligonucleotide
  Sense strand starting at position 2261 of SEQ ID NO: 3789
aucacuaugugggaaaugu

SEQ ID NO: 294801 - RNA, 19 nt, Artificial Sequence
  Description of Artificial Sequence: Synthetic oligonucleotide
  Antisense strand to SEQ ID NO: 294800
acauuucccacauagugau

SEQ ID NO: 294802 - RNA, 19 nt, Artificial Sequence
  Description of Artificial Sequence: Synthetic oligonucleotide
  Sense strand starting at position 2265 of SEQ ID NO: 3789
cuaugugggaaauguauau

SEQ ID NO: 294803 - RNA, 19 nt, Artificial Sequence
  Description of Artificial Sequence: Synthetic oligonucleotide
  Antisense strand to SEQ ID NO: 294802
auauacauuucccacauag

SEQ ID NO: 294804 - RNA, 19 nt, Artificial Sequence
  Description of Artificial Sequence: Synthetic oligonucleotide
  Sense strand starting at position 2440 of SEQ ID NO: 3789
gugacaaagugucuuuguu

SEQ ID NO: 294805 - RNA, 19 nt, Artificial Sequence
  Description of Artificial Sequence: Synthetic oligonucleotide
  Antisense strand to SEQ ID NO: 294804
aacaaagacacuuugucac

SEQ ID NO: 294806 - RNA, 19 nt, Artificial Sequence
  Description of Artificial Sequence: Synthetic oligonucleotide
  Sense strand starting at position 2442 of SEQ ID NO: 3789
gacaaagugucuuuguuau

SEQ ID NO: 294807 - RNA, 19 nt, Artificial Sequence
  Description of Artificial Sequence: Synthetic oligonucleotide
  Antisense strand to SEQ ID NO: 294806
auaacaaagacacuuuguc

SEQ ID NO: 294808 - RNA, 19 nt, Artificial Sequence
  Description of Artificial Sequence: Synthetic oligonucleotide
  Sense strand starting at position 2449 of SEQ ID NO: 3789
ugucuuuguuaucucugga

SEQ ID NO: 294809 - RNA, 19 nt, Artificial Sequence
  Description of Artificial Sequence: Synthetic oligonucleotide
  Antisense strand to SEQ ID NO: 294808
uccagagauaacaaagaca

SEQ ID NO: 294810 - RNA, 19 nt, Artificial Sequence
  Description of Artificial Sequence: Synthetic oligonucleotide
  Sense strand starting at position 2494 of SEQ ID NO: 3789
cggacuuugagacggcaaa

SEQ ID NO: 294811 - RNA, 19 nt, Artificial Sequence
  Description of Artificial Sequence: Synthetic oligonucleotide
  Antisense strand to SEQ ID NO: 294810
uuugccgucucaaaguccg

SEQ ID NO: 294812 - RNA, 19 nt, Artificial Sequence
  Description of Artificial Sequence: Synthetic oligonucleotide
  Sense strand starting at position 2526 of SEQ ID NO: 3789
cccuguauuuacuugcaca

SEQ ID NO: 294813 - RNA, 19 nt, Artificial Sequence
  Description of Artificial Sequence: Synthetic oligonucleotide
  Antisense strand to SEQ ID NO: 294812
ugugcaaguaaauacaggg

SEQ ID NO: 294814 - RNA, 19 nt, Artificial Sequence
  Description of Artificial Sequence: Synthetic oligonucleotide
  Sense strand starting at position 3009 of SEQ ID NO: 3789
ggugauuucucgcccggag

SEQ ID NO: 294815 - RNA, 19 nt, Artificial Sequence
  Description of Artificial Sequence: Synthetic oligonucleotide
  Antisense strand to SEQ ID NO: 294814
cuccgggcgagaaaucacc

SEQ ID NO: 294816 - RNA, 19 nt, Artificial Sequence
  Description of Artificial Sequence: Synthetic oligonucleotide
  Sense strand starting at position 3680 of SEQ ID NO: 3789
ugaccuaucucccgaugca

SEQ ID NO: 294817 - RNA, 19 nt, Artificial Sequence
  Description of Artificial Sequence: Synthetic oligonucleotide
  Antisense strand to SEQ ID NO: 294816
ugcaucgggagauagguca

SEQ ID NO: 294818 - RNA, 19 nt, Artificial Sequence
  Description of Artificial Sequence: Synthetic oligonucleotide
  Sense strand starting at position 3693 of SEQ ID NO: 3789
gaugcagcgucagagguua

SEQ ID NO: 294819 - RNA, 19 nt, Artificial Sequence
  Description of Artificial Sequence: Synthetic oligonucleotide
  Antisense strand to SEQ ID NO: 294818
uaaccucugacgcugcauc

SEQ ID NO: 294820 - RNA, 19 nt, Artificial Sequence
  Description of Artificial Sequence: Synthetic oligonucleotide
  Sense strand starting at position 3701 of SEQ ID NO: 3789
gucagagguuagccuaacu

SEQ ID NO: 294821 - RNA, 19 nt, Artificial Sequence
  Description of Artificial Sequence: Synthetic oligonucleotide
  Antisense strand to SEQ ID NO: 294820
aguuaggcuaaccucugac

SEQ ID NO: 294822 - RNA, 19 nt, Artificial Sequence
  Description of Artificial Sequence: Synthetic oligonucleotide
  Sense strand starting at position 3730 of SEQ ID NO: 3789
cggaaucuggacuguauaa

SEQ ID NO: 294823 - RNA, 19 nt, Artificial Sequence
  Description of Artificial Sequence: Synthetic oligonucleotide
  Antisense strand to SEQ ID NO: 294822
uuauacaguccagauuccg

SEQ ID NO: 294824 - RNA, 19 nt, Artificial Sequence
  Description of Artificial Sequence: Synthetic oligonucleotide
  Sense strand starting at position 3822 of SEQ ID NO: 3789
gcgccugcggaaugagaau

SEQ ID NO: 294825 - RNA, 19 nt, Artificial Sequence
  Description of Artificial Sequence: Synthetic oligonucleotide
  Antisense strand to SEQ ID NO: 294824
auucucauuccgcaggcgc

SEQ ID NO: 294826 - RNA, 19 nt, Artificial Sequence
  Description of Artificial Sequence: Synthetic oligonucleotide
  Sense strand starting at position 3828 of SEQ ID NO: 3789
gcggaaugagaauaucgua

SEQ ID NO: 294827 - RNA, 19 nt, Artificial Sequence
  Description of Artificial Sequence: Synthetic oligonucleotide
  Antisense strand to SEQ ID NO: 294826
uacgauauucucauuccgc

SEQ ID NO: 294828 - RNA, 19 nt, Artificial Sequence
  Description of Artificial Sequence: Synthetic oligonucleotide
  Sense strand starting at position 3831 of SEQ ID NO: 3789
gaaugagaauaucguacuc

SEQ ID NO: 294829 - RNA, 19 nt, Artificial Sequence
  Description of Artificial Sequence: Synthetic oligonucleotide
  Antisense strand to SEQ ID NO: 294828
gaguacgauauucucauuc

SEQ ID NO: 294830 - RNA, 19 nt, Artificial Sequence
  Description of Artificial Sequence: Synthetic oligonucleotide
  Sense strand starting at position 3833 of SEQ ID NO: 3789
augagaauaucguacucaa

SEQ ID NO: 294831 - RNA, 19 nt, Artificial Sequence
  Description of Artificial Sequence: Synthetic oligonucleotide
  Antisense strand to SEQ ID NO: 294830
uugaguacgauauucucau

SEQ ID NO: 294832 - RNA, 19 nt, Artificial Sequence
  Description of Artificial Sequence: Synthetic oligonucleotide
  Sense strand starting at position 3836 of SEQ ID NO: 3789
agaauaucguacucaagac

SEQ ID NO: 294833 - RNA, 19 nt, Artificial Sequence
  Description of Artificial Sequence: Synthetic oligonucleotide
  Antisense strand to SEQ ID NO: 294832
gucuugaguacgauauucu

SEQ ID NO: 294834 - RNA, 19 nt, Artificial Sequence
  Description of Artificial Sequence: Synthetic oligonucleotide
  Sense strand starting at position 3979 of SEQ ID NO: 3789
cgaucuggcuucugaagau

SEQ ID NO: 294835 - RNA, 19 nt, Artificial Sequence
  Description of Artificial Sequence: Synthetic oligonucleotide
  Antisense strand to SEQ ID NO: 294834
aucuucagaagccagaucg

SEQ ID NO: 294836 - RNA, 19 nt, Artificial Sequence
  Description of Artificial Sequence: Synthetic oligonucleotide
  Sense strand starting at position 1213 of SEQ ID NO: 3790
cuucgcugaggcuauaaau

SEQ ID NO: 294837 - RNA, 19 nt, Artificial Sequence
  Description of Artificial Sequence: Synthetic oligonucleotide
  Antisense strand to SEQ ID NO: 294836
auuuauagccucagcgaag

SEQ ID NO: 294838 - RNA, 19 nt, Artificial Sequence
  Description of Artificial Sequence: Synthetic oligonucleotide
  Sense strand starting at position 1232 of SEQ ID NO: 3790
caaagaugccuccguguuc

SEQ ID NO: 294839 - RNA, 19 nt, Artificial Sequence
  Description of Artificial Sequence: Synthetic oligonucleotide
  Antisense strand to SEQ ID NO: 294838
gaacacggaggcaucuuug

SEQ ID NO: 294840 - RNA, 19 nt, Artificial Sequence
  Description of Artificial Sequence: Synthetic oligonucleotide
  Sense strand starting at position 1279 of SEQ ID NO: 3790
uuggguugucgccguaaac

SEQ ID NO: 294841 - RNA, 19 nt, Artificial Sequence
  Description of Artificial Sequence: Synthetic oligonucleotide
  Antisense strand to SEQ ID NO: 294840
guuuacggcgacaacccaa

SEQ ID NO: 294842 - RNA, 19 nt, Artificial Sequence
  Description of Artificial Sequence: Synthetic oligonucleotide
  Sense strand starting at position 1558 of SEQ ID NO: 3790
auuucaaagucaugggcga

SEQ ID NO: 294843 - RNA, 19 nt, Artificial Sequence
  Description of Artificial Sequence: Synthetic oligonucleotide
  Antisense strand to SEQ ID NO: 294842
ucgcccaugacuuugaaau

SEQ ID NO: 294844 - RNA, 19 nt, Artificial Sequence
  Description of Artificial Sequence: Synthetic oligonucleotide
  Sense strand starting at position 1589 of SEQ ID NO: 3790
cggaaauguaaauguuuau

SEQ ID NO: 294845 - RNA, 19 nt, Artificial Sequence
  Description of Artificial Sequence: Synthetic oligonucleotide
  Antisense strand to SEQ ID NO: 294844
auaaacauuuacauuuccg

SEQ ID NO: 294846 - RNA, 19 nt, Artificial Sequence
  Description of Artificial Sequence: Synthetic oligonucleotide
  Sense strand starting at position 1595 of SEQ ID NO: 3790
uguaaauguuuauuagcgu

SEQ ID NO: 294847 - RNA, 19 nt, Artificial Sequence
  Description of Artificial Sequence: Synthetic oligonucleotide
  Antisense strand to SEQ ID NO: 294846
acgcuaauaaacauuuaca

SEQ ID NO: 294848 - RNA, 19 nt, Artificial Sequence
  Description of Artificial Sequence: Synthetic oligonucleotide
  Sense strand starting at position 1601 of SEQ ID NO: 3790
uguuuauuagcgugacuag

SEQ ID NO: 294849 - RNA, 19 nt, Artificial Sequence
  Description of Artificial Sequence: Synthetic oligonucleotide
  Antisense strand to SEQ ID NO: 294848
cuagucacgcuaauaaaca

SEQ ID NO: 294850 - RNA, 19 nt, Artificial Sequence
  Description of Artificial Sequence: Synthetic oligonucleotide
  Sense strand starting at position 1602 of SEQ ID NO: 3790
guuuauuagcgugacuaga

SEQ ID NO: 294851 - RNA, 19 nt, Artificial Sequence
  Description of Artificial Sequence: Synthetic oligonucleotide
  Antisense strand to SEQ ID NO: 294850
ucuagucacgcuaauaaac

SEQ ID NO: 294852 - RNA, 19 nt, Artificial Sequence
  Description of Artificial Sequence: Synthetic oligonucleotide
  Sense strand starting at position 1604 of SEQ ID NO: 3790
uuauuagcgugacuagaug

SEQ ID NO: 294853 - RNA, 19 nt, Artificial Sequence
  Description of Artificial Sequence: Synthetic oligonucleotide
  Antisense strand to SEQ ID NO: 294852
caucuagucacgcuaauaa

SEQ ID NO: 294854 - RNA, 19 nt, Artificial Sequence
  Description of Artificial Sequence: Synthetic oligonucleotide
  Sense strand starting at position 1652 of SEQ ID NO: 3790
gaaacaccauugucgcaua

SEQ ID NO: 294855 - RNA, 19 nt, Artificial Sequence
  Description of Artificial Sequence: Synthetic oligonucleotide
  Antisense strand to SEQ ID NO: 294854
uaugcgacaaugguguuuc

SEQ ID NO: 294856 - RNA, 19 nt, Artificial Sequence
  Description of Artificial Sequence: Synthetic oligonucleotide
  Sense strand starting at position 1800 of SEQ ID NO: 3790
gcaucuuucuggguuccaa

SEQ ID NO: 294857 - RNA, 19 nt, Artificial Sequence
  Description of Artificial Sequence: Synthetic oligonucleotide
  Antisense strand to SEQ ID NO: 294856
uuggaacccagaaagaugc

SEQ ID NO: 294858 - RNA, 19 nt, Artificial Sequence
  Description of Artificial Sequence: Synthetic oligonucleotide
  Sense strand starting at position 1847 of SEQ ID NO: 3790
uguggaaagugcuaauaga

SEQ ID NO: 294859 - RNA, 19 nt, Artificial Sequence
  Description of Artificial Sequence: Synthetic oligonucleotide
  Antisense strand to SEQ ID NO: 294858
ucuauuagcacuuuccaca

SEQ ID NO: 294860 - RNA, 19 nt, Artificial Sequence
  Description of Artificial Sequence: Synthetic oligonucleotide
  Sense strand starting at position 1984 of SEQ ID NO: 3790
gaguauagacguggccaua

SEQ ID NO: 294861 - RNA, 19 nt, Artificial Sequence
  Description of Artificial Sequence: Synthetic oligonucleotide
  Antisense strand to SEQ ID NO: 294860
uauggccacgucuauacuc

SEQ ID NO: 294862 - RNA, 19 nt, Artificial Sequence
  Description of Artificial Sequence: Synthetic oligonucleotide
  Sense strand starting at position 2416 of SEQ ID NO: 3790
agguuuaaguaccaaugaa

SEQ ID NO: 294863 - RNA, 19 nt, Artificial Sequence
  Description of Artificial Sequence: Synthetic oligonucleotide
  Antisense strand to SEQ ID NO: 294862
uucauugguacuuaaaccu

SEQ ID NO: 294864 - RNA, 19 nt, Artificial Sequence
  Description of Artificial Sequence: Synthetic oligonucleotide
  Sense strand starting at position 2481 of SEQ ID NO: 3790
gcaaguuagggcugacagu

SEQ ID NO: 294865 - RNA, 19 nt, Artificial Sequence
  Description of Artificial Sequence: Synthetic oligonucleotide
  Antisense strand to SEQ ID NO: 294864
acugucagcccuaacuugc

SEQ ID NO: 294866 - RNA, 19 nt, Artificial Sequence
  Description of Artificial Sequence: Synthetic oligonucleotide
  Sense strand starting at position 2653 of SEQ ID NO: 3790
cuaucauucuugcuuguga

SEQ ID NO: 294867 - RNA, 19 nt, Artificial Sequence
  Description of Artificial Sequence: Synthetic oligonucleotide
  Antisense strand to SEQ ID NO: 294866
ucacaagcaagaaugauag

SEQ ID NO: 294868 - RNA, 19 nt, Artificial Sequence
  Description of Artificial Sequence: Synthetic oligonucleotide
  Sense strand starting at position 2655 of SEQ ID NO: 3790
aucauucuugcuugugauu

SEQ ID NO: 294869 - RNA, 19 nt, Artificial Sequence
  Description of Artificial Sequence: Synthetic oligonucleotide
  Antisense strand to SEQ ID NO: 294868
aaucacaagcaagaaugau

SEQ ID NO: 294870 - RNA, 19 nt, Artificial Sequence
  Description of Artificial Sequence: Synthetic oligonucleotide
  Sense strand starting at position 2789 of SEQ ID NO: 3790
uaggccucucuguacagau

SEQ ID NO: 294871 - RNA, 19 nt, Artificial Sequence
  Description of Artificial Sequence: Synthetic oligonucleotide
  Antisense strand to SEQ ID NO: 294870
aucuguacagagaggccua

SEQ ID NO: 294872 - RNA, 19 nt, Artificial Sequence
  Description of Artificial Sequence: Synthetic oligonucleotide
  Sense strand starting at position 2869 of SEQ ID NO: 3790
cgguguaagugacuuccua

SEQ ID NO: 294873 - RNA, 19 nt, Artificial Sequence
  Description of Artificial Sequence: Synthetic oligonucleotide
  Antisense strand to SEQ ID NO: 294872
uaggaagucacuuacaccg

SEQ ID NO: 294874 - RNA, 19 nt, Artificial Sequence
  Description of Artificial Sequence: Synthetic oligonucleotide
  Sense strand starting at position 2873 of SEQ ID NO: 3790
guaagugacuuccuaauug

SEQ ID NO: 294875 - RNA, 19 nt, Artificial Sequence
  Description of Artificial Sequence: Synthetic oligonucleotide
  Antisense strand to SEQ ID NO: 294874
caauuaggaagucacuuac

SEQ ID NO: 294876 - RNA, 19 nt, Artificial Sequence
  Description of Artificial Sequence: Synthetic oligonucleotide
  Sense strand starting at position 2914 of SEQ ID NO: 3790
ggguaauacaagugccacu

SEQ ID NO: 294877 - RNA, 19 nt, Artificial Sequence
  Description of Artificial Sequence: Synthetic oligonucleotide
  Antisense strand to SEQ ID NO: 294876
aguggcacuuguauuaccc

SEQ ID NO: 294878 - RNA, 19 nt, Artificial Sequence
  Description of Artificial Sequence: Synthetic oligonucleotide
  Sense strand starting at position 2940 of SEQ ID NO: 3790
gaggcuucuggugguaauu

SEQ ID NO: 294879 - RNA, 19 nt, Artificial Sequence
  Description of Artificial Sequence: Synthetic oligonucleotide
  Antisense strand to SEQ ID NO: 294878
aauuaccaccagaagccuc

SEQ ID NO: 294880 - RNA, 19 nt, Artificial Sequence
  Description of Artificial Sequence: Synthetic oligonucleotide
  Sense strand starting at position 2978 of SEQ ID NO: 3790
uuucgccagcgcuuagaua

SEQ ID NO: 294881 - RNA, 19 nt, Artificial Sequence
  Description of Artificial Sequence: Synthetic oligonucleotide
  Antisense strand to SEQ ID NO: 294880
uaucuaagcgcuggcgaaa

SEQ ID NO: 294882 - RNA, 19 nt, Artificial Sequence
  Description of Artificial Sequence: Synthetic oligonucleotide
  Sense strand starting at position 3002 of SEQ ID NO: 3790
uuaacccaguugucaaaua

SEQ ID NO: 294883 - RNA, 19 nt, Artificial Sequence
  Description of Artificial Sequence: Synthetic oligonucleotide
  Antisense strand to SEQ ID NO: 294882
uauuugacaacuggguuaa

SEQ ID NO: 294884 - RNA, 19 nt, Artificial Sequence
  Description of Artificial Sequence: Synthetic oligonucleotide
  Sense strand starting at position 3010 of SEQ ID NO: 3790
guugucaaauaugacuaaa

SEQ ID NO: 294885 - RNA, 19 nt, Artificial Sequence
  Description of Artificial Sequence: Synthetic oligonucleotide
  Antisense strand to SEQ ID NO: 294884
uuuagucauauuugacaac

SEQ ID NO: 294886 - RNA, 19 nt, Artificial Sequence
  Description of Artificial Sequence: Synthetic oligonucleotide
  Sense strand starting at position 3021 of SEQ ID NO: 3790
ugacuaaacagugggaugu

SEQ ID NO: 294887 - RNA, 19 nt, Artificial Sequence
  Description of Artificial Sequence: Synthetic oligonucleotide
  Antisense strand to SEQ ID NO: 294886
acaucccacuguuuaguca

SEQ ID NO: 294888 - RNA, 19 nt, Artificial Sequence
  Description of Artificial Sequence: Synthetic oligonucleotide
  Sense strand starting at position 3031 of SEQ ID NO: 3790
gugggaugugcugauuauc

SEQ ID NO: 294889 - RNA, 19 nt, Artificial Sequence
  Description of Artificial Sequence: Synthetic oligonucleotide
  Antisense strand to SEQ ID NO: 294888
gauaaucagcacaucccac

SEQ ID NO: 294890 - RNA, 19 nt, Artificial Sequence
  Description of Artificial Sequence: Synthetic oligonucleotide
  Sense strand starting at position 3133 of SEQ ID NO: 3790
uguaacaacuuuggaaaca

SEQ ID NO: 294891 - RNA, 19 nt, Artificial Sequence
  Description of Artificial Sequence: Synthetic oligonucleotide
  Antisense strand to SEQ ID NO: 294890
uguuuccaaaguuguuaca

SEQ ID NO: 294892 - RNA, 19 nt, Artificial Sequence
  Description of Artificial Sequence: Synthetic oligonucleotide
  Sense strand starting at position 3216 of SEQ ID NO: 3790
guuuguuuaacccggugaa

SEQ ID NO: 294893 - RNA, 19 nt, Artificial Sequence
  Description of Artificial Sequence: Synthetic oligonucleotide
  Antisense strand to SEQ ID NO: 294892
uucaccggguuaaacaaac

SEQ ID NO: 294894 - RNA, 19 nt, Artificial Sequence
  Description of Artificial Sequence: Synthetic oligonucleotide
  Sense strand starting at position 3217 of SEQ ID NO: 3790
uuuguuuaacccggugaag

SEQ ID NO: 294895 - RNA, 19 nt, Artificial Sequence
  Description of Artificial Sequence: Synthetic oligonucleotide
  Antisense strand to SEQ ID NO: 294894
cuucaccggguuaaacaaa

SEQ ID NO: 294896 - RNA, 19 nt, Artificial Sequence
  Description of Artificial Sequence: Synthetic oligonucleotide
  Sense strand starting at position 3219 of SEQ ID NO: 3790
uguuuaacccggugaagau

SEQ ID NO: 294897 - RNA, 19 nt, Artificial Sequence
  Description of Artificial Sequence: Synthetic oligonucleotide
  Antisense strand to SEQ ID NO: 294896
aucuucaccggguuaaaca

SEQ ID NO: 294898 - RNA, 19 nt, Artificial Sequence
  Description of Artificial Sequence: Synthetic oligonucleotide
  Sense strand starting at position 3220 of SEQ ID NO: 3790
guuuaacccggugaagauu

SEQ ID NO: 294899 - RNA, 19 nt, Artificial Sequence
  Description of Artificial Sequence: Synthetic oligonucleotide
  Antisense strand to SEQ ID NO: 294898
aaucuucaccggguuaaac

SEQ ID NO: 294900 - RNA, 19 nt, Artificial Sequence
  Description of Artificial Sequence: Synthetic oligonucleotide
  Sense strand starting at position 3237 of SEQ ID NO: 3790
uuugcaugucgcguuucau

SEQ ID NO: 294901 - RNA, 19 nt, Artificial Sequence
  Description of Artificial Sequence: Synthetic oligonucleotide
  Antisense strand to SEQ ID NO: 294900
augaaacgcgacaugcaaa

SEQ ID NO: 294902 - RNA, 19 nt, Artificial Sequence
  Description of Artificial Sequence: Synthetic oligonucleotide
  Sense strand starting at position 3248 of SEQ ID NO: 3790
cguuucauccuggagugga

SEQ ID NO: 294903 - RNA, 19 nt, Artificial Sequence
  Description of Artificial Sequence: Synthetic oligonucleotide
  Antisense strand to SEQ ID NO: 294902
uccacuccaggaugaaacg

SEQ ID NO: 294904 - RNA, 19 nt, Artificial Sequence
  Description of Artificial Sequence: Synthetic oligonucleotide
  Sense strand starting at position 3394 of SEQ ID NO: 3790
cgagaaaucucuccaggac

SEQ ID NO: 294905 - RNA, 19 nt, Artificial Sequence
  Description of Artificial Sequence: Synthetic oligonucleotide
  Antisense strand to SEQ ID NO: 294904
guccuggagagauuucucg

SEQ ID NO: 294906 - RNA, 19 nt, Artificial Sequence
  Description of Artificial Sequence: Synthetic oligonucleotide
  Sense strand starting at position 3494 of SEQ ID NO: 3790
uggaccuugucagugugaa

SEQ ID NO: 294907 - RNA, 19 nt, Artificial Sequence
  Description of Artificial Sequence: Synthetic oligonucleotide
  Antisense strand to SEQ ID NO: 294906
uucacacugacaaggucca

SEQ ID NO: 294908 - RNA, 19 nt, Artificial Sequence
  Description of Artificial Sequence: Synthetic oligonucleotide
  Sense strand starting at position 3495 of SEQ ID NO: 3790
ggaccuugucagugugaaa

SEQ ID NO: 294909 - RNA, 19 nt, Artificial Sequence
  Description of Artificial Sequence: Synthetic oligonucleotide
  Antisense strand to SEQ ID NO: 294908
uuucacacugacaaggucc

SEQ ID NO: 294910 - RNA, 19 nt, Artificial Sequence
  Description of Artificial Sequence: Synthetic oligonucleotide
  Sense strand starting at position 3602 of SEQ ID NO: 3790
cucuuucuucuccagggua

SEQ ID NO: 294911 - RNA, 19 nt, Artificial Sequence
  Description of Artificial Sequence: Synthetic oligonucleotide
  Antisense strand to SEQ ID NO: 294910
uacccuggagaagaaagag

SEQ ID NO: 294912 - RNA, 19 nt, Artificial Sequence
  Description of Artificial Sequence: Synthetic oligonucleotide
  Sense strand starting at position 3845 of SEQ ID NO: 3790
gcaagaucucuugacccaa

SEQ ID NO: 294913 - RNA, 19 nt, Artificial Sequence
  Description of Artificial Sequence: Synthetic oligonucleotide
  Antisense strand to SEQ ID NO: 294912
uugggucaagagaucuugc

SEQ ID NO: 294914 - RNA, 19 nt, Artificial Sequence
  Description of Artificial Sequence: Synthetic oligonucleotide
  Sense strand starting at position 3951 of SEQ ID NO: 3790
ggucgcuuucuuggauuca

SEQ ID NO: 294915 - RNA, 19 nt, Artificial Sequence
  Description of Artificial Sequence: Synthetic oligonucleotide
  Antisense strand to SEQ ID NO: 294914
ugaauccaagaaagcgacc

SEQ ID NO: 294916 - RNA, 19 nt, Artificial Sequence
  Description of Artificial Sequence: Synthetic oligonucleotide
  Sense strand starting at position 36 of SEQ ID NO: 3791
ugguuaaauguuuaacugu

SEQ ID NO: 294917 - RNA, 19 nt, Artificial Sequence
  Description of Artificial Sequence: Synthetic oligonucleotide
  Antisense strand to SEQ ID NO: 294916
acaguuaaacauuuaacca

SEQ ID NO: 294918 - RNA, 19 nt, Artificial Sequence
  Description of Artificial Sequence: Synthetic oligonucleotide
  Sense strand starting at position 119 of SEQ ID NO: 3791
aagcaaauggguuggauaa

SEQ ID NO: 294919 - RNA, 19 nt, Artificial Sequence
  Description of Artificial Sequence: Synthetic oligonucleotide
  Antisense strand to SEQ ID NO: 294918
uuauccaacccauuugcuu

SEQ ID NO: 294920 - RNA, 19 nt, Artificial Sequence
  Description of Artificial Sequence: Synthetic oligonucleotide
  Sense strand starting at position 120 of SEQ ID NO: 3791
agcaaauggguuggauaau

SEQ ID NO: 294921 - RNA, 19 nt, Artificial Sequence
  Description of Artificial Sequence: Synthetic oligonucleotide
  Antisense strand to SEQ ID NO: 294920
auuauccaacccauuugcu

SEQ ID NO: 294922 - RNA, 19 nt, Artificial Sequence
  Description of Artificial Sequence: Synthetic oligonucleotide
  Sense strand starting at position 139 of SEQ ID NO: 3791
ucacacaacgguuaguaaa

SEQ ID NO: 294923 - RNA, 19 nt, Artificial Sequence
  Description of Artificial Sequence: Synthetic oligonucleotide
  Antisense strand to SEQ ID NO: 294922
uuuacuaaccguuguguga

SEQ ID NO: 294924 - RNA, 19 nt, Artificial Sequence
  Description of Artificial Sequence: Synthetic oligonucleotide
  Sense strand starting at position 221 of SEQ ID NO: 3791
gucuuuguaagacagguuu

SEQ ID NO: 294925 - RNA, 19 nt, Artificial Sequence
  Description of Artificial Sequence: Synthetic oligonucleotide
  Antisense strand to SEQ ID NO: 294924
aaaccugucuuacaaagac

SEQ ID NO: 294926 - RNA, 19 nt, Artificial Sequence
  Description of Artificial Sequence: Synthetic oligonucleotide
  Sense strand starting at position 442 of SEQ ID NO: 3791
auuacaagaugccugguua

SEQ ID NO: 294927 - RNA, 19 nt, Artificial Sequence
  Description of Artificial Sequence: Synthetic oligonucleotide
  Antisense strand to SEQ ID NO: 294926
uaaccaggcaucuuguaau

SEQ ID NO: 294928 - RNA, 19 nt, Artificial Sequence
  Description of Artificial Sequence: Synthetic oligonucleotide
  Sense strand starting at position 514 of SEQ ID NO: 3791
aucguuguuaaagaggaau

SEQ ID NO: 294929 - RNA, 19 nt, Artificial Sequence
  Description of Artificial Sequence: Synthetic oligonucleotide
  Antisense strand to SEQ ID NO: 294928
auuccucuuuaacaacgau

SEQ ID NO: 294930 - RNA, 19 nt, Artificial Sequence
  Description of Artificial Sequence: Synthetic oligonucleotide
  Sense strand starting at position 516 of SEQ ID NO: 3791
cguuguuaaagaggaauau

SEQ ID NO: 294931 - RNA, 19 nt, Artificial Sequence
  Description of Artificial Sequence: Synthetic oligonucleotide
  Antisense strand to SEQ ID NO: 294930
auauuccucuuuaacaacg

SEQ ID NO: 294932 - RNA, 19 nt, Artificial Sequence
  Description of Artificial Sequence: Synthetic oligonucleotide
  Sense strand starting at position 724 of SEQ ID NO: 3791
ucuguaguguggaugugua

SEQ ID NO: 294933 - RNA, 19 nt, Artificial Sequence
  Description of Artificial Sequence: Synthetic oligonucleotide
  Antisense strand to SEQ ID NO: 294932
uacacauccacacuacaga

SEQ ID NO: 294934 - RNA, 19 nt, Artificial Sequence
  Description of Artificial Sequence: Synthetic oligonucleotide
  Sense strand starting at position 750 of SEQ ID NO: 3791
ugagucaggacagguuaau

SEQ ID NO: 294935 - RNA, 19 nt, Artificial Sequence
  Description of Artificial Sequence: Synthetic oligonucleotide
  Antisense strand to SEQ ID NO: 294934
auuaaccuguccugacuca

SEQ ID NO: 294936 - RNA, 19 nt, Artificial Sequence
  Description of Artificial Sequence: Synthetic oligonucleotide
  Sense strand starting at position 772 of SEQ ID NO: 3791
cuugucaaagcucacgaaa

SEQ ID NO: 294937 - RNA, 19 nt, Artificial Sequence
  Description of Artificial Sequence: Synthetic oligonucleotide
  Antisense strand to SEQ ID NO: 294936
uuucgugagcuuugacaag

SEQ ID NO: 294938 - RNA, 19 nt, Artificial Sequence
  Description of Artificial Sequence: Synthetic oligonucleotide
  Sense strand starting at position 775 of SEQ ID NO: 3791
gucaaagcucacgaaauga

SEQ ID NO: 294939 - RNA, 19 nt, Artificial Sequence
  Description of Artificial Sequence: Synthetic oligonucleotide
  Antisense strand to SEQ ID NO: 294938
ucauuucgugagcuuugac

SEQ ID NO: 294940 - RNA, 19 nt, Artificial Sequence
  Description of Artificial Sequence: Synthetic oligonucleotide
  Sense strand starting at position 1139 of SEQ ID NO: 3791
uguagcucaccagaucauu

SEQ ID NO: 294941 - RNA, 19 nt, Artificial Sequence
  Description of Artificial Sequence: Synthetic oligonucleotide
  Antisense strand to SEQ ID NO: 294940
aaugaucuggugagcuaca

SEQ ID NO: 294942 - RNA, 19 nt, Artificial Sequence
  Description of Artificial Sequence: Synthetic oligonucleotide
  Sense strand starting at position 1210 of SEQ ID NO: 3791
guagucaaacuuggaacua

SEQ ID NO: 294943 - RNA, 19 nt, Artificial Sequence
  Description of Artificial Sequence: Synthetic oligonucleotide
  Antisense strand to SEQ ID NO: 294942
uaguuccaaguuugacuac

SEQ ID NO: 294944 - RNA, 19 nt, Artificial Sequence
  Description of Artificial Sequence: Synthetic oligonucleotide
  Sense strand starting at position 1320 of SEQ ID NO: 3791
cuuaaaguccaauggcaga

SEQ ID NO: 294945 - RNA, 19 nt, Artificial Sequence
  Description of Artificial Sequence: Synthetic oligonucleotide
  Antisense strand to SEQ ID NO: 294944
ucugccauuggacuuuaag

SEQ ID NO: 294946 - RNA, 19 nt, Artificial Sequence
  Description of Artificial Sequence: Synthetic oligonucleotide
  Sense strand starting at position 1360 of SEQ ID NO: 3791
cguuccuccguugaauuua

SEQ ID NO: 294947 - RNA, 19 nt, Artificial Sequence
  Description of Artificial Sequence: Synthetic oligonucleotide
  Antisense strand to SEQ ID NO: 294946
uaaauucaacggaggaacg

SEQ ID NO: 294948 - RNA, 19 nt, Artificial Sequence
  Description of Artificial Sequence: Synthetic oligonucleotide
  Sense strand starting at position 1449 of SEQ ID NO: 3791
uuuguugugcugucuuaac

SEQ ID NO: 294949 - RNA, 19 nt, Artificial Sequence
  Description of Artificial Sequence: Synthetic oligonucleotide
  Antisense strand to SEQ ID NO: 294948
guuaagacagcacaacaaa

SEQ ID NO: 294950 - RNA, 19 nt, Artificial Sequence
  Description of Artificial Sequence: Synthetic oligonucleotide
  Sense strand starting at position 1566 of SEQ ID NO: 3791
gcuacuaagggcgagaaau

SEQ ID NO: 294951 - RNA, 19 nt, Artificial Sequence
  Description of Artificial Sequence: Synthetic oligonucleotide
  Antisense strand to SEQ ID NO: 294950
auuucucgcccuuaguagc

SEQ ID NO: 294952 - RNA, 19 nt, Artificial Sequence
  Description of Artificial Sequence: Synthetic oligonucleotide
  Sense strand starting at position 1577 of SEQ ID NO: 3791
cgagaaauucagugagugg

SEQ ID NO: 294953 - RNA, 19 nt, Artificial Sequence
  Description of Artificial Sequence: Synthetic oligonucleotide
  Antisense strand to SEQ ID NO: 294952
ccacucacugaauuucucg

SEQ ID NO: 294954 - RNA, 19 nt, Artificial Sequence
  Description of Artificial Sequence: Synthetic oligonucleotide
  Sense strand starting at position 2238 of SEQ ID NO: 3791
cuucguugucgucucugaa

SEQ ID NO: 294955 - RNA, 19 nt, Artificial Sequence
  Description of Artificial Sequence: Synthetic oligonucleotide
  Antisense strand to SEQ ID NO: 294954
uucagagacgacaacgaag

SEQ ID NO: 294956 - RNA, 19 nt, Artificial Sequence
  Description of Artificial Sequence: Synthetic oligonucleotide
  Sense strand starting at position 2239 of SEQ ID NO: 3791
uucguugucgucucugaau

SEQ ID NO: 294957 - RNA, 19 nt, Artificial Sequence
  Description of Artificial Sequence: Synthetic oligonucleotide
  Antisense strand to SEQ ID NO: 294956
auucagagacgacaacgaa

SEQ ID NO: 294958 - RNA, 19 nt, Artificial Sequence
  Description of Artificial Sequence: Synthetic oligonucleotide
  Sense strand starting at position 2344 of SEQ ID NO: 3791
aaaggugaguucucaacac

SEQ ID NO: 294959 - RNA, 19 nt, Artificial Sequence
  Description of Artificial Sequence: Synthetic oligonucleotide
  Antisense strand to SEQ ID NO: 294958
guguugagaacucaccuuu

SEQ ID NO: 294960 - RNA, 19 nt, Artificial Sequence
  Description of Artificial Sequence: Synthetic oligonucleotide
  Sense strand starting at position 2448 of SEQ ID NO: 3791
gaugcuuagcaaugaagaa

SEQ ID NO: 294961 - RNA, 19 nt, Artificial Sequence
  Description of Artificial Sequence: Synthetic oligonucleotide
  Antisense strand to SEQ ID NO: 294960
uucuucauugcuaagcauc

SEQ ID NO: 294962 - RNA, 19 nt, Artificial Sequence
  Description of Artificial Sequence: Synthetic oligonucleotide
  Sense strand starting at position 2458 of SEQ ID NO: 3791
aaugaagaacuaugguguu

SEQ ID NO: 294963 - RNA, 19 nt, Artificial Sequence
  Description of Artificial Sequence: Synthetic oligonucleotide
  Antisense strand to SEQ ID NO: 294962
aacaccauaguucuucauu

SEQ ID NO: 294964 - RNA, 19 nt, Artificial Sequence
  Description of Artificial Sequence: Synthetic oligonucleotide
  Sense strand starting at position 2675 of SEQ ID NO: 3791
agucuuauugcugagagga

SEQ ID NO: 294965 - RNA, 19 nt, Artificial Sequence
  Description of Artificial Sequence: Synthetic oligonucleotide
  Antisense strand to SEQ ID NO: 294964
uccucucagcaauaagacu

SEQ ID NO: 294966 - RNA, 19 nt, Artificial Sequence
  Description of Artificial Sequence: Synthetic oligonucleotide
  Sense strand starting at position 2688 of SEQ ID NO: 3791
agaggaucuuccucagguu

SEQ ID NO: 294967 - RNA, 19 nt, Artificial Sequence
  Description of Artificial Sequence: Synthetic oligonucleotide
  Antisense strand to SEQ ID NO: 294966
aaccugaggaagauccucu

SEQ ID NO: 294968 - RNA, 19 nt, Artificial Sequence
  Description of Artificial Sequence: Synthetic oligonucleotide
  Sense strand starting at position 2702 of SEQ ID NO: 3791
agguuauaucgcguaugua

SEQ ID NO: 294969 - RNA, 19 nt, Artificial Sequence
  Description of Artificial Sequence: Synthetic oligonucleotide
  Antisense strand to SEQ ID NO: 294968
uacauacgcgauauaaccu

SEQ ID NO: 294970 - RNA, 19 nt, Artificial Sequence
  Description of Artificial Sequence: Synthetic oligonucleotide
  Sense strand starting at position 2822 of SEQ ID NO: 3791
ggguuugguauauaacuua

SEQ ID NO: 294971 - RNA, 19 nt, Artificial Sequence
  Description of Artificial Sequence: Synthetic oligonucleotide
  Antisense strand to SEQ ID NO: 294970
uaaguuauauaccaaaccc

SEQ ID NO: 294972 - RNA, 19 nt, Artificial Sequence
  Description of Artificial Sequence: Synthetic oligonucleotide
  Sense strand starting at position 3142 of SEQ ID NO: 3791
guccguugaugggcauuua

SEQ ID NO: 294973 - RNA, 19 nt, Artificial Sequence
  Description of Artificial Sequence: Synthetic oligonucleotide
  Antisense strand to SEQ ID NO: 294972
uaaaugcccaucaacggac

SEQ ID NO: 294974 - RNA, 19 nt, Artificial Sequence
  Description of Artificial Sequence: Synthetic oligonucleotide
  Sense strand starting at position 3316 of SEQ ID NO: 3791
ggaagccagugauccuaua

SEQ ID NO: 294975 - RNA, 19 nt, Artificial Sequence
  Description of Artificial Sequence: Synthetic oligonucleotide
  Antisense strand to SEQ ID NO: 294974
uauaggaucacuggcuucc

SEQ ID NO: 294976 - RNA, 19 nt, Artificial Sequence
  Description of Artificial Sequence: Synthetic oligonucleotide
  Sense strand starting at position 3361 of SEQ ID NO: 3791
agcaguaacuuccuaagga

SEQ ID NO: 294977 - RNA, 19 nt, Artificial Sequence
  Description of Artificial Sequence: Synthetic oligonucleotide
  Antisense strand to SEQ ID NO: 294976
uccuuaggaaguuacugcu

SEQ ID NO: 294978 - RNA, 19 nt, Artificial Sequence
  Description of Artificial Sequence: Synthetic oligonucleotide
  Sense strand starting at position 3374 of SEQ ID NO: 3791
uaaggagguguuugagagu

SEQ ID NO: 294979 - RNA, 19 nt, Artificial Sequence
  Description of Artificial Sequence: Synthetic oligonucleotide
  Antisense strand to SEQ ID NO: 294978
acucucaaacaccuccuua

SEQ ID NO: 294980 - RNA, 19 nt, Artificial Sequence
  Description of Artificial Sequence: Synthetic oligonucleotide
  Sense strand starting at position 3610 of SEQ ID NO: 3791
guuagcuguuauuucuauu

SEQ ID NO: 294981 - RNA, 19 nt, Artificial Sequence
  Description of Artificial Sequence: Synthetic oligonucleotide
  Antisense strand to SEQ ID NO: 294980
aauagaaauaacagcuaac

SEQ ID NO: 294982 - RNA, 19 nt, Artificial Sequence
  Description of Artificial Sequence: Synthetic oligonucleotide
  Sense strand starting at position 3674 of SEQ ID NO: 3791
cagauauaauagucgggua

SEQ ID NO: 294983 - RNA, 19 nt, Artificial Sequence
  Description of Artificial Sequence: Synthetic oligonucleotide
  Antisense strand to SEQ ID NO: 294982
uacccgacuauuauaucug

SEQ ID NO: 294984 - RNA, 19 nt, Artificial Sequence
  Description of Artificial Sequence: Synthetic oligonucleotide
  Sense strand starting at position 3675 of SEQ ID NO: 3791
agauauaauagucggguaa

SEQ ID NO: 294985 - RNA, 19 nt, Artificial Sequence
  Description of Artificial Sequence: Synthetic oligonucleotide
  Antisense strand to SEQ ID NO: 294984
uuacccgacuauuauaucu

SEQ ID NO: 294986 - RNA, 19 nt, Artificial Sequence
  Description of Artificial Sequence: Synthetic oligonucleotide
  Sense strand starting at position 3676 of SEQ ID NO: 3791
gauauaauagucggguaau

SEQ ID NO: 294987 - RNA, 19 nt, Artificial Sequence
  Description of Artificial Sequence: Synthetic oligonucleotide
  Antisense strand to SEQ ID NO: 294986
auuacccgacuauuauauc

SEQ ID NO: 294988 - RNA, 19 nt, Artificial Sequence
  Description of Artificial Sequence: Synthetic oligonucleotide
  Sense strand starting at position 3761 of SEQ ID NO: 3791
cugaguacucauuaaaugc

SEQ ID NO: 294989 - RNA, 19 nt, Artificial Sequence
  Description of Artificial Sequence: Synthetic oligonucleotide
  Antisense strand to SEQ ID NO: 294988
gcauuuaaugaguacucag

SEQ ID NO: 294990 - RNA, 19 nt, Artificial Sequence
  Description of Artificial Sequence: Synthetic oligonucleotide
  Sense strand starting at position 3894 of SEQ ID NO: 3791
gguuguuuccuauaaaucc

SEQ ID NO: 294991 - RNA, 19 nt, Artificial Sequence
  Description of Artificial Sequence: Synthetic oligonucleotide
  Antisense strand to SEQ ID NO: 294990
ggauuuauaggaaacaacc

SEQ ID NO: 294992 - RNA, 19 nt, Artificial Sequence
  Description of Artificial Sequence: Synthetic oligonucleotide
  Sense strand starting at position 3929 of SEQ ID NO: 3791
cuggguaaggaguggucaa

SEQ ID NO: 294993 - RNA, 19 nt, Artificial Sequence
  Description of Artificial Sequence: Synthetic oligonucleotide
  Antisense strand to SEQ ID NO: 294992
uugaccacuccuuacccag

SEQ ID NO: 294994 - RNA, 19 nt, Artificial Sequence
  Description of Artificial Sequence: Synthetic oligonucleotide
  Sense strand starting at position 3961 of SEQ ID NO: 3791
uggcauauccagcaagaca

SEQ ID NO: 294995 - RNA, 19 nt, Artificial Sequence
  Description of Artificial Sequence: Synthetic oligonucleotide
  Antisense strand to SEQ ID NO: 294994
ugucuugcuggauaugcca

SEQ ID NO: 294996 - RNA, 19 nt, Artificial Sequence
  Description of Artificial Sequence: Synthetic oligonucleotide
  Sense strand starting at position 65 of SEQ ID NO: 3792
ucauuauuagcacagguuu

SEQ ID NO: 294997 - RNA, 19 nt, Artificial Sequence
  Description of Artificial Sequence: Synthetic oligonucleotide
  Antisense strand to SEQ ID NO: 294996
aaaccugugcuaauaauga

SEQ ID NO: 294998 - RNA, 19 nt, Artificial Sequence
  Description of Artificial Sequence: Synthetic oligonucleotide
  Sense strand starting at position 71 of SEQ ID NO: 3792
uuagcacagguuuggaaua

SEQ ID NO: 294999 - RNA, 19 nt, Artificial Sequence
  Description of Artificial Sequence: Synthetic oligonucleotide
  Antisense strand to SEQ ID NO: 294998
uauuccaaaccugugcuaa

SEQ ID NO: 295000 - RNA, 19 nt, Artificial Sequence
  Description of Artificial Sequence: Synthetic oligonucleotide
  Sense strand starting at position 604 of SEQ ID NO: 3792
acccgaaagauguaguauc

SEQ ID NO: 295001 - RNA, 19 nt, Artificial Sequence
  Description of Artificial Sequence: Synthetic oligonucleotide
  Antisense strand to SEQ ID NO: 295000
gauacuacaucuuucgggu

SEQ ID NO: 295002 - RNA, 19 nt, Artificial Sequence
  Description of Artificial Sequence: Synthetic oligonucleotide
  Sense strand starting at position 612 of SEQ ID NO: 3792
gauguaguauccuugcuuu

SEQ ID NO: 295003 - RNA, 19 nt, Artificial Sequence
  Description of Artificial Sequence: Synthetic oligonucleotide
  Antisense strand to SEQ ID NO: 295002
aaagcaaggauacuacauc

SEQ ID NO: 295004 - RNA, 19 nt, Artificial Sequence
  Description of Artificial Sequence: Synthetic oligonucleotide
  Sense strand starting at position 666 of SEQ ID NO: 3792
uguaaagugguauguuuaa

SEQ ID NO: 295005 - RNA, 19 nt, Artificial Sequence
  Description of Artificial Sequence: Synthetic oligonucleotide
  Antisense strand to SEQ ID NO: 295004
uuaaacauaccacuuuaca

SEQ ID NO: 295006 - RNA, 19 nt, Artificial Sequence
  Description of Artificial Sequence: Synthetic oligonucleotide
  Sense strand starting at position 1044 of SEQ ID NO: 3792
ggaucaguguggucacucu

SEQ ID NO: 295007 - RNA, 19 nt, Artificial Sequence
  Description of Artificial Sequence: Synthetic oligonucleotide
  Antisense strand to SEQ ID NO: 295006
agagugaccacacugaucc

SEQ ID NO: 295008 - RNA, 19 nt, Artificial Sequence
  Description of Artificial Sequence: Synthetic oligonucleotide
  Sense strand starting at position 1052 of SEQ ID NO: 3792
guggucacucuaggacaaa

SEQ ID NO: 295009 - RNA, 19 nt, Artificial Sequence
  Description of Artificial Sequence: Synthetic oligonucleotide
  Antisense strand to SEQ ID NO: 295008
uuuguccuagagugaccac

SEQ ID NO: 295010 - RNA, 19 nt, Artificial Sequence
  Description of Artificial Sequence: Synthetic oligonucleotide
  Sense strand starting at position 1053 of SEQ ID NO: 3792
uggucacucuaggacaaau

SEQ ID NO: 295011 - RNA, 19 nt, Artificial Sequence
  Description of Artificial Sequence: Synthetic oligonucleotide
  Antisense strand to SEQ ID NO: 295010
auuuguccuagagugacca

SEQ ID NO: 295012 - RNA, 19 nt, Artificial Sequence
  Description of Artificial Sequence: Synthetic oligonucleotide
  Sense strand starting at position 1064 of SEQ ID NO: 3792
ggacaaaugucacugucau

SEQ ID NO: 295013 - RNA, 19 nt, Artificial Sequence
  Description of Artificial Sequence: Synthetic oligonucleotide
  Antisense strand to SEQ ID NO: 295012
augacagugacauuugucc

SEQ ID NO: 295014 - RNA, 19 nt, Artificial Sequence
  Description of Artificial Sequence: Synthetic oligonucleotide
  Sense strand starting at position 1134 of SEQ ID NO: 3792
aaggcuggugucugaaaca

SEQ ID NO: 295015 - RNA, 19 nt, Artificial Sequence
  Description of Artificial Sequence: Synthetic oligonucleotide
  Antisense strand to SEQ ID NO: 295014
uguuucagacaccagccuu

SEQ ID NO: 295016 - RNA, 19 nt, Artificial Sequence
  Description of Artificial Sequence: Synthetic oligonucleotide
  Sense strand starting at position 2224 of SEQ ID NO: 3792
ccaggaagccuucguaauc

SEQ ID NO: 295017 - RNA, 19 nt, Artificial Sequence
  Description of Artificial Sequence: Synthetic oligonucleotide
  Antisense strand to SEQ ID NO: 295016
gauuacgaaggcuuccugg

SEQ ID NO: 295018 - RNA, 19 nt, Artificial Sequence
  Description of Artificial Sequence: Synthetic oligonucleotide
  Sense strand starting at position 2235 of SEQ ID NO: 3792
ucguaaucgauccacggaa

SEQ ID NO: 295019 - RNA, 19 nt, Artificial Sequence
  Description of Artificial Sequence: Synthetic oligonucleotide
  Antisense strand to SEQ ID NO: 295018
uuccguggaucgauuacga

SEQ ID NO: 295020 - RNA, 19 nt, Artificial Sequence
  Description of Artificial Sequence: Synthetic oligonucleotide
  Sense strand starting at position 2349 of SEQ ID NO: 3792
cgaccuaagucuucuccga

SEQ ID NO: 295021 - RNA, 19 nt, Artificial Sequence
  Description of Artificial Sequence: Synthetic oligonucleotide
  Antisense strand to SEQ ID NO: 295020
ucggagaagacuuaggucg

SEQ ID NO: 295022 - RNA, 19 nt, Artificial Sequence
  Description of Artificial Sequence: Synthetic oligonucleotide
  Sense strand starting at position 2351 of SEQ ID NO: 3792
accuaagucuucuccgaag

SEQ ID NO: 295023 - RNA, 19 nt, Artificial Sequence
  Description of Artificial Sequence: Synthetic oligonucleotide
  Antisense strand to SEQ ID NO: 295022
cuucggagaagacuuaggu

SEQ ID NO: 295024 - RNA, 19 nt, Artificial Sequence
  Description of Artificial Sequence: Synthetic oligonucleotide
  Sense strand starting at position 2353 of SEQ ID NO: 3792
cuaagucuucuccgaagga

SEQ ID NO: 295025 - RNA, 19 nt, Artificial Sequence
  Description of Artificial Sequence: Synthetic oligonucleotide
  Antisense strand to SEQ ID NO: 295024
uccuucggagaagacuuag

SEQ ID NO: 295026 - RNA, 19 nt, Artificial Sequence
  Description of Artificial Sequence: Synthetic oligonucleotide
  Sense strand starting at position 2357 of SEQ ID NO: 3792
gucuucuccgaaggauaau

SEQ ID NO: 295027 - RNA, 19 nt, Artificial Sequence
  Description of Artificial Sequence: Synthetic oligonucleotide
  Antisense strand to SEQ ID NO: 295026
auuauccuucggagaagac

SEQ ID NO: 295028 - RNA, 19 nt, Artificial Sequence
  Description of Artificial Sequence: Synthetic oligonucleotide
  Sense strand starting at position 2369 of SEQ ID NO: 3792
ggauaauuggcccaucuca

SEQ ID NO: 295029 - RNA, 19 nt, Artificial Sequence
  Description of Artificial Sequence: Synthetic oligonucleotide
  Antisense strand to SEQ ID NO: 295028
ugagaugggccaauuaucc

SEQ ID NO: 295030 - RNA, 19 nt, Artificial Sequence
  Description of Artificial Sequence: Synthetic oligonucleotide
  Sense strand starting at position 2396 of SEQ ID NO: 3792
ggauaucaaucugggaauu

SEQ ID NO: 295031 - RNA, 19 nt, Artificial Sequence
  Description of Artificial Sequence: Synthetic oligonucleotide
  Antisense strand to SEQ ID NO: 295030
aauucccagauugauaucc

SEQ ID NO: 295032 - RNA, 19 nt, Artificial Sequence
  Description of Artificial Sequence: Synthetic oligonucleotide
  Sense strand starting at position 2398 of SEQ ID NO: 3792
auaucaaucugggaauuaa

SEQ ID NO: 295033 - RNA, 19 nt, Artificial Sequence
  Description of Artificial Sequence: Synthetic oligonucleotide
  Antisense strand to SEQ ID NO: 295032
uuaauucccagauugauau

SEQ ID NO: 295034 - RNA, 19 nt, Artificial Sequence
  Description of Artificial Sequence: Synthetic oligonucleotide
  Sense strand starting at position 2614 of SEQ ID NO: 3792
gaaagcaauugugaagaua

SEQ ID NO: 295035 - RNA, 19 nt, Artificial Sequence
  Description of Artificial Sequence: Synthetic oligonucleotide
  Antisense strand to SEQ ID NO: 295034
uaucuucacaauugcuuuc

SEQ ID NO: 295036 - RNA, 19 nt, Artificial Sequence
  Description of Artificial Sequence: Synthetic oligonucleotide
  Sense strand starting at position 2668 of SEQ ID NO: 3792
aauguuagcucagugugau

SEQ ID NO: 295037 - RNA, 19 nt, Artificial Sequence
  Description of Artificial Sequence: Synthetic oligonucleotide
  Antisense strand to SEQ ID NO: 295036
aucacacugagcuaacauu

SEQ ID NO: 295038 - RNA, 19 nt, Artificial Sequence
  Description of Artificial Sequence: Synthetic oligonucleotide
  Sense strand starting at position 2669 of SEQ ID NO: 3792
auguuagcucagugugaug

SEQ ID NO: 295039 - RNA, 19 nt, Artificial Sequence
  Description of Artificial Sequence: Synthetic oligonucleotide
  Antisense strand to SEQ ID NO: 295038
caucacacugagcuaacau

SEQ ID NO: 295040 - RNA, 19 nt, Artificial Sequence
  Description of Artificial Sequence: Synthetic oligonucleotide
  Sense strand starting at position 2794 of SEQ ID NO: 3792
ucccauaguuuacugaaga

SEQ ID NO: 295041 - RNA, 19 nt, Artificial Sequence
  Description of Artificial Sequence: Synthetic oligonucleotide
  Antisense strand to SEQ ID NO: 295040
ucuucaguaaacuauggga

SEQ ID NO: 295042 - RNA, 19 nt, Artificial Sequence
  Description of Artificial Sequence: Synthetic oligonucleotide
  Sense strand starting at position 2844 of SEQ ID NO: 3792
cccuuccuuugggaaacua

SEQ ID NO: 295043 - RNA, 19 nt, Artificial Sequence
  Description of Artificial Sequence: Synthetic oligonucleotide
  Antisense strand to SEQ ID NO: 295042
uaguuucccaaaggaaggg

SEQ ID NO: 295044 - RNA, 19 nt, Artificial Sequence
  Description of Artificial Sequence: Synthetic oligonucleotide
  Sense strand starting at position 2872 of SEQ ID NO: 3792
cucugcucccuguauucua

SEQ ID NO: 295045 - RNA, 19 nt, Artificial Sequence
  Description of Artificial Sequence: Synthetic oligonucleotide
  Antisense strand to SEQ ID NO: 295044
uagaauacagggagcagag

SEQ ID NO: 295046 - RNA, 19 nt, Artificial Sequence
  Description of Artificial Sequence: Synthetic oligonucleotide
  Sense strand starting at position 2883 of SEQ ID NO: 3792
guauucuaaugagcugcaa

SEQ ID NO: 295047 - RNA, 19 nt, Artificial Sequence
  Description of Artificial Sequence: Synthetic oligonucleotide
  Antisense strand to SEQ ID NO: 295046
uugcagcucauuagaauac

SEQ ID NO: 295048 - RNA, 19 nt, Artificial Sequence
  Description of Artificial Sequence: Synthetic oligonucleotide
  Sense strand starting at position 2933 of SEQ ID NO: 3792
aacacuaggucagucagau

SEQ ID NO: 295049 - RNA, 19 nt, Artificial Sequence
  Description of Artificial Sequence: Synthetic oligonucleotide
  Antisense strand to SEQ ID NO: 295048
aucugacugaccuaguguu

SEQ ID NO: 295050 - RNA, 19 nt, Artificial Sequence
  Description of Artificial Sequence: Synthetic oligonucleotide
  Sense strand starting at position 2943 of SEQ ID NO: 3792
cagucagauucuccuggga

SEQ ID NO: 295051 - RNA, 19 nt, Artificial Sequence
  Description of Artificial Sequence: Synthetic oligonucleotide
  Antisense strand to SEQ ID NO: 295050
ucccaggagaaucugacug

SEQ ID NO: 295052 - RNA, 19 nt, Artificial Sequence
  Description of Artificial Sequence: Synthetic oligonucleotide
  Sense strand starting at position 2963 of SEQ ID NO: 3792
cuggaaucuuggcuggaga

SEQ ID NO: 295053 - RNA, 19 nt, Artificial Sequence
  Description of Artificial Sequence: Synthetic oligonucleotide
  Antisense strand to SEQ ID NO: 295052
ucuccagccaagauuccag

SEQ ID NO: 295054 - RNA, 19 nt, Artificial Sequence
  Description of Artificial Sequence: Synthetic oligonucleotide
  Sense strand starting at position 3000 of SEQ ID NO: 3792
acuggaaacgagugcucuu

SEQ ID NO: 295055 - RNA, 19 nt, Artificial Sequence
  Description of Artificial Sequence: Synthetic oligonucleotide
  Antisense strand to SEQ ID NO: 295054
aagagcacucguuuccagu

SEQ ID NO: 295056 - RNA, 19 nt, Artificial Sequence
  Description of Artificial Sequence: Synthetic oligonucleotide
  Sense strand starting at position 3003 of SEQ ID NO: 3792
ggaaacgagugcucuuaag

SEQ ID NO: 295057 - RNA, 19 nt, Artificial Sequence
  Description of Artificial Sequence: Synthetic oligonucleotide
  Antisense strand to SEQ ID NO: 295056
cuuaagagcacucguuucc

SEQ ID NO: 295058 - RNA, 19 nt, Artificial Sequence
  Description of Artificial Sequence: Synthetic oligonucleotide
  Sense strand starting at position 3013 of SEQ ID NO: 3792
gcucuuaagagcggguuua

SEQ ID NO: 295059 - RNA, 19 nt, Artificial Sequence
  Description of Artificial Sequence: Synthetic oligonucleotide
  Antisense strand to SEQ ID NO: 295058
uaaacccgcucuuaagagc

SEQ ID NO: 295060 - RNA, 19 nt, Artificial Sequence
  Description of Artificial Sequence: Synthetic oligonucleotide
  Sense strand starting at position 3014 of SEQ ID NO: 3792
cucuuaagagcggguuuau

SEQ ID NO: 295061 - RNA, 19 nt, Artificial Sequence
  Description of Artificial Sequence: Synthetic oligonucleotide
  Antisense strand to SEQ ID NO: 295060
auaaacccgcucuuaagag

SEQ ID NO: 295062 - RNA, 19 nt, Artificial Sequence
  Description of Artificial Sequence: Synthetic oligonucleotide
  Sense strand starting at position 3024 of SEQ ID NO: 3792
cggguuuaucaaugcauca

SEQ ID NO: 295063 - RNA, 19 nt, Artificial Sequence
  Description of Artificial Sequence: Synthetic oligonucleotide
  Antisense strand to SEQ ID NO: 295062
ugaugcauugauaaacccg

SEQ ID NO: 295064 - RNA, 19 nt, Artificial Sequence
  Description of Artificial Sequence: Synthetic oligonucleotide
  Sense strand starting at position 3076 of SEQ ID NO: 3792
cuggucacuugguuaugua

SEQ ID NO: 295065 - RNA, 19 nt, Artificial Sequence
  Description of Artificial Sequence: Synthetic oligonucleotide
  Antisense strand to SEQ ID NO: 295064
uacauaaccaagugaccag

SEQ ID NO: 295066 - RNA, 19 nt, Artificial Sequence
  Description of Artificial Sequence: Synthetic oligonucleotide
  Sense strand starting at position 3077 of SEQ ID NO: 3792
uggucacuugguuauguaa

SEQ ID NO: 295067 - RNA, 19 nt, Artificial Sequence
  Description of Artificial Sequence: Synthetic oligonucleotide
  Antisense strand to SEQ ID NO: 295066
uuacauaaccaagugacca

SEQ ID NO: 295068 - RNA, 19 nt, Artificial Sequence
  Description of Artificial Sequence: Synthetic oligonucleotide
  Sense strand starting at position 3230 of SEQ ID NO: 3792
uuacuugaguuagccauaa

SEQ ID NO: 295069 - RNA, 19 nt, Artificial Sequence
  Description of Artificial Sequence: Synthetic oligonucleotide
  Antisense strand to SEQ ID NO: 295068
uuauggcuaacucaaguaa

SEQ ID NO: 295070 - RNA, 19 nt, Artificial Sequence
  Description of Artificial Sequence: Synthetic oligonucleotide
  Sense strand starting at position 3234 of SEQ ID NO: 3792
uugaguuagccauaauuau

SEQ ID NO: 295071 - RNA, 19 nt, Artificial Sequence
  Description of Artificial Sequence: Synthetic oligonucleotide
  Antisense strand to SEQ ID NO: 295070
auaauuauggcuaacucaa

SEQ ID NO: 295072 - RNA, 19 nt, Artificial Sequence
  Description of Artificial Sequence: Synthetic oligonucleotide
  Sense strand starting at position 3553 of SEQ ID NO: 3792
ucuuuauagagccaggguu

SEQ ID NO: 295073 - RNA, 19 nt, Artificial Sequence
  Description of Artificial Sequence: Synthetic oligonucleotide
  Antisense strand to SEQ ID NO: 295072
aacccuggcucuauaaaga

SEQ ID NO: 295074 - RNA, 19 nt, Artificial Sequence
  Description of Artificial Sequence: Synthetic oligonucleotide
  Sense strand starting at position 3929 of SEQ ID NO: 3792
gcuagacccucauucugaa

SEQ ID NO: 295075 - RNA, 19 nt, Artificial Sequence
  Description of Artificial Sequence: Synthetic oligonucleotide
  Antisense strand to SEQ ID NO: 295074
uucagaaugagggucuagc

SEQ ID NO: 295076 - RNA, 19 nt, Artificial Sequence
  Description of Artificial Sequence: Synthetic oligonucleotide
  Sense strand starting at position 20 of SEQ ID NO: 3793
cucggacagagauguucuu

SEQ ID NO: 295077 - RNA, 19 nt, Artificial Sequence
  Description of Artificial Sequence: Synthetic oligonucleotide
  Antisense strand to SEQ ID NO: 295076
aagaacaucucuguccgag

SEQ ID NO: 295078 - RNA, 19 nt, Artificial Sequence
  Description of Artificial Sequence: Synthetic oligonucleotide
  Sense strand starting at position 86 of SEQ ID NO: 3793
gugguuuaaagugaggguu

SEQ ID NO: 295079 - RNA, 19 nt, Artificial Sequence
  Description of Artificial Sequence: Synthetic oligonucleotide
  Antisense strand to SEQ ID NO: 295078
aacccucacuuuaaaccac

SEQ ID NO: 295080 - RNA, 19 nt, Artificial Sequence
  Description of Artificial Sequence: Synthetic oligonucleotide
  Sense strand starting at position 110 of SEQ ID NO: 3793
gucagaauagaguggguuu

SEQ ID NO: 295081 - RNA, 19 nt, Artificial Sequence
  Description of Artificial Sequence: Synthetic oligonucleotide
  Antisense strand to SEQ ID NO: 295080
aaacccacucuauucugac

SEQ ID NO: 295082 - RNA, 19 nt, Artificial Sequence
  Description of Artificial Sequence: Synthetic oligonucleotide
  Sense strand starting at position 233 of SEQ ID NO: 3793
aggauuaucacgugugaaa

SEQ ID NO: 295083 - RNA, 19 nt, Artificial Sequence
  Description of Artificial Sequence: Synthetic oligonucleotide
  Antisense strand to SEQ ID NO: 295082
uuucacacgugauaauccu

SEQ ID NO: 295084 - RNA, 19 nt, Artificial Sequence
  Description of Artificial Sequence: Synthetic oligonucleotide
  Sense strand starting at position 266 of SEQ ID NO: 3793
ucugaaugcuagguacaca

SEQ ID NO: 295085 - RNA, 19 nt, Artificial Sequence
  Description of Artificial Sequence: Synthetic oligonucleotide
  Antisense strand to SEQ ID NO: 295084
uguguaccuagcauucaga

SEQ ID NO: 295086 - RNA, 19 nt, Artificial Sequence
  Description of Artificial Sequence: Synthetic oligonucleotide
  Sense strand starting at position 281 of SEQ ID NO: 3793
cacaguaaaugcuuaguga

SEQ ID NO: 295087 - RNA, 19 nt, Artificial Sequence
  Description of Artificial Sequence: Synthetic oligonucleotide
  Antisense strand to SEQ ID NO: 295086
ucacuaagcauuuacugug

SEQ ID NO: 295088 - RNA, 19 nt, Artificial Sequence
  Description of Artificial Sequence: Synthetic oligonucleotide
  Sense strand starting at position 282 of SEQ ID NO: 3793
acaguaaaugcuuagugau

SEQ ID NO: 295089 - RNA, 19 nt, Artificial Sequence
  Description of Artificial Sequence: Synthetic oligonucleotide
  Antisense strand to SEQ ID NO: 295088
aucacuaagcauuuacugu

SEQ ID NO: 295090 - RNA, 19 nt, Artificial Sequence
  Description of Artificial Sequence: Synthetic oligonucleotide
  Sense strand starting at position 284 of SEQ ID NO: 3793
aguaaaugcuuagugauaa

SEQ ID NO: 295091 - RNA, 19 nt, Artificial Sequence
  Description of Artificial Sequence: Synthetic oligonucleotide
  Antisense strand to SEQ ID NO: 295090
uuaucacuaagcauuuacu

SEQ ID NO: 295092 - RNA, 19 nt, Artificial Sequence
  Description of Artificial Sequence: Synthetic oligonucleotide
  Sense strand starting at position 311 of SEQ ID NO: 3793
ugcuaucaccauuauuguu

SEQ ID NO: 295093 - RNA, 19 nt, Artificial Sequence
  Description of Artificial Sequence: Synthetic oligonucleotide
  Antisense strand to SEQ ID NO: 295092
aacaauaauggugauagca

SEQ ID NO: 295094 - RNA, 19 nt, Artificial Sequence
  Description of Artificial Sequence: Synthetic oligonucleotide
  Sense strand starting at position 461 of SEQ ID NO: 3793
cagagcuaauuguugggaa

SEQ ID NO: 295095 - RNA, 19 nt, Artificial Sequence
  Description of Artificial Sequence: Synthetic oligonucleotide
  Antisense strand to SEQ ID NO: 295094
uucccaacaauuagcucug

SEQ ID NO: 295096 - RNA, 19 nt, Artificial Sequence
  Description of Artificial Sequence: Synthetic oligonucleotide
  Sense strand starting at position 513 of SEQ ID NO: 3793
uaaugucuuccauggguaa

SEQ ID NO: 295097 - RNA, 19 nt, Artificial Sequence
  Description of Artificial Sequence: Synthetic oligonucleotide
  Antisense strand to SEQ ID NO: 295096
uuacccauggaagacauua

SEQ ID NO: 295098 - RNA, 19 nt, Artificial Sequence
  Description of Artificial Sequence: Synthetic oligonucleotide
  Sense strand starting at position 514 of SEQ ID NO: 3793
aaugucuuccauggguaag

SEQ ID NO: 295099 - RNA, 19 nt, Artificial Sequence
  Description of Artificial Sequence: Synthetic oligonucleotide
  Antisense strand to SEQ ID NO: 295098
cuuacccauggaagacauu

SEQ ID NO: 295100 - RNA, 19 nt, Artificial Sequence
  Description of Artificial Sequence: Synthetic oligonucleotide
  Sense strand starting at position 515 of SEQ ID NO: 3793
augucuuccauggguaaga

SEQ ID NO: 295101 - RNA, 19 nt, Artificial Sequence
  Description of Artificial Sequence: Synthetic oligonucleotide
  Antisense strand to SEQ ID NO: 295100
ucuuacccauggaagacau

SEQ ID NO: 295102 - RNA, 19 nt, Artificial Sequence
  Description of Artificial Sequence: Synthetic oligonucleotide
  Sense strand starting at position 516 of SEQ ID NO: 3793
ugucuuccauggguaagau

SEQ ID NO: 295103 - RNA, 19 nt, Artificial Sequence
  Description of Artificial Sequence: Synthetic oligonucleotide
  Antisense strand to SEQ ID NO: 295102
aucuuacccauggaagaca

SEQ ID NO: 295104 - RNA, 19 nt, Artificial Sequence
  Description of Artificial Sequence: Synthetic oligonucleotide
  Sense strand starting at position 517 of SEQ ID NO: 3793
gucuuccauggguaagauu

SEQ ID NO: 295105 - RNA, 19 nt, Artificial Sequence
  Description of Artificial Sequence: Synthetic oligonucleotide
  Antisense strand to SEQ ID NO: 295104
aaucuuacccauggaagac

SEQ ID NO: 295106 - RNA, 19 nt, Artificial Sequence
  Description of Artificial Sequence: Synthetic oligonucleotide
  Sense strand starting at position 557 of SEQ ID NO: 3793
auaggaugcccaugcaaua

SEQ ID NO: 295107 - RNA, 19 nt, Artificial Sequence
  Description of Artificial Sequence: Synthetic oligonucleotide
  Antisense strand to SEQ ID NO: 295106
uauugcaugggcauccuau

SEQ ID NO: 295108 - RNA, 19 nt, Artificial Sequence
  Description of Artificial Sequence: Synthetic oligonucleotide
  Sense strand starting at position 661 of SEQ ID NO: 3793
uauccaugggccuguauuu

SEQ ID NO: 295109 - RNA, 19 nt, Artificial Sequence
  Description of Artificial Sequence: Synthetic oligonucleotide
  Antisense strand to SEQ ID NO: 295108
aaauacaggcccauggaua

SEQ ID NO: 295110 - RNA, 19 nt, Artificial Sequence
  Description of Artificial Sequence: Synthetic oligonucleotide
  Sense strand starting at position 1018 of SEQ ID NO: 3793
acccuuagaucucugagga

SEQ ID NO: 295111 - RNA, 19 nt, Artificial Sequence
  Description of Artificial Sequence: Synthetic oligonucleotide
  Antisense strand to SEQ ID NO: 295110
uccucagagaucuaagggu

SEQ ID NO: 295112 - RNA, 19 nt, Artificial Sequence
  Description of Artificial Sequence: Synthetic oligonucleotide
  Sense strand starting at position 1019 of SEQ ID NO: 3793
cccuuagaucucugaggac

SEQ ID NO: 295113 - RNA, 19 nt, Artificial Sequence
  Description of Artificial Sequence: Synthetic oligonucleotide
  Antisense strand to SEQ ID NO: 295112
guccucagagaucuaaggg

SEQ ID NO: 295114 - RNA, 19 nt, Artificial Sequence
  Description of Artificial Sequence: Synthetic oligonucleotide
  Sense strand starting at position 1113 of SEQ ID NO: 3793
acuaaauggucucccugau

SEQ ID NO: 295115 - RNA, 19 nt, Artificial Sequence
  Description of Artificial Sequence: Synthetic oligonucleotide
  Antisense strand to SEQ ID NO: 295114
aucagggagaccauuuagu

SEQ ID NO: 295116 - RNA, 19 nt, Artificial Sequence
  Description of Artificial Sequence: Synthetic oligonucleotide
  Sense strand starting at position 1154 of SEQ ID NO: 3793
agacuaucuuccuuggacu

SEQ ID NO: 295117 - RNA, 19 nt, Artificial Sequence
  Description of Artificial Sequence: Synthetic oligonucleotide
  Antisense strand to SEQ ID NO: 295116
aguccaaggaagauagucu

SEQ ID NO: 295118 - RNA, 19 nt, Artificial Sequence
  Description of Artificial Sequence: Synthetic oligonucleotide
  Sense strand starting at position 1318 of SEQ ID NO: 3793
auuccuagugagcaaguau

SEQ ID NO: 295119 - RNA, 19 nt, Artificial Sequence
  Description of Artificial Sequence: Synthetic oligonucleotide
  Antisense strand to SEQ ID NO: 295118
auacuugcucacuaggaau

SEQ ID NO: 295120 - RNA, 19 nt, Artificial Sequence
  Description of Artificial Sequence: Synthetic oligonucleotide
  Sense strand starting at position 1327 of SEQ ID NO: 3793
gagcaaguauuacuaugga

SEQ ID NO: 295121 - RNA, 19 nt, Artificial Sequence
  Description of Artificial Sequence: Synthetic oligonucleotide
  Antisense strand to SEQ ID NO: 295120
uccauaguaauacuugcuc

SEQ ID NO: 295122 - RNA, 19 nt, Artificial Sequence
  Description of Artificial Sequence: Synthetic oligonucleotide
  Sense strand starting at position 1366 of SEQ ID NO: 3793
guauguguggcugucuuca

SEQ ID NO: 295123 - RNA, 19 nt, Artificial Sequence
  Description of Artificial Sequence: Synthetic oligonucleotide
  Antisense strand to SEQ ID NO: 295122
ugaagacagccacacauac

SEQ ID NO: 295124 - RNA, 19 nt, Artificial Sequence
  Description of Artificial Sequence: Synthetic oligonucleotide
  Sense strand starting at position 1392 of SEQ ID NO: 3793
ucaggaugaugagaaauga

SEQ ID NO: 295125 - RNA, 19 nt, Artificial Sequence
  Description of Artificial Sequence: Synthetic oligonucleotide
  Antisense strand to SEQ ID NO: 295124
ucauuucucaucauccuga

SEQ ID NO: 295126 - RNA, 19 nt, Artificial Sequence
  Description of Artificial Sequence: Synthetic oligonucleotide
  Sense strand starting at position 1426 of SEQ ID NO: 3793
cuggucucuuggguagaaa

SEQ ID NO: 295127 - RNA, 19 nt, Artificial Sequence
  Description of Artificial Sequence: Synthetic oligonucleotide
  Antisense strand to SEQ ID NO: 295126
uuucuacccaagagaccag

SEQ ID NO: 295128 - RNA, 19 nt, Artificial Sequence
  Description of Artificial Sequence: Synthetic oligonucleotide
  Sense strand starting at position 1427 of SEQ ID NO: 3793
uggucucuuggguagaaac

SEQ ID NO: 295129 - RNA, 19 nt, Artificial Sequence
  Description of Artificial Sequence: Synthetic oligonucleotide
  Antisense strand to SEQ ID NO: 295128
guuucuacccaagagacca

SEQ ID NO: 295130 - RNA, 19 nt, Artificial Sequence
  Description of Artificial Sequence: Synthetic oligonucleotide
  Sense strand starting at position 1481 of SEQ ID NO: 3793
caggauacacguuaaccau

SEQ ID NO: 295131 - RNA, 19 nt, Artificial Sequence
  Description of Artificial Sequence: Synthetic oligonucleotide
  Antisense strand to SEQ ID NO: 295130
augguuaacguguauccug

SEQ ID NO: 295132 - RNA, 19 nt, Artificial Sequence
  Description of Artificial Sequence: Synthetic oligonucleotide
  Sense strand starting at position 2294 of SEQ ID NO: 3793
gcucuaagauacccuggau

SEQ ID NO: 295133 - RNA, 19 nt, Artificial Sequence
  Description of Artificial Sequence: Synthetic oligonucleotide
  Antisense strand to SEQ ID NO: 295132
auccaggguaucuuagagc

SEQ ID NO: 295134 - RNA, 19 nt, Artificial Sequence
  Description of Artificial Sequence: Synthetic oligonucleotide
  Sense strand starting at position 2655 of SEQ ID NO: 3793
ccaauugguuggguuaaac

SEQ ID NO: 295135 - RNA, 19 nt, Artificial Sequence
  Description of Artificial Sequence: Synthetic oligonucleotide
  Antisense strand to SEQ ID NO: 295134
guuuaacccaaccaauugg

SEQ ID NO: 295136 - RNA, 19 nt, Artificial Sequence
  Description of Artificial Sequence: Synthetic oligonucleotide
  Sense strand starting at position 2665 of SEQ ID NO: 3793
ggguuaaacaggugacuga

SEQ ID NO: 295137 - RNA, 19 nt, Artificial Sequence
  Description of Artificial Sequence: Synthetic oligonucleotide
  Antisense strand to SEQ ID NO: 295136
ucagucaccuguuuaaccc

SEQ ID NO: 295138 - RNA, 19 nt, Artificial Sequence
  Description of Artificial Sequence: Synthetic oligonucleotide
  Sense strand starting at position 2676 of SEQ ID NO: 3793
gugacugaaucuuucucua

SEQ ID NO: 295139 - RNA, 19 nt, Artificial Sequence
  Description of Artificial Sequence: Synthetic oligonucleotide
  Antisense strand to SEQ ID NO: 295138
uagagaaagauucagucac

SEQ ID NO: 295140 - RNA, 19 nt, Artificial Sequence
  Description of Artificial Sequence: Synthetic oligonucleotide
  Sense strand starting at position 2804 of SEQ ID NO: 3793
auguguucaccugaggaga

SEQ ID NO: 295141 - RNA, 19 nt, Artificial Sequence
  Description of Artificial Sequence: Synthetic oligonucleotide
  Antisense strand to SEQ ID NO: 295140
ucuccucaggugaacacau

SEQ ID NO: 295142 - RNA, 19 nt, Artificial Sequence
  Description of Artificial Sequence: Synthetic oligonucleotide
  Sense strand starting at position 2897 of SEQ ID NO: 3793
agguuuagagcagaccuau

SEQ ID NO: 295143 - RNA, 19 nt, Artificial Sequence
  Description of Artificial Sequence: Synthetic oligonucleotide
  Antisense strand to SEQ ID NO: 295142
auaggucugcucuaaaccu

SEQ ID NO: 295144 - RNA, 19 nt, Artificial Sequence
  Description of Artificial Sequence: Synthetic oligonucleotide
  Sense strand starting at position 2903 of SEQ ID NO: 3793
agagcagaccuaugcagau

SEQ ID NO: 295145 - RNA, 19 nt, Artificial Sequence
  Description of Artificial Sequence: Synthetic oligonucleotide
  Antisense strand to SEQ ID NO: 295144
aucugcauaggucugcucu

SEQ ID NO: 295146 - RNA, 19 nt, Artificial Sequence
  Description of Artificial Sequence: Synthetic oligonucleotide
  Sense strand starting at position 3441 of SEQ ID NO: 3793
uuauacaggcuuugaaaua

SEQ ID NO: 295147 - RNA, 19 nt, Artificial Sequence
  Description of Artificial Sequence: Synthetic oligonucleotide
  Antisense strand to SEQ ID NO: 295146
uauuucaaagccuguauaa

SEQ ID NO: 295148 - RNA, 19 nt, Artificial Sequence
  Description of Artificial Sequence: Synthetic oligonucleotide
  Sense strand starting at position 3775 of SEQ ID NO: 3793
aaaggucccugagcgagaa

SEQ ID NO: 295149 - RNA, 19 nt, Artificial Sequence
  Description of Artificial Sequence: Synthetic oligonucleotide
  Antisense strand to SEQ ID NO: 295148
uucucgcucagggaccuuu

SEQ ID NO: 295150 - RNA, 19 nt, Artificial Sequence
  Description of Artificial Sequence: Synthetic oligonucleotide
  Sense strand starting at position 3779 of SEQ ID NO: 3793
gucccugagcgagaagauu

SEQ ID NO: 295151 - RNA, 19 nt, Artificial Sequence
  Description of Artificial Sequence: Synthetic oligonucleotide
  Antisense strand to SEQ ID NO: 295150
aaucuucucgcucagggac

SEQ ID NO: 295152 - RNA, 19 nt, Artificial Sequence
  Description of Artificial Sequence: Synthetic oligonucleotide
  Sense strand starting at position 3836 of SEQ ID NO: 3793
agcucagcucaagaguauu

SEQ ID NO: 295153 - RNA, 19 nt, Artificial Sequence
  Description of Artificial Sequence: Synthetic oligonucleotide
  Antisense strand to SEQ ID NO: 295152
aauacucuugagcugagcu

SEQ ID NO: 295154 - RNA, 19 nt, Artificial Sequence
  Description of Artificial Sequence: Synthetic oligonucleotide
  Sense strand starting at position 3896 of SEQ ID NO: 3793
gcaagugaaucuguaugaa

SEQ ID NO: 295155 - RNA, 19 nt, Artificial Sequence
  Description of Artificial Sequence: Synthetic oligonucleotide
  Antisense strand to SEQ ID NO: 295154
uucauacagauucacuugc

SEQ ID NO: 295156 - RNA, 19 nt, Artificial Sequence
  Description of Artificial Sequence: Synthetic oligonucleotide
  Sense strand starting at position 75 of SEQ ID NO: 3796
ggaugagaagcucgugaag

SEQ ID NO: 295157 - RNA, 19 nt, Artificial Sequence
  Description of Artificial Sequence: Synthetic oligonucleotide
  Antisense strand to SEQ ID NO: 295156
cuucacgagcuucucaucc

SEQ ID NO: 295158 - RNA, 19 nt, Artificial Sequence
  Description of Artificial Sequence: Synthetic oligonucleotide
  Sense strand starting at position 2053 of SEQ ID NO: 3796
uuagaagggugacuucuua

SEQ ID NO: 295159 - RNA, 19 nt, Artificial Sequence
  Description of Artificial Sequence: Synthetic oligonucleotide
  Antisense strand to SEQ ID NO: 295158
uaagaagucacccuucuaa

SEQ ID NO: 295160 - RNA, 19 nt, Artificial Sequence
  Description of Artificial Sequence: Synthetic oligonucleotide
  Sense strand starting at position 2057 of SEQ ID NO: 3796
aagggugacuucuuagcuu

SEQ ID NO: 295161 - RNA, 19 nt, Artificial Sequence
  Description of Artificial Sequence: Synthetic oligonucleotide
  Antisense strand to SEQ ID NO: 295160
aagcuaagaagucacccuu

SEQ ID NO: 295162 - RNA, 19 nt, Artificial Sequence
  Description of Artificial Sequence: Synthetic oligonucleotide
  Sense strand starting at position 2095 of SEQ ID NO: 3796
uggcaauaccaauaacugu

SEQ ID NO: 295163 - RNA, 19 nt, Artificial Sequence
  Description of Artificial Sequence: Synthetic oligonucleotide
  Antisense strand to SEQ ID NO: 295162
acaguuauugguauugcca

SEQ ID NO: 295164 - RNA, 19 nt, Artificial Sequence
  Description of Artificial Sequence: Synthetic oligonucleotide
  Sense strand starting at position 2212 of SEQ ID NO: 3796
ugcagaaucguacauaauc

SEQ ID NO: 295165 - RNA, 19 nt, Artificial Sequence
  Description of Artificial Sequence: Synthetic oligonucleotide
  Antisense strand to SEQ ID NO: 295164
gauuauguacgauucugca

SEQ ID NO: 295166 - RNA, 19 nt, Artificial Sequence
  Description of Artificial Sequence: Synthetic oligonucleotide
  Sense strand starting at position 2268 of SEQ ID NO: 3796
acaccuuucggauaaaguu

SEQ ID NO: 295167 - RNA, 19 nt, Artificial Sequence
  Description of Artificial Sequence: Synthetic oligonucleotide
  Antisense strand to SEQ ID NO: 295166
aacuuuauccgaaaggugu

SEQ ID NO: 295168 - RNA, 19 nt, Artificial Sequence
  Description of Artificial Sequence: Synthetic oligonucleotide
  Sense strand starting at position 2410 of SEQ ID NO: 3796
uuggauugguguguggaua

SEQ ID NO: 295169 - RNA, 19 nt, Artificial Sequence
  Description of Artificial Sequence: Synthetic oligonucleotide
  Antisense strand to SEQ ID NO: 295168
uauccacacaccaauccaa

SEQ ID NO: 295170 - RNA, 19 nt, Artificial Sequence
  Description of Artificial Sequence: Synthetic oligonucleotide
  Sense strand starting at position 2411 of SEQ ID NO: 3796
uggauugguguguggauaa

SEQ ID NO: 295171 - RNA, 19 nt, Artificial Sequence
  Description of Artificial Sequence: Synthetic oligonucleotide
  Antisense strand to SEQ ID NO: 295170
uuauccacacaccaaucca

SEQ ID NO: 295172 - RNA, 19 nt, Artificial Sequence
  Description of Artificial Sequence: Synthetic oligonucleotide
  Sense strand starting at position 2449 of SEQ ID NO: 3796
auuagcaagugcuuuauaa

SEQ ID NO: 295173 - RNA, 19 nt, Artificial Sequence
  Description of Artificial Sequence: Synthetic oligonucleotide
  Antisense strand to SEQ ID NO: 295172
uuauaaagcacuugcuaau

SEQ ID NO: 295174 - RNA, 19 nt, Artificial Sequence
  Description of Artificial Sequence: Synthetic oligonucleotide
  Sense strand starting at position 2451 of SEQ ID NO: 3796
uagcaagugcuuuauaagu

SEQ ID NO: 295175 - RNA, 19 nt, Artificial Sequence
  Description of Artificial Sequence: Synthetic oligonucleotide
  Antisense strand to SEQ ID NO: 295174
acuuauaaagcacuugcua

SEQ ID NO: 295176 - RNA, 19 nt, Artificial Sequence
  Description of Artificial Sequence: Synthetic oligonucleotide
  Sense strand starting at position 2478 of SEQ ID NO: 3796
auuuaauccuuggaagaac

SEQ ID NO: 295177 - RNA, 19 nt, Artificial Sequence
  Description of Artificial Sequence: Synthetic oligonucleotide
  Antisense strand to SEQ ID NO: 295176
guucuuccaaggauuaaau

SEQ ID NO: 295178 - RNA, 19 nt, Artificial Sequence
  Description of Artificial Sequence: Synthetic oligonucleotide
  Sense strand starting at position 2604 of SEQ ID NO: 3796
ucucuugagcccuggagau

SEQ ID NO: 295179 - RNA, 19 nt, Artificial Sequence
  Description of Artificial Sequence: Synthetic oligonucleotide
  Antisense strand to SEQ ID NO: 295178
aucuccagggcucaagaga

SEQ ID NO: 295180 - RNA, 19 nt, Artificial Sequence
  Description of Artificial Sequence: Synthetic oligonucleotide
  Sense strand starting at position 2606 of SEQ ID NO: 3796
ucuugagcccuggagauca

SEQ ID NO: 295181 - RNA, 19 nt, Artificial Sequence
  Description of Artificial Sequence: Synthetic oligonucleotide
  Antisense strand to SEQ ID NO: 295180
ugaucuccagggcucaaga

SEQ ID NO: 295182 - RNA, 19 nt, Artificial Sequence
  Description of Artificial Sequence: Synthetic oligonucleotide
  Sense strand starting at position 2869 of SEQ ID NO: 3796
ggugaaauaaguugccuaa

SEQ ID NO: 295183 - RNA, 19 nt, Artificial Sequence
  Description of Artificial Sequence: Synthetic oligonucleotide
  Antisense strand to SEQ ID NO: 295182
uuaggcaacuuauuucacc

SEQ ID NO: 295184 - RNA, 19 nt, Artificial Sequence
  Description of Artificial Sequence: Synthetic oligonucleotide
  Sense strand starting at position 2871 of SEQ ID NO: 3796
ugaaauaaguugccuaagu

SEQ ID NO: 295185 - RNA, 19 nt, Artificial Sequence
  Description of Artificial Sequence: Synthetic oligonucleotide
  Antisense strand to SEQ ID NO: 295184
acuuaggcaacuuauuuca

SEQ ID NO: 295186 - RNA, 19 nt, Artificial Sequence
  Description of Artificial Sequence: Synthetic oligonucleotide
  Sense strand starting at position 2872 of SEQ ID NO: 3796
gaaauaaguugccuaaguu

SEQ ID NO: 295187 - RNA, 19 nt, Artificial Sequence
  Description of Artificial Sequence: Synthetic oligonucleotide
  Antisense strand to SEQ ID NO: 295186
aacuuaggcaacuuauuuc

SEQ ID NO: 295188 - RNA, 19 nt, Artificial Sequence
  Description of Artificial Sequence: Synthetic oligonucleotide
  Sense strand starting at position 2892 of SEQ ID NO: 3796
uuagcuaguaagugguaaa

SEQ ID NO: 295189 - RNA, 19 nt, Artificial Sequence
  Description of Artificial Sequence: Synthetic oligonucleotide
  Antisense strand to SEQ ID NO: 295188
uuuaccacuuacuagcuaa

SEQ ID NO: 295190 - RNA, 19 nt, Artificial Sequence
  Description of Artificial Sequence: Synthetic oligonucleotide
  Sense strand starting at position 2899 of SEQ ID NO: 3796
guaagugguaaaggaagaa

SEQ ID NO: 295191 - RNA, 19 nt, Artificial Sequence
  Description of Artificial Sequence: Synthetic oligonucleotide
  Antisense strand to SEQ ID NO: 295190
uucuuccuuuaccacuuac

SEQ ID NO: 295192 - RNA, 19 nt, Artificial Sequence
  Description of Artificial Sequence: Synthetic oligonucleotide
  Sense strand starting at position 2956 of SEQ ID NO: 3796
gaggaaagcuugcuucuag

SEQ ID NO: 295193 - RNA, 19 nt, Artificial Sequence
  Description of Artificial Sequence: Synthetic oligonucleotide
  Antisense strand to SEQ ID NO: 295192
cuagaagcaagcuuuccuc

SEQ ID NO: 295194 - RNA, 19 nt, Artificial Sequence
  Description of Artificial Sequence: Synthetic oligonucleotide
  Sense strand starting at position 2957 of SEQ ID NO: 3796
aggaaagcuugcuucuaga

SEQ ID NO: 295195 - RNA, 19 nt, Artificial Sequence
  Description of Artificial Sequence: Synthetic oligonucleotide
  Antisense strand to SEQ ID NO: 295194
ucuagaagcaagcuuuccu

SEQ ID NO: 295196 - RNA, 19 nt, Artificial Sequence
  Description of Artificial Sequence: Synthetic oligonucleotide
  Sense strand starting at position 3074 of SEQ ID NO: 3796
uagguccucuggcuaaaua

SEQ ID NO: 295197 - RNA, 19 nt, Artificial Sequence
  Description of Artificial Sequence: Synthetic oligonucleotide
  Antisense strand to SEQ ID NO: 295196
uauuuagccagaggaccua

SEQ ID NO: 295198 - RNA, 19 nt, Artificial Sequence
  Description of Artificial Sequence: Synthetic oligonucleotide
  Sense strand starting at position 3075 of SEQ ID NO: 3796
agguccucuggcuaaauaa

SEQ ID NO: 295199 - RNA, 19 nt, Artificial Sequence
  Description of Artificial Sequence: Synthetic oligonucleotide
  Antisense strand to SEQ ID NO: 295198
uuauuuagccagaggaccu

SEQ ID NO: 295200 - RNA, 19 nt, Artificial Sequence
  Description of Artificial Sequence: Synthetic oligonucleotide
  Sense strand starting at position 3107 of SEQ ID NO: 3796
uugggagguuuccuccaua

SEQ ID NO: 295201 - RNA, 19 nt, Artificial Sequence
  Description of Artificial Sequence: Synthetic oligonucleotide
  Antisense strand to SEQ ID NO: 295200
uauggaggaaaccucccaa

SEQ ID NO: 295202 - RNA, 19 nt, Artificial Sequence
  Description of Artificial Sequence: Synthetic oligonucleotide
  Sense strand starting at position 3110 of SEQ ID NO: 3796
ggagguuuccuccauaauu

SEQ ID NO: 295203 - RNA, 19 nt, Artificial Sequence
  Description of Artificial Sequence: Synthetic oligonucleotide
  Antisense strand to SEQ ID NO: 295202
aauuauggaggaaaccucc

SEQ ID NO: 295204 - RNA, 19 nt, Artificial Sequence
  Description of Artificial Sequence: Synthetic oligonucleotide
  Sense strand starting at position 3112 of SEQ ID NO: 3796
agguuuccuccauaauuag

SEQ ID NO: 295205 - RNA, 19 nt, Artificial Sequence
  Description of Artificial Sequence: Synthetic oligonucleotide
  Antisense strand to SEQ ID NO: 295204
cuaauuauggaggaaaccu

SEQ ID NO: 295206 - RNA, 19 nt, Artificial Sequence
  Description of Artificial Sequence: Synthetic oligonucleotide
  Sense strand starting at position 3164 of SEQ ID NO: 3796
uaggaagggcuuuggaaau

SEQ ID NO: 295207 - RNA, 19 nt, Artificial Sequence
  Description of Artificial Sequence: Synthetic oligonucleotide
  Antisense strand to SEQ ID NO: 295206
auuuccaaagcccuuccua

SEQ ID NO: 295208 - RNA, 19 nt, Artificial Sequence
  Description of Artificial Sequence: Synthetic oligonucleotide
  Sense strand starting at position 3244 of SEQ ID NO: 3796
aucuaacuugcuuagugaa

SEQ ID NO: 295209 - RNA, 19 nt, Artificial Sequence
  Description of Artificial Sequence: Synthetic oligonucleotide
  Antisense strand to SEQ ID NO: 295208
uucacuaagcaaguuagau

SEQ ID NO: 295210 - RNA, 19 nt, Artificial Sequence
  Description of Artificial Sequence: Synthetic oligonucleotide
  Sense strand starting at position 3254 of SEQ ID NO: 3796
cuuagugaaguccgacaga

SEQ ID NO: 295211 - RNA, 19 nt, Artificial Sequence
  Description of Artificial Sequence: Synthetic oligonucleotide
  Antisense strand to SEQ ID NO: 295210
ucugucggacuucacuaag

SEQ ID NO: 295212 - RNA, 19 nt, Artificial Sequence
  Description of Artificial Sequence: Synthetic oligonucleotide
  Sense strand starting at position 3376 of SEQ ID NO: 3796
guagguaggagcuauaaga

SEQ ID NO: 295213 - RNA, 19 nt, Artificial Sequence
  Description of Artificial Sequence: Synthetic oligonucleotide
  Antisense strand to SEQ ID NO: 295212
ucuuauagcuccuaccuac

SEQ ID NO: 295214 - RNA, 19 nt, Artificial Sequence
  Description of Artificial Sequence: Synthetic oligonucleotide
  Sense strand starting at position 3393 of SEQ ID NO: 3796
gaauaaaugcuguaugugu

SEQ ID NO: 295215 - RNA, 19 nt, Artificial Sequence
  Description of Artificial Sequence: Synthetic oligonucleotide
  Antisense strand to SEQ ID NO: 295214
acacauacagcauuuauuc

SEQ ID NO: 295216 - RNA, 19 nt, Artificial Sequence
  Description of Artificial Sequence: Synthetic oligonucleotide
  Sense strand starting at position 3406 of SEQ ID NO: 3796
auguguugagagcaaagau

SEQ ID NO: 295217 - RNA, 19 nt, Artificial Sequence
  Description of Artificial Sequence: Synthetic oligonucleotide
  Antisense strand to SEQ ID NO: 295216
aucuuugcucucaacacau

SEQ ID NO: 295218 - RNA, 19 nt, Artificial Sequence
  Description of Artificial Sequence: Synthetic oligonucleotide
  Sense strand starting at position 3423 of SEQ ID NO: 3796
auguuaaagcagugaauca

SEQ ID NO: 295219 - RNA, 19 nt, Artificial Sequence
  Description of Artificial Sequence: Synthetic oligonucleotide
  Antisense strand to SEQ ID NO: 295218
ugauucacugcuuuaacau

SEQ ID NO: 295220 - RNA, 19 nt, Artificial Sequence
  Description of Artificial Sequence: Synthetic oligonucleotide
  Sense strand starting at position 3544 of SEQ ID NO: 3796
aguauagaauaacuucgaa

SEQ ID NO: 295221 - RNA, 19 nt, Artificial Sequence
  Description of Artificial Sequence: Synthetic oligonucleotide
  Antisense strand to SEQ ID NO: 295220
uucgaaguuauucuauacu

SEQ ID NO: 295222 - RNA, 19 nt, Artificial Sequence
  Description of Artificial Sequence: Synthetic oligonucleotide
  Sense strand starting at position 3716 of SEQ ID NO: 3796
guuucuguuagagaggauu

SEQ ID NO: 295223 - RNA, 19 nt, Artificial Sequence
  Description of Artificial Sequence: Synthetic oligonucleotide
  Antisense strand to SEQ ID NO: 295222
aauccucucuaacagaaac

SEQ ID NO: 295224 - RNA, 19 nt, Artificial Sequence
  Description of Artificial Sequence: Synthetic oligonucleotide
  Sense strand starting at position 3908 of SEQ ID NO: 3796
ucaccagauggucaaaguu

SEQ ID NO: 295225 - RNA, 19 nt, Artificial Sequence
  Description of Artificial Sequence: Synthetic oligonucleotide
  Antisense strand to SEQ ID NO: 295224
aacuuugaccaucugguga

SEQ ID NO: 295226 - RNA, 19 nt, Artificial Sequence
  Description of Artificial Sequence: Synthetic oligonucleotide
  Sense strand starting at position 3945 of SEQ ID NO: 3796
guuugaaaucuugaucugu

SEQ ID NO: 295227 - RNA, 19 nt, Artificial Sequence
  Description of Artificial Sequence: Synthetic oligonucleotide
  Antisense strand to SEQ ID NO: 295226
acagaucaagauuucaaac

SEQ ID NO: 295228 - RNA, 19 nt, Artificial Sequence
  Description of Artificial Sequence: Synthetic oligonucleotide
  Sense strand starting at position 3947 of SEQ ID NO: 3796
uugaaaucuugaucugugu

SEQ ID NO: 295229 - RNA, 19 nt, Artificial Sequence
  Description of Artificial Sequence: Synthetic oligonucleotide
  Antisense strand to SEQ ID NO: 295228
acacagaucaagauuucaa

SEQ ID NO: 295230 - RNA, 19 nt, Artificial Sequence
  Description of Artificial Sequence: Synthetic oligonucleotide
  Sense strand starting at position 3951 of SEQ ID NO: 3796
aaucuugaucuguguaaug

SEQ ID NO: 295231 - RNA, 19 nt, Artificial Sequence
  Description of Artificial Sequence: Synthetic oligonucleotide
  Antisense strand to SEQ ID NO: 295230
cauuacacagaucaagauu

SEQ ID NO: 295232 - RNA, 19 nt, Artificial Sequence
  Description of Artificial Sequence: Synthetic oligonucleotide
  Sense strand starting at position 3953 of SEQ ID NO: 3796
ucuugaucuguguaaugcu

SEQ ID NO: 295233 - RNA, 19 nt, Artificial Sequence
  Description of Artificial Sequence: Synthetic oligonucleotide
  Antisense strand to SEQ ID NO: 295232
agcauuacacagaucaaga

SEQ ID NO: 295234 - RNA, 19 nt, Artificial Sequence
  Description of Artificial Sequence: Synthetic oligonucleotide
  Sense strand starting at position 3970 of SEQ ID NO: 3796
cuaguuugacaguauuguu

SEQ ID NO: 295235 - RNA, 19 nt, Artificial Sequence
  Description of Artificial Sequence: Synthetic oligonucleotide
  Antisense strand to SEQ ID NO: 295234
aacaauacugucaaacuag

SEQ ID NO: 295236 - RNA, 19 nt, Artificial Sequence
  Description of Artificial Sequence: Synthetic oligonucleotide
  Sense strand starting at position 29 of SEQ ID NO: 3794
ugaagagauuucugacuuc

SEQ ID NO: 295237 - RNA, 19 nt, Artificial Sequence
  Description of Artificial Sequence: Synthetic oligonucleotide
  Antisense strand to SEQ ID NO: 295236
gaagucagaaaucucuuca

SEQ ID NO: 295238 - RNA, 19 nt, Artificial Sequence
  Description of Artificial Sequence: Synthetic oligonucleotide
  Sense strand starting at position 116 of SEQ ID NO: 3794
gcugaaaccuuccuuuaag

SEQ ID NO: 295239 - RNA, 19 nt, Artificial Sequence
  Description of Artificial Sequence: Synthetic oligonucleotide
  Antisense strand to SEQ ID NO: 295238
cuuaaaggaagguuucagc

SEQ ID NO: 295240 - RNA, 19 nt, Artificial Sequence
  Description of Artificial Sequence: Synthetic oligonucleotide
  Sense strand starting at position 159 of SEQ ID NO: 3794
guuacacgaccuuacuauu

SEQ ID NO: 295241 - RNA, 19 nt, Artificial Sequence
  Description of Artificial Sequence: Synthetic oligonucleotide
  Antisense strand to SEQ ID NO: 295240
aauaguaaggucguguaac

SEQ ID NO: 295242 - RNA, 19 nt, Artificial Sequence
  Description of Artificial Sequence: Synthetic oligonucleotide
  Sense strand starting at position 300 of SEQ ID NO: 3794
aagcaaugagacuguguuu

SEQ ID NO: 295243 - RNA, 19 nt, Artificial Sequence
  Description of Artificial Sequence: Synthetic oligonucleotide
  Antisense strand to SEQ ID NO: 295242
aaacacagucucauugcuu

SEQ ID NO: 295244 - RNA, 19 nt, Artificial Sequence
  Description of Artificial Sequence: Synthetic oligonucleotide
  Sense strand starting at position 305 of SEQ ID NO: 3794
augagacuguguuugaagu

SEQ ID NO: 295245 - RNA, 19 nt, Artificial Sequence
  Description of Artificial Sequence: Synthetic oligonucleotide
  Antisense strand to SEQ ID NO: 295244
acuucaaacacagucucau

SEQ ID NO: 295246 - RNA, 19 nt, Artificial Sequence
  Description of Artificial Sequence: Synthetic oligonucleotide
  Sense strand starting at position 306 of SEQ ID NO: 3794
ugagacuguguuugaaguu

SEQ ID NO: 295247 - RNA, 19 nt, Artificial Sequence
  Description of Artificial Sequence: Synthetic oligonucleotide
  Antisense strand to SEQ ID NO: 295246
aacuucaaacacagucuca

SEQ ID NO: 295248 - RNA, 19 nt, Artificial Sequence
  Description of Artificial Sequence: Synthetic oligonucleotide
  Sense strand starting at position 456 of SEQ ID NO: 3794
ggaugagaagcucgugaag

SEQ ID NO: 295249 - RNA, 19 nt, Artificial Sequence
  Description of Artificial Sequence: Synthetic oligonucleotide
  Antisense strand to SEQ ID NO: 295248
cuucacgagcuucucaucc

SEQ ID NO: 295250 - RNA, 19 nt, Artificial Sequence
  Description of Artificial Sequence: Synthetic oligonucleotide
  Sense strand starting at position 2434 of SEQ ID NO: 3794
uuagaagggugacuucuua

SEQ ID NO: 295251 - RNA, 19 nt, Artificial Sequence
  Description of Artificial Sequence: Synthetic oligonucleotide
  Antisense strand to SEQ ID NO: 295250
uaagaagucacccuucuaa

SEQ ID NO: 295252 - RNA, 19 nt, Artificial Sequence
  Description of Artificial Sequence: Synthetic oligonucleotide
  Sense strand starting at position 2438 of SEQ ID NO: 3794
aagggugacuucuuagcuu

SEQ ID NO: 295253 - RNA, 19 nt, Artificial Sequence
  Description of Artificial Sequence: Synthetic oligonucleotide
  Antisense strand to SEQ ID NO: 295252
aagcuaagaagucacccuu

SEQ ID NO: 295254 - RNA, 19 nt, Artificial Sequence
  Description of Artificial Sequence: Synthetic oligonucleotide
  Sense strand starting at position 2476 of SEQ ID NO: 3794
uggcaauaccaauaacugu

SEQ ID NO: 295255 - RNA, 19 nt, Artificial Sequence
  Description of Artificial Sequence: Synthetic oligonucleotide
  Antisense strand to SEQ ID NO: 295254
acaguuauugguauugcca

SEQ ID NO: 295256 - RNA, 19 nt, Artificial Sequence
  Description of Artificial Sequence: Synthetic oligonucleotide
  Sense strand starting at position 2593 of SEQ ID NO: 3794
ugcagaaucguacauaauc

SEQ ID NO: 295257 - RNA, 19 nt, Artificial Sequence
  Description of Artificial Sequence: Synthetic oligonucleotide
  Antisense strand to SEQ ID NO: 295256
gauuauguacgauucugca

SEQ ID NO: 295258 - RNA, 19 nt, Artificial Sequence
  Description of Artificial Sequence: Synthetic oligonucleotide
  Sense strand starting at position 2649 of SEQ ID NO: 3794
acaccuuucggauaaaguu

SEQ ID NO: 295259 - RNA, 19 nt, Artificial Sequence
  Description of Artificial Sequence: Synthetic oligonucleotide
  Antisense strand to SEQ ID NO: 295258
aacuuuauccgaaaggugu

SEQ ID NO: 295260 - RNA, 19 nt, Artificial Sequence
  Description of Artificial Sequence: Synthetic oligonucleotide
  Sense strand starting at position 2790 of SEQ ID NO: 3794
cuuggauugguguguggau

SEQ ID NO: 295261 - RNA, 19 nt, Artificial Sequence
  Description of Artificial Sequence: Synthetic oligonucleotide
  Antisense strand to SEQ ID NO: 295260
auccacacaccaauccaag

SEQ ID NO: 295262 - RNA, 19 nt, Artificial Sequence
  Description of Artificial Sequence: Synthetic oligonucleotide
  Sense strand starting at position 2791 of SEQ ID NO: 3794
uuggauugguguguggaua

SEQ ID NO: 295263 - RNA, 19 nt, Artificial Sequence
  Description of Artificial Sequence: Synthetic oligonucleotide
  Antisense strand to SEQ ID NO: 295262
uauccacacaccaauccaa

SEQ ID NO: 295264 - RNA, 19 nt, Artificial Sequence
  Description of Artificial Sequence: Synthetic oligonucleotide
  Sense strand starting at position 2792 of SEQ ID NO: 3794
uggauugguguguggauaa

SEQ ID NO: 295265 - RNA, 19 nt, Artificial Sequence
  Description of Artificial Sequence: Synthetic oligonucleotide
  Antisense strand to SEQ ID NO: 295264
uuauccacacaccaaucca

SEQ ID NO: 295266 - RNA, 19 nt, Artificial Sequence
  Description of Artificial Sequence: Synthetic oligonucleotide
  Sense strand starting at position 2830 of SEQ ID NO: 3794
auuagcaagugcuuuauaa

SEQ ID NO: 295267 - RNA, 19 nt, Artificial Sequence
  Description of Artificial Sequence: Synthetic oligonucleotide
  Antisense strand to SEQ ID NO: 295266
uuauaaagcacuugcuaau

SEQ ID NO: 295268 - RNA, 19 nt, Artificial Sequence
  Description of Artificial Sequence: Synthetic oligonucleotide
  Sense strand starting at position 2832 of SEQ ID NO: 3794
uagcaagugcuuuauaagu

SEQ ID NO: 295269 - RNA, 19 nt, Artificial Sequence
  Description of Artificial Sequence: Synthetic oligonucleotide
  Antisense strand to SEQ ID NO: 295268
acuuauaaagcacuugcua

SEQ ID NO: 295270 - RNA, 19 nt, Artificial Sequence
  Description of Artificial Sequence: Synthetic oligonucleotide
  Sense strand starting at position 2859 of SEQ ID NO: 3794
auuuaauccuuggaagaac

SEQ ID NO: 295271 - RNA, 19 nt, Artificial Sequence
  Description of Artificial Sequence: Synthetic oligonucleotide
  Antisense strand to SEQ ID NO: 295270
guucuuccaaggauuaaau

SEQ ID NO: 295272 - RNA, 19 nt, Artificial Sequence
  Description of Artificial Sequence: Synthetic oligonucleotide
  Sense strand starting at position 2985 of SEQ ID NO: 3794
ucucuugagcccuggagau

SEQ ID NO: 295273 - RNA, 19 nt, Artificial Sequence
  Description of Artificial Sequence: Synthetic oligonucleotide
  Antisense strand to SEQ ID NO: 295272
aucuccagggcucaagaga

SEQ ID NO: 295274 - RNA, 19 nt, Artificial Sequence
  Description of Artificial Sequence: Synthetic oligonucleotide
  Sense strand starting at position 2987 of SEQ ID NO: 3794
ucuugagcccuggagauca

SEQ ID NO: 295275 - RNA, 19 nt, Artificial Sequence
  Description of Artificial Sequence: Synthetic oligonucleotide
  Antisense strand to SEQ ID NO: 295274
ugaucuccagggcucaaga

SEQ ID NO: 295276 - RNA, 19 nt, Artificial Sequence
  Description of Artificial Sequence: Synthetic oligonucleotide
  Sense strand starting at position 3250 of SEQ ID NO: 3794
ggugaaauaaguugccuaa

SEQ ID NO: 295277 - RNA, 19 nt, Artificial Sequence
  Description of Artificial Sequence: Synthetic oligonucleotide
  Antisense strand to SEQ ID NO: 295276
uuaggcaacuuauuucacc

SEQ ID NO: 295278 - RNA, 19 nt, Artificial Sequence
  Description of Artificial Sequence: Synthetic oligonucleotide
  Sense strand starting at position 3252 of SEQ ID NO: 3794
ugaaauaaguugccuaagu

SEQ ID NO: 295279 - RNA, 19 nt, Artificial Sequence
  Description of Artificial Sequence: Synthetic oligonucleotide
  Antisense strand to SEQ ID NO: 295278
acuuaggcaacuuauuuca

SEQ ID NO: 295280 - RNA, 19 nt, Artificial Sequence
  Description of Artificial Sequence: Synthetic oligonucleotide
  Sense strand starting at position 3253 of SEQ ID NO: 3794
gaaauaaguugccuaaguu

SEQ ID NO: 295281 - RNA, 19 nt, Artificial Sequence
  Description of Artificial Sequence: Synthetic oligonucleotide
  Antisense strand to SEQ ID NO: 295280
aacuuaggcaacuuauuuc

SEQ ID NO: 295282 - RNA, 19 nt, Artificial Sequence
  Description of Artificial Sequence: Synthetic oligonucleotide
  Sense strand starting at position 3273 of SEQ ID NO: 3794
uuagcuaguaagugguaaa

SEQ ID NO: 295283 - RNA, 19 nt, Artificial Sequence
  Description of Artificial Sequence: Synthetic oligonucleotide
  Antisense strand to SEQ ID NO: 295282
uuuaccacuuacuagcuaa

SEQ ID NO: 295284 - RNA, 19 nt, Artificial Sequence
  Description of Artificial Sequence: Synthetic oligonucleotide
  Sense strand starting at position 3280 of SEQ ID NO: 3794
guaagugguaaaggaagaa

SEQ ID NO: 295285 - RNA, 19 nt, Artificial Sequence
  Description of Artificial Sequence: Synthetic oligonucleotide
  Antisense strand to SEQ ID NO: 295284
uucuuccuuuaccacuuac

SEQ ID NO: 295286 - RNA, 19 nt, Artificial Sequence
  Description of Artificial Sequence: Synthetic oligonucleotide
  Sense strand starting at position 3337 of SEQ ID NO: 3794
gaggaaagcuugcuucuag

SEQ ID NO: 295287 - RNA, 19 nt, Artificial Sequence
  Description of Artificial Sequence: Synthetic oligonucleotide
  Antisense strand to SEQ ID NO: 295286
cuagaagcaagcuuuccuc

SEQ ID NO: 295288 - RNA, 19 nt, Artificial Sequence
  Description of Artificial Sequence: Synthetic oligonucleotide
  Sense strand starting at position 3338 of SEQ ID NO: 3794
aggaaagcuugcuucuaga

SEQ ID NO: 295289 - RNA, 19 nt, Artificial Sequence
  Description of Artificial Sequence: Synthetic oligonucleotide
  Antisense strand to SEQ ID NO: 295288
ucuagaagcaagcuuuccu

SEQ ID NO: 295290 - RNA, 19 nt, Artificial Sequence
  Description of Artificial Sequence: Synthetic oligonucleotide
  Sense strand starting at position 3455 of SEQ ID NO: 3794
uagguccucuggcuaaaua

SEQ ID NO: 295291 - RNA, 19 nt, Artificial Sequence
  Description of Artificial Sequence: Synthetic oligonucleotide
  Antisense strand to SEQ ID NO: 295290
uauuuagccagaggaccua

SEQ ID NO: 295292 - RNA, 19 nt, Artificial Sequence
  Description of Artificial Sequence: Synthetic oligonucleotide
  Sense strand starting at position 3456 of SEQ ID NO: 3794
agguccucuggcuaaauaa

SEQ ID NO: 295293 - RNA, 19 nt, Artificial Sequence
  Description of Artificial Sequence: Synthetic oligonucleotide
  Antisense strand to SEQ ID NO: 295292
uuauuuagccagaggaccu

SEQ ID NO: 295294 - RNA, 19 nt, Artificial Sequence
  Description of Artificial Sequence: Synthetic oligonucleotide
  Sense strand starting at position 3488 of SEQ ID NO: 3794
uugggagguuuccuccaua

SEQ ID NO: 295295 - RNA, 19 nt, Artificial Sequence
  Description of Artificial Sequence: Synthetic oligonucleotide
  Antisense strand to SEQ ID NO: 295294
uauggaggaaaccucccaa

SEQ ID NO: 295296 - RNA, 19 nt, Artificial Sequence
  Description of Artificial Sequence: Synthetic oligonucleotide
  Sense strand starting at position 3491 of SEQ ID NO: 3794
ggagguuuccuccauaauu

SEQ ID NO: 295297 - RNA, 19 nt, Artificial Sequence
  Description of Artificial Sequence: Synthetic oligonucleotide
  Antisense strand to SEQ ID NO: 295296
aauuauggaggaaaccucc

SEQ ID NO: 295298 - RNA, 19 nt, Artificial Sequence
  Description of Artificial Sequence: Synthetic oligonucleotide
  Sense strand starting at position 3493 of SEQ ID NO: 3794
agguuuccuccauaauuag

SEQ ID NO: 295299 - RNA, 19 nt, Artificial Sequence
  Description of Artificial Sequence: Synthetic oligonucleotide
  Antisense strand to SEQ ID NO: 295298
cuaauuauggaggaaaccu

SEQ ID NO: 295300 - RNA, 19 nt, Artificial Sequence
  Description of Artificial Sequence: Synthetic oligonucleotide
  Sense strand starting at position 3545 of SEQ ID NO: 3794
uaggaagggcuuuggaaau

SEQ ID NO: 295301 - RNA, 19 nt, Artificial Sequence
  Description of Artificial Sequence: Synthetic oligonucleotide
  Antisense strand to SEQ ID NO: 295300
auuuccaaagcccuuccua

SEQ ID NO: 295302 - RNA, 19 nt, Artificial Sequence
  Description of Artificial Sequence: Synthetic oligonucleotide
  Sense strand starting at position 3625 of SEQ ID NO: 3794
aucuaacuugcuuagugaa

SEQ ID NO: 295303 - RNA, 19 nt, Artificial Sequence
  Description of Artificial Sequence: Synthetic oligonucleotide
  Antisense strand to SEQ ID NO: 295302
uucacuaagcaaguuagau

SEQ ID NO: 295304 - RNA, 19 nt, Artificial Sequence
  Description of Artificial Sequence: Synthetic oligonucleotide
  Sense strand starting at position 3635 of SEQ ID NO: 3794
cuuagugaaguccgacaga

SEQ ID NO: 295305 - RNA, 19 nt, Artificial Sequence
  Description of Artificial Sequence: Synthetic oligonucleotide
  Antisense strand to SEQ ID NO: 295304
ucugucggacuucacuaag

SEQ ID NO: 295306 - RNA, 19 nt, Artificial Sequence
  Description of Artificial Sequence: Synthetic oligonucleotide
  Sense strand starting at position 3757 of SEQ ID NO: 3794
guagguaggagcuauaaga

SEQ ID NO: 295307 - RNA, 19 nt, Artificial Sequence
  Description of Artificial Sequence: Synthetic oligonucleotide
  Antisense strand to SEQ ID NO: 295306
ucuuauagcuccuaccuac

SEQ ID NO: 295308 - RNA, 19 nt, Artificial Sequence
  Description of Artificial Sequence: Synthetic oligonucleotide
  Sense strand starting at position 3774 of SEQ ID NO: 3794
gaauaaaugcuguaugugu

SEQ ID NO: 295309 - RNA, 19 nt, Artificial Sequence
  Description of Artificial Sequence: Synthetic oligonucleotide
  Antisense strand to SEQ ID NO: 295308
acacauacagcauuuauuc

SEQ ID NO: 295310 - RNA, 19 nt, Artificial Sequence
  Description of Artificial Sequence: Synthetic oligonucleotide
  Sense strand starting at position 3787 of SEQ ID NO: 3794
auguguugagagcaaagau

SEQ ID NO: 295311 - RNA, 19 nt, Artificial Sequence
  Description of Artificial Sequence: Synthetic oligonucleotide
  Antisense strand to SEQ ID NO: 295310
aucuuugcucucaacacau

SEQ ID NO: 295312 - RNA, 19 nt, Artificial Sequence
  Description of Artificial Sequence: Synthetic oligonucleotide
  Sense strand starting at position 3804 of SEQ ID NO: 3794
auguuaaagcagugaauca

SEQ ID NO: 295313 - RNA, 19 nt, Artificial Sequence
  Description of Artificial Sequence: Synthetic oligonucleotide
  Antisense strand to SEQ ID NO: 295312
ugauucacugcuuuaacau

SEQ ID NO: 295314 - RNA, 19 nt, Artificial Sequence
  Description of Artificial Sequence: Synthetic oligonucleotide
  Sense strand starting at position 3925 of SEQ ID NO: 3794
aguauagaauaacuucgaa

SEQ ID NO: 295315 - RNA, 19 nt, Artificial Sequence
  Description of Artificial Sequence: Synthetic oligonucleotide
  Antisense strand to SEQ ID NO: 295314
uucgaaguuauucuauacu

SEQ ID NO: 295316 - RNA, 19 nt, Artificial Sequence
  Description of Artificial Sequence: Synthetic oligonucleotide
  Sense strand starting at position 150 of SEQ ID NO: 3795
guauuugccuuguccaaau

SEQ ID NO: 295317 - RNA, 19 nt, Artificial Sequence
  Description of Artificial Sequence: Synthetic oligonucleotide
  Antisense strand to SEQ ID NO: 295316
auuuggacaaggcaaauac

SEQ ID NO: 295318 - RNA, 19 nt, Artificial Sequence
  Description of Artificial Sequence: Synthetic oligonucleotide
  Sense strand starting at position 242 of SEQ ID NO: 3795
acacgacaguuacuagaua

SEQ ID NO: 295319 - RNA, 19 nt, Artificial Sequence
  Description of Artificial Sequence: Synthetic oligonucleotide
  Antisense strand to SEQ ID NO: 295318
uaucuaguaacugucgugu

SEQ ID NO: 295320 - RNA, 19 nt, Artificial Sequence
  Description of Artificial Sequence: Synthetic oligonucleotide
  Sense strand starting at position 279 of SEQ ID NO: 3795
acacauugcuuucugguua

SEQ ID NO: 295321 - RNA, 19 nt, Artificial Sequence
  Description of Artificial Sequence: Synthetic oligonucleotide
  Antisense strand to SEQ ID NO: 295320
uaaccagaaagcaaugugu

SEQ ID NO: 295322 - RNA, 19 nt, Artificial Sequence
  Description of Artificial Sequence: Synthetic oligonucleotide
  Sense strand starting at position 284 of SEQ ID NO: 3795
uugcuuucugguuaagcaa

SEQ ID NO: 295323 - RNA, 19 nt, Artificial Sequence
  Description of Artificial Sequence: Synthetic oligonucleotide
  Antisense strand to SEQ ID NO: 295322
uugcuuaaccagaaagcaa

SEQ ID NO: 295324 - RNA, 19 nt, Artificial Sequence
  Description of Artificial Sequence: Synthetic oligonucleotide
  Sense strand starting at position 291 of SEQ ID NO: 3795
cugguuaagcaacacaauu

SEQ ID NO: 295325 - RNA, 19 nt, Artificial Sequence
  Description of Artificial Sequence: Synthetic oligonucleotide
  Antisense strand to SEQ ID NO: 295324
aauuguguugcuuaaccag

SEQ ID NO: 295326 - RNA, 19 nt, Artificial Sequence
  Description of Artificial Sequence: Synthetic oligonucleotide
  Sense strand starting at position 355 of SEQ ID NO: 3795
caggguauugguuguauua

SEQ ID NO: 295327 - RNA, 19 nt, Artificial Sequence
  Description of Artificial Sequence: Synthetic oligonucleotide
  Antisense strand to SEQ ID NO: 295326
uaauacaaccaauacccug

SEQ ID NO: 295328 - RNA, 19 nt, Artificial Sequence
  Description of Artificial Sequence: Synthetic oligonucleotide
  Sense strand starting at position 364 of SEQ ID NO: 3795
gguuguauuauuugaaguc

SEQ ID NO: 295329 - RNA, 19 nt, Artificial Sequence
  Description of Artificial Sequence: Synthetic oligonucleotide
  Antisense strand to SEQ ID NO: 295328
gacuucaaauaauacaacc

SEQ ID NO: 295330 - RNA, 19 nt, Artificial Sequence
  Description of Artificial Sequence: Synthetic oligonucleotide
  Sense strand starting at position 400 of SEQ ID NO: 3795
ugaagagauuucugacuuc

SEQ ID NO: 295331 - RNA, 19 nt, Artificial Sequence
  Description of Artificial Sequence: Synthetic oligonucleotide
  Antisense strand to SEQ ID NO: 295330
gaagucagaaaucucuuca

SEQ ID NO: 295332 - RNA, 19 nt, Artificial Sequence
  Description of Artificial Sequence: Synthetic oligonucleotide
  Sense strand starting at position 487 of SEQ ID NO: 3795
gcugaaaccuuccuuuaag

SEQ ID NO: 295333 - RNA, 19 nt, Artificial Sequence
  Description of Artificial Sequence: Synthetic oligonucleotide
  Antisense strand to SEQ ID NO: 295332
cuuaaaggaagguuucagc

SEQ ID NO: 295334 - RNA, 19 nt, Artificial Sequence
  Description of Artificial Sequence: Synthetic oligonucleotide
  Sense strand starting at position 530 of SEQ ID NO: 3795
guuacacgaccuuacuauu

SEQ ID NO: 295335 - RNA, 19 nt, Artificial Sequence
  Description of Artificial Sequence: Synthetic oligonucleotide
  Antisense strand to SEQ ID NO: 295334
aauaguaaggucguguaac

SEQ ID NO: 295336 - RNA, 19 nt, Artificial Sequence
  Description of Artificial Sequence: Synthetic oligonucleotide
  Sense strand starting at position 671 of SEQ ID NO: 3795
aagcaaugagacuguguuu

SEQ ID NO: 295337 - RNA, 19 nt, Artificial Sequence
  Description of Artificial Sequence: Synthetic oligonucleotide
  Antisense strand to SEQ ID NO: 295336
aaacacagucucauugcuu

SEQ ID NO: 295338 - RNA, 19 nt, Artificial Sequence
  Description of Artificial Sequence: Synthetic oligonucleotide
  Sense strand starting at position 676 of SEQ ID NO: 3795
augagacuguguuugaagu

SEQ ID NO: 295339 - RNA, 19 nt, Artificial Sequence
  Description of Artificial Sequence: Synthetic oligonucleotide
  Antisense strand to SEQ ID NO: 295338
acuucaaacacagucucau

SEQ ID NO: 295340 - RNA, 19 nt, Artificial Sequence
  Description of Artificial Sequence: Synthetic oligonucleotide
  Sense strand starting at position 677 of SEQ ID NO: 3795
ugagacuguguuugaaguu

SEQ ID NO: 295341 - RNA, 19 nt, Artificial Sequence
  Description of Artificial Sequence: Synthetic oligonucleotide
  Antisense strand to SEQ ID NO: 295340
aacuucaaacacagucuca

SEQ ID NO: 295342 - RNA, 19 nt, Artificial Sequence
  Description of Artificial Sequence: Synthetic oligonucleotide
  Sense strand starting at position 827 of SEQ ID NO: 3795
ggaugagaagcucgugaag

SEQ ID NO: 295343 - RNA, 19 nt, Artificial Sequence
  Description of Artificial Sequence: Synthetic oligonucleotide
  Antisense strand to SEQ ID NO: 295342
cuucacgagcuucucaucc

SEQ ID NO: 295344 - RNA, 19 nt, Artificial Sequence
  Description of Artificial Sequence: Synthetic oligonucleotide
  Sense strand starting at position 2805 of SEQ ID NO: 3795
uuagaagggugacuucuua

SEQ ID NO: 295345 - RNA, 19 nt, Artificial Sequence
  Description of Artificial Sequence: Synthetic oligonucleotide
  Antisense strand to SEQ ID NO: 295344
uaagaagucacccuucuaa

SEQ ID NO: 295346 - RNA, 19 nt, Artificial Sequence
  Description of Artificial Sequence: Synthetic oligonucleotide
  Sense strand starting at position 2809 of SEQ ID NO: 3795
aagggugacuucuuagcuu

SEQ ID NO: 295347 - RNA, 19 nt, Artificial Sequence
  Description of Artificial Sequence: Synthetic oligonucleotide
  Antisense strand to SEQ ID NO: 295346
aagcuaagaagucacccuu

SEQ ID NO: 295348 - RNA, 19 nt, Artificial Sequence
  Description of Artificial Sequence: Synthetic oligonucleotide
  Sense strand starting at position 2847 of SEQ ID NO: 3795
uggcaauaccaauaacugu

SEQ ID NO: 295349 - RNA, 19 nt, Artificial Sequence
  Description of Artificial Sequence: Synthetic oligonucleotide
  Antisense strand to SEQ ID NO: 295348
acaguuauugguauugcca

SEQ ID NO: 295350 - RNA, 19 nt, Artificial Sequence
  Description of Artificial Sequence: Synthetic oligonucleotide
  Sense strand starting at position 2964 of SEQ ID NO: 3795
ugcagaaucguacauaauc

SEQ ID NO: 295351 - RNA, 19 nt, Artificial Sequence
  Description of Artificial Sequence: Synthetic oligonucleotide
  Antisense strand to SEQ ID NO: 295350
gauuauguacgauucugca

SEQ ID NO: 295352 - RNA, 19 nt, Artificial Sequence
  Description of Artificial Sequence: Synthetic oligonucleotide
  Sense strand starting at position 3020 of SEQ ID NO: 3795
acaccuuucggauaaaguu

SEQ ID NO: 295353 - RNA, 19 nt, Artificial Sequence
  Description of Artificial Sequence: Synthetic oligonucleotide
  Antisense strand to SEQ ID NO: 295352
aacuuuauccgaaaggugu

SEQ ID NO: 295354 - RNA, 19 nt, Artificial Sequence
  Description of Artificial Sequence: Synthetic oligonucleotide
  Sense strand starting at position 3161 of SEQ ID NO: 3795
cuuggauugguguguggau

SEQ ID NO: 295355 - RNA, 19 nt, Artificial Sequence
  Description of Artificial Sequence: Synthetic oligonucleotide
  Antisense strand to SEQ ID NO: 295354
auccacacaccaauccaag

SEQ ID NO: 295356 - RNA, 19 nt, Artificial Sequence
  Description of Artificial Sequence: Synthetic oligonucleotide
  Sense strand starting at position 3162 of SEQ ID NO: 3795
uuggauugguguguggaua

SEQ ID NO: 295357 - RNA, 19 nt, Artificial Sequence
  Description of Artificial Sequence: Synthetic oligonucleotide
  Antisense strand to SEQ ID NO: 295356
uauccacacaccaauccaa

SEQ ID NO: 295358 - RNA, 19 nt, Artificial Sequence
  Description of Artificial Sequence: Synthetic oligonucleotide
  Sense strand starting at position 3163 of SEQ ID NO: 3795
uggauugguguguggauaa

SEQ ID NO: 295359 - RNA, 19 nt, Artificial Sequence
  Description of Artificial Sequence: Synthetic oligonucleotide
  Antisense strand to SEQ ID NO: 295358
uuauccacacaccaaucca

SEQ ID NO: 295360 - RNA, 19 nt, Artificial Sequence
  Description of Artificial Sequence: Synthetic oligonucleotide
  Sense strand starting at position 3201 of SEQ ID NO: 3795
auuagcaagugcuuuauaa

SEQ ID NO: 295361 - RNA, 19 nt, Artificial Sequence
  Description of Artificial Sequence: Synthetic oligonucleotide
  Antisense strand to SEQ ID NO: 295360
uuauaaagcacuugcuaau

SEQ ID NO: 295362 - RNA, 19 nt, Artificial Sequence
  Description of Artificial Sequence: Synthetic oligonucleotide
  Sense strand starting at position 3203 of SEQ ID NO: 3795
uagcaagugcuuuauaagu

SEQ ID NO: 295363 - RNA, 19 nt, Artificial Sequence
  Description of Artificial Sequence: Synthetic oligonucleotide
  Antisense strand to SEQ ID NO: 295362
acuuauaaagcacuugcua

SEQ ID NO: 295364 - RNA, 19 nt, Artificial Sequence
  Description of Artificial Sequence: Synthetic oligonucleotide
  Sense strand starting at position 3230 of SEQ ID NO: 3795
auuuaauccuuggaagaac

SEQ ID NO: 295365 - RNA, 19 nt, Artificial Sequence
  Description of Artificial Sequence: Synthetic oligonucleotide
  Antisense strand to SEQ ID NO: 295364
guucuuccaaggauuaaau

SEQ ID NO: 295366 - RNA, 19 nt, Artificial Sequence
  Description of Artificial Sequence: Synthetic oligonucleotide
  Sense strand starting at position 3356 of SEQ ID NO: 3795
ucucuugagcccuggagau

SEQ ID NO: 295367 - RNA, 19 nt, Artificial Sequence
  Description of Artificial Sequence: Synthetic oligonucleotide
  Antisense strand to SEQ ID NO: 295366
aucuccagggcucaagaga

SEQ ID NO: 295368 - RNA, 19 nt, Artificial Sequence
  Description of Artificial Sequence: Synthetic oligonucleotide
  Sense strand starting at position 3358 of SEQ ID NO: 3795
ucuugagcccuggagauca

SEQ ID NO: 295369 - RNA, 19 nt, Artificial Sequence
  Description of Artificial Sequence: Synthetic oligonucleotide
  Antisense strand to SEQ ID NO: 295368
ugaucuccagggcucaaga

SEQ ID NO: 295370 - RNA, 19 nt, Artificial Sequence
  Description of Artificial Sequence: Synthetic oligonucleotide
  Sense strand starting at position 3621 of SEQ ID NO: 3795
ggugaaauaaguugccuaa

SEQ ID NO: 295371 - RNA, 19 nt, Artificial Sequence
  Description of Artificial Sequence: Synthetic oligonucleotide
  Antisense strand to SEQ ID NO: 295370
uuaggcaacuuauuucacc

SEQ ID NO: 295372 - RNA, 19 nt, Artificial Sequence
  Description of Artificial Sequence: Synthetic oligonucleotide
  Sense strand starting at position 3623 of SEQ ID NO: 3795
ugaaauaaguugccuaagu

SEQ ID NO: 295373 - RNA, 19 nt, Artificial Sequence
  Description of Artificial Sequence: Synthetic oligonucleotide
  Antisense strand to SEQ ID NO: 295372
acuuaggcaacuuauuuca

SEQ ID NO: 295374 - RNA, 19 nt, Artificial Sequence
  Description of Artificial Sequence: Synthetic oligonucleotide
  Sense strand starting at position 3624 of SEQ ID NO: 3795
gaaauaaguugccuaaguu

SEQ ID NO: 295375 - RNA, 19 nt, Artificial Sequence
  Description of Artificial Sequence: Synthetic oligonucleotide
  Antisense strand to SEQ ID NO: 295374
aacuuaggcaacuuauuuc

SEQ ID NO: 295376 - RNA, 19 nt, Artificial Sequence
  Description of Artificial Sequence: Synthetic oligonucleotide
  Sense strand starting at position 3644 of SEQ ID NO: 3795
uuagcuaguaagugguaaa

SEQ ID NO: 295377 - RNA, 19 nt, Artificial Sequence
  Description of Artificial Sequence: Synthetic oligonucleotide
  Antisense strand to SEQ ID NO: 295376
uuuaccacuuacuagcuaa

SEQ ID NO: 295378 - RNA, 19 nt, Artificial Sequence
  Description of Artificial Sequence: Synthetic oligonucleotide
  Sense strand starting at position 3651 of SEQ ID NO: 3795
guaagugguaaaggaagaa

SEQ ID NO: 295379 - RNA, 19 nt, Artificial Sequence
  Description of Artificial Sequence: Synthetic oligonucleotide
  Antisense strand to SEQ ID NO: 295378
uucuuccuuuaccacuuac

SEQ ID NO: 295380 - RNA, 19 nt, Artificial Sequence
  Description of Artificial Sequence: Synthetic oligonucleotide
  Sense strand starting at position 3708 of SEQ ID NO: 3795
gaggaaagcuugcuucuag

SEQ ID NO: 295381 - RNA, 19 nt, Artificial Sequence
  Description of Artificial Sequence: Synthetic oligonucleotide
  Antisense strand to SEQ ID NO: 295380
cuagaagcaagcuuuccuc

SEQ ID NO: 295382 - RNA, 19 nt, Artificial Sequence
  Description of Artificial Sequence: Synthetic oligonucleotide
  Sense strand starting at position 3709 of SEQ ID NO: 3795
aggaaagcuugcuucuaga

SEQ ID NO: 295383 - RNA, 19 nt, Artificial Sequence
  Description of Artificial Sequence: Synthetic oligonucleotide
  Antisense strand to SEQ ID NO: 295382
ucuagaagcaagcuuuccu

SEQ ID NO: 295384 - RNA, 19 nt, Artificial Sequence
  Description of Artificial Sequence: Synthetic oligonucleotide
  Sense strand starting at position 3826 of SEQ ID NO: 3795
uagguccucuggcuaaaua

SEQ ID NO: 295385 - RNA, 19 nt, Artificial Sequence
  Description of Artificial Sequence: Synthetic oligonucleotide
  Antisense strand to SEQ ID NO: 295384
uauuuagccagaggaccua

SEQ ID NO: 295386 - RNA, 19 nt, Artificial Sequence
  Description of Artificial Sequence: Synthetic oligonucleotide
  Sense strand starting at position 3827 of SEQ ID NO: 3795
agguccucuggcuaaauaa

SEQ ID NO: 295387 - RNA, 19 nt, Artificial Sequence
  Description of Artificial Sequence: Synthetic oligonucleotide
  Antisense strand to SEQ ID NO: 295386
uuauuuagccagaggaccu

SEQ ID NO: 295388 - RNA, 19 nt, Artificial Sequence
  Description of Artificial Sequence: Synthetic oligonucleotide
  Sense strand starting at position 3859 of SEQ ID NO: 3795
uugggagguuuccuccaua

SEQ ID NO: 295389 - RNA, 19 nt, Artificial Sequence
  Description of Artificial Sequence: Synthetic oligonucleotide
  Antisense strand to SEQ ID NO: 295388
uauggaggaaaccucccaa

SEQ ID NO: 295390 - RNA, 19 nt, Artificial Sequence
  Description of Artificial Sequence: Synthetic oligonucleotide
  Sense strand starting at position 3862 of SEQ ID NO: 3795
ggagguuuccuccauaauu

SEQ ID NO: 295391 - RNA, 19 nt, Artificial Sequence
  Description of Artificial Sequence: Synthetic oligonucleotide
  Antisense strand to SEQ ID NO: 295390
aauuauggaggaaaccucc

SEQ ID NO: 295392 - RNA, 19 nt, Artificial Sequence
  Description of Artificial Sequence: Synthetic oligonucleotide
  Sense strand starting at position 3864 of SEQ ID NO: 3795
agguuuccuccauaauuag

SEQ ID NO: 295393 - RNA, 19 nt, Artificial Sequence
  Description of Artificial Sequence: Synthetic oligonucleotide
  Antisense strand to SEQ ID NO: 295392
cuaauuauggaggaaaccu

SEQ ID NO: 295394 - RNA, 19 nt, Artificial Sequence
  Description of Artificial Sequence: Synthetic oligonucleotide
  Sense strand starting at position 3916 of SEQ ID NO: 3795
uaggaagggcuuuggaaau

SEQ ID NO: 295395 - RNA, 19 nt, Artificial Sequence
  Description of Artificial Sequence: Synthetic oligonucleotide
  Antisense strand to SEQ ID NO: 295394
auuuccaaagcccuuccua

SEQ ID NO: 295396 - RNA, 19 nt, Artificial Sequence
  Description of Artificial Sequence: Synthetic oligonucleotide
  Sense strand starting at position 79 of SEQ ID NO: 3797
ugaagaaugugguuagguc

SEQ ID NO: 295397 - RNA, 19 nt, Artificial Sequence
  Description of Artificial Sequence: Synthetic oligonucleotide
  Antisense strand to SEQ ID NO: 295396
gaccuaaccacauucuuca

SEQ ID NO: 295398 - RNA, 19 nt, Artificial Sequence
  Description of Artificial Sequence: Synthetic oligonucleotide
  Sense strand starting at position 80 of SEQ ID NO: 3797
gaagaaugugguuagguca

SEQ ID NO: 295399 - RNA, 19 nt, Artificial Sequence
  Description of Artificial Sequence: Synthetic oligonucleotide
  Antisense strand to SEQ ID NO: 295398
ugaccuaaccacauucuuc

SEQ ID NO: 295400 - RNA, 19 nt, Artificial Sequence
  Description of Artificial Sequence: Synthetic oligonucleotide
  Sense strand starting at position 160 of SEQ ID NO: 3797
augagcaugucaucuuaga

SEQ ID NO: 295401 - RNA, 19 nt, Artificial Sequence
  Description of Artificial Sequence: Synthetic oligonucleotide
  Antisense strand to SEQ ID NO: 295400
ucuaagaugacaugcucau

SEQ ID NO: 295402 - RNA, 19 nt, Artificial Sequence
  Description of Artificial Sequence: Synthetic oligonucleotide
  Sense strand starting at position 357 of SEQ ID NO: 3797
aaaguauuguuccugugaa

SEQ ID NO: 295403 - RNA, 19 nt, Artificial Sequence
  Description of Artificial Sequence: Synthetic oligonucleotide
  Antisense strand to SEQ ID NO: 295402
uucacaggaacaauacuuu

SEQ ID NO: 295404 - RNA, 19 nt, Artificial Sequence
  Description of Artificial Sequence: Synthetic oligonucleotide
  Sense strand starting at position 413 of SEQ ID NO: 3797
agguugauacgguggaagu

SEQ ID NO: 295405 - RNA, 19 nt, Artificial Sequence
  Description of Artificial Sequence: Synthetic oligonucleotide
  Antisense strand to SEQ ID NO: 295404
acuuccaccguaucaaccu

SEQ ID NO: 295406 - RNA, 19 nt, Artificial Sequence
  Description of Artificial Sequence: Synthetic oligonucleotide
  Sense strand starting at position 724 of SEQ ID NO: 3797
ggaagaaguuuagagagaa

SEQ ID NO: 295407 - RNA, 19 nt, Artificial Sequence
  Description of Artificial Sequence: Synthetic oligonucleotide
  Antisense strand to SEQ ID NO: 295406
uucucucuaaacuucuucc

SEQ ID NO: 295408 - RNA, 19 nt, Artificial Sequence
  Description of Artificial Sequence: Synthetic oligonucleotide
  Sense strand starting at position 766 of SEQ ID NO: 3797
uguagucuuuagcuugaca

SEQ ID NO: 295409 - RNA, 19 nt, Artificial Sequence
  Description of Artificial Sequence: Synthetic oligonucleotide
  Antisense strand to SEQ ID NO: 295408
ugucaagcuaaagacuaca

SEQ ID NO: 295410 - RNA, 19 nt, Artificial Sequence
  Description of Artificial Sequence: Synthetic oligonucleotide
  Sense strand starting at position 769 of SEQ ID NO: 3797
agucuuuagcuugacagca

SEQ ID NO: 295411 - RNA, 19 nt, Artificial Sequence
  Description of Artificial Sequence: Synthetic oligonucleotide
  Antisense strand to SEQ ID NO: 295410
ugcugucaagcuaaagacu

SEQ ID NO: 295412 - RNA, 19 nt, Artificial Sequence
  Description of Artificial Sequence: Synthetic oligonucleotide
  Sense strand starting at position 823 of SEQ ID NO: 3797
guagauaaauaggaaugga

SEQ ID NO: 295413 - RNA, 19 nt, Artificial Sequence
  Description of Artificial Sequence: Synthetic oligonucleotide
  Antisense strand to SEQ ID NO: 295412
uccauuccuauuuaucuac

SEQ ID NO: 295414 - RNA, 19 nt, Artificial Sequence
  Description of Artificial Sequence: Synthetic oligonucleotide
  Sense strand starting at position 838 of SEQ ID NO: 3797
uggaguuuggaucaguacu

SEQ ID NO: 295415 - RNA, 19 nt, Artificial Sequence
  Description of Artificial Sequence: Synthetic oligonucleotide
  Antisense strand to SEQ ID NO: 295414
aguacugauccaaacucca

SEQ ID NO: 295416 - RNA, 19 nt, Artificial Sequence
  Description of Artificial Sequence: Synthetic oligonucleotide
  Sense strand starting at position 840 of SEQ ID NO: 3797
gaguuuggaucaguacuag

SEQ ID NO: 295417 - RNA, 19 nt, Artificial Sequence
  Description of Artificial Sequence: Synthetic oligonucleotide
  Antisense strand to SEQ ID NO: 295416
cuaguacugauccaaacuc

SEQ ID NO: 295418 - RNA, 19 nt, Artificial Sequence
  Description of Artificial Sequence: Synthetic oligonucleotide
  Sense strand starting at position 860 of SEQ ID NO: 3797
gacaaagauuuguaugaug

SEQ ID NO: 295419 - RNA, 19 nt, Artificial Sequence
  Description of Artificial Sequence: Synthetic oligonucleotide
  Antisense strand to SEQ ID NO: 295418
caucauacaaaucuuuguc

SEQ ID NO: 295420 - RNA, 19 nt, Artificial Sequence
  Description of Artificial Sequence: Synthetic oligonucleotide
  Sense strand starting at position 863 of SEQ ID NO: 3797
aaagauuuguaugaugcaa

SEQ ID NO: 295421 - RNA, 19 nt, Artificial Sequence
  Description of Artificial Sequence: Synthetic oligonucleotide
  Antisense strand to SEQ ID NO: 295420
uugcaucauacaaaucuuu

SEQ ID NO: 295422 - RNA, 19 nt, Artificial Sequence
  Description of Artificial Sequence: Synthetic oligonucleotide
  Sense strand starting at position 1253 of SEQ ID NO: 3797
uuaauugugugauuacacu

SEQ ID NO: 295423 - RNA, 19 nt, Artificial Sequence
  Description of Artificial Sequence: Synthetic oligonucleotide
  Antisense strand to SEQ ID NO: 295422
aguguaaucacacaauuaa

SEQ ID NO: 295424 - RNA, 19 nt, Artificial Sequence
  Description of Artificial Sequence: Synthetic oligonucleotide
  Sense strand starting at position 1261 of SEQ ID NO: 3797
gugauuacacuuuaaggca

SEQ ID NO: 295425 - RNA, 19 nt, Artificial Sequence
  Description of Artificial Sequence: Synthetic oligonucleotide
  Antisense strand to SEQ ID NO: 295424
ugccuuaaaguguaaucac

SEQ ID NO: 295426 - RNA, 19 nt, Artificial Sequence
  Description of Artificial Sequence: Synthetic oligonucleotide
  Sense strand starting at position 1295 of SEQ ID NO: 3797
ggauuaguugaauguugca

SEQ ID NO: 295427 - RNA, 19 nt, Artificial Sequence
  Description of Artificial Sequence: Synthetic oligonucleotide
  Antisense strand to SEQ ID NO: 295426
ugcaacauucaacuaaucc

SEQ ID NO: 295428 - RNA, 19 nt, Artificial Sequence
  Description of Artificial Sequence: Synthetic oligonucleotide
  Sense strand starting at position 1302 of SEQ ID NO: 3797
uugaauguugcacaacauu

SEQ ID NO: 295429 - RNA, 19 nt, Artificial Sequence
  Description of Artificial Sequence: Synthetic oligonucleotide
  Antisense strand to SEQ ID NO: 295428
aauguugugcaacauucaa

SEQ ID NO: 295430 - RNA, 19 nt, Artificial Sequence
  Description of Artificial Sequence: Synthetic oligonucleotide
  Sense strand starting at position 1404 of SEQ ID NO: 3797
cuacucuucugugcacaga

SEQ ID NO: 295431 - RNA, 19 nt, Artificial Sequence
  Description of Artificial Sequence: Synthetic oligonucleotide
  Antisense strand to SEQ ID NO: 295430
ucugugcacagaagaguag

SEQ ID NO: 295432 - RNA, 19 nt, Artificial Sequence
  Description of Artificial Sequence: Synthetic oligonucleotide
  Sense strand starting at position 1407 of SEQ ID NO: 3797
cucuucugugcacagaaau

SEQ ID NO: 295433 - RNA, 19 nt, Artificial Sequence
  Description of Artificial Sequence: Synthetic oligonucleotide
  Antisense strand to SEQ ID NO: 295432
auuucugugcacagaagag

SEQ ID NO: 295434 - RNA, 19 nt, Artificial Sequence
  Description of Artificial Sequence: Synthetic oligonucleotide
  Sense strand starting at position 1480 of SEQ ID NO: 3797
gaagauggcuaggaaagaa

SEQ ID NO: 295435 - RNA, 19 nt, Artificial Sequence
  Description of Artificial Sequence: Synthetic oligonucleotide
  Antisense strand to SEQ ID NO: 295434
uucuuuccuagccaucuuc

SEQ ID NO: 295436 - RNA, 19 nt, Artificial Sequence
  Description of Artificial Sequence: Synthetic oligonucleotide
  Sense strand starting at position 1763 of SEQ ID NO: 3797
acacaacucugaucgcaga

SEQ ID NO: 295437 - RNA, 19 nt, Artificial Sequence
  Description of Artificial Sequence: Synthetic oligonucleotide
  Antisense strand to SEQ ID NO: 295436
ucugcgaucagaguugugu

SEQ ID NO: 295438 - RNA, 19 nt, Artificial Sequence
  Description of Artificial Sequence: Synthetic oligonucleotide
  Sense strand starting at position 1812 of SEQ ID NO: 3797
gugagauauuucuaaagcu

SEQ ID NO: 295439 - RNA, 19 nt, Artificial Sequence
  Description of Artificial Sequence: Synthetic oligonucleotide
  Antisense strand to SEQ ID NO: 295438
agcuuuagaaauaucucac

SEQ ID NO: 295440 - RNA, 19 nt, Artificial Sequence
  Description of Artificial Sequence: Synthetic oligonucleotide
  Sense strand starting at position 2106 of SEQ ID NO: 3797
cugucuaaaugagcacauu

SEQ ID NO: 295441 - RNA, 19 nt, Artificial Sequence
  Description of Artificial Sequence: Synthetic oligonucleotide
  Antisense strand to SEQ ID NO: 295440
aaugugcucauuuagacag

SEQ ID NO: 295442 - RNA, 19 nt, Artificial Sequence
  Description of Artificial Sequence: Synthetic oligonucleotide
  Sense strand starting at position 2107 of SEQ ID NO: 3797
ugucuaaaugagcacauua

SEQ ID NO: 295443 - RNA, 19 nt, Artificial Sequence
  Description of Artificial Sequence: Synthetic oligonucleotide
  Antisense strand to SEQ ID NO: 295442
uaaugugcucauuuagaca

SEQ ID NO: 295444 - RNA, 19 nt, Artificial Sequence
  Description of Artificial Sequence: Synthetic oligonucleotide
  Sense strand starting at position 2128 of SEQ ID NO: 3797
cuaaguugauucuuagaaa

SEQ ID NO: 295445 - RNA, 19 nt, Artificial Sequence
  Description of Artificial Sequence: Synthetic oligonucleotide
  Antisense strand to SEQ ID NO: 295444
uuucuaagaaucaacuuag

SEQ ID NO: 295446 - RNA, 19 nt, Artificial Sequence
  Description of Artificial Sequence: Synthetic oligonucleotide
  Sense strand starting at position 2467 of SEQ ID NO: 3797
guauuugccuuguccaaau

SEQ ID NO: 295447 - RNA, 19 nt, Artificial Sequence
  Description of Artificial Sequence: Synthetic oligonucleotide
  Antisense strand to SEQ ID NO: 295446
auuuggacaaggcaaauac

SEQ ID NO: 295448 - RNA, 19 nt, Artificial Sequence
  Description of Artificial Sequence: Synthetic oligonucleotide
  Sense strand starting at position 2559 of SEQ ID NO: 3797
acacgacaguuacuagaua

SEQ ID NO: 295449 - RNA, 19 nt, Artificial Sequence
  Description of Artificial Sequence: Synthetic oligonucleotide
  Antisense strand to SEQ ID NO: 295448
uaucuaguaacugucgugu

SEQ ID NO: 295450 - RNA, 19 nt, Artificial Sequence
  Description of Artificial Sequence: Synthetic oligonucleotide
  Sense strand starting at position 2596 of SEQ ID NO: 3797
acacauugcuuucugguua

SEQ ID NO: 295451 - RNA, 19 nt, Artificial Sequence
  Description of Artificial Sequence: Synthetic oligonucleotide
  Antisense strand to SEQ ID NO: 295450
uaaccagaaagcaaugugu

SEQ ID NO: 295452 - RNA, 19 nt, Artificial Sequence
  Description of Artificial Sequence: Synthetic oligonucleotide
  Sense strand starting at position 2601 of SEQ ID NO: 3797
uugcuuucugguuaagcaa

SEQ ID NO: 295453 - RNA, 19 nt, Artificial Sequence
  Description of Artificial Sequence: Synthetic oligonucleotide
  Antisense strand to SEQ ID NO: 295452
uugcuuaaccagaaagcaa

SEQ ID NO: 295454 - RNA, 19 nt, Artificial Sequence
  Description of Artificial Sequence: Synthetic oligonucleotide
  Sense strand starting at position 2608 of SEQ ID NO: 3797
cugguuaagcaacacaauu

SEQ ID NO: 295455 - RNA, 19 nt, Artificial Sequence
  Description of Artificial Sequence: Synthetic oligonucleotide
  Antisense strand to SEQ ID NO: 295454
aauuguguugcuuaaccag

SEQ ID NO: 295456 - RNA, 19 nt, Artificial Sequence
  Description of Artificial Sequence: Synthetic oligonucleotide
  Sense strand starting at position 2672 of SEQ ID NO: 3797
caggguauugguuguauua

SEQ ID NO: 295457 - RNA, 19 nt, Artificial Sequence
  Description of Artificial Sequence: Synthetic oligonucleotide
  Antisense strand to SEQ ID NO: 295456
uaauacaaccaauacccug

SEQ ID NO: 295458 - RNA, 19 nt, Artificial Sequence
  Description of Artificial Sequence: Synthetic oligonucleotide
  Sense strand starting at position 2681 of SEQ ID NO: 3797
gguuguauuauuugaaguc

SEQ ID NO: 295459 - RNA, 19 nt, Artificial Sequence
  Description of Artificial Sequence: Synthetic oligonucleotide
  Antisense strand to SEQ ID NO: 295458
gacuucaaauaauacaacc

SEQ ID NO: 295460 - RNA, 19 nt, Artificial Sequence
  Description of Artificial Sequence: Synthetic oligonucleotide
  Sense strand starting at position 2717 of SEQ ID NO: 3797
ugaagagauuucugacuuc

SEQ ID NO: 295461 - RNA, 19 nt, Artificial Sequence
  Description of Artificial Sequence: Synthetic oligonucleotide
  Antisense strand to SEQ ID NO: 295460
gaagucagaaaucucuuca

SEQ ID NO: 295462 - RNA, 19 nt, Artificial Sequence
  Description of Artificial Sequence: Synthetic oligonucleotide
  Sense strand starting at position 2804 of SEQ ID NO: 3797
gcugaaaccuuccuuuaag

SEQ ID NO: 295463 - RNA, 19 nt, Artificial Sequence
  Description of Artificial Sequence: Synthetic oligonucleotide
  Antisense strand to SEQ ID NO: 295462
cuuaaaggaagguuucagc

SEQ ID NO: 295464 - RNA, 19 nt, Artificial Sequence
  Description of Artificial Sequence: Synthetic oligonucleotide
  Sense strand starting at position 2847 of SEQ ID NO: 3797
guuacacgaccuuacuauu

SEQ ID NO: 295465 - RNA, 19 nt, Artificial Sequence
  Description of Artificial Sequence: Synthetic oligonucleotide
  Antisense strand to SEQ ID NO: 295464
aauaguaaggucguguaac

SEQ ID NO: 295466 - RNA, 19 nt, Artificial Sequence
  Description of Artificial Sequence: Synthetic oligonucleotide
  Sense strand starting at position 2914 of SEQ ID NO: 3797
acagucguuugucuuaaag

SEQ ID NO: 295467 - RNA, 19 nt, Artificial Sequence
  Description of Artificial Sequence: Synthetic oligonucleotide
  Antisense strand to SEQ ID NO: 295466
cuuuaagacaaacgacugu

SEQ ID NO: 295468 - RNA, 19 nt, Artificial Sequence
  Description of Artificial Sequence: Synthetic oligonucleotide
  Sense strand starting at position 2988 of SEQ ID NO: 3797
aagcaaugagacuguguuu

SEQ ID NO: 295469 - RNA, 19 nt, Artificial Sequence
  Description of Artificial Sequence: Synthetic oligonucleotide
  Antisense strand to SEQ ID NO: 295468
aaacacagucucauugcuu

SEQ ID NO: 295470 - RNA, 19 nt, Artificial Sequence
  Description of Artificial Sequence: Synthetic oligonucleotide
  Sense strand starting at position 2993 of SEQ ID NO: 3797
augagacuguguuugaagu

SEQ ID NO: 295471 - RNA, 19 nt, Artificial Sequence
  Description of Artificial Sequence: Synthetic oligonucleotide
  Antisense strand to SEQ ID NO: 295470
acuucaaacacagucucau

SEQ ID NO: 295472 - RNA, 19 nt, Artificial Sequence
  Description of Artificial Sequence: Synthetic oligonucleotide
  Sense strand starting at position 2994 of SEQ ID NO: 3797
ugagacuguguuugaaguu

SEQ ID NO: 295473 - RNA, 19 nt, Artificial Sequence
  Description of Artificial Sequence: Synthetic oligonucleotide
  Antisense strand to SEQ ID NO: 295472
aacuucaaacacagucuca

SEQ ID NO: 295474 - RNA, 19 nt, Artificial Sequence
  Description of Artificial Sequence: Synthetic oligonucleotide
  Sense strand starting at position 3144 of SEQ ID NO: 3797
ggaugagaagcucgugaag

SEQ ID NO: 295475 - RNA, 19 nt, Artificial Sequence
  Description of Artificial Sequence: Synthetic oligonucleotide
  Antisense strand to SEQ ID NO: 295474
cuucacgagcuucucaucc

SEQ ID NO: 295476 - RNA, 19 nt, Artificial Sequence
  Description of Artificial Sequence: Synthetic oligonucleotide
  Sense strand starting at position 209 of SEQ ID NO: 3798
agguguaacauaggauguu

SEQ ID NO: 295477 - RNA, 19 nt, Artificial Sequence
  Description of Artificial Sequence: Synthetic oligonucleotide
  Antisense strand to SEQ ID NO: 295476
aacauccuauguuacaccu

SEQ ID NO: 295478 - RNA, 19 nt, Artificial Sequence
  Description of Artificial Sequence: Synthetic oligonucleotide
  Sense strand starting at position 218 of SEQ ID NO: 3798
auaggauguucuuucuuaa

SEQ ID NO: 295479 - RNA, 19 nt, Artificial Sequence
  Description of Artificial Sequence: Synthetic oligonucleotide
  Antisense strand to SEQ ID NO: 295478
uuaagaaagaacauccuau

SEQ ID NO: 295480 - RNA, 19 nt, Artificial Sequence
  Description of Artificial Sequence: Synthetic oligonucleotide
  Sense strand starting at position 249 of SEQ ID NO: 3798
gucaauguuuauuccuaua

SEQ ID NO: 295481 - RNA, 19 nt, Artificial Sequence
  Description of Artificial Sequence: Synthetic oligonucleotide
  Antisense strand to SEQ ID NO: 295480
uauaggaauaaacauugac

SEQ ID NO: 295482 - RNA, 19 nt, Artificial Sequence
  Description of Artificial Sequence: Synthetic oligonucleotide
  Sense strand starting at position 275 of SEQ ID NO: 3798
acauguauauguguuaaug

SEQ ID NO: 295483 - RNA, 19 nt, Artificial Sequence
  Description of Artificial Sequence: Synthetic oligonucleotide
  Antisense strand to SEQ ID NO: 295482
cauuaacacauauacaugu

SEQ ID NO: 295484 - RNA, 19 nt, Artificial Sequence
  Description of Artificial Sequence: Synthetic oligonucleotide
  Sense strand starting at position 714 of SEQ ID NO: 3798
gucuuacuuguaugagaga

SEQ ID NO: 295485 - RNA, 19 nt, Artificial Sequence
  Description of Artificial Sequence: Synthetic oligonucleotide
  Antisense strand to SEQ ID NO: 295484
ucucucauacaaguaagac

SEQ ID NO: 295486 - RNA, 19 nt, Artificial Sequence
  Description of Artificial Sequence: Synthetic oligonucleotide
  Sense strand starting at position 717 of SEQ ID NO: 3798
uuacuuguaugagagauuu

SEQ ID NO: 295487 - RNA, 19 nt, Artificial Sequence
  Description of Artificial Sequence: Synthetic oligonucleotide
  Antisense strand to SEQ ID NO: 295486
aaaucucucauacaaguaa

SEQ ID NO: 295488 - RNA, 19 nt, Artificial Sequence
  Description of Artificial Sequence: Synthetic oligonucleotide
  Sense strand starting at position 953 of SEQ ID NO: 3798
cugcaaaugcuuugaugga

SEQ ID NO: 295489 - RNA, 19 nt, Artificial Sequence
  Description of Artificial Sequence: Synthetic oligonucleotide
  Antisense strand to SEQ ID NO: 295488
uccaucaaagcauuugcag

SEQ ID NO: 295490 - RNA, 19 nt, Artificial Sequence
  Description of Artificial Sequence: Synthetic oligonucleotide
  Sense strand starting at position 1086 of SEQ ID NO: 3798
uauguaggacaaugcuaaa

SEQ ID NO: 295491 - RNA, 19 nt, Artificial Sequence
  Description of Artificial Sequence: Synthetic oligonucleotide
  Antisense strand to SEQ ID NO: 295490
uuuagcauuguccuacaua

SEQ ID NO: 295492 - RNA, 19 nt, Artificial Sequence
  Description of Artificial Sequence: Synthetic oligonucleotide
  Sense strand starting at position 1181 of SEQ ID NO: 3798
ggcaauuuguccuuugcua

SEQ ID NO: 295493 - RNA, 19 nt, Artificial Sequence
  Description of Artificial Sequence: Synthetic oligonucleotide
  Antisense strand to SEQ ID NO: 295492
uagcaaaggacaaauugcc

SEQ ID NO: 295494 - RNA, 19 nt, Artificial Sequence
  Description of Artificial Sequence: Synthetic oligonucleotide
  Sense strand starting at position 1224 of SEQ ID NO: 3798
cuagguauucaaggguaga

SEQ ID NO: 295495 - RNA, 19 nt, Artificial Sequence
  Description of Artificial Sequence: Synthetic oligonucleotide
  Antisense strand to SEQ ID NO: 295494
ucuacccuugaauaccuag

SEQ ID NO: 295496 - RNA, 19 nt, Artificial Sequence
  Description of Artificial Sequence: Synthetic oligonucleotide
  Sense strand starting at position 1263 of SEQ ID NO: 3798
uguuguuaacgugcagcaa

SEQ ID NO: 295497 - RNA, 19 nt, Artificial Sequence
  Description of Artificial Sequence: Synthetic oligonucleotide
  Antisense strand to SEQ ID NO: 295496
uugcugcacguuaacaaca

SEQ ID NO: 295498 - RNA, 19 nt, Artificial Sequence
  Description of Artificial Sequence: Synthetic oligonucleotide
  Sense strand starting at position 1461 of SEQ ID NO: 3798
ggcacccucccauagaaua

SEQ ID NO: 295499 - RNA, 19 nt, Artificial Sequence
  Description of Artificial Sequence: Synthetic oligonucleotide
  Antisense strand to SEQ ID NO: 295498
uauucuaugggagggugcc

SEQ ID NO: 295500 - RNA, 19 nt, Artificial Sequence
  Description of Artificial Sequence: Synthetic oligonucleotide
  Sense strand starting at position 1576 of SEQ ID NO: 3798
cgaggauguauacaaguca

SEQ ID NO: 295501 - RNA, 19 nt, Artificial Sequence
  Description of Artificial Sequence: Synthetic oligonucleotide
  Antisense strand to SEQ ID NO: 295500
ugacuuguauacauccucg

SEQ ID NO: 295502 - RNA, 19 nt, Artificial Sequence
  Description of Artificial Sequence: Synthetic oligonucleotide
  Sense strand starting at position 1689 of SEQ ID NO: 3798
agauaccuccugcagugaa

SEQ ID NO: 295503 - RNA, 19 nt, Artificial Sequence
  Description of Artificial Sequence: Synthetic oligonucleotide
  Antisense strand to SEQ ID NO: 295502
uucacugcaggagguaucu

SEQ ID NO: 295504 - RNA, 19 nt, Artificial Sequence
  Description of Artificial Sequence: Synthetic oligonucleotide
  Sense strand starting at position 2179 of SEQ ID NO: 3798
gugacccgaaaguauuaau

SEQ ID NO: 295505 - RNA, 19 nt, Artificial Sequence
  Description of Artificial Sequence: Synthetic oligonucleotide
  Antisense strand to SEQ ID NO: 295504
auuaauacuuucgggucac

SEQ ID NO: 295506 - RNA, 19 nt, Artificial Sequence
  Description of Artificial Sequence: Synthetic oligonucleotide
  Sense strand starting at position 2267 of SEQ ID NO: 3798
gauauugaccuuuaaucgu

SEQ ID NO: 295507 - RNA, 19 nt, Artificial Sequence
  Description of Artificial Sequence: Synthetic oligonucleotide
  Antisense strand to SEQ ID NO: 295506
acgauuaaaggucaauauc

SEQ ID NO: 295508 - RNA, 19 nt, Artificial Sequence
  Description of Artificial Sequence: Synthetic oligonucleotide
  Sense strand starting at position 2339 of SEQ ID NO: 3798
ucaauugugagugggcaga

SEQ ID NO: 295509 - RNA, 19 nt, Artificial Sequence
  Description of Artificial Sequence: Synthetic oligonucleotide
  Antisense strand to SEQ ID NO: 295508
ucugcccacucacaauuga

SEQ ID NO: 295510 - RNA, 19 nt, Artificial Sequence
  Description of Artificial Sequence: Synthetic oligonucleotide
  Sense strand starting at position 2341 of SEQ ID NO: 3798
aauugugagugggcagaaa

SEQ ID NO: 295511 - RNA, 19 nt, Artificial Sequence
  Description of Artificial Sequence: Synthetic oligonucleotide
  Antisense strand to SEQ ID NO: 295510
uuucugcccacucacaauu

SEQ ID NO: 295512 - RNA, 19 nt, Artificial Sequence
  Description of Artificial Sequence: Synthetic oligonucleotide
  Sense strand starting at position 2618 of SEQ ID NO: 3798
gugacauagauucgguauu

SEQ ID NO: 295513 - RNA, 19 nt, Artificial Sequence
  Description of Artificial Sequence: Synthetic oligonucleotide
  Antisense strand to SEQ ID NO: 295512
aauaccgaaucuaugucac

SEQ ID NO: 295514 - RNA, 19 nt, Artificial Sequence
  Description of Artificial Sequence: Synthetic oligonucleotide
  Sense strand starting at position 2635 of SEQ ID NO: 3798
uuugaauccuucuugguaa

SEQ ID NO: 295515 - RNA, 19 nt, Artificial Sequence
  Description of Artificial Sequence: Synthetic oligonucleotide
  Antisense strand to SEQ ID NO: 295514
uuaccaagaaggauucaaa

SEQ ID NO: 295516 - RNA, 19 nt, Artificial Sequence
  Description of Artificial Sequence: Synthetic oligonucleotide
  Sense strand starting at position 2637 of SEQ ID NO: 3798
ugaauccuucuugguaaag

SEQ ID NO: 295517 - RNA, 19 nt, Artificial Sequence
  Description of Artificial Sequence: Synthetic oligonucleotide
  Antisense strand to SEQ ID NO: 295516
cuuuaccaagaaggauuca

SEQ ID NO: 295518 - RNA, 19 nt, Artificial Sequence
  Description of Artificial Sequence: Synthetic oligonucleotide
  Sense strand starting at position 2690 of SEQ ID NO: 3798
agaauaugcuuucugaaga

SEQ ID NO: 295519 - RNA, 19 nt, Artificial Sequence
  Description of Artificial Sequence: Synthetic oligonucleotide
  Antisense strand to SEQ ID NO: 295518
ucuucagaaagcauauucu

SEQ ID NO: 295520 - RNA, 19 nt, Artificial Sequence
  Description of Artificial Sequence: Synthetic oligonucleotide
  Sense strand starting at position 2765 of SEQ ID NO: 3798
cuaugauauguuugugaaa

SEQ ID NO: 295521 - RNA, 19 nt, Artificial Sequence
  Description of Artificial Sequence: Synthetic oligonucleotide
  Antisense strand to SEQ ID NO: 295520
uuucacaaacauaucauag

SEQ ID NO: 295522 - RNA, 19 nt, Artificial Sequence
  Description of Artificial Sequence: Synthetic oligonucleotide
  Sense strand starting at position 2809 of SEQ ID NO: 3798
aggucuuuacuauacuagu

SEQ ID NO: 295523 - RNA, 19 nt, Artificial Sequence
  Description of Artificial Sequence: Synthetic oligonucleotide
  Antisense strand to SEQ ID NO: 295522
acuaguauaguaaagaccu

SEQ ID NO: 295524 - RNA, 19 nt, Artificial Sequence
  Description of Artificial Sequence: Synthetic oligonucleotide
  Sense strand starting at position 3132 of SEQ ID NO: 3798
uuaugaguugagcaucuca

SEQ ID NO: 295525 - RNA, 19 nt, Artificial Sequence
  Description of Artificial Sequence: Synthetic oligonucleotide
  Antisense strand to SEQ ID NO: 295524
ugagaugcucaacucauaa

SEQ ID NO: 295526 - RNA, 19 nt, Artificial Sequence
  Description of Artificial Sequence: Synthetic oligonucleotide
  Sense strand starting at position 3251 of SEQ ID NO: 3798
ugguaccauguugaugaau

SEQ ID NO: 295527 - RNA, 19 nt, Artificial Sequence
  Description of Artificial Sequence: Synthetic oligonucleotide
  Antisense strand to SEQ ID NO: 295526
auucaucaacaugguacca

SEQ ID NO: 295528 - RNA, 19 nt, Artificial Sequence
  Description of Artificial Sequence: Synthetic oligonucleotide
  Sense strand starting at position 3264 of SEQ ID NO: 3798
augaauuccucacuggguu

SEQ ID NO: 295529 - RNA, 19 nt, Artificial Sequence
  Description of Artificial Sequence: Synthetic oligonucleotide
  Antisense strand to SEQ ID NO: 295528
aacccagugaggaauucau

SEQ ID NO: 295530 - RNA, 19 nt, Artificial Sequence
  Description of Artificial Sequence: Synthetic oligonucleotide
  Sense strand starting at position 3265 of SEQ ID NO: 3798
ugaauuccucacuggguuu

SEQ ID NO: 295531 - RNA, 19 nt, Artificial Sequence
  Description of Artificial Sequence: Synthetic oligonucleotide
  Antisense strand to SEQ ID NO: 295530
aaacccagugaggaauuca

SEQ ID NO: 295532 - RNA, 19 nt, Artificial Sequence
  Description of Artificial Sequence: Synthetic oligonucleotide
  Sense strand starting at position 3268 of SEQ ID NO: 3798
auuccucacuggguuuaua

SEQ ID NO: 295533 - RNA, 19 nt, Artificial Sequence
  Description of Artificial Sequence: Synthetic oligonucleotide
  Antisense strand to SEQ ID NO: 295532
uauaaacccagugaggaau

SEQ ID NO: 295534 - RNA, 19 nt, Artificial Sequence
  Description of Artificial Sequence: Synthetic oligonucleotide
  Sense strand starting at position 3281 of SEQ ID NO: 3798
uuuauacacuggucuuuau

SEQ ID NO: 295535 - RNA, 19 nt, Artificial Sequence
  Description of Artificial Sequence: Synthetic oligonucleotide
  Antisense strand to SEQ ID NO: 295534
auaaagaccaguguauaaa

SEQ ID NO: 295536 - RNA, 19 nt, Artificial Sequence
  Description of Artificial Sequence: Synthetic oligonucleotide
  Sense strand starting at position 3347 of SEQ ID NO: 3798
gggagugauugcccuacca

SEQ ID NO: 295537 - RNA, 19 nt, Artificial Sequence
  Description of Artificial Sequence: Synthetic oligonucleotide
  Antisense strand to SEQ ID NO: 295536
ugguagggcaaucacuccc

SEQ ID NO: 295538 - RNA, 19 nt, Artificial Sequence
  Description of Artificial Sequence: Synthetic oligonucleotide
  Sense strand starting at position 3349 of SEQ ID NO: 3798
gagugauugcccuaccaau

SEQ ID NO: 295539 - RNA, 19 nt, Artificial Sequence
  Description of Artificial Sequence: Synthetic oligonucleotide
  Antisense strand to SEQ ID NO: 295538
auugguagggcaaucacuc

SEQ ID NO: 295540 - RNA, 19 nt, Artificial Sequence
  Description of Artificial Sequence: Synthetic oligonucleotide
  Sense strand starting at position 3477 of SEQ ID NO: 3798
cugaaagacuggcugaaua

SEQ ID NO: 295541 - RNA, 19 nt, Artificial Sequence
  Description of Artificial Sequence: Synthetic oligonucleotide
  Antisense strand to SEQ ID NO: 295540
uauucagccagucuuucag

SEQ ID NO: 295542 - RNA, 19 nt, Artificial Sequence
  Description of Artificial Sequence: Synthetic oligonucleotide
  Sense strand starting at position 3683 of SEQ ID NO: 3798
aggguuuauugaguuucua

SEQ ID NO: 295543 - RNA, 19 nt, Artificial Sequence
  Description of Artificial Sequence: Synthetic oligonucleotide
  Antisense strand to SEQ ID NO: 295542
uagaaacucaauaaacccu

SEQ ID NO: 295544 - RNA, 19 nt, Artificial Sequence
  Description of Artificial Sequence: Synthetic oligonucleotide
  Sense strand starting at position 3726 of SEQ ID NO: 3798
cacugccuucucugggaua

SEQ ID NO: 295545 - RNA, 19 nt, Artificial Sequence
  Description of Artificial Sequence: Synthetic oligonucleotide
  Antisense strand to SEQ ID NO: 295544
uaucccagagaaggcagug

SEQ ID NO: 295546 - RNA, 19 nt, Artificial Sequence
  Description of Artificial Sequence: Synthetic oligonucleotide
  Sense strand starting at position 3836 of SEQ ID NO: 3798
uauagucuugcucagauug

SEQ ID NO: 295547 - RNA, 19 nt, Artificial Sequence
  Description of Artificial Sequence: Synthetic oligonucleotide
  Antisense strand to SEQ ID NO: 295546
caaucugagcaagacuaua

SEQ ID NO: 295548 - RNA, 19 nt, Artificial Sequence
  Description of Artificial Sequence: Synthetic oligonucleotide
  Sense strand starting at position 3908 of SEQ ID NO: 3798
gauaauggcguauaaggau

SEQ ID NO: 295549 - RNA, 19 nt, Artificial Sequence
  Description of Artificial Sequence: Synthetic oligonucleotide
  Antisense strand to SEQ ID NO: 295548
auccuuauacgccauuauc

SEQ ID NO: 295550 - RNA, 19 nt, Artificial Sequence
  Description of Artificial Sequence: Synthetic oligonucleotide
  Sense strand starting at position 3930 of SEQ ID NO: 3798
agaucauuguccucuauua

SEQ ID NO: 295551 - RNA, 19 nt, Artificial Sequence
  Description of Artificial Sequence: Synthetic oligonucleotide
  Antisense strand to SEQ ID NO: 295550
uaauagaggacaaugaucu

SEQ ID NO: 295552 - RNA, 19 nt, Artificial Sequence
  Description of Artificial Sequence: Synthetic oligonucleotide
  Sense strand starting at position 3952 of SEQ ID NO: 3798
auacacuugcuggguagau

SEQ ID NO: 295553 - RNA, 19 nt, Artificial Sequence
  Description of Artificial Sequence: Synthetic oligonucleotide
  Antisense strand to SEQ ID NO: 295552
aucuacccagcaaguguau

SEQ ID NO: 295554 - RNA, 19 nt, Artificial Sequence
  Description of Artificial Sequence: Synthetic oligonucleotide
  Sense strand starting at position 3953 of SEQ ID NO: 3798
uacacuugcuggguagaua

SEQ ID NO: 295555 - RNA, 19 nt, Artificial Sequence
  Description of Artificial Sequence: Synthetic oligonucleotide
  Antisense strand to SEQ ID NO: 295554
uaucuacccagcaagugua

SEQ ID NO: 295556 - RNA, 19 nt, Artificial Sequence
  Description of Artificial Sequence: Synthetic oligonucleotide
  Sense strand starting at position 515 of SEQ ID NO: 3800
agcaauauccauuggcaac

SEQ ID NO: 295557 - RNA, 19 nt, Artificial Sequence
  Description of Artificial Sequence: Synthetic oligonucleotide
  Antisense strand to SEQ ID NO: 295556
guugccaauggauauugcu

SEQ ID NO: 295558 - RNA, 19 nt, Artificial Sequence
  Description of Artificial Sequence: Synthetic oligonucleotide
  Sense strand starting at position 547 of SEQ ID NO: 3800
gcaaguaagccuuaacuuc

SEQ ID NO: 295559 - RNA, 19 nt, Artificial Sequence
  Description of Artificial Sequence: Synthetic oligonucleotide
  Antisense strand to SEQ ID NO: 295558
gaaguuaaggcuuacuugc

SEQ ID NO: 295560 - RNA, 19 nt, Artificial Sequence
  Description of Artificial Sequence: Synthetic oligonucleotide
  Sense strand starting at position 596 of SEQ ID NO: 3800
gugccagacacugaugaau

SEQ ID NO: 295561 - RNA, 19 nt, Artificial Sequence
  Description of Artificial Sequence: Synthetic oligonucleotide
  Antisense strand to SEQ ID NO: 295560
auucaucagugucuggcac

SEQ ID NO: 295562 - RNA, 19 nt, Artificial Sequence
  Description of Artificial Sequence: Synthetic oligonucleotide
  Sense strand starting at position 602 of SEQ ID NO: 3800
gacacugaugaauguguua

SEQ ID NO: 295563 - RNA, 19 nt, Artificial Sequence
  Description of Artificial Sequence: Synthetic oligonucleotide
  Antisense strand to SEQ ID NO: 295562
uaacacauucaucaguguc

SEQ ID NO: 295564 - RNA, 19 nt, Artificial Sequence
  Description of Artificial Sequence: Synthetic oligonucleotide
  Sense strand starting at position 605 of SEQ ID NO: 3800
acugaugaauguguuacau

SEQ ID NO: 295565 - RNA, 19 nt, Artificial Sequence
  Description of Artificial Sequence: Synthetic oligonucleotide
  Antisense strand to SEQ ID NO: 295564
auguaacacauucaucagu

SEQ ID NO: 295566 - RNA, 19 nt, Artificial Sequence
  Description of Artificial Sequence: Synthetic oligonucleotide
  Sense strand starting at position 724 of SEQ ID NO: 3800
uucccaaaggcucauagua

SEQ ID NO: 295567 - RNA, 19 nt, Artificial Sequence
  Description of Artificial Sequence: Synthetic oligonucleotide
  Antisense strand to SEQ ID NO: 295566
uacuaugagccuuugggaa

SEQ ID NO: 295568 - RNA, 19 nt, Artificial Sequence
  Description of Artificial Sequence: Synthetic oligonucleotide
  Sense strand starting at position 732 of SEQ ID NO: 3800
ggcucauaguaagugauaa

SEQ ID NO: 295569 - RNA, 19 nt, Artificial Sequence
  Description of Artificial Sequence: Synthetic oligonucleotide
  Antisense strand to SEQ ID NO: 295568
uuaucacuuacuaugagcc

SEQ ID NO: 295570 - RNA, 19 nt, Artificial Sequence
  Description of Artificial Sequence: Synthetic oligonucleotide
  Sense strand starting at position 1306 of SEQ ID NO: 3800
guaagagaaucuucgugaa

SEQ ID NO: 295571 - RNA, 19 nt, Artificial Sequence
  Description of Artificial Sequence: Synthetic oligonucleotide
  Antisense strand to SEQ ID NO: 295570
uucacgaagauucucuuac

SEQ ID NO: 295572 - RNA, 19 nt, Artificial Sequence
  Description of Artificial Sequence: Synthetic oligonucleotide
  Sense strand starting at position 1308 of SEQ ID NO: 3800
aagagaaucuucgugaauu

SEQ ID NO: 295573 - RNA, 19 nt, Artificial Sequence
  Description of Artificial Sequence: Synthetic oligonucleotide
  Antisense strand to SEQ ID NO: 295572
aauucacgaagauucucuu

SEQ ID NO: 295574 - RNA, 19 nt, Artificial Sequence
  Description of Artificial Sequence: Synthetic oligonucleotide
  Sense strand starting at position 1412 of SEQ ID NO: 3800
agguguuuaaugggacaua

SEQ ID NO: 295575 - RNA, 19 nt, Artificial Sequence
  Description of Artificial Sequence: Synthetic oligonucleotide
  Antisense strand to SEQ ID NO: 295574
uaugucccauuaaacaccu

SEQ ID NO: 295576 - RNA, 19 nt, Artificial Sequence
  Description of Artificial Sequence: Synthetic oligonucleotide
  Sense strand starting at position 2270 of SEQ ID NO: 3800
cuucccuucgauuagacaa

SEQ ID NO: 295577 - RNA, 19 nt, Artificial Sequence
  Description of Artificial Sequence: Synthetic oligonucleotide
  Antisense strand to SEQ ID NO: 295576
uugucuaaucgaagggaag

SEQ ID NO: 295578 - RNA, 19 nt, Artificial Sequence
  Description of Artificial Sequence: Synthetic oligonucleotide
  Sense strand starting at position 2378 of SEQ ID NO: 3800
ggccgcuugaacugagaaa

SEQ ID NO: 295579 - RNA, 19 nt, Artificial Sequence
  Description of Artificial Sequence: Synthetic oligonucleotide
  Antisense strand to SEQ ID NO: 295578
uuucucaguucaagcggcc

SEQ ID NO: 295580 - RNA, 19 nt, Artificial Sequence
  Description of Artificial Sequence: Synthetic oligonucleotide
  Sense strand starting at position 2439 of SEQ ID NO: 3800
auucuauuguaacugugaa

SEQ ID NO: 295581 - RNA, 19 nt, Artificial Sequence
  Description of Artificial Sequence: Synthetic oligonucleotide
  Antisense strand to SEQ ID NO: 295580
uucacaguuacaauagaau

SEQ ID NO: 295582 - RNA, 19 nt, Artificial Sequence
  Description of Artificial Sequence: Synthetic oligonucleotide
  Sense strand starting at position 2453 of SEQ ID NO: 3800
gugaaucugcagcaguaau

SEQ ID NO: 295583 - RNA, 19 nt, Artificial Sequence
  Description of Artificial Sequence: Synthetic oligonucleotide
  Antisense strand to SEQ ID NO: 295582
auuacugcugcagauucac

SEQ ID NO: 295584 - RNA, 19 nt, Artificial Sequence
  Description of Artificial Sequence: Synthetic oligonucleotide
  Sense strand starting at position 2517 of SEQ ID NO: 3800
augcauguugaaugaacaa

SEQ ID NO: 295585 - RNA, 19 nt, Artificial Sequence
  Description of Artificial Sequence: Synthetic oligonucleotide
  Antisense strand to SEQ ID NO: 295584
uuguucauucaacaugcau

SEQ ID NO: 295586 - RNA, 19 nt, Artificial Sequence
  Description of Artificial Sequence: Synthetic oligonucleotide
  Sense strand starting at position 3019 of SEQ ID NO: 3800
uggcuaauacaaugauuac

SEQ ID NO: 295587 - RNA, 19 nt, Artificial Sequence
  Description of Artificial Sequence: Synthetic oligonucleotide
  Antisense strand to SEQ ID NO: 295586
guaaucauuguauuagcca

SEQ ID NO: 295588 - RNA, 19 nt, Artificial Sequence
  Description of Artificial Sequence: Synthetic oligonucleotide
  Sense strand starting at position 3101 of SEQ ID NO: 3800
aguucugaagaacgaguua

SEQ ID NO: 295589 - RNA, 19 nt, Artificial Sequence
  Description of Artificial Sequence: Synthetic oligonucleotide
  Antisense strand to SEQ ID NO: 295588
uaacucguucuucagaacu

SEQ ID NO: 295590 - RNA, 19 nt, Artificial Sequence
  Description of Artificial Sequence: Synthetic oligonucleotide
  Sense strand starting at position 3112 of SEQ ID NO: 3800
acgaguuaauuccuuccuu

SEQ ID NO: 295591 - RNA, 19 nt, Artificial Sequence
  Description of Artificial Sequence: Synthetic oligonucleotide
  Antisense strand to SEQ ID NO: 295590
aaggaaggaauuaacucgu

SEQ ID NO: 295592 - RNA, 19 nt, Artificial Sequence
  Description of Artificial Sequence: Synthetic oligonucleotide
  Sense strand starting at position 3113 of SEQ ID NO: 3800
cgaguuaauuccuuccuuc

SEQ ID NO: 295593 - RNA, 19 nt, Artificial Sequence
  Description of Artificial Sequence: Synthetic oligonucleotide
  Antisense strand to SEQ ID NO: 295592
gaaggaaggaauuaacucg

SEQ ID NO: 295594 - RNA, 19 nt, Artificial Sequence
  Description of Artificial Sequence: Synthetic oligonucleotide
  Sense strand starting at position 3268 of SEQ ID NO: 3800
agcaucaacugguugugaa

SEQ ID NO: 295595 - RNA, 19 nt, Artificial Sequence
  Description of Artificial Sequence: Synthetic oligonucleotide
  Antisense strand to SEQ ID NO: 295594
uucacaaccaguugaugcu

SEQ ID NO: 295596 - RNA, 19 nt, Artificial Sequence
  Description of Artificial Sequence: Synthetic oligonucleotide
  Sense strand starting at position 3269 of SEQ ID NO: 3800
gcaucaacugguugugaaa

SEQ ID NO: 295597 - RNA, 19 nt, Artificial Sequence
  Description of Artificial Sequence: Synthetic oligonucleotide
  Antisense strand to SEQ ID NO: 295596
uuucacaaccaguugaugc

SEQ ID NO: 295598 - RNA, 19 nt, Artificial Sequence
  Description of Artificial Sequence: Synthetic oligonucleotide
  Sense strand starting at position 3388 of SEQ ID NO: 3800
cgguguugugaugauuaau

SEQ ID NO: 295599 - RNA, 19 nt, Artificial Sequence
  Description of Artificial Sequence: Synthetic oligonucleotide
  Antisense strand to SEQ ID NO: 295598
auuaaucaucacaacaccg

SEQ ID NO: 295600 - RNA, 19 nt, Artificial Sequence
  Description of Artificial Sequence: Synthetic oligonucleotide
  Sense strand starting at position 3437 of SEQ ID NO: 3800
acaauuaauguccgcuaca

SEQ ID NO: 295601 - RNA, 19 nt, Artificial Sequence
  Description of Artificial Sequence: Synthetic oligonucleotide
  Antisense strand to SEQ ID NO: 295600
uguagcggacauuaauugu

SEQ ID NO: 295602 - RNA, 19 nt, Artificial Sequence
  Description of Artificial Sequence: Synthetic oligonucleotide
  Sense strand starting at position 3440 of SEQ ID NO: 3800
auuaauguccgcuacauga

SEQ ID NO: 295603 - RNA, 19 nt, Artificial Sequence
  Description of Artificial Sequence: Synthetic oligonucleotide
  Antisense strand to SEQ ID NO: 295602
ucauguagcggacauuaau

SEQ ID NO: 295604 - RNA, 19 nt, Artificial Sequence
  Description of Artificial Sequence: Synthetic oligonucleotide
  Sense strand starting at position 3442 of SEQ ID NO: 3800
uaauguccgcuacaugaaa

SEQ ID NO: 295605 - RNA, 19 nt, Artificial Sequence
  Description of Artificial Sequence: Synthetic oligonucleotide
  Antisense strand to SEQ ID NO: 295604
uuucauguagcggacauua

SEQ ID NO: 295606 - RNA, 19 nt, Artificial Sequence
  Description of Artificial Sequence: Synthetic oligonucleotide
  Sense strand starting at position 3473 of SEQ ID NO: 3800
uggcaaguaccacaaugau

SEQ ID NO: 295607 - RNA, 19 nt, Artificial Sequence
  Description of Artificial Sequence: Synthetic oligonucleotide
  Antisense strand to SEQ ID NO: 295606
aucauugugguacuugcca

SEQ ID NO: 295608 - RNA, 19 nt, Artificial Sequence
  Description of Artificial Sequence: Synthetic oligonucleotide
  Sense strand starting at position 3567 of SEQ ID NO: 3800
ugaguugugccaugaagga

SEQ ID NO: 295609 - RNA, 19 nt, Artificial Sequence
  Description of Artificial Sequence: Synthetic oligonucleotide
  Antisense strand to SEQ ID NO: 295608
uccuucauggcacaacuca

SEQ ID NO: 295610 - RNA, 19 nt, Artificial Sequence
  Description of Artificial Sequence: Synthetic oligonucleotide
  Sense strand starting at position 3586 of SEQ ID NO: 3800
aaugcaaguggcuguauaa

SEQ ID NO: 295611 - RNA, 19 nt, Artificial Sequence
  Description of Artificial Sequence: Synthetic oligonucleotide
  Antisense strand to SEQ ID NO: 295610
uuauacagccacuugcauu

SEQ ID NO: 295612 - RNA, 19 nt, Artificial Sequence
  Description of Artificial Sequence: Synthetic oligonucleotide
  Sense strand starting at position 3597 of SEQ ID NO: 3800
cuguauaacgcacaaagua

SEQ ID NO: 295613 - RNA, 19 nt, Artificial Sequence
  Description of Artificial Sequence: Synthetic oligonucleotide
  Antisense strand to SEQ ID NO: 295612
uacuuugugcguuauacag

SEQ ID NO: 295614 - RNA, 19 nt, Artificial Sequence
  Description of Artificial Sequence: Synthetic oligonucleotide
  Sense strand starting at position 3616 of SEQ ID NO: 3800
caguuaugagaagguucuu

SEQ ID NO: 295615 - RNA, 19 nt, Artificial Sequence
  Description of Artificial Sequence: Synthetic oligonucleotide
  Antisense strand to SEQ ID NO: 295614
aagaaccuucucauaacug

SEQ ID NO: 295616 - RNA, 19 nt, Artificial Sequence
  Description of Artificial Sequence: Synthetic oligonucleotide
  Sense strand starting at position 3622 of SEQ ID NO: 3800
ugagaagguucuuuaggau

SEQ ID NO: 295617 - RNA, 19 nt, Artificial Sequence
  Description of Artificial Sequence: Synthetic oligonucleotide
  Antisense strand to SEQ ID NO: 295616
auccuaaagaaccuucuca

SEQ ID NO: 295618 - RNA, 19 nt, Artificial Sequence
  Description of Artificial Sequence: Synthetic oligonucleotide
  Sense strand starting at position 3710 of SEQ ID NO: 3800
uuaagcuaucagggaagca

SEQ ID NO: 295619 - RNA, 19 nt, Artificial Sequence
  Description of Artificial Sequence: Synthetic oligonucleotide
  Antisense strand to SEQ ID NO: 295618
ugcuucccugauagcuuaa

SEQ ID NO: 295620 - RNA, 19 nt, Artificial Sequence
  Description of Artificial Sequence: Synthetic oligonucleotide
  Sense strand starting at position 3822 of SEQ ID NO: 3800
cuauguugguguguggaga

SEQ ID NO: 295621 - RNA, 19 nt, Artificial Sequence
  Description of Artificial Sequence: Synthetic oligonucleotide
  Antisense strand to SEQ ID NO: 295620
ucuccacacaccaacauag

SEQ ID NO: 295622 - RNA, 19 nt, Artificial Sequence
  Description of Artificial Sequence: Synthetic oligonucleotide
  Sense strand starting at position 3823 of SEQ ID NO: 3800
uauguugguguguggagaa

SEQ ID NO: 295623 - RNA, 19 nt, Artificial Sequence
  Description of Artificial Sequence: Synthetic oligonucleotide
  Antisense strand to SEQ ID NO: 295622
uucuccacacaccaacaua

SEQ ID NO: 295624 - RNA, 19 nt, Artificial Sequence
  Description of Artificial Sequence: Synthetic oligonucleotide
  Sense strand starting at position 3861 of SEQ ID NO: 3800
ucauauacacuugguuuga

SEQ ID NO: 295625 - RNA, 19 nt, Artificial Sequence
  Description of Artificial Sequence: Synthetic oligonucleotide
  Antisense strand to SEQ ID NO: 295624
ucaaaccaaguguauauga

SEQ ID NO: 295626 - RNA, 19 nt, Artificial Sequence
  Description of Artificial Sequence: Synthetic oligonucleotide
  Sense strand starting at position 3863 of SEQ ID NO: 3800
auauacacuugguuugaau

SEQ ID NO: 295627 - RNA, 19 nt, Artificial Sequence
  Description of Artificial Sequence: Synthetic oligonucleotide
  Antisense strand to SEQ ID NO: 295626
auucaaaccaaguguauau

SEQ ID NO: 295628 - RNA, 19 nt, Artificial Sequence
  Description of Artificial Sequence: Synthetic oligonucleotide
  Sense strand starting at position 3904 of SEQ ID NO: 3800
cuguaugaacguggucaaa

SEQ ID NO: 295629 - RNA, 19 nt, Artificial Sequence
  Description of Artificial Sequence: Synthetic oligonucleotide
  Antisense strand to SEQ ID NO: 295628
uuugaccacguucauacag

SEQ ID NO: 295630 - RNA, 19 nt, Artificial Sequence
  Description of Artificial Sequence: Synthetic oligonucleotide
  Sense strand starting at position 3906 of SEQ ID NO: 3800
guaugaacguggucaaauc

SEQ ID NO: 295631 - RNA, 19 nt, Artificial Sequence
  Description of Artificial Sequence: Synthetic oligonucleotide
  Antisense strand to SEQ ID NO: 295630
gauuugaccacguucauac

SEQ ID NO: 295632 - RNA, 19 nt, Artificial Sequence
  Description of Artificial Sequence: Synthetic oligonucleotide
  Sense strand starting at position 3934 of SEQ ID NO: 3800
uggcaccucucauuaaaug

SEQ ID NO: 295633 - RNA, 19 nt, Artificial Sequence
  Description of Artificial Sequence: Synthetic oligonucleotide
  Antisense strand to SEQ ID NO: 295632
cauuuaaugagaggugcca

SEQ ID NO: 295634 - RNA, 19 nt, Artificial Sequence
  Description of Artificial Sequence: Synthetic oligonucleotide
  Sense strand starting at position 3935 of SEQ ID NO: 3800
ggcaccucucauuaaaugu

SEQ ID NO: 295635 - RNA, 19 nt, Artificial Sequence
  Description of Artificial Sequence: Synthetic oligonucleotide
  Antisense strand to SEQ ID NO: 295634
acauuuaaugagaggugcc

SEQ ID NO: 295636 - RNA, 19 nt, Artificial Sequence
  Description of Artificial Sequence: Synthetic oligonucleotide
  Sense strand starting at position 709 of SEQ ID NO: 3799
gcgcccaggcucuauuuau

SEQ ID NO: 295637 - RNA, 19 nt, Artificial Sequence
  Description of Artificial Sequence: Synthetic oligonucleotide
  Antisense strand to SEQ ID NO: 295636
auaaauagagccugggcgc

SEQ ID NO: 295638 - RNA, 19 nt, Artificial Sequence
  Description of Artificial Sequence: Synthetic oligonucleotide
  Sense strand starting at position 982 of SEQ ID NO: 3799
gccugaccuuccucuagaa

SEQ ID NO: 295639 - RNA, 19 nt, Artificial Sequence
  Description of Artificial Sequence: Synthetic oligonucleotide
  Antisense strand to SEQ ID NO: 295638
uucuagaggaaggucaggc

SEQ ID NO: 295640 - RNA, 19 nt, Artificial Sequence
  Description of Artificial Sequence: Synthetic oligonucleotide
  Sense strand starting at position 1030 of SEQ ID NO: 3799
gcaucuacuugacuugauu

SEQ ID NO: 295641 - RNA, 19 nt, Artificial Sequence
  Description of Artificial Sequence: Synthetic oligonucleotide
  Antisense strand to SEQ ID NO: 295640
aaucaagucaaguagaugc

SEQ ID NO: 295642 - RNA, 19 nt, Artificial Sequence
  Description of Artificial Sequence: Synthetic oligonucleotide
  Sense strand starting at position 1148 of SEQ ID NO: 3799
ccuaguuaggaguacagua

SEQ ID NO: 295643 - RNA, 19 nt, Artificial Sequence
  Description of Artificial Sequence: Synthetic oligonucleotide
  Antisense strand to SEQ ID NO: 295642
uacuguacuccuaacuagg

SEQ ID NO: 295644 - RNA, 19 nt, Artificial Sequence
  Description of Artificial Sequence: Synthetic oligonucleotide
  Sense strand starting at position 1310 of SEQ ID NO: 3799
uccugaaacuucucuagug

SEQ ID NO: 295645 - RNA, 19 nt, Artificial Sequence
  Description of Artificial Sequence: Synthetic oligonucleotide
  Antisense strand to SEQ ID NO: 295644
cacuagagaaguuucagga

SEQ ID NO: 295646 - RNA, 19 nt, Artificial Sequence
  Description of Artificial Sequence: Synthetic oligonucleotide
  Sense strand starting at position 1311 of SEQ ID NO: 3799
ccugaaacuucucuagugu

SEQ ID NO: 295647 - RNA, 19 nt, Artificial Sequence
  Description of Artificial Sequence: Synthetic oligonucleotide
  Antisense strand to SEQ ID NO: 295646
acacuagagaaguuucagg

SEQ ID NO: 295648 - RNA, 19 nt, Artificial Sequence
  Description of Artificial Sequence: Synthetic oligonucleotide
  Sense strand starting at position 1317 of SEQ ID NO: 3799
acuucucuagugugaccaa

SEQ ID NO: 295649 - RNA, 19 nt, Artificial Sequence
  Description of Artificial Sequence: Synthetic oligonucleotide
  Antisense strand to SEQ ID NO: 295648
uuggucacacuagagaagu

SEQ ID NO: 295650 - RNA, 19 nt, Artificial Sequence
  Description of Artificial Sequence: Synthetic oligonucleotide
  Sense strand starting at position 1352 of SEQ ID NO: 3799
ggguuuagcagagaaaguc

SEQ ID NO: 295651 - RNA, 19 nt, Artificial Sequence
  Description of Artificial Sequence: Synthetic oligonucleotide
  Antisense strand to SEQ ID NO: 295650
gacuuucucugcuaaaccc

SEQ ID NO: 295652 - RNA, 19 nt, Artificial Sequence
  Description of Artificial Sequence: Synthetic oligonucleotide
  Sense strand starting at position 1412 of SEQ ID NO: 3799
ucaccugagucuuuaugua

SEQ ID NO: 295653 - RNA, 19 nt, Artificial Sequence
  Description of Artificial Sequence: Synthetic oligonucleotide
  Antisense strand to SEQ ID NO: 295652
uacauaaagacucagguga

SEQ ID NO: 295654 - RNA, 19 nt, Artificial Sequence
  Description of Artificial Sequence: Synthetic oligonucleotide
  Sense strand starting at position 1417 of SEQ ID NO: 3799
ugagucuuuauguaguauu

SEQ ID NO: 295655 - RNA, 19 nt, Artificial Sequence
  Description of Artificial Sequence: Synthetic oligonucleotide
  Antisense strand to SEQ ID NO: 295654
aauacuacauaaagacuca

SEQ ID NO: 295656 - RNA, 19 nt, Artificial Sequence
  Description of Artificial Sequence: Synthetic oligonucleotide
  Sense strand starting at position 1466 of SEQ ID NO: 3799
gggcuaugaaguugaauug

SEQ ID NO: 295657 - RNA, 19 nt, Artificial Sequence
  Description of Artificial Sequence: Synthetic oligonucleotide
  Antisense strand to SEQ ID NO: 295656
caauucaacuucauagccc

SEQ ID NO: 295658 - RNA, 19 nt, Artificial Sequence
  Description of Artificial Sequence: Synthetic oligonucleotide
  Sense strand starting at position 1473 of SEQ ID NO: 3799
gaaguugaauugcccagaa

SEQ ID NO: 295659 - RNA, 19 nt, Artificial Sequence
  Description of Artificial Sequence: Synthetic oligonucleotide
  Antisense strand to SEQ ID NO: 295658
uucugggcaauucaacuuc

SEQ ID NO: 295660 - RNA, 19 nt, Artificial Sequence
  Description of Artificial Sequence: Synthetic oligonucleotide
  Sense strand starting at position 1475 of SEQ ID NO: 3799
aguugaauugcccagaauu

SEQ ID NO: 295661 - RNA, 19 nt, Artificial Sequence
  Description of Artificial Sequence: Synthetic oligonucleotide
  Antisense strand to SEQ ID NO: 295660
aauucugggcaauucaacu

SEQ ID NO: 295662 - RNA, 19 nt, Artificial Sequence
  Description of Artificial Sequence: Synthetic oligonucleotide
  Sense strand starting at position 1512 of SEQ ID NO: 3799
uuaaguagucuagaagcua

SEQ ID NO: 295663 - RNA, 19 nt, Artificial Sequence
  Description of Artificial Sequence: Synthetic oligonucleotide
  Antisense strand to SEQ ID NO: 295662
uagcuucuagacuacuuaa

SEQ ID NO: 295664 - RNA, 19 nt, Artificial Sequence
  Description of Artificial Sequence: Synthetic oligonucleotide
  Sense strand starting at position 1521 of SEQ ID NO: 3799
cuagaagcuagaugaguau

SEQ ID NO: 295665 - RNA, 19 nt, Artificial Sequence
  Description of Artificial Sequence: Synthetic oligonucleotide
  Antisense strand to SEQ ID NO: 295664
auacucaucuagcuucuag

SEQ ID NO: 295666 - RNA, 19 nt, Artificial Sequence
  Description of Artificial Sequence: Synthetic oligonucleotide
  Sense strand starting at position 1524 of SEQ ID NO: 3799
gaagcuagaugaguaugaa

SEQ ID NO: 295667 - RNA, 19 nt, Artificial Sequence
  Description of Artificial Sequence: Synthetic oligonucleotide
  Antisense strand to SEQ ID NO: 295666
uucauacucaucuagcuuc

SEQ ID NO: 295668 - RNA, 19 nt, Artificial Sequence
  Description of Artificial Sequence: Synthetic oligonucleotide
  Sense strand starting at position 1653 of SEQ ID NO: 3799
ugauauccucuuugaucag

SEQ ID NO: 295669 - RNA, 19 nt, Artificial Sequence
  Description of Artificial Sequence: Synthetic oligonucleotide
  Antisense strand to SEQ ID NO: 295668
cugaucaaagaggauauca

SEQ ID NO: 295670 - RNA, 19 nt, Artificial Sequence
  Description of Artificial Sequence: Synthetic oligonucleotide
  Sense strand starting at position 2202 of SEQ ID NO: 3799
cggacauccucuucccaaa

SEQ ID NO: 295671 - RNA, 19 nt, Artificial Sequence
  Description of Artificial Sequence: Synthetic oligonucleotide
  Antisense strand to SEQ ID NO: 295670
uuugggaagaggauguccg

SEQ ID NO: 295672 - RNA, 19 nt, Artificial Sequence
  Description of Artificial Sequence: Synthetic oligonucleotide
  Sense strand starting at position 2224 of SEQ ID NO: 3799
gaagauacuguaugccauu

SEQ ID NO: 295673 - RNA, 19 nt, Artificial Sequence
  Description of Artificial Sequence: Synthetic oligonucleotide
  Antisense strand to SEQ ID NO: 295672
aauggcauacaguaucuuc

SEQ ID NO: 295674 - RNA, 19 nt, Artificial Sequence
  Description of Artificial Sequence: Synthetic oligonucleotide
  Sense strand starting at position 2251 of SEQ ID NO: 3799
gcugcagaacucgaccaaa

SEQ ID NO: 295675 - RNA, 19 nt, Artificial Sequence
  Description of Artificial Sequence: Synthetic oligonucleotide
  Antisense strand to SEQ ID NO: 295674
uuuggucgaguucugcagc

SEQ ID NO: 295676 - RNA, 19 nt, Artificial Sequence
  Description of Artificial Sequence: Synthetic oligonucleotide
  Sense strand starting at position 2351 of SEQ ID NO: 3799
ucuauucugcuugaauuga

SEQ ID NO: 295677 - RNA, 19 nt, Artificial Sequence
  Description of Artificial Sequence: Synthetic oligonucleotide
  Antisense strand to SEQ ID NO: 295676
ucaauucaagcagaauaga

SEQ ID NO: 295678 - RNA, 19 nt, Artificial Sequence
  Description of Artificial Sequence: Synthetic oligonucleotide
  Sense strand starting at position 2487 of SEQ ID NO: 3799
cccauaucucuuuauuggu

SEQ ID NO: 295679 - RNA, 19 nt, Artificial Sequence
  Description of Artificial Sequence: Synthetic oligonucleotide
  Antisense strand to SEQ ID NO: 295678
accaauaaagagauauggg

SEQ ID NO: 295680 - RNA, 19 nt, Artificial Sequence
  Description of Artificial Sequence: Synthetic oligonucleotide
  Sense strand starting at position 2500 of SEQ ID NO: 3799
auugguaaauuccuugaua

SEQ ID NO: 295681 - RNA, 19 nt, Artificial Sequence
  Description of Artificial Sequence: Synthetic oligonucleotide
  Antisense strand to SEQ ID NO: 295680
uaucaaggaauuuaccaau

SEQ ID NO: 295682 - RNA, 19 nt, Artificial Sequence
  Description of Artificial Sequence: Synthetic oligonucleotide
  Sense strand starting at position 2501 of SEQ ID NO: 3799
uugguaaauuccuugauau

SEQ ID NO: 295683 - RNA, 19 nt, Artificial Sequence
  Description of Artificial Sequence: Synthetic oligonucleotide
  Antisense strand to SEQ ID NO: 295682
auaucaaggaauuuaccaa

SEQ ID NO: 295684 - RNA, 19 nt, Artificial Sequence
  Description of Artificial Sequence: Synthetic oligonucleotide
  Sense strand starting at position 2502 of SEQ ID NO: 3799
ugguaaauuccuugauaua

SEQ ID NO: 295685 - RNA, 19 nt, Artificial Sequence
  Description of Artificial Sequence: Synthetic oligonucleotide
  Antisense strand to SEQ ID NO: 295684
uauaucaaggaauuuacca

SEQ ID NO: 295686 - RNA, 19 nt, Artificial Sequence
  Description of Artificial Sequence: Synthetic oligonucleotide
  Sense strand starting at position 2590 of SEQ ID NO: 3799
aaauguagaugugcuuuga

SEQ ID NO: 295687 - RNA, 19 nt, Artificial Sequence
  Description of Artificial Sequence: Synthetic oligonucleotide
  Antisense strand to SEQ ID NO: 295686
ucaaagcacaucuacauuu

SEQ ID NO: 295688 - RNA, 19 nt, Artificial Sequence
  Description of Artificial Sequence: Synthetic oligonucleotide
  Sense strand starting at position 2964 of SEQ ID NO: 3799
gugggaauuaugggcuuga

SEQ ID NO: 295689 - RNA, 19 nt, Artificial Sequence
  Description of Artificial Sequence: Synthetic oligonucleotide
  Antisense strand to SEQ ID NO: 295688
ucaagcccauaauucccac

SEQ ID NO: 295690 - RNA, 19 nt, Artificial Sequence
  Description of Artificial Sequence: Synthetic oligonucleotide
  Sense strand starting at position 2968 of SEQ ID NO: 3799
gaauuaugggcuugagcca

SEQ ID NO: 295691 - RNA, 19 nt, Artificial Sequence
  Description of Artificial Sequence: Synthetic oligonucleotide
  Antisense strand to SEQ ID NO: 295690
uggcucaagcccauaauuc

SEQ ID NO: 295692 - RNA, 19 nt, Artificial Sequence
  Description of Artificial Sequence: Synthetic oligonucleotide
  Sense strand starting at position 3015 of SEQ ID NO: 3799
guuguaaguguaugacaaa

SEQ ID NO: 295693 - RNA, 19 nt, Artificial Sequence
  Description of Artificial Sequence: Synthetic oligonucleotide
  Antisense strand to SEQ ID NO: 295692
uuugucauacacuuacaac

SEQ ID NO: 295694 - RNA, 19 nt, Artificial Sequence
  Description of Artificial Sequence: Synthetic oligonucleotide
  Sense strand starting at position 3039 of SEQ ID NO: 3799
uugagugacugauuauaag

SEQ ID NO: 295695 - RNA, 19 nt, Artificial Sequence
  Description of Artificial Sequence: Synthetic oligonucleotide
  Antisense strand to SEQ ID NO: 295694
cuuauaaucagucacucaa

SEQ ID NO: 295696 - RNA, 19 nt, Artificial Sequence
  Description of Artificial Sequence: Synthetic oligonucleotide
  Sense strand starting at position 3045 of SEQ ID NO: 3799
gacugauuauaaguguaua

SEQ ID NO: 295697 - RNA, 19 nt, Artificial Sequence
  Description of Artificial Sequence: Synthetic oligonucleotide
  Antisense strand to SEQ ID NO: 295696
uauacacuuauaaucaguc

SEQ ID NO: 295698 - RNA, 19 nt, Artificial Sequence
  Description of Artificial Sequence: Synthetic oligonucleotide
  Sense strand starting at position 3061 of SEQ ID NO: 3799
auaugaauguauguuguca

SEQ ID NO: 295699 - RNA, 19 nt, Artificial Sequence
  Description of Artificial Sequence: Synthetic oligonucleotide
  Antisense strand to SEQ ID NO: 295698
ugacaacauacauucauau

SEQ ID NO: 295700 - RNA, 19 nt, Artificial Sequence
  Description of Artificial Sequence: Synthetic oligonucleotide
  Sense strand starting at position 3065 of SEQ ID NO: 3799
gaauguauguugucauaau

SEQ ID NO: 295701 - RNA, 19 nt, Artificial Sequence
  Description of Artificial Sequence: Synthetic oligonucleotide
  Antisense strand to SEQ ID NO: 295700
auuaugacaacauacauuc

SEQ ID NO: 295702 - RNA, 19 nt, Artificial Sequence
  Description of Artificial Sequence: Synthetic oligonucleotide
  Sense strand starting at position 3095 of SEQ ID NO: 3799
ugagacaguuaaucuauca

SEQ ID NO: 295703 - RNA, 19 nt, Artificial Sequence
  Description of Artificial Sequence: Synthetic oligonucleotide
  Antisense strand to SEQ ID NO: 295702
ugauagauuaacugucuca

SEQ ID NO: 295704 - RNA, 19 nt, Artificial Sequence
  Description of Artificial Sequence: Synthetic oligonucleotide
  Sense strand starting at position 3148 of SEQ ID NO: 3799
gguggugauuaguucacau

SEQ ID NO: 295705 - RNA, 19 nt, Artificial Sequence
  Description of Artificial Sequence: Synthetic oligonucleotide
  Antisense strand to SEQ ID NO: 295704
augugaacuaaucaccacc

SEQ ID NO: 295706 - RNA, 19 nt, Artificial Sequence
  Description of Artificial Sequence: Synthetic oligonucleotide
  Sense strand starting at position 3195 of SEQ ID NO: 3799
gucaaauauuucuaggaua

SEQ ID NO: 295707 - RNA, 19 nt, Artificial Sequence
  Description of Artificial Sequence: Synthetic oligonucleotide
  Antisense strand to SEQ ID NO: 295706
uauccuagaaauauuugac

SEQ ID NO: 295708 - RNA, 19 nt, Artificial Sequence
  Description of Artificial Sequence: Synthetic oligonucleotide
  Sense strand starting at position 3421 of SEQ ID NO: 3799
agcacuguccaauauaaug

SEQ ID NO: 295709 - RNA, 19 nt, Artificial Sequence
  Description of Artificial Sequence: Synthetic oligonucleotide
  Antisense strand to SEQ ID NO: 295708
cauuauauuggacagugcu

SEQ ID NO: 295710 - RNA, 19 nt, Artificial Sequence
  Description of Artificial Sequence: Synthetic oligonucleotide
  Sense strand starting at position 3601 of SEQ ID NO: 3799
ugaaaucugcugcguauuu

SEQ ID NO: 295711 - RNA, 19 nt, Artificial Sequence
  Description of Artificial Sequence: Synthetic oligonucleotide
  Antisense strand to SEQ ID NO: 295710
aaauacgcagcagauuuca

SEQ ID NO: 295712 - RNA, 19 nt, Artificial Sequence
  Description of Artificial Sequence: Synthetic oligonucleotide
  Sense strand starting at position 3662 of SEQ ID NO: 3799
acuuuagaugaauaugcuu

SEQ ID NO: 295713 - RNA, 19 nt, Artificial Sequence
  Description of Artificial Sequence: Synthetic oligonucleotide
  Antisense strand to SEQ ID NO: 295712
aagcauauucaucuaaagu

SEQ ID NO: 295714 - RNA, 19 nt, Artificial Sequence
  Description of Artificial Sequence: Synthetic oligonucleotide
  Sense strand starting at position 3748 of SEQ ID NO: 3799
ugaaguaauuuguaggaga

SEQ ID NO: 295715 - RNA, 19 nt, Artificial Sequence
  Description of Artificial Sequence: Synthetic oligonucleotide
  Antisense strand to SEQ ID NO: 295714
ucuccuacaaauuacuuca

SEQ ID NO: 295716 - RNA, 19 nt, Artificial Sequence
  Description of Artificial Sequence: Synthetic oligonucleotide
  Sense strand starting at position 76 of SEQ ID NO: 3802
cccuuugaucuauguucua

SEQ ID NO: 295717 - RNA, 19 nt, Artificial Sequence
  Description of Artificial Sequence: Synthetic oligonucleotide
  Antisense strand to SEQ ID NO: 295716
uagaacauagaucaaaggg

SEQ ID NO: 295718 - RNA, 19 nt, Artificial Sequence
  Description of Artificial Sequence: Synthetic oligonucleotide
  Sense strand starting at position 165 of SEQ ID NO: 3802
cgaagucugcuagaaugca

SEQ ID NO: 295719 - RNA, 19 nt, Artificial Sequence
  Description of Artificial Sequence: Synthetic oligonucleotide
  Antisense strand to SEQ ID NO: 295718
ugcauucuagcagacuucg

SEQ ID NO: 295720 - RNA, 19 nt, Artificial Sequence
  Description of Artificial Sequence: Synthetic oligonucleotide
  Sense strand starting at position 370 of SEQ ID NO: 3802
ggcuguguccuagagacuu

SEQ ID NO: 295721 - RNA, 19 nt, Artificial Sequence
  Description of Artificial Sequence: Synthetic oligonucleotide
  Antisense strand to SEQ ID NO: 295720
aagucucuaggacacagcc

SEQ ID NO: 295722 - RNA, 19 nt, Artificial Sequence
  Description of Artificial Sequence: Synthetic oligonucleotide
  Sense strand starting at position 378 of SEQ ID NO: 3802
ccuagagacuucuugccca

SEQ ID NO: 295723 - RNA, 19 nt, Artificial Sequence
  Description of Artificial Sequence: Synthetic oligonucleotide
  Antisense strand to SEQ ID NO: 295722
ugggcaagaagucucuagg

SEQ ID NO: 295724 - RNA, 19 nt, Artificial Sequence
  Description of Artificial Sequence: Synthetic oligonucleotide
  Sense strand starting at position 542 of SEQ ID NO: 3802
guagccuacuuccucagaa

SEQ ID NO: 295725 - RNA, 19 nt, Artificial Sequence
  Description of Artificial Sequence: Synthetic oligonucleotide
  Antisense strand to SEQ ID NO: 295724
uucugaggaaguaggcuac

SEQ ID NO: 295726 - RNA, 19 nt, Artificial Sequence
  Description of Artificial Sequence: Synthetic oligonucleotide
  Sense strand starting at position 593 of SEQ ID NO: 3802
ucugccuuuggcuagagaa

SEQ ID NO: 295727 - RNA, 19 nt, Artificial Sequence
  Description of Artificial Sequence: Synthetic oligonucleotide
  Antisense strand to SEQ ID NO: 295726
uucucuagccaaaggcaga

SEQ ID NO: 295728 - RNA, 19 nt, Artificial Sequence
  Description of Artificial Sequence: Synthetic oligonucleotide
  Sense strand starting at position 595 of SEQ ID NO: 3802
ugccuuuggcuagagaagu

SEQ ID NO: 295729 - RNA, 19 nt, Artificial Sequence
  Description of Artificial Sequence: Synthetic oligonucleotide
  Antisense strand to SEQ ID NO: 295728
acuucucuagccaaaggca

SEQ ID NO: 295730 - RNA, 19 nt, Artificial Sequence
  Description of Artificial Sequence: Synthetic oligonucleotide
  Sense strand starting at position 620 of SEQ ID NO: 3802
uggcuuacucaaggacuga

SEQ ID NO: 295731 - RNA, 19 nt, Artificial Sequence
  Description of Artificial Sequence: Synthetic oligonucleotide
  Antisense strand to SEQ ID NO: 295730
ucaguccuugaguaagcca

SEQ ID NO: 295732 - RNA, 19 nt, Artificial Sequence
  Description of Artificial Sequence: Synthetic oligonucleotide
  Sense strand starting at position 806 of SEQ ID NO: 3802
gggacaagcacugguccau

SEQ ID NO: 295733 - RNA, 19 nt, Artificial Sequence
  Description of Artificial Sequence: Synthetic oligonucleotide
  Antisense strand to SEQ ID NO: 295732
auggaccagugcuuguccc

SEQ ID NO: 295734 - RNA, 19 nt, Artificial Sequence
  Description of Artificial Sequence: Synthetic oligonucleotide
  Sense strand starting at position 835 of SEQ ID NO: 3802
uuccaugcucuggaaacau

SEQ ID NO: 295735 - RNA, 19 nt, Artificial Sequence
  Description of Artificial Sequence: Synthetic oligonucleotide
  Antisense strand to SEQ ID NO: 295734
auguuuccagagcauggaa

SEQ ID NO: 295736 - RNA, 19 nt, Artificial Sequence
  Description of Artificial Sequence: Synthetic oligonucleotide
  Sense strand starting at position 873 of SEQ ID NO: 3802
agacaugguccaggagcuu

SEQ ID NO: 295737 - RNA, 19 nt, Artificial Sequence
  Description of Artificial Sequence: Synthetic oligonucleotide
  Antisense strand to SEQ ID NO: 295736
aagcuccuggaccaugucu

SEQ ID NO: 295738 - RNA, 19 nt, Artificial Sequence
  Description of Artificial Sequence: Synthetic oligonucleotide
  Sense strand starting at position 983 of SEQ ID NO: 3802
gcauguggauucucaagca

SEQ ID NO: 295739 - RNA, 19 nt, Artificial Sequence
  Description of Artificial Sequence: Synthetic oligonucleotide
  Antisense strand to SEQ ID NO: 295738
ugcuugagaauccacaugc

SEQ ID NO: 295740 - RNA, 19 nt, Artificial Sequence
  Description of Artificial Sequence: Synthetic oligonucleotide
  Sense strand starting at position 1255 of SEQ ID NO: 3802
aguuuaaaucauggaacug

SEQ ID NO: 295741 - RNA, 19 nt, Artificial Sequence
  Description of Artificial Sequence: Synthetic oligonucleotide
  Antisense strand to SEQ ID NO: 295740
caguuccaugauuuaaacu

SEQ ID NO: 295742 - RNA, 19 nt, Artificial Sequence
  Description of Artificial Sequence: Synthetic oligonucleotide
  Sense strand starting at position 1518 of SEQ ID NO: 3802
accaguauccaguaccuua

SEQ ID NO: 295743 - RNA, 19 nt, Artificial Sequence
  Description of Artificial Sequence: Synthetic oligonucleotide
  Antisense strand to SEQ ID NO: 295742
uaagguacuggauacuggu

SEQ ID NO: 295744 - RNA, 19 nt, Artificial Sequence
  Description of Artificial Sequence: Synthetic oligonucleotide
  Sense strand starting at position 2302 of SEQ ID NO: 3802
aagggagucccucgguauu

SEQ ID NO: 295745 - RNA, 19 nt, Artificial Sequence
  Description of Artificial Sequence: Synthetic oligonucleotide
  Antisense strand to SEQ ID NO: 295744
aauaccgagggacucccuu

SEQ ID NO: 295746 - RNA, 19 nt, Artificial Sequence
  Description of Artificial Sequence: Synthetic oligonucleotide
  Sense strand starting at position 2305 of SEQ ID NO: 3802
ggagucccucgguauuugu

SEQ ID NO: 295747 - RNA, 19 nt, Artificial Sequence
  Description of Artificial Sequence: Synthetic oligonucleotide
  Antisense strand to SEQ ID NO: 295746
acaaauaccgagggacucc

SEQ ID NO: 295748 - RNA, 19 nt, Artificial Sequence
  Description of Artificial Sequence: Synthetic oligonucleotide
  Sense strand starting at position 2316 of SEQ ID NO: 3802
guauuuguuccaggcuuuc

SEQ ID NO: 295749 - RNA, 19 nt, Artificial Sequence
  Description of Artificial Sequence: Synthetic oligonucleotide
  Antisense strand to SEQ ID NO: 295748
gaaagccuggaacaaauac

SEQ ID NO: 295750 - RNA, 19 nt, Artificial Sequence
  Description of Artificial Sequence: Synthetic oligonucleotide
  Sense strand starting at position 2468 of SEQ ID NO: 3802
aggaacgguccuggugaga

SEQ ID NO: 295751 - RNA, 19 nt, Artificial Sequence
  Description of Artificial Sequence: Synthetic oligonucleotide
  Antisense strand to SEQ ID NO: 295750
ucucaccaggaccguuccu

SEQ ID NO: 295752 - RNA, 19 nt, Artificial Sequence
  Description of Artificial Sequence: Synthetic oligonucleotide
  Sense strand starting at position 2480 of SEQ ID NO: 3802
ggugagaugccugagaggu

SEQ ID NO: 295753 - RNA, 19 nt, Artificial Sequence
  Description of Artificial Sequence: Synthetic oligonucleotide
  Antisense strand to SEQ ID NO: 295752
accucucaggcaucucacc

SEQ ID NO: 295754 - RNA, 19 nt, Artificial Sequence
  Description of Artificial Sequence: Synthetic oligonucleotide
  Sense strand starting at position 2683 of SEQ ID NO: 3802
aguccucaucuguaagaau

SEQ ID NO: 295755 - RNA, 19 nt, Artificial Sequence
  Description of Artificial Sequence: Synthetic oligonucleotide
  Antisense strand to SEQ ID NO: 295754
auucuuacagaugaggacu

SEQ ID NO: 295756 - RNA, 19 nt, Artificial Sequence
  Description of Artificial Sequence: Synthetic oligonucleotide
  Sense strand starting at position 2694 of SEQ ID NO: 3802
guaagaaugggugguggaa

SEQ ID NO: 295757 - RNA, 19 nt, Artificial Sequence
  Description of Artificial Sequence: Synthetic oligonucleotide
  Antisense strand to SEQ ID NO: 295756
uuccaccacccauucuuac

SEQ ID NO: 295758 - RNA, 19 nt, Artificial Sequence
  Description of Artificial Sequence: Synthetic oligonucleotide
  Sense strand starting at position 2707 of SEQ ID NO: 3802
guggaauaggguugcaaua

SEQ ID NO: 295759 - RNA, 19 nt, Artificial Sequence
  Description of Artificial Sequence: Synthetic oligonucleotide
  Antisense strand to SEQ ID NO: 295758
uauugcaacccuauuccac

SEQ ID NO: 295760 - RNA, 19 nt, Artificial Sequence
  Description of Artificial Sequence: Synthetic oligonucleotide
  Sense strand starting at position 2795 of SEQ ID NO: 3802
aaaggcguccugggaauua

SEQ ID NO: 295761 - RNA, 19 nt, Artificial Sequence
  Description of Artificial Sequence: Synthetic oligonucleotide
  Antisense strand to SEQ ID NO: 295760
uaauucccaggacgccuuu

SEQ ID NO: 295762 - RNA, 19 nt, Artificial Sequence
  Description of Artificial Sequence: Synthetic oligonucleotide
  Sense strand starting at position 2876 of SEQ ID NO: 3802
ggagaaggcuuuguuugcu

SEQ ID NO: 295763 - RNA, 19 nt, Artificial Sequence
  Description of Artificial Sequence: Synthetic oligonucleotide
  Antisense strand to SEQ ID NO: 295762
agcaaacaaagccuucucc

SEQ ID NO: 295764 - RNA, 19 nt, Artificial Sequence
  Description of Artificial Sequence: Synthetic oligonucleotide
  Sense strand starting at position 2879 of SEQ ID NO: 3802
gaaggcuuuguuugcuaag

SEQ ID NO: 295765 - RNA, 19 nt, Artificial Sequence
  Description of Artificial Sequence: Synthetic oligonucleotide
  Antisense strand to SEQ ID NO: 295764
cuuagcaaacaaagccuuc

SEQ ID NO: 295766 - RNA, 19 nt, Artificial Sequence
  Description of Artificial Sequence: Synthetic oligonucleotide
  Sense strand starting at position 2902 of SEQ ID NO: 3802
ugguuucucuacccugaaa

SEQ ID NO: 295767 - RNA, 19 nt, Artificial Sequence
  Description of Artificial Sequence: Synthetic oligonucleotide
  Antisense strand to SEQ ID NO: 295766
uuucaggguagagaaacca

SEQ ID NO: 295768 - RNA, 19 nt, Artificial Sequence
  Description of Artificial Sequence: Synthetic oligonucleotide
  Sense strand starting at position 3091 of SEQ ID NO: 3802
cugggaggaaucugcacau

SEQ ID NO: 295769 - RNA, 19 nt, Artificial Sequence
  Description of Artificial Sequence: Synthetic oligonucleotide
  Antisense strand to SEQ ID NO: 295768
augugcagauuccucccag

SEQ ID NO: 295770 - RNA, 19 nt, Artificial Sequence
  Description of Artificial Sequence: Synthetic oligonucleotide
  Sense strand starting at position 3118 of SEQ ID NO: 3802
ugacucaacugauucugau

SEQ ID NO: 295771 - RNA, 19 nt, Artificial Sequence
  Description of Artificial Sequence: Synthetic oligonucleotide
  Antisense strand to SEQ ID NO: 295770
aucagaaucaguugaguca

SEQ ID NO: 295772 - RNA, 19 nt, Artificial Sequence
  Description of Artificial Sequence: Synthetic oligonucleotide
  Sense strand starting at position 3130 of SEQ ID NO: 3802
uucugaugugccuaagugu

SEQ ID NO: 295773 - RNA, 19 nt, Artificial Sequence
  Description of Artificial Sequence: Synthetic oligonucleotide
  Antisense strand to SEQ ID NO: 295772
acacuuaggcacaucagaa

SEQ ID NO: 295774 - RNA, 19 nt, Artificial Sequence
  Description of Artificial Sequence: Synthetic oligonucleotide
  Sense strand starting at position 3175 of SEQ ID NO: 3802
agaugagaccuuugugaua

SEQ ID NO: 295775 - RNA, 19 nt, Artificial Sequence
  Description of Artificial Sequence: Synthetic oligonucleotide
  Antisense strand to SEQ ID NO: 295774
uaucacaaaggucucaucu

SEQ ID NO: 295776 - RNA, 19 nt, Artificial Sequence
  Description of Artificial Sequence: Synthetic oligonucleotide
  Sense strand starting at position 3527 of SEQ ID NO: 3802
guaucuugacagugguaau

SEQ ID NO: 295777 - RNA, 19 nt, Artificial Sequence
  Description of Artificial Sequence: Synthetic oligonucleotide
  Antisense strand to SEQ ID NO: 295776
auuaccacugucaagauac

SEQ ID NO: 295778 - RNA, 19 nt, Artificial Sequence
  Description of Artificial Sequence: Synthetic oligonucleotide
  Sense strand starting at position 3651 of SEQ ID NO: 3802
gcagaagguagguggauua

SEQ ID NO: 295779 - RNA, 19 nt, Artificial Sequence
  Description of Artificial Sequence: Synthetic oligonucleotide
  Antisense strand to SEQ ID NO: 295778
uaauccaccuaccuucugc

SEQ ID NO: 295780 - RNA, 19 nt, Artificial Sequence
  Description of Artificial Sequence: Synthetic oligonucleotide
  Sense strand starting at position 3694 of SEQ ID NO: 3802
gaugcuguacuauagucau

SEQ ID NO: 295781 - RNA, 19 nt, Artificial Sequence
  Description of Artificial Sequence: Synthetic oligonucleotide
  Antisense strand to SEQ ID NO: 295780
augacuauaguacagcauc

SEQ ID NO: 295782 - RNA, 19 nt, Artificial Sequence
  Description of Artificial Sequence: Synthetic oligonucleotide
  Sense strand starting at position 3697 of SEQ ID NO: 3802
gcuguacuauagucauaca

SEQ ID NO: 295783 - RNA, 19 nt, Artificial Sequence
  Description of Artificial Sequence: Synthetic oligonucleotide
  Antisense strand to SEQ ID NO: 295782
uguaugacuauaguacagc

SEQ ID NO: 295784 - RNA, 19 nt, Artificial Sequence
  Description of Artificial Sequence: Synthetic oligonucleotide
  Sense strand starting at position 3713 of SEQ ID NO: 3802
acaagauguuacccuagga

SEQ ID NO: 295785 - RNA, 19 nt, Artificial Sequence
  Description of Artificial Sequence: Synthetic oligonucleotide
  Antisense strand to SEQ ID NO: 295784
uccuaggguaacaucuugu

SEQ ID NO: 295786 - RNA, 19 nt, Artificial Sequence
  Description of Artificial Sequence: Synthetic oligonucleotide
  Sense strand starting at position 3752 of SEQ ID NO: 3802
ucaggaucucucugcauua

SEQ ID NO: 295787 - RNA, 19 nt, Artificial Sequence
  Description of Artificial Sequence: Synthetic oligonucleotide
  Antisense strand to SEQ ID NO: 295786
uaaugcagagagauccuga

SEQ ID NO: 295788 - RNA, 19 nt, Artificial Sequence
  Description of Artificial Sequence: Synthetic oligonucleotide
  Sense strand starting at position 3772 of SEQ ID NO: 3802
uucuuauaauugccuguga

SEQ ID NO: 295789 - RNA, 19 nt, Artificial Sequence
  Description of Artificial Sequence: Synthetic oligonucleotide
  Antisense strand to SEQ ID NO: 295788
ucacaggcaauuauaagaa

SEQ ID NO: 295790 - RNA, 19 nt, Artificial Sequence
  Description of Artificial Sequence: Synthetic oligonucleotide
  Sense strand starting at position 3773 of SEQ ID NO: 3802
ucuuauaauugccugugaa

SEQ ID NO: 295791 - RNA, 19 nt, Artificial Sequence
  Description of Artificial Sequence: Synthetic oligonucleotide
  Antisense strand to SEQ ID NO: 295790
uucacaggcaauuauaaga

SEQ ID NO: 295792 - RNA, 19 nt, Artificial Sequence
  Description of Artificial Sequence: Synthetic oligonucleotide
  Sense strand starting at position 3774 of SEQ ID NO: 3802
cuuauaauugccugugaau

SEQ ID NO: 295793 - RNA, 19 nt, Artificial Sequence
  Description of Artificial Sequence: Synthetic oligonucleotide
  Antisense strand to SEQ ID NO: 295792
auucacaggcaauuauaag

SEQ ID NO: 295794 - RNA, 19 nt, Artificial Sequence
  Description of Artificial Sequence: Synthetic oligonucleotide
  Sense strand starting at position 3950 of SEQ ID NO: 3802
auccucauucugggauacu

SEQ ID NO: 295795 - RNA, 19 nt, Artificial Sequence
  Description of Artificial Sequence: Synthetic oligonucleotide
  Antisense strand to SEQ ID NO: 295794
aguaucccagaaugaggau

SEQ ID NO: 295796 - RNA, 19 nt, Artificial Sequence
  Description of Artificial Sequence: Synthetic oligonucleotide
  Sense strand starting at position 233 of SEQ ID NO: 3801
ccuaaauaagccuggaaca

SEQ ID NO: 295797 - RNA, 19 nt, Artificial Sequence
  Description of Artificial Sequence: Synthetic oligonucleotide
  Antisense strand to SEQ ID NO: 295796
uguuccaggcuuauuuagg

SEQ ID NO: 295798 - RNA, 19 nt, Artificial Sequence
  Description of Artificial Sequence: Synthetic oligonucleotide
  Sense strand starting at position 234 of SEQ ID NO: 3801
cuaaauaagccuggaacau

SEQ ID NO: 295799 - RNA, 19 nt, Artificial Sequence
  Description of Artificial Sequence: Synthetic oligonucleotide
  Antisense strand to SEQ ID NO: 295798
auguuccaggcuuauuuag

SEQ ID NO: 295800 - RNA, 19 nt, Artificial Sequence
  Description of Artificial Sequence: Synthetic oligonucleotide
  Sense strand starting at position 283 of SEQ ID NO: 3801
cacugcugucccugagaug

SEQ ID NO: 295801 - RNA, 19 nt, Artificial Sequence
  Description of Artificial Sequence: Synthetic oligonucleotide
  Antisense strand to SEQ ID NO: 295800
caucucagggacagcagug

SEQ ID NO: 295802 - RNA, 19 nt, Artificial Sequence
  Description of Artificial Sequence: Synthetic oligonucleotide
  Sense strand starting at position 284 of SEQ ID NO: 3801
acugcugucccugagauga

SEQ ID NO: 295803 - RNA, 19 nt, Artificial Sequence
  Description of Artificial Sequence: Synthetic oligonucleotide
  Antisense strand to SEQ ID NO: 295802
ucaucucagggacagcagu

SEQ ID NO: 295804 - RNA, 19 nt, Artificial Sequence
  Description of Artificial Sequence: Synthetic oligonucleotide
  Sense strand starting at position 501 of SEQ ID NO: 3801
guccauaagugagaccuga

SEQ ID NO: 295805 - RNA, 19 nt, Artificial Sequence
  Description of Artificial Sequence: Synthetic oligonucleotide
  Antisense strand to SEQ ID NO: 295804
ucaggucucacuuauggac

SEQ ID NO: 295806 - RNA, 19 nt, Artificial Sequence
  Description of Artificial Sequence: Synthetic oligonucleotide
  Sense strand starting at position 614 of SEQ ID NO: 3801
ugagacuggcucuggguaa

SEQ ID NO: 295807 - RNA, 19 nt, Artificial Sequence
  Description of Artificial Sequence: Synthetic oligonucleotide
  Antisense strand to SEQ ID NO: 295806
uuacccagagccagucuca

SEQ ID NO: 295808 - RNA, 19 nt, Artificial Sequence
  Description of Artificial Sequence: Synthetic oligonucleotide
  Sense strand starting at position 634 of SEQ ID NO: 3801
aggguuugaaugggagcaa

SEQ ID NO: 295809 - RNA, 19 nt, Artificial Sequence
  Description of Artificial Sequence: Synthetic oligonucleotide
  Antisense strand to SEQ ID NO: 295808
uugcucccauucaaacccu

SEQ ID NO: 295810 - RNA, 19 nt, Artificial Sequence
  Description of Artificial Sequence: Synthetic oligonucleotide
  Sense strand starting at position 635 of SEQ ID NO: 3801
ggguuugaaugggagcaaa

SEQ ID NO: 295811 - RNA, 19 nt, Artificial Sequence
  Description of Artificial Sequence: Synthetic oligonucleotide
  Antisense strand to SEQ ID NO: 295810
uuugcucccauucaaaccc

SEQ ID NO: 295812 - RNA, 19 nt, Artificial Sequence
  Description of Artificial Sequence: Synthetic oligonucleotide
  Sense strand starting at position 653 of SEQ ID NO: 3801
aguuccaggucuugauguu

SEQ ID NO: 295813 - RNA, 19 nt, Artificial Sequence
  Description of Artificial Sequence: Synthetic oligonucleotide
  Antisense strand to SEQ ID NO: 295812
aacaucaagaccuggaacu

SEQ ID NO: 295814 - RNA, 19 nt, Artificial Sequence
  Description of Artificial Sequence: Synthetic oligonucleotide
  Sense strand starting at position 662 of SEQ ID NO: 3801
ucuugauguugccuaggca

SEQ ID NO: 295815 - RNA, 19 nt, Artificial Sequence
  Description of Artificial Sequence: Synthetic oligonucleotide
  Antisense strand to SEQ ID NO: 295814
ugccuaggcaacaucaaga

SEQ ID NO: 295816 - RNA, 19 nt, Artificial Sequence
  Description of Artificial Sequence: Synthetic oligonucleotide
  Sense strand starting at position 663 of SEQ ID NO: 3801
cuugauguugccuaggcau

SEQ ID NO: 295817 - RNA, 19 nt, Artificial Sequence
  Description of Artificial Sequence: Synthetic oligonucleotide
  Antisense strand to SEQ ID NO: 295816
augccuaggcaacaucaag

SEQ ID NO: 295818 - RNA, 19 nt, Artificial Sequence
  Description of Artificial Sequence: Synthetic oligonucleotide
  Sense strand starting at position 1230 of SEQ ID NO: 3801
gugggagaauuccacugga

SEQ ID NO: 295819 - RNA, 19 nt, Artificial Sequence
  Description of Artificial Sequence: Synthetic oligonucleotide
  Antisense strand to SEQ ID NO: 295818
uccaguggaauucucccac

SEQ ID NO: 295820 - RNA, 19 nt, Artificial Sequence
  Description of Artificial Sequence: Synthetic oligonucleotide
  Sense strand starting at position 1233 of SEQ ID NO: 3801
ggagaauuccacuggagca

SEQ ID NO: 295821 - RNA, 19 nt, Artificial Sequence
  Description of Artificial Sequence: Synthetic oligonucleotide
  Antisense strand to SEQ ID NO: 295820
ugcuccaguggaauucucc

SEQ ID NO: 295822 - RNA, 19 nt, Artificial Sequence
  Description of Artificial Sequence: Synthetic oligonucleotide
  Sense strand starting at position 1355 of SEQ ID NO: 3801
acgcccauuucuuggguga

SEQ ID NO: 295823 - RNA, 19 nt, Artificial Sequence
  Description of Artificial Sequence: Synthetic oligonucleotide
  Antisense strand to SEQ ID NO: 295822
ucacccaagaaaugggcgu

SEQ ID NO: 295824 - RNA, 19 nt, Artificial Sequence
  Description of Artificial Sequence: Synthetic oligonucleotide
  Sense strand starting at position 1712 of SEQ ID NO: 3801
cuccuauccgacugccaaa

SEQ ID NO: 295825 - RNA, 19 nt, Artificial Sequence
  Description of Artificial Sequence: Synthetic oligonucleotide
  Antisense strand to SEQ ID NO: 295824
uuuggcagucggauaggag

SEQ ID NO: 295826 - RNA, 19 nt, Artificial Sequence
  Description of Artificial Sequence: Synthetic oligonucleotide
  Sense strand starting at position 2353 of SEQ ID NO: 3801
cccauuuguucugacacgu

SEQ ID NO: 295827 - RNA, 19 nt, Artificial Sequence
  Description of Artificial Sequence: Synthetic oligonucleotide
  Antisense strand to SEQ ID NO: 295826
acgugucagaacaaauggg

SEQ ID NO: 295828 - RNA, 19 nt, Artificial Sequence
  Description of Artificial Sequence: Synthetic oligonucleotide
  Sense strand starting at position 2361 of SEQ ID NO: 3801
uucugacacguccaccaaa

SEQ ID NO: 295829 - RNA, 19 nt, Artificial Sequence
  Description of Artificial Sequence: Synthetic oligonucleotide
  Antisense strand to SEQ ID NO: 295828
uuugguggacgugucagaa

SEQ ID NO: 295830 - RNA, 19 nt, Artificial Sequence
  Description of Artificial Sequence: Synthetic oligonucleotide
  Sense strand starting at position 2391 of SEQ ID NO: 3801
ugggaaauguucccugugu

SEQ ID NO: 295831 - RNA, 19 nt, Artificial Sequence
  Description of Artificial Sequence: Synthetic oligonucleotide
  Antisense strand to SEQ ID NO: 295830
acacagggaacauuuccca

SEQ ID NO: 295832 - RNA, 19 nt, Artificial Sequence
  Description of Artificial Sequence: Synthetic oligonucleotide
  Sense strand starting at position 2392 of SEQ ID NO: 3801
gggaaauguucccuguguu

SEQ ID NO: 295833 - RNA, 19 nt, Artificial Sequence
  Description of Artificial Sequence: Synthetic oligonucleotide
  Antisense strand to SEQ ID NO: 295832
aacacagggaacauuuccc

SEQ ID NO: 295834 - RNA, 19 nt, Artificial Sequence
  Description of Artificial Sequence: Synthetic oligonucleotide
  Sense strand starting at position 2984 of SEQ ID NO: 3801
gcugucuugagguaggguu

SEQ ID NO: 295835 - RNA, 19 nt, Artificial Sequence
  Description of Artificial Sequence: Synthetic oligonucleotide
  Antisense strand to SEQ ID NO: 295834
aacccuaccucaagacagc

SEQ ID NO: 295836 - RNA, 19 nt, Artificial Sequence
  Description of Artificial Sequence: Synthetic oligonucleotide
  Sense strand starting at position 3018 of SEQ ID NO: 3801
aauggcauuuggugcuuaa

SEQ ID NO: 295837 - RNA, 19 nt, Artificial Sequence
  Description of Artificial Sequence: Synthetic oligonucleotide
  Antisense strand to SEQ ID NO: 295836
uuaagcaccaaaugccauu

SEQ ID NO: 295838 - RNA, 19 nt, Artificial Sequence
  Description of Artificial Sequence: Synthetic oligonucleotide
  Sense strand starting at position 3022 of SEQ ID NO: 3801
gcauuuggugcuuaaggca

SEQ ID NO: 295839 - RNA, 19 nt, Artificial Sequence
  Description of Artificial Sequence: Synthetic oligonucleotide
  Antisense strand to SEQ ID NO: 295838
ugccuuaagcaccaaaugc

SEQ ID NO: 295840 - RNA, 19 nt, Artificial Sequence
  Description of Artificial Sequence: Synthetic oligonucleotide
  Sense strand starting at position 3037 of SEQ ID NO: 3801
ggcauuugaugcugagauc

SEQ ID NO: 295841 - RNA, 19 nt, Artificial Sequence
  Description of Artificial Sequence: Synthetic oligonucleotide
  Antisense strand to SEQ ID NO: 295840
gaucucagcaucaaaugcc

SEQ ID NO: 295842 - RNA, 19 nt, Artificial Sequence
  Description of Artificial Sequence: Synthetic oligonucleotide
  Sense strand starting at position 3040 of SEQ ID NO: 3801
auuugaugcugagaucaca

SEQ ID NO: 295843 - RNA, 19 nt, Artificial Sequence
  Description of Artificial Sequence: Synthetic oligonucleotide
  Antisense strand to SEQ ID NO: 295842
ugugaucucagcaucaaau

SEQ ID NO: 295844 - RNA, 19 nt, Artificial Sequence
  Description of Artificial Sequence: Synthetic oligonucleotide
  Sense strand starting at position 3257 of SEQ ID NO: 3801
gagggcaucuagccaugaa

SEQ ID NO: 295845 - RNA, 19 nt, Artificial Sequence
  Description of Artificial Sequence: Synthetic oligonucleotide
  Antisense strand to SEQ ID NO: 295844
uucauggcuagaugcccuc

SEQ ID NO: 295846 - RNA, 19 nt, Artificial Sequence
  Description of Artificial Sequence: Synthetic oligonucleotide
  Sense strand starting at position 3260 of SEQ ID NO: 3801
ggcaucuagccaugaagca

SEQ ID NO: 295847 - RNA, 19 nt, Artificial Sequence
  Description of Artificial Sequence: Synthetic oligonucleotide
  Antisense strand to SEQ ID NO: 295846
ugcuucauggcuagaugcc

SEQ ID NO: 295848 - RNA, 19 nt, Artificial Sequence
  Description of Artificial Sequence: Synthetic oligonucleotide
  Sense strand starting at position 3400 of SEQ ID NO: 3801
gaggauuccugaggcucca

SEQ ID NO: 295849 - RNA, 19 nt, Artificial Sequence
  Description of Artificial Sequence: Synthetic oligonucleotide
  Antisense strand to SEQ ID NO: 295848
uggagccucaggaauccuc

SEQ ID NO: 295850 - RNA, 19 nt, Artificial Sequence
  Description of Artificial Sequence: Synthetic oligonucleotide
  Sense strand starting at position 3807 of SEQ ID NO: 3801
ccugauguguucucacaau

SEQ ID NO: 295851 - RNA, 19 nt, Artificial Sequence
  Description of Artificial Sequence: Synthetic oligonucleotide
  Antisense strand to SEQ ID NO: 295850
auugugagaacacaucagg

SEQ ID NO: 295852 - RNA, 19 nt, Artificial Sequence
  Description of Artificial Sequence: Synthetic oligonucleotide
  Sense strand starting at position 3844 of SEQ ID NO: 3801
cacugcgaauuaucuagua

SEQ ID NO: 295853 - RNA, 19 nt, Artificial Sequence
  Description of Artificial Sequence: Synthetic oligonucleotide
  Antisense strand to SEQ ID NO: 295852
uacuagauaauucgcagug

SEQ ID NO: 295854 - RNA, 19 nt, Artificial Sequence
  Description of Artificial Sequence: Synthetic oligonucleotide
  Sense strand starting at position 3849 of SEQ ID NO: 3801
cgaauuaucuaguacauaa

SEQ ID NO: 295855 - RNA, 19 nt, Artificial Sequence
  Description of Artificial Sequence: Synthetic oligonucleotide
  Antisense strand to SEQ ID NO: 295854
uuauguacuagauaauucg

SEQ ID NO: 295856 - RNA, 19 nt, Artificial Sequence
  Description of Artificial Sequence: Synthetic oligonucleotide
  Sense strand starting at position 3894 of SEQ ID NO: 3801
cagggcuucucagaauguu

SEQ ID NO: 295857 - RNA, 19 nt, Artificial Sequence
  Description of Artificial Sequence: Synthetic oligonucleotide
  Antisense strand to SEQ ID NO: 295856
aacauucugagaagcccug

SEQ ID NO: 295858 - RNA, 19 nt, Artificial Sequence
  Description of Artificial Sequence: Synthetic oligonucleotide
  Sense strand starting at position 3897 of SEQ ID NO: 3801
ggcuucucagaauguuacu

SEQ ID NO: 295859 - RNA, 19 nt, Artificial Sequence
  Description of Artificial Sequence: Synthetic oligonucleotide
  Antisense strand to SEQ ID NO: 295858
aguaacauucugagaagcc

SEQ ID NO: 295860 - RNA, 19 nt, Artificial Sequence
  Description of Artificial Sequence: Synthetic oligonucleotide
  Sense strand starting at position 3900 of SEQ ID NO: 3801
uucucagaauguuacuuga

SEQ ID NO: 295861 - RNA, 19 nt, Artificial Sequence
  Description of Artificial Sequence: Synthetic oligonucleotide
  Antisense strand to SEQ ID NO: 295860
ucaaguaacauucugagaa

SEQ ID NO: 295862 - RNA, 19 nt, Artificial Sequence
  Description of Artificial Sequence: Synthetic oligonucleotide
  Sense strand starting at position 3903 of SEQ ID NO: 3801
ucagaauguuacuugaccu

SEQ ID NO: 295863 - RNA, 19 nt, Artificial Sequence
  Description of Artificial Sequence: Synthetic oligonucleotide
  Antisense strand to SEQ ID NO: 295862
aggucaaguaacauucuga

SEQ ID NO: 295864 - RNA, 19 nt, Artificial Sequence
  Description of Artificial Sequence: Synthetic oligonucleotide
  Sense strand starting at position 22 of SEQ ID NO: 3803
agcugauauuaagccuaua

SEQ ID NO: 295865 - RNA, 19 nt, Artificial Sequence
  Description of Artificial Sequence: Synthetic oligonucleotide
  Antisense strand to SEQ ID NO: 295864
uauaggcuuaauaucagcu

SEQ ID NO: 295866 - RNA, 19 nt, Artificial Sequence
  Description of Artificial Sequence: Synthetic oligonucleotide
  Sense strand starting at position 71 of SEQ ID NO: 3803
agagcaauaucaucagagu

SEQ ID NO: 295867 - RNA, 19 nt, Artificial Sequence
  Description of Artificial Sequence: Synthetic oligonucleotide
  Antisense strand to SEQ ID NO: 295866
acucugaugauauugcucu

SEQ ID NO: 295868 - RNA, 19 nt, Artificial Sequence
  Description of Artificial Sequence: Synthetic oligonucleotide
  Sense strand starting at position 72 of SEQ ID NO: 3803
gagcaauaucaucagaguu

SEQ ID NO: 295869 - RNA, 19 nt, Artificial Sequence
  Description of Artificial Sequence: Synthetic oligonucleotide
  Antisense strand to SEQ ID NO: 295868
aacucugaugauauugcuc

SEQ ID NO: 295870 - RNA, 19 nt, Artificial Sequence
  Description of Artificial Sequence: Synthetic oligonucleotide
  Sense strand starting at position 334 of SEQ ID NO: 3803
ugcccuagacaguagaaua

SEQ ID NO: 295871 - RNA, 19 nt, Artificial Sequence
  Description of Artificial Sequence: Synthetic oligonucleotide
  Antisense strand to SEQ ID NO: 295870
uauucuacugucuagggca

SEQ ID NO: 295872 - RNA, 19 nt, Artificial Sequence
  Description of Artificial Sequence: Synthetic oligonucleotide
  Sense strand starting at position 413 of SEQ ID NO: 3803
cguaaacaucacuggcaau

SEQ ID NO: 295873 - RNA, 19 nt, Artificial Sequence
  Description of Artificial Sequence: Synthetic oligonucleotide
  Antisense strand to SEQ ID NO: 295872
auugccagugauguuuacg

SEQ ID NO: 295874 - RNA, 19 nt, Artificial Sequence
  Description of Artificial Sequence: Synthetic oligonucleotide
  Sense strand starting at position 776 of SEQ ID NO: 3803
guaguaucacuccaugugu

SEQ ID NO: 295875 - RNA, 19 nt, Artificial Sequence
  Description of Artificial Sequence: Synthetic oligonucleotide
  Antisense strand to SEQ ID NO: 295874
acacauggagugauacuac

SEQ ID NO: 295876 - RNA, 19 nt, Artificial Sequence
  Description of Artificial Sequence: Synthetic oligonucleotide
  Sense strand starting at position 818 of SEQ ID NO: 3803
uuugcugcucuccaagaau

SEQ ID NO: 295877 - RNA, 19 nt, Artificial Sequence
  Description of Artificial Sequence: Synthetic oligonucleotide
  Antisense strand to SEQ ID NO: 295876
auucuuggagagcagcaaa

SEQ ID NO: 295878 - RNA, 19 nt, Artificial Sequence
  Description of Artificial Sequence: Synthetic oligonucleotide
  Sense strand starting at position 1112 of SEQ ID NO: 3803
cccagacauuuaugggaaa

SEQ ID NO: 295879 - RNA, 19 nt, Artificial Sequence
  Description of Artificial Sequence: Synthetic oligonucleotide
  Antisense strand to SEQ ID NO: 295878
uuucccauaaaugucuggg

SEQ ID NO: 295880 - RNA, 19 nt, Artificial Sequence
  Description of Artificial Sequence: Synthetic oligonucleotide
  Sense strand starting at position 1156 of SEQ ID NO: 3803
uucgcaaaggacugaguua

SEQ ID NO: 295881 - RNA, 19 nt, Artificial Sequence
  Description of Artificial Sequence: Synthetic oligonucleotide
  Antisense strand to SEQ ID NO: 295880
uaacucaguccuuugcgaa

SEQ ID NO: 295882 - RNA, 19 nt, Artificial Sequence
  Description of Artificial Sequence: Synthetic oligonucleotide
  Sense strand starting at position 1551 of SEQ ID NO: 3803
uggaaucugucucuccaca

SEQ ID NO: 295883 - RNA, 19 nt, Artificial Sequence
  Description of Artificial Sequence: Synthetic oligonucleotide
  Antisense strand to SEQ ID NO: 295882
uguggagagacagauucca

SEQ ID NO: 295884 - RNA, 19 nt, Artificial Sequence
  Description of Artificial Sequence: Synthetic oligonucleotide
  Sense strand starting at position 1573 of SEQ ID NO: 3803
ugugaaaccucuccaagcu

SEQ ID NO: 295885 - RNA, 19 nt, Artificial Sequence
  Description of Artificial Sequence: Synthetic oligonucleotide
  Antisense strand to SEQ ID NO: 295884
agcuuggagagguuucaca

SEQ ID NO: 295886 - RNA, 19 nt, Artificial Sequence
  Description of Artificial Sequence: Synthetic oligonucleotide
  Sense strand starting at position 1872 of SEQ ID NO: 3803
aacggaguuugaucgacau

SEQ ID NO: 295887 - RNA, 19 nt, Artificial Sequence
  Description of Artificial Sequence: Synthetic oligonucleotide
  Antisense strand to SEQ ID NO: 295886
augucgaucaaacuccguu

SEQ ID NO: 295888 - RNA, 19 nt, Artificial Sequence
  Description of Artificial Sequence: Synthetic oligonucleotide
  Sense strand starting at position 1876 of SEQ ID NO: 3803
gaguuugaucgacauggua

SEQ ID NO: 295889 - RNA, 19 nt, Artificial Sequence
  Description of Artificial Sequence: Synthetic oligonucleotide
  Antisense strand to SEQ ID NO: 295888
uaccaugucgaucaaacuc

SEQ ID NO: 295890 - RNA, 19 nt, Artificial Sequence
  Description of Artificial Sequence: Synthetic oligonucleotide
  Sense strand starting at position 1878 of SEQ ID NO: 3803
guuugaucgacaugguauu

SEQ ID NO: 295891 - RNA, 19 nt, Artificial Sequence
  Description of Artificial Sequence: Synthetic oligonucleotide
  Antisense strand to SEQ ID NO: 295890
aauaccaugucgaucaaac

SEQ ID NO: 295892 - RNA, 19 nt, Artificial Sequence
  Description of Artificial Sequence: Synthetic oligonucleotide
  Sense strand starting at position 1885 of SEQ ID NO: 3803
cgacaugguauugggcaua

SEQ ID NO: 295893 - RNA, 19 nt, Artificial Sequence
  Description of Artificial Sequence: Synthetic oligonucleotide
  Antisense strand to SEQ ID NO: 295892
uaugcccaauaccaugucg

SEQ ID NO: 295894 - RNA, 19 nt, Artificial Sequence
  Description of Artificial Sequence: Synthetic oligonucleotide
  Sense strand starting at position 1939 of SEQ ID NO: 3803
ggaguugccauccauuguu

SEQ ID NO: 295895 - RNA, 19 nt, Artificial Sequence
  Description of Artificial Sequence: Synthetic oligonucleotide
  Antisense strand to SEQ ID NO: 295894
aacaauggauggcaacucc

SEQ ID NO: 295896 - RNA, 19 nt, Artificial Sequence
  Description of Artificial Sequence: Synthetic oligonucleotide
  Sense strand starting at position 1995 of SEQ ID NO: 3803
gaaggauaagucuguggug

SEQ ID NO: 295897 - RNA, 19 nt, Artificial Sequence
  Description of Artificial Sequence: Synthetic oligonucleotide
  Antisense strand to SEQ ID NO: 295896
caccacagacuuauccuuc

SEQ ID NO: 295898 - RNA, 19 nt, Artificial Sequence
  Description of Artificial Sequence: Synthetic oligonucleotide
  Sense strand starting at position 2267 of SEQ ID NO: 3803
cgcucauucgugcccagaa

SEQ ID NO: 295899 - RNA, 19 nt, Artificial Sequence
  Description of Artificial Sequence: Synthetic oligonucleotide
  Antisense strand to SEQ ID NO: 295898
uucugggcacgaaugagcg

SEQ ID NO: 295900 - RNA, 19 nt, Artificial Sequence
  Description of Artificial Sequence: Synthetic oligonucleotide
  Sense strand starting at position 2361 of SEQ ID NO: 3803
aggucugagcccugaaguu

SEQ ID NO: 295901 - RNA, 19 nt, Artificial Sequence
  Description of Artificial Sequence: Synthetic oligonucleotide
  Antisense strand to SEQ ID NO: 295900
aacuucagggcucagaccu

SEQ ID NO: 295902 - RNA, 19 nt, Artificial Sequence
  Description of Artificial Sequence: Synthetic oligonucleotide
  Sense strand starting at position 2495 of SEQ ID NO: 3803
cauguuauggucgaucacu

SEQ ID NO: 295903 - RNA, 19 nt, Artificial Sequence
  Description of Artificial Sequence: Synthetic oligonucleotide
  Antisense strand to SEQ ID NO: 295902
agugaucgaccauaacaug

SEQ ID NO: 295904 - RNA, 19 nt, Artificial Sequence
  Description of Artificial Sequence: Synthetic oligonucleotide
  Sense strand starting at position 2500 of SEQ ID NO: 3803
uauggucgaucacucagaa

SEQ ID NO: 295905 - RNA, 19 nt, Artificial Sequence
  Description of Artificial Sequence: Synthetic oligonucleotide
  Antisense strand to SEQ ID NO: 295904
uucugagugaucgaccaua

SEQ ID NO: 295906 - RNA, 19 nt, Artificial Sequence
  Description of Artificial Sequence: Synthetic oligonucleotide
  Sense strand starting at position 2752 of SEQ ID NO: 3803
cuggguaucucccugagca

SEQ ID NO: 295907 - RNA, 19 nt, Artificial Sequence
  Description of Artificial Sequence: Synthetic oligonucleotide
  Antisense strand to SEQ ID NO: 295906
ugcucagggagauacccag

SEQ ID NO: 295908 - RNA, 19 nt, Artificial Sequence
  Description of Artificial Sequence: Synthetic oligonucleotide
  Sense strand starting at position 2753 of SEQ ID NO: 3803
uggguaucucccugagcaa

SEQ ID NO: 295909 - RNA, 19 nt, Artificial Sequence
  Description of Artificial Sequence: Synthetic oligonucleotide
  Antisense strand to SEQ ID NO: 295908
uugcucagggagauaccca

SEQ ID NO: 295910 - RNA, 19 nt, Artificial Sequence
  Description of Artificial Sequence: Synthetic oligonucleotide
  Sense strand starting at position 2754 of SEQ ID NO: 3803
ggguaucucccugagcaaa

SEQ ID NO: 295911 - RNA, 19 nt, Artificial Sequence
  Description of Artificial Sequence: Synthetic oligonucleotide
  Antisense strand to SEQ ID NO: 295910
uuugcucagggagauaccc

SEQ ID NO: 295912 - RNA, 19 nt, Artificial Sequence
  Description of Artificial Sequence: Synthetic oligonucleotide
  Sense strand starting at position 2959 of SEQ ID NO: 3803
cccggauauuaucucugaa

SEQ ID NO: 295913 - RNA, 19 nt, Artificial Sequence
  Description of Artificial Sequence: Synthetic oligonucleotide
  Antisense strand to SEQ ID NO: 295912
uucagagauaauauccggg

SEQ ID NO: 295914 - RNA, 19 nt, Artificial Sequence
  Description of Artificial Sequence: Synthetic oligonucleotide
  Sense strand starting at position 2961 of SEQ ID NO: 3803
cggauauuaucucugaaac

SEQ ID NO: 295915 - RNA, 19 nt, Artificial Sequence
  Description of Artificial Sequence: Synthetic oligonucleotide
  Antisense strand to SEQ ID NO: 295914
guuucagagauaauauccg

SEQ ID NO: 295916 - RNA, 19 nt, Artificial Sequence
  Description of Artificial Sequence: Synthetic oligonucleotide
  Sense strand starting at position 3017 of SEQ ID NO: 3803
gcuagagauccugggacuc

SEQ ID NO: 295917 - RNA, 19 nt, Artificial Sequence
  Description of Artificial Sequence: Synthetic oligonucleotide
  Antisense strand to SEQ ID NO: 295916
gagucccaggaucucuagc

SEQ ID NO: 295918 - RNA, 19 nt, Artificial Sequence
  Description of Artificial Sequence: Synthetic oligonucleotide
  Sense strand starting at position 3035 of SEQ ID NO: 3803
caaggcuuggcaugaugau

SEQ ID NO: 295919 - RNA, 19 nt, Artificial Sequence
  Description of Artificial Sequence: Synthetic oligonucleotide
  Antisense strand to SEQ ID NO: 295918
aucaucaugccaagccuug

SEQ ID NO: 295920 - RNA, 19 nt, Artificial Sequence
  Description of Artificial Sequence: Synthetic oligonucleotide
  Sense strand starting at position 3070 of SEQ ID NO: 3803
cccagacuuuggcugaaga

SEQ ID NO: 295921 - RNA, 19 nt, Artificial Sequence
  Description of Artificial Sequence: Synthetic oligonucleotide
  Antisense strand to SEQ ID NO: 295920
ucuucagccaaagucuggg

SEQ ID NO: 295922 - RNA, 19 nt, Artificial Sequence
  Description of Artificial Sequence: Synthetic oligonucleotide
  Sense strand starting at position 3071 of SEQ ID NO: 3803
ccagacuuuggcugaagaa

SEQ ID NO: 295923 - RNA, 19 nt, Artificial Sequence
  Description of Artificial Sequence: Synthetic oligonucleotide
  Antisense strand to SEQ ID NO: 295922
uucuucagccaaagucugg

SEQ ID NO: 295924 - RNA, 19 nt, Artificial Sequence
  Description of Artificial Sequence: Synthetic oligonucleotide
  Sense strand starting at position 3176 of SEQ ID NO: 3803
gcagcuuagcaagauggaa

SEQ ID NO: 295925 - RNA, 19 nt, Artificial Sequence
  Description of Artificial Sequence: Synthetic oligonucleotide
  Antisense strand to SEQ ID NO: 295924
uuccaucuugcuaagcugc

SEQ ID NO: 295926 - RNA, 19 nt, Artificial Sequence
  Description of Artificial Sequence: Synthetic oligonucleotide
  Sense strand starting at position 3303 of SEQ ID NO: 3803
aucuguaggcucuaaggau

SEQ ID NO: 295927 - RNA, 19 nt, Artificial Sequence
  Description of Artificial Sequence: Synthetic oligonucleotide
  Antisense strand to SEQ ID NO: 295926
auccuuagagccuacagau

SEQ ID NO: 295928 - RNA, 19 nt, Artificial Sequence
  Description of Artificial Sequence: Synthetic oligonucleotide
  Sense strand starting at position 3307 of SEQ ID NO: 3803
guaggcucuaaggauguaa

SEQ ID NO: 295929 - RNA, 19 nt, Artificial Sequence
  Description of Artificial Sequence: Synthetic oligonucleotide
  Antisense strand to SEQ ID NO: 295928
uuacauccuuagagccuac

SEQ ID NO: 295930 - RNA, 19 nt, Artificial Sequence
  Description of Artificial Sequence: Synthetic oligonucleotide
  Sense strand starting at position 3309 of SEQ ID NO: 3803
aggcucuaaggauguaagu

SEQ ID NO: 295931 - RNA, 19 nt, Artificial Sequence
  Description of Artificial Sequence: Synthetic oligonucleotide
  Antisense strand to SEQ ID NO: 295930
acuuacauccuuagagccu

SEQ ID NO: 295932 - RNA, 19 nt, Artificial Sequence
  Description of Artificial Sequence: Synthetic oligonucleotide
  Sense strand starting at position 3311 of SEQ ID NO: 3803
gcucuaaggauguaaguca

SEQ ID NO: 295933 - RNA, 19 nt, Artificial Sequence
  Description of Artificial Sequence: Synthetic oligonucleotide
  Antisense strand to SEQ ID NO: 295932
ugacuuacauccuuagagc

SEQ ID NO: 295934 - RNA, 19 nt, Artificial Sequence
  Description of Artificial Sequence: Synthetic oligonucleotide
  Sense strand starting at position 3343 of SEQ ID NO: 3803
gguggugucagaggagacu

SEQ ID NO: 295935 - RNA, 19 nt, Artificial Sequence
  Description of Artificial Sequence: Synthetic oligonucleotide
  Antisense strand to SEQ ID NO: 295934
agucuccucugacaccacc

SEQ ID NO: 295936 - RNA, 19 nt, Artificial Sequence
  Description of Artificial Sequence: Synthetic oligonucleotide
  Sense strand starting at position 3441 of SEQ ID NO: 3803
ccaagaagagcuugaacuu

SEQ ID NO: 295937 - RNA, 19 nt, Artificial Sequence
  Description of Artificial Sequence: Synthetic oligonucleotide
  Antisense strand to SEQ ID NO: 295936
aaguucaagcucuucuugg

SEQ ID NO: 295938 - RNA, 19 nt, Artificial Sequence
  Description of Artificial Sequence: Synthetic oligonucleotide
  Sense strand starting at position 3510 of SEQ ID NO: 3803
guggcauuaaggcaaagua

SEQ ID NO: 295939 - RNA, 19 nt, Artificial Sequence
  Description of Artificial Sequence: Synthetic oligonucleotide
  Antisense strand to SEQ ID NO: 295938
uacuuugccuuaaugccac

SEQ ID NO: 295940 - RNA, 19 nt, Artificial Sequence
  Description of Artificial Sequence: Synthetic oligonucleotide
  Sense strand starting at position 3584 of SEQ ID NO: 3803
ggugguauuugguuacuua

SEQ ID NO: 295941 - RNA, 19 nt, Artificial Sequence
  Description of Artificial Sequence: Synthetic oligonucleotide
  Antisense strand to SEQ ID NO: 295940
uaaguaaccaaauaccacc

SEQ ID NO: 295942 - RNA, 19 nt, Artificial Sequence
  Description of Artificial Sequence: Synthetic oligonucleotide
  Sense strand starting at position 3959 of SEQ ID NO: 3803
gcugguuccaugggaucca

SEQ ID NO: 295943 - RNA, 19 nt, Artificial Sequence
  Description of Artificial Sequence: Synthetic oligonucleotide
  Antisense strand to SEQ ID NO: 295942
uggaucccauggaaccagc

SEQ ID NO: 295944 - RNA, 19 nt, Artificial Sequence
  Description of Artificial Sequence: Synthetic oligonucleotide
  Sense strand starting at position 362 of SEQ ID NO: 3804
agauauuugcccugugcca

SEQ ID NO: 295945 - RNA, 19 nt, Artificial Sequence
  Description of Artificial Sequence: Synthetic oligonucleotide
  Antisense strand to SEQ ID NO: 295944
uggcacagggcaaauaucu

SEQ ID NO: 295946 - RNA, 19 nt, Artificial Sequence
  Description of Artificial Sequence: Synthetic oligonucleotide
  Sense strand starting at position 401 of SEQ ID NO: 3804
acuuguauuuacuugugca

SEQ ID NO: 295947 - RNA, 19 nt, Artificial Sequence
  Description of Artificial Sequence: Synthetic oligonucleotide
  Antisense strand to SEQ ID NO: 295946
ugcacaaguaaauacaagu

SEQ ID NO: 295948 - RNA, 19 nt, Artificial Sequence
  Description of Artificial Sequence: Synthetic oligonucleotide
  Sense strand starting at position 405 of SEQ ID NO: 3804
guauuuacuugugcaauua

SEQ ID NO: 295949 - RNA, 19 nt, Artificial Sequence
  Description of Artificial Sequence: Synthetic oligonucleotide
  Antisense strand to SEQ ID NO: 295948
uaauugcacaaguaaauac

SEQ ID NO: 295950 - RNA, 19 nt, Artificial Sequence
  Description of Artificial Sequence: Synthetic oligonucleotide
  Sense strand starting at position 472 of SEQ ID NO: 3804
aguauacugaggcgaagaa

SEQ ID NO: 295951 - RNA, 19 nt, Artificial Sequence
  Description of Artificial Sequence: Synthetic oligonucleotide
  Antisense strand to SEQ ID NO: 295950
uucuucgccucaguauacu

SEQ ID NO: 295952 - RNA, 19 nt, Artificial Sequence
  Description of Artificial Sequence: Synthetic oligonucleotide
  Sense strand starting at position 564 of SEQ ID NO: 3804
uagucugagcucuagagaa

SEQ ID NO: 295953 - RNA, 19 nt, Artificial Sequence
  Description of Artificial Sequence: Synthetic oligonucleotide
  Antisense strand to SEQ ID NO: 295952
uucucuagagcucagacua

SEQ ID NO: 295954 - RNA, 19 nt, Artificial Sequence
  Description of Artificial Sequence: Synthetic oligonucleotide
  Sense strand starting at position 585 of SEQ ID NO: 3804
guucuuaaccacuaggcaa

SEQ ID NO: 295955 - RNA, 19 nt, Artificial Sequence
  Description of Artificial Sequence: Synthetic oligonucleotide
  Antisense strand to SEQ ID NO: 295954
uugccuagugguuaagaac

SEQ ID NO: 295956 - RNA, 19 nt, Artificial Sequence
  Description of Artificial Sequence: Synthetic oligonucleotide
  Sense strand starting at position 599 of SEQ ID NO: 3804
ggcaacauuucucacaaga

SEQ ID NO: 295957 - RNA, 19 nt, Artificial Sequence
  Description of Artificial Sequence: Synthetic oligonucleotide
  Antisense strand to SEQ ID NO: 295956
ucuugugagaaauguugcc

SEQ ID NO: 295958 - RNA, 19 nt, Artificial Sequence
  Description of Artificial Sequence: Synthetic oligonucleotide
  Sense strand starting at position 871 of SEQ ID NO: 3804
ggauaagcagauggugaau

SEQ ID NO: 295959 - RNA, 19 nt, Artificial Sequence
  Description of Artificial Sequence: Synthetic oligonucleotide
  Antisense strand to SEQ ID NO: 295958
auucaccaucugcuuaucc

SEQ ID NO: 295960 - RNA, 19 nt, Artificial Sequence
  Description of Artificial Sequence: Synthetic oligonucleotide
  Sense strand starting at position 1062 of SEQ ID NO: 3804
cuugauguacucugguaua

SEQ ID NO: 295961 - RNA, 19 nt, Artificial Sequence
  Description of Artificial Sequence: Synthetic oligonucleotide
  Antisense strand to SEQ ID NO: 295960
uauaccagaguacaucaag

SEQ ID NO: 295962 - RNA, 19 nt, Artificial Sequence
  Description of Artificial Sequence: Synthetic oligonucleotide
  Sense strand starting at position 1067 of SEQ ID NO: 3804
uguacucugguauaaguga

SEQ ID NO: 295963 - RNA, 19 nt, Artificial Sequence
  Description of Artificial Sequence: Synthetic oligonucleotide
  Antisense strand to SEQ ID NO: 295962
ucacuuauaccagaguaca

SEQ ID NO: 295964 - RNA, 19 nt, Artificial Sequence
  Description of Artificial Sequence: Synthetic oligonucleotide
  Sense strand starting at position 1072 of SEQ ID NO: 3804
ucugguauaagugagcaaa

SEQ ID NO: 295965 - RNA, 19 nt, Artificial Sequence
  Description of Artificial Sequence: Synthetic oligonucleotide
  Antisense strand to SEQ ID NO: 295964
uuugcucacuuauaccaga

SEQ ID NO: 295966 - RNA, 19 nt, Artificial Sequence
  Description of Artificial Sequence: Synthetic oligonucleotide
  Sense strand starting at position 1093 of SEQ ID NO: 3804
uguauuagaaagcagguua

SEQ ID NO: 295967 - RNA, 19 nt, Artificial Sequence
  Description of Artificial Sequence: Synthetic oligonucleotide
  Antisense strand to SEQ ID NO: 295966
uaaccugcuuucuaauaca

SEQ ID NO: 295968 - RNA, 19 nt, Artificial Sequence
  Description of Artificial Sequence: Synthetic oligonucleotide
  Sense strand starting at position 1104 of SEQ ID NO: 3804
gcagguuaaagagagguua

SEQ ID NO: 295969 - RNA, 19 nt, Artificial Sequence
  Description of Artificial Sequence: Synthetic oligonucleotide
  Antisense strand to SEQ ID NO: 295968
uaaccucucuuuaaccugc

SEQ ID NO: 295970 - RNA, 19 nt, Artificial Sequence
  Description of Artificial Sequence: Synthetic oligonucleotide
  Sense strand starting at position 1145 of SEQ ID NO: 3804
gguagugagcggucugcga

SEQ ID NO: 295971 - RNA, 19 nt, Artificial Sequence
  Description of Artificial Sequence: Synthetic oligonucleotide
  Antisense strand to SEQ ID NO: 295970
ucgcagaccgcucacuacc

SEQ ID NO: 295972 - RNA, 19 nt, Artificial Sequence
  Description of Artificial Sequence: Synthetic oligonucleotide
  Sense strand starting at position 1146 of SEQ ID NO: 3804
guagugagcggucugcgaa

SEQ ID NO: 295973 - RNA, 19 nt, Artificial Sequence
  Description of Artificial Sequence: Synthetic oligonucleotide
  Antisense strand to SEQ ID NO: 295972
uucgcagaccgcucacuac

SEQ ID NO: 295974 - RNA, 19 nt, Artificial Sequence
  Description of Artificial Sequence: Synthetic oligonucleotide
  Sense strand starting at position 1164 of SEQ ID NO: 3804
agcugagaacucugccuaa

SEQ ID NO: 295975 - RNA, 19 nt, Artificial Sequence
  Description of Artificial Sequence: Synthetic oligonucleotide
  Antisense strand to SEQ ID NO: 295974
uuaggcagaguucucagcu

SEQ ID NO: 295976 - RNA, 19 nt, Artificial Sequence
  Description of Artificial Sequence: Synthetic oligonucleotide
  Sense strand starting at position 2216 of SEQ ID NO: 3804
cuuauuuggccaggcguaa

SEQ ID NO: 295977 - RNA, 19 nt, Artificial Sequence
  Description of Artificial Sequence: Synthetic oligonucleotide
  Antisense strand to SEQ ID NO: 295976
uuacgccuggccaaauaag

SEQ ID NO: 295978 - RNA, 19 nt, Artificial Sequence
  Description of Artificial Sequence: Synthetic oligonucleotide
  Sense strand starting at position 2370 of SEQ ID NO: 3804
ugcuaagcucccguuguaa

SEQ ID NO: 295979 - RNA, 19 nt, Artificial Sequence
  Description of Artificial Sequence: Synthetic oligonucleotide
  Antisense strand to SEQ ID NO: 295978
uuacaacgggagcuuagca

SEQ ID NO: 295980 - RNA, 19 nt, Artificial Sequence
  Description of Artificial Sequence: Synthetic oligonucleotide
  Sense strand starting at position 2388 of SEQ ID NO: 3804
agcccagagcuguaauaac

SEQ ID NO: 295981 - RNA, 19 nt, Artificial Sequence
  Description of Artificial Sequence: Synthetic oligonucleotide
  Antisense strand to SEQ ID NO: 295980
guuauuacagcucugggcu

SEQ ID NO: 295982 - RNA, 19 nt, Artificial Sequence
  Description of Artificial Sequence: Synthetic oligonucleotide
  Sense strand starting at position 2399 of SEQ ID NO: 3804
guaauaacugcugagacac

SEQ ID NO: 295983 - RNA, 19 nt, Artificial Sequence
  Description of Artificial Sequence: Synthetic oligonucleotide
  Antisense strand to SEQ ID NO: 295982
gugucucagcaguuauuac

SEQ ID NO: 295984 - RNA, 19 nt, Artificial Sequence
  Description of Artificial Sequence: Synthetic oligonucleotide
  Sense strand starting at position 2430 of SEQ ID NO: 3804
acaggcuccaguuggaaau

SEQ ID NO: 295985 - RNA, 19 nt, Artificial Sequence
  Description of Artificial Sequence: Synthetic oligonucleotide
  Antisense strand to SEQ ID NO: 295984
auuuccaacuggagccugu

SEQ ID NO: 295986 - RNA, 19 nt, Artificial Sequence
  Description of Artificial Sequence: Synthetic oligonucleotide
  Sense strand starting at position 2450 of SEQ ID NO: 3804
gagaacuuuccagguagau

SEQ ID NO: 295987 - RNA, 19 nt, Artificial Sequence
  Description of Artificial Sequence: Synthetic oligonucleotide
  Antisense strand to SEQ ID NO: 295986
aucuaccuggaaaguucuc

SEQ ID NO: 295988 - RNA, 19 nt, Artificial Sequence
  Description of Artificial Sequence: Synthetic oligonucleotide
  Sense strand starting at position 2747 of SEQ ID NO: 3804
ucgagcuaccaggaguaaa

SEQ ID NO: 295989 - RNA, 19 nt, Artificial Sequence
  Description of Artificial Sequence: Synthetic oligonucleotide
  Antisense strand to SEQ ID NO: 295988
uuuacuccugguagcucga

SEQ ID NO: 295990 - RNA, 19 nt, Artificial Sequence
  Description of Artificial Sequence: Synthetic oligonucleotide
  Sense strand starting at position 2758 of SEQ ID NO: 3804
ggaguaaacuucuuuaaag

SEQ ID NO: 295991 - RNA, 19 nt, Artificial Sequence
  Description of Artificial Sequence: Synthetic oligonucleotide
  Antisense strand to SEQ ID NO: 295990
cuuuaaagaaguuuacucc

SEQ ID NO: 295992 - RNA, 19 nt, Artificial Sequence
  Description of Artificial Sequence: Synthetic oligonucleotide
  Sense strand starting at position 2798 of SEQ ID NO: 3804
ccggcuuugccagaacaga

SEQ ID NO: 295993 - RNA, 19 nt, Artificial Sequence
  Description of Artificial Sequence: Synthetic oligonucleotide
  Antisense strand to SEQ ID NO: 295992
ucuguucuggcaaagccgg

SEQ ID NO: 295994 - RNA, 19 nt, Artificial Sequence
  Description of Artificial Sequence: Synthetic oligonucleotide
  Sense strand starting at position 2811 of SEQ ID NO: 3804
aacagacaugaacgucauu

SEQ ID NO: 295995 - RNA, 19 nt, Artificial Sequence
  Description of Artificial Sequence: Synthetic oligonucleotide
  Antisense strand to SEQ ID NO: 295994
aaugacguucaugucuguu

SEQ ID NO: 295996 - RNA, 19 nt, Artificial Sequence
  Description of Artificial Sequence: Synthetic oligonucleotide
  Sense strand starting at position 2859 of SEQ ID NO: 3804
gugcauacgucagcaauuu

SEQ ID NO: 295997 - RNA, 19 nt, Artificial Sequence
  Description of Artificial Sequence: Synthetic oligonucleotide
  Antisense strand to SEQ ID NO: 295996
aaauugcugacguaugcac

SEQ ID NO: 295998 - RNA, 19 nt, Artificial Sequence
  Description of Artificial Sequence: Synthetic oligonucleotide
  Sense strand starting at position 3130 of SEQ ID NO: 3804
gggauuugcaggcgugaac

SEQ ID NO: 295999 - RNA, 19 nt, Artificial Sequence
  Description of Artificial Sequence: Synthetic oligonucleotide
  Antisense strand to SEQ ID NO: 295998
guucacgccugcaaauccc

SEQ ID NO: 296000 - RNA, 19 nt, Artificial Sequence
  Description of Artificial Sequence: Synthetic oligonucleotide
  Sense strand starting at position 3183 of SEQ ID NO: 3804
uuaccuggcuuuccaagaa

SEQ ID NO: 296001 - RNA, 19 nt, Artificial Sequence
  Description of Artificial Sequence: Synthetic oligonucleotide
  Antisense strand to SEQ ID NO: 296000
uucuuggaaagccagguaa

SEQ ID NO: 296002 - RNA, 19 nt, Artificial Sequence
  Description of Artificial Sequence: Synthetic oligonucleotide
  Sense strand starting at position 3238 of SEQ ID NO: 3804
cuauguacugaguauucua

SEQ ID NO: 296003 - RNA, 19 nt, Artificial Sequence
  Description of Artificial Sequence: Synthetic oligonucleotide
  Antisense strand to SEQ ID NO: 296002
uagaauacucaguacauag

SEQ ID NO: 296004 - RNA, 19 nt, Artificial Sequence
  Description of Artificial Sequence: Synthetic oligonucleotide
  Sense strand starting at position 3246 of SEQ ID NO: 3804
ugaguauucuaagcaugga

SEQ ID NO: 296005 - RNA, 19 nt, Artificial Sequence
  Description of Artificial Sequence: Synthetic oligonucleotide
  Antisense strand to SEQ ID NO: 296004
uccaugcuuagaauacuca

SEQ ID NO: 296006 - RNA, 19 nt, Artificial Sequence
  Description of Artificial Sequence: Synthetic oligonucleotide
  Sense strand starting at position 3249 of SEQ ID NO: 3804
guauucuaagcauggacuu

SEQ ID NO: 296007 - RNA, 19 nt, Artificial Sequence
  Description of Artificial Sequence: Synthetic oligonucleotide
  Antisense strand to SEQ ID NO: 296006
aaguccaugcuuagaauac

SEQ ID NO: 296008 - RNA, 19 nt, Artificial Sequence
  Description of Artificial Sequence: Synthetic oligonucleotide
  Sense strand starting at position 3369 of SEQ ID NO: 3804
agagguuacugggauuuga

SEQ ID NO: 296009 - RNA, 19 nt, Artificial Sequence
  Description of Artificial Sequence: Synthetic oligonucleotide
  Antisense strand to SEQ ID NO: 296008
ucaaaucccaguaaccucu

SEQ ID NO: 296010 - RNA, 19 nt, Artificial Sequence
  Description of Artificial Sequence: Synthetic oligonucleotide
  Sense strand starting at position 3699 of SEQ ID NO: 3804
gggauuagcaccugaccuu

SEQ ID NO: 296011 - RNA, 19 nt, Artificial Sequence
  Description of Artificial Sequence: Synthetic oligonucleotide
  Antisense strand to SEQ ID NO: 296010
aaggucaggugcuaauccc

SEQ ID NO: 296012 - RNA, 19 nt, Artificial Sequence
  Description of Artificial Sequence: Synthetic oligonucleotide
  Sense strand starting at position 3700 of SEQ ID NO: 3804
ggauuagcaccugaccuua

SEQ ID NO: 296013 - RNA, 19 nt, Artificial Sequence
  Description of Artificial Sequence: Synthetic oligonucleotide
  Antisense strand to SEQ ID NO: 296012
uaaggucaggugcuaaucc

SEQ ID NO: 296014 - RNA, 19 nt, Artificial Sequence
  Description of Artificial Sequence: Synthetic oligonucleotide
  Sense strand starting at position 3710 of SEQ ID NO: 3804
cugaccuuacguuagcaau

SEQ ID NO: 296015 - RNA, 19 nt, Artificial Sequence
  Description of Artificial Sequence: Synthetic oligonucleotide
  Antisense strand to SEQ ID NO: 296014
auugcuaacguaaggucag

SEQ ID NO: 296016 - RNA, 19 nt, Artificial Sequence
  Description of Artificial Sequence: Synthetic oligonucleotide
  Sense strand starting at position 3723 of SEQ ID NO: 3804
agcaauccuguugacuuau

SEQ ID NO: 296017 - RNA, 19 nt, Artificial Sequence
  Description of Artificial Sequence: Synthetic oligonucleotide
  Antisense strand to SEQ ID NO: 296016
auaagucaacaggauugcu

SEQ ID NO: 296018 - RNA, 19 nt, Artificial Sequence
  Description of Artificial Sequence: Synthetic oligonucleotide
  Sense strand starting at position 3835 of SEQ ID NO: 3804
ugggcugaguugguagaau

SEQ ID NO: 296019 - RNA, 19 nt, Artificial Sequence
  Description of Artificial Sequence: Synthetic oligonucleotide
  Antisense strand to SEQ ID NO: 296018
auucuaccaacucagccca

SEQ ID NO: 296020 - RNA, 19 nt, Artificial Sequence
  Description of Artificial Sequence: Synthetic oligonucleotide
  Sense strand starting at position 3848 of SEQ ID NO: 3804
uagaauguuuaugcagauc

SEQ ID NO: 296021 - RNA, 19 nt, Artificial Sequence
  Description of Artificial Sequence: Synthetic oligonucleotide
  Antisense strand to SEQ ID NO: 296020
gaucugcauaaacauucua

SEQ ID NO: 296022 - RNA, 19 nt, Artificial Sequence
  Description of Artificial Sequence: Synthetic oligonucleotide
  Sense strand starting at position 3851 of SEQ ID NO: 3804
aauguuuaugcagaucaag

SEQ ID NO: 296023 - RNA, 19 nt, Artificial Sequence
  Description of Artificial Sequence: Synthetic oligonucleotide
  Antisense strand to SEQ ID NO: 296022
cuugaucugcauaaacauu

SEQ ID NO: 296024 - RNA, 19 nt, Artificial Sequence
  Description of Artificial Sequence: Synthetic oligonucleotide
  Sense strand starting at position 44 of SEQ ID NO: 3805
ucaugugcucaucaagagu

SEQ ID NO: 296025 - RNA, 19 nt, Artificial Sequence
  Description of Artificial Sequence: Synthetic oligonucleotide
  Antisense strand to SEQ ID NO: 296024
acucuugaugagcacauga

SEQ ID NO: 296026 - RNA, 19 nt, Artificial Sequence
  Description of Artificial Sequence: Synthetic oligonucleotide
  Sense strand starting at position 115 of SEQ ID NO: 3805
ucaagucugggugacuaua

SEQ ID NO: 296027 - RNA, 19 nt, Artificial Sequence
  Description of Artificial Sequence: Synthetic oligonucleotide
  Antisense strand to SEQ ID NO: 296026
uauagucacccagacuuga

SEQ ID NO: 296028 - RNA, 19 nt, Artificial Sequence
  Description of Artificial Sequence: Synthetic oligonucleotide
  Sense strand starting at position 199 of SEQ ID NO: 3805
ggcagauuuccacgguguc

SEQ ID NO: 296029 - RNA, 19 nt, Artificial Sequence
  Description of Artificial Sequence: Synthetic oligonucleotide
  Antisense strand to SEQ ID NO: 296028
gacaccguggaaaucugcc

SEQ ID NO: 296030 - RNA, 19 nt, Artificial Sequence
  Description of Artificial Sequence: Synthetic oligonucleotide
  Sense strand starting at position 200 of SEQ ID NO: 3805
gcagauuuccacgguguca

SEQ ID NO: 296031 - RNA, 19 nt, Artificial Sequence
  Description of Artificial Sequence: Synthetic oligonucleotide
  Antisense strand to SEQ ID NO: 296030
ugacaccguggaaaucugc

SEQ ID NO: 296032 - RNA, 19 nt, Artificial Sequence
  Description of Artificial Sequence: Synthetic oligonucleotide
  Sense strand starting at position 202 of SEQ ID NO: 3805
agauuuccacggugucagu

SEQ ID NO: 296033 - RNA, 19 nt, Artificial Sequence
  Description of Artificial Sequence: Synthetic oligonucleotide
  Antisense strand to SEQ ID NO: 296032
acugacaccguggaaaucu

SEQ ID NO: 296034 - RNA, 19 nt, Artificial Sequence
  Description of Artificial Sequence: Synthetic oligonucleotide
  Sense strand starting at position 219 of SEQ ID NO: 3805
guaauugguucucuuggga

SEQ ID NO: 296035 - RNA, 19 nt, Artificial Sequence
  Description of Artificial Sequence: Synthetic oligonucleotide
  Antisense strand to SEQ ID NO: 296034
ucccaagagaaccaauuac

SEQ ID NO: 296036 - RNA, 19 nt, Artificial Sequence
  Description of Artificial Sequence: Synthetic oligonucleotide
  Sense strand starting at position 233 of SEQ ID NO: 3805
ugggaucuauccucaugcu

SEQ ID NO: 296037 - RNA, 19 nt, Artificial Sequence
  Description of Artificial Sequence: Synthetic oligonucleotide
  Antisense strand to SEQ ID NO: 296036
agcaugaggauagauccca

SEQ ID NO: 296038 - RNA, 19 nt, Artificial Sequence
  Description of Artificial Sequence: Synthetic oligonucleotide
  Sense strand starting at position 284 of SEQ ID NO: 3805
uguggugagcaauagcuaa

SEQ ID NO: 296039 - RNA, 19 nt, Artificial Sequence
  Description of Artificial Sequence: Synthetic oligonucleotide
  Antisense strand to SEQ ID NO: 296038
uuagcuauugcucaccaca

SEQ ID NO: 296040 - RNA, 19 nt, Artificial Sequence
  Description of Artificial Sequence: Synthetic oligonucleotide
  Sense strand starting at position 436 of SEQ ID NO: 3805
ucuguauucugauccagga

SEQ ID NO: 296041 - RNA, 19 nt, Artificial Sequence
  Description of Artificial Sequence: Synthetic oligonucleotide
  Antisense strand to SEQ ID NO: 296040
uccuggaucagaauacaga

SEQ ID NO: 296042 - RNA, 19 nt, Artificial Sequence
  Description of Artificial Sequence: Synthetic oligonucleotide
  Sense strand starting at position 519 of SEQ ID NO: 3805
cuccacucuggccaugauu

SEQ ID NO: 296043 - RNA, 19 nt, Artificial Sequence
  Description of Artificial Sequence: Synthetic oligonucleotide
  Antisense strand to SEQ ID NO: 296042
aaucauggccagaguggag

SEQ ID NO: 296044 - RNA, 19 nt, Artificial Sequence
  Description of Artificial Sequence: Synthetic oligonucleotide
  Sense strand starting at position 724 of SEQ ID NO: 3805
ccaugugcucuacagagua

SEQ ID NO: 296045 - RNA, 19 nt, Artificial Sequence
  Description of Artificial Sequence: Synthetic oligonucleotide
  Antisense strand to SEQ ID NO: 296044
uacucuguagagcacaugg

SEQ ID NO: 296046 - RNA, 19 nt, Artificial Sequence
  Description of Artificial Sequence: Synthetic oligonucleotide
  Sense strand starting at position 802 of SEQ ID NO: 3805
gagagaaagcaauguccau

SEQ ID NO: 296047 - RNA, 19 nt, Artificial Sequence
  Description of Artificial Sequence: Synthetic oligonucleotide
  Antisense strand to SEQ ID NO: 296046
auggacauugcuuucucuc

SEQ ID NO: 296048 - RNA, 19 nt, Artificial Sequence
  Description of Artificial Sequence: Synthetic oligonucleotide
  Sense strand starting at position 897 of SEQ ID NO: 3805
uccuaagaugugcaacuuu

SEQ ID NO: 296049 - RNA, 19 nt, Artificial Sequence
  Description of Artificial Sequence: Synthetic oligonucleotide
  Antisense strand to SEQ ID NO: 296048
aaaguugcacaucuuagga

SEQ ID NO: 296050 - RNA, 19 nt, Artificial Sequence
  Description of Artificial Sequence: Synthetic oligonucleotide
  Sense strand starting at position 1000 of SEQ ID NO: 3805
auaauaaggcagugaaauu

SEQ ID NO: 296051 - RNA, 19 nt, Artificial Sequence
  Description of Artificial Sequence: Synthetic oligonucleotide
  Antisense strand to SEQ ID NO: 296050
aauuucacugccuuauuau

SEQ ID NO: 296052 - RNA, 19 nt, Artificial Sequence
  Description of Artificial Sequence: Synthetic oligonucleotide
  Sense strand starting at position 1039 of SEQ ID NO: 3805
ggagaugacuugcugcuua

SEQ ID NO: 296053 - RNA, 19 nt, Artificial Sequence
  Description of Artificial Sequence: Synthetic oligonucleotide
  Antisense strand to SEQ ID NO: 296052
uaagcagcaagucaucucc

SEQ ID NO: 296054 - RNA, 19 nt, Artificial Sequence
  Description of Artificial Sequence: Synthetic oligonucleotide
  Sense strand starting at position 1051 of SEQ ID NO: 3805
cugcuuauguuucucauuu

SEQ ID NO: 296055 - RNA, 19 nt, Artificial Sequence
  Description of Artificial Sequence: Synthetic oligonucleotide
  Antisense strand to SEQ ID NO: 296054
aaaugagaaacauaagcag

SEQ ID NO: 296056 - RNA, 19 nt, Artificial Sequence
  Description of Artificial Sequence: Synthetic oligonucleotide
  Sense strand starting at position 1063 of SEQ ID NO: 3805
cucauuuccuuugaaggau

SEQ ID NO: 296057 - RNA, 19 nt, Artificial Sequence
  Description of Artificial Sequence: Synthetic oligonucleotide
  Antisense strand to SEQ ID NO: 296056
auccuucaaaggaaaugag

SEQ ID NO: 296058 - RNA, 19 nt, Artificial Sequence
  Description of Artificial Sequence: Synthetic oligonucleotide
  Sense strand starting at position 1110 of SEQ ID NO: 3805
cagacuuagucauuggaag

SEQ ID NO: 296059 - RNA, 19 nt, Artificial Sequence
  Description of Artificial Sequence: Synthetic oligonucleotide
  Antisense strand to SEQ ID NO: 296058
cuuccaaugacuaagucug

SEQ ID NO: 296060 - RNA, 19 nt, Artificial Sequence
  Description of Artificial Sequence: Synthetic oligonucleotide
  Sense strand starting at position 1133 of SEQ ID NO: 3805
agugauuacucuuucuuua

SEQ ID NO: 296061 - RNA, 19 nt, Artificial Sequence
  Description of Artificial Sequence: Synthetic oligonucleotide
  Antisense strand to SEQ ID NO: 296060
uaaagaaagaguaaucacu

SEQ ID NO: 296062 - RNA, 19 nt, Artificial Sequence
  Description of Artificial Sequence: Synthetic oligonucleotide
  Sense strand starting at position 1201 of SEQ ID NO: 3805
gugaauuucuuugacucaa

SEQ ID NO: 296063 - RNA, 19 nt, Artificial Sequence
  Description of Artificial Sequence: Synthetic oligonucleotide
  Antisense strand to SEQ ID NO: 296062
uugagucaaagaaauucac

SEQ ID NO: 296064 - RNA, 19 nt, Artificial Sequence
  Description of Artificial Sequence: Synthetic oligonucleotide
  Sense strand starting at position 1223 of SEQ ID NO: 3805
ccagauuauuuccaguaag

SEQ ID NO: 296065 - RNA, 19 nt, Artificial Sequence
  Description of Artificial Sequence: Synthetic oligonucleotide
  Antisense strand to SEQ ID NO: 296064
cuuacuggaaauaaucugg

SEQ ID NO: 296066 - RNA, 19 nt, Artificial Sequence
  Description of Artificial Sequence: Synthetic oligonucleotide
  Sense strand starting at position 1288 of SEQ ID NO: 3805
aaaugagaaguucguaaua

SEQ ID NO: 296067 - RNA, 19 nt, Artificial Sequence
  Description of Artificial Sequence: Synthetic oligonucleotide
  Antisense strand to SEQ ID NO: 296066
uauuacgaacuucucauuu

SEQ ID NO: 296068 - RNA, 19 nt, Artificial Sequence
  Description of Artificial Sequence: Synthetic oligonucleotide
  Sense strand starting at position 1392 of SEQ ID NO: 3805
gcagaagaaucagucauca

SEQ ID NO: 296069 - RNA, 19 nt, Artificial Sequence
  Description of Artificial Sequence: Synthetic oligonucleotide
  Antisense strand to SEQ ID NO: 296068
ugaugacugauucuucugc

SEQ ID NO: 296070 - RNA, 19 nt, Artificial Sequence
  Description of Artificial Sequence: Synthetic oligonucleotide
  Sense strand starting at position 1418 of SEQ ID NO: 3805
uuuggauagccucaugaca

SEQ ID NO: 296071 - RNA, 19 nt, Artificial Sequence
  Description of Artificial Sequence: Synthetic oligonucleotide
  Antisense strand to SEQ ID NO: 296070
ugucaugaggcuauccaaa

SEQ ID NO: 296072 - RNA, 19 nt, Artificial Sequence
  Description of Artificial Sequence: Synthetic oligonucleotide
  Sense strand starting at position 1486 of SEQ ID NO: 3805
agagaugacuagcuacuau

SEQ ID NO: 296073 - RNA, 19 nt, Artificial Sequence
  Description of Artificial Sequence: Synthetic oligonucleotide
  Antisense strand to SEQ ID NO: 296072
auaguagcuagucaucucu

SEQ ID NO: 296074 - RNA, 19 nt, Artificial Sequence
  Description of Artificial Sequence: Synthetic oligonucleotide
  Sense strand starting at position 2018 of SEQ ID NO: 3805
ugcagcaaucuguaacuua

SEQ ID NO: 296075 - RNA, 19 nt, Artificial Sequence
  Description of Artificial Sequence: Synthetic oligonucleotide
  Antisense strand to SEQ ID NO: 296074
uaaguuacagauugcugca

SEQ ID NO: 296076 - RNA, 19 nt, Artificial Sequence
  Description of Artificial Sequence: Synthetic oligonucleotide
  Sense strand starting at position 2260 of SEQ ID NO: 3805
uaaauuguuguguauugag

SEQ ID NO: 296077 - RNA, 19 nt, Artificial Sequence
  Description of Artificial Sequence: Synthetic oligonucleotide
  Antisense strand to SEQ ID NO: 296076
cucaauacacaacaauuua

SEQ ID NO: 296078 - RNA, 19 nt, Artificial Sequence
  Description of Artificial Sequence: Synthetic oligonucleotide
  Sense strand starting at position 2301 of SEQ ID NO: 3805
cuugcaguugacuacuuau

SEQ ID NO: 296079 - RNA, 19 nt, Artificial Sequence
  Description of Artificial Sequence: Synthetic oligonucleotide
  Antisense strand to SEQ ID NO: 296078
auaaguagucaacugcaag

SEQ ID NO: 296080 - RNA, 19 nt, Artificial Sequence
  Description of Artificial Sequence: Synthetic oligonucleotide
  Sense strand starting at position 2304 of SEQ ID NO: 3805
gcaguugacuacuuaugaa

SEQ ID NO: 296081 - RNA, 19 nt, Artificial Sequence
  Description of Artificial Sequence: Synthetic oligonucleotide
  Antisense strand to SEQ ID NO: 296080
uucauaaguagucaacugc

SEQ ID NO: 296082 - RNA, 19 nt, Artificial Sequence
  Description of Artificial Sequence: Synthetic oligonucleotide
  Sense strand starting at position 2332 of SEQ ID NO: 3805
gguauaagaucuucuugga

SEQ ID NO: 296083 - RNA, 19 nt, Artificial Sequence
  Description of Artificial Sequence: Synthetic oligonucleotide
  Antisense strand to SEQ ID NO: 296082
uccaagaagaucuuauacc

SEQ ID NO: 296084 - RNA, 19 nt, Artificial Sequence
  Description of Artificial Sequence: Synthetic oligonucleotide
  Sense strand starting at position 2474 of SEQ ID NO: 3805
ugcacaucaccuggauaau

SEQ ID NO: 296085 - RNA, 19 nt, Artificial Sequence
  Description of Artificial Sequence: Synthetic oligonucleotide
  Antisense strand to SEQ ID NO: 296084
auuauccaggugaugugca

SEQ ID NO: 296086 - RNA, 19 nt, Artificial Sequence
  Description of Artificial Sequence: Synthetic oligonucleotide
  Sense strand starting at position 2508 of SEQ ID NO: 3805
ugaugauucccaugcacug

SEQ ID NO: 296087 - RNA, 19 nt, Artificial Sequence
  Description of Artificial Sequence: Synthetic oligonucleotide
  Antisense strand to SEQ ID NO: 296086
cagugcaugggaaucauca

SEQ ID NO: 296088 - RNA, 19 nt, Artificial Sequence
  Description of Artificial Sequence: Synthetic oligonucleotide
  Sense strand starting at position 2513 of SEQ ID NO: 3805
auucccaugcacuguaaga

SEQ ID NO: 296089 - RNA, 19 nt, Artificial Sequence
  Description of Artificial Sequence: Synthetic oligonucleotide
  Antisense strand to SEQ ID NO: 296088
ucuuacagugcaugggaau

SEQ ID NO: 296090 - RNA, 19 nt, Artificial Sequence
  Description of Artificial Sequence: Synthetic oligonucleotide
  Sense strand starting at position 2526 of SEQ ID NO: 3805
guaagaucccaagguaguu

SEQ ID NO: 296091 - RNA, 19 nt, Artificial Sequence
  Description of Artificial Sequence: Synthetic oligonucleotide
  Antisense strand to SEQ ID NO: 296090
aacuaccuugggaucuuac

SEQ ID NO: 296092 - RNA, 19 nt, Artificial Sequence
  Description of Artificial Sequence: Synthetic oligonucleotide
  Sense strand starting at position 2607 of SEQ ID NO: 3805
uuguguucuuauuugugga

SEQ ID NO: 296093 - RNA, 19 nt, Artificial Sequence
  Description of Artificial Sequence: Synthetic oligonucleotide
  Antisense strand to SEQ ID NO: 296092
uccacaaauaagaacacaa

SEQ ID NO: 296094 - RNA, 19 nt, Artificial Sequence
  Description of Artificial Sequence: Synthetic oligonucleotide
  Sense strand starting at position 2608 of SEQ ID NO: 3805
uguguucuuauuuguggau

SEQ ID NO: 296095 - RNA, 19 nt, Artificial Sequence
  Description of Artificial Sequence: Synthetic oligonucleotide
  Antisense strand to SEQ ID NO: 296094
auccacaaauaagaacaca

SEQ ID NO: 296096 - RNA, 19 nt, Artificial Sequence
  Description of Artificial Sequence: Synthetic oligonucleotide
  Sense strand starting at position 2609 of SEQ ID NO: 3805
guguucuuauuuguggauu

SEQ ID NO: 296097 - RNA, 19 nt, Artificial Sequence
  Description of Artificial Sequence: Synthetic oligonucleotide
  Antisense strand to SEQ ID NO: 296096
aauccacaaauaagaacac

SEQ ID NO: 296098 - RNA, 19 nt, Artificial Sequence
  Description of Artificial Sequence: Synthetic oligonucleotide
  Sense strand starting at position 2667 of SEQ ID NO: 3805
gacugagaucuuggcucua

SEQ ID NO: 296099 - RNA, 19 nt, Artificial Sequence
  Description of Artificial Sequence: Synthetic oligonucleotide
  Antisense strand to SEQ ID NO: 296098
uagagccaagaucucaguc

SEQ ID NO: 296100 - RNA, 19 nt, Artificial Sequence
  Description of Artificial Sequence: Synthetic oligonucleotide
  Sense strand starting at position 2684 of SEQ ID NO: 3805
uaccauguaccaggaguau

SEQ ID NO: 296101 - RNA, 19 nt, Artificial Sequence
  Description of Artificial Sequence: Synthetic oligonucleotide
  Antisense strand to SEQ ID NO: 296100
auacuccugguacauggua

SEQ ID NO: 296102 - RNA, 19 nt, Artificial Sequence
  Description of Artificial Sequence: Synthetic oligonucleotide
  Sense strand starting at position 2759 of SEQ ID NO: 3805
ggcauaaaugguuagaggu

SEQ ID NO: 296103 - RNA, 19 nt, Artificial Sequence
  Description of Artificial Sequence: Synthetic oligonucleotide
  Antisense strand to SEQ ID NO: 296102
accucuaaccauuuaugcc

SEQ ID NO: 296104 - RNA, 19 nt, Artificial Sequence
  Description of Artificial Sequence: Synthetic oligonucleotide
  Sense strand starting at position 116 of SEQ ID NO: 3806
uccuuuggcguucaugaga

SEQ ID NO: 296105 - RNA, 19 nt, Artificial Sequence
  Description of Artificial Sequence: Synthetic oligonucleotide
  Antisense strand to SEQ ID NO: 296104
ucucaugaacgccaaagga

SEQ ID NO: 296106 - RNA, 19 nt, Artificial Sequence
  Description of Artificial Sequence: Synthetic oligonucleotide
  Sense strand starting at position 165 of SEQ ID NO: 3806
ccucaauaguguuccagca

SEQ ID NO: 296107 - RNA, 19 nt, Artificial Sequence
  Description of Artificial Sequence: Synthetic oligonucleotide
  Antisense strand to SEQ ID NO: 296106
ugcuggaacacuauugagg

SEQ ID NO: 296108 - RNA, 19 nt, Artificial Sequence
  Description of Artificial Sequence: Synthetic oligonucleotide
  Sense strand starting at position 218 of SEQ ID NO: 3806
ucugucugcucuccauaca

SEQ ID NO: 296109 - RNA, 19 nt, Artificial Sequence
  Description of Artificial Sequence: Synthetic oligonucleotide
  Antisense strand to SEQ ID NO: 296108
uguauggagagcagacaga

SEQ ID NO: 296110 - RNA, 19 nt, Artificial Sequence
  Description of Artificial Sequence: Synthetic oligonucleotide
  Sense strand starting at position 1297 of SEQ ID NO: 3806
gaaggaaagcucuagcggu

SEQ ID NO: 296111 - RNA, 19 nt, Artificial Sequence
  Description of Artificial Sequence: Synthetic oligonucleotide
  Antisense strand to SEQ ID NO: 296110
accgcuagagcuuuccuuc

SEQ ID NO: 296112 - RNA, 19 nt, Artificial Sequence
  Description of Artificial Sequence: Synthetic oligonucleotide
  Sense strand starting at position 1328 of SEQ ID NO: 3806
cagagaguuuacuuguuug

SEQ ID NO: 296113 - RNA, 19 nt, Artificial Sequence
  Description of Artificial Sequence: Synthetic oligonucleotide
  Antisense strand to SEQ ID NO: 296112
caaacaaguaaacucucug

SEQ ID NO: 296114 - RNA, 19 nt, Artificial Sequence
  Description of Artificial Sequence: Synthetic oligonucleotide
  Sense strand starting at position 1331 of SEQ ID NO: 3806
agaguuuacuuguuuggag

SEQ ID NO: 296115 - RNA, 19 nt, Artificial Sequence
  Description of Artificial Sequence: Synthetic oligonucleotide
  Antisense strand to SEQ ID NO: 296114
cuccaaacaaguaaacucu

SEQ ID NO: 296116 - RNA, 19 nt, Artificial Sequence
  Description of Artificial Sequence: Synthetic oligonucleotide
  Sense strand starting at position 1332 of SEQ ID NO: 3806
gaguuuacuuguuuggaga

SEQ ID NO: 296117 - RNA, 19 nt, Artificial Sequence
  Description of Artificial Sequence: Synthetic oligonucleotide
  Antisense strand to SEQ ID NO: 296116
ucuccaaacaaguaaacuc

SEQ ID NO: 296118 - RNA, 19 nt, Artificial Sequence
  Description of Artificial Sequence: Synthetic oligonucleotide
  Sense strand starting at position 1333 of SEQ ID NO: 3806
aguuuacuuguuuggagac

SEQ ID NO: 296119 - RNA, 19 nt, Artificial Sequence
  Description of Artificial Sequence: Synthetic oligonucleotide
  Antisense strand to SEQ ID NO: 296118
gucuccaaacaaguaaacu

SEQ ID NO: 296120 - RNA, 19 nt, Artificial Sequence
  Description of Artificial Sequence: Synthetic oligonucleotide
  Sense strand starting at position 1479 of SEQ ID NO: 3806
caccgagucuuccuguaca

SEQ ID NO: 296121 - RNA, 19 nt, Artificial Sequence
  Description of Artificial Sequence: Synthetic oligonucleotide
  Antisense strand to SEQ ID NO: 296120
uguacaggaagacucggug

SEQ ID NO: 296122 - RNA, 19 nt, Artificial Sequence
  Description of Artificial Sequence: Synthetic oligonucleotide
  Sense strand starting at position 1569 of SEQ ID NO: 3806
aggaguagcccuuaaauuc

SEQ ID NO: 296123 - RNA, 19 nt, Artificial Sequence
  Description of Artificial Sequence: Synthetic oligonucleotide
  Antisense strand to SEQ ID NO: 296122
gaauuuaagggcuacuccu

SEQ ID NO: 296124 - RNA, 19 nt, Artificial Sequence
  Description of Artificial Sequence: Synthetic oligonucleotide
  Sense strand starting at position 2289 of SEQ ID NO: 3806
gcucgaauuuccucccagu

SEQ ID NO: 296125 - RNA, 19 nt, Artificial Sequence
  Description of Artificial Sequence: Synthetic oligonucleotide
  Antisense strand to SEQ ID NO: 296124
acugggaggaaauucgagc

SEQ ID NO: 296126 - RNA, 19 nt, Artificial Sequence
  Description of Artificial Sequence: Synthetic oligonucleotide
  Sense strand starting at position 2384 of SEQ ID NO: 3806
cagugaacacccugaauga

SEQ ID NO: 296127 - RNA, 19 nt, Artificial Sequence
  Description of Artificial Sequence: Synthetic oligonucleotide
  Antisense strand to SEQ ID NO: 296126
ucauucaggguguucacug

SEQ ID NO: 296128 - RNA, 19 nt, Artificial Sequence
  Description of Artificial Sequence: Synthetic oligonucleotide
  Sense strand starting at position 2401 of SEQ ID NO: 3806
gaagcuuaugccuguuuag

SEQ ID NO: 296129 - RNA, 19 nt, Artificial Sequence
  Description of Artificial Sequence: Synthetic oligonucleotide
  Antisense strand to SEQ ID NO: 296128
cuaaacaggcauaagcuuc

SEQ ID NO: 296130 - RNA, 19 nt, Artificial Sequence
  Description of Artificial Sequence: Synthetic oligonucleotide
  Sense strand starting at position 2421 of SEQ ID NO: 3806
aauugaagucucugcuugu

SEQ ID NO: 296131 - RNA, 19 nt, Artificial Sequence
  Description of Artificial Sequence: Synthetic oligonucleotide
  Antisense strand to SEQ ID NO: 296130
acaagcagagacuucaauu

SEQ ID NO: 296132 - RNA, 19 nt, Artificial Sequence
  Description of Artificial Sequence: Synthetic oligonucleotide
  Sense strand starting at position 2467 of SEQ ID NO: 3806
aggagcuuccucugggaga

SEQ ID NO: 296133 - RNA, 19 nt, Artificial Sequence
  Description of Artificial Sequence: Synthetic oligonucleotide
  Antisense strand to SEQ ID NO: 296132
ucucccagaggaagcuccu

SEQ ID NO: 296134 - RNA, 19 nt, Artificial Sequence
  Description of Artificial Sequence: Synthetic oligonucleotide
  Sense strand starting at position 2544 of SEQ ID NO: 3806
ccgugaucccaccaguaac

SEQ ID NO: 296135 - RNA, 19 nt, Artificial Sequence
  Description of Artificial Sequence: Synthetic oligonucleotide
  Antisense strand to SEQ ID NO: 296134
guuacuggugggaucacgg

SEQ ID NO: 296136 - RNA, 19 nt, Artificial Sequence
  Description of Artificial Sequence: Synthetic oligonucleotide
  Sense strand starting at position 2857 of SEQ ID NO: 3806
ccaaauauugugugucagu

SEQ ID NO: 296137 - RNA, 19 nt, Artificial Sequence
  Description of Artificial Sequence: Synthetic oligonucleotide
  Antisense strand to SEQ ID NO: 296136
acugacacacaauauuugg

SEQ ID NO: 296138 - RNA, 19 nt, Artificial Sequence
  Description of Artificial Sequence: Synthetic oligonucleotide
  Sense strand starting at position 2858 of SEQ ID NO: 3806
caaauauugugugucaguu

SEQ ID NO: 296139 - RNA, 19 nt, Artificial Sequence
  Description of Artificial Sequence: Synthetic oligonucleotide
  Antisense strand to SEQ ID NO: 296138
aacugacacacaauauuug

SEQ ID NO: 296140 - RNA, 19 nt, Artificial Sequence
  Description of Artificial Sequence: Synthetic oligonucleotide
  Sense strand starting at position 2883 of SEQ ID NO: 3806
aaacgaaucucuuuagagu

SEQ ID NO: 296141 - RNA, 19 nt, Artificial Sequence
  Description of Artificial Sequence: Synthetic oligonucleotide
  Antisense strand to SEQ ID NO: 296140
acucuaaagagauucguuu

SEQ ID NO: 296142 - RNA, 19 nt, Artificial Sequence
  Description of Artificial Sequence: Synthetic oligonucleotide
  Sense strand starting at position 2898 of SEQ ID NO: 3806
gaguuuagcaagggcagua

SEQ ID NO: 296143 - RNA, 19 nt, Artificial Sequence
  Description of Artificial Sequence: Synthetic oligonucleotide
  Antisense strand to SEQ ID NO: 296142
uacugcccuugcuaaacuc

SEQ ID NO: 296144 - RNA, 19 nt, Artificial Sequence
  Description of Artificial Sequence: Synthetic oligonucleotide
  Sense strand starting at position 2914 of SEQ ID NO: 3806
guaaguaaccucugauaac

SEQ ID NO: 296145 - RNA, 19 nt, Artificial Sequence
  Description of Artificial Sequence: Synthetic oligonucleotide
  Antisense strand to SEQ ID NO: 296144
guuaucagagguuacuuac

SEQ ID NO: 296146 - RNA, 19 nt, Artificial Sequence
  Description of Artificial Sequence: Synthetic oligonucleotide
  Sense strand starting at position 3245 of SEQ ID NO: 3806
cugauaagacucuguauau

SEQ ID NO: 296147 - RNA, 19 nt, Artificial Sequence
  Description of Artificial Sequence: Synthetic oligonucleotide
  Antisense strand to SEQ ID NO: 296146
auauacagagucuuaucag

SEQ ID NO: 296148 - RNA, 19 nt, Artificial Sequence
  Description of Artificial Sequence: Synthetic oligonucleotide
  Sense strand starting at position 3246 of SEQ ID NO: 3806
ugauaagacucuguauaug

SEQ ID NO: 296149 - RNA, 19 nt, Artificial Sequence
  Description of Artificial Sequence: Synthetic oligonucleotide
  Antisense strand to SEQ ID NO: 296148
cauauacagagucuuauca

SEQ ID NO: 296150 - RNA, 19 nt, Artificial Sequence
  Description of Artificial Sequence: Synthetic oligonucleotide
  Sense strand starting at position 3252 of SEQ ID NO: 3806
gacucuguauauguguaua

SEQ ID NO: 296151 - RNA, 19 nt, Artificial Sequence
  Description of Artificial Sequence: Synthetic oligonucleotide
  Antisense strand to SEQ ID NO: 296150
uauacacauauacagaguc

SEQ ID NO: 296152 - RNA, 19 nt, Artificial Sequence
  Description of Artificial Sequence: Synthetic oligonucleotide
  Sense strand starting at position 3255 of SEQ ID NO: 3806
ucuguauauguguauacca

SEQ ID NO: 296153 - RNA, 19 nt, Artificial Sequence
  Description of Artificial Sequence: Synthetic oligonucleotide
  Antisense strand to SEQ ID NO: 296152
ugguauacacauauacaga

SEQ ID NO: 296154 - RNA, 19 nt, Artificial Sequence
  Description of Artificial Sequence: Synthetic oligonucleotide
  Sense strand starting at position 3257 of SEQ ID NO: 3806
uguauauguguauaccauu

SEQ ID NO: 296155 - RNA, 19 nt, Artificial Sequence
  Description of Artificial Sequence: Synthetic oligonucleotide
  Antisense strand to SEQ ID NO: 296154
aaugguauacacauauaca

SEQ ID NO: 296156 - RNA, 19 nt, Artificial Sequence
  Description of Artificial Sequence: Synthetic oligonucleotide
  Sense strand starting at position 3260 of SEQ ID NO: 3806
auauguguauaccauuuga

SEQ ID NO: 296157 - RNA, 19 nt, Artificial Sequence
  Description of Artificial Sequence: Synthetic oligonucleotide
  Antisense strand to SEQ ID NO: 296156
ucaaaugguauacacauau

SEQ ID NO: 296158 - RNA, 19 nt, Artificial Sequence
  Description of Artificial Sequence: Synthetic oligonucleotide
  Sense strand starting at position 3330 of SEQ ID NO: 3806
ggcccaacagcuuacuauu

SEQ ID NO: 296159 - RNA, 19 nt, Artificial Sequence
  Description of Artificial Sequence: Synthetic oligonucleotide
  Antisense strand to SEQ ID NO: 296158
aauaguaagcuguugggcc

SEQ ID NO: 296160 - RNA, 19 nt, Artificial Sequence
  Description of Artificial Sequence: Synthetic oligonucleotide
  Sense strand starting at position 3847 of SEQ ID NO: 3806
acauaagccugauaaagga

SEQ ID NO: 296161 - RNA, 19 nt, Artificial Sequence
  Description of Artificial Sequence: Synthetic oligonucleotide
  Antisense strand to SEQ ID NO: 296160
uccuuuaucaggcuuaugu

SEQ ID NO: 296162 - RNA, 19 nt, Artificial Sequence
  Description of Artificial Sequence: Synthetic oligonucleotide
  Sense strand starting at position 3890 of SEQ ID NO: 3806
uugaauaaggucuguaggu

SEQ ID NO: 296163 - RNA, 19 nt, Artificial Sequence
  Description of Artificial Sequence: Synthetic oligonucleotide
  Antisense strand to SEQ ID NO: 296162
accuacagaccuuauucaa

SEQ ID NO: 296164 - RNA, 19 nt, Artificial Sequence
  Description of Artificial Sequence: Synthetic oligonucleotide
  Sense strand starting at position 3892 of SEQ ID NO: 3806
gaauaaggucuguagguua

SEQ ID NO: 296165 - RNA, 19 nt, Artificial Sequence
  Description of Artificial Sequence: Synthetic oligonucleotide
  Antisense strand to SEQ ID NO: 296164
uaaccuacagaccuuauuc

SEQ ID NO: 296166 - RNA, 19 nt, Artificial Sequence
  Description of Artificial Sequence: Synthetic oligonucleotide
  Sense strand starting at position 3897 of SEQ ID NO: 3806
aggucuguagguuaguuau

SEQ ID NO: 296167 - RNA, 19 nt, Artificial Sequence
  Description of Artificial Sequence: Synthetic oligonucleotide
  Antisense strand to SEQ ID NO: 296166
auaacuaaccuacagaccu

SEQ ID NO: 296168 - RNA, 19 nt, Artificial Sequence
  Description of Artificial Sequence: Synthetic oligonucleotide
  Sense strand starting at position 3903 of SEQ ID NO: 3806
guagguuaguuauuggcau

SEQ ID NO: 296169 - RNA, 19 nt, Artificial Sequence
  Description of Artificial Sequence: Synthetic oligonucleotide
  Antisense strand to SEQ ID NO: 296168
augccaauaacuaaccuac

SEQ ID NO: 296170 - RNA, 19 nt, Artificial Sequence
  Description of Artificial Sequence: Synthetic oligonucleotide
  Sense strand starting at position 3910 of SEQ ID NO: 3806
aguuauuggcauugaauca

SEQ ID NO: 296171 - RNA, 19 nt, Artificial Sequence
  Description of Artificial Sequence: Synthetic oligonucleotide
  Antisense strand to SEQ ID NO: 296170
ugauucaaugccaauaacu

SEQ ID NO: 296172 - RNA, 19 nt, Artificial Sequence
  Description of Artificial Sequence: Synthetic oligonucleotide
  Sense strand starting at position 3931 of SEQ ID NO: 3806
uccugacuuugaccaguga

SEQ ID NO: 296173 - RNA, 19 nt, Artificial Sequence
  Description of Artificial Sequence: Synthetic oligonucleotide
  Antisense strand to SEQ ID NO: 296172
ucacuggucaaagucagga

SEQ ID NO: 296174 - RNA, 19 nt, Artificial Sequence
  Description of Artificial Sequence: Synthetic oligonucleotide
  Sense strand starting at position 3935 of SEQ ID NO: 3806
gacuuugaccagugaacua

SEQ ID NO: 296175 - RNA, 19 nt, Artificial Sequence
  Description of Artificial Sequence: Synthetic oligonucleotide
  Antisense strand to SEQ ID NO: 296174
uaguucacuggucaaaguc

SEQ ID NO: 296176 - RNA, 19 nt, Artificial Sequence
  Description of Artificial Sequence: Synthetic oligonucleotide
  Sense strand starting at position 3945 of SEQ ID NO: 3806
agugaacuauuguuauauc

SEQ ID NO: 296177 - RNA, 19 nt, Artificial Sequence
  Description of Artificial Sequence: Synthetic oligonucleotide
  Antisense strand to SEQ ID NO: 296176
gauauaacaauaguucacu

SEQ ID NO: 296178 - RNA, 19 nt, Artificial Sequence
  Description of Artificial Sequence: Synthetic oligonucleotide
  Sense strand starting at position 3955 of SEQ ID NO: 3806
uguuauaucagagaguguu

SEQ ID NO: 296179 - RNA, 19 nt, Artificial Sequence
  Description of Artificial Sequence: Synthetic oligonucleotide
  Antisense strand to SEQ ID NO: 296178
aacacucucugauauaaca

SEQ ID NO: 296180 - RNA, 19 nt, Artificial Sequence
  Description of Artificial Sequence: Synthetic oligonucleotide
  Sense strand starting at position 3958 of SEQ ID NO: 3806
uauaucagagaguguucuu

SEQ ID NO: 296181 - RNA, 19 nt, Artificial Sequence
  Description of Artificial Sequence: Synthetic oligonucleotide
  Antisense strand to SEQ ID NO: 296180
aagaacacucucugauaua

SEQ ID NO: 296182 - RNA, 19 nt, Artificial Sequence
  Description of Artificial Sequence: Synthetic oligonucleotide
  Sense strand starting at position 3961 of SEQ ID NO: 3806
aucagagaguguucuuguu

SEQ ID NO: 296183 - RNA, 19 nt, Artificial Sequence
  Description of Artificial Sequence: Synthetic oligonucleotide
  Antisense strand to SEQ ID NO: 296182
aacaagaacacucucugau

SEQ ID NO: 296184 - RNA, 19 nt, Artificial Sequence
  Description of Artificial Sequence: Synthetic oligonucleotide
  Sense strand starting at position 8 of SEQ ID NO: 3807
cgugaaagcacaggaaauu

SEQ ID NO: 296185 - RNA, 19 nt, Artificial Sequence
  Description of Artificial Sequence: Synthetic oligonucleotide
  Antisense strand to SEQ ID NO: 296184
aauuuccugugcuuucacg

SEQ ID NO: 296186 - RNA, 19 nt, Artificial Sequence
  Description of Artificial Sequence: Synthetic oligonucleotide
  Sense strand starting at position 17 of SEQ ID NO: 3807
acaggaaauuaguuauucu

SEQ ID NO: 296187 - RNA, 19 nt, Artificial Sequence
  Description of Artificial Sequence: Synthetic oligonucleotide
  Antisense strand to SEQ ID NO: 296186
agaauaacuaauuuccugu

SEQ ID NO: 296188 - RNA, 19 nt, Artificial Sequence
  Description of Artificial Sequence: Synthetic oligonucleotide
  Sense strand starting at position 20 of SEQ ID NO: 3807
ggaaauuaguuauucuguc

SEQ ID NO: 296189 - RNA, 19 nt, Artificial Sequence
  Description of Artificial Sequence: Synthetic oligonucleotide
  Antisense strand to SEQ ID NO: 296188
gacagaauaacuaauuucc

SEQ ID NO: 296190 - RNA, 19 nt, Artificial Sequence
  Description of Artificial Sequence: Synthetic oligonucleotide
  Sense strand starting at position 297 of SEQ ID NO: 3807
acuauauaugcauguauac

SEQ ID NO: 296191 - RNA, 19 nt, Artificial Sequence
  Description of Artificial Sequence: Synthetic oligonucleotide
  Antisense strand to SEQ ID NO: 296190
guauacaugcauauauagu

SEQ ID NO: 296192 - RNA, 19 nt, Artificial Sequence
  Description of Artificial Sequence: Synthetic oligonucleotide
  Sense strand starting at position 584 of SEQ ID NO: 3807
auaggaauuucugaaugua

SEQ ID NO: 296193 - RNA, 19 nt, Artificial Sequence
  Description of Artificial Sequence: Synthetic oligonucleotide
  Antisense strand to SEQ ID NO: 296192
uacauucagaaauuccuau

SEQ ID NO: 296194 - RNA, 19 nt, Artificial Sequence
  Description of Artificial Sequence: Synthetic oligonucleotide
  Sense strand starting at position 592 of SEQ ID NO: 3807
uucugaauguaguuaagua

SEQ ID NO: 296195 - RNA, 19 nt, Artificial Sequence
  Description of Artificial Sequence: Synthetic oligonucleotide
  Antisense strand to SEQ ID NO: 296194
uacuuaacuacauucagaa

SEQ ID NO: 296196 - RNA, 19 nt, Artificial Sequence
  Description of Artificial Sequence: Synthetic oligonucleotide
  Sense strand starting at position 732 of SEQ ID NO: 3807
cccagaucuguuuaaugcu

SEQ ID NO: 296197 - RNA, 19 nt, Artificial Sequence
  Description of Artificial Sequence: Synthetic oligonucleotide
  Antisense strand to SEQ ID NO: 296196
agcauuaaacagaucuggg

SEQ ID NO: 296198 - RNA, 19 nt, Artificial Sequence
  Description of Artificial Sequence: Synthetic oligonucleotide
  Sense strand starting at position 746 of SEQ ID NO: 3807
augcucucugagugauaac

SEQ ID NO: 296199 - RNA, 19 nt, Artificial Sequence
  Description of Artificial Sequence: Synthetic oligonucleotide
  Antisense strand to SEQ ID NO: 296198
guuaucacucagagagcau

SEQ ID NO: 296200 - RNA, 19 nt, Artificial Sequence
  Description of Artificial Sequence: Synthetic oligonucleotide
  Sense strand starting at position 765 of SEQ ID NO: 3807
aggauuuacugcuauacac

SEQ ID NO: 296201 - RNA, 19 nt, Artificial Sequence
  Description of Artificial Sequence: Synthetic oligonucleotide
  Antisense strand to SEQ ID NO: 296200
guguauagcaguaaauccu

SEQ ID NO: 296202 - RNA, 19 nt, Artificial Sequence
  Description of Artificial Sequence: Synthetic oligonucleotide
  Sense strand starting at position 801 of SEQ ID NO: 3807
gcuaaaucuuaggcaaauu

SEQ ID NO: 296203 - RNA, 19 nt, Artificial Sequence
  Description of Artificial Sequence: Synthetic oligonucleotide
  Antisense strand to SEQ ID NO: 296202
aauuugccuaagauuuagc

SEQ ID NO: 296204 - RNA, 19 nt, Artificial Sequence
  Description of Artificial Sequence: Synthetic oligonucleotide
  Sense strand starting at position 812 of SEQ ID NO: 3807
ggcaaauuugugggcaguu

SEQ ID NO: 296205 - RNA, 19 nt, Artificial Sequence
  Description of Artificial Sequence: Synthetic oligonucleotide
  Antisense strand to SEQ ID NO: 296204
aacugcccacaaauuugcc

SEQ ID NO: 296206 - RNA, 19 nt, Artificial Sequence
  Description of Artificial Sequence: Synthetic oligonucleotide
  Sense strand starting at position 1017 of SEQ ID NO: 3807
agauaugugcuuuaacuag

SEQ ID NO: 296207 - RNA, 19 nt, Artificial Sequence
  Description of Artificial Sequence: Synthetic oligonucleotide
  Antisense strand to SEQ ID NO: 296206
cuaguuaaagcacauaucu

SEQ ID NO: 296208 - RNA, 19 nt, Artificial Sequence
  Description of Artificial Sequence: Synthetic oligonucleotide
  Sense strand starting at position 1024 of SEQ ID NO: 3807
ugcuuuaacuagucagaca

SEQ ID NO: 296209 - RNA, 19 nt, Artificial Sequence
  Description of Artificial Sequence: Synthetic oligonucleotide
  Antisense strand to SEQ ID NO: 296208
ugucugacuaguuaaagca

SEQ ID NO: 296210 - RNA, 19 nt, Artificial Sequence
  Description of Artificial Sequence: Synthetic oligonucleotide
  Sense strand starting at position 1032 of SEQ ID NO: 3807
cuagucagacauuguuuaa

SEQ ID NO: 296211 - RNA, 19 nt, Artificial Sequence
  Description of Artificial Sequence: Synthetic oligonucleotide
  Antisense strand to SEQ ID NO: 296210
uuaaacaaugucugacuag

SEQ ID NO: 296212 - RNA, 19 nt, Artificial Sequence
  Description of Artificial Sequence: Synthetic oligonucleotide
  Sense strand starting at position 1123 of SEQ ID NO: 3807
agaucaugugaacgcuaua

SEQ ID NO: 296213 - RNA, 19 nt, Artificial Sequence
  Description of Artificial Sequence: Synthetic oligonucleotide
  Antisense strand to SEQ ID NO: 296212
uauagcguucacaugaucu

SEQ ID NO: 296214 - RNA, 19 nt, Artificial Sequence
  Description of Artificial Sequence: Synthetic oligonucleotide
  Sense strand starting at position 1126 of SEQ ID NO: 3807
ucaugugaacgcuauaauu

SEQ ID NO: 296215 - RNA, 19 nt, Artificial Sequence
  Description of Artificial Sequence: Synthetic oligonucleotide
  Antisense strand to SEQ ID NO: 296214
aauuauagcguucacauga

SEQ ID NO: 296216 - RNA, 19 nt, Artificial Sequence
  Description of Artificial Sequence: Synthetic oligonucleotide
  Sense strand starting at position 1128 of SEQ ID NO: 3807
augugaacgcuauaauuaa

SEQ ID NO: 296217 - RNA, 19 nt, Artificial Sequence
  Description of Artificial Sequence: Synthetic oligonucleotide
  Antisense strand to SEQ ID NO: 296216
uuaauuauagcguucacau

SEQ ID NO: 296218 - RNA, 19 nt, Artificial Sequence
  Description of Artificial Sequence: Synthetic oligonucleotide
  Sense strand starting at position 1978 of SEQ ID NO: 3807
ggaugagucauccgagggu

SEQ ID NO: 296219 - RNA, 19 nt, Artificial Sequence
  Description of Artificial Sequence: Synthetic oligonucleotide
  Antisense strand to SEQ ID NO: 296218
acccucggaugacucaucc

SEQ ID NO: 296220 - RNA, 19 nt, Artificial Sequence
  Description of Artificial Sequence: Synthetic oligonucleotide
  Sense strand starting at position 2125 of SEQ ID NO: 3807
guaaguuaugauuaccaau

SEQ ID NO: 296221 - RNA, 19 nt, Artificial Sequence
  Description of Artificial Sequence: Synthetic oligonucleotide
  Antisense strand to SEQ ID NO: 296220
auugguaaucauaacuuac

SEQ ID NO: 296222 - RNA, 19 nt, Artificial Sequence
  Description of Artificial Sequence: Synthetic oligonucleotide
  Sense strand starting at position 2283 of SEQ ID NO: 3807
ggaucccucucuuuaaagu

SEQ ID NO: 296223 - RNA, 19 nt, Artificial Sequence
  Description of Artificial Sequence: Synthetic oligonucleotide
  Antisense strand to SEQ ID NO: 296222
acuuuaaagagagggaucc

SEQ ID NO: 296224 - RNA, 19 nt, Artificial Sequence
  Description of Artificial Sequence: Synthetic oligonucleotide
  Sense strand starting at position 2457 of SEQ ID NO: 3807
uuuagagaggcauguugaa

SEQ ID NO: 296225 - RNA, 19 nt, Artificial Sequence
  Description of Artificial Sequence: Synthetic oligonucleotide
  Antisense strand to SEQ ID NO: 296224
uucaacaugccucucuaaa

SEQ ID NO: 296226 - RNA, 19 nt, Artificial Sequence
  Description of Artificial Sequence: Synthetic oligonucleotide
  Sense strand starting at position 2550 of SEQ ID NO: 3807
gguaaagaaauguggcaaa

SEQ ID NO: 296227 - RNA, 19 nt, Artificial Sequence
  Description of Artificial Sequence: Synthetic oligonucleotide
  Antisense strand to SEQ ID NO: 296226
uuugccacauuucuuuacc

SEQ ID NO: 296228 - RNA, 19 nt, Artificial Sequence
  Description of Artificial Sequence: Synthetic oligonucleotide
  Sense strand starting at position 2572 of SEQ ID NO: 3807
uugauaaaugguugcaucu

SEQ ID NO: 296229 - RNA, 19 nt, Artificial Sequence
  Description of Artificial Sequence: Synthetic oligonucleotide
  Antisense strand to SEQ ID NO: 296228
agaugcaaccauuuaucaa

SEQ ID NO: 296230 - RNA, 19 nt, Artificial Sequence
  Description of Artificial Sequence: Synthetic oligonucleotide
  Sense strand starting at position 2731 of SEQ ID NO: 3807
uuucuaguuagguauagag

SEQ ID NO: 296231 - RNA, 19 nt, Artificial Sequence
  Description of Artificial Sequence: Synthetic oligonucleotide
  Antisense strand to SEQ ID NO: 296230
cucuauaccuaacuagaaa

SEQ ID NO: 296232 - RNA, 19 nt, Artificial Sequence
  Description of Artificial Sequence: Synthetic oligonucleotide
  Sense strand starting at position 2769 of SEQ ID NO: 3807
gggagcugaacuugaaguu

SEQ ID NO: 296233 - RNA, 19 nt, Artificial Sequence
  Description of Artificial Sequence: Synthetic oligonucleotide
  Antisense strand to SEQ ID NO: 296232
aacuucaaguucagcuccc

SEQ ID NO: 296234 - RNA, 19 nt, Artificial Sequence
  Description of Artificial Sequence: Synthetic oligonucleotide
  Sense strand starting at position 2799 of SEQ ID NO: 3807
ccagcugggagguaugaua

SEQ ID NO: 296235 - RNA, 19 nt, Artificial Sequence
  Description of Artificial Sequence: Synthetic oligonucleotide
  Antisense strand to SEQ ID NO: 296234
uaucauaccucccagcugg

SEQ ID NO: 296236 - RNA, 19 nt, Artificial Sequence
  Description of Artificial Sequence: Synthetic oligonucleotide
  Sense strand starting at position 2831 of SEQ ID NO: 3807
gcuguugugaguguugcau

SEQ ID NO: 296237 - RNA, 19 nt, Artificial Sequence
  Description of Artificial Sequence: Synthetic oligonucleotide
  Antisense strand to SEQ ID NO: 296236
augcaacacucacaacagc

SEQ ID NO: 296238 - RNA, 19 nt, Artificial Sequence
  Description of Artificial Sequence: Synthetic oligonucleotide
  Sense strand starting at position 2910 of SEQ ID NO: 3807
uuaugcauucucugaggac

SEQ ID NO: 296239 - RNA, 19 nt, Artificial Sequence
  Description of Artificial Sequence: Synthetic oligonucleotide
  Antisense strand to SEQ ID NO: 296238
guccucagagaaugcauaa

SEQ ID NO: 296240 - RNA, 19 nt, Artificial Sequence
  Description of Artificial Sequence: Synthetic oligonucleotide
  Sense strand starting at position 2950 of SEQ ID NO: 3807
caguguuaacguuaugaag

SEQ ID NO: 296241 - RNA, 19 nt, Artificial Sequence
  Description of Artificial Sequence: Synthetic oligonucleotide
  Antisense strand to SEQ ID NO: 296240
cuucauaacguuaacacug

SEQ ID NO: 296242 - RNA, 19 nt, Artificial Sequence
  Description of Artificial Sequence: Synthetic oligonucleotide
  Sense strand starting at position 3005 of SEQ ID NO: 3807
ggaaaugcuccaugagagg

SEQ ID NO: 296243 - RNA, 19 nt, Artificial Sequence
  Description of Artificial Sequence: Synthetic oligonucleotide
  Antisense strand to SEQ ID NO: 296242
ccucucauggagcauuucc

SEQ ID NO: 296244 - RNA, 19 nt, Artificial Sequence
  Description of Artificial Sequence: Synthetic oligonucleotide
  Sense strand starting at position 3020 of SEQ ID NO: 3807
gagguuauguaagucacau

SEQ ID NO: 296245 - RNA, 19 nt, Artificial Sequence
  Description of Artificial Sequence: Synthetic oligonucleotide
  Antisense strand to SEQ ID NO: 296244
augugacuuacauaaccuc

SEQ ID NO: 296246 - RNA, 19 nt, Artificial Sequence
  Description of Artificial Sequence: Synthetic oligonucleotide
  Sense strand starting at position 3086 of SEQ ID NO: 3807
uugcuugacucacuuaaug

SEQ ID NO: 296247 - RNA, 19 nt, Artificial Sequence
  Description of Artificial Sequence: Synthetic oligonucleotide
  Antisense strand to SEQ ID NO: 296246
cauuaagugagucaagcaa

SEQ ID NO: 296248 - RNA, 19 nt, Artificial Sequence
  Description of Artificial Sequence: Synthetic oligonucleotide
  Sense strand starting at position 3107 of SEQ ID NO: 3807
caaauugggugucuuaaac

SEQ ID NO: 296249 - RNA, 19 nt, Artificial Sequence
  Description of Artificial Sequence: Synthetic oligonucleotide
  Antisense strand to SEQ ID NO: 296248
guuuaagacacccaauuug

SEQ ID NO: 296250 - RNA, 19 nt, Artificial Sequence
  Description of Artificial Sequence: Synthetic oligonucleotide
  Sense strand starting at position 3387 of SEQ ID NO: 3807
gcaaacagcugacucuaau

SEQ ID NO: 296251 - RNA, 19 nt, Artificial Sequence
  Description of Artificial Sequence: Synthetic oligonucleotide
  Antisense strand to SEQ ID NO: 296250
auuagagucagcuguuugc

SEQ ID NO: 296252 - RNA, 19 nt, Artificial Sequence
  Description of Artificial Sequence: Synthetic oligonucleotide
  Sense strand starting at position 3407 of SEQ ID NO: 3807
cuuaaaggacccugucuaa

SEQ ID NO: 296253 - RNA, 19 nt, Artificial Sequence
  Description of Artificial Sequence: Synthetic oligonucleotide
  Antisense strand to SEQ ID NO: 296252
uuagacaggguccuuuaag

SEQ ID NO: 296254 - RNA, 19 nt, Artificial Sequence
  Description of Artificial Sequence: Synthetic oligonucleotide
  Sense strand starting at position 3441 of SEQ ID NO: 3807
gcuccaaaugguugggaca

SEQ ID NO: 296255 - RNA, 19 nt, Artificial Sequence
  Description of Artificial Sequence: Synthetic oligonucleotide
  Antisense strand to SEQ ID NO: 296254
ugucccaaccauuuggagc

SEQ ID NO: 296256 - RNA, 19 nt, Artificial Sequence
  Description of Artificial Sequence: Synthetic oligonucleotide
  Sense strand starting at position 3498 of SEQ ID NO: 3807
acugauuaggauugugcau

SEQ ID NO: 296257 - RNA, 19 nt, Artificial Sequence
  Description of Artificial Sequence: Synthetic oligonucleotide
  Antisense strand to SEQ ID NO: 296256
augcacaauccuaaucagu

SEQ ID NO: 296258 - RNA, 19 nt, Artificial Sequence
  Description of Artificial Sequence: Synthetic oligonucleotide
  Sense strand starting at position 3683 of SEQ ID NO: 3807
cuuguagucuaauuugagu

SEQ ID NO: 296259 - RNA, 19 nt, Artificial Sequence
  Description of Artificial Sequence: Synthetic oligonucleotide
  Antisense strand to SEQ ID NO: 296258
acucaaauuagacuacaag

SEQ ID NO: 296260 - RNA, 19 nt, Artificial Sequence
  Description of Artificial Sequence: Synthetic oligonucleotide
  Sense strand starting at position 3685 of SEQ ID NO: 3807
uguagucuaauuugaguuu

SEQ ID NO: 296261 - RNA, 19 nt, Artificial Sequence
  Description of Artificial Sequence: Synthetic oligonucleotide
  Antisense strand to SEQ ID NO: 296260
aaacucaaauuagacuaca

SEQ ID NO: 296262 - RNA, 19 nt, Artificial Sequence
  Description of Artificial Sequence: Synthetic oligonucleotide
  Sense strand starting at position 3792 of SEQ ID NO: 3807
auaauaaugugugcacaca

SEQ ID NO: 296263 - RNA, 19 nt, Artificial Sequence
  Description of Artificial Sequence: Synthetic oligonucleotide
  Antisense strand to SEQ ID NO: 296262
ugugugcacacauuauuau

SEQ ID NO: 296264 - RNA, 19 nt, Artificial Sequence
  Description of Artificial Sequence: Synthetic oligonucleotide
  Sense strand starting at position 264 of SEQ ID NO: 3808
gaugcaggcuccggauuua

SEQ ID NO: 296265 - RNA, 19 nt, Artificial Sequence
  Description of Artificial Sequence: Synthetic oligonucleotide
  Antisense strand to SEQ ID NO: 296264
uaaauccggagccugcauc

SEQ ID NO: 296266 - RNA, 19 nt, Artificial Sequence
  Description of Artificial Sequence: Synthetic oligonucleotide
  Sense strand starting at position 306 of SEQ ID NO: 3808
gggauaucaugugacaaua

SEQ ID NO: 296267 - RNA, 19 nt, Artificial Sequence
  Description of Artificial Sequence: Synthetic oligonucleotide
  Antisense strand to SEQ ID NO: 296266
uauugucacaugauauccc

SEQ ID NO: 296268 - RNA, 19 nt, Artificial Sequence
  Description of Artificial Sequence: Synthetic oligonucleotide
  Sense strand starting at position 1047 of SEQ ID NO: 3808
ucacaaagucacugugcaa

SEQ ID NO: 296269 - RNA, 19 nt, Artificial Sequence
  Description of Artificial Sequence: Synthetic oligonucleotide
  Antisense strand to SEQ ID NO: 296268
uugcacagugacuuuguga

SEQ ID NO: 296270 - RNA, 19 nt, Artificial Sequence
  Description of Artificial Sequence: Synthetic oligonucleotide
  Sense strand starting at position 1112 of SEQ ID NO: 3808
gcucuagccgccgaggauu

SEQ ID NO: 296271 - RNA, 19 nt, Artificial Sequence
  Description of Artificial Sequence: Synthetic oligonucleotide
  Antisense strand to SEQ ID NO: 296270
aauccucggcggcuagagc

SEQ ID NO: 296272 - RNA, 19 nt, Artificial Sequence
  Description of Artificial Sequence: Synthetic oligonucleotide
  Sense strand starting at position 1144 of SEQ ID NO: 3808
agcuguaaguccuccgaga

SEQ ID NO: 296273 - RNA, 19 nt, Artificial Sequence
  Description of Artificial Sequence: Synthetic oligonucleotide
  Antisense strand to SEQ ID NO: 296272
ucucggaggacuuacagcu

SEQ ID NO: 296274 - RNA, 19 nt, Artificial Sequence
  Description of Artificial Sequence: Synthetic oligonucleotide
  Sense strand starting at position 1446 of SEQ ID NO: 3808
ggguguguuucuucgguca

SEQ ID NO: 296275 - RNA, 19 nt, Artificial Sequence
  Description of Artificial Sequence: Synthetic oligonucleotide
  Antisense strand to SEQ ID NO: 296274
ugaccgaagaaacacaccc

SEQ ID NO: 296276 - RNA, 19 nt, Artificial Sequence
  Description of Artificial Sequence: Synthetic oligonucleotide
  Sense strand starting at position 1448 of SEQ ID NO: 3808
guguguuucuucggucauu

SEQ ID NO: 296277 - RNA, 19 nt, Artificial Sequence
  Description of Artificial Sequence: Synthetic oligonucleotide
  Antisense strand to SEQ ID NO: 296276
aaugaccgaagaaacacac

SEQ ID NO: 296278 - RNA, 19 nt, Artificial Sequence
  Description of Artificial Sequence: Synthetic oligonucleotide
  Sense strand starting at position 1449 of SEQ ID NO: 3808
uguguuucuucggucauuu

SEQ ID NO: 296279 - RNA, 19 nt, Artificial Sequence
  Description of Artificial Sequence: Synthetic oligonucleotide
  Antisense strand to SEQ ID NO: 296278
aaaugaccgaagaaacaca

SEQ ID NO: 296280 - RNA, 19 nt, Artificial Sequence
  Description of Artificial Sequence: Synthetic oligonucleotide
  Sense strand starting at position 1969 of SEQ ID NO: 3808
ucucgacuccaccgauuua

SEQ ID NO: 296281 - RNA, 19 nt, Artificial Sequence
  Description of Artificial Sequence: Synthetic oligonucleotide
  Antisense strand to SEQ ID NO: 296280
uaaaucgguggagucgaga

SEQ ID NO: 296282 - RNA, 19 nt, Artificial Sequence
  Description of Artificial Sequence: Synthetic oligonucleotide
  Sense strand starting at position 2239 of SEQ ID NO: 3808
uccgaauccuccuugauua

SEQ ID NO: 296283 - RNA, 19 nt, Artificial Sequence
  Description of Artificial Sequence: Synthetic oligonucleotide
  Antisense strand to SEQ ID NO: 296282
uaaucaaggaggauucgga

SEQ ID NO: 296284 - RNA, 19 nt, Artificial Sequence
  Description of Artificial Sequence: Synthetic oligonucleotide
  Sense strand starting at position 2240 of SEQ ID NO: 3808
ccgaauccuccuugauuag

SEQ ID NO: 296285 - RNA, 19 nt, Artificial Sequence
  Description of Artificial Sequence: Synthetic oligonucleotide
  Antisense strand to SEQ ID NO: 296284
cuaaucaaggaggauucgg

SEQ ID NO: 296286 - RNA, 19 nt, Artificial Sequence
  Description of Artificial Sequence: Synthetic oligonucleotide
  Sense strand starting at position 2304 of SEQ ID NO: 3808
ggaggacucguacacaucu

SEQ ID NO: 296287 - RNA, 19 nt, Artificial Sequence
  Description of Artificial Sequence: Synthetic oligonucleotide
  Antisense strand to SEQ ID NO: 296286
agauguguacgaguccucc

SEQ ID NO: 296288 - RNA, 19 nt, Artificial Sequence
  Description of Artificial Sequence: Synthetic oligonucleotide
  Sense strand starting at position 2548 of SEQ ID NO: 3808
guucgacuuugccaagguu

SEQ ID NO: 296289 - RNA, 19 nt, Artificial Sequence
  Description of Artificial Sequence: Synthetic oligonucleotide
  Antisense strand to SEQ ID NO: 296288
aaccuuggcaaagucgaac

SEQ ID NO: 296290 - RNA, 19 nt, Artificial Sequence
  Description of Artificial Sequence: Synthetic oligonucleotide
  Sense strand starting at position 2591 of SEQ ID NO: 3808
ucacgugaaucuugugauu

SEQ ID NO: 296291 - RNA, 19 nt, Artificial Sequence
  Description of Artificial Sequence: Synthetic oligonucleotide
  Antisense strand to SEQ ID NO: 296290
aaucacaagauucacguga

SEQ ID NO: 296292 - RNA, 19 nt, Artificial Sequence
  Description of Artificial Sequence: Synthetic oligonucleotide
  Sense strand starting at position 3001 of SEQ ID NO: 3808
cccagaaacguuugcauuu

SEQ ID NO: 296293 - RNA, 19 nt, Artificial Sequence
  Description of Artificial Sequence: Synthetic oligonucleotide
  Antisense strand to SEQ ID NO: 296292
aaaugcaaacguuucuggg

SEQ ID NO: 296294 - RNA, 19 nt, Artificial Sequence
  Description of Artificial Sequence: Synthetic oligonucleotide
  Sense strand starting at position 3008 of SEQ ID NO: 3808
acguuugcauuuccguaga

SEQ ID NO: 296295 - RNA, 19 nt, Artificial Sequence
  Description of Artificial Sequence: Synthetic oligonucleotide
  Antisense strand to SEQ ID NO: 296294
ucuacggaaaugcaaacgu

SEQ ID NO: 296296 - RNA, 19 nt, Artificial Sequence
  Description of Artificial Sequence: Synthetic oligonucleotide
  Sense strand starting at position 3010 of SEQ ID NO: 3808
guuugcauuuccguagaaa

SEQ ID NO: 296297 - RNA, 19 nt, Artificial Sequence
  Description of Artificial Sequence: Synthetic oligonucleotide
  Antisense strand to SEQ ID NO: 296296
uuucuacggaaaugcaaac

SEQ ID NO: 296298 - RNA, 19 nt, Artificial Sequence
  Description of Artificial Sequence: Synthetic oligonucleotide
  Sense strand starting at position 3021 of SEQ ID NO: 3808
cguagaaauuauggaauuu

SEQ ID NO: 296299 - RNA, 19 nt, Artificial Sequence
  Description of Artificial Sequence: Synthetic oligonucleotide
  Antisense strand to SEQ ID NO: 296298
aaauuccauaauuucuacg

SEQ ID NO: 296300 - RNA, 19 nt, Artificial Sequence
  Description of Artificial Sequence: Synthetic oligonucleotide
  Sense strand starting at position 3030 of SEQ ID NO: 3808
uauggaauuucucgcguua

SEQ ID NO: 296301 - RNA, 19 nt, Artificial Sequence
  Description of Artificial Sequence: Synthetic oligonucleotide
  Antisense strand to SEQ ID NO: 296300
uaacgcgagaaauuccaua

SEQ ID NO: 296302 - RNA, 19 nt, Artificial Sequence
  Description of Artificial Sequence: Synthetic oligonucleotide
  Sense strand starting at position 3032 of SEQ ID NO: 3808
uggaauuucucgcguuaag

SEQ ID NO: 296303 - RNA, 19 nt, Artificial Sequence
  Description of Artificial Sequence: Synthetic oligonucleotide
  Antisense strand to SEQ ID NO: 296302
cuuaacgcgagaaauucca

SEQ ID NO: 296304 - RNA, 19 nt, Artificial Sequence
  Description of Artificial Sequence: Synthetic oligonucleotide
  Sense strand starting at position 3443 of SEQ ID NO: 3808
cuugaauguccaugggaca

SEQ ID NO: 296305 - RNA, 19 nt, Artificial Sequence
  Description of Artificial Sequence: Synthetic oligonucleotide
  Antisense strand to SEQ ID NO: 296304
ugucccauggacauucaag

SEQ ID NO: 296306 - RNA, 19 nt, Artificial Sequence
  Description of Artificial Sequence: Synthetic oligonucleotide
  Sense strand starting at position 3444 of SEQ ID NO: 3808
uugaauguccaugggacaa

SEQ ID NO: 296307 - RNA, 19 nt, Artificial Sequence
  Description of Artificial Sequence: Synthetic oligonucleotide
  Antisense strand to SEQ ID NO: 296306
uugucccauggacauucaa

SEQ ID NO: 296308 - RNA, 19 nt, Artificial Sequence
  Description of Artificial Sequence: Synthetic oligonucleotide
  Sense strand starting at position 3465 of SEQ ID NO: 3808
cagauacgauguuaacuaa

SEQ ID NO: 296309 - RNA, 19 nt, Artificial Sequence
  Description of Artificial Sequence: Synthetic oligonucleotide
  Antisense strand to SEQ ID NO: 296308
uuaguuaacaucguaucug

SEQ ID NO: 296310 - RNA, 19 nt, Artificial Sequence
  Description of Artificial Sequence: Synthetic oligonucleotide
  Sense strand starting at position 3495 of SEQ ID NO: 3808
ugaacagguuaagagauua

SEQ ID NO: 296311 - RNA, 19 nt, Artificial Sequence
  Description of Artificial Sequence: Synthetic oligonucleotide
  Antisense strand to SEQ ID NO: 296310
uaaucucuuaaccuguuca

SEQ ID NO: 296312 - RNA, 19 nt, Artificial Sequence
  Description of Artificial Sequence: Synthetic oligonucleotide
  Sense strand starting at position 3745 of SEQ ID NO: 3808
gcugcaguguaccgagauu

SEQ ID NO: 296313 - RNA, 19 nt, Artificial Sequence
  Description of Artificial Sequence: Synthetic oligonucleotide
  Antisense strand to SEQ ID NO: 296312
aaucucgguacacugcagc

SEQ ID NO: 296314 - RNA, 19 nt, Artificial Sequence
  Description of Artificial Sequence: Synthetic oligonucleotide
  Sense strand starting at position 3891 of SEQ ID NO: 3808
caccuugagucagggauaa

SEQ ID NO: 296315 - RNA, 19 nt, Artificial Sequence
  Description of Artificial Sequence: Synthetic oligonucleotide
  Antisense strand to SEQ ID NO: 296314
uuaucccugacucaaggug

SEQ ID NO: 296316 - RNA, 19 nt, Artificial Sequence
  Description of Artificial Sequence: Synthetic oligonucleotide
  Sense strand starting at position 3901 of SEQ ID NO: 3808
cagggauaaacuggugguu

SEQ ID NO: 296317 - RNA, 19 nt, Artificial Sequence
  Description of Artificial Sequence: Synthetic oligonucleotide
  Antisense strand to SEQ ID NO: 296316
aaccaccaguuuaucccug

SEQ ID NO: 296318 - RNA, 19 nt, Artificial Sequence
  Description of Artificial Sequence: Synthetic oligonucleotide
  Sense strand starting at position 3903 of SEQ ID NO: 3808
gggauaaacuggugguuua

SEQ ID NO: 296319 - RNA, 19 nt, Artificial Sequence
  Description of Artificial Sequence: Synthetic oligonucleotide
  Antisense strand to SEQ ID NO: 296318
uaaaccaccaguuuauccc

SEQ ID NO: 296320 - RNA, 19 nt, Artificial Sequence
  Description of Artificial Sequence: Synthetic oligonucleotide
  Sense strand starting at position 3913 of SEQ ID NO: 3808
ggugguuuacuccaggcuu

SEQ ID NO: 296321 - RNA, 19 nt, Artificial Sequence
  Description of Artificial Sequence: Synthetic oligonucleotide
  Antisense strand to SEQ ID NO: 296320
aagccuggaguaaaccacc

SEQ ID NO: 296322 - RNA, 19 nt, Artificial Sequence
  Description of Artificial Sequence: Synthetic oligonucleotide
  Sense strand starting at position 3926 of SEQ ID NO: 3808
aggcuuugugcuuaucaca

SEQ ID NO: 296323 - RNA, 19 nt, Artificial Sequence
  Description of Artificial Sequence: Synthetic oligonucleotide
  Antisense strand to SEQ ID NO: 296322
ugugauaagcacaaagccu

SEQ ID NO: 296324 - RNA, 19 nt, Artificial Sequence
  Description of Artificial Sequence: Synthetic oligonucleotide
  Sense strand starting at position 3943 of SEQ ID NO: 3808
cagccaugaucucuguaga

SEQ ID NO: 296325 - RNA, 19 nt, Artificial Sequence
  Description of Artificial Sequence: Synthetic oligonucleotide
  Antisense strand to SEQ ID NO: 296324
ucuacagagaucauggcug

SEQ ID NO: 296326 - RNA, 19 nt, Artificial Sequence
  Description of Artificial Sequence: Synthetic oligonucleotide
  Sense strand starting at position 3944 of SEQ ID NO: 3808
agccaugaucucuguagac

SEQ ID NO: 296327 - RNA, 19 nt, Artificial Sequence
  Description of Artificial Sequence: Synthetic oligonucleotide
  Antisense strand to SEQ ID NO: 296326
gucuacagagaucauggcu

SEQ ID NO: 296328 - RNA, 19 nt, Artificial Sequence
  Description of Artificial Sequence: Synthetic oligonucleotide
  Sense strand starting at position 3946 of SEQ ID NO: 3808
ccaugaucucuguagacau

SEQ ID NO: 296329 - RNA, 19 nt, Artificial Sequence
  Description of Artificial Sequence: Synthetic oligonucleotide
  Antisense strand to SEQ ID NO: 296328
augucuacagagaucaugg

SEQ ID NO: 296330 - RNA, 19 nt, Artificial Sequence
  Description of Artificial Sequence: Synthetic oligonucleotide
  Sense strand starting at position 3969 of SEQ ID NO: 3808
uaggguucacgcuggugau

SEQ ID NO: 296331 - RNA, 19 nt, Artificial Sequence
  Description of Artificial Sequence: Synthetic oligonucleotide
  Antisense strand to SEQ ID NO: 296330
aucaccagcgugaacccua

SEQ ID NO: 296332 - RNA, 19 nt, Artificial Sequence
  Description of Artificial Sequence: Synthetic oligonucleotide
  Sense strand starting at position 61 of SEQ ID NO: 3809
auaaaugucuuagugacau

SEQ ID NO: 296333 - RNA, 19 nt, Artificial Sequence
  Description of Artificial Sequence: Synthetic oligonucleotide
  Antisense strand to SEQ ID NO: 296332
augucacuaagacauuuau

SEQ ID NO: 296334 - RNA, 19 nt, Artificial Sequence
  Description of Artificial Sequence: Synthetic oligonucleotide
  Sense strand starting at position 178 of SEQ ID NO: 3809
cacaguugugaagguccaa

SEQ ID NO: 296335 - RNA, 19 nt, Artificial Sequence
  Description of Artificial Sequence: Synthetic oligonucleotide
  Antisense strand to SEQ ID NO: 296334
uuggaccuucacaacugug

SEQ ID NO: 296336 - RNA, 19 nt, Artificial Sequence
  Description of Artificial Sequence: Synthetic oligonucleotide
  Sense strand starting at position 240 of SEQ ID NO: 3809
cuggguugugguuacagau

SEQ ID NO: 296337 - RNA, 19 nt, Artificial Sequence
  Description of Artificial Sequence: Synthetic oligonucleotide
  Antisense strand to SEQ ID NO: 296336
aucuguaaccacaacccag

SEQ ID NO: 296338 - RNA, 19 nt, Artificial Sequence
  Description of Artificial Sequence: Synthetic oligonucleotide
  Sense strand starting at position 1569 of SEQ ID NO: 3809
gcaucauccgaguaccaau

SEQ ID NO: 296339 - RNA, 19 nt, Artificial Sequence
  Description of Artificial Sequence: Synthetic oligonucleotide
  Antisense strand to SEQ ID NO: 296338
auugguacucggaugaugc

SEQ ID NO: 296340 - RNA, 19 nt, Artificial Sequence
  Description of Artificial Sequence: Synthetic oligonucleotide
  Sense strand starting at position 2474 of SEQ ID NO: 3809
auucgauuaucgccaugga

SEQ ID NO: 296341 - RNA, 19 nt, Artificial Sequence
  Description of Artificial Sequence: Synthetic oligonucleotide
  Antisense strand to SEQ ID NO: 296340
uccauggcgauaaucgaau

SEQ ID NO: 296342 - RNA, 19 nt, Artificial Sequence
  Description of Artificial Sequence: Synthetic oligonucleotide
  Sense strand starting at position 2475 of SEQ ID NO: 3809
uucgauuaucgccauggaa

SEQ ID NO: 296343 - RNA, 19 nt, Artificial Sequence
  Description of Artificial Sequence: Synthetic oligonucleotide
  Antisense strand to SEQ ID NO: 296342
uuccauggcgauaaucgaa

SEQ ID NO: 296344 - RNA, 19 nt, Artificial Sequence
  Description of Artificial Sequence: Synthetic oligonucleotide
  Sense strand starting at position 2477 of SEQ ID NO: 3809
cgauuaucgccauggaaag

SEQ ID NO: 296345 - RNA, 19 nt, Artificial Sequence
  Description of Artificial Sequence: Synthetic oligonucleotide
  Antisense strand to SEQ ID NO: 296344
cuuuccauggcgauaaucg

SEQ ID NO: 296346 - RNA, 19 nt, Artificial Sequence
  Description of Artificial Sequence: Synthetic oligonucleotide
  Sense strand starting at position 2478 of SEQ ID NO: 3809
gauuaucgccauggaaaga

SEQ ID NO: 296347 - RNA, 19 nt, Artificial Sequence
  Description of Artificial Sequence: Synthetic oligonucleotide
  Antisense strand to SEQ ID NO: 296346
ucuuuccauggcgauaauc

SEQ ID NO: 296348 - RNA, 19 nt, Artificial Sequence
  Description of Artificial Sequence: Synthetic oligonucleotide
  Sense strand starting at position 2570 of SEQ ID NO: 3809
gaggguauuuagggagguu

SEQ ID NO: 296349 - RNA, 19 nt, Artificial Sequence
  Description of Artificial Sequence: Synthetic oligonucleotide
  Antisense strand to SEQ ID NO: 296348
aaccucccuaaauacccuc

SEQ ID NO: 296350 - RNA, 19 nt, Artificial Sequence
  Description of Artificial Sequence: Synthetic oligonucleotide
  Sense strand starting at position 2601 of SEQ ID NO: 3809
uugcuugguugguuugaga

SEQ ID NO: 296351 - RNA, 19 nt, Artificial Sequence
  Description of Artificial Sequence: Synthetic oligonucleotide
  Antisense strand to SEQ ID NO: 296350
ucucaaaccaaccaagcaa

SEQ ID NO: 296352 - RNA, 19 nt, Artificial Sequence
  Description of Artificial Sequence: Synthetic oligonucleotide
  Sense strand starting at position 2608 of SEQ ID NO: 3809
guugguuugagaugcaguu

SEQ ID NO: 296353 - RNA, 19 nt, Artificial Sequence
  Description of Artificial Sequence: Synthetic oligonucleotide
  Antisense strand to SEQ ID NO: 296352
aacugcaucucaaaccaac

SEQ ID NO: 296354 - RNA, 19 nt, Artificial Sequence
  Description of Artificial Sequence: Synthetic oligonucleotide
  Sense strand starting at position 2614 of SEQ ID NO: 3809
uugagaugcaguuggugau

SEQ ID NO: 296355 - RNA, 19 nt, Artificial Sequence
  Description of Artificial Sequence: Synthetic oligonucleotide
  Antisense strand to SEQ ID NO: 296354
aucaccaacugcaucucaa

SEQ ID NO: 296356 - RNA, 19 nt, Artificial Sequence
  Description of Artificial Sequence: Synthetic oligonucleotide
  Sense strand starting at position 2671 of SEQ ID NO: 3809
cgaccucuucgugggaaac

SEQ ID NO: 296357 - RNA, 19 nt, Artificial Sequence
  Description of Artificial Sequence: Synthetic oligonucleotide
  Antisense strand to SEQ ID NO: 296356
guuucccacgaagaggucg

SEQ ID NO: 296358 - RNA, 19 nt, Artificial Sequence
  Description of Artificial Sequence: Synthetic oligonucleotide
  Sense strand starting at position 2969 of SEQ ID NO: 3809
acuggacguuuccucaaau

SEQ ID NO: 296359 - RNA, 19 nt, Artificial Sequence
  Description of Artificial Sequence: Synthetic oligonucleotide
  Antisense strand to SEQ ID NO: 296358
auuugaggaaacguccagu

SEQ ID NO: 296360 - RNA, 19 nt, Artificial Sequence
  Description of Artificial Sequence: Synthetic oligonucleotide
  Sense strand starting at position 2970 of SEQ ID NO: 3809
cuggacguuuccucaaauu

SEQ ID NO: 296361 - RNA, 19 nt, Artificial Sequence
  Description of Artificial Sequence: Synthetic oligonucleotide
  Antisense strand to SEQ ID NO: 296360
aauuugaggaaacguccag

SEQ ID NO: 296362 - RNA, 19 nt, Artificial Sequence
  Description of Artificial Sequence: Synthetic oligonucleotide
  Sense strand starting at position 3039 of SEQ ID NO: 3809
cccucaggcuguguagaaa

SEQ ID NO: 296363 - RNA, 19 nt, Artificial Sequence
  Description of Artificial Sequence: Synthetic oligonucleotide
  Antisense strand to SEQ ID NO: 296362
uuucuacacagccugaggg

SEQ ID NO: 296364 - RNA, 19 nt, Artificial Sequence
  Description of Artificial Sequence: Synthetic oligonucleotide
  Sense strand starting at position 3051 of SEQ ID NO: 3809
guagaaauuccagaaccgu

SEQ ID NO: 296365 - RNA, 19 nt, Artificial Sequence
  Description of Artificial Sequence: Synthetic oligonucleotide
  Antisense strand to SEQ ID NO: 296364
acgguucuggaauuucuac

SEQ ID NO: 296366 - RNA, 19 nt, Artificial Sequence
  Description of Artificial Sequence: Synthetic oligonucleotide
  Sense strand starting at position 3113 of SEQ ID NO: 3809
uggaaacgcucuuuagaaa

SEQ ID NO: 296367 - RNA, 19 nt, Artificial Sequence
  Description of Artificial Sequence: Synthetic oligonucleotide
  Antisense strand to SEQ ID NO: 296366
uuucuaaagagcguuucca

SEQ ID NO: 296368 - RNA, 19 nt, Artificial Sequence
  Description of Artificial Sequence: Synthetic oligonucleotide
  Sense strand starting at position 3154 of SEQ ID NO: 3809
ucuccuuguucuguaaagu

SEQ ID NO: 296369 - RNA, 19 nt, Artificial Sequence
  Description of Artificial Sequence: Synthetic oligonucleotide
  Antisense strand to SEQ ID NO: 296368
acuuuacagaacaaggaga

SEQ ID NO: 296370 - RNA, 19 nt, Artificial Sequence
  Description of Artificial Sequence: Synthetic oligonucleotide
  Sense strand starting at position 3155 of SEQ ID NO: 3809
cuccuuguucuguaaagug

SEQ ID NO: 296371 - RNA, 19 nt, Artificial Sequence
  Description of Artificial Sequence: Synthetic oligonucleotide
  Antisense strand to SEQ ID NO: 296370
cacuuuacagaacaaggag

SEQ ID NO: 296372 - RNA, 19 nt, Artificial Sequence
  Description of Artificial Sequence: Synthetic oligonucleotide
  Sense strand starting at position 3254 of SEQ ID NO: 3809
accugaucaccuggauuaa

SEQ ID NO: 296373 - RNA, 19 nt, Artificial Sequence
  Description of Artificial Sequence: Synthetic oligonucleotide
  Antisense strand to SEQ ID NO: 296372
uuaauccaggugaucaggu

SEQ ID NO: 296374 - RNA, 19 nt, Artificial Sequence
  Description of Artificial Sequence: Synthetic oligonucleotide
  Sense strand starting at position 3294 of SEQ ID NO: 3809
agccaaguaguuuguauca

SEQ ID NO: 296375 - RNA, 19 nt, Artificial Sequence
  Description of Artificial Sequence: Synthetic oligonucleotide
  Antisense strand to SEQ ID NO: 296374
ugauacaaacuacuuggcu

SEQ ID NO: 296376 - RNA, 19 nt, Artificial Sequence
  Description of Artificial Sequence: Synthetic oligonucleotide
  Sense strand starting at position 3304 of SEQ ID NO: 3809
uuuguaucaugcuuauauc

SEQ ID NO: 296377 - RNA, 19 nt, Artificial Sequence
  Description of Artificial Sequence: Synthetic oligonucleotide
  Antisense strand to SEQ ID NO: 296376
gauauaagcaugauacaaa

SEQ ID NO: 296378 - RNA, 19 nt, Artificial Sequence
  Description of Artificial Sequence: Synthetic oligonucleotide
  Sense strand starting at position 3305 of SEQ ID NO: 3809
uuguaucaugcuuauaucu

SEQ ID NO: 296379 - RNA, 19 nt, Artificial Sequence
  Description of Artificial Sequence: Synthetic oligonucleotide
  Antisense strand to SEQ ID NO: 296378
agauauaagcaugauacaa

SEQ ID NO: 296380 - RNA, 19 nt, Artificial Sequence
  Description of Artificial Sequence: Synthetic oligonucleotide
  Sense strand starting at position 3338 of SEQ ID NO: 3809
cuggccugauggguuuaua

SEQ ID NO: 296381 - RNA, 19 nt, Artificial Sequence
  Description of Artificial Sequence: Synthetic oligonucleotide
  Antisense strand to SEQ ID NO: 296380
uauaaacccaucaggccag

SEQ ID NO: 296382 - RNA, 19 nt, Artificial Sequence
  Description of Artificial Sequence: Synthetic oligonucleotide
  Sense strand starting at position 3341 of SEQ ID NO: 3809
gccugauggguuuauaugu

SEQ ID NO: 296383 - RNA, 19 nt, Artificial Sequence
  Description of Artificial Sequence: Synthetic oligonucleotide
  Antisense strand to SEQ ID NO: 296382
acauauaaacccaucaggc

SEQ ID NO: 296384 - RNA, 19 nt, Artificial Sequence
  Description of Artificial Sequence: Synthetic oligonucleotide
  Sense strand starting at position 3346 of SEQ ID NO: 3809
auggguuuauauguuugua

SEQ ID NO: 296385 - RNA, 19 nt, Artificial Sequence
  Description of Artificial Sequence: Synthetic oligonucleotide
  Antisense strand to SEQ ID NO: 296384
uacaaacauauaaacccau

SEQ ID NO: 296386 - RNA, 19 nt, Artificial Sequence
  Description of Artificial Sequence: Synthetic oligonucleotide
  Sense strand starting at position 3348 of SEQ ID NO: 3809
ggguuuauauguuuguaug

SEQ ID NO: 296387 - RNA, 19 nt, Artificial Sequence
  Description of Artificial Sequence: Synthetic oligonucleotide
  Antisense strand to SEQ ID NO: 296386
cauacaaacauauaaaccc

SEQ ID NO: 296388 - RNA, 19 nt, Artificial Sequence
  Description of Artificial Sequence: Synthetic oligonucleotide
  Sense strand starting at position 3398 of SEQ ID NO: 3809
cagugaaaucgucacagca

SEQ ID NO: 296389 - RNA, 19 nt, Artificial Sequence
  Description of Artificial Sequence: Synthetic oligonucleotide
  Antisense strand to SEQ ID NO: 296388
ugcugugacgauuucacug

SEQ ID NO: 296390 - RNA, 19 nt, Artificial Sequence
  Description of Artificial Sequence: Synthetic oligonucleotide
  Sense strand starting at position 3460 of SEQ ID NO: 3809
guuugaaccuauguuuacu

SEQ ID NO: 296391 - RNA, 19 nt, Artificial Sequence
  Description of Artificial Sequence: Synthetic oligonucleotide
  Antisense strand to SEQ ID NO: 296390
aguaaacauagguucaaac

SEQ ID NO: 296392 - RNA, 19 nt, Artificial Sequence
  Description of Artificial Sequence: Synthetic oligonucleotide
  Sense strand starting at position 3546 of SEQ ID NO: 3809
accguaaacucucuuaaag

SEQ ID NO: 296393 - RNA, 19 nt, Artificial Sequence
  Description of Artificial Sequence: Synthetic oligonucleotide
  Antisense strand to SEQ ID NO: 296392
cuuuaagagaguuuacggu

SEQ ID NO: 296394 - RNA, 19 nt, Artificial Sequence
  Description of Artificial Sequence: Synthetic oligonucleotide
  Sense strand starting at position 3556 of SEQ ID NO: 3809
cucuuaaagguaggguuau

SEQ ID NO: 296395 - RNA, 19 nt, Artificial Sequence
  Description of Artificial Sequence: Synthetic oligonucleotide
  Antisense strand to SEQ ID NO: 296394
auaacccuaccuuuaagag

SEQ ID NO: 296396 - RNA, 19 nt, Artificial Sequence
  Description of Artificial Sequence: Synthetic oligonucleotide
  Sense strand starting at position 3659 of SEQ ID NO: 3809
ugcccucauuagguaauaa

SEQ ID NO: 296397 - RNA, 19 nt, Artificial Sequence
  Description of Artificial Sequence: Synthetic oligonucleotide
  Antisense strand to SEQ ID NO: 296396
uuauuaccuaaugagggca

SEQ ID NO: 296398 - RNA, 19 nt, Artificial Sequence
  Description of Artificial Sequence: Synthetic oligonucleotide
  Sense strand starting at position 3823 of SEQ ID NO: 3809
cuuccaguguuauucugaa

SEQ ID NO: 296399 - RNA, 19 nt, Artificial Sequence
  Description of Artificial Sequence: Synthetic oligonucleotide
  Antisense strand to SEQ ID NO: 296398
uucagaauaacacuggaag

SEQ ID NO: 296400 - RNA, 19 nt, Artificial Sequence
  Description of Artificial Sequence: Synthetic oligonucleotide
  Sense strand starting at position 3835 of SEQ ID NO: 3809
uucugaaaugguuauuccu

SEQ ID NO: 296401 - RNA, 19 nt, Artificial Sequence
  Description of Artificial Sequence: Synthetic oligonucleotide
  Antisense strand to SEQ ID NO: 296400
aggaauaaccauuucagaa

SEQ ID NO: 296402 - RNA, 19 nt, Artificial Sequence
  Description of Artificial Sequence: Synthetic oligonucleotide
  Sense strand starting at position 3837 of SEQ ID NO: 3809
cugaaaugguuauuccuuu

SEQ ID NO: 296403 - RNA, 19 nt, Artificial Sequence
  Description of Artificial Sequence: Synthetic oligonucleotide
  Antisense strand to SEQ ID NO: 296402
aaaggaauaaccauuucag

SEQ ID NO: 296404 - RNA, 19 nt, Artificial Sequence
  Description of Artificial Sequence: Synthetic oligonucleotide
  Sense strand starting at position 3838 of SEQ ID NO: 3809
ugaaaugguuauuccuuua

SEQ ID NO: 296405 - RNA, 19 nt, Artificial Sequence
  Description of Artificial Sequence: Synthetic oligonucleotide
  Antisense strand to SEQ ID NO: 296404
uaaaggaauaaccauuuca

SEQ ID NO: 296406 - RNA, 19 nt, Artificial Sequence
  Description of Artificial Sequence: Synthetic oligonucleotide
  Sense strand starting at position 3843 of SEQ ID NO: 3809
ugguuauuccuuuaucaca

SEQ ID NO: 296407 - RNA, 19 nt, Artificial Sequence
  Description of Artificial Sequence: Synthetic oligonucleotide
  Antisense strand to SEQ ID NO: 296406
ugugauaaaggaauaacca

SEQ ID NO: 296408 - RNA, 19 nt, Artificial Sequence
  Description of Artificial Sequence: Synthetic oligonucleotide
  Sense strand starting at position 3845 of SEQ ID NO: 3809
guuauuccuuuaucacaga

SEQ ID NO: 296409 - RNA, 19 nt, Artificial Sequence
  Description of Artificial Sequence: Synthetic oligonucleotide
  Antisense strand to SEQ ID NO: 296408
ucugugauaaaggaauaac

SEQ ID NO: 296410 - RNA, 19 nt, Artificial Sequence
  Description of Artificial Sequence: Synthetic oligonucleotide
  Sense strand starting at position 3975 of SEQ ID NO: 3809
uuagcaagguacucuagua

SEQ ID NO: 296411 - RNA, 19 nt, Artificial Sequence
  Description of Artificial Sequence: Synthetic oligonucleotide
  Antisense strand to SEQ ID NO: 296410
uacuagaguaccuugcuaa

SEQ ID NO: 296412 - RNA, 19 nt, Artificial Sequence
  Description of Artificial Sequence: Synthetic oligonucleotide
  Sense strand starting at position 275 of SEQ ID NO: 3810
ugccgaagagcucaagaga

SEQ ID NO: 296413 - RNA, 19 nt, Artificial Sequence
  Description of Artificial Sequence: Synthetic oligonucleotide
  Antisense strand to SEQ ID NO: 296412
ucucuugagcucuucggca

SEQ ID NO: 296414 - RNA, 19 nt, Artificial Sequence
  Description of Artificial Sequence: Synthetic oligonucleotide
  Sense strand starting at position 347 of SEQ ID NO: 3810
agcuaacugccagaggaau

SEQ ID NO: 296415 - RNA, 19 nt, Artificial Sequence
  Description of Artificial Sequence: Synthetic oligonucleotide
  Antisense strand to SEQ ID NO: 296414
auuccucuggcaguuagcu

SEQ ID NO: 296416 - RNA, 19 nt, Artificial Sequence
  Description of Artificial Sequence: Synthetic oligonucleotide
  Sense strand starting at position 419 of SEQ ID NO: 3810
agagaagugucauuacugu

SEQ ID NO: 296417 - RNA, 19 nt, Artificial Sequence
  Description of Artificial Sequence: Synthetic oligonucleotide
  Antisense strand to SEQ ID NO: 296416
acaguaaugacacuucucu

SEQ ID NO: 296418 - RNA, 19 nt, Artificial Sequence
  Description of Artificial Sequence: Synthetic oligonucleotide
  Sense strand starting at position 701 of SEQ ID NO: 3810
auguauaagcucugagaca

SEQ ID NO: 296419 - RNA, 19 nt, Artificial Sequence
  Description of Artificial Sequence: Synthetic oligonucleotide
  Antisense strand to SEQ ID NO: 296418
ugucucagagcuuauacau

SEQ ID NO: 296420 - RNA, 19 nt, Artificial Sequence
  Description of Artificial Sequence: Synthetic oligonucleotide
  Sense strand starting at position 851 of SEQ ID NO: 3810
ucaauugucugagccuuaa

SEQ ID NO: 296421 - RNA, 19 nt, Artificial Sequence
  Description of Artificial Sequence: Synthetic oligonucleotide
  Antisense strand to SEQ ID NO: 296420
uuaaggcucagacaauuga

SEQ ID NO: 296422 - RNA, 19 nt, Artificial Sequence
  Description of Artificial Sequence: Synthetic oligonucleotide
  Sense strand starting at position 1081 of SEQ ID NO: 3810
gcuauuguucuacaggacu

SEQ ID NO: 296423 - RNA, 19 nt, Artificial Sequence
  Description of Artificial Sequence: Synthetic oligonucleotide
  Antisense strand to SEQ ID NO: 296422
aguccuguagaacaauagc

SEQ ID NO: 296424 - RNA, 19 nt, Artificial Sequence
  Description of Artificial Sequence: Synthetic oligonucleotide
  Sense strand starting at position 1127 of SEQ ID NO: 3810
uaaagcuucccagagguaa

SEQ ID NO: 296425 - RNA, 19 nt, Artificial Sequence
  Description of Artificial Sequence: Synthetic oligonucleotide
  Antisense strand to SEQ ID NO: 296424
uuaccucugggaagcuuua

SEQ ID NO: 296426 - RNA, 19 nt, Artificial Sequence
  Description of Artificial Sequence: Synthetic oligonucleotide
  Sense strand starting at position 1177 of SEQ ID NO: 3810
ggaaucaaauaccugcaua

SEQ ID NO: 296427 - RNA, 19 nt, Artificial Sequence
  Description of Artificial Sequence: Synthetic oligonucleotide
  Antisense strand to SEQ ID NO: 296426
uaugcagguauuugauucc

SEQ ID NO: 296428 - RNA, 19 nt, Artificial Sequence
  Description of Artificial Sequence: Synthetic oligonucleotide
  Sense strand starting at position 1196 of SEQ ID NO: 3810
cuaauaagucuaugagcac

SEQ ID NO: 296429 - RNA, 19 nt, Artificial Sequence
  Description of Artificial Sequence: Synthetic oligonucleotide
  Antisense strand to SEQ ID NO: 296428
gugcucauagacuuauuag

SEQ ID NO: 296430 - RNA, 19 nt, Artificial Sequence
  Description of Artificial Sequence: Synthetic oligonucleotide
  Sense strand starting at position 1203 of SEQ ID NO: 3810
gucuaugagcacugaucua

SEQ ID NO: 296431 - RNA, 19 nt, Artificial Sequence
  Description of Artificial Sequence: Synthetic oligonucleotide
  Antisense strand to SEQ ID NO: 296430
uagaucagugcucauagac

SEQ ID NO: 296432 - RNA, 19 nt, Artificial Sequence
  Description of Artificial Sequence: Synthetic oligonucleotide
  Sense strand starting at position 1213 of SEQ ID NO: 3810
acugaucuacuaggaggua

SEQ ID NO: 296433 - RNA, 19 nt, Artificial Sequence
  Description of Artificial Sequence: Synthetic oligonucleotide
  Antisense strand to SEQ ID NO: 296432
uaccuccuaguagaucagu

SEQ ID NO: 296434 - RNA, 19 nt, Artificial Sequence
  Description of Artificial Sequence: Synthetic oligonucleotide
  Sense strand starting at position 2070 of SEQ ID NO: 3810
ggugaugucaccugauuag

SEQ ID NO: 296435 - RNA, 19 nt, Artificial Sequence
  Description of Artificial Sequence: Synthetic oligonucleotide
  Antisense strand to SEQ ID NO: 296434
cuaaucaggugacaucacc

SEQ ID NO: 296436 - RNA, 19 nt, Artificial Sequence
  Description of Artificial Sequence: Synthetic oligonucleotide
  Sense strand starting at position 2073 of SEQ ID NO: 3810
gaugucaccugauuagcau

SEQ ID NO: 296437 - RNA, 19 nt, Artificial Sequence
  Description of Artificial Sequence: Synthetic oligonucleotide
  Antisense strand to SEQ ID NO: 296436
augcuaaucaggugacauc

SEQ ID NO: 296438 - RNA, 19 nt, Artificial Sequence
  Description of Artificial Sequence: Synthetic oligonucleotide
  Sense strand starting at position 2074 of SEQ ID NO: 3810
augucaccugauuagcaua

SEQ ID NO: 296439 - RNA, 19 nt, Artificial Sequence
  Description of Artificial Sequence: Synthetic oligonucleotide
  Antisense strand to SEQ ID NO: 296438
uaugcuaaucaggugacau

SEQ ID NO: 296440 - RNA, 19 nt, Artificial Sequence
  Description of Artificial Sequence: Synthetic oligonucleotide
  Sense strand starting at position 2101 of SEQ ID NO: 3810
guauuagaaaugcaggcua

SEQ ID NO: 296441 - RNA, 19 nt, Artificial Sequence
  Description of Artificial Sequence: Synthetic oligonucleotide
  Antisense strand to SEQ ID NO: 296440
uagccugcauuucuaauac

SEQ ID NO: 296442 - RNA, 19 nt, Artificial Sequence
  Description of Artificial Sequence: Synthetic oligonucleotide
  Sense strand starting at position 2103 of SEQ ID NO: 3810
auuagaaaugcaggcuaua

SEQ ID NO: 296443 - RNA, 19 nt, Artificial Sequence
  Description of Artificial Sequence: Synthetic oligonucleotide
  Antisense strand to SEQ ID NO: 296442
uauagccugcauuucuaau

SEQ ID NO: 296444 - RNA, 19 nt, Artificial Sequence
  Description of Artificial Sequence: Synthetic oligonucleotide
  Sense strand starting at position 2241 of SEQ ID NO: 3810
gcgguagugccuucccaaa

SEQ ID NO: 296445 - RNA, 19 nt, Artificial Sequence
  Description of Artificial Sequence: Synthetic oligonucleotide
  Antisense strand to SEQ ID NO: 296444
uuugggaaggcacuaccgc

SEQ ID NO: 296446 - RNA, 19 nt, Artificial Sequence
  Description of Artificial Sequence: Synthetic oligonucleotide
  Sense strand starting at position 2258 of SEQ ID NO: 3810
aacagagcugcuggaauua

SEQ ID NO: 296447 - RNA, 19 nt, Artificial Sequence
  Description of Artificial Sequence: Synthetic oligonucleotide
  Antisense strand to SEQ ID NO: 296446
uaauuccagcagcucuguu

SEQ ID NO: 296448 - RNA, 19 nt, Artificial Sequence
  Description of Artificial Sequence: Synthetic oligonucleotide
  Sense strand starting at position 2314 of SEQ ID NO: 3810
cgauuacuaucacuugaaa

SEQ ID NO: 296449 - RNA, 19 nt, Artificial Sequence
  Description of Artificial Sequence: Synthetic oligonucleotide
  Antisense strand to SEQ ID NO: 296448
uuucaagugauaguaaucg

SEQ ID NO: 296450 - RNA, 19 nt, Artificial Sequence
  Description of Artificial Sequence: Synthetic oligonucleotide
  Sense strand starting at position 2563 of SEQ ID NO: 3810
guguaaguucgggcucagu

SEQ ID NO: 296451 - RNA, 19 nt, Artificial Sequence
  Description of Artificial Sequence: Synthetic oligonucleotide
  Antisense strand to SEQ ID NO: 296450
acugagcccgaacuuacac

SEQ ID NO: 296452 - RNA, 19 nt, Artificial Sequence
  Description of Artificial Sequence: Synthetic oligonucleotide
  Sense strand starting at position 2566 of SEQ ID NO: 3810
uaaguucgggcucagugaa

SEQ ID NO: 296453 - RNA, 19 nt, Artificial Sequence
  Description of Artificial Sequence: Synthetic oligonucleotide
  Antisense strand to SEQ ID NO: 296452
uucacugagcccgaacuua

SEQ ID NO: 296454 - RNA, 19 nt, Artificial Sequence
  Description of Artificial Sequence: Synthetic oligonucleotide
  Sense strand starting at position 2581 of SEQ ID NO: 3810
ugaagaaucucggcugacu

SEQ ID NO: 296455 - RNA, 19 nt, Artificial Sequence
  Description of Artificial Sequence: Synthetic oligonucleotide
  Antisense strand to SEQ ID NO: 296454
agucagccgagauucuuca

SEQ ID NO: 296456 - RNA, 19 nt, Artificial Sequence
  Description of Artificial Sequence: Synthetic oligonucleotide
  Sense strand starting at position 2583 of SEQ ID NO: 3810
aagaaucucggcugacuua

SEQ ID NO: 296457 - RNA, 19 nt, Artificial Sequence
  Description of Artificial Sequence: Synthetic oligonucleotide
  Antisense strand to SEQ ID NO: 296456
uaagucagccgagauucuu

SEQ ID NO: 296458 - RNA, 19 nt, Artificial Sequence
  Description of Artificial Sequence: Synthetic oligonucleotide
  Sense strand starting at position 2627 of SEQ ID NO: 3810
ggugguuuccuggaauaac

SEQ ID NO: 296459 - RNA, 19 nt, Artificial Sequence
  Description of Artificial Sequence: Synthetic oligonucleotide
  Antisense strand to SEQ ID NO: 296458
guuauuccaggaaaccacc

SEQ ID NO: 296460 - RNA, 19 nt, Artificial Sequence
  Description of Artificial Sequence: Synthetic oligonucleotide
  Sense strand starting at position 2641 of SEQ ID NO: 3810
auaacacgggccuaugaua

SEQ ID NO: 296461 - RNA, 19 nt, Artificial Sequence
  Description of Artificial Sequence: Synthetic oligonucleotide
  Antisense strand to SEQ ID NO: 296460
uaucauaggcccguguuau

SEQ ID NO: 296462 - RNA, 19 nt, Artificial Sequence
  Description of Artificial Sequence: Synthetic oligonucleotide
  Sense strand starting at position 2648 of SEQ ID NO: 3810
gggccuaugauaggaauuc

SEQ ID NO: 296463 - RNA, 19 nt, Artificial Sequence
  Description of Artificial Sequence: Synthetic oligonucleotide
  Antisense strand to SEQ ID NO: 296462
gaauuccuaucauaggccc

SEQ ID NO: 296464 - RNA, 19 nt, Artificial Sequence
  Description of Artificial Sequence: Synthetic oligonucleotide
  Sense strand starting at position 2747 of SEQ ID NO: 3810
cugaccuggaguuguuuau

SEQ ID NO: 296465 - RNA, 19 nt, Artificial Sequence
  Description of Artificial Sequence: Synthetic oligonucleotide
  Antisense strand to SEQ ID NO: 296464
auaaacaacuccaggucag

SEQ ID NO: 296466 - RNA, 19 nt, Artificial Sequence
  Description of Artificial Sequence: Synthetic oligonucleotide
  Sense strand starting at position 2751 of SEQ ID NO: 3810
ccuggaguuguuuaugauc

SEQ ID NO: 296467 - RNA, 19 nt, Artificial Sequence
  Description of Artificial Sequence: Synthetic oligonucleotide
  Antisense strand to SEQ ID NO: 296466
gaucauaaacaacuccagg

SEQ ID NO: 296468 - RNA, 19 nt, Artificial Sequence
  Description of Artificial Sequence: Synthetic oligonucleotide
  Sense strand starting at position 2939 of SEQ ID NO: 3810
aaauguauucuugggaaau

SEQ ID NO: 296469 - RNA, 19 nt, Artificial Sequence
  Description of Artificial Sequence: Synthetic oligonucleotide
  Antisense strand to SEQ ID NO: 296468
auuucccaagaauacauuu

SEQ ID NO: 296470 - RNA, 19 nt, Artificial Sequence
  Description of Artificial Sequence: Synthetic oligonucleotide
  Sense strand starting at position 3106 of SEQ ID NO: 3810
gggaucccaauauguagua

SEQ ID NO: 296471 - RNA, 19 nt, Artificial Sequence
  Description of Artificial Sequence: Synthetic oligonucleotide
  Antisense strand to SEQ ID NO: 296470
uacuacauauugggauccc

SEQ ID NO: 296472 - RNA, 19 nt, Artificial Sequence
  Description of Artificial Sequence: Synthetic oligonucleotide
  Sense strand starting at position 3164 of SEQ ID NO: 3810
gggcacuuguaauugaagu

SEQ ID NO: 296473 - RNA, 19 nt, Artificial Sequence
  Description of Artificial Sequence: Synthetic oligonucleotide
  Antisense strand to SEQ ID NO: 296472
acuucaauuacaagugccc

SEQ ID NO: 296474 - RNA, 19 nt, Artificial Sequence
  Description of Artificial Sequence: Synthetic oligonucleotide
  Sense strand starting at position 3165 of SEQ ID NO: 3810
ggcacuuguaauugaagua

SEQ ID NO: 296475 - RNA, 19 nt, Artificial Sequence
  Description of Artificial Sequence: Synthetic oligonucleotide
  Antisense strand to SEQ ID NO: 296474
uacuucaauuacaagugcc

SEQ ID NO: 296476 - RNA, 19 nt, Artificial Sequence
  Description of Artificial Sequence: Synthetic oligonucleotide
  Sense strand starting at position 3554 of SEQ ID NO: 3810
agcugucagacugaguaau

SEQ ID NO: 296477 - RNA, 19 nt, Artificial Sequence
  Description of Artificial Sequence: Synthetic oligonucleotide
  Antisense strand to SEQ ID NO: 296476
auuacucagucugacagcu

SEQ ID NO: 296478 - RNA, 19 nt, Artificial Sequence
  Description of Artificial Sequence: Synthetic oligonucleotide
  Sense strand starting at position 3556 of SEQ ID NO: 3810
cugucagacugaguaauaa

SEQ ID NO: 296479 - RNA, 19 nt, Artificial Sequence
  Description of Artificial Sequence: Synthetic oligonucleotide
  Antisense strand to SEQ ID NO: 296478
uuauuacucagucugacag

SEQ ID NO: 296480 - RNA, 19 nt, Artificial Sequence
  Description of Artificial Sequence: Synthetic oligonucleotide
  Sense strand starting at position 3758 of SEQ ID NO: 3810
cgucucaaugaagaucuuu

SEQ ID NO: 296481 - RNA, 19 nt, Artificial Sequence
  Description of Artificial Sequence: Synthetic oligonucleotide
  Antisense strand to SEQ ID NO: 296480
aaagaucuucauugagacg

SEQ ID NO: 296482 - RNA, 19 nt, Artificial Sequence
  Description of Artificial Sequence: Synthetic oligonucleotide
  Sense strand starting at position 3810 of SEQ ID NO: 3810
gugaaaugauaagucucua

SEQ ID NO: 296483 - RNA, 19 nt, Artificial Sequence
  Description of Artificial Sequence: Synthetic oligonucleotide
  Antisense strand to SEQ ID NO: 296482
uagagacuuaucauuucac

SEQ ID NO: 296484 - RNA, 19 nt, Artificial Sequence
  Description of Artificial Sequence: Synthetic oligonucleotide
  Sense strand starting at position 3814 of SEQ ID NO: 3810
aaugauaagucucuaagug

SEQ ID NO: 296485 - RNA, 19 nt, Artificial Sequence
  Description of Artificial Sequence: Synthetic oligonucleotide
  Antisense strand to SEQ ID NO: 296484
cacuuagagacuuaucauu

SEQ ID NO: 296486 - RNA, 19 nt, Artificial Sequence
  Description of Artificial Sequence: Synthetic oligonucleotide
  Sense strand starting at position 3815 of SEQ ID NO: 3810
augauaagucucuaagugu

SEQ ID NO: 296487 - RNA, 19 nt, Artificial Sequence
  Description of Artificial Sequence: Synthetic oligonucleotide
  Antisense strand to SEQ ID NO: 296486
acacuuagagacuuaucau

SEQ ID NO: 296488 - RNA, 19 nt, Artificial Sequence
  Description of Artificial Sequence: Synthetic oligonucleotide
  Sense strand starting at position 3951 of SEQ ID NO: 3810
ucuaguauggguuaguaca

SEQ ID NO: 296489 - RNA, 19 nt, Artificial Sequence
  Description of Artificial Sequence: Synthetic oligonucleotide
  Antisense strand to SEQ ID NO: 296488
uguacuaacccauacuaga

SEQ ID NO: 296490 - RNA, 19 nt, Artificial Sequence
  Description of Artificial Sequence: Synthetic oligonucleotide
  Sense strand starting at position 3958 of SEQ ID NO: 3810
uggguuaguacaugaaaua

SEQ ID NO: 296491 - RNA, 19 nt, Artificial Sequence
  Description of Artificial Sequence: Synthetic oligonucleotide
  Antisense strand to SEQ ID NO: 296490
uauuucauguacuaaccca

SEQ ID NO: 296492 - RNA, 19 nt, Artificial Sequence
  Description of Artificial Sequence: Synthetic oligonucleotide
  Sense strand starting at position 50 of SEQ ID NO: 3811
cuugaaucuccacgaucuu

SEQ ID NO: 296493 - RNA, 19 nt, Artificial Sequence
  Description of Artificial Sequence: Synthetic oligonucleotide
  Antisense strand to SEQ ID NO: 296492
aagaucguggagauucaag

SEQ ID NO: 296494 - RNA, 19 nt, Artificial Sequence
  Description of Artificial Sequence: Synthetic oligonucleotide
  Sense strand starting at position 371 of SEQ ID NO: 3811
acucucugccuggaguauu

SEQ ID NO: 296495 - RNA, 19 nt, Artificial Sequence
  Description of Artificial Sequence: Synthetic oligonucleotide
  Antisense strand to SEQ ID NO: 296494
aauacuccaggcagagagu

SEQ ID NO: 296496 - RNA, 19 nt, Artificial Sequence
  Description of Artificial Sequence: Synthetic oligonucleotide
  Sense strand starting at position 495 of SEQ ID NO: 3811
uccuguauacaguagguua

SEQ ID NO: 296497 - RNA, 19 nt, Artificial Sequence
  Description of Artificial Sequence: Synthetic oligonucleotide
  Antisense strand to SEQ ID NO: 296496
uaaccuacuguauacagga

SEQ ID NO: 296498 - RNA, 19 nt, Artificial Sequence
  Description of Artificial Sequence: Synthetic oligonucleotide
  Sense strand starting at position 497 of SEQ ID NO: 3811
cuguauacaguagguuaua

SEQ ID NO: 296499 - RNA, 19 nt, Artificial Sequence
  Description of Artificial Sequence: Synthetic oligonucleotide
  Antisense strand to SEQ ID NO: 296498
uauaaccuacuguauacag

SEQ ID NO: 296500 - RNA, 19 nt, Artificial Sequence
  Description of Artificial Sequence: Synthetic oligonucleotide
  Sense strand starting at position 498 of SEQ ID NO: 3811
uguauacaguagguuauaa

SEQ ID NO: 296501 - RNA, 19 nt, Artificial Sequence
  Description of Artificial Sequence: Synthetic oligonucleotide
  Antisense strand to SEQ ID NO: 296500
uuauaaccuacuguauaca

SEQ ID NO: 296502 - RNA, 19 nt, Artificial Sequence
  Description of Artificial Sequence: Synthetic oligonucleotide
  Sense strand starting at position 558 of SEQ ID NO: 3811
cacugcugucaagagagua

SEQ ID NO: 296503 - RNA, 19 nt, Artificial Sequence
  Description of Artificial Sequence: Synthetic oligonucleotide
  Antisense strand to SEQ ID NO: 296502
uacucucuugacagcagug

SEQ ID NO: 296504 - RNA, 19 nt, Artificial Sequence
  Description of Artificial Sequence: Synthetic oligonucleotide
  Sense strand starting at position 676 of SEQ ID NO: 3811
guacaaauauggucucuac

SEQ ID NO: 296505 - RNA, 19 nt, Artificial Sequence
  Description of Artificial Sequence: Synthetic oligonucleotide
  Antisense strand to SEQ ID NO: 296504
guagagaccauauuuguac

SEQ ID NO: 296506 - RNA, 19 nt, Artificial Sequence
  Description of Artificial Sequence: Synthetic oligonucleotide
  Sense strand starting at position 686 of SEQ ID NO: 3811
ggucucuacagaggaauau

SEQ ID NO: 296507 - RNA, 19 nt, Artificial Sequence
  Description of Artificial Sequence: Synthetic oligonucleotide
  Antisense strand to SEQ ID NO: 296506
auauuccucuguagagacc

SEQ ID NO: 296508 - RNA, 19 nt, Artificial Sequence
  Description of Artificial Sequence: Synthetic oligonucleotide
  Sense strand starting at position 759 of SEQ ID NO: 3811
ugaagaagugauggcacau

SEQ ID NO: 296509 - RNA, 19 nt, Artificial Sequence
  Description of Artificial Sequence: Synthetic oligonucleotide
  Antisense strand to SEQ ID NO: 296508
augugccaucacuucuuca

SEQ ID NO: 296510 - RNA, 19 nt, Artificial Sequence
  Description of Artificial Sequence: Synthetic oligonucleotide
  Sense strand starting at position 1064 of SEQ ID NO: 3811
ccaacagagugcuugaaug

SEQ ID NO: 296511 - RNA, 19 nt, Artificial Sequence
  Description of Artificial Sequence: Synthetic oligonucleotide
  Antisense strand to SEQ ID NO: 296510
cauucaagcacucuguugg

SEQ ID NO: 296512 - RNA, 19 nt, Artificial Sequence
  Description of Artificial Sequence: Synthetic oligonucleotide
  Sense strand starting at position 1066 of SEQ ID NO: 3811
aacagagugcuugaauguu

SEQ ID NO: 296513 - RNA, 19 nt, Artificial Sequence
  Description of Artificial Sequence: Synthetic oligonucleotide
  Antisense strand to SEQ ID NO: 296512
aacauucaagcacucuguu

SEQ ID NO: 296514 - RNA, 19 nt, Artificial Sequence
  Description of Artificial Sequence: Synthetic oligonucleotide
  Sense strand starting at position 1123 of SEQ ID NO: 3811
gaaagaaccugagaucaga

SEQ ID NO: 296515 - RNA, 19 nt, Artificial Sequence
  Description of Artificial Sequence: Synthetic oligonucleotide
  Antisense strand to SEQ ID NO: 296514
ucugaucucagguucuuuc

SEQ ID NO: 296516 - RNA, 19 nt, Artificial Sequence
  Description of Artificial Sequence: Synthetic oligonucleotide
  Sense strand starting at position 1307 of SEQ ID NO: 3811
gaggaaaguugccuagaga

SEQ ID NO: 296517 - RNA, 19 nt, Artificial Sequence
  Description of Artificial Sequence: Synthetic oligonucleotide
  Antisense strand to SEQ ID NO: 296516
ucucuaggcaacuuuccuc

SEQ ID NO: 296518 - RNA, 19 nt, Artificial Sequence
  Description of Artificial Sequence: Synthetic oligonucleotide
  Sense strand starting at position 1310 of SEQ ID NO: 3811
gaaaguugccuagagaguu

SEQ ID NO: 296519 - RNA, 19 nt, Artificial Sequence
  Description of Artificial Sequence: Synthetic oligonucleotide
  Antisense strand to SEQ ID NO: 296518
aacucucuaggcaacuuuc

SEQ ID NO: 296520 - RNA, 19 nt, Artificial Sequence
  Description of Artificial Sequence: Synthetic oligonucleotide
  Sense strand starting at position 1318 of SEQ ID NO: 3811
ccuagagaguucccaauuc

SEQ ID NO: 296521 - RNA, 19 nt, Artificial Sequence
  Description of Artificial Sequence: Synthetic oligonucleotide
  Antisense strand to SEQ ID NO: 296520
gaauugggaacucucuagg

SEQ ID NO: 296522 - RNA, 19 nt, Artificial Sequence
  Description of Artificial Sequence: Synthetic oligonucleotide
  Sense strand starting at position 1691 of SEQ ID NO: 3811
ugcagcaauuuggcugaaa

SEQ ID NO: 296523 - RNA, 19 nt, Artificial Sequence
  Description of Artificial Sequence: Synthetic oligonucleotide
  Antisense strand to SEQ ID NO: 296522
uuucagccaaauugcugca

SEQ ID NO: 296524 - RNA, 19 nt, Artificial Sequence
  Description of Artificial Sequence: Synthetic oligonucleotide
  Sense strand starting at position 1807 of SEQ ID NO: 3811
gguguuauugcccaaauga

SEQ ID NO: 296525 - RNA, 19 nt, Artificial Sequence
  Description of Artificial Sequence: Synthetic oligonucleotide
  Antisense strand to SEQ ID NO: 296524
ucauuugggcaauaacacc

SEQ ID NO: 296526 - RNA, 19 nt, Artificial Sequence
  Description of Artificial Sequence: Synthetic oligonucleotide
  Sense strand starting at position 1951 of SEQ ID NO: 3811
cgagauuccgugagugcca

SEQ ID NO: 296527 - RNA, 19 nt, Artificial Sequence
  Description of Artificial Sequence: Synthetic oligonucleotide
  Antisense strand to SEQ ID NO: 296526
uggcacucacggaaucucg

SEQ ID NO: 296528 - RNA, 19 nt, Artificial Sequence
  Description of Artificial Sequence: Synthetic oligonucleotide
  Sense strand starting at position 2356 of SEQ ID NO: 3811
cagggacucugaguacuga

SEQ ID NO: 296529 - RNA, 19 nt, Artificial Sequence
  Description of Artificial Sequence: Synthetic oligonucleotide
  Antisense strand to SEQ ID NO: 296528
ucaguacucagagucccug

SEQ ID NO: 296530 - RNA, 19 nt, Artificial Sequence
  Description of Artificial Sequence: Synthetic oligonucleotide
  Sense strand starting at position 2379 of SEQ ID NO: 3811
ccuagcaaguuauugaaau

SEQ ID NO: 296531 - RNA, 19 nt, Artificial Sequence
  Description of Artificial Sequence: Synthetic oligonucleotide
  Antisense strand to SEQ ID NO: 296530
auuucaauaacuugcuagg

SEQ ID NO: 296532 - RNA, 19 nt, Artificial Sequence
  Description of Artificial Sequence: Synthetic oligonucleotide
  Sense strand starting at position 2419 of SEQ ID NO: 3811
gcagaucuaccggaaguga

SEQ ID NO: 296533 - RNA, 19 nt, Artificial Sequence
  Description of Artificial Sequence: Synthetic oligonucleotide
  Antisense strand to SEQ ID NO: 296532
ucacuuccgguagaucugc

SEQ ID NO: 296534 - RNA, 19 nt, Artificial Sequence
  Description of Artificial Sequence: Synthetic oligonucleotide
  Sense strand starting at position 2427 of SEQ ID NO: 3811
accggaagugagcauagau

SEQ ID NO: 296535 - RNA, 19 nt, Artificial Sequence
  Description of Artificial Sequence: Synthetic oligonucleotide
  Antisense strand to SEQ ID NO: 296534
aucuaugcucacuuccggu

SEQ ID NO: 296536 - RNA, 19 nt, Artificial Sequence
  Description of Artificial Sequence: Synthetic oligonucleotide
  Sense strand starting at position 2522 of SEQ ID NO: 3811
cugagauuguuggccagga

SEQ ID NO: 296537 - RNA, 19 nt, Artificial Sequence
  Description of Artificial Sequence: Synthetic oligonucleotide
  Antisense strand to SEQ ID NO: 296536
uccuggccaacaaucucag

SEQ ID NO: 296538 - RNA, 19 nt, Artificial Sequence
  Description of Artificial Sequence: Synthetic oligonucleotide
  Sense strand starting at position 2523 of SEQ ID NO: 3811
ugagauuguuggccaggaa

SEQ ID NO: 296539 - RNA, 19 nt, Artificial Sequence
  Description of Artificial Sequence: Synthetic oligonucleotide
  Antisense strand to SEQ ID NO: 296538
uuccuggccaacaaucuca

SEQ ID NO: 296540 - RNA, 19 nt, Artificial Sequence
  Description of Artificial Sequence: Synthetic oligonucleotide
  Sense strand starting at position 2526 of SEQ ID NO: 3811
gauuguuggccaggaaaga

SEQ ID NO: 296541 - RNA, 19 nt, Artificial Sequence
  Description of Artificial Sequence: Synthetic oligonucleotide
  Antisense strand to SEQ ID NO: 296540
ucuuuccuggccaacaauc

SEQ ID NO: 296542 - RNA, 19 nt, Artificial Sequence
  Description of Artificial Sequence: Synthetic oligonucleotide
  Sense strand starting at position 2540 of SEQ ID NO: 3811
aaagaucaguuuccgagau

SEQ ID NO: 296543 - RNA, 19 nt, Artificial Sequence
  Description of Artificial Sequence: Synthetic oligonucleotide
  Antisense strand to SEQ ID NO: 296542
aucucggaaacugaucuuu

SEQ ID NO: 296544 - RNA, 19 nt, Artificial Sequence
  Description of Artificial Sequence: Synthetic oligonucleotide
  Sense strand starting at position 2544 of SEQ ID NO: 3811
aucaguuuccgagauuguu

SEQ ID NO: 296545 - RNA, 19 nt, Artificial Sequence
  Description of Artificial Sequence: Synthetic oligonucleotide
  Antisense strand to SEQ ID NO: 296544
aacaaucucggaaacugau

SEQ ID NO: 296546 - RNA, 19 nt, Artificial Sequence
  Description of Artificial Sequence: Synthetic oligonucleotide
  Sense strand starting at position 2550 of SEQ ID NO: 3811
uuccgagauuguuuaggga

SEQ ID NO: 296547 - RNA, 19 nt, Artificial Sequence
  Description of Artificial Sequence: Synthetic oligonucleotide
  Antisense strand to SEQ ID NO: 296546
ucccuaaacaaucucggaa

SEQ ID NO: 296548 - RNA, 19 nt, Artificial Sequence
  Description of Artificial Sequence: Synthetic oligonucleotide
  Sense strand starting at position 2626 of SEQ ID NO: 3811
ggccuagaauugucuacua

SEQ ID NO: 296549 - RNA, 19 nt, Artificial Sequence
  Description of Artificial Sequence: Synthetic oligonucleotide
  Antisense strand to SEQ ID NO: 296548
uaguagacaauucuaggcc

SEQ ID NO: 296550 - RNA, 19 nt, Artificial Sequence
  Description of Artificial Sequence: Synthetic oligonucleotide
  Sense strand starting at position 2792 of SEQ ID NO: 3811
gcuacucagguuuauggua

SEQ ID NO: 296551 - RNA, 19 nt, Artificial Sequence
  Description of Artificial Sequence: Synthetic oligonucleotide
  Antisense strand to SEQ ID NO: 296550
uaccauaaaccugaguagc

SEQ ID NO: 296552 - RNA, 19 nt, Artificial Sequence
  Description of Artificial Sequence: Synthetic oligonucleotide
  Sense strand starting at position 2851 of SEQ ID NO: 3811
accauagacugguagauuu

SEQ ID NO: 296553 - RNA, 19 nt, Artificial Sequence
  Description of Artificial Sequence: Synthetic oligonucleotide
  Antisense strand to SEQ ID NO: 296552
aaaucuaccagucuauggu

SEQ ID NO: 296554 - RNA, 19 nt, Artificial Sequence
  Description of Artificial Sequence: Synthetic oligonucleotide
  Sense strand starting at position 2859 of SEQ ID NO: 3811
cugguagauuuauaaagaa

SEQ ID NO: 296555 - RNA, 19 nt, Artificial Sequence
  Description of Artificial Sequence: Synthetic oligonucleotide
  Antisense strand to SEQ ID NO: 296554
uucuuuauaaaucuaccag

SEQ ID NO: 296556 - RNA, 19 nt, Artificial Sequence
  Description of Artificial Sequence: Synthetic oligonucleotide
  Sense strand starting at position 2879 of SEQ ID NO: 3811
gagauuuguuuggcuugua

SEQ ID NO: 296557 - RNA, 19 nt, Artificial Sequence
  Description of Artificial Sequence: Synthetic oligonucleotide
  Antisense strand to SEQ ID NO: 296556
uacaagccaaacaaaucuc

SEQ ID NO: 296558 - RNA, 19 nt, Artificial Sequence
  Description of Artificial Sequence: Synthetic oligonucleotide
  Sense strand starting at position 2882 of SEQ ID NO: 3811
auuuguuuggcuuguaguu

SEQ ID NO: 296559 - RNA, 19 nt, Artificial Sequence
  Description of Artificial Sequence: Synthetic oligonucleotide
  Antisense strand to SEQ ID NO: 296558
aacuacaagccaaacaaau

SEQ ID NO: 296560 - RNA, 19 nt, Artificial Sequence
  Description of Artificial Sequence: Synthetic oligonucleotide
  Sense strand starting at position 2921 of SEQ ID NO: 3811
gacagagggcauuauuguu

SEQ ID NO: 296561 - RNA, 19 nt, Artificial Sequence
  Description of Artificial Sequence: Synthetic oligonucleotide
  Antisense strand to SEQ ID NO: 296560
aacaauaaugcccucuguc

SEQ ID NO: 296562 - RNA, 19 nt, Artificial Sequence
  Description of Artificial Sequence: Synthetic oligonucleotide
  Sense strand starting at position 3198 of SEQ ID NO: 3811
aguccugcccuggaggaau

SEQ ID NO: 296563 - RNA, 19 nt, Artificial Sequence
  Description of Artificial Sequence: Synthetic oligonucleotide
  Antisense strand to SEQ ID NO: 296562
auuccuccagggcaggacu

SEQ ID NO: 296564 - RNA, 19 nt, Artificial Sequence
  Description of Artificial Sequence: Synthetic oligonucleotide
  Sense strand starting at position 3209 of SEQ ID NO: 3811
ggaggaauuuacgaccaag

SEQ ID NO: 296565 - RNA, 19 nt, Artificial Sequence
  Description of Artificial Sequence: Synthetic oligonucleotide
  Antisense strand to SEQ ID NO: 296564
cuuggucguaaauuccucc

SEQ ID NO: 296566 - RNA, 19 nt, Artificial Sequence
  Description of Artificial Sequence: Synthetic oligonucleotide
  Sense strand starting at position 3331 of SEQ ID NO: 3811
guaagagugggccagcaaa

SEQ ID NO: 296567 - RNA, 19 nt, Artificial Sequence
  Description of Artificial Sequence: Synthetic oligonucleotide
  Antisense strand to SEQ ID NO: 296566
uuugcuggcccacucuuac

SEQ ID NO: 296568 - RNA, 19 nt, Artificial Sequence
  Description of Artificial Sequence: Synthetic oligonucleotide
  Sense strand starting at position 3692 of SEQ ID NO: 3811
uuggaucucaagugcugaa

SEQ ID NO: 296569 - RNA, 19 nt, Artificial Sequence
  Description of Artificial Sequence: Synthetic oligonucleotide
  Antisense strand to SEQ ID NO: 296568
uucagcacuugagauccaa

SEQ ID NO: 296570 - RNA, 19 nt, Artificial Sequence
  Description of Artificial Sequence: Synthetic oligonucleotide
  Sense strand starting at position 3808 of SEQ ID NO: 3811
uggauuugauggagguugu

SEQ ID NO: 296571 - RNA, 19 nt, Artificial Sequence
  Description of Artificial Sequence: Synthetic oligonucleotide
  Antisense strand to SEQ ID NO: 296570
acaaccuccaucaaaucca

SEQ ID NO: 296572 - RNA, 19 nt, Artificial Sequence
  Description of Artificial Sequence: Synthetic oligonucleotide
  Sense strand starting at position 186 of SEQ ID NO: 3812
ggauacaguuuaguucuua

SEQ ID NO: 296573 - RNA, 19 nt, Artificial Sequence
  Description of Artificial Sequence: Synthetic oligonucleotide
  Antisense strand to SEQ ID NO: 296572
uaagaacuaaacuguaucc

SEQ ID NO: 296574 - RNA, 19 nt, Artificial Sequence
  Description of Artificial Sequence: Synthetic oligonucleotide
  Sense strand starting at position 190 of SEQ ID NO: 3812
acaguuuaguucuuauuac

SEQ ID NO: 296575 - RNA, 19 nt, Artificial Sequence
  Description of Artificial Sequence: Synthetic oligonucleotide
  Antisense strand to SEQ ID NO: 296574
guaauaagaacuaaacugu

SEQ ID NO: 296576 - RNA, 19 nt, Artificial Sequence
  Description of Artificial Sequence: Synthetic oligonucleotide
  Sense strand starting at position 340 of SEQ ID NO: 3812
ccuucuucucucgaaauga

SEQ ID NO: 296577 - RNA, 19 nt, Artificial Sequence
  Description of Artificial Sequence: Synthetic oligonucleotide
  Antisense strand to SEQ ID NO: 296576
ucauuucgagagaagaagg

SEQ ID NO: 296578 - RNA, 19 nt, Artificial Sequence
  Description of Artificial Sequence: Synthetic oligonucleotide
  Sense strand starting at position 349 of SEQ ID NO: 3812
cucgaaaugaggcaucacu

SEQ ID NO: 296579 - RNA, 19 nt, Artificial Sequence
  Description of Artificial Sequence: Synthetic oligonucleotide
  Antisense strand to SEQ ID NO: 296578
agugaugccucauuucgag

SEQ ID NO: 296580 - RNA, 19 nt, Artificial Sequence
  Description of Artificial Sequence: Synthetic oligonucleotide
  Sense strand starting at position 363 of SEQ ID NO: 3812
ucacuuucucuuuacgaga

SEQ ID NO: 296581 - RNA, 19 nt, Artificial Sequence
  Description of Artificial Sequence: Synthetic oligonucleotide
  Antisense strand to SEQ ID NO: 296580
ucucguaaagagaaaguga

SEQ ID NO: 296582 - RNA, 19 nt, Artificial Sequence
  Description of Artificial Sequence: Synthetic oligonucleotide
  Sense strand starting at position 382 of SEQ ID NO: 3812
cagauuaugccagaggcau

SEQ ID NO: 296583 - RNA, 19 nt, Artificial Sequence
  Description of Artificial Sequence: Synthetic oligonucleotide
  Antisense strand to SEQ ID NO: 296582
augccucuggcauaaucug

SEQ ID NO: 296584 - RNA, 19 nt, Artificial Sequence
  Description of Artificial Sequence: Synthetic oligonucleotide
  Sense strand starting at position 393 of SEQ ID NO: 3812
agaggcauucuuuauccua

SEQ ID NO: 296585 - RNA, 19 nt, Artificial Sequence
  Description of Artificial Sequence: Synthetic oligonucleotide
  Antisense strand to SEQ ID NO: 296584
uaggauaaagaaugccucu

SEQ ID NO: 296586 - RNA, 19 nt, Artificial Sequence
  Description of Artificial Sequence: Synthetic oligonucleotide
  Sense strand starting at position 735 of SEQ ID NO: 3812
auacuaaacgauugggcau

SEQ ID NO: 296587 - RNA, 19 nt, Artificial Sequence
  Description of Artificial Sequence: Synthetic oligonucleotide
  Antisense strand to SEQ ID NO: 296586
augcccaaucguuuaguau

SEQ ID NO: 296588 - RNA, 19 nt, Artificial Sequence
  Description of Artificial Sequence: Synthetic oligonucleotide
  Sense strand starting at position 781 of SEQ ID NO: 3812
cuucccuuucccugugaga

SEQ ID NO: 296589 - RNA, 19 nt, Artificial Sequence
  Description of Artificial Sequence: Synthetic oligonucleotide
  Antisense strand to SEQ ID NO: 296588
ucucacagggaaagggaag

SEQ ID NO: 296590 - RNA, 19 nt, Artificial Sequence
  Description of Artificial Sequence: Synthetic oligonucleotide
  Sense strand starting at position 783 of SEQ ID NO: 3812
ucccuuucccugugagacu

SEQ ID NO: 296591 - RNA, 19 nt, Artificial Sequence
  Description of Artificial Sequence: Synthetic oligonucleotide
  Antisense strand to SEQ ID NO: 296590
agucucacagggaaaggga

SEQ ID NO: 296592 - RNA, 19 nt, Artificial Sequence
  Description of Artificial Sequence: Synthetic oligonucleotide
  Sense strand starting at position 812 of SEQ ID NO: 3812
uggacagucuuucucugaa

SEQ ID NO: 296593 - RNA, 19 nt, Artificial Sequence
  Description of Artificial Sequence: Synthetic oligonucleotide
  Antisense strand to SEQ ID NO: 296592
uucagagaaagacugucca

SEQ ID NO: 296594 - RNA, 19 nt, Artificial Sequence
  Description of Artificial Sequence: Synthetic oligonucleotide
  Sense strand starting at position 1036 of SEQ ID NO: 3812
gcuugagucagugggaucu

SEQ ID NO: 296595 - RNA, 19 nt, Artificial Sequence
  Description of Artificial Sequence: Synthetic oligonucleotide
  Antisense strand to SEQ ID NO: 296594
agaucccacugacucaagc

SEQ ID NO: 296596 - RNA, 19 nt, Artificial Sequence
  Description of Artificial Sequence: Synthetic oligonucleotide
  Sense strand starting at position 1046 of SEQ ID NO: 3812
gugggaucucacuauauuc

SEQ ID NO: 296597 - RNA, 19 nt, Artificial Sequence
  Description of Artificial Sequence: Synthetic oligonucleotide
  Antisense strand to SEQ ID NO: 296596
gaauauagugagaucccac

SEQ ID NO: 296598 - RNA, 19 nt, Artificial Sequence
  Description of Artificial Sequence: Synthetic oligonucleotide
  Sense strand starting at position 1151 of SEQ ID NO: 3812
cugaguuucccucgggaga

SEQ ID NO: 296599 - RNA, 19 nt, Artificial Sequence
  Description of Artificial Sequence: Synthetic oligonucleotide
  Antisense strand to SEQ ID NO: 296598
ucucccgagggaaacucag

SEQ ID NO: 296600 - RNA, 19 nt, Artificial Sequence
  Description of Artificial Sequence: Synthetic oligonucleotide
  Sense strand starting at position 1152 of SEQ ID NO: 3812
ugaguuucccucgggagau

SEQ ID NO: 296601 - RNA, 19 nt, Artificial Sequence
  Description of Artificial Sequence: Synthetic oligonucleotide
  Antisense strand to SEQ ID NO: 296600
aucucccgagggaaacuca

SEQ ID NO: 296602 - RNA, 19 nt, Artificial Sequence
  Description of Artificial Sequence: Synthetic oligonucleotide
  Sense strand starting at position 1169 of SEQ ID NO: 3812
augccaaacgcguaagacu

SEQ ID NO: 296603 - RNA, 19 nt, Artificial Sequence
  Description of Artificial Sequence: Synthetic oligonucleotide
  Antisense strand to SEQ ID NO: 296602
agucuuacgcguuuggcau

SEQ ID NO: 296604 - RNA, 19 nt, Artificial Sequence
  Description of Artificial Sequence: Synthetic oligonucleotide
  Sense strand starting at position 1178 of SEQ ID NO: 3812
gcguaagacucucccaaga

SEQ ID NO: 296605 - RNA, 19 nt, Artificial Sequence
  Description of Artificial Sequence: Synthetic oligonucleotide
  Antisense strand to SEQ ID NO: 296604
ucuugggagagucuuacgc

SEQ ID NO: 296606 - RNA, 19 nt, Artificial Sequence
  Description of Artificial Sequence: Synthetic oligonucleotide
  Sense strand starting at position 1653 of SEQ ID NO: 3812
ggaaguaauguaggcagaa

SEQ ID NO: 296607 - RNA, 19 nt, Artificial Sequence
  Description of Artificial Sequence: Synthetic oligonucleotide
  Antisense strand to SEQ ID NO: 296606
uucugccuacauuacuucc

SEQ ID NO: 296608 - RNA, 19 nt, Artificial Sequence
  Description of Artificial Sequence: Synthetic oligonucleotide
  Sense strand starting at position 2244 of SEQ ID NO: 3812
cgcauacuucuggaacuaa

SEQ ID NO: 296609 - RNA, 19 nt, Artificial Sequence
  Description of Artificial Sequence: Synthetic oligonucleotide
  Antisense strand to SEQ ID NO: 296608
uuaguuccagaaguaugcg

SEQ ID NO: 296610 - RNA, 19 nt, Artificial Sequence
  Description of Artificial Sequence: Synthetic oligonucleotide
  Sense strand starting at position 2675 of SEQ ID NO: 3812
ggugaucaugcacagauug

SEQ ID NO: 296611 - RNA, 19 nt, Artificial Sequence
  Description of Artificial Sequence: Synthetic oligonucleotide
  Antisense strand to SEQ ID NO: 296610
caaucugugcaugaucacc

SEQ ID NO: 296612 - RNA, 19 nt, Artificial Sequence
  Description of Artificial Sequence: Synthetic oligonucleotide
  Sense strand starting at position 2696 of SEQ ID NO: 3812
gccagaagucgagauucug

SEQ ID NO: 296613 - RNA, 19 nt, Artificial Sequence
  Description of Artificial Sequence: Synthetic oligonucleotide
  Antisense strand to SEQ ID NO: 296612
cagaaucucgacuucuggc

SEQ ID NO: 296614 - RNA, 19 nt, Artificial Sequence
  Description of Artificial Sequence: Synthetic oligonucleotide
  Sense strand starting at position 2919 of SEQ ID NO: 3812
guuucccaccuuuauguua

SEQ ID NO: 296615 - RNA, 19 nt, Artificial Sequence
  Description of Artificial Sequence: Synthetic oligonucleotide
  Antisense strand to SEQ ID NO: 296614
uaacauaaaggugggaaac

SEQ ID NO: 296616 - RNA, 19 nt, Artificial Sequence
  Description of Artificial Sequence: Synthetic oligonucleotide
  Sense strand starting at position 3121 of SEQ ID NO: 3812
ugucccaucucccuugauu

SEQ ID NO: 296617 - RNA, 19 nt, Artificial Sequence
  Description of Artificial Sequence: Synthetic oligonucleotide
  Antisense strand to SEQ ID NO: 296616
aaucaagggagaugggaca

SEQ ID NO: 296618 - RNA, 19 nt, Artificial Sequence
  Description of Artificial Sequence: Synthetic oligonucleotide
  Sense strand starting at position 3359 of SEQ ID NO: 3812
uccugauucuuggcacaca

SEQ ID NO: 296619 - RNA, 19 nt, Artificial Sequence
  Description of Artificial Sequence: Synthetic oligonucleotide
  Antisense strand to SEQ ID NO: 296618
ugugugccaagaaucagga

SEQ ID NO: 296620 - RNA, 19 nt, Artificial Sequence
  Description of Artificial Sequence: Synthetic oligonucleotide
  Sense strand starting at position 3377 of SEQ ID NO: 3812
augguauauggugaugcuu

SEQ ID NO: 296621 - RNA, 19 nt, Artificial Sequence
  Description of Artificial Sequence: Synthetic oligonucleotide
  Antisense strand to SEQ ID NO: 296620
aagcaucaccauauaccau

SEQ ID NO: 296622 - RNA, 19 nt, Artificial Sequence
  Description of Artificial Sequence: Synthetic oligonucleotide
  Sense strand starting at position 3415 of SEQ ID NO: 3812
cugcuugcugaccaagagu

SEQ ID NO: 296623 - RNA, 19 nt, Artificial Sequence
  Description of Artificial Sequence: Synthetic oligonucleotide
  Antisense strand to SEQ ID NO: 296622
acucuuggucagcaagcag

SEQ ID NO: 296624 - RNA, 19 nt, Artificial Sequence
  Description of Artificial Sequence: Synthetic oligonucleotide
  Sense strand starting at position 3422 of SEQ ID NO: 3812
cugaccaagagucguuuau

SEQ ID NO: 296625 - RNA, 19 nt, Artificial Sequence
  Description of Artificial Sequence: Synthetic oligonucleotide
  Antisense strand to SEQ ID NO: 296624
auaaacgacucuuggucag

SEQ ID NO: 296626 - RNA, 19 nt, Artificial Sequence
  Description of Artificial Sequence: Synthetic oligonucleotide
  Sense strand starting at position 3424 of SEQ ID NO: 3812
gaccaagagucguuuauca

SEQ ID NO: 296627 - RNA, 19 nt, Artificial Sequence
  Description of Artificial Sequence: Synthetic oligonucleotide
  Antisense strand to SEQ ID NO: 296626
ugauaaacgacucuugguc

SEQ ID NO: 296628 - RNA, 19 nt, Artificial Sequence
  Description of Artificial Sequence: Synthetic oligonucleotide
  Sense strand starting at position 3426 of SEQ ID NO: 3812
ccaagagucguuuaucaua

SEQ ID NO: 296629 - RNA, 19 nt, Artificial Sequence
  Description of Artificial Sequence: Synthetic oligonucleotide
  Antisense strand to SEQ ID NO: 296628
uaugauaaacgacucuugg

SEQ ID NO: 296630 - RNA, 19 nt, Artificial Sequence
  Description of Artificial Sequence: Synthetic oligonucleotide
  Sense strand starting at position 3428 of SEQ ID NO: 3812
aagagucguuuaucauauu

SEQ ID NO: 296631 - RNA, 19 nt, Artificial Sequence
  Description of Artificial Sequence: Synthetic oligonucleotide
  Antisense strand to SEQ ID NO: 296630
aauaugauaaacgacucuu

SEQ ID NO: 296632 - RNA, 19 nt, Artificial Sequence
  Description of Artificial Sequence: Synthetic oligonucleotide
  Sense strand starting at position 3440 of SEQ ID NO: 3812
ucauauucccauuggguua

SEQ ID NO: 296633 - RNA, 19 nt, Artificial Sequence
  Description of Artificial Sequence: Synthetic oligonucleotide
  Antisense strand to SEQ ID NO: 296632
uaacccaaugggaauauga

SEQ ID NO: 296634 - RNA, 19 nt, Artificial Sequence
  Description of Artificial Sequence: Synthetic oligonucleotide
  Sense strand starting at position 3445 of SEQ ID NO: 3812
uucccauuggguuauaauu

SEQ ID NO: 296635 - RNA, 19 nt, Artificial Sequence
  Description of Artificial Sequence: Synthetic oligonucleotide
  Antisense strand to SEQ ID NO: 296634
aauuauaacccaaugggaa

SEQ ID NO: 296636 - RNA, 19 nt, Artificial Sequence
  Description of Artificial Sequence: Synthetic oligonucleotide
  Sense strand starting at position 3580 of SEQ ID NO: 3812
uugcacuggcuuuagagua

SEQ ID NO: 296637 - RNA, 19 nt, Artificial Sequence
  Description of Artificial Sequence: Synthetic oligonucleotide
  Antisense strand to SEQ ID NO: 296636
uacucuaaagccagugcaa

SEQ ID NO: 296638 - RNA, 19 nt, Artificial Sequence
  Description of Artificial Sequence: Synthetic oligonucleotide
  Sense strand starting at position 3585 of SEQ ID NO: 3812
cuggcuuuagaguacaagu

SEQ ID NO: 296639 - RNA, 19 nt, Artificial Sequence
  Description of Artificial Sequence: Synthetic oligonucleotide
  Antisense strand to SEQ ID NO: 296638
acuuguacucuaaagccag

SEQ ID NO: 296640 - RNA, 19 nt, Artificial Sequence
  Description of Artificial Sequence: Synthetic oligonucleotide
  Sense strand starting at position 3623 of SEQ ID NO: 3812
cuacaaccugcuuguugaa

SEQ ID NO: 296641 - RNA, 19 nt, Artificial Sequence
  Description of Artificial Sequence: Synthetic oligonucleotide
  Antisense strand to SEQ ID NO: 296640
uucaacaagcagguuguag

SEQ ID NO: 296642 - RNA, 19 nt, Artificial Sequence
  Description of Artificial Sequence: Synthetic oligonucleotide
  Sense strand starting at position 3625 of SEQ ID NO: 3812
acaaccugcuuguugaaga

SEQ ID NO: 296643 - RNA, 19 nt, Artificial Sequence
  Description of Artificial Sequence: Synthetic oligonucleotide
  Antisense strand to SEQ ID NO: 296642
ucuucaacaagcagguugu

SEQ ID NO: 296644 - RNA, 19 nt, Artificial Sequence
  Description of Artificial Sequence: Synthetic oligonucleotide
  Sense strand starting at position 3636 of SEQ ID NO: 3812
guugaagaugcccaaaucu

SEQ ID NO: 296645 - RNA, 19 nt, Artificial Sequence
  Description of Artificial Sequence: Synthetic oligonucleotide
  Antisense strand to SEQ ID NO: 296644
agauuugggcaucuucaac

SEQ ID NO: 296646 - RNA, 19 nt, Artificial Sequence
  Description of Artificial Sequence: Synthetic oligonucleotide
  Sense strand starting at position 3653 of SEQ ID NO: 3812
cuagauugccagcaaagau

SEQ ID NO: 296647 - RNA, 19 nt, Artificial Sequence
  Description of Artificial Sequence: Synthetic oligonucleotide
  Antisense strand to SEQ ID NO: 296646
aucuuugcuggcaaucuag

SEQ ID NO: 296648 - RNA, 19 nt, Artificial Sequence
  Description of Artificial Sequence: Synthetic oligonucleotide
  Sense strand starting at position 3668 of SEQ ID NO: 3812
agauaugagcuuuagcucu

SEQ ID NO: 296649 - RNA, 19 nt, Artificial Sequence
  Description of Artificial Sequence: Synthetic oligonucleotide
  Antisense strand to SEQ ID NO: 296648
agagcuaaagcucauaucu

SEQ ID NO: 296650 - RNA, 19 nt, Artificial Sequence
  Description of Artificial Sequence: Synthetic oligonucleotide
  Sense strand starting at position 3804 of SEQ ID NO: 3812
uucuauguuccugaguguu

SEQ ID NO: 296651 - RNA, 19 nt, Artificial Sequence
  Description of Artificial Sequence: Synthetic oligonucleotide
  Antisense strand to SEQ ID NO: 296650
aacacucaggaacauagaa

SEQ ID NO: 296652 - RNA, 19 nt, Artificial Sequence
  Description of Artificial Sequence: Synthetic oligonucleotide
  Sense strand starting at position 51 of SEQ ID NO: 3813
ggcuguaacgaugacaauc

SEQ ID NO: 296653 - RNA, 19 nt, Artificial Sequence
  Description of Artificial Sequence: Synthetic oligonucleotide
  Antisense strand to SEQ ID NO: 296652
gauugucaucguuacagcc

SEQ ID NO: 296654 - RNA, 19 nt, Artificial Sequence
  Description of Artificial Sequence: Synthetic oligonucleotide
  Sense strand starting at position 151 of SEQ ID NO: 3813
acgugaucuccgaggcaug

SEQ ID NO: 296655 - RNA, 19 nt, Artificial Sequence
  Description of Artificial Sequence: Synthetic oligonucleotide
  Antisense strand to SEQ ID NO: 296654
caugccucggagaucacgu

SEQ ID NO: 296656 - RNA, 19 nt, Artificial Sequence
  Description of Artificial Sequence: Synthetic oligonucleotide
  Sense strand starting at position 380 of SEQ ID NO: 3813
cuucgugugccuuuagcau

SEQ ID NO: 296657 - RNA, 19 nt, Artificial Sequence
  Description of Artificial Sequence: Synthetic oligonucleotide
  Antisense strand to SEQ ID NO: 296656
augcuaaaggcacacgaag

SEQ ID NO: 296658 - RNA, 19 nt, Artificial Sequence
  Description of Artificial Sequence: Synthetic oligonucleotide
  Sense strand starting at position 465 of SEQ ID NO: 3813
auuaucuagccacaguaua

SEQ ID NO: 296659 - RNA, 19 nt, Artificial Sequence
  Description of Artificial Sequence: Synthetic oligonucleotide
  Antisense strand to SEQ ID NO: 296658
uauacuguggcuagauaau

SEQ ID NO: 296660 - RNA, 19 nt, Artificial Sequence
  Description of Artificial Sequence: Synthetic oligonucleotide
  Sense strand starting at position 553 of SEQ ID NO: 3813
ucucuaggaucuucgaauu

SEQ ID NO: 296661 - RNA, 19 nt, Artificial Sequence
  Description of Artificial Sequence: Synthetic oligonucleotide
  Antisense strand to SEQ ID NO: 296660
aauucgaagauccuagaga

SEQ ID NO: 296662 - RNA, 19 nt, Artificial Sequence
  Description of Artificial Sequence: Synthetic oligonucleotide
  Sense strand starting at position 777 of SEQ ID NO: 3813
acgggccauccucaagauu

SEQ ID NO: 296663 - RNA, 19 nt, Artificial Sequence
  Description of Artificial Sequence: Synthetic oligonucleotide
  Antisense strand to SEQ ID NO: 296662
aaucuugaggauggcccgu

SEQ ID NO: 296664 - RNA, 19 nt, Artificial Sequence
  Description of Artificial Sequence: Synthetic oligonucleotide
  Sense strand starting at position 783 of SEQ ID NO: 3813
cauccucaagauuggguaa

SEQ ID NO: 296665 - RNA, 19 nt, Artificial Sequence
  Description of Artificial Sequence: Synthetic oligonucleotide
  Antisense strand to SEQ ID NO: 296664
uuacccaaucuugaggaug

SEQ ID NO: 296666 - RNA, 19 nt, Artificial Sequence
  Description of Artificial Sequence: Synthetic oligonucleotide
  Sense strand starting at position 857 of SEQ ID NO: 3813
uccgcaaaucccugagaaa

SEQ ID NO: 296667 - RNA, 19 nt, Artificial Sequence
  Description of Artificial Sequence: Synthetic oligonucleotide
  Antisense strand to SEQ ID NO: 296666
uuucucagggauuugcgga

SEQ ID NO: 296668 - RNA, 19 nt, Artificial Sequence
  Description of Artificial Sequence: Synthetic oligonucleotide
  Sense strand starting at position 858 of SEQ ID NO: 3813
ccgcaaaucccugagaaac

SEQ ID NO: 296669 - RNA, 19 nt, Artificial Sequence
  Description of Artificial Sequence: Synthetic oligonucleotide
  Antisense strand to SEQ ID NO: 296668
guuucucagggauuugcgg

SEQ ID NO: 296670 - RNA, 19 nt, Artificial Sequence
  Description of Artificial Sequence: Synthetic oligonucleotide
  Sense strand starting at position 1246 of SEQ ID NO: 3813
ccgcaauuuaaccgauugu

SEQ ID NO: 296671 - RNA, 19 nt, Artificial Sequence
  Description of Artificial Sequence: Synthetic oligonucleotide
  Antisense strand to SEQ ID NO: 296670
acaaucgguuaaauugcgg

SEQ ID NO: 296672 - RNA, 19 nt, Artificial Sequence
  Description of Artificial Sequence: Synthetic oligonucleotide
  Sense strand starting at position 1247 of SEQ ID NO: 3813
cgcaauuuaaccgauuguu

SEQ ID NO: 296673 - RNA, 19 nt, Artificial Sequence
  Description of Artificial Sequence: Synthetic oligonucleotide
  Antisense strand to SEQ ID NO: 296672
aacaaucgguuaaauugcg

SEQ ID NO: 296674 - RNA, 19 nt, Artificial Sequence
  Description of Artificial Sequence: Synthetic oligonucleotide
  Sense strand starting at position 1289 of SEQ ID NO: 3813
cugccaauuucguucuauc

SEQ ID NO: 296675 - RNA, 19 nt, Artificial Sequence
  Description of Artificial Sequence: Synthetic oligonucleotide
  Antisense strand to SEQ ID NO: 296674
gauagaacgaaauuggcag

SEQ ID NO: 296676 - RNA, 19 nt, Artificial Sequence
  Description of Artificial Sequence: Synthetic oligonucleotide
  Sense strand starting at position 1532 of SEQ ID NO: 3813
uacggaacucggcagagau

SEQ ID NO: 296677 - RNA, 19 nt, Artificial Sequence
  Description of Artificial Sequence: Synthetic oligonucleotide
  Antisense strand to SEQ ID NO: 296676
aucucugccgaguuccgua

SEQ ID NO: 296678 - RNA, 19 nt, Artificial Sequence
  Description of Artificial Sequence: Synthetic oligonucleotide
  Sense strand starting at position 1878 of SEQ ID NO: 3813
ccggguucgcguuuauaua

SEQ ID NO: 296679 - RNA, 19 nt, Artificial Sequence
  Description of Artificial Sequence: Synthetic oligonucleotide
  Antisense strand to SEQ ID NO: 296678
uauauaaacgcgaacccgg

SEQ ID NO: 296680 - RNA, 19 nt, Artificial Sequence
  Description of Artificial Sequence: Synthetic oligonucleotide
  Sense strand starting at position 2044 of SEQ ID NO: 3813
ccacgaucucuccaguaaa

SEQ ID NO: 296681 - RNA, 19 nt, Artificial Sequence
  Description of Artificial Sequence: Synthetic oligonucleotide
  Antisense strand to SEQ ID NO: 296680
uuuacuggagagaucgugg

SEQ ID NO: 296682 - RNA, 19 nt, Artificial Sequence
  Description of Artificial Sequence: Synthetic oligonucleotide
  Sense strand starting at position 2047 of SEQ ID NO: 3813
cgaucucuccaguaaaccu

SEQ ID NO: 296683 - RNA, 19 nt, Artificial Sequence
  Description of Artificial Sequence: Synthetic oligonucleotide
  Antisense strand to SEQ ID NO: 296682
agguuuacuggagagaucg

SEQ ID NO: 296684 - RNA, 19 nt, Artificial Sequence
  Description of Artificial Sequence: Synthetic oligonucleotide
  Sense strand starting at position 2188 of SEQ ID NO: 3813
uuaacaaucuuaguacgga

SEQ ID NO: 296685 - RNA, 19 nt, Artificial Sequence
  Description of Artificial Sequence: Synthetic oligonucleotide
  Antisense strand to SEQ ID NO: 296684
uccguacuaagauuguuaa

SEQ ID NO: 296686 - RNA, 19 nt, Artificial Sequence
  Description of Artificial Sequence: Synthetic oligonucleotide
  Sense strand starting at position 2210 of SEQ ID NO: 3813
auuagaccggccuaugaaa

SEQ ID NO: 296687 - RNA, 19 nt, Artificial Sequence
  Description of Artificial Sequence: Synthetic oligonucleotide
  Antisense strand to SEQ ID NO: 296686
uuucauaggccggucuaau

SEQ ID NO: 296688 - RNA, 19 nt, Artificial Sequence
  Description of Artificial Sequence: Synthetic oligonucleotide
  Sense strand starting at position 2222 of SEQ ID NO: 3813
uaugaaaggcuguacaauu

SEQ ID NO: 296689 - RNA, 19 nt, Artificial Sequence
  Description of Artificial Sequence: Synthetic oligonucleotide
  Antisense strand to SEQ ID NO: 296688
aauuguacagccuuucaua

SEQ ID NO: 296690 - RNA, 19 nt, Artificial Sequence
  Description of Artificial Sequence: Synthetic oligonucleotide
  Sense strand starting at position 2236 of SEQ ID NO: 3813
caauuuaaccgcugauguu

SEQ ID NO: 296691 - RNA, 19 nt, Artificial Sequence
  Description of Artificial Sequence: Synthetic oligonucleotide
  Antisense strand to SEQ ID NO: 296690
aacaucagcgguuaaauug

SEQ ID NO: 296692 - RNA, 19 nt, Artificial Sequence
  Description of Artificial Sequence: Synthetic oligonucleotide
  Sense strand starting at position 2312 of SEQ ID NO: 3813
gggcucaucagagguaauc

SEQ ID NO: 296693 - RNA, 19 nt, Artificial Sequence
  Description of Artificial Sequence: Synthetic oligonucleotide
  Antisense strand to SEQ ID NO: 296692
gauuaccucugaugagccc

SEQ ID NO: 296694 - RNA, 19 nt, Artificial Sequence
  Description of Artificial Sequence: Synthetic oligonucleotide
  Sense strand starting at position 2314 of SEQ ID NO: 3813
gcucaucagagguaaucga

SEQ ID NO: 296695 - RNA, 19 nt, Artificial Sequence
  Description of Artificial Sequence: Synthetic oligonucleotide
  Antisense strand to SEQ ID NO: 296694
ucgauuaccucugaugagc

SEQ ID NO: 296696 - RNA, 19 nt, Artificial Sequence
  Description of Artificial Sequence: Synthetic oligonucleotide
  Sense strand starting at position 2496 of SEQ ID NO: 3813
guucuuggagucugaaaga

SEQ ID NO: 296697 - RNA, 19 nt, Artificial Sequence
  Description of Artificial Sequence: Synthetic oligonucleotide
  Antisense strand to SEQ ID NO: 296696
ucuuucagacuccaagaac

SEQ ID NO: 296698 - RNA, 19 nt, Artificial Sequence
  Description of Artificial Sequence: Synthetic oligonucleotide
  Sense strand starting at position 2627 of SEQ ID NO: 3813
gcaucugaagcucaaagua

SEQ ID NO: 296699 - RNA, 19 nt, Artificial Sequence
  Description of Artificial Sequence: Synthetic oligonucleotide
  Antisense strand to SEQ ID NO: 296698
uacuuugagcuucagaugc

SEQ ID NO: 296700 - RNA, 19 nt, Artificial Sequence
  Description of Artificial Sequence: Synthetic oligonucleotide
  Sense strand starting at position 2742 of SEQ ID NO: 3813
aucuccacucaguggaaau

SEQ ID NO: 296701 - RNA, 19 nt, Artificial Sequence
  Description of Artificial Sequence: Synthetic oligonucleotide
  Antisense strand to SEQ ID NO: 296700
auuuccacugaguggagau

SEQ ID NO: 296702 - RNA, 19 nt, Artificial Sequence
  Description of Artificial Sequence: Synthetic oligonucleotide
  Sense strand starting at position 2815 of SEQ ID NO: 3813
acauuagaauugcucuaga

SEQ ID NO: 296703 - RNA, 19 nt, Artificial Sequence
  Description of Artificial Sequence: Synthetic oligonucleotide
  Antisense strand to SEQ ID NO: 296702
ucuagagcaauucuaaugu

SEQ ID NO: 296704 - RNA, 19 nt, Artificial Sequence
  Description of Artificial Sequence: Synthetic oligonucleotide
  Sense strand starting at position 2818 of SEQ ID NO: 3813
uuagaauugcucuagacac

SEQ ID NO: 296705 - RNA, 19 nt, Artificial Sequence
  Description of Artificial Sequence: Synthetic oligonucleotide
  Antisense strand to SEQ ID NO: 296704
gugucuagagcaauucuaa

SEQ ID NO: 296706 - RNA, 19 nt, Artificial Sequence
  Description of Artificial Sequence: Synthetic oligonucleotide
  Sense strand starting at position 2886 of SEQ ID NO: 3813
caucguaaauucuuggaau

SEQ ID NO: 296707 - RNA, 19 nt, Artificial Sequence
  Description of Artificial Sequence: Synthetic oligonucleotide
  Antisense strand to SEQ ID NO: 296706
auuccaagaauuuacgaug

SEQ ID NO: 296708 - RNA, 19 nt, Artificial Sequence
  Description of Artificial Sequence: Synthetic oligonucleotide
  Sense strand starting at position 2888 of SEQ ID NO: 3813
ucguaaauucuuggaauac

SEQ ID NO: 296709 - RNA, 19 nt, Artificial Sequence
  Description of Artificial Sequence: Synthetic oligonucleotide
  Antisense strand to SEQ ID NO: 296708
guauuccaagaauuuacga

SEQ ID NO: 296710 - RNA, 19 nt, Artificial Sequence
  Description of Artificial Sequence: Synthetic oligonucleotide
  Sense strand starting at position 2988 of SEQ ID NO: 3813
ugaguauagguguggaaug

SEQ ID NO: 296711 - RNA, 19 nt, Artificial Sequence
  Description of Artificial Sequence: Synthetic oligonucleotide
  Antisense strand to SEQ ID NO: 296710
cauuccacaccuauacuca

SEQ ID NO: 296712 - RNA, 19 nt, Artificial Sequence
  Description of Artificial Sequence: Synthetic oligonucleotide
  Sense strand starting at position 3025 of SEQ ID NO: 3813
ggccuaguuggugaauaaa

SEQ ID NO: 296713 - RNA, 19 nt, Artificial Sequence
  Description of Artificial Sequence: Synthetic oligonucleotide
  Antisense strand to SEQ ID NO: 296712
uuuauucaccaacuaggcc

SEQ ID NO: 296714 - RNA, 19 nt, Artificial Sequence
  Description of Artificial Sequence: Synthetic oligonucleotide
  Sense strand starting at position 3035 of SEQ ID NO: 3813
gugaauaaagcauggauuc

SEQ ID NO: 296715 - RNA, 19 nt, Artificial Sequence
  Description of Artificial Sequence: Synthetic oligonucleotide
  Antisense strand to SEQ ID NO: 296714
gaauccaugcuuuauucac

SEQ ID NO: 296716 - RNA, 19 nt, Artificial Sequence
  Description of Artificial Sequence: Synthetic oligonucleotide
  Sense strand starting at position 3036 of SEQ ID NO: 3813
ugaauaaagcauggauucu

SEQ ID NO: 296717 - RNA, 19 nt, Artificial Sequence
  Description of Artificial Sequence: Synthetic oligonucleotide
  Antisense strand to SEQ ID NO: 296716
agaauccaugcuuuauuca

SEQ ID NO: 296718 - RNA, 19 nt, Artificial Sequence
  Description of Artificial Sequence: Synthetic oligonucleotide
  Sense strand starting at position 3048 of SEQ ID NO: 3813
ggauucuuuccaggucaug

SEQ ID NO: 296719 - RNA, 19 nt, Artificial Sequence
  Description of Artificial Sequence: Synthetic oligonucleotide
  Antisense strand to SEQ ID NO: 296718
caugaccuggaaagaaucc

SEQ ID NO: 296720 - RNA, 19 nt, Artificial Sequence
  Description of Artificial Sequence: Synthetic oligonucleotide
  Sense strand starting at position 3091 of SEQ ID NO: 3813
cguugauuaaguuauggag

SEQ ID NO: 296721 - RNA, 19 nt, Artificial Sequence
  Description of Artificial Sequence: Synthetic oligonucleotide
  Antisense strand to SEQ ID NO: 296720
cuccauaacuuaaucaacg

SEQ ID NO: 296722 - RNA, 19 nt, Artificial Sequence
  Description of Artificial Sequence: Synthetic oligonucleotide
  Sense strand starting at position 3147 of SEQ ID NO: 3813
auagaagcucuguagagua

SEQ ID NO: 296723 - RNA, 19 nt, Artificial Sequence
  Description of Artificial Sequence: Synthetic oligonucleotide
  Antisense strand to SEQ ID NO: 296722
uacucuacagagcuucuau

SEQ ID NO: 296724 - RNA, 19 nt, Artificial Sequence
  Description of Artificial Sequence: Synthetic oligonucleotide
  Sense strand starting at position 3149 of SEQ ID NO: 3813
agaagcucuguagaguaua

SEQ ID NO: 296725 - RNA, 19 nt, Artificial Sequence
  Description of Artificial Sequence: Synthetic oligonucleotide
  Antisense strand to SEQ ID NO: 296724
uauacucuacagagcuucu

SEQ ID NO: 296726 - RNA, 19 nt, Artificial Sequence
  Description of Artificial Sequence: Synthetic oligonucleotide
  Sense strand starting at position 3176 of SEQ ID NO: 3813
cccuuagucuuggugauuu

SEQ ID NO: 296727 - RNA, 19 nt, Artificial Sequence
  Description of Artificial Sequence: Synthetic oligonucleotide
  Antisense strand to SEQ ID NO: 296726
aaaucaccaagacuaaggg

SEQ ID NO: 296728 - RNA, 19 nt, Artificial Sequence
  Description of Artificial Sequence: Synthetic oligonucleotide
  Sense strand starting at position 3584 of SEQ ID NO: 3813
auuauaugguaucugaaag

SEQ ID NO: 296729 - RNA, 19 nt, Artificial Sequence
  Description of Artificial Sequence: Synthetic oligonucleotide
  Antisense strand to SEQ ID NO: 296728
cuuucagauaccauauaau

SEQ ID NO: 296730 - RNA, 19 nt, Artificial Sequence
  Description of Artificial Sequence: Synthetic oligonucleotide
  Sense strand starting at position 3636 of SEQ ID NO: 3813
ugacuuucuucuguuaaga

SEQ ID NO: 296731 - RNA, 19 nt, Artificial Sequence
  Description of Artificial Sequence: Synthetic oligonucleotide
  Antisense strand to SEQ ID NO: 296730
ucuuaacagaagaaaguca

SEQ ID NO: 296732 - RNA, 19 nt, Artificial Sequence
  Description of Artificial Sequence: Synthetic oligonucleotide
  Sense strand starting at position 230 of SEQ ID NO: 3815
cugugcauuuguuugguau

SEQ ID NO: 296733 - RNA, 19 nt, Artificial Sequence
  Description of Artificial Sequence: Synthetic oligonucleotide
  Antisense strand to SEQ ID NO: 296732
auaccaaacaaaugcacag

SEQ ID NO: 296734 - RNA, 19 nt, Artificial Sequence
  Description of Artificial Sequence: Synthetic oligonucleotide
  Sense strand starting at position 645 of SEQ ID NO: 3815
auguuacaguuccuuagau

SEQ ID NO: 296735 - RNA, 19 nt, Artificial Sequence
  Description of Artificial Sequence: Synthetic oligonucleotide
  Antisense strand to SEQ ID NO: 296734
aucuaaggaacuguaacau

SEQ ID NO: 296736 - RNA, 19 nt, Artificial Sequence
  Description of Artificial Sequence: Synthetic oligonucleotide
  Sense strand starting at position 647 of SEQ ID NO: 3815
guuacaguuccuuagauac

SEQ ID NO: 296737 - RNA, 19 nt, Artificial Sequence
  Description of Artificial Sequence: Synthetic oligonucleotide
  Antisense strand to SEQ ID NO: 296736
guaucuaaggaacuguaac

SEQ ID NO: 296738 - RNA, 19 nt, Artificial Sequence
  Description of Artificial Sequence: Synthetic oligonucleotide
  Sense strand starting at position 658 of SEQ ID NO: 3815
uuagauacucuaugcuaag

SEQ ID NO: 296739 - RNA, 19 nt, Artificial Sequence
  Description of Artificial Sequence: Synthetic oligonucleotide
  Antisense strand to SEQ ID NO: 296738
cuuagcauagaguaucuaa

SEQ ID NO: 296740 - RNA, 19 nt, Artificial Sequence
  Description of Artificial Sequence: Synthetic oligonucleotide
  Sense strand starting at position 697 of SEQ ID NO: 3815
gggagaauguggucauacu

SEQ ID NO: 296741 - RNA, 19 nt, Artificial Sequence
  Description of Artificial Sequence: Synthetic oligonucleotide
  Antisense strand to SEQ ID NO: 296740
aguaugaccacauucuccc

SEQ ID NO: 296742 - RNA, 19 nt, Artificial Sequence
  Description of Artificial Sequence: Synthetic oligonucleotide
  Sense strand starting at position 769 of SEQ ID NO: 3815
gccaguuuccuguuucgua

SEQ ID NO: 296743 - RNA, 19 nt, Artificial Sequence
  Description of Artificial Sequence: Synthetic oligonucleotide
  Antisense strand to SEQ ID NO: 296742
uacgaaacaggaaacuggc

SEQ ID NO: 296744 - RNA, 19 nt, Artificial Sequence
  Description of Artificial Sequence: Synthetic oligonucleotide
  Sense strand starting at position 771 of SEQ ID NO: 3815
caguuuccuguuucguauu

SEQ ID NO: 296745 - RNA, 19 nt, Artificial Sequence
  Description of Artificial Sequence: Synthetic oligonucleotide
  Antisense strand to SEQ ID NO: 296744
aauacgaaacaggaaacug

SEQ ID NO: 296746 - RNA, 19 nt, Artificial Sequence
  Description of Artificial Sequence: Synthetic oligonucleotide
  Sense strand starting at position 781 of SEQ ID NO: 3815
uuucguauuccugacauua

SEQ ID NO: 296747 - RNA, 19 nt, Artificial Sequence
  Description of Artificial Sequence: Synthetic oligonucleotide
  Antisense strand to SEQ ID NO: 296746
uaaugucaggaauacgaaa

SEQ ID NO: 296748 - RNA, 19 nt, Artificial Sequence
  Description of Artificial Sequence: Synthetic oligonucleotide
  Sense strand starting at position 794 of SEQ ID NO: 3815
acauuagcacugcaaugaa

SEQ ID NO: 296749 - RNA, 19 nt, Artificial Sequence
  Description of Artificial Sequence: Synthetic oligonucleotide
  Antisense strand to SEQ ID NO: 296748
uucauugcagugcuaaugu

SEQ ID NO: 296750 - RNA, 19 nt, Artificial Sequence
  Description of Artificial Sequence: Synthetic oligonucleotide
  Sense strand starting at position 942 of SEQ ID NO: 3815
ucgagaauauugccauuag

SEQ ID NO: 296751 - RNA, 19 nt, Artificial Sequence
  Description of Artificial Sequence: Synthetic oligonucleotide
  Antisense strand to SEQ ID NO: 296750
cuaauggcaauauucucga

SEQ ID NO: 296752 - RNA, 19 nt, Artificial Sequence
  Description of Artificial Sequence: Synthetic oligonucleotide
  Sense strand starting at position 946 of SEQ ID NO: 3815
gaauauugccauuaguuga

SEQ ID NO: 296753 - RNA, 19 nt, Artificial Sequence
  Description of Artificial Sequence: Synthetic oligonucleotide
  Antisense strand to SEQ ID NO: 296752
ucaacuaauggcaauauuc

SEQ ID NO: 296754 - RNA, 19 nt, Artificial Sequence
  Description of Artificial Sequence: Synthetic oligonucleotide
  Sense strand starting at position 956 of SEQ ID NO: 3815
auuaguugacucuaguuau

SEQ ID NO: 296755 - RNA, 19 nt, Artificial Sequence
  Description of Artificial Sequence: Synthetic oligonucleotide
  Antisense strand to SEQ ID NO: 296754
auaacuagagucaacuaau

SEQ ID NO: 296756 - RNA, 19 nt, Artificial Sequence
  Description of Artificial Sequence: Synthetic oligonucleotide
  Sense strand starting at position 959 of SEQ ID NO: 3815
aguugacucuaguuaugaa

SEQ ID NO: 296757 - RNA, 19 nt, Artificial Sequence
  Description of Artificial Sequence: Synthetic oligonucleotide
  Antisense strand to SEQ ID NO: 296756
uucauaacuagagucaacu

SEQ ID NO: 296758 - RNA, 19 nt, Artificial Sequence
  Description of Artificial Sequence: Synthetic oligonucleotide
  Sense strand starting at position 986 of SEQ ID NO: 3815
gguacacuuccuggaagca

SEQ ID NO: 296759 - RNA, 19 nt, Artificial Sequence
  Description of Artificial Sequence: Synthetic oligonucleotide
  Antisense strand to SEQ ID NO: 296758
ugcuuccaggaaguguacc

SEQ ID NO: 296760 - RNA, 19 nt, Artificial Sequence
  Description of Artificial Sequence: Synthetic oligonucleotide
  Sense strand starting at position 987 of SEQ ID NO: 3815
guacacuuccuggaagcau

SEQ ID NO: 296761 - RNA, 19 nt, Artificial Sequence
  Description of Artificial Sequence: Synthetic oligonucleotide
  Antisense strand to SEQ ID NO: 296760
augcuuccaggaaguguac

SEQ ID NO: 296762 - RNA, 19 nt, Artificial Sequence
  Description of Artificial Sequence: Synthetic oligonucleotide
  Sense strand starting at position 1027 of SEQ ID NO: 3815
auucgauaccauggauaca

SEQ ID NO: 296763 - RNA, 19 nt, Artificial Sequence
  Description of Artificial Sequence: Synthetic oligonucleotide
  Antisense strand to SEQ ID NO: 296762
uguauccaugguaucgaau

SEQ ID NO: 296764 - RNA, 19 nt, Artificial Sequence
  Description of Artificial Sequence: Synthetic oligonucleotide
  Sense strand starting at position 1266 of SEQ ID NO: 3815
aauguacgacuguaaauga

SEQ ID NO: 296765 - RNA, 19 nt, Artificial Sequence
  Description of Artificial Sequence: Synthetic oligonucleotide
  Antisense strand to SEQ ID NO: 296764
ucauuuacagucguacauu

SEQ ID NO: 296766 - RNA, 19 nt, Artificial Sequence
  Description of Artificial Sequence: Synthetic oligonucleotide
  Sense strand starting at position 1281 of SEQ ID NO: 3815
augaaauauuacccacguu

SEQ ID NO: 296767 - RNA, 19 nt, Artificial Sequence
  Description of Artificial Sequence: Synthetic oligonucleotide
  Antisense strand to SEQ ID NO: 296766
aacguggguaauauuucau

SEQ ID NO: 296768 - RNA, 19 nt, Artificial Sequence
  Description of Artificial Sequence: Synthetic oligonucleotide
  Sense strand starting at position 1812 of SEQ ID NO: 3815
ucauuagccaccgagaguu

SEQ ID NO: 296769 - RNA, 19 nt, Artificial Sequence
  Description of Artificial Sequence: Synthetic oligonucleotide
  Antisense strand to SEQ ID NO: 296768
aacucucgguggcuaauga

SEQ ID NO: 296770 - RNA, 19 nt, Artificial Sequence
  Description of Artificial Sequence: Synthetic oligonucleotide
  Sense strand starting at position 1828 of SEQ ID NO: 3815
guuacucaccuuuaagguu

SEQ ID NO: 296771 - RNA, 19 nt, Artificial Sequence
  Description of Artificial Sequence: Synthetic oligonucleotide
  Antisense strand to SEQ ID NO: 296770
aaccuuaaaggugaguaac

SEQ ID NO: 296772 - RNA, 19 nt, Artificial Sequence
  Description of Artificial Sequence: Synthetic oligonucleotide
  Sense strand starting at position 2068 of SEQ ID NO: 3815
ucccaaacagauuggguua

SEQ ID NO: 296773 - RNA, 19 nt, Artificial Sequence
  Description of Artificial Sequence: Synthetic oligonucleotide
  Antisense strand to SEQ ID NO: 296772
uaacccaaucuguuuggga

SEQ ID NO: 296774 - RNA, 19 nt, Artificial Sequence
  Description of Artificial Sequence: Synthetic oligonucleotide
  Sense strand starting at position 2427 of SEQ ID NO: 3815
gugaaacugugaucuugga

SEQ ID NO: 296775 - RNA, 19 nt, Artificial Sequence
  Description of Artificial Sequence: Synthetic oligonucleotide
  Antisense strand to SEQ ID NO: 296774
uccaagaucacaguuucac

SEQ ID NO: 296776 - RNA, 19 nt, Artificial Sequence
  Description of Artificial Sequence: Synthetic oligonucleotide
  Sense strand starting at position 2475 of SEQ ID NO: 3815
uauaaauagggccgguaau

SEQ ID NO: 296777 - RNA, 19 nt, Artificial Sequence
  Description of Artificial Sequence: Synthetic oligonucleotide
  Antisense strand to SEQ ID NO: 296776
auuaccggcccuauuuaua

SEQ ID NO: 296778 - RNA, 19 nt, Artificial Sequence
  Description of Artificial Sequence: Synthetic oligonucleotide
  Sense strand starting at position 2476 of SEQ ID NO: 3815
auaaauagggccgguaaua

SEQ ID NO: 296779 - RNA, 19 nt, Artificial Sequence
  Description of Artificial Sequence: Synthetic oligonucleotide
  Antisense strand to SEQ ID NO: 296778
uauuaccggcccuauuuau

SEQ ID NO: 296780 - RNA, 19 nt, Artificial Sequence
  Description of Artificial Sequence: Synthetic oligonucleotide
  Sense strand starting at position 2591 of SEQ ID NO: 3815
caguuuauuugagccaagu

SEQ ID NO: 296781 - RNA, 19 nt, Artificial Sequence
  Description of Artificial Sequence: Synthetic oligonucleotide
  Antisense strand to SEQ ID NO: 296780
acuuggcucaaauaaacug

SEQ ID NO: 296782 - RNA, 19 nt, Artificial Sequence
  Description of Artificial Sequence: Synthetic oligonucleotide
  Sense strand starting at position 2711 of SEQ ID NO: 3815
uccuaaauuguuuaccgau

SEQ ID NO: 296783 - RNA, 19 nt, Artificial Sequence
  Description of Artificial Sequence: Synthetic oligonucleotide
  Antisense strand to SEQ ID NO: 296782
aucgguaaacaauuuagga

SEQ ID NO: 296784 - RNA, 19 nt, Artificial Sequence
  Description of Artificial Sequence: Synthetic oligonucleotide
  Sense strand starting at position 2713 of SEQ ID NO: 3815
cuaaauuguuuaccgauaa

SEQ ID NO: 296785 - RNA, 19 nt, Artificial Sequence
  Description of Artificial Sequence: Synthetic oligonucleotide
  Antisense strand to SEQ ID NO: 296784
uuaucgguaaacaauuuag

SEQ ID NO: 296786 - RNA, 19 nt, Artificial Sequence
  Description of Artificial Sequence: Synthetic oligonucleotide
  Sense strand starting at position 2717 of SEQ ID NO: 3815
auuguuuaccgauaacuua

SEQ ID NO: 296787 - RNA, 19 nt, Artificial Sequence
  Description of Artificial Sequence: Synthetic oligonucleotide
  Antisense strand to SEQ ID NO: 296786
uaaguuaucgguaaacaau

SEQ ID NO: 296788 - RNA, 19 nt, Artificial Sequence
  Description of Artificial Sequence: Synthetic oligonucleotide
  Sense strand starting at position 3119 of SEQ ID NO: 3815
cccagacaugcggaacuau

SEQ ID NO: 296789 - RNA, 19 nt, Artificial Sequence
  Description of Artificial Sequence: Synthetic oligonucleotide
  Antisense strand to SEQ ID NO: 296788
auaguuccgcaugucuggg

SEQ ID NO: 296790 - RNA, 19 nt, Artificial Sequence
  Description of Artificial Sequence: Synthetic oligonucleotide
  Sense strand starting at position 3266 of SEQ ID NO: 3815
ugauaaauuccgcauaccu

SEQ ID NO: 296791 - RNA, 19 nt, Artificial Sequence
  Description of Artificial Sequence: Synthetic oligonucleotide
  Antisense strand to SEQ ID NO: 296790
agguaugcggaauuuauca

SEQ ID NO: 296792 - RNA, 19 nt, Artificial Sequence
  Description of Artificial Sequence: Synthetic oligonucleotide
  Sense strand starting at position 3321 of SEQ ID NO: 3815
ucuuaaggccaaugagaaa

SEQ ID NO: 296793 - RNA, 19 nt, Artificial Sequence
  Description of Artificial Sequence: Synthetic oligonucleotide
  Antisense strand to SEQ ID NO: 296792
uuucucauuggccuuaaga

SEQ ID NO: 296794 - RNA, 19 nt, Artificial Sequence
  Description of Artificial Sequence: Synthetic oligonucleotide
  Sense strand starting at position 3353 of SEQ ID NO: 3815
aggguugugcucagguagu

SEQ ID NO: 296795 - RNA, 19 nt, Artificial Sequence
  Description of Artificial Sequence: Synthetic oligonucleotide
  Antisense strand to SEQ ID NO: 296794
acuaccugagcacaacccu

SEQ ID NO: 296796 - RNA, 19 nt, Artificial Sequence
  Description of Artificial Sequence: Synthetic oligonucleotide
  Sense strand starting at position 3355 of SEQ ID NO: 3815
gguugugcucagguaguuu

SEQ ID NO: 296797 - RNA, 19 nt, Artificial Sequence
  Description of Artificial Sequence: Synthetic oligonucleotide
  Antisense strand to SEQ ID NO: 296796
aaacuaccugagcacaacc

SEQ ID NO: 296798 - RNA, 19 nt, Artificial Sequence
  Description of Artificial Sequence: Synthetic oligonucleotide
  Sense strand starting at position 3469 of SEQ ID NO: 3815
uugaucaagucagugagaa

SEQ ID NO: 296799 - RNA, 19 nt, Artificial Sequence
  Description of Artificial Sequence: Synthetic oligonucleotide
  Antisense strand to SEQ ID NO: 296798
uucucacugacuugaucaa

SEQ ID NO: 296800 - RNA, 19 nt, Artificial Sequence
  Description of Artificial Sequence: Synthetic oligonucleotide
  Sense strand starting at position 3470 of SEQ ID NO: 3815
ugaucaagucagugagaau

SEQ ID NO: 296801 - RNA, 19 nt, Artificial Sequence
  Description of Artificial Sequence: Synthetic oligonucleotide
  Antisense strand to SEQ ID NO: 296800
auucucacugacuugauca

SEQ ID NO: 296802 - RNA, 19 nt, Artificial Sequence
  Description of Artificial Sequence: Synthetic oligonucleotide
  Sense strand starting at position 3507 of SEQ ID NO: 3815
aaauaauaucagugucagg

SEQ ID NO: 296803 - RNA, 19 nt, Artificial Sequence
  Description of Artificial Sequence: Synthetic oligonucleotide
  Antisense strand to SEQ ID NO: 296802
ccugacacugauauuauuu

SEQ ID NO: 296804 - RNA, 19 nt, Artificial Sequence
  Description of Artificial Sequence: Synthetic oligonucleotide
  Sense strand starting at position 3586 of SEQ ID NO: 3815
gaggcuuaacacugggaau

SEQ ID NO: 296805 - RNA, 19 nt, Artificial Sequence
  Description of Artificial Sequence: Synthetic oligonucleotide
  Antisense strand to SEQ ID NO: 296804
auucccaguguuaagccuc

SEQ ID NO: 296806 - RNA, 19 nt, Artificial Sequence
  Description of Artificial Sequence: Synthetic oligonucleotide
  Sense strand starting at position 3588 of SEQ ID NO: 3815
ggcuuaacacugggaauag

SEQ ID NO: 296807 - RNA, 19 nt, Artificial Sequence
  Description of Artificial Sequence: Synthetic oligonucleotide
  Antisense strand to SEQ ID NO: 296806
cuauucccaguguuaagcc

SEQ ID NO: 296808 - RNA, 19 nt, Artificial Sequence
  Description of Artificial Sequence: Synthetic oligonucleotide
  Sense strand starting at position 3613 of SEQ ID NO: 3815
gagucagaaucugccuaga

SEQ ID NO: 296809 - RNA, 19 nt, Artificial Sequence
  Description of Artificial Sequence: Synthetic oligonucleotide
  Antisense strand to SEQ ID NO: 296808
ucuaggcagauucugacuc

SEQ ID NO: 296810 - RNA, 19 nt, Artificial Sequence
  Description of Artificial Sequence: Synthetic oligonucleotide
  Sense strand starting at position 3615 of SEQ ID NO: 3815
gucagaaucugccuagaga

SEQ ID NO: 296811 - RNA, 19 nt, Artificial Sequence
  Description of Artificial Sequence: Synthetic oligonucleotide
  Antisense strand to SEQ ID NO: 296810
ucucuaggcagauucugac

SEQ ID NO: 296812 - RNA, 19 nt, Artificial Sequence
  Description of Artificial Sequence: Synthetic oligonucleotide
  Sense strand starting at position 1 of SEQ ID NO: 3814
accucaauuugaugacaga

SEQ ID NO: 296813 - RNA, 19 nt, Artificial Sequence
  Description of Artificial Sequence: Synthetic oligonucleotide
  Antisense strand to SEQ ID NO: 296812
ucugucaucaaauugaggu

SEQ ID NO: 296814 - RNA, 19 nt, Artificial Sequence
  Description of Artificial Sequence: Synthetic oligonucleotide
  Sense strand starting at position 446 of SEQ ID NO: 3814
cugugcauuuguuugguau

SEQ ID NO: 296815 - RNA, 19 nt, Artificial Sequence
  Description of Artificial Sequence: Synthetic oligonucleotide
  Antisense strand to SEQ ID NO: 296814
auaccaaacaaaugcacag

SEQ ID NO: 296816 - RNA, 19 nt, Artificial Sequence
  Description of Artificial Sequence: Synthetic oligonucleotide
  Sense strand starting at position 863 of SEQ ID NO: 3814
guuacaguuccuuagauac

SEQ ID NO: 296817 - RNA, 19 nt, Artificial Sequence
  Description of Artificial Sequence: Synthetic oligonucleotide
  Antisense strand to SEQ ID NO: 296816
guaucuaaggaacuguaac

SEQ ID NO: 296818 - RNA, 19 nt, Artificial Sequence
  Description of Artificial Sequence: Synthetic oligonucleotide
  Sense strand starting at position 874 of SEQ ID NO: 3814
uuagauacucuaugcuaag

SEQ ID NO: 296819 - RNA, 19 nt, Artificial Sequence
  Description of Artificial Sequence: Synthetic oligonucleotide
  Antisense strand to SEQ ID NO: 296818
cuuagcauagaguaucuaa

SEQ ID NO: 296820 - RNA, 19 nt, Artificial Sequence
  Description of Artificial Sequence: Synthetic oligonucleotide
  Sense strand starting at position 913 of SEQ ID NO: 3814
gggagaauguggucauacu

SEQ ID NO: 296821 - RNA, 19 nt, Artificial Sequence
  Description of Artificial Sequence: Synthetic oligonucleotide
  Antisense strand to SEQ ID NO: 296820
aguaugaccacauucuccc

SEQ ID NO: 296822 - RNA, 19 nt, Artificial Sequence
  Description of Artificial Sequence: Synthetic oligonucleotide
  Sense strand starting at position 985 of SEQ ID NO: 3814
gccaguuuccuguuucgua

SEQ ID NO: 296823 - RNA, 19 nt, Artificial Sequence
  Description of Artificial Sequence: Synthetic oligonucleotide
  Antisense strand to SEQ ID NO: 296822
uacgaaacaggaaacuggc

SEQ ID NO: 296824 - RNA, 19 nt, Artificial Sequence
  Description of Artificial Sequence: Synthetic oligonucleotide
  Sense strand starting at position 987 of SEQ ID NO: 3814
caguuuccuguuucguauu

SEQ ID NO: 296825 - RNA, 19 nt, Artificial Sequence
  Description of Artificial Sequence: Synthetic oligonucleotide
  Antisense strand to SEQ ID NO: 296824
aauacgaaacaggaaacug

SEQ ID NO: 296826 - RNA, 19 nt, Artificial Sequence
  Description of Artificial Sequence: Synthetic oligonucleotide
  Sense strand starting at position 997 of SEQ ID NO: 3814
uuucguauuccugacauua

SEQ ID NO: 296827 - RNA, 19 nt, Artificial Sequence
  Description of Artificial Sequence: Synthetic oligonucleotide
  Antisense strand to SEQ ID NO: 296826
uaaugucaggaauacgaaa

SEQ ID NO: 296828 - RNA, 19 nt, Artificial Sequence
  Description of Artificial Sequence: Synthetic oligonucleotide
  Sense strand starting at position 1010 of SEQ ID NO: 3814
acauuagcacugcaaugaa

SEQ ID NO: 296829 - RNA, 19 nt, Artificial Sequence
  Description of Artificial Sequence: Synthetic oligonucleotide
  Antisense strand to SEQ ID NO: 296828
uucauugcagugcuaaugu

SEQ ID NO: 296830 - RNA, 19 nt, Artificial Sequence
  Description of Artificial Sequence: Synthetic oligonucleotide
  Sense strand starting at position 1158 of SEQ ID NO: 3814
ucgagaauauugccauuag

SEQ ID NO: 296831 - RNA, 19 nt, Artificial Sequence
  Description of Artificial Sequence: Synthetic oligonucleotide
  Antisense strand to SEQ ID NO: 296830
cuaauggcaauauucucga

SEQ ID NO: 296832 - RNA, 19 nt, Artificial Sequence
  Description of Artificial Sequence: Synthetic oligonucleotide
  Sense strand starting at position 1162 of SEQ ID NO: 3814
gaauauugccauuaguuga

SEQ ID NO: 296833 - RNA, 19 nt, Artificial Sequence
  Description of Artificial Sequence: Synthetic oligonucleotide
  Antisense strand to SEQ ID NO: 296832
ucaacuaauggcaauauuc

SEQ ID NO: 296834 - RNA, 19 nt, Artificial Sequence
  Description of Artificial Sequence: Synthetic oligonucleotide
  Sense strand starting at position 1172 of SEQ ID NO: 3814
auuaguugacucuaguuau

SEQ ID NO: 296835 - RNA, 19 nt, Artificial Sequence
  Description of Artificial Sequence: Synthetic oligonucleotide
  Antisense strand to SEQ ID NO: 296834
auaacuagagucaacuaau

SEQ ID NO: 296836 - RNA, 19 nt, Artificial Sequence
  Description of Artificial Sequence: Synthetic oligonucleotide
  Sense strand starting at position 1175 of SEQ ID NO: 3814
aguugacucuaguuaugaa

SEQ ID NO: 296837 - RNA, 19 nt, Artificial Sequence
  Description of Artificial Sequence: Synthetic oligonucleotide
  Antisense strand to SEQ ID NO: 296836
uucauaacuagagucaacu

SEQ ID NO: 296838 - RNA, 19 nt, Artificial Sequence
  Description of Artificial Sequence: Synthetic oligonucleotide
  Sense strand starting at position 1202 of SEQ ID NO: 3814
gguacacuuccuggaagca

SEQ ID NO: 296839 - RNA, 19 nt, Artificial Sequence
  Description of Artificial Sequence: Synthetic oligonucleotide
  Antisense strand to SEQ ID NO: 296838
ugcuuccaggaaguguacc

SEQ ID NO: 296840 - RNA, 19 nt, Artificial Sequence
  Description of Artificial Sequence: Synthetic oligonucleotide
  Sense strand starting at position 1203 of SEQ ID NO: 3814
guacacuuccuggaagcau

SEQ ID NO: 296841 - RNA, 19 nt, Artificial Sequence
  Description of Artificial Sequence: Synthetic oligonucleotide
  Antisense strand to SEQ ID NO: 296840
augcuuccaggaaguguac

SEQ ID NO: 296842 - RNA, 19 nt, Artificial Sequence
  Description of Artificial Sequence: Synthetic oligonucleotide
  Sense strand starting at position 1243 of SEQ ID NO: 3814
auucgauaccauggauaca

SEQ ID NO: 296843 - RNA, 19 nt, Artificial Sequence
  Description of Artificial Sequence: Synthetic oligonucleotide
  Antisense strand to SEQ ID NO: 296842
uguauccaugguaucgaau

SEQ ID NO: 296844 - RNA, 19 nt, Artificial Sequence
  Description of Artificial Sequence: Synthetic oligonucleotide
  Sense strand starting at position 1482 of SEQ ID NO: 3814
aauguacgacuguaaauga

SEQ ID NO: 296845 - RNA, 19 nt, Artificial Sequence
  Description of Artificial Sequence: Synthetic oligonucleotide
  Antisense strand to SEQ ID NO: 296844
ucauuuacagucguacauu

SEQ ID NO: 296846 - RNA, 19 nt, Artificial Sequence
  Description of Artificial Sequence: Synthetic oligonucleotide
  Sense strand starting at position 1497 of SEQ ID NO: 3814
augaaauauuacccacguu

SEQ ID NO: 296847 - RNA, 19 nt, Artificial Sequence
  Description of Artificial Sequence: Synthetic oligonucleotide
  Antisense strand to SEQ ID NO: 296846
aacguggguaauauuucau

SEQ ID NO: 296848 - RNA, 19 nt, Artificial Sequence
  Description of Artificial Sequence: Synthetic oligonucleotide
  Sense strand starting at position 2028 of SEQ ID NO: 3814
ucauuagccaccgagaguu

SEQ ID NO: 296849 - RNA, 19 nt, Artificial Sequence
  Description of Artificial Sequence: Synthetic oligonucleotide
  Antisense strand to SEQ ID NO: 296848
aacucucgguggcuaauga

SEQ ID NO: 296850 - RNA, 19 nt, Artificial Sequence
  Description of Artificial Sequence: Synthetic oligonucleotide
  Sense strand starting at position 2044 of SEQ ID NO: 3814
guuacucaccuuuaagguu

SEQ ID NO: 296851 - RNA, 19 nt, Artificial Sequence
  Description of Artificial Sequence: Synthetic oligonucleotide
  Antisense strand to SEQ ID NO: 296850
aaccuuaaaggugaguaac

SEQ ID NO: 296852 - RNA, 19 nt, Artificial Sequence
  Description of Artificial Sequence: Synthetic oligonucleotide
  Sense strand starting at position 2284 of SEQ ID NO: 3814
ucccaaacagauuggguua

SEQ ID NO: 296853 - RNA, 19 nt, Artificial Sequence
  Description of Artificial Sequence: Synthetic oligonucleotide
  Antisense strand to SEQ ID NO: 296852
uaacccaaucuguuuggga

SEQ ID NO: 296854 - RNA, 19 nt, Artificial Sequence
  Description of Artificial Sequence: Synthetic oligonucleotide
  Sense strand starting at position 2643 of SEQ ID NO: 3814
gugaaacugugaucuugga

SEQ ID NO: 296855 - RNA, 19 nt, Artificial Sequence
  Description of Artificial Sequence: Synthetic oligonucleotide
  Antisense strand to SEQ ID NO: 296854
uccaagaucacaguuucac

SEQ ID NO: 296856 - RNA, 19 nt, Artificial Sequence
  Description of Artificial Sequence: Synthetic oligonucleotide
  Sense strand starting at position 2691 of SEQ ID NO: 3814
uauaaauagggccgguaau

SEQ ID NO: 296857 - RNA, 19 nt, Artificial Sequence
  Description of Artificial Sequence: Synthetic oligonucleotide
  Antisense strand to SEQ ID NO: 296856
auuaccggcccuauuuaua

SEQ ID NO: 296858 - RNA, 19 nt, Artificial Sequence
  Description of Artificial Sequence: Synthetic oligonucleotide
  Sense strand starting at position 2692 of SEQ ID NO: 3814
auaaauagggccgguaaua

SEQ ID NO: 296859 - RNA, 19 nt, Artificial Sequence
  Description of Artificial Sequence: Synthetic oligonucleotide
  Antisense strand to SEQ ID NO: 296858
uauuaccggcccuauuuau

SEQ ID NO: 296860 - RNA, 19 nt, Artificial Sequence
  Description of Artificial Sequence: Synthetic oligonucleotide
  Sense strand starting at position 2807 of SEQ ID NO: 3814
caguuuauuugagccaagu

SEQ ID NO: 296861 - RNA, 19 nt, Artificial Sequence
  Description of Artificial Sequence: Synthetic oligonucleotide
  Antisense strand to SEQ ID NO: 296860
acuuggcucaaauaaacug

SEQ ID NO: 296862 - RNA, 19 nt, Artificial Sequence
  Description of Artificial Sequence: Synthetic oligonucleotide
  Sense strand starting at position 2927 of SEQ ID NO: 3814
uccuaaauuguuuaccgau

SEQ ID NO: 296863 - RNA, 19 nt, Artificial Sequence
  Description of Artificial Sequence: Synthetic oligonucleotide
  Antisense strand to SEQ ID NO: 296862
aucgguaaacaauuuagga

SEQ ID NO: 296864 - RNA, 19 nt, Artificial Sequence
  Description of Artificial Sequence: Synthetic oligonucleotide
  Sense strand starting at position 2929 of SEQ ID NO: 3814
cuaaauuguuuaccgauaa

SEQ ID NO: 296865 - RNA, 19 nt, Artificial Sequence
  Description of Artificial Sequence: Synthetic oligonucleotide
  Antisense strand to SEQ ID NO: 296864
uuaucgguaaacaauuuag

SEQ ID NO: 296866 - RNA, 19 nt, Artificial Sequence
  Description of Artificial Sequence: Synthetic oligonucleotide
  Sense strand starting at position 2933 of SEQ ID NO: 3814
auuguuuaccgauaacuua

SEQ ID NO: 296867 - RNA, 19 nt, Artificial Sequence
  Description of Artificial Sequence: Synthetic oligonucleotide
  Antisense strand to SEQ ID NO: 296866
uaaguuaucgguaaacaau

SEQ ID NO: 296868 - RNA, 19 nt, Artificial Sequence
  Description of Artificial Sequence: Synthetic oligonucleotide
  Sense strand starting at position 3335 of SEQ ID NO: 3814
cccagacaugcggaacuau

SEQ ID NO: 296869 - RNA, 19 nt, Artificial Sequence
  Description of Artificial Sequence: Synthetic oligonucleotide
  Antisense strand to SEQ ID NO: 296868
auaguuccgcaugucuggg

SEQ ID NO: 296870 - RNA, 19 nt, Artificial Sequence
  Description of Artificial Sequence: Synthetic oligonucleotide
  Sense strand starting at position 3482 of SEQ ID NO: 3814
ugauaaauuccgcauaccu

SEQ ID NO: 296871 - RNA, 19 nt, Artificial Sequence
  Description of Artificial Sequence: Synthetic oligonucleotide
  Antisense strand to SEQ ID NO: 296870
agguaugcggaauuuauca

SEQ ID NO: 296872 - RNA, 19 nt, Artificial Sequence
  Description of Artificial Sequence: Synthetic oligonucleotide
  Sense strand starting at position 3537 of SEQ ID NO: 3814
ucuuaaggccaaugagaaa

SEQ ID NO: 296873 - RNA, 19 nt, Artificial Sequence
  Description of Artificial Sequence: Synthetic oligonucleotide
  Antisense strand to SEQ ID NO: 296872
uuucucauuggccuuaaga

SEQ ID NO: 296874 - RNA, 19 nt, Artificial Sequence
  Description of Artificial Sequence: Synthetic oligonucleotide
  Sense strand starting at position 3569 of SEQ ID NO: 3814
aggguugugcucagguagu

SEQ ID NO: 296875 - RNA, 19 nt, Artificial Sequence
  Description of Artificial Sequence: Synthetic oligonucleotide
  Antisense strand to SEQ ID NO: 296874
acuaccugagcacaacccu

SEQ ID NO: 296876 - RNA, 19 nt, Artificial Sequence
  Description of Artificial Sequence: Synthetic oligonucleotide
  Sense strand starting at position 3571 of SEQ ID NO: 3814
gguugugcucagguaguuu

SEQ ID NO: 296877 - RNA, 19 nt, Artificial Sequence
  Description of Artificial Sequence: Synthetic oligonucleotide
  Antisense strand to SEQ ID NO: 296876
aaacuaccugagcacaacc

SEQ ID NO: 296878 - RNA, 19 nt, Artificial Sequence
  Description of Artificial Sequence: Synthetic oligonucleotide
  Sense strand starting at position 3685 of SEQ ID NO: 3814
uugaucaagucagugagaa

SEQ ID NO: 296879 - RNA, 19 nt, Artificial Sequence
  Description of Artificial Sequence: Synthetic oligonucleotide
  Antisense strand to SEQ ID NO: 296878
uucucacugacuugaucaa

SEQ ID NO: 296880 - RNA, 19 nt, Artificial Sequence
  Description of Artificial Sequence: Synthetic oligonucleotide
  Sense strand starting at position 3686 of SEQ ID NO: 3814
ugaucaagucagugagaau

SEQ ID NO: 296881 - RNA, 19 nt, Artificial Sequence
  Description of Artificial Sequence: Synthetic oligonucleotide
  Antisense strand to SEQ ID NO: 296880
auucucacugacuugauca

SEQ ID NO: 296882 - RNA, 19 nt, Artificial Sequence
  Description of Artificial Sequence: Synthetic oligonucleotide
  Sense strand starting at position 3723 of SEQ ID NO: 3814
aaauaauaucagugucagg

SEQ ID NO: 296883 - RNA, 19 nt, Artificial Sequence
  Description of Artificial Sequence: Synthetic oligonucleotide
  Antisense strand to SEQ ID NO: 296882
ccugacacugauauuauuu

SEQ ID NO: 296884 - RNA, 19 nt, Artificial Sequence
  Description of Artificial Sequence: Synthetic oligonucleotide
  Sense strand starting at position 3802 of SEQ ID NO: 3814
gaggcuuaacacugggaau

SEQ ID NO: 296885 - RNA, 19 nt, Artificial Sequence
  Description of Artificial Sequence: Synthetic oligonucleotide
  Antisense strand to SEQ ID NO: 296884
auucccaguguuaagccuc

SEQ ID NO: 296886 - RNA, 19 nt, Artificial Sequence
  Description of Artificial Sequence: Synthetic oligonucleotide
  Sense strand starting at position 3804 of SEQ ID NO: 3814
ggcuuaacacugggaauag

SEQ ID NO: 296887 - RNA, 19 nt, Artificial Sequence
  Description of Artificial Sequence: Synthetic oligonucleotide
  Antisense strand to SEQ ID NO: 296886
cuauucccaguguuaagcc

SEQ ID NO: 296888 - RNA, 19 nt, Artificial Sequence
  Description of Artificial Sequence: Synthetic oligonucleotide
  Sense strand starting at position 3829 of SEQ ID NO: 3814
gagucagaaucugccuaga

SEQ ID NO: 296889 - RNA, 19 nt, Artificial Sequence
  Description of Artificial Sequence: Synthetic oligonucleotide
  Antisense strand to SEQ ID NO: 296888
ucuaggcagauucugacuc

SEQ ID NO: 296890 - RNA, 19 nt, Artificial Sequence
  Description of Artificial Sequence: Synthetic oligonucleotide
  Sense strand starting at position 3831 of SEQ ID NO: 3814
gucagaaucugccuagaga

SEQ ID NO: 296891 - RNA, 19 nt, Artificial Sequence
  Description of Artificial Sequence: Synthetic oligonucleotide
  Antisense strand to SEQ ID NO: 296890
ucucuaggcagauucugac

SEQ ID NO: 296892 - RNA, 19 nt, Artificial Sequence
  Description of Artificial Sequence: Synthetic oligonucleotide
  Sense strand starting at position 1226 of SEQ ID NO: 3816
ugucccuuggcagggaaau

SEQ ID NO: 296893 - RNA, 19 nt, Artificial Sequence
  Description of Artificial Sequence: Synthetic oligonucleotide
  Antisense strand to SEQ ID NO: 296892
auuucccugccaagggaca

SEQ ID NO: 296894 - RNA, 19 nt, Artificial Sequence
  Description of Artificial Sequence: Synthetic oligonucleotide
  Sense strand starting at position 2091 of SEQ ID NO: 3816
cgacuacugcccgcggaau

SEQ ID NO: 296895 - RNA, 19 nt, Artificial Sequence
  Description of Artificial Sequence: Synthetic oligonucleotide
  Antisense strand to SEQ ID NO: 296894
auuccgcgggcaguagucg

SEQ ID NO: 296896 - RNA, 19 nt, Artificial Sequence
  Description of Artificial Sequence: Synthetic oligonucleotide
  Sense strand starting at position 2104 of SEQ ID NO: 3816
cggaaugggcaagauuagu

SEQ ID NO: 296897 - RNA, 19 nt, Artificial Sequence
  Description of Artificial Sequence: Synthetic oligonucleotide
  Antisense strand to SEQ ID NO: 296896
acuaaucuugcccauuccg

SEQ ID NO: 296898 - RNA, 19 nt, Artificial Sequence
  Description of Artificial Sequence: Synthetic oligonucleotide
  Sense strand starting at position 2110 of SEQ ID NO: 3816
gggcaagauuaguuuguua

SEQ ID NO: 296899 - RNA, 19 nt, Artificial Sequence
  Description of Artificial Sequence: Synthetic oligonucleotide
  Antisense strand to SEQ ID NO: 296898
uaacaaacuaaucuugccc

SEQ ID NO: 296900 - RNA, 19 nt, Artificial Sequence
  Description of Artificial Sequence: Synthetic oligonucleotide
  Sense strand starting at position 2112 of SEQ ID NO: 3816
gcaagauuaguuuguuaau

SEQ ID NO: 296901 - RNA, 19 nt, Artificial Sequence
  Description of Artificial Sequence: Synthetic oligonucleotide
  Antisense strand to SEQ ID NO: 296900
auuaacaaacuaaucuugc

SEQ ID NO: 296902 - RNA, 19 nt, Artificial Sequence
  Description of Artificial Sequence: Synthetic oligonucleotide
  Sense strand starting at position 2256 of SEQ ID NO: 3816
uugaaagagucgccugaau

SEQ ID NO: 296903 - RNA, 19 nt, Artificial Sequence
  Description of Artificial Sequence: Synthetic oligonucleotide
  Antisense strand to SEQ ID NO: 296902
auucaggcgacucuuucaa

SEQ ID NO: 296904 - RNA, 19 nt, Artificial Sequence
  Description of Artificial Sequence: Synthetic oligonucleotide
  Sense strand starting at position 2258 of SEQ ID NO: 3816
gaaagagucgccugaauau

SEQ ID NO: 296905 - RNA, 19 nt, Artificial Sequence
  Description of Artificial Sequence: Synthetic oligonucleotide
  Antisense strand to SEQ ID NO: 296904
auauucaggcgacucuuuc

SEQ ID NO: 296906 - RNA, 19 nt, Artificial Sequence
  Description of Artificial Sequence: Synthetic oligonucleotide
  Sense strand starting at position 2279 of SEQ ID NO: 3816
acucuuuaguguccaagga

SEQ ID NO: 296907 - RNA, 19 nt, Artificial Sequence
  Description of Artificial Sequence: Synthetic oligonucleotide
  Antisense strand to SEQ ID NO: 296906
uccuuggacacuaaagagu

SEQ ID NO: 296908 - RNA, 19 nt, Artificial Sequence
  Description of Artificial Sequence: Synthetic oligonucleotide
  Sense strand starting at position 2280 of SEQ ID NO: 3816
cucuuuaguguccaaggaa

SEQ ID NO: 296909 - RNA, 19 nt, Artificial Sequence
  Description of Artificial Sequence: Synthetic oligonucleotide
  Antisense strand to SEQ ID NO: 296908
uuccuuggacacuaaagag

SEQ ID NO: 296910 - RNA, 19 nt, Artificial Sequence
  Description of Artificial Sequence: Synthetic oligonucleotide
  Sense strand starting at position 2283 of SEQ ID NO: 3816
uuuaguguccaaggaauug

SEQ ID NO: 296911 - RNA, 19 nt, Artificial Sequence
  Description of Artificial Sequence: Synthetic oligonucleotide
  Antisense strand to SEQ ID NO: 296910
caauuccuuggacacuaaa

SEQ ID NO: 296912 - RNA, 19 nt, Artificial Sequence
  Description of Artificial Sequence: Synthetic oligonucleotide
  Sense strand starting at position 2358 of SEQ ID NO: 3816
agacuaagcuuccuggagu

SEQ ID NO: 296913 - RNA, 19 nt, Artificial Sequence
  Description of Artificial Sequence: Synthetic oligonucleotide
  Antisense strand to SEQ ID NO: 296912
acuccaggaagcuuagucu

SEQ ID NO: 296914 - RNA, 19 nt, Artificial Sequence
  Description of Artificial Sequence: Synthetic oligonucleotide
  Sense strand starting at position 2401 of SEQ ID NO: 3816
uaucguguuuauguuauga

SEQ ID NO: 296915 - RNA, 19 nt, Artificial Sequence
  Description of Artificial Sequence: Synthetic oligonucleotide
  Antisense strand to SEQ ID NO: 296914
ucauaacauaaacacgaua

SEQ ID NO: 296916 - RNA, 19 nt, Artificial Sequence
  Description of Artificial Sequence: Synthetic oligonucleotide
  Sense strand starting at position 2494 of SEQ ID NO: 3816
aggaaacaauugggacaau

SEQ ID NO: 296917 - RNA, 19 nt, Artificial Sequence
  Description of Artificial Sequence: Synthetic oligonucleotide
  Antisense strand to SEQ ID NO: 296916
auugucccaauuguuuccu

SEQ ID NO: 296918 - RNA, 19 nt, Artificial Sequence
  Description of Artificial Sequence: Synthetic oligonucleotide
  Sense strand starting at position 2505 of SEQ ID NO: 3816
gggacaauguggagauagu

SEQ ID NO: 296919 - RNA, 19 nt, Artificial Sequence
  Description of Artificial Sequence: Synthetic oligonucleotide
  Antisense strand to SEQ ID NO: 296918
acuaucuccacauuguccc

SEQ ID NO: 296920 - RNA, 19 nt, Artificial Sequence
  Description of Artificial Sequence: Synthetic oligonucleotide
  Sense strand starting at position 2515 of SEQ ID NO: 3816
ggagauaguugcuuggauu

SEQ ID NO: 296921 - RNA, 19 nt, Artificial Sequence
  Description of Artificial Sequence: Synthetic oligonucleotide
  Antisense strand to SEQ ID NO: 296920
aauccaagcaacuaucucc

SEQ ID NO: 296922 - RNA, 19 nt, Artificial Sequence
  Description of Artificial Sequence: Synthetic oligonucleotide
  Sense strand starting at position 2758 of SEQ ID NO: 3816
uuggcuaugcucugaagaa

SEQ ID NO: 296923 - RNA, 19 nt, Artificial Sequence
  Description of Artificial Sequence: Synthetic oligonucleotide
  Antisense strand to SEQ ID NO: 296922
uucuucagagcauagccaa

SEQ ID NO: 296924 - RNA, 19 nt, Artificial Sequence
  Description of Artificial Sequence: Synthetic oligonucleotide
  Sense strand starting at position 2909 of SEQ ID NO: 3816
uucgaauuacaagguaauu

SEQ ID NO: 296925 - RNA, 19 nt, Artificial Sequence
  Description of Artificial Sequence: Synthetic oligonucleotide
  Antisense strand to SEQ ID NO: 296924
aauuaccuuguaauucgaa

SEQ ID NO: 296926 - RNA, 19 nt, Artificial Sequence
  Description of Artificial Sequence: Synthetic oligonucleotide
  Sense strand starting at position 2929 of SEQ ID NO: 3816
agugcauugucauugauag

SEQ ID NO: 296927 - RNA, 19 nt, Artificial Sequence
  Description of Artificial Sequence: Synthetic oligonucleotide
  Antisense strand to SEQ ID NO: 296926
cuaucaaugacaaugcacu

SEQ ID NO: 296928 - RNA, 19 nt, Artificial Sequence
  Description of Artificial Sequence: Synthetic oligonucleotide
  Sense strand starting at position 2937 of SEQ ID NO: 3816
gucauugauagcuacagga

SEQ ID NO: 296929 - RNA, 19 nt, Artificial Sequence
  Description of Artificial Sequence: Synthetic oligonucleotide
  Antisense strand to SEQ ID NO: 296928
uccuguagcuaucaaugac

SEQ ID NO: 296930 - RNA, 19 nt, Artificial Sequence
  Description of Artificial Sequence: Synthetic oligonucleotide
  Sense strand starting at position 2966 of SEQ ID NO: 3816
uuuggagaauuuggaauga

SEQ ID NO: 296931 - RNA, 19 nt, Artificial Sequence
  Description of Artificial Sequence: Synthetic oligonucleotide
  Antisense strand to SEQ ID NO: 296930
ucauuccaaauucuccaaa

SEQ ID NO: 296932 - RNA, 19 nt, Artificial Sequence
  Description of Artificial Sequence: Synthetic oligonucleotide
  Sense strand starting at position 2982 of SEQ ID NO: 3816
ugaagaaugcucuggagau

SEQ ID NO: 296933 - RNA, 19 nt, Artificial Sequence
  Description of Artificial Sequence: Synthetic oligonucleotide
  Antisense strand to SEQ ID NO: 296932
aucuccagagcauucuuca

SEQ ID NO: 296934 - RNA, 19 nt, Artificial Sequence
  Description of Artificial Sequence: Synthetic oligonucleotide
  Sense strand starting at position 2988 of SEQ ID NO: 3816
augcucuggagaugaaaua

SEQ ID NO: 296935 - RNA, 19 nt, Artificial Sequence
  Description of Artificial Sequence: Synthetic oligonucleotide
  Antisense strand to SEQ ID NO: 296934
uauuucaucuccagagcau

SEQ ID NO: 296936 - RNA, 19 nt, Artificial Sequence
  Description of Artificial Sequence: Synthetic oligonucleotide
  Sense strand starting at position 2999 of SEQ ID NO: 3816
augaaauagugccuaguuu

SEQ ID NO: 296937 - RNA, 19 nt, Artificial Sequence
  Description of Artificial Sequence: Synthetic oligonucleotide
  Antisense strand to SEQ ID NO: 296936
aaacuaggcacuauuucau

SEQ ID NO: 296938 - RNA, 19 nt, Artificial Sequence
  Description of Artificial Sequence: Synthetic oligonucleotide
  Sense strand starting at position 3102 of SEQ ID NO: 3816
agcgcauugcucuagauuu

SEQ ID NO: 296939 - RNA, 19 nt, Artificial Sequence
  Description of Artificial Sequence: Synthetic oligonucleotide
  Antisense strand to SEQ ID NO: 296938
aaaucuagagcaaugcgcu

SEQ ID NO: 296940 - RNA, 19 nt, Artificial Sequence
  Description of Artificial Sequence: Synthetic oligonucleotide
  Sense strand starting at position 3104 of SEQ ID NO: 3816
cgcauugcucuagauuuac

SEQ ID NO: 296941 - RNA, 19 nt, Artificial Sequence
  Description of Artificial Sequence: Synthetic oligonucleotide
  Antisense strand to SEQ ID NO: 296940
guaaaucuagagcaaugcg

SEQ ID NO: 296942 - RNA, 19 nt, Artificial Sequence
  Description of Artificial Sequence: Synthetic oligonucleotide
  Sense strand starting at position 3211 of SEQ ID NO: 3816
uccugagucucaucuaugu

SEQ ID NO: 296943 - RNA, 19 nt, Artificial Sequence
  Description of Artificial Sequence: Synthetic oligonucleotide
  Antisense strand to SEQ ID NO: 296942
acauagaugagacucagga

SEQ ID NO: 296944 - RNA, 19 nt, Artificial Sequence
  Description of Artificial Sequence: Synthetic oligonucleotide
  Sense strand starting at position 3215 of SEQ ID NO: 3816
gagucucaucuauguacug

SEQ ID NO: 296945 - RNA, 19 nt, Artificial Sequence
  Description of Artificial Sequence: Synthetic oligonucleotide
  Antisense strand to SEQ ID NO: 296944
caguacauagaugagacuc

SEQ ID NO: 296946 - RNA, 19 nt, Artificial Sequence
  Description of Artificial Sequence: Synthetic oligonucleotide
  Sense strand starting at position 3247 of SEQ ID NO: 3816
gaguuagaacagugauauu

SEQ ID NO: 296947 - RNA, 19 nt, Artificial Sequence
  Description of Artificial Sequence: Synthetic oligonucleotide
  Antisense strand to SEQ ID NO: 296946
aauaucacuguucuaacuc

SEQ ID NO: 296948 - RNA, 19 nt, Artificial Sequence
  Description of Artificial Sequence: Synthetic oligonucleotide
  Sense strand starting at position 3267 of SEQ ID NO: 3816
auaucucuauggcuugaaa

SEQ ID NO: 296949 - RNA, 19 nt, Artificial Sequence
  Description of Artificial Sequence: Synthetic oligonucleotide
  Antisense strand to SEQ ID NO: 296948
uuucaagccauagagauau

SEQ ID NO: 296950 - RNA, 19 nt, Artificial Sequence
  Description of Artificial Sequence: Synthetic oligonucleotide
  Sense strand starting at position 3269 of SEQ ID NO: 3816
aucucuauggcuugaaauu

SEQ ID NO: 296951 - RNA, 19 nt, Artificial Sequence
  Description of Artificial Sequence: Synthetic oligonucleotide
  Antisense strand to SEQ ID NO: 296950
aauuucaagccauagagau

SEQ ID NO: 296952 - RNA, 19 nt, Artificial Sequence
  Description of Artificial Sequence: Synthetic oligonucleotide
  Sense strand starting at position 3350 of SEQ ID NO: 3816
guaggaugcagcuaacagu

SEQ ID NO: 296953 - RNA, 19 nt, Artificial Sequence
  Description of Artificial Sequence: Synthetic oligonucleotide
  Antisense strand to SEQ ID NO: 296952
acuguuagcugcauccuac

SEQ ID NO: 296954 - RNA, 19 nt, Artificial Sequence
  Description of Artificial Sequence: Synthetic oligonucleotide
  Sense strand starting at position 3403 of SEQ ID NO: 3816
gccuguguggaagaugaaa

SEQ ID NO: 296955 - RNA, 19 nt, Artificial Sequence
  Description of Artificial Sequence: Synthetic oligonucleotide
  Antisense strand to SEQ ID NO: 296954
uuucaucuuccacacaggc

SEQ ID NO: 296956 - RNA, 19 nt, Artificial Sequence
  Description of Artificial Sequence: Synthetic oligonucleotide
  Sense strand starting at position 3456 of SEQ ID NO: 3816
cauugaaagggcuggucaa

SEQ ID NO: 296957 - RNA, 19 nt, Artificial Sequence
  Description of Artificial Sequence: Synthetic oligonucleotide
  Antisense strand to SEQ ID NO: 296956
uugaccagcccuuucaaug

SEQ ID NO: 296958 - RNA, 19 nt, Artificial Sequence
  Description of Artificial Sequence: Synthetic oligonucleotide
  Sense strand starting at position 3649 of SEQ ID NO: 3816
cuagcuaagccagaacuuu

SEQ ID NO: 296959 - RNA, 19 nt, Artificial Sequence
  Description of Artificial Sequence: Synthetic oligonucleotide
  Antisense strand to SEQ ID NO: 296958
aaaguucuggcuuagcuag

SEQ ID NO: 296960 - RNA, 19 nt, Artificial Sequence
  Description of Artificial Sequence: Synthetic oligonucleotide
  Sense strand starting at position 3726 of SEQ ID NO: 3816
acagcaugucuaugucauu

SEQ ID NO: 296961 - RNA, 19 nt, Artificial Sequence
  Description of Artificial Sequence: Synthetic oligonucleotide
  Antisense strand to SEQ ID NO: 296960
aaugacauagacaugcugu

SEQ ID NO: 296962 - RNA, 19 nt, Artificial Sequence
  Description of Artificial Sequence: Synthetic oligonucleotide
  Sense strand starting at position 3790 of SEQ ID NO: 3816
aagguauguuuggcuuacu

SEQ ID NO: 296963 - RNA, 19 nt, Artificial Sequence
  Description of Artificial Sequence: Synthetic oligonucleotide
  Antisense strand to SEQ ID NO: 296962
aguaagccaaacauaccuu

SEQ ID NO: 296964 - RNA, 19 nt, Artificial Sequence
  Description of Artificial Sequence: Synthetic oligonucleotide
  Sense strand starting at position 3791 of SEQ ID NO: 3816
agguauguuuggcuuacua

SEQ ID NO: 296965 - RNA, 19 nt, Artificial Sequence
  Description of Artificial Sequence: Synthetic oligonucleotide
  Antisense strand to SEQ ID NO: 296964
uaguaagccaaacauaccu

SEQ ID NO: 296966 - RNA, 19 nt, Artificial Sequence
  Description of Artificial Sequence: Synthetic oligonucleotide
  Sense strand starting at position 3799 of SEQ ID NO: 3816
uuggcuuacuagccagauu

SEQ ID NO: 296967 - RNA, 19 nt, Artificial Sequence
  Description of Artificial Sequence: Synthetic oligonucleotide
  Antisense strand to SEQ ID NO: 296966
aaucuggcuaguaagccaa

SEQ ID NO: 296968 - RNA, 19 nt, Artificial Sequence
  Description of Artificial Sequence: Synthetic oligonucleotide
  Sense strand starting at position 3802 of SEQ ID NO: 3816
gcuuacuagccagauugua

SEQ ID NO: 296969 - RNA, 19 nt, Artificial Sequence
  Description of Artificial Sequence: Synthetic oligonucleotide
  Antisense strand to SEQ ID NO: 296968
uacaaucuggcuaguaagc

SEQ ID NO: 296970 - RNA, 19 nt, Artificial Sequence
  Description of Artificial Sequence: Synthetic oligonucleotide
  Sense strand starting at position 3894 of SEQ ID NO: 3816
gauaaugggucuucuugag

SEQ ID NO: 296971 - RNA, 19 nt, Artificial Sequence
  Description of Artificial Sequence: Synthetic oligonucleotide
  Antisense strand to SEQ ID NO: 296970
cucaagaagacccauuauc

SEQ ID NO: 296972 - RNA, 19 nt, Artificial Sequence
  Description of Artificial Sequence: Synthetic oligonucleotide
  Sense strand starting at position 39 of SEQ ID NO: 3817
aacaaagaugacuguggua

SEQ ID NO: 296973 - RNA, 19 nt, Artificial Sequence
  Description of Artificial Sequence: Synthetic oligonucleotide
  Antisense strand to SEQ ID NO: 296972
uaccacagucaucuuuguu

SEQ ID NO: 296974 - RNA, 19 nt, Artificial Sequence
  Description of Artificial Sequence: Synthetic oligonucleotide
  Sense strand starting at position 41 of SEQ ID NO: 3817
caaagaugacugugguaag

SEQ ID NO: 296975 - RNA, 19 nt, Artificial Sequence
  Description of Artificial Sequence: Synthetic oligonucleotide
  Antisense strand to SEQ ID NO: 296974
cuuaccacagucaucuuug

SEQ ID NO: 296976 - RNA, 19 nt, Artificial Sequence
  Description of Artificial Sequence: Synthetic oligonucleotide
  Sense strand starting at position 52 of SEQ ID NO: 3817
gugguaagaguaugagaaa

SEQ ID NO: 296977 - RNA, 19 nt, Artificial Sequence
  Description of Artificial Sequence: Synthetic oligonucleotide
  Antisense strand to SEQ ID NO: 296976
uuucucauacucuuaccac

SEQ ID NO: 296978 - RNA, 19 nt, Artificial Sequence
  Description of Artificial Sequence: Synthetic oligonucleotide
  Sense strand starting at position 148 of SEQ ID NO: 3817
agacuauaagccuguaaau

SEQ ID NO: 296979 - RNA, 19 nt, Artificial Sequence
  Description of Artificial Sequence: Synthetic oligonucleotide
  Antisense strand to SEQ ID NO: 296978
auuuacaggcuuauagucu

SEQ ID NO: 296980 - RNA, 19 nt, Artificial Sequence
  Description of Artificial Sequence: Synthetic oligonucleotide
  Sense strand starting at position 258 of SEQ ID NO: 3817
cccugacuuggugaagcuu

SEQ ID NO: 296981 - RNA, 19 nt, Artificial Sequence
  Description of Artificial Sequence: Synthetic oligonucleotide
  Antisense strand to SEQ ID NO: 296980
aagcuucaccaagucaggg

SEQ ID NO: 296982 - RNA, 19 nt, Artificial Sequence
  Description of Artificial Sequence: Synthetic oligonucleotide
  Sense strand starting at position 269 of SEQ ID NO: 3817
ugaagcuuuggauagcagu

SEQ ID NO: 296983 - RNA, 19 nt, Artificial Sequence
  Description of Artificial Sequence: Synthetic oligonucleotide
  Antisense strand to SEQ ID NO: 296982
acugcuauccaaagcuuca

SEQ ID NO: 296984 - RNA, 19 nt, Artificial Sequence
  Description of Artificial Sequence: Synthetic oligonucleotide
  Sense strand starting at position 299 of SEQ ID NO: 3817
agggaaggugucuacaugu

SEQ ID NO: 296985 - RNA, 19 nt, Artificial Sequence
  Description of Artificial Sequence: Synthetic oligonucleotide
  Antisense strand to SEQ ID NO: 296984
acauguagacaccuucccu

SEQ ID NO: 296986 - RNA, 19 nt, Artificial Sequence
  Description of Artificial Sequence: Synthetic oligonucleotide
  Sense strand starting at position 330 of SEQ ID NO: 3817
agucgugugcauucggauu

SEQ ID NO: 296987 - RNA, 19 nt, Artificial Sequence
  Description of Artificial Sequence: Synthetic oligonucleotide
  Antisense strand to SEQ ID NO: 296986
aauccgaaugcacacgacu

SEQ ID NO: 296988 - RNA, 19 nt, Artificial Sequence
  Description of Artificial Sequence: Synthetic oligonucleotide
  Sense strand starting at position 382 of SEQ ID NO: 3817
uccaguaacuuugugacaa

SEQ ID NO: 296989 - RNA, 19 nt, Artificial Sequence
  Description of Artificial Sequence: Synthetic oligonucleotide
  Antisense strand to SEQ ID NO: 296988
uugucacaaaguuacugga

SEQ ID NO: 296990 - RNA, 19 nt, Artificial Sequence
  Description of Artificial Sequence: Synthetic oligonucleotide
  Sense strand starting at position 423 of SEQ ID NO: 3817
gacaauggcucccugaaga

SEQ ID NO: 296991 - RNA, 19 nt, Artificial Sequence
  Description of Artificial Sequence: Synthetic oligonucleotide
  Antisense strand to SEQ ID NO: 296990
ucuucagggagccauuguc

SEQ ID NO: 296992 - RNA, 19 nt, Artificial Sequence
  Description of Artificial Sequence: Synthetic oligonucleotide
  Sense strand starting at position 710 of SEQ ID NO: 3817
agaagucacuuaccucgaa

SEQ ID NO: 296993 - RNA, 19 nt, Artificial Sequence
  Description of Artificial Sequence: Synthetic oligonucleotide
  Antisense strand to SEQ ID NO: 296992
uucgagguaagugacuucu

SEQ ID NO: 296994 - RNA, 19 nt, Artificial Sequence
  Description of Artificial Sequence: Synthetic oligonucleotide
  Sense strand starting at position 711 of SEQ ID NO: 3817
gaagucacuuaccucgaau

SEQ ID NO: 296995 - RNA, 19 nt, Artificial Sequence
  Description of Artificial Sequence: Synthetic oligonucleotide
  Antisense strand to SEQ ID NO: 296994
auucgagguaagugacuuc

SEQ ID NO: 296996 - RNA, 19 nt, Artificial Sequence
  Description of Artificial Sequence: Synthetic oligonucleotide
  Sense strand starting at position 859 of SEQ ID NO: 3817
cuguuagaaaccuggaugu

SEQ ID NO: 296997 - RNA, 19 nt, Artificial Sequence
  Description of Artificial Sequence: Synthetic oligonucleotide
  Antisense strand to SEQ ID NO: 296996
acauccagguuucuaacag

SEQ ID NO: 296998 - RNA, 19 nt, Artificial Sequence
  Description of Artificial Sequence: Synthetic oligonucleotide
  Sense strand starting at position 905 of SEQ ID NO: 3817
acaggaugugcucacaauc

SEQ ID NO: 296999 - RNA, 19 nt, Artificial Sequence
  Description of Artificial Sequence: Synthetic oligonucleotide
  Antisense strand to SEQ ID NO: 296998
gauugugagcacauccugu

SEQ ID NO: 297000 - RNA, 19 nt, Artificial Sequence
  Description of Artificial Sequence: Synthetic oligonucleotide
  Sense strand starting at position 1190 of SEQ ID NO: 3817
uggaaugaaaugugcauua

SEQ ID NO: 297001 - RNA, 19 nt, Artificial Sequence
  Description of Artificial Sequence: Synthetic oligonucleotide
  Antisense strand to SEQ ID NO: 297000
uaaugcacauuucauucca

SEQ ID NO: 297002 - RNA, 19 nt, Artificial Sequence
  Description of Artificial Sequence: Synthetic oligonucleotide
  Sense strand starting at position 1195 of SEQ ID NO: 3817
ugaaaugugcauuacaugu

SEQ ID NO: 297003 - RNA, 19 nt, Artificial Sequence
  Description of Artificial Sequence: Synthetic oligonucleotide
  Antisense strand to SEQ ID NO: 297002
acauguaaugcacauuuca

SEQ ID NO: 297004 - RNA, 19 nt, Artificial Sequence
  Description of Artificial Sequence: Synthetic oligonucleotide
  Sense strand starting at position 1216 of SEQ ID NO: 3817
guagccugucaucaaacaa

SEQ ID NO: 297005 - RNA, 19 nt, Artificial Sequence
  Description of Artificial Sequence: Synthetic oligonucleotide
  Antisense strand to SEQ ID NO: 297004
uuguuugaugacaggcuac

SEQ ID NO: 297006 - RNA, 19 nt, Artificial Sequence
  Description of Artificial Sequence: Synthetic oligonucleotide
  Sense strand starting at position 1581 of SEQ ID NO: 3817
gacugacagcaucagugua

SEQ ID NO: 297007 - RNA, 19 nt, Artificial Sequence
  Description of Artificial Sequence: Synthetic oligonucleotide
  Antisense strand to SEQ ID NO: 297006
uacacugaugcugucaguc

SEQ ID NO: 297008 - RNA, 19 nt, Artificial Sequence
  Description of Artificial Sequence: Synthetic oligonucleotide
  Sense strand starting at position 1704 of SEQ ID NO: 3817
gaagcacuagcuuaaagua

SEQ ID NO: 297009 - RNA, 19 nt, Artificial Sequence
  Description of Artificial Sequence: Synthetic oligonucleotide
  Antisense strand to SEQ ID NO: 297008
uacuuuaagcuagugcuuc

SEQ ID NO: 297010 - RNA, 19 nt, Artificial Sequence
  Description of Artificial Sequence: Synthetic oligonucleotide
  Sense strand starting at position 1800 of SEQ ID NO: 3817
uaguuaccuccugggauau

SEQ ID NO: 297011 - RNA, 19 nt, Artificial Sequence
  Description of Artificial Sequence: Synthetic oligonucleotide
  Antisense strand to SEQ ID NO: 297010
auaucccaggagguaacua

SEQ ID NO: 297012 - RNA, 19 nt, Artificial Sequence
  Description of Artificial Sequence: Synthetic oligonucleotide
  Sense strand starting at position 1801 of SEQ ID NO: 3817
aguuaccuccugggauaua

SEQ ID NO: 297013 - RNA, 19 nt, Artificial Sequence
  Description of Artificial Sequence: Synthetic oligonucleotide
  Antisense strand to SEQ ID NO: 297012
uauaucccaggagguaacu

SEQ ID NO: 297014 - RNA, 19 nt, Artificial Sequence
  Description of Artificial Sequence: Synthetic oligonucleotide
  Sense strand starting at position 1893 of SEQ ID NO: 3817
cgaauccaguuucucagaa

SEQ ID NO: 297015 - RNA, 19 nt, Artificial Sequence
  Description of Artificial Sequence: Synthetic oligonucleotide
  Antisense strand to SEQ ID NO: 297014
uucugagaaacuggauucg

SEQ ID NO: 297016 - RNA, 19 nt, Artificial Sequence
  Description of Artificial Sequence: Synthetic oligonucleotide
  Sense strand starting at position 1907 of SEQ ID NO: 3817
cagaaagaaacgugugaug

SEQ ID NO: 297017 - RNA, 19 nt, Artificial Sequence
  Description of Artificial Sequence: Synthetic oligonucleotide
  Antisense strand to SEQ ID NO: 297016
caucacacguuucuuucug

SEQ ID NO: 297018 - RNA, 19 nt, Artificial Sequence
  Description of Artificial Sequence: Synthetic oligonucleotide
  Sense strand starting at position 2108 of SEQ ID NO: 3817
augguauaacggcaagacu

SEQ ID NO: 297019 - RNA, 19 nt, Artificial Sequence
  Description of Artificial Sequence: Synthetic oligonucleotide
  Antisense strand to SEQ ID NO: 297018
agucuugccguuauaccau

SEQ ID NO: 297020 - RNA, 19 nt, Artificial Sequence
  Description of Artificial Sequence: Synthetic oligonucleotide
  Sense strand starting at position 2203 of SEQ ID NO: 3817
gucagaagucaacauggca

SEQ ID NO: 297021 - RNA, 19 nt, Artificial Sequence
  Description of Artificial Sequence: Synthetic oligonucleotide
  Antisense strand to SEQ ID NO: 297020
ugccauguugacuucugac

SEQ ID NO: 297022 - RNA, 19 nt, Artificial Sequence
  Description of Artificial Sequence: Synthetic oligonucleotide
  Sense strand starting at position 2258 of SEQ ID NO: 3817
aguauaagaguuugacuuc

SEQ ID NO: 297023 - RNA, 19 nt, Artificial Sequence
  Description of Artificial Sequence: Synthetic oligonucleotide
  Antisense strand to SEQ ID NO: 297022
gaagucaaacucuuauacu

SEQ ID NO: 297024 - RNA, 19 nt, Artificial Sequence
  Description of Artificial Sequence: Synthetic oligonucleotide
  Sense strand starting at position 2261 of SEQ ID NO: 3817
auaagaguuugacuuccca

SEQ ID NO: 297025 - RNA, 19 nt, Artificial Sequence
  Description of Artificial Sequence: Synthetic oligonucleotide
  Antisense strand to SEQ ID NO: 297024
ugggaagucaaacucuuau

SEQ ID NO: 297026 - RNA, 19 nt, Artificial Sequence
  Description of Artificial Sequence: Synthetic oligonucleotide
  Sense strand starting at position 2265 of SEQ ID NO: 3817
gaguuugacuucccaagaa

SEQ ID NO: 297027 - RNA, 19 nt, Artificial Sequence
  Description of Artificial Sequence: Synthetic oligonucleotide
  Antisense strand to SEQ ID NO: 297026
uucuugggaagucaaacuc

SEQ ID NO: 297028 - RNA, 19 nt, Artificial Sequence
  Description of Artificial Sequence: Synthetic oligonucleotide
  Sense strand starting at position 2269 of SEQ ID NO: 3817
uugacuucccaagaaguuu

SEQ ID NO: 297029 - RNA, 19 nt, Artificial Sequence
  Description of Artificial Sequence: Synthetic oligonucleotide
  Antisense strand to SEQ ID NO: 297028
aaacuucuugggaagucaa

SEQ ID NO: 297030 - RNA, 19 nt, Artificial Sequence
  Description of Artificial Sequence: Synthetic oligonucleotide
  Sense strand starting at position 2434 of SEQ ID NO: 3817
uggagaagccagggcuuau

SEQ ID NO: 297031 - RNA, 19 nt, Artificial Sequence
  Description of Artificial Sequence: Synthetic oligonucleotide
  Antisense strand to SEQ ID NO: 297030
auaagcccuggcuucucca

SEQ ID NO: 297032 - RNA, 19 nt, Artificial Sequence
  Description of Artificial Sequence: Synthetic oligonucleotide
  Sense strand starting at position 2443 of SEQ ID NO: 3817
cagggcuuaucagcugaaa

SEQ ID NO: 297033 - RNA, 19 nt, Artificial Sequence
  Description of Artificial Sequence: Synthetic oligonucleotide
  Antisense strand to SEQ ID NO: 297032
uuucagcugauaagcccug

SEQ ID NO: 297034 - RNA, 19 nt, Artificial Sequence
  Description of Artificial Sequence: Synthetic oligonucleotide
  Sense strand starting at position 2586 of SEQ ID NO: 3817
uguuaauugcuagaauaac

SEQ ID NO: 297035 - RNA, 19 nt, Artificial Sequence
  Description of Artificial Sequence: Synthetic oligonucleotide
  Antisense strand to SEQ ID NO: 297034
guuauucuagcaauuaaca

SEQ ID NO: 297036 - RNA, 19 nt, Artificial Sequence
  Description of Artificial Sequence: Synthetic oligonucleotide
  Sense strand starting at position 2595 of SEQ ID NO: 3817
cuagaauaacugugucaua

SEQ ID NO: 297037 - RNA, 19 nt, Artificial Sequence
  Description of Artificial Sequence: Synthetic oligonucleotide
  Antisense strand to SEQ ID NO: 297036
uaugacacaguuauucuag

SEQ ID NO: 297038 - RNA, 19 nt, Artificial Sequence
  Description of Artificial Sequence: Synthetic oligonucleotide
  Sense strand starting at position 2644 of SEQ ID NO: 3817
ugguuugagaugggaucuu

SEQ ID NO: 297039 - RNA, 19 nt, Artificial Sequence
  Description of Artificial Sequence: Synthetic oligonucleotide
  Antisense strand to SEQ ID NO: 297038
aagaucccaucucaaacca

SEQ ID NO: 297040 - RNA, 19 nt, Artificial Sequence
  Description of Artificial Sequence: Synthetic oligonucleotide
  Sense strand starting at position 3539 of SEQ ID NO: 3817
ccagcuaucuguuuauuug

SEQ ID NO: 297041 - RNA, 19 nt, Artificial Sequence
  Description of Artificial Sequence: Synthetic oligonucleotide
  Antisense strand to SEQ ID NO: 297040
caaauaaacagauagcugg

SEQ ID NO: 297042 - RNA, 19 nt, Artificial Sequence
  Description of Artificial Sequence: Synthetic oligonucleotide
  Sense strand starting at position 3679 of SEQ ID NO: 3817
ggugcaauugugagugagu

SEQ ID NO: 297043 - RNA, 19 nt, Artificial Sequence
  Description of Artificial Sequence: Synthetic oligonucleotide
  Antisense strand to SEQ ID NO: 297042
acucacucacaauugcacc

SEQ ID NO: 297044 - RNA, 19 nt, Artificial Sequence
  Description of Artificial Sequence: Synthetic oligonucleotide
  Sense strand starting at position 3795 of SEQ ID NO: 3817
ggaaauccuuaagcuacga

SEQ ID NO: 297045 - RNA, 19 nt, Artificial Sequence
  Description of Artificial Sequence: Synthetic oligonucleotide
  Antisense strand to SEQ ID NO: 297044
ucguagcuuaaggauuucc

SEQ ID NO: 297046 - RNA, 19 nt, Artificial Sequence
  Description of Artificial Sequence: Synthetic oligonucleotide
  Sense strand starting at position 3803 of SEQ ID NO: 3817
uuaagcuacgauugaaauu

SEQ ID NO: 297047 - RNA, 19 nt, Artificial Sequence
  Description of Artificial Sequence: Synthetic oligonucleotide
  Antisense strand to SEQ ID NO: 297046
aauuucaaucguagcuuaa

SEQ ID NO: 297048 - RNA, 19 nt, Artificial Sequence
  Description of Artificial Sequence: Synthetic oligonucleotide
  Sense strand starting at position 3877 of SEQ ID NO: 3817
ugaucaucucuuuaguaug

SEQ ID NO: 297049 - RNA, 19 nt, Artificial Sequence
  Description of Artificial Sequence: Synthetic oligonucleotide
  Antisense strand to SEQ ID NO: 297048
cauacuaaagagaugauca

SEQ ID NO: 297050 - RNA, 19 nt, Artificial Sequence
  Description of Artificial Sequence: Synthetic oligonucleotide
  Sense strand starting at position 3882 of SEQ ID NO: 3817
aucucuuuaguaugggaca

SEQ ID NO: 297051 - RNA, 19 nt, Artificial Sequence
  Description of Artificial Sequence: Synthetic oligonucleotide
  Antisense strand to SEQ ID NO: 297050
ugucccauacuaaagagau

SEQ ID NO: 297052 - RNA, 19 nt, Artificial Sequence
  Description of Artificial Sequence: Synthetic oligonucleotide
  Sense strand starting at position 94 of SEQ ID NO: 3818
gccaaccugcuagauaaau

SEQ ID NO: 297053 - RNA, 19 nt, Artificial Sequence
  Description of Artificial Sequence: Synthetic oligonucleotide
  Antisense strand to SEQ ID NO: 297052
auuuaucuagcagguuggc

SEQ ID NO: 297054 - RNA, 19 nt, Artificial Sequence
  Description of Artificial Sequence: Synthetic oligonucleotide
  Sense strand starting at position 176 of SEQ ID NO: 3818
gaacaaagaguguguucuu

SEQ ID NO: 297055 - RNA, 19 nt, Artificial Sequence
  Description of Artificial Sequence: Synthetic oligonucleotide
  Antisense strand to SEQ ID NO: 297054
aagaacacacucuuuguuc

SEQ ID NO: 297056 - RNA, 19 nt, Artificial Sequence
  Description of Artificial Sequence: Synthetic oligonucleotide
  Sense strand starting at position 177 of SEQ ID NO: 3818
aacaaagaguguguucuua

SEQ ID NO: 297057 - RNA, 19 nt, Artificial Sequence
  Description of Artificial Sequence: Synthetic oligonucleotide
  Antisense strand to SEQ ID NO: 297056
uaagaacacacucuuuguu

SEQ ID NO: 297058 - RNA, 19 nt, Artificial Sequence
  Description of Artificial Sequence: Synthetic oligonucleotide
  Sense strand starting at position 179 of SEQ ID NO: 3818
caaagaguguguucuuauu

SEQ ID NO: 297059 - RNA, 19 nt, Artificial Sequence
  Description of Artificial Sequence: Synthetic oligonucleotide
  Antisense strand to SEQ ID NO: 297058
aauaagaacacacucuuug

SEQ ID NO: 297060 - RNA, 19 nt, Artificial Sequence
  Description of Artificial Sequence: Synthetic oligonucleotide
  Sense strand starting at position 193 of SEQ ID NO: 3818
uuauucugccacggauaua

SEQ ID NO: 297061 - RNA, 19 nt, Artificial Sequence
  Description of Artificial Sequence: Synthetic oligonucleotide
  Antisense strand to SEQ ID NO: 297060
uauauccguggcagaauaa

SEQ ID NO: 297062 - RNA, 19 nt, Artificial Sequence
  Description of Artificial Sequence: Synthetic oligonucleotide
  Sense strand starting at position 203 of SEQ ID NO: 3818
acggauauauccuuaacgu

SEQ ID NO: 297063 - RNA, 19 nt, Artificial Sequence
  Description of Artificial Sequence: Synthetic oligonucleotide
  Antisense strand to SEQ ID NO: 297062
acguuaaggauauauccgu

SEQ ID NO: 297064 - RNA, 19 nt, Artificial Sequence
  Description of Artificial Sequence: Synthetic oligonucleotide
  Sense strand starting at position 204 of SEQ ID NO: 3818
cggauauauccuuaacguu

SEQ ID NO: 297065 - RNA, 19 nt, Artificial Sequence
  Description of Artificial Sequence: Synthetic oligonucleotide
  Antisense strand to SEQ ID NO: 297064
aacguuaaggauauauccg

SEQ ID NO: 297066 - RNA, 19 nt, Artificial Sequence
  Description of Artificial Sequence: Synthetic oligonucleotide
  Sense strand starting at position 283 of SEQ ID NO: 3818
cuguccaaauagucguaaa

SEQ ID NO: 297067 - RNA, 19 nt, Artificial Sequence
  Description of Artificial Sequence: Synthetic oligonucleotide
  Antisense strand to SEQ ID NO: 297066
uuuacgacuauuuggacag

SEQ ID NO: 297068 - RNA, 19 nt, Artificial Sequence
  Description of Artificial Sequence: Synthetic oligonucleotide
  Sense strand starting at position 416 of SEQ ID NO: 3818
cagaauauccaagggucau

SEQ ID NO: 297069 - RNA, 19 nt, Artificial Sequence
  Description of Artificial Sequence: Synthetic oligonucleotide
  Antisense strand to SEQ ID NO: 297068
augacccuuggauauucug

SEQ ID NO: 297070 - RNA, 19 nt, Artificial Sequence
  Description of Artificial Sequence: Synthetic oligonucleotide
  Sense strand starting at position 487 of SEQ ID NO: 3818
ucaagacaugcugguuaua

SEQ ID NO: 297071 - RNA, 19 nt, Artificial Sequence
  Description of Artificial Sequence: Synthetic oligonucleotide
  Antisense strand to SEQ ID NO: 297070
uauaaccagcaugucuuga

SEQ ID NO: 297072 - RNA, 19 nt, Artificial Sequence
  Description of Artificial Sequence: Synthetic oligonucleotide
  Sense strand starting at position 489 of SEQ ID NO: 3818
aagacaugcugguuauaug

SEQ ID NO: 297073 - RNA, 19 nt, Artificial Sequence
  Description of Artificial Sequence: Synthetic oligonucleotide
  Antisense strand to SEQ ID NO: 297072
cauauaaccagcaugucuu

SEQ ID NO: 297074 - RNA, 19 nt, Artificial Sequence
  Description of Artificial Sequence: Synthetic oligonucleotide
  Sense strand starting at position 499 of SEQ ID NO: 3818
gguuauaugcucucgcagu

SEQ ID NO: 297075 - RNA, 19 nt, Artificial Sequence
  Description of Artificial Sequence: Synthetic oligonucleotide
  Antisense strand to SEQ ID NO: 297074
acugcgagagcauauaacc

SEQ ID NO: 297076 - RNA, 19 nt, Artificial Sequence
  Description of Artificial Sequence: Synthetic oligonucleotide
  Sense strand starting at position 538 of SEQ ID NO: 3818
ccaagugacagcuggaauu

SEQ ID NO: 297077 - RNA, 19 nt, Artificial Sequence
  Description of Artificial Sequence: Synthetic oligonucleotide
  Antisense strand to SEQ ID NO: 297076
aauuccagcugucacuugg

SEQ ID NO: 297078 - RNA, 19 nt, Artificial Sequence
  Description of Artificial Sequence: Synthetic oligonucleotide
  Sense strand starting at position 560 of SEQ ID NO: 3818
gugcuucuaggcucuguua

SEQ ID NO: 297079 - RNA, 19 nt, Artificial Sequence
  Description of Artificial Sequence: Synthetic oligonucleotide
  Antisense strand to SEQ ID NO: 297078
uaacagagccuagaagcac

SEQ ID NO: 297080 - RNA, 19 nt, Artificial Sequence
  Description of Artificial Sequence: Synthetic oligonucleotide
  Sense strand starting at position 574 of SEQ ID NO: 3818
uguuacuagcaauguuaga

SEQ ID NO: 297081 - RNA, 19 nt, Artificial Sequence
  Description of Artificial Sequence: Synthetic oligonucleotide
  Antisense strand to SEQ ID NO: 297080
ucuaacauugcuaguaaca

SEQ ID NO: 297082 - RNA, 19 nt, Artificial Sequence
  Description of Artificial Sequence: Synthetic oligonucleotide
  Sense strand starting at position 608 of SEQ ID NO: 3818
ucaagcucucaggauuaca

SEQ ID NO: 297083 - RNA, 19 nt, Artificial Sequence
  Description of Artificial Sequence: Synthetic oligonucleotide
  Antisense strand to SEQ ID NO: 297082
uguaauccugagagcuuga

SEQ ID NO: 297084 - RNA, 19 nt, Artificial Sequence
  Description of Artificial Sequence: Synthetic oligonucleotide
  Sense strand starting at position 784 of SEQ ID NO: 3818
ggagaugagucuccuuccu

SEQ ID NO: 297085 - RNA, 19 nt, Artificial Sequence
  Description of Artificial Sequence: Synthetic oligonucleotide
  Antisense strand to SEQ ID NO: 297084
aggaaggagacucaucucc

SEQ ID NO: 297086 - RNA, 19 nt, Artificial Sequence
  Description of Artificial Sequence: Synthetic oligonucleotide
  Sense strand starting at position 890 of SEQ ID NO: 3818
ucaaaugaacgaugccuaa

SEQ ID NO: 297087 - RNA, 19 nt, Artificial Sequence
  Description of Artificial Sequence: Synthetic oligonucleotide
  Antisense strand to SEQ ID NO: 297086
uuaggcaucguucauuuga

SEQ ID NO: 297088 - RNA, 19 nt, Artificial Sequence
  Description of Artificial Sequence: Synthetic oligonucleotide
  Sense strand starting at position 894 of SEQ ID NO: 3818
augaacgaugccuaauuaa

SEQ ID NO: 297089 - RNA, 19 nt, Artificial Sequence
  Description of Artificial Sequence: Synthetic oligonucleotide
  Antisense strand to SEQ ID NO: 297088
uuaauuaggcaucguucau

SEQ ID NO: 297090 - RNA, 19 nt, Artificial Sequence
  Description of Artificial Sequence: Synthetic oligonucleotide
  Sense strand starting at position 920 of SEQ ID NO: 3818
ccgcaugcaugacuuaaga

SEQ ID NO: 297091 - RNA, 19 nt, Artificial Sequence
  Description of Artificial Sequence: Synthetic oligonucleotide
  Antisense strand to SEQ ID NO: 297090
ucuuaagucaugcaugcgg

SEQ ID NO: 297092 - RNA, 19 nt, Artificial Sequence
  Description of Artificial Sequence: Synthetic oligonucleotide
  Sense strand starting at position 955 of SEQ ID NO: 3818
ucgucuuccgagucagcua

SEQ ID NO: 297093 - RNA, 19 nt, Artificial Sequence
  Description of Artificial Sequence: Synthetic oligonucleotide
  Antisense strand to SEQ ID NO: 297092
uagcugacucggaagacga

SEQ ID NO: 297094 - RNA, 19 nt, Artificial Sequence
  Description of Artificial Sequence: Synthetic oligonucleotide
  Sense strand starting at position 960 of SEQ ID NO: 3818
uuccgagucagcuagagau

SEQ ID NO: 297095 - RNA, 19 nt, Artificial Sequence
  Description of Artificial Sequence: Synthetic oligonucleotide
  Antisense strand to SEQ ID NO: 297094
aucucuagcugacucggaa

SEQ ID NO: 297096 - RNA, 19 nt, Artificial Sequence
  Description of Artificial Sequence: Synthetic oligonucleotide
  Sense strand starting at position 962 of SEQ ID NO: 3818
ccgagucagcuagagauuc

SEQ ID NO: 297097 - RNA, 19 nt, Artificial Sequence
  Description of Artificial Sequence: Synthetic oligonucleotide
  Antisense strand to SEQ ID NO: 297096
gaaucucuagcugacucgg

SEQ ID NO: 297098 - RNA, 19 nt, Artificial Sequence
  Description of Artificial Sequence: Synthetic oligonucleotide
  Sense strand starting at position 970 of SEQ ID NO: 3818
gcuagagauucugcaggau

SEQ ID NO: 297099 - RNA, 19 nt, Artificial Sequence
  Description of Artificial Sequence: Synthetic oligonucleotide
  Antisense strand to SEQ ID NO: 297098
auccugcagaaucucuagc

SEQ ID NO: 297100 - RNA, 19 nt, Artificial Sequence
  Description of Artificial Sequence: Synthetic oligonucleotide
  Sense strand starting at position 1459 of SEQ ID NO: 3818
cgaagcuuccagcaaugaa

SEQ ID NO: 297101 - RNA, 19 nt, Artificial Sequence
  Description of Artificial Sequence: Synthetic oligonucleotide
  Antisense strand to SEQ ID NO: 297100
uucauugcuggaagcuucg

SEQ ID NO: 297102 - RNA, 19 nt, Artificial Sequence
  Description of Artificial Sequence: Synthetic oligonucleotide
  Sense strand starting at position 1462 of SEQ ID NO: 3818
agcuuccagcaaugaauua

SEQ ID NO: 297103 - RNA, 19 nt, Artificial Sequence
  Description of Artificial Sequence: Synthetic oligonucleotide
  Antisense strand to SEQ ID NO: 297102
uaauucauugcuggaagcu

SEQ ID NO: 297104 - RNA, 19 nt, Artificial Sequence
  Description of Artificial Sequence: Synthetic oligonucleotide
  Sense strand starting at position 2756 of SEQ ID NO: 3818
gcgauuuaaauccgguaag

SEQ ID NO: 297105 - RNA, 19 nt, Artificial Sequence
  Description of Artificial Sequence: Synthetic oligonucleotide
  Antisense strand to SEQ ID NO: 297104
cuuaccggauuuaaaucgc

SEQ ID NO: 297106 - RNA, 19 nt, Artificial Sequence
  Description of Artificial Sequence: Synthetic oligonucleotide
  Sense strand starting at position 2838 of SEQ ID NO: 3818
ccucuuaaucuuggagauc

SEQ ID NO: 297107 - RNA, 19 nt, Artificial Sequence
  Description of Artificial Sequence: Synthetic oligonucleotide
  Antisense strand to SEQ ID NO: 297106
gaucuccaagauuaagagg

SEQ ID NO: 297108 - RNA, 19 nt, Artificial Sequence
  Description of Artificial Sequence: Synthetic oligonucleotide
  Sense strand starting at position 2941 of SEQ ID NO: 3818
agaguaaguccacagugca

SEQ ID NO: 297109 - RNA, 19 nt, Artificial Sequence
  Description of Artificial Sequence: Synthetic oligonucleotide
  Antisense strand to SEQ ID NO: 297108
ugcacuguggacuuacucu

SEQ ID NO: 297110 - RNA, 19 nt, Artificial Sequence
  Description of Artificial Sequence: Synthetic oligonucleotide
  Sense strand starting at position 3284 of SEQ ID NO: 3818
aagguacaaugcuuguaau

SEQ ID NO: 297111 - RNA, 19 nt, Artificial Sequence
  Description of Artificial Sequence: Synthetic oligonucleotide
  Antisense strand to SEQ ID NO: 297110
auuacaagcauuguaccuu

SEQ ID NO: 297112 - RNA, 19 nt, Artificial Sequence
  Description of Artificial Sequence: Synthetic oligonucleotide
  Sense strand starting at position 3285 of SEQ ID NO: 3818
agguacaaugcuuguaaug

SEQ ID NO: 297113 - RNA, 19 nt, Artificial Sequence
  Description of Artificial Sequence: Synthetic oligonucleotide
  Antisense strand to SEQ ID NO: 297112
cauuacaagcauuguaccu

SEQ ID NO: 297114 - RNA, 19 nt, Artificial Sequence
  Description of Artificial Sequence: Synthetic oligonucleotide
  Sense strand starting at position 3304 of SEQ ID NO: 3818
cuuguauauaugggcagau

SEQ ID NO: 297115 - RNA, 19 nt, Artificial Sequence
  Description of Artificial Sequence: Synthetic oligonucleotide
  Antisense strand to SEQ ID NO: 297114
aucugcccauauauacaag

SEQ ID NO: 297116 - RNA, 19 nt, Artificial Sequence
  Description of Artificial Sequence: Synthetic oligonucleotide
  Sense strand starting at position 3306 of SEQ ID NO: 3818
uguauauaugggcagaugu

SEQ ID NO: 297117 - RNA, 19 nt, Artificial Sequence
  Description of Artificial Sequence: Synthetic oligonucleotide
  Antisense strand to SEQ ID NO: 297116
acaucugcccauauauaca

SEQ ID NO: 297118 - RNA, 19 nt, Artificial Sequence
  Description of Artificial Sequence: Synthetic oligonucleotide
  Sense strand starting at position 3621 of SEQ ID NO: 3818
acacaugugcuugaugcaa

SEQ ID NO: 297119 - RNA, 19 nt, Artificial Sequence
  Description of Artificial Sequence: Synthetic oligonucleotide
  Antisense strand to SEQ ID NO: 297118
uugcaucaagcacaugugu

SEQ ID NO: 297120 - RNA, 19 nt, Artificial Sequence
  Description of Artificial Sequence: Synthetic oligonucleotide
  Sense strand starting at position 3719 of SEQ ID NO: 3818
agcguuauggcugccauga

SEQ ID NO: 297121 - RNA, 19 nt, Artificial Sequence
  Description of Artificial Sequence: Synthetic oligonucleotide
  Antisense strand to SEQ ID NO: 297120
ucauggcagccauaacgcu

SEQ ID NO: 297122 - RNA, 19 nt, Artificial Sequence
  Description of Artificial Sequence: Synthetic oligonucleotide
  Sense strand starting at position 3720 of SEQ ID NO: 3818
gcguuauggcugccaugag

SEQ ID NO: 297123 - RNA, 19 nt, Artificial Sequence
  Description of Artificial Sequence: Synthetic oligonucleotide
  Antisense strand to SEQ ID NO: 297122
cucauggcagccauaacgc

SEQ ID NO: 297124 - RNA, 19 nt, Artificial Sequence
  Description of Artificial Sequence: Synthetic oligonucleotide
  Sense strand starting at position 3732 of SEQ ID NO: 3818
ccaugagagucagcaguau

SEQ ID NO: 297125 - RNA, 19 nt, Artificial Sequence
  Description of Artificial Sequence: Synthetic oligonucleotide
  Antisense strand to SEQ ID NO: 297124
auacugcugacucucaugg

SEQ ID NO: 297126 - RNA, 19 nt, Artificial Sequence
  Description of Artificial Sequence: Synthetic oligonucleotide
  Sense strand starting at position 3736 of SEQ ID NO: 3818
gagagucagcaguauccca

SEQ ID NO: 297127 - RNA, 19 nt, Artificial Sequence
  Description of Artificial Sequence: Synthetic oligonucleotide
  Antisense strand to SEQ ID NO: 297126
ugggauacugcugacucuc

SEQ ID NO: 297128 - RNA, 19 nt, Artificial Sequence
  Description of Artificial Sequence: Synthetic oligonucleotide
  Sense strand starting at position 3946 of SEQ ID NO: 3818
cucagcuauuauucuggau

SEQ ID NO: 297129 - RNA, 19 nt, Artificial Sequence
  Description of Artificial Sequence: Synthetic oligonucleotide
  Antisense strand to SEQ ID NO: 297128
auccagaauaauagcugag

SEQ ID NO: 297130 - RNA, 19 nt, Artificial Sequence
  Description of Artificial Sequence: Synthetic oligonucleotide
  Sense strand starting at position 3950 of SEQ ID NO: 3818
gcuauuauucuggauuaag

SEQ ID NO: 297131 - RNA, 19 nt, Artificial Sequence
  Description of Artificial Sequence: Synthetic oligonucleotide
  Antisense strand to SEQ ID NO: 297130
cuuaauccagaauaauagc

SEQ ID NO: 297132 - RNA, 19 nt, Artificial Sequence
  Description of Artificial Sequence: Synthetic oligonucleotide
  Sense strand starting at position 19 of SEQ ID NO: 3819
gcagucccuucgcuauuua

SEQ ID NO: 297133 - RNA, 19 nt, Artificial Sequence
  Description of Artificial Sequence: Synthetic oligonucleotide
  Antisense strand to SEQ ID NO: 297132
uaaauagcgaagggacugc

SEQ ID NO: 297134 - RNA, 19 nt, Artificial Sequence
  Description of Artificial Sequence: Synthetic oligonucleotide
  Sense strand starting at position 189 of SEQ ID NO: 3819
auguuaaauugucucaacu

SEQ ID NO: 297135 - RNA, 19 nt, Artificial Sequence
  Description of Artificial Sequence: Synthetic oligonucleotide
  Antisense strand to SEQ ID NO: 297134
aguugagacaauuuaacau

SEQ ID NO: 297136 - RNA, 19 nt, Artificial Sequence
  Description of Artificial Sequence: Synthetic oligonucleotide
  Sense strand starting at position 191 of SEQ ID NO: 3819
guuaaauugucucaacuuu

SEQ ID NO: 297137 - RNA, 19 nt, Artificial Sequence
  Description of Artificial Sequence: Synthetic oligonucleotide
  Antisense strand to SEQ ID NO: 297136
aaaguugagacaauuuaac

SEQ ID NO: 297138 - RNA, 19 nt, Artificial Sequence
  Description of Artificial Sequence: Synthetic oligonucleotide
  Sense strand starting at position 306 of SEQ ID NO: 3819
ccucacucuuuccaggagu

SEQ ID NO: 297139 - RNA, 19 nt, Artificial Sequence
  Description of Artificial Sequence: Synthetic oligonucleotide
  Antisense strand to SEQ ID NO: 297138
acuccuggaaagagugagg

SEQ ID NO: 297140 - RNA, 19 nt, Artificial Sequence
  Description of Artificial Sequence: Synthetic oligonucleotide
  Sense strand starting at position 308 of SEQ ID NO: 3819
ucacucuuuccaggaguau

SEQ ID NO: 297141 - RNA, 19 nt, Artificial Sequence
  Description of Artificial Sequence: Synthetic oligonucleotide
  Antisense strand to SEQ ID NO: 297140
auacuccuggaaagaguga

SEQ ID NO: 297142 - RNA, 19 nt, Artificial Sequence
  Description of Artificial Sequence: Synthetic oligonucleotide
  Sense strand starting at position 351 of SEQ ID NO: 3819
ggagcucaguacuccauau

SEQ ID NO: 297143 - RNA, 19 nt, Artificial Sequence
  Description of Artificial Sequence: Synthetic oligonucleotide
  Antisense strand to SEQ ID NO: 297142
auauggaguacugagcucc

SEQ ID NO: 297144 - RNA, 19 nt, Artificial Sequence
  Description of Artificial Sequence: Synthetic oligonucleotide
  Sense strand starting at position 372 of SEQ ID NO: 3819
agcagugacuccuaucaca

SEQ ID NO: 297145 - RNA, 19 nt, Artificial Sequence
  Description of Artificial Sequence: Synthetic oligonucleotide
  Antisense strand to SEQ ID NO: 297144
ugugauaggagucacugcu

SEQ ID NO: 297146 - RNA, 19 nt, Artificial Sequence
  Description of Artificial Sequence: Synthetic oligonucleotide
  Sense strand starting at position 449 of SEQ ID NO: 3819
guaagaugcuaccauuugu

SEQ ID NO: 297147 - RNA, 19 nt, Artificial Sequence
  Description of Artificial Sequence: Synthetic oligonucleotide
  Antisense strand to SEQ ID NO: 297146
acaaaugguagcaucuuac

SEQ ID NO: 297148 - RNA, 19 nt, Artificial Sequence
  Description of Artificial Sequence: Synthetic oligonucleotide
  Sense strand starting at position 617 of SEQ ID NO: 3819
uuccucaagugguauauaa

SEQ ID NO: 297149 - RNA, 19 nt, Artificial Sequence
  Description of Artificial Sequence: Synthetic oligonucleotide
  Antisense strand to SEQ ID NO: 297148
uuauauaccacuugaggaa

SEQ ID NO: 297150 - RNA, 19 nt, Artificial Sequence
  Description of Artificial Sequence: Synthetic oligonucleotide
  Sense strand starting at position 738 of SEQ ID NO: 3819
cuaaauuugcagcgcauau

SEQ ID NO: 297151 - RNA, 19 nt, Artificial Sequence
  Description of Artificial Sequence: Synthetic oligonucleotide
  Antisense strand to SEQ ID NO: 297150
auaugcgcugcaaauuuag

SEQ ID NO: 297152 - RNA, 19 nt, Artificial Sequence
  Description of Artificial Sequence: Synthetic oligonucleotide
  Sense strand starting at position 857 of SEQ ID NO: 3819
uggaauucuuccuugguca

SEQ ID NO: 297153 - RNA, 19 nt, Artificial Sequence
  Description of Artificial Sequence: Synthetic oligonucleotide
  Antisense strand to SEQ ID NO: 297152
ugaccaaggaagaauucca

SEQ ID NO: 297154 - RNA, 19 nt, Artificial Sequence
  Description of Artificial Sequence: Synthetic oligonucleotide
  Sense strand starting at position 858 of SEQ ID NO: 3819
ggaauucuuccuuggucau

SEQ ID NO: 297155 - RNA, 19 nt, Artificial Sequence
  Description of Artificial Sequence: Synthetic oligonucleotide
  Antisense strand to SEQ ID NO: 297154
augaccaaggaagaauucc

SEQ ID NO: 297156 - RNA, 19 nt, Artificial Sequence
  Description of Artificial Sequence: Synthetic oligonucleotide
  Sense strand starting at position 964 of SEQ ID NO: 3819
ugcagaaaguucucuaaau

SEQ ID NO: 297157 - RNA, 19 nt, Artificial Sequence
  Description of Artificial Sequence: Synthetic oligonucleotide
  Antisense strand to SEQ ID NO: 297156
auuuagagaacuuucugca

SEQ ID NO: 297158 - RNA, 19 nt, Artificial Sequence
  Description of Artificial Sequence: Synthetic oligonucleotide
  Sense strand starting at position 965 of SEQ ID NO: 3819
gcagaaaguucucuaaaua

SEQ ID NO: 297159 - RNA, 19 nt, Artificial Sequence
  Description of Artificial Sequence: Synthetic oligonucleotide
  Antisense strand to SEQ ID NO: 297158
uauuuagagaacuuucugc

SEQ ID NO: 297160 - RNA, 19 nt, Artificial Sequence
  Description of Artificial Sequence: Synthetic oligonucleotide
  Sense strand starting at position 1110 of SEQ ID NO: 3819
augguuugccucucgccaa

SEQ ID NO: 297161 - RNA, 19 nt, Artificial Sequence
  Description of Artificial Sequence: Synthetic oligonucleotide
  Antisense strand to SEQ ID NO: 297160
uuggcgagaggcaaaccau

SEQ ID NO: 297162 - RNA, 19 nt, Artificial Sequence
  Description of Artificial Sequence: Synthetic oligonucleotide
  Sense strand starting at position 1113 of SEQ ID NO: 3819
guuugccucucgccaaauu

SEQ ID NO: 297163 - RNA, 19 nt, Artificial Sequence
  Description of Artificial Sequence: Synthetic oligonucleotide
  Antisense strand to SEQ ID NO: 297162
aauuuggcgagaggcaaac

SEQ ID NO: 297164 - RNA, 19 nt, Artificial Sequence
  Description of Artificial Sequence: Synthetic oligonucleotide
  Sense strand starting at position 1114 of SEQ ID NO: 3819
uuugccucucgccaaauuu

SEQ ID NO: 297165 - RNA, 19 nt, Artificial Sequence
  Description of Artificial Sequence: Synthetic oligonucleotide
  Antisense strand to SEQ ID NO: 297164
aaauuuggcgagaggcaaa

SEQ ID NO: 297166 - RNA, 19 nt, Artificial Sequence
  Description of Artificial Sequence: Synthetic oligonucleotide
  Sense strand starting at position 1358 of SEQ ID NO: 3819
gcgggagccauugaguuua

SEQ ID NO: 297167 - RNA, 19 nt, Artificial Sequence
  Description of Artificial Sequence: Synthetic oligonucleotide
  Antisense strand to SEQ ID NO: 297166
uaaacucaauggcucccgc

SEQ ID NO: 297168 - RNA, 19 nt, Artificial Sequence
  Description of Artificial Sequence: Synthetic oligonucleotide
  Sense strand starting at position 1405 of SEQ ID NO: 3819
ggcaaauccgaaugagaug

SEQ ID NO: 297169 - RNA, 19 nt, Artificial Sequence
  Description of Artificial Sequence: Synthetic oligonucleotide
  Antisense strand to SEQ ID NO: 297168
caucucauucggauuugcc

SEQ ID NO: 297170 - RNA, 19 nt, Artificial Sequence
  Description of Artificial Sequence: Synthetic oligonucleotide
  Sense strand starting at position 1414 of SEQ ID NO: 3819
gaaugagauggacgucaca

SEQ ID NO: 297171 - RNA, 19 nt, Artificial Sequence
  Description of Artificial Sequence: Synthetic oligonucleotide
  Antisense strand to SEQ ID NO: 297170
ugugacguccaucucauuc

SEQ ID NO: 297172 - RNA, 19 nt, Artificial Sequence
  Description of Artificial Sequence: Synthetic oligonucleotide
  Sense strand starting at position 1498 of SEQ ID NO: 3819
ggaguuugccgccugccaa

SEQ ID NO: 297173 - RNA, 19 nt, Artificial Sequence
  Description of Artificial Sequence: Synthetic oligonucleotide
  Antisense strand to SEQ ID NO: 297172
uuggcaggcggcaaacucc

SEQ ID NO: 297174 - RNA, 19 nt, Artificial Sequence
  Description of Artificial Sequence: Synthetic oligonucleotide
  Sense strand starting at position 1524 of SEQ ID NO: 3819
agaauuaacacucggguau

SEQ ID NO: 297175 - RNA, 19 nt, Artificial Sequence
  Description of Artificial Sequence: Synthetic oligonucleotide
  Antisense strand to SEQ ID NO: 297174
auacccgaguguuaauucu

SEQ ID NO: 297176 - RNA, 19 nt, Artificial Sequence
  Description of Artificial Sequence: Synthetic oligonucleotide
  Sense strand starting at position 1525 of SEQ ID NO: 3819
gaauuaacacucggguauu

SEQ ID NO: 297177 - RNA, 19 nt, Artificial Sequence
  Description of Artificial Sequence: Synthetic oligonucleotide
  Antisense strand to SEQ ID NO: 297176
aauacccgaguguuaauuc

SEQ ID NO: 297178 - RNA, 19 nt, Artificial Sequence
  Description of Artificial Sequence: Synthetic oligonucleotide
  Sense strand starting at position 1526 of SEQ ID NO: 3819
aauuaacacucggguauuu

SEQ ID NO: 297179 - RNA, 19 nt, Artificial Sequence
  Description of Artificial Sequence: Synthetic oligonucleotide
  Antisense strand to SEQ ID NO: 297178
aaauacccgaguguuaauu

SEQ ID NO: 297180 - RNA, 19 nt, Artificial Sequence
  Description of Artificial Sequence: Synthetic oligonucleotide
  Sense strand starting at position 1535 of SEQ ID NO: 3819
ucggguauuuaggauucua

SEQ ID NO: 297181 - RNA, 19 nt, Artificial Sequence
  Description of Artificial Sequence: Synthetic oligonucleotide
  Antisense strand to SEQ ID NO: 297180
uagaauccuaaauacccga

SEQ ID NO: 297182 - RNA, 19 nt, Artificial Sequence
  Description of Artificial Sequence: Synthetic oligonucleotide
  Sense strand starting at position 1772 of SEQ ID NO: 3819
cccguucgcuucuccagaa

SEQ ID NO: 297183 - RNA, 19 nt, Artificial Sequence
  Description of Artificial Sequence: Synthetic oligonucleotide
  Antisense strand to SEQ ID NO: 297182
uucuggagaagcgaacggg

SEQ ID NO: 297184 - RNA, 19 nt, Artificial Sequence
  Description of Artificial Sequence: Synthetic oligonucleotide
  Sense strand starting at position 1773 of SEQ ID NO: 3819
ccguucgcuucuccagaau

SEQ ID NO: 297185 - RNA, 19 nt, Artificial Sequence
  Description of Artificial Sequence: Synthetic oligonucleotide
  Antisense strand to SEQ ID NO: 297184
auucuggagaagcgaacgg

SEQ ID NO: 297186 - RNA, 19 nt, Artificial Sequence
  Description of Artificial Sequence: Synthetic oligonucleotide
  Sense strand starting at position 1854 of SEQ ID NO: 3819
gaguguaacuccgcgcaca

SEQ ID NO: 297187 - RNA, 19 nt, Artificial Sequence
  Description of Artificial Sequence: Synthetic oligonucleotide
  Antisense strand to SEQ ID NO: 297186
ugugcgcggaguuacacuc

SEQ ID NO: 297188 - RNA, 19 nt, Artificial Sequence
  Description of Artificial Sequence: Synthetic oligonucleotide
  Sense strand starting at position 2813 of SEQ ID NO: 3819
gaagguuaccugcacagua

SEQ ID NO: 297189 - RNA, 19 nt, Artificial Sequence
  Description of Artificial Sequence: Synthetic oligonucleotide
  Antisense strand to SEQ ID NO: 297188
uacugugcagguaaccuuc

SEQ ID NO: 297190 - RNA, 19 nt, Artificial Sequence
  Description of Artificial Sequence: Synthetic oligonucleotide
  Sense strand starting at position 2950 of SEQ ID NO: 3819
ggaagugagucuuugugua

SEQ ID NO: 297191 - RNA, 19 nt, Artificial Sequence
  Description of Artificial Sequence: Synthetic oligonucleotide
  Antisense strand to SEQ ID NO: 297190
uacacaaagacucacuucc

SEQ ID NO: 297192 - RNA, 19 nt, Artificial Sequence
  Description of Artificial Sequence: Synthetic oligonucleotide
  Sense strand starting at position 2960 of SEQ ID NO: 3819
cuuuguguacccuguccaa

SEQ ID NO: 297193 - RNA, 19 nt, Artificial Sequence
  Description of Artificial Sequence: Synthetic oligonucleotide
  Antisense strand to SEQ ID NO: 297192
uuggacaggguacacaaag

SEQ ID NO: 297194 - RNA, 19 nt, Artificial Sequence
  Description of Artificial Sequence: Synthetic oligonucleotide
  Sense strand starting at position 3141 of SEQ ID NO: 3819
cccagagcuucucuaagga

SEQ ID NO: 297195 - RNA, 19 nt, Artificial Sequence
  Description of Artificial Sequence: Synthetic oligonucleotide
  Antisense strand to SEQ ID NO: 297194
uccuuagagaagcucuggg

SEQ ID NO: 297196 - RNA, 19 nt, Artificial Sequence
  Description of Artificial Sequence: Synthetic oligonucleotide
  Sense strand starting at position 3145 of SEQ ID NO: 3819
gagcuucucuaaggauaug

SEQ ID NO: 297197 - RNA, 19 nt, Artificial Sequence
  Description of Artificial Sequence: Synthetic oligonucleotide
  Antisense strand to SEQ ID NO: 297196
cauauccuuagagaagcuc

SEQ ID NO: 297198 - RNA, 19 nt, Artificial Sequence
  Description of Artificial Sequence: Synthetic oligonucleotide
  Sense strand starting at position 3317 of SEQ ID NO: 3819
gggacaagugguugaagca

SEQ ID NO: 297199 - RNA, 19 nt, Artificial Sequence
  Description of Artificial Sequence: Synthetic oligonucleotide
  Antisense strand to SEQ ID NO: 297198
ugcuucaaccacuuguccc

SEQ ID NO: 297200 - RNA, 19 nt, Artificial Sequence
  Description of Artificial Sequence: Synthetic oligonucleotide
  Sense strand starting at position 3509 of SEQ ID NO: 3819
gcccuuuguuugcugguaa

SEQ ID NO: 297201 - RNA, 19 nt, Artificial Sequence
  Description of Artificial Sequence: Synthetic oligonucleotide
  Antisense strand to SEQ ID NO: 297200
uuaccagcaaacaaagggc

SEQ ID NO: 297202 - RNA, 19 nt, Artificial Sequence
  Description of Artificial Sequence: Synthetic oligonucleotide
  Sense strand starting at position 3523 of SEQ ID NO: 3819
gguaaauacucuccuguga

SEQ ID NO: 297203 - RNA, 19 nt, Artificial Sequence
  Description of Artificial Sequence: Synthetic oligonucleotide
  Antisense strand to SEQ ID NO: 297202
ucacaggagaguauuuacc

SEQ ID NO: 297204 - RNA, 19 nt, Artificial Sequence
  Description of Artificial Sequence: Synthetic oligonucleotide
  Sense strand starting at position 3646 of SEQ ID NO: 3819
gauggauaauauugcuaag

SEQ ID NO: 297205 - RNA, 19 nt, Artificial Sequence
  Description of Artificial Sequence: Synthetic oligonucleotide
  Antisense strand to SEQ ID NO: 297204
cuuagcaauauuauccauc

SEQ ID NO: 297206 - RNA, 19 nt, Artificial Sequence
  Description of Artificial Sequence: Synthetic oligonucleotide
  Sense strand starting at position 3649 of SEQ ID NO: 3819
ggauaauauugcuaagguu

SEQ ID NO: 297207 - RNA, 19 nt, Artificial Sequence
  Description of Artificial Sequence: Synthetic oligonucleotide
  Antisense strand to SEQ ID NO: 297206
aaccuuagcaauauuaucc

SEQ ID NO: 297208 - RNA, 19 nt, Artificial Sequence
  Description of Artificial Sequence: Synthetic oligonucleotide
  Sense strand starting at position 3752 of SEQ ID NO: 3819
gagaucugccauuaaaugu

SEQ ID NO: 297209 - RNA, 19 nt, Artificial Sequence
  Description of Artificial Sequence: Synthetic oligonucleotide
  Antisense strand to SEQ ID NO: 297208
acauuuaauggcagaucuc

SEQ ID NO: 297210 - RNA, 19 nt, Artificial Sequence
  Description of Artificial Sequence: Synthetic oligonucleotide
  Sense strand starting at position 3981 of SEQ ID NO: 3819
gguauaaugcacuguguuc

SEQ ID NO: 297211 - RNA, 19 nt, Artificial Sequence
  Description of Artificial Sequence: Synthetic oligonucleotide
  Antisense strand to SEQ ID NO: 297210
gaacacagugcauuauacc

SEQ ID NO: 297212 - RNA, 19 nt, Artificial Sequence
  Description of Artificial Sequence: Synthetic oligonucleotide
  Sense strand starting at position 11 of SEQ ID NO: 3820
ugcagaaaguucucuaaau

SEQ ID NO: 297213 - RNA, 19 nt, Artificial Sequence
  Description of Artificial Sequence: Synthetic oligonucleotide
  Antisense strand to SEQ ID NO: 297212
auuuagagaacuuucugca

SEQ ID NO: 297214 - RNA, 19 nt, Artificial Sequence
  Description of Artificial Sequence: Synthetic oligonucleotide
  Sense strand starting at position 12 of SEQ ID NO: 3820
gcagaaaguucucuaaaua

SEQ ID NO: 297215 - RNA, 19 nt, Artificial Sequence
  Description of Artificial Sequence: Synthetic oligonucleotide
  Antisense strand to SEQ ID NO: 297214
uauuuagagaacuuucugc

SEQ ID NO: 297216 - RNA, 19 nt, Artificial Sequence
  Description of Artificial Sequence: Synthetic oligonucleotide
  Sense strand starting at position 157 of SEQ ID NO: 3820
augguuugccucucgccaa

SEQ ID NO: 297217 - RNA, 19 nt, Artificial Sequence
  Description of Artificial Sequence: Synthetic oligonucleotide
  Antisense strand to SEQ ID NO: 297216
uuggcgagaggcaaaccau

SEQ ID NO: 297218 - RNA, 19 nt, Artificial Sequence
  Description of Artificial Sequence: Synthetic oligonucleotide
  Sense strand starting at position 160 of SEQ ID NO: 3820
guuugccucucgccaaauu

SEQ ID NO: 297219 - RNA, 19 nt, Artificial Sequence
  Description of Artificial Sequence: Synthetic oligonucleotide
  Antisense strand to SEQ ID NO: 297218
aauuuggcgagaggcaaac

SEQ ID NO: 297220 - RNA, 19 nt, Artificial Sequence
  Description of Artificial Sequence: Synthetic oligonucleotide
  Sense strand starting at position 161 of SEQ ID NO: 3820
uuugccucucgccaaauuu

SEQ ID NO: 297221 - RNA, 19 nt, Artificial Sequence
  Description of Artificial Sequence: Synthetic oligonucleotide
  Antisense strand to SEQ ID NO: 297220
aaauuuggcgagaggcaaa

SEQ ID NO: 297222 - RNA, 19 nt, Artificial Sequence
  Description of Artificial Sequence: Synthetic oligonucleotide
  Sense strand starting at position 405 of SEQ ID NO: 3820
gcgggagccauugaguuua

SEQ ID NO: 297223 - RNA, 19 nt, Artificial Sequence
  Description of Artificial Sequence: Synthetic oligonucleotide
  Antisense strand to SEQ ID NO: 297222
uaaacucaauggcucccgc

SEQ ID NO: 297224 - RNA, 19 nt, Artificial Sequence
  Description of Artificial Sequence: Synthetic oligonucleotide
  Sense strand starting at position 452 of SEQ ID NO: 3820
ggcaaauccgaaugagaug

SEQ ID NO: 297225 - RNA, 19 nt, Artificial Sequence
  Description of Artificial Sequence: Synthetic oligonucleotide
  Antisense strand to SEQ ID NO: 297224
caucucauucggauuugcc

SEQ ID NO: 297226 - RNA, 19 nt, Artificial Sequence
  Description of Artificial Sequence: Synthetic oligonucleotide
  Sense strand starting at position 461 of SEQ ID NO: 3820
gaaugagauggacgucaca

SEQ ID NO: 297227 - RNA, 19 nt, Artificial Sequence
  Description of Artificial Sequence: Synthetic oligonucleotide
  Antisense strand to SEQ ID NO: 297226
ugugacguccaucucauuc

SEQ ID NO: 297228 - RNA, 19 nt, Artificial Sequence
  Description of Artificial Sequence: Synthetic oligonucleotide
  Sense strand starting at position 545 of SEQ ID NO: 3820
ggaguuugccgccugccaa

SEQ ID NO: 297229 - RNA, 19 nt, Artificial Sequence
  Description of Artificial Sequence: Synthetic oligonucleotide
  Antisense strand to SEQ ID NO: 297228
uuggcaggcggcaaacucc

SEQ ID NO: 297230 - RNA, 19 nt, Artificial Sequence
  Description of Artificial Sequence: Synthetic oligonucleotide
  Sense strand starting at position 571 of SEQ ID NO: 3820
agaauuaacacucggguau

SEQ ID NO: 297231 - RNA, 19 nt, Artificial Sequence
  Description of Artificial Sequence: Synthetic oligonucleotide
  Antisense strand to SEQ ID NO: 297230
auacccgaguguuaauucu

SEQ ID NO: 297232 - RNA, 19 nt, Artificial Sequence
  Description of Artificial Sequence: Synthetic oligonucleotide
  Sense strand starting at position 572 of SEQ ID NO: 3820
gaauuaacacucggguauu

SEQ ID NO: 297233 - RNA, 19 nt, Artificial Sequence
  Description of Artificial Sequence: Synthetic oligonucleotide
  Antisense strand to SEQ ID NO: 297232
aauacccgaguguuaauuc

SEQ ID NO: 297234 - RNA, 19 nt, Artificial Sequence
  Description of Artificial Sequence: Synthetic oligonucleotide
  Sense strand starting at position 573 of SEQ ID NO: 3820
aauuaacacucggguauuu

SEQ ID NO: 297235 - RNA, 19 nt, Artificial Sequence
  Description of Artificial Sequence: Synthetic oligonucleotide
  Antisense strand to SEQ ID NO: 297234
aaauacccgaguguuaauu

SEQ ID NO: 297236 - RNA, 19 nt, Artificial Sequence
  Description of Artificial Sequence: Synthetic oligonucleotide
  Sense strand starting at position 582 of SEQ ID NO: 3820
ucggguauuuaggauucua

SEQ ID NO: 297237 - RNA, 19 nt, Artificial Sequence
  Description of Artificial Sequence: Synthetic oligonucleotide
  Antisense strand to SEQ ID NO: 297236
uagaauccuaaauacccga

SEQ ID NO: 297238 - RNA, 19 nt, Artificial Sequence
  Description of Artificial Sequence: Synthetic oligonucleotide
  Sense strand starting at position 819 of SEQ ID NO: 3820
cccguucgcuucuccagaa

SEQ ID NO: 297239 - RNA, 19 nt, Artificial Sequence
  Description of Artificial Sequence: Synthetic oligonucleotide
  Antisense strand to SEQ ID NO: 297238
uucuggagaagcgaacggg

SEQ ID NO: 297240 - RNA, 19 nt, Artificial Sequence
  Description of Artificial Sequence: Synthetic oligonucleotide
  Sense strand starting at position 820 of SEQ ID NO: 3820
ccguucgcuucuccagaau

SEQ ID NO: 297241 - RNA, 19 nt, Artificial Sequence
  Description of Artificial Sequence: Synthetic oligonucleotide
  Antisense strand to SEQ ID NO: 297240
auucuggagaagcgaacgg

SEQ ID NO: 297242 - RNA, 19 nt, Artificial Sequence
  Description of Artificial Sequence: Synthetic oligonucleotide
  Sense strand starting at position 901 of SEQ ID NO: 3820
gaguguaacuccgcgcaca

SEQ ID NO: 297243 - RNA, 19 nt, Artificial Sequence
  Description of Artificial Sequence: Synthetic oligonucleotide
  Antisense strand to SEQ ID NO: 297242
ugugcgcggaguuacacuc

SEQ ID NO: 297244 - RNA, 19 nt, Artificial Sequence
  Description of Artificial Sequence: Synthetic oligonucleotide
  Sense strand starting at position 1740 of SEQ ID NO: 3820
ucugcuugucgcggagagu

SEQ ID NO: 297245 - RNA, 19 nt, Artificial Sequence
  Description of Artificial Sequence: Synthetic oligonucleotide
  Antisense strand to SEQ ID NO: 297244
acucuccgcgacaagcaga

SEQ ID NO: 297246 - RNA, 19 nt, Artificial Sequence
  Description of Artificial Sequence: Synthetic oligonucleotide
  Sense strand starting at position 1860 of SEQ ID NO: 3820
gaagguuaccugcacagua

SEQ ID NO: 297247 - RNA, 19 nt, Artificial Sequence
  Description of Artificial Sequence: Synthetic oligonucleotide
  Antisense strand to SEQ ID NO: 297246
uacugugcagguaaccuuc

SEQ ID NO: 297248 - RNA, 19 nt, Artificial Sequence
  Description of Artificial Sequence: Synthetic oligonucleotide
  Sense strand starting at position 1997 of SEQ ID NO: 3820
ggaagugagucuuugugua

SEQ ID NO: 297249 - RNA, 19 nt, Artificial Sequence
  Description of Artificial Sequence: Synthetic oligonucleotide
  Antisense strand to SEQ ID NO: 297248
uacacaaagacucacuucc

SEQ ID NO: 297250 - RNA, 19 nt, Artificial Sequence
  Description of Artificial Sequence: Synthetic oligonucleotide
  Sense strand starting at position 2007 of SEQ ID NO: 3820
cuuuguguacccuguccaa

SEQ ID NO: 297251 - RNA, 19 nt, Artificial Sequence
  Description of Artificial Sequence: Synthetic oligonucleotide
  Antisense strand to SEQ ID NO: 297250
uuggacaggguacacaaag

SEQ ID NO: 297252 - RNA, 19 nt, Artificial Sequence
  Description of Artificial Sequence: Synthetic oligonucleotide
  Sense strand starting at position 2188 of SEQ ID NO: 3820
cccagagcuucucuaagga

SEQ ID NO: 297253 - RNA, 19 nt, Artificial Sequence
  Description of Artificial Sequence: Synthetic oligonucleotide
  Antisense strand to SEQ ID NO: 297252
uccuuagagaagcucuggg

SEQ ID NO: 297254 - RNA, 19 nt, Artificial Sequence
  Description of Artificial Sequence: Synthetic oligonucleotide
  Sense strand starting at position 2192 of SEQ ID NO: 3820
gagcuucucuaaggauaug

SEQ ID NO: 297255 - RNA, 19 nt, Artificial Sequence
  Description of Artificial Sequence: Synthetic oligonucleotide
  Antisense strand to SEQ ID NO: 297254
cauauccuuagagaagcuc

SEQ ID NO: 297256 - RNA, 19 nt, Artificial Sequence
  Description of Artificial Sequence: Synthetic oligonucleotide
  Sense strand starting at position 2364 of SEQ ID NO: 3820
gggacaagugguugaagca

SEQ ID NO: 297257 - RNA, 19 nt, Artificial Sequence
  Description of Artificial Sequence: Synthetic oligonucleotide
  Antisense strand to SEQ ID NO: 297256
ugcuucaaccacuuguccc

SEQ ID NO: 297258 - RNA, 19 nt, Artificial Sequence
  Description of Artificial Sequence: Synthetic oligonucleotide
  Sense strand starting at position 2556 of SEQ ID NO: 3820
gcccuuuguuugcugguaa

SEQ ID NO: 297259 - RNA, 19 nt, Artificial Sequence
  Description of Artificial Sequence: Synthetic oligonucleotide
  Antisense strand to SEQ ID NO: 297258
uuaccagcaaacaaagggc

SEQ ID NO: 297260 - RNA, 19 nt, Artificial Sequence
  Description of Artificial Sequence: Synthetic oligonucleotide
  Sense strand starting at position 2560 of SEQ ID NO: 3820
uuuguuugcugguaaauac

SEQ ID NO: 297261 - RNA, 19 nt, Artificial Sequence
  Description of Artificial Sequence: Synthetic oligonucleotide
  Antisense strand to SEQ ID NO: 297260
guauuuaccagcaaacaaa

SEQ ID NO: 297262 - RNA, 19 nt, Artificial Sequence
  Description of Artificial Sequence: Synthetic oligonucleotide
  Sense strand starting at position 2570 of SEQ ID NO: 3820
gguaaauacucuccuguga

SEQ ID NO: 297263 - RNA, 19 nt, Artificial Sequence
  Description of Artificial Sequence: Synthetic oligonucleotide
  Antisense strand to SEQ ID NO: 297262
ucacaggagaguauuuacc

SEQ ID NO: 297264 - RNA, 19 nt, Artificial Sequence
  Description of Artificial Sequence: Synthetic oligonucleotide
  Sense strand starting at position 2693 of SEQ ID NO: 3820
gauggauaauauugcuaag

SEQ ID NO: 297265 - RNA, 19 nt, Artificial Sequence
  Description of Artificial Sequence: Synthetic oligonucleotide
  Antisense strand to SEQ ID NO: 297264
cuuagcaauauuauccauc

SEQ ID NO: 297266 - RNA, 19 nt, Artificial Sequence
  Description of Artificial Sequence: Synthetic oligonucleotide
  Sense strand starting at position 2696 of SEQ ID NO: 3820
ggauaauauugcuaagguu

SEQ ID NO: 297267 - RNA, 19 nt, Artificial Sequence
  Description of Artificial Sequence: Synthetic oligonucleotide
  Antisense strand to SEQ ID NO: 297266
aaccuuagcaauauuaucc

SEQ ID NO: 297268 - RNA, 19 nt, Artificial Sequence
  Description of Artificial Sequence: Synthetic oligonucleotide
  Sense strand starting at position 2799 of SEQ ID NO: 3820
gagaucugccauuaaaugu

SEQ ID NO: 297269 - RNA, 19 nt, Artificial Sequence
  Description of Artificial Sequence: Synthetic oligonucleotide
  Antisense strand to SEQ ID NO: 297268
acauuuaauggcagaucuc

SEQ ID NO: 297270 - RNA, 19 nt, Artificial Sequence
  Description of Artificial Sequence: Synthetic oligonucleotide
  Sense strand starting at position 3028 of SEQ ID NO: 3820
gguauaaugcacuguguuc

SEQ ID NO: 297271 - RNA, 19 nt, Artificial Sequence
  Description of Artificial Sequence: Synthetic oligonucleotide
  Antisense strand to SEQ ID NO: 297270
gaacacagugcauuauacc

SEQ ID NO: 297272 - RNA, 19 nt, Artificial Sequence
  Description of Artificial Sequence: Synthetic oligonucleotide
  Sense strand starting at position 3112 of SEQ ID NO: 3820
cauggaauucugcggaacu

SEQ ID NO: 297273 - RNA, 19 nt, Artificial Sequence
  Description of Artificial Sequence: Synthetic oligonucleotide
  Antisense strand to SEQ ID NO: 297272
aguuccgcagaauuccaug

SEQ ID NO: 297274 - RNA, 19 nt, Artificial Sequence
  Description of Artificial Sequence: Synthetic oligonucleotide
  Sense strand starting at position 3122 of SEQ ID NO: 3820
ugcggaacugccugaauga

SEQ ID NO: 297275 - RNA, 19 nt, Artificial Sequence
  Description of Artificial Sequence: Synthetic oligonucleotide
  Antisense strand to SEQ ID NO: 297274
ucauucaggcaguuccgca

SEQ ID NO: 297276 - RNA, 19 nt, Artificial Sequence
  Description of Artificial Sequence: Synthetic oligonucleotide
  Sense strand starting at position 3123 of SEQ ID NO: 3820
gcggaacugccugaaugaa

SEQ ID NO: 297277 - RNA, 19 nt, Artificial Sequence
  Description of Artificial Sequence: Synthetic oligonucleotide
  Antisense strand to SEQ ID NO: 297276
uucauucaggcaguuccgc

SEQ ID NO: 297278 - RNA, 19 nt, Artificial Sequence
  Description of Artificial Sequence: Synthetic oligonucleotide
  Sense strand starting at position 3133 of SEQ ID NO: 3820
cugaaugaacaauguguua

SEQ ID NO: 297279 - RNA, 19 nt, Artificial Sequence
  Description of Artificial Sequence: Synthetic oligonucleotide
  Antisense strand to SEQ ID NO: 297278
uaacacauuguucauucag

SEQ ID NO: 297280 - RNA, 19 nt, Artificial Sequence
  Description of Artificial Sequence: Synthetic oligonucleotide
  Sense strand starting at position 3529 of SEQ ID NO: 3820
auacauacagugugguuaa

SEQ ID NO: 297281 - RNA, 19 nt, Artificial Sequence
  Description of Artificial Sequence: Synthetic oligonucleotide
  Antisense strand to SEQ ID NO: 297280
uuaaccacacuguauguau

SEQ ID NO: 297282 - RNA, 19 nt, Artificial Sequence
  Description of Artificial Sequence: Synthetic oligonucleotide
  Sense strand starting at position 3530 of SEQ ID NO: 3820
uacauacagugugguuaaa

SEQ ID NO: 297283 - RNA, 19 nt, Artificial Sequence
  Description of Artificial Sequence: Synthetic oligonucleotide
  Antisense strand to SEQ ID NO: 297282
uuuaaccacacuguaugua

SEQ ID NO: 297284 - RNA, 19 nt, Artificial Sequence
  Description of Artificial Sequence: Synthetic oligonucleotide
  Sense strand starting at position 3687 of SEQ ID NO: 3820
uguuucucuucuguauaau

SEQ ID NO: 297285 - RNA, 19 nt, Artificial Sequence
  Description of Artificial Sequence: Synthetic oligonucleotide
  Antisense strand to SEQ ID NO: 297284
auuauacagaagagaaaca

SEQ ID NO: 297286 - RNA, 19 nt, Artificial Sequence
  Description of Artificial Sequence: Synthetic oligonucleotide
  Sense strand starting at position 3688 of SEQ ID NO: 3820
guuucucuucuguauaaug

SEQ ID NO: 297287 - RNA, 19 nt, Artificial Sequence
  Description of Artificial Sequence: Synthetic oligonucleotide
  Antisense strand to SEQ ID NO: 297286
cauuauacagaagagaaac

SEQ ID NO: 297288 - RNA, 19 nt, Artificial Sequence
  Description of Artificial Sequence: Synthetic oligonucleotide
  Sense strand starting at position 3699 of SEQ ID NO: 3820
guauaauggauguaauagu

SEQ ID NO: 297289 - RNA, 19 nt, Artificial Sequence
  Description of Artificial Sequence: Synthetic oligonucleotide
  Antisense strand to SEQ ID NO: 297288
acuauuacauccauuauac

SEQ ID NO: 297290 - RNA, 19 nt, Artificial Sequence
  Description of Artificial Sequence: Synthetic oligonucleotide
  Sense strand starting at position 3817 of SEQ ID NO: 3820
ggccauaauguugaaaccu

SEQ ID NO: 297291 - RNA, 19 nt, Artificial Sequence
  Description of Artificial Sequence: Synthetic oligonucleotide
  Antisense strand to SEQ ID NO: 297290
agguuucaacauuauggcc

SEQ ID NO: 297292 - RNA, 19 nt, Artificial Sequence
  Description of Artificial Sequence: Synthetic oligonucleotide
  Sense strand starting at position 42 of SEQ ID NO: 3821
guaggacuaaacugugauc

SEQ ID NO: 297293 - RNA, 19 nt, Artificial Sequence
  Description of Artificial Sequence: Synthetic oligonucleotide
  Antisense strand to SEQ ID NO: 297292
gaucacaguuuaguccuac

SEQ ID NO: 297294 - RNA, 19 nt, Artificial Sequence
  Description of Artificial Sequence: Synthetic oligonucleotide
  Sense strand starting at position 44 of SEQ ID NO: 3821
aggacuaaacugugaucca

SEQ ID NO: 297295 - RNA, 19 nt, Artificial Sequence
  Description of Artificial Sequence: Synthetic oligonucleotide
  Antisense strand to SEQ ID NO: 297294
uggaucacaguuuaguccu

SEQ ID NO: 297296 - RNA, 19 nt, Artificial Sequence
  Description of Artificial Sequence: Synthetic oligonucleotide
  Sense strand starting at position 378 of SEQ ID NO: 3821
aacagugagccuuaagagu

SEQ ID NO: 297297 - RNA, 19 nt, Artificial Sequence
  Description of Artificial Sequence: Synthetic oligonucleotide
  Antisense strand to SEQ ID NO: 297296
acucuuaaggcucacuguu

SEQ ID NO: 297298 - RNA, 19 nt, Artificial Sequence
  Description of Artificial Sequence: Synthetic oligonucleotide
  Sense strand starting at position 384 of SEQ ID NO: 3821
gagccuuaagagugauguu

SEQ ID NO: 297299 - RNA, 19 nt, Artificial Sequence
  Description of Artificial Sequence: Synthetic oligonucleotide
  Antisense strand to SEQ ID NO: 297298
aacaucacucuuaaggcuc

SEQ ID NO: 297300 - RNA, 19 nt, Artificial Sequence
  Description of Artificial Sequence: Synthetic oligonucleotide
  Sense strand starting at position 385 of SEQ ID NO: 3821
agccuuaagagugauguuu

SEQ ID NO: 297301 - RNA, 19 nt, Artificial Sequence
  Description of Artificial Sequence: Synthetic oligonucleotide
  Antisense strand to SEQ ID NO: 297300
aaacaucacucuuaaggcu

SEQ ID NO: 297302 - RNA, 19 nt, Artificial Sequence
  Description of Artificial Sequence: Synthetic oligonucleotide
  Sense strand starting at position 393 of SEQ ID NO: 3821
gagugauguuucccagauu

SEQ ID NO: 297303 - RNA, 19 nt, Artificial Sequence
  Description of Artificial Sequence: Synthetic oligonucleotide
  Antisense strand to SEQ ID NO: 297302
aaucugggaaacaucacuc

SEQ ID NO: 297304 - RNA, 19 nt, Artificial Sequence
  Description of Artificial Sequence: Synthetic oligonucleotide
  Sense strand starting at position 529 of SEQ ID NO: 3821
gggauuacacaacguauca

SEQ ID NO: 297305 - RNA, 19 nt, Artificial Sequence
  Description of Artificial Sequence: Synthetic oligonucleotide
  Antisense strand to SEQ ID NO: 297304
ugauacguuguguaauccc

SEQ ID NO: 297306 - RNA, 19 nt, Artificial Sequence
  Description of Artificial Sequence: Synthetic oligonucleotide
  Sense strand starting at position 602 of SEQ ID NO: 3821
ggaauuacugcugagaugu

SEQ ID NO: 297307 - RNA, 19 nt, Artificial Sequence
  Description of Artificial Sequence: Synthetic oligonucleotide
  Antisense strand to SEQ ID NO: 297306
acaucucagcaguaauucc

SEQ ID NO: 297308 - RNA, 19 nt, Artificial Sequence
  Description of Artificial Sequence: Synthetic oligonucleotide
  Sense strand starting at position 613 of SEQ ID NO: 3821
ugagaugugcaguauucuu

SEQ ID NO: 297309 - RNA, 19 nt, Artificial Sequence
  Description of Artificial Sequence: Synthetic oligonucleotide
  Antisense strand to SEQ ID NO: 297308
aagaauacugcacaucuca

SEQ ID NO: 297310 - RNA, 19 nt, Artificial Sequence
  Description of Artificial Sequence: Synthetic oligonucleotide
  Sense strand starting at position 884 of SEQ ID NO: 3821
guauauaucuuauccaugu

SEQ ID NO: 297311 - RNA, 19 nt, Artificial Sequence
  Description of Artificial Sequence: Synthetic oligonucleotide
  Antisense strand to SEQ ID NO: 297310
acauggauaagauauauac

SEQ ID NO: 297312 - RNA, 19 nt, Artificial Sequence
  Description of Artificial Sequence: Synthetic oligonucleotide
  Sense strand starting at position 910 of SEQ ID NO: 3821
auucuauagucacugagag

SEQ ID NO: 297313 - RNA, 19 nt, Artificial Sequence
  Description of Artificial Sequence: Synthetic oligonucleotide
  Antisense strand to SEQ ID NO: 297312
cucucagugacuauagaau

SEQ ID NO: 297314 - RNA, 19 nt, Artificial Sequence
  Description of Artificial Sequence: Synthetic oligonucleotide
  Sense strand starting at position 911 of SEQ ID NO: 3821
uucuauagucacugagaga

SEQ ID NO: 297315 - RNA, 19 nt, Artificial Sequence
  Description of Artificial Sequence: Synthetic oligonucleotide
  Antisense strand to SEQ ID NO: 297314
ucucucagugacuauagaa

SEQ ID NO: 297316 - RNA, 19 nt, Artificial Sequence
  Description of Artificial Sequence: Synthetic oligonucleotide
  Sense strand starting at position 927 of SEQ ID NO: 3821
agaccagcgcuuuaugacu

SEQ ID NO: 297317 - RNA, 19 nt, Artificial Sequence
  Description of Artificial Sequence: Synthetic oligonucleotide
  Antisense strand to SEQ ID NO: 297316
agucauaaagcgcuggucu

SEQ ID NO: 297318 - RNA, 19 nt, Artificial Sequence
  Description of Artificial Sequence: Synthetic oligonucleotide
  Sense strand starting at position 935 of SEQ ID NO: 3821
gcuuuaugacugcaacaug

SEQ ID NO: 297319 - RNA, 19 nt, Artificial Sequence
  Description of Artificial Sequence: Synthetic oligonucleotide
  Antisense strand to SEQ ID NO: 297318
cauguugcagucauaaagc

SEQ ID NO: 297320 - RNA, 19 nt, Artificial Sequence
  Description of Artificial Sequence: Synthetic oligonucleotide
  Sense strand starting at position 938 of SEQ ID NO: 3821
uuaugacugcaacauguaa

SEQ ID NO: 297321 - RNA, 19 nt, Artificial Sequence
  Description of Artificial Sequence: Synthetic oligonucleotide
  Antisense strand to SEQ ID NO: 297320
uuacauguugcagucauaa

SEQ ID NO: 297322 - RNA, 19 nt, Artificial Sequence
  Description of Artificial Sequence: Synthetic oligonucleotide
  Sense strand starting at position 1096 of SEQ ID NO: 3821
cuacccuaucagggauuga

SEQ ID NO: 297323 - RNA, 19 nt, Artificial Sequence
  Description of Artificial Sequence: Synthetic oligonucleotide
  Antisense strand to SEQ ID NO: 297322
ucaaucccugauaggguag

SEQ ID NO: 297324 - RNA, 19 nt, Artificial Sequence
  Description of Artificial Sequence: Synthetic oligonucleotide
  Sense strand starting at position 1111 of SEQ ID NO: 3821
uugaaugcaugaguaauau

SEQ ID NO: 297325 - RNA, 19 nt, Artificial Sequence
  Description of Artificial Sequence: Synthetic oligonucleotide
  Antisense strand to SEQ ID NO: 297324
auauuacucaugcauucaa

SEQ ID NO: 297326 - RNA, 19 nt, Artificial Sequence
  Description of Artificial Sequence: Synthetic oligonucleotide
  Sense strand starting at position 1139 of SEQ ID NO: 3821
ggaaguaaguucuuccuau

SEQ ID NO: 297327 - RNA, 19 nt, Artificial Sequence
  Description of Artificial Sequence: Synthetic oligonucleotide
  Antisense strand to SEQ ID NO: 297326
auaggaagaacuuacuucc

SEQ ID NO: 297328 - RNA, 19 nt, Artificial Sequence
  Description of Artificial Sequence: Synthetic oligonucleotide
  Sense strand starting at position 2130 of SEQ ID NO: 3821
ucacgaauuuaguuuguuu

SEQ ID NO: 297329 - RNA, 19 nt, Artificial Sequence
  Description of Artificial Sequence: Synthetic oligonucleotide
  Antisense strand to SEQ ID NO: 297328
aaacaaacuaaauucguga

SEQ ID NO: 297330 - RNA, 19 nt, Artificial Sequence
  Description of Artificial Sequence: Synthetic oligonucleotide
  Sense strand starting at position 2157 of SEQ ID NO: 3821
caggacucguagcuagaga

SEQ ID NO: 297331 - RNA, 19 nt, Artificial Sequence
  Description of Artificial Sequence: Synthetic oligonucleotide
  Antisense strand to SEQ ID NO: 297330
ucucuagcuacgaguccug

SEQ ID NO: 297332 - RNA, 19 nt, Artificial Sequence
  Description of Artificial Sequence: Synthetic oligonucleotide
  Sense strand starting at position 2158 of SEQ ID NO: 3821
aggacucguagcuagagaa

SEQ ID NO: 297333 - RNA, 19 nt, Artificial Sequence
  Description of Artificial Sequence: Synthetic oligonucleotide
  Antisense strand to SEQ ID NO: 297332
uucucuagcuacgaguccu

SEQ ID NO: 297334 - RNA, 19 nt, Artificial Sequence
  Description of Artificial Sequence: Synthetic oligonucleotide
  Sense strand starting at position 2204 of SEQ ID NO: 3821
aguccuguuucccuagaaa

SEQ ID NO: 297335 - RNA, 19 nt, Artificial Sequence
  Description of Artificial Sequence: Synthetic oligonucleotide
  Antisense strand to SEQ ID NO: 297334
uuucuagggaaacaggacu

SEQ ID NO: 297336 - RNA, 19 nt, Artificial Sequence
  Description of Artificial Sequence: Synthetic oligonucleotide
  Sense strand starting at position 2246 of SEQ ID NO: 3821
cuuugagauucugcgaaag

SEQ ID NO: 297337 - RNA, 19 nt, Artificial Sequence
  Description of Artificial Sequence: Synthetic oligonucleotide
  Antisense strand to SEQ ID NO: 297336
cuuucgcagaaucucaaag

SEQ ID NO: 297338 - RNA, 19 nt, Artificial Sequence
  Description of Artificial Sequence: Synthetic oligonucleotide
  Sense strand starting at position 2346 of SEQ ID NO: 3821
agcgguggucgaaguaacu

SEQ ID NO: 297339 - RNA, 19 nt, Artificial Sequence
  Description of Artificial Sequence: Synthetic oligonucleotide
  Antisense strand to SEQ ID NO: 297338
aguuacuucgaccaccgcu

SEQ ID NO: 297340 - RNA, 19 nt, Artificial Sequence
  Description of Artificial Sequence: Synthetic oligonucleotide
  Sense strand starting at position 2453 of SEQ ID NO: 3821
gccuuagacuuguugagag

SEQ ID NO: 297341 - RNA, 19 nt, Artificial Sequence
  Description of Artificial Sequence: Synthetic oligonucleotide
  Antisense strand to SEQ ID NO: 297340
cucucaacaagucuaaggc

SEQ ID NO: 297342 - RNA, 19 nt, Artificial Sequence
  Description of Artificial Sequence: Synthetic oligonucleotide
  Sense strand starting at position 2455 of SEQ ID NO: 3821
cuuagacuuguugagaguu

SEQ ID NO: 297343 - RNA, 19 nt, Artificial Sequence
  Description of Artificial Sequence: Synthetic oligonucleotide
  Antisense strand to SEQ ID NO: 297342
aacucucaacaagucuaag

SEQ ID NO: 297344 - RNA, 19 nt, Artificial Sequence
  Description of Artificial Sequence: Synthetic oligonucleotide
  Sense strand starting at position 2522 of SEQ ID NO: 3821
gguaguacgagucauaaac

SEQ ID NO: 297345 - RNA, 19 nt, Artificial Sequence
  Description of Artificial Sequence: Synthetic oligonucleotide
  Antisense strand to SEQ ID NO: 297344
guuuaugacucguacuacc

SEQ ID NO: 297346 - RNA, 19 nt, Artificial Sequence
  Description of Artificial Sequence: Synthetic oligonucleotide
  Sense strand starting at position 2611 of SEQ ID NO: 3821
auucucuguuccucuuaga

SEQ ID NO: 297347 - RNA, 19 nt, Artificial Sequence
  Description of Artificial Sequence: Synthetic oligonucleotide
  Antisense strand to SEQ ID NO: 297346
ucuaagaggaacagagaau

SEQ ID NO: 297348 - RNA, 19 nt, Artificial Sequence
  Description of Artificial Sequence: Synthetic oligonucleotide
  Sense strand starting at position 2656 of SEQ ID NO: 3821
gucucuccuccucauuaga

SEQ ID NO: 297349 - RNA, 19 nt, Artificial Sequence
  Description of Artificial Sequence: Synthetic oligonucleotide
  Antisense strand to SEQ ID NO: 297348
ucuaaugaggaggagagac

SEQ ID NO: 297350 - RNA, 19 nt, Artificial Sequence
  Description of Artificial Sequence: Synthetic oligonucleotide
  Sense strand starting at position 2783 of SEQ ID NO: 3821
cugaacagugcguaucuaa

SEQ ID NO: 297351 - RNA, 19 nt, Artificial Sequence
  Description of Artificial Sequence: Synthetic oligonucleotide
  Antisense strand to SEQ ID NO: 297350
uuagauacgcacuguucag

SEQ ID NO: 297352 - RNA, 19 nt, Artificial Sequence
  Description of Artificial Sequence: Synthetic oligonucleotide
  Sense strand starting at position 2786 of SEQ ID NO: 3821
aacagugcguaucuaaaga

SEQ ID NO: 297353 - RNA, 19 nt, Artificial Sequence
  Description of Artificial Sequence: Synthetic oligonucleotide
  Antisense strand to SEQ ID NO: 297352
ucuuuagauacgcacuguu

SEQ ID NO: 297354 - RNA, 19 nt, Artificial Sequence
  Description of Artificial Sequence: Synthetic oligonucleotide
  Sense strand starting at position 2791 of SEQ ID NO: 3821
ugcguaucuaaagauguca

SEQ ID NO: 297355 - RNA, 19 nt, Artificial Sequence
  Description of Artificial Sequence: Synthetic oligonucleotide
  Antisense strand to SEQ ID NO: 297354
ugacaucuuuagauacgca

SEQ ID NO: 297356 - RNA, 19 nt, Artificial Sequence
  Description of Artificial Sequence: Synthetic oligonucleotide
  Sense strand starting at position 2833 of SEQ ID NO: 3821
uauugaaauguggguccua

SEQ ID NO: 297357 - RNA, 19 nt, Artificial Sequence
  Description of Artificial Sequence: Synthetic oligonucleotide
  Antisense strand to SEQ ID NO: 297356
uaggacccacauuucaaua

SEQ ID NO: 297358 - RNA, 19 nt, Artificial Sequence
  Description of Artificial Sequence: Synthetic oligonucleotide
  Sense strand starting at position 2848 of SEQ ID NO: 3821
ccuacuagaguuugcaauu

SEQ ID NO: 297359 - RNA, 19 nt, Artificial Sequence
  Description of Artificial Sequence: Synthetic oligonucleotide
  Antisense strand to SEQ ID NO: 297358
aauugcaaacucuaguagg

SEQ ID NO: 297360 - RNA, 19 nt, Artificial Sequence
  Description of Artificial Sequence: Synthetic oligonucleotide
  Sense strand starting at position 2884 of SEQ ID NO: 3821
uguugagaauuacuccaac

SEQ ID NO: 297361 - RNA, 19 nt, Artificial Sequence
  Description of Artificial Sequence: Synthetic oligonucleotide
  Antisense strand to SEQ ID NO: 297360
guuggaguaauucucaaca

SEQ ID NO: 297362 - RNA, 19 nt, Artificial Sequence
  Description of Artificial Sequence: Synthetic oligonucleotide
  Sense strand starting at position 2945 of SEQ ID NO: 3821
guauaaagaccugaugcua

SEQ ID NO: 297363 - RNA, 19 nt, Artificial Sequence
  Description of Artificial Sequence: Synthetic oligonucleotide
  Antisense strand to SEQ ID NO: 297362
uagcaucaggucuuuauac

SEQ ID NO: 297364 - RNA, 19 nt, Artificial Sequence
  Description of Artificial Sequence: Synthetic oligonucleotide
  Sense strand starting at position 2982 of SEQ ID NO: 3821
ucagaaaggugguugcauu

SEQ ID NO: 297365 - RNA, 19 nt, Artificial Sequence
  Description of Artificial Sequence: Synthetic oligonucleotide
  Antisense strand to SEQ ID NO: 297364
aaugcaaccaccuuucuga

SEQ ID NO: 297366 - RNA, 19 nt, Artificial Sequence
  Description of Artificial Sequence: Synthetic oligonucleotide
  Sense strand starting at position 3430 of SEQ ID NO: 3821
uugucuaagacuuaguguu

SEQ ID NO: 297367 - RNA, 19 nt, Artificial Sequence
  Description of Artificial Sequence: Synthetic oligonucleotide
  Antisense strand to SEQ ID NO: 297366
aacacuaagucuuagacaa

SEQ ID NO: 297368 - RNA, 19 nt, Artificial Sequence
  Description of Artificial Sequence: Synthetic oligonucleotide
  Sense strand starting at position 3460 of SEQ ID NO: 3821
caaggcugacuagguauaa

SEQ ID NO: 297369 - RNA, 19 nt, Artificial Sequence
  Description of Artificial Sequence: Synthetic oligonucleotide
  Antisense strand to SEQ ID NO: 297368
uuauaccuagucagccuug

SEQ ID NO: 297370 - RNA, 19 nt, Artificial Sequence
  Description of Artificial Sequence: Synthetic oligonucleotide
  Sense strand starting at position 3748 of SEQ ID NO: 3821
guucgugauggccauaaug

SEQ ID NO: 297371 - RNA, 19 nt, Artificial Sequence
  Description of Artificial Sequence: Synthetic oligonucleotide
  Antisense strand to SEQ ID NO: 297370
cauuauggccaucacgaac

SEQ ID NO: 297372 - RNA, 19 nt, Artificial Sequence
  Description of Artificial Sequence: Synthetic oligonucleotide
  Sense strand starting at position 250 of SEQ ID NO: 3823
aaaucacaacgaugagagu

SEQ ID NO: 297373 - RNA, 19 nt, Artificial Sequence
  Description of Artificial Sequence: Synthetic oligonucleotide
  Antisense strand to SEQ ID NO: 297372
acucucaucguugugauuu

SEQ ID NO: 297374 - RNA, 19 nt, Artificial Sequence
  Description of Artificial Sequence: Synthetic oligonucleotide
  Sense strand starting at position 301 of SEQ ID NO: 3823
ccauaauuaggugguauaa

SEQ ID NO: 297375 - RNA, 19 nt, Artificial Sequence
  Description of Artificial Sequence: Synthetic oligonucleotide
  Antisense strand to SEQ ID NO: 297374
uuauaccaccuaauuaugg

SEQ ID NO: 297376 - RNA, 19 nt, Artificial Sequence
  Description of Artificial Sequence: Synthetic oligonucleotide
  Sense strand starting at position 493 of SEQ ID NO: 3823
cagugaacuuucuugagga

SEQ ID NO: 297377 - RNA, 19 nt, Artificial Sequence
  Description of Artificial Sequence: Synthetic oligonucleotide
  Antisense strand to SEQ ID NO: 297376
uccucaagaaaguucacug

SEQ ID NO: 297378 - RNA, 19 nt, Artificial Sequence
  Description of Artificial Sequence: Synthetic oligonucleotide
  Sense strand starting at position 498 of SEQ ID NO: 3823
aacuuucuugaggauuguu

SEQ ID NO: 297379 - RNA, 19 nt, Artificial Sequence
  Description of Artificial Sequence: Synthetic oligonucleotide
  Antisense strand to SEQ ID NO: 297378
aacaauccucaagaaaguu

SEQ ID NO: 297380 - RNA, 19 nt, Artificial Sequence
  Description of Artificial Sequence: Synthetic oligonucleotide
  Sense strand starting at position 501 of SEQ ID NO: 3823
uuucuugaggauuguuaac

SEQ ID NO: 297381 - RNA, 19 nt, Artificial Sequence
  Description of Artificial Sequence: Synthetic oligonucleotide
  Antisense strand to SEQ ID NO: 297380
guuaacaauccucaagaaa

SEQ ID NO: 297382 - RNA, 19 nt, Artificial Sequence
  Description of Artificial Sequence: Synthetic oligonucleotide
  Sense strand starting at position 503 of SEQ ID NO: 3823
ucuugaggauuguuaacua

SEQ ID NO: 297383 - RNA, 19 nt, Artificial Sequence
  Description of Artificial Sequence: Synthetic oligonucleotide
  Antisense strand to SEQ ID NO: 297382
uaguuaacaauccucaaga

SEQ ID NO: 297384 - RNA, 19 nt, Artificial Sequence
  Description of Artificial Sequence: Synthetic oligonucleotide
  Sense strand starting at position 507 of SEQ ID NO: 3823
gaggauuguuaacuaacuu

SEQ ID NO: 297385 - RNA, 19 nt, Artificial Sequence
  Description of Artificial Sequence: Synthetic oligonucleotide
  Antisense strand to SEQ ID NO: 297384
aaguuaguuaacaauccuc

SEQ ID NO: 297386 - RNA, 19 nt, Artificial Sequence
  Description of Artificial Sequence: Synthetic oligonucleotide
  Sense strand starting at position 612 of SEQ ID NO: 3823
ggaacuggucugggaauua

SEQ ID NO: 297387 - RNA, 19 nt, Artificial Sequence
  Description of Artificial Sequence: Synthetic oligonucleotide
  Antisense strand to SEQ ID NO: 297386
uaauucccagaccaguucc

SEQ ID NO: 297388 - RNA, 19 nt, Artificial Sequence
  Description of Artificial Sequence: Synthetic oligonucleotide
  Sense strand starting at position 623 of SEQ ID NO: 3823
gggaauuaaugcucauaau

SEQ ID NO: 297389 - RNA, 19 nt, Artificial Sequence
  Description of Artificial Sequence: Synthetic oligonucleotide
  Antisense strand to SEQ ID NO: 297388
auuaugagcauuaauuccc

SEQ ID NO: 297390 - RNA, 19 nt, Artificial Sequence
  Description of Artificial Sequence: Synthetic oligonucleotide
  Sense strand starting at position 826 of SEQ ID NO: 3823
auucuagucuuucuagaua

SEQ ID NO: 297391 - RNA, 19 nt, Artificial Sequence
  Description of Artificial Sequence: Synthetic oligonucleotide
  Antisense strand to SEQ ID NO: 297390
uaucuagaaagacuagaau

SEQ ID NO: 297392 - RNA, 19 nt, Artificial Sequence
  Description of Artificial Sequence: Synthetic oligonucleotide
  Sense strand starting at position 829 of SEQ ID NO: 3823
cuagucuuucuagauauag

SEQ ID NO: 297393 - RNA, 19 nt, Artificial Sequence
  Description of Artificial Sequence: Synthetic oligonucleotide
  Antisense strand to SEQ ID NO: 297392
cuauaucuagaaagacuag

SEQ ID NO: 297394 - RNA, 19 nt, Artificial Sequence
  Description of Artificial Sequence: Synthetic oligonucleotide
  Sense strand starting at position 949 of SEQ ID NO: 3823
aucaguaugcucuagaaua

SEQ ID NO: 297395 - RNA, 19 nt, Artificial Sequence
  Description of Artificial Sequence: Synthetic oligonucleotide
  Antisense strand to SEQ ID NO: 297394
uauucuagagcauacugau

SEQ ID NO: 297396 - RNA, 19 nt, Artificial Sequence
  Description of Artificial Sequence: Synthetic oligonucleotide
  Sense strand starting at position 1175 of SEQ ID NO: 3823
caauauucgggucacaauu

SEQ ID NO: 297397 - RNA, 19 nt, Artificial Sequence
  Description of Artificial Sequence: Synthetic oligonucleotide
  Antisense strand to SEQ ID NO: 297396
aauugugacccgaauauug

SEQ ID NO: 297398 - RNA, 19 nt, Artificial Sequence
  Description of Artificial Sequence: Synthetic oligonucleotide
  Sense strand starting at position 1386 of SEQ ID NO: 3823
augcuuguugcaucucagu

SEQ ID NO: 297399 - RNA, 19 nt, Artificial Sequence
  Description of Artificial Sequence: Synthetic oligonucleotide
  Antisense strand to SEQ ID NO: 297398
acugagaugcaacaagcau

SEQ ID NO: 297400 - RNA, 19 nt, Artificial Sequence
  Description of Artificial Sequence: Synthetic oligonucleotide
  Sense strand starting at position 1985 of SEQ ID NO: 3823
cccguucgucugucuauua

SEQ ID NO: 297401 - RNA, 19 nt, Artificial Sequence
  Description of Artificial Sequence: Synthetic oligonucleotide
  Antisense strand to SEQ ID NO: 297400
uaauagacagacgaacggg

SEQ ID NO: 297402 - RNA, 19 nt, Artificial Sequence
  Description of Artificial Sequence: Synthetic oligonucleotide
  Sense strand starting at position 1997 of SEQ ID NO: 3823
ucuauuacauucccaguga

SEQ ID NO: 297403 - RNA, 19 nt, Artificial Sequence
  Description of Artificial Sequence: Synthetic oligonucleotide
  Antisense strand to SEQ ID NO: 297402
ucacugggaauguaauaga

SEQ ID NO: 297404 - RNA, 19 nt, Artificial Sequence
  Description of Artificial Sequence: Synthetic oligonucleotide
  Sense strand starting at position 2294 of SEQ ID NO: 3823
gacagaaagucuuucgaau

SEQ ID NO: 297405 - RNA, 19 nt, Artificial Sequence
  Description of Artificial Sequence: Synthetic oligonucleotide
  Antisense strand to SEQ ID NO: 297404
auucgaaagacuuucuguc

SEQ ID NO: 297406 - RNA, 19 nt, Artificial Sequence
  Description of Artificial Sequence: Synthetic oligonucleotide
  Sense strand starting at position 2300 of SEQ ID NO: 3823
aagucuuucgaauguauuu

SEQ ID NO: 297407 - RNA, 19 nt, Artificial Sequence
  Description of Artificial Sequence: Synthetic oligonucleotide
  Antisense strand to SEQ ID NO: 297406
aaauacauucgaaagacuu

SEQ ID NO: 297408 - RNA, 19 nt, Artificial Sequence
  Description of Artificial Sequence: Synthetic oligonucleotide
  Sense strand starting at position 2350 of SEQ ID NO: 3823
gguagucuuagauauuagg

SEQ ID NO: 297409 - RNA, 19 nt, Artificial Sequence
  Description of Artificial Sequence: Synthetic oligonucleotide
  Antisense strand to SEQ ID NO: 297408
ccuaauaucuaagacuacc

SEQ ID NO: 297410 - RNA, 19 nt, Artificial Sequence
  Description of Artificial Sequence: Synthetic oligonucleotide
  Sense strand starting at position 2356 of SEQ ID NO: 3823
cuuagauauuaggcaauau

SEQ ID NO: 297411 - RNA, 19 nt, Artificial Sequence
  Description of Artificial Sequence: Synthetic oligonucleotide
  Antisense strand to SEQ ID NO: 297410
auauugccuaauaucuaag

SEQ ID NO: 297412 - RNA, 19 nt, Artificial Sequence
  Description of Artificial Sequence: Synthetic oligonucleotide
  Sense strand starting at position 2576 of SEQ ID NO: 3823
cccagaugagacuaacguu

SEQ ID NO: 297413 - RNA, 19 nt, Artificial Sequence
  Description of Artificial Sequence: Synthetic oligonucleotide
  Antisense strand to SEQ ID NO: 297412
aacguuagucucaucuggg

SEQ ID NO: 297414 - RNA, 19 nt, Artificial Sequence
  Description of Artificial Sequence: Synthetic oligonucleotide
  Sense strand starting at position 2833 of SEQ ID NO: 3823
cucagaagacuuugugaaa

SEQ ID NO: 297415 - RNA, 19 nt, Artificial Sequence
  Description of Artificial Sequence: Synthetic oligonucleotide
  Antisense strand to SEQ ID NO: 297414
uuucacaaagucuucugag

SEQ ID NO: 297416 - RNA, 19 nt, Artificial Sequence
  Description of Artificial Sequence: Synthetic oligonucleotide
  Sense strand starting at position 2834 of SEQ ID NO: 3823
ucagaagacuuugugaaac

SEQ ID NO: 297417 - RNA, 19 nt, Artificial Sequence
  Description of Artificial Sequence: Synthetic oligonucleotide
  Antisense strand to SEQ ID NO: 297416
guuucacaaagucuucuga

SEQ ID NO: 297418 - RNA, 19 nt, Artificial Sequence
  Description of Artificial Sequence: Synthetic oligonucleotide
  Sense strand starting at position 2850 of SEQ ID NO: 3823
aacauuaggcuuugguuua

SEQ ID NO: 297419 - RNA, 19 nt, Artificial Sequence
  Description of Artificial Sequence: Synthetic oligonucleotide
  Antisense strand to SEQ ID NO: 297418
uaaaccaaagccuaauguu

SEQ ID NO: 297420 - RNA, 19 nt, Artificial Sequence
  Description of Artificial Sequence: Synthetic oligonucleotide
  Sense strand starting at position 2930 of SEQ ID NO: 3823
gugugauggcaugaccuau

SEQ ID NO: 297421 - RNA, 19 nt, Artificial Sequence
  Description of Artificial Sequence: Synthetic oligonucleotide
  Antisense strand to SEQ ID NO: 297420
auaggucaugccaucacac

SEQ ID NO: 297422 - RNA, 19 nt, Artificial Sequence
  Description of Artificial Sequence: Synthetic oligonucleotide
  Sense strand starting at position 3038 of SEQ ID NO: 3823
guguauauuucuguuggag

SEQ ID NO: 297423 - RNA, 19 nt, Artificial Sequence
  Description of Artificial Sequence: Synthetic oligonucleotide
  Antisense strand to SEQ ID NO: 297422
cuccaacagaaauauacac

SEQ ID NO: 297424 - RNA, 19 nt, Artificial Sequence
  Description of Artificial Sequence: Synthetic oligonucleotide
  Sense strand starting at position 3046 of SEQ ID NO: 3823
uucuguuggaguuaccuga

SEQ ID NO: 297425 - RNA, 19 nt, Artificial Sequence
  Description of Artificial Sequence: Synthetic oligonucleotide
  Antisense strand to SEQ ID NO: 297424
ucagguaacuccaacagaa

SEQ ID NO: 297426 - RNA, 19 nt, Artificial Sequence
  Description of Artificial Sequence: Synthetic oligonucleotide
  Sense strand starting at position 3050 of SEQ ID NO: 3823
guuggaguuaccugaagug

SEQ ID NO: 297427 - RNA, 19 nt, Artificial Sequence
  Description of Artificial Sequence: Synthetic oligonucleotide
  Antisense strand to SEQ ID NO: 297426
cacuucagguaacuccaac

SEQ ID NO: 297428 - RNA, 19 nt, Artificial Sequence
  Description of Artificial Sequence: Synthetic oligonucleotide
  Sense strand starting at position 3072 of SEQ ID NO: 3823
uuguguagucaucaacuuu

SEQ ID NO: 297429 - RNA, 19 nt, Artificial Sequence
  Description of Artificial Sequence: Synthetic oligonucleotide
  Antisense strand to SEQ ID NO: 297428
aaaguugaugacuacacaa

SEQ ID NO: 297430 - RNA, 19 nt, Artificial Sequence
  Description of Artificial Sequence: Synthetic oligonucleotide
  Sense strand starting at position 3092 of SEQ ID NO: 3823
cagacuuaggguugaaagu

SEQ ID NO: 297431 - RNA, 19 nt, Artificial Sequence
  Description of Artificial Sequence: Synthetic oligonucleotide
  Antisense strand to SEQ ID NO: 297430
acuuucaacccuaagucug

SEQ ID NO: 297432 - RNA, 19 nt, Artificial Sequence
  Description of Artificial Sequence: Synthetic oligonucleotide
  Sense strand starting at position 3311 of SEQ ID NO: 3823
acuggagaugcuggucauu

SEQ ID NO: 297433 - RNA, 19 nt, Artificial Sequence
  Description of Artificial Sequence: Synthetic oligonucleotide
  Antisense strand to SEQ ID NO: 297432
aaugaccagcaucuccagu

SEQ ID NO: 297434 - RNA, 19 nt, Artificial Sequence
  Description of Artificial Sequence: Synthetic oligonucleotide
  Sense strand starting at position 3398 of SEQ ID NO: 3823
ccucucacucaguaaaugu

SEQ ID NO: 297435 - RNA, 19 nt, Artificial Sequence
  Description of Artificial Sequence: Synthetic oligonucleotide
  Antisense strand to SEQ ID NO: 297434
acauuuacugagugagagg

SEQ ID NO: 297436 - RNA, 19 nt, Artificial Sequence
  Description of Artificial Sequence: Synthetic oligonucleotide
  Sense strand starting at position 3726 of SEQ ID NO: 3823
cauagaggcuguuccugau

SEQ ID NO: 297437 - RNA, 19 nt, Artificial Sequence
  Description of Artificial Sequence: Synthetic oligonucleotide
  Antisense strand to SEQ ID NO: 297436
aucaggaacagccucuaug

SEQ ID NO: 297438 - RNA, 19 nt, Artificial Sequence
  Description of Artificial Sequence: Synthetic oligonucleotide
  Sense strand starting at position 3730 of SEQ ID NO: 3823
gaggcuguuccugauauua

SEQ ID NO: 297439 - RNA, 19 nt, Artificial Sequence
  Description of Artificial Sequence: Synthetic oligonucleotide
  Antisense strand to SEQ ID NO: 297438
uaauaucaggaacagccuc

SEQ ID NO: 297440 - RNA, 19 nt, Artificial Sequence
  Description of Artificial Sequence: Synthetic oligonucleotide
  Sense strand starting at position 3749 of SEQ ID NO: 3823
gaaaguuaauaugcccagu

SEQ ID NO: 297441 - RNA, 19 nt, Artificial Sequence
  Description of Artificial Sequence: Synthetic oligonucleotide
  Antisense strand to SEQ ID NO: 297440
acugggcauauuaacuuuc

SEQ ID NO: 297442 - RNA, 19 nt, Artificial Sequence
  Description of Artificial Sequence: Synthetic oligonucleotide
  Sense strand starting at position 3784 of SEQ ID NO: 3823
gguaauagcuaagugaaua

SEQ ID NO: 297443 - RNA, 19 nt, Artificial Sequence
  Description of Artificial Sequence: Synthetic oligonucleotide
  Antisense strand to SEQ ID NO: 297442
uauucacuuagcuauuacc

SEQ ID NO: 297444 - RNA, 19 nt, Artificial Sequence
  Description of Artificial Sequence: Synthetic oligonucleotide
  Sense strand starting at position 3837 of SEQ ID NO: 3823
uuuguaaauguugaccaga

SEQ ID NO: 297445 - RNA, 19 nt, Artificial Sequence
  Description of Artificial Sequence: Synthetic oligonucleotide
  Antisense strand to SEQ ID NO: 297444
ucuggucaacauuuacaaa

SEQ ID NO: 297446 - RNA, 19 nt, Artificial Sequence
  Description of Artificial Sequence: Synthetic oligonucleotide
  Sense strand starting at position 3839 of SEQ ID NO: 3823
uguaaauguugaccagagu

SEQ ID NO: 297447 - RNA, 19 nt, Artificial Sequence
  Description of Artificial Sequence: Synthetic oligonucleotide
  Antisense strand to SEQ ID NO: 297446
acucuggucaacauuuaca

SEQ ID NO: 297448 - RNA, 19 nt, Artificial Sequence
  Description of Artificial Sequence: Synthetic oligonucleotide
  Sense strand starting at position 3840 of SEQ ID NO: 3823
guaaauguugaccagaguu

SEQ ID NO: 297449 - RNA, 19 nt, Artificial Sequence
  Description of Artificial Sequence: Synthetic oligonucleotide
  Antisense strand to SEQ ID NO: 297448
aacucuggucaacauuuac

SEQ ID NO: 297450 - RNA, 19 nt, Artificial Sequence
  Description of Artificial Sequence: Synthetic oligonucleotide
  Sense strand starting at position 3948 of SEQ ID NO: 3823
uuucuuguuuaacuggaaa

SEQ ID NO: 297451 - RNA, 19 nt, Artificial Sequence
  Description of Artificial Sequence: Synthetic oligonucleotide
  Antisense strand to SEQ ID NO: 297450
uuuccaguuaaacaagaaa

SEQ ID NO: 297452 - RNA, 19 nt, Artificial Sequence
  Description of Artificial Sequence: Synthetic oligonucleotide
  Sense strand starting at position 321 of SEQ ID NO: 3822
aaaucacaacgaugagagu

SEQ ID NO: 297453 - RNA, 19 nt, Artificial Sequence
  Description of Artificial Sequence: Synthetic oligonucleotide
  Antisense strand to SEQ ID NO: 297452
acucucaucguugugauuu

SEQ ID NO: 297454 - RNA, 19 nt, Artificial Sequence
  Description of Artificial Sequence: Synthetic oligonucleotide
  Sense strand starting at position 372 of SEQ ID NO: 3822
ccauaauuaggugguauaa

SEQ ID NO: 297455 - RNA, 19 nt, Artificial Sequence
  Description of Artificial Sequence: Synthetic oligonucleotide
  Antisense strand to SEQ ID NO: 297454
uuauaccaccuaauuaugg

SEQ ID NO: 297456 - RNA, 19 nt, Artificial Sequence
  Description of Artificial Sequence: Synthetic oligonucleotide
  Sense strand starting at position 564 of SEQ ID NO: 3822
cagugaacuuucuugagga

SEQ ID NO: 297457 - RNA, 19 nt, Artificial Sequence
  Description of Artificial Sequence: Synthetic oligonucleotide
  Antisense strand to SEQ ID NO: 297456
uccucaagaaaguucacug

SEQ ID NO: 297458 - RNA, 19 nt, Artificial Sequence
  Description of Artificial Sequence: Synthetic oligonucleotide
  Sense strand starting at position 569 of SEQ ID NO: 3822
aacuuucuugaggauuguu

SEQ ID NO: 297459 - RNA, 19 nt, Artificial Sequence
  Description of Artificial Sequence: Synthetic oligonucleotide
  Antisense strand to SEQ ID NO: 297458
aacaauccucaagaaaguu

SEQ ID NO: 297460 - RNA, 19 nt, Artificial Sequence
  Description of Artificial Sequence: Synthetic oligonucleotide
  Sense strand starting at position 572 of SEQ ID NO: 3822
uuucuugaggauuguuaac

SEQ ID NO: 297461 - RNA, 19 nt, Artificial Sequence
  Description of Artificial Sequence: Synthetic oligonucleotide
  Antisense strand to SEQ ID NO: 297460
guuaacaauccucaagaaa

SEQ ID NO: 297462 - RNA, 19 nt, Artificial Sequence
  Description of Artificial Sequence: Synthetic oligonucleotide
  Sense strand starting at position 574 of SEQ ID NO: 3822
ucuugaggauuguuaacua

SEQ ID NO: 297463 - RNA, 19 nt, Artificial Sequence
  Description of Artificial Sequence: Synthetic oligonucleotide
  Antisense strand to SEQ ID NO: 297462
uaguuaacaauccucaaga

SEQ ID NO: 297464 - RNA, 19 nt, Artificial Sequence
  Description of Artificial Sequence: Synthetic oligonucleotide
  Sense strand starting at position 578 of SEQ ID NO: 3822
gaggauuguuaacuaacuu

SEQ ID NO: 297465 - RNA, 19 nt, Artificial Sequence
  Description of Artificial Sequence: Synthetic oligonucleotide
  Antisense strand to SEQ ID NO: 297464
aaguuaguuaacaauccuc

SEQ ID NO: 297466 - RNA, 19 nt, Artificial Sequence
  Description of Artificial Sequence: Synthetic oligonucleotide
  Sense strand starting at position 683 of SEQ ID NO: 3822
ggaacuggucugggaauua

SEQ ID NO: 297467 - RNA, 19 nt, Artificial Sequence
  Description of Artificial Sequence: Synthetic oligonucleotide
  Antisense strand to SEQ ID NO: 297466
uaauucccagaccaguucc

SEQ ID NO: 297468 - RNA, 19 nt, Artificial Sequence
  Description of Artificial Sequence: Synthetic oligonucleotide
  Sense strand starting at position 694 of SEQ ID NO: 3822
gggaauuaaugcucauaau

SEQ ID NO: 297469 - RNA, 19 nt, Artificial Sequence
  Description of Artificial Sequence: Synthetic oligonucleotide
  Antisense strand to SEQ ID NO: 297468
auuaugagcauuaauuccc

SEQ ID NO: 297470 - RNA, 19 nt, Artificial Sequence
  Description of Artificial Sequence: Synthetic oligonucleotide
  Sense strand starting at position 897 of SEQ ID NO: 3822
auucuagucuuucuagaua

SEQ ID NO: 297471 - RNA, 19 nt, Artificial Sequence
  Description of Artificial Sequence: Synthetic oligonucleotide
  Antisense strand to SEQ ID NO: 297470
uaucuagaaagacuagaau

SEQ ID NO: 297472 - RNA, 19 nt, Artificial Sequence
  Description of Artificial Sequence: Synthetic oligonucleotide
  Sense strand starting at position 900 of SEQ ID NO: 3822
cuagucuuucuagauauag

SEQ ID NO: 297473 - RNA, 19 nt, Artificial Sequence
  Description of Artificial Sequence: Synthetic oligonucleotide
  Antisense strand to SEQ ID NO: 297472
cuauaucuagaaagacuag

SEQ ID NO: 297474 - RNA, 19 nt, Artificial Sequence
  Description of Artificial Sequence: Synthetic oligonucleotide
  Sense strand starting at position 1020 of SEQ ID NO: 3822
aucaguaugcucuagaaua

SEQ ID NO: 297475 - RNA, 19 nt, Artificial Sequence
  Description of Artificial Sequence: Synthetic oligonucleotide
  Antisense strand to SEQ ID NO: 297474
uauucuagagcauacugau

SEQ ID NO: 297476 - RNA, 19 nt, Artificial Sequence
  Description of Artificial Sequence: Synthetic oligonucleotide
  Sense strand starting at position 1246 of SEQ ID NO: 3822
caauauucgggucacaauu

SEQ ID NO: 297477 - RNA, 19 nt, Artificial Sequence
  Description of Artificial Sequence: Synthetic oligonucleotide
  Antisense strand to SEQ ID NO: 297476
aauugugacccgaauauug

SEQ ID NO: 297478 - RNA, 19 nt, Artificial Sequence
  Description of Artificial Sequence: Synthetic oligonucleotide
  Sense strand starting at position 1457 of SEQ ID NO: 3822
augcuuguugcaucucagu

SEQ ID NO: 297479 - RNA, 19 nt, Artificial Sequence
  Description of Artificial Sequence: Synthetic oligonucleotide
  Antisense strand to SEQ ID NO: 297478
acugagaugcaacaagcau

SEQ ID NO: 297480 - RNA, 19 nt, Artificial Sequence
  Description of Artificial Sequence: Synthetic oligonucleotide
  Sense strand starting at position 2056 of SEQ ID NO: 3822
cccguucgucugucuauua

SEQ ID NO: 297481 - RNA, 19 nt, Artificial Sequence
  Description of Artificial Sequence: Synthetic oligonucleotide
  Antisense strand to SEQ ID NO: 297480
uaauagacagacgaacggg

SEQ ID NO: 297482 - RNA, 19 nt, Artificial Sequence
  Description of Artificial Sequence: Synthetic oligonucleotide
  Sense strand starting at position 2068 of SEQ ID NO: 3822
ucuauuacauucccaguga

SEQ ID NO: 297483 - RNA, 19 nt, Artificial Sequence
  Description of Artificial Sequence: Synthetic oligonucleotide
  Antisense strand to SEQ ID NO: 297482
ucacugggaauguaauaga

SEQ ID NO: 297484 - RNA, 19 nt, Artificial Sequence
  Description of Artificial Sequence: Synthetic oligonucleotide
  Sense strand starting at position 2365 of SEQ ID NO: 3822
gacagaaagucuuucgaau

SEQ ID NO: 297485 - RNA, 19 nt, Artificial Sequence
  Description of Artificial Sequence: Synthetic oligonucleotide
  Antisense strand to SEQ ID NO: 297484
auucgaaagacuuucuguc

SEQ ID NO: 297486 - RNA, 19 nt, Artificial Sequence
  Description of Artificial Sequence: Synthetic oligonucleotide
  Sense strand starting at position 2371 of SEQ ID NO: 3822
aagucuuucgaauguauuu

SEQ ID NO: 297487 - RNA, 19 nt, Artificial Sequence
  Description of Artificial Sequence: Synthetic oligonucleotide
  Antisense strand to SEQ ID NO: 297486
aaauacauucgaaagacuu

SEQ ID NO: 297488 - RNA, 19 nt, Artificial Sequence
  Description of Artificial Sequence: Synthetic oligonucleotide
  Sense strand starting at position 2421 of SEQ ID NO: 3822
gguagucuuagauauuagg

SEQ ID NO: 297489 - RNA, 19 nt, Artificial Sequence
  Description of Artificial Sequence: Synthetic oligonucleotide
  Antisense strand to SEQ ID NO: 297488
ccuaauaucuaagacuacc

SEQ ID NO: 297490 - RNA, 19 nt, Artificial Sequence
  Description of Artificial Sequence: Synthetic oligonucleotide
  Sense strand starting at position 2427 of SEQ ID NO: 3822
cuuagauauuaggcaauau

SEQ ID NO: 297491 - RNA, 19 nt, Artificial Sequence
  Description of Artificial Sequence: Synthetic oligonucleotide
  Antisense strand to SEQ ID NO: 297490
auauugccuaauaucuaag

SEQ ID NO: 297492 - RNA, 19 nt, Artificial Sequence
  Description of Artificial Sequence: Synthetic oligonucleotide
  Sense strand starting at position 2647 of SEQ ID NO: 3822
cccagaugagacuaacguu

SEQ ID NO: 297493 - RNA, 19 nt, Artificial Sequence
  Description of Artificial Sequence: Synthetic oligonucleotide
  Antisense strand to SEQ ID NO: 297492
aacguuagucucaucuggg

SEQ ID NO: 297494 - RNA, 19 nt, Artificial Sequence
  Description of Artificial Sequence: Synthetic oligonucleotide
  Sense strand starting at position 2904 of SEQ ID NO: 3822
cucagaagacuuugugaaa

SEQ ID NO: 297495 - RNA, 19 nt, Artificial Sequence
  Description of Artificial Sequence: Synthetic oligonucleotide
  Antisense strand to SEQ ID NO: 297494
uuucacaaagucuucugag

SEQ ID NO: 297496 - RNA, 19 nt, Artificial Sequence
  Description of Artificial Sequence: Synthetic oligonucleotide
  Sense strand starting at position 2905 of SEQ ID NO: 3822
ucagaagacuuugugaaac

SEQ ID NO: 297497 - RNA, 19 nt, Artificial Sequence
  Description of Artificial Sequence: Synthetic oligonucleotide
  Antisense strand to SEQ ID NO: 297496
guuucacaaagucuucuga

SEQ ID NO: 297498 - RNA, 19 nt, Artificial Sequence
  Description of Artificial Sequence: Synthetic oligonucleotide
  Sense strand starting at position 2921 of SEQ ID NO: 3822
aacauuaggcuuugguuua

SEQ ID NO: 297499 - RNA, 19 nt, Artificial Sequence
  Description of Artificial Sequence: Synthetic oligonucleotide
  Antisense strand to SEQ ID NO: 297498
uaaaccaaagccuaauguu

SEQ ID NO: 297500 - RNA, 19 nt, Artificial Sequence
  Description of Artificial Sequence: Synthetic oligonucleotide
  Sense strand starting at position 3001 of SEQ ID NO: 3822
gugugauggcaugaccuau

SEQ ID NO: 297501 - RNA, 19 nt, Artificial Sequence
  Description of Artificial Sequence: Synthetic oligonucleotide
  Antisense strand to SEQ ID NO: 297500
auaggucaugccaucacac

SEQ ID NO: 297502 - RNA, 19 nt, Artificial Sequence
  Description of Artificial Sequence: Synthetic oligonucleotide
  Sense strand starting at position 3109 of SEQ ID NO: 3822
guguauauuucuguuggag

SEQ ID NO: 297503 - RNA, 19 nt, Artificial Sequence
  Description of Artificial Sequence: Synthetic oligonucleotide
  Antisense strand to SEQ ID NO: 297502
cuccaacagaaauauacac

SEQ ID NO: 297504 - RNA, 19 nt, Artificial Sequence
  Description of Artificial Sequence: Synthetic oligonucleotide
  Sense strand starting at position 3117 of SEQ ID NO: 3822
uucuguuggaguuaccuga

SEQ ID NO: 297505 - RNA, 19 nt, Artificial Sequence
  Description of Artificial Sequence: Synthetic oligonucleotide
  Antisense strand to SEQ ID NO: 297504
ucagguaacuccaacagaa

SEQ ID NO: 297506 - RNA, 19 nt, Artificial Sequence
  Description of Artificial Sequence: Synthetic oligonucleotide
  Sense strand starting at position 3121 of SEQ ID NO: 3822
guuggaguuaccugaagug

SEQ ID NO: 297507 - RNA, 19 nt, Artificial Sequence
  Description of Artificial Sequence: Synthetic oligonucleotide
  Antisense strand to SEQ ID NO: 297506
cacuucagguaacuccaac

SEQ ID NO: 297508 - RNA, 19 nt, Artificial Sequence
  Description of Artificial Sequence: Synthetic oligonucleotide
  Sense strand starting at position 3143 of SEQ ID NO: 3822
uuguguagucaucaacuuu

SEQ ID NO: 297509 - RNA, 19 nt, Artificial Sequence
  Description of Artificial Sequence: Synthetic oligonucleotide
  Antisense strand to SEQ ID NO: 297508
aaaguugaugacuacacaa

SEQ ID NO: 297510 - RNA, 19 nt, Artificial Sequence
  Description of Artificial Sequence: Synthetic oligonucleotide
  Sense strand starting at position 3163 of SEQ ID NO: 3822
cagacuuaggguugaaagu

SEQ ID NO: 297511 - RNA, 19 nt, Artificial Sequence
  Description of Artificial Sequence: Synthetic oligonucleotide
  Antisense strand to SEQ ID NO: 297510
acuuucaacccuaagucug

SEQ ID NO: 297512 - RNA, 19 nt, Artificial Sequence
  Description of Artificial Sequence: Synthetic oligonucleotide
  Sense strand starting at position 3382 of SEQ ID NO: 3822
acuggagaugcuggucauu

SEQ ID NO: 297513 - RNA, 19 nt, Artificial Sequence
  Description of Artificial Sequence: Synthetic oligonucleotide
  Antisense strand to SEQ ID NO: 297512
aaugaccagcaucuccagu

SEQ ID NO: 297514 - RNA, 19 nt, Artificial Sequence
  Description of Artificial Sequence: Synthetic oligonucleotide
  Sense strand starting at position 3469 of SEQ ID NO: 3822
ccucucacucaguaaaugu

SEQ ID NO: 297515 - RNA, 19 nt, Artificial Sequence
  Description of Artificial Sequence: Synthetic oligonucleotide
  Antisense strand to SEQ ID NO: 297514
acauuuacugagugagagg

SEQ ID NO: 297516 - RNA, 19 nt, Artificial Sequence
  Description of Artificial Sequence: Synthetic oligonucleotide
  Sense strand starting at position 3713 of SEQ ID NO: 3822
agauuaugaugagaagacu

SEQ ID NO: 297517 - RNA, 19 nt, Artificial Sequence
  Description of Artificial Sequence: Synthetic oligonucleotide
  Antisense strand to SEQ ID NO: 297516
agucuucucaucauaaucu

SEQ ID NO: 297518 - RNA, 19 nt, Artificial Sequence
  Description of Artificial Sequence: Synthetic oligonucleotide
  Sense strand starting at position 3797 of SEQ ID NO: 3822
cauagaggcuguuccugau

SEQ ID NO: 297519 - RNA, 19 nt, Artificial Sequence
  Description of Artificial Sequence: Synthetic oligonucleotide
  Antisense strand to SEQ ID NO: 297518
aucaggaacagccucuaug

SEQ ID NO: 297520 - RNA, 19 nt, Artificial Sequence
  Description of Artificial Sequence: Synthetic oligonucleotide
  Sense strand starting at position 3801 of SEQ ID NO: 3822
gaggcuguuccugauauua

SEQ ID NO: 297521 - RNA, 19 nt, Artificial Sequence
  Description of Artificial Sequence: Synthetic oligonucleotide
  Antisense strand to SEQ ID NO: 297520
uaauaucaggaacagccuc

SEQ ID NO: 297522 - RNA, 19 nt, Artificial Sequence
  Description of Artificial Sequence: Synthetic oligonucleotide
  Sense strand starting at position 3820 of SEQ ID NO: 3822
gaaaguuaauaugcccagu

SEQ ID NO: 297523 - RNA, 19 nt, Artificial Sequence
  Description of Artificial Sequence: Synthetic oligonucleotide
  Antisense strand to SEQ ID NO: 297522
acugggcauauuaacuuuc

SEQ ID NO: 297524 - RNA, 19 nt, Artificial Sequence
  Description of Artificial Sequence: Synthetic oligonucleotide
  Sense strand starting at position 3855 of SEQ ID NO: 3822
gguaauagcuaagugaaua

SEQ ID NO: 297525 - RNA, 19 nt, Artificial Sequence
  Description of Artificial Sequence: Synthetic oligonucleotide
  Antisense strand to SEQ ID NO: 297524
uauucacuuagcuauuacc

SEQ ID NO: 297526 - RNA, 19 nt, Artificial Sequence
  Description of Artificial Sequence: Synthetic oligonucleotide
  Sense strand starting at position 3908 of SEQ ID NO: 3822
uuuguaaauguugaccaga

SEQ ID NO: 297527 - RNA, 19 nt, Artificial Sequence
  Description of Artificial Sequence: Synthetic oligonucleotide
  Antisense strand to SEQ ID NO: 297526
ucuggucaacauuuacaaa

SEQ ID NO: 297528 - RNA, 19 nt, Artificial Sequence
  Description of Artificial Sequence: Synthetic oligonucleotide
  Sense strand starting at position 3910 of SEQ ID NO: 3822
uguaaauguugaccagagu

SEQ ID NO: 297529 - RNA, 19 nt, Artificial Sequence
  Description of Artificial Sequence: Synthetic oligonucleotide
  Antisense strand to SEQ ID NO: 297528
acucuggucaacauuuaca

SEQ ID NO: 297530 - RNA, 19 nt, Artificial Sequence
  Description of Artificial Sequence: Synthetic oligonucleotide
  Sense strand starting at position 3911 of SEQ ID NO: 3822
guaaauguugaccagaguu

SEQ ID NO: 297531 - RNA, 19 nt, Artificial Sequence
  Description of Artificial Sequence: Synthetic oligonucleotide
  Antisense strand to SEQ ID NO: 297530
aacucuggucaacauuuac

SEQ ID NO: 297532 - RNA, 19 nt, Artificial Sequence
  Description of Artificial Sequence: Synthetic oligonucleotide
  Sense strand starting at position 332 of SEQ ID NO: 3824
aaaucacaacgaugagagu

SEQ ID NO: 297533 - RNA, 19 nt, Artificial Sequence
  Description of Artificial Sequence: Synthetic oligonucleotide
  Antisense strand to SEQ ID NO: 297532
acucucaucguugugauuu

SEQ ID NO: 297534 - RNA, 19 nt, Artificial Sequence
  Description of Artificial Sequence: Synthetic oligonucleotide
  Sense strand starting at position 383 of SEQ ID NO: 3824
ccauaauuaggugguauaa

SEQ ID NO: 297535 - RNA, 19 nt, Artificial Sequence
  Description of Artificial Sequence: Synthetic oligonucleotide
  Antisense strand to SEQ ID NO: 297534
uuauaccaccuaauuaugg

SEQ ID NO: 297536 - RNA, 19 nt, Artificial Sequence
  Description of Artificial Sequence: Synthetic oligonucleotide
  Sense strand starting at position 575 of SEQ ID NO: 3824
cagugaacuuucuugagga

SEQ ID NO: 297537 - RNA, 19 nt, Artificial Sequence
  Description of Artificial Sequence: Synthetic oligonucleotide
  Antisense strand to SEQ ID NO: 297536
uccucaagaaaguucacug

SEQ ID NO: 297538 - RNA, 19 nt, Artificial Sequence
  Description of Artificial Sequence: Synthetic oligonucleotide
  Sense strand starting at position 580 of SEQ ID NO: 3824
aacuuucuugaggauuguu

SEQ ID NO: 297539 - RNA, 19 nt, Artificial Sequence
  Description of Artificial Sequence: Synthetic oligonucleotide
  Antisense strand to SEQ ID NO: 297538
aacaauccucaagaaaguu

SEQ ID NO: 297540 - RNA, 19 nt, Artificial Sequence
  Description of Artificial Sequence: Synthetic oligonucleotide
  Sense strand starting at position 583 of SEQ ID NO: 3824
uuucuugaggauuguuaac

SEQ ID NO: 297541 - RNA, 19 nt, Artificial Sequence
  Description of Artificial Sequence: Synthetic oligonucleotide
  Antisense strand to SEQ ID NO: 297540
guuaacaauccucaagaaa

SEQ ID NO: 297542 - RNA, 19 nt, Artificial Sequence
  Description of Artificial Sequence: Synthetic oligonucleotide
  Sense strand starting at position 585 of SEQ ID NO: 3824
ucuugaggauuguuaacua

SEQ ID NO: 297543 - RNA, 19 nt, Artificial Sequence
  Description of Artificial Sequence: Synthetic oligonucleotide
  Antisense strand to SEQ ID NO: 297542
uaguuaacaauccucaaga

SEQ ID NO: 297544 - RNA, 19 nt, Artificial Sequence
  Description of Artificial Sequence: Synthetic oligonucleotide
  Sense strand starting at position 589 of SEQ ID NO: 3824
gaggauuguuaacuaacuu

SEQ ID NO: 297545 - RNA, 19 nt, Artificial Sequence
  Description of Artificial Sequence: Synthetic oligonucleotide
  Antisense strand to SEQ ID NO: 297544
aaguuaguuaacaauccuc

SEQ ID NO: 297546 - RNA, 19 nt, Artificial Sequence
  Description of Artificial Sequence: Synthetic oligonucleotide
  Sense strand starting at position 694 of SEQ ID NO: 3824
ggaacuggucugggaauua

SEQ ID NO: 297547 - RNA, 19 nt, Artificial Sequence
  Description of Artificial Sequence: Synthetic oligonucleotide
  Antisense strand to SEQ ID NO: 297546
uaauucccagaccaguucc

SEQ ID NO: 297548 - RNA, 19 nt, Artificial Sequence
  Description of Artificial Sequence: Synthetic oligonucleotide
  Sense strand starting at position 705 of SEQ ID NO: 3824
gggaauuaaugcucauaau

SEQ ID NO: 297549 - RNA, 19 nt, Artificial Sequence
  Description of Artificial Sequence: Synthetic oligonucleotide
  Antisense strand to SEQ ID NO: 297548
auuaugagcauuaauuccc

SEQ ID NO: 297550 - RNA, 19 nt, Artificial Sequence
  Description of Artificial Sequence: Synthetic oligonucleotide
  Sense strand starting at position 908 of SEQ ID NO: 3824
auucuagucuuucuagaua

SEQ ID NO: 297551 - RNA, 19 nt, Artificial Sequence
  Description of Artificial Sequence: Synthetic oligonucleotide
  Antisense strand to SEQ ID NO: 297550
uaucuagaaagacuagaau

SEQ ID NO: 297552 - RNA, 19 nt, Artificial Sequence
  Description of Artificial Sequence: Synthetic oligonucleotide
  Sense strand starting at position 911 of SEQ ID NO: 3824
cuagucuuucuagauauag

SEQ ID NO: 297553 - RNA, 19 nt, Artificial Sequence
  Description of Artificial Sequence: Synthetic oligonucleotide
  Antisense strand to SEQ ID NO: 297552
cuauaucuagaaagacuag

SEQ ID NO: 297554 - RNA, 19 nt, Artificial Sequence
  Description of Artificial Sequence: Synthetic oligonucleotide
  Sense strand starting at position 1031 of SEQ ID NO: 3824
aucaguaugcucuagaaua

SEQ ID NO: 297555 - RNA, 19 nt, Artificial Sequence
  Description of Artificial Sequence: Synthetic oligonucleotide
  Antisense strand to SEQ ID NO: 297554
uauucuagagcauacugau

SEQ ID NO: 297556 - RNA, 19 nt, Artificial Sequence
  Description of Artificial Sequence: Synthetic oligonucleotide
  Sense strand starting at position 1257 of SEQ ID NO: 3824
caauauucgggucacaauu

SEQ ID NO: 297557 - RNA, 19 nt, Artificial Sequence
  Description of Artificial Sequence: Synthetic oligonucleotide
  Antisense strand to SEQ ID NO: 297556
aauugugacccgaauauug

SEQ ID NO: 297558 - RNA, 19 nt, Artificial Sequence
  Description of Artificial Sequence: Synthetic oligonucleotide
  Sense strand starting at position 1468 of SEQ ID NO: 3824
augcuuguugcaucucagu

SEQ ID NO: 297559 - RNA, 19 nt, Artificial Sequence
  Description of Artificial Sequence: Synthetic oligonucleotide
  Antisense strand to SEQ ID NO: 297558
acugagaugcaacaagcau

SEQ ID NO: 297560 - RNA, 19 nt, Artificial Sequence
  Description of Artificial Sequence: Synthetic oligonucleotide
  Sense strand starting at position 2067 of SEQ ID NO: 3824
cccguucgucugucuauua

SEQ ID NO: 297561 - RNA, 19 nt, Artificial Sequence
  Description of Artificial Sequence: Synthetic oligonucleotide
  Antisense strand to SEQ ID NO: 297560
uaauagacagacgaacggg

SEQ ID NO: 297562 - RNA, 19 nt, Artificial Sequence
  Description of Artificial Sequence: Synthetic oligonucleotide
  Sense strand starting at position 2079 of SEQ ID NO: 3824
ucuauuacauucccaguga

SEQ ID NO: 297563 - RNA, 19 nt, Artificial Sequence
  Description of Artificial Sequence: Synthetic oligonucleotide
  Antisense strand to SEQ ID NO: 297562
ucacugggaauguaauaga

SEQ ID NO: 297564 - RNA, 19 nt, Artificial Sequence
  Description of Artificial Sequence: Synthetic oligonucleotide
  Sense strand starting at position 2376 of SEQ ID NO: 3824
gacagaaagucuuucgaau

SEQ ID NO: 297565 - RNA, 19 nt, Artificial Sequence
  Description of Artificial Sequence: Synthetic oligonucleotide
  Antisense strand to SEQ ID NO: 297564
auucgaaagacuuucuguc

SEQ ID NO: 297566 - RNA, 19 nt, Artificial Sequence
  Description of Artificial Sequence: Synthetic oligonucleotide
  Sense strand starting at position 2382 of SEQ ID NO: 3824
aagucuuucgaauguauuu

SEQ ID NO: 297567 - RNA, 19 nt, Artificial Sequence
  Description of Artificial Sequence: Synthetic oligonucleotide
  Antisense strand to SEQ ID NO: 297566
aaauacauucgaaagacuu

SEQ ID NO: 297568 - RNA, 19 nt, Artificial Sequence
  Description of Artificial Sequence: Synthetic oligonucleotide
  Sense strand starting at position 2432 of SEQ ID NO: 3824
gguagucuuagauauuagg

SEQ ID NO: 297569 - RNA, 19 nt, Artificial Sequence
  Description of Artificial Sequence: Synthetic oligonucleotide
  Antisense strand to SEQ ID NO: 297568
ccuaauaucuaagacuacc

SEQ ID NO: 297570 - RNA, 19 nt, Artificial Sequence
  Description of Artificial Sequence: Synthetic oligonucleotide
  Sense strand starting at position 2438 of SEQ ID NO: 3824
cuuagauauuaggcaauau

SEQ ID NO: 297571 - RNA, 19 nt, Artificial Sequence
  Description of Artificial Sequence: Synthetic oligonucleotide
  Antisense strand to SEQ ID NO: 297570
auauugccuaauaucuaag

SEQ ID NO: 297572 - RNA, 19 nt, Artificial Sequence
  Description of Artificial Sequence: Synthetic oligonucleotide
  Sense strand starting at position 2658 of SEQ ID NO: 3824
cccagaugagacuaacguu

SEQ ID NO: 297573 - RNA, 19 nt, Artificial Sequence
  Description of Artificial Sequence: Synthetic oligonucleotide
  Antisense strand to SEQ ID NO: 297572
aacguuagucucaucuggg

SEQ ID NO: 297574 - RNA, 19 nt, Artificial Sequence
  Description of Artificial Sequence: Synthetic oligonucleotide
  Sense strand starting at position 2915 of SEQ ID NO: 3824
cucagaagacuuugugaaa

SEQ ID NO: 297575 - RNA, 19 nt, Artificial Sequence
  Description of Artificial Sequence: Synthetic oligonucleotide
  Antisense strand to SEQ ID NO: 297574
uuucacaaagucuucugag

SEQ ID NO: 297576 - RNA, 19 nt, Artificial Sequence
  Description of Artificial Sequence: Synthetic oligonucleotide
  Sense strand starting at position 2916 of SEQ ID NO: 3824
ucagaagacuuugugaaac

SEQ ID NO: 297577 - RNA, 19 nt, Artificial Sequence
  Description of Artificial Sequence: Synthetic oligonucleotide
  Antisense strand to SEQ ID NO: 297576
guuucacaaagucuucuga

SEQ ID NO: 297578 - RNA, 19 nt, Artificial Sequence
  Description of Artificial Sequence: Synthetic oligonucleotide
  Sense strand starting at position 2932 of SEQ ID NO: 3824
aacauuaggcuuugguuua

SEQ ID NO: 297579 - RNA, 19 nt, Artificial Sequence
  Description of Artificial Sequence: Synthetic oligonucleotide
  Antisense strand to SEQ ID NO: 297578
uaaaccaaagccuaauguu

SEQ ID NO: 297580 - RNA, 19 nt, Artificial Sequence
  Description of Artificial Sequence: Synthetic oligonucleotide
  Sense strand starting at position 3012 of SEQ ID NO: 3824
gugugauggcaugaccuau

SEQ ID NO: 297581 - RNA, 19 nt, Artificial Sequence
  Description of Artificial Sequence: Synthetic oligonucleotide
  Antisense strand to SEQ ID NO: 297580
auaggucaugccaucacac

SEQ ID NO: 297582 - RNA, 19 nt, Artificial Sequence
  Description of Artificial Sequence: Synthetic oligonucleotide
  Sense strand starting at position 3120 of SEQ ID NO: 3824
guguauauuucuguuggag

SEQ ID NO: 297583 - RNA, 19 nt, Artificial Sequence
  Description of Artificial Sequence: Synthetic oligonucleotide
  Antisense strand to SEQ ID NO: 297582
cuccaacagaaauauacac

SEQ ID NO: 297584 - RNA, 19 nt, Artificial Sequence
  Description of Artificial Sequence: Synthetic oligonucleotide
  Sense strand starting at position 3128 of SEQ ID NO: 3824
uucuguuggaguuaccuga

SEQ ID NO: 297585 - RNA, 19 nt, Artificial Sequence
  Description of Artificial Sequence: Synthetic oligonucleotide
  Antisense strand to SEQ ID NO: 297584
ucagguaacuccaacagaa

SEQ ID NO: 297586 - RNA, 19 nt, Artificial Sequence
  Description of Artificial Sequence: Synthetic oligonucleotide
  Sense strand starting at position 3132 of SEQ ID NO: 3824
guuggaguuaccugaagug

SEQ ID NO: 297587 - RNA, 19 nt, Artificial Sequence
  Description of Artificial Sequence: Synthetic oligonucleotide
  Antisense strand to SEQ ID NO: 297586
cacuucagguaacuccaac

SEQ ID NO: 297588 - RNA, 19 nt, Artificial Sequence
  Description of Artificial Sequence: Synthetic oligonucleotide
  Sense strand starting at position 3154 of SEQ ID NO: 3824
uuguguagucaucaacuuu

SEQ ID NO: 297589 - RNA, 19 nt, Artificial Sequence
  Description of Artificial Sequence: Synthetic oligonucleotide
  Antisense strand to SEQ ID NO: 297588
aaaguugaugacuacacaa

SEQ ID NO: 297590 - RNA, 19 nt, Artificial Sequence
  Description of Artificial Sequence: Synthetic oligonucleotide
  Sense strand starting at position 3174 of SEQ ID NO: 3824
cagacuuaggguugaaagu

SEQ ID NO: 297591 - RNA, 19 nt, Artificial Sequence
  Description of Artificial Sequence: Synthetic oligonucleotide
  Antisense strand to SEQ ID NO: 297590
acuuucaacccuaagucug

SEQ ID NO: 297592 - RNA, 19 nt, Artificial Sequence
  Description of Artificial Sequence: Synthetic oligonucleotide
  Sense strand starting at position 3393 of SEQ ID NO: 3824
acuggagaugcuggucauu

SEQ ID NO: 297593 - RNA, 19 nt, Artificial Sequence
  Description of Artificial Sequence: Synthetic oligonucleotide
  Antisense strand to SEQ ID NO: 297592
aaugaccagcaucuccagu

SEQ ID NO: 297594 - RNA, 19 nt, Artificial Sequence
  Description of Artificial Sequence: Synthetic oligonucleotide
  Sense strand starting at position 3480 of SEQ ID NO: 3824
ccucucacucaguaaaugu

SEQ ID NO: 297595 - RNA, 19 nt, Artificial Sequence
  Description of Artificial Sequence: Synthetic oligonucleotide
  Antisense strand to SEQ ID NO: 297594
acauuuacugagugagagg

SEQ ID NO: 297596 - RNA, 19 nt, Artificial Sequence
  Description of Artificial Sequence: Synthetic oligonucleotide
  Sense strand starting at position 3724 of SEQ ID NO: 3824
agauuaugaugagaagacu

SEQ ID NO: 297597 - RNA, 19 nt, Artificial Sequence
  Description of Artificial Sequence: Synthetic oligonucleotide
  Antisense strand to SEQ ID NO: 297596
agucuucucaucauaaucu

SEQ ID NO: 297598 - RNA, 19 nt, Artificial Sequence
  Description of Artificial Sequence: Synthetic oligonucleotide
  Sense strand starting at position 3808 of SEQ ID NO: 3824
cauagaggcuguuccugau

SEQ ID NO: 297599 - RNA, 19 nt, Artificial Sequence
  Description of Artificial Sequence: Synthetic oligonucleotide
  Antisense strand to SEQ ID NO: 297598
aucaggaacagccucuaug

SEQ ID NO: 297600 - RNA, 19 nt, Artificial Sequence
  Description of Artificial Sequence: Synthetic oligonucleotide
  Sense strand starting at position 3812 of SEQ ID NO: 3824
gaggcuguuccugauauua

SEQ ID NO: 297601 - RNA, 19 nt, Artificial Sequence
  Description of Artificial Sequence: Synthetic oligonucleotide
  Antisense strand to SEQ ID NO: 297600
uaauaucaggaacagccuc

SEQ ID NO: 297602 - RNA, 19 nt, Artificial Sequence
  Description of Artificial Sequence: Synthetic oligonucleotide
  Sense strand starting at position 3831 of SEQ ID NO: 3824
gaaaguuaauaugcccagu

SEQ ID NO: 297603 - RNA, 19 nt, Artificial Sequence
  Description of Artificial Sequence: Synthetic oligonucleotide
  Antisense strand to SEQ ID NO: 297602
acugggcauauuaacuuuc

SEQ ID NO: 297604 - RNA, 19 nt, Artificial Sequence
  Description of Artificial Sequence: Synthetic oligonucleotide
  Sense strand starting at position 3866 of SEQ ID NO: 3824
gguaauagcuaagugaaua

SEQ ID NO: 297605 - RNA, 19 nt, Artificial Sequence
  Description of Artificial Sequence: Synthetic oligonucleotide
  Antisense strand to SEQ ID NO: 297604
uauucacuuagcuauuacc

SEQ ID NO: 297606 - RNA, 19 nt, Artificial Sequence
  Description of Artificial Sequence: Synthetic oligonucleotide
  Sense strand starting at position 3919 of SEQ ID NO: 3824
uuuguaaauguugaccaga

SEQ ID NO: 297607 - RNA, 19 nt, Artificial Sequence
  Description of Artificial Sequence: Synthetic oligonucleotide
  Antisense strand to SEQ ID NO: 297606
ucuggucaacauuuacaaa

SEQ ID NO: 297608 - RNA, 19 nt, Artificial Sequence
  Description of Artificial Sequence: Synthetic oligonucleotide
  Sense strand starting at position 3921 of SEQ ID NO: 3824
uguaaauguugaccagagu

SEQ ID NO: 297609 - RNA, 19 nt, Artificial Sequence
  Description of Artificial Sequence: Synthetic oligonucleotide
  Antisense strand to SEQ ID NO: 297608
acucuggucaacauuuaca

SEQ ID NO: 297610 - RNA, 19 nt, Artificial Sequence
  Description of Artificial Sequence: Synthetic oligonucleotide
  Sense strand starting at position 3922 of SEQ ID NO: 3824
guaaauguugaccagaguu

SEQ ID NO: 297611 - RNA, 19 nt, Artificial Sequence
  Description of Artificial Sequence: Synthetic oligonucleotide
  Antisense strand to SEQ ID NO: 297610
aacucuggucaacauuuac

SEQ ID NO: 297612 - RNA, 19 nt, Artificial Sequence
  Description of Artificial Sequence: Synthetic oligonucleotide
  Sense strand starting at position 84 of SEQ ID NO: 3825
cacccaagagacugugauu

SEQ ID NO: 297613 - RNA, 19 nt, Artificial Sequence
  Description of Artificial Sequence: Synthetic oligonucleotide
  Antisense strand to SEQ ID NO: 297612
aaucacagucucuugggug

SEQ ID NO: 297614 - RNA, 19 nt, Artificial Sequence
  Description of Artificial Sequence: Synthetic oligonucleotide
  Sense strand starting at position 193 of SEQ ID NO: 3825
guuguuugugguuauuauu

SEQ ID NO: 297615 - RNA, 19 nt, Artificial Sequence
  Description of Artificial Sequence: Synthetic oligonucleotide
  Antisense strand to SEQ ID NO: 297614
aauaauaaccacaaacaac

SEQ ID NO: 297616 - RNA, 19 nt, Artificial Sequence
  Description of Artificial Sequence: Synthetic oligonucleotide
  Sense strand starting at position 318 of SEQ ID NO: 3825
cuggcaucuggguguuaca

SEQ ID NO: 297617 - RNA, 19 nt, Artificial Sequence
  Description of Artificial Sequence: Synthetic oligonucleotide
  Antisense strand to SEQ ID NO: 297616
uguaacacccagaugccag

SEQ ID NO: 297618 - RNA, 19 nt, Artificial Sequence
  Description of Artificial Sequence: Synthetic oligonucleotide
  Sense strand starting at position 413 of SEQ ID NO: 3825
guuguuucccuguggagga

SEQ ID NO: 297619 - RNA, 19 nt, Artificial Sequence
  Description of Artificial Sequence: Synthetic oligonucleotide
  Antisense strand to SEQ ID NO: 297618
uccuccacagggaaacaac

SEQ ID NO: 297620 - RNA, 19 nt, Artificial Sequence
  Description of Artificial Sequence: Synthetic oligonucleotide
  Sense strand starting at position 417 of SEQ ID NO: 3825
uuucccuguggaggaaaua

SEQ ID NO: 297621 - RNA, 19 nt, Artificial Sequence
  Description of Artificial Sequence: Synthetic oligonucleotide
  Antisense strand to SEQ ID NO: 297620
uauuuccuccacagggaaa

SEQ ID NO: 297622 - RNA, 19 nt, Artificial Sequence
  Description of Artificial Sequence: Synthetic oligonucleotide
  Sense strand starting at position 492 of SEQ ID NO: 3825
ccgaaaucacggcaaagua

SEQ ID NO: 297623 - RNA, 19 nt, Artificial Sequence
  Description of Artificial Sequence: Synthetic oligonucleotide
  Antisense strand to SEQ ID NO: 297622
uacuuugccgugauuucgg

SEQ ID NO: 297624 - RNA, 19 nt, Artificial Sequence
  Description of Artificial Sequence: Synthetic oligonucleotide
  Sense strand starting at position 535 of SEQ ID NO: 3825
uuaagaauaucuguugcaa

SEQ ID NO: 297625 - RNA, 19 nt, Artificial Sequence
  Description of Artificial Sequence: Synthetic oligonucleotide
  Antisense strand to SEQ ID NO: 297624
uugcaacagauauucuuaa

SEQ ID NO: 297626 - RNA, 19 nt, Artificial Sequence
  Description of Artificial Sequence: Synthetic oligonucleotide
  Sense strand starting at position 645 of SEQ ID NO: 3825
aaacguaaucaaugguacu

SEQ ID NO: 297627 - RNA, 19 nt, Artificial Sequence
  Description of Artificial Sequence: Synthetic oligonucleotide
  Antisense strand to SEQ ID NO: 297626
aguaccauugauuacguuu

SEQ ID NO: 297628 - RNA, 19 nt, Artificial Sequence
  Description of Artificial Sequence: Synthetic oligonucleotide
  Sense strand starting at position 711 of SEQ ID NO: 3825
gggacacuauucccaaagu

SEQ ID NO: 297629 - RNA, 19 nt, Artificial Sequence
  Description of Artificial Sequence: Synthetic oligonucleotide
  Antisense strand to SEQ ID NO: 297628
acuuugggaauaguguccc

SEQ ID NO: 297630 - RNA, 19 nt, Artificial Sequence
  Description of Artificial Sequence: Synthetic oligonucleotide
  Sense strand starting at position 728 of SEQ ID NO: 3825
guucuaguuaacgucgcaa

SEQ ID NO: 297631 - RNA, 19 nt, Artificial Sequence
  Description of Artificial Sequence: Synthetic oligonucleotide
  Antisense strand to SEQ ID NO: 297630
uugcgacguuaacuagaac

SEQ ID NO: 297632 - RNA, 19 nt, Artificial Sequence
  Description of Artificial Sequence: Synthetic oligonucleotide
  Sense strand starting at position 790 of SEQ ID NO: 3825
guuuguguaaccuggacaa

SEQ ID NO: 297633 - RNA, 19 nt, Artificial Sequence
  Description of Artificial Sequence: Synthetic oligonucleotide
  Antisense strand to SEQ ID NO: 297632
uuguccagguuacacaaac

SEQ ID NO: 297634 - RNA, 19 nt, Artificial Sequence
  Description of Artificial Sequence: Synthetic oligonucleotide
  Sense strand starting at position 965 of SEQ ID NO: 3825
cuuucugguuguguuaaag

SEQ ID NO: 297635 - RNA, 19 nt, Artificial Sequence
  Description of Artificial Sequence: Synthetic oligonucleotide
  Antisense strand to SEQ ID NO: 297634
cuuuaacacaaccagaaag

SEQ ID NO: 297636 - RNA, 19 nt, Artificial Sequence
  Description of Artificial Sequence: Synthetic oligonucleotide
  Sense strand starting at position 971 of SEQ ID NO: 3825
gguuguguuaaagauuaca

SEQ ID NO: 297637 - RNA, 19 nt, Artificial Sequence
  Description of Artificial Sequence: Synthetic oligonucleotide
  Antisense strand to SEQ ID NO: 297636
uguaaucuuuaacacaacc

SEQ ID NO: 297638 - RNA, 19 nt, Artificial Sequence
  Description of Artificial Sequence: Synthetic oligonucleotide
  Sense strand starting at position 1010 of SEQ ID NO: 3825
ccaugccuucgcuaucuaa

SEQ ID NO: 297639 - RNA, 19 nt, Artificial Sequence
  Description of Artificial Sequence: Synthetic oligonucleotide
  Antisense strand to SEQ ID NO: 297638
uuagauagcgaaggcaugg

SEQ ID NO: 297640 - RNA, 19 nt, Artificial Sequence
  Description of Artificial Sequence: Synthetic oligonucleotide
  Sense strand starting at position 1017 of SEQ ID NO: 3825
uucgcuaucuaauugauuu

SEQ ID NO: 297641 - RNA, 19 nt, Artificial Sequence
  Description of Artificial Sequence: Synthetic oligonucleotide
  Antisense strand to SEQ ID NO: 297640
aaaucaauuagauagcgaa

SEQ ID NO: 297642 - RNA, 19 nt, Artificial Sequence
  Description of Artificial Sequence: Synthetic oligonucleotide
  Sense strand starting at position 1025 of SEQ ID NO: 3825
cuaauugauuucuacagug

SEQ ID NO: 297643 - RNA, 19 nt, Artificial Sequence
  Description of Artificial Sequence: Synthetic oligonucleotide
  Antisense strand to SEQ ID NO: 297642
cacuguagaaaucaauuag

SEQ ID NO: 297644 - RNA, 19 nt, Artificial Sequence
  Description of Artificial Sequence: Synthetic oligonucleotide
  Sense strand starting at position 1030 of SEQ ID NO: 3825
ugauuucuacaguguuguu

SEQ ID NO: 297645 - RNA, 19 nt, Artificial Sequence
  Description of Artificial Sequence: Synthetic oligonucleotide
  Antisense strand to SEQ ID NO: 297644
aacaacacuguagaaauca

SEQ ID NO: 297646 - RNA, 19 nt, Artificial Sequence
  Description of Artificial Sequence: Synthetic oligonucleotide
  Sense strand starting at position 1182 of SEQ ID NO: 3825
gguucaaucgacuguauug

SEQ ID NO: 297647 - RNA, 19 nt, Artificial Sequence
  Description of Artificial Sequence: Synthetic oligonucleotide
  Antisense strand to SEQ ID NO: 297646
caauacagucgauugaacc

SEQ ID NO: 297648 - RNA, 19 nt, Artificial Sequence
  Description of Artificial Sequence: Synthetic oligonucleotide
  Sense strand starting at position 1189 of SEQ ID NO: 3825
ucgacuguauugccaauua

SEQ ID NO: 297649 - RNA, 19 nt, Artificial Sequence
  Description of Artificial Sequence: Synthetic oligonucleotide
  Antisense strand to SEQ ID NO: 297648
uaauuggcaauacagucga

SEQ ID NO: 297650 - RNA, 19 nt, Artificial Sequence
  Description of Artificial Sequence: Synthetic oligonucleotide
  Sense strand starting at position 1436 of SEQ ID NO: 3825
cggcgugagcucucggagu

SEQ ID NO: 297651 - RNA, 19 nt, Artificial Sequence
  Description of Artificial Sequence: Synthetic oligonucleotide
  Antisense strand to SEQ ID NO: 297650
acuccgagagcucacgccg

SEQ ID NO: 297652 - RNA, 19 nt, Artificial Sequence
  Description of Artificial Sequence: Synthetic oligonucleotide
  Sense strand starting at position 2276 of SEQ ID NO: 3825
agaauccugccagguguua

SEQ ID NO: 297653 - RNA, 19 nt, Artificial Sequence
  Description of Artificial Sequence: Synthetic oligonucleotide
  Antisense strand to SEQ ID NO: 297652
uaacaccuggcaggauucu

SEQ ID NO: 297654 - RNA, 19 nt, Artificial Sequence
  Description of Artificial Sequence: Synthetic oligonucleotide
  Sense strand starting at position 2391 of SEQ ID NO: 3825
agugauaaccgccauugca

SEQ ID NO: 297655 - RNA, 19 nt, Artificial Sequence
  Description of Artificial Sequence: Synthetic oligonucleotide
  Antisense strand to SEQ ID NO: 297654
ugcaauggcgguuaucacu

SEQ ID NO: 297656 - RNA, 19 nt, Artificial Sequence
  Description of Artificial Sequence: Synthetic oligonucleotide
  Sense strand starting at position 2398 of SEQ ID NO: 3825
accgccauugcagaauuaa

SEQ ID NO: 297657 - RNA, 19 nt, Artificial Sequence
  Description of Artificial Sequence: Synthetic oligonucleotide
  Antisense strand to SEQ ID NO: 297656
uuaauucugcaauggcggu

SEQ ID NO: 297658 - RNA, 19 nt, Artificial Sequence
  Description of Artificial Sequence: Synthetic oligonucleotide
  Sense strand starting at position 2480 of SEQ ID NO: 3825
cugagcuuaggugaacuaa

SEQ ID NO: 297659 - RNA, 19 nt, Artificial Sequence
  Description of Artificial Sequence: Synthetic oligonucleotide
  Antisense strand to SEQ ID NO: 297658
uuaguucaccuaagcucag

SEQ ID NO: 297660 - RNA, 19 nt, Artificial Sequence
  Description of Artificial Sequence: Synthetic oligonucleotide
  Sense strand starting at position 2562 of SEQ ID NO: 3825
ucuucuuaucugggaacua

SEQ ID NO: 297661 - RNA, 19 nt, Artificial Sequence
  Description of Artificial Sequence: Synthetic oligonucleotide
  Antisense strand to SEQ ID NO: 297660
uaguucccagauaagaaga

SEQ ID NO: 297662 - RNA, 19 nt, Artificial Sequence
  Description of Artificial Sequence: Synthetic oligonucleotide
  Sense strand starting at position 2597 of SEQ ID NO: 3825
cuaauaaguuagccauaag

SEQ ID NO: 297663 - RNA, 19 nt, Artificial Sequence
  Description of Artificial Sequence: Synthetic oligonucleotide
  Antisense strand to SEQ ID NO: 297662
cuuauggcuaacuuauuag

SEQ ID NO: 297664 - RNA, 19 nt, Artificial Sequence
  Description of Artificial Sequence: Synthetic oligonucleotide
  Sense strand starting at position 2600 of SEQ ID NO: 3825
auaaguuagccauaagauu

SEQ ID NO: 297665 - RNA, 19 nt, Artificial Sequence
  Description of Artificial Sequence: Synthetic oligonucleotide
  Antisense strand to SEQ ID NO: 297664
aaucuuauggcuaacuuau

SEQ ID NO: 297666 - RNA, 19 nt, Artificial Sequence
  Description of Artificial Sequence: Synthetic oligonucleotide
  Sense strand starting at position 2922 of SEQ ID NO: 3825
gagacugauugaguaaugu

SEQ ID NO: 297667 - RNA, 19 nt, Artificial Sequence
  Description of Artificial Sequence: Synthetic oligonucleotide
  Antisense strand to SEQ ID NO: 297666
acauuacucaaucagucuc

SEQ ID NO: 297668 - RNA, 19 nt, Artificial Sequence
  Description of Artificial Sequence: Synthetic oligonucleotide
  Sense strand starting at position 3159 of SEQ ID NO: 3825
cauaguucucuuggacuag

SEQ ID NO: 297669 - RNA, 19 nt, Artificial Sequence
  Description of Artificial Sequence: Synthetic oligonucleotide
  Antisense strand to SEQ ID NO: 297668
cuaguccaagagaacuaug

SEQ ID NO: 297670 - RNA, 19 nt, Artificial Sequence
  Description of Artificial Sequence: Synthetic oligonucleotide
  Sense strand starting at position 3219 of SEQ ID NO: 3825
gcccaauaugcauggacuu

SEQ ID NO: 297671 - RNA, 19 nt, Artificial Sequence
  Description of Artificial Sequence: Synthetic oligonucleotide
  Antisense strand to SEQ ID NO: 297670
aaguccaugcauauugggc

SEQ ID NO: 297672 - RNA, 19 nt, Artificial Sequence
  Description of Artificial Sequence: Synthetic oligonucleotide
  Sense strand starting at position 3220 of SEQ ID NO: 3825
cccaauaugcauggacuua

SEQ ID NO: 297673 - RNA, 19 nt, Artificial Sequence
  Description of Artificial Sequence: Synthetic oligonucleotide
  Antisense strand to SEQ ID NO: 297672
uaaguccaugcauauuggg

SEQ ID NO: 297674 - RNA, 19 nt, Artificial Sequence
  Description of Artificial Sequence: Synthetic oligonucleotide
  Sense strand starting at position 3234 of SEQ ID NO: 3825
acuuaaucgcaauggagaa

SEQ ID NO: 297675 - RNA, 19 nt, Artificial Sequence
  Description of Artificial Sequence: Synthetic oligonucleotide
  Antisense strand to SEQ ID NO: 297674
uucuccauugcgauuaagu

SEQ ID NO: 297676 - RNA, 19 nt, Artificial Sequence
  Description of Artificial Sequence: Synthetic oligonucleotide
  Sense strand starting at position 3294 of SEQ ID NO: 3825
ggguaucuguagcuccaua

SEQ ID NO: 297677 - RNA, 19 nt, Artificial Sequence
  Description of Artificial Sequence: Synthetic oligonucleotide
  Antisense strand to SEQ ID NO: 297676
uauggagcuacagauaccc

SEQ ID NO: 297678 - RNA, 19 nt, Artificial Sequence
  Description of Artificial Sequence: Synthetic oligonucleotide
  Sense strand starting at position 3407 of SEQ ID NO: 3825
cuuccuucuccggacugau

SEQ ID NO: 297679 - RNA, 19 nt, Artificial Sequence
  Description of Artificial Sequence: Synthetic oligonucleotide
  Antisense strand to SEQ ID NO: 297678
aucaguccggagaaggaag

SEQ ID NO: 297680 - RNA, 19 nt, Artificial Sequence
  Description of Artificial Sequence: Synthetic oligonucleotide
  Sense strand starting at position 3417 of SEQ ID NO: 3825
cggacugauucuguagcca

SEQ ID NO: 297681 - RNA, 19 nt, Artificial Sequence
  Description of Artificial Sequence: Synthetic oligonucleotide
  Antisense strand to SEQ ID NO: 297680
uggcuacagaaucaguccg

SEQ ID NO: 297682 - RNA, 19 nt, Artificial Sequence
  Description of Artificial Sequence: Synthetic oligonucleotide
  Sense strand starting at position 3521 of SEQ ID NO: 3825
agagucuugguucgggaga

SEQ ID NO: 297683 - RNA, 19 nt, Artificial Sequence
  Description of Artificial Sequence: Synthetic oligonucleotide
  Antisense strand to SEQ ID NO: 297682
ucucccgaaccaagacucu

SEQ ID NO: 297684 - RNA, 19 nt, Artificial Sequence
  Description of Artificial Sequence: Synthetic oligonucleotide
  Sense strand starting at position 3532 of SEQ ID NO: 3825
ucgggagacuucucaauca

SEQ ID NO: 297685 - RNA, 19 nt, Artificial Sequence
  Description of Artificial Sequence: Synthetic oligonucleotide
  Antisense strand to SEQ ID NO: 297684
ugauugagaagucucccga

SEQ ID NO: 297686 - RNA, 19 nt, Artificial Sequence
  Description of Artificial Sequence: Synthetic oligonucleotide
  Sense strand starting at position 3563 of SEQ ID NO: 3825
ggagauuugucagauggag

SEQ ID NO: 297687 - RNA, 19 nt, Artificial Sequence
  Description of Artificial Sequence: Synthetic oligonucleotide
  Antisense strand to SEQ ID NO: 297686
cuccaucugacaaaucucc

SEQ ID NO: 297688 - RNA, 19 nt, Artificial Sequence
  Description of Artificial Sequence: Synthetic oligonucleotide
  Sense strand starting at position 3613 of SEQ ID NO: 3825
ggaguucuugguuagggac

SEQ ID NO: 297689 - RNA, 19 nt, Artificial Sequence
  Description of Artificial Sequence: Synthetic oligonucleotide
  Antisense strand to SEQ ID NO: 297688
gucccuaaccaagaacucc

SEQ ID NO: 297690 - RNA, 19 nt, Artificial Sequence
  Description of Artificial Sequence: Synthetic oligonucleotide
  Sense strand starting at position 3803 of SEQ ID NO: 3825
cagggugacugcucagaga

SEQ ID NO: 297691 - RNA, 19 nt, Artificial Sequence
  Description of Artificial Sequence: Synthetic oligonucleotide
  Antisense strand to SEQ ID NO: 297690
ucucugagcagucacccug

SEQ ID NO: 297692 - RNA, 19 nt, Artificial Sequence
  Description of Artificial Sequence: Synthetic oligonucleotide
  Sense strand starting at position 271 of SEQ ID NO: 3826
cccagucacugagcucaaa

SEQ ID NO: 297693 - RNA, 19 nt, Artificial Sequence
  Description of Artificial Sequence: Synthetic oligonucleotide
  Antisense strand to SEQ ID NO: 297692
uuugagcucagugacuggg

SEQ ID NO: 297694 - RNA, 19 nt, Artificial Sequence
  Description of Artificial Sequence: Synthetic oligonucleotide
  Sense strand starting at position 283 of SEQ ID NO: 3826
gcucaaaucucagauuuag

SEQ ID NO: 297695 - RNA, 19 nt, Artificial Sequence
  Description of Artificial Sequence: Synthetic oligonucleotide
  Antisense strand to SEQ ID NO: 297694
cuaaaucugagauuugagc

SEQ ID NO: 297696 - RNA, 19 nt, Artificial Sequence
  Description of Artificial Sequence: Synthetic oligonucleotide
  Sense strand starting at position 300 of SEQ ID NO: 3826
aggguugauuccuuccacu

SEQ ID NO: 297697 - RNA, 19 nt, Artificial Sequence
  Description of Artificial Sequence: Synthetic oligonucleotide
  Antisense strand to SEQ ID NO: 297696
aguggaaggaaucaacccu

SEQ ID NO: 297698 - RNA, 19 nt, Artificial Sequence
  Description of Artificial Sequence: Synthetic oligonucleotide
  Sense strand starting at position 417 of SEQ ID NO: 3826
auccuaugaucuguccauu

SEQ ID NO: 297699 - RNA, 19 nt, Artificial Sequence
  Description of Artificial Sequence: Synthetic oligonucleotide
  Antisense strand to SEQ ID NO: 297698
aauggacagaucauaggau

SEQ ID NO: 297700 - RNA, 19 nt, Artificial Sequence
  Description of Artificial Sequence: Synthetic oligonucleotide
  Sense strand starting at position 420 of SEQ ID NO: 3826
cuaugaucuguccauuccu

SEQ ID NO: 297701 - RNA, 19 nt, Artificial Sequence
  Description of Artificial Sequence: Synthetic oligonucleotide
  Antisense strand to SEQ ID NO: 297700
aggaauggacagaucauag

SEQ ID NO: 297702 - RNA, 19 nt, Artificial Sequence
  Description of Artificial Sequence: Synthetic oligonucleotide
  Sense strand starting at position 428 of SEQ ID NO: 3826
uguccauuccuaggcagau

SEQ ID NO: 297703 - RNA, 19 nt, Artificial Sequence
  Description of Artificial Sequence: Synthetic oligonucleotide
  Antisense strand to SEQ ID NO: 297702
aucugccuaggaauggaca

SEQ ID NO: 297704 - RNA, 19 nt, Artificial Sequence
  Description of Artificial Sequence: Synthetic oligonucleotide
  Sense strand starting at position 429 of SEQ ID NO: 3826
guccauuccuaggcagauu

SEQ ID NO: 297705 - RNA, 19 nt, Artificial Sequence
  Description of Artificial Sequence: Synthetic oligonucleotide
  Antisense strand to SEQ ID NO: 297704
aaucugccuaggaauggac

SEQ ID NO: 297706 - RNA, 19 nt, Artificial Sequence
  Description of Artificial Sequence: Synthetic oligonucleotide
  Sense strand starting at position 528 of SEQ ID NO: 3826
uucugcuuugcuccagcua

SEQ ID NO: 297707 - RNA, 19 nt, Artificial Sequence
  Description of Artificial Sequence: Synthetic oligonucleotide
  Antisense strand to SEQ ID NO: 297706
uagcuggagcaaagcagaa

SEQ ID NO: 297708 - RNA, 19 nt, Artificial Sequence
  Description of Artificial Sequence: Synthetic oligonucleotide
  Sense strand starting at position 631 of SEQ ID NO: 3826
ucauaaaguugucugagac

SEQ ID NO: 297709 - RNA, 19 nt, Artificial Sequence
  Description of Artificial Sequence: Synthetic oligonucleotide
  Antisense strand to SEQ ID NO: 297708
gucucagacaacuuuauga

SEQ ID NO: 297710 - RNA, 19 nt, Artificial Sequence
  Description of Artificial Sequence: Synthetic oligonucleotide
  Sense strand starting at position 632 of SEQ ID NO: 3826
cauaaaguugucugagacu

SEQ ID NO: 297711 - RNA, 19 nt, Artificial Sequence
  Description of Artificial Sequence: Synthetic oligonucleotide
  Antisense strand to SEQ ID NO: 297710
agucucagacaacuuuaug

SEQ ID NO: 297712 - RNA, 19 nt, Artificial Sequence
  Description of Artificial Sequence: Synthetic oligonucleotide
  Sense strand starting at position 641 of SEQ ID NO: 3826
gucugagacuuacucacaa

SEQ ID NO: 297713 - RNA, 19 nt, Artificial Sequence
  Description of Artificial Sequence: Synthetic oligonucleotide
  Antisense strand to SEQ ID NO: 297712
uugugaguaagucucagac

SEQ ID NO: 297714 - RNA, 19 nt, Artificial Sequence
  Description of Artificial Sequence: Synthetic oligonucleotide
  Sense strand starting at position 738 of SEQ ID NO: 3826
cugugaugccuccagaguc

SEQ ID NO: 297715 - RNA, 19 nt, Artificial Sequence
  Description of Artificial Sequence: Synthetic oligonucleotide
  Antisense strand to SEQ ID NO: 297714
gacucuggaggcaucacag

SEQ ID NO: 297716 - RNA, 19 nt, Artificial Sequence
  Description of Artificial Sequence: Synthetic oligonucleotide
  Sense strand starting at position 846 of SEQ ID NO: 3826
auacuaugugcucgaaaca

SEQ ID NO: 297717 - RNA, 19 nt, Artificial Sequence
  Description of Artificial Sequence: Synthetic oligonucleotide
  Antisense strand to SEQ ID NO: 297716
uguuucgagcacauaguau

SEQ ID NO: 297718 - RNA, 19 nt, Artificial Sequence
  Description of Artificial Sequence: Synthetic oligonucleotide
  Sense strand starting at position 847 of SEQ ID NO: 3826
uacuaugugcucgaaacag

SEQ ID NO: 297719 - RNA, 19 nt, Artificial Sequence
  Description of Artificial Sequence: Synthetic oligonucleotide
  Antisense strand to SEQ ID NO: 297718
cuguuucgagcacauagua

SEQ ID NO: 297720 - RNA, 19 nt, Artificial Sequence
  Description of Artificial Sequence: Synthetic oligonucleotide
  Sense strand starting at position 856 of SEQ ID NO: 3826
cucgaaacaguuuguugaa

SEQ ID NO: 297721 - RNA, 19 nt, Artificial Sequence
  Description of Artificial Sequence: Synthetic oligonucleotide
  Antisense strand to SEQ ID NO: 297720
uucaacaaacuguuucgag

SEQ ID NO: 297722 - RNA, 19 nt, Artificial Sequence
  Description of Artificial Sequence: Synthetic oligonucleotide
  Sense strand starting at position 857 of SEQ ID NO: 3826
ucgaaacaguuuguugaau

SEQ ID NO: 297723 - RNA, 19 nt, Artificial Sequence
  Description of Artificial Sequence: Synthetic oligonucleotide
  Antisense strand to SEQ ID NO: 297722
auucaacaaacuguuucga

SEQ ID NO: 297724 - RNA, 19 nt, Artificial Sequence
  Description of Artificial Sequence: Synthetic oligonucleotide
  Sense strand starting at position 929 of SEQ ID NO: 3826
ugaucucacaagugugagu

SEQ ID NO: 297725 - RNA, 19 nt, Artificial Sequence
  Description of Artificial Sequence: Synthetic oligonucleotide
  Antisense strand to SEQ ID NO: 297724
acucacacuugugagauca

SEQ ID NO: 297726 - RNA, 19 nt, Artificial Sequence
  Description of Artificial Sequence: Synthetic oligonucleotide
  Sense strand starting at position 994 of SEQ ID NO: 3826
gcucaaguccuguuucugu

SEQ ID NO: 297727 - RNA, 19 nt, Artificial Sequence
  Description of Artificial Sequence: Synthetic oligonucleotide
  Antisense strand to SEQ ID NO: 297726
acagaaacaggacuugagc

SEQ ID NO: 297728 - RNA, 19 nt, Artificial Sequence
  Description of Artificial Sequence: Synthetic oligonucleotide
  Sense strand starting at position 1347 of SEQ ID NO: 3826
caagacugucgagguuaua

SEQ ID NO: 297729 - RNA, 19 nt, Artificial Sequence
  Description of Artificial Sequence: Synthetic oligonucleotide
  Antisense strand to SEQ ID NO: 297728
uauaaccucgacagucuug

SEQ ID NO: 297730 - RNA, 19 nt, Artificial Sequence
  Description of Artificial Sequence: Synthetic oligonucleotide
  Sense strand starting at position 1350 of SEQ ID NO: 3826
gacugucgagguuauauac

SEQ ID NO: 297731 - RNA, 19 nt, Artificial Sequence
  Description of Artificial Sequence: Synthetic oligonucleotide
  Antisense strand to SEQ ID NO: 297730
guauauaaccucgacaguc

SEQ ID NO: 297732 - RNA, 19 nt, Artificial Sequence
  Description of Artificial Sequence: Synthetic oligonucleotide
  Sense strand starting at position 1473 of SEQ ID NO: 3826
ggagaaagugacgguaaau

SEQ ID NO: 297733 - RNA, 19 nt, Artificial Sequence
  Description of Artificial Sequence: Synthetic oligonucleotide
  Antisense strand to SEQ ID NO: 297732
auuuaccgucacuuucucc

SEQ ID NO: 297734 - RNA, 19 nt, Artificial Sequence
  Description of Artificial Sequence: Synthetic oligonucleotide
  Sense strand starting at position 1501 of SEQ ID NO: 3826
cagugccuucuagaggaaa

SEQ ID NO: 297735 - RNA, 19 nt, Artificial Sequence
  Description of Artificial Sequence: Synthetic oligonucleotide
  Antisense strand to SEQ ID NO: 297734
uuuccucuagaaggcacug

SEQ ID NO: 297736 - RNA, 19 nt, Artificial Sequence
  Description of Artificial Sequence: Synthetic oligonucleotide
  Sense strand starting at position 1633 of SEQ ID NO: 3826
cgcguucuuccucugggau

SEQ ID NO: 297737 - RNA, 19 nt, Artificial Sequence
  Description of Artificial Sequence: Synthetic oligonucleotide
  Antisense strand to SEQ ID NO: 297736
aucccagaggaagaacgcg

SEQ ID NO: 297738 - RNA, 19 nt, Artificial Sequence
  Description of Artificial Sequence: Synthetic oligonucleotide
  Sense strand starting at position 1896 of SEQ ID NO: 3826
gcagacucugcgcaggaaa

SEQ ID NO: 297739 - RNA, 19 nt, Artificial Sequence
  Description of Artificial Sequence: Synthetic oligonucleotide
  Antisense strand to SEQ ID NO: 297738
uuuccugcgcagagucugc

SEQ ID NO: 297740 - RNA, 19 nt, Artificial Sequence
  Description of Artificial Sequence: Synthetic oligonucleotide
  Sense strand starting at position 2389 of SEQ ID NO: 3826
gccuuuguucuugaaacac

SEQ ID NO: 297741 - RNA, 19 nt, Artificial Sequence
  Description of Artificial Sequence: Synthetic oligonucleotide
  Antisense strand to SEQ ID NO: 297740
guguuucaagaacaaaggc

SEQ ID NO: 297742 - RNA, 19 nt, Artificial Sequence
  Description of Artificial Sequence: Synthetic oligonucleotide
  Sense strand starting at position 2409 of SEQ ID NO: 3826
uuucuuccuuggucaugau

SEQ ID NO: 297743 - RNA, 19 nt, Artificial Sequence
  Description of Artificial Sequence: Synthetic oligonucleotide
  Antisense strand to SEQ ID NO: 297742
aucaugaccaaggaagaaa

SEQ ID NO: 297744 - RNA, 19 nt, Artificial Sequence
  Description of Artificial Sequence: Synthetic oligonucleotide
  Sense strand starting at position 2413 of SEQ ID NO: 3826
uuccuuggucaugaugaua

SEQ ID NO: 297745 - RNA, 19 nt, Artificial Sequence
  Description of Artificial Sequence: Synthetic oligonucleotide
  Antisense strand to SEQ ID NO: 297744
uaucaucaugaccaaggaa

SEQ ID NO: 297746 - RNA, 19 nt, Artificial Sequence
  Description of Artificial Sequence: Synthetic oligonucleotide
  Sense strand starting at position 2514 of SEQ ID NO: 3826
guugucaggguccagacau

SEQ ID NO: 297747 - RNA, 19 nt, Artificial Sequence
  Description of Artificial Sequence: Synthetic oligonucleotide
  Antisense strand to SEQ ID NO: 297746
augucuggacccugacaac

SEQ ID NO: 297748 - RNA, 19 nt, Artificial Sequence
  Description of Artificial Sequence: Synthetic oligonucleotide
  Sense strand starting at position 2599 of SEQ ID NO: 3826
uuuccuucuagauggagga

SEQ ID NO: 297749 - RNA, 19 nt, Artificial Sequence
  Description of Artificial Sequence: Synthetic oligonucleotide
  Antisense strand to SEQ ID NO: 297748
uccuccaucuagaaggaaa

SEQ ID NO: 297750 - RNA, 19 nt, Artificial Sequence
  Description of Artificial Sequence: Synthetic oligonucleotide
  Sense strand starting at position 2696 of SEQ ID NO: 3826
ugcagugagcucuacaaac

SEQ ID NO: 297751 - RNA, 19 nt, Artificial Sequence
  Description of Artificial Sequence: Synthetic oligonucleotide
  Antisense strand to SEQ ID NO: 297750
guuuguagagcucacugca

SEQ ID NO: 297752 - RNA, 19 nt, Artificial Sequence
  Description of Artificial Sequence: Synthetic oligonucleotide
  Sense strand starting at position 2975 of SEQ ID NO: 3826
cauacaagaguuugagugu

SEQ ID NO: 297753 - RNA, 19 nt, Artificial Sequence
  Description of Artificial Sequence: Synthetic oligonucleotide
  Antisense strand to SEQ ID NO: 297752
acacucaaacucuuguaug

SEQ ID NO: 297754 - RNA, 19 nt, Artificial Sequence
  Description of Artificial Sequence: Synthetic oligonucleotide
  Sense strand starting at position 3361 of SEQ ID NO: 3826
uggacuauaugcucauaaa

SEQ ID NO: 297755 - RNA, 19 nt, Artificial Sequence
  Description of Artificial Sequence: Synthetic oligonucleotide
  Antisense strand to SEQ ID NO: 297754
uuuaugagcauauagucca

SEQ ID NO: 297756 - RNA, 19 nt, Artificial Sequence
  Description of Artificial Sequence: Synthetic oligonucleotide
  Sense strand starting at position 3410 of SEQ ID NO: 3826
ugagucaagccuugaauaa

SEQ ID NO: 297757 - RNA, 19 nt, Artificial Sequence
  Description of Artificial Sequence: Synthetic oligonucleotide
  Antisense strand to SEQ ID NO: 297756
uuauucaaggcuugacuca

SEQ ID NO: 297758 - RNA, 19 nt, Artificial Sequence
  Description of Artificial Sequence: Synthetic oligonucleotide
  Sense strand starting at position 3446 of SEQ ID NO: 3826
ggagaaggaucugaauaau

SEQ ID NO: 297759 - RNA, 19 nt, Artificial Sequence
  Description of Artificial Sequence: Synthetic oligonucleotide
  Antisense strand to SEQ ID NO: 297758
auuauucagauccuucucc

SEQ ID NO: 297760 - RNA, 19 nt, Artificial Sequence
  Description of Artificial Sequence: Synthetic oligonucleotide
  Sense strand starting at position 3457 of SEQ ID NO: 3826
ugaauaauuucccauggau

SEQ ID NO: 297761 - RNA, 19 nt, Artificial Sequence
  Description of Artificial Sequence: Synthetic oligonucleotide
  Antisense strand to SEQ ID NO: 297760
auccaugggaaauuauuca

SEQ ID NO: 297762 - RNA, 19 nt, Artificial Sequence
  Description of Artificial Sequence: Synthetic oligonucleotide
  Sense strand starting at position 3469 of SEQ ID NO: 3826
cauggauaugccuauaugu

SEQ ID NO: 297763 - RNA, 19 nt, Artificial Sequence
  Description of Artificial Sequence: Synthetic oligonucleotide
  Antisense strand to SEQ ID NO: 297762
acauauaggcauauccaug

SEQ ID NO: 297764 - RNA, 19 nt, Artificial Sequence
  Description of Artificial Sequence: Synthetic oligonucleotide
  Sense strand starting at position 3471 of SEQ ID NO: 3826
uggauaugccuauaugugu

SEQ ID NO: 297765 - RNA, 19 nt, Artificial Sequence
  Description of Artificial Sequence: Synthetic oligonucleotide
  Antisense strand to SEQ ID NO: 297764
acacauauaggcauaucca

SEQ ID NO: 297766 - RNA, 19 nt, Artificial Sequence
  Description of Artificial Sequence: Synthetic oligonucleotide
  Sense strand starting at position 3570 of SEQ ID NO: 3826
auuagacuucucugccaag

SEQ ID NO: 297767 - RNA, 19 nt, Artificial Sequence
  Description of Artificial Sequence: Synthetic oligonucleotide
  Antisense strand to SEQ ID NO: 297766
cuuggcagagaagucuaau

SEQ ID NO: 297768 - RNA, 19 nt, Artificial Sequence
  Description of Artificial Sequence: Synthetic oligonucleotide
  Sense strand starting at position 3571 of SEQ ID NO: 3826
uuagacuucucugccaaga

SEQ ID NO: 297769 - RNA, 19 nt, Artificial Sequence
  Description of Artificial Sequence: Synthetic oligonucleotide
  Antisense strand to SEQ ID NO: 297768
ucuuggcagagaagucuaa

SEQ ID NO: 297770 - RNA, 19 nt, Artificial Sequence
  Description of Artificial Sequence: Synthetic oligonucleotide
  Sense strand starting at position 3873 of SEQ ID NO: 3826
ucggauccucgagacucau

SEQ ID NO: 297771 - RNA, 19 nt, Artificial Sequence
  Description of Artificial Sequence: Synthetic oligonucleotide
  Antisense strand to SEQ ID NO: 297770
augagucucgaggauccga

SEQ ID NO: 297772 - RNA, 19 nt, Artificial Sequence
  Description of Artificial Sequence: Synthetic oligonucleotide
  Sense strand starting at position 15 of SEQ ID NO: 3828
auacauauucuuuggguuu

SEQ ID NO: 297773 - RNA, 19 nt, Artificial Sequence
  Description of Artificial Sequence: Synthetic oligonucleotide
  Antisense strand to SEQ ID NO: 297772
aaacccaaagaauauguau

SEQ ID NO: 297774 - RNA, 19 nt, Artificial Sequence
  Description of Artificial Sequence: Synthetic oligonucleotide
  Sense strand starting at position 260 of SEQ ID NO: 3828
cugacauugcuaugaauau

SEQ ID NO: 297775 - RNA, 19 nt, Artificial Sequence
  Description of Artificial Sequence: Synthetic oligonucleotide
  Antisense strand to SEQ ID NO: 297774
auauucauagcaaugucag

SEQ ID NO: 297776 - RNA, 19 nt, Artificial Sequence
  Description of Artificial Sequence: Synthetic oligonucleotide
  Sense strand starting at position 264 of SEQ ID NO: 3828
cauugcuaugaauauggua

SEQ ID NO: 297777 - RNA, 19 nt, Artificial Sequence
  Description of Artificial Sequence: Synthetic oligonucleotide
  Antisense strand to SEQ ID NO: 297776
uaccauauucauagcaaug

SEQ ID NO: 297778 - RNA, 19 nt, Artificial Sequence
  Description of Artificial Sequence: Synthetic oligonucleotide
  Sense strand starting at position 272 of SEQ ID NO: 3828
ugaauaugguagguggaua

SEQ ID NO: 297779 - RNA, 19 nt, Artificial Sequence
  Description of Artificial Sequence: Synthetic oligonucleotide
  Antisense strand to SEQ ID NO: 297778
uauccaccuaccauauuca

SEQ ID NO: 297780 - RNA, 19 nt, Artificial Sequence
  Description of Artificial Sequence: Synthetic oligonucleotide
  Sense strand starting at position 277 of SEQ ID NO: 3828
augguagguggauauaagu

SEQ ID NO: 297781 - RNA, 19 nt, Artificial Sequence
  Description of Artificial Sequence: Synthetic oligonucleotide
  Antisense strand to SEQ ID NO: 297780
acuuauauccaccuaccau

SEQ ID NO: 297782 - RNA, 19 nt, Artificial Sequence
  Description of Artificial Sequence: Synthetic oligonucleotide
  Sense strand starting at position 283 of SEQ ID NO: 3828
gguggauauaaguaguaug

SEQ ID NO: 297783 - RNA, 19 nt, Artificial Sequence
  Description of Artificial Sequence: Synthetic oligonucleotide
  Antisense strand to SEQ ID NO: 297782
cauacuacuuauauccacc

SEQ ID NO: 297784 - RNA, 19 nt, Artificial Sequence
  Description of Artificial Sequence: Synthetic oligonucleotide
  Sense strand starting at position 288 of SEQ ID NO: 3828
auauaaguaguaugucaac

SEQ ID NO: 297785 - RNA, 19 nt, Artificial Sequence
  Description of Artificial Sequence: Synthetic oligonucleotide
  Antisense strand to SEQ ID NO: 297784
guugacauacuacuuauau

SEQ ID NO: 297786 - RNA, 19 nt, Artificial Sequence
  Description of Artificial Sequence: Synthetic oligonucleotide
  Sense strand starting at position 338 of SEQ ID NO: 3828
gcgaaaugacgccugccua

SEQ ID NO: 297787 - RNA, 19 nt, Artificial Sequence
  Description of Artificial Sequence: Synthetic oligonucleotide
  Antisense strand to SEQ ID NO: 297786
uaggcaggcgucauuucgc

SEQ ID NO: 297788 - RNA, 19 nt, Artificial Sequence
  Description of Artificial Sequence: Synthetic oligonucleotide
  Sense strand starting at position 384 of SEQ ID NO: 3828
gagguuuccugagucugaa

SEQ ID NO: 297789 - RNA, 19 nt, Artificial Sequence
  Description of Artificial Sequence: Synthetic oligonucleotide
  Antisense strand to SEQ ID NO: 297788
uucagacucaggaaaccuc

SEQ ID NO: 297790 - RNA, 19 nt, Artificial Sequence
  Description of Artificial Sequence: Synthetic oligonucleotide
  Sense strand starting at position 412 of SEQ ID NO: 3828
uuuccagauaucggaugua

SEQ ID NO: 297791 - RNA, 19 nt, Artificial Sequence
  Description of Artificial Sequence: Synthetic oligonucleotide
  Antisense strand to SEQ ID NO: 297790
uacauccgauaucuggaaa

SEQ ID NO: 297792 - RNA, 19 nt, Artificial Sequence
  Description of Artificial Sequence: Synthetic oligonucleotide
  Sense strand starting at position 415 of SEQ ID NO: 3828
ccagauaucggauguauau

SEQ ID NO: 297793 - RNA, 19 nt, Artificial Sequence
  Description of Artificial Sequence: Synthetic oligonucleotide
  Antisense strand to SEQ ID NO: 297792
auauacauccgauaucugg

SEQ ID NO: 297794 - RNA, 19 nt, Artificial Sequence
  Description of Artificial Sequence: Synthetic oligonucleotide
  Sense strand starting at position 666 of SEQ ID NO: 3828
gcuguaacacuaggaugaa

SEQ ID NO: 297795 - RNA, 19 nt, Artificial Sequence
  Description of Artificial Sequence: Synthetic oligonucleotide
  Antisense strand to SEQ ID NO: 297794
uucauccuaguguuacagc

SEQ ID NO: 297796 - RNA, 19 nt, Artificial Sequence
  Description of Artificial Sequence: Synthetic oligonucleotide
  Sense strand starting at position 770 of SEQ ID NO: 3828
aggugauggauaugcugaa

SEQ ID NO: 297797 - RNA, 19 nt, Artificial Sequence
  Description of Artificial Sequence: Synthetic oligonucleotide
  Antisense strand to SEQ ID NO: 297796
uucagcauauccaucaccu

SEQ ID NO: 297798 - RNA, 19 nt, Artificial Sequence
  Description of Artificial Sequence: Synthetic oligonucleotide
  Sense strand starting at position 771 of SEQ ID NO: 3828
ggugauggauaugcugaau

SEQ ID NO: 297799 - RNA, 19 nt, Artificial Sequence
  Description of Artificial Sequence: Synthetic oligonucleotide
  Antisense strand to SEQ ID NO: 297798
auucagcauauccaucacc

SEQ ID NO: 297800 - RNA, 19 nt, Artificial Sequence
  Description of Artificial Sequence: Synthetic oligonucleotide
  Sense strand starting at position 782 of SEQ ID NO: 3828
ugcugaauauccuuugauc

SEQ ID NO: 297801 - RNA, 19 nt, Artificial Sequence
  Description of Artificial Sequence: Synthetic oligonucleotide
  Antisense strand to SEQ ID NO: 297800
gaucaaaggauauucagca

SEQ ID NO: 297802 - RNA, 19 nt, Artificial Sequence
  Description of Artificial Sequence: Synthetic oligonucleotide
  Sense strand starting at position 934 of SEQ ID NO: 3828
gagucuuucggagagcuga

SEQ ID NO: 297803 - RNA, 19 nt, Artificial Sequence
  Description of Artificial Sequence: Synthetic oligonucleotide
  Antisense strand to SEQ ID NO: 297802
ucagcucuccgaaagacuc

SEQ ID NO: 297804 - RNA, 19 nt, Artificial Sequence
  Description of Artificial Sequence: Synthetic oligonucleotide
  Sense strand starting at position 1135 of SEQ ID NO: 3828
uugcgugcauuuccuagaa

SEQ ID NO: 297805 - RNA, 19 nt, Artificial Sequence
  Description of Artificial Sequence: Synthetic oligonucleotide
  Antisense strand to SEQ ID NO: 297804
uucuaggaaaugcacgcaa

SEQ ID NO: 297806 - RNA, 19 nt, Artificial Sequence
  Description of Artificial Sequence: Synthetic oligonucleotide
  Sense strand starting at position 1312 of SEQ ID NO: 3828
cugaaauccagguacgcua

SEQ ID NO: 297807 - RNA, 19 nt, Artificial Sequence
  Description of Artificial Sequence: Synthetic oligonucleotide
  Antisense strand to SEQ ID NO: 297806
uagcguaccuggauuucag

SEQ ID NO: 297808 - RNA, 19 nt, Artificial Sequence
  Description of Artificial Sequence: Synthetic oligonucleotide
  Sense strand starting at position 1355 of SEQ ID NO: 3828
uagagaagcuggcuaagaa

SEQ ID NO: 297809 - RNA, 19 nt, Artificial Sequence
  Description of Artificial Sequence: Synthetic oligonucleotide
  Antisense strand to SEQ ID NO: 297808
uucuuagccagcuucucua

SEQ ID NO: 297810 - RNA, 19 nt, Artificial Sequence
  Description of Artificial Sequence: Synthetic oligonucleotide
  Sense strand starting at position 1540 of SEQ ID NO: 3828
cgcuuccuucuauaauaag

SEQ ID NO: 297811 - RNA, 19 nt, Artificial Sequence
  Description of Artificial Sequence: Synthetic oligonucleotide
  Antisense strand to SEQ ID NO: 297810
cuuauuauagaaggaagcg

SEQ ID NO: 297812 - RNA, 19 nt, Artificial Sequence
  Description of Artificial Sequence: Synthetic oligonucleotide
  Sense strand starting at position 1559 of SEQ ID NO: 3828
ccuccucaggaagguuaaa

SEQ ID NO: 297813 - RNA, 19 nt, Artificial Sequence
  Description of Artificial Sequence: Synthetic oligonucleotide
  Antisense strand to SEQ ID NO: 297812
uuuaaccuuccugaggagg

SEQ ID NO: 297814 - RNA, 19 nt, Artificial Sequence
  Description of Artificial Sequence: Synthetic oligonucleotide
  Sense strand starting at position 1619 of SEQ ID NO: 3828
gaguauccugcauaauaag

SEQ ID NO: 297815 - RNA, 19 nt, Artificial Sequence
  Description of Artificial Sequence: Synthetic oligonucleotide
  Antisense strand to SEQ ID NO: 297814
cuuauuaugcaggauacuc

SEQ ID NO: 297816 - RNA, 19 nt, Artificial Sequence
  Description of Artificial Sequence: Synthetic oligonucleotide
  Sense strand starting at position 1637 of SEQ ID NO: 3828
gcauguccuccuuacaaga

SEQ ID NO: 297817 - RNA, 19 nt, Artificial Sequence
  Description of Artificial Sequence: Synthetic oligonucleotide
  Antisense strand to SEQ ID NO: 297816
ucuuguaaggaggacaugc

SEQ ID NO: 297818 - RNA, 19 nt, Artificial Sequence
  Description of Artificial Sequence: Synthetic oligonucleotide
  Sense strand starting at position 2049 of SEQ ID NO: 3828
ugagauccucugcagaguu

SEQ ID NO: 297819 - RNA, 19 nt, Artificial Sequence
  Description of Artificial Sequence: Synthetic oligonucleotide
  Antisense strand to SEQ ID NO: 297818
aacucugcagaggaucuca

SEQ ID NO: 297820 - RNA, 19 nt, Artificial Sequence
  Description of Artificial Sequence: Synthetic oligonucleotide
  Sense strand starting at position 2368 of SEQ ID NO: 3828
acaucagccuguucuagaa

SEQ ID NO: 297821 - RNA, 19 nt, Artificial Sequence
  Description of Artificial Sequence: Synthetic oligonucleotide
  Antisense strand to SEQ ID NO: 297820
uucuagaacaggcugaugu

SEQ ID NO: 297822 - RNA, 19 nt, Artificial Sequence
  Description of Artificial Sequence: Synthetic oligonucleotide
  Sense strand starting at position 2397 of SEQ ID NO: 3828
ggaggaagucuugguccca

SEQ ID NO: 297823 - RNA, 19 nt, Artificial Sequence
  Description of Artificial Sequence: Synthetic oligonucleotide
  Antisense strand to SEQ ID NO: 297822
ugggaccaagacuuccucc

SEQ ID NO: 297824 - RNA, 19 nt, Artificial Sequence
  Description of Artificial Sequence: Synthetic oligonucleotide
  Sense strand starting at position 2398 of SEQ ID NO: 3828
gaggaagucuuggucccau

SEQ ID NO: 297825 - RNA, 19 nt, Artificial Sequence
  Description of Artificial Sequence: Synthetic oligonucleotide
  Antisense strand to SEQ ID NO: 297824
augggaccaagacuuccuc

SEQ ID NO: 297826 - RNA, 19 nt, Artificial Sequence
  Description of Artificial Sequence: Synthetic oligonucleotide
  Sense strand starting at position 2840 of SEQ ID NO: 3828
acaugcuuagagcaauaua

SEQ ID NO: 297827 - RNA, 19 nt, Artificial Sequence
  Description of Artificial Sequence: Synthetic oligonucleotide
  Antisense strand to SEQ ID NO: 297826
uauauugcucuaagcaugu

SEQ ID NO: 297828 - RNA, 19 nt, Artificial Sequence
  Description of Artificial Sequence: Synthetic oligonucleotide
  Sense strand starting at position 2843 of SEQ ID NO: 3828
ugcuuagagcaauauacca

SEQ ID NO: 297829 - RNA, 19 nt, Artificial Sequence
  Description of Artificial Sequence: Synthetic oligonucleotide
  Antisense strand to SEQ ID NO: 297828
ugguauauugcucuaagca

SEQ ID NO: 297830 - RNA, 19 nt, Artificial Sequence
  Description of Artificial Sequence: Synthetic oligonucleotide
  Sense strand starting at position 2851 of SEQ ID NO: 3828
gcaauauaccaaggugaaa

SEQ ID NO: 297831 - RNA, 19 nt, Artificial Sequence
  Description of Artificial Sequence: Synthetic oligonucleotide
  Antisense strand to SEQ ID NO: 297830
uuucaccuugguauauugc

SEQ ID NO: 297832 - RNA, 19 nt, Artificial Sequence
  Description of Artificial Sequence: Synthetic oligonucleotide
  Sense strand starting at position 3060 of SEQ ID NO: 3828
ggcaguuuccaggagcuua

SEQ ID NO: 297833 - RNA, 19 nt, Artificial Sequence
  Description of Artificial Sequence: Synthetic oligonucleotide
  Antisense strand to SEQ ID NO: 297832
uaagcuccuggaaacugcc

SEQ ID NO: 297834 - RNA, 19 nt, Artificial Sequence
  Description of Artificial Sequence: Synthetic oligonucleotide
  Sense strand starting at position 3165 of SEQ ID NO: 3828
ugucacugccuauaggaaa

SEQ ID NO: 297835 - RNA, 19 nt, Artificial Sequence
  Description of Artificial Sequence: Synthetic oligonucleotide
  Antisense strand to SEQ ID NO: 297834
uuuccuauaggcagugaca

SEQ ID NO: 297836 - RNA, 19 nt, Artificial Sequence
  Description of Artificial Sequence: Synthetic oligonucleotide
  Sense strand starting at position 3336 of SEQ ID NO: 3828
acuggauauuccucccuga

SEQ ID NO: 297837 - RNA, 19 nt, Artificial Sequence
  Description of Artificial Sequence: Synthetic oligonucleotide
  Antisense strand to SEQ ID NO: 297836
ucagggaggaauauccagu

SEQ ID NO: 297838 - RNA, 19 nt, Artificial Sequence
  Description of Artificial Sequence: Synthetic oligonucleotide
  Sense strand starting at position 3367 of SEQ ID NO: 3828
agugaaauccuauaguucu

SEQ ID NO: 297839 - RNA, 19 nt, Artificial Sequence
  Description of Artificial Sequence: Synthetic oligonucleotide
  Antisense strand to SEQ ID NO: 297838
agaacuauaggauuucacu

SEQ ID NO: 297840 - RNA, 19 nt, Artificial Sequence
  Description of Artificial Sequence: Synthetic oligonucleotide
  Sense strand starting at position 3373 of SEQ ID NO: 3828
auccuauaguucucaguga

SEQ ID NO: 297841 - RNA, 19 nt, Artificial Sequence
  Description of Artificial Sequence: Synthetic oligonucleotide
  Antisense strand to SEQ ID NO: 297840
ucacugagaacuauaggau

SEQ ID NO: 297842 - RNA, 19 nt, Artificial Sequence
  Description of Artificial Sequence: Synthetic oligonucleotide
  Sense strand starting at position 3377 of SEQ ID NO: 3828
uauaguucucagugaagac

SEQ ID NO: 297843 - RNA, 19 nt, Artificial Sequence
  Description of Artificial Sequence: Synthetic oligonucleotide
  Antisense strand to SEQ ID NO: 297842
gucuucacugagaacuaua

SEQ ID NO: 297844 - RNA, 19 nt, Artificial Sequence
  Description of Artificial Sequence: Synthetic oligonucleotide
  Sense strand starting at position 3387 of SEQ ID NO: 3828
agugaagacuucccgauga

SEQ ID NO: 297845 - RNA, 19 nt, Artificial Sequence
  Description of Artificial Sequence: Synthetic oligonucleotide
  Antisense strand to SEQ ID NO: 297844
ucaucgggaagucuucacu

SEQ ID NO: 297846 - RNA, 19 nt, Artificial Sequence
  Description of Artificial Sequence: Synthetic oligonucleotide
  Sense strand starting at position 3463 of SEQ ID NO: 3828
agcgcucuccaagagaaau

SEQ ID NO: 297847 - RNA, 19 nt, Artificial Sequence
  Description of Artificial Sequence: Synthetic oligonucleotide
  Antisense strand to SEQ ID NO: 297846
auuucucuuggagagcgcu

SEQ ID NO: 297848 - RNA, 19 nt, Artificial Sequence
  Description of Artificial Sequence: Synthetic oligonucleotide
  Sense strand starting at position 3679 of SEQ ID NO: 3828
gguguauauuuagcacuua

SEQ ID NO: 297849 - RNA, 19 nt, Artificial Sequence
  Description of Artificial Sequence: Synthetic oligonucleotide
  Antisense strand to SEQ ID NO: 297848
uaagugcuaaauauacacc

SEQ ID NO: 297850 - RNA, 19 nt, Artificial Sequence
  Description of Artificial Sequence: Synthetic oligonucleotide
  Sense strand starting at position 3700 of SEQ ID NO: 3828
gggcaugucaguuaggacu

SEQ ID NO: 297851 - RNA, 19 nt, Artificial Sequence
  Description of Artificial Sequence: Synthetic oligonucleotide
  Antisense strand to SEQ ID NO: 297850
aguccuaacugacaugccc

SEQ ID NO: 297852 - RNA, 19 nt, Artificial Sequence
  Description of Artificial Sequence: Synthetic oligonucleotide
  Sense strand starting at position 2 of SEQ ID NO: 3827
gcgaaaugacgccugccua

SEQ ID NO: 297853 - RNA, 19 nt, Artificial Sequence
  Description of Artificial Sequence: Synthetic oligonucleotide
  Antisense strand to SEQ ID NO: 297852
uaggcaggcgucauuucgc

SEQ ID NO: 297854 - RNA, 19 nt, Artificial Sequence
  Description of Artificial Sequence: Synthetic oligonucleotide
  Sense strand starting at position 48 of SEQ ID NO: 3827
gagguuuccugagucugaa

SEQ ID NO: 297855 - RNA, 19 nt, Artificial Sequence
  Description of Artificial Sequence: Synthetic oligonucleotide
  Antisense strand to SEQ ID NO: 297854
uucagacucaggaaaccuc

SEQ ID NO: 297856 - RNA, 19 nt, Artificial Sequence
  Description of Artificial Sequence: Synthetic oligonucleotide
  Sense strand starting at position 76 of SEQ ID NO: 3827
uuuccagauaucggaugua

SEQ ID NO: 297857 - RNA, 19 nt, Artificial Sequence
  Description of Artificial Sequence: Synthetic oligonucleotide
  Antisense strand to SEQ ID NO: 297856
uacauccgauaucuggaaa

SEQ ID NO: 297858 - RNA, 19 nt, Artificial Sequence
  Description of Artificial Sequence: Synthetic oligonucleotide
  Sense strand starting at position 79 of SEQ ID NO: 3827
ccagauaucggauguauau

SEQ ID NO: 297859 - RNA, 19 nt, Artificial Sequence
  Description of Artificial Sequence: Synthetic oligonucleotide
  Antisense strand to SEQ ID NO: 297858
auauacauccgauaucugg

SEQ ID NO: 297860 - RNA, 19 nt, Artificial Sequence
  Description of Artificial Sequence: Synthetic oligonucleotide
  Sense strand starting at position 330 of SEQ ID NO: 3827
gcuguaacacuaggaugaa

SEQ ID NO: 297861 - RNA, 19 nt, Artificial Sequence
  Description of Artificial Sequence: Synthetic oligonucleotide
  Antisense strand to SEQ ID NO: 297860
uucauccuaguguuacagc

SEQ ID NO: 297862 - RNA, 19 nt, Artificial Sequence
  Description of Artificial Sequence: Synthetic oligonucleotide
  Sense strand starting at position 434 of SEQ ID NO: 3827
aggugauggauaugcugaa

SEQ ID NO: 297863 - RNA, 19 nt, Artificial Sequence
  Description of Artificial Sequence: Synthetic oligonucleotide
  Antisense strand to SEQ ID NO: 297862
uucagcauauccaucaccu

SEQ ID NO: 297864 - RNA, 19 nt, Artificial Sequence
  Description of Artificial Sequence: Synthetic oligonucleotide
  Sense strand starting at position 435 of SEQ ID NO: 3827
ggugauggauaugcugaau

SEQ ID NO: 297865 - RNA, 19 nt, Artificial Sequence
  Description of Artificial Sequence: Synthetic oligonucleotide
  Antisense strand to SEQ ID NO: 297864
auucagcauauccaucacc

SEQ ID NO: 297866 - RNA, 19 nt, Artificial Sequence
  Description of Artificial Sequence: Synthetic oligonucleotide
  Sense strand starting at position 446 of SEQ ID NO: 3827
ugcugaauauccuuugauc

SEQ ID NO: 297867 - RNA, 19 nt, Artificial Sequence
  Description of Artificial Sequence: Synthetic oligonucleotide
  Antisense strand to SEQ ID NO: 297866
gaucaaaggauauucagca

SEQ ID NO: 297868 - RNA, 19 nt, Artificial Sequence
  Description of Artificial Sequence: Synthetic oligonucleotide
  Sense strand starting at position 598 of SEQ ID NO: 3827
gagucuuucggagagcuga

SEQ ID NO: 297869 - RNA, 19 nt, Artificial Sequence
  Description of Artificial Sequence: Synthetic oligonucleotide
  Antisense strand to SEQ ID NO: 297868
ucagcucuccgaaagacuc

SEQ ID NO: 297870 - RNA, 19 nt, Artificial Sequence
  Description of Artificial Sequence: Synthetic oligonucleotide
  Sense strand starting at position 799 of SEQ ID NO: 3827
uugcgugcauuuccuagaa

SEQ ID NO: 297871 - RNA, 19 nt, Artificial Sequence
  Description of Artificial Sequence: Synthetic oligonucleotide
  Antisense strand to SEQ ID NO: 297870
uucuaggaaaugcacgcaa

SEQ ID NO: 297872 - RNA, 19 nt, Artificial Sequence
  Description of Artificial Sequence: Synthetic oligonucleotide
  Sense strand starting at position 976 of SEQ ID NO: 3827
cugaaauccagguacgcua

SEQ ID NO: 297873 - RNA, 19 nt, Artificial Sequence
  Description of Artificial Sequence: Synthetic oligonucleotide
  Antisense strand to SEQ ID NO: 297872
uagcguaccuggauuucag

SEQ ID NO: 297874 - RNA, 19 nt, Artificial Sequence
  Description of Artificial Sequence: Synthetic oligonucleotide
  Sense strand starting at position 1019 of SEQ ID NO: 3827
uagagaagcuggcuaagaa

SEQ ID NO: 297875 - RNA, 19 nt, Artificial Sequence
  Description of Artificial Sequence: Synthetic oligonucleotide
  Antisense strand to SEQ ID NO: 297874
uucuuagccagcuucucua

SEQ ID NO: 297876 - RNA, 19 nt, Artificial Sequence
  Description of Artificial Sequence: Synthetic oligonucleotide
  Sense strand starting at position 1204 of SEQ ID NO: 3827
cgcuuccuucuauaauaag

SEQ ID NO: 297877 - RNA, 19 nt, Artificial Sequence
  Description of Artificial Sequence: Synthetic oligonucleotide
  Antisense strand to SEQ ID NO: 297876
cuuauuauagaaggaagcg

SEQ ID NO: 297878 - RNA, 19 nt, Artificial Sequence
  Description of Artificial Sequence: Synthetic oligonucleotide
  Sense strand starting at position 1223 of SEQ ID NO: 3827
ccuccucaggaagguuaaa

SEQ ID NO: 297879 - RNA, 19 nt, Artificial Sequence
  Description of Artificial Sequence: Synthetic oligonucleotide
  Antisense strand to SEQ ID NO: 297878
uuuaaccuuccugaggagg

SEQ ID NO: 297880 - RNA, 19 nt, Artificial Sequence
  Description of Artificial Sequence: Synthetic oligonucleotide
  Sense strand starting at position 1283 of SEQ ID NO: 3827
gaguauccugcauaauaag

SEQ ID NO: 297881 - RNA, 19 nt, Artificial Sequence
  Description of Artificial Sequence: Synthetic oligonucleotide
  Antisense strand to SEQ ID NO: 297880
cuuauuaugcaggauacuc

SEQ ID NO: 297882 - RNA, 19 nt, Artificial Sequence
  Description of Artificial Sequence: Synthetic oligonucleotide
  Sense strand starting at position 1301 of SEQ ID NO: 3827
gcauguccuccuuacaaga

SEQ ID NO: 297883 - RNA, 19 nt, Artificial Sequence
  Description of Artificial Sequence: Synthetic oligonucleotide
  Antisense strand to SEQ ID NO: 297882
ucuuguaaggaggacaugc

SEQ ID NO: 297884 - RNA, 19 nt, Artificial Sequence
  Description of Artificial Sequence: Synthetic oligonucleotide
  Sense strand starting at position 1713 of SEQ ID NO: 3827
ugagauccucugcagaguu

SEQ ID NO: 297885 - RNA, 19 nt, Artificial Sequence
  Description of Artificial Sequence: Synthetic oligonucleotide
  Antisense strand to SEQ ID NO: 297884
aacucugcagaggaucuca

SEQ ID NO: 297886 - RNA, 19 nt, Artificial Sequence
  Description of Artificial Sequence: Synthetic oligonucleotide
  Sense strand starting at position 2032 of SEQ ID NO: 3827
acaucagccuguucuagaa

SEQ ID NO: 297887 - RNA, 19 nt, Artificial Sequence
  Description of Artificial Sequence: Synthetic oligonucleotide
  Antisense strand to SEQ ID NO: 297886
uucuagaacaggcugaugu

SEQ ID NO: 297888 - RNA, 19 nt, Artificial Sequence
  Description of Artificial Sequence: Synthetic oligonucleotide
  Sense strand starting at position 2061 of SEQ ID NO: 3827
ggaggaagucuugguccca

SEQ ID NO: 297889 - RNA, 19 nt, Artificial Sequence
  Description of Artificial Sequence: Synthetic oligonucleotide
  Antisense strand to SEQ ID NO: 297888
ugggaccaagacuuccucc

SEQ ID NO: 297890 - RNA, 19 nt, Artificial Sequence
  Description of Artificial Sequence: Synthetic oligonucleotide
  Sense strand starting at position 2062 of SEQ ID NO: 3827
gaggaagucuuggucccau

SEQ ID NO: 297891 - RNA, 19 nt, Artificial Sequence
  Description of Artificial Sequence: Synthetic oligonucleotide
  Antisense strand to SEQ ID NO: 297890
augggaccaagacuuccuc

SEQ ID NO: 297892 - RNA, 19 nt, Artificial Sequence
  Description of Artificial Sequence: Synthetic oligonucleotide
  Sense strand starting at position 2504 of SEQ ID NO: 3827
acaugcuuagagcaauaua

SEQ ID NO: 297893 - RNA, 19 nt, Artificial Sequence
  Description of Artificial Sequence: Synthetic oligonucleotide
  Antisense strand to SEQ ID NO: 297892
uauauugcucuaagcaugu

SEQ ID NO: 297894 - RNA, 19 nt, Artificial Sequence
  Description of Artificial Sequence: Synthetic oligonucleotide
  Sense strand starting at position 2507 of SEQ ID NO: 3827
ugcuuagagcaauauacca

SEQ ID NO: 297895 - RNA, 19 nt, Artificial Sequence
  Description of Artificial Sequence: Synthetic oligonucleotide
  Antisense strand to SEQ ID NO: 297894
ugguauauugcucuaagca

SEQ ID NO: 297896 - RNA, 19 nt, Artificial Sequence
  Description of Artificial Sequence: Synthetic oligonucleotide
  Sense strand starting at position 2515 of SEQ ID NO: 3827
gcaauauaccaaggugaaa

SEQ ID NO: 297897 - RNA, 19 nt, Artificial Sequence
  Description of Artificial Sequence: Synthetic oligonucleotide
  Antisense strand to SEQ ID NO: 297896
uuucaccuugguauauugc

SEQ ID NO: 297898 - RNA, 19 nt, Artificial Sequence
  Description of Artificial Sequence: Synthetic oligonucleotide
  Sense strand starting at position 2724 of SEQ ID NO: 3827
ggcaguuuccaggagcuua

SEQ ID NO: 297899 - RNA, 19 nt, Artificial Sequence
  Description of Artificial Sequence: Synthetic oligonucleotide
  Antisense strand to SEQ ID NO: 297898
uaagcuccuggaaacugcc

SEQ ID NO: 297900 - RNA, 19 nt, Artificial Sequence
  Description of Artificial Sequence: Synthetic oligonucleotide
  Sense strand starting at position 2829 of SEQ ID NO: 3827
ugucacugccuauaggaaa

SEQ ID NO: 297901 - RNA, 19 nt, Artificial Sequence
  Description of Artificial Sequence: Synthetic oligonucleotide
  Antisense strand to SEQ ID NO: 297900
uuuccuauaggcagugaca

SEQ ID NO: 297902 - RNA, 19 nt, Artificial Sequence
  Description of Artificial Sequence: Synthetic oligonucleotide
  Sense strand starting at position 3000 of SEQ ID NO: 3827
acuggauauuccucccuga

SEQ ID NO: 297903 - RNA, 19 nt, Artificial Sequence
  Description of Artificial Sequence: Synthetic oligonucleotide
  Antisense strand to SEQ ID NO: 297902
ucagggaggaauauccagu

SEQ ID NO: 297904 - RNA, 19 nt, Artificial Sequence
  Description of Artificial Sequence: Synthetic oligonucleotide
  Sense strand starting at position 3031 of SEQ ID NO: 3827
agugaaauccuauaguucu

SEQ ID NO: 297905 - RNA, 19 nt, Artificial Sequence
  Description of Artificial Sequence: Synthetic oligonucleotide
  Antisense strand to SEQ ID NO: 297904
agaacuauaggauuucacu

SEQ ID NO: 297906 - RNA, 19 nt, Artificial Sequence
  Description of Artificial Sequence: Synthetic oligonucleotide
  Sense strand starting at position 3037 of SEQ ID NO: 3827
auccuauaguucucaguga

SEQ ID NO: 297907 - RNA, 19 nt, Artificial Sequence
  Description of Artificial Sequence: Synthetic oligonucleotide
  Antisense strand to SEQ ID NO: 297906
ucacugagaacuauaggau

SEQ ID NO: 297908 - RNA, 19 nt, Artificial Sequence
  Description of Artificial Sequence: Synthetic oligonucleotide
  Sense strand starting at position 3041 of SEQ ID NO: 3827
uauaguucucagugaagac

SEQ ID NO: 297909 - RNA, 19 nt, Artificial Sequence
  Description of Artificial Sequence: Synthetic oligonucleotide
  Antisense strand to SEQ ID NO: 297908
gucuucacugagaacuaua

SEQ ID NO: 297910 - RNA, 19 nt, Artificial Sequence
  Description of Artificial Sequence: Synthetic oligonucleotide
  Sense strand starting at position 3051 of SEQ ID NO: 3827
agugaagacuucccgauga

SEQ ID NO: 297911 - RNA, 19 nt, Artificial Sequence
  Description of Artificial Sequence: Synthetic oligonucleotide
  Antisense strand to SEQ ID NO: 297910
ucaucgggaagucuucacu

SEQ ID NO: 297912 - RNA, 19 nt, Artificial Sequence
  Description of Artificial Sequence: Synthetic oligonucleotide
  Sense strand starting at position 3127 of SEQ ID NO: 3827
agcgcucuccaagagaaau

SEQ ID NO: 297913 - RNA, 19 nt, Artificial Sequence
  Description of Artificial Sequence: Synthetic oligonucleotide
  Antisense strand to SEQ ID NO: 297912
auuucucuuggagagcgcu

SEQ ID NO: 297914 - RNA, 19 nt, Artificial Sequence
  Description of Artificial Sequence: Synthetic oligonucleotide
  Sense strand starting at position 3343 of SEQ ID NO: 3827
gguguauauuuagcacuua

SEQ ID NO: 297915 - RNA, 19 nt, Artificial Sequence
  Description of Artificial Sequence: Synthetic oligonucleotide
  Antisense strand to SEQ ID NO: 297914
uaagugcuaaauauacacc

SEQ ID NO: 297916 - RNA, 19 nt, Artificial Sequence
  Description of Artificial Sequence: Synthetic oligonucleotide
  Sense strand starting at position 3364 of SEQ ID NO: 3827
gggcaugucaguuaggacu

SEQ ID NO: 297917 - RNA, 19 nt, Artificial Sequence
  Description of Artificial Sequence: Synthetic oligonucleotide
  Antisense strand to SEQ ID NO: 297916
aguccuaacugacaugccc

SEQ ID NO: 297918 - RNA, 19 nt, Artificial Sequence
  Description of Artificial Sequence: Synthetic oligonucleotide
  Sense strand starting at position 3678 of SEQ ID NO: 3827
uacuguucuggaugaaauu

SEQ ID NO: 297919 - RNA, 19 nt, Artificial Sequence
  Description of Artificial Sequence: Synthetic oligonucleotide
  Antisense strand to SEQ ID NO: 297918
aauuucauccagaacagua

SEQ ID NO: 297920 - RNA, 19 nt, Artificial Sequence
  Description of Artificial Sequence: Synthetic oligonucleotide
  Sense strand starting at position 3863 of SEQ ID NO: 3827
uuuaaugucugguuugaga

SEQ ID NO: 297921 - RNA, 19 nt, Artificial Sequence
  Description of Artificial Sequence: Synthetic oligonucleotide
  Antisense strand to SEQ ID NO: 297920
ucucaaaccagacauuaaa

SEQ ID NO: 297922 - RNA, 19 nt, Artificial Sequence
  Description of Artificial Sequence: Synthetic oligonucleotide
  Sense strand starting at position 3865 of SEQ ID NO: 3827
uaaugucugguuugagaga

SEQ ID NO: 297923 - RNA, 19 nt, Artificial Sequence
  Description of Artificial Sequence: Synthetic oligonucleotide
  Antisense strand to SEQ ID NO: 297922
ucucucaaaccagacauua

SEQ ID NO: 297924 - RNA, 19 nt, Artificial Sequence
  Description of Artificial Sequence: Synthetic oligonucleotide
  Sense strand starting at position 3900 of SEQ ID NO: 3827
auaucuguuucugcauuua

SEQ ID NO: 297925 - RNA, 19 nt, Artificial Sequence
  Description of Artificial Sequence: Synthetic oligonucleotide
  Antisense strand to SEQ ID NO: 297924
uaaaugcagaaacagauau

SEQ ID NO: 297926 - RNA, 19 nt, Artificial Sequence
  Description of Artificial Sequence: Synthetic oligonucleotide
  Sense strand starting at position 3911 of SEQ ID NO: 3827
ugcauuuaaucugcugcaa

SEQ ID NO: 297927 - RNA, 19 nt, Artificial Sequence
  Description of Artificial Sequence: Synthetic oligonucleotide
  Antisense strand to SEQ ID NO: 297926
uugcagcagauuaaaugca

SEQ ID NO: 297928 - RNA, 19 nt, Artificial Sequence
  Description of Artificial Sequence: Synthetic oligonucleotide
  Sense strand starting at position 3915 of SEQ ID NO: 3827
uuuaaucugcugcaaagua

SEQ ID NO: 297929 - RNA, 19 nt, Artificial Sequence
  Description of Artificial Sequence: Synthetic oligonucleotide
  Antisense strand to SEQ ID NO: 297928
uacuuugcagcagauuaaa

SEQ ID NO: 297930 - RNA, 19 nt, Artificial Sequence
  Description of Artificial Sequence: Synthetic oligonucleotide
  Sense strand starting at position 3942 of SEQ ID NO: 3827
guugacauauuugaagaaa

SEQ ID NO: 297931 - RNA, 19 nt, Artificial Sequence
  Description of Artificial Sequence: Synthetic oligonucleotide
  Antisense strand to SEQ ID NO: 297930
uuucuucaaauaugucaac

SEQ ID NO: 297932 - RNA, 19 nt, Artificial Sequence
  Description of Artificial Sequence: Synthetic oligonucleotide
  Sense strand starting at position 4 of SEQ ID NO: 3829
agcugagggcuucauguua

SEQ ID NO: 297933 - RNA, 19 nt, Artificial Sequence
  Description of Artificial Sequence: Synthetic oligonucleotide
  Antisense strand to SEQ ID NO: 297932
uaacaugaagcccucagcu

SEQ ID NO: 297934 - RNA, 19 nt, Artificial Sequence
  Description of Artificial Sequence: Synthetic oligonucleotide
  Sense strand starting at position 181 of SEQ ID NO: 3829
gcaccuuggucucugauaa

SEQ ID NO: 297935 - RNA, 19 nt, Artificial Sequence
  Description of Artificial Sequence: Synthetic oligonucleotide
  Antisense strand to SEQ ID NO: 297934
uuaucagagaccaaggugc

SEQ ID NO: 297936 - RNA, 19 nt, Artificial Sequence
  Description of Artificial Sequence: Synthetic oligonucleotide
  Sense strand starting at position 182 of SEQ ID NO: 3829
caccuuggucucugauaag

SEQ ID NO: 297937 - RNA, 19 nt, Artificial Sequence
  Description of Artificial Sequence: Synthetic oligonucleotide
  Antisense strand to SEQ ID NO: 297936
cuuaucagagaccaaggug

SEQ ID NO: 297938 - RNA, 19 nt, Artificial Sequence
  Description of Artificial Sequence: Synthetic oligonucleotide
  Sense strand starting at position 222 of SEQ ID NO: 3829
ggccaaggauaggagauau

SEQ ID NO: 297939 - RNA, 19 nt, Artificial Sequence
  Description of Artificial Sequence: Synthetic oligonucleotide
  Antisense strand to SEQ ID NO: 297938
auaucuccuauccuuggcc

SEQ ID NO: 297940 - RNA, 19 nt, Artificial Sequence
  Description of Artificial Sequence: Synthetic oligonucleotide
  Sense strand starting at position 248 of SEQ ID NO: 3829
agaggaaucuaccuguuug

SEQ ID NO: 297941 - RNA, 19 nt, Artificial Sequence
  Description of Artificial Sequence: Synthetic oligonucleotide
  Antisense strand to SEQ ID NO: 297940
caaacagguagauuccucu

SEQ ID NO: 297942 - RNA, 19 nt, Artificial Sequence
  Description of Artificial Sequence: Synthetic oligonucleotide
  Sense strand starting at position 285 of SEQ ID NO: 3829
gggaacaugugugauccca

SEQ ID NO: 297943 - RNA, 19 nt, Artificial Sequence
  Description of Artificial Sequence: Synthetic oligonucleotide
  Antisense strand to SEQ ID NO: 297942
ugggaucacacauguuccc

SEQ ID NO: 297944 - RNA, 19 nt, Artificial Sequence
  Description of Artificial Sequence: Synthetic oligonucleotide
  Sense strand starting at position 399 of SEQ ID NO: 3829
cucugaggccagcauuaga

SEQ ID NO: 297945 - RNA, 19 nt, Artificial Sequence
  Description of Artificial Sequence: Synthetic oligonucleotide
  Antisense strand to SEQ ID NO: 297944
ucuaaugcuggccucagag

SEQ ID NO: 297946 - RNA, 19 nt, Artificial Sequence
  Description of Artificial Sequence: Synthetic oligonucleotide
  Sense strand starting at position 407 of SEQ ID NO: 3829
ccagcauuagacuguguca

SEQ ID NO: 297947 - RNA, 19 nt, Artificial Sequence
  Description of Artificial Sequence: Synthetic oligonucleotide
  Antisense strand to SEQ ID NO: 297946
ugacacagucuaaugcugg

SEQ ID NO: 297948 - RNA, 19 nt, Artificial Sequence
  Description of Artificial Sequence: Synthetic oligonucleotide
  Sense strand starting at position 409 of SEQ ID NO: 3829
agcauuagacugugucacu

SEQ ID NO: 297949 - RNA, 19 nt, Artificial Sequence
  Description of Artificial Sequence: Synthetic oligonucleotide
  Antisense strand to SEQ ID NO: 297948
agugacacagucuaaugcu

SEQ ID NO: 297950 - RNA, 19 nt, Artificial Sequence
  Description of Artificial Sequence: Synthetic oligonucleotide
  Sense strand starting at position 410 of SEQ ID NO: 3829
gcauuagacugugucacuu

SEQ ID NO: 297951 - RNA, 19 nt, Artificial Sequence
  Description of Artificial Sequence: Synthetic oligonucleotide
  Antisense strand to SEQ ID NO: 297950
aagugacacagucuaaugc

SEQ ID NO: 297952 - RNA, 19 nt, Artificial Sequence
  Description of Artificial Sequence: Synthetic oligonucleotide
  Sense strand starting at position 819 of SEQ ID NO: 3829
ggcuccaagucagauaacu

SEQ ID NO: 297953 - RNA, 19 nt, Artificial Sequence
  Description of Artificial Sequence: Synthetic oligonucleotide
  Antisense strand to SEQ ID NO: 297952
aguuaucugacuuggagcc

SEQ ID NO: 297954 - RNA, 19 nt, Artificial Sequence
  Description of Artificial Sequence: Synthetic oligonucleotide
  Sense strand starting at position 827 of SEQ ID NO: 3829
gucagauaacucuggguuc

SEQ ID NO: 297955 - RNA, 19 nt, Artificial Sequence
  Description of Artificial Sequence: Synthetic oligonucleotide
  Antisense strand to SEQ ID NO: 297954
gaacccagaguuaucugac

SEQ ID NO: 297956 - RNA, 19 nt, Artificial Sequence
  Description of Artificial Sequence: Synthetic oligonucleotide
  Sense strand starting at position 869 of SEQ ID NO: 3829
agcuguguauccuugcaaa

SEQ ID NO: 297957 - RNA, 19 nt, Artificial Sequence
  Description of Artificial Sequence: Synthetic oligonucleotide
  Antisense strand to SEQ ID NO: 297956
uuugcaaggauacacagcu

SEQ ID NO: 297958 - RNA, 19 nt, Artificial Sequence
  Description of Artificial Sequence: Synthetic oligonucleotide
  Sense strand starting at position 943 of SEQ ID NO: 3829
uccuguugugaggauuaac

SEQ ID NO: 297959 - RNA, 19 nt, Artificial Sequence
  Description of Artificial Sequence: Synthetic oligonucleotide
  Antisense strand to SEQ ID NO: 297958
guuaauccucacaacagga

SEQ ID NO: 297960 - RNA, 19 nt, Artificial Sequence
  Description of Artificial Sequence: Synthetic oligonucleotide
  Sense strand starting at position 953 of SEQ ID NO: 3829
aggauuaacugggauauug

SEQ ID NO: 297961 - RNA, 19 nt, Artificial Sequence
  Description of Artificial Sequence: Synthetic oligonucleotide
  Antisense strand to SEQ ID NO: 297960
caauaucccaguuaauccu

SEQ ID NO: 297962 - RNA, 19 nt, Artificial Sequence
  Description of Artificial Sequence: Synthetic oligonucleotide
  Sense strand starting at position 961 of SEQ ID NO: 3829
cugggauauugugcucaaa

SEQ ID NO: 297963 - RNA, 19 nt, Artificial Sequence
  Description of Artificial Sequence: Synthetic oligonucleotide
  Antisense strand to SEQ ID NO: 297962
uuugagcacaauaucccag

SEQ ID NO: 297964 - RNA, 19 nt, Artificial Sequence
  Description of Artificial Sequence: Synthetic oligonucleotide
  Sense strand starting at position 963 of SEQ ID NO: 3829
gggauauugugcucaaagc

SEQ ID NO: 297965 - RNA, 19 nt, Artificial Sequence
  Description of Artificial Sequence: Synthetic oligonucleotide
  Antisense strand to SEQ ID NO: 297964
gcuuugagcacaauauccc

SEQ ID NO: 297966 - RNA, 19 nt, Artificial Sequence
  Description of Artificial Sequence: Synthetic oligonucleotide
  Sense strand starting at position 985 of SEQ ID NO: 3829
uagcaagaugccuggcaca

SEQ ID NO: 297967 - RNA, 19 nt, Artificial Sequence
  Description of Artificial Sequence: Synthetic oligonucleotide
  Antisense strand to SEQ ID NO: 297966
ugugccaggcaucuugcua

SEQ ID NO: 297968 - RNA, 19 nt, Artificial Sequence
  Description of Artificial Sequence: Synthetic oligonucleotide
  Sense strand starting at position 1011 of SEQ ID NO: 3829
gggaauaucugcuguuaau

SEQ ID NO: 297969 - RNA, 19 nt, Artificial Sequence
  Description of Artificial Sequence: Synthetic oligonucleotide
  Antisense strand to SEQ ID NO: 297968
auuaacagcagauauuccc

SEQ ID NO: 297970 - RNA, 19 nt, Artificial Sequence
  Description of Artificial Sequence: Synthetic oligonucleotide
  Sense strand starting at position 1109 of SEQ ID NO: 3829
ugagguggcccuggauauu

SEQ ID NO: 297971 - RNA, 19 nt, Artificial Sequence
  Description of Artificial Sequence: Synthetic oligonucleotide
  Antisense strand to SEQ ID NO: 297970
aauauccagggccaccuca

SEQ ID NO: 297972 - RNA, 19 nt, Artificial Sequence
  Description of Artificial Sequence: Synthetic oligonucleotide
  Sense strand starting at position 2215 of SEQ ID NO: 3829
cgccaacacuuccugauuu

SEQ ID NO: 297973 - RNA, 19 nt, Artificial Sequence
  Description of Artificial Sequence: Synthetic oligonucleotide
  Antisense strand to SEQ ID NO: 297972
aaaucaggaaguguuggcg

SEQ ID NO: 297974 - RNA, 19 nt, Artificial Sequence
  Description of Artificial Sequence: Synthetic oligonucleotide
  Sense strand starting at position 2352 of SEQ ID NO: 3829
cucgaauccuuguccauuu

SEQ ID NO: 297975 - RNA, 19 nt, Artificial Sequence
  Description of Artificial Sequence: Synthetic oligonucleotide
  Antisense strand to SEQ ID NO: 297974
aaauggacaaggauucgag

SEQ ID NO: 297976 - RNA, 19 nt, Artificial Sequence
  Description of Artificial Sequence: Synthetic oligonucleotide
  Sense strand starting at position 2814 of SEQ ID NO: 3829
uuucuuuacaggugaggag

SEQ ID NO: 297977 - RNA, 19 nt, Artificial Sequence
  Description of Artificial Sequence: Synthetic oligonucleotide
  Antisense strand to SEQ ID NO: 297976
cuccucaccuguaaagaaa

SEQ ID NO: 297978 - RNA, 19 nt, Artificial Sequence
  Description of Artificial Sequence: Synthetic oligonucleotide
  Sense strand starting at position 2849 of SEQ ID NO: 3829
ucagauucguggaggcuga

SEQ ID NO: 297979 - RNA, 19 nt, Artificial Sequence
  Description of Artificial Sequence: Synthetic oligonucleotide
  Antisense strand to SEQ ID NO: 297978
ucagccuccacgaaucuga

SEQ ID NO: 297980 - RNA, 19 nt, Artificial Sequence
  Description of Artificial Sequence: Synthetic oligonucleotide
  Sense strand starting at position 2885 of SEQ ID NO: 3829
cugguacucuuucuagagu

SEQ ID NO: 297981 - RNA, 19 nt, Artificial Sequence
  Description of Artificial Sequence: Synthetic oligonucleotide
  Antisense strand to SEQ ID NO: 297980
acucuagaaagaguaccag

SEQ ID NO: 297982 - RNA, 19 nt, Artificial Sequence
  Description of Artificial Sequence: Synthetic oligonucleotide
  Sense strand starting at position 2886 of SEQ ID NO: 3829
ugguacucuuucuagagua

SEQ ID NO: 297983 - RNA, 19 nt, Artificial Sequence
  Description of Artificial Sequence: Synthetic oligonucleotide
  Antisense strand to SEQ ID NO: 297982
uacucuagaaagaguacca

SEQ ID NO: 297984 - RNA, 19 nt, Artificial Sequence
  Description of Artificial Sequence: Synthetic oligonucleotide
  Sense strand starting at position 2888 of SEQ ID NO: 3829
guacucuuucuagaguauu

SEQ ID NO: 297985 - RNA, 19 nt, Artificial Sequence
  Description of Artificial Sequence: Synthetic oligonucleotide
  Antisense strand to SEQ ID NO: 297984
aauacucuagaaagaguac

SEQ ID NO: 297986 - RNA, 19 nt, Artificial Sequence
  Description of Artificial Sequence: Synthetic oligonucleotide
  Sense strand starting at position 2898 of SEQ ID NO: 3829
uagaguauuccugggagac

SEQ ID NO: 297987 - RNA, 19 nt, Artificial Sequence
  Description of Artificial Sequence: Synthetic oligonucleotide
  Antisense strand to SEQ ID NO: 297986
gucucccaggaauacucua

SEQ ID NO: 297988 - RNA, 19 nt, Artificial Sequence
  Description of Artificial Sequence: Synthetic oligonucleotide
  Sense strand starting at position 2900 of SEQ ID NO: 3829
gaguauuccugggagacau

SEQ ID NO: 297989 - RNA, 19 nt, Artificial Sequence
  Description of Artificial Sequence: Synthetic oligonucleotide
  Antisense strand to SEQ ID NO: 297988
augucucccaggaauacuc

SEQ ID NO: 297990 - RNA, 19 nt, Artificial Sequence
  Description of Artificial Sequence: Synthetic oligonucleotide
  Sense strand starting at position 2921 of SEQ ID NO: 3829
acuauuagccucugauaag

SEQ ID NO: 297991 - RNA, 19 nt, Artificial Sequence
  Description of Artificial Sequence: Synthetic oligonucleotide
  Antisense strand to SEQ ID NO: 297990
cuuaucagaggcuaauagu

SEQ ID NO: 297992 - RNA, 19 nt, Artificial Sequence
  Description of Artificial Sequence: Synthetic oligonucleotide
  Sense strand starting at position 3465 of SEQ ID NO: 3829
ugcaguggguuguaaacuu

SEQ ID NO: 297993 - RNA, 19 nt, Artificial Sequence
  Description of Artificial Sequence: Synthetic oligonucleotide
  Antisense strand to SEQ ID NO: 297992
aaguuuacaacccacugca

SEQ ID NO: 297994 - RNA, 19 nt, Artificial Sequence
  Description of Artificial Sequence: Synthetic oligonucleotide
  Sense strand starting at position 3472 of SEQ ID NO: 3829
gguuguaaacuuugagaag

SEQ ID NO: 297995 - RNA, 19 nt, Artificial Sequence
  Description of Artificial Sequence: Synthetic oligonucleotide
  Antisense strand to SEQ ID NO: 297994
cuucucaaaguuuacaacc

SEQ ID NO: 297996 - RNA, 19 nt, Artificial Sequence
  Description of Artificial Sequence: Synthetic oligonucleotide
  Sense strand starting at position 3473 of SEQ ID NO: 3829
guuguaaacuuugagaaga

SEQ ID NO: 297997 - RNA, 19 nt, Artificial Sequence
  Description of Artificial Sequence: Synthetic oligonucleotide
  Antisense strand to SEQ ID NO: 297996
ucuucucaaaguuuacaac

SEQ ID NO: 297998 - RNA, 19 nt, Artificial Sequence
  Description of Artificial Sequence: Synthetic oligonucleotide
  Sense strand starting at position 3475 of SEQ ID NO: 3829
uguaaacuuugagaagaca

SEQ ID NO: 297999 - RNA, 19 nt, Artificial Sequence
  Description of Artificial Sequence: Synthetic oligonucleotide
  Antisense strand to SEQ ID NO: 297998
ugucuucucaaaguuuaca

SEQ ID NO: 298000 - RNA, 19 nt, Artificial Sequence
  Description of Artificial Sequence: Synthetic oligonucleotide
  Sense strand starting at position 3652 of SEQ ID NO: 3829
gaggucuuccagcaucuuu

SEQ ID NO: 298001 - RNA, 19 nt, Artificial Sequence
  Description of Artificial Sequence: Synthetic oligonucleotide
  Antisense strand to SEQ ID NO: 298000
aaagaugcuggaagaccuc

SEQ ID NO: 298002 - RNA, 19 nt, Artificial Sequence
  Description of Artificial Sequence: Synthetic oligonucleotide
  Sense strand starting at position 3704 of SEQ ID NO: 3829
gggcucuccaugcaugagu

SEQ ID NO: 298003 - RNA, 19 nt, Artificial Sequence
  Description of Artificial Sequence: Synthetic oligonucleotide
  Antisense strand to SEQ ID NO: 298002
acucaugcauggagagccc

SEQ ID NO: 298004 - RNA, 19 nt, Artificial Sequence
  Description of Artificial Sequence: Synthetic oligonucleotide
  Sense strand starting at position 3706 of SEQ ID NO: 3829
gcucuccaugcaugaguaa

SEQ ID NO: 298005 - RNA, 19 nt, Artificial Sequence
  Description of Artificial Sequence: Synthetic oligonucleotide
  Antisense strand to SEQ ID NO: 298004
uuacucaugcauggagagc

SEQ ID NO: 298006 - RNA, 19 nt, Artificial Sequence
  Description of Artificial Sequence: Synthetic oligonucleotide
  Sense strand starting at position 3762 of SEQ ID NO: 3829
gcucuccaugaguaagaga

SEQ ID NO: 298007 - RNA, 19 nt, Artificial Sequence
  Description of Artificial Sequence: Synthetic oligonucleotide
  Antisense strand to SEQ ID NO: 298006
ucucuuacucauggagagc

SEQ ID NO: 298008 - RNA, 19 nt, Artificial Sequence
  Description of Artificial Sequence: Synthetic oligonucleotide
  Sense strand starting at position 3877 of SEQ ID NO: 3829
ugaaauuucucacagacag

SEQ ID NO: 298009 - RNA, 19 nt, Artificial Sequence
  Description of Artificial Sequence: Synthetic oligonucleotide
  Antisense strand to SEQ ID NO: 298008
cugucugugagaaauuuca

SEQ ID NO: 298010 - RNA, 19 nt, Artificial Sequence
  Description of Artificial Sequence: Synthetic oligonucleotide
  Sense strand starting at position 3981 of SEQ ID NO: 3829
uccacugaccguuggacua

SEQ ID NO: 298011 - RNA, 19 nt, Artificial Sequence
  Description of Artificial Sequence: Synthetic oligonucleotide
  Antisense strand to SEQ ID NO: 298010
uaguccaacggucagugga

SEQ ID NO: 298012 - RNA, 19 nt, Artificial Sequence
  Description of Artificial Sequence: Synthetic oligonucleotide
  Sense strand starting at position 144 of SEQ ID NO: 3830
gacacugauguugguacaa

SEQ ID NO: 298013 - RNA, 19 nt, Artificial Sequence
  Description of Artificial Sequence: Synthetic oligonucleotide
  Antisense strand to SEQ ID NO: 298012
uuguaccaacaucaguguc

SEQ ID NO: 298014 - RNA, 19 nt, Artificial Sequence
  Description of Artificial Sequence: Synthetic oligonucleotide
  Sense strand starting at position 153 of SEQ ID NO: 3830
guugguacaauauguauau

SEQ ID NO: 298015 - RNA, 19 nt, Artificial Sequence
  Description of Artificial Sequence: Synthetic oligonucleotide
  Antisense strand to SEQ ID NO: 298014
auauacauauuguaccaac

SEQ ID NO: 298016 - RNA, 19 nt, Artificial Sequence
  Description of Artificial Sequence: Synthetic oligonucleotide
  Sense strand starting at position 333 of SEQ ID NO: 3830
aaggauucuguauguacua

SEQ ID NO: 298017 - RNA, 19 nt, Artificial Sequence
  Description of Artificial Sequence: Synthetic oligonucleotide
  Antisense strand to SEQ ID NO: 298016
uaguacauacagaauccuu

SEQ ID NO: 298018 - RNA, 19 nt, Artificial Sequence
  Description of Artificial Sequence: Synthetic oligonucleotide
  Sense strand starting at position 335 of SEQ ID NO: 3830
ggauucuguauguacuaga

SEQ ID NO: 298019 - RNA, 19 nt, Artificial Sequence
  Description of Artificial Sequence: Synthetic oligonucleotide
  Antisense strand to SEQ ID NO: 298018
ucuaguacauacagaaucc

SEQ ID NO: 298020 - RNA, 19 nt, Artificial Sequence
  Description of Artificial Sequence: Synthetic oligonucleotide
  Sense strand starting at position 345 of SEQ ID NO: 3830
uguacuagacacugaggau

SEQ ID NO: 298021 - RNA, 19 nt, Artificial Sequence
  Description of Artificial Sequence: Synthetic oligonucleotide
  Antisense strand to SEQ ID NO: 298020
auccucagugucuaguaca

SEQ ID NO: 298022 - RNA, 19 nt, Artificial Sequence
  Description of Artificial Sequence: Synthetic oligonucleotide
  Sense strand starting at position 436 of SEQ ID NO: 3830
auaagacauuugcaaaguu

SEQ ID NO: 298023 - RNA, 19 nt, Artificial Sequence
  Description of Artificial Sequence: Synthetic oligonucleotide
  Antisense strand to SEQ ID NO: 298022
aacuuugcaaaugucuuau

SEQ ID NO: 298024 - RNA, 19 nt, Artificial Sequence
  Description of Artificial Sequence: Synthetic oligonucleotide
  Sense strand starting at position 676 of SEQ ID NO: 3830
ggagaaucacuucguccca

SEQ ID NO: 298025 - RNA, 19 nt, Artificial Sequence
  Description of Artificial Sequence: Synthetic oligonucleotide
  Antisense strand to SEQ ID NO: 298024
ugggacgaagugauucucc

SEQ ID NO: 298026 - RNA, 19 nt, Artificial Sequence
  Description of Artificial Sequence: Synthetic oligonucleotide
  Sense strand starting at position 869 of SEQ ID NO: 3830
uaguauguaccagaugacu

SEQ ID NO: 298027 - RNA, 19 nt, Artificial Sequence
  Description of Artificial Sequence: Synthetic oligonucleotide
  Antisense strand to SEQ ID NO: 298026
agucaucugguacauacua

SEQ ID NO: 298028 - RNA, 19 nt, Artificial Sequence
  Description of Artificial Sequence: Synthetic oligonucleotide
  Sense strand starting at position 877 of SEQ ID NO: 3830
accagaugacuuugguauc

SEQ ID NO: 298029 - RNA, 19 nt, Artificial Sequence
  Description of Artificial Sequence: Synthetic oligonucleotide
  Antisense strand to SEQ ID NO: 298028
gauaccaaagucaucuggu

SEQ ID NO: 298030 - RNA, 19 nt, Artificial Sequence
  Description of Artificial Sequence: Synthetic oligonucleotide
  Sense strand starting at position 999 of SEQ ID NO: 3830
auauaauugguaggaaguu

SEQ ID NO: 298031 - RNA, 19 nt, Artificial Sequence
  Description of Artificial Sequence: Synthetic oligonucleotide
  Antisense strand to SEQ ID NO: 298030
aacuuccuaccaauuauau

SEQ ID NO: 298032 - RNA, 19 nt, Artificial Sequence
  Description of Artificial Sequence: Synthetic oligonucleotide
  Sense strand starting at position 1011 of SEQ ID NO: 3830
ggaaguuacuucuccuauc

SEQ ID NO: 298033 - RNA, 19 nt, Artificial Sequence
  Description of Artificial Sequence: Synthetic oligonucleotide
  Antisense strand to SEQ ID NO: 298032
gauaggagaaguaacuucc

SEQ ID NO: 298034 - RNA, 19 nt, Artificial Sequence
  Description of Artificial Sequence: Synthetic oligonucleotide
  Sense strand starting at position 1242 of SEQ ID NO: 3830
uaugccaaucugugaggaa

SEQ ID NO: 298035 - RNA, 19 nt, Artificial Sequence
  Description of Artificial Sequence: Synthetic oligonucleotide
  Antisense strand to SEQ ID NO: 298034
uuccucacagauuggcaua

SEQ ID NO: 298036 - RNA, 19 nt, Artificial Sequence
  Description of Artificial Sequence: Synthetic oligonucleotide
  Sense strand starting at position 1285 of SEQ ID NO: 3830
gcaaguuugaaagaggguu

SEQ ID NO: 298037 - RNA, 19 nt, Artificial Sequence
  Description of Artificial Sequence: Synthetic oligonucleotide
  Antisense strand to SEQ ID NO: 298036
aacccucuuucaaacuugc

SEQ ID NO: 298038 - RNA, 19 nt, Artificial Sequence
  Description of Artificial Sequence: Synthetic oligonucleotide
  Sense strand starting at position 1354 of SEQ ID NO: 3830
uguauuuaguaccuugcua

SEQ ID NO: 298039 - RNA, 19 nt, Artificial Sequence
  Description of Artificial Sequence: Synthetic oligonucleotide
  Antisense strand to SEQ ID NO: 298038
uagcaagguacuaaauaca

SEQ ID NO: 298040 - RNA, 19 nt, Artificial Sequence
  Description of Artificial Sequence: Synthetic oligonucleotide
  Sense strand starting at position 1378 of SEQ ID NO: 3830
uaaugauuaugaccgagau

SEQ ID NO: 298041 - RNA, 19 nt, Artificial Sequence
  Description of Artificial Sequence: Synthetic oligonucleotide
  Antisense strand to SEQ ID NO: 298040
aucucggucauaaucauua

SEQ ID NO: 298042 - RNA, 19 nt, Artificial Sequence
  Description of Artificial Sequence: Synthetic oligonucleotide
  Sense strand starting at position 1379 of SEQ ID NO: 3830
aaugauuaugaccgagauc

SEQ ID NO: 298043 - RNA, 19 nt, Artificial Sequence
  Description of Artificial Sequence: Synthetic oligonucleotide
  Antisense strand to SEQ ID NO: 298042
gaucucggucauaaucauu

SEQ ID NO: 298044 - RNA, 19 nt, Artificial Sequence
  Description of Artificial Sequence: Synthetic oligonucleotide
  Sense strand starting at position 1426 of SEQ ID NO: 3830
agguaaugaucacuuccuu

SEQ ID NO: 298045 - RNA, 19 nt, Artificial Sequence
  Description of Artificial Sequence: Synthetic oligonucleotide
  Antisense strand to SEQ ID NO: 298044
aaggaagugaucauuaccu

SEQ ID NO: 298046 - RNA, 19 nt, Artificial Sequence
  Description of Artificial Sequence: Synthetic oligonucleotide
  Sense strand starting at position 1440 of SEQ ID NO: 3830
uccuucugacagugucaga

SEQ ID NO: 298047 - RNA, 19 nt, Artificial Sequence
  Description of Artificial Sequence: Synthetic oligonucleotide
  Antisense strand to SEQ ID NO: 298046
ucugacacugucagaagga

SEQ ID NO: 298048 - RNA, 19 nt, Artificial Sequence
  Description of Artificial Sequence: Synthetic oligonucleotide
  Sense strand starting at position 1482 of SEQ ID NO: 3830
gcccuuuggccucaaagga

SEQ ID NO: 298049 - RNA, 19 nt, Artificial Sequence
  Description of Artificial Sequence: Synthetic oligonucleotide
  Antisense strand to SEQ ID NO: 298048
uccuuugaggccaaagggc

SEQ ID NO: 298050 - RNA, 19 nt, Artificial Sequence
  Description of Artificial Sequence: Synthetic oligonucleotide
  Sense strand starting at position 1505 of SEQ ID NO: 3830
uagaguuuaggcuaucaca

SEQ ID NO: 298051 - RNA, 19 nt, Artificial Sequence
  Description of Artificial Sequence: Synthetic oligonucleotide
  Antisense strand to SEQ ID NO: 298050
ugugauagccuaaacucua

SEQ ID NO: 298052 - RNA, 19 nt, Artificial Sequence
  Description of Artificial Sequence: Synthetic oligonucleotide
  Sense strand starting at position 1915 of SEQ ID NO: 3830
cgcccuuucgaggaacaua

SEQ ID NO: 298053 - RNA, 19 nt, Artificial Sequence
  Description of Artificial Sequence: Synthetic oligonucleotide
  Antisense strand to SEQ ID NO: 298052
uauguuccucgaaagggcg

SEQ ID NO: 298054 - RNA, 19 nt, Artificial Sequence
  Description of Artificial Sequence: Synthetic oligonucleotide
  Sense strand starting at position 1928 of SEQ ID NO: 3830
aacauaaguccuggucaga

SEQ ID NO: 298055 - RNA, 19 nt, Artificial Sequence
  Description of Artificial Sequence: Synthetic oligonucleotide
  Antisense strand to SEQ ID NO: 298054
ucugaccaggacuuauguu

SEQ ID NO: 298056 - RNA, 19 nt, Artificial Sequence
  Description of Artificial Sequence: Synthetic oligonucleotide
  Sense strand starting at position 1931 of SEQ ID NO: 3830
auaaguccuggucagacau

SEQ ID NO: 298057 - RNA, 19 nt, Artificial Sequence
  Description of Artificial Sequence: Synthetic oligonucleotide
  Antisense strand to SEQ ID NO: 298056
augucugaccaggacuuau

SEQ ID NO: 298058 - RNA, 19 nt, Artificial Sequence
  Description of Artificial Sequence: Synthetic oligonucleotide
  Sense strand starting at position 1937 of SEQ ID NO: 3830
ccuggucagacauaccgaa

SEQ ID NO: 298059 - RNA, 19 nt, Artificial Sequence
  Description of Artificial Sequence: Synthetic oligonucleotide
  Antisense strand to SEQ ID NO: 298058
uucgguaugucugaccagg

SEQ ID NO: 298060 - RNA, 19 nt, Artificial Sequence
  Description of Artificial Sequence: Synthetic oligonucleotide
  Sense strand starting at position 1993 of SEQ ID NO: 3830
gcgccuaucaaugauggaa

SEQ ID NO: 298061 - RNA, 19 nt, Artificial Sequence
  Description of Artificial Sequence: Synthetic oligonucleotide
  Antisense strand to SEQ ID NO: 298060
uuccaucauugauaggcgc

SEQ ID NO: 298062 - RNA, 19 nt, Artificial Sequence
  Description of Artificial Sequence: Synthetic oligonucleotide
  Sense strand starting at position 2061 of SEQ ID NO: 3830
augucucugccgccggaaa

SEQ ID NO: 298063 - RNA, 19 nt, Artificial Sequence
  Description of Artificial Sequence: Synthetic oligonucleotide
  Antisense strand to SEQ ID NO: 298062
uuuccggcggcagagacau

SEQ ID NO: 298064 - RNA, 19 nt, Artificial Sequence
  Description of Artificial Sequence: Synthetic oligonucleotide
  Sense strand starting at position 2259 of SEQ ID NO: 3830
aggaaacccugacucguuu

SEQ ID NO: 298065 - RNA, 19 nt, Artificial Sequence
  Description of Artificial Sequence: Synthetic oligonucleotide
  Antisense strand to SEQ ID NO: 298064
aaacgagucaggguuuccu

SEQ ID NO: 298066 - RNA, 19 nt, Artificial Sequence
  Description of Artificial Sequence: Synthetic oligonucleotide
  Sense strand starting at position 2309 of SEQ ID NO: 3830
aauggagcuuuguuagaua

SEQ ID NO: 298067 - RNA, 19 nt, Artificial Sequence
  Description of Artificial Sequence: Synthetic oligonucleotide
  Antisense strand to SEQ ID NO: 298066
uaucuaacaaagcuccauu

SEQ ID NO: 298068 - RNA, 19 nt, Artificial Sequence
  Description of Artificial Sequence: Synthetic oligonucleotide
  Sense strand starting at position 2370 of SEQ ID NO: 3830
agcguauccgccguaggau

SEQ ID NO: 298069 - RNA, 19 nt, Artificial Sequence
  Description of Artificial Sequence: Synthetic oligonucleotide
  Antisense strand to SEQ ID NO: 298068
auccuacggcggauacgcu

SEQ ID NO: 298070 - RNA, 19 nt, Artificial Sequence
  Description of Artificial Sequence: Synthetic oligonucleotide
  Sense strand starting at position 2387 of SEQ ID NO: 3830
auggacuuagaucguguaa

SEQ ID NO: 298071 - RNA, 19 nt, Artificial Sequence
  Description of Artificial Sequence: Synthetic oligonucleotide
  Antisense strand to SEQ ID NO: 298070
uuacacgaucuaaguccau

SEQ ID NO: 298072 - RNA, 19 nt, Artificial Sequence
  Description of Artificial Sequence: Synthetic oligonucleotide
  Sense strand starting at position 2565 of SEQ ID NO: 3830
guaguuauucaaccgcguu

SEQ ID NO: 298073 - RNA, 19 nt, Artificial Sequence
  Description of Artificial Sequence: Synthetic oligonucleotide
  Antisense strand to SEQ ID NO: 298072
aacgcgguugaauaacuac

SEQ ID NO: 298074 - RNA, 19 nt, Artificial Sequence
  Description of Artificial Sequence: Synthetic oligonucleotide
  Sense strand starting at position 2756 of SEQ ID NO: 3830
uuaacagaauuccugguuu

SEQ ID NO: 298075 - RNA, 19 nt, Artificial Sequence
  Description of Artificial Sequence: Synthetic oligonucleotide
  Antisense strand to SEQ ID NO: 298074
aaaccaggaauucuguuaa

SEQ ID NO: 298076 - RNA, 19 nt, Artificial Sequence
  Description of Artificial Sequence: Synthetic oligonucleotide
  Sense strand starting at position 2855 of SEQ ID NO: 3830
auaggaucauagucaucuu

SEQ ID NO: 298077 - RNA, 19 nt, Artificial Sequence
  Description of Artificial Sequence: Synthetic oligonucleotide
  Antisense strand to SEQ ID NO: 298076
aagaugacuaugauccuau

SEQ ID NO: 298078 - RNA, 19 nt, Artificial Sequence
  Description of Artificial Sequence: Synthetic oligonucleotide
  Sense strand starting at position 2858 of SEQ ID NO: 3830
ggaucauagucaucuuuau

SEQ ID NO: 298079 - RNA, 19 nt, Artificial Sequence
  Description of Artificial Sequence: Synthetic oligonucleotide
  Antisense strand to SEQ ID NO: 298078
auaaagaugacuaugaucc

SEQ ID NO: 298080 - RNA, 19 nt, Artificial Sequence
  Description of Artificial Sequence: Synthetic oligonucleotide
  Sense strand starting at position 2865 of SEQ ID NO: 3830
agucaucuuuaucccaagu

SEQ ID NO: 298081 - RNA, 19 nt, Artificial Sequence
  Description of Artificial Sequence: Synthetic oligonucleotide
  Antisense strand to SEQ ID NO: 298080
acuugggauaaagaugacu

SEQ ID NO: 298082 - RNA, 19 nt, Artificial Sequence
  Description of Artificial Sequence: Synthetic oligonucleotide
  Sense strand starting at position 3035 of SEQ ID NO: 3830
uggagauacauccgaagca

SEQ ID NO: 298083 - RNA, 19 nt, Artificial Sequence
  Description of Artificial Sequence: Synthetic oligonucleotide
  Antisense strand to SEQ ID NO: 298082
ugcuucggauguaucucca

SEQ ID NO: 298084 - RNA, 19 nt, Artificial Sequence
  Description of Artificial Sequence: Synthetic oligonucleotide
  Sense strand starting at position 3298 of SEQ ID NO: 3830
ccaccuuucuauguaagag

SEQ ID NO: 298085 - RNA, 19 nt, Artificial Sequence
  Description of Artificial Sequence: Synthetic oligonucleotide
  Antisense strand to SEQ ID NO: 298084
cucuuacauagaaaggugg

SEQ ID NO: 298086 - RNA, 19 nt, Artificial Sequence
  Description of Artificial Sequence: Synthetic oligonucleotide
  Sense strand starting at position 3611 of SEQ ID NO: 3830
acaagcuggccguaaagaa

SEQ ID NO: 298087 - RNA, 19 nt, Artificial Sequence
  Description of Artificial Sequence: Synthetic oligonucleotide
  Antisense strand to SEQ ID NO: 298086
uucuuuacggccagcuugu

SEQ ID NO: 298088 - RNA, 19 nt, Artificial Sequence
  Description of Artificial Sequence: Synthetic oligonucleotide
  Sense strand starting at position 3687 of SEQ ID NO: 3830
gccucauaccugggaggaa

SEQ ID NO: 298089 - RNA, 19 nt, Artificial Sequence
  Description of Artificial Sequence: Synthetic oligonucleotide
  Antisense strand to SEQ ID NO: 298088
uuccucccagguaugaggc

SEQ ID NO: 298090 - RNA, 19 nt, Artificial Sequence
  Description of Artificial Sequence: Synthetic oligonucleotide
  Sense strand starting at position 3950 of SEQ ID NO: 3830
agcucugacccuuaugaug

SEQ ID NO: 298091 - RNA, 19 nt, Artificial Sequence
  Description of Artificial Sequence: Synthetic oligonucleotide
  Antisense strand to SEQ ID NO: 298090
caucauaagggucagagcu

SEQ ID NO: 298092 - RNA, 19 nt, Artificial Sequence
  Description of Artificial Sequence: Synthetic oligonucleotide
  Sense strand starting at position 50 of SEQ ID NO: 3831
caagucucuguagagaagu

SEQ ID NO: 298093 - RNA, 19 nt, Artificial Sequence
  Description of Artificial Sequence: Synthetic oligonucleotide
  Antisense strand to SEQ ID NO: 298092
acuucucuacagagacuug

SEQ ID NO: 298094 - RNA, 19 nt, Artificial Sequence
  Description of Artificial Sequence: Synthetic oligonucleotide
  Sense strand starting at position 67 of SEQ ID NO: 3831
guagaagugaccuaugagc

SEQ ID NO: 298095 - RNA, 19 nt, Artificial Sequence
  Description of Artificial Sequence: Synthetic oligonucleotide
  Antisense strand to SEQ ID NO: 298094
gcucauaggucacuucuac

SEQ ID NO: 298096 - RNA, 19 nt, Artificial Sequence
  Description of Artificial Sequence: Synthetic oligonucleotide
  Sense strand starting at position 69 of SEQ ID NO: 3831
agaagugaccuaugagcau

SEQ ID NO: 298097 - RNA, 19 nt, Artificial Sequence
  Description of Artificial Sequence: Synthetic oligonucleotide
  Antisense strand to SEQ ID NO: 298096
augcucauaggucacuucu

SEQ ID NO: 298098 - RNA, 19 nt, Artificial Sequence
  Description of Artificial Sequence: Synthetic oligonucleotide
  Sense strand starting at position 78 of SEQ ID NO: 3831
cuaugagcaucucuggaca

SEQ ID NO: 298099 - RNA, 19 nt, Artificial Sequence
  Description of Artificial Sequence: Synthetic oligonucleotide
  Antisense strand to SEQ ID NO: 298098
uguccagagaugcucauag

SEQ ID NO: 298100 - RNA, 19 nt, Artificial Sequence
  Description of Artificial Sequence: Synthetic oligonucleotide
  Sense strand starting at position 375 of SEQ ID NO: 3831
ccuacaguuggagauguuu

SEQ ID NO: 298101 - RNA, 19 nt, Artificial Sequence
  Description of Artificial Sequence: Synthetic oligonucleotide
  Antisense strand to SEQ ID NO: 298100
aaacaucuccaacuguagg

SEQ ID NO: 298102 - RNA, 19 nt, Artificial Sequence
  Description of Artificial Sequence: Synthetic oligonucleotide
  Sense strand starting at position 570 of SEQ ID NO: 3831
cuccauaaccaggagucuu

SEQ ID NO: 298103 - RNA, 19 nt, Artificial Sequence
  Description of Artificial Sequence: Synthetic oligonucleotide
  Antisense strand to SEQ ID NO: 298102
aagacuccugguuauggag

SEQ ID NO: 298104 - RNA, 19 nt, Artificial Sequence
  Description of Artificial Sequence: Synthetic oligonucleotide
  Sense strand starting at position 578 of SEQ ID NO: 3831
ccaggagucuuucugaccu

SEQ ID NO: 298105 - RNA, 19 nt, Artificial Sequence
  Description of Artificial Sequence: Synthetic oligonucleotide
  Antisense strand to SEQ ID NO: 298104
aggucagaaagacuccugg

SEQ ID NO: 298106 - RNA, 19 nt, Artificial Sequence
  Description of Artificial Sequence: Synthetic oligonucleotide
  Sense strand starting at position 582 of SEQ ID NO: 3831
gagucuuucugaccuugaa

SEQ ID NO: 298107 - RNA, 19 nt, Artificial Sequence
  Description of Artificial Sequence: Synthetic oligonucleotide
  Antisense strand to SEQ ID NO: 298106
uucaaggucagaaagacuc

SEQ ID NO: 298108 - RNA, 19 nt, Artificial Sequence
  Description of Artificial Sequence: Synthetic oligonucleotide
  Sense strand starting at position 585 of SEQ ID NO: 3831
ucuuucugaccuugaagaa

SEQ ID NO: 298109 - RNA, 19 nt, Artificial Sequence
  Description of Artificial Sequence: Synthetic oligonucleotide
  Antisense strand to SEQ ID NO: 298108
uucuucaaggucagaaaga

SEQ ID NO: 298110 - RNA, 19 nt, Artificial Sequence
  Description of Artificial Sequence: Synthetic oligonucleotide
  Sense strand starting at position 989 of SEQ ID NO: 3831
uauagaaaucuuugagguc

SEQ ID NO: 298111 - RNA, 19 nt, Artificial Sequence
  Description of Artificial Sequence: Synthetic oligonucleotide
  Antisense strand to SEQ ID NO: 298110
gaccucaaagauuucuaua

SEQ ID NO: 298112 - RNA, 19 nt, Artificial Sequence
  Description of Artificial Sequence: Synthetic oligonucleotide
  Sense strand starting at position 1066 of SEQ ID NO: 3831
cuuaucaaguacuugucaa

SEQ ID NO: 298113 - RNA, 19 nt, Artificial Sequence
  Description of Artificial Sequence: Synthetic oligonucleotide
  Antisense strand to SEQ ID NO: 298112
uugacaaguacuugauaag

SEQ ID NO: 298114 - RNA, 19 nt, Artificial Sequence
  Description of Artificial Sequence: Synthetic oligonucleotide
  Sense strand starting at position 1086 of SEQ ID NO: 3831
cccgcauugggugagacau

SEQ ID NO: 298115 - RNA, 19 nt, Artificial Sequence
  Description of Artificial Sequence: Synthetic oligonucleotide
  Antisense strand to SEQ ID NO: 298114
augucucacccaaugcggg

SEQ ID NO: 298116 - RNA, 19 nt, Artificial Sequence
  Description of Artificial Sequence: Synthetic oligonucleotide
  Sense strand starting at position 1138 of SEQ ID NO: 3831
uccaucagugagggauaau

SEQ ID NO: 298117 - RNA, 19 nt, Artificial Sequence
  Description of Artificial Sequence: Synthetic oligonucleotide
  Antisense strand to SEQ ID NO: 298116
auuaucccucacugaugga

SEQ ID NO: 298118 - RNA, 19 nt, Artificial Sequence
  Description of Artificial Sequence: Synthetic oligonucleotide
  Sense strand starting at position 1183 of SEQ ID NO: 3831
aaacaugguuuaucaaggu

SEQ ID NO: 298119 - RNA, 19 nt, Artificial Sequence
  Description of Artificial Sequence: Synthetic oligonucleotide
  Antisense strand to SEQ ID NO: 298118
accuugauaaaccauguuu

SEQ ID NO: 298120 - RNA, 19 nt, Artificial Sequence
  Description of Artificial Sequence: Synthetic oligonucleotide
  Sense strand starting at position 1187 of SEQ ID NO: 3831
augguuuaucaaggucaca

SEQ ID NO: 298121 - RNA, 19 nt, Artificial Sequence
  Description of Artificial Sequence: Synthetic oligonucleotide
  Antisense strand to SEQ ID NO: 298120
ugugaccuugauaaaccau

SEQ ID NO: 298122 - RNA, 19 nt, Artificial Sequence
  Description of Artificial Sequence: Synthetic oligonucleotide
  Sense strand starting at position 1263 of SEQ ID NO: 3831
gguucugucaggugagaga

SEQ ID NO: 298123 - RNA, 19 nt, Artificial Sequence
  Description of Artificial Sequence: Synthetic oligonucleotide
  Antisense strand to SEQ ID NO: 298122
ucucucaccugacagaacc

SEQ ID NO: 298124 - RNA, 19 nt, Artificial Sequence
  Description of Artificial Sequence: Synthetic oligonucleotide
  Sense strand starting at position 1566 of SEQ ID NO: 3831
gcggaucaugcuggaaaga

SEQ ID NO: 298125 - RNA, 19 nt, Artificial Sequence
  Description of Artificial Sequence: Synthetic oligonucleotide
  Antisense strand to SEQ ID NO: 298124
ucuuuccagcaugauccgc

SEQ ID NO: 298126 - RNA, 19 nt, Artificial Sequence
  Description of Artificial Sequence: Synthetic oligonucleotide
  Sense strand starting at position 1617 of SEQ ID NO: 3831
ccagacgacccaugaagua

SEQ ID NO: 298127 - RNA, 19 nt, Artificial Sequence
  Description of Artificial Sequence: Synthetic oligonucleotide
  Antisense strand to SEQ ID NO: 298126
uacuucaugggucgucugg

SEQ ID NO: 298128 - RNA, 19 nt, Artificial Sequence
  Description of Artificial Sequence: Synthetic oligonucleotide
  Sense strand starting at position 2125 of SEQ ID NO: 3831
uggugaggguucucuacuu

SEQ ID NO: 298129 - RNA, 19 nt, Artificial Sequence
  Description of Artificial Sequence: Synthetic oligonucleotide
  Antisense strand to SEQ ID NO: 298128
aaguagagaacccucacca

SEQ ID NO: 298130 - RNA, 19 nt, Artificial Sequence
  Description of Artificial Sequence: Synthetic oligonucleotide
  Sense strand starting at position 2392 of SEQ ID NO: 3831
uagucucagugguuaagag

SEQ ID NO: 298131 - RNA, 19 nt, Artificial Sequence
  Description of Artificial Sequence: Synthetic oligonucleotide
  Antisense strand to SEQ ID NO: 298130
cucuuaaccacugagacua

SEQ ID NO: 298132 - RNA, 19 nt, Artificial Sequence
  Description of Artificial Sequence: Synthetic oligonucleotide
  Sense strand starting at position 2414 of SEQ ID NO: 3831
aggcuugugaaccagacuu

SEQ ID NO: 298133 - RNA, 19 nt, Artificial Sequence
  Description of Artificial Sequence: Synthetic oligonucleotide
  Antisense strand to SEQ ID NO: 298132
aagucugguucacaagccu

SEQ ID NO: 298134 - RNA, 19 nt, Artificial Sequence
  Description of Artificial Sequence: Synthetic oligonucleotide
  Sense strand starting at position 2546 of SEQ ID NO: 3831
gguuaaguagcuuaacugu

SEQ ID NO: 298135 - RNA, 19 nt, Artificial Sequence
  Description of Artificial Sequence: Synthetic oligonucleotide
  Antisense strand to SEQ ID NO: 298134
acaguuaagcuacuuaacc

SEQ ID NO: 298136 - RNA, 19 nt, Artificial Sequence
  Description of Artificial Sequence: Synthetic oligonucleotide
  Sense strand starting at position 2585 of SEQ ID NO: 3831
aaaugacagcuccguuaac

SEQ ID NO: 298137 - RNA, 19 nt, Artificial Sequence
  Description of Artificial Sequence: Synthetic oligonucleotide
  Antisense strand to SEQ ID NO: 298136
guuaacggagcugucauuu

SEQ ID NO: 298138 - RNA, 19 nt, Artificial Sequence
  Description of Artificial Sequence: Synthetic oligonucleotide
  Sense strand starting at position 2683 of SEQ ID NO: 3831
accucauggaguugaagau

SEQ ID NO: 298139 - RNA, 19 nt, Artificial Sequence
  Description of Artificial Sequence: Synthetic oligonucleotide
  Antisense strand to SEQ ID NO: 298138
aucuucaacuccaugaggu

SEQ ID NO: 298140 - RNA, 19 nt, Artificial Sequence
  Description of Artificial Sequence: Synthetic oligonucleotide
  Sense strand starting at position 2703 of SEQ ID NO: 3831
aaaugagauguacaguguu

SEQ ID NO: 298141 - RNA, 19 nt, Artificial Sequence
  Description of Artificial Sequence: Synthetic oligonucleotide
  Antisense strand to SEQ ID NO: 298140
aacacuguacaucucauuu

SEQ ID NO: 298142 - RNA, 19 nt, Artificial Sequence
  Description of Artificial Sequence: Synthetic oligonucleotide
  Sense strand starting at position 2706 of SEQ ID NO: 3831
ugagauguacaguguuuaa

SEQ ID NO: 298143 - RNA, 19 nt, Artificial Sequence
  Description of Artificial Sequence: Synthetic oligonucleotide
  Antisense strand to SEQ ID NO: 298142
uuaaacacuguacaucuca

SEQ ID NO: 298144 - RNA, 19 nt, Artificial Sequence
  Description of Artificial Sequence: Synthetic oligonucleotide
  Sense strand starting at position 2709 of SEQ ID NO: 3831
gauguacaguguuuaauac

SEQ ID NO: 298145 - RNA, 19 nt, Artificial Sequence
  Description of Artificial Sequence: Synthetic oligonucleotide
  Antisense strand to SEQ ID NO: 298144
guauuaaacacuguacauc

SEQ ID NO: 298146 - RNA, 19 nt, Artificial Sequence
  Description of Artificial Sequence: Synthetic oligonucleotide
  Sense strand starting at position 2710 of SEQ ID NO: 3831
auguacaguguuuaauaca

SEQ ID NO: 298147 - RNA, 19 nt, Artificial Sequence
  Description of Artificial Sequence: Synthetic oligonucleotide
  Antisense strand to SEQ ID NO: 298146
uguauuaaacacuguacau

SEQ ID NO: 298148 - RNA, 19 nt, Artificial Sequence
  Description of Artificial Sequence: Synthetic oligonucleotide
  Sense strand starting at position 2756 of SEQ ID NO: 3831
gucaauaaaccguaauuau

SEQ ID NO: 298149 - RNA, 19 nt, Artificial Sequence
  Description of Artificial Sequence: Synthetic oligonucleotide
  Antisense strand to SEQ ID NO: 298148
auaauuacgguuuauugac

SEQ ID NO: 298150 - RNA, 19 nt, Artificial Sequence
  Description of Artificial Sequence: Synthetic oligonucleotide
  Sense strand starting at position 2797 of SEQ ID NO: 3831
cauucuugagacuguaaag

SEQ ID NO: 298151 - RNA, 19 nt, Artificial Sequence
  Description of Artificial Sequence: Synthetic oligonucleotide
  Antisense strand to SEQ ID NO: 298150
cuuuacagucucaagaaug

SEQ ID NO: 298152 - RNA, 19 nt, Artificial Sequence
  Description of Artificial Sequence: Synthetic oligonucleotide
  Sense strand starting at position 2859 of SEQ ID NO: 3831
agcaguuguccuuaauauc

SEQ ID NO: 298153 - RNA, 19 nt, Artificial Sequence
  Description of Artificial Sequence: Synthetic oligonucleotide
  Antisense strand to SEQ ID NO: 298152
gauauuaaggacaacugcu

SEQ ID NO: 298154 - RNA, 19 nt, Artificial Sequence
  Description of Artificial Sequence: Synthetic oligonucleotide
  Sense strand starting at position 3021 of SEQ ID NO: 3831
cccggaucacccugaagau

SEQ ID NO: 298155 - RNA, 19 nt, Artificial Sequence
  Description of Artificial Sequence: Synthetic oligonucleotide
  Antisense strand to SEQ ID NO: 298154
aucuucagggugauccggg

SEQ ID NO: 298156 - RNA, 19 nt, Artificial Sequence
  Description of Artificial Sequence: Synthetic oligonucleotide
  Sense strand starting at position 3140 of SEQ ID NO: 3831
ggcugaggauuugagauga

SEQ ID NO: 298157 - RNA, 19 nt, Artificial Sequence
  Description of Artificial Sequence: Synthetic oligonucleotide
  Antisense strand to SEQ ID NO: 298156
ucaucucaaauccucagcc

SEQ ID NO: 298158 - RNA, 19 nt, Artificial Sequence
  Description of Artificial Sequence: Synthetic oligonucleotide
  Sense strand starting at position 3276 of SEQ ID NO: 3831
ugagguaggaucugagauu

SEQ ID NO: 298159 - RNA, 19 nt, Artificial Sequence
  Description of Artificial Sequence: Synthetic oligonucleotide
  Antisense strand to SEQ ID NO: 298158
aaucucagauccuaccuca

SEQ ID NO: 298160 - RNA, 19 nt, Artificial Sequence
  Description of Artificial Sequence: Synthetic oligonucleotide
  Sense strand starting at position 3277 of SEQ ID NO: 3831
gagguaggaucugagauuu

SEQ ID NO: 298161 - RNA, 19 nt, Artificial Sequence
  Description of Artificial Sequence: Synthetic oligonucleotide
  Antisense strand to SEQ ID NO: 298160
aaaucucagauccuaccuc

SEQ ID NO: 298162 - RNA, 19 nt, Artificial Sequence
  Description of Artificial Sequence: Synthetic oligonucleotide
  Sense strand starting at position 3468 of SEQ ID NO: 3831
cucggaguagcuuggaaua

SEQ ID NO: 298163 - RNA, 19 nt, Artificial Sequence
  Description of Artificial Sequence: Synthetic oligonucleotide
  Antisense strand to SEQ ID NO: 298162
uauuccaagcuacuccgag

SEQ ID NO: 298164 - RNA, 19 nt, Artificial Sequence
  Description of Artificial Sequence: Synthetic oligonucleotide
  Sense strand starting at position 3671 of SEQ ID NO: 3831
ccaggugaugucgaugaag

SEQ ID NO: 298165 - RNA, 19 nt, Artificial Sequence
  Description of Artificial Sequence: Synthetic oligonucleotide
  Antisense strand to SEQ ID NO: 298164
cuucaucgacaucaccugg

SEQ ID NO: 298166 - RNA, 19 nt, Artificial Sequence
  Description of Artificial Sequence: Synthetic oligonucleotide
  Sense strand starting at position 3766 of SEQ ID NO: 3831
agaggaaguccaggcuaaa

SEQ ID NO: 298167 - RNA, 19 nt, Artificial Sequence
  Description of Artificial Sequence: Synthetic oligonucleotide
  Antisense strand to SEQ ID NO: 298166
uuuagccuggacuuccucu

SEQ ID NO: 298168 - RNA, 19 nt, Artificial Sequence
  Description of Artificial Sequence: Synthetic oligonucleotide
  Sense strand starting at position 3836 of SEQ ID NO: 3831
ccaggaauccgacacguga

SEQ ID NO: 298169 - RNA, 19 nt, Artificial Sequence
  Description of Artificial Sequence: Synthetic oligonucleotide
  Antisense strand to SEQ ID NO: 298168
ucacgugucggauuccugg

SEQ ID NO: 298170 - RNA, 19 nt, Artificial Sequence
  Description of Artificial Sequence: Synthetic oligonucleotide
  Sense strand starting at position 3857 of SEQ ID NO: 3831
gucuguccgccgucucaga

SEQ ID NO: 298171 - RNA, 19 nt, Artificial Sequence
  Description of Artificial Sequence: Synthetic oligonucleotide
  Antisense strand to SEQ ID NO: 298170
ucugagacggcggacagac

SEQ ID NO: 298172 - RNA, 19 nt, Artificial Sequence
  Description of Artificial Sequence: Synthetic oligonucleotide
  Sense strand starting at position 12 of SEQ ID NO: 3832
uuagaaacgucagccauaa

SEQ ID NO: 298173 - RNA, 19 nt, Artificial Sequence
  Description of Artificial Sequence: Synthetic oligonucleotide
  Antisense strand to SEQ ID NO: 298172
uuauggcugacguuucuaa

SEQ ID NO: 298174 - RNA, 19 nt, Artificial Sequence
  Description of Artificial Sequence: Synthetic oligonucleotide
  Sense strand starting at position 69 of SEQ ID NO: 3832
uaacacagcgauuagucaa

SEQ ID NO: 298175 - RNA, 19 nt, Artificial Sequence
  Description of Artificial Sequence: Synthetic oligonucleotide
  Antisense strand to SEQ ID NO: 298174
uugacuaaucgcuguguua

SEQ ID NO: 298176 - RNA, 19 nt, Artificial Sequence
  Description of Artificial Sequence: Synthetic oligonucleotide
  Sense strand starting at position 262 of SEQ ID NO: 3832
uuggaucccuacuuuagaa

SEQ ID NO: 298177 - RNA, 19 nt, Artificial Sequence
  Description of Artificial Sequence: Synthetic oligonucleotide
  Antisense strand to SEQ ID NO: 298176
uucuaaaguagggauccaa

SEQ ID NO: 298178 - RNA, 19 nt, Artificial Sequence
  Description of Artificial Sequence: Synthetic oligonucleotide
  Sense strand starting at position 399 of SEQ ID NO: 3832
cgaggcagaugaguuuaaa

SEQ ID NO: 298179 - RNA, 19 nt, Artificial Sequence
  Description of Artificial Sequence: Synthetic oligonucleotide
  Antisense strand to SEQ ID NO: 298178
uuuaaacucaucugccucg

SEQ ID NO: 298180 - RNA, 19 nt, Artificial Sequence
  Description of Artificial Sequence: Synthetic oligonucleotide
  Sense strand starting at position 470 of SEQ ID NO: 3832
ggguacacggucuaauauu

SEQ ID NO: 298181 - RNA, 19 nt, Artificial Sequence
  Description of Artificial Sequence: Synthetic oligonucleotide
  Antisense strand to SEQ ID NO: 298180
aauauuagaccguguaccc

SEQ ID NO: 298182 - RNA, 19 nt, Artificial Sequence
  Description of Artificial Sequence: Synthetic oligonucleotide
  Sense strand starting at position 547 of SEQ ID NO: 3832
caguguuaucaaugagaaa

SEQ ID NO: 298183 - RNA, 19 nt, Artificial Sequence
  Description of Artificial Sequence: Synthetic oligonucleotide
  Antisense strand to SEQ ID NO: 298182
uuucucauugauaacacug

SEQ ID NO: 298184 - RNA, 19 nt, Artificial Sequence
  Description of Artificial Sequence: Synthetic oligonucleotide
  Sense strand starting at position 558 of SEQ ID NO: 3832
augagaaaguagguuuauu

SEQ ID NO: 298185 - RNA, 19 nt, Artificial Sequence
  Description of Artificial Sequence: Synthetic oligonucleotide
  Antisense strand to SEQ ID NO: 298184
aauaaaccuacuuucucau

SEQ ID NO: 298186 - RNA, 19 nt, Artificial Sequence
  Description of Artificial Sequence: Synthetic oligonucleotide
  Sense strand starting at position 754 of SEQ ID NO: 3832
uaaacauuacgucgacaaa

SEQ ID NO: 298187 - RNA, 19 nt, Artificial Sequence
  Description of Artificial Sequence: Synthetic oligonucleotide
  Antisense strand to SEQ ID NO: 298186
uuugucgacguaauguuua

SEQ ID NO: 298188 - RNA, 19 nt, Artificial Sequence
  Description of Artificial Sequence: Synthetic oligonucleotide
  Sense strand starting at position 773 of SEQ ID NO: 3832
acaaucggugaaugugaua

SEQ ID NO: 298189 - RNA, 19 nt, Artificial Sequence
  Description of Artificial Sequence: Synthetic oligonucleotide
  Antisense strand to SEQ ID NO: 298188
uaucacauucaccgauugu

SEQ ID NO: 298190 - RNA, 19 nt, Artificial Sequence
  Description of Artificial Sequence: Synthetic oligonucleotide
  Sense strand starting at position 797 of SEQ ID NO: 3832
uccucauguguuuaaauau

SEQ ID NO: 298191 - RNA, 19 nt, Artificial Sequence
  Description of Artificial Sequence: Synthetic oligonucleotide
  Antisense strand to SEQ ID NO: 298190
auauuuaaacacaugagga

SEQ ID NO: 298192 - RNA, 19 nt, Artificial Sequence
  Description of Artificial Sequence: Synthetic oligonucleotide
  Sense strand starting at position 890 of SEQ ID NO: 3832
gccucuaguccagacagaa

SEQ ID NO: 298193 - RNA, 19 nt, Artificial Sequence
  Description of Artificial Sequence: Synthetic oligonucleotide
  Antisense strand to SEQ ID NO: 298192
uucugucuggacuagaggc

SEQ ID NO: 298194 - RNA, 19 nt, Artificial Sequence
  Description of Artificial Sequence: Synthetic oligonucleotide
  Sense strand starting at position 956 of SEQ ID NO: 3832
cuacuucucccucggagga

SEQ ID NO: 298195 - RNA, 19 nt, Artificial Sequence
  Description of Artificial Sequence: Synthetic oligonucleotide
  Antisense strand to SEQ ID NO: 298194
uccuccgagggagaaguag

SEQ ID NO: 298196 - RNA, 19 nt, Artificial Sequence
  Description of Artificial Sequence: Synthetic oligonucleotide
  Sense strand starting at position 957 of SEQ ID NO: 3832
uacuucucccucggaggaa

SEQ ID NO: 298197 - RNA, 19 nt, Artificial Sequence
  Description of Artificial Sequence: Synthetic oligonucleotide
  Antisense strand to SEQ ID NO: 298196
uuccuccgagggagaagua

SEQ ID NO: 298198 - RNA, 19 nt, Artificial Sequence
  Description of Artificial Sequence: Synthetic oligonucleotide
  Sense strand starting at position 1049 of SEQ ID NO: 3832
agugguauaguuugaggau

SEQ ID NO: 298199 - RNA, 19 nt, Artificial Sequence
  Description of Artificial Sequence: Synthetic oligonucleotide
  Antisense strand to SEQ ID NO: 298198
auccucaaacuauaccacu

SEQ ID NO: 298200 - RNA, 19 nt, Artificial Sequence
  Description of Artificial Sequence: Synthetic oligonucleotide
  Sense strand starting at position 1064 of SEQ ID NO: 3832
ggaugagucgugcacacua

SEQ ID NO: 298201 - RNA, 19 nt, Artificial Sequence
  Description of Artificial Sequence: Synthetic oligonucleotide
  Antisense strand to SEQ ID NO: 298200
uagugugcacgacucaucc

SEQ ID NO: 298202 - RNA, 19 nt, Artificial Sequence
  Description of Artificial Sequence: Synthetic oligonucleotide
  Sense strand starting at position 1136 of SEQ ID NO: 3832
agcuguagcccgucuugau

SEQ ID NO: 298203 - RNA, 19 nt, Artificial Sequence
  Description of Artificial Sequence: Synthetic oligonucleotide
  Antisense strand to SEQ ID NO: 298202
aucaagacgggcuacagcu

SEQ ID NO: 298204 - RNA, 19 nt, Artificial Sequence
  Description of Artificial Sequence: Synthetic oligonucleotide
  Sense strand starting at position 1216 of SEQ ID NO: 3832
acgaacuuucucuagacga

SEQ ID NO: 298205 - RNA, 19 nt, Artificial Sequence
  Description of Artificial Sequence: Synthetic oligonucleotide
  Antisense strand to SEQ ID NO: 298204
ucgucuagagaaaguucgu

SEQ ID NO: 298206 - RNA, 19 nt, Artificial Sequence
  Description of Artificial Sequence: Synthetic oligonucleotide
  Sense strand starting at position 1951 of SEQ ID NO: 3832
cuugcagucgcgguuugaa

SEQ ID NO: 298207 - RNA, 19 nt, Artificial Sequence
  Description of Artificial Sequence: Synthetic oligonucleotide
  Antisense strand to SEQ ID NO: 298206
uucaaaccgcgacugcaag

SEQ ID NO: 298208 - RNA, 19 nt, Artificial Sequence
  Description of Artificial Sequence: Synthetic oligonucleotide
  Sense strand starting at position 2308 of SEQ ID NO: 3832
aggugugaauauccggaga

SEQ ID NO: 298209 - RNA, 19 nt, Artificial Sequence
  Description of Artificial Sequence: Synthetic oligonucleotide
  Antisense strand to SEQ ID NO: 298208
ucuccggauauucacaccu

SEQ ID NO: 298210 - RNA, 19 nt, Artificial Sequence
  Description of Artificial Sequence: Synthetic oligonucleotide
  Sense strand starting at position 2407 of SEQ ID NO: 3832
uucugacucuucuugagag

SEQ ID NO: 298211 - RNA, 19 nt, Artificial Sequence
  Description of Artificial Sequence: Synthetic oligonucleotide
  Antisense strand to SEQ ID NO: 298210
cucucaagaagagucagaa

SEQ ID NO: 298212 - RNA, 19 nt, Artificial Sequence
  Description of Artificial Sequence: Synthetic oligonucleotide
  Sense strand starting at position 2417 of SEQ ID NO: 3832
ucuugagagucuuccuuag

SEQ ID NO: 298213 - RNA, 19 nt, Artificial Sequence
  Description of Artificial Sequence: Synthetic oligonucleotide
  Antisense strand to SEQ ID NO: 298212
cuaaggaagacucucaaga

SEQ ID NO: 298214 - RNA, 19 nt, Artificial Sequence
  Description of Artificial Sequence: Synthetic oligonucleotide
  Sense strand starting at position 2419 of SEQ ID NO: 3832
uugagagucuuccuuagga

SEQ ID NO: 298215 - RNA, 19 nt, Artificial Sequence
  Description of Artificial Sequence: Synthetic oligonucleotide
  Antisense strand to SEQ ID NO: 298214
uccuaaggaagacucucaa

SEQ ID NO: 298216 - RNA, 19 nt, Artificial Sequence
  Description of Artificial Sequence: Synthetic oligonucleotide
  Sense strand starting at position 2633 of SEQ ID NO: 3832
cauuuauagugcuaaggaa

SEQ ID NO: 298217 - RNA, 19 nt, Artificial Sequence
  Description of Artificial Sequence: Synthetic oligonucleotide
  Antisense strand to SEQ ID NO: 298216
uuccuuagcacuauaaaug

SEQ ID NO: 298218 - RNA, 19 nt, Artificial Sequence
  Description of Artificial Sequence: Synthetic oligonucleotide
  Sense strand starting at position 2684 of SEQ ID NO: 3832
ucuguuauccuuugaagac

SEQ ID NO: 298219 - RNA, 19 nt, Artificial Sequence
  Description of Artificial Sequence: Synthetic oligonucleotide
  Antisense strand to SEQ ID NO: 298218
gucuucaaaggauaacaga

SEQ ID NO: 298220 - RNA, 19 nt, Artificial Sequence
  Description of Artificial Sequence: Synthetic oligonucleotide
  Sense strand starting at position 2715 of SEQ ID NO: 3832
caaaguucugugcaagaca

SEQ ID NO: 298221 - RNA, 19 nt, Artificial Sequence
  Description of Artificial Sequence: Synthetic oligonucleotide
  Antisense strand to SEQ ID NO: 298220
ugucuugcacagaacuuug

SEQ ID NO: 298222 - RNA, 19 nt, Artificial Sequence
  Description of Artificial Sequence: Synthetic oligonucleotide
  Sense strand starting at position 2718 of SEQ ID NO: 3832
aguucugugcaagacacaa

SEQ ID NO: 298223 - RNA, 19 nt, Artificial Sequence
  Description of Artificial Sequence: Synthetic oligonucleotide
  Antisense strand to SEQ ID NO: 298222
uugugucuugcacagaacu

SEQ ID NO: 298224 - RNA, 19 nt, Artificial Sequence
  Description of Artificial Sequence: Synthetic oligonucleotide
  Sense strand starting at position 2802 of SEQ ID NO: 3832
gggauuaguuauguaaucu

SEQ ID NO: 298225 - RNA, 19 nt, Artificial Sequence
  Description of Artificial Sequence: Synthetic oligonucleotide
  Antisense strand to SEQ ID NO: 298224
agauuacauaacuaauccc

SEQ ID NO: 298226 - RNA, 19 nt, Artificial Sequence
  Description of Artificial Sequence: Synthetic oligonucleotide
  Sense strand starting at position 2806 of SEQ ID NO: 3832
uuaguuauguaaucuagga

SEQ ID NO: 298227 - RNA, 19 nt, Artificial Sequence
  Description of Artificial Sequence: Synthetic oligonucleotide
  Antisense strand to SEQ ID NO: 298226
uccuagauuacauaacuaa

SEQ ID NO: 298228 - RNA, 19 nt, Artificial Sequence
  Description of Artificial Sequence: Synthetic oligonucleotide
  Sense strand starting at position 2833 of SEQ ID NO: 3832
agaggacauuuacgauaau

SEQ ID NO: 298229 - RNA, 19 nt, Artificial Sequence
  Description of Artificial Sequence: Synthetic oligonucleotide
  Antisense strand to SEQ ID NO: 298228
auuaucguaaauguccucu

SEQ ID NO: 298230 - RNA, 19 nt, Artificial Sequence
  Description of Artificial Sequence: Synthetic oligonucleotide
  Sense strand starting at position 2834 of SEQ ID NO: 3832
gaggacauuuacgauaauu

SEQ ID NO: 298231 - RNA, 19 nt, Artificial Sequence
  Description of Artificial Sequence: Synthetic oligonucleotide
  Antisense strand to SEQ ID NO: 298230
aauuaucguaaauguccuc

SEQ ID NO: 298232 - RNA, 19 nt, Artificial Sequence
  Description of Artificial Sequence: Synthetic oligonucleotide
  Sense strand starting at position 2889 of SEQ ID NO: 3832
ggagucguccucuugcuuu

SEQ ID NO: 298233 - RNA, 19 nt, Artificial Sequence
  Description of Artificial Sequence: Synthetic oligonucleotide
  Antisense strand to SEQ ID NO: 298232
aaagcaagaggacgacucc

SEQ ID NO: 298234 - RNA, 19 nt, Artificial Sequence
  Description of Artificial Sequence: Synthetic oligonucleotide
  Sense strand starting at position 2953 of SEQ ID NO: 3832
guucuaucccaguaagcca

SEQ ID NO: 298235 - RNA, 19 nt, Artificial Sequence
  Description of Artificial Sequence: Synthetic oligonucleotide
  Antisense strand to SEQ ID NO: 298234
uggcuuacugggauagaac

SEQ ID NO: 298236 - RNA, 19 nt, Artificial Sequence
  Description of Artificial Sequence: Synthetic oligonucleotide
  Sense strand starting at position 3027 of SEQ ID NO: 3832
aaagguauagaaugcauca

SEQ ID NO: 298237 - RNA, 19 nt, Artificial Sequence
  Description of Artificial Sequence: Synthetic oligonucleotide
  Antisense strand to SEQ ID NO: 298236
ugaugcauucuauaccuuu

SEQ ID NO: 298238 - RNA, 19 nt, Artificial Sequence
  Description of Artificial Sequence: Synthetic oligonucleotide
  Sense strand starting at position 3066 of SEQ ID NO: 3832
uuuguuguuacuuagguua

SEQ ID NO: 298239 - RNA, 19 nt, Artificial Sequence
  Description of Artificial Sequence: Synthetic oligonucleotide
  Antisense strand to SEQ ID NO: 298238
uaaccuaaguaacaacaaa

SEQ ID NO: 298240 - RNA, 19 nt, Artificial Sequence
  Description of Artificial Sequence: Synthetic oligonucleotide
  Sense strand starting at position 3133 of SEQ ID NO: 3832
ggagaauauugcuuccauc

SEQ ID NO: 298241 - RNA, 19 nt, Artificial Sequence
  Description of Artificial Sequence: Synthetic oligonucleotide
  Antisense strand to SEQ ID NO: 298240
gauggaagcaauauucucc

SEQ ID NO: 298242 - RNA, 19 nt, Artificial Sequence
  Description of Artificial Sequence: Synthetic oligonucleotide
  Sense strand starting at position 3255 of SEQ ID NO: 3832
auccguaagcaaugagacu

SEQ ID NO: 298243 - RNA, 19 nt, Artificial Sequence
  Description of Artificial Sequence: Synthetic oligonucleotide
  Antisense strand to SEQ ID NO: 298242
agucucauugcuuacggau

SEQ ID NO: 298244 - RNA, 19 nt, Artificial Sequence
  Description of Artificial Sequence: Synthetic oligonucleotide
  Sense strand starting at position 3266 of SEQ ID NO: 3832
augagacuguucccaucuu

SEQ ID NO: 298245 - RNA, 19 nt, Artificial Sequence
  Description of Artificial Sequence: Synthetic oligonucleotide
  Antisense strand to SEQ ID NO: 298244
aagaugggaacagucucau

SEQ ID NO: 298246 - RNA, 19 nt, Artificial Sequence
  Description of Artificial Sequence: Synthetic oligonucleotide
  Sense strand starting at position 3361 of SEQ ID NO: 3832
aggauuacaucauuauggu

SEQ ID NO: 298247 - RNA, 19 nt, Artificial Sequence
  Description of Artificial Sequence: Synthetic oligonucleotide
  Antisense strand to SEQ ID NO: 298246
accauaaugauguaauccu

SEQ ID NO: 298248 - RNA, 19 nt, Artificial Sequence
  Description of Artificial Sequence: Synthetic oligonucleotide
  Sense strand starting at position 3550 of SEQ ID NO: 3832
aguccucuuggucacaaua

SEQ ID NO: 298249 - RNA, 19 nt, Artificial Sequence
  Description of Artificial Sequence: Synthetic oligonucleotide
  Antisense strand to SEQ ID NO: 298248
uauugugaccaagaggacu

SEQ ID NO: 298250 - RNA, 19 nt, Artificial Sequence
  Description of Artificial Sequence: Synthetic oligonucleotide
  Sense strand starting at position 3909 of SEQ ID NO: 3832
ggcacugugguucaaguaa

SEQ ID NO: 298251 - RNA, 19 nt, Artificial Sequence
  Description of Artificial Sequence: Synthetic oligonucleotide
  Antisense strand to SEQ ID NO: 298250
uuacuugaaccacagugcc

SEQ ID NO: 298252 - RNA, 19 nt, Artificial Sequence
  Description of Artificial Sequence: Synthetic oligonucleotide
  Sense strand starting at position 79 of SEQ ID NO: 3834
cugugacccaaaggaguua

SEQ ID NO: 298253 - RNA, 19 nt, Artificial Sequence
  Description of Artificial Sequence: Synthetic oligonucleotide
  Antisense strand to SEQ ID NO: 298252
uaacuccuuugggucacag

SEQ ID NO: 298254 - RNA, 19 nt, Artificial Sequence
  Description of Artificial Sequence: Synthetic oligonucleotide
  Sense strand starting at position 90 of SEQ ID NO: 3834
aggaguuauuucugcaguu

SEQ ID NO: 298255 - RNA, 19 nt, Artificial Sequence
  Description of Artificial Sequence: Synthetic oligonucleotide
  Antisense strand to SEQ ID NO: 298254
aacugcagaaauaacuccu

SEQ ID NO: 298256 - RNA, 19 nt, Artificial Sequence
  Description of Artificial Sequence: Synthetic oligonucleotide
  Sense strand starting at position 91 of SEQ ID NO: 3834
ggaguuauuucugcaguuc

SEQ ID NO: 298257 - RNA, 19 nt, Artificial Sequence
  Description of Artificial Sequence: Synthetic oligonucleotide
  Antisense strand to SEQ ID NO: 298256
gaacugcagaaauaacucc

SEQ ID NO: 298258 - RNA, 19 nt, Artificial Sequence
  Description of Artificial Sequence: Synthetic oligonucleotide
  Sense strand starting at position 454 of SEQ ID NO: 3834
ccagcaccuuagucaugua

SEQ ID NO: 298259 - RNA, 19 nt, Artificial Sequence
  Description of Artificial Sequence: Synthetic oligonucleotide
  Antisense strand to SEQ ID NO: 298258
uacaugacuaaggugcugg

SEQ ID NO: 298260 - RNA, 19 nt, Artificial Sequence
  Description of Artificial Sequence: Synthetic oligonucleotide
  Sense strand starting at position 457 of SEQ ID NO: 3834
gcaccuuagucauguaagu

SEQ ID NO: 298261 - RNA, 19 nt, Artificial Sequence
  Description of Artificial Sequence: Synthetic oligonucleotide
  Antisense strand to SEQ ID NO: 298260
acuuacaugacuaaggugc

SEQ ID NO: 298262 - RNA, 19 nt, Artificial Sequence
  Description of Artificial Sequence: Synthetic oligonucleotide
  Sense strand starting at position 464 of SEQ ID NO: 3834
agucauguaaguuaccaga

SEQ ID NO: 298263 - RNA, 19 nt, Artificial Sequence
  Description of Artificial Sequence: Synthetic oligonucleotide
  Antisense strand to SEQ ID NO: 298262
ucugguaacuuacaugacu

SEQ ID NO: 298264 - RNA, 19 nt, Artificial Sequence
  Description of Artificial Sequence: Synthetic oligonucleotide
  Sense strand starting at position 466 of SEQ ID NO: 3834
ucauguaaguuaccagaua

SEQ ID NO: 298265 - RNA, 19 nt, Artificial Sequence
  Description of Artificial Sequence: Synthetic oligonucleotide
  Antisense strand to SEQ ID NO: 298264
uaucugguaacuuacauga

SEQ ID NO: 298266 - RNA, 19 nt, Artificial Sequence
  Description of Artificial Sequence: Synthetic oligonucleotide
  Sense strand starting at position 622 of SEQ ID NO: 3834
uccgguuuccuccaaagca

SEQ ID NO: 298267 - RNA, 19 nt, Artificial Sequence
  Description of Artificial Sequence: Synthetic oligonucleotide
  Antisense strand to SEQ ID NO: 298266
ugcuuuggaggaaaccgga

SEQ ID NO: 298268 - RNA, 19 nt, Artificial Sequence
  Description of Artificial Sequence: Synthetic oligonucleotide
  Sense strand starting at position 714 of SEQ ID NO: 3834
agcacauaggagugaacaa

SEQ ID NO: 298269 - RNA, 19 nt, Artificial Sequence
  Description of Artificial Sequence: Synthetic oligonucleotide
  Antisense strand to SEQ ID NO: 298268
uuguucacuccuaugugcu

SEQ ID NO: 298270 - RNA, 19 nt, Artificial Sequence
  Description of Artificial Sequence: Synthetic oligonucleotide
  Sense strand starting at position 752 of SEQ ID NO: 3834
cggcgauuccaacgccuua

SEQ ID NO: 298271 - RNA, 19 nt, Artificial Sequence
  Description of Artificial Sequence: Synthetic oligonucleotide
  Antisense strand to SEQ ID NO: 298270
uaaggcguuggaaucgccg

SEQ ID NO: 298272 - RNA, 19 nt, Artificial Sequence
  Description of Artificial Sequence: Synthetic oligonucleotide
  Sense strand starting at position 997 of SEQ ID NO: 3834
gcuuaaagguggcuccaua

SEQ ID NO: 298273 - RNA, 19 nt, Artificial Sequence
  Description of Artificial Sequence: Synthetic oligonucleotide
  Antisense strand to SEQ ID NO: 298272
uauggagccaccuuuaagc

SEQ ID NO: 298274 - RNA, 19 nt, Artificial Sequence
  Description of Artificial Sequence: Synthetic oligonucleotide
  Sense strand starting at position 1018 of SEQ ID NO: 3834
ggaaacgacuucuuuaaag

SEQ ID NO: 298275 - RNA, 19 nt, Artificial Sequence
  Description of Artificial Sequence: Synthetic oligonucleotide
  Antisense strand to SEQ ID NO: 298274
cuuuaaagaagucguuucc

SEQ ID NO: 298276 - RNA, 19 nt, Artificial Sequence
  Description of Artificial Sequence: Synthetic oligonucleotide
  Sense strand starting at position 1040 of SEQ ID NO: 3834
aaagaugagucucauguuc

SEQ ID NO: 298277 - RNA, 19 nt, Artificial Sequence
  Description of Artificial Sequence: Synthetic oligonucleotide
  Antisense strand to SEQ ID NO: 298276
gaacaugagacucaucuuu

SEQ ID NO: 298278 - RNA, 19 nt, Artificial Sequence
  Description of Artificial Sequence: Synthetic oligonucleotide
  Sense strand starting at position 1046 of SEQ ID NO: 3834
gagucucauguucgggcaa

SEQ ID NO: 298279 - RNA, 19 nt, Artificial Sequence
  Description of Artificial Sequence: Synthetic oligonucleotide
  Antisense strand to SEQ ID NO: 298278
uugcccgaacaugagacuc

SEQ ID NO: 298280 - RNA, 19 nt, Artificial Sequence
  Description of Artificial Sequence: Synthetic oligonucleotide
  Sense strand starting at position 1080 of SEQ ID NO: 3834
guuaaacgguccugacaga

SEQ ID NO: 298281 - RNA, 19 nt, Artificial Sequence
  Description of Artificial Sequence: Synthetic oligonucleotide
  Antisense strand to SEQ ID NO: 298280
ucugucaggaccguuuaac

SEQ ID NO: 298282 - RNA, 19 nt, Artificial Sequence
  Description of Artificial Sequence: Synthetic oligonucleotide
  Sense strand starting at position 1433 of SEQ ID NO: 3834
gcgagcuucugccacgcaa

SEQ ID NO: 298283 - RNA, 19 nt, Artificial Sequence
  Description of Artificial Sequence: Synthetic oligonucleotide
  Antisense strand to SEQ ID NO: 298282
uugcguggcagaagcucgc

SEQ ID NO: 298284 - RNA, 19 nt, Artificial Sequence
  Description of Artificial Sequence: Synthetic oligonucleotide
  Sense strand starting at position 1606 of SEQ ID NO: 3834
gugagaggccgcuagucuu

SEQ ID NO: 298285 - RNA, 19 nt, Artificial Sequence
  Description of Artificial Sequence: Synthetic oligonucleotide
  Antisense strand to SEQ ID NO: 298284
aagacuagcggccucucac

SEQ ID NO: 298286 - RNA, 19 nt, Artificial Sequence
  Description of Artificial Sequence: Synthetic oligonucleotide
  Sense strand starting at position 2405 of SEQ ID NO: 3834
aguccugcucccgaaaggu

SEQ ID NO: 298287 - RNA, 19 nt, Artificial Sequence
  Description of Artificial Sequence: Synthetic oligonucleotide
  Antisense strand to SEQ ID NO: 298286
accuuucgggagcaggacu

SEQ ID NO: 298288 - RNA, 19 nt, Artificial Sequence
  Description of Artificial Sequence: Synthetic oligonucleotide
  Sense strand starting at position 2813 of SEQ ID NO: 3834
gcccauuccuugggcgagu

SEQ ID NO: 298289 - RNA, 19 nt, Artificial Sequence
  Description of Artificial Sequence: Synthetic oligonucleotide
  Antisense strand to SEQ ID NO: 298288
acucgcccaaggaaugggc

SEQ ID NO: 298290 - RNA, 19 nt, Artificial Sequence
  Description of Artificial Sequence: Synthetic oligonucleotide
  Sense strand starting at position 3094 of SEQ ID NO: 3834
ccaccuguccggugaggaa

SEQ ID NO: 298291 - RNA, 19 nt, Artificial Sequence
  Description of Artificial Sequence: Synthetic oligonucleotide
  Antisense strand to SEQ ID NO: 298290
uuccucaccggacaggugg

SEQ ID NO: 298292 - RNA, 19 nt, Artificial Sequence
  Description of Artificial Sequence: Synthetic oligonucleotide
  Sense strand starting at position 3206 of SEQ ID NO: 3834
cuccuucuucgagaggguu

SEQ ID NO: 298293 - RNA, 19 nt, Artificial Sequence
  Description of Artificial Sequence: Synthetic oligonucleotide
  Antisense strand to SEQ ID NO: 298292
aacccucucgaagaaggag

SEQ ID NO: 298294 - RNA, 19 nt, Artificial Sequence
  Description of Artificial Sequence: Synthetic oligonucleotide
  Sense strand starting at position 3248 of SEQ ID NO: 3834
gugcgugucuucucauggu

SEQ ID NO: 298295 - RNA, 19 nt, Artificial Sequence
  Description of Artificial Sequence: Synthetic oligonucleotide
  Antisense strand to SEQ ID NO: 298294
accaugagaagacacgcac

SEQ ID NO: 298296 - RNA, 19 nt, Artificial Sequence
  Description of Artificial Sequence: Synthetic oligonucleotide
  Sense strand starting at position 3269 of SEQ ID NO: 3834
acugccgaguccuuuaaga

SEQ ID NO: 298297 - RNA, 19 nt, Artificial Sequence
  Description of Artificial Sequence: Synthetic oligonucleotide
  Antisense strand to SEQ ID NO: 298296
ucuuaaaggacucggcagu

SEQ ID NO: 298298 - RNA, 19 nt, Artificial Sequence
  Description of Artificial Sequence: Synthetic oligonucleotide
  Sense strand starting at position 3271 of SEQ ID NO: 3834
ugccgaguccuuuaagaag

SEQ ID NO: 298299 - RNA, 19 nt, Artificial Sequence
  Description of Artificial Sequence: Synthetic oligonucleotide
  Antisense strand to SEQ ID NO: 298298
cuucuuaaaggacucggca

SEQ ID NO: 298300 - RNA, 19 nt, Artificial Sequence
  Description of Artificial Sequence: Synthetic oligonucleotide
  Sense strand starting at position 3274 of SEQ ID NO: 3834
cgaguccuuuaagaagcua

SEQ ID NO: 298301 - RNA, 19 nt, Artificial Sequence
  Description of Artificial Sequence: Synthetic oligonucleotide
  Antisense strand to SEQ ID NO: 298300
uagcuucuuaaaggacucg

SEQ ID NO: 298302 - RNA, 19 nt, Artificial Sequence
  Description of Artificial Sequence: Synthetic oligonucleotide
  Sense strand starting at position 3288 of SEQ ID NO: 3834
agcuaugcuucccugucau

SEQ ID NO: 298303 - RNA, 19 nt, Artificial Sequence
  Description of Artificial Sequence: Synthetic oligonucleotide
  Antisense strand to SEQ ID NO: 298302
augacagggaagcauagcu

SEQ ID NO: 298304 - RNA, 19 nt, Artificial Sequence
  Description of Artificial Sequence: Synthetic oligonucleotide
  Sense strand starting at position 3300 of SEQ ID NO: 3834
cugucaugcguccaggaca

SEQ ID NO: 298305 - RNA, 19 nt, Artificial Sequence
  Description of Artificial Sequence: Synthetic oligonucleotide
  Antisense strand to SEQ ID NO: 298304
uguccuggacgcaugacag

SEQ ID NO: 298306 - RNA, 19 nt, Artificial Sequence
  Description of Artificial Sequence: Synthetic oligonucleotide
  Sense strand starting at position 3381 of SEQ ID NO: 3834
ggcuuuguuugugcuuuga

SEQ ID NO: 298307 - RNA, 19 nt, Artificial Sequence
  Description of Artificial Sequence: Synthetic oligonucleotide
  Antisense strand to SEQ ID NO: 298306
ucaaagcacaaacaaagcc

SEQ ID NO: 298308 - RNA, 19 nt, Artificial Sequence
  Description of Artificial Sequence: Synthetic oligonucleotide
  Sense strand starting at position 3383 of SEQ ID NO: 3834
cuuuguuugugcuuugacu

SEQ ID NO: 298309 - RNA, 19 nt, Artificial Sequence
  Description of Artificial Sequence: Synthetic oligonucleotide
  Antisense strand to SEQ ID NO: 298308
agucaaagcacaaacaaag

SEQ ID NO: 298310 - RNA, 19 nt, Artificial Sequence
  Description of Artificial Sequence: Synthetic oligonucleotide
  Sense strand starting at position 3459 of SEQ ID NO: 3834
acggcaggcgcucaguaau

SEQ ID NO: 298311 - RNA, 19 nt, Artificial Sequence
  Description of Artificial Sequence: Synthetic oligonucleotide
  Antisense strand to SEQ ID NO: 298310
auuacugagcgccugccgu

SEQ ID NO: 298312 - RNA, 19 nt, Artificial Sequence
  Description of Artificial Sequence: Synthetic oligonucleotide
  Sense strand starting at position 3462 of SEQ ID NO: 3834
gcaggcgcucaguaauguu

SEQ ID NO: 298313 - RNA, 19 nt, Artificial Sequence
  Description of Artificial Sequence: Synthetic oligonucleotide
  Antisense strand to SEQ ID NO: 298312
aacauuacugagcgccugc

SEQ ID NO: 298314 - RNA, 19 nt, Artificial Sequence
  Description of Artificial Sequence: Synthetic oligonucleotide
  Sense strand starting at position 3492 of SEQ ID NO: 3834
uguguaaaugcaugaagau

SEQ ID NO: 298315 - RNA, 19 nt, Artificial Sequence
  Description of Artificial Sequence: Synthetic oligonucleotide
  Antisense strand to SEQ ID NO: 298314
aucuucaugcauuuacaca

SEQ ID NO: 298316 - RNA, 19 nt, Artificial Sequence
  Description of Artificial Sequence: Synthetic oligonucleotide
  Sense strand starting at position 3493 of SEQ ID NO: 3834
guguaaaugcaugaagaua

SEQ ID NO: 298317 - RNA, 19 nt, Artificial Sequence
  Description of Artificial Sequence: Synthetic oligonucleotide
  Antisense strand to SEQ ID NO: 298316
uaucuucaugcauuuacac

SEQ ID NO: 298318 - RNA, 19 nt, Artificial Sequence
  Description of Artificial Sequence: Synthetic oligonucleotide
  Sense strand starting at position 3501 of SEQ ID NO: 3834
gcaugaagauaauauaugu

SEQ ID NO: 298319 - RNA, 19 nt, Artificial Sequence
  Description of Artificial Sequence: Synthetic oligonucleotide
  Antisense strand to SEQ ID NO: 298318
acauauauuaucuucaugc

SEQ ID NO: 298320 - RNA, 19 nt, Artificial Sequence
  Description of Artificial Sequence: Synthetic oligonucleotide
  Sense strand starting at position 3556 of SEQ ID NO: 3834
ggccuucguguggucagua

SEQ ID NO: 298321 - RNA, 19 nt, Artificial Sequence
  Description of Artificial Sequence: Synthetic oligonucleotide
  Antisense strand to SEQ ID NO: 298320
uacugaccacacgaaggcc

SEQ ID NO: 298322 - RNA, 19 nt, Artificial Sequence
  Description of Artificial Sequence: Synthetic oligonucleotide
  Sense strand starting at position 3557 of SEQ ID NO: 3834
gccuucguguggucaguaa

SEQ ID NO: 298323 - RNA, 19 nt, Artificial Sequence
  Description of Artificial Sequence: Synthetic oligonucleotide
  Antisense strand to SEQ ID NO: 298322
uuacugaccacacgaaggc

SEQ ID NO: 298324 - RNA, 19 nt, Artificial Sequence
  Description of Artificial Sequence: Synthetic oligonucleotide
  Sense strand starting at position 3568 of SEQ ID NO: 3834
gucaguaaucgcugcacuu

SEQ ID NO: 298325 - RNA, 19 nt, Artificial Sequence
  Description of Artificial Sequence: Synthetic oligonucleotide
  Antisense strand to SEQ ID NO: 298324
aagugcagcgauuacugac

SEQ ID NO: 298326 - RNA, 19 nt, Artificial Sequence
  Description of Artificial Sequence: Synthetic oligonucleotide
  Sense strand starting at position 3587 of SEQ ID NO: 3834
uuccgaagugccuagaaga

SEQ ID NO: 298327 - RNA, 19 nt, Artificial Sequence
  Description of Artificial Sequence: Synthetic oligonucleotide
  Antisense strand to SEQ ID NO: 298326
ucuucuaggcacuucggaa

SEQ ID NO: 298328 - RNA, 19 nt, Artificial Sequence
  Description of Artificial Sequence: Synthetic oligonucleotide
  Sense strand starting at position 3817 of SEQ ID NO: 3834
guuggagguugcugugagu

SEQ ID NO: 298329 - RNA, 19 nt, Artificial Sequence
  Description of Artificial Sequence: Synthetic oligonucleotide
  Antisense strand to SEQ ID NO: 298328
acucacagcaaccuccaac

SEQ ID NO: 298330 - RNA, 19 nt, Artificial Sequence
  Description of Artificial Sequence: Synthetic oligonucleotide
  Sense strand starting at position 3835 of SEQ ID NO: 3834
ucaagaucaugccacagua

SEQ ID NO: 298331 - RNA, 19 nt, Artificial Sequence
  Description of Artificial Sequence: Synthetic oligonucleotide
  Antisense strand to SEQ ID NO: 298330
uacuguggcaugaucuuga

SEQ ID NO: 298332 - RNA, 19 nt, Artificial Sequence
  Description of Artificial Sequence: Synthetic oligonucleotide
  Sense strand starting at position 119 of SEQ ID NO: 3833
ccagcaccuuagucaugua

SEQ ID NO: 298333 - RNA, 19 nt, Artificial Sequence
  Description of Artificial Sequence: Synthetic oligonucleotide
  Antisense strand to SEQ ID NO: 298332
uacaugacuaaggugcugg

SEQ ID NO: 298334 - RNA, 19 nt, Artificial Sequence
  Description of Artificial Sequence: Synthetic oligonucleotide
  Sense strand starting at position 122 of SEQ ID NO: 3833
gcaccuuagucauguaagu

SEQ ID NO: 298335 - RNA, 19 nt, Artificial Sequence
  Description of Artificial Sequence: Synthetic oligonucleotide
  Antisense strand to SEQ ID NO: 298334
acuuacaugacuaaggugc

SEQ ID NO: 298336 - RNA, 19 nt, Artificial Sequence
  Description of Artificial Sequence: Synthetic oligonucleotide
  Sense strand starting at position 129 of SEQ ID NO: 3833
agucauguaaguuaccaga

SEQ ID NO: 298337 - RNA, 19 nt, Artificial Sequence
  Description of Artificial Sequence: Synthetic oligonucleotide
  Antisense strand to SEQ ID NO: 298336
ucugguaacuuacaugacu

SEQ ID NO: 298338 - RNA, 19 nt, Artificial Sequence
  Description of Artificial Sequence: Synthetic oligonucleotide
  Sense strand starting at position 131 of SEQ ID NO: 3833
ucauguaaguuaccagaua

SEQ ID NO: 298339 - RNA, 19 nt, Artificial Sequence
  Description of Artificial Sequence: Synthetic oligonucleotide
  Antisense strand to SEQ ID NO: 298338
uaucugguaacuuacauga

SEQ ID NO: 298340 - RNA, 19 nt, Artificial Sequence
  Description of Artificial Sequence: Synthetic oligonucleotide
  Sense strand starting at position 287 of SEQ ID NO: 3833
uccgguuuccuccaaagca

SEQ ID NO: 298341 - RNA, 19 nt, Artificial Sequence
  Description of Artificial Sequence: Synthetic oligonucleotide
  Antisense strand to SEQ ID NO: 298340
ugcuuuggaggaaaccgga

SEQ ID NO: 298342 - RNA, 19 nt, Artificial Sequence
  Description of Artificial Sequence: Synthetic oligonucleotide
  Sense strand starting at position 379 of SEQ ID NO: 3833
agcacauaggagugaacaa

SEQ ID NO: 298343 - RNA, 19 nt, Artificial Sequence
  Description of Artificial Sequence: Synthetic oligonucleotide
  Antisense strand to SEQ ID NO: 298342
uuguucacuccuaugugcu

SEQ ID NO: 298344 - RNA, 19 nt, Artificial Sequence
  Description of Artificial Sequence: Synthetic oligonucleotide
  Sense strand starting at position 417 of SEQ ID NO: 3833
cggcgauuccaacgccuua

SEQ ID NO: 298345 - RNA, 19 nt, Artificial Sequence
  Description of Artificial Sequence: Synthetic oligonucleotide
  Antisense strand to SEQ ID NO: 298344
uaaggcguuggaaucgccg

SEQ ID NO: 298346 - RNA, 19 nt, Artificial Sequence
  Description of Artificial Sequence: Synthetic oligonucleotide
  Sense strand starting at position 662 of SEQ ID NO: 3833
gcuuaaagguggcuccaua

SEQ ID NO: 298347 - RNA, 19 nt, Artificial Sequence
  Description of Artificial Sequence: Synthetic oligonucleotide
  Antisense strand to SEQ ID NO: 298346
uauggagccaccuuuaagc

SEQ ID NO: 298348 - RNA, 19 nt, Artificial Sequence
  Description of Artificial Sequence: Synthetic oligonucleotide
  Sense strand starting at position 683 of SEQ ID NO: 3833
ggaaacgacuucuuuaaag

SEQ ID NO: 298349 - RNA, 19 nt, Artificial Sequence
  Description of Artificial Sequence: Synthetic oligonucleotide
  Antisense strand to SEQ ID NO: 298348
cuuuaaagaagucguuucc

SEQ ID NO: 298350 - RNA, 19 nt, Artificial Sequence
  Description of Artificial Sequence: Synthetic oligonucleotide
  Sense strand starting at position 705 of SEQ ID NO: 3833
aaagaugagucucauguuc

SEQ ID NO: 298351 - RNA, 19 nt, Artificial Sequence
  Description of Artificial Sequence: Synthetic oligonucleotide
  Antisense strand to SEQ ID NO: 298350
gaacaugagacucaucuuu

SEQ ID NO: 298352 - RNA, 19 nt, Artificial Sequence
  Description of Artificial Sequence: Synthetic oligonucleotide
  Sense strand starting at position 711 of SEQ ID NO: 3833
gagucucauguucgggcaa

SEQ ID NO: 298353 - RNA, 19 nt, Artificial Sequence
  Description of Artificial Sequence: Synthetic oligonucleotide
  Antisense strand to SEQ ID NO: 298352
uugcccgaacaugagacuc

SEQ ID NO: 298354 - RNA, 19 nt, Artificial Sequence
  Description of Artificial Sequence: Synthetic oligonucleotide
  Sense strand starting at position 745 of SEQ ID NO: 3833
guuaaacgguccugacaga

SEQ ID NO: 298355 - RNA, 19 nt, Artificial Sequence
  Description of Artificial Sequence: Synthetic oligonucleotide
  Antisense strand to SEQ ID NO: 298354
ucugucaggaccguuuaac

SEQ ID NO: 298356 - RNA, 19 nt, Artificial Sequence
  Description of Artificial Sequence: Synthetic oligonucleotide
  Sense strand starting at position 1271 of SEQ ID NO: 3833
gugagaggccgcuagucuu

SEQ ID NO: 298357 - RNA, 19 nt, Artificial Sequence
  Description of Artificial Sequence: Synthetic oligonucleotide
  Antisense strand to SEQ ID NO: 298356
aagacuagcggccucucac

SEQ ID NO: 298358 - RNA, 19 nt, Artificial Sequence
  Description of Artificial Sequence: Synthetic oligonucleotide
  Sense strand starting at position 2070 of SEQ ID NO: 3833
aguccugcucccgaaaggu

SEQ ID NO: 298359 - RNA, 19 nt, Artificial Sequence
  Description of Artificial Sequence: Synthetic oligonucleotide
  Antisense strand to SEQ ID NO: 298358
accuuucgggagcaggacu

SEQ ID NO: 298360 - RNA, 19 nt, Artificial Sequence
  Description of Artificial Sequence: Synthetic oligonucleotide
  Sense strand starting at position 2759 of SEQ ID NO: 3833
ccaccuguccggugaggaa

SEQ ID NO: 298361 - RNA, 19 nt, Artificial Sequence
  Description of Artificial Sequence: Synthetic oligonucleotide
  Antisense strand to SEQ ID NO: 298360
uuccucaccggacaggugg

SEQ ID NO: 298362 - RNA, 19 nt, Artificial Sequence
  Description of Artificial Sequence: Synthetic oligonucleotide
  Sense strand starting at position 2871 of SEQ ID NO: 3833
cuccuucuucgagaggguu

SEQ ID NO: 298363 - RNA, 19 nt, Artificial Sequence
  Description of Artificial Sequence: Synthetic oligonucleotide
  Antisense strand to SEQ ID NO: 298362
aacccucucgaagaaggag

SEQ ID NO: 298364 - RNA, 19 nt, Artificial Sequence
  Description of Artificial Sequence: Synthetic oligonucleotide
  Sense strand starting at position 2913 of SEQ ID NO: 3833
gugcgugucuucucauggu

SEQ ID NO: 298365 - RNA, 19 nt, Artificial Sequence
  Description of Artificial Sequence: Synthetic oligonucleotide
  Antisense strand to SEQ ID NO: 298364
accaugagaagacacgcac

SEQ ID NO: 298366 - RNA, 19 nt, Artificial Sequence
  Description of Artificial Sequence: Synthetic oligonucleotide
  Sense strand starting at position 2934 of SEQ ID NO: 3833
acugccgaguccuuuaaga

SEQ ID NO: 298367 - RNA, 19 nt, Artificial Sequence
  Description of Artificial Sequence: Synthetic oligonucleotide
  Antisense strand to SEQ ID NO: 298366
ucuuaaaggacucggcagu

SEQ ID NO: 298368 - RNA, 19 nt, Artificial Sequence
  Description of Artificial Sequence: Synthetic oligonucleotide
  Sense strand starting at position 2936 of SEQ ID NO: 3833
ugccgaguccuuuaagaag

SEQ ID NO: 298369 - RNA, 19 nt, Artificial Sequence
  Description of Artificial Sequence: Synthetic oligonucleotide
  Antisense strand to SEQ ID NO: 298368
cuucuuaaaggacucggca

SEQ ID NO: 298370 - RNA, 19 nt, Artificial Sequence
  Description of Artificial Sequence: Synthetic oligonucleotide
  Sense strand starting at position 2939 of SEQ ID NO: 3833
cgaguccuuuaagaagcua

SEQ ID NO: 298371 - RNA, 19 nt, Artificial Sequence
  Description of Artificial Sequence: Synthetic oligonucleotide
  Antisense strand to SEQ ID NO: 298370
uagcuucuuaaaggacucg

SEQ ID NO: 298372 - RNA, 19 nt, Artificial Sequence
  Description of Artificial Sequence: Synthetic oligonucleotide
  Sense strand starting at position 2953 of SEQ ID NO: 3833
agcuaugcuucccugucau

SEQ ID NO: 298373 - RNA, 19 nt, Artificial Sequence
  Description of Artificial Sequence: Synthetic oligonucleotide
  Antisense strand to SEQ ID NO: 298372
augacagggaagcauagcu

SEQ ID NO: 298374 - RNA, 19 nt, Artificial Sequence
  Description of Artificial Sequence: Synthetic oligonucleotide
  Sense strand starting at position 2965 of SEQ ID NO: 3833
cugucaugcguccaggaca

SEQ ID NO: 298375 - RNA, 19 nt, Artificial Sequence
  Description of Artificial Sequence: Synthetic oligonucleotide
  Antisense strand to SEQ ID NO: 298374
uguccuggacgcaugacag

SEQ ID NO: 298376 - RNA, 19 nt, Artificial Sequence
  Description of Artificial Sequence: Synthetic oligonucleotide
  Sense strand starting at position 3046 of SEQ ID NO: 3833
ggcuuuguuugugcuuuga

SEQ ID NO: 298377 - RNA, 19 nt, Artificial Sequence
  Description of Artificial Sequence: Synthetic oligonucleotide
  Antisense strand to SEQ ID NO: 298376
ucaaagcacaaacaaagcc

SEQ ID NO: 298378 - RNA, 19 nt, Artificial Sequence
  Description of Artificial Sequence: Synthetic oligonucleotide
  Sense strand starting at position 3048 of SEQ ID NO: 3833
cuuuguuugugcuuugacu

SEQ ID NO: 298379 - RNA, 19 nt, Artificial Sequence
  Description of Artificial Sequence: Synthetic oligonucleotide
  Antisense strand to SEQ ID NO: 298378
agucaaagcacaaacaaag

SEQ ID NO: 298380 - RNA, 19 nt, Artificial Sequence
  Description of Artificial Sequence: Synthetic oligonucleotide
  Sense strand starting at position 3124 of SEQ ID NO: 3833
acggcaggcgcucaguaau

SEQ ID NO: 298381 - RNA, 19 nt, Artificial Sequence
  Description of Artificial Sequence: Synthetic oligonucleotide
  Antisense strand to SEQ ID NO: 298380
auuacugagcgccugccgu

SEQ ID NO: 298382 - RNA, 19 nt, Artificial Sequence
  Description of Artificial Sequence: Synthetic oligonucleotide
  Sense strand starting at position 3127 of SEQ ID NO: 3833
gcaggcgcucaguaauguu

SEQ ID NO: 298383 - RNA, 19 nt, Artificial Sequence
  Description of Artificial Sequence: Synthetic oligonucleotide
  Antisense strand to SEQ ID NO: 298382
aacauuacugagcgccugc

SEQ ID NO: 298384 - RNA, 19 nt, Artificial Sequence
  Description of Artificial Sequence: Synthetic oligonucleotide
  Sense strand starting at position 3157 of SEQ ID NO: 3833
uguguaaaugcaugaagau

SEQ ID NO: 298385 - RNA, 19 nt, Artificial Sequence
  Description of Artificial Sequence: Synthetic oligonucleotide
  Antisense strand to SEQ ID NO: 298384
aucuucaugcauuuacaca

SEQ ID NO: 298386 - RNA, 19 nt, Artificial Sequence
  Description of Artificial Sequence: Synthetic oligonucleotide
  Sense strand starting at position 3158 of SEQ ID NO: 3833
guguaaaugcaugaagaua

SEQ ID NO: 298387 - RNA, 19 nt, Artificial Sequence
  Description of Artificial Sequence: Synthetic oligonucleotide
  Antisense strand to SEQ ID NO: 298386
uaucuucaugcauuuacac

SEQ ID NO: 298388 - RNA, 19 nt, Artificial Sequence
  Description of Artificial Sequence: Synthetic oligonucleotide
  Sense strand starting at position 3166 of SEQ ID NO: 3833
gcaugaagauaauauaugu

SEQ ID NO: 298389 - RNA, 19 nt, Artificial Sequence
  Description of Artificial Sequence: Synthetic oligonucleotide
  Antisense strand to SEQ ID NO: 298388
acauauauuaucuucaugc

SEQ ID NO: 298390 - RNA, 19 nt, Artificial Sequence
  Description of Artificial Sequence: Synthetic oligonucleotide
  Sense strand starting at position 3221 of SEQ ID NO: 3833
ggccuucguguggucagua

SEQ ID NO: 298391 - RNA, 19 nt, Artificial Sequence
  Description of Artificial Sequence: Synthetic oligonucleotide
  Antisense strand to SEQ ID NO: 298390
uacugaccacacgaaggcc

SEQ ID NO: 298392 - RNA, 19 nt, Artificial Sequence
  Description of Artificial Sequence: Synthetic oligonucleotide
  Sense strand starting at position 3222 of SEQ ID NO: 3833
gccuucguguggucaguaa

SEQ ID NO: 298393 - RNA, 19 nt, Artificial Sequence
  Description of Artificial Sequence: Synthetic oligonucleotide
  Antisense strand to SEQ ID NO: 298392
uuacugaccacacgaaggc

SEQ ID NO: 298394 - RNA, 19 nt, Artificial Sequence
  Description of Artificial Sequence: Synthetic oligonucleotide
  Sense strand starting at position 3233 of SEQ ID NO: 3833
gucaguaaucgcugcacuu

SEQ ID NO: 298395 - RNA, 19 nt, Artificial Sequence
  Description of Artificial Sequence: Synthetic oligonucleotide
  Antisense strand to SEQ ID NO: 298394
aagugcagcgauuacugac

SEQ ID NO: 298396 - RNA, 19 nt, Artificial Sequence
  Description of Artificial Sequence: Synthetic oligonucleotide
  Sense strand starting at position 3252 of SEQ ID NO: 3833
uuccgaagugccuagaaga

SEQ ID NO: 298397 - RNA, 19 nt, Artificial Sequence
  Description of Artificial Sequence: Synthetic oligonucleotide
  Antisense strand to SEQ ID NO: 298396
ucuucuaggcacuucggaa

SEQ ID NO: 298398 - RNA, 19 nt, Artificial Sequence
  Description of Artificial Sequence: Synthetic oligonucleotide
  Sense strand starting at position 3482 of SEQ ID NO: 3833
guuggagguugcugugagu

SEQ ID NO: 298399 - RNA, 19 nt, Artificial Sequence
  Description of Artificial Sequence: Synthetic oligonucleotide
  Antisense strand to SEQ ID NO: 298398
acucacagcaaccuccaac

SEQ ID NO: 298400 - RNA, 19 nt, Artificial Sequence
  Description of Artificial Sequence: Synthetic oligonucleotide
  Sense strand starting at position 3500 of SEQ ID NO: 3833
ucaagaucaugccacagua

SEQ ID NO: 298401 - RNA, 19 nt, Artificial Sequence
  Description of Artificial Sequence: Synthetic oligonucleotide
  Antisense strand to SEQ ID NO: 298400
uacuguggcaugaucuuga

SEQ ID NO: 298402 - RNA, 19 nt, Artificial Sequence
  Description of Artificial Sequence: Synthetic oligonucleotide
  Sense strand starting at position 3665 of SEQ ID NO: 3833
ugaucaucaccaugucuuu

SEQ ID NO: 298403 - RNA, 19 nt, Artificial Sequence
  Description of Artificial Sequence: Synthetic oligonucleotide
  Antisense strand to SEQ ID NO: 298402
aaagacauggugaugauca

SEQ ID NO: 298404 - RNA, 19 nt, Artificial Sequence
  Description of Artificial Sequence: Synthetic oligonucleotide
  Sense strand starting at position 3745 of SEQ ID NO: 3833
guuguauacuucuguuauu

SEQ ID NO: 298405 - RNA, 19 nt, Artificial Sequence
  Description of Artificial Sequence: Synthetic oligonucleotide
  Antisense strand to SEQ ID NO: 298404
aauaacagaaguauacaac

SEQ ID NO: 298406 - RNA, 19 nt, Artificial Sequence
  Description of Artificial Sequence: Synthetic oligonucleotide
  Sense strand starting at position 3746 of SEQ ID NO: 3833
uuguauacuucuguuauuc

SEQ ID NO: 298407 - RNA, 19 nt, Artificial Sequence
  Description of Artificial Sequence: Synthetic oligonucleotide
  Antisense strand to SEQ ID NO: 298406
gaauaacagaaguauacaa

SEQ ID NO: 298408 - RNA, 19 nt, Artificial Sequence
  Description of Artificial Sequence: Synthetic oligonucleotide
  Sense strand starting at position 3748 of SEQ ID NO: 3833
guauacuucuguuauucuu

SEQ ID NO: 298409 - RNA, 19 nt, Artificial Sequence
  Description of Artificial Sequence: Synthetic oligonucleotide
  Antisense strand to SEQ ID NO: 298408
aagaauaacagaaguauac

SEQ ID NO: 298410 - RNA, 19 nt, Artificial Sequence
  Description of Artificial Sequence: Synthetic oligonucleotide
  Sense strand starting at position 3975 of SEQ ID NO: 3833
ucaucauguuggucauguu

SEQ ID NO: 298411 - RNA, 19 nt, Artificial Sequence
  Description of Artificial Sequence: Synthetic oligonucleotide
  Antisense strand to SEQ ID NO: 298410
aacaugaccaacaugauga

SEQ ID NO: 298412 - RNA, 19 nt, Artificial Sequence
  Description of Artificial Sequence: Synthetic oligonucleotide
  Sense strand starting at position 394 of SEQ ID NO: 3835
gugagaggccgcuagucuu

SEQ ID NO: 298413 - RNA, 19 nt, Artificial Sequence
  Description of Artificial Sequence: Synthetic oligonucleotide
  Antisense strand to SEQ ID NO: 298412
aagacuagcggccucucac

SEQ ID NO: 298414 - RNA, 19 nt, Artificial Sequence
  Description of Artificial Sequence: Synthetic oligonucleotide
  Sense strand starting at position 1193 of SEQ ID NO: 3835
aguccugcucccgaaaggu

SEQ ID NO: 298415 - RNA, 19 nt, Artificial Sequence
  Description of Artificial Sequence: Synthetic oligonucleotide
  Antisense strand to SEQ ID NO: 298414
accuuucgggagcaggacu

SEQ ID NO: 298416 - RNA, 19 nt, Artificial Sequence
  Description of Artificial Sequence: Synthetic oligonucleotide
  Sense strand starting at position 1882 of SEQ ID NO: 3835
ccaccuguccggugaggaa

SEQ ID NO: 298417 - RNA, 19 nt, Artificial Sequence
  Description of Artificial Sequence: Synthetic oligonucleotide
  Antisense strand to SEQ ID NO: 298416
uuccucaccggacaggugg

SEQ ID NO: 298418 - RNA, 19 nt, Artificial Sequence
  Description of Artificial Sequence: Synthetic oligonucleotide
  Sense strand starting at position 1994 of SEQ ID NO: 3835
cuccuucuucgagaggguu

SEQ ID NO: 298419 - RNA, 19 nt, Artificial Sequence
  Description of Artificial Sequence: Synthetic oligonucleotide
  Antisense strand to SEQ ID NO: 298418
aacccucucgaagaaggag

SEQ ID NO: 298420 - RNA, 19 nt, Artificial Sequence
  Description of Artificial Sequence: Synthetic oligonucleotide
  Sense strand starting at position 2057 of SEQ ID NO: 3835
acugccgaguccuuuaaga

SEQ ID NO: 298421 - RNA, 19 nt, Artificial Sequence
  Description of Artificial Sequence: Synthetic oligonucleotide
  Antisense strand to SEQ ID NO: 298420
ucuuaaaggacucggcagu

SEQ ID NO: 298422 - RNA, 19 nt, Artificial Sequence
  Description of Artificial Sequence: Synthetic oligonucleotide
  Sense strand starting at position 2059 of SEQ ID NO: 3835
ugccgaguccuuuaagaag

SEQ ID NO: 298423 - RNA, 19 nt, Artificial Sequence
  Description of Artificial Sequence: Synthetic oligonucleotide
  Antisense strand to SEQ ID NO: 298422
cuucuuaaaggacucggca

SEQ ID NO: 298424 - RNA, 19 nt, Artificial Sequence
  Description of Artificial Sequence: Synthetic oligonucleotide
  Sense strand starting at position 2076 of SEQ ID NO: 3835
agcuaugcuucccugucau

SEQ ID NO: 298425 - RNA, 19 nt, Artificial Sequence
  Description of Artificial Sequence: Synthetic oligonucleotide
  Antisense strand to SEQ ID NO: 298424
augacagggaagcauagcu

SEQ ID NO: 298426 - RNA, 19 nt, Artificial Sequence
  Description of Artificial Sequence: Synthetic oligonucleotide
  Sense strand starting at position 2088 of SEQ ID NO: 3835
cugucaugcguccaggaca

SEQ ID NO: 298427 - RNA, 19 nt, Artificial Sequence
  Description of Artificial Sequence: Synthetic oligonucleotide
  Antisense strand to SEQ ID NO: 298426
uguccuggacgcaugacag

SEQ ID NO: 298428 - RNA, 19 nt, Artificial Sequence
  Description of Artificial Sequence: Synthetic oligonucleotide
  Sense strand starting at position 2169 of SEQ ID NO: 3835
ggcuuuguuugugcuuuga

SEQ ID NO: 298429 - RNA, 19 nt, Artificial Sequence
  Description of Artificial Sequence: Synthetic oligonucleotide
  Antisense strand to SEQ ID NO: 298428
ucaaagcacaaacaaagcc

SEQ ID NO: 298430 - RNA, 19 nt, Artificial Sequence
  Description of Artificial Sequence: Synthetic oligonucleotide
  Sense strand starting at position 2171 of SEQ ID NO: 3835
cuuuguuugugcuuugacu

SEQ ID NO: 298431 - RNA, 19 nt, Artificial Sequence
  Description of Artificial Sequence: Synthetic oligonucleotide
  Antisense strand to SEQ ID NO: 298430
agucaaagcacaaacaaag

SEQ ID NO: 298432 - RNA, 19 nt, Artificial Sequence
  Description of Artificial Sequence: Synthetic oligonucleotide
  Sense strand starting at position 2247 of SEQ ID NO: 3835
acggcaggcgcucaguaau

SEQ ID NO: 298433 - RNA, 19 nt, Artificial Sequence
  Description of Artificial Sequence: Synthetic oligonucleotide
  Antisense strand to SEQ ID NO: 298432
auuacugagcgccugccgu

SEQ ID NO: 298434 - RNA, 19 nt, Artificial Sequence
  Description of Artificial Sequence: Synthetic oligonucleotide
  Sense strand starting at position 2250 of SEQ ID NO: 3835
gcaggcgcucaguaauguu

SEQ ID NO: 298435 - RNA, 19 nt, Artificial Sequence
  Description of Artificial Sequence: Synthetic oligonucleotide
  Antisense strand to SEQ ID NO: 298434
aacauuacugagcgccugc

SEQ ID NO: 298436 - RNA, 19 nt, Artificial Sequence
  Description of Artificial Sequence: Synthetic oligonucleotide
  Sense strand starting at position 2280 of SEQ ID NO: 3835
uguguaaaugcaugaagau

SEQ ID NO: 298437 - RNA, 19 nt, Artificial Sequence
  Description of Artificial Sequence: Synthetic oligonucleotide
  Antisense strand to SEQ ID NO: 298436
aucuucaugcauuuacaca

SEQ ID NO: 298438 - RNA, 19 nt, Artificial Sequence
  Description of Artificial Sequence: Synthetic oligonucleotide
  Sense strand starting at position 2281 of SEQ ID NO: 3835
guguaaaugcaugaagaua

SEQ ID NO: 298439 - RNA, 19 nt, Artificial Sequence
  Description of Artificial Sequence: Synthetic oligonucleotide
  Antisense strand to SEQ ID NO: 298438
uaucuucaugcauuuacac

SEQ ID NO: 298440 - RNA, 19 nt, Artificial Sequence
  Description of Artificial Sequence: Synthetic oligonucleotide
  Sense strand starting at position 2289 of SEQ ID NO: 3835
gcaugaagauaauauaugu

SEQ ID NO: 298441 - RNA, 19 nt, Artificial Sequence
  Description of Artificial Sequence: Synthetic oligonucleotide
  Antisense strand to SEQ ID NO: 298440
acauauauuaucuucaugc

SEQ ID NO: 298442 - RNA, 19 nt, Artificial Sequence
  Description of Artificial Sequence: Synthetic oligonucleotide
  Sense strand starting at position 2344 of SEQ ID NO: 3835
ggccuucguguggucagua

SEQ ID NO: 298443 - RNA, 19 nt, Artificial Sequence
  Description of Artificial Sequence: Synthetic oligonucleotide
  Antisense strand to SEQ ID NO: 298442
uacugaccacacgaaggcc

SEQ ID NO: 298444 - RNA, 19 nt, Artificial Sequence
  Description of Artificial Sequence: Synthetic oligonucleotide
  Sense strand starting at position 2375 of SEQ ID NO: 3835
uuccgaagugccuagaaga

SEQ ID NO: 298445 - RNA, 19 nt, Artificial Sequence
  Description of Artificial Sequence: Synthetic oligonucleotide
  Antisense strand to SEQ ID NO: 298444
ucuucuaggcacuucggaa

SEQ ID NO: 298446 - RNA, 19 nt, Artificial Sequence
  Description of Artificial Sequence: Synthetic oligonucleotide
  Sense strand starting at position 2623 of SEQ ID NO: 3835
ucaagaucaugccacagua

SEQ ID NO: 298447 - RNA, 19 nt, Artificial Sequence
  Description of Artificial Sequence: Synthetic oligonucleotide
  Antisense strand to SEQ ID NO: 298446
uacuguggcaugaucuuga

SEQ ID NO: 298448 - RNA, 19 nt, Artificial Sequence
  Description of Artificial Sequence: Synthetic oligonucleotide
  Sense strand starting at position 2788 of SEQ ID NO: 3835
ugaucaucaccaugucuuu

SEQ ID NO: 298449 - RNA, 19 nt, Artificial Sequence
  Description of Artificial Sequence: Synthetic oligonucleotide
  Antisense strand to SEQ ID NO: 298448
aaagacauggugaugauca

SEQ ID NO: 298450 - RNA, 19 nt, Artificial Sequence
  Description of Artificial Sequence: Synthetic oligonucleotide
  Sense strand starting at position 2869 of SEQ ID NO: 3835
uuguauacuucuguuauuc

SEQ ID NO: 298451 - RNA, 19 nt, Artificial Sequence
  Description of Artificial Sequence: Synthetic oligonucleotide
  Antisense strand to SEQ ID NO: 298450
gaauaacagaaguauacaa

SEQ ID NO: 298452 - RNA, 19 nt, Artificial Sequence
  Description of Artificial Sequence: Synthetic oligonucleotide
  Sense strand starting at position 3098 of SEQ ID NO: 3835
ucaucauguuggucauguu

SEQ ID NO: 298453 - RNA, 19 nt, Artificial Sequence
  Description of Artificial Sequence: Synthetic oligonucleotide
  Antisense strand to SEQ ID NO: 298452
aacaugaccaacaugauga

SEQ ID NO: 298454 - RNA, 19 nt, Artificial Sequence
  Description of Artificial Sequence: Synthetic oligonucleotide
  Sense strand starting at position 3108 of SEQ ID NO: 3835
ggucauguuggucaggcua

SEQ ID NO: 298455 - RNA, 19 nt, Artificial Sequence
  Description of Artificial Sequence: Synthetic oligonucleotide
  Antisense strand to SEQ ID NO: 298454
uagccugaccaacaugacc

SEQ ID NO: 298456 - RNA, 19 nt, Artificial Sequence
  Description of Artificial Sequence: Synthetic oligonucleotide
  Sense strand starting at position 3281 of SEQ ID NO: 3835
cagauaaggucuuacucug

SEQ ID NO: 298457 - RNA, 19 nt, Artificial Sequence
  Description of Artificial Sequence: Synthetic oligonucleotide
  Antisense strand to SEQ ID NO: 298456
cagaguaagaccuuaucug

SEQ ID NO: 298458 - RNA, 19 nt, Artificial Sequence
  Description of Artificial Sequence: Synthetic oligonucleotide
  Sense strand starting at position 3517 of SEQ ID NO: 3835
gugcuuucagaguacaggu

SEQ ID NO: 298459 - RNA, 19 nt, Artificial Sequence
  Description of Artificial Sequence: Synthetic oligonucleotide
  Antisense strand to SEQ ID NO: 298458
accuguacucugaaagcac

SEQ ID NO: 298460 - RNA, 19 nt, Artificial Sequence
  Description of Artificial Sequence: Synthetic oligonucleotide
  Sense strand starting at position 3542 of SEQ ID NO: 3835
cacugagccuggucucuau

SEQ ID NO: 298461 - RNA, 19 nt, Artificial Sequence
  Description of Artificial Sequence: Synthetic oligonucleotide
  Antisense strand to SEQ ID NO: 298460
auagagaccaggcucagug

SEQ ID NO: 298462 - RNA, 19 nt, Artificial Sequence
  Description of Artificial Sequence: Synthetic oligonucleotide
  Sense strand starting at position 3600 of SEQ ID NO: 3835
ucacuuucuuccuugggaa

SEQ ID NO: 298463 - RNA, 19 nt, Artificial Sequence
  Description of Artificial Sequence: Synthetic oligonucleotide
  Antisense strand to SEQ ID NO: 298462
uucccaaggaagaaaguga

SEQ ID NO: 298464 - RNA, 19 nt, Artificial Sequence
  Description of Artificial Sequence: Synthetic oligonucleotide
  Sense strand starting at position 3602 of SEQ ID NO: 3835
acuuucuuccuugggaaua

SEQ ID NO: 298465 - RNA, 19 nt, Artificial Sequence
  Description of Artificial Sequence: Synthetic oligonucleotide
  Antisense strand to SEQ ID NO: 298464
uauucccaaggaagaaagu

SEQ ID NO: 298466 - RNA, 19 nt, Artificial Sequence
  Description of Artificial Sequence: Synthetic oligonucleotide
  Sense strand starting at position 3615 of SEQ ID NO: 3835
ggaauauggcgcuaauagu

SEQ ID NO: 298467 - RNA, 19 nt, Artificial Sequence
  Description of Artificial Sequence: Synthetic oligonucleotide
  Antisense strand to SEQ ID NO: 298466
acuauuagcgccauauucc

SEQ ID NO: 298468 - RNA, 19 nt, Artificial Sequence
  Description of Artificial Sequence: Synthetic oligonucleotide
  Sense strand starting at position 3637 of SEQ ID NO: 3835
uuucuuguagauugugaga

SEQ ID NO: 298469 - RNA, 19 nt, Artificial Sequence
  Description of Artificial Sequence: Synthetic oligonucleotide
  Antisense strand to SEQ ID NO: 298468
ucucacaaucuacaagaaa

SEQ ID NO: 298470 - RNA, 19 nt, Artificial Sequence
  Description of Artificial Sequence: Synthetic oligonucleotide
  Sense strand starting at position 3640 of SEQ ID NO: 3835
cuuguagauugugagaaua

SEQ ID NO: 298471 - RNA, 19 nt, Artificial Sequence
  Description of Artificial Sequence: Synthetic oligonucleotide
  Antisense strand to SEQ ID NO: 298470
uauucucacaaucuacaag

SEQ ID NO: 298472 - RNA, 19 nt, Artificial Sequence
  Description of Artificial Sequence: Synthetic oligonucleotide
  Sense strand starting at position 3642 of SEQ ID NO: 3835
uguagauugugagaauaac

SEQ ID NO: 298473 - RNA, 19 nt, Artificial Sequence
  Description of Artificial Sequence: Synthetic oligonucleotide
  Antisense strand to SEQ ID NO: 298472
guuauucucacaaucuaca

SEQ ID NO: 298474 - RNA, 19 nt, Artificial Sequence
  Description of Artificial Sequence: Synthetic oligonucleotide
  Sense strand starting at position 3651 of SEQ ID NO: 3835
ugagaauaacaccguaugu

SEQ ID NO: 298475 - RNA, 19 nt, Artificial Sequence
  Description of Artificial Sequence: Synthetic oligonucleotide
  Antisense strand to SEQ ID NO: 298474
acauacgguguuauucuca

SEQ ID NO: 298476 - RNA, 19 nt, Artificial Sequence
  Description of Artificial Sequence: Synthetic oligonucleotide
  Sense strand starting at position 3694 of SEQ ID NO: 3835
cucagagagucacuguguu

SEQ ID NO: 298477 - RNA, 19 nt, Artificial Sequence
  Description of Artificial Sequence: Synthetic oligonucleotide
  Antisense strand to SEQ ID NO: 298476
aacacagugacucucugag

SEQ ID NO: 298478 - RNA, 19 nt, Artificial Sequence
  Description of Artificial Sequence: Synthetic oligonucleotide
  Sense strand starting at position 3698 of SEQ ID NO: 3835
gagagucacuguguuuauu

SEQ ID NO: 298479 - RNA, 19 nt, Artificial Sequence
  Description of Artificial Sequence: Synthetic oligonucleotide
  Antisense strand to SEQ ID NO: 298478
aauaaacacagugacucuc

SEQ ID NO: 298480 - RNA, 19 nt, Artificial Sequence
  Description of Artificial Sequence: Synthetic oligonucleotide
  Sense strand starting at position 3700 of SEQ ID NO: 3835
gagucacuguguuuauuau

SEQ ID NO: 298481 - RNA, 19 nt, Artificial Sequence
  Description of Artificial Sequence: Synthetic oligonucleotide
  Antisense strand to SEQ ID NO: 298480
auaauaaacacagugacuc

SEQ ID NO: 298482 - RNA, 19 nt, Artificial Sequence
  Description of Artificial Sequence: Synthetic oligonucleotide
  Sense strand starting at position 3701 of SEQ ID NO: 3835
agucacuguguuuauuauu

SEQ ID NO: 298483 - RNA, 19 nt, Artificial Sequence
  Description of Artificial Sequence: Synthetic oligonucleotide
  Antisense strand to SEQ ID NO: 298482
aauaauaaacacagugacu

SEQ ID NO: 298484 - RNA, 19 nt, Artificial Sequence
  Description of Artificial Sequence: Synthetic oligonucleotide
  Sense strand starting at position 3706 of SEQ ID NO: 3835
cuguguuuauuauugacaa

SEQ ID NO: 298485 - RNA, 19 nt, Artificial Sequence
  Description of Artificial Sequence: Synthetic oligonucleotide
  Antisense strand to SEQ ID NO: 298484
uugucaauaauaaacacag

SEQ ID NO: 298486 - RNA, 19 nt, Artificial Sequence
  Description of Artificial Sequence: Synthetic oligonucleotide
  Sense strand starting at position 3745 of SEQ ID NO: 3835
agggaacacucacaauuga

SEQ ID NO: 298487 - RNA, 19 nt, Artificial Sequence
  Description of Artificial Sequence: Synthetic oligonucleotide
  Antisense strand to SEQ ID NO: 298486
ucaauugugaguguucccu

SEQ ID NO: 298488 - RNA, 19 nt, Artificial Sequence
  Description of Artificial Sequence: Synthetic oligonucleotide
  Sense strand starting at position 3919 of SEQ ID NO: 3835
uuguaugcugcugggaauu

SEQ ID NO: 298489 - RNA, 19 nt, Artificial Sequence
  Description of Artificial Sequence: Synthetic oligonucleotide
  Antisense strand to SEQ ID NO: 298488
aauucccagcagcauacaa

SEQ ID NO: 298490 - RNA, 19 nt, Artificial Sequence
  Description of Artificial Sequence: Synthetic oligonucleotide
  Sense strand starting at position 3960 of SEQ ID NO: 3835
ggaguuggacuuuguguca

SEQ ID NO: 298491 - RNA, 19 nt, Artificial Sequence
  Description of Artificial Sequence: Synthetic oligonucleotide
  Antisense strand to SEQ ID NO: 298490
ugacacaaaguccaacucc

SEQ ID NO: 298492 - RNA, 19 nt, Artificial Sequence
  Description of Artificial Sequence: Synthetic oligonucleotide
  Sense strand starting at position 14 of SEQ ID NO: 3836
guucucuaaccuggagaga

SEQ ID NO: 298493 - RNA, 19 nt, Artificial Sequence
  Description of Artificial Sequence: Synthetic oligonucleotide
  Antisense strand to SEQ ID NO: 298492
ucucuccagguuagagaac

SEQ ID NO: 298494 - RNA, 19 nt, Artificial Sequence
  Description of Artificial Sequence: Synthetic oligonucleotide
  Sense strand starting at position 169 of SEQ ID NO: 3836
cacugauggcuccagauuc

SEQ ID NO: 298495 - RNA, 19 nt, Artificial Sequence
  Description of Artificial Sequence: Synthetic oligonucleotide
  Antisense strand to SEQ ID NO: 298494
gaaucuggagccaucagug

SEQ ID NO: 298496 - RNA, 19 nt, Artificial Sequence
  Description of Artificial Sequence: Synthetic oligonucleotide
  Sense strand starting at position 190 of SEQ ID NO: 3836
gcauucugagguugggaaa

SEQ ID NO: 298497 - RNA, 19 nt, Artificial Sequence
  Description of Artificial Sequence: Synthetic oligonucleotide
  Antisense strand to SEQ ID NO: 298496
uuucccaaccucagaaugc

SEQ ID NO: 298498 - RNA, 19 nt, Artificial Sequence
  Description of Artificial Sequence: Synthetic oligonucleotide
  Sense strand starting at position 191 of SEQ ID NO: 3836
cauucugagguugggaaau

SEQ ID NO: 298499 - RNA, 19 nt, Artificial Sequence
  Description of Artificial Sequence: Synthetic oligonucleotide
  Antisense strand to SEQ ID NO: 298498
auuucccaaccucagaaug

SEQ ID NO: 298500 - RNA, 19 nt, Artificial Sequence
  Description of Artificial Sequence: Synthetic oligonucleotide
  Sense strand starting at position 471 of SEQ ID NO: 3836
aucucagagcuccagaagu

SEQ ID NO: 298501 - RNA, 19 nt, Artificial Sequence
  Description of Artificial Sequence: Synthetic oligonucleotide
  Antisense strand to SEQ ID NO: 298500
acuucuggagcucugagau

SEQ ID NO: 298502 - RNA, 19 nt, Artificial Sequence
  Description of Artificial Sequence: Synthetic oligonucleotide
  Sense strand starting at position 473 of SEQ ID NO: 3836
cucagagcuccagaaguca

SEQ ID NO: 298503 - RNA, 19 nt, Artificial Sequence
  Description of Artificial Sequence: Synthetic oligonucleotide
  Antisense strand to SEQ ID NO: 298502
ugacuucuggagcucugag

SEQ ID NO: 298504 - RNA, 19 nt, Artificial Sequence
  Description of Artificial Sequence: Synthetic oligonucleotide
  Sense strand starting at position 497 of SEQ ID NO: 3836
uagaguguuugaguaacuc

SEQ ID NO: 298505 - RNA, 19 nt, Artificial Sequence
  Description of Artificial Sequence: Synthetic oligonucleotide
  Antisense strand to SEQ ID NO: 298504
gaguuacucaaacacucua

SEQ ID NO: 298506 - RNA, 19 nt, Artificial Sequence
  Description of Artificial Sequence: Synthetic oligonucleotide
  Sense strand starting at position 515 of SEQ ID NO: 3836
cuuauuauuucuguuaguc

SEQ ID NO: 298507 - RNA, 19 nt, Artificial Sequence
  Description of Artificial Sequence: Synthetic oligonucleotide
  Antisense strand to SEQ ID NO: 298506
gacuaacagaaauaauaag

SEQ ID NO: 298508 - RNA, 19 nt, Artificial Sequence
  Description of Artificial Sequence: Synthetic oligonucleotide
  Sense strand starting at position 527 of SEQ ID NO: 3836
guuagucucccgcuuccau

SEQ ID NO: 298509 - RNA, 19 nt, Artificial Sequence
  Description of Artificial Sequence: Synthetic oligonucleotide
  Antisense strand to SEQ ID NO: 298508
auggaagcgggagacuaac

SEQ ID NO: 298510 - RNA, 19 nt, Artificial Sequence
  Description of Artificial Sequence: Synthetic oligonucleotide
  Sense strand starting at position 633 of SEQ ID NO: 3836
gaagaaguguucugauuug

SEQ ID NO: 298511 - RNA, 19 nt, Artificial Sequence
  Description of Artificial Sequence: Synthetic oligonucleotide
  Antisense strand to SEQ ID NO: 298510
caaaucagaacacuucuuc

SEQ ID NO: 298512 - RNA, 19 nt, Artificial Sequence
  Description of Artificial Sequence: Synthetic oligonucleotide
  Sense strand starting at position 719 of SEQ ID NO: 3836
ucaagugguuuaccucuua

SEQ ID NO: 298513 - RNA, 19 nt, Artificial Sequence
  Description of Artificial Sequence: Synthetic oligonucleotide
  Antisense strand to SEQ ID NO: 298512
uaagagguaaaccacuuga

SEQ ID NO: 298514 - RNA, 19 nt, Artificial Sequence
  Description of Artificial Sequence: Synthetic oligonucleotide
  Sense strand starting at position 736 of SEQ ID NO: 3836
uauuacauggugugcuaga

SEQ ID NO: 298515 - RNA, 19 nt, Artificial Sequence
  Description of Artificial Sequence: Synthetic oligonucleotide
  Antisense strand to SEQ ID NO: 298514
ucuagcacaccauguaaua

SEQ ID NO: 298516 - RNA, 19 nt, Artificial Sequence
  Description of Artificial Sequence: Synthetic oligonucleotide
  Sense strand starting at position 741 of SEQ ID NO: 3836
cauggugugcuagagacua

SEQ ID NO: 298517 - RNA, 19 nt, Artificial Sequence
  Description of Artificial Sequence: Synthetic oligonucleotide
  Antisense strand to SEQ ID NO: 298516
uagucucuagcacaccaug

SEQ ID NO: 298518 - RNA, 19 nt, Artificial Sequence
  Description of Artificial Sequence: Synthetic oligonucleotide
  Sense strand starting at position 743 of SEQ ID NO: 3836
uggugugcuagagacuaau

SEQ ID NO: 298519 - RNA, 19 nt, Artificial Sequence
  Description of Artificial Sequence: Synthetic oligonucleotide
  Antisense strand to SEQ ID NO: 298518
auuagucucuagcacacca

SEQ ID NO: 298520 - RNA, 19 nt, Artificial Sequence
  Description of Artificial Sequence: Synthetic oligonucleotide
  Sense strand starting at position 746 of SEQ ID NO: 3836
ugugcuagagacuaauaau

SEQ ID NO: 298521 - RNA, 19 nt, Artificial Sequence
  Description of Artificial Sequence: Synthetic oligonucleotide
  Antisense strand to SEQ ID NO: 298520
auuauuagucucuagcaca

SEQ ID NO: 298522 - RNA, 19 nt, Artificial Sequence
  Description of Artificial Sequence: Synthetic oligonucleotide
  Sense strand starting at position 924 of SEQ ID NO: 3836
gcuagaaagcgguggagau

SEQ ID NO: 298523 - RNA, 19 nt, Artificial Sequence
  Description of Artificial Sequence: Synthetic oligonucleotide
  Antisense strand to SEQ ID NO: 298522
aucuccaccgcuuucuagc

SEQ ID NO: 298524 - RNA, 19 nt, Artificial Sequence
  Description of Artificial Sequence: Synthetic oligonucleotide
  Sense strand starting at position 998 of SEQ ID NO: 3836
gggagucaguaccuuagga

SEQ ID NO: 298525 - RNA, 19 nt, Artificial Sequence
  Description of Artificial Sequence: Synthetic oligonucleotide
  Antisense strand to SEQ ID NO: 298524
uccuaagguacugacuccc

SEQ ID NO: 298526 - RNA, 19 nt, Artificial Sequence
  Description of Artificial Sequence: Synthetic oligonucleotide
  Sense strand starting at position 1371 of SEQ ID NO: 3836
guggaaugcaugcaaagau

SEQ ID NO: 298527 - RNA, 19 nt, Artificial Sequence
  Description of Artificial Sequence: Synthetic oligonucleotide
  Antisense strand to SEQ ID NO: 298526
aucuuugcaugcauuccac

SEQ ID NO: 298528 - RNA, 19 nt, Artificial Sequence
  Description of Artificial Sequence: Synthetic oligonucleotide
  Sense strand starting at position 1409 of SEQ ID NO: 3836
cagagcuucucuuuguagu

SEQ ID NO: 298529 - RNA, 19 nt, Artificial Sequence
  Description of Artificial Sequence: Synthetic oligonucleotide
  Antisense strand to SEQ ID NO: 298528
acuacaaagagaagcucug

SEQ ID NO: 298530 - RNA, 19 nt, Artificial Sequence
  Description of Artificial Sequence: Synthetic oligonucleotide
  Sense strand starting at position 1410 of SEQ ID NO: 3836
agagcuucucuuuguaguu

SEQ ID NO: 298531 - RNA, 19 nt, Artificial Sequence
  Description of Artificial Sequence: Synthetic oligonucleotide
  Antisense strand to SEQ ID NO: 298530
aacuacaaagagaagcucu

SEQ ID NO: 298532 - RNA, 19 nt, Artificial Sequence
  Description of Artificial Sequence: Synthetic oligonucleotide
  Sense strand starting at position 1743 of SEQ ID NO: 3836
uacguugccugacuuauaa

SEQ ID NO: 298533 - RNA, 19 nt, Artificial Sequence
  Description of Artificial Sequence: Synthetic oligonucleotide
  Antisense strand to SEQ ID NO: 298532
uuauaagucaggcaacgua

SEQ ID NO: 298534 - RNA, 19 nt, Artificial Sequence
  Description of Artificial Sequence: Synthetic oligonucleotide
  Sense strand starting at position 1796 of SEQ ID NO: 3836
cggcucccuuucuuacaau

SEQ ID NO: 298535 - RNA, 19 nt, Artificial Sequence
  Description of Artificial Sequence: Synthetic oligonucleotide
  Antisense strand to SEQ ID NO: 298534
auuguaagaaagggagccg

SEQ ID NO: 298536 - RNA, 19 nt, Artificial Sequence
  Description of Artificial Sequence: Synthetic oligonucleotide
  Sense strand starting at position 2121 of SEQ ID NO: 3836
ggcugacagccuggaucua

SEQ ID NO: 298537 - RNA, 19 nt, Artificial Sequence
  Description of Artificial Sequence: Synthetic oligonucleotide
  Antisense strand to SEQ ID NO: 298536
uagauccaggcugucagcc

SEQ ID NO: 298538 - RNA, 19 nt, Artificial Sequence
  Description of Artificial Sequence: Synthetic oligonucleotide
  Sense strand starting at position 2212 of SEQ ID NO: 3836
ggcagagaugcugacaucu

SEQ ID NO: 298539 - RNA, 19 nt, Artificial Sequence
  Description of Artificial Sequence: Synthetic oligonucleotide
  Antisense strand to SEQ ID NO: 298538
agaugucagcaucucugcc

SEQ ID NO: 298540 - RNA, 19 nt, Artificial Sequence
  Description of Artificial Sequence: Synthetic oligonucleotide
  Sense strand starting at position 2220 of SEQ ID NO: 3836
ugcugacaucucugggaaa

SEQ ID NO: 298541 - RNA, 19 nt, Artificial Sequence
  Description of Artificial Sequence: Synthetic oligonucleotide
  Antisense strand to SEQ ID NO: 298540
uuucccagagaugucagca

SEQ ID NO: 298542 - RNA, 19 nt, Artificial Sequence
  Description of Artificial Sequence: Synthetic oligonucleotide
  Sense strand starting at position 2267 of SEQ ID NO: 3836
ggcgcugaucugagugaga

SEQ ID NO: 298543 - RNA, 19 nt, Artificial Sequence
  Description of Artificial Sequence: Synthetic oligonucleotide
  Antisense strand to SEQ ID NO: 298542
ucucacucagaucagcgcc

SEQ ID NO: 298544 - RNA, 19 nt, Artificial Sequence
  Description of Artificial Sequence: Synthetic oligonucleotide
  Sense strand starting at position 2541 of SEQ ID NO: 3836
agcacuagugaggacuauu

SEQ ID NO: 298545 - RNA, 19 nt, Artificial Sequence
  Description of Artificial Sequence: Synthetic oligonucleotide
  Antisense strand to SEQ ID NO: 298544
aauaguccucacuagugcu

SEQ ID NO: 298546 - RNA, 19 nt, Artificial Sequence
  Description of Artificial Sequence: Synthetic oligonucleotide
  Sense strand starting at position 2552 of SEQ ID NO: 3836
ggacuauuguaugaauaaa

SEQ ID NO: 298547 - RNA, 19 nt, Artificial Sequence
  Description of Artificial Sequence: Synthetic oligonucleotide
  Antisense strand to SEQ ID NO: 298546
uuuauucauacaauagucc

SEQ ID NO: 298548 - RNA, 19 nt, Artificial Sequence
  Description of Artificial Sequence: Synthetic oligonucleotide
  Sense strand starting at position 2660 of SEQ ID NO: 3836
guaggaucaauguggguua

SEQ ID NO: 298549 - RNA, 19 nt, Artificial Sequence
  Description of Artificial Sequence: Synthetic oligonucleotide
  Antisense strand to SEQ ID NO: 298548
uaacccacauugauccuac

SEQ ID NO: 298550 - RNA, 19 nt, Artificial Sequence
  Description of Artificial Sequence: Synthetic oligonucleotide
  Sense strand starting at position 2663 of SEQ ID NO: 3836
ggaucaauguggguuaacu

SEQ ID NO: 298551 - RNA, 19 nt, Artificial Sequence
  Description of Artificial Sequence: Synthetic oligonucleotide
  Antisense strand to SEQ ID NO: 298550
aguuaacccacauugaucc

SEQ ID NO: 298552 - RNA, 19 nt, Artificial Sequence
  Description of Artificial Sequence: Synthetic oligonucleotide
  Sense strand starting at position 2770 of SEQ ID NO: 3836
gcauuuaccucagaauagu

SEQ ID NO: 298553 - RNA, 19 nt, Artificial Sequence
  Description of Artificial Sequence: Synthetic oligonucleotide
  Antisense strand to SEQ ID NO: 298552
acuauucugagguaaaugc

SEQ ID NO: 298554 - RNA, 19 nt, Artificial Sequence
  Description of Artificial Sequence: Synthetic oligonucleotide
  Sense strand starting at position 2802 of SEQ ID NO: 3836
acggauuuguaauauacuu

SEQ ID NO: 298555 - RNA, 19 nt, Artificial Sequence
  Description of Artificial Sequence: Synthetic oligonucleotide
  Antisense strand to SEQ ID NO: 298554
aaguauauuacaaauccgu

SEQ ID NO: 298556 - RNA, 19 nt, Artificial Sequence
  Description of Artificial Sequence: Synthetic oligonucleotide
  Sense strand starting at position 3177 of SEQ ID NO: 3836
cuagaugagucccaaagaa

SEQ ID NO: 298557 - RNA, 19 nt, Artificial Sequence
  Description of Artificial Sequence: Synthetic oligonucleotide
  Antisense strand to SEQ ID NO: 298556
uucuuugggacucaucuag

SEQ ID NO: 298558 - RNA, 19 nt, Artificial Sequence
  Description of Artificial Sequence: Synthetic oligonucleotide
  Sense strand starting at position 3258 of SEQ ID NO: 3836
accuuagauucuuuguacu

SEQ ID NO: 298559 - RNA, 19 nt, Artificial Sequence
  Description of Artificial Sequence: Synthetic oligonucleotide
  Antisense strand to SEQ ID NO: 298558
aguacaaagaaucuaaggu

SEQ ID NO: 298560 - RNA, 19 nt, Artificial Sequence
  Description of Artificial Sequence: Synthetic oligonucleotide
  Sense strand starting at position 3260 of SEQ ID NO: 3836
cuuagauucuuuguacuag

SEQ ID NO: 298561 - RNA, 19 nt, Artificial Sequence
  Description of Artificial Sequence: Synthetic oligonucleotide
  Antisense strand to SEQ ID NO: 298560
cuaguacaaagaaucuaag

SEQ ID NO: 298562 - RNA, 19 nt, Artificial Sequence
  Description of Artificial Sequence: Synthetic oligonucleotide
  Sense strand starting at position 3266 of SEQ ID NO: 3836
uucuuuguacuaggacauu

SEQ ID NO: 298563 - RNA, 19 nt, Artificial Sequence
  Description of Artificial Sequence: Synthetic oligonucleotide
  Antisense strand to SEQ ID NO: 298562
aauguccuaguacaaagaa

SEQ ID NO: 298564 - RNA, 19 nt, Artificial Sequence
  Description of Artificial Sequence: Synthetic oligonucleotide
  Sense strand starting at position 3706 of SEQ ID NO: 3836
gaggcuacaccucaauguu

SEQ ID NO: 298565 - RNA, 19 nt, Artificial Sequence
  Description of Artificial Sequence: Synthetic oligonucleotide
  Antisense strand to SEQ ID NO: 298564
aacauugagguguagccuc

SEQ ID NO: 298566 - RNA, 19 nt, Artificial Sequence
  Description of Artificial Sequence: Synthetic oligonucleotide
  Sense strand starting at position 3748 of SEQ ID NO: 3836
aguacuggccguuauuaag

SEQ ID NO: 298567 - RNA, 19 nt, Artificial Sequence
  Description of Artificial Sequence: Synthetic oligonucleotide
  Antisense strand to SEQ ID NO: 298566
cuuaauaacggccaguacu

SEQ ID NO: 298568 - RNA, 19 nt, Artificial Sequence
  Description of Artificial Sequence: Synthetic oligonucleotide
  Sense strand starting at position 3757 of SEQ ID NO: 3836
cguuauuaagaguaucuag

SEQ ID NO: 298569 - RNA, 19 nt, Artificial Sequence
  Description of Artificial Sequence: Synthetic oligonucleotide
  Antisense strand to SEQ ID NO: 298568
cuagauacucuuaauaacg

SEQ ID NO: 298570 - RNA, 19 nt, Artificial Sequence
  Description of Artificial Sequence: Synthetic oligonucleotide
  Sense strand starting at position 3979 of SEQ ID NO: 3836
uagagauagugucucgcuu

SEQ ID NO: 298571 - RNA, 19 nt, Artificial Sequence
  Description of Artificial Sequence: Synthetic oligonucleotide
  Antisense strand to SEQ ID NO: 298570
aagcgagacacuaucucua

SEQ ID NO: 298572 - RNA, 19 nt, Artificial Sequence
  Description of Artificial Sequence: Synthetic oligonucleotide
  Sense strand starting at position 42 of SEQ ID NO: 3837
accagaugugcggaagaca

SEQ ID NO: 298573 - RNA, 19 nt, Artificial Sequence
  Description of Artificial Sequence: Synthetic oligonucleotide
  Antisense strand to SEQ ID NO: 298572
ugucuuccgcacaucuggu

SEQ ID NO: 298574 - RNA, 19 nt, Artificial Sequence
  Description of Artificial Sequence: Synthetic oligonucleotide
  Sense strand starting at position 62 of SEQ ID NO: 3837
cgguguauucaggaagcaa

SEQ ID NO: 298575 - RNA, 19 nt, Artificial Sequence
  Description of Artificial Sequence: Synthetic oligonucleotide
  Antisense strand to SEQ ID NO: 298574
uugcuuccugaauacaccg

SEQ ID NO: 298576 - RNA, 19 nt, Artificial Sequence
  Description of Artificial Sequence: Synthetic oligonucleotide
  Sense strand starting at position 148 of SEQ ID NO: 3837
agagguuuccauggaauau

SEQ ID NO: 298577 - RNA, 19 nt, Artificial Sequence
  Description of Artificial Sequence: Synthetic oligonucleotide
  Antisense strand to SEQ ID NO: 298576
auauuccauggaaaccucu

SEQ ID NO: 298578 - RNA, 19 nt, Artificial Sequence
  Description of Artificial Sequence: Synthetic oligonucleotide
  Sense strand starting at position 159 of SEQ ID NO: 3837
uggaauauuccaggcuuug

SEQ ID NO: 298579 - RNA, 19 nt, Artificial Sequence
  Description of Artificial Sequence: Synthetic oligonucleotide
  Antisense strand to SEQ ID NO: 298578
caaagccuggaauauucca

SEQ ID NO: 298580 - RNA, 19 nt, Artificial Sequence
  Description of Artificial Sequence: Synthetic oligonucleotide
  Sense strand starting at position 276 of SEQ ID NO: 3837
gucuacagaugccuauuau

SEQ ID NO: 298581 - RNA, 19 nt, Artificial Sequence
  Description of Artificial Sequence: Synthetic oligonucleotide
  Antisense strand to SEQ ID NO: 298580
auaauaggcaucuguagac

SEQ ID NO: 298582 - RNA, 19 nt, Artificial Sequence
  Description of Artificial Sequence: Synthetic oligonucleotide
  Sense strand starting at position 287 of SEQ ID NO: 3837
ccuauuauagguuaucuga

SEQ ID NO: 298583 - RNA, 19 nt, Artificial Sequence
  Description of Artificial Sequence: Synthetic oligonucleotide
  Antisense strand to SEQ ID NO: 298582
ucagauaaccuauaauagg

SEQ ID NO: 298584 - RNA, 19 nt, Artificial Sequence
  Description of Artificial Sequence: Synthetic oligonucleotide
  Sense strand starting at position 289 of SEQ ID NO: 3837
uauuauagguuaucugaag

SEQ ID NO: 298585 - RNA, 19 nt, Artificial Sequence
  Description of Artificial Sequence: Synthetic oligonucleotide
  Antisense strand to SEQ ID NO: 298584
cuucagauaaccuauaaua

SEQ ID NO: 298586 - RNA, 19 nt, Artificial Sequence
  Description of Artificial Sequence: Synthetic oligonucleotide
  Sense strand starting at position 635 of SEQ ID NO: 3837
aggcuucccuaagugacaa

SEQ ID NO: 298587 - RNA, 19 nt, Artificial Sequence
  Description of Artificial Sequence: Synthetic oligonucleotide
  Antisense strand to SEQ ID NO: 298586
uugucacuuagggaagccu

SEQ ID NO: 298588 - RNA, 19 nt, Artificial Sequence
  Description of Artificial Sequence: Synthetic oligonucleotide
  Sense strand starting at position 685 of SEQ ID NO: 3837
guucuaagucaagggacaa

SEQ ID NO: 298589 - RNA, 19 nt, Artificial Sequence
  Description of Artificial Sequence: Synthetic oligonucleotide
  Antisense strand to SEQ ID NO: 298588
uugucccuugacuuagaac

SEQ ID NO: 298590 - RNA, 19 nt, Artificial Sequence
  Description of Artificial Sequence: Synthetic oligonucleotide
  Sense strand starting at position 724 of SEQ ID NO: 3837
aagugcuuggcccaaggaa

SEQ ID NO: 298591 - RNA, 19 nt, Artificial Sequence
  Description of Artificial Sequence: Synthetic oligonucleotide
  Antisense strand to SEQ ID NO: 298590
uuccuugggccaagcacuu

SEQ ID NO: 298592 - RNA, 19 nt, Artificial Sequence
  Description of Artificial Sequence: Synthetic oligonucleotide
  Sense strand starting at position 760 of SEQ ID NO: 3837
gcgacucugccagguauuu

SEQ ID NO: 298593 - RNA, 19 nt, Artificial Sequence
  Description of Artificial Sequence: Synthetic oligonucleotide
  Antisense strand to SEQ ID NO: 298592
aaauaccuggcagagucgc

SEQ ID NO: 298594 - RNA, 19 nt, Artificial Sequence
  Description of Artificial Sequence: Synthetic oligonucleotide
  Sense strand starting at position 787 of SEQ ID NO: 3837
aagauaaggugauauuugu

SEQ ID NO: 298595 - RNA, 19 nt, Artificial Sequence
  Description of Artificial Sequence: Synthetic oligonucleotide
  Antisense strand to SEQ ID NO: 298594
acaaauaucaccuuaucuu

SEQ ID NO: 298596 - RNA, 19 nt, Artificial Sequence
  Description of Artificial Sequence: Synthetic oligonucleotide
  Sense strand starting at position 2559 of SEQ ID NO: 3837
gaaacuugauuccuuaggu

SEQ ID NO: 298597 - RNA, 19 nt, Artificial Sequence
  Description of Artificial Sequence: Synthetic oligonucleotide
  Antisense strand to SEQ ID NO: 298596
accuaaggaaucaaguuuc

SEQ ID NO: 298598 - RNA, 19 nt, Artificial Sequence
  Description of Artificial Sequence: Synthetic oligonucleotide
  Sense strand starting at position 2673 of SEQ ID NO: 3837
uuuagaaaguuugcucaaa

SEQ ID NO: 298599 - RNA, 19 nt, Artificial Sequence
  Description of Artificial Sequence: Synthetic oligonucleotide
  Antisense strand to SEQ ID NO: 298598
uuugagcaaacuuucuaaa

SEQ ID NO: 298600 - RNA, 19 nt, Artificial Sequence
  Description of Artificial Sequence: Synthetic oligonucleotide
  Sense strand starting at position 2674 of SEQ ID NO: 3837
uuagaaaguuugcucaaau

SEQ ID NO: 298601 - RNA, 19 nt, Artificial Sequence
  Description of Artificial Sequence: Synthetic oligonucleotide
  Antisense strand to SEQ ID NO: 298600
auuugagcaaacuuucuaa

SEQ ID NO: 298602 - RNA, 19 nt, Artificial Sequence
  Description of Artificial Sequence: Synthetic oligonucleotide
  Sense strand starting at position 2755 of SEQ ID NO: 3837
ucuuuaagagcguauacuu

SEQ ID NO: 298603 - RNA, 19 nt, Artificial Sequence
  Description of Artificial Sequence: Synthetic oligonucleotide
  Antisense strand to SEQ ID NO: 298602
aaguauacgcucuuaaaga

SEQ ID NO: 298604 - RNA, 19 nt, Artificial Sequence
  Description of Artificial Sequence: Synthetic oligonucleotide
  Sense strand starting at position 2796 of SEQ ID NO: 3837
gcaugaauaaacuguguug

SEQ ID NO: 298605 - RNA, 19 nt, Artificial Sequence
  Description of Artificial Sequence: Synthetic oligonucleotide
  Antisense strand to SEQ ID NO: 298604
caacacaguuuauucaugc

SEQ ID NO: 298606 - RNA, 19 nt, Artificial Sequence
  Description of Artificial Sequence: Synthetic oligonucleotide
  Sense strand starting at position 2798 of SEQ ID NO: 3837
augaauaaacuguguugga

SEQ ID NO: 298607 - RNA, 19 nt, Artificial Sequence
  Description of Artificial Sequence: Synthetic oligonucleotide
  Antisense strand to SEQ ID NO: 298606
uccaacacaguuuauucau

SEQ ID NO: 298608 - RNA, 19 nt, Artificial Sequence
  Description of Artificial Sequence: Synthetic oligonucleotide
  Sense strand starting at position 2799 of SEQ ID NO: 3837
ugaauaaacuguguuggaa

SEQ ID NO: 298609 - RNA, 19 nt, Artificial Sequence
  Description of Artificial Sequence: Synthetic oligonucleotide
  Antisense strand to SEQ ID NO: 298608
uuccaacacaguuuauuca

SEQ ID NO: 298610 - RNA, 19 nt, Artificial Sequence
  Description of Artificial Sequence: Synthetic oligonucleotide
  Sense strand starting at position 2893 of SEQ ID NO: 3837
uccuaauuauaggugucau

SEQ ID NO: 298611 - RNA, 19 nt, Artificial Sequence
  Description of Artificial Sequence: Synthetic oligonucleotide
  Antisense strand to SEQ ID NO: 298610
augacaccuauaauuagga

SEQ ID NO: 298612 - RNA, 19 nt, Artificial Sequence
  Description of Artificial Sequence: Synthetic oligonucleotide
  Sense strand starting at position 2906 of SEQ ID NO: 3837
ugucauauuuaacagugaa

SEQ ID NO: 298613 - RNA, 19 nt, Artificial Sequence
  Description of Artificial Sequence: Synthetic oligonucleotide
  Antisense strand to SEQ ID NO: 298612
uucacuguuaaauaugaca

SEQ ID NO: 298614 - RNA, 19 nt, Artificial Sequence
  Description of Artificial Sequence: Synthetic oligonucleotide
  Sense strand starting at position 2990 of SEQ ID NO: 3837
gcaguaaaccaauaguauu

SEQ ID NO: 298615 - RNA, 19 nt, Artificial Sequence
  Description of Artificial Sequence: Synthetic oligonucleotide
  Antisense strand to SEQ ID NO: 298614
aauacuauugguuuacugc

SEQ ID NO: 298616 - RNA, 19 nt, Artificial Sequence
  Description of Artificial Sequence: Synthetic oligonucleotide
  Sense strand starting at position 3011 of SEQ ID NO: 3837
ucguuuggccaagaugauc

SEQ ID NO: 298617 - RNA, 19 nt, Artificial Sequence
  Description of Artificial Sequence: Synthetic oligonucleotide
  Antisense strand to SEQ ID NO: 298616
gaucaucuuggccaaacga

SEQ ID NO: 298618 - RNA, 19 nt, Artificial Sequence
  Description of Artificial Sequence: Synthetic oligonucleotide
  Sense strand starting at position 3124 of SEQ ID NO: 3837
aguguauguacagaaaucu

SEQ ID NO: 298619 - RNA, 19 nt, Artificial Sequence
  Description of Artificial Sequence: Synthetic oligonucleotide
  Antisense strand to SEQ ID NO: 298618
agauuucuguacauacacu

SEQ ID NO: 298620 - RNA, 19 nt, Artificial Sequence
  Description of Artificial Sequence: Synthetic oligonucleotide
  Sense strand starting at position 3189 of SEQ ID NO: 3837
uaggaaaguuaguugucua

SEQ ID NO: 298621 - RNA, 19 nt, Artificial Sequence
  Description of Artificial Sequence: Synthetic oligonucleotide
  Antisense strand to SEQ ID NO: 298620
uagacaacuaacuuuccua

SEQ ID NO: 298622 - RNA, 19 nt, Artificial Sequence
  Description of Artificial Sequence: Synthetic oligonucleotide
  Sense strand starting at position 3190 of SEQ ID NO: 3837
aggaaaguuaguugucuaa

SEQ ID NO: 298623 - RNA, 19 nt, Artificial Sequence
  Description of Artificial Sequence: Synthetic oligonucleotide
  Antisense strand to SEQ ID NO: 298622
uuagacaacuaacuuuccu

SEQ ID NO: 298624 - RNA, 19 nt, Artificial Sequence
  Description of Artificial Sequence: Synthetic oligonucleotide
  Sense strand starting at position 3216 of SEQ ID NO: 3837
auugauguccacugaagau

SEQ ID NO: 298625 - RNA, 19 nt, Artificial Sequence
  Description of Artificial Sequence: Synthetic oligonucleotide
  Antisense strand to SEQ ID NO: 298624
aucuucaguggacaucaau

SEQ ID NO: 298626 - RNA, 19 nt, Artificial Sequence
  Description of Artificial Sequence: Synthetic oligonucleotide
  Sense strand starting at position 3241 of SEQ ID NO: 3837
acuuaaucucuuggagcau

SEQ ID NO: 298627 - RNA, 19 nt, Artificial Sequence
  Description of Artificial Sequence: Synthetic oligonucleotide
  Antisense strand to SEQ ID NO: 298626
augcuccaagagauuaagu

SEQ ID NO: 298628 - RNA, 19 nt, Artificial Sequence
  Description of Artificial Sequence: Synthetic oligonucleotide
  Sense strand starting at position 3323 of SEQ ID NO: 3837
aaguguacauucuuugaug

SEQ ID NO: 298629 - RNA, 19 nt, Artificial Sequence
  Description of Artificial Sequence: Synthetic oligonucleotide
  Antisense strand to SEQ ID NO: 298628
caucaaagaauguacacuu

SEQ ID NO: 298630 - RNA, 19 nt, Artificial Sequence
  Description of Artificial Sequence: Synthetic oligonucleotide
  Sense strand starting at position 3330 of SEQ ID NO: 3837
cauucuuugaugcggagga

SEQ ID NO: 298631 - RNA, 19 nt, Artificial Sequence
  Description of Artificial Sequence: Synthetic oligonucleotide
  Antisense strand to SEQ ID NO: 298630
uccuccgcaucaaagaaug

SEQ ID NO: 298632 - RNA, 19 nt, Artificial Sequence
  Description of Artificial Sequence: Synthetic oligonucleotide
  Sense strand starting at position 3404 of SEQ ID NO: 3837
auucuaggccucugaggaa

SEQ ID NO: 298633 - RNA, 19 nt, Artificial Sequence
  Description of Artificial Sequence: Synthetic oligonucleotide
  Antisense strand to SEQ ID NO: 298632
uuccucagaggccuagaau

SEQ ID NO: 298634 - RNA, 19 nt, Artificial Sequence
  Description of Artificial Sequence: Synthetic oligonucleotide
  Sense strand starting at position 3607 of SEQ ID NO: 3837
ccaggaauguucuugggac

SEQ ID NO: 298635 - RNA, 19 nt, Artificial Sequence
  Description of Artificial Sequence: Synthetic oligonucleotide
  Antisense strand to SEQ ID NO: 298634
gucccaagaacauuccugg

SEQ ID NO: 298636 - RNA, 19 nt, Artificial Sequence
  Description of Artificial Sequence: Synthetic oligonucleotide
  Sense strand starting at position 3609 of SEQ ID NO: 3837
aggaauguucuugggacuu

SEQ ID NO: 298637 - RNA, 19 nt, Artificial Sequence
  Description of Artificial Sequence: Synthetic oligonucleotide
  Antisense strand to SEQ ID NO: 298636
aagucccaagaacauuccu

SEQ ID NO: 298638 - RNA, 19 nt, Artificial Sequence
  Description of Artificial Sequence: Synthetic oligonucleotide
  Sense strand starting at position 3637 of SEQ ID NO: 3837
acaugaugccgucaagauc

SEQ ID NO: 298639 - RNA, 19 nt, Artificial Sequence
  Description of Artificial Sequence: Synthetic oligonucleotide
  Antisense strand to SEQ ID NO: 298638
gaucuugacggcaucaugu

SEQ ID NO: 298640 - RNA, 19 nt, Artificial Sequence
  Description of Artificial Sequence: Synthetic oligonucleotide
  Sense strand starting at position 3640 of SEQ ID NO: 3837
ugaugccgucaagaucaau

SEQ ID NO: 298641 - RNA, 19 nt, Artificial Sequence
  Description of Artificial Sequence: Synthetic oligonucleotide
  Antisense strand to SEQ ID NO: 298640
auugaucuugacggcauca

SEQ ID NO: 298642 - RNA, 19 nt, Artificial Sequence
  Description of Artificial Sequence: Synthetic oligonucleotide
  Sense strand starting at position 3771 of SEQ ID NO: 3837
gaugaagacuugcuugagu

SEQ ID NO: 298643 - RNA, 19 nt, Artificial Sequence
  Description of Artificial Sequence: Synthetic oligonucleotide
  Antisense strand to SEQ ID NO: 298642
acucaagcaagucuucauc

SEQ ID NO: 298644 - RNA, 19 nt, Artificial Sequence
  Description of Artificial Sequence: Synthetic oligonucleotide
  Sense strand starting at position 3774 of SEQ ID NO: 3837
gaagacuugcuugagugga

SEQ ID NO: 298645 - RNA, 19 nt, Artificial Sequence
  Description of Artificial Sequence: Synthetic oligonucleotide
  Antisense strand to SEQ ID NO: 298644
uccacucaagcaagucuuc

SEQ ID NO: 298646 - RNA, 19 nt, Artificial Sequence
  Description of Artificial Sequence: Synthetic oligonucleotide
  Sense strand starting at position 3788 of SEQ ID NO: 3837
guggaugacucagugcaca

SEQ ID NO: 298647 - RNA, 19 nt, Artificial Sequence
  Description of Artificial Sequence: Synthetic oligonucleotide
  Antisense strand to SEQ ID NO: 298646
ugugcacugagucauccac

SEQ ID NO: 298648 - RNA, 19 nt, Artificial Sequence
  Description of Artificial Sequence: Synthetic oligonucleotide
  Sense strand starting at position 3818 of SEQ ID NO: 3837
uacaguaaaucgguuuaaa

SEQ ID NO: 298649 - RNA, 19 nt, Artificial Sequence
  Description of Artificial Sequence: Synthetic oligonucleotide
  Antisense strand to SEQ ID NO: 298648
uuuaaaccgauuuacugua

SEQ ID NO: 298650 - RNA, 19 nt, Artificial Sequence
  Description of Artificial Sequence: Synthetic oligonucleotide
  Sense strand starting at position 3928 of SEQ ID NO: 3837
gaguuaauguuucuguaaa

SEQ ID NO: 298651 - RNA, 19 nt, Artificial Sequence
  Description of Artificial Sequence: Synthetic oligonucleotide
  Antisense strand to SEQ ID NO: 298650
uuuacagaaacauuaacuc

SEQ ID NO: 298652 - RNA, 19 nt, Artificial Sequence
  Description of Artificial Sequence: Synthetic oligonucleotide
  Sense strand starting at position 111 of SEQ ID NO: 3838
uguugugcccugccuuaau

SEQ ID NO: 298653 - RNA, 19 nt, Artificial Sequence
  Description of Artificial Sequence: Synthetic oligonucleotide
  Antisense strand to SEQ ID NO: 298652
auuaaggcagggcacaaca

SEQ ID NO: 298654 - RNA, 19 nt, Artificial Sequence
  Description of Artificial Sequence: Synthetic oligonucleotide
  Sense strand starting at position 391 of SEQ ID NO: 3838
agaaguguguucuuccuaa

SEQ ID NO: 298655 - RNA, 19 nt, Artificial Sequence
  Description of Artificial Sequence: Synthetic oligonucleotide
  Antisense strand to SEQ ID NO: 298654
uuaggaagaacacacuucu

SEQ ID NO: 298656 - RNA, 19 nt, Artificial Sequence
  Description of Artificial Sequence: Synthetic oligonucleotide
  Sense strand starting at position 556 of SEQ ID NO: 3838
gcaauaucagcccagguca

SEQ ID NO: 298657 - RNA, 19 nt, Artificial Sequence
  Description of Artificial Sequence: Synthetic oligonucleotide
  Antisense strand to SEQ ID NO: 298656
ugaccugggcugauauugc

SEQ ID NO: 298658 - RNA, 19 nt, Artificial Sequence
  Description of Artificial Sequence: Synthetic oligonucleotide
  Sense strand starting at position 600 of SEQ ID NO: 3838
cagacuugaucuguccaga

SEQ ID NO: 298659 - RNA, 19 nt, Artificial Sequence
  Description of Artificial Sequence: Synthetic oligonucleotide
  Antisense strand to SEQ ID NO: 298658
ucuggacagaucaagucug

SEQ ID NO: 298660 - RNA, 19 nt, Artificial Sequence
  Description of Artificial Sequence: Synthetic oligonucleotide
  Sense strand starting at position 605 of SEQ ID NO: 3838
uugaucuguccagacccau

SEQ ID NO: 298661 - RNA, 19 nt, Artificial Sequence
  Description of Artificial Sequence: Synthetic oligonucleotide
  Antisense strand to SEQ ID NO: 298660
augggucuggacagaucaa

SEQ ID NO: 298662 - RNA, 19 nt, Artificial Sequence
  Description of Artificial Sequence: Synthetic oligonucleotide
  Sense strand starting at position 761 of SEQ ID NO: 3838
aguccauagccucaggauu

SEQ ID NO: 298663 - RNA, 19 nt, Artificial Sequence
  Description of Artificial Sequence: Synthetic oligonucleotide
  Antisense strand to SEQ ID NO: 298662
aauccugaggcuauggacu

SEQ ID NO: 298664 - RNA, 19 nt, Artificial Sequence
  Description of Artificial Sequence: Synthetic oligonucleotide
  Sense strand starting at position 902 of SEQ ID NO: 3838
gagcuaugcagacgggaau

SEQ ID NO: 298665 - RNA, 19 nt, Artificial Sequence
  Description of Artificial Sequence: Synthetic oligonucleotide
  Antisense strand to SEQ ID NO: 298664
auucccgucugcauagcuc

SEQ ID NO: 298666 - RNA, 19 nt, Artificial Sequence
  Description of Artificial Sequence: Synthetic oligonucleotide
  Sense strand starting at position 970 of SEQ ID NO: 3838
aaacuucuagccuggagga

SEQ ID NO: 298667 - RNA, 19 nt, Artificial Sequence
  Description of Artificial Sequence: Synthetic oligonucleotide
  Antisense strand to SEQ ID NO: 298666
uccuccaggcuagaaguuu

SEQ ID NO: 298668 - RNA, 19 nt, Artificial Sequence
  Description of Artificial Sequence: Synthetic oligonucleotide
  Sense strand starting at position 997 of SEQ ID NO: 3838
ucguguuugcgguuagucu

SEQ ID NO: 298669 - RNA, 19 nt, Artificial Sequence
  Description of Artificial Sequence: Synthetic oligonucleotide
  Antisense strand to SEQ ID NO: 298668
agacuaaccgcaaacacga

SEQ ID NO: 298670 - RNA, 19 nt, Artificial Sequence
  Description of Artificial Sequence: Synthetic oligonucleotide
  Sense strand starting at position 999 of SEQ ID NO: 3838
guguuugcgguuagucuga

SEQ ID NO: 298671 - RNA, 19 nt, Artificial Sequence
  Description of Artificial Sequence: Synthetic oligonucleotide
  Antisense strand to SEQ ID NO: 298670
ucagacuaaccgcaaacac

SEQ ID NO: 298672 - RNA, 19 nt, Artificial Sequence
  Description of Artificial Sequence: Synthetic oligonucleotide
  Sense strand starting at position 1126 of SEQ ID NO: 3838
cuucuucugucuuuagaua

SEQ ID NO: 298673 - RNA, 19 nt, Artificial Sequence
  Description of Artificial Sequence: Synthetic oligonucleotide
  Antisense strand to SEQ ID NO: 298672
uaucuaaagacagaagaag

SEQ ID NO: 298674 - RNA, 19 nt, Artificial Sequence
  Description of Artificial Sequence: Synthetic oligonucleotide
  Sense strand starting at position 1127 of SEQ ID NO: 3838
uucuucugucuuuagauau

SEQ ID NO: 298675 - RNA, 19 nt, Artificial Sequence
  Description of Artificial Sequence: Synthetic oligonucleotide
  Antisense strand to SEQ ID NO: 298674
auaucuaaagacagaagaa

SEQ ID NO: 298676 - RNA, 19 nt, Artificial Sequence
  Description of Artificial Sequence: Synthetic oligonucleotide
  Sense strand starting at position 1152 of SEQ ID NO: 3838
cgcuaauuacaugaaguau

SEQ ID NO: 298677 - RNA, 19 nt, Artificial Sequence
  Description of Artificial Sequence: Synthetic oligonucleotide
  Antisense strand to SEQ ID NO: 298676
auacuucauguaauuagcg

SEQ ID NO: 298678 - RNA, 19 nt, Artificial Sequence
  Description of Artificial Sequence: Synthetic oligonucleotide
  Sense strand starting at position 1167 of SEQ ID NO: 3838
guaucauuauuauucgaag

SEQ ID NO: 298679 - RNA, 19 nt, Artificial Sequence
  Description of Artificial Sequence: Synthetic oligonucleotide
  Antisense strand to SEQ ID NO: 298678
cuucgaauaauaaugauac

SEQ ID NO: 298680 - RNA, 19 nt, Artificial Sequence
  Description of Artificial Sequence: Synthetic oligonucleotide
  Sense strand starting at position 1173 of SEQ ID NO: 3838
uuauuauucgaagaaagca

SEQ ID NO: 298681 - RNA, 19 nt, Artificial Sequence
  Description of Artificial Sequence: Synthetic oligonucleotide
  Antisense strand to SEQ ID NO: 298680
ugcuuucuucgaauaauaa

SEQ ID NO: 298682 - RNA, 19 nt, Artificial Sequence
  Description of Artificial Sequence: Synthetic oligonucleotide
  Sense strand starting at position 1332 of SEQ ID NO: 3838
uggucauaccugcaggaaa

SEQ ID NO: 298683 - RNA, 19 nt, Artificial Sequence
  Description of Artificial Sequence: Synthetic oligonucleotide
  Antisense strand to SEQ ID NO: 298682
uuuccugcagguaugacca

SEQ ID NO: 298684 - RNA, 19 nt, Artificial Sequence
  Description of Artificial Sequence: Synthetic oligonucleotide
  Sense strand starting at position 1334 of SEQ ID NO: 3838
gucauaccugcaggaaaua

SEQ ID NO: 298685 - RNA, 19 nt, Artificial Sequence
  Description of Artificial Sequence: Synthetic oligonucleotide
  Antisense strand to SEQ ID NO: 298684
uauuuccugcagguaugac

SEQ ID NO: 298686 - RNA, 19 nt, Artificial Sequence
  Description of Artificial Sequence: Synthetic oligonucleotide
  Sense strand starting at position 1643 of SEQ ID NO: 3838
ucggaacugagucgauauu

SEQ ID NO: 298687 - RNA, 19 nt, Artificial Sequence
  Description of Artificial Sequence: Synthetic oligonucleotide
  Antisense strand to SEQ ID NO: 298686
aauaucgacucaguuccga

SEQ ID NO: 298688 - RNA, 19 nt, Artificial Sequence
  Description of Artificial Sequence: Synthetic oligonucleotide
  Sense strand starting at position 1862 of SEQ ID NO: 3838
ccgcaaacuuucccagaca

SEQ ID NO: 298689 - RNA, 19 nt, Artificial Sequence
  Description of Artificial Sequence: Synthetic oligonucleotide
  Antisense strand to SEQ ID NO: 298688
ugucugggaaaguuugcgg

SEQ ID NO: 298690 - RNA, 19 nt, Artificial Sequence
  Description of Artificial Sequence: Synthetic oligonucleotide
  Sense strand starting at position 2312 of SEQ ID NO: 3838
ggcgguaagucuaugaguu

SEQ ID NO: 298691 - RNA, 19 nt, Artificial Sequence
  Description of Artificial Sequence: Synthetic oligonucleotide
  Antisense strand to SEQ ID NO: 298690
aacucauagacuuaccgcc

SEQ ID NO: 298692 - RNA, 19 nt, Artificial Sequence
  Description of Artificial Sequence: Synthetic oligonucleotide
  Sense strand starting at position 2442 of SEQ ID NO: 3838
gcggucgugcuuucuaagu

SEQ ID NO: 298693 - RNA, 19 nt, Artificial Sequence
  Description of Artificial Sequence: Synthetic oligonucleotide
  Antisense strand to SEQ ID NO: 298692
acuuagaaagcacgaccgc

SEQ ID NO: 298694 - RNA, 19 nt, Artificial Sequence
  Description of Artificial Sequence: Synthetic oligonucleotide
  Sense strand starting at position 2589 of SEQ ID NO: 3838
gggcgaaucaaucauagca

SEQ ID NO: 298695 - RNA, 19 nt, Artificial Sequence
  Description of Artificial Sequence: Synthetic oligonucleotide
  Antisense strand to SEQ ID NO: 298694
ugcuaugauugauucgccc

SEQ ID NO: 298696 - RNA, 19 nt, Artificial Sequence
  Description of Artificial Sequence: Synthetic oligonucleotide
  Sense strand starting at position 2782 of SEQ ID NO: 3838
ggcaaaugacuccaggcaa

SEQ ID NO: 298697 - RNA, 19 nt, Artificial Sequence
  Description of Artificial Sequence: Synthetic oligonucleotide
  Antisense strand to SEQ ID NO: 298696
uugccuggagucauuugcc

SEQ ID NO: 298698 - RNA, 19 nt, Artificial Sequence
  Description of Artificial Sequence: Synthetic oligonucleotide
  Sense strand starting at position 2913 of SEQ ID NO: 3838
gagagacugagcugaguuu

SEQ ID NO: 298699 - RNA, 19 nt, Artificial Sequence
  Description of Artificial Sequence: Synthetic oligonucleotide
  Antisense strand to SEQ ID NO: 298698
aaacucagcucagucucuc

SEQ ID NO: 298700 - RNA, 19 nt, Artificial Sequence
  Description of Artificial Sequence: Synthetic oligonucleotide
  Sense strand starting at position 3112 of SEQ ID NO: 3838
cucagugaauccuugagga

SEQ ID NO: 298701 - RNA, 19 nt, Artificial Sequence
  Description of Artificial Sequence: Synthetic oligonucleotide
  Antisense strand to SEQ ID NO: 298700
uccucaaggauucacugag

SEQ ID NO: 298702 - RNA, 19 nt, Artificial Sequence
  Description of Artificial Sequence: Synthetic oligonucleotide
  Sense strand starting at position 3159 of SEQ ID NO: 3838
uuaacaguccuguaggaug

SEQ ID NO: 298703 - RNA, 19 nt, Artificial Sequence
  Description of Artificial Sequence: Synthetic oligonucleotide
  Antisense strand to SEQ ID NO: 298702
cauccuacaggacuguuaa

SEQ ID NO: 298704 - RNA, 19 nt, Artificial Sequence
  Description of Artificial Sequence: Synthetic oligonucleotide
  Sense strand starting at position 3265 of SEQ ID NO: 3838
guggaaaggcaaugaauua

SEQ ID NO: 298705 - RNA, 19 nt, Artificial Sequence
  Description of Artificial Sequence: Synthetic oligonucleotide
  Antisense strand to SEQ ID NO: 298704
uaauucauugccuuuccac

SEQ ID NO: 298706 - RNA, 19 nt, Artificial Sequence
  Description of Artificial Sequence: Synthetic oligonucleotide
  Sense strand starting at position 3355 of SEQ ID NO: 3838
aguggacacuucuuuguau

SEQ ID NO: 298707 - RNA, 19 nt, Artificial Sequence
  Description of Artificial Sequence: Synthetic oligonucleotide
  Antisense strand to SEQ ID NO: 298706
auacaaagaaguguccacu

SEQ ID NO: 298708 - RNA, 19 nt, Artificial Sequence
  Description of Artificial Sequence: Synthetic oligonucleotide
  Sense strand starting at position 3451 of SEQ ID NO: 3838
auggaaauauagucaguac

SEQ ID NO: 298709 - RNA, 19 nt, Artificial Sequence
  Description of Artificial Sequence: Synthetic oligonucleotide
  Antisense strand to SEQ ID NO: 298708
guacugacuauauuuccau

SEQ ID NO: 298710 - RNA, 19 nt, Artificial Sequence
  Description of Artificial Sequence: Synthetic oligonucleotide
  Sense strand starting at position 3574 of SEQ ID NO: 3838
aggaucuauuuaggauacu

SEQ ID NO: 298711 - RNA, 19 nt, Artificial Sequence
  Description of Artificial Sequence: Synthetic oligonucleotide
  Antisense strand to SEQ ID NO: 298710
aguauccuaaauagauccu

SEQ ID NO: 298712 - RNA, 19 nt, Artificial Sequence
  Description of Artificial Sequence: Synthetic oligonucleotide
  Sense strand starting at position 3575 of SEQ ID NO: 3838
ggaucuauuuaggauacuu

SEQ ID NO: 298713 - RNA, 19 nt, Artificial Sequence
  Description of Artificial Sequence: Synthetic oligonucleotide
  Antisense strand to SEQ ID NO: 298712
aaguauccuaaauagaucc

SEQ ID NO: 298714 - RNA, 19 nt, Artificial Sequence
  Description of Artificial Sequence: Synthetic oligonucleotide
  Sense strand starting at position 3618 of SEQ ID NO: 3838
ugugcuuaugcuuaauaua

SEQ ID NO: 298715 - RNA, 19 nt, Artificial Sequence
  Description of Artificial Sequence: Synthetic oligonucleotide
  Antisense strand to SEQ ID NO: 298714
uauauuaagcauaagcaca

SEQ ID NO: 298716 - RNA, 19 nt, Artificial Sequence
  Description of Artificial Sequence: Synthetic oligonucleotide
  Sense strand starting at position 3689 of SEQ ID NO: 3838
gcuaccuuccaguaauggu

SEQ ID NO: 298717 - RNA, 19 nt, Artificial Sequence
  Description of Artificial Sequence: Synthetic oligonucleotide
  Antisense strand to SEQ ID NO: 298716
accauuacuggaagguagc

SEQ ID NO: 298718 - RNA, 19 nt, Artificial Sequence
  Description of Artificial Sequence: Synthetic oligonucleotide
  Sense strand starting at position 3696 of SEQ ID NO: 3838
uccaguaaugguuaagagu

SEQ ID NO: 298719 - RNA, 19 nt, Artificial Sequence
  Description of Artificial Sequence: Synthetic oligonucleotide
  Antisense strand to SEQ ID NO: 298718
acucuuaaccauuacugga

SEQ ID NO: 298720 - RNA, 19 nt, Artificial Sequence
  Description of Artificial Sequence: Synthetic oligonucleotide
  Sense strand starting at position 3703 of SEQ ID NO: 3838
augguuaagaguugaggaa

SEQ ID NO: 298721 - RNA, 19 nt, Artificial Sequence
  Description of Artificial Sequence: Synthetic oligonucleotide
  Antisense strand to SEQ ID NO: 298720
uuccucaacucuuaaccau

SEQ ID NO: 298722 - RNA, 19 nt, Artificial Sequence
  Description of Artificial Sequence: Synthetic oligonucleotide
  Sense strand starting at position 3722 of SEQ ID NO: 3838
gggcaacuugccuagggaa

SEQ ID NO: 298723 - RNA, 19 nt, Artificial Sequence
  Description of Artificial Sequence: Synthetic oligonucleotide
  Antisense strand to SEQ ID NO: 298722
uucccuaggcaaguugccc

SEQ ID NO: 298724 - RNA, 19 nt, Artificial Sequence
  Description of Artificial Sequence: Synthetic oligonucleotide
  Sense strand starting at position 3724 of SEQ ID NO: 3838
gcaacuugccuagggaaga

SEQ ID NO: 298725 - RNA, 19 nt, Artificial Sequence
  Description of Artificial Sequence: Synthetic oligonucleotide
  Antisense strand to SEQ ID NO: 298724
ucuucccuaggcaaguugc

SEQ ID NO: 298726 - RNA, 19 nt, Artificial Sequence
  Description of Artificial Sequence: Synthetic oligonucleotide
  Sense strand starting at position 3777 of SEQ ID NO: 3838
cugguuaacuugucagaga

SEQ ID NO: 298727 - RNA, 19 nt, Artificial Sequence
  Description of Artificial Sequence: Synthetic oligonucleotide
  Antisense strand to SEQ ID NO: 298726
ucucugacaaguuaaccag

SEQ ID NO: 298728 - RNA, 19 nt, Artificial Sequence
  Description of Artificial Sequence: Synthetic oligonucleotide
  Sense strand starting at position 3785 of SEQ ID NO: 3838
cuugucagagauuguucca

SEQ ID NO: 298729 - RNA, 19 nt, Artificial Sequence
  Description of Artificial Sequence: Synthetic oligonucleotide
  Antisense strand to SEQ ID NO: 298728
uggaacaaucucugacaag

SEQ ID NO: 298730 - RNA, 19 nt, Artificial Sequence
  Description of Artificial Sequence: Synthetic oligonucleotide
  Sense strand starting at position 3792 of SEQ ID NO: 3838
gagauuguuccauggaaac

SEQ ID NO: 298731 - RNA, 19 nt, Artificial Sequence
  Description of Artificial Sequence: Synthetic oligonucleotide
  Antisense strand to SEQ ID NO: 298730
guuuccauggaacaaucuc

SEQ ID NO: 298732 - RNA, 19 nt, Artificial Sequence
  Description of Artificial Sequence: Synthetic oligonucleotide
  Sense strand starting at position 312 of SEQ ID NO: 3839
gcaauaucagcccagguca

SEQ ID NO: 298733 - RNA, 19 nt, Artificial Sequence
  Description of Artificial Sequence: Synthetic oligonucleotide
  Antisense strand to SEQ ID NO: 298732
ugaccugggcugauauugc

SEQ ID NO: 298734 - RNA, 19 nt, Artificial Sequence
  Description of Artificial Sequence: Synthetic oligonucleotide
  Sense strand starting at position 356 of SEQ ID NO: 3839
cagacuugaucuguccaga

SEQ ID NO: 298735 - RNA, 19 nt, Artificial Sequence
  Description of Artificial Sequence: Synthetic oligonucleotide
  Antisense strand to SEQ ID NO: 298734
ucuggacagaucaagucug

SEQ ID NO: 298736 - RNA, 19 nt, Artificial Sequence
  Description of Artificial Sequence: Synthetic oligonucleotide
  Sense strand starting at position 361 of SEQ ID NO: 3839
uugaucuguccagacccau

SEQ ID NO: 298737 - RNA, 19 nt, Artificial Sequence
  Description of Artificial Sequence: Synthetic oligonucleotide
  Antisense strand to SEQ ID NO: 298736
augggucuggacagaucaa

SEQ ID NO: 298738 - RNA, 19 nt, Artificial Sequence
  Description of Artificial Sequence: Synthetic oligonucleotide
  Sense strand starting at position 517 of SEQ ID NO: 3839
aguccauagccucaggauu

SEQ ID NO: 298739 - RNA, 19 nt, Artificial Sequence
  Description of Artificial Sequence: Synthetic oligonucleotide
  Antisense strand to SEQ ID NO: 298738
aauccugaggcuauggacu

SEQ ID NO: 298740 - RNA, 19 nt, Artificial Sequence
  Description of Artificial Sequence: Synthetic oligonucleotide
  Sense strand starting at position 658 of SEQ ID NO: 3839
gagcuaugcagacgggaau

SEQ ID NO: 298741 - RNA, 19 nt, Artificial Sequence
  Description of Artificial Sequence: Synthetic oligonucleotide
  Antisense strand to SEQ ID NO: 298740
auucccgucugcauagcuc

SEQ ID NO: 298742 - RNA, 19 nt, Artificial Sequence
  Description of Artificial Sequence: Synthetic oligonucleotide
  Sense strand starting at position 726 of SEQ ID NO: 3839
aaacuucuagccuggagga

SEQ ID NO: 298743 - RNA, 19 nt, Artificial Sequence
  Description of Artificial Sequence: Synthetic oligonucleotide
  Antisense strand to SEQ ID NO: 298742
uccuccaggcuagaaguuu

SEQ ID NO: 298744 - RNA, 19 nt, Artificial Sequence
  Description of Artificial Sequence: Synthetic oligonucleotide
  Sense strand starting at position 753 of SEQ ID NO: 3839
ucguguuugcgguuagucu

SEQ ID NO: 298745 - RNA, 19 nt, Artificial Sequence
  Description of Artificial Sequence: Synthetic oligonucleotide
  Antisense strand to SEQ ID NO: 298744
agacuaaccgcaaacacga

SEQ ID NO: 298746 - RNA, 19 nt, Artificial Sequence
  Description of Artificial Sequence: Synthetic oligonucleotide
  Sense strand starting at position 882 of SEQ ID NO: 3839
cuucuucugucuuuagaua

SEQ ID NO: 298747 - RNA, 19 nt, Artificial Sequence
  Description of Artificial Sequence: Synthetic oligonucleotide
  Antisense strand to SEQ ID NO: 298746
uaucuaaagacagaagaag

SEQ ID NO: 298748 - RNA, 19 nt, Artificial Sequence
  Description of Artificial Sequence: Synthetic oligonucleotide
  Sense strand starting at position 883 of SEQ ID NO: 3839
uucuucugucuuuagauau

SEQ ID NO: 298749 - RNA, 19 nt, Artificial Sequence
  Description of Artificial Sequence: Synthetic oligonucleotide
  Antisense strand to SEQ ID NO: 298748
auaucuaaagacagaagaa

SEQ ID NO: 298750 - RNA, 19 nt, Artificial Sequence
  Description of Artificial Sequence: Synthetic oligonucleotide
  Sense strand starting at position 908 of SEQ ID NO: 3839
cgcuaauuacaugaaguau

SEQ ID NO: 298751 - RNA, 19 nt, Artificial Sequence
  Description of Artificial Sequence: Synthetic oligonucleotide
  Antisense strand to SEQ ID NO: 298750
auacuucauguaauuagcg

SEQ ID NO: 298752 - RNA, 19 nt, Artificial Sequence
  Description of Artificial Sequence: Synthetic oligonucleotide
  Sense strand starting at position 923 of SEQ ID NO: 3839
guaucauuauuauucgaag

SEQ ID NO: 298753 - RNA, 19 nt, Artificial Sequence
  Description of Artificial Sequence: Synthetic oligonucleotide
  Antisense strand to SEQ ID NO: 298752
cuucgaauaauaaugauac

SEQ ID NO: 298754 - RNA, 19 nt, Artificial Sequence
  Description of Artificial Sequence: Synthetic oligonucleotide
  Sense strand starting at position 929 of SEQ ID NO: 3839
uuauuauucgaagaaagca

SEQ ID NO: 298755 - RNA, 19 nt, Artificial Sequence
  Description of Artificial Sequence: Synthetic oligonucleotide
  Antisense strand to SEQ ID NO: 298754
ugcuuucuucgaauaauaa

SEQ ID NO: 298756 - RNA, 19 nt, Artificial Sequence
  Description of Artificial Sequence: Synthetic oligonucleotide
  Sense strand starting at position 1088 of SEQ ID NO: 3839
uggucauaccugcaggaaa

SEQ ID NO: 298757 - RNA, 19 nt, Artificial Sequence
  Description of Artificial Sequence: Synthetic oligonucleotide
  Antisense strand to SEQ ID NO: 298756
uuuccugcagguaugacca

SEQ ID NO: 298758 - RNA, 19 nt, Artificial Sequence
  Description of Artificial Sequence: Synthetic oligonucleotide
  Sense strand starting at position 1090 of SEQ ID NO: 3839
gucauaccugcaggaaaua

SEQ ID NO: 298759 - RNA, 19 nt, Artificial Sequence
  Description of Artificial Sequence: Synthetic oligonucleotide
  Antisense strand to SEQ ID NO: 298758
uauuuccugcagguaugac

SEQ ID NO: 298760 - RNA, 19 nt, Artificial Sequence
  Description of Artificial Sequence: Synthetic oligonucleotide
  Sense strand starting at position 1399 of SEQ ID NO: 3839
ucggaacugagucgauauu

SEQ ID NO: 298761 - RNA, 19 nt, Artificial Sequence
  Description of Artificial Sequence: Synthetic oligonucleotide
  Antisense strand to SEQ ID NO: 298760
aauaucgacucaguuccga

SEQ ID NO: 298762 - RNA, 19 nt, Artificial Sequence
  Description of Artificial Sequence: Synthetic oligonucleotide
  Sense strand starting at position 1618 of SEQ ID NO: 3839
ccgcaaacuuucccagaca

SEQ ID NO: 298763 - RNA, 19 nt, Artificial Sequence
  Description of Artificial Sequence: Synthetic oligonucleotide
  Antisense strand to SEQ ID NO: 298762
ugucugggaaaguuugcgg

SEQ ID NO: 298764 - RNA, 19 nt, Artificial Sequence
  Description of Artificial Sequence: Synthetic oligonucleotide
  Sense strand starting at position 2068 of SEQ ID NO: 3839
ggcgguaagucuaugaguu

SEQ ID NO: 298765 - RNA, 19 nt, Artificial Sequence
  Description of Artificial Sequence: Synthetic oligonucleotide
  Antisense strand to SEQ ID NO: 298764
aacucauagacuuaccgcc

SEQ ID NO: 298766 - RNA, 19 nt, Artificial Sequence
  Description of Artificial Sequence: Synthetic oligonucleotide
  Sense strand starting at position 2198 of SEQ ID NO: 3839
gcggucgugcuuucuaagu

SEQ ID NO: 298767 - RNA, 19 nt, Artificial Sequence
  Description of Artificial Sequence: Synthetic oligonucleotide
  Antisense strand to SEQ ID NO: 298766
acuuagaaagcacgaccgc

SEQ ID NO: 298768 - RNA, 19 nt, Artificial Sequence
  Description of Artificial Sequence: Synthetic oligonucleotide
  Sense strand starting at position 2345 of SEQ ID NO: 3839
gggcgaaucaaucauagca

SEQ ID NO: 298769 - RNA, 19 nt, Artificial Sequence
  Description of Artificial Sequence: Synthetic oligonucleotide
  Antisense strand to SEQ ID NO: 298768
ugcuaugauugauucgccc

SEQ ID NO: 298770 - RNA, 19 nt, Artificial Sequence
  Description of Artificial Sequence: Synthetic oligonucleotide
  Sense strand starting at position 2538 of SEQ ID NO: 3839
ggcaaaugacuccaggcaa

SEQ ID NO: 298771 - RNA, 19 nt, Artificial Sequence
  Description of Artificial Sequence: Synthetic oligonucleotide
  Antisense strand to SEQ ID NO: 298770
uugccuggagucauuugcc

SEQ ID NO: 298772 - RNA, 19 nt, Artificial Sequence
  Description of Artificial Sequence: Synthetic oligonucleotide
  Sense strand starting at position 2669 of SEQ ID NO: 3839
gagagacugagcugaguuu

SEQ ID NO: 298773 - RNA, 19 nt, Artificial Sequence
  Description of Artificial Sequence: Synthetic oligonucleotide
  Antisense strand to SEQ ID NO: 298772
aaacucagcucagucucuc

SEQ ID NO: 298774 - RNA, 19 nt, Artificial Sequence
  Description of Artificial Sequence: Synthetic oligonucleotide
  Sense strand starting at position 2868 of SEQ ID NO: 3839
cucagugaauccuugagga

SEQ ID NO: 298775 - RNA, 19 nt, Artificial Sequence
  Description of Artificial Sequence: Synthetic oligonucleotide
  Antisense strand to SEQ ID NO: 298774
uccucaaggauucacugag

SEQ ID NO: 298776 - RNA, 19 nt, Artificial Sequence
  Description of Artificial Sequence: Synthetic oligonucleotide
  Sense strand starting at position 2915 of SEQ ID NO: 3839
uuaacaguccuguaggaug

SEQ ID NO: 298777 - RNA, 19 nt, Artificial Sequence
  Description of Artificial Sequence: Synthetic oligonucleotide
  Antisense strand to SEQ ID NO: 298776
cauccuacaggacuguuaa

SEQ ID NO: 298778 - RNA, 19 nt, Artificial Sequence
  Description of Artificial Sequence: Synthetic oligonucleotide
  Sense strand starting at position 3021 of SEQ ID NO: 3839
guggaaaggcaaugaauua

SEQ ID NO: 298779 - RNA, 19 nt, Artificial Sequence
  Description of Artificial Sequence: Synthetic oligonucleotide
  Antisense strand to SEQ ID NO: 298778
uaauucauugccuuuccac

SEQ ID NO: 298780 - RNA, 19 nt, Artificial Sequence
  Description of Artificial Sequence: Synthetic oligonucleotide
  Sense strand starting at position 3111 of SEQ ID NO: 3839
aguggacacuucuuuguau

SEQ ID NO: 298781 - RNA, 19 nt, Artificial Sequence
  Description of Artificial Sequence: Synthetic oligonucleotide
  Antisense strand to SEQ ID NO: 298780
auacaaagaaguguccacu

SEQ ID NO: 298782 - RNA, 19 nt, Artificial Sequence
  Description of Artificial Sequence: Synthetic oligonucleotide
  Sense strand starting at position 3207 of SEQ ID NO: 3839
auggaaauauagucaguac

SEQ ID NO: 298783 - RNA, 19 nt, Artificial Sequence
  Description of Artificial Sequence: Synthetic oligonucleotide
  Antisense strand to SEQ ID NO: 298782
guacugacuauauuuccau

SEQ ID NO: 298784 - RNA, 19 nt, Artificial Sequence
  Description of Artificial Sequence: Synthetic oligonucleotide
  Sense strand starting at position 3330 of SEQ ID NO: 3839
aggaucuauuuaggauacu

SEQ ID NO: 298785 - RNA, 19 nt, Artificial Sequence
  Description of Artificial Sequence: Synthetic oligonucleotide
  Antisense strand to SEQ ID NO: 298784
aguauccuaaauagauccu

SEQ ID NO: 298786 - RNA, 19 nt, Artificial Sequence
  Description of Artificial Sequence: Synthetic oligonucleotide
  Sense strand starting at position 3331 of SEQ ID NO: 3839
ggaucuauuuaggauacuu

SEQ ID NO: 298787 - RNA, 19 nt, Artificial Sequence
  Description of Artificial Sequence: Synthetic oligonucleotide
  Antisense strand to SEQ ID NO: 298786
aaguauccuaaauagaucc

SEQ ID NO: 298788 - RNA, 19 nt, Artificial Sequence
  Description of Artificial Sequence: Synthetic oligonucleotide
  Sense strand starting at position 3374 of SEQ ID NO: 3839
ugugcuuaugcuuaauaua

SEQ ID NO: 298789 - RNA, 19 nt, Artificial Sequence
  Description of Artificial Sequence: Synthetic oligonucleotide
  Antisense strand to SEQ ID NO: 298788
uauauuaagcauaagcaca

SEQ ID NO: 298790 - RNA, 19 nt, Artificial Sequence
  Description of Artificial Sequence: Synthetic oligonucleotide
  Sense strand starting at position 3445 of SEQ ID NO: 3839
gcuaccuuccaguaauggu

SEQ ID NO: 298791 - RNA, 19 nt, Artificial Sequence
  Description of Artificial Sequence: Synthetic oligonucleotide
  Antisense strand to SEQ ID NO: 298790
accauuacuggaagguagc

SEQ ID NO: 298792 - RNA, 19 nt, Artificial Sequence
  Description of Artificial Sequence: Synthetic oligonucleotide
  Sense strand starting at position 3452 of SEQ ID NO: 3839
uccaguaaugguuaagagu

SEQ ID NO: 298793 - RNA, 19 nt, Artificial Sequence
  Description of Artificial Sequence: Synthetic oligonucleotide
  Antisense strand to SEQ ID NO: 298792
acucuuaaccauuacugga

SEQ ID NO: 298794 - RNA, 19 nt, Artificial Sequence
  Description of Artificial Sequence: Synthetic oligonucleotide
  Sense strand starting at position 3459 of SEQ ID NO: 3839
augguuaagaguugaggaa

SEQ ID NO: 298795 - RNA, 19 nt, Artificial Sequence
  Description of Artificial Sequence: Synthetic oligonucleotide
  Antisense strand to SEQ ID NO: 298794
uuccucaacucuuaaccau

SEQ ID NO: 298796 - RNA, 19 nt, Artificial Sequence
  Description of Artificial Sequence: Synthetic oligonucleotide
  Sense strand starting at position 3478 of SEQ ID NO: 3839
gggcaacuugccuagggaa

SEQ ID NO: 298797 - RNA, 19 nt, Artificial Sequence
  Description of Artificial Sequence: Synthetic oligonucleotide
  Antisense strand to SEQ ID NO: 298796
uucccuaggcaaguugccc

SEQ ID NO: 298798 - RNA, 19 nt, Artificial Sequence
  Description of Artificial Sequence: Synthetic oligonucleotide
  Sense strand starting at position 3480 of SEQ ID NO: 3839
gcaacuugccuagggaaga

SEQ ID NO: 298799 - RNA, 19 nt, Artificial Sequence
  Description of Artificial Sequence: Synthetic oligonucleotide
  Antisense strand to SEQ ID NO: 298798
ucuucccuaggcaaguugc

SEQ ID NO: 298800 - RNA, 19 nt, Artificial Sequence
  Description of Artificial Sequence: Synthetic oligonucleotide
  Sense strand starting at position 3533 of SEQ ID NO: 3839
cugguuaacuugucagaga

SEQ ID NO: 298801 - RNA, 19 nt, Artificial Sequence
  Description of Artificial Sequence: Synthetic oligonucleotide
  Antisense strand to SEQ ID NO: 298800
ucucugacaaguuaaccag

SEQ ID NO: 298802 - RNA, 19 nt, Artificial Sequence
  Description of Artificial Sequence: Synthetic oligonucleotide
  Sense strand starting at position 3541 of SEQ ID NO: 3839
cuugucagagauuguucca

SEQ ID NO: 298803 - RNA, 19 nt, Artificial Sequence
  Description of Artificial Sequence: Synthetic oligonucleotide
  Antisense strand to SEQ ID NO: 298802
uggaacaaucucugacaag

SEQ ID NO: 298804 - RNA, 19 nt, Artificial Sequence
  Description of Artificial Sequence: Synthetic oligonucleotide
  Sense strand starting at position 3548 of SEQ ID NO: 3839
gagauuguuccauggaaac

SEQ ID NO: 298805 - RNA, 19 nt, Artificial Sequence
  Description of Artificial Sequence: Synthetic oligonucleotide
  Antisense strand to SEQ ID NO: 298804
guuuccauggaacaaucuc

SEQ ID NO: 298806 - RNA, 19 nt, Artificial Sequence
  Description of Artificial Sequence: Synthetic oligonucleotide
  Sense strand starting at position 3892 of SEQ ID NO: 3839
uacagaguucuguaugcac

SEQ ID NO: 298807 - RNA, 19 nt, Artificial Sequence
  Description of Artificial Sequence: Synthetic oligonucleotide
  Antisense strand to SEQ ID NO: 298806
gugcauacagaacucugua

SEQ ID NO: 298808 - RNA, 19 nt, Artificial Sequence
  Description of Artificial Sequence: Synthetic oligonucleotide
  Sense strand starting at position 3919 of SEQ ID NO: 3839
cuuugucaucuuugaaaga

SEQ ID NO: 298809 - RNA, 19 nt, Artificial Sequence
  Description of Artificial Sequence: Synthetic oligonucleotide
  Antisense strand to SEQ ID NO: 298808
ucuuucaaagaugacaaag

SEQ ID NO: 298810 - RNA, 19 nt, Artificial Sequence
  Description of Artificial Sequence: Synthetic oligonucleotide
  Sense strand starting at position 3940 of SEQ ID NO: 3839
caguauggccuuuauuagu

SEQ ID NO: 298811 - RNA, 19 nt, Artificial Sequence
  Description of Artificial Sequence: Synthetic oligonucleotide
  Antisense strand to SEQ ID NO: 298810
acuaauaaaggccauacug

SEQ ID NO: 298812 - RNA, 19 nt, Artificial Sequence
  Description of Artificial Sequence: Synthetic oligonucleotide
  Sense strand starting at position 232 of SEQ ID NO: 3841
uauguauuauggcuagaau

SEQ ID NO: 298813 - RNA, 19 nt, Artificial Sequence
  Description of Artificial Sequence: Synthetic oligonucleotide
  Antisense strand to SEQ ID NO: 298812
auucuagccauaauacaua

SEQ ID NO: 298814 - RNA, 19 nt, Artificial Sequence
  Description of Artificial Sequence: Synthetic oligonucleotide
  Sense strand starting at position 233 of SEQ ID NO: 3841
auguauuauggcuagaauu

SEQ ID NO: 298815 - RNA, 19 nt, Artificial Sequence
  Description of Artificial Sequence: Synthetic oligonucleotide
  Antisense strand to SEQ ID NO: 298814
aauucuagccauaauacau

SEQ ID NO: 298816 - RNA, 19 nt, Artificial Sequence
  Description of Artificial Sequence: Synthetic oligonucleotide
  Sense strand starting at position 272 of SEQ ID NO: 3841
uuucgaagguuucuaggaa

SEQ ID NO: 298817 - RNA, 19 nt, Artificial Sequence
  Description of Artificial Sequence: Synthetic oligonucleotide
  Antisense strand to SEQ ID NO: 298816
uuccuagaaaccuucgaaa

SEQ ID NO: 298818 - RNA, 19 nt, Artificial Sequence
  Description of Artificial Sequence: Synthetic oligonucleotide
  Sense strand starting at position 415 of SEQ ID NO: 3841
aguauacaaugguuugcaa

SEQ ID NO: 298819 - RNA, 19 nt, Artificial Sequence
  Description of Artificial Sequence: Synthetic oligonucleotide
  Antisense strand to SEQ ID NO: 298818
uugcaaaccauuguauacu

SEQ ID NO: 298820 - RNA, 19 nt, Artificial Sequence
  Description of Artificial Sequence: Synthetic oligonucleotide
  Sense strand starting at position 435 of SEQ ID NO: 3841
cuuagaccucaauaugugu

SEQ ID NO: 298821 - RNA, 19 nt, Artificial Sequence
  Description of Artificial Sequence: Synthetic oligonucleotide
  Antisense strand to SEQ ID NO: 298820
acacauauugaggucuaag

SEQ ID NO: 298822 - RNA, 19 nt, Artificial Sequence
  Description of Artificial Sequence: Synthetic oligonucleotide
  Sense strand starting at position 440 of SEQ ID NO: 3841
accucaauaugugugacaa

SEQ ID NO: 298823 - RNA, 19 nt, Artificial Sequence
  Description of Artificial Sequence: Synthetic oligonucleotide
  Antisense strand to SEQ ID NO: 298822
uugucacacauauugaggu

SEQ ID NO: 298824 - RNA, 19 nt, Artificial Sequence
  Description of Artificial Sequence: Synthetic oligonucleotide
  Sense strand starting at position 441 of SEQ ID NO: 3841
ccucaauaugugugacaaa

SEQ ID NO: 298825 - RNA, 19 nt, Artificial Sequence
  Description of Artificial Sequence: Synthetic oligonucleotide
  Antisense strand to SEQ ID NO: 298824
uuugucacacauauugagg

SEQ ID NO: 298826 - RNA, 19 nt, Artificial Sequence
  Description of Artificial Sequence: Synthetic oligonucleotide
  Sense strand starting at position 448 of SEQ ID NO: 3841
augugugacaaauggcauu

SEQ ID NO: 298827 - RNA, 19 nt, Artificial Sequence
  Description of Artificial Sequence: Synthetic oligonucleotide
  Antisense strand to SEQ ID NO: 298826
aaugccauuugucacacau

SEQ ID NO: 298828 - RNA, 19 nt, Artificial Sequence
  Description of Artificial Sequence: Synthetic oligonucleotide
  Sense strand starting at position 558 of SEQ ID NO: 3841
uuaaguggugaucagcaau

SEQ ID NO: 298829 - RNA, 19 nt, Artificial Sequence
  Description of Artificial Sequence: Synthetic oligonucleotide
  Antisense strand to SEQ ID NO: 298828
auugcugaucaccacuuaa

SEQ ID NO: 298830 - RNA, 19 nt, Artificial Sequence
  Description of Artificial Sequence: Synthetic oligonucleotide
  Sense strand starting at position 1392 of SEQ ID NO: 3841
gugagucagacugaagcuu

SEQ ID NO: 298831 - RNA, 19 nt, Artificial Sequence
  Description of Artificial Sequence: Synthetic oligonucleotide
  Antisense strand to SEQ ID NO: 298830
aagcuucagucugacucac

SEQ ID NO: 298832 - RNA, 19 nt, Artificial Sequence
  Description of Artificial Sequence: Synthetic oligonucleotide
  Sense strand starting at position 1458 of SEQ ID NO: 3841
ucuacaaaugccugugaca

SEQ ID NO: 298833 - RNA, 19 nt, Artificial Sequence
  Description of Artificial Sequence: Synthetic oligonucleotide
  Antisense strand to SEQ ID NO: 298832
ugucacaggcauuuguaga

SEQ ID NO: 298834 - RNA, 19 nt, Artificial Sequence
  Description of Artificial Sequence: Synthetic oligonucleotide
  Sense strand starting at position 1833 of SEQ ID NO: 3841
cuguauaugcaugaucuca

SEQ ID NO: 298835 - RNA, 19 nt, Artificial Sequence
  Description of Artificial Sequence: Synthetic oligonucleotide
  Antisense strand to SEQ ID NO: 298834
ugagaucaugcauauacag

SEQ ID NO: 298836 - RNA, 19 nt, Artificial Sequence
  Description of Artificial Sequence: Synthetic oligonucleotide
  Sense strand starting at position 1907 of SEQ ID NO: 3841
auaaguucggaggaguuaa

SEQ ID NO: 298837 - RNA, 19 nt, Artificial Sequence
  Description of Artificial Sequence: Synthetic oligonucleotide
  Antisense strand to SEQ ID NO: 298836
uuaacuccuccgaacuuau

SEQ ID NO: 298838 - RNA, 19 nt, Artificial Sequence
  Description of Artificial Sequence: Synthetic oligonucleotide
  Sense strand starting at position 2135 of SEQ ID NO: 3841
gagcucuagauuggaagga

SEQ ID NO: 298839 - RNA, 19 nt, Artificial Sequence
  Description of Artificial Sequence: Synthetic oligonucleotide
  Antisense strand to SEQ ID NO: 298838
uccuuccaaucuagagcuc

SEQ ID NO: 298840 - RNA, 19 nt, Artificial Sequence
  Description of Artificial Sequence: Synthetic oligonucleotide
  Sense strand starting at position 2156 of SEQ ID NO: 3841
cuguucucacgugagaaga

SEQ ID NO: 298841 - RNA, 19 nt, Artificial Sequence
  Description of Artificial Sequence: Synthetic oligonucleotide
  Antisense strand to SEQ ID NO: 298840
ucuucucacgugagaacag

SEQ ID NO: 298842 - RNA, 19 nt, Artificial Sequence
  Description of Artificial Sequence: Synthetic oligonucleotide
  Sense strand starting at position 2217 of SEQ ID NO: 3841
gacaucaggcugugggaaa

SEQ ID NO: 298843 - RNA, 19 nt, Artificial Sequence
  Description of Artificial Sequence: Synthetic oligonucleotide
  Antisense strand to SEQ ID NO: 298842
uuucccacagccugauguc

SEQ ID NO: 298844 - RNA, 19 nt, Artificial Sequence
  Description of Artificial Sequence: Synthetic oligonucleotide
  Sense strand starting at position 2291 of SEQ ID NO: 3841
ugggucauuucugagaaug

SEQ ID NO: 298845 - RNA, 19 nt, Artificial Sequence
  Description of Artificial Sequence: Synthetic oligonucleotide
  Antisense strand to SEQ ID NO: 298844
cauucucagaaaugaccca

SEQ ID NO: 298846 - RNA, 19 nt, Artificial Sequence
  Description of Artificial Sequence: Synthetic oligonucleotide
  Sense strand starting at position 2293 of SEQ ID NO: 3841
ggucauuucugagaauggc

SEQ ID NO: 298847 - RNA, 19 nt, Artificial Sequence
  Description of Artificial Sequence: Synthetic oligonucleotide
  Antisense strand to SEQ ID NO: 298846
gccauucucagaaaugacc

SEQ ID NO: 298848 - RNA, 19 nt, Artificial Sequence
  Description of Artificial Sequence: Synthetic oligonucleotide
  Sense strand starting at position 2372 of SEQ ID NO: 3841
gcccuuagugaugaauaau

SEQ ID NO: 298849 - RNA, 19 nt, Artificial Sequence
  Description of Artificial Sequence: Synthetic oligonucleotide
  Antisense strand to SEQ ID NO: 298848
auuauucaucacuaagggc

SEQ ID NO: 298850 - RNA, 19 nt, Artificial Sequence
  Description of Artificial Sequence: Synthetic oligonucleotide
  Sense strand starting at position 2394 of SEQ ID NO: 3841
ucagaauuguugucuaaua

SEQ ID NO: 298851 - RNA, 19 nt, Artificial Sequence
  Description of Artificial Sequence: Synthetic oligonucleotide
  Antisense strand to SEQ ID NO: 298850
uauuagacaacaauucuga

SEQ ID NO: 298852 - RNA, 19 nt, Artificial Sequence
  Description of Artificial Sequence: Synthetic oligonucleotide
  Sense strand starting at position 2444 of SEQ ID NO: 3841
uggcgauuccaguauucuc

SEQ ID NO: 298853 - RNA, 19 nt, Artificial Sequence
  Description of Artificial Sequence: Synthetic oligonucleotide
  Antisense strand to SEQ ID NO: 298852
gagaauacuggaaucgcca

SEQ ID NO: 298854 - RNA, 19 nt, Artificial Sequence
  Description of Artificial Sequence: Synthetic oligonucleotide
  Sense strand starting at position 2449 of SEQ ID NO: 3841
auuccaguauucucuguaa

SEQ ID NO: 298855 - RNA, 19 nt, Artificial Sequence
  Description of Artificial Sequence: Synthetic oligonucleotide
  Antisense strand to SEQ ID NO: 298854
uuacagagaauacuggaau

SEQ ID NO: 298856 - RNA, 19 nt, Artificial Sequence
  Description of Artificial Sequence: Synthetic oligonucleotide
  Sense strand starting at position 2451 of SEQ ID NO: 3841
uccaguauucucuguaauu

SEQ ID NO: 298857 - RNA, 19 nt, Artificial Sequence
  Description of Artificial Sequence: Synthetic oligonucleotide
  Antisense strand to SEQ ID NO: 298856
aauuacagagaauacugga

SEQ ID NO: 298858 - RNA, 19 nt, Artificial Sequence
  Description of Artificial Sequence: Synthetic oligonucleotide
  Sense strand starting at position 2482 of SEQ ID NO: 3841
uguaacucccugcaaaguu

SEQ ID NO: 298859 - RNA, 19 nt, Artificial Sequence
  Description of Artificial Sequence: Synthetic oligonucleotide
  Antisense strand to SEQ ID NO: 298858
aacuuugcagggaguuaca

SEQ ID NO: 298860 - RNA, 19 nt, Artificial Sequence
  Description of Artificial Sequence: Synthetic oligonucleotide
  Sense strand starting at position 2629 of SEQ ID NO: 3841
ucuccuguagauuguugaa

SEQ ID NO: 298861 - RNA, 19 nt, Artificial Sequence
  Description of Artificial Sequence: Synthetic oligonucleotide
  Antisense strand to SEQ ID NO: 298860
uucaacaaucuacaggaga

SEQ ID NO: 298862 - RNA, 19 nt, Artificial Sequence
  Description of Artificial Sequence: Synthetic oligonucleotide
  Sense strand starting at position 2631 of SEQ ID NO: 3841
uccuguagauuguugaagu

SEQ ID NO: 298863 - RNA, 19 nt, Artificial Sequence
  Description of Artificial Sequence: Synthetic oligonucleotide
  Antisense strand to SEQ ID NO: 298862
acuucaacaaucuacagga

SEQ ID NO: 298864 - RNA, 19 nt, Artificial Sequence
  Description of Artificial Sequence: Synthetic oligonucleotide
  Sense strand starting at position 2649 of SEQ ID NO: 3841
ucagauuagaugcauguga

SEQ ID NO: 298865 - RNA, 19 nt, Artificial Sequence
  Description of Artificial Sequence: Synthetic oligonucleotide
  Antisense strand to SEQ ID NO: 298864
ucacaugcaucuaaucuga

SEQ ID NO: 298866 - RNA, 19 nt, Artificial Sequence
  Description of Artificial Sequence: Synthetic oligonucleotide
  Sense strand starting at position 2651 of SEQ ID NO: 3841
agauuagaugcaugugaua

SEQ ID NO: 298867 - RNA, 19 nt, Artificial Sequence
  Description of Artificial Sequence: Synthetic oligonucleotide
  Antisense strand to SEQ ID NO: 298866
uaucacaugcaucuaaucu

SEQ ID NO: 298868 - RNA, 19 nt, Artificial Sequence
  Description of Artificial Sequence: Synthetic oligonucleotide
  Sense strand starting at position 2658 of SEQ ID NO: 3841
augcaugugauaggugaaa

SEQ ID NO: 298869 - RNA, 19 nt, Artificial Sequence
  Description of Artificial Sequence: Synthetic oligonucleotide
  Antisense strand to SEQ ID NO: 298868
uuucaccuaucacaugcau

SEQ ID NO: 298870 - RNA, 19 nt, Artificial Sequence
  Description of Artificial Sequence: Synthetic oligonucleotide
  Sense strand starting at position 2660 of SEQ ID NO: 3841
gcaugugauaggugaaaca

SEQ ID NO: 298871 - RNA, 19 nt, Artificial Sequence
  Description of Artificial Sequence: Synthetic oligonucleotide
  Antisense strand to SEQ ID NO: 298870
uguuucaccuaucacaugc

SEQ ID NO: 298872 - RNA, 19 nt, Artificial Sequence
  Description of Artificial Sequence: Synthetic oligonucleotide
  Sense strand starting at position 2751 of SEQ ID NO: 3841
caauguggucccuaauguc

SEQ ID NO: 298873 - RNA, 19 nt, Artificial Sequence
  Description of Artificial Sequence: Synthetic oligonucleotide
  Antisense strand to SEQ ID NO: 298872
gacauuagggaccacauug

SEQ ID NO: 298874 - RNA, 19 nt, Artificial Sequence
  Description of Artificial Sequence: Synthetic oligonucleotide
  Sense strand starting at position 2803 of SEQ ID NO: 3841
gacugaugccaaggaggua

SEQ ID NO: 298875 - RNA, 19 nt, Artificial Sequence
  Description of Artificial Sequence: Synthetic oligonucleotide
  Antisense strand to SEQ ID NO: 298874
uaccuccuuggcaucaguc

SEQ ID NO: 298876 - RNA, 19 nt, Artificial Sequence
  Description of Artificial Sequence: Synthetic oligonucleotide
  Sense strand starting at position 2815 of SEQ ID NO: 3841
ggagguauucagcagagcu

SEQ ID NO: 298877 - RNA, 19 nt, Artificial Sequence
  Description of Artificial Sequence: Synthetic oligonucleotide
  Antisense strand to SEQ ID NO: 298876
agcucugcugaauaccucc

SEQ ID NO: 298878 - RNA, 19 nt, Artificial Sequence
  Description of Artificial Sequence: Synthetic oligonucleotide
  Sense strand starting at position 2950 of SEQ ID NO: 3841
ugaauugaguccuuuauuc

SEQ ID NO: 298879 - RNA, 19 nt, Artificial Sequence
  Description of Artificial Sequence: Synthetic oligonucleotide
  Antisense strand to SEQ ID NO: 298878
gaauaaaggacucaauuca

SEQ ID NO: 298880 - RNA, 19 nt, Artificial Sequence
  Description of Artificial Sequence: Synthetic oligonucleotide
  Sense strand starting at position 3034 of SEQ ID NO: 3841
gugucugugcgguuccauu

SEQ ID NO: 298881 - RNA, 19 nt, Artificial Sequence
  Description of Artificial Sequence: Synthetic oligonucleotide
  Antisense strand to SEQ ID NO: 298880
aauggaaccgcacagacac

SEQ ID NO: 298882 - RNA, 19 nt, Artificial Sequence
  Description of Artificial Sequence: Synthetic oligonucleotide
  Sense strand starting at position 3207 of SEQ ID NO: 3841
acuguauauccuggaaaca

SEQ ID NO: 298883 - RNA, 19 nt, Artificial Sequence
  Description of Artificial Sequence: Synthetic oligonucleotide
  Antisense strand to SEQ ID NO: 298882
uguuuccaggauauacagu

SEQ ID NO: 298884 - RNA, 19 nt, Artificial Sequence
  Description of Artificial Sequence: Synthetic oligonucleotide
  Sense strand starting at position 3254 of SEQ ID NO: 3841
uuaacaugcagcugugaag

SEQ ID NO: 298885 - RNA, 19 nt, Artificial Sequence
  Description of Artificial Sequence: Synthetic oligonucleotide
  Antisense strand to SEQ ID NO: 298884
cuucacagcugcauguuaa

SEQ ID NO: 298886 - RNA, 19 nt, Artificial Sequence
  Description of Artificial Sequence: Synthetic oligonucleotide
  Sense strand starting at position 3282 of SEQ ID NO: 3841
aagggcuugcuaugacagu

SEQ ID NO: 298887 - RNA, 19 nt, Artificial Sequence
  Description of Artificial Sequence: Synthetic oligonucleotide
  Antisense strand to SEQ ID NO: 298886
acugucauagcaagcccuu

SEQ ID NO: 298888 - RNA, 19 nt, Artificial Sequence
  Description of Artificial Sequence: Synthetic oligonucleotide
  Sense strand starting at position 3780 of SEQ ID NO: 3841
acauauguucugcagcuca

SEQ ID NO: 298889 - RNA, 19 nt, Artificial Sequence
  Description of Artificial Sequence: Synthetic oligonucleotide
  Antisense strand to SEQ ID NO: 298888
ugagcugcagaacauaugu

SEQ ID NO: 298890 - RNA, 19 nt, Artificial Sequence
  Description of Artificial Sequence: Synthetic oligonucleotide
  Sense strand starting at position 3835 of SEQ ID NO: 3841
agcuaugugacagggaaua

SEQ ID NO: 298891 - RNA, 19 nt, Artificial Sequence
  Description of Artificial Sequence: Synthetic oligonucleotide
  Antisense strand to SEQ ID NO: 298890
uauucccugucacauagcu

SEQ ID NO: 298892 - RNA, 19 nt, Artificial Sequence
  Description of Artificial Sequence: Synthetic oligonucleotide
  Sense strand starting at position 1991 of SEQ ID NO: 3840
auagguugacucuguuaaa

SEQ ID NO: 298893 - RNA, 19 nt, Artificial Sequence
  Description of Artificial Sequence: Synthetic oligonucleotide
  Antisense strand to SEQ ID NO: 298892
uuuaacagagucaaccuau

SEQ ID NO: 298894 - RNA, 19 nt, Artificial Sequence
  Description of Artificial Sequence: Synthetic oligonucleotide
  Sense strand starting at position 2050 of SEQ ID NO: 3840
gggaaucauuacuaaaugu

SEQ ID NO: 298895 - RNA, 19 nt, Artificial Sequence
  Description of Artificial Sequence: Synthetic oligonucleotide
  Antisense strand to SEQ ID NO: 298894
acauuuaguaaugauuccc

SEQ ID NO: 298896 - RNA, 19 nt, Artificial Sequence
  Description of Artificial Sequence: Synthetic oligonucleotide
  Sense strand starting at position 2098 of SEQ ID NO: 3840
uaauucuguugguggcuaa

SEQ ID NO: 298897 - RNA, 19 nt, Artificial Sequence
  Description of Artificial Sequence: Synthetic oligonucleotide
  Antisense strand to SEQ ID NO: 298896
uuagccaccaacagaauua

SEQ ID NO: 298898 - RNA, 19 nt, Artificial Sequence
  Description of Artificial Sequence: Synthetic oligonucleotide
  Sense strand starting at position 2108 of SEQ ID NO: 3840
gguggcuaaguggauuaaa

SEQ ID NO: 298899 - RNA, 19 nt, Artificial Sequence
  Description of Artificial Sequence: Synthetic oligonucleotide
  Antisense strand to SEQ ID NO: 298898
uuuaauccacuuagccacc

SEQ ID NO: 298900 - RNA, 19 nt, Artificial Sequence
  Description of Artificial Sequence: Synthetic oligonucleotide
  Sense strand starting at position 2146 of SEQ ID NO: 3840
guaugcugucuauaaggua

SEQ ID NO: 298901 - RNA, 19 nt, Artificial Sequence
  Description of Artificial Sequence: Synthetic oligonucleotide
  Antisense strand to SEQ ID NO: 298900
uaccuuauagacagcauac

SEQ ID NO: 298902 - RNA, 19 nt, Artificial Sequence
  Description of Artificial Sequence: Synthetic oligonucleotide
  Sense strand starting at position 2183 of SEQ ID NO: 3840
acagacauaugcugaaagu

SEQ ID NO: 298903 - RNA, 19 nt, Artificial Sequence
  Description of Artificial Sequence: Synthetic oligonucleotide
  Antisense strand to SEQ ID NO: 298902
acuuucagcauaugucugu

SEQ ID NO: 298904 - RNA, 19 nt, Artificial Sequence
  Description of Artificial Sequence: Synthetic oligonucleotide
  Sense strand starting at position 2225 of SEQ ID NO: 3840
augcaaauguuauccaaga

SEQ ID NO: 298905 - RNA, 19 nt, Artificial Sequence
  Description of Artificial Sequence: Synthetic oligonucleotide
  Antisense strand to SEQ ID NO: 298904
ucuuggauaacauuugcau

SEQ ID NO: 298906 - RNA, 19 nt, Artificial Sequence
  Description of Artificial Sequence: Synthetic oligonucleotide
  Sense strand starting at position 2226 of SEQ ID NO: 3840
ugcaaauguuauccaagag

SEQ ID NO: 298907 - RNA, 19 nt, Artificial Sequence
  Description of Artificial Sequence: Synthetic oligonucleotide
  Antisense strand to SEQ ID NO: 298906
cucuuggauaacauuugca

SEQ ID NO: 298908 - RNA, 19 nt, Artificial Sequence
  Description of Artificial Sequence: Synthetic oligonucleotide
  Sense strand starting at position 2384 of SEQ ID NO: 3840
ugggaauggugggucacaa

SEQ ID NO: 298909 - RNA, 19 nt, Artificial Sequence
  Description of Artificial Sequence: Synthetic oligonucleotide
  Antisense strand to SEQ ID NO: 298908
uugugacccaccauuccca

SEQ ID NO: 298910 - RNA, 19 nt, Artificial Sequence
  Description of Artificial Sequence: Synthetic oligonucleotide
  Sense strand starting at position 2559 of SEQ ID NO: 3840
guagcugagucaggagaau

SEQ ID NO: 298911 - RNA, 19 nt, Artificial Sequence
  Description of Artificial Sequence: Synthetic oligonucleotide
  Antisense strand to SEQ ID NO: 298910
auucuccugacucagcuac

SEQ ID NO: 298912 - RNA, 19 nt, Artificial Sequence
  Description of Artificial Sequence: Synthetic oligonucleotide
  Sense strand starting at position 2943 of SEQ ID NO: 3840
agcagaucacguuagguua

SEQ ID NO: 298913 - RNA, 19 nt, Artificial Sequence
  Description of Artificial Sequence: Synthetic oligonucleotide
  Antisense strand to SEQ ID NO: 298912
uaaccuaacgugaucugcu

SEQ ID NO: 298914 - RNA, 19 nt, Artificial Sequence
  Description of Artificial Sequence: Synthetic oligonucleotide
  Sense strand starting at position 3197 of SEQ ID NO: 3840
ggaacuuuauagccacaaa

SEQ ID NO: 298915 - RNA, 19 nt, Artificial Sequence
  Description of Artificial Sequence: Synthetic oligonucleotide
  Antisense strand to SEQ ID NO: 298914
uuuguggcuauaaaguucc

SEQ ID NO: 298916 - RNA, 19 nt, Artificial Sequence
  Description of Artificial Sequence: Synthetic oligonucleotide
  Sense strand starting at position 3512 of SEQ ID NO: 3840
aacagagacugugucauua

SEQ ID NO: 298917 - RNA, 19 nt, Artificial Sequence
  Description of Artificial Sequence: Synthetic oligonucleotide
  Antisense strand to SEQ ID NO: 298916
uaaugacacagucucuguu

SEQ ID NO: 298918 - RNA, 19 nt, Artificial Sequence
  Description of Artificial Sequence: Synthetic oligonucleotide
  Sense strand starting at position 3514 of SEQ ID NO: 3840
cagagacugugucauuacu

SEQ ID NO: 298919 - RNA, 19 nt, Artificial Sequence
  Description of Artificial Sequence: Synthetic oligonucleotide
  Antisense strand to SEQ ID NO: 298918
aguaaugacacagucucug

SEQ ID NO: 298920 - RNA, 19 nt, Artificial Sequence
  Description of Artificial Sequence: Synthetic oligonucleotide
  Sense strand starting at position 3516 of SEQ ID NO: 3840
gagacugugucauuacucu

SEQ ID NO: 298921 - RNA, 19 nt, Artificial Sequence
  Description of Artificial Sequence: Synthetic oligonucleotide
  Antisense strand to SEQ ID NO: 298920
agaguaaugacacagucuc

SEQ ID NO: 298922 - RNA, 19 nt, Artificial Sequence
  Description of Artificial Sequence: Synthetic oligonucleotide
  Sense strand starting at position 3878 of SEQ ID NO: 3840
gguggugggcaggagaauu

SEQ ID NO: 298923 - RNA, 19 nt, Artificial Sequence
  Description of Artificial Sequence: Synthetic oligonucleotide
  Antisense strand to SEQ ID NO: 298922
aauucuccugcccaccacc

SEQ ID NO: 298924 - RNA, 19 nt, Artificial Sequence
  Description of Artificial Sequence: Synthetic oligonucleotide
  Sense strand starting at position 23 of SEQ ID NO: 3842
aagguuuauuuggaaagca

SEQ ID NO: 298925 - RNA, 19 nt, Artificial Sequence
  Description of Artificial Sequence: Synthetic oligonucleotide
  Antisense strand to SEQ ID NO: 298924
ugcuuuccaaauaaaccuu

SEQ ID NO: 298926 - RNA, 19 nt, Artificial Sequence
  Description of Artificial Sequence: Synthetic oligonucleotide
  Sense strand starting at position 33 of SEQ ID NO: 3842
uggaaagcagguugucaaa

SEQ ID NO: 298927 - RNA, 19 nt, Artificial Sequence
  Description of Artificial Sequence: Synthetic oligonucleotide
  Antisense strand to SEQ ID NO: 298926
uuugacaaccugcuuucca

SEQ ID NO: 298928 - RNA, 19 nt, Artificial Sequence
  Description of Artificial Sequence: Synthetic oligonucleotide
  Sense strand starting at position 101 of SEQ ID NO: 3842
cccggagugaucuauucua

SEQ ID NO: 298929 - RNA, 19 nt, Artificial Sequence
  Description of Artificial Sequence: Synthetic oligonucleotide
  Antisense strand to SEQ ID NO: 298928
uagaauagaucacuccggg

SEQ ID NO: 298930 - RNA, 19 nt, Artificial Sequence
  Description of Artificial Sequence: Synthetic oligonucleotide
  Sense strand starting at position 162 of SEQ ID NO: 3842
auacacuguuaaucuguua

SEQ ID NO: 298931 - RNA, 19 nt, Artificial Sequence
  Description of Artificial Sequence: Synthetic oligonucleotide
  Antisense strand to SEQ ID NO: 298930
uaacagauuaacaguguau

SEQ ID NO: 298932 - RNA, 19 nt, Artificial Sequence
  Description of Artificial Sequence: Synthetic oligonucleotide
  Sense strand starting at position 196 of SEQ ID NO: 3842
uuacacaaguguuuaauga

SEQ ID NO: 298933 - RNA, 19 nt, Artificial Sequence
  Description of Artificial Sequence: Synthetic oligonucleotide
  Antisense strand to SEQ ID NO: 298932
ucauuaaacacuuguguaa

SEQ ID NO: 298934 - RNA, 19 nt, Artificial Sequence
  Description of Artificial Sequence: Synthetic oligonucleotide
  Sense strand starting at position 207 of SEQ ID NO: 3842
uuuaaugagugguuaccau

SEQ ID NO: 298935 - RNA, 19 nt, Artificial Sequence
  Description of Artificial Sequence: Synthetic oligonucleotide
  Antisense strand to SEQ ID NO: 298934
augguaaccacucauuaaa

SEQ ID NO: 298936 - RNA, 19 nt, Artificial Sequence
  Description of Artificial Sequence: Synthetic oligonucleotide
  Sense strand starting at position 306 of SEQ ID NO: 3842
aaggguuauggaugucaug

SEQ ID NO: 298937 - RNA, 19 nt, Artificial Sequence
  Description of Artificial Sequence: Synthetic oligonucleotide
  Antisense strand to SEQ ID NO: 298936
caugacauccauaacccuu

SEQ ID NO: 298938 - RNA, 19 nt, Artificial Sequence
  Description of Artificial Sequence: Synthetic oligonucleotide
  Sense strand starting at position 479 of SEQ ID NO: 3842
ucugguaagaauuguuagu

SEQ ID NO: 298939 - RNA, 19 nt, Artificial Sequence
  Description of Artificial Sequence: Synthetic oligonucleotide
  Antisense strand to SEQ ID NO: 298938
acuaacaauucuuaccaga

SEQ ID NO: 298940 - RNA, 19 nt, Artificial Sequence
  Description of Artificial Sequence: Synthetic oligonucleotide
  Sense strand starting at position 481 of SEQ ID NO: 3842
ugguaagaauuguuaguaa

SEQ ID NO: 298941 - RNA, 19 nt, Artificial Sequence
  Description of Artificial Sequence: Synthetic oligonucleotide
  Antisense strand to SEQ ID NO: 298940
uuacuaacaauucuuacca

SEQ ID NO: 298942 - RNA, 19 nt, Artificial Sequence
  Description of Artificial Sequence: Synthetic oligonucleotide
  Sense strand starting at position 523 of SEQ ID NO: 3842
gguuuaaucucagagauuu

SEQ ID NO: 298943 - RNA, 19 nt, Artificial Sequence
  Description of Artificial Sequence: Synthetic oligonucleotide
  Antisense strand to SEQ ID NO: 298942
aaaucucugagauuaaacc

SEQ ID NO: 298944 - RNA, 19 nt, Artificial Sequence
  Description of Artificial Sequence: Synthetic oligonucleotide
  Sense strand starting at position 553 of SEQ ID NO: 3842
acaccagacuauuaagaga

SEQ ID NO: 298945 - RNA, 19 nt, Artificial Sequence
  Description of Artificial Sequence: Synthetic oligonucleotide
  Antisense strand to SEQ ID NO: 298944
ucucuuaauagucuggugu

SEQ ID NO: 298946 - RNA, 19 nt, Artificial Sequence
  Description of Artificial Sequence: Synthetic oligonucleotide
  Sense strand starting at position 556 of SEQ ID NO: 3842
ccagacuauuaagagauaa

SEQ ID NO: 298947 - RNA, 19 nt, Artificial Sequence
  Description of Artificial Sequence: Synthetic oligonucleotide
  Antisense strand to SEQ ID NO: 298946
uuaucucuuaauagucugg

SEQ ID NO: 298948 - RNA, 19 nt, Artificial Sequence
  Description of Artificial Sequence: Synthetic oligonucleotide
  Sense strand starting at position 752 of SEQ ID NO: 3842
agugcagucccuuacacuu

SEQ ID NO: 298949 - RNA, 19 nt, Artificial Sequence
  Description of Artificial Sequence: Synthetic oligonucleotide
  Antisense strand to SEQ ID NO: 298948
aaguguaagggacugcacu

SEQ ID NO: 298950 - RNA, 19 nt, Artificial Sequence
  Description of Artificial Sequence: Synthetic oligonucleotide
  Sense strand starting at position 781 of SEQ ID NO: 3842
cgcuaauuacgauaaagcu

SEQ ID NO: 298951 - RNA, 19 nt, Artificial Sequence
  Description of Artificial Sequence: Synthetic oligonucleotide
  Antisense strand to SEQ ID NO: 298950
agcuuuaucguaauuagcg

SEQ ID NO: 298952 - RNA, 19 nt, Artificial Sequence
  Description of Artificial Sequence: Synthetic oligonucleotide
  Sense strand starting at position 789 of SEQ ID NO: 3842
acgauaaagcuuuauaagu

SEQ ID NO: 298953 - RNA, 19 nt, Artificial Sequence
  Description of Artificial Sequence: Synthetic oligonucleotide
  Antisense strand to SEQ ID NO: 298952
acuuauaaagcuuuaucgu

SEQ ID NO: 298954 - RNA, 19 nt, Artificial Sequence
  Description of Artificial Sequence: Synthetic oligonucleotide
  Sense strand starting at position 839 of SEQ ID NO: 3842
augugaagacuuugaucug

SEQ ID NO: 298955 - RNA, 19 nt, Artificial Sequence
  Description of Artificial Sequence: Synthetic oligonucleotide
  Antisense strand to SEQ ID NO: 298954
cagaucaaagucuucacau

SEQ ID NO: 298956 - RNA, 19 nt, Artificial Sequence
  Description of Artificial Sequence: Synthetic oligonucleotide
  Sense strand starting at position 970 of SEQ ID NO: 3842
gauguaacucuuuguugag

SEQ ID NO: 298957 - RNA, 19 nt, Artificial Sequence
  Description of Artificial Sequence: Synthetic oligonucleotide
  Antisense strand to SEQ ID NO: 298956
cucaacaaagaguuacauc

SEQ ID NO: 298958 - RNA, 19 nt, Artificial Sequence
  Description of Artificial Sequence: Synthetic oligonucleotide
  Sense strand starting at position 1057 of SEQ ID NO: 3842
cgcacaguucaggagaauu

SEQ ID NO: 298959 - RNA, 19 nt, Artificial Sequence
  Description of Artificial Sequence: Synthetic oligonucleotide
  Antisense strand to SEQ ID NO: 298958
aauucuccugaacugugcg

SEQ ID NO: 298960 - RNA, 19 nt, Artificial Sequence
  Description of Artificial Sequence: Synthetic oligonucleotide
  Sense strand starting at position 1155 of SEQ ID NO: 3842
ccguguuacacauccguau

SEQ ID NO: 298961 - RNA, 19 nt, Artificial Sequence
  Description of Artificial Sequence: Synthetic oligonucleotide
  Antisense strand to SEQ ID NO: 298960
auacggauguguaacacgg

SEQ ID NO: 298962 - RNA, 19 nt, Artificial Sequence
  Description of Artificial Sequence: Synthetic oligonucleotide
  Sense strand starting at position 1159 of SEQ ID NO: 3842
guuacacauccguaucaag

SEQ ID NO: 298963 - RNA, 19 nt, Artificial Sequence
  Description of Artificial Sequence: Synthetic oligonucleotide
  Antisense strand to SEQ ID NO: 298962
cuugauacggauguguaac

SEQ ID NO: 298964 - RNA, 19 nt, Artificial Sequence
  Description of Artificial Sequence: Synthetic oligonucleotide
  Sense strand starting at position 2310 of SEQ ID NO: 3842
gaaccacuccagugaguaa

SEQ ID NO: 298965 - RNA, 19 nt, Artificial Sequence
  Description of Artificial Sequence: Synthetic oligonucleotide
  Antisense strand to SEQ ID NO: 298964
uuacucacuggagugguuc

SEQ ID NO: 298966 - RNA, 19 nt, Artificial Sequence
  Description of Artificial Sequence: Synthetic oligonucleotide
  Sense strand starting at position 2346 of SEQ ID NO: 3842
cgaacuugcccuugacaac

SEQ ID NO: 298967 - RNA, 19 nt, Artificial Sequence
  Description of Artificial Sequence: Synthetic oligonucleotide
  Antisense strand to SEQ ID NO: 298966
guugucaagggcaaguucg

SEQ ID NO: 298968 - RNA, 19 nt, Artificial Sequence
  Description of Artificial Sequence: Synthetic oligonucleotide
  Sense strand starting at position 2584 of SEQ ID NO: 3842
gcgccuuauccucugccau

SEQ ID NO: 298969 - RNA, 19 nt, Artificial Sequence
  Description of Artificial Sequence: Synthetic oligonucleotide
  Antisense strand to SEQ ID NO: 298968
auggcagaggauaaggcgc

SEQ ID NO: 298970 - RNA, 19 nt, Artificial Sequence
  Description of Artificial Sequence: Synthetic oligonucleotide
  Sense strand starting at position 2653 of SEQ ID NO: 3842
ggcauuaaaccuuaagcuu

SEQ ID NO: 298971 - RNA, 19 nt, Artificial Sequence
  Description of Artificial Sequence: Synthetic oligonucleotide
  Antisense strand to SEQ ID NO: 298970
aagcuuaagguuuaaugcc

SEQ ID NO: 298972 - RNA, 19 nt, Artificial Sequence
  Description of Artificial Sequence: Synthetic oligonucleotide
  Sense strand starting at position 2716 of SEQ ID NO: 3842
gagcucuuucugggucaaa

SEQ ID NO: 298973 - RNA, 19 nt, Artificial Sequence
  Description of Artificial Sequence: Synthetic oligonucleotide
  Antisense strand to SEQ ID NO: 298972
uuugacccagaaagagcuc

SEQ ID NO: 298974 - RNA, 19 nt, Artificial Sequence
  Description of Artificial Sequence: Synthetic oligonucleotide
  Sense strand starting at position 2717 of SEQ ID NO: 3842
agcucuuucugggucaaau

SEQ ID NO: 298975 - RNA, 19 nt, Artificial Sequence
  Description of Artificial Sequence: Synthetic oligonucleotide
  Antisense strand to SEQ ID NO: 298974
auuugacccagaaagagcu

SEQ ID NO: 298976 - RNA, 19 nt, Artificial Sequence
  Description of Artificial Sequence: Synthetic oligonucleotide
  Sense strand starting at position 2729 of SEQ ID NO: 3842
gucaaauagaguugggcuu

SEQ ID NO: 298977 - RNA, 19 nt, Artificial Sequence
  Description of Artificial Sequence: Synthetic oligonucleotide
  Antisense strand to SEQ ID NO: 298976
aagcccaacucuauuugac

SEQ ID NO: 298978 - RNA, 19 nt, Artificial Sequence
  Description of Artificial Sequence: Synthetic oligonucleotide
  Sense strand starting at position 2799 of SEQ ID NO: 3842
ggcugacuuuaguuugaag

SEQ ID NO: 298979 - RNA, 19 nt, Artificial Sequence
  Description of Artificial Sequence: Synthetic oligonucleotide
  Antisense strand to SEQ ID NO: 298978
cuucaaacuaaagucagcc

SEQ ID NO: 298980 - RNA, 19 nt, Artificial Sequence
  Description of Artificial Sequence: Synthetic oligonucleotide
  Sense strand starting at position 2808 of SEQ ID NO: 3842
uaguuugaagcguaaauaa

SEQ ID NO: 298981 - RNA, 19 nt, Artificial Sequence
  Description of Artificial Sequence: Synthetic oligonucleotide
  Antisense strand to SEQ ID NO: 298980
uuauuuacgcuucaaacua

SEQ ID NO: 298982 - RNA, 19 nt, Artificial Sequence
  Description of Artificial Sequence: Synthetic oligonucleotide
  Sense strand starting at position 2895 of SEQ ID NO: 3842
gucauaauaauagggaugu

SEQ ID NO: 298983 - RNA, 19 nt, Artificial Sequence
  Description of Artificial Sequence: Synthetic oligonucleotide
  Antisense strand to SEQ ID NO: 298982
acaucccuauuauuaugac

SEQ ID NO: 298984 - RNA, 19 nt, Artificial Sequence
  Description of Artificial Sequence: Synthetic oligonucleotide
  Sense strand starting at position 2899 of SEQ ID NO: 3842
uaauaauagggauguuacu

SEQ ID NO: 298985 - RNA, 19 nt, Artificial Sequence
  Description of Artificial Sequence: Synthetic oligonucleotide
  Antisense strand to SEQ ID NO: 298984
aguaacaucccuauuauua

SEQ ID NO: 298986 - RNA, 19 nt, Artificial Sequence
  Description of Artificial Sequence: Synthetic oligonucleotide
  Sense strand starting at position 3060 of SEQ ID NO: 3842
guaaaucuucccgaccuuu

SEQ ID NO: 298987 - RNA, 19 nt, Artificial Sequence
  Description of Artificial Sequence: Synthetic oligonucleotide
  Antisense strand to SEQ ID NO: 298986
aaaggucgggaagauuuac

SEQ ID NO: 298988 - RNA, 19 nt, Artificial Sequence
  Description of Artificial Sequence: Synthetic oligonucleotide
  Sense strand starting at position 3098 of SEQ ID NO: 3842
ggaagucugagguacagua

SEQ ID NO: 298989 - RNA, 19 nt, Artificial Sequence
  Description of Artificial Sequence: Synthetic oligonucleotide
  Antisense strand to SEQ ID NO: 298988
uacuguaccucagacuucc

SEQ ID NO: 298990 - RNA, 19 nt, Artificial Sequence
  Description of Artificial Sequence: Synthetic oligonucleotide
  Sense strand starting at position 3106 of SEQ ID NO: 3842
gagguacaguagucuccaa

SEQ ID NO: 298991 - RNA, 19 nt, Artificial Sequence
  Description of Artificial Sequence: Synthetic oligonucleotide
  Antisense strand to SEQ ID NO: 298990
uuggagacuacuguaccuc

SEQ ID NO: 298992 - RNA, 19 nt, Artificial Sequence
  Description of Artificial Sequence: Synthetic oligonucleotide
  Sense strand starting at position 3119 of SEQ ID NO: 3842
cuccaaauagcagguuaau

SEQ ID NO: 298993 - RNA, 19 nt, Artificial Sequence
  Description of Artificial Sequence: Synthetic oligonucleotide
  Antisense strand to SEQ ID NO: 298992
auuaaccugcuauuuggag

SEQ ID NO: 298994 - RNA, 19 nt, Artificial Sequence
  Description of Artificial Sequence: Synthetic oligonucleotide
  Sense strand starting at position 3129 of SEQ ID NO: 3842
cagguuaaugguggugaca

SEQ ID NO: 298995 - RNA, 19 nt, Artificial Sequence
  Description of Artificial Sequence: Synthetic oligonucleotide
  Antisense strand to SEQ ID NO: 298994
ugucaccaccauuaaccug

SEQ ID NO: 298996 - RNA, 19 nt, Artificial Sequence
  Description of Artificial Sequence: Synthetic oligonucleotide
  Sense strand starting at position 3132 of SEQ ID NO: 3842
guuaaugguggugacauga

SEQ ID NO: 298997 - RNA, 19 nt, Artificial Sequence
  Description of Artificial Sequence: Synthetic oligonucleotide
  Antisense strand to SEQ ID NO: 298996
ucaugucaccaccauuaac

SEQ ID NO: 298998 - RNA, 19 nt, Artificial Sequence
  Description of Artificial Sequence: Synthetic oligonucleotide
  Sense strand starting at position 3556 of SEQ ID NO: 3842
uuaaguaauguccagcaag

SEQ ID NO: 298999 - RNA, 19 nt, Artificial Sequence
  Description of Artificial Sequence: Synthetic oligonucleotide
  Antisense strand to SEQ ID NO: 298998
cuugcuggacauuacuuaa

SEQ ID NO: 299000 - RNA, 19 nt, Artificial Sequence
  Description of Artificial Sequence: Synthetic oligonucleotide
  Sense strand starting at position 3559 of SEQ ID NO: 3842
aguaauguccagcaagucu

SEQ ID NO: 299001 - RNA, 19 nt, Artificial Sequence
  Description of Artificial Sequence: Synthetic oligonucleotide
  Antisense strand to SEQ ID NO: 299000
agacuugcuggacauuacu

SEQ ID NO: 299002 - RNA, 19 nt, Artificial Sequence
  Description of Artificial Sequence: Synthetic oligonucleotide
  Sense strand starting at position 3645 of SEQ ID NO: 3842
auggaagagguuuguuaga

SEQ ID NO: 299003 - RNA, 19 nt, Artificial Sequence
  Description of Artificial Sequence: Synthetic oligonucleotide
  Antisense strand to SEQ ID NO: 299002
ucuaacaaaccucuuccau

SEQ ID NO: 299004 - RNA, 19 nt, Artificial Sequence
  Description of Artificial Sequence: Synthetic oligonucleotide
  Sense strand starting at position 4 of SEQ ID NO: 3843
ucaaauuuguuggagacua

SEQ ID NO: 299005 - RNA, 19 nt, Artificial Sequence
  Description of Artificial Sequence: Synthetic oligonucleotide
  Antisense strand to SEQ ID NO: 299004
uagucuccaacaaauuuga

SEQ ID NO: 299006 - RNA, 19 nt, Artificial Sequence
  Description of Artificial Sequence: Synthetic oligonucleotide
  Sense strand starting at position 192 of SEQ ID NO: 3843
gcucauuugucaucucuca

SEQ ID NO: 299007 - RNA, 19 nt, Artificial Sequence
  Description of Artificial Sequence: Synthetic oligonucleotide
  Antisense strand to SEQ ID NO: 299006
ugagagaugacaaaugagc

SEQ ID NO: 299008 - RNA, 19 nt, Artificial Sequence
  Description of Artificial Sequence: Synthetic oligonucleotide
  Sense strand starting at position 598 of SEQ ID NO: 3843
ccuguuccagcacaugauu

SEQ ID NO: 299009 - RNA, 19 nt, Artificial Sequence
  Description of Artificial Sequence: Synthetic oligonucleotide
  Antisense strand to SEQ ID NO: 299008
aaucaugugcuggaacagg

SEQ ID NO: 299010 - RNA, 19 nt, Artificial Sequence
  Description of Artificial Sequence: Synthetic oligonucleotide
  Sense strand starting at position 819 of SEQ ID NO: 3843
guguaugcccuggaaguuu

SEQ ID NO: 299011 - RNA, 19 nt, Artificial Sequence
  Description of Artificial Sequence: Synthetic oligonucleotide
  Antisense strand to SEQ ID NO: 299010
aaacuuccagggcauacac

SEQ ID NO: 299012 - RNA, 19 nt, Artificial Sequence
  Description of Artificial Sequence: Synthetic oligonucleotide
  Sense strand starting at position 869 of SEQ ID NO: 3843
uucugaauggcuuguaaag

SEQ ID NO: 299013 - RNA, 19 nt, Artificial Sequence
  Description of Artificial Sequence: Synthetic oligonucleotide
  Antisense strand to SEQ ID NO: 299012
cuuuacaagccauucagaa

SEQ ID NO: 299014 - RNA, 19 nt, Artificial Sequence
  Description of Artificial Sequence: Synthetic oligonucleotide
  Sense strand starting at position 923 of SEQ ID NO: 3843
guuaucuccucccuggaua

SEQ ID NO: 299015 - RNA, 19 nt, Artificial Sequence
  Description of Artificial Sequence: Synthetic oligonucleotide
  Antisense strand to SEQ ID NO: 299014
uauccagggaggagauaac

SEQ ID NO: 299016 - RNA, 19 nt, Artificial Sequence
  Description of Artificial Sequence: Synthetic oligonucleotide
  Sense strand starting at position 937 of SEQ ID NO: 3843
ggauauacuuuaucuugca

SEQ ID NO: 299017 - RNA, 19 nt, Artificial Sequence
  Description of Artificial Sequence: Synthetic oligonucleotide
  Antisense strand to SEQ ID NO: 299016
ugcaagauaaaguauaucc

SEQ ID NO: 299018 - RNA, 19 nt, Artificial Sequence
  Description of Artificial Sequence: Synthetic oligonucleotide
  Sense strand starting at position 1465 of SEQ ID NO: 3843
gcaggauggccagagaguu

SEQ ID NO: 299019 - RNA, 19 nt, Artificial Sequence
  Description of Artificial Sequence: Synthetic oligonucleotide
  Antisense strand to SEQ ID NO: 299018
aacucucuggccauccugc

SEQ ID NO: 299020 - RNA, 19 nt, Artificial Sequence
  Description of Artificial Sequence: Synthetic oligonucleotide
  Sense strand starting at position 1471 of SEQ ID NO: 3843
uggccagagaguugaaaug

SEQ ID NO: 299021 - RNA, 19 nt, Artificial Sequence
  Description of Artificial Sequence: Synthetic oligonucleotide
  Antisense strand to SEQ ID NO: 299020
cauuucaacucucuggcca

SEQ ID NO: 299022 - RNA, 19 nt, Artificial Sequence
  Description of Artificial Sequence: Synthetic oligonucleotide
  Sense strand starting at position 1482 of SEQ ID NO: 3843
uugaaaugagucugggagu

SEQ ID NO: 299023 - RNA, 19 nt, Artificial Sequence
  Description of Artificial Sequence: Synthetic oligonucleotide
  Antisense strand to SEQ ID NO: 299022
acucccagacucauuucaa

SEQ ID NO: 299024 - RNA, 19 nt, Artificial Sequence
  Description of Artificial Sequence: Synthetic oligonucleotide
  Sense strand starting at position 1489 of SEQ ID NO: 3843
gagucugggaguuaagagu

SEQ ID NO: 299025 - RNA, 19 nt, Artificial Sequence
  Description of Artificial Sequence: Synthetic oligonucleotide
  Antisense strand to SEQ ID NO: 299024
acucuuaacucccagacuc

SEQ ID NO: 299026 - RNA, 19 nt, Artificial Sequence
  Description of Artificial Sequence: Synthetic oligonucleotide
  Sense strand starting at position 2607 of SEQ ID NO: 3843
cuucguguucggaguuucu

SEQ ID NO: 299027 - RNA, 19 nt, Artificial Sequence
  Description of Artificial Sequence: Synthetic oligonucleotide
  Antisense strand to SEQ ID NO: 299026
agaaacuccgaacacgaag

SEQ ID NO: 299028 - RNA, 19 nt, Artificial Sequence
  Description of Artificial Sequence: Synthetic oligonucleotide
  Sense strand starting at position 2708 of SEQ ID NO: 3843
ccuguuaccugaccaguuu

SEQ ID NO: 299029 - RNA, 19 nt, Artificial Sequence
  Description of Artificial Sequence: Synthetic oligonucleotide
  Antisense strand to SEQ ID NO: 299028
aaacuggucagguaacagg

SEQ ID NO: 299030 - RNA, 19 nt, Artificial Sequence
  Description of Artificial Sequence: Synthetic oligonucleotide
  Sense strand starting at position 2836 of SEQ ID NO: 3843
guuucuuucccuuugcagu

SEQ ID NO: 299031 - RNA, 19 nt, Artificial Sequence
  Description of Artificial Sequence: Synthetic oligonucleotide
  Antisense strand to SEQ ID NO: 299030
acugcaaagggaaagaaac

SEQ ID NO: 299032 - RNA, 19 nt, Artificial Sequence
  Description of Artificial Sequence: Synthetic oligonucleotide
  Sense strand starting at position 2903 of SEQ ID NO: 3843
ucuguuauuucggucucau

SEQ ID NO: 299033 - RNA, 19 nt, Artificial Sequence
  Description of Artificial Sequence: Synthetic oligonucleotide
  Antisense strand to SEQ ID NO: 299032
augagaccgaaauaacaga

SEQ ID NO: 299034 - RNA, 19 nt, Artificial Sequence
  Description of Artificial Sequence: Synthetic oligonucleotide
  Sense strand starting at position 3010 of SEQ ID NO: 3843
gauaaaugacaucguuucu

SEQ ID NO: 299035 - RNA, 19 nt, Artificial Sequence
  Description of Artificial Sequence: Synthetic oligonucleotide
  Antisense strand to SEQ ID NO: 299034
agaaacgaugucauuuauc

SEQ ID NO: 299036 - RNA, 19 nt, Artificial Sequence
  Description of Artificial Sequence: Synthetic oligonucleotide
  Sense strand starting at position 3021 of SEQ ID NO: 3843
ucguuucugucaucaaaga

SEQ ID NO: 299037 - RNA, 19 nt, Artificial Sequence
  Description of Artificial Sequence: Synthetic oligonucleotide
  Antisense strand to SEQ ID NO: 299036
ucuuugaugacagaaacga

SEQ ID NO: 299038 - RNA, 19 nt, Artificial Sequence
  Description of Artificial Sequence: Synthetic oligonucleotide
  Sense strand starting at position 3030 of SEQ ID NO: 3843
ucaucaaagauuggcguau

SEQ ID NO: 299039 - RNA, 19 nt, Artificial Sequence
  Description of Artificial Sequence: Synthetic oligonucleotide
  Antisense strand to SEQ ID NO: 299038
auacgccaaucuuugauga

SEQ ID NO: 299040 - RNA, 19 nt, Artificial Sequence
  Description of Artificial Sequence: Synthetic oligonucleotide
  Sense strand starting at position 3031 of SEQ ID NO: 3843
caucaaagauuggcguaua

SEQ ID NO: 299041 - RNA, 19 nt, Artificial Sequence
  Description of Artificial Sequence: Synthetic oligonucleotide
  Antisense strand to SEQ ID NO: 299040
uauacgccaaucuuugaug

SEQ ID NO: 299042 - RNA, 19 nt, Artificial Sequence
  Description of Artificial Sequence: Synthetic oligonucleotide
  Sense strand starting at position 3034 of SEQ ID NO: 3843
caaagauuggcguauaauc

SEQ ID NO: 299043 - RNA, 19 nt, Artificial Sequence
  Description of Artificial Sequence: Synthetic oligonucleotide
  Antisense strand to SEQ ID NO: 299042
gauuauacgccaaucuuug

SEQ ID NO: 299044 - RNA, 19 nt, Artificial Sequence
  Description of Artificial Sequence: Synthetic oligonucleotide
  Sense strand starting at position 3036 of SEQ ID NO: 3843
aagauuggcguauaaucaa

SEQ ID NO: 299045 - RNA, 19 nt, Artificial Sequence
  Description of Artificial Sequence: Synthetic oligonucleotide
  Antisense strand to SEQ ID NO: 299044
uugauuauacgccaaucuu

SEQ ID NO: 299046 - RNA, 19 nt, Artificial Sequence
  Description of Artificial Sequence: Synthetic oligonucleotide
  Sense strand starting at position 3039 of SEQ ID NO: 3843
auuggcguauaaucaaaua

SEQ ID NO: 299047 - RNA, 19 nt, Artificial Sequence
  Description of Artificial Sequence: Synthetic oligonucleotide
  Antisense strand to SEQ ID NO: 299046
uauuugauuauacgccaau

SEQ ID NO: 299048 - RNA, 19 nt, Artificial Sequence
  Description of Artificial Sequence: Synthetic oligonucleotide
  Sense strand starting at position 3115 of SEQ ID NO: 3843
ucccuagcgcggucuuaga

SEQ ID NO: 299049 - RNA, 19 nt, Artificial Sequence
  Description of Artificial Sequence: Synthetic oligonucleotide
  Antisense strand to SEQ ID NO: 299048
ucuaagaccgcgcuaggga

SEQ ID NO: 299050 - RNA, 19 nt, Artificial Sequence
  Description of Artificial Sequence: Synthetic oligonucleotide
  Sense strand starting at position 3117 of SEQ ID NO: 3843
ccuagcgcggucuuagaua

SEQ ID NO: 299051 - RNA, 19 nt, Artificial Sequence
  Description of Artificial Sequence: Synthetic oligonucleotide
  Antisense strand to SEQ ID NO: 299050
uaucuaagaccgcgcuagg

SEQ ID NO: 299052 - RNA, 19 nt, Artificial Sequence
  Description of Artificial Sequence: Synthetic oligonucleotide
  Sense strand starting at position 3240 of SEQ ID NO: 3843
ucaaguuacucucuguaaa

SEQ ID NO: 299053 - RNA, 19 nt, Artificial Sequence
  Description of Artificial Sequence: Synthetic oligonucleotide
  Antisense strand to SEQ ID NO: 299052
uuuacagagaguaacuuga

SEQ ID NO: 299054 - RNA, 19 nt, Artificial Sequence
  Description of Artificial Sequence: Synthetic oligonucleotide
  Sense strand starting at position 3243 of SEQ ID NO: 3843
aguuacucucuguaaauau

SEQ ID NO: 299055 - RNA, 19 nt, Artificial Sequence
  Description of Artificial Sequence: Synthetic oligonucleotide
  Antisense strand to SEQ ID NO: 299054
auauuuacagagaguaacu

SEQ ID NO: 299056 - RNA, 19 nt, Artificial Sequence
  Description of Artificial Sequence: Synthetic oligonucleotide
  Sense strand starting at position 3267 of SEQ ID NO: 3843
uucuccgaagucugacaau

SEQ ID NO: 299057 - RNA, 19 nt, Artificial Sequence
  Description of Artificial Sequence: Synthetic oligonucleotide
  Antisense strand to SEQ ID NO: 299056
auugucagacuucggagaa

SEQ ID NO: 299058 - RNA, 19 nt, Artificial Sequence
  Description of Artificial Sequence: Synthetic oligonucleotide
  Sense strand starting at position 3276 of SEQ ID NO: 3843
gucugacaauaugucacua

SEQ ID NO: 299059 - RNA, 19 nt, Artificial Sequence
  Description of Artificial Sequence: Synthetic oligonucleotide
  Antisense strand to SEQ ID NO: 299058
uagugacauauugucagac

SEQ ID NO: 299060 - RNA, 19 nt, Artificial Sequence
  Description of Artificial Sequence: Synthetic oligonucleotide
  Sense strand starting at position 3420 of SEQ ID NO: 3843
guacuuguggguuaucaga

SEQ ID NO: 299061 - RNA, 19 nt, Artificial Sequence
  Description of Artificial Sequence: Synthetic oligonucleotide
  Antisense strand to SEQ ID NO: 299060
ucugauaacccacaaguac

SEQ ID NO: 299062 - RNA, 19 nt, Artificial Sequence
  Description of Artificial Sequence: Synthetic oligonucleotide
  Sense strand starting at position 3422 of SEQ ID NO: 3843
acuuguggguuaucagacu

SEQ ID NO: 299063 - RNA, 19 nt, Artificial Sequence
  Description of Artificial Sequence: Synthetic oligonucleotide
  Antisense strand to SEQ ID NO: 299062
agucugauaacccacaagu

SEQ ID NO: 299064 - RNA, 19 nt, Artificial Sequence
  Description of Artificial Sequence: Synthetic oligonucleotide
  Sense strand starting at position 3435 of SEQ ID NO: 3843
cagacuugauggccaugaa

SEQ ID NO: 299065 - RNA, 19 nt, Artificial Sequence
  Description of Artificial Sequence: Synthetic oligonucleotide
  Antisense strand to SEQ ID NO: 299064
uucauggccaucaagucug

SEQ ID NO: 299066 - RNA, 19 nt, Artificial Sequence
  Description of Artificial Sequence: Synthetic oligonucleotide
  Sense strand starting at position 3570 of SEQ ID NO: 3843
gugucugcucugguugcaa

SEQ ID NO: 299067 - RNA, 19 nt, Artificial Sequence
  Description of Artificial Sequence: Synthetic oligonucleotide
  Antisense strand to SEQ ID NO: 299066
uugcaaccagagcagacac

SEQ ID NO: 299068 - RNA, 19 nt, Artificial Sequence
  Description of Artificial Sequence: Synthetic oligonucleotide
  Sense strand starting at position 3713 of SEQ ID NO: 3843
gucaguguccuuugagaua

SEQ ID NO: 299069 - RNA, 19 nt, Artificial Sequence
  Description of Artificial Sequence: Synthetic oligonucleotide
  Antisense strand to SEQ ID NO: 299068
uaucucaaaggacacugac

SEQ ID NO: 299070 - RNA, 19 nt, Artificial Sequence
  Description of Artificial Sequence: Synthetic oligonucleotide
  Sense strand starting at position 3733 of SEQ ID NO: 3843
agcccagucuucucauuua

SEQ ID NO: 299071 - RNA, 19 nt, Artificial Sequence
  Description of Artificial Sequence: Synthetic oligonucleotide
  Antisense strand to SEQ ID NO: 299070
uaaaugagaagacugggcu

SEQ ID NO: 299072 - RNA, 19 nt, Artificial Sequence
  Description of Artificial Sequence: Synthetic oligonucleotide
  Sense strand starting at position 3802 of SEQ ID NO: 3843
ccuugagugagacgacaua

SEQ ID NO: 299073 - RNA, 19 nt, Artificial Sequence
  Description of Artificial Sequence: Synthetic oligonucleotide
  Antisense strand to SEQ ID NO: 299072
uaugucgucucacucaagg

SEQ ID NO: 299074 - RNA, 19 nt, Artificial Sequence
  Description of Artificial Sequence: Synthetic oligonucleotide
  Sense strand starting at position 3811 of SEQ ID NO: 3843
agacgacauauccgacaau

SEQ ID NO: 299075 - RNA, 19 nt, Artificial Sequence
  Description of Artificial Sequence: Synthetic oligonucleotide
  Antisense strand to SEQ ID NO: 299074
auugucggauaugucgucu

SEQ ID NO: 299076 - RNA, 19 nt, Artificial Sequence
  Description of Artificial Sequence: Synthetic oligonucleotide
  Sense strand starting at position 3821 of SEQ ID NO: 3843
uccgacaauuccuuuaagu

SEQ ID NO: 299077 - RNA, 19 nt, Artificial Sequence
  Description of Artificial Sequence: Synthetic oligonucleotide
  Antisense strand to SEQ ID NO: 299076
acuuaaaggaauugucgga

SEQ ID NO: 299078 - RNA, 19 nt, Artificial Sequence
  Description of Artificial Sequence: Synthetic oligonucleotide
  Sense strand starting at position 3823 of SEQ ID NO: 3843
cgacaauuccuuuaaguca

SEQ ID NO: 299079 - RNA, 19 nt, Artificial Sequence
  Description of Artificial Sequence: Synthetic oligonucleotide
  Antisense strand to SEQ ID NO: 299078
ugacuuaaaggaauugucg

SEQ ID NO: 299080 - RNA, 19 nt, Artificial Sequence
  Description of Artificial Sequence: Synthetic oligonucleotide
  Sense strand starting at position 3951 of SEQ ID NO: 3843
uuugcuuuacgaggacuca

SEQ ID NO: 299081 - RNA, 19 nt, Artificial Sequence
  Description of Artificial Sequence: Synthetic oligonucleotide
  Antisense strand to SEQ ID NO: 299080
ugaguccucguaaagcaaa

SEQ ID NO: 299082 - RNA, 19 nt, Artificial Sequence
  Description of Artificial Sequence: Synthetic oligonucleotide
  Sense strand starting at position 3952 of SEQ ID NO: 3843
uugcuuuacgaggacucau

SEQ ID NO: 299083 - RNA, 19 nt, Artificial Sequence
  Description of Artificial Sequence: Synthetic oligonucleotide
  Antisense strand to SEQ ID NO: 299082
augaguccucguaaagcaa

SEQ ID NO: 299084 - RNA, 19 nt, Artificial Sequence
  Description of Artificial Sequence: Synthetic oligonucleotide
  Sense strand starting at position 15 of SEQ ID NO: 3844
acuuccaguucugugggaa

SEQ ID NO: 299085 - RNA, 19 nt, Artificial Sequence
  Description of Artificial Sequence: Synthetic oligonucleotide
  Antisense strand to SEQ ID NO: 299084
uucccacagaacuggaagu

SEQ ID NO: 299086 - RNA, 19 nt, Artificial Sequence
  Description of Artificial Sequence: Synthetic oligonucleotide
  Sense strand starting at position 18 of SEQ ID NO: 3844
uccaguucugugggaagag

SEQ ID NO: 299087 - RNA, 19 nt, Artificial Sequence
  Description of Artificial Sequence: Synthetic oligonucleotide
  Antisense strand to SEQ ID NO: 299086
cucuucccacagaacugga

SEQ ID NO: 299088 - RNA, 19 nt, Artificial Sequence
  Description of Artificial Sequence: Synthetic oligonucleotide
  Sense strand starting at position 37 of SEQ ID NO: 3844
gauugagaggacugcuaag

SEQ ID NO: 299089 - RNA, 19 nt, Artificial Sequence
  Description of Artificial Sequence: Synthetic oligonucleotide
  Antisense strand to SEQ ID NO: 299088
cuuagcaguccucucaauc

SEQ ID NO: 299090 - RNA, 19 nt, Artificial Sequence
  Description of Artificial Sequence: Synthetic oligonucleotide
  Sense strand starting at position 268 of SEQ ID NO: 3844
ucaaauuaagcugguuuaa

SEQ ID NO: 299091 - RNA, 19 nt, Artificial Sequence
  Description of Artificial Sequence: Synthetic oligonucleotide
  Antisense strand to SEQ ID NO: 299090
uuaaaccagcuuaauuuga

SEQ ID NO: 299092 - RNA, 19 nt, Artificial Sequence
  Description of Artificial Sequence: Synthetic oligonucleotide
  Sense strand starting at position 307 of SEQ ID NO: 3844
auucuuggugcucaaacuu

SEQ ID NO: 299093 - RNA, 19 nt, Artificial Sequence
  Description of Artificial Sequence: Synthetic oligonucleotide
  Antisense strand to SEQ ID NO: 299092
aaguuugagcaccaagaau

SEQ ID NO: 299094 - RNA, 19 nt, Artificial Sequence
  Description of Artificial Sequence: Synthetic oligonucleotide
  Sense strand starting at position 323 of SEQ ID NO: 3844
cuuuauugaccugagugau

SEQ ID NO: 299095 - RNA, 19 nt, Artificial Sequence
  Description of Artificial Sequence: Synthetic oligonucleotide
  Antisense strand to SEQ ID NO: 299094
aucacucaggucaauaaag

SEQ ID NO: 299096 - RNA, 19 nt, Artificial Sequence
  Description of Artificial Sequence: Synthetic oligonucleotide
  Sense strand starting at position 326 of SEQ ID NO: 3844
uauugaccugagugauuac

SEQ ID NO: 299097 - RNA, 19 nt, Artificial Sequence
  Description of Artificial Sequence: Synthetic oligonucleotide
  Antisense strand to SEQ ID NO: 299096
guaaucacucaggucaaua

SEQ ID NO: 299098 - RNA, 19 nt, Artificial Sequence
  Description of Artificial Sequence: Synthetic oligonucleotide
  Sense strand starting at position 335 of SEQ ID NO: 3844
gagugauuacuggguauaa

SEQ ID NO: 299099 - RNA, 19 nt, Artificial Sequence
  Description of Artificial Sequence: Synthetic oligonucleotide
  Antisense strand to SEQ ID NO: 299098
uuauacccaguaaucacuc

SEQ ID NO: 299100 - RNA, 19 nt, Artificial Sequence
  Description of Artificial Sequence: Synthetic oligonucleotide
  Sense strand starting at position 336 of SEQ ID NO: 3844
agugauuacuggguauaau

SEQ ID NO: 299101 - RNA, 19 nt, Artificial Sequence
  Description of Artificial Sequence: Synthetic oligonucleotide
  Antisense strand to SEQ ID NO: 299100
auuauacccaguaaucacu

SEQ ID NO: 299102 - RNA, 19 nt, Artificial Sequence
  Description of Artificial Sequence: Synthetic oligonucleotide
  Sense strand starting at position 337 of SEQ ID NO: 3844
gugauuacuggguauaaug

SEQ ID NO: 299103 - RNA, 19 nt, Artificial Sequence
  Description of Artificial Sequence: Synthetic oligonucleotide
  Antisense strand to SEQ ID NO: 299102
cauuauacccaguaaucac

SEQ ID NO: 299104 - RNA, 19 nt, Artificial Sequence
  Description of Artificial Sequence: Synthetic oligonucleotide
  Sense strand starting at position 438 of SEQ ID NO: 3844
guuaucuagccagaccuuu

SEQ ID NO: 299105 - RNA, 19 nt, Artificial Sequence
  Description of Artificial Sequence: Synthetic oligonucleotide
  Antisense strand to SEQ ID NO: 299104
aaaggucuggcuagauaac

SEQ ID NO: 299106 - RNA, 19 nt, Artificial Sequence
  Description of Artificial Sequence: Synthetic oligonucleotide
  Sense strand starting at position 450 of SEQ ID NO: 3844
gaccuuuguccucaaguga

SEQ ID NO: 299107 - RNA, 19 nt, Artificial Sequence
  Description of Artificial Sequence: Synthetic oligonucleotide
  Antisense strand to SEQ ID NO: 299106
ucacuugaggacaaagguc

SEQ ID NO: 299108 - RNA, 19 nt, Artificial Sequence
  Description of Artificial Sequence: Synthetic oligonucleotide
  Sense strand starting at position 476 of SEQ ID NO: 3844
cuaaguguuagcuauugag

SEQ ID NO: 299109 - RNA, 19 nt, Artificial Sequence
  Description of Artificial Sequence: Synthetic oligonucleotide
  Antisense strand to SEQ ID NO: 299108
cucaauagcuaacacuuag

SEQ ID NO: 299110 - RNA, 19 nt, Artificial Sequence
  Description of Artificial Sequence: Synthetic oligonucleotide
  Sense strand starting at position 494 of SEQ ID NO: 3844
gugcacacucaucaaugua

SEQ ID NO: 299111 - RNA, 19 nt, Artificial Sequence
  Description of Artificial Sequence: Synthetic oligonucleotide
  Antisense strand to SEQ ID NO: 299110
uacauugaugagugugcac

SEQ ID NO: 299112 - RNA, 19 nt, Artificial Sequence
  Description of Artificial Sequence: Synthetic oligonucleotide
  Sense strand starting at position 619 of SEQ ID NO: 3844
uguuacauacgagaugcuu

SEQ ID NO: 299113 - RNA, 19 nt, Artificial Sequence
  Description of Artificial Sequence: Synthetic oligonucleotide
  Antisense strand to SEQ ID NO: 299112
aagcaucucguauguaaca

SEQ ID NO: 299114 - RNA, 19 nt, Artificial Sequence
  Description of Artificial Sequence: Synthetic oligonucleotide
  Sense strand starting at position 651 of SEQ ID NO: 3844
ccacuuauucugcagugaa

SEQ ID NO: 299115 - RNA, 19 nt, Artificial Sequence
  Description of Artificial Sequence: Synthetic oligonucleotide
  Antisense strand to SEQ ID NO: 299114
uucacugcagaauaagugg

SEQ ID NO: 299116 - RNA, 19 nt, Artificial Sequence
  Description of Artificial Sequence: Synthetic oligonucleotide
  Sense strand starting at position 891 of SEQ ID NO: 3844
agauuaaguguccaggguu

SEQ ID NO: 299117 - RNA, 19 nt, Artificial Sequence
  Description of Artificial Sequence: Synthetic oligonucleotide
  Antisense strand to SEQ ID NO: 299116
aacccuggacacuuaaucu

SEQ ID NO: 299118 - RNA, 19 nt, Artificial Sequence
  Description of Artificial Sequence: Synthetic oligonucleotide
  Sense strand starting at position 950 of SEQ ID NO: 3844
ugauguggcugauuccaaa

SEQ ID NO: 299119 - RNA, 19 nt, Artificial Sequence
  Description of Artificial Sequence: Synthetic oligonucleotide
  Antisense strand to SEQ ID NO: 299118
uuuggaaucagccacauca

SEQ ID NO: 299120 - RNA, 19 nt, Artificial Sequence
  Description of Artificial Sequence: Synthetic oligonucleotide
  Sense strand starting at position 1081 of SEQ ID NO: 3844
aacggauguguccacaaau

SEQ ID NO: 299121 - RNA, 19 nt, Artificial Sequence
  Description of Artificial Sequence: Synthetic oligonucleotide
  Antisense strand to SEQ ID NO: 299120
auuuguggacacauccguu

SEQ ID NO: 299122 - RNA, 19 nt, Artificial Sequence
  Description of Artificial Sequence: Synthetic oligonucleotide
  Sense strand starting at position 1233 of SEQ ID NO: 3844
gggaauucgaagugcagga

SEQ ID NO: 299123 - RNA, 19 nt, Artificial Sequence
  Description of Artificial Sequence: Synthetic oligonucleotide
  Antisense strand to SEQ ID NO: 299122
uccugcacuucgaauuccc

SEQ ID NO: 299124 - RNA, 19 nt, Artificial Sequence
  Description of Artificial Sequence: Synthetic oligonucleotide
  Sense strand starting at position 1993 of SEQ ID NO: 3844
ccuagaaauguggguuuga

SEQ ID NO: 299125 - RNA, 19 nt, Artificial Sequence
  Description of Artificial Sequence: Synthetic oligonucleotide
  Antisense strand to SEQ ID NO: 299124
ucaaacccacauuucuagg

SEQ ID NO: 299126 - RNA, 19 nt, Artificial Sequence
  Description of Artificial Sequence: Synthetic oligonucleotide
  Sense strand starting at position 1994 of SEQ ID NO: 3844
cuagaaauguggguuugau

SEQ ID NO: 299127 - RNA, 19 nt, Artificial Sequence
  Description of Artificial Sequence: Synthetic oligonucleotide
  Antisense strand to SEQ ID NO: 299126
aucaaacccacauuucuag

SEQ ID NO: 299128 - RNA, 19 nt, Artificial Sequence
  Description of Artificial Sequence: Synthetic oligonucleotide
  Sense strand starting at position 2220 of SEQ ID NO: 3844
agagcagugccagaacuuu

SEQ ID NO: 299129 - RNA, 19 nt, Artificial Sequence
  Description of Artificial Sequence: Synthetic oligonucleotide
  Antisense strand to SEQ ID NO: 299128
aaaguucuggcacugcucu

SEQ ID NO: 299130 - RNA, 19 nt, Artificial Sequence
  Description of Artificial Sequence: Synthetic oligonucleotide
  Sense strand starting at position 2295 of SEQ ID NO: 3844
uaauauuucucaccgcgua

SEQ ID NO: 299131 - RNA, 19 nt, Artificial Sequence
  Description of Artificial Sequence: Synthetic oligonucleotide
  Antisense strand to SEQ ID NO: 299130
uacgcggugagaaauauua

SEQ ID NO: 299132 - RNA, 19 nt, Artificial Sequence
  Description of Artificial Sequence: Synthetic oligonucleotide
  Sense strand starting at position 2350 of SEQ ID NO: 3844
gggaauucgaacuggcacu

SEQ ID NO: 299133 - RNA, 19 nt, Artificial Sequence
  Description of Artificial Sequence: Synthetic oligonucleotide
  Antisense strand to SEQ ID NO: 299132
agugccaguucgaauuccc

SEQ ID NO: 299134 - RNA, 19 nt, Artificial Sequence
  Description of Artificial Sequence: Synthetic oligonucleotide
  Sense strand starting at position 2422 of SEQ ID NO: 3844
acaguuaacuucuuggaau

SEQ ID NO: 299135 - RNA, 19 nt, Artificial Sequence
  Description of Artificial Sequence: Synthetic oligonucleotide
  Antisense strand to SEQ ID NO: 299134
auuccaagaaguuaacugu

SEQ ID NO: 299136 - RNA, 19 nt, Artificial Sequence
  Description of Artificial Sequence: Synthetic oligonucleotide
  Sense strand starting at position 2424 of SEQ ID NO: 3844
aguuaacuucuuggaaugu

SEQ ID NO: 299137 - RNA, 19 nt, Artificial Sequence
  Description of Artificial Sequence: Synthetic oligonucleotide
  Antisense strand to SEQ ID NO: 299136
acauuccaagaaguuaacu

SEQ ID NO: 299138 - RNA, 19 nt, Artificial Sequence
  Description of Artificial Sequence: Synthetic oligonucleotide
  Sense strand starting at position 2495 of SEQ ID NO: 3844
aguguuuauucccugagga

SEQ ID NO: 299139 - RNA, 19 nt, Artificial Sequence
  Description of Artificial Sequence: Synthetic oligonucleotide
  Antisense strand to SEQ ID NO: 299138
uccucagggaauaaacacu

SEQ ID NO: 299140 - RNA, 19 nt, Artificial Sequence
  Description of Artificial Sequence: Synthetic oligonucleotide
  Sense strand starting at position 2497 of SEQ ID NO: 3844
uguuuauucccugaggauc

SEQ ID NO: 299141 - RNA, 19 nt, Artificial Sequence
  Description of Artificial Sequence: Synthetic oligonucleotide
  Antisense strand to SEQ ID NO: 299140
gauccucagggaauaaaca

SEQ ID NO: 299142 - RNA, 19 nt, Artificial Sequence
  Description of Artificial Sequence: Synthetic oligonucleotide
  Sense strand starting at position 2512 of SEQ ID NO: 3844
gauccuaagggcugaaauu

SEQ ID NO: 299143 - RNA, 19 nt, Artificial Sequence
  Description of Artificial Sequence: Synthetic oligonucleotide
  Antisense strand to SEQ ID NO: 299142
aauuucagcccuuaggauc

SEQ ID NO: 299144 - RNA, 19 nt, Artificial Sequence
  Description of Artificial Sequence: Synthetic oligonucleotide
  Sense strand starting at position 2525 of SEQ ID NO: 3844
gaaauucgaggucaaaugu

SEQ ID NO: 299145 - RNA, 19 nt, Artificial Sequence
  Description of Artificial Sequence: Synthetic oligonucleotide
  Antisense strand to SEQ ID NO: 299144
acauuugaccucgaauuuc

SEQ ID NO: 299146 - RNA, 19 nt, Artificial Sequence
  Description of Artificial Sequence: Synthetic oligonucleotide
  Sense strand starting at position 2671 of SEQ ID NO: 3844
uccugagauuccucaucag

SEQ ID NO: 299147 - RNA, 19 nt, Artificial Sequence
  Description of Artificial Sequence: Synthetic oligonucleotide
  Antisense strand to SEQ ID NO: 299146
cugaugaggaaucucagga

SEQ ID NO: 299148 - RNA, 19 nt, Artificial Sequence
  Description of Artificial Sequence: Synthetic oligonucleotide
  Sense strand starting at position 2729 of SEQ ID NO: 3844
ucauuauaauuggcacuga

SEQ ID NO: 299149 - RNA, 19 nt, Artificial Sequence
  Description of Artificial Sequence: Synthetic oligonucleotide
  Antisense strand to SEQ ID NO: 299148
ucagugccaauuauaauga

SEQ ID NO: 299150 - RNA, 19 nt, Artificial Sequence
  Description of Artificial Sequence: Synthetic oligonucleotide
  Sense strand starting at position 2813 of SEQ ID NO: 3844
uugucauuaacagguugga

SEQ ID NO: 299151 - RNA, 19 nt, Artificial Sequence
  Description of Artificial Sequence: Synthetic oligonucleotide
  Antisense strand to SEQ ID NO: 299150
uccaaccuguuaaugacaa

SEQ ID NO: 299152 - RNA, 19 nt, Artificial Sequence
  Description of Artificial Sequence: Synthetic oligonucleotide
  Sense strand starting at position 2998 of SEQ ID NO: 3844
uccugagcugucgcuugau

SEQ ID NO: 299153 - RNA, 19 nt, Artificial Sequence
  Description of Artificial Sequence: Synthetic oligonucleotide
  Antisense strand to SEQ ID NO: 299152
aucaagcgacagcucagga

SEQ ID NO: 299154 - RNA, 19 nt, Artificial Sequence
  Description of Artificial Sequence: Synthetic oligonucleotide
  Sense strand starting at position 3174 of SEQ ID NO: 3844
acaaauaacucaucguuga

SEQ ID NO: 299155 - RNA, 19 nt, Artificial Sequence
  Description of Artificial Sequence: Synthetic oligonucleotide
  Antisense strand to SEQ ID NO: 299154
ucaacgaugaguuauuugu

SEQ ID NO: 299156 - RNA, 19 nt, Artificial Sequence
  Description of Artificial Sequence: Synthetic oligonucleotide
  Sense strand starting at position 3178 of SEQ ID NO: 3844
auaacucaucguugaauug

SEQ ID NO: 299157 - RNA, 19 nt, Artificial Sequence
  Description of Artificial Sequence: Synthetic oligonucleotide
  Antisense strand to SEQ ID NO: 299156
caauucaacgaugaguuau

SEQ ID NO: 299158 - RNA, 19 nt, Artificial Sequence
  Description of Artificial Sequence: Synthetic oligonucleotide
  Sense strand starting at position 3179 of SEQ ID NO: 3844
uaacucaucguugaauuga

SEQ ID NO: 299159 - RNA, 19 nt, Artificial Sequence
  Description of Artificial Sequence: Synthetic oligonucleotide
  Antisense strand to SEQ ID NO: 299158
ucaauucaacgaugaguua

SEQ ID NO: 299160 - RNA, 19 nt, Artificial Sequence
  Description of Artificial Sequence: Synthetic oligonucleotide
  Sense strand starting at position 3676 of SEQ ID NO: 3844
agaggauggucuucaguac

SEQ ID NO: 299161 - RNA, 19 nt, Artificial Sequence
  Description of Artificial Sequence: Synthetic oligonucleotide
  Antisense strand to SEQ ID NO: 299160
guacugaagaccauccucu

SEQ ID NO: 299162 - RNA, 19 nt, Artificial Sequence
  Description of Artificial Sequence: Synthetic oligonucleotide
  Sense strand starting at position 3691 of SEQ ID NO: 3844
guacucagaccuuaguuau

SEQ ID NO: 299163 - RNA, 19 nt, Artificial Sequence
  Description of Artificial Sequence: Synthetic oligonucleotide
  Antisense strand to SEQ ID NO: 299162
auaacuaaggucugaguac

SEQ ID NO: 299164 - RNA, 19 nt, Artificial Sequence
  Description of Artificial Sequence: Synthetic oligonucleotide
  Sense strand starting at position 188 of SEQ ID NO: 3845
ugaauugugucucucuaag

SEQ ID NO: 299165 - RNA, 19 nt, Artificial Sequence
  Description of Artificial Sequence: Synthetic oligonucleotide
  Antisense strand to SEQ ID NO: 299164
cuuagagagacacaauuca

SEQ ID NO: 299166 - RNA, 19 nt, Artificial Sequence
  Description of Artificial Sequence: Synthetic oligonucleotide
  Sense strand starting at position 411 of SEQ ID NO: 3845
gugagaagguccuccauag

SEQ ID NO: 299167 - RNA, 19 nt, Artificial Sequence
  Description of Artificial Sequence: Synthetic oligonucleotide
  Antisense strand to SEQ ID NO: 299166
cuauggaggaccuucucac

SEQ ID NO: 299168 - RNA, 19 nt, Artificial Sequence
  Description of Artificial Sequence: Synthetic oligonucleotide
  Sense strand starting at position 485 of SEQ ID NO: 3845
gggacuucccaauguacac

SEQ ID NO: 299169 - RNA, 19 nt, Artificial Sequence
  Description of Artificial Sequence: Synthetic oligonucleotide
  Antisense strand to SEQ ID NO: 299168
guguacauugggaaguccc

SEQ ID NO: 299170 - RNA, 19 nt, Artificial Sequence
  Description of Artificial Sequence: Synthetic oligonucleotide
  Sense strand starting at position 532 of SEQ ID NO: 3845
ggcucuggccuugaacuaa

SEQ ID NO: 299171 - RNA, 19 nt, Artificial Sequence
  Description of Artificial Sequence: Synthetic oligonucleotide
  Antisense strand to SEQ ID NO: 299170
uuaguucaaggccagagcc

SEQ ID NO: 299172 - RNA, 19 nt, Artificial Sequence
  Description of Artificial Sequence: Synthetic oligonucleotide
  Sense strand starting at position 542 of SEQ ID NO: 3845
uugaacuaaugcccugaga

SEQ ID NO: 299173 - RNA, 19 nt, Artificial Sequence
  Description of Artificial Sequence: Synthetic oligonucleotide
  Antisense strand to SEQ ID NO: 299172
ucucagggcauuaguucaa

SEQ ID NO: 299174 - RNA, 19 nt, Artificial Sequence
  Description of Artificial Sequence: Synthetic oligonucleotide
  Sense strand starting at position 706 of SEQ ID NO: 3845
uguccagugaacuauggau

SEQ ID NO: 299175 - RNA, 19 nt, Artificial Sequence
  Description of Artificial Sequence: Synthetic oligonucleotide
  Antisense strand to SEQ ID NO: 299174
auccauaguucacuggaca

SEQ ID NO: 299176 - RNA, 19 nt, Artificial Sequence
  Description of Artificial Sequence: Synthetic oligonucleotide
  Sense strand starting at position 761 of SEQ ID NO: 3845
agugauagaaccuggcuaa

SEQ ID NO: 299177 - RNA, 19 nt, Artificial Sequence
  Description of Artificial Sequence: Synthetic oligonucleotide
  Antisense strand to SEQ ID NO: 299176
uuagccagguucuaucacu

SEQ ID NO: 299178 - RNA, 19 nt, Artificial Sequence
  Description of Artificial Sequence: Synthetic oligonucleotide
  Sense strand starting at position 762 of SEQ ID NO: 3845
gugauagaaccuggcuaaa

SEQ ID NO: 299179 - RNA, 19 nt, Artificial Sequence
  Description of Artificial Sequence: Synthetic oligonucleotide
  Antisense strand to SEQ ID NO: 299178
uuuagccagguucuaucac

SEQ ID NO: 299180 - RNA, 19 nt, Artificial Sequence
  Description of Artificial Sequence: Synthetic oligonucleotide
  Sense strand starting at position 1227 of SEQ ID NO: 3845
gagggcugucauggaagaa

SEQ ID NO: 299181 - RNA, 19 nt, Artificial Sequence
  Description of Artificial Sequence: Synthetic oligonucleotide
  Antisense strand to SEQ ID NO: 299180
uucuuccaugacagcccuc

SEQ ID NO: 299182 - RNA, 19 nt, Artificial Sequence
  Description of Artificial Sequence: Synthetic oligonucleotide
  Sense strand starting at position 1245 of SEQ ID NO: 3845
agaaauagucuuggccaga

SEQ ID NO: 299183 - RNA, 19 nt, Artificial Sequence
  Description of Artificial Sequence: Synthetic oligonucleotide
  Antisense strand to SEQ ID NO: 299182
ucuggccaagacuauuucu

SEQ ID NO: 299184 - RNA, 19 nt, Artificial Sequence
  Description of Artificial Sequence: Synthetic oligonucleotide
  Sense strand starting at position 1246 of SEQ ID NO: 3845
gaaauagucuuggccagag

SEQ ID NO: 299185 - RNA, 19 nt, Artificial Sequence
  Description of Artificial Sequence: Synthetic oligonucleotide
  Antisense strand to SEQ ID NO: 299184
cucuggccaagacuauuuc

SEQ ID NO: 299186 - RNA, 19 nt, Artificial Sequence
  Description of Artificial Sequence: Synthetic oligonucleotide
  Sense strand starting at position 1250 of SEQ ID NO: 3845
uagucuuggccagagaagu

SEQ ID NO: 299187 - RNA, 19 nt, Artificial Sequence
  Description of Artificial Sequence: Synthetic oligonucleotide
  Antisense strand to SEQ ID NO: 299186
acuucucuggccaagacua

SEQ ID NO: 299188 - RNA, 19 nt, Artificial Sequence
  Description of Artificial Sequence: Synthetic oligonucleotide
  Sense strand starting at position 1443 of SEQ ID NO: 3845
uuuaucagauucuuaggau

SEQ ID NO: 299189 - RNA, 19 nt, Artificial Sequence
  Description of Artificial Sequence: Synthetic oligonucleotide
  Antisense strand to SEQ ID NO: 299188
auccuaagaaucugauaaa

SEQ ID NO: 299190 - RNA, 19 nt, Artificial Sequence
  Description of Artificial Sequence: Synthetic oligonucleotide
  Sense strand starting at position 1497 of SEQ ID NO: 3845
caccuauguggcuaaaggu

SEQ ID NO: 299191 - RNA, 19 nt, Artificial Sequence
  Description of Artificial Sequence: Synthetic oligonucleotide
  Antisense strand to SEQ ID NO: 299190
accuuuagccacauaggug

SEQ ID NO: 299192 - RNA, 19 nt, Artificial Sequence
  Description of Artificial Sequence: Synthetic oligonucleotide
  Sense strand starting at position 1530 of SEQ ID NO: 3845
acgaguuagguacagaauu

SEQ ID NO: 299193 - RNA, 19 nt, Artificial Sequence
  Description of Artificial Sequence: Synthetic oligonucleotide
  Antisense strand to SEQ ID NO: 299192
aauucuguaccuaacucgu

SEQ ID NO: 299194 - RNA, 19 nt, Artificial Sequence
  Description of Artificial Sequence: Synthetic oligonucleotide
  Sense strand starting at position 2037 of SEQ ID NO: 3845
gcucuaggaccagaugcau

SEQ ID NO: 299195 - RNA, 19 nt, Artificial Sequence
  Description of Artificial Sequence: Synthetic oligonucleotide
  Antisense strand to SEQ ID NO: 299194
augcaucugguccuagagc

SEQ ID NO: 299196 - RNA, 19 nt, Artificial Sequence
  Description of Artificial Sequence: Synthetic oligonucleotide
  Sense strand starting at position 2131 of SEQ ID NO: 3845
aucuaugaaguguggguaa

SEQ ID NO: 299197 - RNA, 19 nt, Artificial Sequence
  Description of Artificial Sequence: Synthetic oligonucleotide
  Antisense strand to SEQ ID NO: 299196
uuacccacacuucauagau

SEQ ID NO: 299198 - RNA, 19 nt, Artificial Sequence
  Description of Artificial Sequence: Synthetic oligonucleotide
  Sense strand starting at position 2133 of SEQ ID NO: 3845
cuaugaaguguggguaaua

SEQ ID NO: 299199 - RNA, 19 nt, Artificial Sequence
  Description of Artificial Sequence: Synthetic oligonucleotide
  Antisense strand to SEQ ID NO: 299198
uauuacccacacuucauag

SEQ ID NO: 299200 - RNA, 19 nt, Artificial Sequence
  Description of Artificial Sequence: Synthetic oligonucleotide
  Sense strand starting at position 2202 of SEQ ID NO: 3845
auacacuuugcagagcaaa

SEQ ID NO: 299201 - RNA, 19 nt, Artificial Sequence
  Description of Artificial Sequence: Synthetic oligonucleotide
  Antisense strand to SEQ ID NO: 299200
uuugcucugcaaaguguau

SEQ ID NO: 299202 - RNA, 19 nt, Artificial Sequence
  Description of Artificial Sequence: Synthetic oligonucleotide
  Sense strand starting at position 2380 of SEQ ID NO: 3845
gauuauauuccaugguguc

SEQ ID NO: 299203 - RNA, 19 nt, Artificial Sequence
  Description of Artificial Sequence: Synthetic oligonucleotide
  Antisense strand to SEQ ID NO: 299202
gacaccauggaauauaauc

SEQ ID NO: 299204 - RNA, 19 nt, Artificial Sequence
  Description of Artificial Sequence: Synthetic oligonucleotide
  Sense strand starting at position 2396 of SEQ ID NO: 3845
gucuuugguuaccugggaa

SEQ ID NO: 299205 - RNA, 19 nt, Artificial Sequence
  Description of Artificial Sequence: Synthetic oligonucleotide
  Antisense strand to SEQ ID NO: 299204
uucccagguaaccaaagac

SEQ ID NO: 299206 - RNA, 19 nt, Artificial Sequence
  Description of Artificial Sequence: Synthetic oligonucleotide
  Sense strand starting at position 2399 of SEQ ID NO: 3845
uuugguuaccugggaaauu

SEQ ID NO: 299207 - RNA, 19 nt, Artificial Sequence
  Description of Artificial Sequence: Synthetic oligonucleotide
  Antisense strand to SEQ ID NO: 299206
aauuucccagguaaccaaa

SEQ ID NO: 299208 - RNA, 19 nt, Artificial Sequence
  Description of Artificial Sequence: Synthetic oligonucleotide
  Sense strand starting at position 2427 of SEQ ID NO: 3845
aaguguuaaugaucucuga

SEQ ID NO: 299209 - RNA, 19 nt, Artificial Sequence
  Description of Artificial Sequence: Synthetic oligonucleotide
  Antisense strand to SEQ ID NO: 299208
ucagagaucauuaacacuu

SEQ ID NO: 299210 - RNA, 19 nt, Artificial Sequence
  Description of Artificial Sequence: Synthetic oligonucleotide
  Sense strand starting at position 2430 of SEQ ID NO: 3845
uguuaaugaucucugaacu

SEQ ID NO: 299211 - RNA, 19 nt, Artificial Sequence
  Description of Artificial Sequence: Synthetic oligonucleotide
  Antisense strand to SEQ ID NO: 299210
aguucagagaucauuaaca

SEQ ID NO: 299212 - RNA, 19 nt, Artificial Sequence
  Description of Artificial Sequence: Synthetic oligonucleotide
  Sense strand starting at position 2431 of SEQ ID NO: 3845
guuaaugaucucugaacug

SEQ ID NO: 299213 - RNA, 19 nt, Artificial Sequence
  Description of Artificial Sequence: Synthetic oligonucleotide
  Antisense strand to SEQ ID NO: 299212
caguucagagaucauuaac

SEQ ID NO: 299214 - RNA, 19 nt, Artificial Sequence
  Description of Artificial Sequence: Synthetic oligonucleotide
  Sense strand starting at position 2490 of SEQ ID NO: 3845
cuuuccuuucuggaauuga

SEQ ID NO: 299215 - RNA, 19 nt, Artificial Sequence
  Description of Artificial Sequence: Synthetic oligonucleotide
  Antisense strand to SEQ ID NO: 299214
ucaauuccagaaaggaaag

SEQ ID NO: 299216 - RNA, 19 nt, Artificial Sequence
  Description of Artificial Sequence: Synthetic oligonucleotide
  Sense strand starting at position 2554 of SEQ ID NO: 3845
ugucuucuuugacccugaa

SEQ ID NO: 299217 - RNA, 19 nt, Artificial Sequence
  Description of Artificial Sequence: Synthetic oligonucleotide
  Antisense strand to SEQ ID NO: 299216
uucagggucaaagaagaca

SEQ ID NO: 299218 - RNA, 19 nt, Artificial Sequence
  Description of Artificial Sequence: Synthetic oligonucleotide
  Sense strand starting at position 3091 of SEQ ID NO: 3845
aguuaaagucccuaagucu

SEQ ID NO: 299219 - RNA, 19 nt, Artificial Sequence
  Description of Artificial Sequence: Synthetic oligonucleotide
  Antisense strand to SEQ ID NO: 299218
agacuuagggacuuuaacu

SEQ ID NO: 299220 - RNA, 19 nt, Artificial Sequence
  Description of Artificial Sequence: Synthetic oligonucleotide
  Sense strand starting at position 3097 of SEQ ID NO: 3845
agucccuaagucuacuaaa

SEQ ID NO: 299221 - RNA, 19 nt, Artificial Sequence
  Description of Artificial Sequence: Synthetic oligonucleotide
  Antisense strand to SEQ ID NO: 299220
uuuaguagacuuagggacu

SEQ ID NO: 299222 - RNA, 19 nt, Artificial Sequence
  Description of Artificial Sequence: Synthetic oligonucleotide
  Sense strand starting at position 3181 of SEQ ID NO: 3845
gggucacagucucuacaau

SEQ ID NO: 299223 - RNA, 19 nt, Artificial Sequence
  Description of Artificial Sequence: Synthetic oligonucleotide
  Antisense strand to SEQ ID NO: 299222
auuguagagacugugaccc

SEQ ID NO: 299224 - RNA, 19 nt, Artificial Sequence
  Description of Artificial Sequence: Synthetic oligonucleotide
  Sense strand starting at position 3264 of SEQ ID NO: 3845
ugggauguugcacaaucuu

SEQ ID NO: 299225 - RNA, 19 nt, Artificial Sequence
  Description of Artificial Sequence: Synthetic oligonucleotide
  Antisense strand to SEQ ID NO: 299224
aagauugugcaacauccca

SEQ ID NO: 299226 - RNA, 19 nt, Artificial Sequence
  Description of Artificial Sequence: Synthetic oligonucleotide
  Sense strand starting at position 3283 of SEQ ID NO: 3845
cuagcagucuccuuauuuc

SEQ ID NO: 299227 - RNA, 19 nt, Artificial Sequence
  Description of Artificial Sequence: Synthetic oligonucleotide
  Antisense strand to SEQ ID NO: 299226
gaaauaaggagacugcuag

SEQ ID NO: 299228 - RNA, 19 nt, Artificial Sequence
  Description of Artificial Sequence: Synthetic oligonucleotide
  Sense strand starting at position 3302 of SEQ ID NO: 3845
uggucucuucccuacuagu

SEQ ID NO: 299229 - RNA, 19 nt, Artificial Sequence
  Description of Artificial Sequence: Synthetic oligonucleotide
  Antisense strand to SEQ ID NO: 299228
acuaguagggaagagacca

SEQ ID NO: 299230 - RNA, 19 nt, Artificial Sequence
  Description of Artificial Sequence: Synthetic oligonucleotide
  Sense strand starting at position 3376 of SEQ ID NO: 3845
uuguuuauggcucaaauuc

SEQ ID NO: 299231 - RNA, 19 nt, Artificial Sequence
  Description of Artificial Sequence: Synthetic oligonucleotide
  Antisense strand to SEQ ID NO: 299230
gaauuugagccauaaacaa

SEQ ID NO: 299232 - RNA, 19 nt, Artificial Sequence
  Description of Artificial Sequence: Synthetic oligonucleotide
  Sense strand starting at position 3484 of SEQ ID NO: 3845
agugaagaggcaugaucau

SEQ ID NO: 299233 - RNA, 19 nt, Artificial Sequence
  Description of Artificial Sequence: Synthetic oligonucleotide
  Antisense strand to SEQ ID NO: 299232
augaucaugccucuucacu

SEQ ID NO: 299234 - RNA, 19 nt, Artificial Sequence
  Description of Artificial Sequence: Synthetic oligonucleotide
  Sense strand starting at position 3808 of SEQ ID NO: 3845
cuuacucuguuuccauaga

SEQ ID NO: 299235 - RNA, 19 nt, Artificial Sequence
  Description of Artificial Sequence: Synthetic oligonucleotide
  Antisense strand to SEQ ID NO: 299234
ucuauggaaacagaguaag

SEQ ID NO: 299236 - RNA, 19 nt, Artificial Sequence
  Description of Artificial Sequence: Synthetic oligonucleotide
  Sense strand starting at position 3862 of SEQ ID NO: 3845
gaagccuuuccuuagguua

SEQ ID NO: 299237 - RNA, 19 nt, Artificial Sequence
  Description of Artificial Sequence: Synthetic oligonucleotide
  Antisense strand to SEQ ID NO: 299236
uaaccuaaggaaaggcuuc

SEQ ID NO: 299238 - RNA, 19 nt, Artificial Sequence
  Description of Artificial Sequence: Synthetic oligonucleotide
  Sense strand starting at position 3874 of SEQ ID NO: 3845
uagguuauagcuggaagca

SEQ ID NO: 299239 - RNA, 19 nt, Artificial Sequence
  Description of Artificial Sequence: Synthetic oligonucleotide
  Antisense strand to SEQ ID NO: 299238
ugcuuccagcuauaaccua

SEQ ID NO: 299240 - RNA, 19 nt, Artificial Sequence
  Description of Artificial Sequence: Synthetic oligonucleotide
  Sense strand starting at position 3889 of SEQ ID NO: 3845
agcaaucucucugugaacu

SEQ ID NO: 299241 - RNA, 19 nt, Artificial Sequence
  Description of Artificial Sequence: Synthetic oligonucleotide
  Antisense strand to SEQ ID NO: 299240
aguucacagagagauugcu

SEQ ID NO: 299242 - RNA, 19 nt, Artificial Sequence
  Description of Artificial Sequence: Synthetic oligonucleotide
  Sense strand starting at position 3900 of SEQ ID NO: 3845
ugugaacuaccauaugcuu

SEQ ID NO: 299243 - RNA, 19 nt, Artificial Sequence
  Description of Artificial Sequence: Synthetic oligonucleotide
  Antisense strand to SEQ ID NO: 299242
aagcauaugguaguucaca

SEQ ID NO: 299244 - RNA, 19 nt, Artificial Sequence
  Description of Artificial Sequence: Synthetic oligonucleotide
  Sense strand starting at position 148 of SEQ ID NO: 3846
uugcuuguggcuguaguau

SEQ ID NO: 299245 - RNA, 19 nt, Artificial Sequence
  Description of Artificial Sequence: Synthetic oligonucleotide
  Antisense strand to SEQ ID NO: 299244
auacuacagccacaagcaa

SEQ ID NO: 299246 - RNA, 19 nt, Artificial Sequence
  Description of Artificial Sequence: Synthetic oligonucleotide
  Sense strand starting at position 156 of SEQ ID NO: 3846
ggcuguaguauugagauaa

SEQ ID NO: 299247 - RNA, 19 nt, Artificial Sequence
  Description of Artificial Sequence: Synthetic oligonucleotide
  Antisense strand to SEQ ID NO: 299246
uuaucucaauacuacagcc

SEQ ID NO: 299248 - RNA, 19 nt, Artificial Sequence
  Description of Artificial Sequence: Synthetic oligonucleotide
  Sense strand starting at position 160 of SEQ ID NO: 3846
guaguauugagauaacugu

SEQ ID NO: 299249 - RNA, 19 nt, Artificial Sequence
  Description of Artificial Sequence: Synthetic oligonucleotide
  Antisense strand to SEQ ID NO: 299248
acaguuaucucaauacuac

SEQ ID NO: 299250 - RNA, 19 nt, Artificial Sequence
  Description of Artificial Sequence: Synthetic oligonucleotide
  Sense strand starting at position 213 of SEQ ID NO: 3846
auaaucaugcagugaacuu

SEQ ID NO: 299251 - RNA, 19 nt, Artificial Sequence
  Description of Artificial Sequence: Synthetic oligonucleotide
  Antisense strand to SEQ ID NO: 299250
aaguucacugcaugauuau

SEQ ID NO: 299252 - RNA, 19 nt, Artificial Sequence
  Description of Artificial Sequence: Synthetic oligonucleotide
  Sense strand starting at position 400 of SEQ ID NO: 3846
cugaaauaacggcagaugu

SEQ ID NO: 299253 - RNA, 19 nt, Artificial Sequence
  Description of Artificial Sequence: Synthetic oligonucleotide
  Antisense strand to SEQ ID NO: 299252
acaucugccguuauuucag

SEQ ID NO: 299254 - RNA, 19 nt, Artificial Sequence
  Description of Artificial Sequence: Synthetic oligonucleotide
  Sense strand starting at position 495 of SEQ ID NO: 3846
cuuguauaaucucuaggaa

SEQ ID NO: 299255 - RNA, 19 nt, Artificial Sequence
  Description of Artificial Sequence: Synthetic oligonucleotide
  Antisense strand to SEQ ID NO: 299254
uuccuagagauuauacaag

SEQ ID NO: 299256 - RNA, 19 nt, Artificial Sequence
  Description of Artificial Sequence: Synthetic oligonucleotide
  Sense strand starting at position 498 of SEQ ID NO: 3846
guauaaucucuaggaauua

SEQ ID NO: 299257 - RNA, 19 nt, Artificial Sequence
  Description of Artificial Sequence: Synthetic oligonucleotide
  Antisense strand to SEQ ID NO: 299256
uaauuccuagagauuauac

SEQ ID NO: 299258 - RNA, 19 nt, Artificial Sequence
  Description of Artificial Sequence: Synthetic oligonucleotide
  Sense strand starting at position 510 of SEQ ID NO: 3846
ggaauuauauggcuaauag

SEQ ID NO: 299259 - RNA, 19 nt, Artificial Sequence
  Description of Artificial Sequence: Synthetic oligonucleotide
  Antisense strand to SEQ ID NO: 299258
cuauuagccauauaauucc

SEQ ID NO: 299260 - RNA, 19 nt, Artificial Sequence
  Description of Artificial Sequence: Synthetic oligonucleotide
  Sense strand starting at position 511 of SEQ ID NO: 3846
gaauuauauggcuaauagu

SEQ ID NO: 299261 - RNA, 19 nt, Artificial Sequence
  Description of Artificial Sequence: Synthetic oligonucleotide
  Antisense strand to SEQ ID NO: 299260
acuauuagccauauaauuc

SEQ ID NO: 299262 - RNA, 19 nt, Artificial Sequence
  Description of Artificial Sequence: Synthetic oligonucleotide
  Sense strand starting at position 560 of SEQ ID NO: 3846
agcuauaggcucuauggaa

SEQ ID NO: 299263 - RNA, 19 nt, Artificial Sequence
  Description of Artificial Sequence: Synthetic oligonucleotide
  Antisense strand to SEQ ID NO: 299262
uuccauagagccuauagcu

SEQ ID NO: 299264 - RNA, 19 nt, Artificial Sequence
  Description of Artificial Sequence: Synthetic oligonucleotide
  Sense strand starting at position 575 of SEQ ID NO: 3846
ggaagugcagucuaccauu

SEQ ID NO: 299265 - RNA, 19 nt, Artificial Sequence
  Description of Artificial Sequence: Synthetic oligonucleotide
  Antisense strand to SEQ ID NO: 299264
aaugguagacugcacuucc

SEQ ID NO: 299266 - RNA, 19 nt, Artificial Sequence
  Description of Artificial Sequence: Synthetic oligonucleotide
  Sense strand starting at position 721 of SEQ ID NO: 3846
ucuugaacucaaugaguuu

SEQ ID NO: 299267 - RNA, 19 nt, Artificial Sequence
  Description of Artificial Sequence: Synthetic oligonucleotide
  Antisense strand to SEQ ID NO: 299266
aaacucauugaguucaaga

SEQ ID NO: 299268 - RNA, 19 nt, Artificial Sequence
  Description of Artificial Sequence: Synthetic oligonucleotide
  Sense strand starting at position 813 of SEQ ID NO: 3846
acugucauccaaggucaga

SEQ ID NO: 299269 - RNA, 19 nt, Artificial Sequence
  Description of Artificial Sequence: Synthetic oligonucleotide
  Antisense strand to SEQ ID NO: 299268
ucugaccuuggaugacagu

SEQ ID NO: 299270 - RNA, 19 nt, Artificial Sequence
  Description of Artificial Sequence: Synthetic oligonucleotide
  Sense strand starting at position 869 of SEQ ID NO: 3846
uuauuauggcuggaguaca

SEQ ID NO: 299271 - RNA, 19 nt, Artificial Sequence
  Description of Artificial Sequence: Synthetic oligonucleotide
  Antisense strand to SEQ ID NO: 299270
uguacuccagccauaauaa

SEQ ID NO: 299272 - RNA, 19 nt, Artificial Sequence
  Description of Artificial Sequence: Synthetic oligonucleotide
  Sense strand starting at position 943 of SEQ ID NO: 3846
cccaaucaguuagugauca

SEQ ID NO: 299273 - RNA, 19 nt, Artificial Sequence
  Description of Artificial Sequence: Synthetic oligonucleotide
  Antisense strand to SEQ ID NO: 299272
ugaucacuaacugauuggg

SEQ ID NO: 299274 - RNA, 19 nt, Artificial Sequence
  Description of Artificial Sequence: Synthetic oligonucleotide
  Sense strand starting at position 948 of SEQ ID NO: 3846
ucaguuagugaucauucuu

SEQ ID NO: 299275 - RNA, 19 nt, Artificial Sequence
  Description of Artificial Sequence: Synthetic oligonucleotide
  Antisense strand to SEQ ID NO: 299274
aagaaugaucacuaacuga

SEQ ID NO: 299276 - RNA, 19 nt, Artificial Sequence
  Description of Artificial Sequence: Synthetic oligonucleotide
  Sense strand starting at position 1370 of SEQ ID NO: 3846
agacuaauuugguacagag

SEQ ID NO: 299277 - RNA, 19 nt, Artificial Sequence
  Description of Artificial Sequence: Synthetic oligonucleotide
  Antisense strand to SEQ ID NO: 299276
cucuguaccaaauuagucu

SEQ ID NO: 299278 - RNA, 19 nt, Artificial Sequence
  Description of Artificial Sequence: Synthetic oligonucleotide
  Sense strand starting at position 1497 of SEQ ID NO: 3846
gaaggcugucuugaggguu

SEQ ID NO: 299279 - RNA, 19 nt, Artificial Sequence
  Description of Artificial Sequence: Synthetic oligonucleotide
  Antisense strand to SEQ ID NO: 299278
aacccucaagacagccuuc

SEQ ID NO: 299280 - RNA, 19 nt, Artificial Sequence
  Description of Artificial Sequence: Synthetic oligonucleotide
  Sense strand starting at position 1723 of SEQ ID NO: 3846
gaggaauuguuucucucca

SEQ ID NO: 299281 - RNA, 19 nt, Artificial Sequence
  Description of Artificial Sequence: Synthetic oligonucleotide
  Antisense strand to SEQ ID NO: 299280
uggagagaaacaauuccuc

SEQ ID NO: 299282 - RNA, 19 nt, Artificial Sequence
  Description of Artificial Sequence: Synthetic oligonucleotide
  Sense strand starting at position 1724 of SEQ ID NO: 3846
aggaauuguuucucuccaa

SEQ ID NO: 299283 - RNA, 19 nt, Artificial Sequence
  Description of Artificial Sequence: Synthetic oligonucleotide
  Antisense strand to SEQ ID NO: 299282
uuggagagaaacaauuccu

SEQ ID NO: 299284 - RNA, 19 nt, Artificial Sequence
  Description of Artificial Sequence: Synthetic oligonucleotide
  Sense strand starting at position 1725 of SEQ ID NO: 3846
ggaauuguuucucuccaaa

SEQ ID NO: 299285 - RNA, 19 nt, Artificial Sequence
  Description of Artificial Sequence: Synthetic oligonucleotide
  Antisense strand to SEQ ID NO: 299284
uuuggagagaaacaauucc

SEQ ID NO: 299286 - RNA, 19 nt, Artificial Sequence
  Description of Artificial Sequence: Synthetic oligonucleotide
  Sense strand starting at position 1825 of SEQ ID NO: 3846
cuuaccugacuuuggguaa

SEQ ID NO: 299287 - RNA, 19 nt, Artificial Sequence
  Description of Artificial Sequence: Synthetic oligonucleotide
  Antisense strand to SEQ ID NO: 299286
uuacccaaagucagguaag

SEQ ID NO: 299288 - RNA, 19 nt, Artificial Sequence
  Description of Artificial Sequence: Synthetic oligonucleotide
  Sense strand starting at position 2065 of SEQ ID NO: 3846
cauaguauggguuaucauc

SEQ ID NO: 299289 - RNA, 19 nt, Artificial Sequence
  Description of Artificial Sequence: Synthetic oligonucleotide
  Antisense strand to SEQ ID NO: 299288
gaugauaacccauacuaug

SEQ ID NO: 299290 - RNA, 19 nt, Artificial Sequence
  Description of Artificial Sequence: Synthetic oligonucleotide
  Sense strand starting at position 2086 of SEQ ID NO: 3846
acugccuuugauuagaaua

SEQ ID NO: 299291 - RNA, 19 nt, Artificial Sequence
  Description of Artificial Sequence: Synthetic oligonucleotide
  Antisense strand to SEQ ID NO: 299290
uauucuaaucaaaggcagu

SEQ ID NO: 299292 - RNA, 19 nt, Artificial Sequence
  Description of Artificial Sequence: Synthetic oligonucleotide
  Sense strand starting at position 2214 of SEQ ID NO: 3846
uuucuacauguggaaacuu

SEQ ID NO: 299293 - RNA, 19 nt, Artificial Sequence
  Description of Artificial Sequence: Synthetic oligonucleotide
  Antisense strand to SEQ ID NO: 299292
aaguuuccacauguagaaa

SEQ ID NO: 299294 - RNA, 19 nt, Artificial Sequence
  Description of Artificial Sequence: Synthetic oligonucleotide
  Sense strand starting at position 2223 of SEQ ID NO: 3846
guggaaacuuaagucauua

SEQ ID NO: 299295 - RNA, 19 nt, Artificial Sequence
  Description of Artificial Sequence: Synthetic oligonucleotide
  Antisense strand to SEQ ID NO: 299294
uaaugacuuaaguuuccac

SEQ ID NO: 299296 - RNA, 19 nt, Artificial Sequence
  Description of Artificial Sequence: Synthetic oligonucleotide
  Sense strand starting at position 2342 of SEQ ID NO: 3846
auuacuuguuaaucgggaa

SEQ ID NO: 299297 - RNA, 19 nt, Artificial Sequence
  Description of Artificial Sequence: Synthetic oligonucleotide
  Antisense strand to SEQ ID NO: 299296
uucccgauuaacaaguaau

SEQ ID NO: 299298 - RNA, 19 nt, Artificial Sequence
  Description of Artificial Sequence: Synthetic oligonucleotide
  Sense strand starting at position 2346 of SEQ ID NO: 3846
cuuguuaaucgggaauaua

SEQ ID NO: 299299 - RNA, 19 nt, Artificial Sequence
  Description of Artificial Sequence: Synthetic oligonucleotide
  Antisense strand to SEQ ID NO: 299298
uauauucccgauuaacaag

SEQ ID NO: 299300 - RNA, 19 nt, Artificial Sequence
  Description of Artificial Sequence: Synthetic oligonucleotide
  Sense strand starting at position 2355 of SEQ ID NO: 3846
cgggaauauaauggguuau

SEQ ID NO: 299301 - RNA, 19 nt, Artificial Sequence
  Description of Artificial Sequence: Synthetic oligonucleotide
  Antisense strand to SEQ ID NO: 299300
auaacccauuauauucccg

SEQ ID NO: 299302 - RNA, 19 nt, Artificial Sequence
  Description of Artificial Sequence: Synthetic oligonucleotide
  Sense strand starting at position 2357 of SEQ ID NO: 3846
ggaauauaauggguuaugu

SEQ ID NO: 299303 - RNA, 19 nt, Artificial Sequence
  Description of Artificial Sequence: Synthetic oligonucleotide
  Antisense strand to SEQ ID NO: 299302
acauaacccauuauauucc

SEQ ID NO: 299304 - RNA, 19 nt, Artificial Sequence
  Description of Artificial Sequence: Synthetic oligonucleotide
  Sense strand starting at position 2359 of SEQ ID NO: 3846
aauauaauggguuaugugu

SEQ ID NO: 299305 - RNA, 19 nt, Artificial Sequence
  Description of Artificial Sequence: Synthetic oligonucleotide
  Antisense strand to SEQ ID NO: 299304
acacauaacccauuauauu

SEQ ID NO: 299306 - RNA, 19 nt, Artificial Sequence
  Description of Artificial Sequence: Synthetic oligonucleotide
  Sense strand starting at position 2633 of SEQ ID NO: 3846
gucuacuaacucuggaaac

SEQ ID NO: 299307 - RNA, 19 nt, Artificial Sequence
  Description of Artificial Sequence: Synthetic oligonucleotide
  Antisense strand to SEQ ID NO: 299306
guuuccagaguuaguagac

SEQ ID NO: 299308 - RNA, 19 nt, Artificial Sequence
  Description of Artificial Sequence: Synthetic oligonucleotide
  Sense strand starting at position 2643 of SEQ ID NO: 3846
ucuggaaacuuggaauuua

SEQ ID NO: 299309 - RNA, 19 nt, Artificial Sequence
  Description of Artificial Sequence: Synthetic oligonucleotide
  Antisense strand to SEQ ID NO: 299308
uaaauuccaaguuuccaga

SEQ ID NO: 299310 - RNA, 19 nt, Artificial Sequence
  Description of Artificial Sequence: Synthetic oligonucleotide
  Sense strand starting at position 2783 of SEQ ID NO: 3846
cccagauacguggaacuuu

SEQ ID NO: 299311 - RNA, 19 nt, Artificial Sequence
  Description of Artificial Sequence: Synthetic oligonucleotide
  Antisense strand to SEQ ID NO: 299310
aaaguuccacguaucuggg

SEQ ID NO: 299312 - RNA, 19 nt, Artificial Sequence
  Description of Artificial Sequence: Synthetic oligonucleotide
  Sense strand starting at position 3098 of SEQ ID NO: 3846
gagaaucuuguugggaacu

SEQ ID NO: 299313 - RNA, 19 nt, Artificial Sequence
  Description of Artificial Sequence: Synthetic oligonucleotide
  Antisense strand to SEQ ID NO: 299312
aguucccaacaagauucuc

SEQ ID NO: 299314 - RNA, 19 nt, Artificial Sequence
  Description of Artificial Sequence: Synthetic oligonucleotide
  Sense strand starting at position 3218 of SEQ ID NO: 3846
auuguaucugguggaauaa

SEQ ID NO: 299315 - RNA, 19 nt, Artificial Sequence
  Description of Artificial Sequence: Synthetic oligonucleotide
  Antisense strand to SEQ ID NO: 299314
uuauuccaccagauacaau

SEQ ID NO: 299316 - RNA, 19 nt, Artificial Sequence
  Description of Artificial Sequence: Synthetic oligonucleotide
  Sense strand starting at position 3605 of SEQ ID NO: 3846
cguguuacccugcuuccua

SEQ ID NO: 299317 - RNA, 19 nt, Artificial Sequence
  Description of Artificial Sequence: Synthetic oligonucleotide
  Antisense strand to SEQ ID NO: 299316
uaggaagcaggguaacacg

SEQ ID NO: 299318 - RNA, 19 nt, Artificial Sequence
  Description of Artificial Sequence: Synthetic oligonucleotide
  Sense strand starting at position 3729 of SEQ ID NO: 3846
ggauucuaagucuggaagu

SEQ ID NO: 299319 - RNA, 19 nt, Artificial Sequence
  Description of Artificial Sequence: Synthetic oligonucleotide
  Antisense strand to SEQ ID NO: 299318
acuuccagacuuagaaucc

SEQ ID NO: 299320 - RNA, 19 nt, Artificial Sequence
  Description of Artificial Sequence: Synthetic oligonucleotide
  Sense strand starting at position 3731 of SEQ ID NO: 3846
auucuaagucuggaaguua

SEQ ID NO: 299321 - RNA, 19 nt, Artificial Sequence
  Description of Artificial Sequence: Synthetic oligonucleotide
  Antisense strand to SEQ ID NO: 299320
uaacuuccagacuuagaau

SEQ ID NO: 299322 - RNA, 19 nt, Artificial Sequence
  Description of Artificial Sequence: Synthetic oligonucleotide
  Sense strand starting at position 3769 of SEQ ID NO: 3846
ggguaaaugcuuuagcaua

SEQ ID NO: 299323 - RNA, 19 nt, Artificial Sequence
  Description of Artificial Sequence: Synthetic oligonucleotide
  Antisense strand to SEQ ID NO: 299322
uaugcuaaagcauuuaccc

SEQ ID NO: 299324 - RNA, 19 nt, Artificial Sequence
  Description of Artificial Sequence: Synthetic oligonucleotide
  Sense strand starting at position 29 of SEQ ID NO: 3847
gucuauaaugaaugaauug

SEQ ID NO: 299325 - RNA, 19 nt, Artificial Sequence
  Description of Artificial Sequence: Synthetic oligonucleotide
  Antisense strand to SEQ ID NO: 299324
caauucauucauuauagac

SEQ ID NO: 299326 - RNA, 19 nt, Artificial Sequence
  Description of Artificial Sequence: Synthetic oligonucleotide
  Sense strand starting at position 402 of SEQ ID NO: 3847
gcguuuggcagauagagaa

SEQ ID NO: 299327 - RNA, 19 nt, Artificial Sequence
  Description of Artificial Sequence: Synthetic oligonucleotide
  Antisense strand to SEQ ID NO: 299326
uucucuaucugccaaacgc

SEQ ID NO: 299328 - RNA, 19 nt, Artificial Sequence
  Description of Artificial Sequence: Synthetic oligonucleotide
  Sense strand starting at position 453 of SEQ ID NO: 3847
uggaauugucaaugaaauu

SEQ ID NO: 299329 - RNA, 19 nt, Artificial Sequence
  Description of Artificial Sequence: Synthetic oligonucleotide
  Antisense strand to SEQ ID NO: 299328
aauuucauugacaauucca

SEQ ID NO: 299330 - RNA, 19 nt, Artificial Sequence
  Description of Artificial Sequence: Synthetic oligonucleotide
  Sense strand starting at position 481 of SEQ ID NO: 3847
agaugugauccucaccagu

SEQ ID NO: 299331 - RNA, 19 nt, Artificial Sequence
  Description of Artificial Sequence: Synthetic oligonucleotide
  Antisense strand to SEQ ID NO: 299330
acuggugaggaucacaucu

SEQ ID NO: 299332 - RNA, 19 nt, Artificial Sequence
  Description of Artificial Sequence: Synthetic oligonucleotide
  Sense strand starting at position 545 of SEQ ID NO: 3847
ggcuccugaugaguaagau

SEQ ID NO: 299333 - RNA, 19 nt, Artificial Sequence
  Description of Artificial Sequence: Synthetic oligonucleotide
  Antisense strand to SEQ ID NO: 299332
aucuuacucaucaggagcc

SEQ ID NO: 299334 - RNA, 19 nt, Artificial Sequence
  Description of Artificial Sequence: Synthetic oligonucleotide
  Sense strand starting at position 546 of SEQ ID NO: 3847
gcuccugaugaguaagauu

SEQ ID NO: 299335 - RNA, 19 nt, Artificial Sequence
  Description of Artificial Sequence: Synthetic oligonucleotide
  Antisense strand to SEQ ID NO: 299334
aaucuuacucaucaggagc

SEQ ID NO: 299336 - RNA, 19 nt, Artificial Sequence
  Description of Artificial Sequence: Synthetic oligonucleotide
  Sense strand starting at position 626 of SEQ ID NO: 3847
gcagaaucuucugucagga

SEQ ID NO: 299337 - RNA, 19 nt, Artificial Sequence
  Description of Artificial Sequence: Synthetic oligonucleotide
  Antisense strand to SEQ ID NO: 299336
uccugacagaagauucugc

SEQ ID NO: 299338 - RNA, 19 nt, Artificial Sequence
  Description of Artificial Sequence: Synthetic oligonucleotide
  Sense strand starting at position 799 of SEQ ID NO: 3847
ccaguaauguauuucuagu

SEQ ID NO: 299339 - RNA, 19 nt, Artificial Sequence
  Description of Artificial Sequence: Synthetic oligonucleotide
  Antisense strand to SEQ ID NO: 299338
acuagaaauacauuacugg

SEQ ID NO: 299340 - RNA, 19 nt, Artificial Sequence
  Description of Artificial Sequence: Synthetic oligonucleotide
  Sense strand starting at position 812 of SEQ ID NO: 3847
ucuaguagauauguagaua

SEQ ID NO: 299341 - RNA, 19 nt, Artificial Sequence
  Description of Artificial Sequence: Synthetic oligonucleotide
  Antisense strand to SEQ ID NO: 299340
uaucuacauaucuacuaga

SEQ ID NO: 299342 - RNA, 19 nt, Artificial Sequence
  Description of Artificial Sequence: Synthetic oligonucleotide
  Sense strand starting at position 929 of SEQ ID NO: 3847
uuguuaaacugauuguuga

SEQ ID NO: 299343 - RNA, 19 nt, Artificial Sequence
  Description of Artificial Sequence: Synthetic oligonucleotide
  Antisense strand to SEQ ID NO: 299342
ucaacaaucaguuuaacaa

SEQ ID NO: 299344 - RNA, 19 nt, Artificial Sequence
  Description of Artificial Sequence: Synthetic oligonucleotide
  Sense strand starting at position 932 of SEQ ID NO: 3847
uuaaacugauuguugagau

SEQ ID NO: 299345 - RNA, 19 nt, Artificial Sequence
  Description of Artificial Sequence: Synthetic oligonucleotide
  Antisense strand to SEQ ID NO: 299344
aucucaacaaucaguuuaa

SEQ ID NO: 299346 - RNA, 19 nt, Artificial Sequence
  Description of Artificial Sequence: Synthetic oligonucleotide
  Sense strand starting at position 1034 of SEQ ID NO: 3847
aggugauaucagcauugca

SEQ ID NO: 299347 - RNA, 19 nt, Artificial Sequence
  Description of Artificial Sequence: Synthetic oligonucleotide
  Antisense strand to SEQ ID NO: 299346
ugcaaugcugauaucaccu

SEQ ID NO: 299348 - RNA, 19 nt, Artificial Sequence
  Description of Artificial Sequence: Synthetic oligonucleotide
  Sense strand starting at position 1037 of SEQ ID NO: 3847
ugauaucagcauugcagaa

SEQ ID NO: 299349 - RNA, 19 nt, Artificial Sequence
  Description of Artificial Sequence: Synthetic oligonucleotide
  Antisense strand to SEQ ID NO: 299348
uucugcaaugcugauauca

SEQ ID NO: 299350 - RNA, 19 nt, Artificial Sequence
  Description of Artificial Sequence: Synthetic oligonucleotide
  Sense strand starting at position 1343 of SEQ ID NO: 3847
ccauaucacucuguccaga

SEQ ID NO: 299351 - RNA, 19 nt, Artificial Sequence
  Description of Artificial Sequence: Synthetic oligonucleotide
  Antisense strand to SEQ ID NO: 299350
ucuggacagagugauaugg

SEQ ID NO: 299352 - RNA, 19 nt, Artificial Sequence
  Description of Artificial Sequence: Synthetic oligonucleotide
  Sense strand starting at position 1345 of SEQ ID NO: 3847
auaucacucuguccagagu

SEQ ID NO: 299353 - RNA, 19 nt, Artificial Sequence
  Description of Artificial Sequence: Synthetic oligonucleotide
  Antisense strand to SEQ ID NO: 299352
acucuggacagagugauau

SEQ ID NO: 299354 - RNA, 19 nt, Artificial Sequence
  Description of Artificial Sequence: Synthetic oligonucleotide
  Sense strand starting at position 1454 of SEQ ID NO: 3847
accuaccugcuuuaggaua

SEQ ID NO: 299355 - RNA, 19 nt, Artificial Sequence
  Description of Artificial Sequence: Synthetic oligonucleotide
  Antisense strand to SEQ ID NO: 299354
uauccuaaagcagguaggu

SEQ ID NO: 299356 - RNA, 19 nt, Artificial Sequence
  Description of Artificial Sequence: Synthetic oligonucleotide
  Sense strand starting at position 2238 of SEQ ID NO: 3847
aggacuugccugugaaauu

SEQ ID NO: 299357 - RNA, 19 nt, Artificial Sequence
  Description of Artificial Sequence: Synthetic oligonucleotide
  Antisense strand to SEQ ID NO: 299356
aauuucacaggcaaguccu

SEQ ID NO: 299358 - RNA, 19 nt, Artificial Sequence
  Description of Artificial Sequence: Synthetic oligonucleotide
  Sense strand starting at position 2327 of SEQ ID NO: 3847
ccuggauggaucugaaucu

SEQ ID NO: 299359 - RNA, 19 nt, Artificial Sequence
  Description of Artificial Sequence: Synthetic oligonucleotide
  Antisense strand to SEQ ID NO: 299358
agauucagauccauccagg

SEQ ID NO: 299360 - RNA, 19 nt, Artificial Sequence
  Description of Artificial Sequence: Synthetic oligonucleotide
  Sense strand starting at position 2334 of SEQ ID NO: 3847
ggaucugaaucucccagua

SEQ ID NO: 299361 - RNA, 19 nt, Artificial Sequence
  Description of Artificial Sequence: Synthetic oligonucleotide
  Antisense strand to SEQ ID NO: 299360
uacugggagauucagaucc

SEQ ID NO: 299362 - RNA, 19 nt, Artificial Sequence
  Description of Artificial Sequence: Synthetic oligonucleotide
  Sense strand starting at position 2365 of SEQ ID NO: 3847
agggucagcuuuguuauuu

SEQ ID NO: 299363 - RNA, 19 nt, Artificial Sequence
  Description of Artificial Sequence: Synthetic oligonucleotide
  Antisense strand to SEQ ID NO: 299362
aaauaacaaagcugacccu

SEQ ID NO: 299364 - RNA, 19 nt, Artificial Sequence
  Description of Artificial Sequence: Synthetic oligonucleotide
  Sense strand starting at position 2404 of SEQ ID NO: 3847
ugcuaaacuggagaauugu

SEQ ID NO: 299365 - RNA, 19 nt, Artificial Sequence
  Description of Artificial Sequence: Synthetic oligonucleotide
  Antisense strand to SEQ ID NO: 299364
acaauucuccaguuuagca

SEQ ID NO: 299366 - RNA, 19 nt, Artificial Sequence
  Description of Artificial Sequence: Synthetic oligonucleotide
  Sense strand starting at position 2655 of SEQ ID NO: 3847
gugugucuggcugucugau

SEQ ID NO: 299367 - RNA, 19 nt, Artificial Sequence
  Description of Artificial Sequence: Synthetic oligonucleotide
  Antisense strand to SEQ ID NO: 299366
aucagacagccagacacac

SEQ ID NO: 299368 - RNA, 19 nt, Artificial Sequence
  Description of Artificial Sequence: Synthetic oligonucleotide
  Sense strand starting at position 2681 of SEQ ID NO: 3847
cuucgugucccagcuuuga

SEQ ID NO: 299369 - RNA, 19 nt, Artificial Sequence
  Description of Artificial Sequence: Synthetic oligonucleotide
  Antisense strand to SEQ ID NO: 299368
ucaaagcugggacacgaag

SEQ ID NO: 299370 - RNA, 19 nt, Artificial Sequence
  Description of Artificial Sequence: Synthetic oligonucleotide
  Sense strand starting at position 2712 of SEQ ID NO: 3847
ggagaagccuucuuugacu

SEQ ID NO: 299371 - RNA, 19 nt, Artificial Sequence
  Description of Artificial Sequence: Synthetic oligonucleotide
  Antisense strand to SEQ ID NO: 299370
agucaaagaaggcuucucc

SEQ ID NO: 299372 - RNA, 19 nt, Artificial Sequence
  Description of Artificial Sequence: Synthetic oligonucleotide
  Sense strand starting at position 2714 of SEQ ID NO: 3847
agaagccuucuuugacuuu

SEQ ID NO: 299373 - RNA, 19 nt, Artificial Sequence
  Description of Artificial Sequence: Synthetic oligonucleotide
  Antisense strand to SEQ ID NO: 299372
aaagucaaagaaggcuucu

SEQ ID NO: 299374 - RNA, 19 nt, Artificial Sequence
  Description of Artificial Sequence: Synthetic oligonucleotide
  Sense strand starting at position 2784 of SEQ ID NO: 3847
guuccuuuagagcaaccau

SEQ ID NO: 299375 - RNA, 19 nt, Artificial Sequence
  Description of Artificial Sequence: Synthetic oligonucleotide
  Antisense strand to SEQ ID NO: 299374
augguugcucuaaaggaac

SEQ ID NO: 299376 - RNA, 19 nt, Artificial Sequence
  Description of Artificial Sequence: Synthetic oligonucleotide
  Sense strand starting at position 2818 of SEQ ID NO: 3847
gcguguuuacuuguuggca

SEQ ID NO: 299377 - RNA, 19 nt, Artificial Sequence
  Description of Artificial Sequence: Synthetic oligonucleotide
  Antisense strand to SEQ ID NO: 299376
ugccaacaaguaaacacgc

SEQ ID NO: 299378 - RNA, 19 nt, Artificial Sequence
  Description of Artificial Sequence: Synthetic oligonucleotide
  Sense strand starting at position 2924 of SEQ ID NO: 3847
gcauucuucuauuucucga

SEQ ID NO: 299379 - RNA, 19 nt, Artificial Sequence
  Description of Artificial Sequence: Synthetic oligonucleotide
  Antisense strand to SEQ ID NO: 299378
ucgagaaauagaagaaugc

SEQ ID NO: 299380 - RNA, 19 nt, Artificial Sequence
  Description of Artificial Sequence: Synthetic oligonucleotide
  Sense strand starting at position 3067 of SEQ ID NO: 3847
guauuugaacccugugcca

SEQ ID NO: 299381 - RNA, 19 nt, Artificial Sequence
  Description of Artificial Sequence: Synthetic oligonucleotide
  Antisense strand to SEQ ID NO: 299380
uggcacaggguucaaauac

SEQ ID NO: 299382 - RNA, 19 nt, Artificial Sequence
  Description of Artificial Sequence: Synthetic oligonucleotide
  Sense strand starting at position 3212 of SEQ ID NO: 3847
uuauuuaaugcuuggcaac

SEQ ID NO: 299383 - RNA, 19 nt, Artificial Sequence
  Description of Artificial Sequence: Synthetic oligonucleotide
  Antisense strand to SEQ ID NO: 299382
guugccaagcauuaaauaa

SEQ ID NO: 299384 - RNA, 19 nt, Artificial Sequence
  Description of Artificial Sequence: Synthetic oligonucleotide
  Sense strand starting at position 3740 of SEQ ID NO: 3847
guacuuucucaugagguua

SEQ ID NO: 299385 - RNA, 19 nt, Artificial Sequence
  Description of Artificial Sequence: Synthetic oligonucleotide
  Antisense strand to SEQ ID NO: 299384
uaaccucaugagaaaguac

SEQ ID NO: 299386 - RNA, 19 nt, Artificial Sequence
  Description of Artificial Sequence: Synthetic oligonucleotide
  Sense strand starting at position 3790 of SEQ ID NO: 3847
aagaauaaaguuggugcua

SEQ ID NO: 299387 - RNA, 19 nt, Artificial Sequence
  Description of Artificial Sequence: Synthetic oligonucleotide
  Antisense strand to SEQ ID NO: 299386
uagcaccaacuuuauucuu

SEQ ID NO: 299388 - RNA, 19 nt, Artificial Sequence
  Description of Artificial Sequence: Synthetic oligonucleotide
  Sense strand starting at position 3791 of SEQ ID NO: 3847
agaauaaaguuggugcuaa

SEQ ID NO: 299389 - RNA, 19 nt, Artificial Sequence
  Description of Artificial Sequence: Synthetic oligonucleotide
  Antisense strand to SEQ ID NO: 299388
uuagcaccaacuuuauucu

SEQ ID NO: 299390 - RNA, 19 nt, Artificial Sequence
  Description of Artificial Sequence: Synthetic oligonucleotide
  Sense strand starting at position 3841 of SEQ ID NO: 3847
cuaaauauauggguuugaa

SEQ ID NO: 299391 - RNA, 19 nt, Artificial Sequence
  Description of Artificial Sequence: Synthetic oligonucleotide
  Antisense strand to SEQ ID NO: 299390
uucaaacccauauauuuag

SEQ ID NO: 299392 - RNA, 19 nt, Artificial Sequence
  Description of Artificial Sequence: Synthetic oligonucleotide
  Sense strand starting at position 3928 of SEQ ID NO: 3847
uuaaucucacaggguuaau

SEQ ID NO: 299393 - RNA, 19 nt, Artificial Sequence
  Description of Artificial Sequence: Synthetic oligonucleotide
  Antisense strand to SEQ ID NO: 299392
auuaacccugugagauuaa

SEQ ID NO: 299394 - RNA, 19 nt, Artificial Sequence
  Description of Artificial Sequence: Synthetic oligonucleotide
  Sense strand starting at position 3931 of SEQ ID NO: 3847
aucucacaggguuaaugua

SEQ ID NO: 299395 - RNA, 19 nt, Artificial Sequence
  Description of Artificial Sequence: Synthetic oligonucleotide
  Antisense strand to SEQ ID NO: 299394
uacauuaacccugugagau

SEQ ID NO: 299396 - RNA, 19 nt, Artificial Sequence
  Description of Artificial Sequence: Synthetic oligonucleotide
  Sense strand starting at position 3943 of SEQ ID NO: 3847
uaauguaauguuggaugua

SEQ ID NO: 299397 - RNA, 19 nt, Artificial Sequence
  Description of Artificial Sequence: Synthetic oligonucleotide
  Antisense strand to SEQ ID NO: 299396
uacauccaacauuacauua

SEQ ID NO: 299398 - RNA, 19 nt, Artificial Sequence
  Description of Artificial Sequence: Synthetic oligonucleotide
  Sense strand starting at position 3952 of SEQ ID NO: 3847
guuggauguaaauaaggua

SEQ ID NO: 299399 - RNA, 19 nt, Artificial Sequence
  Description of Artificial Sequence: Synthetic oligonucleotide
  Antisense strand to SEQ ID NO: 299398
uaccuuauuuacauccaac

SEQ ID NO: 299400 - RNA, 19 nt, Artificial Sequence
  Description of Artificial Sequence: Synthetic oligonucleotide
  Sense strand starting at position 3971 of SEQ ID NO: 3847
uccuauaaucuugggauau

SEQ ID NO: 299401 - RNA, 19 nt, Artificial Sequence
  Description of Artificial Sequence: Synthetic oligonucleotide
  Antisense strand to SEQ ID NO: 299400
auaucccaagauuauagga

SEQ ID NO: 299402 - RNA, 19 nt, Artificial Sequence
  Description of Artificial Sequence: Synthetic oligonucleotide
  Sense strand starting at position 3983 of SEQ ID NO: 3847
gggauauauuggguaccca

SEQ ID NO: 299403 - RNA, 19 nt, Artificial Sequence
  Description of Artificial Sequence: Synthetic oligonucleotide
  Antisense strand to SEQ ID NO: 299402
uggguacccaauauauccc

SEQ ID NO: 299404 - RNA, 19 nt, Artificial Sequence
  Description of Artificial Sequence: Synthetic oligonucleotide
  Sense strand starting at position 22 of SEQ ID NO: 3848
cgugaaucauaacugagau

SEQ ID NO: 299405 - RNA, 19 nt, Artificial Sequence
  Description of Artificial Sequence: Synthetic oligonucleotide
  Antisense strand to SEQ ID NO: 299404
aucucaguuaugauucacg

SEQ ID NO: 299406 - RNA, 19 nt, Artificial Sequence
  Description of Artificial Sequence: Synthetic oligonucleotide
  Sense strand starting at position 356 of SEQ ID NO: 3848
aaucaugguuuacuaggaa

SEQ ID NO: 299407 - RNA, 19 nt, Artificial Sequence
  Description of Artificial Sequence: Synthetic oligonucleotide
  Antisense strand to SEQ ID NO: 299406
uuccuaguaaaccaugauu

SEQ ID NO: 299408 - RNA, 19 nt, Artificial Sequence
  Description of Artificial Sequence: Synthetic oligonucleotide
  Sense strand starting at position 979 of SEQ ID NO: 3848
guuacuuuagcauauacau

SEQ ID NO: 299409 - RNA, 19 nt, Artificial Sequence
  Description of Artificial Sequence: Synthetic oligonucleotide
  Antisense strand to SEQ ID NO: 299408
auguauaugcuaaaguaac

SEQ ID NO: 299410 - RNA, 19 nt, Artificial Sequence
  Description of Artificial Sequence: Synthetic oligonucleotide
  Sense strand starting at position 1031 of SEQ ID NO: 3848
guguauauuuaguucuucu

SEQ ID NO: 299411 - RNA, 19 nt, Artificial Sequence
  Description of Artificial Sequence: Synthetic oligonucleotide
  Antisense strand to SEQ ID NO: 299410
agaagaacuaaauauacac

SEQ ID NO: 299412 - RNA, 19 nt, Artificial Sequence
  Description of Artificial Sequence: Synthetic oligonucleotide
  Sense strand starting at position 1054 of SEQ ID NO: 3848
uugaaauaacuugggcuau

SEQ ID NO: 299413 - RNA, 19 nt, Artificial Sequence
  Description of Artificial Sequence: Synthetic oligonucleotide
  Antisense strand to SEQ ID NO: 299412
auagcccaaguuauuucaa

SEQ ID NO: 299414 - RNA, 19 nt, Artificial Sequence
  Description of Artificial Sequence: Synthetic oligonucleotide
  Sense strand starting at position 1135 of SEQ ID NO: 3848
acagauggcuccuuuaaca

SEQ ID NO: 299415 - RNA, 19 nt, Artificial Sequence
  Description of Artificial Sequence: Synthetic oligonucleotide
  Antisense strand to SEQ ID NO: 299414
uguuaaaggagccaucugu

SEQ ID NO: 299416 - RNA, 19 nt, Artificial Sequence
  Description of Artificial Sequence: Synthetic oligonucleotide
  Sense strand starting at position 1196 of SEQ ID NO: 3848
ggacaauguuauguuauag

SEQ ID NO: 299417 - RNA, 19 nt, Artificial Sequence
  Description of Artificial Sequence: Synthetic oligonucleotide
  Antisense strand to SEQ ID NO: 299416
cuauaacauaacauugucc

SEQ ID NO: 299418 - RNA, 19 nt, Artificial Sequence
  Description of Artificial Sequence: Synthetic oligonucleotide
  Sense strand starting at position 1330 of SEQ ID NO: 3848
uuaaaugagguuggcuuua

SEQ ID NO: 299419 - RNA, 19 nt, Artificial Sequence
  Description of Artificial Sequence: Synthetic oligonucleotide
  Antisense strand to SEQ ID NO: 299418
uaaagccaaccucauuuaa

SEQ ID NO: 299420 - RNA, 19 nt, Artificial Sequence
  Description of Artificial Sequence: Synthetic oligonucleotide
  Sense strand starting at position 1335 of SEQ ID NO: 3848
ugagguuggcuuuaguaaa

SEQ ID NO: 299421 - RNA, 19 nt, Artificial Sequence
  Description of Artificial Sequence: Synthetic oligonucleotide
  Antisense strand to SEQ ID NO: 299420
uuuacuaaagccaaccuca

SEQ ID NO: 299422 - RNA, 19 nt, Artificial Sequence
  Description of Artificial Sequence: Synthetic oligonucleotide
  Sense strand starting at position 1773 of SEQ ID NO: 3848
ccucacugaugcucagaca

SEQ ID NO: 299423 - RNA, 19 nt, Artificial Sequence
  Description of Artificial Sequence: Synthetic oligonucleotide
  Antisense strand to SEQ ID NO: 299422
ugucugagcaucagugagg

SEQ ID NO: 299424 - RNA, 19 nt, Artificial Sequence
  Description of Artificial Sequence: Synthetic oligonucleotide
  Sense strand starting at position 1785 of SEQ ID NO: 3848
ucagacagauuccugcaau

SEQ ID NO: 299425 - RNA, 19 nt, Artificial Sequence
  Description of Artificial Sequence: Synthetic oligonucleotide
  Antisense strand to SEQ ID NO: 299424
auugcaggaaucugucuga

SEQ ID NO: 299426 - RNA, 19 nt, Artificial Sequence
  Description of Artificial Sequence: Synthetic oligonucleotide
  Sense strand starting at position 1791 of SEQ ID NO: 3848
agauuccugcaaugaggaa

SEQ ID NO: 299427 - RNA, 19 nt, Artificial Sequence
  Description of Artificial Sequence: Synthetic oligonucleotide
  Antisense strand to SEQ ID NO: 299426
uuccucauugcaggaaucu

SEQ ID NO: 299428 - RNA, 19 nt, Artificial Sequence
  Description of Artificial Sequence: Synthetic oligonucleotide
  Sense strand starting at position 1855 of SEQ ID NO: 3848
cuaugagaaguguacuugu

SEQ ID NO: 299429 - RNA, 19 nt, Artificial Sequence
  Description of Artificial Sequence: Synthetic oligonucleotide
  Antisense strand to SEQ ID NO: 299428
acaaguacacuucucauag

SEQ ID NO: 299430 - RNA, 19 nt, Artificial Sequence
  Description of Artificial Sequence: Synthetic oligonucleotide
  Sense strand starting at position 1880 of SEQ ID NO: 3848
cgacuugucauuuaccgca

SEQ ID NO: 299431 - RNA, 19 nt, Artificial Sequence
  Description of Artificial Sequence: Synthetic oligonucleotide
  Antisense strand to SEQ ID NO: 299430
ugcgguaaaugacaagucg

SEQ ID NO: 299432 - RNA, 19 nt, Artificial Sequence
  Description of Artificial Sequence: Synthetic oligonucleotide
  Sense strand starting at position 1955 of SEQ ID NO: 3848
cuuggaaaguuucugaggu

SEQ ID NO: 299433 - RNA, 19 nt, Artificial Sequence
  Description of Artificial Sequence: Synthetic oligonucleotide
  Antisense strand to SEQ ID NO: 299432
accucagaaacuuuccaag

SEQ ID NO: 299434 - RNA, 19 nt, Artificial Sequence
  Description of Artificial Sequence: Synthetic oligonucleotide
  Sense strand starting at position 2312 of SEQ ID NO: 3848
ggcugauuacaugaccauu

SEQ ID NO: 299435 - RNA, 19 nt, Artificial Sequence
  Description of Artificial Sequence: Synthetic oligonucleotide
  Antisense strand to SEQ ID NO: 299434
aauggucauguaaucagcc

SEQ ID NO: 299436 - RNA, 19 nt, Artificial Sequence
  Description of Artificial Sequence: Synthetic oligonucleotide
  Sense strand starting at position 2463 of SEQ ID NO: 3848
ucucuucuggguugauaga

SEQ ID NO: 299437 - RNA, 19 nt, Artificial Sequence
  Description of Artificial Sequence: Synthetic oligonucleotide
  Antisense strand to SEQ ID NO: 299436
ucuaucaacccagaagaga

SEQ ID NO: 299438 - RNA, 19 nt, Artificial Sequence
  Description of Artificial Sequence: Synthetic oligonucleotide
  Sense strand starting at position 2464 of SEQ ID NO: 3848
cucuucuggguugauagau

SEQ ID NO: 299439 - RNA, 19 nt, Artificial Sequence
  Description of Artificial Sequence: Synthetic oligonucleotide
  Antisense strand to SEQ ID NO: 299438
aucuaucaacccagaagag

SEQ ID NO: 299440 - RNA, 19 nt, Artificial Sequence
  Description of Artificial Sequence: Synthetic oligonucleotide
  Sense strand starting at position 2623 of SEQ ID NO: 3848
gaguuugaaccuugacucu

SEQ ID NO: 299441 - RNA, 19 nt, Artificial Sequence
  Description of Artificial Sequence: Synthetic oligonucleotide
  Antisense strand to SEQ ID NO: 299440
agagucaagguucaaacuc

SEQ ID NO: 299442 - RNA, 19 nt, Artificial Sequence
  Description of Artificial Sequence: Synthetic oligonucleotide
  Sense strand starting at position 2642 of SEQ ID NO: 3848
accauuuacuaguuguguu

SEQ ID NO: 299443 - RNA, 19 nt, Artificial Sequence
  Description of Artificial Sequence: Synthetic oligonucleotide
  Antisense strand to SEQ ID NO: 299442
aacacaacuaguaaauggu

SEQ ID NO: 299444 - RNA, 19 nt, Artificial Sequence
  Description of Artificial Sequence: Synthetic oligonucleotide
  Sense strand starting at position 2702 of SEQ ID NO: 3848
aauuguuaacaguggaaau

SEQ ID NO: 299445 - RNA, 19 nt, Artificial Sequence
  Description of Artificial Sequence: Synthetic oligonucleotide
  Antisense strand to SEQ ID NO: 299444
auuuccacuguuaacaauu

SEQ ID NO: 299446 - RNA, 19 nt, Artificial Sequence
  Description of Artificial Sequence: Synthetic oligonucleotide
  Sense strand starting at position 2703 of SEQ ID NO: 3848
auuguuaacaguggaaaug

SEQ ID NO: 299447 - RNA, 19 nt, Artificial Sequence
  Description of Artificial Sequence: Synthetic oligonucleotide
  Antisense strand to SEQ ID NO: 299446
cauuuccacuguuaacaau

SEQ ID NO: 299448 - RNA, 19 nt, Artificial Sequence
  Description of Artificial Sequence: Synthetic oligonucleotide
  Sense strand starting at position 2704 of SEQ ID NO: 3848
uuguuaacaguggaaaugu

SEQ ID NO: 299449 - RNA, 19 nt, Artificial Sequence
  Description of Artificial Sequence: Synthetic oligonucleotide
  Antisense strand to SEQ ID NO: 299448
acauuuccacuguuaacaa

SEQ ID NO: 299450 - RNA, 19 nt, Artificial Sequence
  Description of Artificial Sequence: Synthetic oligonucleotide
  Sense strand starting at position 2714 of SEQ ID NO: 3848
uggaaauguaucugaguua

SEQ ID NO: 299451 - RNA, 19 nt, Artificial Sequence
  Description of Artificial Sequence: Synthetic oligonucleotide
  Antisense strand to SEQ ID NO: 299450
uaacucagauacauuucca

SEQ ID NO: 299452 - RNA, 19 nt, Artificial Sequence
  Description of Artificial Sequence: Synthetic oligonucleotide
  Sense strand starting at position 2927 of SEQ ID NO: 3848
auguuuaaccuugaugcua

SEQ ID NO: 299453 - RNA, 19 nt, Artificial Sequence
  Description of Artificial Sequence: Synthetic oligonucleotide
  Antisense strand to SEQ ID NO: 299452
uagcaucaagguuaaacau

SEQ ID NO: 299454 - RNA, 19 nt, Artificial Sequence
  Description of Artificial Sequence: Synthetic oligonucleotide
  Sense strand starting at position 3164 of SEQ ID NO: 3848
ugcuucucccuggaacauu

SEQ ID NO: 299455 - RNA, 19 nt, Artificial Sequence
  Description of Artificial Sequence: Synthetic oligonucleotide
  Antisense strand to SEQ ID NO: 299454
aauguuccagggagaagca

SEQ ID NO: 299456 - RNA, 19 nt, Artificial Sequence
  Description of Artificial Sequence: Synthetic oligonucleotide
  Sense strand starting at position 3174 of SEQ ID NO: 3848
uggaacauuuccuagggua

SEQ ID NO: 299457 - RNA, 19 nt, Artificial Sequence
  Description of Artificial Sequence: Synthetic oligonucleotide
  Antisense strand to SEQ ID NO: 299456
uacccuaggaaauguucca

SEQ ID NO: 299458 - RNA, 19 nt, Artificial Sequence
  Description of Artificial Sequence: Synthetic oligonucleotide
  Sense strand starting at position 3296 of SEQ ID NO: 3848
guugauggcucuccaauuu

SEQ ID NO: 299459 - RNA, 19 nt, Artificial Sequence
  Description of Artificial Sequence: Synthetic oligonucleotide
  Antisense strand to SEQ ID NO: 299458
aaauuggagagccaucaac

SEQ ID NO: 299460 - RNA, 19 nt, Artificial Sequence
  Description of Artificial Sequence: Synthetic oligonucleotide
  Sense strand starting at position 3371 of SEQ ID NO: 3848
gcuaauucggaggaaagca

SEQ ID NO: 299461 - RNA, 19 nt, Artificial Sequence
  Description of Artificial Sequence: Synthetic oligonucleotide
  Antisense strand to SEQ ID NO: 299460
ugcuuuccuccgaauuagc

SEQ ID NO: 299462 - RNA, 19 nt, Artificial Sequence
  Description of Artificial Sequence: Synthetic oligonucleotide
  Sense strand starting at position 3435 of SEQ ID NO: 3848
acuggauggccuugagaaa

SEQ ID NO: 299463 - RNA, 19 nt, Artificial Sequence
  Description of Artificial Sequence: Synthetic oligonucleotide
  Antisense strand to SEQ ID NO: 299462
uuucucaaggccauccagu

SEQ ID NO: 299464 - RNA, 19 nt, Artificial Sequence
  Description of Artificial Sequence: Synthetic oligonucleotide
  Sense strand starting at position 3470 of SEQ ID NO: 3848
ugacucacacuguguaaca

SEQ ID NO: 299465 - RNA, 19 nt, Artificial Sequence
  Description of Artificial Sequence: Synthetic oligonucleotide
  Antisense strand to SEQ ID NO: 299464
uguuacacagugugaguca

SEQ ID NO: 299466 - RNA, 19 nt, Artificial Sequence
  Description of Artificial Sequence: Synthetic oligonucleotide
  Sense strand starting at position 3496 of SEQ ID NO: 3848
uucugaccuguaugugaaa

SEQ ID NO: 299467 - RNA, 19 nt, Artificial Sequence
  Description of Artificial Sequence: Synthetic oligonucleotide
  Antisense strand to SEQ ID NO: 299466
uuucacauacaggucagaa

SEQ ID NO: 299468 - RNA, 19 nt, Artificial Sequence
  Description of Artificial Sequence: Synthetic oligonucleotide
  Sense strand starting at position 3498 of SEQ ID NO: 3848
cugaccuguaugugaaaga

SEQ ID NO: 299469 - RNA, 19 nt, Artificial Sequence
  Description of Artificial Sequence: Synthetic oligonucleotide
  Antisense strand to SEQ ID NO: 299468
ucuuucacauacaggucag

SEQ ID NO: 299470 - RNA, 19 nt, Artificial Sequence
  Description of Artificial Sequence: Synthetic oligonucleotide
  Sense strand starting at position 3503 of SEQ ID NO: 3848
cuguaugugaaagagcaua

SEQ ID NO: 299471 - RNA, 19 nt, Artificial Sequence
  Description of Artificial Sequence: Synthetic oligonucleotide
  Antisense strand to SEQ ID NO: 299470
uaugcucuuucacauacag

SEQ ID NO: 299472 - RNA, 19 nt, Artificial Sequence
  Description of Artificial Sequence: Synthetic oligonucleotide
  Sense strand starting at position 3508 of SEQ ID NO: 3848
ugugaaagagcauaauugu

SEQ ID NO: 299473 - RNA, 19 nt, Artificial Sequence
  Description of Artificial Sequence: Synthetic oligonucleotide
  Antisense strand to SEQ ID NO: 299472
acaauuaugcucuuucaca

SEQ ID NO: 299474 - RNA, 19 nt, Artificial Sequence
  Description of Artificial Sequence: Synthetic oligonucleotide
  Sense strand starting at position 3650 of SEQ ID NO: 3848
gccucuugauaagucaaau

SEQ ID NO: 299475 - RNA, 19 nt, Artificial Sequence
  Description of Artificial Sequence: Synthetic oligonucleotide
  Antisense strand to SEQ ID NO: 299474
auuugacuuaucaagaggc

SEQ ID NO: 299476 - RNA, 19 nt, Artificial Sequence
  Description of Artificial Sequence: Synthetic oligonucleotide
  Sense strand starting at position 3670 of SEQ ID NO: 3848
ucuauaaauguagacugua

SEQ ID NO: 299477 - RNA, 19 nt, Artificial Sequence
  Description of Artificial Sequence: Synthetic oligonucleotide
  Antisense strand to SEQ ID NO: 299476
uacagucuacauuuauaga

SEQ ID NO: 299478 - RNA, 19 nt, Artificial Sequence
  Description of Artificial Sequence: Synthetic oligonucleotide
  Sense strand starting at position 3798 of SEQ ID NO: 3848
aauguuaaccagugaagaa

SEQ ID NO: 299479 - RNA, 19 nt, Artificial Sequence
  Description of Artificial Sequence: Synthetic oligonucleotide
  Antisense strand to SEQ ID NO: 299478
uucuucacugguuaacauu

SEQ ID NO: 299480 - RNA, 19 nt, Artificial Sequence
  Description of Artificial Sequence: Synthetic oligonucleotide
  Sense strand starting at position 3827 of SEQ ID NO: 3848
aguuauucuuaguuaccaa

SEQ ID NO: 299481 - RNA, 19 nt, Artificial Sequence
  Description of Artificial Sequence: Synthetic oligonucleotide
  Antisense strand to SEQ ID NO: 299480
uugguaacuaagaauaacu

SEQ ID NO: 299482 - RNA, 19 nt, Artificial Sequence
  Description of Artificial Sequence: Synthetic oligonucleotide
  Sense strand starting at position 3936 of SEQ ID NO: 3848
acaggaacgaucugaugua

SEQ ID NO: 299483 - RNA, 19 nt, Artificial Sequence
  Description of Artificial Sequence: Synthetic oligonucleotide
  Antisense strand to SEQ ID NO: 299482
uacaucagaucguuccugu

SEQ ID NO: 299484 - RNA, 19 nt, Artificial Sequence
  Description of Artificial Sequence: Synthetic oligonucleotide
  Sense strand starting at position 76 of SEQ ID NO: 3849
uugcucuuccaucagucua

SEQ ID NO: 299485 - RNA, 19 nt, Artificial Sequence
  Description of Artificial Sequence: Synthetic oligonucleotide
  Antisense strand to SEQ ID NO: 299484
uagacugauggaagagcaa

SEQ ID NO: 299486 - RNA, 19 nt, Artificial Sequence
  Description of Artificial Sequence: Synthetic oligonucleotide
  Sense strand starting at position 155 of SEQ ID NO: 3849
cuaagcauuuacgccuaua

SEQ ID NO: 299487 - RNA, 19 nt, Artificial Sequence
  Description of Artificial Sequence: Synthetic oligonucleotide
  Antisense strand to SEQ ID NO: 299486
uauaggcguaaaugcuuag

SEQ ID NO: 299488 - RNA, 19 nt, Artificial Sequence
  Description of Artificial Sequence: Synthetic oligonucleotide
  Sense strand starting at position 158 of SEQ ID NO: 3849
agcauuuacgccuauacuu

SEQ ID NO: 299489 - RNA, 19 nt, Artificial Sequence
  Description of Artificial Sequence: Synthetic oligonucleotide
  Antisense strand to SEQ ID NO: 299488
aaguauaggcguaaaugcu

SEQ ID NO: 299490 - RNA, 19 nt, Artificial Sequence
  Description of Artificial Sequence: Synthetic oligonucleotide
  Sense strand starting at position 242 of SEQ ID NO: 3849
gauuauuaguaaguagauc

SEQ ID NO: 299491 - RNA, 19 nt, Artificial Sequence
  Description of Artificial Sequence: Synthetic oligonucleotide
  Antisense strand to SEQ ID NO: 299490
gaucuacuuacuaauaauc

SEQ ID NO: 299492 - RNA, 19 nt, Artificial Sequence
  Description of Artificial Sequence: Synthetic oligonucleotide
  Sense strand starting at position 274 of SEQ ID NO: 3849
ucuagauuaugguuaagcu

SEQ ID NO: 299493 - RNA, 19 nt, Artificial Sequence
  Description of Artificial Sequence: Synthetic oligonucleotide
  Antisense strand to SEQ ID NO: 299492
agcuuaaccauaaucuaga

SEQ ID NO: 299494 - RNA, 19 nt, Artificial Sequence
  Description of Artificial Sequence: Synthetic oligonucleotide
  Sense strand starting at position 275 of SEQ ID NO: 3849
cuagauuaugguuaagcuu

SEQ ID NO: 299495 - RNA, 19 nt, Artificial Sequence
  Description of Artificial Sequence: Synthetic oligonucleotide
  Antisense strand to SEQ ID NO: 299494
aagcuuaaccauaaucuag

SEQ ID NO: 299496 - RNA, 19 nt, Artificial Sequence
  Description of Artificial Sequence: Synthetic oligonucleotide
  Sense strand starting at position 278 of SEQ ID NO: 3849
gauuaugguuaagcuuuaa

SEQ ID NO: 299497 - RNA, 19 nt, Artificial Sequence
  Description of Artificial Sequence: Synthetic oligonucleotide
  Antisense strand to SEQ ID NO: 299496
uuaaagcuuaaccauaauc

SEQ ID NO: 299498 - RNA, 19 nt, Artificial Sequence
  Description of Artificial Sequence: Synthetic oligonucleotide
  Sense strand starting at position 349 of SEQ ID NO: 3849
gcucucacgaaaugguaca

SEQ ID NO: 299499 - RNA, 19 nt, Artificial Sequence
  Description of Artificial Sequence: Synthetic oligonucleotide
  Antisense strand to SEQ ID NO: 299498
uguaccauuucgugagagc

SEQ ID NO: 299500 - RNA, 19 nt, Artificial Sequence
  Description of Artificial Sequence: Synthetic oligonucleotide
  Sense strand starting at position 386 of SEQ ID NO: 3849
agggaauagguguguuaaa

SEQ ID NO: 299501 - RNA, 19 nt, Artificial Sequence
  Description of Artificial Sequence: Synthetic oligonucleotide
  Antisense strand to SEQ ID NO: 299500
uuuaacacaccuauucccu

SEQ ID NO: 299502 - RNA, 19 nt, Artificial Sequence
  Description of Artificial Sequence: Synthetic oligonucleotide
  Sense strand starting at position 387 of SEQ ID NO: 3849
gggaauagguguguuaaau

SEQ ID NO: 299503 - RNA, 19 nt, Artificial Sequence
  Description of Artificial Sequence: Synthetic oligonucleotide
  Antisense strand to SEQ ID NO: 299502
auuuaacacaccuauuccc

SEQ ID NO: 299504 - RNA, 19 nt, Artificial Sequence
  Description of Artificial Sequence: Synthetic oligonucleotide
  Sense strand starting at position 421 of SEQ ID NO: 3849
caucguggaguugaaugaa

SEQ ID NO: 299505 - RNA, 19 nt, Artificial Sequence
  Description of Artificial Sequence: Synthetic oligonucleotide
  Antisense strand to SEQ ID NO: 299504
uucauucaacuccacgaug

SEQ ID NO: 299506 - RNA, 19 nt, Artificial Sequence
  Description of Artificial Sequence: Synthetic oligonucleotide
  Sense strand starting at position 818 of SEQ ID NO: 3849
aaagucgucugagcaaaca

SEQ ID NO: 299507 - RNA, 19 nt, Artificial Sequence
  Description of Artificial Sequence: Synthetic oligonucleotide
  Antisense strand to SEQ ID NO: 299506
uguuugcucagacgacuuu

SEQ ID NO: 299508 - RNA, 19 nt, Artificial Sequence
  Description of Artificial Sequence: Synthetic oligonucleotide
  Sense strand starting at position 872 of SEQ ID NO: 3849
gccauaaaguuguuuaauu

SEQ ID NO: 299509 - RNA, 19 nt, Artificial Sequence
  Description of Artificial Sequence: Synthetic oligonucleotide
  Antisense strand to SEQ ID NO: 299508
aauuaaacaacuuuauggc

SEQ ID NO: 299510 - RNA, 19 nt, Artificial Sequence
  Description of Artificial Sequence: Synthetic oligonucleotide
  Sense strand starting at position 914 of SEQ ID NO: 3849
ggaaaucgaucacuccuga

SEQ ID NO: 299511 - RNA, 19 nt, Artificial Sequence
  Description of Artificial Sequence: Synthetic oligonucleotide
  Antisense strand to SEQ ID NO: 299510
ucaggagugaucgauuucc

SEQ ID NO: 299512 - RNA, 19 nt, Artificial Sequence
  Description of Artificial Sequence: Synthetic oligonucleotide
  Sense strand starting at position 919 of SEQ ID NO: 3849
ucgaucacuccugauuaag

SEQ ID NO: 299513 - RNA, 19 nt, Artificial Sequence
  Description of Artificial Sequence: Synthetic oligonucleotide
  Antisense strand to SEQ ID NO: 299512
cuuaaucaggagugaucga

SEQ ID NO: 299514 - RNA, 19 nt, Artificial Sequence
  Description of Artificial Sequence: Synthetic oligonucleotide
  Sense strand starting at position 921 of SEQ ID NO: 3849
gaucacuccugauuaagug

SEQ ID NO: 299515 - RNA, 19 nt, Artificial Sequence
  Description of Artificial Sequence: Synthetic oligonucleotide
  Antisense strand to SEQ ID NO: 299514
cacuuaaucaggagugauc

SEQ ID NO: 299516 - RNA, 19 nt, Artificial Sequence
  Description of Artificial Sequence: Synthetic oligonucleotide
  Sense strand starting at position 925 of SEQ ID NO: 3849
acuccugauuaagugcaaa

SEQ ID NO: 299517 - RNA, 19 nt, Artificial Sequence
  Description of Artificial Sequence: Synthetic oligonucleotide
  Antisense strand to SEQ ID NO: 299516
uuugcacuuaaucaggagu

SEQ ID NO: 299518 - RNA, 19 nt, Artificial Sequence
  Description of Artificial Sequence: Synthetic oligonucleotide
  Sense strand starting at position 993 of SEQ ID NO: 3849
ccaggcaacuuucugcaaa

SEQ ID NO: 299519 - RNA, 19 nt, Artificial Sequence
  Description of Artificial Sequence: Synthetic oligonucleotide
  Antisense strand to SEQ ID NO: 299518
uuugcagaaaguugccugg

SEQ ID NO: 299520 - RNA, 19 nt, Artificial Sequence
  Description of Artificial Sequence: Synthetic oligonucleotide
  Sense strand starting at position 995 of SEQ ID NO: 3849
aggcaacuuucugcaaaua

SEQ ID NO: 299521 - RNA, 19 nt, Artificial Sequence
  Description of Artificial Sequence: Synthetic oligonucleotide
  Antisense strand to SEQ ID NO: 299520
uauuugcagaaaguugccu

SEQ ID NO: 299522 - RNA, 19 nt, Artificial Sequence
  Description of Artificial Sequence: Synthetic oligonucleotide
  Sense strand starting at position 996 of SEQ ID NO: 3849
ggcaacuuucugcaaauau

SEQ ID NO: 299523 - RNA, 19 nt, Artificial Sequence
  Description of Artificial Sequence: Synthetic oligonucleotide
  Antisense strand to SEQ ID NO: 299522
auauuugcagaaaguugcc

SEQ ID NO: 299524 - RNA, 19 nt, Artificial Sequence
  Description of Artificial Sequence: Synthetic oligonucleotide
  Sense strand starting at position 1006 of SEQ ID NO: 3849
ugcaaauauucugcaacga

SEQ ID NO: 299525 - RNA, 19 nt, Artificial Sequence
  Description of Artificial Sequence: Synthetic oligonucleotide
  Antisense strand to SEQ ID NO: 299524
ucguugcagaauauuugca

SEQ ID NO: 299526 - RNA, 19 nt, Artificial Sequence
  Description of Artificial Sequence: Synthetic oligonucleotide
  Sense strand starting at position 1007 of SEQ ID NO: 3849
gcaaauauucugcaacgac

SEQ ID NO: 299527 - RNA, 19 nt, Artificial Sequence
  Description of Artificial Sequence: Synthetic oligonucleotide
  Antisense strand to SEQ ID NO: 299526
gucguugcagaauauuugc

SEQ ID NO: 299528 - RNA, 19 nt, Artificial Sequence
  Description of Artificial Sequence: Synthetic oligonucleotide
  Sense strand starting at position 1064 of SEQ ID NO: 3849
auaugagacuuccucaggu

SEQ ID NO: 299529 - RNA, 19 nt, Artificial Sequence
  Description of Artificial Sequence: Synthetic oligonucleotide
  Antisense strand to SEQ ID NO: 299528
accugaggaagucucauau

SEQ ID NO: 299530 - RNA, 19 nt, Artificial Sequence
  Description of Artificial Sequence: Synthetic oligonucleotide
  Sense strand starting at position 1080 of SEQ ID NO: 3849
gguuaaugcccaggugaga

SEQ ID NO: 299531 - RNA, 19 nt, Artificial Sequence
  Description of Artificial Sequence: Synthetic oligonucleotide
  Antisense strand to SEQ ID NO: 299530
ucucaccugggcauuaacc

SEQ ID NO: 299532 - RNA, 19 nt, Artificial Sequence
  Description of Artificial Sequence: Synthetic oligonucleotide
  Sense strand starting at position 1134 of SEQ ID NO: 3849
cuuucuugguuauuaugaa

SEQ ID NO: 299533 - RNA, 19 nt, Artificial Sequence
  Description of Artificial Sequence: Synthetic oligonucleotide
  Antisense strand to SEQ ID NO: 299532
uucauaauaaccaagaaag

SEQ ID NO: 299534 - RNA, 19 nt, Artificial Sequence
  Description of Artificial Sequence: Synthetic oligonucleotide
  Sense strand starting at position 1417 of SEQ ID NO: 3849
cagggauucucucccguua

SEQ ID NO: 299535 - RNA, 19 nt, Artificial Sequence
  Description of Artificial Sequence: Synthetic oligonucleotide
  Antisense strand to SEQ ID NO: 299534
uaacgggagagaaucccug

SEQ ID NO: 299536 - RNA, 19 nt, Artificial Sequence
  Description of Artificial Sequence: Synthetic oligonucleotide
  Sense strand starting at position 1463 of SEQ ID NO: 3849
ugcgauuaguccucuggaa

SEQ ID NO: 299537 - RNA, 19 nt, Artificial Sequence
  Description of Artificial Sequence: Synthetic oligonucleotide
  Antisense strand to SEQ ID NO: 299536
uuccagaggacuaaucgca

SEQ ID NO: 299538 - RNA, 19 nt, Artificial Sequence
  Description of Artificial Sequence: Synthetic oligonucleotide
  Sense strand starting at position 1465 of SEQ ID NO: 3849
cgauuaguccucuggaagg

SEQ ID NO: 299539 - RNA, 19 nt, Artificial Sequence
  Description of Artificial Sequence: Synthetic oligonucleotide
  Antisense strand to SEQ ID NO: 299538
ccuuccagaggacuaaucg

SEQ ID NO: 299540 - RNA, 19 nt, Artificial Sequence
  Description of Artificial Sequence: Synthetic oligonucleotide
  Sense strand starting at position 1833 of SEQ ID NO: 3849
cccgguaccuggucagaca

SEQ ID NO: 299541 - RNA, 19 nt, Artificial Sequence
  Description of Artificial Sequence: Synthetic oligonucleotide
  Antisense strand to SEQ ID NO: 299540
ugucugaccagguaccggg

SEQ ID NO: 299542 - RNA, 19 nt, Artificial Sequence
  Description of Artificial Sequence: Synthetic oligonucleotide
  Sense strand starting at position 1834 of SEQ ID NO: 3849
ccgguaccuggucagacau

SEQ ID NO: 299543 - RNA, 19 nt, Artificial Sequence
  Description of Artificial Sequence: Synthetic oligonucleotide
  Antisense strand to SEQ ID NO: 299542
augucugaccagguaccgg

SEQ ID NO: 299544 - RNA, 19 nt, Artificial Sequence
  Description of Artificial Sequence: Synthetic oligonucleotide
  Sense strand starting at position 2269 of SEQ ID NO: 3849
ugacgacugagccgagaua

SEQ ID NO: 299545 - RNA, 19 nt, Artificial Sequence
  Description of Artificial Sequence: Synthetic oligonucleotide
  Antisense strand to SEQ ID NO: 299544
uaucucggcucagucguca

SEQ ID NO: 299546 - RNA, 19 nt, Artificial Sequence
  Description of Artificial Sequence: Synthetic oligonucleotide
  Sense strand starting at position 2338 of SEQ ID NO: 3849
uguuuauuugaaugccagu

SEQ ID NO: 299547 - RNA, 19 nt, Artificial Sequence
  Description of Artificial Sequence: Synthetic oligonucleotide
  Antisense strand to SEQ ID NO: 299546
acuggcauucaaauaaaca

SEQ ID NO: 299548 - RNA, 19 nt, Artificial Sequence
  Description of Artificial Sequence: Synthetic oligonucleotide
  Sense strand starting at position 2403 of SEQ ID NO: 3849
caaacacaugaccgugauu

SEQ ID NO: 299549 - RNA, 19 nt, Artificial Sequence
  Description of Artificial Sequence: Synthetic oligonucleotide
  Antisense strand to SEQ ID NO: 299548
aaucacggucauguguuug

SEQ ID NO: 299550 - RNA, 19 nt, Artificial Sequence
  Description of Artificial Sequence: Synthetic oligonucleotide
  Sense strand starting at position 2501 of SEQ ID NO: 3849
gggagugaguaauuccaac

SEQ ID NO: 299551 - RNA, 19 nt, Artificial Sequence
  Description of Artificial Sequence: Synthetic oligonucleotide
  Antisense strand to SEQ ID NO: 299550
guuggaauuacucacuccc

SEQ ID NO: 299552 - RNA, 19 nt, Artificial Sequence
  Description of Artificial Sequence: Synthetic oligonucleotide
  Sense strand starting at position 2523 of SEQ ID NO: 3849
ugaauugguugcuuugagu

SEQ ID NO: 299553 - RNA, 19 nt, Artificial Sequence
  Description of Artificial Sequence: Synthetic oligonucleotide
  Antisense strand to SEQ ID NO: 299552
acucaaagcaaccaauuca

SEQ ID NO: 299554 - RNA, 19 nt, Artificial Sequence
  Description of Artificial Sequence: Synthetic oligonucleotide
  Sense strand starting at position 2530 of SEQ ID NO: 3849
guugcuuugaguuaagguu

SEQ ID NO: 299555 - RNA, 19 nt, Artificial Sequence
  Description of Artificial Sequence: Synthetic oligonucleotide
  Antisense strand to SEQ ID NO: 299554
aaccuuaacucaaagcaac

SEQ ID NO: 299556 - RNA, 19 nt, Artificial Sequence
  Description of Artificial Sequence: Synthetic oligonucleotide
  Sense strand starting at position 2546 of SEQ ID NO: 3849
guuaaagaaugauucuucu

SEQ ID NO: 299557 - RNA, 19 nt, Artificial Sequence
  Description of Artificial Sequence: Synthetic oligonucleotide
  Antisense strand to SEQ ID NO: 299556
agaagaaucauucuuuaac

SEQ ID NO: 299558 - RNA, 19 nt, Artificial Sequence
  Description of Artificial Sequence: Synthetic oligonucleotide
  Sense strand starting at position 2552 of SEQ ID NO: 3849
gaaugauucuucuuggcag

SEQ ID NO: 299559 - RNA, 19 nt, Artificial Sequence
  Description of Artificial Sequence: Synthetic oligonucleotide
  Antisense strand to SEQ ID NO: 299558
cugccaagaagaaucauuc

SEQ ID NO: 299560 - RNA, 19 nt, Artificial Sequence
  Description of Artificial Sequence: Synthetic oligonucleotide
  Sense strand starting at position 3470 of SEQ ID NO: 3849
gggcauacucauggaggau

SEQ ID NO: 299561 - RNA, 19 nt, Artificial Sequence
  Description of Artificial Sequence: Synthetic oligonucleotide
  Antisense strand to SEQ ID NO: 299560
auccuccaugaguaugccc

SEQ ID NO: 299562 - RNA, 19 nt, Artificial Sequence
  Description of Artificial Sequence: Synthetic oligonucleotide
  Sense strand starting at position 3479 of SEQ ID NO: 3849
cauggaggauaagaauaua

SEQ ID NO: 299563 - RNA, 19 nt, Artificial Sequence
  Description of Artificial Sequence: Synthetic oligonucleotide
  Antisense strand to SEQ ID NO: 299562
uauauucuuauccuccaug

SEQ ID NO: 299564 - RNA, 19 nt, Artificial Sequence
  Description of Artificial Sequence: Synthetic oligonucleotide
  Sense strand starting at position 28 of SEQ ID NO: 3850
gguuaaagauaauaagaag

SEQ ID NO: 299565 - RNA, 19 nt, Artificial Sequence
  Description of Artificial Sequence: Synthetic oligonucleotide
  Antisense strand to SEQ ID NO: 299564
cuucuuauuaucuuuaacc

SEQ ID NO: 299566 - RNA, 19 nt, Artificial Sequence
  Description of Artificial Sequence: Synthetic oligonucleotide
  Sense strand starting at position 60 of SEQ ID NO: 3850
gugugucuuaggcaugauc

SEQ ID NO: 299567 - RNA, 19 nt, Artificial Sequence
  Description of Artificial Sequence: Synthetic oligonucleotide
  Antisense strand to SEQ ID NO: 299566
gaucaugccuaagacacac

SEQ ID NO: 299568 - RNA, 19 nt, Artificial Sequence
  Description of Artificial Sequence: Synthetic oligonucleotide
  Sense strand starting at position 69 of SEQ ID NO: 3850
aggcaugauccugguggaa

SEQ ID NO: 299569 - RNA, 19 nt, Artificial Sequence
  Description of Artificial Sequence: Synthetic oligonucleotide
  Antisense strand to SEQ ID NO: 299568
uuccaccaggaucaugccu

SEQ ID NO: 299570 - RNA, 19 nt, Artificial Sequence
  Description of Artificial Sequence: Synthetic oligonucleotide
  Sense strand starting at position 133 of SEQ ID NO: 3850
ugacauauagaacgugaga

SEQ ID NO: 299571 - RNA, 19 nt, Artificial Sequence
  Description of Artificial Sequence: Synthetic oligonucleotide
  Antisense strand to SEQ ID NO: 299570
ucucacguucuauauguca

SEQ ID NO: 299572 - RNA, 19 nt, Artificial Sequence
  Description of Artificial Sequence: Synthetic oligonucleotide
  Sense strand starting at position 138 of SEQ ID NO: 3850
uauagaacgugagagauuu

SEQ ID NO: 299573 - RNA, 19 nt, Artificial Sequence
  Description of Artificial Sequence: Synthetic oligonucleotide
  Antisense strand to SEQ ID NO: 299572
aaaucucucacguucuaua

SEQ ID NO: 299574 - RNA, 19 nt, Artificial Sequence
  Description of Artificial Sequence: Synthetic oligonucleotide
  Sense strand starting at position 186 of SEQ ID NO: 3850
ccaaucucucuuuguaugu

SEQ ID NO: 299575 - RNA, 19 nt, Artificial Sequence
  Description of Artificial Sequence: Synthetic oligonucleotide
  Antisense strand to SEQ ID NO: 299574
acauacaaagagagauugg

SEQ ID NO: 299576 - RNA, 19 nt, Artificial Sequence
  Description of Artificial Sequence: Synthetic oligonucleotide
  Sense strand starting at position 195 of SEQ ID NO: 3850
cuuuguaugucaucuauuc

SEQ ID NO: 299577 - RNA, 19 nt, Artificial Sequence
  Description of Artificial Sequence: Synthetic oligonucleotide
  Antisense strand to SEQ ID NO: 299576
gaauagaugacauacaaag

SEQ ID NO: 299578 - RNA, 19 nt, Artificial Sequence
  Description of Artificial Sequence: Synthetic oligonucleotide
  Sense strand starting at position 284 of SEQ ID NO: 3850
gucagaauuccuuggcuua

SEQ ID NO: 299579 - RNA, 19 nt, Artificial Sequence
  Description of Artificial Sequence: Synthetic oligonucleotide
  Antisense strand to SEQ ID NO: 299578
uaagccaaggaauucugac

SEQ ID NO: 299580 - RNA, 19 nt, Artificial Sequence
  Description of Artificial Sequence: Synthetic oligonucleotide
  Sense strand starting at position 285 of SEQ ID NO: 3850
ucagaauuccuuggcuuac

SEQ ID NO: 299581 - RNA, 19 nt, Artificial Sequence
  Description of Artificial Sequence: Synthetic oligonucleotide
  Antisense strand to SEQ ID NO: 299580
guaagccaaggaauucuga

SEQ ID NO: 299582 - RNA, 19 nt, Artificial Sequence
  Description of Artificial Sequence: Synthetic oligonucleotide
  Sense strand starting at position 287 of SEQ ID NO: 3850
agaauuccuuggcuuacca

SEQ ID NO: 299583 - RNA, 19 nt, Artificial Sequence
  Description of Artificial Sequence: Synthetic oligonucleotide
  Antisense strand to SEQ ID NO: 299582
ugguaagccaaggaauucu

SEQ ID NO: 299584 - RNA, 19 nt, Artificial Sequence
  Description of Artificial Sequence: Synthetic oligonucleotide
  Sense strand starting at position 409 of SEQ ID NO: 3850
ucggucaaagacugauaau

SEQ ID NO: 299585 - RNA, 19 nt, Artificial Sequence
  Description of Artificial Sequence: Synthetic oligonucleotide
  Antisense strand to SEQ ID NO: 299584
auuaucagucuuugaccga

SEQ ID NO: 299586 - RNA, 19 nt, Artificial Sequence
  Description of Artificial Sequence: Synthetic oligonucleotide
  Sense strand starting at position 428 of SEQ ID NO: 3850
gugagauccuugcccugaa

SEQ ID NO: 299587 - RNA, 19 nt, Artificial Sequence
  Description of Artificial Sequence: Synthetic oligonucleotide
  Antisense strand to SEQ ID NO: 299586
uucagggcaaggaucucac

SEQ ID NO: 299588 - RNA, 19 nt, Artificial Sequence
  Description of Artificial Sequence: Synthetic oligonucleotide
  Sense strand starting at position 432 of SEQ ID NO: 3850
gauccuugcccugaaguga

SEQ ID NO: 299589 - RNA, 19 nt, Artificial Sequence
  Description of Artificial Sequence: Synthetic oligonucleotide
  Antisense strand to SEQ ID NO: 299588
ucacuucagggcaaggauc

SEQ ID NO: 299590 - RNA, 19 nt, Artificial Sequence
  Description of Artificial Sequence: Synthetic oligonucleotide
  Sense strand starting at position 494 of SEQ ID NO: 3850
aguacuguucuagagguau

SEQ ID NO: 299591 - RNA, 19 nt, Artificial Sequence
  Description of Artificial Sequence: Synthetic oligonucleotide
  Antisense strand to SEQ ID NO: 299590
auaccucuagaacaguacu

SEQ ID NO: 299592 - RNA, 19 nt, Artificial Sequence
  Description of Artificial Sequence: Synthetic oligonucleotide
  Sense strand starting at position 500 of SEQ ID NO: 3850
guucuagagguauauggac

SEQ ID NO: 299593 - RNA, 19 nt, Artificial Sequence
  Description of Artificial Sequence: Synthetic oligonucleotide
  Antisense strand to SEQ ID NO: 299592
guccauauaccucuagaac

SEQ ID NO: 299594 - RNA, 19 nt, Artificial Sequence
  Description of Artificial Sequence: Synthetic oligonucleotide
  Sense strand starting at position 543 of SEQ ID NO: 3850
ggagcuuccugggugaaau

SEQ ID NO: 299595 - RNA, 19 nt, Artificial Sequence
  Description of Artificial Sequence: Synthetic oligonucleotide
  Antisense strand to SEQ ID NO: 299594
auuucacccaggaagcucc

SEQ ID NO: 299596 - RNA, 19 nt, Artificial Sequence
  Description of Artificial Sequence: Synthetic oligonucleotide
  Sense strand starting at position 544 of SEQ ID NO: 3850
gagcuuccugggugaaaug

SEQ ID NO: 299597 - RNA, 19 nt, Artificial Sequence
  Description of Artificial Sequence: Synthetic oligonucleotide
  Antisense strand to SEQ ID NO: 299596
cauuucacccaggaagcuc

SEQ ID NO: 299598 - RNA, 19 nt, Artificial Sequence
  Description of Artificial Sequence: Synthetic oligonucleotide
  Sense strand starting at position 588 of SEQ ID NO: 3850
acuacucaguuucuugaga

SEQ ID NO: 299599 - RNA, 19 nt, Artificial Sequence
  Description of Artificial Sequence: Synthetic oligonucleotide
  Antisense strand to SEQ ID NO: 299598
ucucaagaaacugaguagu

SEQ ID NO: 299600 - RNA, 19 nt, Artificial Sequence
  Description of Artificial Sequence: Synthetic oligonucleotide
  Sense strand starting at position 596 of SEQ ID NO: 3850
guuucuugagaaugcugua

SEQ ID NO: 299601 - RNA, 19 nt, Artificial Sequence
  Description of Artificial Sequence: Synthetic oligonucleotide
  Antisense strand to SEQ ID NO: 299600
uacagcauucucaagaaac

SEQ ID NO: 299602 - RNA, 19 nt, Artificial Sequence
  Description of Artificial Sequence: Synthetic oligonucleotide
  Sense strand starting at position 637 of SEQ ID NO: 3850
agcugugaacucugccaga

SEQ ID NO: 299603 - RNA, 19 nt, Artificial Sequence
  Description of Artificial Sequence: Synthetic oligonucleotide
  Antisense strand to SEQ ID NO: 299602
ucuggcagaguucacagcu

SEQ ID NO: 299604 - RNA, 19 nt, Artificial Sequence
  Description of Artificial Sequence: Synthetic oligonucleotide
  Sense strand starting at position 651 of SEQ ID NO: 3850
ccagaaaugcucugccaac

SEQ ID NO: 299605 - RNA, 19 nt, Artificial Sequence
  Description of Artificial Sequence: Synthetic oligonucleotide
  Antisense strand to SEQ ID NO: 299604
guuggcagagcauuucugg

SEQ ID NO: 299606 - RNA, 19 nt, Artificial Sequence
  Description of Artificial Sequence: Synthetic oligonucleotide
  Sense strand starting at position 769 of SEQ ID NO: 3850
gugcuuugcaagucuaugu

SEQ ID NO: 299607 - RNA, 19 nt, Artificial Sequence
  Description of Artificial Sequence: Synthetic oligonucleotide
  Antisense strand to SEQ ID NO: 299606
acauagacuugcaaagcac

SEQ ID NO: 299608 - RNA, 19 nt, Artificial Sequence
  Description of Artificial Sequence: Synthetic oligonucleotide
  Sense strand starting at position 887 of SEQ ID NO: 3850
acagaaauaucuggcauuu

SEQ ID NO: 299609 - RNA, 19 nt, Artificial Sequence
  Description of Artificial Sequence: Synthetic oligonucleotide
  Antisense strand to SEQ ID NO: 299608
aaaugccagauauuucugu

SEQ ID NO: 299610 - RNA, 19 nt, Artificial Sequence
  Description of Artificial Sequence: Synthetic oligonucleotide
  Sense strand starting at position 889 of SEQ ID NO: 3850
agaaauaucuggcauuugu

SEQ ID NO: 299611 - RNA, 19 nt, Artificial Sequence
  Description of Artificial Sequence: Synthetic oligonucleotide
  Antisense strand to SEQ ID NO: 299610
acaaaugccagauauuucu

SEQ ID NO: 299612 - RNA, 19 nt, Artificial Sequence
  Description of Artificial Sequence: Synthetic oligonucleotide
  Sense strand starting at position 900 of SEQ ID NO: 3850
gcauuuguugaauguuuac

SEQ ID NO: 299613 - RNA, 19 nt, Artificial Sequence
  Description of Artificial Sequence: Synthetic oligonucleotide
  Antisense strand to SEQ ID NO: 299612
guaaacauucaacaaaugc

SEQ ID NO: 299614 - RNA, 19 nt, Artificial Sequence
  Description of Artificial Sequence: Synthetic oligonucleotide
  Sense strand starting at position 906 of SEQ ID NO: 3850
guugaauguuuacuauaug

SEQ ID NO: 299615 - RNA, 19 nt, Artificial Sequence
  Description of Artificial Sequence: Synthetic oligonucleotide
  Antisense strand to SEQ ID NO: 299614
cauauaguaaacauucaac

SEQ ID NO: 299616 - RNA, 19 nt, Artificial Sequence
  Description of Artificial Sequence: Synthetic oligonucleotide
  Sense strand starting at position 1350 of SEQ ID NO: 3850
cacaaauggcgaggucaaa

SEQ ID NO: 299617 - RNA, 19 nt, Artificial Sequence
  Description of Artificial Sequence: Synthetic oligonucleotide
  Antisense strand to SEQ ID NO: 299616
uuugaccucgccauuugug

SEQ ID NO: 299618 - RNA, 19 nt, Artificial Sequence
  Description of Artificial Sequence: Synthetic oligonucleotide
  Sense strand starting at position 1380 of SEQ ID NO: 3850
uccagagucugcucucuua

SEQ ID NO: 299619 - RNA, 19 nt, Artificial Sequence
  Description of Artificial Sequence: Synthetic oligonucleotide
  Antisense strand to SEQ ID NO: 299618
uaagagagcagacucugga

SEQ ID NO: 299620 - RNA, 19 nt, Artificial Sequence
  Description of Artificial Sequence: Synthetic oligonucleotide
  Sense strand starting at position 2781 of SEQ ID NO: 3850
ugcguucuugugcuucuua

SEQ ID NO: 299621 - RNA, 19 nt, Artificial Sequence
  Description of Artificial Sequence: Synthetic oligonucleotide
  Antisense strand to SEQ ID NO: 299620
uaagaagcacaagaacgca

SEQ ID NO: 299622 - RNA, 19 nt, Artificial Sequence
  Description of Artificial Sequence: Synthetic oligonucleotide
  Sense strand starting at position 2793 of SEQ ID NO: 3850
cuucuuaagcuuuggauga

SEQ ID NO: 299623 - RNA, 19 nt, Artificial Sequence
  Description of Artificial Sequence: Synthetic oligonucleotide
  Antisense strand to SEQ ID NO: 299622
ucauccaaagcuuaagaag

SEQ ID NO: 299624 - RNA, 19 nt, Artificial Sequence
  Description of Artificial Sequence: Synthetic oligonucleotide
  Sense strand starting at position 2797 of SEQ ID NO: 3850
uuaagcuuuggaugaggaa

SEQ ID NO: 299625 - RNA, 19 nt, Artificial Sequence
  Description of Artificial Sequence: Synthetic oligonucleotide
  Antisense strand to SEQ ID NO: 299624
uuccucauccaaagcuuaa

SEQ ID NO: 299626 - RNA, 19 nt, Artificial Sequence
  Description of Artificial Sequence: Synthetic oligonucleotide
  Sense strand starting at position 2826 of SEQ ID NO: 3850
ccacucagcgauuacgaaa

SEQ ID NO: 299627 - RNA, 19 nt, Artificial Sequence
  Description of Artificial Sequence: Synthetic oligonucleotide
  Antisense strand to SEQ ID NO: 299626
uuucguaaucgcugagugg

SEQ ID NO: 299628 - RNA, 19 nt, Artificial Sequence
  Description of Artificial Sequence: Synthetic oligonucleotide
  Sense strand starting at position 3155 of SEQ ID NO: 3850
ugcagugagguguauuaca

SEQ ID NO: 299629 - RNA, 19 nt, Artificial Sequence
  Description of Artificial Sequence: Synthetic oligonucleotide
  Antisense strand to SEQ ID NO: 299628
uguaauacaccucacugca

SEQ ID NO: 299630 - RNA, 19 nt, Artificial Sequence
  Description of Artificial Sequence: Synthetic oligonucleotide
  Sense strand starting at position 3448 of SEQ ID NO: 3850
gggaauggguaagaaauua

SEQ ID NO: 299631 - RNA, 19 nt, Artificial Sequence
  Description of Artificial Sequence: Synthetic oligonucleotide
  Antisense strand to SEQ ID NO: 299630
uaauuucuuacccauuccc

SEQ ID NO: 299632 - RNA, 19 nt, Artificial Sequence
  Description of Artificial Sequence: Synthetic oligonucleotide
  Sense strand starting at position 3753 of SEQ ID NO: 3850
aaguacugaccuugugcua

SEQ ID NO: 299633 - RNA, 19 nt, Artificial Sequence
  Description of Artificial Sequence: Synthetic oligonucleotide
  Antisense strand to SEQ ID NO: 299632
uagcacaaggucaguacuu

SEQ ID NO: 299634 - RNA, 19 nt, Artificial Sequence
  Description of Artificial Sequence: Synthetic oligonucleotide
  Sense strand starting at position 3766 of SEQ ID NO: 3850
gugcuaugugauuaucauu

SEQ ID NO: 299635 - RNA, 19 nt, Artificial Sequence
  Description of Artificial Sequence: Synthetic oligonucleotide
  Antisense strand to SEQ ID NO: 299634
aaugauaaucacauagcac

SEQ ID NO: 299636 - RNA, 19 nt, Artificial Sequence
  Description of Artificial Sequence: Synthetic oligonucleotide
  Sense strand starting at position 3771 of SEQ ID NO: 3850
augugauuaucauuggagg

SEQ ID NO: 299637 - RNA, 19 nt, Artificial Sequence
  Description of Artificial Sequence: Synthetic oligonucleotide
  Antisense strand to SEQ ID NO: 299636
ccuccaaugauaaucacau

SEQ ID NO: 299638 - RNA, 19 nt, Artificial Sequence
  Description of Artificial Sequence: Synthetic oligonucleotide
  Sense strand starting at position 3835 of SEQ ID NO: 3850
aggauauucucuugaauuu

SEQ ID NO: 299639 - RNA, 19 nt, Artificial Sequence
  Description of Artificial Sequence: Synthetic oligonucleotide
  Antisense strand to SEQ ID NO: 299638
aaauucaagagaauauccu

SEQ ID NO: 299640 - RNA, 19 nt, Artificial Sequence
  Description of Artificial Sequence: Synthetic oligonucleotide
  Sense strand starting at position 3862 of SEQ ID NO: 3850
uugugaagauauccugaaa

SEQ ID NO: 299641 - RNA, 19 nt, Artificial Sequence
  Description of Artificial Sequence: Synthetic oligonucleotide
  Antisense strand to SEQ ID NO: 299640
uuucaggauaucuucacaa

SEQ ID NO: 299642 - RNA, 19 nt, Artificial Sequence
  Description of Artificial Sequence: Synthetic oligonucleotide
  Sense strand starting at position 3897 of SEQ ID NO: 3850
agauaaagcuggucccuua

SEQ ID NO: 299643 - RNA, 19 nt, Artificial Sequence
  Description of Artificial Sequence: Synthetic oligonucleotide
  Antisense strand to SEQ ID NO: 299642
uaagggaccagcuuuaucu

SEQ ID NO: 299644 - RNA, 19 nt, Artificial Sequence
  Description of Artificial Sequence: Synthetic oligonucleotide
  Sense strand starting at position 30 of SEQ ID NO: 3851
cuaagauacucacaaagga

SEQ ID NO: 299645 - RNA, 19 nt, Artificial Sequence
  Description of Artificial Sequence: Synthetic oligonucleotide
  Antisense strand to SEQ ID NO: 299644
uccuuugugaguaucuuag

SEQ ID NO: 299646 - RNA, 19 nt, Artificial Sequence
  Description of Artificial Sequence: Synthetic oligonucleotide
  Sense strand starting at position 61 of SEQ ID NO: 3851
agagcugugcuccaauaau

SEQ ID NO: 299647 - RNA, 19 nt, Artificial Sequence
  Description of Artificial Sequence: Synthetic oligonucleotide
  Antisense strand to SEQ ID NO: 299646
auuauuggagcacagcucu

SEQ ID NO: 299648 - RNA, 19 nt, Artificial Sequence
  Description of Artificial Sequence: Synthetic oligonucleotide
  Sense strand starting at position 87 of SEQ ID NO: 3851
ccaucaugcuaccugaaga

SEQ ID NO: 299649 - RNA, 19 nt, Artificial Sequence
  Description of Artificial Sequence: Synthetic oligonucleotide
  Antisense strand to SEQ ID NO: 299648
ucuucagguagcaugaugg

SEQ ID NO: 299650 - RNA, 19 nt, Artificial Sequence
  Description of Artificial Sequence: Synthetic oligonucleotide
  Sense strand starting at position 229 of SEQ ID NO: 3851
cauguuucucuguggauag

SEQ ID NO: 299651 - RNA, 19 nt, Artificial Sequence
  Description of Artificial Sequence: Synthetic oligonucleotide
  Antisense strand to SEQ ID NO: 299650
cuauccacagagaaacaug

SEQ ID NO: 299652 - RNA, 19 nt, Artificial Sequence
  Description of Artificial Sequence: Synthetic oligonucleotide
  Sense strand starting at position 332 of SEQ ID NO: 3851
guuucuuaaggauagcaua

SEQ ID NO: 299653 - RNA, 19 nt, Artificial Sequence
  Description of Artificial Sequence: Synthetic oligonucleotide
  Antisense strand to SEQ ID NO: 299652
uaugcuauccuuaagaaac

SEQ ID NO: 299654 - RNA, 19 nt, Artificial Sequence
  Description of Artificial Sequence: Synthetic oligonucleotide
  Sense strand starting at position 391 of SEQ ID NO: 3851
aguaaacugcauuagaauu

SEQ ID NO: 299655 - RNA, 19 nt, Artificial Sequence
  Description of Artificial Sequence: Synthetic oligonucleotide
  Antisense strand to SEQ ID NO: 299654
aauucuaaugcaguuuacu

SEQ ID NO: 299656 - RNA, 19 nt, Artificial Sequence
  Description of Artificial Sequence: Synthetic oligonucleotide
  Sense strand starting at position 402 of SEQ ID NO: 3851
uuagaauucugaguaucuu

SEQ ID NO: 299657 - RNA, 19 nt, Artificial Sequence
  Description of Artificial Sequence: Synthetic oligonucleotide
  Antisense strand to SEQ ID NO: 299656
aagauacucagaauucuaa

SEQ ID NO: 299658 - RNA, 19 nt, Artificial Sequence
  Description of Artificial Sequence: Synthetic oligonucleotide
  Sense strand starting at position 551 of SEQ ID NO: 3851
cccagaauccucuaggugu

SEQ ID NO: 299659 - RNA, 19 nt, Artificial Sequence
  Description of Artificial Sequence: Synthetic oligonucleotide
  Antisense strand to SEQ ID NO: 299658
acaccuagaggauucuggg

SEQ ID NO: 299660 - RNA, 19 nt, Artificial Sequence
  Description of Artificial Sequence: Synthetic oligonucleotide
  Sense strand starting at position 645 of SEQ ID NO: 3851
ggucuaguccuuugaccaa

SEQ ID NO: 299661 - RNA, 19 nt, Artificial Sequence
  Description of Artificial Sequence: Synthetic oligonucleotide
  Antisense strand to SEQ ID NO: 299660
uuggucaaaggacuagacc

SEQ ID NO: 299662 - RNA, 19 nt, Artificial Sequence
  Description of Artificial Sequence: Synthetic oligonucleotide
  Sense strand starting at position 798 of SEQ ID NO: 3851
gggauguguguugaaagga

SEQ ID NO: 299663 - RNA, 19 nt, Artificial Sequence
  Description of Artificial Sequence: Synthetic oligonucleotide
  Antisense strand to SEQ ID NO: 299662
uccuuucaacacacauccc

SEQ ID NO: 299664 - RNA, 19 nt, Artificial Sequence
  Description of Artificial Sequence: Synthetic oligonucleotide
  Sense strand starting at position 799 of SEQ ID NO: 3851
ggauguguguugaaaggaa

SEQ ID NO: 299665 - RNA, 19 nt, Artificial Sequence
  Description of Artificial Sequence: Synthetic oligonucleotide
  Antisense strand to SEQ ID NO: 299664
uuccuuucaacacacaucc

SEQ ID NO: 299666 - RNA, 19 nt, Artificial Sequence
  Description of Artificial Sequence: Synthetic oligonucleotide
  Sense strand starting at position 883 of SEQ ID NO: 3851
acaaaugacucaguugauc

SEQ ID NO: 299667 - RNA, 19 nt, Artificial Sequence
  Description of Artificial Sequence: Synthetic oligonucleotide
  Antisense strand to SEQ ID NO: 299666
gaucaacugagucauuugu

SEQ ID NO: 299668 - RNA, 19 nt, Artificial Sequence
  Description of Artificial Sequence: Synthetic oligonucleotide
  Sense strand starting at position 888 of SEQ ID NO: 3851
ugacucaguugaucaguaa

SEQ ID NO: 299669 - RNA, 19 nt, Artificial Sequence
  Description of Artificial Sequence: Synthetic oligonucleotide
  Antisense strand to SEQ ID NO: 299668
uuacugaucaacugaguca

SEQ ID NO: 299670 - RNA, 19 nt, Artificial Sequence
  Description of Artificial Sequence: Synthetic oligonucleotide
  Sense strand starting at position 1124 of SEQ ID NO: 3851
auucguuguggacagcaua

SEQ ID NO: 299671 - RNA, 19 nt, Artificial Sequence
  Description of Artificial Sequence: Synthetic oligonucleotide
  Antisense strand to SEQ ID NO: 299670
uaugcuguccacaacgaau

SEQ ID NO: 299672 - RNA, 19 nt, Artificial Sequence
  Description of Artificial Sequence: Synthetic oligonucleotide
  Sense strand starting at position 1238 of SEQ ID NO: 3851
gggcuaagaugauccacau

SEQ ID NO: 299673 - RNA, 19 nt, Artificial Sequence
  Description of Artificial Sequence: Synthetic oligonucleotide
  Antisense strand to SEQ ID NO: 299672
auguggaucaucuuagccc

SEQ ID NO: 299674 - RNA, 19 nt, Artificial Sequence
  Description of Artificial Sequence: Synthetic oligonucleotide
  Sense strand starting at position 1356 of SEQ ID NO: 3851
cgagguguuaguggagaug

SEQ ID NO: 299675 - RNA, 19 nt, Artificial Sequence
  Description of Artificial Sequence: Synthetic oligonucleotide
  Antisense strand to SEQ ID NO: 299674
caucuccacuaacaccucg

SEQ ID NO: 299676 - RNA, 19 nt, Artificial Sequence
  Description of Artificial Sequence: Synthetic oligonucleotide
  Sense strand starting at position 1359 of SEQ ID NO: 3851
gguguuaguggagauguuu

SEQ ID NO: 299677 - RNA, 19 nt, Artificial Sequence
  Description of Artificial Sequence: Synthetic oligonucleotide
  Antisense strand to SEQ ID NO: 299676
aaacaucuccacuaacacc

SEQ ID NO: 299678 - RNA, 19 nt, Artificial Sequence
  Description of Artificial Sequence: Synthetic oligonucleotide
  Sense strand starting at position 1397 of SEQ ID NO: 3851
ccgggaggacguuauccau

SEQ ID NO: 299679 - RNA, 19 nt, Artificial Sequence
  Description of Artificial Sequence: Synthetic oligonucleotide
  Antisense strand to SEQ ID NO: 299678
auggauaacguccucccgg

SEQ ID NO: 299680 - RNA, 19 nt, Artificial Sequence
  Description of Artificial Sequence: Synthetic oligonucleotide
  Sense strand starting at position 1492 of SEQ ID NO: 3851
ggcucaggguccuucuaaa

SEQ ID NO: 299681 - RNA, 19 nt, Artificial Sequence
  Description of Artificial Sequence: Synthetic oligonucleotide
  Antisense strand to SEQ ID NO: 299680
uuuagaaggacccugagcc

SEQ ID NO: 299682 - RNA, 19 nt, Artificial Sequence
  Description of Artificial Sequence: Synthetic oligonucleotide
  Sense strand starting at position 1562 of SEQ ID NO: 3851
ugaacuggcgcucagaaua

SEQ ID NO: 299683 - RNA, 19 nt, Artificial Sequence
  Description of Artificial Sequence: Synthetic oligonucleotide
  Antisense strand to SEQ ID NO: 299682
uauucugagcgccaguuca

SEQ ID NO: 299684 - RNA, 19 nt, Artificial Sequence
  Description of Artificial Sequence: Synthetic oligonucleotide
  Sense strand starting at position 1648 of SEQ ID NO: 3851
ggagacguuugaguucaga

SEQ ID NO: 299685 - RNA, 19 nt, Artificial Sequence
  Description of Artificial Sequence: Synthetic oligonucleotide
  Antisense strand to SEQ ID NO: 299684
ucugaacucaaacgucucc

SEQ ID NO: 299686 - RNA, 19 nt, Artificial Sequence
  Description of Artificial Sequence: Synthetic oligonucleotide
  Sense strand starting at position 1651 of SEQ ID NO: 3851
gacguuugaguucagaagu

SEQ ID NO: 299687 - RNA, 19 nt, Artificial Sequence
  Description of Artificial Sequence: Synthetic oligonucleotide
  Antisense strand to SEQ ID NO: 299686
acuucugaacucaaacguc

SEQ ID NO: 299688 - RNA, 19 nt, Artificial Sequence
  Description of Artificial Sequence: Synthetic oligonucleotide
  Sense strand starting at position 1724 of SEQ ID NO: 3851
gucacaguucuaggaagca

SEQ ID NO: 299689 - RNA, 19 nt, Artificial Sequence
  Description of Artificial Sequence: Synthetic oligonucleotide
  Antisense strand to SEQ ID NO: 299688
ugcuuccuagaacugugac

SEQ ID NO: 299690 - RNA, 19 nt, Artificial Sequence
  Description of Artificial Sequence: Synthetic oligonucleotide
  Sense strand starting at position 2403 of SEQ ID NO: 3851
augggaaacggucaugugu

SEQ ID NO: 299691 - RNA, 19 nt, Artificial Sequence
  Description of Artificial Sequence: Synthetic oligonucleotide
  Antisense strand to SEQ ID NO: 299690
acacaugaccguuucccau

SEQ ID NO: 299692 - RNA, 19 nt, Artificial Sequence
  Description of Artificial Sequence: Synthetic oligonucleotide
  Sense strand starting at position 2521 of SEQ ID NO: 3851
ugaggcuguguuuaggaaa

SEQ ID NO: 299693 - RNA, 19 nt, Artificial Sequence
  Description of Artificial Sequence: Synthetic oligonucleotide
  Antisense strand to SEQ ID NO: 299692
uuuccuaaacacagccuca

SEQ ID NO: 299694 - RNA, 19 nt, Artificial Sequence
  Description of Artificial Sequence: Synthetic oligonucleotide
  Sense strand starting at position 2576 of SEQ ID NO: 3851
gcugauucaccugggaagu

SEQ ID NO: 299695 - RNA, 19 nt, Artificial Sequence
  Description of Artificial Sequence: Synthetic oligonucleotide
  Antisense strand to SEQ ID NO: 299694
acuucccaggugaaucagc

SEQ ID NO: 299696 - RNA, 19 nt, Artificial Sequence
  Description of Artificial Sequence: Synthetic oligonucleotide
  Sense strand starting at position 2592 of SEQ ID NO: 3851
agugacagucucuaagcuu

SEQ ID NO: 299697 - RNA, 19 nt, Artificial Sequence
  Description of Artificial Sequence: Synthetic oligonucleotide
  Antisense strand to SEQ ID NO: 299696
aagcuuagagacugucacu

SEQ ID NO: 299698 - RNA, 19 nt, Artificial Sequence
  Description of Artificial Sequence: Synthetic oligonucleotide
  Sense strand starting at position 2599 of SEQ ID NO: 3851
gucucuaagcuuugaggac

SEQ ID NO: 299699 - RNA, 19 nt, Artificial Sequence
  Description of Artificial Sequence: Synthetic oligonucleotide
  Antisense strand to SEQ ID NO: 299698
guccucaaagcuuagagac

SEQ ID NO: 299700 - RNA, 19 nt, Artificial Sequence
  Description of Artificial Sequence: Synthetic oligonucleotide
  Sense strand starting at position 3373 of SEQ ID NO: 3851
aaagcaucucucgggaagu

SEQ ID NO: 299701 - RNA, 19 nt, Artificial Sequence
  Description of Artificial Sequence: Synthetic oligonucleotide
  Antisense strand to SEQ ID NO: 299700
acuucccgagagaugcuuu

SEQ ID NO: 299702 - RNA, 19 nt, Artificial Sequence
  Description of Artificial Sequence: Synthetic oligonucleotide
  Sense strand starting at position 3391 of SEQ ID NO: 3851
ugcuuuaaggcugggaaau

SEQ ID NO: 299703 - RNA, 19 nt, Artificial Sequence
  Description of Artificial Sequence: Synthetic oligonucleotide
  Antisense strand to SEQ ID NO: 299702
auuucccagccuuaaagca

SEQ ID NO: 299704 - RNA, 19 nt, Artificial Sequence
  Description of Artificial Sequence: Synthetic oligonucleotide
  Sense strand starting at position 3392 of SEQ ID NO: 3851
gcuuuaaggcugggaaauu

SEQ ID NO: 299705 - RNA, 19 nt, Artificial Sequence
  Description of Artificial Sequence: Synthetic oligonucleotide
  Antisense strand to SEQ ID NO: 299704
aauuucccagccuuaaagc

SEQ ID NO: 299706 - RNA, 19 nt, Artificial Sequence
  Description of Artificial Sequence: Synthetic oligonucleotide
  Sense strand starting at position 3393 of SEQ ID NO: 3851
cuuuaaggcugggaaauuu

SEQ ID NO: 299707 - RNA, 19 nt, Artificial Sequence
  Description of Artificial Sequence: Synthetic oligonucleotide
  Antisense strand to SEQ ID NO: 299706
aaauuucccagccuuaaag

SEQ ID NO: 299708 - RNA, 19 nt, Artificial Sequence
  Description of Artificial Sequence: Synthetic oligonucleotide
  Sense strand starting at position 3402 of SEQ ID NO: 3851
ugggaaauuuacuauacac

SEQ ID NO: 299709 - RNA, 19 nt, Artificial Sequence
  Description of Artificial Sequence: Synthetic oligonucleotide
  Antisense strand to SEQ ID NO: 299708
guguauaguaaauuuccca

SEQ ID NO: 299710 - RNA, 19 nt, Artificial Sequence
  Description of Artificial Sequence: Synthetic oligonucleotide
  Sense strand starting at position 3453 of SEQ ID NO: 3851
ggaggagaaucugcuguuu

SEQ ID NO: 299711 - RNA, 19 nt, Artificial Sequence
  Description of Artificial Sequence: Synthetic oligonucleotide
  Antisense strand to SEQ ID NO: 299710
aaacagcagauucuccucc

SEQ ID NO: 299712 - RNA, 19 nt, Artificial Sequence
  Description of Artificial Sequence: Synthetic oligonucleotide
  Sense strand starting at position 3626 of SEQ ID NO: 3851
agaggucuucuuuguggaa

SEQ ID NO: 299713 - RNA, 19 nt, Artificial Sequence
  Description of Artificial Sequence: Synthetic oligonucleotide
  Antisense strand to SEQ ID NO: 299712
uuccacaaagaagaccucu

SEQ ID NO: 299714 - RNA, 19 nt, Artificial Sequence
  Description of Artificial Sequence: Synthetic oligonucleotide
  Sense strand starting at position 3627 of SEQ ID NO: 3851
gaggucuucuuuguggaag

SEQ ID NO: 299715 - RNA, 19 nt, Artificial Sequence
  Description of Artificial Sequence: Synthetic oligonucleotide
  Antisense strand to SEQ ID NO: 299714
cuuccacaaagaagaccuc

SEQ ID NO: 299716 - RNA, 19 nt, Artificial Sequence
  Description of Artificial Sequence: Synthetic oligonucleotide
  Sense strand starting at position 3630 of SEQ ID NO: 3851
gucuucuuuguggaaggga

SEQ ID NO: 299717 - RNA, 19 nt, Artificial Sequence
  Description of Artificial Sequence: Synthetic oligonucleotide
  Antisense strand to SEQ ID NO: 299716
ucccuuccacaaagaagac

SEQ ID NO: 299718 - RNA, 19 nt, Artificial Sequence
  Description of Artificial Sequence: Synthetic oligonucleotide
  Sense strand starting at position 3665 of SEQ ID NO: 3851
ggaucucugcuugaggcuu

SEQ ID NO: 299719 - RNA, 19 nt, Artificial Sequence
  Description of Artificial Sequence: Synthetic oligonucleotide
  Antisense strand to SEQ ID NO: 299718
aagccucaagcagagaucc

SEQ ID NO: 299720 - RNA, 19 nt, Artificial Sequence
  Description of Artificial Sequence: Synthetic oligonucleotide
  Sense strand starting at position 3789 of SEQ ID NO: 3851
uuccaagcuguuuaaaguu

SEQ ID NO: 299721 - RNA, 19 nt, Artificial Sequence
  Description of Artificial Sequence: Synthetic oligonucleotide
  Antisense strand to SEQ ID NO: 299720
aacuuuaaacagcuuggaa

SEQ ID NO: 299722 - RNA, 19 nt, Artificial Sequence
  Description of Artificial Sequence: Synthetic oligonucleotide
  Sense strand starting at position 3865 of SEQ ID NO: 3851
uuauucagugguuaaggga

SEQ ID NO: 299723 - RNA, 19 nt, Artificial Sequence
  Description of Artificial Sequence: Synthetic oligonucleotide
  Antisense strand to SEQ ID NO: 299722
ucccuuaaccacugaauaa

SEQ ID NO: 299724 - RNA, 19 nt, Artificial Sequence
  Description of Artificial Sequence: Synthetic oligonucleotide
  Sense strand starting at position 3 of SEQ ID NO: 3852
gaauguuggcauugcauga

SEQ ID NO: 299725 - RNA, 19 nt, Artificial Sequence
  Description of Artificial Sequence: Synthetic oligonucleotide
  Antisense strand to SEQ ID NO: 299724
ucaugcaaugccaacauuc

SEQ ID NO: 299726 - RNA, 19 nt, Artificial Sequence
  Description of Artificial Sequence: Synthetic oligonucleotide
  Sense strand starting at position 10 of SEQ ID NO: 3852
ggcauugcaugagugacaa

SEQ ID NO: 299727 - RNA, 19 nt, Artificial Sequence
  Description of Artificial Sequence: Synthetic oligonucleotide
  Antisense strand to SEQ ID NO: 299726
uugucacucaugcaaugcc

SEQ ID NO: 299728 - RNA, 19 nt, Artificial Sequence
  Description of Artificial Sequence: Synthetic oligonucleotide
  Sense strand starting at position 116 of SEQ ID NO: 3852
guuacuuaccucuguaaca

SEQ ID NO: 299729 - RNA, 19 nt, Artificial Sequence
  Description of Artificial Sequence: Synthetic oligonucleotide
  Antisense strand to SEQ ID NO: 299728
uguuacagagguaaguaac

SEQ ID NO: 299730 - RNA, 19 nt, Artificial Sequence
  Description of Artificial Sequence: Synthetic oligonucleotide
  Sense strand starting at position 246 of SEQ ID NO: 3852
agguguucccaucaagcca

SEQ ID NO: 299731 - RNA, 19 nt, Artificial Sequence
  Description of Artificial Sequence: Synthetic oligonucleotide
  Antisense strand to SEQ ID NO: 299730
uggcuugaugggaacaccu

SEQ ID NO: 299732 - RNA, 19 nt, Artificial Sequence
  Description of Artificial Sequence: Synthetic oligonucleotide
  Sense strand starting at position 357 of SEQ ID NO: 3852
cagagagauuauccgcaaa

SEQ ID NO: 299733 - RNA, 19 nt, Artificial Sequence
  Description of Artificial Sequence: Synthetic oligonucleotide
  Antisense strand to SEQ ID NO: 299732
uuugcggauaaucucucug

SEQ ID NO: 299734 - RNA, 19 nt, Artificial Sequence
  Description of Artificial Sequence: Synthetic oligonucleotide
  Sense strand starting at position 359 of SEQ ID NO: 3852
gagagauuauccgcaaaca

SEQ ID NO: 299735 - RNA, 19 nt, Artificial Sequence
  Description of Artificial Sequence: Synthetic oligonucleotide
  Antisense strand to SEQ ID NO: 299734
uguuugcggauaaucucuc

SEQ ID NO: 299736 - RNA, 19 nt, Artificial Sequence
  Description of Artificial Sequence: Synthetic oligonucleotide
  Sense strand starting at position 379 of SEQ ID NO: 3852
ggagaggcgcgguaugaaa

SEQ ID NO: 299737 - RNA, 19 nt, Artificial Sequence
  Description of Artificial Sequence: Synthetic oligonucleotide
  Antisense strand to SEQ ID NO: 299736
uuucauaccgcgccucucc

SEQ ID NO: 299738 - RNA, 19 nt, Artificial Sequence
  Description of Artificial Sequence: Synthetic oligonucleotide
  Sense strand starting at position 387 of SEQ ID NO: 3852
gcgguaugaaaccgaauua

SEQ ID NO: 299739 - RNA, 19 nt, Artificial Sequence
  Description of Artificial Sequence: Synthetic oligonucleotide
  Antisense strand to SEQ ID NO: 299738
uaauucgguuucauaccgc

SEQ ID NO: 299740 - RNA, 19 nt, Artificial Sequence
  Description of Artificial Sequence: Synthetic oligonucleotide
  Sense strand starting at position 388 of SEQ ID NO: 3852
cgguaugaaaccgaauuaa

SEQ ID NO: 299741 - RNA, 19 nt, Artificial Sequence
  Description of Artificial Sequence: Synthetic oligonucleotide
  Antisense strand to SEQ ID NO: 299740
uuaauucgguuucauaccg

SEQ ID NO: 299742 - RNA, 19 nt, Artificial Sequence
  Description of Artificial Sequence: Synthetic oligonucleotide
  Sense strand starting at position 426 of SEQ ID NO: 3852
ugaaauaugcagugugaca

SEQ ID NO: 299743 - RNA, 19 nt, Artificial Sequence
  Description of Artificial Sequence: Synthetic oligonucleotide
  Antisense strand to SEQ ID NO: 299742
ugucacacugcauauuuca

SEQ ID NO: 299744 - RNA, 19 nt, Artificial Sequence
  Description of Artificial Sequence: Synthetic oligonucleotide
  Sense strand starting at position 520 of SEQ ID NO: 3852
gugagaagaugacaaacaa

SEQ ID NO: 299745 - RNA, 19 nt, Artificial Sequence
  Description of Artificial Sequence: Synthetic oligonucleotide
  Antisense strand to SEQ ID NO: 299744
uuguuugucaucuucucac

SEQ ID NO: 299746 - RNA, 19 nt, Artificial Sequence
  Description of Artificial Sequence: Synthetic oligonucleotide
  Sense strand starting at position 614 of SEQ ID NO: 3852
gaacuagauuuguaauggu

SEQ ID NO: 299747 - RNA, 19 nt, Artificial Sequence
  Description of Artificial Sequence: Synthetic oligonucleotide
  Antisense strand to SEQ ID NO: 299746
accauuacaaaucuaguuc

SEQ ID NO: 299748 - RNA, 19 nt, Artificial Sequence
  Description of Artificial Sequence: Synthetic oligonucleotide
  Sense strand starting at position 667 of SEQ ID NO: 3852
ggguaucaacuaugugugu

SEQ ID NO: 299749 - RNA, 19 nt, Artificial Sequence
  Description of Artificial Sequence: Synthetic oligonucleotide
  Antisense strand to SEQ ID NO: 299748
acacacauaguugauaccc

SEQ ID NO: 299750 - RNA, 19 nt, Artificial Sequence
  Description of Artificial Sequence: Synthetic oligonucleotide
  Sense strand starting at position 668 of SEQ ID NO: 3852
gguaucaacuaugugugua

SEQ ID NO: 299751 - RNA, 19 nt, Artificial Sequence
  Description of Artificial Sequence: Synthetic oligonucleotide
  Antisense strand to SEQ ID NO: 299750
uacacacauaguugauacc

SEQ ID NO: 299752 - RNA, 19 nt, Artificial Sequence
  Description of Artificial Sequence: Synthetic oligonucleotide
  Sense strand starting at position 752 of SEQ ID NO: 3852
cuggguauacgcuagcuaa

SEQ ID NO: 299753 - RNA, 19 nt, Artificial Sequence
  Description of Artificial Sequence: Synthetic oligonucleotide
  Antisense strand to SEQ ID NO: 299752
uuagcuagcguauacccag

SEQ ID NO: 299754 - RNA, 19 nt, Artificial Sequence
  Description of Artificial Sequence: Synthetic oligonucleotide
  Sense strand starting at position 765 of SEQ ID NO: 3852
agcuaauggugaguuacaa

SEQ ID NO: 299755 - RNA, 19 nt, Artificial Sequence
  Description of Artificial Sequence: Synthetic oligonucleotide
  Antisense strand to SEQ ID NO: 299754
uuguaacucaccauuagcu

SEQ ID NO: 299756 - RNA, 19 nt, Artificial Sequence
  Description of Artificial Sequence: Synthetic oligonucleotide
  Sense strand starting at position 913 of SEQ ID NO: 3852
uggaguuugacuuguuguu

SEQ ID NO: 299757 - RNA, 19 nt, Artificial Sequence
  Description of Artificial Sequence: Synthetic oligonucleotide
  Antisense strand to SEQ ID NO: 299756
aacaacaagucaaacucca

SEQ ID NO: 299758 - RNA, 19 nt, Artificial Sequence
  Description of Artificial Sequence: Synthetic oligonucleotide
  Sense strand starting at position 915 of SEQ ID NO: 3852
gaguuugacuuguuguuag

SEQ ID NO: 299759 - RNA, 19 nt, Artificial Sequence
  Description of Artificial Sequence: Synthetic oligonucleotide
  Antisense strand to SEQ ID NO: 299758
cuaacaacaagucaaacuc

SEQ ID NO: 299760 - RNA, 19 nt, Artificial Sequence
  Description of Artificial Sequence: Synthetic oligonucleotide
  Sense strand starting at position 936 of SEQ ID NO: 3852
uugaucuaauuaucgagua

SEQ ID NO: 299761 - RNA, 19 nt, Artificial Sequence
  Description of Artificial Sequence: Synthetic oligonucleotide
  Antisense strand to SEQ ID NO: 299760
uacucgauaauuagaucaa

SEQ ID NO: 299762 - RNA, 19 nt, Artificial Sequence
  Description of Artificial Sequence: Synthetic oligonucleotide
  Sense strand starting at position 941 of SEQ ID NO: 3852
cuaauuaucgaguaucauu

SEQ ID NO: 299763 - RNA, 19 nt, Artificial Sequence
  Description of Artificial Sequence: Synthetic oligonucleotide
  Antisense strand to SEQ ID NO: 299762
aaugauacucgauaauuag

SEQ ID NO: 299764 - RNA, 19 nt, Artificial Sequence
  Description of Artificial Sequence: Synthetic oligonucleotide
  Sense strand starting at position 1354 of SEQ ID NO: 3852
uugguaaaguguucaguga

SEQ ID NO: 299765 - RNA, 19 nt, Artificial Sequence
  Description of Artificial Sequence: Synthetic oligonucleotide
  Antisense strand to SEQ ID NO: 299764
ucacugaacacuuuaccaa

SEQ ID NO: 299766 - RNA, 19 nt, Artificial Sequence
  Description of Artificial Sequence: Synthetic oligonucleotide
  Sense strand starting at position 1377 of SEQ ID NO: 3852
guacuaacacuacgaugaa

SEQ ID NO: 299767 - RNA, 19 nt, Artificial Sequence
  Description of Artificial Sequence: Synthetic oligonucleotide
  Antisense strand to SEQ ID NO: 299766
uucaucguaguguuaguac

SEQ ID NO: 299768 - RNA, 19 nt, Artificial Sequence
  Description of Artificial Sequence: Synthetic oligonucleotide
  Sense strand starting at position 1995 of SEQ ID NO: 3852
gcgagauccgcgccuagga

SEQ ID NO: 299769 - RNA, 19 nt, Artificial Sequence
  Description of Artificial Sequence: Synthetic oligonucleotide
  Antisense strand to SEQ ID NO: 299768
uccuaggcgcggaucucgc

SEQ ID NO: 299770 - RNA, 19 nt, Artificial Sequence
  Description of Artificial Sequence: Synthetic oligonucleotide
  Sense strand starting at position 1997 of SEQ ID NO: 3852
gagauccgcgccuaggauu

SEQ ID NO: 299771 - RNA, 19 nt, Artificial Sequence
  Description of Artificial Sequence: Synthetic oligonucleotide
  Antisense strand to SEQ ID NO: 299770
aauccuaggcgcggaucuc

SEQ ID NO: 299772 - RNA, 19 nt, Artificial Sequence
  Description of Artificial Sequence: Synthetic oligonucleotide
  Sense strand starting at position 2151 of SEQ ID NO: 3852
ugcugagugguuugaucaa

SEQ ID NO: 299773 - RNA, 19 nt, Artificial Sequence
  Description of Artificial Sequence: Synthetic oligonucleotide
  Antisense strand to SEQ ID NO: 299772
uugaucaaaccacucagca

SEQ ID NO: 299774 - RNA, 19 nt, Artificial Sequence
  Description of Artificial Sequence: Synthetic oligonucleotide
  Sense strand starting at position 2366 of SEQ ID NO: 3852
gugaguuagaccuagguuu

SEQ ID NO: 299775 - RNA, 19 nt, Artificial Sequence
  Description of Artificial Sequence: Synthetic oligonucleotide
  Antisense strand to SEQ ID NO: 299774
aaaccuaggucuaacucac

SEQ ID NO: 299776 - RNA, 19 nt, Artificial Sequence
  Description of Artificial Sequence: Synthetic oligonucleotide
  Sense strand starting at position 2368 of SEQ ID NO: 3852
gaguuagaccuagguuucu

SEQ ID NO: 299777 - RNA, 19 nt, Artificial Sequence
  Description of Artificial Sequence: Synthetic oligonucleotide
  Antisense strand to SEQ ID NO: 299776
agaaaccuaggucuaacuc

SEQ ID NO: 299778 - RNA, 19 nt, Artificial Sequence
  Description of Artificial Sequence: Synthetic oligonucleotide
  Sense strand starting at position 2373 of SEQ ID NO: 3852
agaccuagguuucuaauca

SEQ ID NO: 299779 - RNA, 19 nt, Artificial Sequence
  Description of Artificial Sequence: Synthetic oligonucleotide
  Antisense strand to SEQ ID NO: 299778
ugauuagaaaccuaggucu

SEQ ID NO: 299780 - RNA, 19 nt, Artificial Sequence
  Description of Artificial Sequence: Synthetic oligonucleotide
  Sense strand starting at position 2418 of SEQ ID NO: 3852
guuuacuccucuguaagaa

SEQ ID NO: 299781 - RNA, 19 nt, Artificial Sequence
  Description of Artificial Sequence: Synthetic oligonucleotide
  Antisense strand to SEQ ID NO: 299780
uucuuacagaggaguaaac

SEQ ID NO: 299782 - RNA, 19 nt, Artificial Sequence
  Description of Artificial Sequence: Synthetic oligonucleotide
  Sense strand starting at position 2436 of SEQ ID NO: 3852
auuagauguuaucugugag

SEQ ID NO: 299783 - RNA, 19 nt, Artificial Sequence
  Description of Artificial Sequence: Synthetic oligonucleotide
  Antisense strand to SEQ ID NO: 299782
cucacagauaacaucuaau

SEQ ID NO: 299784 - RNA, 19 nt, Artificial Sequence
  Description of Artificial Sequence: Synthetic oligonucleotide
  Sense strand starting at position 2616 of SEQ ID NO: 3852
gagugaauauaauugaguc

SEQ ID NO: 299785 - RNA, 19 nt, Artificial Sequence
  Description of Artificial Sequence: Synthetic oligonucleotide
  Antisense strand to SEQ ID NO: 299784
gacucaauuauauucacuc

SEQ ID NO: 299786 - RNA, 19 nt, Artificial Sequence
  Description of Artificial Sequence: Synthetic oligonucleotide
  Sense strand starting at position 2626 of SEQ ID NO: 3852
aauugagucucaguaagug

SEQ ID NO: 299787 - RNA, 19 nt, Artificial Sequence
  Description of Artificial Sequence: Synthetic oligonucleotide
  Antisense strand to SEQ ID NO: 299786
cacuuacugagacucaauu

SEQ ID NO: 299788 - RNA, 19 nt, Artificial Sequence
  Description of Artificial Sequence: Synthetic oligonucleotide
  Sense strand starting at position 2774 of SEQ ID NO: 3852
uggagauuguauucugaug

SEQ ID NO: 299789 - RNA, 19 nt, Artificial Sequence
  Description of Artificial Sequence: Synthetic oligonucleotide
  Antisense strand to SEQ ID NO: 299788
caucagaauacaaucucca

SEQ ID NO: 299790 - RNA, 19 nt, Artificial Sequence
  Description of Artificial Sequence: Synthetic oligonucleotide
  Sense strand starting at position 2817 of SEQ ID NO: 3852
aaauaugugguauguuaag

SEQ ID NO: 299791 - RNA, 19 nt, Artificial Sequence
  Description of Artificial Sequence: Synthetic oligonucleotide
  Antisense strand to SEQ ID NO: 299790
cuuaacauaccacauauuu

SEQ ID NO: 299792 - RNA, 19 nt, Artificial Sequence
  Description of Artificial Sequence: Synthetic oligonucleotide
  Sense strand starting at position 2956 of SEQ ID NO: 3852
cguacaucccaagaaguua

SEQ ID NO: 299793 - RNA, 19 nt, Artificial Sequence
  Description of Artificial Sequence: Synthetic oligonucleotide
  Antisense strand to SEQ ID NO: 299792
uaacuucuugggauguacg

SEQ ID NO: 299794 - RNA, 19 nt, Artificial Sequence
  Description of Artificial Sequence: Synthetic oligonucleotide
  Sense strand starting at position 3181 of SEQ ID NO: 3852
aucucuauaggcuggagua

SEQ ID NO: 299795 - RNA, 19 nt, Artificial Sequence
  Description of Artificial Sequence: Synthetic oligonucleotide
  Antisense strand to SEQ ID NO: 299794
uacuccagccuauagagau

SEQ ID NO: 299796 - RNA, 19 nt, Artificial Sequence
  Description of Artificial Sequence: Synthetic oligonucleotide
  Sense strand starting at position 3462 of SEQ ID NO: 3852
agaagagagucucaaccaa

SEQ ID NO: 299797 - RNA, 19 nt, Artificial Sequence
  Description of Artificial Sequence: Synthetic oligonucleotide
  Antisense strand to SEQ ID NO: 299796
uugguugagacucucuucu

SEQ ID NO: 299798 - RNA, 19 nt, Artificial Sequence
  Description of Artificial Sequence: Synthetic oligonucleotide
  Sense strand starting at position 3512 of SEQ ID NO: 3852
uucgauaaacucuggaaag

SEQ ID NO: 299799 - RNA, 19 nt, Artificial Sequence
  Description of Artificial Sequence: Synthetic oligonucleotide
  Antisense strand to SEQ ID NO: 299798
cuuuccagaguuuaucgaa

SEQ ID NO: 299800 - RNA, 19 nt, Artificial Sequence
  Description of Artificial Sequence: Synthetic oligonucleotide
  Sense strand starting at position 3691 of SEQ ID NO: 3852
aacugauaucaguggcauc

SEQ ID NO: 299801 - RNA, 19 nt, Artificial Sequence
  Description of Artificial Sequence: Synthetic oligonucleotide
  Antisense strand to SEQ ID NO: 299800
gaugccacugauaucaguu

SEQ ID NO: 299802 - RNA, 19 nt, Artificial Sequence
  Description of Artificial Sequence: Synthetic oligonucleotide
  Sense strand starting at position 3783 of SEQ ID NO: 3852
acucuaggccaauaaaugu

SEQ ID NO: 299803 - RNA, 19 nt, Artificial Sequence
  Description of Artificial Sequence: Synthetic oligonucleotide
  Antisense strand to SEQ ID NO: 299802
acauuuauuggccuagagu

SEQ ID NO: 299804 - RNA, 19 nt, Artificial Sequence
  Description of Artificial Sequence: Synthetic oligonucleotide
  Sense strand starting at position 23 of SEQ ID NO: 3853
aggauauauuuaugaugcu

SEQ ID NO: 299805 - RNA, 19 nt, Artificial Sequence
  Description of Artificial Sequence: Synthetic oligonucleotide
  Antisense strand to SEQ ID NO: 299804
agcaucauaaauauauccu

SEQ ID NO: 299806 - RNA, 19 nt, Artificial Sequence
  Description of Artificial Sequence: Synthetic oligonucleotide
  Sense strand starting at position 24 of SEQ ID NO: 3853
ggauauauuuaugaugcuu

SEQ ID NO: 299807 - RNA, 19 nt, Artificial Sequence
  Description of Artificial Sequence: Synthetic oligonucleotide
  Antisense strand to SEQ ID NO: 299806
aagcaucauaaauauaucc

SEQ ID NO: 299808 - RNA, 19 nt, Artificial Sequence
  Description of Artificial Sequence: Synthetic oligonucleotide
  Sense strand starting at position 61 of SEQ ID NO: 3853
agcauucuggcugacacaa

SEQ ID NO: 299809 - RNA, 19 nt, Artificial Sequence
  Description of Artificial Sequence: Synthetic oligonucleotide
  Antisense strand to SEQ ID NO: 299808
uugugucagccagaaugcu

SEQ ID NO: 299810 - RNA, 19 nt, Artificial Sequence
  Description of Artificial Sequence: Synthetic oligonucleotide
  Sense strand starting at position 101 of SEQ ID NO: 3853
uagggaaggucccuuguga

SEQ ID NO: 299811 - RNA, 19 nt, Artificial Sequence
  Description of Artificial Sequence: Synthetic oligonucleotide
  Antisense strand to SEQ ID NO: 299810
ucacaagggaccuucccua

SEQ ID NO: 299812 - RNA, 19 nt, Artificial Sequence
  Description of Artificial Sequence: Synthetic oligonucleotide
  Sense strand starting at position 114 of SEQ ID NO: 3853
uugugaggucuuuaaguag

SEQ ID NO: 299813 - RNA, 19 nt, Artificial Sequence
  Description of Artificial Sequence: Synthetic oligonucleotide
  Antisense strand to SEQ ID NO: 299812
cuacuuaaagaccucacaa

SEQ ID NO: 299814 - RNA, 19 nt, Artificial Sequence
  Description of Artificial Sequence: Synthetic oligonucleotide
  Sense strand starting at position 117 of SEQ ID NO: 3853
ugaggucuuuaaguagcuu

SEQ ID NO: 299815 - RNA, 19 nt, Artificial Sequence
  Description of Artificial Sequence: Synthetic oligonucleotide
  Antisense strand to SEQ ID NO: 299814
aagcuacuuaaagaccuca

SEQ ID NO: 299816 - RNA, 19 nt, Artificial Sequence
  Description of Artificial Sequence: Synthetic oligonucleotide
  Sense strand starting at position 121 of SEQ ID NO: 3853
gucuuuaaguagcuuagau

SEQ ID NO: 299817 - RNA, 19 nt, Artificial Sequence
  Description of Artificial Sequence: Synthetic oligonucleotide
  Antisense strand to SEQ ID NO: 299816
aucuaagcuacuuaaagac

SEQ ID NO: 299818 - RNA, 19 nt, Artificial Sequence
  Description of Artificial Sequence: Synthetic oligonucleotide
  Sense strand starting at position 123 of SEQ ID NO: 3853
cuuuaaguagcuuagauga

SEQ ID NO: 299819 - RNA, 19 nt, Artificial Sequence
  Description of Artificial Sequence: Synthetic oligonucleotide
  Antisense strand to SEQ ID NO: 299818
ucaucuaagcuacuuaaag

SEQ ID NO: 299820 - RNA, 19 nt, Artificial Sequence
  Description of Artificial Sequence: Synthetic oligonucleotide
  Sense strand starting at position 128 of SEQ ID NO: 3853
aguagcuuagaugaguaaa

SEQ ID NO: 299821 - RNA, 19 nt, Artificial Sequence
  Description of Artificial Sequence: Synthetic oligonucleotide
  Antisense strand to SEQ ID NO: 299820
uuuacucaucuaagcuacu

SEQ ID NO: 299822 - RNA, 19 nt, Artificial Sequence
  Description of Artificial Sequence: Synthetic oligonucleotide
  Sense strand starting at position 172 of SEQ ID NO: 3853
guagucucagccgcucaua

SEQ ID NO: 299823 - RNA, 19 nt, Artificial Sequence
  Description of Artificial Sequence: Synthetic oligonucleotide
  Antisense strand to SEQ ID NO: 299822
uaugagcggcugagacuac

SEQ ID NO: 299824 - RNA, 19 nt, Artificial Sequence
  Description of Artificial Sequence: Synthetic oligonucleotide
  Sense strand starting at position 232 of SEQ ID NO: 3853
ccuggaaucuuccuaguag

SEQ ID NO: 299825 - RNA, 19 nt, Artificial Sequence
  Description of Artificial Sequence: Synthetic oligonucleotide
  Antisense strand to SEQ ID NO: 299824
cuacuaggaagauuccagg

SEQ ID NO: 299826 - RNA, 19 nt, Artificial Sequence
  Description of Artificial Sequence: Synthetic oligonucleotide
  Sense strand starting at position 540 of SEQ ID NO: 3853
gagcgaucucagcaaucuu

SEQ ID NO: 299827 - RNA, 19 nt, Artificial Sequence
  Description of Artificial Sequence: Synthetic oligonucleotide
  Antisense strand to SEQ ID NO: 299826
aagauugcugagaucgcuc

SEQ ID NO: 299828 - RNA, 19 nt, Artificial Sequence
  Description of Artificial Sequence: Synthetic oligonucleotide
  Sense strand starting at position 558 of SEQ ID NO: 3853
ugagcccuuuccucaaaga

SEQ ID NO: 299829 - RNA, 19 nt, Artificial Sequence
  Description of Artificial Sequence: Synthetic oligonucleotide
  Antisense strand to SEQ ID NO: 299828
ucuuugaggaaagggcuca

SEQ ID NO: 299830 - RNA, 19 nt, Artificial Sequence
  Description of Artificial Sequence: Synthetic oligonucleotide
  Sense strand starting at position 940 of SEQ ID NO: 3853
ggaccuuucugucugcaaa

SEQ ID NO: 299831 - RNA, 19 nt, Artificial Sequence
  Description of Artificial Sequence: Synthetic oligonucleotide
  Antisense strand to SEQ ID NO: 299830
uuugcagacagaaaggucc

SEQ ID NO: 299832 - RNA, 19 nt, Artificial Sequence
  Description of Artificial Sequence: Synthetic oligonucleotide
  Sense strand starting at position 1224 of SEQ ID NO: 3853
ccaauaaaggaguguggau

SEQ ID NO: 299833 - RNA, 19 nt, Artificial Sequence
  Description of Artificial Sequence: Synthetic oligonucleotide
  Antisense strand to SEQ ID NO: 299832
auccacacuccuuuauugg

SEQ ID NO: 299834 - RNA, 19 nt, Artificial Sequence
  Description of Artificial Sequence: Synthetic oligonucleotide
  Sense strand starting at position 1243 of SEQ ID NO: 3853
augcuaaucgcaguguucu

SEQ ID NO: 299835 - RNA, 19 nt, Artificial Sequence
  Description of Artificial Sequence: Synthetic oligonucleotide
  Antisense strand to SEQ ID NO: 299834
agaacacugcgauuagcau

SEQ ID NO: 299836 - RNA, 19 nt, Artificial Sequence
  Description of Artificial Sequence: Synthetic oligonucleotide
  Sense strand starting at position 1663 of SEQ ID NO: 3853
ugccuauucccggaaagcu

SEQ ID NO: 299837 - RNA, 19 nt, Artificial Sequence
  Description of Artificial Sequence: Synthetic oligonucleotide
  Antisense strand to SEQ ID NO: 299836
agcuuuccgggaauaggca

SEQ ID NO: 299838 - RNA, 19 nt, Artificial Sequence
  Description of Artificial Sequence: Synthetic oligonucleotide
  Sense strand starting at position 1848 of SEQ ID NO: 3853
guuaccugccgggaaaguu

SEQ ID NO: 299839 - RNA, 19 nt, Artificial Sequence
  Description of Artificial Sequence: Synthetic oligonucleotide
  Antisense strand to SEQ ID NO: 299838
aacuuucccggcagguaac

SEQ ID NO: 299840 - RNA, 19 nt, Artificial Sequence
  Description of Artificial Sequence: Synthetic oligonucleotide
  Sense strand starting at position 2316 of SEQ ID NO: 3853
ugagaugggccauagucuu

SEQ ID NO: 299841 - RNA, 19 nt, Artificial Sequence
  Description of Artificial Sequence: Synthetic oligonucleotide
  Antisense strand to SEQ ID NO: 299840
aagacuauggcccaucuca

SEQ ID NO: 299842 - RNA, 19 nt, Artificial Sequence
  Description of Artificial Sequence: Synthetic oligonucleotide
  Sense strand starting at position 2528 of SEQ ID NO: 3853
gggccagaaucagcuaaau

SEQ ID NO: 299843 - RNA, 19 nt, Artificial Sequence
  Description of Artificial Sequence: Synthetic oligonucleotide
  Antisense strand to SEQ ID NO: 299842
auuuagcugauucuggccc

SEQ ID NO: 299844 - RNA, 19 nt, Artificial Sequence
  Description of Artificial Sequence: Synthetic oligonucleotide
  Sense strand starting at position 2793 of SEQ ID NO: 3853
ucgguugguggcaguaaau

SEQ ID NO: 299845 - RNA, 19 nt, Artificial Sequence
  Description of Artificial Sequence: Synthetic oligonucleotide
  Antisense strand to SEQ ID NO: 299844
auuuacugccaccaaccga

SEQ ID NO: 299846 - RNA, 19 nt, Artificial Sequence
  Description of Artificial Sequence: Synthetic oligonucleotide
  Sense strand starting at position 2836 of SEQ ID NO: 3853
uuuguuauucuccagcaga

SEQ ID NO: 299847 - RNA, 19 nt, Artificial Sequence
  Description of Artificial Sequence: Synthetic oligonucleotide
  Antisense strand to SEQ ID NO: 299846
ucugcuggagaauaacaaa

SEQ ID NO: 299848 - RNA, 19 nt, Artificial Sequence
  Description of Artificial Sequence: Synthetic oligonucleotide
  Sense strand starting at position 2839 of SEQ ID NO: 3853
guuauucuccagcagagca

SEQ ID NO: 299849 - RNA, 19 nt, Artificial Sequence
  Description of Artificial Sequence: Synthetic oligonucleotide
  Antisense strand to SEQ ID NO: 299848
ugcucugcuggagaauaac

SEQ ID NO: 299850 - RNA, 19 nt, Artificial Sequence
  Description of Artificial Sequence: Synthetic oligonucleotide
  Sense strand starting at position 2887 of SEQ ID NO: 3853
uguccuggguucuccaaga

SEQ ID NO: 299851 - RNA, 19 nt, Artificial Sequence
  Description of Artificial Sequence: Synthetic oligonucleotide
  Antisense strand to SEQ ID NO: 299850
ucuuggagaacccaggaca

SEQ ID NO: 299852 - RNA, 19 nt, Artificial Sequence
  Description of Artificial Sequence: Synthetic oligonucleotide
  Sense strand starting at position 2927 of SEQ ID NO: 3853
gccaaauuggccuaaggga

SEQ ID NO: 299853 - RNA, 19 nt, Artificial Sequence
  Description of Artificial Sequence: Synthetic oligonucleotide
  Antisense strand to SEQ ID NO: 299852
ucccuuaggccaauuuggc

SEQ ID NO: 299854 - RNA, 19 nt, Artificial Sequence
  Description of Artificial Sequence: Synthetic oligonucleotide
  Sense strand starting at position 2941 of SEQ ID NO: 3853
agggacucugcucacuuaa

SEQ ID NO: 299855 - RNA, 19 nt, Artificial Sequence
  Description of Artificial Sequence: Synthetic oligonucleotide
  Antisense strand to SEQ ID NO: 299854
uuaagugagcagagucccu

SEQ ID NO: 299856 - RNA, 19 nt, Artificial Sequence
  Description of Artificial Sequence: Synthetic oligonucleotide
  Sense strand starting at position 2943 of SEQ ID NO: 3853
ggacucugcucacuuaaua

SEQ ID NO: 299857 - RNA, 19 nt, Artificial Sequence
  Description of Artificial Sequence: Synthetic oligonucleotide
  Antisense strand to SEQ ID NO: 299856
uauuaagugagcagagucc

SEQ ID NO: 299858 - RNA, 19 nt, Artificial Sequence
  Description of Artificial Sequence: Synthetic oligonucleotide
  Sense strand starting at position 2962 of SEQ ID NO: 3853
cccgaagcucucuaagaca

SEQ ID NO: 299859 - RNA, 19 nt, Artificial Sequence
  Description of Artificial Sequence: Synthetic oligonucleotide
  Antisense strand to SEQ ID NO: 299858
ugucuuagagagcuucggg

SEQ ID NO: 299860 - RNA, 19 nt, Artificial Sequence
  Description of Artificial Sequence: Synthetic oligonucleotide
  Sense strand starting at position 2974 of SEQ ID NO: 3853
uaagacagccuucguugau

SEQ ID NO: 299861 - RNA, 19 nt, Artificial Sequence
  Description of Artificial Sequence: Synthetic oligonucleotide
  Antisense strand to SEQ ID NO: 299860
aucaacgaaggcugucuua

SEQ ID NO: 299862 - RNA, 19 nt, Artificial Sequence
  Description of Artificial Sequence: Synthetic oligonucleotide
  Sense strand starting at position 3046 of SEQ ID NO: 3853
gggaauugugcacggguca

SEQ ID NO: 299863 - RNA, 19 nt, Artificial Sequence
  Description of Artificial Sequence: Synthetic oligonucleotide
  Antisense strand to SEQ ID NO: 299862
ugacccgugcacaauuccc

SEQ ID NO: 299864 - RNA, 19 nt, Artificial Sequence
  Description of Artificial Sequence: Synthetic oligonucleotide
  Sense strand starting at position 3073 of SEQ ID NO: 3853
gugugucuggagcagagaa

SEQ ID NO: 299865 - RNA, 19 nt, Artificial Sequence
  Description of Artificial Sequence: Synthetic oligonucleotide
  Antisense strand to SEQ ID NO: 299864
uucucugcuccagacacac

SEQ ID NO: 299866 - RNA, 19 nt, Artificial Sequence
  Description of Artificial Sequence: Synthetic oligonucleotide
  Sense strand starting at position 3075 of SEQ ID NO: 3853
gugucuggagcagagaaua

SEQ ID NO: 299867 - RNA, 19 nt, Artificial Sequence
  Description of Artificial Sequence: Synthetic oligonucleotide
  Antisense strand to SEQ ID NO: 299866
uauucucugcuccagacac

SEQ ID NO: 299868 - RNA, 19 nt, Artificial Sequence
  Description of Artificial Sequence: Synthetic oligonucleotide
  Sense strand starting at position 3099 of SEQ ID NO: 3853
guugcuguaaaccgauuua

SEQ ID NO: 299869 - RNA, 19 nt, Artificial Sequence
  Description of Artificial Sequence: Synthetic oligonucleotide
  Antisense strand to SEQ ID NO: 299868
uaaaucgguuuacagcaac

SEQ ID NO: 299870 - RNA, 19 nt, Artificial Sequence
  Description of Artificial Sequence: Synthetic oligonucleotide
  Sense strand starting at position 3356 of SEQ ID NO: 3853
gccugauuacugcuguguu

SEQ ID NO: 299871 - RNA, 19 nt, Artificial Sequence
  Description of Artificial Sequence: Synthetic oligonucleotide
  Antisense strand to SEQ ID NO: 299870
aacacagcaguaaucaggc

SEQ ID NO: 299872 - RNA, 19 nt, Artificial Sequence
  Description of Artificial Sequence: Synthetic oligonucleotide
  Sense strand starting at position 3360 of SEQ ID NO: 3853
gauuacugcuguguugaua

SEQ ID NO: 299873 - RNA, 19 nt, Artificial Sequence
  Description of Artificial Sequence: Synthetic oligonucleotide
  Antisense strand to SEQ ID NO: 299872
uaucaacacagcaguaauc

SEQ ID NO: 299874 - RNA, 19 nt, Artificial Sequence
  Description of Artificial Sequence: Synthetic oligonucleotide
  Sense strand starting at position 3368 of SEQ ID NO: 3853
cuguguugauauuugagca

SEQ ID NO: 299875 - RNA, 19 nt, Artificial Sequence
  Description of Artificial Sequence: Synthetic oligonucleotide
  Antisense strand to SEQ ID NO: 299874
ugcucaaauaucaacacag

SEQ ID NO: 299876 - RNA, 19 nt, Artificial Sequence
  Description of Artificial Sequence: Synthetic oligonucleotide
  Sense strand starting at position 3404 of SEQ ID NO: 3853
cuugaaguauucccgaaac

SEQ ID NO: 299877 - RNA, 19 nt, Artificial Sequence
  Description of Artificial Sequence: Synthetic oligonucleotide
  Antisense strand to SEQ ID NO: 299876
guuucgggaauacuucaag

SEQ ID NO: 299878 - RNA, 19 nt, Artificial Sequence
  Description of Artificial Sequence: Synthetic oligonucleotide
  Sense strand starting at position 3711 of SEQ ID NO: 3853
ucuuuauaaugggagaaag

SEQ ID NO: 299879 - RNA, 19 nt, Artificial Sequence
  Description of Artificial Sequence: Synthetic oligonucleotide
  Antisense strand to SEQ ID NO: 299878
cuuucucccauuauaaaga

SEQ ID NO: 299880 - RNA, 19 nt, Artificial Sequence
  Description of Artificial Sequence: Synthetic oligonucleotide
  Sense strand starting at position 3805 of SEQ ID NO: 3853
ugaugaaauugcuuaguua

SEQ ID NO: 299881 - RNA, 19 nt, Artificial Sequence
  Description of Artificial Sequence: Synthetic oligonucleotide
  Antisense strand to SEQ ID NO: 299880
uaacuaagcaauuucauca

SEQ ID NO: 299882 - RNA, 19 nt, Artificial Sequence
  Description of Artificial Sequence: Synthetic oligonucleotide
  Sense strand starting at position 3806 of SEQ ID NO: 3853
gaugaaauugcuuaguuaa

SEQ ID NO: 299883 - RNA, 19 nt, Artificial Sequence
  Description of Artificial Sequence: Synthetic oligonucleotide
  Antisense strand to SEQ ID NO: 299882
uuaacuaagcaauuucauc

SEQ ID NO: 299884 - RNA, 19 nt, Artificial Sequence
  Description of Artificial Sequence: Synthetic oligonucleotide
  Sense strand starting at position 89 of SEQ ID NO: 3855
ggaaguuucuaugcuauaa

SEQ ID NO: 299885 - RNA, 19 nt, Artificial Sequence
  Description of Artificial Sequence: Synthetic oligonucleotide
  Antisense strand to SEQ ID NO: 299884
uuauagcauagaaacuucc

SEQ ID NO: 299886 - RNA, 19 nt, Artificial Sequence
  Description of Artificial Sequence: Synthetic oligonucleotide
  Sense strand starting at position 93 of SEQ ID NO: 3855
guuucuaugcuauaaggau

SEQ ID NO: 299887 - RNA, 19 nt, Artificial Sequence
  Description of Artificial Sequence: Synthetic oligonucleotide
  Antisense strand to SEQ ID NO: 299886
auccuuauagcauagaaac

SEQ ID NO: 299888 - RNA, 19 nt, Artificial Sequence
  Description of Artificial Sequence: Synthetic oligonucleotide
  Sense strand starting at position 122 of SEQ ID NO: 3855
cucaaauuagugcauaagu

SEQ ID NO: 299889 - RNA, 19 nt, Artificial Sequence
  Description of Artificial Sequence: Synthetic oligonucleotide
  Antisense strand to SEQ ID NO: 299888
acuuaugcacuaauuugag

SEQ ID NO: 299890 - RNA, 19 nt, Artificial Sequence
  Description of Artificial Sequence: Synthetic oligonucleotide
  Sense strand starting at position 199 of SEQ ID NO: 3855
guuaguuaucucuaugacu

SEQ ID NO: 299891 - RNA, 19 nt, Artificial Sequence
  Description of Artificial Sequence: Synthetic oligonucleotide
  Antisense strand to SEQ ID NO: 299890
agucauagagauaacuaac

SEQ ID NO: 299892 - RNA, 19 nt, Artificial Sequence
  Description of Artificial Sequence: Synthetic oligonucleotide
  Sense strand starting at position 296 of SEQ ID NO: 3855
agguuagacuggguauaca

SEQ ID NO: 299893 - RNA, 19 nt, Artificial Sequence
  Description of Artificial Sequence: Synthetic oligonucleotide
  Antisense strand to SEQ ID NO: 299892
uguauacccagucuaaccu

SEQ ID NO: 299894 - RNA, 19 nt, Artificial Sequence
  Description of Artificial Sequence: Synthetic oligonucleotide
  Sense strand starting at position 830 of SEQ ID NO: 3855
acuaguuuacuauaacugu

SEQ ID NO: 299895 - RNA, 19 nt, Artificial Sequence
  Description of Artificial Sequence: Synthetic oligonucleotide
  Antisense strand to SEQ ID NO: 299894
acaguuauaguaaacuagu

SEQ ID NO: 299896 - RNA, 19 nt, Artificial Sequence
  Description of Artificial Sequence: Synthetic oligonucleotide
  Sense strand starting at position 838 of SEQ ID NO: 3855
acuauaacuguguaaguuu

SEQ ID NO: 299897 - RNA, 19 nt, Artificial Sequence
  Description of Artificial Sequence: Synthetic oligonucleotide
  Antisense strand to SEQ ID NO: 299896
aaacuuacacaguuauagu

SEQ ID NO: 299898 - RNA, 19 nt, Artificial Sequence
  Description of Artificial Sequence: Synthetic oligonucleotide
  Sense strand starting at position 873 of SEQ ID NO: 3855
ugcagcauugucuauaaga

SEQ ID NO: 299899 - RNA, 19 nt, Artificial Sequence
  Description of Artificial Sequence: Synthetic oligonucleotide
  Antisense strand to SEQ ID NO: 299898
ucuuauagacaaugcugca

SEQ ID NO: 299900 - RNA, 19 nt, Artificial Sequence
  Description of Artificial Sequence: Synthetic oligonucleotide
  Sense strand starting at position 889 of SEQ ID NO: 3855
agauuaacacuuuagugua

SEQ ID NO: 299901 - RNA, 19 nt, Artificial Sequence
  Description of Artificial Sequence: Synthetic oligonucleotide
  Antisense strand to SEQ ID NO: 299900
uacacuaaaguguuaaucu

SEQ ID NO: 299902 - RNA, 19 nt, Artificial Sequence
  Description of Artificial Sequence: Synthetic oligonucleotide
  Sense strand starting at position 1267 of SEQ ID NO: 3855
gaguuaauguuuguauaga

SEQ ID NO: 299903 - RNA, 19 nt, Artificial Sequence
  Description of Artificial Sequence: Synthetic oligonucleotide
  Antisense strand to SEQ ID NO: 299902
ucuauacaaacauuaacuc

SEQ ID NO: 299904 - RNA, 19 nt, Artificial Sequence
  Description of Artificial Sequence: Synthetic oligonucleotide
  Sense strand starting at position 1739 of SEQ ID NO: 3855
cuaugacguuaacuacaaa

SEQ ID NO: 299905 - RNA, 19 nt, Artificial Sequence
  Description of Artificial Sequence: Synthetic oligonucleotide
  Antisense strand to SEQ ID NO: 299904
uuuguaguuaacgucauag

SEQ ID NO: 299906 - RNA, 19 nt, Artificial Sequence
  Description of Artificial Sequence: Synthetic oligonucleotide
  Sense strand starting at position 1847 of SEQ ID NO: 3855
ccuuuccuagguuaagaau

SEQ ID NO: 299907 - RNA, 19 nt, Artificial Sequence
  Description of Artificial Sequence: Synthetic oligonucleotide
  Antisense strand to SEQ ID NO: 299906
auucuuaaccuaggaaagg

SEQ ID NO: 299908 - RNA, 19 nt, Artificial Sequence
  Description of Artificial Sequence: Synthetic oligonucleotide
  Sense strand starting at position 1889 of SEQ ID NO: 3855
uuaccucuucuccagguua

SEQ ID NO: 299909 - RNA, 19 nt, Artificial Sequence
  Description of Artificial Sequence: Synthetic oligonucleotide
  Antisense strand to SEQ ID NO: 299908
uaaccuggagaagagguaa

SEQ ID NO: 299910 - RNA, 19 nt, Artificial Sequence
  Description of Artificial Sequence: Synthetic oligonucleotide
  Sense strand starting at position 1891 of SEQ ID NO: 3855
accucuucuccagguuaca

SEQ ID NO: 299911 - RNA, 19 nt, Artificial Sequence
  Description of Artificial Sequence: Synthetic oligonucleotide
  Antisense strand to SEQ ID NO: 299910
uguaaccuggagaagaggu

SEQ ID NO: 299912 - RNA, 19 nt, Artificial Sequence
  Description of Artificial Sequence: Synthetic oligonucleotide
  Sense strand starting at position 2068 of SEQ ID NO: 3855
ccuuauuuguagcuagcaa

SEQ ID NO: 299913 - RNA, 19 nt, Artificial Sequence
  Description of Artificial Sequence: Synthetic oligonucleotide
  Antisense strand to SEQ ID NO: 299912
uugcuagcuacaaauaagg

SEQ ID NO: 299914 - RNA, 19 nt, Artificial Sequence
  Description of Artificial Sequence: Synthetic oligonucleotide
  Sense strand starting at position 2177 of SEQ ID NO: 3855
gaagcaagauacuuuaugu

SEQ ID NO: 299915 - RNA, 19 nt, Artificial Sequence
  Description of Artificial Sequence: Synthetic oligonucleotide
  Antisense strand to SEQ ID NO: 299914
acauaaaguaucuugcuuc

SEQ ID NO: 299916 - RNA, 19 nt, Artificial Sequence
  Description of Artificial Sequence: Synthetic oligonucleotide
  Sense strand starting at position 2351 of SEQ ID NO: 3855
accuaagaagcauguuuau

SEQ ID NO: 299917 - RNA, 19 nt, Artificial Sequence
  Description of Artificial Sequence: Synthetic oligonucleotide
  Antisense strand to SEQ ID NO: 299916
auaaacaugcuucuuaggu

SEQ ID NO: 299918 - RNA, 19 nt, Artificial Sequence
  Description of Artificial Sequence: Synthetic oligonucleotide
  Sense strand starting at position 2363 of SEQ ID NO: 3855
uguuuauaaacaggaggua

SEQ ID NO: 299919 - RNA, 19 nt, Artificial Sequence
  Description of Artificial Sequence: Synthetic oligonucleotide
  Antisense strand to SEQ ID NO: 299918
uaccuccuguuuauaaaca

SEQ ID NO: 299920 - RNA, 19 nt, Artificial Sequence
  Description of Artificial Sequence: Synthetic oligonucleotide
  Sense strand starting at position 2404 of SEQ ID NO: 3855
gucuuuauggccuacagaa

SEQ ID NO: 299921 - RNA, 19 nt, Artificial Sequence
  Description of Artificial Sequence: Synthetic oligonucleotide
  Antisense strand to SEQ ID NO: 299920
uucuguaggccauaaagac

SEQ ID NO: 299922 - RNA, 19 nt, Artificial Sequence
  Description of Artificial Sequence: Synthetic oligonucleotide
  Sense strand starting at position 2406 of SEQ ID NO: 3855
cuuuauggccuacagaagu

SEQ ID NO: 299923 - RNA, 19 nt, Artificial Sequence
  Description of Artificial Sequence: Synthetic oligonucleotide
  Antisense strand to SEQ ID NO: 299922
acuucuguaggccauaaag

SEQ ID NO: 299924 - RNA, 19 nt, Artificial Sequence
  Description of Artificial Sequence: Synthetic oligonucleotide
  Sense strand starting at position 2430 of SEQ ID NO: 3855
ggaagaagcuuuguaguaa

SEQ ID NO: 299925 - RNA, 19 nt, Artificial Sequence
  Description of Artificial Sequence: Synthetic oligonucleotide
  Antisense strand to SEQ ID NO: 299924
uuacuacaaagcuucuucc

SEQ ID NO: 299926 - RNA, 19 nt, Artificial Sequence
  Description of Artificial Sequence: Synthetic oligonucleotide
  Sense strand starting at position 2476 of SEQ ID NO: 3855
gagcuuagguacucagaag

SEQ ID NO: 299927 - RNA, 19 nt, Artificial Sequence
  Description of Artificial Sequence: Synthetic oligonucleotide
  Antisense strand to SEQ ID NO: 299926
cuucugaguaccuaagcuc

SEQ ID NO: 299928 - RNA, 19 nt, Artificial Sequence
  Description of Artificial Sequence: Synthetic oligonucleotide
  Sense strand starting at position 2588 of SEQ ID NO: 3855
cgggaaaugcuuuacaaau

SEQ ID NO: 299929 - RNA, 19 nt, Artificial Sequence
  Description of Artificial Sequence: Synthetic oligonucleotide
  Antisense strand to SEQ ID NO: 299928
auuuguaaagcauuucccg

SEQ ID NO: 299930 - RNA, 19 nt, Artificial Sequence
  Description of Artificial Sequence: Synthetic oligonucleotide
  Sense strand starting at position 2669 of SEQ ID NO: 3855
gcaugugcaccacagacau

SEQ ID NO: 299931 - RNA, 19 nt, Artificial Sequence
  Description of Artificial Sequence: Synthetic oligonucleotide
  Antisense strand to SEQ ID NO: 299930
augucuguggugcacaugc

SEQ ID NO: 299932 - RNA, 19 nt, Artificial Sequence
  Description of Artificial Sequence: Synthetic oligonucleotide
  Sense strand starting at position 2713 of SEQ ID NO: 3855
cuggaaauguccuuagaca

SEQ ID NO: 299933 - RNA, 19 nt, Artificial Sequence
  Description of Artificial Sequence: Synthetic oligonucleotide
  Antisense strand to SEQ ID NO: 299932
ugucuaaggacauuuccag

SEQ ID NO: 299934 - RNA, 19 nt, Artificial Sequence
  Description of Artificial Sequence: Synthetic oligonucleotide
  Sense strand starting at position 2773 of SEQ ID NO: 3855
ggagaagguaaaugcucaa

SEQ ID NO: 299935 - RNA, 19 nt, Artificial Sequence
  Description of Artificial Sequence: Synthetic oligonucleotide
  Antisense strand to SEQ ID NO: 299934
uugagcauuuaccuucucc

SEQ ID NO: 299936 - RNA, 19 nt, Artificial Sequence
  Description of Artificial Sequence: Synthetic oligonucleotide
  Sense strand starting at position 2776 of SEQ ID NO: 3855
gaagguaaaugcucaaugu

SEQ ID NO: 299937 - RNA, 19 nt, Artificial Sequence
  Description of Artificial Sequence: Synthetic oligonucleotide
  Antisense strand to SEQ ID NO: 299936
acauugagcauuuaccuuc

SEQ ID NO: 299938 - RNA, 19 nt, Artificial Sequence
  Description of Artificial Sequence: Synthetic oligonucleotide
  Sense strand starting at position 2777 of SEQ ID NO: 3855
aagguaaaugcucaauguc

SEQ ID NO: 299939 - RNA, 19 nt, Artificial Sequence
  Description of Artificial Sequence: Synthetic oligonucleotide
  Antisense strand to SEQ ID NO: 299938
gacauugagcauuuaccuu

SEQ ID NO: 299940 - RNA, 19 nt, Artificial Sequence
  Description of Artificial Sequence: Synthetic oligonucleotide
  Sense strand starting at position 2889 of SEQ ID NO: 3855
uaaaguuacugagcuggau

SEQ ID NO: 299941 - RNA, 19 nt, Artificial Sequence
  Description of Artificial Sequence: Synthetic oligonucleotide
  Antisense strand to SEQ ID NO: 299940
auccagcucaguaacuuua

SEQ ID NO: 299942 - RNA, 19 nt, Artificial Sequence
  Description of Artificial Sequence: Synthetic oligonucleotide
  Sense strand starting at position 2892 of SEQ ID NO: 3855
aguuacugagcuggauaaa

SEQ ID NO: 299943 - RNA, 19 nt, Artificial Sequence
  Description of Artificial Sequence: Synthetic oligonucleotide
  Antisense strand to SEQ ID NO: 299942
uuuauccagcucaguaacu

SEQ ID NO: 299944 - RNA, 19 nt, Artificial Sequence
  Description of Artificial Sequence: Synthetic oligonucleotide
  Sense strand starting at position 3090 of SEQ ID NO: 3855
agauauugcuacuuaugau

SEQ ID NO: 299945 - RNA, 19 nt, Artificial Sequence
  Description of Artificial Sequence: Synthetic oligonucleotide
  Antisense strand to SEQ ID NO: 299944
aucauaaguagcaauaucu

SEQ ID NO: 299946 - RNA, 19 nt, Artificial Sequence
  Description of Artificial Sequence: Synthetic oligonucleotide
  Sense strand starting at position 3443 of SEQ ID NO: 3855
uccugucuagacugggaaa

SEQ ID NO: 299947 - RNA, 19 nt, Artificial Sequence
  Description of Artificial Sequence: Synthetic oligonucleotide
  Antisense strand to SEQ ID NO: 299946
uuucccagucuagacagga

SEQ ID NO: 299948 - RNA, 19 nt, Artificial Sequence
  Description of Artificial Sequence: Synthetic oligonucleotide
  Sense strand starting at position 3444 of SEQ ID NO: 3855
ccugucuagacugggaaau

SEQ ID NO: 299949 - RNA, 19 nt, Artificial Sequence
  Description of Artificial Sequence: Synthetic oligonucleotide
  Antisense strand to SEQ ID NO: 299948
auuucccagucuagacagg

SEQ ID NO: 299950 - RNA, 19 nt, Artificial Sequence
  Description of Artificial Sequence: Synthetic oligonucleotide
  Sense strand starting at position 3516 of SEQ ID NO: 3855
ggcauuugagcuuggcuga

SEQ ID NO: 299951 - RNA, 19 nt, Artificial Sequence
  Description of Artificial Sequence: Synthetic oligonucleotide
  Antisense strand to SEQ ID NO: 299950
ucagccaagcucaaaugcc

SEQ ID NO: 299952 - RNA, 19 nt, Artificial Sequence
  Description of Artificial Sequence: Synthetic oligonucleotide
  Sense strand starting at position 3631 of SEQ ID NO: 3855
gcuacaguuagagaagcuu

SEQ ID NO: 299953 - RNA, 19 nt, Artificial Sequence
  Description of Artificial Sequence: Synthetic oligonucleotide
  Antisense strand to SEQ ID NO: 299952
aagcuucucuaacuguagc

SEQ ID NO: 299954 - RNA, 19 nt, Artificial Sequence
  Description of Artificial Sequence: Synthetic oligonucleotide
  Sense strand starting at position 3696 of SEQ ID NO: 3855
ccaguucuagacuaggcaa

SEQ ID NO: 299955 - RNA, 19 nt, Artificial Sequence
  Description of Artificial Sequence: Synthetic oligonucleotide
  Antisense strand to SEQ ID NO: 299954
uugccuagucuagaacugg

SEQ ID NO: 299956 - RNA, 19 nt, Artificial Sequence
  Description of Artificial Sequence: Synthetic oligonucleotide
  Sense strand starting at position 3804 of SEQ ID NO: 3855
ggagucguaaaucaaguga

SEQ ID NO: 299957 - RNA, 19 nt, Artificial Sequence
  Description of Artificial Sequence: Synthetic oligonucleotide
  Antisense strand to SEQ ID NO: 299956
ucacuugauuuacgacucc

SEQ ID NO: 299958 - RNA, 19 nt, Artificial Sequence
  Description of Artificial Sequence: Synthetic oligonucleotide
  Sense strand starting at position 3808 of SEQ ID NO: 3855
ucguaaaucaagugacuag

SEQ ID NO: 299959 - RNA, 19 nt, Artificial Sequence
  Description of Artificial Sequence: Synthetic oligonucleotide
  Antisense strand to SEQ ID NO: 299958
cuagucacuugauuuacga

SEQ ID NO: 299960 - RNA, 19 nt, Artificial Sequence
  Description of Artificial Sequence: Synthetic oligonucleotide
  Sense strand starting at position 3818 of SEQ ID NO: 3855
agugacuagggcugacaaa

SEQ ID NO: 299961 - RNA, 19 nt, Artificial Sequence
  Description of Artificial Sequence: Synthetic oligonucleotide
  Antisense strand to SEQ ID NO: 299960
uuugucagcccuagucacu

SEQ ID NO: 299962 - RNA, 19 nt, Artificial Sequence
  Description of Artificial Sequence: Synthetic oligonucleotide
  Sense strand starting at position 3972 of SEQ ID NO: 3855
guuccuauucagggagaga

SEQ ID NO: 299963 - RNA, 19 nt, Artificial Sequence
  Description of Artificial Sequence: Synthetic oligonucleotide
  Antisense strand to SEQ ID NO: 299962
ucucucccugaauaggaac

SEQ ID NO: 299964 - RNA, 19 nt, Artificial Sequence
  Description of Artificial Sequence: Synthetic oligonucleotide
  Sense strand starting at position 89 of SEQ ID NO: 3854
gcaugaacaguuuauguua

SEQ ID NO: 299965 - RNA, 19 nt, Artificial Sequence
  Description of Artificial Sequence: Synthetic oligonucleotide
  Antisense strand to SEQ ID NO: 299964
uaacauaaacuguucaugc

SEQ ID NO: 299966 - RNA, 19 nt, Artificial Sequence
  Description of Artificial Sequence: Synthetic oligonucleotide
  Sense strand starting at position 163 of SEQ ID NO: 3854
ugaagagggacuuguccua

SEQ ID NO: 299967 - RNA, 19 nt, Artificial Sequence
  Description of Artificial Sequence: Synthetic oligonucleotide
  Antisense strand to SEQ ID NO: 299966
uaggacaagucccucuuca

SEQ ID NO: 299968 - RNA, 19 nt, Artificial Sequence
  Description of Artificial Sequence: Synthetic oligonucleotide
  Sense strand starting at position 170 of SEQ ID NO: 3854
ggacuuguccuaugaauua

SEQ ID NO: 299969 - RNA, 19 nt, Artificial Sequence
  Description of Artificial Sequence: Synthetic oligonucleotide
  Antisense strand to SEQ ID NO: 299968
uaauucauaggacaagucc

SEQ ID NO: 299970 - RNA, 19 nt, Artificial Sequence
  Description of Artificial Sequence: Synthetic oligonucleotide
  Sense strand starting at position 203 of SEQ ID NO: 3854
aucaaagcagauugguauu

SEQ ID NO: 299971 - RNA, 19 nt, Artificial Sequence
  Description of Artificial Sequence: Synthetic oligonucleotide
  Antisense strand to SEQ ID NO: 299970
aauaccaaucugcuuugau

SEQ ID NO: 299972 - RNA, 19 nt, Artificial Sequence
  Description of Artificial Sequence: Synthetic oligonucleotide
  Sense strand starting at position 248 of SEQ ID NO: 3854
agcaacagaugagucuaaa

SEQ ID NO: 299973 - RNA, 19 nt, Artificial Sequence
  Description of Artificial Sequence: Synthetic oligonucleotide
  Antisense strand to SEQ ID NO: 299972
uuuagacucaucuguugcu

SEQ ID NO: 299974 - RNA, 19 nt, Artificial Sequence
  Description of Artificial Sequence: Synthetic oligonucleotide
  Sense strand starting at position 275 of SEQ ID NO: 3854
gcauguacacuugagaauu

SEQ ID NO: 299975 - RNA, 19 nt, Artificial Sequence
  Description of Artificial Sequence: Synthetic oligonucleotide
  Antisense strand to SEQ ID NO: 299974
aauucucaaguguacaugc

SEQ ID NO: 299976 - RNA, 19 nt, Artificial Sequence
  Description of Artificial Sequence: Synthetic oligonucleotide
  Sense strand starting at position 277 of SEQ ID NO: 3854
auguacacuugagaauuua

SEQ ID NO: 299977 - RNA, 19 nt, Artificial Sequence
  Description of Artificial Sequence: Synthetic oligonucleotide
  Antisense strand to SEQ ID NO: 299976
uaaauucucaaguguacau

SEQ ID NO: 299978 - RNA, 19 nt, Artificial Sequence
  Description of Artificial Sequence: Synthetic oligonucleotide
  Sense strand starting at position 312 of SEQ ID NO: 3854
uuucuagucaguugggaga

SEQ ID NO: 299979 - RNA, 19 nt, Artificial Sequence
  Description of Artificial Sequence: Synthetic oligonucleotide
  Antisense strand to SEQ ID NO: 299978
ucucccaacugacuagaaa

SEQ ID NO: 299980 - RNA, 19 nt, Artificial Sequence
  Description of Artificial Sequence: Synthetic oligonucleotide
  Sense strand starting at position 604 of SEQ ID NO: 3854
ugaaaucuguagucuaaug

SEQ ID NO: 299981 - RNA, 19 nt, Artificial Sequence
  Description of Artificial Sequence: Synthetic oligonucleotide
  Antisense strand to SEQ ID NO: 299980
cauuagacuacagauuuca

SEQ ID NO: 299982 - RNA, 19 nt, Artificial Sequence
  Description of Artificial Sequence: Synthetic oligonucleotide
  Sense strand starting at position 667 of SEQ ID NO: 3854
ggacauaguaagugacagu

SEQ ID NO: 299983 - RNA, 19 nt, Artificial Sequence
  Description of Artificial Sequence: Synthetic oligonucleotide
  Antisense strand to SEQ ID NO: 299982
acugucacuuacuaugucc

SEQ ID NO: 299984 - RNA, 19 nt, Artificial Sequence
  Description of Artificial Sequence: Synthetic oligonucleotide
  Sense strand starting at position 677 of SEQ ID NO: 3854
agugacaguuaacuauaau

SEQ ID NO: 299985 - RNA, 19 nt, Artificial Sequence
  Description of Artificial Sequence: Synthetic oligonucleotide
  Antisense strand to SEQ ID NO: 299984
auuauaguuaacugucacu

SEQ ID NO: 299986 - RNA, 19 nt, Artificial Sequence
  Description of Artificial Sequence: Synthetic oligonucleotide
  Sense strand starting at position 798 of SEQ ID NO: 3854
uaucgaacaguaugcauaa

SEQ ID NO: 299987 - RNA, 19 nt, Artificial Sequence
  Description of Artificial Sequence: Synthetic oligonucleotide
  Antisense strand to SEQ ID NO: 299986
uuaugcauacuguucgaua

SEQ ID NO: 299988 - RNA, 19 nt, Artificial Sequence
  Description of Artificial Sequence: Synthetic oligonucleotide
  Sense strand starting at position 799 of SEQ ID NO: 3854
aucgaacaguaugcauaau

SEQ ID NO: 299989 - RNA, 19 nt, Artificial Sequence
  Description of Artificial Sequence: Synthetic oligonucleotide
  Antisense strand to SEQ ID NO: 299988
auuaugcauacuguucgau

SEQ ID NO: 299990 - RNA, 19 nt, Artificial Sequence
  Description of Artificial Sequence: Synthetic oligonucleotide
  Sense strand starting at position 846 of SEQ ID NO: 3854
ugguuaugcacauacagga

SEQ ID NO: 299991 - RNA, 19 nt, Artificial Sequence
  Description of Artificial Sequence: Synthetic oligonucleotide
  Antisense strand to SEQ ID NO: 299990
uccuguaugugcauaacca

SEQ ID NO: 299992 - RNA, 19 nt, Artificial Sequence
  Description of Artificial Sequence: Synthetic oligonucleotide
  Sense strand starting at position 1018 of SEQ ID NO: 3854
ucucguuuggguguguauu

SEQ ID NO: 299993 - RNA, 19 nt, Artificial Sequence
  Description of Artificial Sequence: Synthetic oligonucleotide
  Antisense strand to SEQ ID NO: 299992
aauacacacccaaacgaga

SEQ ID NO: 299994 - RNA, 19 nt, Artificial Sequence
  Description of Artificial Sequence: Synthetic oligonucleotide
  Sense strand starting at position 1141 of SEQ ID NO: 3854
ucuccugugaggugagaua

SEQ ID NO: 299995 - RNA, 19 nt, Artificial Sequence
  Description of Artificial Sequence: Synthetic oligonucleotide
  Antisense strand to SEQ ID NO: 299994
uaucucaccucacaggaga

SEQ ID NO: 299996 - RNA, 19 nt, Artificial Sequence
  Description of Artificial Sequence: Synthetic oligonucleotide
  Sense strand starting at position 1196 of SEQ ID NO: 3854
cucguuauagcauaacaau

SEQ ID NO: 299997 - RNA, 19 nt, Artificial Sequence
  Description of Artificial Sequence: Synthetic oligonucleotide
  Antisense strand to SEQ ID NO: 299996
auuguuaugcuauaacgag

SEQ ID NO: 299998 - RNA, 19 nt, Artificial Sequence
  Description of Artificial Sequence: Synthetic oligonucleotide
  Sense strand starting at position 1310 of SEQ ID NO: 3854
gcgugaggacucuaccuaa

SEQ ID NO: 299999 - RNA, 19 nt, Artificial Sequence
  Description of Artificial Sequence: Synthetic oligonucleotide
  Antisense strand to SEQ ID NO: 299998
uuagguagaguccucacgc

SEQ ID NO: 300000 - RNA, 19 nt, Artificial Sequence
  Description of Artificial Sequence: Synthetic oligonucleotide
  Sense strand starting at position 1521 of SEQ ID NO: 3854
gaguaaccacgauacuacu

SEQ ID NO: 300001 - RNA, 19 nt, Artificial Sequence
  Description of Artificial Sequence: Synthetic oligonucleotide
  Antisense strand to SEQ ID NO: 300000
aguaguaucgugguuacuc

SEQ ID NO: 300002 - RNA, 19 nt, Artificial Sequence
  Description of Artificial Sequence: Synthetic oligonucleotide
  Sense strand starting at position 1527 of SEQ ID NO: 3854
ccacgauacuacuugauuc

SEQ ID NO: 300003 - RNA, 19 nt, Artificial Sequence
  Description of Artificial Sequence: Synthetic oligonucleotide
  Antisense strand to SEQ ID NO: 300002
gaaucaaguaguaucgugg

SEQ ID NO: 300004 - RNA, 19 nt, Artificial Sequence
  Description of Artificial Sequence: Synthetic oligonucleotide
  Sense strand starting at position 2224 of SEQ ID NO: 3854
agagaauccuaugucaagu

SEQ ID NO: 300005 - RNA, 19 nt, Artificial Sequence
  Description of Artificial Sequence: Synthetic oligonucleotide
  Antisense strand to SEQ ID NO: 300004
acuugacauaggauucucu

SEQ ID NO: 300006 - RNA, 19 nt, Artificial Sequence
  Description of Artificial Sequence: Synthetic oligonucleotide
  Sense strand starting at position 2232 of SEQ ID NO: 3854
cuaugucaaguguaaaggu

SEQ ID NO: 300007 - RNA, 19 nt, Artificial Sequence
  Description of Artificial Sequence: Synthetic oligonucleotide
  Antisense strand to SEQ ID NO: 300006
accuuuacacuugacauag

SEQ ID NO: 300008 - RNA, 19 nt, Artificial Sequence
  Description of Artificial Sequence: Synthetic oligonucleotide
  Sense strand starting at position 2284 of SEQ ID NO: 3854
acgauaaauaaccgguaaa

SEQ ID NO: 300009 - RNA, 19 nt, Artificial Sequence
  Description of Artificial Sequence: Synthetic oligonucleotide
  Antisense strand to SEQ ID NO: 300008
uuuaccgguuauuuaucgu

SEQ ID NO: 300010 - RNA, 19 nt, Artificial Sequence
  Description of Artificial Sequence: Synthetic oligonucleotide
  Sense strand starting at position 2285 of SEQ ID NO: 3854
cgauaaauaaccgguaaau

SEQ ID NO: 300011 - RNA, 19 nt, Artificial Sequence
  Description of Artificial Sequence: Synthetic oligonucleotide
  Antisense strand to SEQ ID NO: 300010
auuuaccgguuauuuaucg

SEQ ID NO: 300012 - RNA, 19 nt, Artificial Sequence
  Description of Artificial Sequence: Synthetic oligonucleotide
  Sense strand starting at position 2330 of SEQ ID NO: 3854
cccuauauaugaguuagag

SEQ ID NO: 300013 - RNA, 19 nt, Artificial Sequence
  Description of Artificial Sequence: Synthetic oligonucleotide
  Antisense strand to SEQ ID NO: 300012
cucuaacucauauauaggg

SEQ ID NO: 300014 - RNA, 19 nt, Artificial Sequence
  Description of Artificial Sequence: Synthetic oligonucleotide
  Sense strand starting at position 2355 of SEQ ID NO: 3854
agaaucaccugagaaacaa

SEQ ID NO: 300015 - RNA, 19 nt, Artificial Sequence
  Description of Artificial Sequence: Synthetic oligonucleotide
  Antisense strand to SEQ ID NO: 300014
uuguuucucaggugauucu

SEQ ID NO: 300016 - RNA, 19 nt, Artificial Sequence
  Description of Artificial Sequence: Synthetic oligonucleotide
  Sense strand starting at position 2448 of SEQ ID NO: 3854
ucaacagauccucguaaau

SEQ ID NO: 300017 - RNA, 19 nt, Artificial Sequence
  Description of Artificial Sequence: Synthetic oligonucleotide
  Antisense strand to SEQ ID NO: 300016
auuuacgaggaucuguuga

SEQ ID NO: 300018 - RNA, 19 nt, Artificial Sequence
  Description of Artificial Sequence: Synthetic oligonucleotide
  Sense strand starting at position 2655 of SEQ ID NO: 3854
cuagccaugcaugaauauu

SEQ ID NO: 300019 - RNA, 19 nt, Artificial Sequence
  Description of Artificial Sequence: Synthetic oligonucleotide
  Antisense strand to SEQ ID NO: 300018
aauauucaugcauggcuag

SEQ ID NO: 300020 - RNA, 19 nt, Artificial Sequence
  Description of Artificial Sequence: Synthetic oligonucleotide
  Sense strand starting at position 2663 of SEQ ID NO: 3854
gcaugaauauuaucuaaga

SEQ ID NO: 300021 - RNA, 19 nt, Artificial Sequence
  Description of Artificial Sequence: Synthetic oligonucleotide
  Antisense strand to SEQ ID NO: 300020
ucuuagauaauauucaugc

SEQ ID NO: 300022 - RNA, 19 nt, Artificial Sequence
  Description of Artificial Sequence: Synthetic oligonucleotide
  Sense strand starting at position 2851 of SEQ ID NO: 3854
ucuaguuaucuugaauguu

SEQ ID NO: 300023 - RNA, 19 nt, Artificial Sequence
  Description of Artificial Sequence: Synthetic oligonucleotide
  Antisense strand to SEQ ID NO: 300022
aacauucaagauaacuaga

SEQ ID NO: 300024 - RNA, 19 nt, Artificial Sequence
  Description of Artificial Sequence: Synthetic oligonucleotide
  Sense strand starting at position 3466 of SEQ ID NO: 3854
ugacauaugacguggagga

SEQ ID NO: 300025 - RNA, 19 nt, Artificial Sequence
  Description of Artificial Sequence: Synthetic oligonucleotide
  Antisense strand to SEQ ID NO: 300024
uccuccacgucauauguca

SEQ ID NO: 300026 - RNA, 19 nt, Artificial Sequence
  Description of Artificial Sequence: Synthetic oligonucleotide
  Sense strand starting at position 3467 of SEQ ID NO: 3854
gacauaugacguggaggau

SEQ ID NO: 300027 - RNA, 19 nt, Artificial Sequence
  Description of Artificial Sequence: Synthetic oligonucleotide
  Antisense strand to SEQ ID NO: 300026
auccuccacgucauauguc

SEQ ID NO: 300028 - RNA, 19 nt, Artificial Sequence
  Description of Artificial Sequence: Synthetic oligonucleotide
  Sense strand starting at position 3790 of SEQ ID NO: 3854
ggaauuuaguaauauacuc

SEQ ID NO: 300029 - RNA, 19 nt, Artificial Sequence
  Description of Artificial Sequence: Synthetic oligonucleotide
  Antisense strand to SEQ ID NO: 300028
gaguauauuacuaaauucc

SEQ ID NO: 300030 - RNA, 19 nt, Artificial Sequence
  Description of Artificial Sequence: Synthetic oligonucleotide
  Sense strand starting at position 3795 of SEQ ID NO: 3854
uuaguaauauacucagagu

SEQ ID NO: 300031 - RNA, 19 nt, Artificial Sequence
  Description of Artificial Sequence: Synthetic oligonucleotide
  Antisense strand to SEQ ID NO: 300030
acucugaguauauuacuaa

SEQ ID NO: 300032 - RNA, 19 nt, Artificial Sequence
  Description of Artificial Sequence: Synthetic oligonucleotide
  Sense strand starting at position 3819 of SEQ ID NO: 3854
gcugaaugcauaggcauuu

SEQ ID NO: 300033 - RNA, 19 nt, Artificial Sequence
  Description of Artificial Sequence: Synthetic oligonucleotide
  Antisense strand to SEQ ID NO: 300032
aaaugccuaugcauucagc

SEQ ID NO: 300034 - RNA, 19 nt, Artificial Sequence
  Description of Artificial Sequence: Synthetic oligonucleotide
  Sense strand starting at position 3837 of SEQ ID NO: 3854
uugaaauauggaggugcua

SEQ ID NO: 300035 - RNA, 19 nt, Artificial Sequence
  Description of Artificial Sequence: Synthetic oligonucleotide
  Antisense strand to SEQ ID NO: 300034
uagcaccuccauauuucaa

SEQ ID NO: 300036 - RNA, 19 nt, Artificial Sequence
  Description of Artificial Sequence: Synthetic oligonucleotide
  Sense strand starting at position 3929 of SEQ ID NO: 3854
uguuguagucuugaagaga

SEQ ID NO: 300037 - RNA, 19 nt, Artificial Sequence
  Description of Artificial Sequence: Synthetic oligonucleotide
  Antisense strand to SEQ ID NO: 300036
ucucuucaagacuacaaca

SEQ ID NO: 300038 - RNA, 19 nt, Artificial Sequence
  Description of Artificial Sequence: Synthetic oligonucleotide
  Sense strand starting at position 3932 of SEQ ID NO: 3854
uguagucuugaagagaagu

SEQ ID NO: 300039 - RNA, 19 nt, Artificial Sequence
  Description of Artificial Sequence: Synthetic oligonucleotide
  Antisense strand to SEQ ID NO: 300038
acuucucuucaagacuaca

SEQ ID NO: 300040 - RNA, 19 nt, Artificial Sequence
  Description of Artificial Sequence: Synthetic oligonucleotide
  Sense strand starting at position 3942 of SEQ ID NO: 3854
aagagaaguggcugcauaa

SEQ ID NO: 300041 - RNA, 19 nt, Artificial Sequence
  Description of Artificial Sequence: Synthetic oligonucleotide
  Antisense strand to SEQ ID NO: 300040
uuaugcagccacuucucuu

SEQ ID NO: 300042 - RNA, 19 nt, Artificial Sequence
  Description of Artificial Sequence: Synthetic oligonucleotide
  Sense strand starting at position 3972 of SEQ ID NO: 3854
gugaaauaugcauaaaugc

SEQ ID NO: 300043 - RNA, 19 nt, Artificial Sequence
  Description of Artificial Sequence: Synthetic oligonucleotide
  Antisense strand to SEQ ID NO: 300042
gcauuuaugcauauuucac

SEQ ID NO: 300044 - RNA, 19 nt, Artificial Sequence
  Description of Artificial Sequence: Synthetic oligonucleotide
  Sense strand starting at position 26 of SEQ ID NO: 3856
cacuaacuagauggugaau

SEQ ID NO: 300045 - RNA, 19 nt, Artificial Sequence
  Description of Artificial Sequence: Synthetic oligonucleotide
  Antisense strand to SEQ ID NO: 300044
auucaccaucuaguuagug

SEQ ID NO: 300046 - RNA, 19 nt, Artificial Sequence
  Description of Artificial Sequence: Synthetic oligonucleotide
  Sense strand starting at position 37 of SEQ ID NO: 3856
uggugaaucggcugaaggu

SEQ ID NO: 300047 - RNA, 19 nt, Artificial Sequence
  Description of Artificial Sequence: Synthetic oligonucleotide
  Antisense strand to SEQ ID NO: 300046
accuucagccgauucacca

SEQ ID NO: 300048 - RNA, 19 nt, Artificial Sequence
  Description of Artificial Sequence: Synthetic oligonucleotide
  Sense strand starting at position 38 of SEQ ID NO: 3856
ggugaaucggcugaaggua

SEQ ID NO: 300049 - RNA, 19 nt, Artificial Sequence
  Description of Artificial Sequence: Synthetic oligonucleotide
  Antisense strand to SEQ ID NO: 300048
uaccuucagccgauucacc

SEQ ID NO: 300050 - RNA, 19 nt, Artificial Sequence
  Description of Artificial Sequence: Synthetic oligonucleotide
  Sense strand starting at position 99 of SEQ ID NO: 3856
cgagcagaguauccuacau

SEQ ID NO: 300051 - RNA, 19 nt, Artificial Sequence
  Description of Artificial Sequence: Synthetic oligonucleotide
  Antisense strand to SEQ ID NO: 300050
auguaggauacucugcucg

SEQ ID NO: 300052 - RNA, 19 nt, Artificial Sequence
  Description of Artificial Sequence: Synthetic oligonucleotide
  Sense strand starting at position 123 of SEQ ID NO: 3856
cacggaacucagugaauga

SEQ ID NO: 300053 - RNA, 19 nt, Artificial Sequence
  Description of Artificial Sequence: Synthetic oligonucleotide
  Antisense strand to SEQ ID NO: 300052
ucauucacugaguuccgug

SEQ ID NO: 300054 - RNA, 19 nt, Artificial Sequence
  Description of Artificial Sequence: Synthetic oligonucleotide
  Sense strand starting at position 134 of SEQ ID NO: 3856
gugaaugaaugagcguuua

SEQ ID NO: 300055 - RNA, 19 nt, Artificial Sequence
  Description of Artificial Sequence: Synthetic oligonucleotide
  Antisense strand to SEQ ID NO: 300054
uaaacgcucauucauucac

SEQ ID NO: 300056 - RNA, 19 nt, Artificial Sequence
  Description of Artificial Sequence: Synthetic oligonucleotide
  Sense strand starting at position 144 of SEQ ID NO: 3856
gagcguuuacgggacaaac

SEQ ID NO: 300057 - RNA, 19 nt, Artificial Sequence
  Description of Artificial Sequence: Synthetic oligonucleotide
  Antisense strand to SEQ ID NO: 300056
guuugucccguaaacgcuc

SEQ ID NO: 300058 - RNA, 19 nt, Artificial Sequence
  Description of Artificial Sequence: Synthetic oligonucleotide
  Sense strand starting at position 154 of SEQ ID NO: 3856
gggacaaacuguccuuaug

SEQ ID NO: 300059 - RNA, 19 nt, Artificial Sequence
  Description of Artificial Sequence: Synthetic oligonucleotide
  Antisense strand to SEQ ID NO: 300058
cauaaggacaguuuguccc

SEQ ID NO: 300060 - RNA, 19 nt, Artificial Sequence
  Description of Artificial Sequence: Synthetic oligonucleotide
  Sense strand starting at position 157 of SEQ ID NO: 3856
acaaacuguccuuauguuu

SEQ ID NO: 300061 - RNA, 19 nt, Artificial Sequence
  Description of Artificial Sequence: Synthetic oligonucleotide
  Antisense strand to SEQ ID NO: 300060
aaacauaaggacaguuugu

SEQ ID NO: 300062 - RNA, 19 nt, Artificial Sequence
  Description of Artificial Sequence: Synthetic oligonucleotide
  Sense strand starting at position 742 of SEQ ID NO: 3856
guuuccaggcguguuagua

SEQ ID NO: 300063 - RNA, 19 nt, Artificial Sequence
  Description of Artificial Sequence: Synthetic oligonucleotide
  Antisense strand to SEQ ID NO: 300062
uacuaacacgccuggaaac

SEQ ID NO: 300064 - RNA, 19 nt, Artificial Sequence
  Description of Artificial Sequence: Synthetic oligonucleotide
  Sense strand starting at position 754 of SEQ ID NO: 3856
guuaguacaucuccuacca

SEQ ID NO: 300065 - RNA, 19 nt, Artificial Sequence
  Description of Artificial Sequence: Synthetic oligonucleotide
  Antisense strand to SEQ ID NO: 300064
ugguaggagauguacuaac

SEQ ID NO: 300066 - RNA, 19 nt, Artificial Sequence
  Description of Artificial Sequence: Synthetic oligonucleotide
  Sense strand starting at position 794 of SEQ ID NO: 3856
ucccuagacuggucugaga

SEQ ID NO: 300067 - RNA, 19 nt, Artificial Sequence
  Description of Artificial Sequence: Synthetic oligonucleotide
  Antisense strand to SEQ ID NO: 300066
ucucagaccagucuaggga

SEQ ID NO: 300068 - RNA, 19 nt, Artificial Sequence
  Description of Artificial Sequence: Synthetic oligonucleotide
  Sense strand starting at position 878 of SEQ ID NO: 3856
cugucuucuccucaguaga

SEQ ID NO: 300069 - RNA, 19 nt, Artificial Sequence
  Description of Artificial Sequence: Synthetic oligonucleotide
  Antisense strand to SEQ ID NO: 300068
ucuacugaggagaagacag

SEQ ID NO: 300070 - RNA, 19 nt, Artificial Sequence
  Description of Artificial Sequence: Synthetic oligonucleotide
  Sense strand starting at position 880 of SEQ ID NO: 3856
gucuucuccucaguagaac

SEQ ID NO: 300071 - RNA, 19 nt, Artificial Sequence
  Description of Artificial Sequence: Synthetic oligonucleotide
  Antisense strand to SEQ ID NO: 300070
guucuacugaggagaagac

SEQ ID NO: 300072 - RNA, 19 nt, Artificial Sequence
  Description of Artificial Sequence: Synthetic oligonucleotide
  Sense strand starting at position 1031 of SEQ ID NO: 3856
cugcaaguuggcgucaauu

SEQ ID NO: 300073 - RNA, 19 nt, Artificial Sequence
  Description of Artificial Sequence: Synthetic oligonucleotide
  Antisense strand to SEQ ID NO: 300072
aauugacgccaacuugcag

SEQ ID NO: 300074 - RNA, 19 nt, Artificial Sequence
  Description of Artificial Sequence: Synthetic oligonucleotide
  Sense strand starting at position 1033 of SEQ ID NO: 3856
gcaaguuggcgucaauuuc

SEQ ID NO: 300075 - RNA, 19 nt, Artificial Sequence
  Description of Artificial Sequence: Synthetic oligonucleotide
  Antisense strand to SEQ ID NO: 300074
gaaauugacgccaacuugc

SEQ ID NO: 300076 - RNA, 19 nt, Artificial Sequence
  Description of Artificial Sequence: Synthetic oligonucleotide
  Sense strand starting at position 1191 of SEQ ID NO: 3856
agaucacgagcuugggauu

SEQ ID NO: 300077 - RNA, 19 nt, Artificial Sequence
  Description of Artificial Sequence: Synthetic oligonucleotide
  Antisense strand to SEQ ID NO: 300076
aaucccaagcucgugaucu

SEQ ID NO: 300078 - RNA, 19 nt, Artificial Sequence
  Description of Artificial Sequence: Synthetic oligonucleotide
  Sense strand starting at position 2643 of SEQ ID NO: 3856
cccggagguaccgauauua

SEQ ID NO: 300079 - RNA, 19 nt, Artificial Sequence
  Description of Artificial Sequence: Synthetic oligonucleotide
  Antisense strand to SEQ ID NO: 300078
uaauaucgguaccuccggg

SEQ ID NO: 300080 - RNA, 19 nt, Artificial Sequence
  Description of Artificial Sequence: Synthetic oligonucleotide
  Sense strand starting at position 2677 of SEQ ID NO: 3856
gugcccugcccagaaauaa

SEQ ID NO: 300081 - RNA, 19 nt, Artificial Sequence
  Description of Artificial Sequence: Synthetic oligonucleotide
  Antisense strand to SEQ ID NO: 300080
uuauuucugggcagggcac

SEQ ID NO: 300082 - RNA, 19 nt, Artificial Sequence
  Description of Artificial Sequence: Synthetic oligonucleotide
  Sense strand starting at position 2765 of SEQ ID NO: 3856
gaauguagaggucggguuu

SEQ ID NO: 300083 - RNA, 19 nt, Artificial Sequence
  Description of Artificial Sequence: Synthetic oligonucleotide
  Antisense strand to SEQ ID NO: 300082
aaacccgaccucuacauuc

SEQ ID NO: 300084 - RNA, 19 nt, Artificial Sequence
  Description of Artificial Sequence: Synthetic oligonucleotide
  Sense strand starting at position 2787 of SEQ ID NO: 3856
augcguauuuccucaagga

SEQ ID NO: 300085 - RNA, 19 nt, Artificial Sequence
  Description of Artificial Sequence: Synthetic oligonucleotide
  Antisense strand to SEQ ID NO: 300084
uccuugaggaaauacgcau

SEQ ID NO: 300086 - RNA, 19 nt, Artificial Sequence
  Description of Artificial Sequence: Synthetic oligonucleotide
  Sense strand starting at position 2974 of SEQ ID NO: 3856
acugauaacuaggacagaa

SEQ ID NO: 300087 - RNA, 19 nt, Artificial Sequence
  Description of Artificial Sequence: Synthetic oligonucleotide
  Antisense strand to SEQ ID NO: 300086
uucuguccuaguuaucagu

SEQ ID NO: 300088 - RNA, 19 nt, Artificial Sequence
  Description of Artificial Sequence: Synthetic oligonucleotide
  Sense strand starting at position 3323 of SEQ ID NO: 3856
ccgggaaucgcagagauga

SEQ ID NO: 300089 - RNA, 19 nt, Artificial Sequence
  Description of Artificial Sequence: Synthetic oligonucleotide
  Antisense strand to SEQ ID NO: 300088
ucaucucugcgauucccgg

SEQ ID NO: 300090 - RNA, 19 nt, Artificial Sequence
  Description of Artificial Sequence: Synthetic oligonucleotide
  Sense strand starting at position 3489 of SEQ ID NO: 3856
uugagaaagucccacagaa

SEQ ID NO: 300091 - RNA, 19 nt, Artificial Sequence
  Description of Artificial Sequence: Synthetic oligonucleotide
  Antisense strand to SEQ ID NO: 300090
uucugugggacuuucucaa

SEQ ID NO: 300092 - RNA, 19 nt, Artificial Sequence
  Description of Artificial Sequence: Synthetic oligonucleotide
  Sense strand starting at position 3514 of SEQ ID NO: 3856
uugcuagaucaguacuuga

SEQ ID NO: 300093 - RNA, 19 nt, Artificial Sequence
  Description of Artificial Sequence: Synthetic oligonucleotide
  Antisense strand to SEQ ID NO: 300092
ucaaguacugaucuagcaa

SEQ ID NO: 300094 - RNA, 19 nt, Artificial Sequence
  Description of Artificial Sequence: Synthetic oligonucleotide
  Sense strand starting at position 3517 of SEQ ID NO: 3856
cuagaucaguacuugaaua

SEQ ID NO: 300095 - RNA, 19 nt, Artificial Sequence
  Description of Artificial Sequence: Synthetic oligonucleotide
  Antisense strand to SEQ ID NO: 300094
uauucaaguacugaucuag

SEQ ID NO: 300096 - RNA, 19 nt, Artificial Sequence
  Description of Artificial Sequence: Synthetic oligonucleotide
  Sense strand starting at position 3531 of SEQ ID NO: 3856
gaauaugaguuugacagga

SEQ ID NO: 300097 - RNA, 19 nt, Artificial Sequence
  Description of Artificial Sequence: Synthetic oligonucleotide
  Antisense strand to SEQ ID NO: 300096
uccugucaaacucauauuc

SEQ ID NO: 300098 - RNA, 19 nt, Artificial Sequence
  Description of Artificial Sequence: Synthetic oligonucleotide
  Sense strand starting at position 3561 of SEQ ID NO: 3856
ggaggucaugucugguaaa

SEQ ID NO: 300099 - RNA, 19 nt, Artificial Sequence
  Description of Artificial Sequence: Synthetic oligonucleotide
  Antisense strand to SEQ ID NO: 300098
uuuaccagacaugaccucc

SEQ ID NO: 300100 - RNA, 19 nt, Artificial Sequence
  Description of Artificial Sequence: Synthetic oligonucleotide
  Sense strand starting at position 3588 of SEQ ID NO: 3856
cacagaugaccuugugguu

SEQ ID NO: 300101 - RNA, 19 nt, Artificial Sequence
  Description of Artificial Sequence: Synthetic oligonucleotide
  Antisense strand to SEQ ID NO: 300100
aaccacaaggucaucugug

SEQ ID NO: 300102 - RNA, 19 nt, Artificial Sequence
  Description of Artificial Sequence: Synthetic oligonucleotide
  Sense strand starting at position 3595 of SEQ ID NO: 3856
gaccuugugguuuagagca

SEQ ID NO: 300103 - RNA, 19 nt, Artificial Sequence
  Description of Artificial Sequence: Synthetic oligonucleotide
  Antisense strand to SEQ ID NO: 300102
ugcucuaaaccacaagguc

SEQ ID NO: 300104 - RNA, 19 nt, Artificial Sequence
  Description of Artificial Sequence: Synthetic oligonucleotide
  Sense strand starting at position 3671 of SEQ ID NO: 3856
ugaucuugaccuugggcaa

SEQ ID NO: 300105 - RNA, 19 nt, Artificial Sequence
  Description of Artificial Sequence: Synthetic oligonucleotide
  Antisense strand to SEQ ID NO: 300104
uugcccaaggucaagauca

SEQ ID NO: 300106 - RNA, 19 nt, Artificial Sequence
  Description of Artificial Sequence: Synthetic oligonucleotide
  Sense strand starting at position 3674 of SEQ ID NO: 3856
ucuugaccuugggcaagau

SEQ ID NO: 300107 - RNA, 19 nt, Artificial Sequence
  Description of Artificial Sequence: Synthetic oligonucleotide
  Antisense strand to SEQ ID NO: 300106
aucuugcccaaggucaaga

SEQ ID NO: 300108 - RNA, 19 nt, Artificial Sequence
  Description of Artificial Sequence: Synthetic oligonucleotide
  Sense strand starting at position 3699 of SEQ ID NO: 3856
cucaaugagccucaguuua

SEQ ID NO: 300109 - RNA, 19 nt, Artificial Sequence
  Description of Artificial Sequence: Synthetic oligonucleotide
  Antisense strand to SEQ ID NO: 300108
uaaacugaggcucauugag

SEQ ID NO: 300110 - RNA, 19 nt, Artificial Sequence
  Description of Artificial Sequence: Synthetic oligonucleotide
  Sense strand starting at position 3728 of SEQ ID NO: 3856
aaauuaggauaaucguagu

SEQ ID NO: 300111 - RNA, 19 nt, Artificial Sequence
  Description of Artificial Sequence: Synthetic oligonucleotide
  Antisense strand to SEQ ID NO: 300110
acuacgauuauccuaauuu

SEQ ID NO: 300112 - RNA, 19 nt, Artificial Sequence
  Description of Artificial Sequence: Synthetic oligonucleotide
  Sense strand starting at position 3778 of SEQ ID NO: 3856
uguaguaaguacuuagaac

SEQ ID NO: 300113 - RNA, 19 nt, Artificial Sequence
  Description of Artificial Sequence: Synthetic oligonucleotide
  Antisense strand to SEQ ID NO: 300112
guucuaaguacuuacuaca

SEQ ID NO: 300114 - RNA, 19 nt, Artificial Sequence
  Description of Artificial Sequence: Synthetic oligonucleotide
  Sense strand starting at position 3798 of SEQ ID NO: 3856
caaaguaaguacucaguga

SEQ ID NO: 300115 - RNA, 19 nt, Artificial Sequence
  Description of Artificial Sequence: Synthetic oligonucleotide
  Antisense strand to SEQ ID NO: 300114
ucacugaguacuuacuuug

SEQ ID NO: 300116 - RNA, 19 nt, Artificial Sequence
  Description of Artificial Sequence: Synthetic oligonucleotide
  Sense strand starting at position 3802 of SEQ ID NO: 3856
guaaguacucagugaacau

SEQ ID NO: 300117 - RNA, 19 nt, Artificial Sequence
  Description of Artificial Sequence: Synthetic oligonucleotide
  Antisense strand to SEQ ID NO: 300116
auguucacugaguacuuac

SEQ ID NO: 300118 - RNA, 19 nt, Artificial Sequence
  Description of Artificial Sequence: Synthetic oligonucleotide
  Sense strand starting at position 3965 of SEQ ID NO: 3856
gggaggguacuaugaggua

SEQ ID NO: 300119 - RNA, 19 nt, Artificial Sequence
  Description of Artificial Sequence: Synthetic oligonucleotide
  Antisense strand to SEQ ID NO: 300118
uaccucauaguacccuccc

SEQ ID NO: 300120 - RNA, 19 nt, Artificial Sequence
  Description of Artificial Sequence: Synthetic oligonucleotide
  Sense strand starting at position 3978 of SEQ ID NO: 3856
gagguacuguguuucuauu

SEQ ID NO: 300121 - RNA, 19 nt, Artificial Sequence
  Description of Artificial Sequence: Synthetic oligonucleotide
  Antisense strand to SEQ ID NO: 300120
aauagaaacacaguaccuc

SEQ ID NO: 300122 - RNA, 19 nt, Artificial Sequence
  Description of Artificial Sequence: Synthetic oligonucleotide
  Sense strand starting at position 3980 of SEQ ID NO: 3856
gguacuguguuucuauuau

SEQ ID NO: 300123 - RNA, 19 nt, Artificial Sequence
  Description of Artificial Sequence: Synthetic oligonucleotide
  Antisense strand to SEQ ID NO: 300122
auaauagaaacacaguacc

SEQ ID NO: 300124 - RNA, 19 nt, Artificial Sequence
  Description of Artificial Sequence: Synthetic oligonucleotide
  Sense strand starting at position 164 of SEQ ID NO: 3857
uuuagaagucauuggccga

SEQ ID NO: 300125 - RNA, 19 nt, Artificial Sequence
  Description of Artificial Sequence: Synthetic oligonucleotide
  Antisense strand to SEQ ID NO: 300124
ucggccaaugacuucuaaa

SEQ ID NO: 300126 - RNA, 19 nt, Artificial Sequence
  Description of Artificial Sequence: Synthetic oligonucleotide
  Sense strand starting at position 165 of SEQ ID NO: 3857
uuagaagucauuggccgau

SEQ ID NO: 300127 - RNA, 19 nt, Artificial Sequence
  Description of Artificial Sequence: Synthetic oligonucleotide
  Antisense strand to SEQ ID NO: 300126
aucggccaaugacuucuaa

SEQ ID NO: 300128 - RNA, 19 nt, Artificial Sequence
  Description of Artificial Sequence: Synthetic oligonucleotide
  Sense strand starting at position 169 of SEQ ID NO: 3857
aagucauuggccgaucguu

SEQ ID NO: 300129 - RNA, 19 nt, Artificial Sequence
  Description of Artificial Sequence: Synthetic oligonucleotide
  Antisense strand to SEQ ID NO: 300128
aacgaucggccaaugacuu

SEQ ID NO: 300130 - RNA, 19 nt, Artificial Sequence
  Description of Artificial Sequence: Synthetic oligonucleotide
  Sense strand starting at position 238 of SEQ ID NO: 3857
cuaaauaagugucaagaaa

SEQ ID NO: 300131 - RNA, 19 nt, Artificial Sequence
  Description of Artificial Sequence: Synthetic oligonucleotide
  Antisense strand to SEQ ID NO: 300130
uuucuugacacuuauuuag

SEQ ID NO: 300132 - RNA, 19 nt, Artificial Sequence
  Description of Artificial Sequence: Synthetic oligonucleotide
  Sense strand starting at position 421 of SEQ ID NO: 3857
aaggaaacaugcgccuauu

SEQ ID NO: 300133 - RNA, 19 nt, Artificial Sequence
  Description of Artificial Sequence: Synthetic oligonucleotide
  Antisense strand to SEQ ID NO: 300132
aauaggcgcauguuuccuu

SEQ ID NO: 300134 - RNA, 19 nt, Artificial Sequence
  Description of Artificial Sequence: Synthetic oligonucleotide
  Sense strand starting at position 427 of SEQ ID NO: 3857
acaugcgccuauuuaaauu

SEQ ID NO: 300135 - RNA, 19 nt, Artificial Sequence
  Description of Artificial Sequence: Synthetic oligonucleotide
  Antisense strand to SEQ ID NO: 300134
aauuuaaauaggcgcaugu

SEQ ID NO: 300136 - RNA, 19 nt, Artificial Sequence
  Description of Artificial Sequence: Synthetic oligonucleotide
  Sense strand starting at position 544 of SEQ ID NO: 3857
cagcaaauaggcgaauauu

SEQ ID NO: 300137 - RNA, 19 nt, Artificial Sequence
  Description of Artificial Sequence: Synthetic oligonucleotide
  Antisense strand to SEQ ID NO: 300136
aauauucgccuauuugcug

SEQ ID NO: 300138 - RNA, 19 nt, Artificial Sequence
  Description of Artificial Sequence: Synthetic oligonucleotide
  Sense strand starting at position 553 of SEQ ID NO: 3857
ggcgaauauuugcuggauu

SEQ ID NO: 300139 - RNA, 19 nt, Artificial Sequence
  Description of Artificial Sequence: Synthetic oligonucleotide
  Antisense strand to SEQ ID NO: 300138
aauccagcaaauauucgcc

SEQ ID NO: 300140 - RNA, 19 nt, Artificial Sequence
  Description of Artificial Sequence: Synthetic oligonucleotide
  Sense strand starting at position 643 of SEQ ID NO: 3857
gaagguggcaguuaucacu

SEQ ID NO: 300141 - RNA, 19 nt, Artificial Sequence
  Description of Artificial Sequence: Synthetic oligonucleotide
  Antisense strand to SEQ ID NO: 300140
agugauaacugccaccuuc

SEQ ID NO: 300142 - RNA, 19 nt, Artificial Sequence
  Description of Artificial Sequence: Synthetic oligonucleotide
  Sense strand starting at position 2075 of SEQ ID NO: 3857
guugguuuacgugagcacu

SEQ ID NO: 300143 - RNA, 19 nt, Artificial Sequence
  Description of Artificial Sequence: Synthetic oligonucleotide
  Antisense strand to SEQ ID NO: 300142
agugcucacguaaaccaac

SEQ ID NO: 300144 - RNA, 19 nt, Artificial Sequence
  Description of Artificial Sequence: Synthetic oligonucleotide
  Sense strand starting at position 2078 of SEQ ID NO: 3857
gguuuacgugagcacuguu

SEQ ID NO: 300145 - RNA, 19 nt, Artificial Sequence
  Description of Artificial Sequence: Synthetic oligonucleotide
  Antisense strand to SEQ ID NO: 300144
aacagugcucacguaaacc

SEQ ID NO: 300146 - RNA, 19 nt, Artificial Sequence
  Description of Artificial Sequence: Synthetic oligonucleotide
  Sense strand starting at position 2091 of SEQ ID NO: 3857
acuguugugucaccuuuaa

SEQ ID NO: 300147 - RNA, 19 nt, Artificial Sequence
  Description of Artificial Sequence: Synthetic oligonucleotide
  Antisense strand to SEQ ID NO: 300146
uuaaaggugacacaacagu

SEQ ID NO: 300148 - RNA, 19 nt, Artificial Sequence
  Description of Artificial Sequence: Synthetic oligonucleotide
  Sense strand starting at position 2103 of SEQ ID NO: 3857
ccuuuaagcucugugacca

SEQ ID NO: 300149 - RNA, 19 nt, Artificial Sequence
  Description of Artificial Sequence: Synthetic oligonucleotide
  Antisense strand to SEQ ID NO: 300148
uggucacagagcuuaaagg

SEQ ID NO: 300150 - RNA, 19 nt, Artificial Sequence
  Description of Artificial Sequence: Synthetic oligonucleotide
  Sense strand starting at position 2111 of SEQ ID NO: 3857
cucugugaccacugcuuua

SEQ ID NO: 300151 - RNA, 19 nt, Artificial Sequence
  Description of Artificial Sequence: Synthetic oligonucleotide
  Antisense strand to SEQ ID NO: 300150
uaaagcaguggucacagag

SEQ ID NO: 300152 - RNA, 19 nt, Artificial Sequence
  Description of Artificial Sequence: Synthetic oligonucleotide
  Sense strand starting at position 2144 of SEQ ID NO: 3857
uguggaauuuacuaaacau

SEQ ID NO: 300153 - RNA, 19 nt, Artificial Sequence
  Description of Artificial Sequence: Synthetic oligonucleotide
  Antisense strand to SEQ ID NO: 300152
auguuuaguaaauuccaca

SEQ ID NO: 300154 - RNA, 19 nt, Artificial Sequence
  Description of Artificial Sequence: Synthetic oligonucleotide
  Sense strand starting at position 2208 of SEQ ID NO: 3857
gagggaauucgacgaugcu

SEQ ID NO: 300155 - RNA, 19 nt, Artificial Sequence
  Description of Artificial Sequence: Synthetic oligonucleotide
  Antisense strand to SEQ ID NO: 300154
agcaucgucgaauucccuc

SEQ ID NO: 300156 - RNA, 19 nt, Artificial Sequence
  Description of Artificial Sequence: Synthetic oligonucleotide
  Sense strand starting at position 2209 of SEQ ID NO: 3857
agggaauucgacgaugcua

SEQ ID NO: 300157 - RNA, 19 nt, Artificial Sequence
  Description of Artificial Sequence: Synthetic oligonucleotide
  Antisense strand to SEQ ID NO: 300156
uagcaucgucgaauucccu

SEQ ID NO: 300158 - RNA, 19 nt, Artificial Sequence
  Description of Artificial Sequence: Synthetic oligonucleotide
  Sense strand starting at position 2239 of SEQ ID NO: 3857
ggaucugaaugagccaaau

SEQ ID NO: 300159 - RNA, 19 nt, Artificial Sequence
  Description of Artificial Sequence: Synthetic oligonucleotide
  Antisense strand to SEQ ID NO: 300158
auuuggcucauucagaucc

SEQ ID NO: 300160 - RNA, 19 nt, Artificial Sequence
  Description of Artificial Sequence: Synthetic oligonucleotide
  Sense strand starting at position 2312 of SEQ ID NO: 3857
gccucuucucgcccuguaa

SEQ ID NO: 300161 - RNA, 19 nt, Artificial Sequence
  Description of Artificial Sequence: Synthetic oligonucleotide
  Antisense strand to SEQ ID NO: 300160
uuacagggcgagaagaggc

SEQ ID NO: 300162 - RNA, 19 nt, Artificial Sequence
  Description of Artificial Sequence: Synthetic oligonucleotide
  Sense strand starting at position 2385 of SEQ ID NO: 3857
ggugcuuugugagcagauc

SEQ ID NO: 300163 - RNA, 19 nt, Artificial Sequence
  Description of Artificial Sequence: Synthetic oligonucleotide
  Antisense strand to SEQ ID NO: 300162
gaucugcucacaaagcacc

SEQ ID NO: 300164 - RNA, 19 nt, Artificial Sequence
  Description of Artificial Sequence: Synthetic oligonucleotide
  Sense strand starting at position 2549 of SEQ ID NO: 3857
caggaagguucgguuucuu

SEQ ID NO: 300165 - RNA, 19 nt, Artificial Sequence
  Description of Artificial Sequence: Synthetic oligonucleotide
  Antisense strand to SEQ ID NO: 300164
aagaaaccgaaccuuccug

SEQ ID NO: 300166 - RNA, 19 nt, Artificial Sequence
  Description of Artificial Sequence: Synthetic oligonucleotide
  Sense strand starting at position 2558 of SEQ ID NO: 3857
ucgguuucuugguugagua

SEQ ID NO: 300167 - RNA, 19 nt, Artificial Sequence
  Description of Artificial Sequence: Synthetic oligonucleotide
  Antisense strand to SEQ ID NO: 300166
uacucaaccaagaaaccga

SEQ ID NO: 300168 - RNA, 19 nt, Artificial Sequence
  Description of Artificial Sequence: Synthetic oligonucleotide
  Sense strand starting at position 2559 of SEQ ID NO: 3857
cgguuucuugguugaguac

SEQ ID NO: 300169 - RNA, 19 nt, Artificial Sequence
  Description of Artificial Sequence: Synthetic oligonucleotide
  Antisense strand to SEQ ID NO: 300168
guacucaaccaagaaaccg

SEQ ID NO: 300170 - RNA, 19 nt, Artificial Sequence
  Description of Artificial Sequence: Synthetic oligonucleotide
  Sense strand starting at position 2560 of SEQ ID NO: 3857
gguuucuugguugaguaca

SEQ ID NO: 300171 - RNA, 19 nt, Artificial Sequence
  Description of Artificial Sequence: Synthetic oligonucleotide
  Antisense strand to SEQ ID NO: 300170
uguacucaaccaagaaacc

SEQ ID NO: 300172 - RNA, 19 nt, Artificial Sequence
  Description of Artificial Sequence: Synthetic oligonucleotide
  Sense strand starting at position 2562 of SEQ ID NO: 3857
uuucuugguugaguacaga

SEQ ID NO: 300173 - RNA, 19 nt, Artificial Sequence
  Description of Artificial Sequence: Synthetic oligonucleotide
  Antisense strand to SEQ ID NO: 300172
ucuguacucaaccaagaaa

SEQ ID NO: 300174 - RNA, 19 nt, Artificial Sequence
  Description of Artificial Sequence: Synthetic oligonucleotide
  Sense strand starting at position 2614 of SEQ ID NO: 3857
uugaaauaaucauaagcug

SEQ ID NO: 300175 - RNA, 19 nt, Artificial Sequence
  Description of Artificial Sequence: Synthetic oligonucleotide
  Antisense strand to SEQ ID NO: 300174
cagcuuaugauuauuucaa

SEQ ID NO: 300176 - RNA, 19 nt, Artificial Sequence
  Description of Artificial Sequence: Synthetic oligonucleotide
  Sense strand starting at position 2637 of SEQ ID NO: 3857
gcugaaaugccuuaaugua

SEQ ID NO: 300177 - RNA, 19 nt, Artificial Sequence
  Description of Artificial Sequence: Synthetic oligonucleotide
  Antisense strand to SEQ ID NO: 300176
uacauuaaggcauuucagc

SEQ ID NO: 300178 - RNA, 19 nt, Artificial Sequence
  Description of Artificial Sequence: Synthetic oligonucleotide
  Sense strand starting at position 2645 of SEQ ID NO: 3857
gccuuaauguauuugcagu

SEQ ID NO: 300179 - RNA, 19 nt, Artificial Sequence
  Description of Artificial Sequence: Synthetic oligonucleotide
  Antisense strand to SEQ ID NO: 300178
acugcaaauacauuaaggc

SEQ ID NO: 300180 - RNA, 19 nt, Artificial Sequence
  Description of Artificial Sequence: Synthetic oligonucleotide
  Sense strand starting at position 2651 of SEQ ID NO: 3857
auguauuugcagugauguu

SEQ ID NO: 300181 - RNA, 19 nt, Artificial Sequence
  Description of Artificial Sequence: Synthetic oligonucleotide
  Antisense strand to SEQ ID NO: 300180
aacaucacugcaaauacau

SEQ ID NO: 300182 - RNA, 19 nt, Artificial Sequence
  Description of Artificial Sequence: Synthetic oligonucleotide
  Sense strand starting at position 2652 of SEQ ID NO: 3857
uguauuugcagugauguuu

SEQ ID NO: 300183 - RNA, 19 nt, Artificial Sequence
  Description of Artificial Sequence: Synthetic oligonucleotide
  Antisense strand to SEQ ID NO: 300182
aaacaucacugcaaauaca

SEQ ID NO: 300184 - RNA, 19 nt, Artificial Sequence
  Description of Artificial Sequence: Synthetic oligonucleotide
  Sense strand starting at position 2668 of SEQ ID NO: 3857
uuuaccggcucuuuauuaa

SEQ ID NO: 300185 - RNA, 19 nt, Artificial Sequence
  Description of Artificial Sequence: Synthetic oligonucleotide
  Antisense strand to SEQ ID NO: 300184
uuaauaaagagccgguaaa

SEQ ID NO: 300186 - RNA, 19 nt, Artificial Sequence
  Description of Artificial Sequence: Synthetic oligonucleotide
  Sense strand starting at position 2671 of SEQ ID NO: 3857
accggcucuuuauuaaaua

SEQ ID NO: 300187 - RNA, 19 nt, Artificial Sequence
  Description of Artificial Sequence: Synthetic oligonucleotide
  Antisense strand to SEQ ID NO: 300186
uauuuaauaaagagccggu

SEQ ID NO: 300188 - RNA, 19 nt, Artificial Sequence
  Description of Artificial Sequence: Synthetic oligonucleotide
  Sense strand starting at position 2698 of SEQ ID NO: 3857
gcgcacuugguugcagauu

SEQ ID NO: 300189 - RNA, 19 nt, Artificial Sequence
  Description of Artificial Sequence: Synthetic oligonucleotide
  Antisense strand to SEQ ID NO: 300188
aaucugcaaccaagugcgc

SEQ ID NO: 300190 - RNA, 19 nt, Artificial Sequence
  Description of Artificial Sequence: Synthetic oligonucleotide
  Sense strand starting at position 2707 of SEQ ID NO: 3857
guugcagauuaucugaaga

SEQ ID NO: 300191 - RNA, 19 nt, Artificial Sequence
  Description of Artificial Sequence: Synthetic oligonucleotide
  Antisense strand to SEQ ID NO: 300190
ucuucagauaaucugcaac

SEQ ID NO: 300192 - RNA, 19 nt, Artificial Sequence
  Description of Artificial Sequence: Synthetic oligonucleotide
  Sense strand starting at position 2773 of SEQ ID NO: 3857
uuuccuucucucugaggua

SEQ ID NO: 300193 - RNA, 19 nt, Artificial Sequence
  Description of Artificial Sequence: Synthetic oligonucleotide
  Antisense strand to SEQ ID NO: 300192
uaccucagagagaaggaaa

SEQ ID NO: 300194 - RNA, 19 nt, Artificial Sequence
  Description of Artificial Sequence: Synthetic oligonucleotide
  Sense strand starting at position 2848 of SEQ ID NO: 3857
ugcaaaugggcucgucaga

SEQ ID NO: 300195 - RNA, 19 nt, Artificial Sequence
  Description of Artificial Sequence: Synthetic oligonucleotide
  Antisense strand to SEQ ID NO: 300194
ucugacgagcccauuugca

SEQ ID NO: 300196 - RNA, 19 nt, Artificial Sequence
  Description of Artificial Sequence: Synthetic oligonucleotide
  Sense strand starting at position 2905 of SEQ ID NO: 3857
cacaguaaucgcuacugaa

SEQ ID NO: 300197 - RNA, 19 nt, Artificial Sequence
  Description of Artificial Sequence: Synthetic oligonucleotide
  Antisense strand to SEQ ID NO: 300196
uucaguagcgauuacugug

SEQ ID NO: 300198 - RNA, 19 nt, Artificial Sequence
  Description of Artificial Sequence: Synthetic oligonucleotide
  Sense strand starting at position 3490 of SEQ ID NO: 3857
ggcagcucccggagugaga

SEQ ID NO: 300199 - RNA, 19 nt, Artificial Sequence
  Description of Artificial Sequence: Synthetic oligonucleotide
  Antisense strand to SEQ ID NO: 300198
ucucacuccgggagcugcc

SEQ ID NO: 300200 - RNA, 19 nt, Artificial Sequence
  Description of Artificial Sequence: Synthetic oligonucleotide
  Sense strand starting at position 3744 of SEQ ID NO: 3857
gcagguuguugaccagaug

SEQ ID NO: 300201 - RNA, 19 nt, Artificial Sequence
  Description of Artificial Sequence: Synthetic oligonucleotide
  Antisense strand to SEQ ID NO: 300200
caucuggucaacaaccugc

SEQ ID NO: 300202 - RNA, 19 nt, Artificial Sequence
  Description of Artificial Sequence: Synthetic oligonucleotide
  Sense strand starting at position 3867 of SEQ ID NO: 3857
agcagucuuagcuguugaa

SEQ ID NO: 300203 - RNA, 19 nt, Artificial Sequence
  Description of Artificial Sequence: Synthetic oligonucleotide
  Antisense strand to SEQ ID NO: 300202
uucaacagcuaagacugcu

SEQ ID NO: 300204 - RNA, 19 nt, Artificial Sequence
  Description of Artificial Sequence: Synthetic oligonucleotide
  Sense strand starting at position 75 of SEQ ID NO: 3858
uugcaaagaugauuaaugu

SEQ ID NO: 300205 - RNA, 19 nt, Artificial Sequence
  Description of Artificial Sequence: Synthetic oligonucleotide
  Antisense strand to SEQ ID NO: 300204
acauuaaucaucuuugcaa

SEQ ID NO: 300206 - RNA, 19 nt, Artificial Sequence
  Description of Artificial Sequence: Synthetic oligonucleotide
  Sense strand starting at position 76 of SEQ ID NO: 3858
ugcaaagaugauuaauguu

SEQ ID NO: 300207 - RNA, 19 nt, Artificial Sequence
  Description of Artificial Sequence: Synthetic oligonucleotide
  Antisense strand to SEQ ID NO: 300206
aacauuaaucaucuuugca

SEQ ID NO: 300208 - RNA, 19 nt, Artificial Sequence
  Description of Artificial Sequence: Synthetic oligonucleotide
  Sense strand starting at position 125 of SEQ ID NO: 3858
agaaguaaggcucauguua

SEQ ID NO: 300209 - RNA, 19 nt, Artificial Sequence
  Description of Artificial Sequence: Synthetic oligonucleotide
  Antisense strand to SEQ ID NO: 300208
uaacaugagccuuacuucu

SEQ ID NO: 300210 - RNA, 19 nt, Artificial Sequence
  Description of Artificial Sequence: Synthetic oligonucleotide
  Sense strand starting at position 281 of SEQ ID NO: 3858
guuguucuccuggaggaca

SEQ ID NO: 300211 - RNA, 19 nt, Artificial Sequence
  Description of Artificial Sequence: Synthetic oligonucleotide
  Antisense strand to SEQ ID NO: 300210
uguccuccaggagaacaac

SEQ ID NO: 300212 - RNA, 19 nt, Artificial Sequence
  Description of Artificial Sequence: Synthetic oligonucleotide
  Sense strand starting at position 368 of SEQ ID NO: 3858
cuaggacucuccuugguau

SEQ ID NO: 300213 - RNA, 19 nt, Artificial Sequence
  Description of Artificial Sequence: Synthetic oligonucleotide
  Antisense strand to SEQ ID NO: 300212
auaccaaggagaguccuag

SEQ ID NO: 300214 - RNA, 19 nt, Artificial Sequence
  Description of Artificial Sequence: Synthetic oligonucleotide
  Sense strand starting at position 369 of SEQ ID NO: 3858
uaggacucuccuugguaua

SEQ ID NO: 300215 - RNA, 19 nt, Artificial Sequence
  Description of Artificial Sequence: Synthetic oligonucleotide
  Antisense strand to SEQ ID NO: 300214
uauaccaaggagaguccua

SEQ ID NO: 300216 - RNA, 19 nt, Artificial Sequence
  Description of Artificial Sequence: Synthetic oligonucleotide
  Sense strand starting at position 370 of SEQ ID NO: 3858
aggacucuccuugguauaa

SEQ ID NO: 300217 - RNA, 19 nt, Artificial Sequence
  Description of Artificial Sequence: Synthetic oligonucleotide
  Antisense strand to SEQ ID NO: 300216
uuauaccaaggagaguccu

SEQ ID NO: 300218 - RNA, 19 nt, Artificial Sequence
  Description of Artificial Sequence: Synthetic oligonucleotide
  Sense strand starting at position 371 of SEQ ID NO: 3858
ggacucuccuugguauaau

SEQ ID NO: 300219 - RNA, 19 nt, Artificial Sequence
  Description of Artificial Sequence: Synthetic oligonucleotide
  Antisense strand to SEQ ID NO: 300218
auuauaccaaggagagucc

SEQ ID NO: 300220 - RNA, 19 nt, Artificial Sequence
  Description of Artificial Sequence: Synthetic oligonucleotide
  Sense strand starting at position 410 of SEQ ID NO: 3858
cuuggaaccugcuacauuu

SEQ ID NO: 300221 - RNA, 19 nt, Artificial Sequence
  Description of Artificial Sequence: Synthetic oligonucleotide
  Antisense strand to SEQ ID NO: 300220
aaauguagcagguuccaag

SEQ ID NO: 300222 - RNA, 19 nt, Artificial Sequence
  Description of Artificial Sequence: Synthetic oligonucleotide
  Sense strand starting at position 474 of SEQ ID NO: 3858
ggaggugcauucccaugaa

SEQ ID NO: 300223 - RNA, 19 nt, Artificial Sequence
  Description of Artificial Sequence: Synthetic oligonucleotide
  Antisense strand to SEQ ID NO: 300222
uucaugggaaugcaccucc

SEQ ID NO: 300224 - RNA, 19 nt, Artificial Sequence
  Description of Artificial Sequence: Synthetic oligonucleotide
  Sense strand starting at position 503 of SEQ ID NO: 3858
gccacacucccaugagaaa

SEQ ID NO: 300225 - RNA, 19 nt, Artificial Sequence
  Description of Artificial Sequence: Synthetic oligonucleotide
  Antisense strand to SEQ ID NO: 300224
uuucucaugggaguguggc

SEQ ID NO: 300226 - RNA, 19 nt, Artificial Sequence
  Description of Artificial Sequence: Synthetic oligonucleotide
  Sense strand starting at position 1007 of SEQ ID NO: 3858
gacuucugagagcguuuga

SEQ ID NO: 300227 - RNA, 19 nt, Artificial Sequence
  Description of Artificial Sequence: Synthetic oligonucleotide
  Antisense strand to SEQ ID NO: 300226
ucaaacgcucucagaaguc

SEQ ID NO: 300228 - RNA, 19 nt, Artificial Sequence
  Description of Artificial Sequence: Synthetic oligonucleotide
  Sense strand starting at position 1172 of SEQ ID NO: 3858
ggcagagcuuggcucagaa

SEQ ID NO: 300229 - RNA, 19 nt, Artificial Sequence
  Description of Artificial Sequence: Synthetic oligonucleotide
  Antisense strand to SEQ ID NO: 300228
uucugagccaagcucugcc

SEQ ID NO: 300230 - RNA, 19 nt, Artificial Sequence
  Description of Artificial Sequence: Synthetic oligonucleotide
  Sense strand starting at position 1200 of SEQ ID NO: 3858
cuguguucucucuacuacu

SEQ ID NO: 300231 - RNA, 19 nt, Artificial Sequence
  Description of Artificial Sequence: Synthetic oligonucleotide
  Antisense strand to SEQ ID NO: 300230
aguaguagagagaacacag

SEQ ID NO: 300232 - RNA, 19 nt, Artificial Sequence
  Description of Artificial Sequence: Synthetic oligonucleotide
  Sense strand starting at position 1447 of SEQ ID NO: 3858
cucagugaccuugggaaau

SEQ ID NO: 300233 - RNA, 19 nt, Artificial Sequence
  Description of Artificial Sequence: Synthetic oligonucleotide
  Antisense strand to SEQ ID NO: 300232
auuucccaaggucacugag

SEQ ID NO: 300234 - RNA, 19 nt, Artificial Sequence
  Description of Artificial Sequence: Synthetic oligonucleotide
  Sense strand starting at position 1487 of SEQ ID NO: 3858
caguuuccucaagagaagu

SEQ ID NO: 300235 - RNA, 19 nt, Artificial Sequence
  Description of Artificial Sequence: Synthetic oligonucleotide
  Antisense strand to SEQ ID NO: 300234
acuucucuugaggaaacug

SEQ ID NO: 300236 - RNA, 19 nt, Artificial Sequence
  Description of Artificial Sequence: Synthetic oligonucleotide
  Sense strand starting at position 1493 of SEQ ID NO: 3858
ccucaagagaagugaguua

SEQ ID NO: 300237 - RNA, 19 nt, Artificial Sequence
  Description of Artificial Sequence: Synthetic oligonucleotide
  Antisense strand to SEQ ID NO: 300236
uaacucacuucucuugagg

SEQ ID NO: 300238 - RNA, 19 nt, Artificial Sequence
  Description of Artificial Sequence: Synthetic oligonucleotide
  Sense strand starting at position 1625 of SEQ ID NO: 3858
gguaauacugagugaggcu

SEQ ID NO: 300239 - RNA, 19 nt, Artificial Sequence
  Description of Artificial Sequence: Synthetic oligonucleotide
  Antisense strand to SEQ ID NO: 300238
agccucacucaguauuacc

SEQ ID NO: 300240 - RNA, 19 nt, Artificial Sequence
  Description of Artificial Sequence: Synthetic oligonucleotide
  Sense strand starting at position 2356 of SEQ ID NO: 3858
gaaggcugccugcauacau

SEQ ID NO: 300241 - RNA, 19 nt, Artificial Sequence
  Description of Artificial Sequence: Synthetic oligonucleotide
  Antisense strand to SEQ ID NO: 300240
auguaugcaggcagccuuc

SEQ ID NO: 300242 - RNA, 19 nt, Artificial Sequence
  Description of Artificial Sequence: Synthetic oligonucleotide
  Sense strand starting at position 2365 of SEQ ID NO: 3858
cugcauacaucccugaaag

SEQ ID NO: 300243 - RNA, 19 nt, Artificial Sequence
  Description of Artificial Sequence: Synthetic oligonucleotide
  Antisense strand to SEQ ID NO: 300242
cuuucagggauguaugcag

SEQ ID NO: 300244 - RNA, 19 nt, Artificial Sequence
  Description of Artificial Sequence: Synthetic oligonucleotide
  Sense strand starting at position 2458 of SEQ ID NO: 3858
cgauuuccacucuguguuu

SEQ ID NO: 300245 - RNA, 19 nt, Artificial Sequence
  Description of Artificial Sequence: Synthetic oligonucleotide
  Antisense strand to SEQ ID NO: 300244
aaacacagaguggaaaucg

SEQ ID NO: 300246 - RNA, 19 nt, Artificial Sequence
  Description of Artificial Sequence: Synthetic oligonucleotide
  Sense strand starting at position 2460 of SEQ ID NO: 3858
auuuccacucuguguuuaa

SEQ ID NO: 300247 - RNA, 19 nt, Artificial Sequence
  Description of Artificial Sequence: Synthetic oligonucleotide
  Antisense strand to SEQ ID NO: 300246
uuaaacacagaguggaaau

SEQ ID NO: 300248 - RNA, 19 nt, Artificial Sequence
  Description of Artificial Sequence: Synthetic oligonucleotide
  Sense strand starting at position 2461 of SEQ ID NO: 3858
uuuccacucuguguuuaaa

SEQ ID NO: 300249 - RNA, 19 nt, Artificial Sequence
  Description of Artificial Sequence: Synthetic oligonucleotide
  Antisense strand to SEQ ID NO: 300248
uuuaaacacagaguggaaa

SEQ ID NO: 300250 - RNA, 19 nt, Artificial Sequence
  Description of Artificial Sequence: Synthetic oligonucleotide
  Sense strand starting at position 2463 of SEQ ID NO: 3858
uccacucuguguuuaaauu

SEQ ID NO: 300251 - RNA, 19 nt, Artificial Sequence
  Description of Artificial Sequence: Synthetic oligonucleotide
  Antisense strand to SEQ ID NO: 300250
aauuuaaacacagagugga

SEQ ID NO: 300252 - RNA, 19 nt, Artificial Sequence
  Description of Artificial Sequence: Synthetic oligonucleotide
  Sense strand starting at position 2602 of SEQ ID NO: 3858
ccuguuugauugguacaau

SEQ ID NO: 300253 - RNA, 19 nt, Artificial Sequence
  Description of Artificial Sequence: Synthetic oligonucleotide
  Antisense strand to SEQ ID NO: 300252
auuguaccaaucaaacagg

SEQ ID NO: 300254 - RNA, 19 nt, Artificial Sequence
  Description of Artificial Sequence: Synthetic oligonucleotide
  Sense strand starting at position 2605 of SEQ ID NO: 3858
guuugauugguacaaucac

SEQ ID NO: 300255 - RNA, 19 nt, Artificial Sequence
  Description of Artificial Sequence: Synthetic oligonucleotide
  Antisense strand to SEQ ID NO: 300254
gugauuguaccaaucaaac

SEQ ID NO: 300256 - RNA, 19 nt, Artificial Sequence
  Description of Artificial Sequence: Synthetic oligonucleotide
  Sense strand starting at position 2630 of SEQ ID NO: 3858
gcuacuuucccagaaguuc

SEQ ID NO: 300257 - RNA, 19 nt, Artificial Sequence
  Description of Artificial Sequence: Synthetic oligonucleotide
  Antisense strand to SEQ ID NO: 300256
gaacuucugggaaaguagc

SEQ ID NO: 300258 - RNA, 19 nt, Artificial Sequence
  Description of Artificial Sequence: Synthetic oligonucleotide
  Sense strand starting at position 2636 of SEQ ID NO: 3858
uucccagaaguucgauauu

SEQ ID NO: 300259 - RNA, 19 nt, Artificial Sequence
  Description of Artificial Sequence: Synthetic oligonucleotide
  Antisense strand to SEQ ID NO: 300258
aauaucgaacuucugggaa

SEQ ID NO: 300260 - RNA, 19 nt, Artificial Sequence
  Description of Artificial Sequence: Synthetic oligonucleotide
  Sense strand starting at position 2655 of SEQ ID NO: 3858
cauagauuacugugugcca

SEQ ID NO: 300261 - RNA, 19 nt, Artificial Sequence
  Description of Artificial Sequence: Synthetic oligonucleotide
  Antisense strand to SEQ ID NO: 300260
uggcacacaguaaucuaug

SEQ ID NO: 300262 - RNA, 19 nt, Artificial Sequence
  Description of Artificial Sequence: Synthetic oligonucleotide
  Sense strand starting at position 2733 of SEQ ID NO: 3858
ucaguuuagauguguggga

SEQ ID NO: 300263 - RNA, 19 nt, Artificial Sequence
  Description of Artificial Sequence: Synthetic oligonucleotide
  Antisense strand to SEQ ID NO: 300262
ucccacacaucuaaacuga

SEQ ID NO: 300264 - RNA, 19 nt, Artificial Sequence
  Description of Artificial Sequence: Synthetic oligonucleotide
  Sense strand starting at position 2734 of SEQ ID NO: 3858
caguuuagaugugugggaa

SEQ ID NO: 300265 - RNA, 19 nt, Artificial Sequence
  Description of Artificial Sequence: Synthetic oligonucleotide
  Antisense strand to SEQ ID NO: 300264
uucccacacaucuaaacug

SEQ ID NO: 300266 - RNA, 19 nt, Artificial Sequence
  Description of Artificial Sequence: Synthetic oligonucleotide
  Sense strand starting at position 2735 of SEQ ID NO: 3858
aguuuagaugugugggaac

SEQ ID NO: 300267 - RNA, 19 nt, Artificial Sequence
  Description of Artificial Sequence: Synthetic oligonucleotide
  Antisense strand to SEQ ID NO: 300266
guucccacacaucuaaacu

SEQ ID NO: 300268 - RNA, 19 nt, Artificial Sequence
  Description of Artificial Sequence: Synthetic oligonucleotide
  Sense strand starting at position 2742 of SEQ ID NO: 3858
augugugggaacugguaua

SEQ ID NO: 300269 - RNA, 19 nt, Artificial Sequence
  Description of Artificial Sequence: Synthetic oligonucleotide
  Antisense strand to SEQ ID NO: 300268
uauaccaguucccacacau

SEQ ID NO: 300270 - RNA, 19 nt, Artificial Sequence
  Description of Artificial Sequence: Synthetic oligonucleotide
  Sense strand starting at position 2755 of SEQ ID NO: 3858
gguauacugggaggugaaa

SEQ ID NO: 300271 - RNA, 19 nt, Artificial Sequence
  Description of Artificial Sequence: Synthetic oligonucleotide
  Antisense strand to SEQ ID NO: 300270
uuucaccucccaguauacc

SEQ ID NO: 300272 - RNA, 19 nt, Artificial Sequence
  Description of Artificial Sequence: Synthetic oligonucleotide
  Sense strand starting at position 2991 of SEQ ID NO: 3858
ggcugaaggaaucgcgaau

SEQ ID NO: 300273 - RNA, 19 nt, Artificial Sequence
  Description of Artificial Sequence: Synthetic oligonucleotide
  Antisense strand to SEQ ID NO: 300272
auucgcgauuccuucagcc

SEQ ID NO: 300274 - RNA, 19 nt, Artificial Sequence
  Description of Artificial Sequence: Synthetic oligonucleotide
  Sense strand starting at position 3133 of SEQ ID NO: 3858
guggauguacagugagaaa

SEQ ID NO: 300275 - RNA, 19 nt, Artificial Sequence
  Description of Artificial Sequence: Synthetic oligonucleotide
  Antisense strand to SEQ ID NO: 300274
uuucucacuguacauccac

SEQ ID NO: 300276 - RNA, 19 nt, Artificial Sequence
  Description of Artificial Sequence: Synthetic oligonucleotide
  Sense strand starting at position 3601 of SEQ ID NO: 3858
cuggcuaagaugggugaaa

SEQ ID NO: 300277 - RNA, 19 nt, Artificial Sequence
  Description of Artificial Sequence: Synthetic oligonucleotide
  Antisense strand to SEQ ID NO: 300276
uuucacccaucuuagccag

SEQ ID NO: 300278 - RNA, 19 nt, Artificial Sequence
  Description of Artificial Sequence: Synthetic oligonucleotide
  Sense strand starting at position 3853 of SEQ ID NO: 3858
guagguagguuaguagaaa

SEQ ID NO: 300279 - RNA, 19 nt, Artificial Sequence
  Description of Artificial Sequence: Synthetic oligonucleotide
  Antisense strand to SEQ ID NO: 300278
uuucuacuaaccuaccuac

SEQ ID NO: 300280 - RNA, 19 nt, Artificial Sequence
  Description of Artificial Sequence: Synthetic oligonucleotide
  Sense strand starting at position 3913 of SEQ ID NO: 3858
uuggcaucuccauacuaug

SEQ ID NO: 300281 - RNA, 19 nt, Artificial Sequence
  Description of Artificial Sequence: Synthetic oligonucleotide
  Antisense strand to SEQ ID NO: 300280
cauaguauggagaugccaa

SEQ ID NO: 300282 - RNA, 19 nt, Artificial Sequence
  Description of Artificial Sequence: Synthetic oligonucleotide
  Sense strand starting at position 3956 of SEQ ID NO: 3858
augacagcccuuuguuaaa

SEQ ID NO: 300283 - RNA, 19 nt, Artificial Sequence
  Description of Artificial Sequence: Synthetic oligonucleotide
  Antisense strand to SEQ ID NO: 300282
uuuaacaaagggcugucau

SEQ ID NO: 300284 - RNA, 19 nt, Artificial Sequence
  Description of Artificial Sequence: Synthetic oligonucleotide
  Sense strand starting at position 287 of SEQ ID NO: 3859
cccggucaauuugcuuaau

SEQ ID NO: 300285 - RNA, 19 nt, Artificial Sequence
  Description of Artificial Sequence: Synthetic oligonucleotide
  Antisense strand to SEQ ID NO: 300284
auuaagcaaauugaccggg

SEQ ID NO: 300286 - RNA, 19 nt, Artificial Sequence
  Description of Artificial Sequence: Synthetic oligonucleotide
  Sense strand starting at position 289 of SEQ ID NO: 3859
cggucaauuugcuuaauca

SEQ ID NO: 300287 - RNA, 19 nt, Artificial Sequence
  Description of Artificial Sequence: Synthetic oligonucleotide
  Antisense strand to SEQ ID NO: 300286
ugauuaagcaaauugaccg

SEQ ID NO: 300288 - RNA, 19 nt, Artificial Sequence
  Description of Artificial Sequence: Synthetic oligonucleotide
  Sense strand starting at position 366 of SEQ ID NO: 3859
cgcagcgcucgcuuuaaau

SEQ ID NO: 300289 - RNA, 19 nt, Artificial Sequence
  Description of Artificial Sequence: Synthetic oligonucleotide
  Antisense strand to SEQ ID NO: 300288
auuuaaagcgagcgcugcg

SEQ ID NO: 300290 - RNA, 19 nt, Artificial Sequence
  Description of Artificial Sequence: Synthetic oligonucleotide
  Sense strand starting at position 442 of SEQ ID NO: 3859
uugggucgccucgaaauca

SEQ ID NO: 300291 - RNA, 19 nt, Artificial Sequence
  Description of Artificial Sequence: Synthetic oligonucleotide
  Antisense strand to SEQ ID NO: 300290
ugauuucgaggcgacccaa

SEQ ID NO: 300292 - RNA, 19 nt, Artificial Sequence
  Description of Artificial Sequence: Synthetic oligonucleotide
  Sense strand starting at position 451 of SEQ ID NO: 3859
cucgaaaucaucuacgcga

SEQ ID NO: 300293 - RNA, 19 nt, Artificial Sequence
  Description of Artificial Sequence: Synthetic oligonucleotide
  Antisense strand to SEQ ID NO: 300292
ucgcguagaugauuucgag

SEQ ID NO: 300294 - RNA, 19 nt, Artificial Sequence
  Description of Artificial Sequence: Synthetic oligonucleotide
  Sense strand starting at position 454 of SEQ ID NO: 3859
gaaaucaucuacgcgaguu

SEQ ID NO: 300295 - RNA, 19 nt, Artificial Sequence
  Description of Artificial Sequence: Synthetic oligonucleotide
  Antisense strand to SEQ ID NO: 300294
aacucgcguagaugauuuc

SEQ ID NO: 300296 - RNA, 19 nt, Artificial Sequence
  Description of Artificial Sequence: Synthetic oligonucleotide
  Sense strand starting at position 456 of SEQ ID NO: 3859
aaucaucuacgcgaguuua

SEQ ID NO: 300297 - RNA, 19 nt, Artificial Sequence
  Description of Artificial Sequence: Synthetic oligonucleotide
  Antisense strand to SEQ ID NO: 300296
uaaacucgcguagaugauu

SEQ ID NO: 300298 - RNA, 19 nt, Artificial Sequence
  Description of Artificial Sequence: Synthetic oligonucleotide
  Sense strand starting at position 481 of SEQ ID NO: 3859
ggagcuagcuccgcagaaa

SEQ ID NO: 300299 - RNA, 19 nt, Artificial Sequence
  Description of Artificial Sequence: Synthetic oligonucleotide
  Antisense strand to SEQ ID NO: 300298
uuucugcggagcuagcucc

SEQ ID NO: 300300 - RNA, 19 nt, Artificial Sequence
  Description of Artificial Sequence: Synthetic oligonucleotide
  Sense strand starting at position 544 of SEQ ID NO: 3859
ugaauaacccgccacgaaa

SEQ ID NO: 300301 - RNA, 19 nt, Artificial Sequence
  Description of Artificial Sequence: Synthetic oligonucleotide
  Antisense strand to SEQ ID NO: 300300
uuucguggcggguuauuca

SEQ ID NO: 300302 - RNA, 19 nt, Artificial Sequence
  Description of Artificial Sequence: Synthetic oligonucleotide
  Sense strand starting at position 892 of SEQ ID NO: 3859
acaaguucugcuugggauc

SEQ ID NO: 300303 - RNA, 19 nt, Artificial Sequence
  Description of Artificial Sequence: Synthetic oligonucleotide
  Antisense strand to SEQ ID NO: 300302
gaucccaagcagaacuugu

SEQ ID NO: 300304 - RNA, 19 nt, Artificial Sequence
  Description of Artificial Sequence: Synthetic oligonucleotide
  Sense strand starting at position 1127 of SEQ ID NO: 3859
gaggccuucucacugcgaa

SEQ ID NO: 300305 - RNA, 19 nt, Artificial Sequence
  Description of Artificial Sequence: Synthetic oligonucleotide
  Antisense strand to SEQ ID NO: 300304
uucgcagugagaaggccuc

SEQ ID NO: 300306 - RNA, 19 nt, Artificial Sequence
  Description of Artificial Sequence: Synthetic oligonucleotide
  Sense strand starting at position 1130 of SEQ ID NO: 3859
gccuucucacugcgaacaa

SEQ ID NO: 300307 - RNA, 19 nt, Artificial Sequence
  Description of Artificial Sequence: Synthetic oligonucleotide
  Antisense strand to SEQ ID NO: 300306
uuguucgcagugagaaggc

SEQ ID NO: 300308 - RNA, 19 nt, Artificial Sequence
  Description of Artificial Sequence: Synthetic oligonucleotide
  Sense strand starting at position 1375 of SEQ ID NO: 3859
cacauaccuucggcgaaau

SEQ ID NO: 300309 - RNA, 19 nt, Artificial Sequence
  Description of Artificial Sequence: Synthetic oligonucleotide
  Antisense strand to SEQ ID NO: 300308
auuucgccgaagguaugug

SEQ ID NO: 300310 - RNA, 19 nt, Artificial Sequence
  Description of Artificial Sequence: Synthetic oligonucleotide
  Sense strand starting at position 1376 of SEQ ID NO: 3859
acauaccuucggcgaaaua

SEQ ID NO: 300311 - RNA, 19 nt, Artificial Sequence
  Description of Artificial Sequence: Synthetic oligonucleotide
  Antisense strand to SEQ ID NO: 300310
uauuucgccgaagguaugu

SEQ ID NO: 300312 - RNA, 19 nt, Artificial Sequence
  Description of Artificial Sequence: Synthetic oligonucleotide
  Sense strand starting at position 2325 of SEQ ID NO: 3859
ccuggaguccuggaagucu

SEQ ID NO: 300313 - RNA, 19 nt, Artificial Sequence
  Description of Artificial Sequence: Synthetic oligonucleotide
  Antisense strand to SEQ ID NO: 300312
agacuuccaggacuccagg

SEQ ID NO: 300314 - RNA, 19 nt, Artificial Sequence
  Description of Artificial Sequence: Synthetic oligonucleotide
  Sense strand starting at position 2658 of SEQ ID NO: 3859
agauuucccugcugaaauc

SEQ ID NO: 300315 - RNA, 19 nt, Artificial Sequence
  Description of Artificial Sequence: Synthetic oligonucleotide
  Antisense strand to SEQ ID NO: 300314
gauuucagcagggaaaucu

SEQ ID NO: 300316 - RNA, 19 nt, Artificial Sequence
  Description of Artificial Sequence: Synthetic oligonucleotide
  Sense strand starting at position 2759 of SEQ ID NO: 3859
uugguucauugagagggaa

SEQ ID NO: 300317 - RNA, 19 nt, Artificial Sequence
  Description of Artificial Sequence: Synthetic oligonucleotide
  Antisense strand to SEQ ID NO: 300316
uucccucucaaugaaccaa

SEQ ID NO: 300318 - RNA, 19 nt, Artificial Sequence
  Description of Artificial Sequence: Synthetic oligonucleotide
  Sense strand starting at position 2818 of SEQ ID NO: 3859
gcgugaguagccagugaac

SEQ ID NO: 300319 - RNA, 19 nt, Artificial Sequence
  Description of Artificial Sequence: Synthetic oligonucleotide
  Antisense strand to SEQ ID NO: 300318
guucacuggcuacucacgc

SEQ ID NO: 300320 - RNA, 19 nt, Artificial Sequence
  Description of Artificial Sequence: Synthetic oligonucleotide
  Sense strand starting at position 3037 of SEQ ID NO: 3859
augacauuaagaugucguu

SEQ ID NO: 300321 - RNA, 19 nt, Artificial Sequence
  Description of Artificial Sequence: Synthetic oligonucleotide
  Antisense strand to SEQ ID NO: 300320
aacgacaucuuaaugucau

SEQ ID NO: 300322 - RNA, 19 nt, Artificial Sequence
  Description of Artificial Sequence: Synthetic oligonucleotide
  Sense strand starting at position 3046 of SEQ ID NO: 3859
agaugucguuucucuccaa

SEQ ID NO: 300323 - RNA, 19 nt, Artificial Sequence
  Description of Artificial Sequence: Synthetic oligonucleotide
  Antisense strand to SEQ ID NO: 300322
uuggagagaaacgacaucu

SEQ ID NO: 300324 - RNA, 19 nt, Artificial Sequence
  Description of Artificial Sequence: Synthetic oligonucleotide
  Sense strand starting at position 3062 of SEQ ID NO: 3859
caaccugugcgggaaaguu

SEQ ID NO: 300325 - RNA, 19 nt, Artificial Sequence
  Description of Artificial Sequence: Synthetic oligonucleotide
  Antisense strand to SEQ ID NO: 300324
aacuuucccgcacagguug

SEQ ID NO: 300326 - RNA, 19 nt, Artificial Sequence
  Description of Artificial Sequence: Synthetic oligonucleotide
  Sense strand starting at position 3155 of SEQ ID NO: 3859
gcaguauggaacuauguaa

SEQ ID NO: 300327 - RNA, 19 nt, Artificial Sequence
  Description of Artificial Sequence: Synthetic oligonucleotide
  Antisense strand to SEQ ID NO: 300326
uuacauaguuccauacugc

SEQ ID NO: 300328 - RNA, 19 nt, Artificial Sequence
  Description of Artificial Sequence: Synthetic oligonucleotide
  Sense strand starting at position 3194 of SEQ ID NO: 3859
gcagaagaguuucuacaga

SEQ ID NO: 300329 - RNA, 19 nt, Artificial Sequence
  Description of Artificial Sequence: Synthetic oligonucleotide
  Antisense strand to SEQ ID NO: 300328
ucuguagaaacucuucugc

SEQ ID NO: 300330 - RNA, 19 nt, Artificial Sequence
  Description of Artificial Sequence: Synthetic oligonucleotide
  Sense strand starting at position 3258 of SEQ ID NO: 3859
aucagagagcuuggugaca

SEQ ID NO: 300331 - RNA, 19 nt, Artificial Sequence
  Description of Artificial Sequence: Synthetic oligonucleotide
  Antisense strand to SEQ ID NO: 300330
ugucaccaagcucucugau

SEQ ID NO: 300332 - RNA, 19 nt, Artificial Sequence
  Description of Artificial Sequence: Synthetic oligonucleotide
  Sense strand starting at position 3289 of SEQ ID NO: 3859
cuuucuuuacagugacagu

SEQ ID NO: 300333 - RNA, 19 nt, Artificial Sequence
  Description of Artificial Sequence: Synthetic oligonucleotide
  Antisense strand to SEQ ID NO: 300332
acugucacuguaaagaaag

SEQ ID NO: 300334 - RNA, 19 nt, Artificial Sequence
  Description of Artificial Sequence: Synthetic oligonucleotide
  Sense strand starting at position 3554 of SEQ ID NO: 3859
augacuauuucugggaaag

SEQ ID NO: 300335 - RNA, 19 nt, Artificial Sequence
  Description of Artificial Sequence: Synthetic oligonucleotide
  Antisense strand to SEQ ID NO: 300334
cuuucccagaaauagucau

SEQ ID NO: 300336 - RNA, 19 nt, Artificial Sequence
  Description of Artificial Sequence: Synthetic oligonucleotide
  Sense strand starting at position 3556 of SEQ ID NO: 3859
gacuauuucugggaaagga

SEQ ID NO: 300337 - RNA, 19 nt, Artificial Sequence
  Description of Artificial Sequence: Synthetic oligonucleotide
  Antisense strand to SEQ ID NO: 300336
uccuuucccagaaauaguc

SEQ ID NO: 300338 - RNA, 19 nt, Artificial Sequence
  Description of Artificial Sequence: Synthetic oligonucleotide
  Sense strand starting at position 3690 of SEQ ID NO: 3859
gauguaucuugagcaguau

SEQ ID NO: 300339 - RNA, 19 nt, Artificial Sequence
  Description of Artificial Sequence: Synthetic oligonucleotide
  Antisense strand to SEQ ID NO: 300338
auacugcucaagauacauc

SEQ ID NO: 300340 - RNA, 19 nt, Artificial Sequence
  Description of Artificial Sequence: Synthetic oligonucleotide
  Sense strand starting at position 3701 of SEQ ID NO: 3859
agcaguaucgaguaacaag

SEQ ID NO: 300341 - RNA, 19 nt, Artificial Sequence
  Description of Artificial Sequence: Synthetic oligonucleotide
  Antisense strand to SEQ ID NO: 300340
cuuguuacucgauacugcu

SEQ ID NO: 300342 - RNA, 19 nt, Artificial Sequence
  Description of Artificial Sequence: Synthetic oligonucleotide
  Sense strand starting at position 3775 of SEQ ID NO: 3859
guuaacugccucugguuaa

SEQ ID NO: 300343 - RNA, 19 nt, Artificial Sequence
  Description of Artificial Sequence: Synthetic oligonucleotide
  Antisense strand to SEQ ID NO: 300342
uuaaccagaggcaguuaac

SEQ ID NO: 300344 - RNA, 19 nt, Artificial Sequence
  Description of Artificial Sequence: Synthetic oligonucleotide
  Sense strand starting at position 3786 of SEQ ID NO: 3859
cugguuaaccacugucacu

SEQ ID NO: 300345 - RNA, 19 nt, Artificial Sequence
  Description of Artificial Sequence: Synthetic oligonucleotide
  Antisense strand to SEQ ID NO: 300344
agugacagugguuaaccag

SEQ ID NO: 300346 - RNA, 19 nt, Artificial Sequence
  Description of Artificial Sequence: Synthetic oligonucleotide
  Sense strand starting at position 3795 of SEQ ID NO: 3859
cacugucacuaguuuggua

SEQ ID NO: 300347 - RNA, 19 nt, Artificial Sequence
  Description of Artificial Sequence: Synthetic oligonucleotide
  Antisense strand to SEQ ID NO: 300346
uaccaaacuagugacagug

SEQ ID NO: 300348 - RNA, 19 nt, Artificial Sequence
  Description of Artificial Sequence: Synthetic oligonucleotide
  Sense strand starting at position 3797 of SEQ ID NO: 3859
cugucacuaguuugguaua

SEQ ID NO: 300349 - RNA, 19 nt, Artificial Sequence
  Description of Artificial Sequence: Synthetic oligonucleotide
  Antisense strand to SEQ ID NO: 300348
uauaccaaacuagugacag

SEQ ID NO: 300350 - RNA, 19 nt, Artificial Sequence
  Description of Artificial Sequence: Synthetic oligonucleotide
  Sense strand starting at position 3799 of SEQ ID NO: 3859
gucacuaguuugguauaua

SEQ ID NO: 300351 - RNA, 19 nt, Artificial Sequence
  Description of Artificial Sequence: Synthetic oligonucleotide
  Antisense strand to SEQ ID NO: 300350
uauauaccaaacuagugac

SEQ ID NO: 300352 - RNA, 19 nt, Artificial Sequence
  Description of Artificial Sequence: Synthetic oligonucleotide
  Sense strand starting at position 3826 of SEQ ID NO: 3859
gacacuuuccuaggcaguu

SEQ ID NO: 300353 - RNA, 19 nt, Artificial Sequence
  Description of Artificial Sequence: Synthetic oligonucleotide
  Antisense strand to SEQ ID NO: 300352
aacugccuaggaaaguguc

SEQ ID NO: 300354 - RNA, 19 nt, Artificial Sequence
  Description of Artificial Sequence: Synthetic oligonucleotide
  Sense strand starting at position 3827 of SEQ ID NO: 3859
acacuuuccuaggcaguua

SEQ ID NO: 300355 - RNA, 19 nt, Artificial Sequence
  Description of Artificial Sequence: Synthetic oligonucleotide
  Antisense strand to SEQ ID NO: 300354
uaacugccuaggaaagugu

SEQ ID NO: 300356 - RNA, 19 nt, Artificial Sequence
  Description of Artificial Sequence: Synthetic oligonucleotide
  Sense strand starting at position 3838 of SEQ ID NO: 3859
ggcaguuaugaacauaugu

SEQ ID NO: 300357 - RNA, 19 nt, Artificial Sequence
  Description of Artificial Sequence: Synthetic oligonucleotide
  Antisense strand to SEQ ID NO: 300356
acauauguucauaacugcc

SEQ ID NO: 300358 - RNA, 19 nt, Artificial Sequence
  Description of Artificial Sequence: Synthetic oligonucleotide
  Sense strand starting at position 3958 of SEQ ID NO: 3859
ucauguuuaugguccauaa

SEQ ID NO: 300359 - RNA, 19 nt, Artificial Sequence
  Description of Artificial Sequence: Synthetic oligonucleotide
  Antisense strand to SEQ ID NO: 300358
uuauggaccauaaacauga

SEQ ID NO: 300360 - RNA, 19 nt, Artificial Sequence
  Description of Artificial Sequence: Synthetic oligonucleotide
  Sense strand starting at position 3960 of SEQ ID NO: 3859
auguuuaugguccauaaau

SEQ ID NO: 300361 - RNA, 19 nt, Artificial Sequence
  Description of Artificial Sequence: Synthetic oligonucleotide
  Antisense strand to SEQ ID NO: 300360
auuuauggaccauaaacau

SEQ ID NO: 300362 - RNA, 19 nt, Artificial Sequence
  Description of Artificial Sequence: Synthetic oligonucleotide
  Sense strand starting at position 3962 of SEQ ID NO: 3859
guuuaugguccauaaauau

SEQ ID NO: 300363 - RNA, 19 nt, Artificial Sequence
  Description of Artificial Sequence: Synthetic oligonucleotide
  Antisense strand to SEQ ID NO: 300362
auauuuauggaccauaaac

SEQ ID NO: 300364 - RNA, 19 nt, Artificial Sequence
  Description of Artificial Sequence: Synthetic oligonucleotide
  Sense strand starting at position 662 of SEQ ID NO: 3860
gagggacucaaggguucuu

SEQ ID NO: 300365 - RNA, 19 nt, Artificial Sequence
  Description of Artificial Sequence: Synthetic oligonucleotide
  Antisense strand to SEQ ID NO: 300364
aagaacccuugagucccuc

SEQ ID NO: 300366 - RNA, 19 nt, Artificial Sequence
  Description of Artificial Sequence: Synthetic oligonucleotide
  Sense strand starting at position 672 of SEQ ID NO: 3860
aggguucuugccugagcuu

SEQ ID NO: 300367 - RNA, 19 nt, Artificial Sequence
  Description of Artificial Sequence: Synthetic oligonucleotide
  Antisense strand to SEQ ID NO: 300366
aagcucaggcaagaacccu

SEQ ID NO: 300368 - RNA, 19 nt, Artificial Sequence
  Description of Artificial Sequence: Synthetic oligonucleotide
  Sense strand starting at position 786 of SEQ ID NO: 3860
gucagagaauucuccagag

SEQ ID NO: 300369 - RNA, 19 nt, Artificial Sequence
  Description of Artificial Sequence: Synthetic oligonucleotide
  Antisense strand to SEQ ID NO: 300368
cucuggagaauucucugac

SEQ ID NO: 300370 - RNA, 19 nt, Artificial Sequence
  Description of Artificial Sequence: Synthetic oligonucleotide
  Sense strand starting at position 1275 of SEQ ID NO: 3860
guggcuuguccacaugaac

SEQ ID NO: 300371 - RNA, 19 nt, Artificial Sequence
  Description of Artificial Sequence: Synthetic oligonucleotide
  Antisense strand to SEQ ID NO: 300370
guucauguggacaagccac

SEQ ID NO: 300372 - RNA, 19 nt, Artificial Sequence
  Description of Artificial Sequence: Synthetic oligonucleotide
  Sense strand starting at position 2028 of SEQ ID NO: 3860
cgggaucucuucuccagua

SEQ ID NO: 300373 - RNA, 19 nt, Artificial Sequence
  Description of Artificial Sequence: Synthetic oligonucleotide
  Antisense strand to SEQ ID NO: 300372
uacuggagaagagaucccg

SEQ ID NO: 300374 - RNA, 19 nt, Artificial Sequence
  Description of Artificial Sequence: Synthetic oligonucleotide
  Sense strand starting at position 2158 of SEQ ID NO: 3860
guuccugucacuuagagga

SEQ ID NO: 300375 - RNA, 19 nt, Artificial Sequence
  Description of Artificial Sequence: Synthetic oligonucleotide
  Antisense strand to SEQ ID NO: 300374
uccucuaagugacaggaac

SEQ ID NO: 300376 - RNA, 19 nt, Artificial Sequence
  Description of Artificial Sequence: Synthetic oligonucleotide
  Sense strand starting at position 2280 of SEQ ID NO: 3860
ccugguuugcgcucugauc

SEQ ID NO: 300377 - RNA, 19 nt, Artificial Sequence
  Description of Artificial Sequence: Synthetic oligonucleotide
  Antisense strand to SEQ ID NO: 300376
gaucagagcgcaaaccagg

SEQ ID NO: 300378 - RNA, 19 nt, Artificial Sequence
  Description of Artificial Sequence: Synthetic oligonucleotide
  Sense strand starting at position 2400 of SEQ ID NO: 3860
gggugugcugacugauagu

SEQ ID NO: 300379 - RNA, 19 nt, Artificial Sequence
  Description of Artificial Sequence: Synthetic oligonucleotide
  Antisense strand to SEQ ID NO: 300378
acuaucagucagcacaccc

SEQ ID NO: 300380 - RNA, 19 nt, Artificial Sequence
  Description of Artificial Sequence: Synthetic oligonucleotide
  Sense strand starting at position 2403 of SEQ ID NO: 3860
ugugcugacugauaguguu

SEQ ID NO: 300381 - RNA, 19 nt, Artificial Sequence
  Description of Artificial Sequence: Synthetic oligonucleotide
  Antisense strand to SEQ ID NO: 300380
aacacuaucagucagcaca

SEQ ID NO: 300382 - RNA, 19 nt, Artificial Sequence
  Description of Artificial Sequence: Synthetic oligonucleotide
  Sense strand starting at position 2406 of SEQ ID NO: 3860
gcugacugauaguguuacu

SEQ ID NO: 300383 - RNA, 19 nt, Artificial Sequence
  Description of Artificial Sequence: Synthetic oligonucleotide
  Antisense strand to SEQ ID NO: 300382
aguaacacuaucagucagc

SEQ ID NO: 300384 - RNA, 19 nt, Artificial Sequence
  Description of Artificial Sequence: Synthetic oligonucleotide
  Sense strand starting at position 2409 of SEQ ID NO: 3860
gacugauaguguuacuuga

SEQ ID NO: 300385 - RNA, 19 nt, Artificial Sequence
  Description of Artificial Sequence: Synthetic oligonucleotide
  Antisense strand to SEQ ID NO: 300384
ucaaguaacacuaucaguc

SEQ ID NO: 300386 - RNA, 19 nt, Artificial Sequence
  Description of Artificial Sequence: Synthetic oligonucleotide
  Sense strand starting at position 2411 of SEQ ID NO: 3860
cugauaguguuacuugaug

SEQ ID NO: 300387 - RNA, 19 nt, Artificial Sequence
  Description of Artificial Sequence: Synthetic oligonucleotide
  Antisense strand to SEQ ID NO: 300386
caucaaguaacacuaucag

SEQ ID NO: 300388 - RNA, 19 nt, Artificial Sequence
  Description of Artificial Sequence: Synthetic oligonucleotide
  Sense strand starting at position 2416 of SEQ ID NO: 3860
aguguuacuugaugccgua

SEQ ID NO: 300389 - RNA, 19 nt, Artificial Sequence
  Description of Artificial Sequence: Synthetic oligonucleotide
  Antisense strand to SEQ ID NO: 300388
uacggcaucaaguaacacu

SEQ ID NO: 300390 - RNA, 19 nt, Artificial Sequence
  Description of Artificial Sequence: Synthetic oligonucleotide
  Sense strand starting at position 2694 of SEQ ID NO: 3860
cuggguaaguguccagagu

SEQ ID NO: 300391 - RNA, 19 nt, Artificial Sequence
  Description of Artificial Sequence: Synthetic oligonucleotide
  Antisense strand to SEQ ID NO: 300390
acucuggacacuuacccag

SEQ ID NO: 300392 - RNA, 19 nt, Artificial Sequence
  Description of Artificial Sequence: Synthetic oligonucleotide
  Sense strand starting at position 2696 of SEQ ID NO: 3860
ggguaaguguccagaguca

SEQ ID NO: 300393 - RNA, 19 nt, Artificial Sequence
  Description of Artificial Sequence: Synthetic oligonucleotide
  Antisense strand to SEQ ID NO: 300392
ugacucuggacacuuaccc

SEQ ID NO: 300394 - RNA, 19 nt, Artificial Sequence
  Description of Artificial Sequence: Synthetic oligonucleotide
  Sense strand starting at position 2709 of SEQ ID NO: 3860
gagucagacgcccaaaucu

SEQ ID NO: 300395 - RNA, 19 nt, Artificial Sequence
  Description of Artificial Sequence: Synthetic oligonucleotide
  Antisense strand to SEQ ID NO: 300394
agauuugggcgucugacuc

SEQ ID NO: 300396 - RNA, 19 nt, Artificial Sequence
  Description of Artificial Sequence: Synthetic oligonucleotide
  Sense strand starting at position 3028 of SEQ ID NO: 3860
accagaaaguccucacuag

SEQ ID NO: 300397 - RNA, 19 nt, Artificial Sequence
  Description of Artificial Sequence: Synthetic oligonucleotide
  Antisense strand to SEQ ID NO: 300396
cuagugaggacuuucuggu

SEQ ID NO: 300398 - RNA, 19 nt, Artificial Sequence
  Description of Artificial Sequence: Synthetic oligonucleotide
  Sense strand starting at position 3399 of SEQ ID NO: 3860
cugggaaccucuucuuacu

SEQ ID NO: 300399 - RNA, 19 nt, Artificial Sequence
  Description of Artificial Sequence: Synthetic oligonucleotide
  Antisense strand to SEQ ID NO: 300398
aguaagaagagguucccag

SEQ ID NO: 300400 - RNA, 19 nt, Artificial Sequence
  Description of Artificial Sequence: Synthetic oligonucleotide
  Sense strand starting at position 3452 of SEQ ID NO: 3860
ggacugguguggucugaga

SEQ ID NO: 300401 - RNA, 19 nt, Artificial Sequence
  Description of Artificial Sequence: Synthetic oligonucleotide
  Antisense strand to SEQ ID NO: 300400
ucucagaccacaccagucc

SEQ ID NO: 300402 - RNA, 19 nt, Artificial Sequence
  Description of Artificial Sequence: Synthetic oligonucleotide
  Sense strand starting at position 3454 of SEQ ID NO: 3860
acugguguggucugagaaa

SEQ ID NO: 300403 - RNA, 19 nt, Artificial Sequence
  Description of Artificial Sequence: Synthetic oligonucleotide
  Antisense strand to SEQ ID NO: 300402
uuucucagaccacaccagu

SEQ ID NO: 300404 - RNA, 19 nt, Artificial Sequence
  Description of Artificial Sequence: Synthetic oligonucleotide
  Sense strand starting at position 3467 of SEQ ID NO: 3860
gagaaacauccucgagccu

SEQ ID NO: 300405 - RNA, 19 nt, Artificial Sequence
  Description of Artificial Sequence: Synthetic oligonucleotide
  Antisense strand to SEQ ID NO: 300404
aggcucgaggauguuucuc

SEQ ID NO: 300406 - RNA, 19 nt, Artificial Sequence
  Description of Artificial Sequence: Synthetic oligonucleotide
  Sense strand starting at position 3588 of SEQ ID NO: 3860
ucucuuuaggcagagcaga

SEQ ID NO: 300407 - RNA, 19 nt, Artificial Sequence
  Description of Artificial Sequence: Synthetic oligonucleotide
  Antisense strand to SEQ ID NO: 300406
ucugcucugccuaaagaga

SEQ ID NO: 300408 - RNA, 19 nt, Artificial Sequence
  Description of Artificial Sequence: Synthetic oligonucleotide
  Sense strand starting at position 3708 of SEQ ID NO: 3860
gugggagacuucucagccu

SEQ ID NO: 300409 - RNA, 19 nt, Artificial Sequence
  Description of Artificial Sequence: Synthetic oligonucleotide
  Antisense strand to SEQ ID NO: 300408
aggcugagaagucucccac

SEQ ID NO: 300410 - RNA, 19 nt, Artificial Sequence
  Description of Artificial Sequence: Synthetic oligonucleotide
  Sense strand starting at position 3800 of SEQ ID NO: 3860
ucauguggugaccacgaua

SEQ ID NO: 300411 - RNA, 19 nt, Artificial Sequence
  Description of Artificial Sequence: Synthetic oligonucleotide
  Antisense strand to SEQ ID NO: 300410
uaucguggucaccacauga

SEQ ID NO: 300412 - RNA, 19 nt, Artificial Sequence
  Description of Artificial Sequence: Synthetic oligonucleotide
  Sense strand starting at position 31 of SEQ ID NO: 3861
ccguuuaauuaugggagga

SEQ ID NO: 300413 - RNA, 19 nt, Artificial Sequence
  Description of Artificial Sequence: Synthetic oligonucleotide
  Antisense strand to SEQ ID NO: 300412
uccucccauaauuaaacgg

SEQ ID NO: 300414 - RNA, 19 nt, Artificial Sequence
  Description of Artificial Sequence: Synthetic oligonucleotide
  Sense strand starting at position 32 of SEQ ID NO: 3861
cguuuaauuaugggaggaa

SEQ ID NO: 300415 - RNA, 19 nt, Artificial Sequence
  Description of Artificial Sequence: Synthetic oligonucleotide
  Antisense strand to SEQ ID NO: 300414
uuccucccauaauuaaacg

SEQ ID NO: 300416 - RNA, 19 nt, Artificial Sequence
  Description of Artificial Sequence: Synthetic oligonucleotide
  Sense strand starting at position 33 of SEQ ID NO: 3861
guuuaauuaugggaggaac

SEQ ID NO: 300417 - RNA, 19 nt, Artificial Sequence
  Description of Artificial Sequence: Synthetic oligonucleotide
  Antisense strand to SEQ ID NO: 300416
guuccucccauaauuaaac

SEQ ID NO: 300418 - RNA, 19 nt, Artificial Sequence
  Description of Artificial Sequence: Synthetic oligonucleotide
  Sense strand starting at position 108 of SEQ ID NO: 3861
ggaaucaagcuuugcaaag

SEQ ID NO: 300419 - RNA, 19 nt, Artificial Sequence
  Description of Artificial Sequence: Synthetic oligonucleotide
  Antisense strand to SEQ ID NO: 300418
cuuugcaaagcuugauucc

SEQ ID NO: 300420 - RNA, 19 nt, Artificial Sequence
  Description of Artificial Sequence: Synthetic oligonucleotide
  Sense strand starting at position 301 of SEQ ID NO: 3861
cugcauaugugauccagau

SEQ ID NO: 300421 - RNA, 19 nt, Artificial Sequence
  Description of Artificial Sequence: Synthetic oligonucleotide
  Antisense strand to SEQ ID NO: 300420
aucuggaucacauaugcag

SEQ ID NO: 300422 - RNA, 19 nt, Artificial Sequence
  Description of Artificial Sequence: Synthetic oligonucleotide
  Sense strand starting at position 303 of SEQ ID NO: 3861
gcauaugugauccagaugu

SEQ ID NO: 300423 - RNA, 19 nt, Artificial Sequence
  Description of Artificial Sequence: Synthetic oligonucleotide
  Antisense strand to SEQ ID NO: 300422
acaucuggaucacauaugc

SEQ ID NO: 300424 - RNA, 19 nt, Artificial Sequence
  Description of Artificial Sequence: Synthetic oligonucleotide
  Sense strand starting at position 305 of SEQ ID NO: 3861
auaugugauccagaugucu

SEQ ID NO: 300425 - RNA, 19 nt, Artificial Sequence
  Description of Artificial Sequence: Synthetic oligonucleotide
  Antisense strand to SEQ ID NO: 300424
agacaucuggaucacauau

SEQ ID NO: 300426 - RNA, 19 nt, Artificial Sequence
  Description of Artificial Sequence: Synthetic oligonucleotide
  Sense strand starting at position 311 of SEQ ID NO: 3861
gauccagaugucugcuuua

SEQ ID NO: 300427 - RNA, 19 nt, Artificial Sequence
  Description of Artificial Sequence: Synthetic oligonucleotide
  Antisense strand to SEQ ID NO: 300426
uaaagcagacaucuggauc

SEQ ID NO: 300428 - RNA, 19 nt, Artificial Sequence
  Description of Artificial Sequence: Synthetic oligonucleotide
  Sense strand starting at position 314 of SEQ ID NO: 3861
ccagaugucugcuuuaacc

SEQ ID NO: 300429 - RNA, 19 nt, Artificial Sequence
  Description of Artificial Sequence: Synthetic oligonucleotide
  Antisense strand to SEQ ID NO: 300428
gguuaaagcagacaucugg

SEQ ID NO: 300430 - RNA, 19 nt, Artificial Sequence
  Description of Artificial Sequence: Synthetic oligonucleotide
  Sense strand starting at position 689 of SEQ ID NO: 3861
ccgaguugucugggcccuu

SEQ ID NO: 300431 - RNA, 19 nt, Artificial Sequence
  Description of Artificial Sequence: Synthetic oligonucleotide
  Antisense strand to SEQ ID NO: 300430
aagggcccagacaacucgg

SEQ ID NO: 300432 - RNA, 19 nt, Artificial Sequence
  Description of Artificial Sequence: Synthetic oligonucleotide
  Sense strand starting at position 900 of SEQ ID NO: 3861
ccacuauaaugggagggaa

SEQ ID NO: 300433 - RNA, 19 nt, Artificial Sequence
  Description of Artificial Sequence: Synthetic oligonucleotide
  Antisense strand to SEQ ID NO: 300432
uucccucccauuauagugg

SEQ ID NO: 300434 - RNA, 19 nt, Artificial Sequence
  Description of Artificial Sequence: Synthetic oligonucleotide
  Sense strand starting at position 1069 of SEQ ID NO: 3861
ucaugcaauuaguaucuga

SEQ ID NO: 300435 - RNA, 19 nt, Artificial Sequence
  Description of Artificial Sequence: Synthetic oligonucleotide
  Antisense strand to SEQ ID NO: 300434
ucagauacuaauugcauga

SEQ ID NO: 300436 - RNA, 19 nt, Artificial Sequence
  Description of Artificial Sequence: Synthetic oligonucleotide
  Sense strand starting at position 1076 of SEQ ID NO: 3861
auuaguaucugagugccua

SEQ ID NO: 300437 - RNA, 19 nt, Artificial Sequence
  Description of Artificial Sequence: Synthetic oligonucleotide
  Antisense strand to SEQ ID NO: 300436
uaggcacucagauacuaau

SEQ ID NO: 300438 - RNA, 19 nt, Artificial Sequence
  Description of Artificial Sequence: Synthetic oligonucleotide
  Sense strand starting at position 1181 of SEQ ID NO: 3861
acaucaguucgucacuaga

SEQ ID NO: 300439 - RNA, 19 nt, Artificial Sequence
  Description of Artificial Sequence: Synthetic oligonucleotide
  Antisense strand to SEQ ID NO: 300438
ucuagugacgaacugaugu

SEQ ID NO: 300440 - RNA, 19 nt, Artificial Sequence
  Description of Artificial Sequence: Synthetic oligonucleotide
  Sense strand starting at position 1183 of SEQ ID NO: 3861
aucaguucgucacuagauu

SEQ ID NO: 300441 - RNA, 19 nt, Artificial Sequence
  Description of Artificial Sequence: Synthetic oligonucleotide
  Antisense strand to SEQ ID NO: 300440
aaucuagugacgaacugau

SEQ ID NO: 300442 - RNA, 19 nt, Artificial Sequence
  Description of Artificial Sequence: Synthetic oligonucleotide
  Sense strand starting at position 1184 of SEQ ID NO: 3861
ucaguucgucacuagauuc

SEQ ID NO: 300443 - RNA, 19 nt, Artificial Sequence
  Description of Artificial Sequence: Synthetic oligonucleotide
  Antisense strand to SEQ ID NO: 300442
gaaucuagugacgaacuga

SEQ ID NO: 300444 - RNA, 19 nt, Artificial Sequence
  Description of Artificial Sequence: Synthetic oligonucleotide
  Sense strand starting at position 1366 of SEQ ID NO: 3861
gcauuagcaugagcuugaa

SEQ ID NO: 300445 - RNA, 19 nt, Artificial Sequence
  Description of Artificial Sequence: Synthetic oligonucleotide
  Antisense strand to SEQ ID NO: 300444
uucaagcucaugcuaaugc

SEQ ID NO: 300446 - RNA, 19 nt, Artificial Sequence
  Description of Artificial Sequence: Synthetic oligonucleotide
  Sense strand starting at position 1369 of SEQ ID NO: 3861
uuagcaugagcuugaaaua

SEQ ID NO: 300447 - RNA, 19 nt, Artificial Sequence
  Description of Artificial Sequence: Synthetic oligonucleotide
  Antisense strand to SEQ ID NO: 300446
uauuucaagcucaugcuaa

SEQ ID NO: 300448 - RNA, 19 nt, Artificial Sequence
  Description of Artificial Sequence: Synthetic oligonucleotide
  Sense strand starting at position 1414 of SEQ ID NO: 3861
acaagaaacuucuagaggu

SEQ ID NO: 300449 - RNA, 19 nt, Artificial Sequence
  Description of Artificial Sequence: Synthetic oligonucleotide
  Antisense strand to SEQ ID NO: 300448
accucuagaaguuucuugu

SEQ ID NO: 300450 - RNA, 19 nt, Artificial Sequence
  Description of Artificial Sequence: Synthetic oligonucleotide
  Sense strand starting at position 1461 of SEQ ID NO: 3861
augcaaacaucagagauga

SEQ ID NO: 300451 - RNA, 19 nt, Artificial Sequence
  Description of Artificial Sequence: Synthetic oligonucleotide
  Antisense strand to SEQ ID NO: 300450
ucaucucugauguuugcau

SEQ ID NO: 300452 - RNA, 19 nt, Artificial Sequence
  Description of Artificial Sequence: Synthetic oligonucleotide
  Sense strand starting at position 1522 of SEQ ID NO: 3861
aauugucagcccugcaaag

SEQ ID NO: 300453 - RNA, 19 nt, Artificial Sequence
  Description of Artificial Sequence: Synthetic oligonucleotide
  Antisense strand to SEQ ID NO: 300452
cuuugcagggcugacaauu

SEQ ID NO: 300454 - RNA, 19 nt, Artificial Sequence
  Description of Artificial Sequence: Synthetic oligonucleotide
  Sense strand starting at position 1581 of SEQ ID NO: 3861
ccaagaggaucagaaauga

SEQ ID NO: 300455 - RNA, 19 nt, Artificial Sequence
  Description of Artificial Sequence: Synthetic oligonucleotide
  Antisense strand to SEQ ID NO: 300454
ucauuucugauccucuugg

SEQ ID NO: 300456 - RNA, 19 nt, Artificial Sequence
  Description of Artificial Sequence: Synthetic oligonucleotide
  Sense strand starting at position 1618 of SEQ ID NO: 3861
acgagccuugcuugaacaa

SEQ ID NO: 300457 - RNA, 19 nt, Artificial Sequence
  Description of Artificial Sequence: Synthetic oligonucleotide
  Antisense strand to SEQ ID NO: 300456
uuguucaagcaaggcucgu

SEQ ID NO: 300458 - RNA, 19 nt, Artificial Sequence
  Description of Artificial Sequence: Synthetic oligonucleotide
  Sense strand starting at position 1691 of SEQ ID NO: 3861
cggcuuaccuccuugagaa

SEQ ID NO: 300459 - RNA, 19 nt, Artificial Sequence
  Description of Artificial Sequence: Synthetic oligonucleotide
  Antisense strand to SEQ ID NO: 300458
uucucaaggagguaagccg

SEQ ID NO: 300460 - RNA, 19 nt, Artificial Sequence
  Description of Artificial Sequence: Synthetic oligonucleotide
  Sense strand starting at position 1692 of SEQ ID NO: 3861
ggcuuaccuccuugagaag

SEQ ID NO: 300461 - RNA, 19 nt, Artificial Sequence
  Description of Artificial Sequence: Synthetic oligonucleotide
  Antisense strand to SEQ ID NO: 300460
cuucucaaggagguaagcc

SEQ ID NO: 300462 - RNA, 19 nt, Artificial Sequence
  Description of Artificial Sequence: Synthetic oligonucleotide
  Sense strand starting at position 1995 of SEQ ID NO: 3861
ggcucaugaugcugccaga

SEQ ID NO: 300463 - RNA, 19 nt, Artificial Sequence
  Description of Artificial Sequence: Synthetic oligonucleotide
  Antisense strand to SEQ ID NO: 300462
ucuggcagcaucaugagcc

SEQ ID NO: 300464 - RNA, 19 nt, Artificial Sequence
  Description of Artificial Sequence: Synthetic oligonucleotide
  Sense strand starting at position 1998 of SEQ ID NO: 3861
ucaugaugcugccagaggu

SEQ ID NO: 300465 - RNA, 19 nt, Artificial Sequence
  Description of Artificial Sequence: Synthetic oligonucleotide
  Antisense strand to SEQ ID NO: 300464
accucuggcagcaucauga

SEQ ID NO: 300466 - RNA, 19 nt, Artificial Sequence
  Description of Artificial Sequence: Synthetic oligonucleotide
  Sense strand starting at position 2078 of SEQ ID NO: 3861
agguccuucucgccuagaa

SEQ ID NO: 300467 - RNA, 19 nt, Artificial Sequence
  Description of Artificial Sequence: Synthetic oligonucleotide
  Antisense strand to SEQ ID NO: 300466
uucuaggcgagaaggaccu

SEQ ID NO: 300468 - RNA, 19 nt, Artificial Sequence
  Description of Artificial Sequence: Synthetic oligonucleotide
  Sense strand starting at position 2080 of SEQ ID NO: 3861
guccuucucgccuagaaca

SEQ ID NO: 300469 - RNA, 19 nt, Artificial Sequence
  Description of Artificial Sequence: Synthetic oligonucleotide
  Antisense strand to SEQ ID NO: 300468
uguucuaggcgagaaggac

SEQ ID NO: 300470 - RNA, 19 nt, Artificial Sequence
  Description of Artificial Sequence: Synthetic oligonucleotide
  Sense strand starting at position 2131 of SEQ ID NO: 3861
uucagucucguggauggau

SEQ ID NO: 300471 - RNA, 19 nt, Artificial Sequence
  Description of Artificial Sequence: Synthetic oligonucleotide
  Antisense strand to SEQ ID NO: 300470
auccauccacgagacugaa

SEQ ID NO: 300472 - RNA, 19 nt, Artificial Sequence
  Description of Artificial Sequence: Synthetic oligonucleotide
  Sense strand starting at position 2180 of SEQ ID NO: 3861
gcagcagucugaucggacu

SEQ ID NO: 300473 - RNA, 19 nt, Artificial Sequence
  Description of Artificial Sequence: Synthetic oligonucleotide
  Antisense strand to SEQ ID NO: 300472
aguccgaucagacugcugc

SEQ ID NO: 300474 - RNA, 19 nt, Artificial Sequence
  Description of Artificial Sequence: Synthetic oligonucleotide
  Sense strand starting at position 2366 of SEQ ID NO: 3861
ugagcaguuucuccuggua

SEQ ID NO: 300475 - RNA, 19 nt, Artificial Sequence
  Description of Artificial Sequence: Synthetic oligonucleotide
  Antisense strand to SEQ ID NO: 300474
uaccaggagaaacugcuca

SEQ ID NO: 300476 - RNA, 19 nt, Artificial Sequence
  Description of Artificial Sequence: Synthetic oligonucleotide
  Sense strand starting at position 2369 of SEQ ID NO: 3861
gcaguuucuccugguauuu

SEQ ID NO: 300477 - RNA, 19 nt, Artificial Sequence
  Description of Artificial Sequence: Synthetic oligonucleotide
  Antisense strand to SEQ ID NO: 300476
aaauaccaggagaaacugc

SEQ ID NO: 300478 - RNA, 19 nt, Artificial Sequence
  Description of Artificial Sequence: Synthetic oligonucleotide
  Sense strand starting at position 2490 of SEQ ID NO: 3861
cuuccuguuucugggaaga

SEQ ID NO: 300479 - RNA, 19 nt, Artificial Sequence
  Description of Artificial Sequence: Synthetic oligonucleotide
  Antisense strand to SEQ ID NO: 300478
ucuucccagaaacaggaag

SEQ ID NO: 300480 - RNA, 19 nt, Artificial Sequence
  Description of Artificial Sequence: Synthetic oligonucleotide
  Sense strand starting at position 2492 of SEQ ID NO: 3861
uccuguuucugggaagaga

SEQ ID NO: 300481 - RNA, 19 nt, Artificial Sequence
  Description of Artificial Sequence: Synthetic oligonucleotide
  Antisense strand to SEQ ID NO: 300480
ucucuucccagaaacagga

SEQ ID NO: 300482 - RNA, 19 nt, Artificial Sequence
  Description of Artificial Sequence: Synthetic oligonucleotide
  Sense strand starting at position 2645 of SEQ ID NO: 3861
gggugaucaaggugagauu

SEQ ID NO: 300483 - RNA, 19 nt, Artificial Sequence
  Description of Artificial Sequence: Synthetic oligonucleotide
  Antisense strand to SEQ ID NO: 300482
aaucucaccuugaucaccc

SEQ ID NO: 300484 - RNA, 19 nt, Artificial Sequence
  Description of Artificial Sequence: Synthetic oligonucleotide
  Sense strand starting at position 2648 of SEQ ID NO: 3861
ugaucaaggugagauuucu

SEQ ID NO: 300485 - RNA, 19 nt, Artificial Sequence
  Description of Artificial Sequence: Synthetic oligonucleotide
  Antisense strand to SEQ ID NO: 300484
agaaaucucaccuugauca

SEQ ID NO: 300486 - RNA, 19 nt, Artificial Sequence
  Description of Artificial Sequence: Synthetic oligonucleotide
  Sense strand starting at position 2665 of SEQ ID NO: 3861
cuaagaaaguugcccucuu

SEQ ID NO: 300487 - RNA, 19 nt, Artificial Sequence
  Description of Artificial Sequence: Synthetic oligonucleotide
  Antisense strand to SEQ ID NO: 300486
aagagggcaacuuucuuag

SEQ ID NO: 300488 - RNA, 19 nt, Artificial Sequence
  Description of Artificial Sequence: Synthetic oligonucleotide
  Sense strand starting at position 3889 of SEQ ID NO: 3861
gccagaucuguccgggaca

SEQ ID NO: 300489 - RNA, 19 nt, Artificial Sequence
  Description of Artificial Sequence: Synthetic oligonucleotide
  Antisense strand to SEQ ID NO: 300488
ugucccggacagaucuggc

SEQ ID NO: 300490 - RNA, 19 nt, Artificial Sequence
  Description of Artificial Sequence: Synthetic oligonucleotide
  Sense strand starting at position 3972 of SEQ ID NO: 3861
ggcucauuccgaggcagga

SEQ ID NO: 300491 - RNA, 19 nt, Artificial Sequence
  Description of Artificial Sequence: Synthetic oligonucleotide
  Antisense strand to SEQ ID NO: 300490
uccugccucggaaugagcc

SEQ ID NO: 300492 - RNA, 19 nt, Artificial Sequence
  Description of Artificial Sequence: Synthetic oligonucleotide
  Sense strand starting at position 4 of SEQ ID NO: 3862
augaaucaugccuacaguu

SEQ ID NO: 300493 - RNA, 19 nt, Artificial Sequence
  Description of Artificial Sequence: Synthetic oligonucleotide
  Antisense strand to SEQ ID NO: 300492
aacuguaggcaugauucau

SEQ ID NO: 300494 - RNA, 19 nt, Artificial Sequence
  Description of Artificial Sequence: Synthetic oligonucleotide
  Sense strand starting at position 34 of SEQ ID NO: 3862
acugauaaguaccuacagu

SEQ ID NO: 300495 - RNA, 19 nt, Artificial Sequence
  Description of Artificial Sequence: Synthetic oligonucleotide
  Antisense strand to SEQ ID NO: 300494
acuguagguacuuaucagu

SEQ ID NO: 300496 - RNA, 19 nt, Artificial Sequence
  Description of Artificial Sequence: Synthetic oligonucleotide
  Sense strand starting at position 51 of SEQ ID NO: 3862
guugucagugcuuagcaaa

SEQ ID NO: 300497 - RNA, 19 nt, Artificial Sequence
  Description of Artificial Sequence: Synthetic oligonucleotide
  Antisense strand to SEQ ID NO: 300496
uuugcuaagcacugacaac

SEQ ID NO: 300498 - RNA, 19 nt, Artificial Sequence
  Description of Artificial Sequence: Synthetic oligonucleotide
  Sense strand starting at position 58 of SEQ ID NO: 3862
gugcuuagcaaaugacagu

SEQ ID NO: 300499 - RNA, 19 nt, Artificial Sequence
  Description of Artificial Sequence: Synthetic oligonucleotide
  Antisense strand to SEQ ID NO: 300498
acugucauuugcuaagcac

SEQ ID NO: 300500 - RNA, 19 nt, Artificial Sequence
  Description of Artificial Sequence: Synthetic oligonucleotide
  Sense strand starting at position 65 of SEQ ID NO: 3862
gcaaaugacaguuggcuga

SEQ ID NO: 300501 - RNA, 19 nt, Artificial Sequence
  Description of Artificial Sequence: Synthetic oligonucleotide
  Antisense strand to SEQ ID NO: 300500
ucagccaacugucauuugc

SEQ ID NO: 300502 - RNA, 19 nt, Artificial Sequence
  Description of Artificial Sequence: Synthetic oligonucleotide
  Sense strand starting at position 67 of SEQ ID NO: 3862
aaaugacaguuggcugaau

SEQ ID NO: 300503 - RNA, 19 nt, Artificial Sequence
  Description of Artificial Sequence: Synthetic oligonucleotide
  Antisense strand to SEQ ID NO: 300502
auucagccaacugucauuu

SEQ ID NO: 300504 - RNA, 19 nt, Artificial Sequence
  Description of Artificial Sequence: Synthetic oligonucleotide
  Sense strand starting at position 69 of SEQ ID NO: 3862
augacaguuggcugaauga

SEQ ID NO: 300505 - RNA, 19 nt, Artificial Sequence
  Description of Artificial Sequence: Synthetic oligonucleotide
  Antisense strand to SEQ ID NO: 300504
ucauucagccaacugucau

SEQ ID NO: 300506 - RNA, 19 nt, Artificial Sequence
  Description of Artificial Sequence: Synthetic oligonucleotide
  Sense strand starting at position 78 of SEQ ID NO: 3862
ggcugaaugaagggcuaau

SEQ ID NO: 300507 - RNA, 19 nt, Artificial Sequence
  Description of Artificial Sequence: Synthetic oligonucleotide
  Antisense strand to SEQ ID NO: 300506
auuagcccuucauucagcc

SEQ ID NO: 300508 - RNA, 19 nt, Artificial Sequence
  Description of Artificial Sequence: Synthetic oligonucleotide
  Sense strand starting at position 90 of SEQ ID NO: 3862
ggcuaauuacugugccaac

SEQ ID NO: 300509 - RNA, 19 nt, Artificial Sequence
  Description of Artificial Sequence: Synthetic oligonucleotide
  Antisense strand to SEQ ID NO: 300508
guuggcacaguaauuagcc

SEQ ID NO: 300510 - RNA, 19 nt, Artificial Sequence
  Description of Artificial Sequence: Synthetic oligonucleotide
  Sense strand starting at position 91 of SEQ ID NO: 3862
gcuaauuacugugccaaca

SEQ ID NO: 300511 - RNA, 19 nt, Artificial Sequence
  Description of Artificial Sequence: Synthetic oligonucleotide
  Antisense strand to SEQ ID NO: 300510
uguuggcacaguaauuagc

SEQ ID NO: 300512 - RNA, 19 nt, Artificial Sequence
  Description of Artificial Sequence: Synthetic oligonucleotide
  Sense strand starting at position 351 of SEQ ID NO: 3862
agagaagccucccaugaga

SEQ ID NO: 300513 - RNA, 19 nt, Artificial Sequence
  Description of Artificial Sequence: Synthetic oligonucleotide
  Antisense strand to SEQ ID NO: 300512
ucucaugggaggcuucucu

SEQ ID NO: 300514 - RNA, 19 nt, Artificial Sequence
  Description of Artificial Sequence: Synthetic oligonucleotide
  Sense strand starting at position 390 of SEQ ID NO: 3862
cgaagcugugccgaucuua

SEQ ID NO: 300515 - RNA, 19 nt, Artificial Sequence
  Description of Artificial Sequence: Synthetic oligonucleotide
  Antisense strand to SEQ ID NO: 300514
uaagaucggcacagcuucg

SEQ ID NO: 300516 - RNA, 19 nt, Artificial Sequence
  Description of Artificial Sequence: Synthetic oligonucleotide
  Sense strand starting at position 420 of SEQ ID NO: 3862
uugauccgauuagaaagau

SEQ ID NO: 300517 - RNA, 19 nt, Artificial Sequence
  Description of Artificial Sequence: Synthetic oligonucleotide
  Antisense strand to SEQ ID NO: 300516
aucuuucuaaucggaucaa

SEQ ID NO: 300518 - RNA, 19 nt, Artificial Sequence
  Description of Artificial Sequence: Synthetic oligonucleotide
  Sense strand starting at position 426 of SEQ ID NO: 3862
cgauuagaaagauggcaau

SEQ ID NO: 300519 - RNA, 19 nt, Artificial Sequence
  Description of Artificial Sequence: Synthetic oligonucleotide
  Antisense strand to SEQ ID NO: 300518
auugccaucuuucuaaucg

SEQ ID NO: 300520 - RNA, 19 nt, Artificial Sequence
  Description of Artificial Sequence: Synthetic oligonucleotide
  Sense strand starting at position 429 of SEQ ID NO: 3862
uuagaaagauggcaaugaa

SEQ ID NO: 300521 - RNA, 19 nt, Artificial Sequence
  Description of Artificial Sequence: Synthetic oligonucleotide
  Antisense strand to SEQ ID NO: 300520
uucauugccaucuuucuaa

SEQ ID NO: 300522 - RNA, 19 nt, Artificial Sequence
  Description of Artificial Sequence: Synthetic oligonucleotide
  Sense strand starting at position 464 of SEQ ID NO: 3862
ucuuauggcuccucuaagu

SEQ ID NO: 300523 - RNA, 19 nt, Artificial Sequence
  Description of Artificial Sequence: Synthetic oligonucleotide
  Antisense strand to SEQ ID NO: 300522
acuuagaggagccauaaga

SEQ ID NO: 300524 - RNA, 19 nt, Artificial Sequence
  Description of Artificial Sequence: Synthetic oligonucleotide
  Sense strand starting at position 537 of SEQ ID NO: 3862
aagucaaaucuacggucuu

SEQ ID NO: 300525 - RNA, 19 nt, Artificial Sequence
  Description of Artificial Sequence: Synthetic oligonucleotide
  Antisense strand to SEQ ID NO: 300524
aagaccguagauuugacuu

SEQ ID NO: 300526 - RNA, 19 nt, Artificial Sequence
  Description of Artificial Sequence: Synthetic oligonucleotide
  Sense strand starting at position 549 of SEQ ID NO: 3862
cggucuugucaacagagaa

SEQ ID NO: 300527 - RNA, 19 nt, Artificial Sequence
  Description of Artificial Sequence: Synthetic oligonucleotide
  Antisense strand to SEQ ID NO: 300526
uucucuguugacaagaccg

SEQ ID NO: 300528 - RNA, 19 nt, Artificial Sequence
  Description of Artificial Sequence: Synthetic oligonucleotide
  Sense strand starting at position 700 of SEQ ID NO: 3862
aagaguguaugcucaggaa

SEQ ID NO: 300529 - RNA, 19 nt, Artificial Sequence
  Description of Artificial Sequence: Synthetic oligonucleotide
  Antisense strand to SEQ ID NO: 300528
uuccugagcauacacucuu

SEQ ID NO: 300530 - RNA, 19 nt, Artificial Sequence
  Description of Artificial Sequence: Synthetic oligonucleotide
  Sense strand starting at position 704 of SEQ ID NO: 3862
guguaugcucaggaaacag

SEQ ID NO: 300531 - RNA, 19 nt, Artificial Sequence
  Description of Artificial Sequence: Synthetic oligonucleotide
  Antisense strand to SEQ ID NO: 300530
cuguuuccugagcauacac

SEQ ID NO: 300532 - RNA, 19 nt, Artificial Sequence
  Description of Artificial Sequence: Synthetic oligonucleotide
  Sense strand starting at position 821 of SEQ ID NO: 3862
uuacccagaucauguauuu

SEQ ID NO: 300533 - RNA, 19 nt, Artificial Sequence
  Description of Artificial Sequence: Synthetic oligonucleotide
  Antisense strand to SEQ ID NO: 300532
aaauacaugaucuggguaa

SEQ ID NO: 300534 - RNA, 19 nt, Artificial Sequence
  Description of Artificial Sequence: Synthetic oligonucleotide
  Sense strand starting at position 856 of SEQ ID NO: 3862
gccacuguguauucuucua

SEQ ID NO: 300535 - RNA, 19 nt, Artificial Sequence
  Description of Artificial Sequence: Synthetic oligonucleotide
  Antisense strand to SEQ ID NO: 300534
uagaagaauacacaguggc

SEQ ID NO: 300536 - RNA, 19 nt, Artificial Sequence
  Description of Artificial Sequence: Synthetic oligonucleotide
  Sense strand starting at position 875 of SEQ ID NO: 3862
ucaguucugccagguaaua

SEQ ID NO: 300537 - RNA, 19 nt, Artificial Sequence
  Description of Artificial Sequence: Synthetic oligonucleotide
  Antisense strand to SEQ ID NO: 300536
uauuaccuggcagaacuga

SEQ ID NO: 300538 - RNA, 19 nt, Artificial Sequence
  Description of Artificial Sequence: Synthetic oligonucleotide
  Sense strand starting at position 877 of SEQ ID NO: 3862
aguucugccagguaauaga

SEQ ID NO: 300539 - RNA, 19 nt, Artificial Sequence
  Description of Artificial Sequence: Synthetic oligonucleotide
  Antisense strand to SEQ ID NO: 300538
ucuauuaccuggcagaacu

SEQ ID NO: 300540 - RNA, 19 nt, Artificial Sequence
  Description of Artificial Sequence: Synthetic oligonucleotide
  Sense strand starting at position 1045 of SEQ ID NO: 3862
cuuccaagucuggagaagu

SEQ ID NO: 300541 - RNA, 19 nt, Artificial Sequence
  Description of Artificial Sequence: Synthetic oligonucleotide
  Antisense strand to SEQ ID NO: 300540
acuucuccagacuuggaag

SEQ ID NO: 300542 - RNA, 19 nt, Artificial Sequence
  Description of Artificial Sequence: Synthetic oligonucleotide
  Sense strand starting at position 1067 of SEQ ID NO: 3862
acuuucuuagggcaacuaa

SEQ ID NO: 300543 - RNA, 19 nt, Artificial Sequence
  Description of Artificial Sequence: Synthetic oligonucleotide
  Antisense strand to SEQ ID NO: 300542
uuaguugcccuaagaaagu

SEQ ID NO: 300544 - RNA, 19 nt, Artificial Sequence
  Description of Artificial Sequence: Synthetic oligonucleotide
  Sense strand starting at position 1210 of SEQ ID NO: 3862
ggucccugggcugagaaua

SEQ ID NO: 300545 - RNA, 19 nt, Artificial Sequence
  Description of Artificial Sequence: Synthetic oligonucleotide
  Antisense strand to SEQ ID NO: 300544
uauucucagcccagggacc

SEQ ID NO: 300546 - RNA, 19 nt, Artificial Sequence
  Description of Artificial Sequence: Synthetic oligonucleotide
  Sense strand starting at position 1304 of SEQ ID NO: 3862
acgaguuuagugugagaaa

SEQ ID NO: 300547 - RNA, 19 nt, Artificial Sequence
  Description of Artificial Sequence: Synthetic oligonucleotide
  Antisense strand to SEQ ID NO: 300546
uuucucacacuaaacucgu

SEQ ID NO: 300548 - RNA, 19 nt, Artificial Sequence
  Description of Artificial Sequence: Synthetic oligonucleotide
  Sense strand starting at position 2341 of SEQ ID NO: 3862
acaagucugucucuugcua

SEQ ID NO: 300549 - RNA, 19 nt, Artificial Sequence
  Description of Artificial Sequence: Synthetic oligonucleotide
  Antisense strand to SEQ ID NO: 300548
uagcaagagacagacuugu

SEQ ID NO: 300550 - RNA, 19 nt, Artificial Sequence
  Description of Artificial Sequence: Synthetic oligonucleotide
  Sense strand starting at position 2400 of SEQ ID NO: 3862
ugccacgcucugugauaaa

SEQ ID NO: 300551 - RNA, 19 nt, Artificial Sequence
  Description of Artificial Sequence: Synthetic oligonucleotide
  Antisense strand to SEQ ID NO: 300550
uuuaucacagagcguggca

SEQ ID NO: 300552 - RNA, 19 nt, Artificial Sequence
  Description of Artificial Sequence: Synthetic oligonucleotide
  Sense strand starting at position 2426 of SEQ ID NO: 3862
uguguucuugucggaaauu

SEQ ID NO: 300553 - RNA, 19 nt, Artificial Sequence
  Description of Artificial Sequence: Synthetic oligonucleotide
  Antisense strand to SEQ ID NO: 300552
aauuuccgacaagaacaca

SEQ ID NO: 300554 - RNA, 19 nt, Artificial Sequence
  Description of Artificial Sequence: Synthetic oligonucleotide
  Sense strand starting at position 2493 of SEQ ID NO: 3862
ggaaguugcccugggucau

SEQ ID NO: 300555 - RNA, 19 nt, Artificial Sequence
  Description of Artificial Sequence: Synthetic oligonucleotide
  Antisense strand to SEQ ID NO: 300554
augacccagggcaacuucc

SEQ ID NO: 300556 - RNA, 19 nt, Artificial Sequence
  Description of Artificial Sequence: Synthetic oligonucleotide
  Sense strand starting at position 2716 of SEQ ID NO: 3862
accgguuaguccuugucaa

SEQ ID NO: 300557 - RNA, 19 nt, Artificial Sequence
  Description of Artificial Sequence: Synthetic oligonucleotide
  Antisense strand to SEQ ID NO: 300556
uugacaaggacuaaccggu

SEQ ID NO: 300558 - RNA, 19 nt, Artificial Sequence
  Description of Artificial Sequence: Synthetic oligonucleotide
  Sense strand starting at position 2789 of SEQ ID NO: 3862
agagucuaguaggcuuauu

SEQ ID NO: 300559 - RNA, 19 nt, Artificial Sequence
  Description of Artificial Sequence: Synthetic oligonucleotide
  Antisense strand to SEQ ID NO: 300558
aauaagccuacuagacucu

SEQ ID NO: 300560 - RNA, 19 nt, Artificial Sequence
  Description of Artificial Sequence: Synthetic oligonucleotide
  Sense strand starting at position 2861 of SEQ ID NO: 3862
ccguaugauuuagcaauuc

SEQ ID NO: 300561 - RNA, 19 nt, Artificial Sequence
  Description of Artificial Sequence: Synthetic oligonucleotide
  Antisense strand to SEQ ID NO: 300560
gaauugcuaaaucauacgg

SEQ ID NO: 300562 - RNA, 19 nt, Artificial Sequence
  Description of Artificial Sequence: Synthetic oligonucleotide
  Sense strand starting at position 2977 of SEQ ID NO: 3862
ccaaauguccaucgguuga

SEQ ID NO: 300563 - RNA, 19 nt, Artificial Sequence
  Description of Artificial Sequence: Synthetic oligonucleotide
  Antisense strand to SEQ ID NO: 300562
ucaaccgauggacauuugg

SEQ ID NO: 300564 - RNA, 19 nt, Artificial Sequence
  Description of Artificial Sequence: Synthetic oligonucleotide
  Sense strand starting at position 2981 of SEQ ID NO: 3862
auguccaucgguugacgaa

SEQ ID NO: 300565 - RNA, 19 nt, Artificial Sequence
  Description of Artificial Sequence: Synthetic oligonucleotide
  Antisense strand to SEQ ID NO: 300564
uucgucaaccgauggacau

SEQ ID NO: 300566 - RNA, 19 nt, Artificial Sequence
  Description of Artificial Sequence: Synthetic oligonucleotide
  Sense strand starting at position 2982 of SEQ ID NO: 3862
uguccaucgguugacgaaa

SEQ ID NO: 300567 - RNA, 19 nt, Artificial Sequence
  Description of Artificial Sequence: Synthetic oligonucleotide
  Antisense strand to SEQ ID NO: 300566
uuucgucaaccgauggaca

SEQ ID NO: 300568 - RNA, 19 nt, Artificial Sequence
  Description of Artificial Sequence: Synthetic oligonucleotide
  Sense strand starting at position 3092 of SEQ ID NO: 3862
ccuugaaggcaugaugcua

SEQ ID NO: 300569 - RNA, 19 nt, Artificial Sequence
  Description of Artificial Sequence: Synthetic oligonucleotide
  Antisense strand to SEQ ID NO: 300568
uagcaucaugccuucaagg

SEQ ID NO: 300570 - RNA, 19 nt, Artificial Sequence
  Description of Artificial Sequence: Synthetic oligonucleotide
  Sense strand starting at position 3295 of SEQ ID NO: 3862
gcaucacaacagugugaau

SEQ ID NO: 300571 - RNA, 19 nt, Artificial Sequence
  Description of Artificial Sequence: Synthetic oligonucleotide
  Antisense strand to SEQ ID NO: 300570
auucacacuguugugaugc

SEQ ID NO: 300572 - RNA, 19 nt, Artificial Sequence
  Description of Artificial Sequence: Synthetic oligonucleotide
  Sense strand starting at position 41 of SEQ ID NO: 3863
auuggauauuguucuaaca

SEQ ID NO: 300573 - RNA, 19 nt, Artificial Sequence
  Description of Artificial Sequence: Synthetic oligonucleotide
  Antisense strand to SEQ ID NO: 300572
uguuagaacaauauccaau

SEQ ID NO: 300574 - RNA, 19 nt, Artificial Sequence
  Description of Artificial Sequence: Synthetic oligonucleotide
  Sense strand starting at position 70 of SEQ ID NO: 3863
uguccacauuuguaauaca

SEQ ID NO: 300575 - RNA, 19 nt, Artificial Sequence
  Description of Artificial Sequence: Synthetic oligonucleotide
  Antisense strand to SEQ ID NO: 300574
uguauuacaaauguggaca

SEQ ID NO: 300576 - RNA, 19 nt, Artificial Sequence
  Description of Artificial Sequence: Synthetic oligonucleotide
  Sense strand starting at position 271 of SEQ ID NO: 3863
acaagagauucccucguca

SEQ ID NO: 300577 - RNA, 19 nt, Artificial Sequence
  Description of Artificial Sequence: Synthetic oligonucleotide
  Antisense strand to SEQ ID NO: 300576
ugacgagggaaucucuugu

SEQ ID NO: 300578 - RNA, 19 nt, Artificial Sequence
  Description of Artificial Sequence: Synthetic oligonucleotide
  Sense strand starting at position 273 of SEQ ID NO: 3863
aagagauucccucgucacu

SEQ ID NO: 300579 - RNA, 19 nt, Artificial Sequence
  Description of Artificial Sequence: Synthetic oligonucleotide
  Antisense strand to SEQ ID NO: 300578
agugacgagggaaucucuu

SEQ ID NO: 300580 - RNA, 19 nt, Artificial Sequence
  Description of Artificial Sequence: Synthetic oligonucleotide
  Sense strand starting at position 313 of SEQ ID NO: 3863
uggcuucuugcuguuugua

SEQ ID NO: 300581 - RNA, 19 nt, Artificial Sequence
  Description of Artificial Sequence: Synthetic oligonucleotide
  Antisense strand to SEQ ID NO: 300580
uacaaacagcaagaagcca

SEQ ID NO: 300582 - RNA, 19 nt, Artificial Sequence
  Description of Artificial Sequence: Synthetic oligonucleotide
  Sense strand starting at position 650 of SEQ ID NO: 3863
caggguguacugugaugga

SEQ ID NO: 300583 - RNA, 19 nt, Artificial Sequence
  Description of Artificial Sequence: Synthetic oligonucleotide
  Antisense strand to SEQ ID NO: 300582
uccaucacaguacacccug

SEQ ID NO: 300584 - RNA, 19 nt, Artificial Sequence
  Description of Artificial Sequence: Synthetic oligonucleotide
  Sense strand starting at position 691 of SEQ ID NO: 3863
gguuuaguguacuuagaca

SEQ ID NO: 300585 - RNA, 19 nt, Artificial Sequence
  Description of Artificial Sequence: Synthetic oligonucleotide
  Antisense strand to SEQ ID NO: 300584
ugucuaaguacacuaaacc

SEQ ID NO: 300586 - RNA, 19 nt, Artificial Sequence
  Description of Artificial Sequence: Synthetic oligonucleotide
  Sense strand starting at position 764 of SEQ ID NO: 3863
agugcaugcugaguaaaua

SEQ ID NO: 300587 - RNA, 19 nt, Artificial Sequence
  Description of Artificial Sequence: Synthetic oligonucleotide
  Antisense strand to SEQ ID NO: 300586
uauuuacucagcaugcacu

SEQ ID NO: 300588 - RNA, 19 nt, Artificial Sequence
  Description of Artificial Sequence: Synthetic oligonucleotide
  Sense strand starting at position 765 of SEQ ID NO: 3863
gugcaugcugaguaaauaa

SEQ ID NO: 300589 - RNA, 19 nt, Artificial Sequence
  Description of Artificial Sequence: Synthetic oligonucleotide
  Antisense strand to SEQ ID NO: 300588
uuauuuacucagcaugcac

SEQ ID NO: 300590 - RNA, 19 nt, Artificial Sequence
  Description of Artificial Sequence: Synthetic oligonucleotide
  Sense strand starting at position 977 of SEQ ID NO: 3863
ucaccugucccggguauuu

SEQ ID NO: 300591 - RNA, 19 nt, Artificial Sequence
  Description of Artificial Sequence: Synthetic oligonucleotide
  Antisense strand to SEQ ID NO: 300590
aaauacccgggacagguga

SEQ ID NO: 300592 - RNA, 19 nt, Artificial Sequence
  Description of Artificial Sequence: Synthetic oligonucleotide
  Sense strand starting at position 1241 of SEQ ID NO: 3863
ggcuguuuagaagaucaca

SEQ ID NO: 300593 - RNA, 19 nt, Artificial Sequence
  Description of Artificial Sequence: Synthetic oligonucleotide
  Antisense strand to SEQ ID NO: 300592
ugugaucuucuaaacagcc

SEQ ID NO: 300594 - RNA, 19 nt, Artificial Sequence
  Description of Artificial Sequence: Synthetic oligonucleotide
  Sense strand starting at position 1269 of SEQ ID NO: 3863
cagguuuacuguuugagag

SEQ ID NO: 300595 - RNA, 19 nt, Artificial Sequence
  Description of Artificial Sequence: Synthetic oligonucleotide
  Antisense strand to SEQ ID NO: 300594
cucucaaacaguaaaccug

SEQ ID NO: 300596 - RNA, 19 nt, Artificial Sequence
  Description of Artificial Sequence: Synthetic oligonucleotide
  Sense strand starting at position 1275 of SEQ ID NO: 3863
uacuguuugagagguauag

SEQ ID NO: 300597 - RNA, 19 nt, Artificial Sequence
  Description of Artificial Sequence: Synthetic oligonucleotide
  Antisense strand to SEQ ID NO: 300596
cuauaccucucaaacagua

SEQ ID NO: 300598 - RNA, 19 nt, Artificial Sequence
  Description of Artificial Sequence: Synthetic oligonucleotide
  Sense strand starting at position 1277 of SEQ ID NO: 3863
cuguuugagagguauagcu

SEQ ID NO: 300599 - RNA, 19 nt, Artificial Sequence
  Description of Artificial Sequence: Synthetic oligonucleotide
  Antisense strand to SEQ ID NO: 300598
agcuauaccucucaaacag

SEQ ID NO: 300600 - RNA, 19 nt, Artificial Sequence
  Description of Artificial Sequence: Synthetic oligonucleotide
  Sense strand starting at position 1279 of SEQ ID NO: 3863
guuugagagguauagcuga

SEQ ID NO: 300601 - RNA, 19 nt, Artificial Sequence
  Description of Artificial Sequence: Synthetic oligonucleotide
  Antisense strand to SEQ ID NO: 300600
ucagcuauaccucucaaac

SEQ ID NO: 300602 - RNA, 19 nt, Artificial Sequence
  Description of Artificial Sequence: Synthetic oligonucleotide
  Sense strand starting at position 1284 of SEQ ID NO: 3863
agagguauagcugauccua

SEQ ID NO: 300603 - RNA, 19 nt, Artificial Sequence
  Description of Artificial Sequence: Synthetic oligonucleotide
  Antisense strand to SEQ ID NO: 300602
uaggaucagcuauaccucu

SEQ ID NO: 300604 - RNA, 19 nt, Artificial Sequence
  Description of Artificial Sequence: Synthetic oligonucleotide
  Sense strand starting at position 1307 of SEQ ID NO: 3863
aagugaagugcugguaaau

SEQ ID NO: 300605 - RNA, 19 nt, Artificial Sequence
  Description of Artificial Sequence: Synthetic oligonucleotide
  Antisense strand to SEQ ID NO: 300604
auuuaccagcacuucacuu

SEQ ID NO: 300606 - RNA, 19 nt, Artificial Sequence
  Description of Artificial Sequence: Synthetic oligonucleotide
  Sense strand starting at position 1427 of SEQ ID NO: 3863
acauaaugucauuggcacu

SEQ ID NO: 300607 - RNA, 19 nt, Artificial Sequence
  Description of Artificial Sequence: Synthetic oligonucleotide
  Antisense strand to SEQ ID NO: 300606
agugccaaugacauuaugu

SEQ ID NO: 300608 - RNA, 19 nt, Artificial Sequence
  Description of Artificial Sequence: Synthetic oligonucleotide
  Sense strand starting at position 1442 of SEQ ID NO: 3863
cacugaguugcacagauau

SEQ ID NO: 300609 - RNA, 19 nt, Artificial Sequence
  Description of Artificial Sequence: Synthetic oligonucleotide
  Antisense strand to SEQ ID NO: 300608
auaucugugcaacucagug

SEQ ID NO: 300610 - RNA, 19 nt, Artificial Sequence
  Description of Artificial Sequence: Synthetic oligonucleotide
  Sense strand starting at position 1502 of SEQ ID NO: 3863
gcucacauguuccucugaa

SEQ ID NO: 300611 - RNA, 19 nt, Artificial Sequence
  Description of Artificial Sequence: Synthetic oligonucleotide
  Antisense strand to SEQ ID NO: 300610
uucagaggaacaugugagc

SEQ ID NO: 300612 - RNA, 19 nt, Artificial Sequence
  Description of Artificial Sequence: Synthetic oligonucleotide
  Sense strand starting at position 1591 of SEQ ID NO: 3863
gggaguauccaaggugaag

SEQ ID NO: 300613 - RNA, 19 nt, Artificial Sequence
  Description of Artificial Sequence: Synthetic oligonucleotide
  Antisense strand to SEQ ID NO: 300612
cuucaccuuggauacuccc

SEQ ID NO: 300614 - RNA, 19 nt, Artificial Sequence
  Description of Artificial Sequence: Synthetic oligonucleotide
  Sense strand starting at position 2047 of SEQ ID NO: 3863
ugaugagggucccugucau

SEQ ID NO: 300615 - RNA, 19 nt, Artificial Sequence
  Description of Artificial Sequence: Synthetic oligonucleotide
  Antisense strand to SEQ ID NO: 300614
augacagggacccucauca

SEQ ID NO: 300616 - RNA, 19 nt, Artificial Sequence
  Description of Artificial Sequence: Synthetic oligonucleotide
  Sense strand starting at position 2216 of SEQ ID NO: 3863
gagcccaugugguuuacaa

SEQ ID NO: 300617 - RNA, 19 nt, Artificial Sequence
  Description of Artificial Sequence: Synthetic oligonucleotide
  Antisense strand to SEQ ID NO: 300616
uuguaaaccacaugggcuc

SEQ ID NO: 300618 - RNA, 19 nt, Artificial Sequence
  Description of Artificial Sequence: Synthetic oligonucleotide
  Sense strand starting at position 2218 of SEQ ID NO: 3863
gcccaugugguuuacaaca

SEQ ID NO: 300619 - RNA, 19 nt, Artificial Sequence
  Description of Artificial Sequence: Synthetic oligonucleotide
  Antisense strand to SEQ ID NO: 300618
uguuguaaaccacaugggc

SEQ ID NO: 300620 - RNA, 19 nt, Artificial Sequence
  Description of Artificial Sequence: Synthetic oligonucleotide
  Sense strand starting at position 2223 of SEQ ID NO: 3863
ugugguuuacaacaucaga

SEQ ID NO: 300621 - RNA, 19 nt, Artificial Sequence
  Description of Artificial Sequence: Synthetic oligonucleotide
  Antisense strand to SEQ ID NO: 300620
ucugauguuguaaaccaca

SEQ ID NO: 300622 - RNA, 19 nt, Artificial Sequence
  Description of Artificial Sequence: Synthetic oligonucleotide
  Sense strand starting at position 2542 of SEQ ID NO: 3863
uuugguaucuacguacaau

SEQ ID NO: 300623 - RNA, 19 nt, Artificial Sequence
  Description of Artificial Sequence: Synthetic oligonucleotide
  Antisense strand to SEQ ID NO: 300622
auuguacguagauaccaaa

SEQ ID NO: 300624 - RNA, 19 nt, Artificial Sequence
  Description of Artificial Sequence: Synthetic oligonucleotide
  Sense strand starting at position 2543 of SEQ ID NO: 3863
uugguaucuacguacaaug

SEQ ID NO: 300625 - RNA, 19 nt, Artificial Sequence
  Description of Artificial Sequence: Synthetic oligonucleotide
  Antisense strand to SEQ ID NO: 300624
cauuguacguagauaccaa

SEQ ID NO: 300626 - RNA, 19 nt, Artificial Sequence
  Description of Artificial Sequence: Synthetic oligonucleotide
  Sense strand starting at position 3012 of SEQ ID NO: 3863
cugcgagguaccuagagaa

SEQ ID NO: 300627 - RNA, 19 nt, Artificial Sequence
  Description of Artificial Sequence: Synthetic oligonucleotide
  Antisense strand to SEQ ID NO: 300626
uucucuagguaccucgcag

SEQ ID NO: 300628 - RNA, 19 nt, Artificial Sequence
  Description of Artificial Sequence: Synthetic oligonucleotide
  Sense strand starting at position 3056 of SEQ ID NO: 3863
gaaugauaguugccagaga

SEQ ID NO: 300629 - RNA, 19 nt, Artificial Sequence
  Description of Artificial Sequence: Synthetic oligonucleotide
  Antisense strand to SEQ ID NO: 300628
ucucuggcaacuaucauuc

SEQ ID NO: 300630 - RNA, 19 nt, Artificial Sequence
  Description of Artificial Sequence: Synthetic oligonucleotide
  Sense strand starting at position 3484 of SEQ ID NO: 3863
uguucugaacuuuauagau

SEQ ID NO: 300631 - RNA, 19 nt, Artificial Sequence
  Description of Artificial Sequence: Synthetic oligonucleotide
  Antisense strand to SEQ ID NO: 300630
aucuauaaaguucagaaca

SEQ ID NO: 300632 - RNA, 19 nt, Artificial Sequence
  Description of Artificial Sequence: Synthetic oligonucleotide
  Sense strand starting at position 3519 of SEQ ID NO: 3863
auggaaaucucugcuuaca

SEQ ID NO: 300633 - RNA, 19 nt, Artificial Sequence
  Description of Artificial Sequence: Synthetic oligonucleotide
  Antisense strand to SEQ ID NO: 300632
uguaagcagagauuuccau

SEQ ID NO: 300634 - RNA, 19 nt, Artificial Sequence
  Description of Artificial Sequence: Synthetic oligonucleotide
  Sense strand starting at position 3521 of SEQ ID NO: 3863
ggaaaucucugcuuacauu

SEQ ID NO: 300635 - RNA, 19 nt, Artificial Sequence
  Description of Artificial Sequence: Synthetic oligonucleotide
  Antisense strand to SEQ ID NO: 300634
aauguaagcagagauuucc

SEQ ID NO: 300636 - RNA, 19 nt, Artificial Sequence
  Description of Artificial Sequence: Synthetic oligonucleotide
  Sense strand starting at position 3670 of SEQ ID NO: 3863
cucugagagggugauguua

SEQ ID NO: 300637 - RNA, 19 nt, Artificial Sequence
  Description of Artificial Sequence: Synthetic oligonucleotide
  Antisense strand to SEQ ID NO: 300636
uaacaucacccucucagag

SEQ ID NO: 300638 - RNA, 19 nt, Artificial Sequence
  Description of Artificial Sequence: Synthetic oligonucleotide
  Sense strand starting at position 3688 of SEQ ID NO: 3863
auaguagagaucugaagca

SEQ ID NO: 300639 - RNA, 19 nt, Artificial Sequence
  Description of Artificial Sequence: Synthetic oligonucleotide
  Antisense strand to SEQ ID NO: 300638
ugcuucagaucucuacuau

SEQ ID NO: 300640 - RNA, 19 nt, Artificial Sequence
  Description of Artificial Sequence: Synthetic oligonucleotide
  Sense strand starting at position 3744 of SEQ ID NO: 3863
ggguucuagacacagcaau

SEQ ID NO: 300641 - RNA, 19 nt, Artificial Sequence
  Description of Artificial Sequence: Synthetic oligonucleotide
  Antisense strand to SEQ ID NO: 300640
auugcugugucuagaaccc

SEQ ID NO: 300642 - RNA, 19 nt, Artificial Sequence
  Description of Artificial Sequence: Synthetic oligonucleotide
  Sense strand starting at position 3810 of SEQ ID NO: 3863
ccagccaugugccuagaaa

SEQ ID NO: 300643 - RNA, 19 nt, Artificial Sequence
  Description of Artificial Sequence: Synthetic oligonucleotide
  Antisense strand to SEQ ID NO: 300642
uuucuaggcacauggcugg

SEQ ID NO: 300644 - RNA, 19 nt, Artificial Sequence
  Description of Artificial Sequence: Synthetic oligonucleotide
  Sense strand starting at position 3811 of SEQ ID NO: 3863
cagccaugugccuagaaag

SEQ ID NO: 300645 - RNA, 19 nt, Artificial Sequence
  Description of Artificial Sequence: Synthetic oligonucleotide
  Antisense strand to SEQ ID NO: 300644
cuuucuaggcacauggcug

SEQ ID NO: 300646 - RNA, 19 nt, Artificial Sequence
  Description of Artificial Sequence: Synthetic oligonucleotide
  Sense strand starting at position 3855 of SEQ ID NO: 3863
gauugaguuggcugggaau

SEQ ID NO: 300647 - RNA, 19 nt, Artificial Sequence
  Description of Artificial Sequence: Synthetic oligonucleotide
  Antisense strand to SEQ ID NO: 300646
auucccagccaacucaauc

SEQ ID NO: 300648 - RNA, 19 nt, Artificial Sequence
  Description of Artificial Sequence: Synthetic oligonucleotide
  Sense strand starting at position 3857 of SEQ ID NO: 3863
uugaguuggcugggaaucu

SEQ ID NO: 300649 - RNA, 19 nt, Artificial Sequence
  Description of Artificial Sequence: Synthetic oligonucleotide
  Antisense strand to SEQ ID NO: 300648
agauucccagccaacucaa

SEQ ID NO: 300650 - RNA, 19 nt, Artificial Sequence
  Description of Artificial Sequence: Synthetic oligonucleotide
  Sense strand starting at position 3937 of SEQ ID NO: 3863
cuuugaguguguccacaga

SEQ ID NO: 300651 - RNA, 19 nt, Artificial Sequence
  Description of Artificial Sequence: Synthetic oligonucleotide
  Antisense strand to SEQ ID NO: 300650
ucuguggacacacucaaag

SEQ ID NO: 300652 - RNA, 19 nt, Artificial Sequence
  Description of Artificial Sequence: Synthetic oligonucleotide
  Sense strand starting at position 218 of SEQ ID NO: 3864
cccagcuuccaagaaguga

SEQ ID NO: 300653 - RNA, 19 nt, Artificial Sequence
  Description of Artificial Sequence: Synthetic oligonucleotide
  Antisense strand to SEQ ID NO: 300652
ucacuucuuggaagcuggg

SEQ ID NO: 300654 - RNA, 19 nt, Artificial Sequence
  Description of Artificial Sequence: Synthetic oligonucleotide
  Sense strand starting at position 290 of SEQ ID NO: 3864
ccaauauggcuuuacagca

SEQ ID NO: 300655 - RNA, 19 nt, Artificial Sequence
  Description of Artificial Sequence: Synthetic oligonucleotide
  Antisense strand to SEQ ID NO: 300654
ugcuguaaagccauauugg

SEQ ID NO: 300656 - RNA, 19 nt, Artificial Sequence
  Description of Artificial Sequence: Synthetic oligonucleotide
  Sense strand starting at position 380 of SEQ ID NO: 3864
cuuccaucucgguagcaga

SEQ ID NO: 300657 - RNA, 19 nt, Artificial Sequence
  Description of Artificial Sequence: Synthetic oligonucleotide
  Antisense strand to SEQ ID NO: 300656
ucugcuaccgagauggaag

SEQ ID NO: 300658 - RNA, 19 nt, Artificial Sequence
  Description of Artificial Sequence: Synthetic oligonucleotide
  Sense strand starting at position 422 of SEQ ID NO: 3864
aagggagaauuguucccua

SEQ ID NO: 300659 - RNA, 19 nt, Artificial Sequence
  Description of Artificial Sequence: Synthetic oligonucleotide
  Antisense strand to SEQ ID NO: 300658
uagggaacaauucucccuu

SEQ ID NO: 300660 - RNA, 19 nt, Artificial Sequence
  Description of Artificial Sequence: Synthetic oligonucleotide
  Sense strand starting at position 425 of SEQ ID NO: 3864
ggagaauuguucccuaacg

SEQ ID NO: 300661 - RNA, 19 nt, Artificial Sequence
  Description of Artificial Sequence: Synthetic oligonucleotide
  Antisense strand to SEQ ID NO: 300660
cguuagggaacaauucucc

SEQ ID NO: 300662 - RNA, 19 nt, Artificial Sequence
  Description of Artificial Sequence: Synthetic oligonucleotide
  Sense strand starting at position 426 of SEQ ID NO: 3864
gagaauuguucccuaacgg

SEQ ID NO: 300663 - RNA, 19 nt, Artificial Sequence
  Description of Artificial Sequence: Synthetic oligonucleotide
  Antisense strand to SEQ ID NO: 300662
ccguuagggaacaauucuc

SEQ ID NO: 300664 - RNA, 19 nt, Artificial Sequence
  Description of Artificial Sequence: Synthetic oligonucleotide
  Sense strand starting at position 449 of SEQ ID NO: 3864
aggacauuguagguaucua

SEQ ID NO: 300665 - RNA, 19 nt, Artificial Sequence
  Description of Artificial Sequence: Synthetic oligonucleotide
  Antisense strand to SEQ ID NO: 300664
uagauaccuacaauguccu

SEQ ID NO: 300666 - RNA, 19 nt, Artificial Sequence
  Description of Artificial Sequence: Synthetic oligonucleotide
  Sense strand starting at position 450 of SEQ ID NO: 3864
ggacauuguagguaucuag

SEQ ID NO: 300667 - RNA, 19 nt, Artificial Sequence
  Description of Artificial Sequence: Synthetic oligonucleotide
  Antisense strand to SEQ ID NO: 300666
cuagauaccuacaaugucc

SEQ ID NO: 300668 - RNA, 19 nt, Artificial Sequence
  Description of Artificial Sequence: Synthetic oligonucleotide
  Sense strand starting at position 453 of SEQ ID NO: 3864
cauuguagguaucuaggaa

SEQ ID NO: 300669 - RNA, 19 nt, Artificial Sequence
  Description of Artificial Sequence: Synthetic oligonucleotide
  Antisense strand to SEQ ID NO: 300668
uuccuagauaccuacaaug

SEQ ID NO: 300670 - RNA, 19 nt, Artificial Sequence
  Description of Artificial Sequence: Synthetic oligonucleotide
  Sense strand starting at position 634 of SEQ ID NO: 3864
acacuuaaucucuggguga

SEQ ID NO: 300671 - RNA, 19 nt, Artificial Sequence
  Description of Artificial Sequence: Synthetic oligonucleotide
  Antisense strand to SEQ ID NO: 300670
ucacccagagauuaagugu

SEQ ID NO: 300672 - RNA, 19 nt, Artificial Sequence
  Description of Artificial Sequence: Synthetic oligonucleotide
  Sense strand starting at position 636 of SEQ ID NO: 3864
acuuaaucucugggugauu

SEQ ID NO: 300673 - RNA, 19 nt, Artificial Sequence
  Description of Artificial Sequence: Synthetic oligonucleotide
  Antisense strand to SEQ ID NO: 300672
aaucacccagagauuaagu

SEQ ID NO: 300674 - RNA, 19 nt, Artificial Sequence
  Description of Artificial Sequence: Synthetic oligonucleotide
  Sense strand starting at position 637 of SEQ ID NO: 3864
cuuaaucucugggugauua

SEQ ID NO: 300675 - RNA, 19 nt, Artificial Sequence
  Description of Artificial Sequence: Synthetic oligonucleotide
  Antisense strand to SEQ ID NO: 300674
uaaucacccagagauuaag

SEQ ID NO: 300676 - RNA, 19 nt, Artificial Sequence
  Description of Artificial Sequence: Synthetic oligonucleotide
  Sense strand starting at position 638 of SEQ ID NO: 3864
uuaaucucugggugauuaa

SEQ ID NO: 300677 - RNA, 19 nt, Artificial Sequence
  Description of Artificial Sequence: Synthetic oligonucleotide
  Antisense strand to SEQ ID NO: 300676
uuaaucacccagagauuaa

SEQ ID NO: 300678 - RNA, 19 nt, Artificial Sequence
  Description of Artificial Sequence: Synthetic oligonucleotide
  Sense strand starting at position 641 of SEQ ID NO: 3864
aucucugggugauuaacau

SEQ ID NO: 300679 - RNA, 19 nt, Artificial Sequence
  Description of Artificial Sequence: Synthetic oligonucleotide
  Antisense strand to SEQ ID NO: 300678
auguuaaucacccagagau

SEQ ID NO: 300680 - RNA, 19 nt, Artificial Sequence
  Description of Artificial Sequence: Synthetic oligonucleotide
  Sense strand starting at position 746 of SEQ ID NO: 3864
acuacuuuggcccaugaau

SEQ ID NO: 300681 - RNA, 19 nt, Artificial Sequence
  Description of Artificial Sequence: Synthetic oligonucleotide
  Antisense strand to SEQ ID NO: 300680
auucaugggccaaaguagu

SEQ ID NO: 300682 - RNA, 19 nt, Artificial Sequence
  Description of Artificial Sequence: Synthetic oligonucleotide
  Sense strand starting at position 820 of SEQ ID NO: 3864
ggaugucuucagggaggac

SEQ ID NO: 300683 - RNA, 19 nt, Artificial Sequence
  Description of Artificial Sequence: Synthetic oligonucleotide
  Antisense strand to SEQ ID NO: 300682
guccucccugaagacaucc

SEQ ID NO: 300684 - RNA, 19 nt, Artificial Sequence
  Description of Artificial Sequence: Synthetic oligonucleotide
  Sense strand starting at position 995 of SEQ ID NO: 3864
ucaaaugcccuuuggguua

SEQ ID NO: 300685 - RNA, 19 nt, Artificial Sequence
  Description of Artificial Sequence: Synthetic oligonucleotide
  Antisense strand to SEQ ID NO: 300684
uaacccaaagggcauuuga

SEQ ID NO: 300686 - RNA, 19 nt, Artificial Sequence
  Description of Artificial Sequence: Synthetic oligonucleotide
  Sense strand starting at position 998 of SEQ ID NO: 3864
aaugcccuuuggguuaaau

SEQ ID NO: 300687 - RNA, 19 nt, Artificial Sequence
  Description of Artificial Sequence: Synthetic oligonucleotide
  Antisense strand to SEQ ID NO: 300686
auuuaacccaaagggcauu

SEQ ID NO: 300688 - RNA, 19 nt, Artificial Sequence
  Description of Artificial Sequence: Synthetic oligonucleotide
  Sense strand starting at position 1000 of SEQ ID NO: 3864
ugcccuuuggguuaaauua

SEQ ID NO: 300689 - RNA, 19 nt, Artificial Sequence
  Description of Artificial Sequence: Synthetic oligonucleotide
  Antisense strand to SEQ ID NO: 300688
uaauuuaacccaaagggca

SEQ ID NO: 300690 - RNA, 19 nt, Artificial Sequence
  Description of Artificial Sequence: Synthetic oligonucleotide
  Sense strand starting at position 1008 of SEQ ID NO: 3864
ggguuaaauuaggcacauu

SEQ ID NO: 300691 - RNA, 19 nt, Artificial Sequence
  Description of Artificial Sequence: Synthetic oligonucleotide
  Antisense strand to SEQ ID NO: 300690
aaugugccuaauuuaaccc

SEQ ID NO: 300692 - RNA, 19 nt, Artificial Sequence
  Description of Artificial Sequence: Synthetic oligonucleotide
  Sense strand starting at position 1088 of SEQ ID NO: 3864
aagugaaaugacugcccau

SEQ ID NO: 300693 - RNA, 19 nt, Artificial Sequence
  Description of Artificial Sequence: Synthetic oligonucleotide
  Antisense strand to SEQ ID NO: 300692
augggcagucauuucacuu

SEQ ID NO: 300694 - RNA, 19 nt, Artificial Sequence
  Description of Artificial Sequence: Synthetic oligonucleotide
  Sense strand starting at position 2695 of SEQ ID NO: 3864
ccgagucaggccgacauuu

SEQ ID NO: 300695 - RNA, 19 nt, Artificial Sequence
  Description of Artificial Sequence: Synthetic oligonucleotide
  Antisense strand to SEQ ID NO: 300694
aaaugucggccugacucgg

SEQ ID NO: 300696 - RNA, 19 nt, Artificial Sequence
  Description of Artificial Sequence: Synthetic oligonucleotide
  Sense strand starting at position 2740 of SEQ ID NO: 3864
cugauugucuuucccauua

SEQ ID NO: 300697 - RNA, 19 nt, Artificial Sequence
  Description of Artificial Sequence: Synthetic oligonucleotide
  Antisense strand to SEQ ID NO: 300696
uaaugggaaagacaaucag

SEQ ID NO: 300698 - RNA, 19 nt, Artificial Sequence
  Description of Artificial Sequence: Synthetic oligonucleotide
  Sense strand starting at position 2745 of SEQ ID NO: 3864
ugucuuucccauuagacug

SEQ ID NO: 300699 - RNA, 19 nt, Artificial Sequence
  Description of Artificial Sequence: Synthetic oligonucleotide
  Antisense strand to SEQ ID NO: 300698
cagucuaaugggaaagaca

SEQ ID NO: 300700 - RNA, 19 nt, Artificial Sequence
  Description of Artificial Sequence: Synthetic oligonucleotide
  Sense strand starting at position 2826 of SEQ ID NO: 3864
gugcaugggacauaguuaa

SEQ ID NO: 300701 - RNA, 19 nt, Artificial Sequence
  Description of Artificial Sequence: Synthetic oligonucleotide
  Antisense strand to SEQ ID NO: 300700
uuaacuaugucccaugcac

SEQ ID NO: 300702 - RNA, 19 nt, Artificial Sequence
  Description of Artificial Sequence: Synthetic oligonucleotide
  Sense strand starting at position 2843 of SEQ ID NO: 3864
aagauaaauguuuguugag

SEQ ID NO: 300703 - RNA, 19 nt, Artificial Sequence
  Description of Artificial Sequence: Synthetic oligonucleotide
  Antisense strand to SEQ ID NO: 300702
cucaacaaacauuuaucuu

SEQ ID NO: 300704 - RNA, 19 nt, Artificial Sequence
  Description of Artificial Sequence: Synthetic oligonucleotide
  Sense strand starting at position 2845 of SEQ ID NO: 3864
gauaaauguuuguugagua

SEQ ID NO: 300705 - RNA, 19 nt, Artificial Sequence
  Description of Artificial Sequence: Synthetic oligonucleotide
  Antisense strand to SEQ ID NO: 300704
uacucaacaaacauuuauc

SEQ ID NO: 300706 - RNA, 19 nt, Artificial Sequence
  Description of Artificial Sequence: Synthetic oligonucleotide
  Sense strand starting at position 2849 of SEQ ID NO: 3864
aauguuuguugaguaaaca

SEQ ID NO: 300707 - RNA, 19 nt, Artificial Sequence
  Description of Artificial Sequence: Synthetic oligonucleotide
  Antisense strand to SEQ ID NO: 300706
uguuuacucaacaaacauu

SEQ ID NO: 300708 - RNA, 19 nt, Artificial Sequence
  Description of Artificial Sequence: Synthetic oligonucleotide
  Sense strand starting at position 2850 of SEQ ID NO: 3864
auguuuguugaguaaacau

SEQ ID NO: 300709 - RNA, 19 nt, Artificial Sequence
  Description of Artificial Sequence: Synthetic oligonucleotide
  Antisense strand to SEQ ID NO: 300708
auguuuacucaacaaacau

SEQ ID NO: 300710 - RNA, 19 nt, Artificial Sequence
  Description of Artificial Sequence: Synthetic oligonucleotide
  Sense strand starting at position 2956 of SEQ ID NO: 3864
aaggaagcaucucugugaa

SEQ ID NO: 300711 - RNA, 19 nt, Artificial Sequence
  Description of Artificial Sequence: Synthetic oligonucleotide
  Antisense strand to SEQ ID NO: 300710
uucacagagaugcuuccuu

SEQ ID NO: 300712 - RNA, 19 nt, Artificial Sequence
  Description of Artificial Sequence: Synthetic oligonucleotide
  Sense strand starting at position 2958 of SEQ ID NO: 3864
ggaagcaucucugugaaca

SEQ ID NO: 300713 - RNA, 19 nt, Artificial Sequence
  Description of Artificial Sequence: Synthetic oligonucleotide
  Antisense strand to SEQ ID NO: 300712
uguucacagagaugcuucc

SEQ ID NO: 300714 - RNA, 19 nt, Artificial Sequence
  Description of Artificial Sequence: Synthetic oligonucleotide
  Sense strand starting at position 2959 of SEQ ID NO: 3864
gaagcaucucugugaacau

SEQ ID NO: 300715 - RNA, 19 nt, Artificial Sequence
  Description of Artificial Sequence: Synthetic oligonucleotide
  Antisense strand to SEQ ID NO: 300714
auguucacagagaugcuuc

SEQ ID NO: 300716 - RNA, 19 nt, Artificial Sequence
  Description of Artificial Sequence: Synthetic oligonucleotide
  Sense strand starting at position 3068 of SEQ ID NO: 3864
uggucuugaggagagcuua

SEQ ID NO: 300717 - RNA, 19 nt, Artificial Sequence
  Description of Artificial Sequence: Synthetic oligonucleotide
  Antisense strand to SEQ ID NO: 300716
uaagcucuccucaagacca

SEQ ID NO: 300718 - RNA, 19 nt, Artificial Sequence
  Description of Artificial Sequence: Synthetic oligonucleotide
  Sense strand starting at position 3171 of SEQ ID NO: 3864
agaggagucacauguauga

SEQ ID NO: 300719 - RNA, 19 nt, Artificial Sequence
  Description of Artificial Sequence: Synthetic oligonucleotide
  Antisense strand to SEQ ID NO: 300718
ucauacaugugacuccucu

SEQ ID NO: 300720 - RNA, 19 nt, Artificial Sequence
  Description of Artificial Sequence: Synthetic oligonucleotide
  Sense strand starting at position 3352 of SEQ ID NO: 3864
gggauucugucccugagua

SEQ ID NO: 300721 - RNA, 19 nt, Artificial Sequence
  Description of Artificial Sequence: Synthetic oligonucleotide
  Antisense strand to SEQ ID NO: 300720
uacucagggacagaauccc

SEQ ID NO: 300722 - RNA, 19 nt, Artificial Sequence
  Description of Artificial Sequence: Synthetic oligonucleotide
  Sense strand starting at position 3353 of SEQ ID NO: 3864
ggauucugucccugaguau

SEQ ID NO: 300723 - RNA, 19 nt, Artificial Sequence
  Description of Artificial Sequence: Synthetic oligonucleotide
  Antisense strand to SEQ ID NO: 300722
auacucagggacagaaucc

SEQ ID NO: 300724 - RNA, 19 nt, Artificial Sequence
  Description of Artificial Sequence: Synthetic oligonucleotide
  Sense strand starting at position 3354 of SEQ ID NO: 3864
gauucugucccugaguauu

SEQ ID NO: 300725 - RNA, 19 nt, Artificial Sequence
  Description of Artificial Sequence: Synthetic oligonucleotide
  Antisense strand to SEQ ID NO: 300724
aauacucagggacagaauc

SEQ ID NO: 300726 - RNA, 19 nt, Artificial Sequence
  Description of Artificial Sequence: Synthetic oligonucleotide
  Sense strand starting at position 3357 of SEQ ID NO: 3864
ucugucccugaguauuaau

SEQ ID NO: 300727 - RNA, 19 nt, Artificial Sequence
  Description of Artificial Sequence: Synthetic oligonucleotide
  Antisense strand to SEQ ID NO: 300726
auuaauacucagggacaga

SEQ ID NO: 300728 - RNA, 19 nt, Artificial Sequence
  Description of Artificial Sequence: Synthetic oligonucleotide
  Sense strand starting at position 3557 of SEQ ID NO: 3864
uuaggagaaugggaauauu

SEQ ID NO: 300729 - RNA, 19 nt, Artificial Sequence
  Description of Artificial Sequence: Synthetic oligonucleotide
  Antisense strand to SEQ ID NO: 300728
aauauucccauucuccuaa

SEQ ID NO: 300730 - RNA, 19 nt, Artificial Sequence
  Description of Artificial Sequence: Synthetic oligonucleotide
  Sense strand starting at position 3701 of SEQ ID NO: 3864
ugacuaucccagcagaagu

SEQ ID NO: 300731 - RNA, 19 nt, Artificial Sequence
  Description of Artificial Sequence: Synthetic oligonucleotide
  Antisense strand to SEQ ID NO: 300730
acuucugcugggauaguca

SEQ ID NO: 300732 - RNA, 19 nt, Artificial Sequence
  Description of Artificial Sequence: Synthetic oligonucleotide
  Sense strand starting at position 161 of SEQ ID NO: 3865
ugauuuagucauugguggu

SEQ ID NO: 300733 - RNA, 19 nt, Artificial Sequence
  Description of Artificial Sequence: Synthetic oligonucleotide
  Antisense strand to SEQ ID NO: 300732
accaccaaugacuaaauca

SEQ ID NO: 300734 - RNA, 19 nt, Artificial Sequence
  Description of Artificial Sequence: Synthetic oligonucleotide
  Sense strand starting at position 302 of SEQ ID NO: 3865
caacaagauucugugguca

SEQ ID NO: 300735 - RNA, 19 nt, Artificial Sequence
  Description of Artificial Sequence: Synthetic oligonucleotide
  Antisense strand to SEQ ID NO: 300734
ugaccacagaaucuuguug

SEQ ID NO: 300736 - RNA, 19 nt, Artificial Sequence
  Description of Artificial Sequence: Synthetic oligonucleotide
  Sense strand starting at position 409 of SEQ ID NO: 3865
cuugauuaguuaucuguau

SEQ ID NO: 300737 - RNA, 19 nt, Artificial Sequence
  Description of Artificial Sequence: Synthetic oligonucleotide
  Antisense strand to SEQ ID NO: 300736
auacagauaacuaaucaag

SEQ ID NO: 300738 - RNA, 19 nt, Artificial Sequence
  Description of Artificial Sequence: Synthetic oligonucleotide
  Sense strand starting at position 487 of SEQ ID NO: 3865
agcuguaggccacaaauua

SEQ ID NO: 300739 - RNA, 19 nt, Artificial Sequence
  Description of Artificial Sequence: Synthetic oligonucleotide
  Antisense strand to SEQ ID NO: 300738
uaauuuguggccuacagcu

SEQ ID NO: 300740 - RNA, 19 nt, Artificial Sequence
  Description of Artificial Sequence: Synthetic oligonucleotide
  Sense strand starting at position 539 of SEQ ID NO: 3865
cccucuuuaguuuaaggau

SEQ ID NO: 300741 - RNA, 19 nt, Artificial Sequence
  Description of Artificial Sequence: Synthetic oligonucleotide
  Antisense strand to SEQ ID NO: 300740
auccuuaaacuaaagaggg

SEQ ID NO: 300742 - RNA, 19 nt, Artificial Sequence
  Description of Artificial Sequence: Synthetic oligonucleotide
  Sense strand starting at position 564 of SEQ ID NO: 3865
agauauggacacuguauau

SEQ ID NO: 300743 - RNA, 19 nt, Artificial Sequence
  Description of Artificial Sequence: Synthetic oligonucleotide
  Antisense strand to SEQ ID NO: 300742
auauacaguguccauaucu

SEQ ID NO: 300744 - RNA, 19 nt, Artificial Sequence
  Description of Artificial Sequence: Synthetic oligonucleotide
  Sense strand starting at position 595 of SEQ ID NO: 3865
gcacuagaaugauagauuu

SEQ ID NO: 300745 - RNA, 19 nt, Artificial Sequence
  Description of Artificial Sequence: Synthetic oligonucleotide
  Antisense strand to SEQ ID NO: 300744
aaaucuaucauucuagugc

SEQ ID NO: 300746 - RNA, 19 nt, Artificial Sequence
  Description of Artificial Sequence: Synthetic oligonucleotide
  Sense strand starting at position 790 of SEQ ID NO: 3865
guguuuauauuaucucaug

SEQ ID NO: 300747 - RNA, 19 nt, Artificial Sequence
  Description of Artificial Sequence: Synthetic oligonucleotide
  Antisense strand to SEQ ID NO: 300746
caugagauaauauaaacac

SEQ ID NO: 300748 - RNA, 19 nt, Artificial Sequence
  Description of Artificial Sequence: Synthetic oligonucleotide
  Sense strand starting at position 826 of SEQ ID NO: 3865
gugacuaauuuccagagca

SEQ ID NO: 300749 - RNA, 19 nt, Artificial Sequence
  Description of Artificial Sequence: Synthetic oligonucleotide
  Antisense strand to SEQ ID NO: 300748
ugcucuggaaauuagucac

SEQ ID NO: 300750 - RNA, 19 nt, Artificial Sequence
  Description of Artificial Sequence: Synthetic oligonucleotide
  Sense strand starting at position 971 of SEQ ID NO: 3865
auuauauuucugugguugu

SEQ ID NO: 300751 - RNA, 19 nt, Artificial Sequence
  Description of Artificial Sequence: Synthetic oligonucleotide
  Antisense strand to SEQ ID NO: 300750
acaaccacagaaauauaau

SEQ ID NO: 300752 - RNA, 19 nt, Artificial Sequence
  Description of Artificial Sequence: Synthetic oligonucleotide
  Sense strand starting at position 974 of SEQ ID NO: 3865
auauuucugugguuguuua

SEQ ID NO: 300753 - RNA, 19 nt, Artificial Sequence
  Description of Artificial Sequence: Synthetic oligonucleotide
  Antisense strand to SEQ ID NO: 300752
uaaacaaccacagaaauau

SEQ ID NO: 300754 - RNA, 19 nt, Artificial Sequence
  Description of Artificial Sequence: Synthetic oligonucleotide
  Sense strand starting at position 987 of SEQ ID NO: 3865
uguuuacugcuguauuaua

SEQ ID NO: 300755 - RNA, 19 nt, Artificial Sequence
  Description of Artificial Sequence: Synthetic oligonucleotide
  Antisense strand to SEQ ID NO: 300754
uauaauacagcaguaaaca

SEQ ID NO: 300756 - RNA, 19 nt, Artificial Sequence
  Description of Artificial Sequence: Synthetic oligonucleotide
  Sense strand starting at position 1103 of SEQ ID NO: 3865
caacauagacuugaucgua

SEQ ID NO: 300757 - RNA, 19 nt, Artificial Sequence
  Description of Artificial Sequence: Synthetic oligonucleotide
  Antisense strand to SEQ ID NO: 300756
uacgaucaagucuauguug

SEQ ID NO: 300758 - RNA, 19 nt, Artificial Sequence
  Description of Artificial Sequence: Synthetic oligonucleotide
  Sense strand starting at position 1106 of SEQ ID NO: 3865
cauagacuugaucguaagu

SEQ ID NO: 300759 - RNA, 19 nt, Artificial Sequence
  Description of Artificial Sequence: Synthetic oligonucleotide
  Antisense strand to SEQ ID NO: 300758
acuuacgaucaagucuaug

SEQ ID NO: 300760 - RNA, 19 nt, Artificial Sequence
  Description of Artificial Sequence: Synthetic oligonucleotide
  Sense strand starting at position 1116 of SEQ ID NO: 3865
aucguaaguauucucguuu

SEQ ID NO: 300761 - RNA, 19 nt, Artificial Sequence
  Description of Artificial Sequence: Synthetic oligonucleotide
  Antisense strand to SEQ ID NO: 300760
aaacgagaauacuuacgau

SEQ ID NO: 300762 - RNA, 19 nt, Artificial Sequence
  Description of Artificial Sequence: Synthetic oligonucleotide
  Sense strand starting at position 1122 of SEQ ID NO: 3865
aguauucucguuuaaguau

SEQ ID NO: 300763 - RNA, 19 nt, Artificial Sequence
  Description of Artificial Sequence: Synthetic oligonucleotide
  Antisense strand to SEQ ID NO: 300762
auacuuaaacgagaauacu

SEQ ID NO: 300764 - RNA, 19 nt, Artificial Sequence
  Description of Artificial Sequence: Synthetic oligonucleotide
  Sense strand starting at position 1129 of SEQ ID NO: 3865
ucguuuaaguaucucagaa

SEQ ID NO: 300765 - RNA, 19 nt, Artificial Sequence
  Description of Artificial Sequence: Synthetic oligonucleotide
  Antisense strand to SEQ ID NO: 300764
uucugagauacuuaaacga

SEQ ID NO: 300766 - RNA, 19 nt, Artificial Sequence
  Description of Artificial Sequence: Synthetic oligonucleotide
  Sense strand starting at position 1145 of SEQ ID NO: 3865
gaauaugaccuuuggucuu

SEQ ID NO: 300767 - RNA, 19 nt, Artificial Sequence
  Description of Artificial Sequence: Synthetic oligonucleotide
  Antisense strand to SEQ ID NO: 300766
aagaccaaaggucauauuc

SEQ ID NO: 300768 - RNA, 19 nt, Artificial Sequence
  Description of Artificial Sequence: Synthetic oligonucleotide
  Sense strand starting at position 1151 of SEQ ID NO: 3865
gaccuuuggucuuuggaga

SEQ ID NO: 300769 - RNA, 19 nt, Artificial Sequence
  Description of Artificial Sequence: Synthetic oligonucleotide
  Antisense strand to SEQ ID NO: 300768
ucuccaaagaccaaagguc

SEQ ID NO: 300770 - RNA, 19 nt, Artificial Sequence
  Description of Artificial Sequence: Synthetic oligonucleotide
  Sense strand starting at position 1152 of SEQ ID NO: 3865
accuuuggucuuuggagaa

SEQ ID NO: 300771 - RNA, 19 nt, Artificial Sequence
  Description of Artificial Sequence: Synthetic oligonucleotide
  Antisense strand to SEQ ID NO: 300770
uucuccaaagaccaaaggu

SEQ ID NO: 300772 - RNA, 19 nt, Artificial Sequence
  Description of Artificial Sequence: Synthetic oligonucleotide
  Sense strand starting at position 1156 of SEQ ID NO: 3865
uuggucuuuggagaauugu

SEQ ID NO: 300773 - RNA, 19 nt, Artificial Sequence
  Description of Artificial Sequence: Synthetic oligonucleotide
  Antisense strand to SEQ ID NO: 300772
acaauucuccaaagaccaa

SEQ ID NO: 300774 - RNA, 19 nt, Artificial Sequence
  Description of Artificial Sequence: Synthetic oligonucleotide
  Sense strand starting at position 1545 of SEQ ID NO: 3865
ugaguuuacucuguuuaca

SEQ ID NO: 300775 - RNA, 19 nt, Artificial Sequence
  Description of Artificial Sequence: Synthetic oligonucleotide
  Antisense strand to SEQ ID NO: 300774
uguaaacagaguaaacuca

SEQ ID NO: 300776 - RNA, 19 nt, Artificial Sequence
  Description of Artificial Sequence: Synthetic oligonucleotide
  Sense strand starting at position 1588 of SEQ ID NO: 3865
gcaaauaaacagugauccu

SEQ ID NO: 300777 - RNA, 19 nt, Artificial Sequence
  Description of Artificial Sequence: Synthetic oligonucleotide
  Antisense strand to SEQ ID NO: 300776
aggaucacuguuuauuugc

SEQ ID NO: 300778 - RNA, 19 nt, Artificial Sequence
  Description of Artificial Sequence: Synthetic oligonucleotide
  Sense strand starting at position 1672 of SEQ ID NO: 3865
ucuuaugggcuagacagua

SEQ ID NO: 300779 - RNA, 19 nt, Artificial Sequence
  Description of Artificial Sequence: Synthetic oligonucleotide
  Antisense strand to SEQ ID NO: 300778
uacugucuagcccauaaga

SEQ ID NO: 300780 - RNA, 19 nt, Artificial Sequence
  Description of Artificial Sequence: Synthetic oligonucleotide
  Sense strand starting at position 1684 of SEQ ID NO: 3865
gacaguauauugccaggua

SEQ ID NO: 300781 - RNA, 19 nt, Artificial Sequence
  Description of Artificial Sequence: Synthetic oligonucleotide
  Antisense strand to SEQ ID NO: 300780
uaccuggcaauauacuguc

SEQ ID NO: 300782 - RNA, 19 nt, Artificial Sequence
  Description of Artificial Sequence: Synthetic oligonucleotide
  Sense strand starting at position 1720 of SEQ ID NO: 3865
ugaugaaaguucuuggaau

SEQ ID NO: 300783 - RNA, 19 nt, Artificial Sequence
  Description of Artificial Sequence: Synthetic oligonucleotide
  Antisense strand to SEQ ID NO: 300782
auuccaagaacuuucauca

SEQ ID NO: 300784 - RNA, 19 nt, Artificial Sequence
  Description of Artificial Sequence: Synthetic oligonucleotide
  Sense strand starting at position 1722 of SEQ ID NO: 3865
augaaaguucuuggaaugu

SEQ ID NO: 300785 - RNA, 19 nt, Artificial Sequence
  Description of Artificial Sequence: Synthetic oligonucleotide
  Antisense strand to SEQ ID NO: 300784
acauuccaagaacuuucau

SEQ ID NO: 300786 - RNA, 19 nt, Artificial Sequence
  Description of Artificial Sequence: Synthetic oligonucleotide
  Sense strand starting at position 1843 of SEQ ID NO: 3865
gcgauugaagaguaacuga

SEQ ID NO: 300787 - RNA, 19 nt, Artificial Sequence
  Description of Artificial Sequence: Synthetic oligonucleotide
  Antisense strand to SEQ ID NO: 300786
ucaguuacucuucaaucgc

SEQ ID NO: 300788 - RNA, 19 nt, Artificial Sequence
  Description of Artificial Sequence: Synthetic oligonucleotide
  Sense strand starting at position 1878 of SEQ ID NO: 3865
ucuuacuagcagugaaaga

SEQ ID NO: 300789 - RNA, 19 nt, Artificial Sequence
  Description of Artificial Sequence: Synthetic oligonucleotide
  Antisense strand to SEQ ID NO: 300788
ucuuucacugcuaguaaga

SEQ ID NO: 300790 - RNA, 19 nt, Artificial Sequence
  Description of Artificial Sequence: Synthetic oligonucleotide
  Sense strand starting at position 1900 of SEQ ID NO: 3865
agguaagaauuugacuauu

SEQ ID NO: 300791 - RNA, 19 nt, Artificial Sequence
  Description of Artificial Sequence: Synthetic oligonucleotide
  Antisense strand to SEQ ID NO: 300790
aauagucaaauucuuaccu

SEQ ID NO: 300792 - RNA, 19 nt, Artificial Sequence
  Description of Artificial Sequence: Synthetic oligonucleotide
  Sense strand starting at position 2154 of SEQ ID NO: 3865
cuuuacuuuccaggauugu

SEQ ID NO: 300793 - RNA, 19 nt, Artificial Sequence
  Description of Artificial Sequence: Synthetic oligonucleotide
  Antisense strand to SEQ ID NO: 300792
acaauccuggaaaguaaag

SEQ ID NO: 300794 - RNA, 19 nt, Artificial Sequence
  Description of Artificial Sequence: Synthetic oligonucleotide
  Sense strand starting at position 2438 of SEQ ID NO: 3865
ggcuacucagcccaguuau

SEQ ID NO: 300795 - RNA, 19 nt, Artificial Sequence
  Description of Artificial Sequence: Synthetic oligonucleotide
  Antisense strand to SEQ ID NO: 300794
auaacugggcugaguagcc

SEQ ID NO: 300796 - RNA, 19 nt, Artificial Sequence
  Description of Artificial Sequence: Synthetic oligonucleotide
  Sense strand starting at position 2508 of SEQ ID NO: 3865
guuucugggcuugauguaa

SEQ ID NO: 300797 - RNA, 19 nt, Artificial Sequence
  Description of Artificial Sequence: Synthetic oligonucleotide
  Antisense strand to SEQ ID NO: 300796
uuacaucaagcccagaaac

SEQ ID NO: 300798 - RNA, 19 nt, Artificial Sequence
  Description of Artificial Sequence: Synthetic oligonucleotide
  Sense strand starting at position 2526 of SEQ ID NO: 3865
aguacuaaauggcuuaaua

SEQ ID NO: 300799 - RNA, 19 nt, Artificial Sequence
  Description of Artificial Sequence: Synthetic oligonucleotide
  Antisense strand to SEQ ID NO: 300798
uauuaagccauuuaguacu

SEQ ID NO: 300800 - RNA, 19 nt, Artificial Sequence
  Description of Artificial Sequence: Synthetic oligonucleotide
  Sense strand starting at position 2585 of SEQ ID NO: 3865
cuccaauaauuguuggcua

SEQ ID NO: 300801 - RNA, 19 nt, Artificial Sequence
  Description of Artificial Sequence: Synthetic oligonucleotide
  Antisense strand to SEQ ID NO: 300800
uagccaacaauuauuggag

SEQ ID NO: 300802 - RNA, 19 nt, Artificial Sequence
  Description of Artificial Sequence: Synthetic oligonucleotide
  Sense strand starting at position 2590 of SEQ ID NO: 3865
auaauuguuggcuaucauu

SEQ ID NO: 300803 - RNA, 19 nt, Artificial Sequence
  Description of Artificial Sequence: Synthetic oligonucleotide
  Antisense strand to SEQ ID NO: 300802
aaugauagccaacaauuau

SEQ ID NO: 300804 - RNA, 19 nt, Artificial Sequence
  Description of Artificial Sequence: Synthetic oligonucleotide
  Sense strand starting at position 2691 of SEQ ID NO: 3865
ugucccuaucauugagguu

SEQ ID NO: 300805 - RNA, 19 nt, Artificial Sequence
  Description of Artificial Sequence: Synthetic oligonucleotide
  Antisense strand to SEQ ID NO: 300804
aaccucaaugauagggaca

SEQ ID NO: 300806 - RNA, 19 nt, Artificial Sequence
  Description of Artificial Sequence: Synthetic oligonucleotide
  Sense strand starting at position 2729 of SEQ ID NO: 3865
uuggaauuauggucauauc

SEQ ID NO: 300807 - RNA, 19 nt, Artificial Sequence
  Description of Artificial Sequence: Synthetic oligonucleotide
  Antisense strand to SEQ ID NO: 300806
gauaugaccauaauuccaa

SEQ ID NO: 300808 - RNA, 19 nt, Artificial Sequence
  Description of Artificial Sequence: Synthetic oligonucleotide
  Sense strand starting at position 2778 of SEQ ID NO: 3865
ggcagaaucuacuuugcca

SEQ ID NO: 300809 - RNA, 19 nt, Artificial Sequence
  Description of Artificial Sequence: Synthetic oligonucleotide
  Antisense strand to SEQ ID NO: 300808
uggcaaaguagauucugcc

SEQ ID NO: 300810 - RNA, 19 nt, Artificial Sequence
  Description of Artificial Sequence: Synthetic oligonucleotide
  Sense strand starting at position 3227 of SEQ ID NO: 3865
ucagauuguagaggaaagu

SEQ ID NO: 300811 - RNA, 19 nt, Artificial Sequence
  Description of Artificial Sequence: Synthetic oligonucleotide
  Antisense strand to SEQ ID NO: 300810
acuuuccucuacaaucuga

SEQ ID NO: 300812 - RNA, 19 nt, Artificial Sequence
  Description of Artificial Sequence: Synthetic oligonucleotide
  Sense strand starting at position 22 of SEQ ID NO: 3866
caacaaguuccaggguauu

SEQ ID NO: 300813 - RNA, 19 nt, Artificial Sequence
  Description of Artificial Sequence: Synthetic oligonucleotide
  Antisense strand to SEQ ID NO: 300812
aauacccuggaacuuguug

SEQ ID NO: 300814 - RNA, 19 nt, Artificial Sequence
  Description of Artificial Sequence: Synthetic oligonucleotide
  Sense strand starting at position 270 of SEQ ID NO: 3866
uuggacugugucugacaca

SEQ ID NO: 300815 - RNA, 19 nt, Artificial Sequence
  Description of Artificial Sequence: Synthetic oligonucleotide
  Antisense strand to SEQ ID NO: 300814
ugugucagacacaguccaa

SEQ ID NO: 300816 - RNA, 19 nt, Artificial Sequence
  Description of Artificial Sequence: Synthetic oligonucleotide
  Sense strand starting at position 275 of SEQ ID NO: 3866
cugugucugacacagagua

SEQ ID NO: 300817 - RNA, 19 nt, Artificial Sequence
  Description of Artificial Sequence: Synthetic oligonucleotide
  Antisense strand to SEQ ID NO: 300816
uacucugugucagacacag

SEQ ID NO: 300818 - RNA, 19 nt, Artificial Sequence
  Description of Artificial Sequence: Synthetic oligonucleotide
  Sense strand starting at position 277 of SEQ ID NO: 3866
gugucugacacagaguaaa

SEQ ID NO: 300819 - RNA, 19 nt, Artificial Sequence
  Description of Artificial Sequence: Synthetic oligonucleotide
  Antisense strand to SEQ ID NO: 300818
uuuacucugugucagacac

SEQ ID NO: 300820 - RNA, 19 nt, Artificial Sequence
  Description of Artificial Sequence: Synthetic oligonucleotide
  Sense strand starting at position 376 of SEQ ID NO: 3866
ccaggaagcuucccuugua

SEQ ID NO: 300821 - RNA, 19 nt, Artificial Sequence
  Description of Artificial Sequence: Synthetic oligonucleotide
  Antisense strand to SEQ ID NO: 300820
uacaagggaagcuuccugg

SEQ ID NO: 300822 - RNA, 19 nt, Artificial Sequence
  Description of Artificial Sequence: Synthetic oligonucleotide
  Sense strand starting at position 377 of SEQ ID NO: 3866
caggaagcuucccuuguau

SEQ ID NO: 300823 - RNA, 19 nt, Artificial Sequence
  Description of Artificial Sequence: Synthetic oligonucleotide
  Antisense strand to SEQ ID NO: 300822
auacaagggaagcuuccug

SEQ ID NO: 300824 - RNA, 19 nt, Artificial Sequence
  Description of Artificial Sequence: Synthetic oligonucleotide
  Sense strand starting at position 379 of SEQ ID NO: 3866
ggaagcuucccuuguauug

SEQ ID NO: 300825 - RNA, 19 nt, Artificial Sequence
  Description of Artificial Sequence: Synthetic oligonucleotide
  Antisense strand to SEQ ID NO: 300824
caauacaagggaagcuucc

SEQ ID NO: 300826 - RNA, 19 nt, Artificial Sequence
  Description of Artificial Sequence: Synthetic oligonucleotide
  Sense strand starting at position 424 of SEQ ID NO: 3866
uuuaaaucagagcaacagu

SEQ ID NO: 300827 - RNA, 19 nt, Artificial Sequence
  Description of Artificial Sequence: Synthetic oligonucleotide
  Antisense strand to SEQ ID NO: 300826
acuguugcucugauuuaaa

SEQ ID NO: 300828 - RNA, 19 nt, Artificial Sequence
  Description of Artificial Sequence: Synthetic oligonucleotide
  Sense strand starting at position 517 of SEQ ID NO: 3866
gugaguuucagguaagggu

SEQ ID NO: 300829 - RNA, 19 nt, Artificial Sequence
  Description of Artificial Sequence: Synthetic oligonucleotide
  Antisense strand to SEQ ID NO: 300828
acccuuaccugaaacucac

SEQ ID NO: 300830 - RNA, 19 nt, Artificial Sequence
  Description of Artificial Sequence: Synthetic oligonucleotide
  Sense strand starting at position 554 of SEQ ID NO: 3866
uuccaagacugccuuguau

SEQ ID NO: 300831 - RNA, 19 nt, Artificial Sequence
  Description of Artificial Sequence: Synthetic oligonucleotide
  Antisense strand to SEQ ID NO: 300830
auacaaggcagucuuggaa

SEQ ID NO: 300832 - RNA, 19 nt, Artificial Sequence
  Description of Artificial Sequence: Synthetic oligonucleotide
  Sense strand starting at position 556 of SEQ ID NO: 3866
ccaagacugccuuguauuu

SEQ ID NO: 300833 - RNA, 19 nt, Artificial Sequence
  Description of Artificial Sequence: Synthetic oligonucleotide
  Antisense strand to SEQ ID NO: 300832
aaauacaaggcagucuugg

SEQ ID NO: 300834 - RNA, 19 nt, Artificial Sequence
  Description of Artificial Sequence: Synthetic oligonucleotide
  Sense strand starting at position 567 of SEQ ID NO: 3866
uuguauuucucuuacagga

SEQ ID NO: 300835 - RNA, 19 nt, Artificial Sequence
  Description of Artificial Sequence: Synthetic oligonucleotide
  Antisense strand to SEQ ID NO: 300834
uccuguaagagaaauacaa

SEQ ID NO: 300836 - RNA, 19 nt, Artificial Sequence
  Description of Artificial Sequence: Synthetic oligonucleotide
  Sense strand starting at position 569 of SEQ ID NO: 3866
guauuucucuuacaggaug

SEQ ID NO: 300837 - RNA, 19 nt, Artificial Sequence
  Description of Artificial Sequence: Synthetic oligonucleotide
  Antisense strand to SEQ ID NO: 300836
cauccuguaagagaaauac

SEQ ID NO: 300838 - RNA, 19 nt, Artificial Sequence
  Description of Artificial Sequence: Synthetic oligonucleotide
  Sense strand starting at position 706 of SEQ ID NO: 3866
ggaggaguuccauggcuuu

SEQ ID NO: 300839 - RNA, 19 nt, Artificial Sequence
  Description of Artificial Sequence: Synthetic oligonucleotide
  Antisense strand to SEQ ID NO: 300838
aaagccauggaacuccucc

SEQ ID NO: 300840 - RNA, 19 nt, Artificial Sequence
  Description of Artificial Sequence: Synthetic oligonucleotide
  Sense strand starting at position 778 of SEQ ID NO: 3866
gggcauaucgaacgaacaa

SEQ ID NO: 300841 - RNA, 19 nt, Artificial Sequence
  Description of Artificial Sequence: Synthetic oligonucleotide
  Antisense strand to SEQ ID NO: 300840
uuguucguucgauaugccc

SEQ ID NO: 300842 - RNA, 19 nt, Artificial Sequence
  Description of Artificial Sequence: Synthetic oligonucleotide
  Sense strand starting at position 779 of SEQ ID NO: 3866
ggcauaucgaacgaacaau

SEQ ID NO: 300843 - RNA, 19 nt, Artificial Sequence
  Description of Artificial Sequence: Synthetic oligonucleotide
  Antisense strand to SEQ ID NO: 300842
auuguucguucgauaugcc

SEQ ID NO: 300844 - RNA, 19 nt, Artificial Sequence
  Description of Artificial Sequence: Synthetic oligonucleotide
  Sense strand starting at position 826 of SEQ ID NO: 3866
ggacaccugcgcuauugau

SEQ ID NO: 300845 - RNA, 19 nt, Artificial Sequence
  Description of Artificial Sequence: Synthetic oligonucleotide
  Antisense strand to SEQ ID NO: 300844
aucaauagcgcaggugucc

SEQ ID NO: 300846 - RNA, 19 nt, Artificial Sequence
  Description of Artificial Sequence: Synthetic oligonucleotide
  Sense strand starting at position 1107 of SEQ ID NO: 3866
ccacuucucccagggaagu

SEQ ID NO: 300847 - RNA, 19 nt, Artificial Sequence
  Description of Artificial Sequence: Synthetic oligonucleotide
  Antisense strand to SEQ ID NO: 300846
acuucccugggagaagugg

SEQ ID NO: 300848 - RNA, 19 nt, Artificial Sequence
  Description of Artificial Sequence: Synthetic oligonucleotide
  Sense strand starting at position 1108 of SEQ ID NO: 3866
cacuucucccagggaaguu

SEQ ID NO: 300849 - RNA, 19 nt, Artificial Sequence
  Description of Artificial Sequence: Synthetic oligonucleotide
  Antisense strand to SEQ ID NO: 300848
aacuucccugggagaagug

SEQ ID NO: 300850 - RNA, 19 nt, Artificial Sequence
  Description of Artificial Sequence: Synthetic oligonucleotide
  Sense strand starting at position 1205 of SEQ ID NO: 3866
cgccucugccgaucuugaa

SEQ ID NO: 300851 - RNA, 19 nt, Artificial Sequence
  Description of Artificial Sequence: Synthetic oligonucleotide
  Antisense strand to SEQ ID NO: 300850
uucaagaucggcagaggcg

SEQ ID NO: 300852 - RNA, 19 nt, Artificial Sequence
  Description of Artificial Sequence: Synthetic oligonucleotide
  Sense strand starting at position 2401 of SEQ ID NO: 3866
aggaaagggaccugugagu

SEQ ID NO: 300853 - RNA, 19 nt, Artificial Sequence
  Description of Artificial Sequence: Synthetic oligonucleotide
  Antisense strand to SEQ ID NO: 300852
acucacaggucccuuuccu

SEQ ID NO: 300854 - RNA, 19 nt, Artificial Sequence
  Description of Artificial Sequence: Synthetic oligonucleotide
  Sense strand starting at position 2473 of SEQ ID NO: 3866
ugaagaauuuguuaaacca

SEQ ID NO: 300855 - RNA, 19 nt, Artificial Sequence
  Description of Artificial Sequence: Synthetic oligonucleotide
  Antisense strand to SEQ ID NO: 300854
ugguuuaacaaauucuuca

SEQ ID NO: 300856 - RNA, 19 nt, Artificial Sequence
  Description of Artificial Sequence: Synthetic oligonucleotide
  Sense strand starting at position 2555 of SEQ ID NO: 3866
caggccacaucguuaagau

SEQ ID NO: 300857 - RNA, 19 nt, Artificial Sequence
  Description of Artificial Sequence: Synthetic oligonucleotide
  Antisense strand to SEQ ID NO: 300856
aucuuaacgauguggccug

SEQ ID NO: 300858 - RNA, 19 nt, Artificial Sequence
  Description of Artificial Sequence: Synthetic oligonucleotide
  Sense strand starting at position 2556 of SEQ ID NO: 3866
aggccacaucguuaagauc

SEQ ID NO: 300859 - RNA, 19 nt, Artificial Sequence
  Description of Artificial Sequence: Synthetic oligonucleotide
  Antisense strand to SEQ ID NO: 300858
gaucuuaacgauguggccu

SEQ ID NO: 300860 - RNA, 19 nt, Artificial Sequence
  Description of Artificial Sequence: Synthetic oligonucleotide
  Sense strand starting at position 2562 of SEQ ID NO: 3866
caucguuaagaucagucuu

SEQ ID NO: 300861 - RNA, 19 nt, Artificial Sequence
  Description of Artificial Sequence: Synthetic oligonucleotide
  Antisense strand to SEQ ID NO: 300860
aagacugaucuuaacgaug

SEQ ID NO: 300862 - RNA, 19 nt, Artificial Sequence
  Description of Artificial Sequence: Synthetic oligonucleotide
  Sense strand starting at position 2568 of SEQ ID NO: 3866
uaagaucagucuucguacu

SEQ ID NO: 300863 - RNA, 19 nt, Artificial Sequence
  Description of Artificial Sequence: Synthetic oligonucleotide
  Antisense strand to SEQ ID NO: 300862
aguacgaagacugaucuua

SEQ ID NO: 300864 - RNA, 19 nt, Artificial Sequence
  Description of Artificial Sequence: Synthetic oligonucleotide
  Sense strand starting at position 2569 of SEQ ID NO: 3866
aagaucagucuucguacuu

SEQ ID NO: 300865 - RNA, 19 nt, Artificial Sequence
  Description of Artificial Sequence: Synthetic oligonucleotide
  Antisense strand to SEQ ID NO: 300864
aaguacgaagacugaucuu

SEQ ID NO: 300866 - RNA, 19 nt, Artificial Sequence
  Description of Artificial Sequence: Synthetic oligonucleotide
  Sense strand starting at position 2582 of SEQ ID NO: 3866
guacuucuggccugggacu

SEQ ID NO: 300867 - RNA, 19 nt, Artificial Sequence
  Description of Artificial Sequence: Synthetic oligonucleotide
  Antisense strand to SEQ ID NO: 300866
agucccaggccagaaguac

SEQ ID NO: 300868 - RNA, 19 nt, Artificial Sequence
  Description of Artificial Sequence: Synthetic oligonucleotide
  Sense strand starting at position 2588 of SEQ ID NO: 3866
cuggccugggacugauaaa

SEQ ID NO: 300869 - RNA, 19 nt, Artificial Sequence
  Description of Artificial Sequence: Synthetic oligonucleotide
  Antisense strand to SEQ ID NO: 300868
uuuaucagucccaggccag

SEQ ID NO: 300870 - RNA, 19 nt, Artificial Sequence
  Description of Artificial Sequence: Synthetic oligonucleotide
  Sense strand starting at position 2617 of SEQ ID NO: 3866
cugugacgaaucugguuau

SEQ ID NO: 300871 - RNA, 19 nt, Artificial Sequence
  Description of Artificial Sequence: Synthetic oligonucleotide
  Antisense strand to SEQ ID NO: 300870
auaaccagauucgucacag

SEQ ID NO: 300872 - RNA, 19 nt, Artificial Sequence
  Description of Artificial Sequence: Synthetic oligonucleotide
  Sense strand starting at position 2620 of SEQ ID NO: 3866
ugacgaaucugguuauaug

SEQ ID NO: 300873 - RNA, 19 nt, Artificial Sequence
  Description of Artificial Sequence: Synthetic oligonucleotide
  Antisense strand to SEQ ID NO: 300872
cauauaaccagauucguca

SEQ ID NO: 300874 - RNA, 19 nt, Artificial Sequence
  Description of Artificial Sequence: Synthetic oligonucleotide
  Sense strand starting at position 2796 of SEQ ID NO: 3866
aagacauucugggcgaaga

SEQ ID NO: 300875 - RNA, 19 nt, Artificial Sequence
  Description of Artificial Sequence: Synthetic oligonucleotide
  Antisense strand to SEQ ID NO: 300874
ucuucgcccagaaugucuu

SEQ ID NO: 300876 - RNA, 19 nt, Artificial Sequence
  Description of Artificial Sequence: Synthetic oligonucleotide
  Sense strand starting at position 2798 of SEQ ID NO: 3866
gacauucugggcgaagagu

SEQ ID NO: 300877 - RNA, 19 nt, Artificial Sequence
  Description of Artificial Sequence: Synthetic oligonucleotide
  Antisense strand to SEQ ID NO: 300876
acucuucgcccagaauguc

SEQ ID NO: 300878 - RNA, 19 nt, Artificial Sequence
  Description of Artificial Sequence: Synthetic oligonucleotide
  Sense strand starting at position 2815 of SEQ ID NO: 3866
guggaagauccauagguuc

SEQ ID NO: 300879 - RNA, 19 nt, Artificial Sequence
  Description of Artificial Sequence: Synthetic oligonucleotide
  Antisense strand to SEQ ID NO: 300878
gaaccuauggaucuuccac

SEQ ID NO: 300880 - RNA, 19 nt, Artificial Sequence
  Description of Artificial Sequence: Synthetic oligonucleotide
  Sense strand starting at position 2817 of SEQ ID NO: 3866
ggaagauccauagguuccu

SEQ ID NO: 300881 - RNA, 19 nt, Artificial Sequence
  Description of Artificial Sequence: Synthetic oligonucleotide
  Antisense strand to SEQ ID NO: 300880
aggaaccuauggaucuucc

SEQ ID NO: 300882 - RNA, 19 nt, Artificial Sequence
  Description of Artificial Sequence: Synthetic oligonucleotide
  Sense strand starting at position 2853 of SEQ ID NO: 3866
acaguacacccgggagauu

SEQ ID NO: 300883 - RNA, 19 nt, Artificial Sequence
  Description of Artificial Sequence: Synthetic oligonucleotide
  Antisense strand to SEQ ID NO: 300882
aaucucccggguguacugu

SEQ ID NO: 300884 - RNA, 19 nt, Artificial Sequence
  Description of Artificial Sequence: Synthetic oligonucleotide
  Sense strand starting at position 2947 of SEQ ID NO: 3866
auccacuuuccuugaaggu

SEQ ID NO: 300885 - RNA, 19 nt, Artificial Sequence
  Description of Artificial Sequence: Synthetic oligonucleotide
  Antisense strand to SEQ ID NO: 300884
accuucaaggaaaguggau

SEQ ID NO: 300886 - RNA, 19 nt, Artificial Sequence
  Description of Artificial Sequence: Synthetic oligonucleotide
  Sense strand starting at position 3160 of SEQ ID NO: 3866
ggagcauacuuuguucuuu

SEQ ID NO: 300887 - RNA, 19 nt, Artificial Sequence
  Description of Artificial Sequence: Synthetic oligonucleotide
  Antisense strand to SEQ ID NO: 300886
aaagaacaaaguaugcucc

SEQ ID NO: 300888 - RNA, 19 nt, Artificial Sequence
  Description of Artificial Sequence: Synthetic oligonucleotide
  Sense strand starting at position 3225 of SEQ ID NO: 3866
acaugcacuuccuuuagua

SEQ ID NO: 300889 - RNA, 19 nt, Artificial Sequence
  Description of Artificial Sequence: Synthetic oligonucleotide
  Antisense strand to SEQ ID NO: 300888
uacuaaaggaagugcaugu

SEQ ID NO: 300890 - RNA, 19 nt, Artificial Sequence
  Description of Artificial Sequence: Synthetic oligonucleotide
  Sense strand starting at position 3320 of SEQ ID NO: 3866
gucugcuuuggcuacagaa

SEQ ID NO: 300891 - RNA, 19 nt, Artificial Sequence
  Description of Artificial Sequence: Synthetic oligonucleotide
  Antisense strand to SEQ ID NO: 300890
uucuguagccaaagcagac

SEQ ID NO: 300892 - RNA, 19 nt, Artificial Sequence
  Description of Artificial Sequence: Synthetic oligonucleotide
  Sense strand starting at position 16 of SEQ ID NO: 3867
uagauugguccugggauuc

SEQ ID NO: 300893 - RNA, 19 nt, Artificial Sequence
  Description of Artificial Sequence: Synthetic oligonucleotide
  Antisense strand to SEQ ID NO: 300892
gaaucccaggaccaaucua

SEQ ID NO: 300894 - RNA, 19 nt, Artificial Sequence
  Description of Artificial Sequence: Synthetic oligonucleotide
  Sense strand starting at position 57 of SEQ ID NO: 3867
ccuccaaugcuaugacaag

SEQ ID NO: 300895 - RNA, 19 nt, Artificial Sequence
  Description of Artificial Sequence: Synthetic oligonucleotide
  Antisense strand to SEQ ID NO: 300894
cuugucauagcauuggagg

SEQ ID NO: 300896 - RNA, 19 nt, Artificial Sequence
  Description of Artificial Sequence: Synthetic oligonucleotide
  Sense strand starting at position 74 of SEQ ID NO: 3867
agaggacugccaugcacaa

SEQ ID NO: 300897 - RNA, 19 nt, Artificial Sequence
  Description of Artificial Sequence: Synthetic oligonucleotide
  Antisense strand to SEQ ID NO: 300896
uugugcauggcaguccucu

SEQ ID NO: 300898 - RNA, 19 nt, Artificial Sequence
  Description of Artificial Sequence: Synthetic oligonucleotide
  Sense strand starting at position 85 of SEQ ID NO: 3867
augcacaaucaugagugua

SEQ ID NO: 300899 - RNA, 19 nt, Artificial Sequence
  Description of Artificial Sequence: Synthetic oligonucleotide
  Antisense strand to SEQ ID NO: 300898
uacacucaugauugugcau

SEQ ID NO: 300900 - RNA, 19 nt, Artificial Sequence
  Description of Artificial Sequence: Synthetic oligonucleotide
  Sense strand starting at position 88 of SEQ ID NO: 3867
cacaaucaugaguguagaa

SEQ ID NO: 300901 - RNA, 19 nt, Artificial Sequence
  Description of Artificial Sequence: Synthetic oligonucleotide
  Antisense strand to SEQ ID NO: 300900
uucuacacucaugauugug

SEQ ID NO: 300902 - RNA, 19 nt, Artificial Sequence
  Description of Artificial Sequence: Synthetic oligonucleotide
  Sense strand starting at position 118 of SEQ ID NO: 3867
gugaaugaaggcuaacagu

SEQ ID NO: 300903 - RNA, 19 nt, Artificial Sequence
  Description of Artificial Sequence: Synthetic oligonucleotide
  Antisense strand to SEQ ID NO: 300902
acuguuagccuucauucac

SEQ ID NO: 300904 - RNA, 19 nt, Artificial Sequence
  Description of Artificial Sequence: Synthetic oligonucleotide
  Sense strand starting at position 370 of SEQ ID NO: 3867
ggauccuuuccaggcacaa

SEQ ID NO: 300905 - RNA, 19 nt, Artificial Sequence
  Description of Artificial Sequence: Synthetic oligonucleotide
  Antisense strand to SEQ ID NO: 300904
uugugccuggaaaggaucc

SEQ ID NO: 300906 - RNA, 19 nt, Artificial Sequence
  Description of Artificial Sequence: Synthetic oligonucleotide
  Sense strand starting at position 596 of SEQ ID NO: 3867
gcagauuccagccaguaga

SEQ ID NO: 300907 - RNA, 19 nt, Artificial Sequence
  Description of Artificial Sequence: Synthetic oligonucleotide
  Antisense strand to SEQ ID NO: 300906
ucuacuggcuggaaucugc

SEQ ID NO: 300908 - RNA, 19 nt, Artificial Sequence
  Description of Artificial Sequence: Synthetic oligonucleotide
  Sense strand starting at position 764 of SEQ ID NO: 3867
cucaguugucugccagcuu

SEQ ID NO: 300909 - RNA, 19 nt, Artificial Sequence
  Description of Artificial Sequence: Synthetic oligonucleotide
  Antisense strand to SEQ ID NO: 300908
aagcuggcagacaacugag

SEQ ID NO: 300910 - RNA, 19 nt, Artificial Sequence
  Description of Artificial Sequence: Synthetic oligonucleotide
  Sense strand starting at position 802 of SEQ ID NO: 3867
aagcauguccaccaugaga

SEQ ID NO: 300911 - RNA, 19 nt, Artificial Sequence
  Description of Artificial Sequence: Synthetic oligonucleotide
  Antisense strand to SEQ ID NO: 300910
ucucaugguggacaugcuu

SEQ ID NO: 300912 - RNA, 19 nt, Artificial Sequence
  Description of Artificial Sequence: Synthetic oligonucleotide
  Sense strand starting at position 804 of SEQ ID NO: 3867
gcauguccaccaugagaga

SEQ ID NO: 300913 - RNA, 19 nt, Artificial Sequence
  Description of Artificial Sequence: Synthetic oligonucleotide
  Antisense strand to SEQ ID NO: 300912
ucucucaugguggacaugc

SEQ ID NO: 300914 - RNA, 19 nt, Artificial Sequence
  Description of Artificial Sequence: Synthetic oligonucleotide
  Sense strand starting at position 1004 of SEQ ID NO: 3867
ugauuaaacucugcucaga

SEQ ID NO: 300915 - RNA, 19 nt, Artificial Sequence
  Description of Artificial Sequence: Synthetic oligonucleotide
  Antisense strand to SEQ ID NO: 300914
ucugagcagaguuuaauca

SEQ ID NO: 300916 - RNA, 19 nt, Artificial Sequence
  Description of Artificial Sequence: Synthetic oligonucleotide
  Sense strand starting at position 1128 of SEQ ID NO: 3867
acucaacaguccuugggua

SEQ ID NO: 300917 - RNA, 19 nt, Artificial Sequence
  Description of Artificial Sequence: Synthetic oligonucleotide
  Antisense strand to SEQ ID NO: 300916
uacccaaggacuguugagu

SEQ ID NO: 300918 - RNA, 19 nt, Artificial Sequence
  Description of Artificial Sequence: Synthetic oligonucleotide
  Sense strand starting at position 1130 of SEQ ID NO: 3867
ucaacaguccuuggguaga

SEQ ID NO: 300919 - RNA, 19 nt, Artificial Sequence
  Description of Artificial Sequence: Synthetic oligonucleotide
  Antisense strand to SEQ ID NO: 300918
ucuacccaaggacuguuga

SEQ ID NO: 300920 - RNA, 19 nt, Artificial Sequence
  Description of Artificial Sequence: Synthetic oligonucleotide
  Sense strand starting at position 1182 of SEQ ID NO: 3867
cguguuuaaggauaucaac

SEQ ID NO: 300921 - RNA, 19 nt, Artificial Sequence
  Description of Artificial Sequence: Synthetic oligonucleotide
  Antisense strand to SEQ ID NO: 300920
guugauauccuuaaacacg

SEQ ID NO: 300922 - RNA, 19 nt, Artificial Sequence
  Description of Artificial Sequence: Synthetic oligonucleotide
  Sense strand starting at position 1397 of SEQ ID NO: 3867
cugagugugacccgaauuu

SEQ ID NO: 300923 - RNA, 19 nt, Artificial Sequence
  Description of Artificial Sequence: Synthetic oligonucleotide
  Antisense strand to SEQ ID NO: 300922
aaauucgggucacacucag

SEQ ID NO: 300924 - RNA, 19 nt, Artificial Sequence
  Description of Artificial Sequence: Synthetic oligonucleotide
  Sense strand starting at position 2644 of SEQ ID NO: 3867
gaggccugggacuaucuua

SEQ ID NO: 300925 - RNA, 19 nt, Artificial Sequence
  Description of Artificial Sequence: Synthetic oligonucleotide
  Antisense strand to SEQ ID NO: 300924
uaagauagucccaggccuc

SEQ ID NO: 300926 - RNA, 19 nt, Artificial Sequence
  Description of Artificial Sequence: Synthetic oligonucleotide
  Sense strand starting at position 2651 of SEQ ID NO: 3867
gggacuaucuuacuccuuu

SEQ ID NO: 300927 - RNA, 19 nt, Artificial Sequence
  Description of Artificial Sequence: Synthetic oligonucleotide
  Antisense strand to SEQ ID NO: 300926
aaaggaguaagauaguccc

SEQ ID NO: 300928 - RNA, 19 nt, Artificial Sequence
  Description of Artificial Sequence: Synthetic oligonucleotide
  Sense strand starting at position 2717 of SEQ ID NO: 3867
gaagaauuguagguuacca

SEQ ID NO: 300929 - RNA, 19 nt, Artificial Sequence
  Description of Artificial Sequence: Synthetic oligonucleotide
  Antisense strand to SEQ ID NO: 300928
ugguaaccuacaauucuuc

SEQ ID NO: 300930 - RNA, 19 nt, Artificial Sequence
  Description of Artificial Sequence: Synthetic oligonucleotide
  Sense strand starting at position 2721 of SEQ ID NO: 3867
aauuguagguuaccaugaa

SEQ ID NO: 300931 - RNA, 19 nt, Artificial Sequence
  Description of Artificial Sequence: Synthetic oligonucleotide
  Antisense strand to SEQ ID NO: 300930
uucaugguaaccuacaauu

SEQ ID NO: 300932 - RNA, 19 nt, Artificial Sequence
  Description of Artificial Sequence: Synthetic oligonucleotide
  Sense strand starting at position 2725 of SEQ ID NO: 3867
guagguuaccaugaaucca

SEQ ID NO: 300933 - RNA, 19 nt, Artificial Sequence
  Description of Artificial Sequence: Synthetic oligonucleotide
  Antisense strand to SEQ ID NO: 300932
uggauucaugguaaccuac

SEQ ID NO: 300934 - RNA, 19 nt, Artificial Sequence
  Description of Artificial Sequence: Synthetic oligonucleotide
  Sense strand starting at position 2789 of SEQ ID NO: 3867
uuggaaagcucccuccaga

SEQ ID NO: 300935 - RNA, 19 nt, Artificial Sequence
  Description of Artificial Sequence: Synthetic oligonucleotide
  Antisense strand to SEQ ID NO: 300934
ucuggagggagcuuuccaa

SEQ ID NO: 300936 - RNA, 19 nt, Artificial Sequence
  Description of Artificial Sequence: Synthetic oligonucleotide
  Sense strand starting at position 2804 of SEQ ID NO: 3867
cagaguugucaguacucaa

SEQ ID NO: 300937 - RNA, 19 nt, Artificial Sequence
  Description of Artificial Sequence: Synthetic oligonucleotide
  Antisense strand to SEQ ID NO: 300936
uugaguacugacaacucug

SEQ ID NO: 300938 - RNA, 19 nt, Artificial Sequence
  Description of Artificial Sequence: Synthetic oligonucleotide
  Sense strand starting at position 3052 of SEQ ID NO: 3867
acaaucuuccugugacuug

SEQ ID NO: 300939 - RNA, 19 nt, Artificial Sequence
  Description of Artificial Sequence: Synthetic oligonucleotide
  Antisense strand to SEQ ID NO: 300938
caagucacaggaagauugu

SEQ ID NO: 300940 - RNA, 19 nt, Artificial Sequence
  Description of Artificial Sequence: Synthetic oligonucleotide
  Sense strand starting at position 3091 of SEQ ID NO: 3867
gugacucauggccacauaa

SEQ ID NO: 300941 - RNA, 19 nt, Artificial Sequence
  Description of Artificial Sequence: Synthetic oligonucleotide
  Antisense strand to SEQ ID NO: 300940
uuauguggccaugagucac

SEQ ID NO: 300942 - RNA, 19 nt, Artificial Sequence
  Description of Artificial Sequence: Synthetic oligonucleotide
  Sense strand starting at position 3205 of SEQ ID NO: 3867
agcucugaccagcaauuga

SEQ ID NO: 300943 - RNA, 19 nt, Artificial Sequence
  Description of Artificial Sequence: Synthetic oligonucleotide
  Antisense strand to SEQ ID NO: 300942
ucaauugcuggucagagcu

SEQ ID NO: 300944 - RNA, 19 nt, Artificial Sequence
  Description of Artificial Sequence: Synthetic oligonucleotide
  Sense strand starting at position 3344 of SEQ ID NO: 3867
gagacuaugugacuuguca

SEQ ID NO: 300945 - RNA, 19 nt, Artificial Sequence
  Description of Artificial Sequence: Synthetic oligonucleotide
  Antisense strand to SEQ ID NO: 300944
ugacaagucacauagucuc

SEQ ID NO: 300946 - RNA, 19 nt, Artificial Sequence
  Description of Artificial Sequence: Synthetic oligonucleotide
  Sense strand starting at position 3352 of SEQ ID NO: 3867
gugacuugucaucaacuaa

SEQ ID NO: 300947 - RNA, 19 nt, Artificial Sequence
  Description of Artificial Sequence: Synthetic oligonucleotide
  Antisense strand to SEQ ID NO: 300946
uuaguugaugacaagucac

SEQ ID NO: 300948 - RNA, 19 nt, Artificial Sequence
  Description of Artificial Sequence: Synthetic oligonucleotide
  Sense strand starting at position 3414 of SEQ ID NO: 3867
aucuuaguccucuaccaga

SEQ ID NO: 300949 - RNA, 19 nt, Artificial Sequence
  Description of Artificial Sequence: Synthetic oligonucleotide
  Antisense strand to SEQ ID NO: 300948
ucugguagaggacuaagau

SEQ ID NO: 300950 - RNA, 19 nt, Artificial Sequence
  Description of Artificial Sequence: Synthetic oligonucleotide
  Sense strand starting at position 3450 of SEQ ID NO: 3867
gcacaagacuaguuacaga

SEQ ID NO: 300951 - RNA, 19 nt, Artificial Sequence
  Description of Artificial Sequence: Synthetic oligonucleotide
  Antisense strand to SEQ ID NO: 300950
ucuguaacuagucuugugc

SEQ ID NO: 300952 - RNA, 19 nt, Artificial Sequence
  Description of Artificial Sequence: Synthetic oligonucleotide
  Sense strand starting at position 3457 of SEQ ID NO: 3867
acuaguuacagaggugaua

SEQ ID NO: 300953 - RNA, 19 nt, Artificial Sequence
  Description of Artificial Sequence: Synthetic oligonucleotide
  Antisense strand to SEQ ID NO: 300952
uaucaccucuguaacuagu

SEQ ID NO: 300954 - RNA, 19 nt, Artificial Sequence
  Description of Artificial Sequence: Synthetic oligonucleotide
  Sense strand starting at position 3513 of SEQ ID NO: 3867
gugacugagcaaugaagua

SEQ ID NO: 300955 - RNA, 19 nt, Artificial Sequence
  Description of Artificial Sequence: Synthetic oligonucleotide
  Antisense strand to SEQ ID NO: 300954
uacuucauugcucagucac

SEQ ID NO: 300956 - RNA, 19 nt, Artificial Sequence
  Description of Artificial Sequence: Synthetic oligonucleotide
  Sense strand starting at position 3525 of SEQ ID NO: 3867
ugaaguagacgcuauuaau

SEQ ID NO: 300957 - RNA, 19 nt, Artificial Sequence
  Description of Artificial Sequence: Synthetic oligonucleotide
  Antisense strand to SEQ ID NO: 300956
auuaauagcgucuacuuca

SEQ ID NO: 300958 - RNA, 19 nt, Artificial Sequence
  Description of Artificial Sequence: Synthetic oligonucleotide
  Sense strand starting at position 3546 of SEQ ID NO: 3867
acuuaauagcgucaaagaa

SEQ ID NO: 300959 - RNA, 19 nt, Artificial Sequence
  Description of Artificial Sequence: Synthetic oligonucleotide
  Antisense strand to SEQ ID NO: 300958
uucuuugacgcuauuaagu

SEQ ID NO: 300960 - RNA, 19 nt, Artificial Sequence
  Description of Artificial Sequence: Synthetic oligonucleotide
  Sense strand starting at position 3647 of SEQ ID NO: 3867
aaaggugacuugucccaaa

SEQ ID NO: 300961 - RNA, 19 nt, Artificial Sequence
  Description of Artificial Sequence: Synthetic oligonucleotide
  Antisense strand to SEQ ID NO: 300960
uuugggacaagucaccuuu

SEQ ID NO: 300962 - RNA, 19 nt, Artificial Sequence
  Description of Artificial Sequence: Synthetic oligonucleotide
  Sense strand starting at position 3768 of SEQ ID NO: 3867
uguguucuacuuuagauga

SEQ ID NO: 300963 - RNA, 19 nt, Artificial Sequence
  Description of Artificial Sequence: Synthetic oligonucleotide
  Antisense strand to SEQ ID NO: 300962
ucaucuaaaguagaacaca

SEQ ID NO: 300964 - RNA, 19 nt, Artificial Sequence
  Description of Artificial Sequence: Synthetic oligonucleotide
  Sense strand starting at position 3854 of SEQ ID NO: 3867
ggauucuuacaauggcaag

SEQ ID NO: 300965 - RNA, 19 nt, Artificial Sequence
  Description of Artificial Sequence: Synthetic oligonucleotide
  Antisense strand to SEQ ID NO: 300964
cuugccauuguaagaaucc

SEQ ID NO: 300966 - RNA, 19 nt, Artificial Sequence
  Description of Artificial Sequence: Synthetic oligonucleotide
  Sense strand starting at position 3866 of SEQ ID NO: 3867
uggcaagcuccauauuauu

SEQ ID NO: 300967 - RNA, 19 nt, Artificial Sequence
  Description of Artificial Sequence: Synthetic oligonucleotide
  Antisense strand to SEQ ID NO: 300966
aauaauauggagcuugcca

SEQ ID NO: 300968 - RNA, 19 nt, Artificial Sequence
  Description of Artificial Sequence: Synthetic oligonucleotide
  Sense strand starting at position 3954 of SEQ ID NO: 3867
uguaaaugccuguaccaua

SEQ ID NO: 300969 - RNA, 19 nt, Artificial Sequence
  Description of Artificial Sequence: Synthetic oligonucleotide
  Antisense strand to SEQ ID NO: 300968
uaugguacaggcauuuaca

SEQ ID NO: 300970 - RNA, 19 nt, Artificial Sequence
  Description of Artificial Sequence: Synthetic oligonucleotide
  Sense strand starting at position 3959 of SEQ ID NO: 3867
augccuguaccauaaaugu

SEQ ID NO: 300971 - RNA, 19 nt, Artificial Sequence
  Description of Artificial Sequence: Synthetic oligonucleotide
  Antisense strand to SEQ ID NO: 300970
acauuuaugguacaggcau

SEQ ID NO: 300972 - RNA, 19 nt, Artificial Sequence
  Description of Artificial Sequence: Synthetic oligonucleotide
  Sense strand starting at position 3 of SEQ ID NO: 3868
agaggacacucagaguaaa

SEQ ID NO: 300973 - RNA, 19 nt, Artificial Sequence
  Description of Artificial Sequence: Synthetic oligonucleotide
  Antisense strand to SEQ ID NO: 300972
uuuacucugaguguccucu

SEQ ID NO: 300974 - RNA, 19 nt, Artificial Sequence
  Description of Artificial Sequence: Synthetic oligonucleotide
  Sense strand starting at position 68 of SEQ ID NO: 3868
ccuaauagggccugaggaa

SEQ ID NO: 300975 - RNA, 19 nt, Artificial Sequence
  Description of Artificial Sequence: Synthetic oligonucleotide
  Antisense strand to SEQ ID NO: 300974
uuccucaggcccuauuagg

SEQ ID NO: 300976 - RNA, 19 nt, Artificial Sequence
  Description of Artificial Sequence: Synthetic oligonucleotide
  Sense strand starting at position 220 of SEQ ID NO: 3868
uguugugaugagcgauaua

SEQ ID NO: 300977 - RNA, 19 nt, Artificial Sequence
  Description of Artificial Sequence: Synthetic oligonucleotide
  Antisense strand to SEQ ID NO: 300976
uauaucgcucaucacaaca

SEQ ID NO: 300978 - RNA, 19 nt, Artificial Sequence
  Description of Artificial Sequence: Synthetic oligonucleotide
  Sense strand starting at position 223 of SEQ ID NO: 3868
ugugaugagcgauauagag

SEQ ID NO: 300979 - RNA, 19 nt, Artificial Sequence
  Description of Artificial Sequence: Synthetic oligonucleotide
  Antisense strand to SEQ ID NO: 300978
cucuauaucgcucaucaca

SEQ ID NO: 300980 - RNA, 19 nt, Artificial Sequence
  Description of Artificial Sequence: Synthetic oligonucleotide
  Sense strand starting at position 257 of SEQ ID NO: 3868
ggcugcagucaccagauau

SEQ ID NO: 300981 - RNA, 19 nt, Artificial Sequence
  Description of Artificial Sequence: Synthetic oligonucleotide
  Antisense strand to SEQ ID NO: 300980
auaucuggugacugcagcc

SEQ ID NO: 300982 - RNA, 19 nt, Artificial Sequence
  Description of Artificial Sequence: Synthetic oligonucleotide
  Sense strand starting at position 308 of SEQ ID NO: 3868
uccagaaccguucggauaa

SEQ ID NO: 300983 - RNA, 19 nt, Artificial Sequence
  Description of Artificial Sequence: Synthetic oligonucleotide
  Antisense strand to SEQ ID NO: 300982
uuauccgaacgguucugga

SEQ ID NO: 300984 - RNA, 19 nt, Artificial Sequence
  Description of Artificial Sequence: Synthetic oligonucleotide
  Sense strand starting at position 321 of SEQ ID NO: 3868
ggauaaaggucauccuucu

SEQ ID NO: 300985 - RNA, 19 nt, Artificial Sequence
  Description of Artificial Sequence: Synthetic oligonucleotide
  Antisense strand to SEQ ID NO: 300984
agaaggaugaccuuuaucc

SEQ ID NO: 300986 - RNA, 19 nt, Artificial Sequence
  Description of Artificial Sequence: Synthetic oligonucleotide
  Sense strand starting at position 386 of SEQ ID NO: 3868
ggcagaaccggacaucuuu

SEQ ID NO: 300987 - RNA, 19 nt, Artificial Sequence
  Description of Artificial Sequence: Synthetic oligonucleotide
  Antisense strand to SEQ ID NO: 300986
aaagauguccgguucugcc

SEQ ID NO: 300988 - RNA, 19 nt, Artificial Sequence
  Description of Artificial Sequence: Synthetic oligonucleotide
  Sense strand starting at position 438 of SEQ ID NO: 3868
gguccuguaucaucaucuu

SEQ ID NO: 300989 - RNA, 19 nt, Artificial Sequence
  Description of Artificial Sequence: Synthetic oligonucleotide
  Antisense strand to SEQ ID NO: 300988
aagaugaugauacaggacc

SEQ ID NO: 300990 - RNA, 19 nt, Artificial Sequence
  Description of Artificial Sequence: Synthetic oligonucleotide
  Sense strand starting at position 483 of SEQ ID NO: 3868
guaggcucugaagacuuaa

SEQ ID NO: 300991 - RNA, 19 nt, Artificial Sequence
  Description of Artificial Sequence: Synthetic oligonucleotide
  Antisense strand to SEQ ID NO: 300990
uuaagucuucagagccuac

SEQ ID NO: 300992 - RNA, 19 nt, Artificial Sequence
  Description of Artificial Sequence: Synthetic oligonucleotide
  Sense strand starting at position 564 of SEQ ID NO: 3868
ggagaaagcuucccuuugu

SEQ ID NO: 300993 - RNA, 19 nt, Artificial Sequence
  Description of Artificial Sequence: Synthetic oligonucleotide
  Antisense strand to SEQ ID NO: 300992
acaaagggaagcuuucucc

SEQ ID NO: 300994 - RNA, 19 nt, Artificial Sequence
  Description of Artificial Sequence: Synthetic oligonucleotide
  Sense strand starting at position 565 of SEQ ID NO: 3868
gagaaagcuucccuuuguc

SEQ ID NO: 300995 - RNA, 19 nt, Artificial Sequence
  Description of Artificial Sequence: Synthetic oligonucleotide
  Antisense strand to SEQ ID NO: 300994
gacaaagggaagcuuucuc

SEQ ID NO: 300996 - RNA, 19 nt, Artificial Sequence
  Description of Artificial Sequence: Synthetic oligonucleotide
  Sense strand starting at position 619 of SEQ ID NO: 3868
uguuaucagaaggguugga

SEQ ID NO: 300997 - RNA, 19 nt, Artificial Sequence
  Description of Artificial Sequence: Synthetic oligonucleotide
  Antisense strand to SEQ ID NO: 300996
uccaacccuucugauaaca

SEQ ID NO: 300998 - RNA, 19 nt, Artificial Sequence
  Description of Artificial Sequence: Synthetic oligonucleotide
  Sense strand starting at position 651 of SEQ ID NO: 3868
uggucuuuccgggaaggcu

SEQ ID NO: 300999 - RNA, 19 nt, Artificial Sequence
  Description of Artificial Sequence: Synthetic oligonucleotide
  Antisense strand to SEQ ID NO: 300998
agccuucccggaaagacca

SEQ ID NO: 301000 - RNA, 19 nt, Artificial Sequence
  Description of Artificial Sequence: Synthetic oligonucleotide
  Sense strand starting at position 660 of SEQ ID NO: 3868
cgggaaggcugcucuggaa

SEQ ID NO: 301001 - RNA, 19 nt, Artificial Sequence
  Description of Artificial Sequence: Synthetic oligonucleotide
  Antisense strand to SEQ ID NO: 301000
uuccagagcagccuucccg

SEQ ID NO: 301002 - RNA, 19 nt, Artificial Sequence
  Description of Artificial Sequence: Synthetic oligonucleotide
  Sense strand starting at position 1051 of SEQ ID NO: 3868
ccggaugcgacuuacuagu

SEQ ID NO: 301003 - RNA, 19 nt, Artificial Sequence
  Description of Artificial Sequence: Synthetic oligonucleotide
  Antisense strand to SEQ ID NO: 301002
acuaguaagucgcauccgg

SEQ ID NO: 301004 - RNA, 19 nt, Artificial Sequence
  Description of Artificial Sequence: Synthetic oligonucleotide
  Sense strand starting at position 1261 of SEQ ID NO: 3868
ccggaugcgacuugguaga

SEQ ID NO: 301005 - RNA, 19 nt, Artificial Sequence
  Description of Artificial Sequence: Synthetic oligonucleotide
  Antisense strand to SEQ ID NO: 301004
ucuaccaagucgcauccgg

SEQ ID NO: 301006 - RNA, 19 nt, Artificial Sequence
  Description of Artificial Sequence: Synthetic oligonucleotide
  Sense strand starting at position 1312 of SEQ ID NO: 3868
uggagacguuuccugcaga

SEQ ID NO: 301007 - RNA, 19 nt, Artificial Sequence
  Description of Artificial Sequence: Synthetic oligonucleotide
  Antisense strand to SEQ ID NO: 301006
ucugcaggaaacgucucca

SEQ ID NO: 301008 - RNA, 19 nt, Artificial Sequence
  Description of Artificial Sequence: Synthetic oligonucleotide
  Sense strand starting at position 1378 of SEQ ID NO: 3868
gcggcacggcuccugaaau

SEQ ID NO: 301009 - RNA, 19 nt, Artificial Sequence
  Description of Artificial Sequence: Synthetic oligonucleotide
  Antisense strand to SEQ ID NO: 301008
auuucaggagccgugccgc

SEQ ID NO: 301010 - RNA, 19 nt, Artificial Sequence
  Description of Artificial Sequence: Synthetic oligonucleotide
  Sense strand starting at position 1403 of SEQ ID NO: 3868
acgaguuagcaccggagaa

SEQ ID NO: 301011 - RNA, 19 nt, Artificial Sequence
  Description of Artificial Sequence: Synthetic oligonucleotide
  Antisense strand to SEQ ID NO: 301010
uucuccggugcuaacucgu

SEQ ID NO: 301012 - RNA, 19 nt, Artificial Sequence
  Description of Artificial Sequence: Synthetic oligonucleotide
  Sense strand starting at position 1404 of SEQ ID NO: 3868
cgaguuagcaccggagaag

SEQ ID NO: 301013 - RNA, 19 nt, Artificial Sequence
  Description of Artificial Sequence: Synthetic oligonucleotide
  Antisense strand to SEQ ID NO: 301012
cuucuccggugcuaacucg

SEQ ID NO: 301014 - RNA, 19 nt, Artificial Sequence
  Description of Artificial Sequence: Synthetic oligonucleotide
  Sense strand starting at position 1678 of SEQ ID NO: 3868
agcgcuuccgcccucuaau

SEQ ID NO: 301015 - RNA, 19 nt, Artificial Sequence
  Description of Artificial Sequence: Synthetic oligonucleotide
  Antisense strand to SEQ ID NO: 301014
auuagagggcggaagcgcu

SEQ ID NO: 301016 - RNA, 19 nt, Artificial Sequence
  Description of Artificial Sequence: Synthetic oligonucleotide
  Sense strand starting at position 1936 of SEQ ID NO: 3868
ucguacuuccgagaccuua

SEQ ID NO: 301017 - RNA, 19 nt, Artificial Sequence
  Description of Artificial Sequence: Synthetic oligonucleotide
  Antisense strand to SEQ ID NO: 301016
uaaggucucggaaguacga

SEQ ID NO: 301018 - RNA, 19 nt, Artificial Sequence
  Description of Artificial Sequence: Synthetic oligonucleotide
  Sense strand starting at position 2112 of SEQ ID NO: 3868
gucucucccaugugggaau

SEQ ID NO: 301019 - RNA, 19 nt, Artificial Sequence
  Description of Artificial Sequence: Synthetic oligonucleotide
  Antisense strand to SEQ ID NO: 301018
auucccacaugggagagac

SEQ ID NO: 301020 - RNA, 19 nt, Artificial Sequence
  Description of Artificial Sequence: Synthetic oligonucleotide
  Sense strand starting at position 2208 of SEQ ID NO: 3868
cuuccaggucgccaaacau

SEQ ID NO: 301021 - RNA, 19 nt, Artificial Sequence
  Description of Artificial Sequence: Synthetic oligonucleotide
  Antisense strand to SEQ ID NO: 301020
auguuuggcgaccuggaag

SEQ ID NO: 301022 - RNA, 19 nt, Artificial Sequence
  Description of Artificial Sequence: Synthetic oligonucleotide
  Sense strand starting at position 2283 of SEQ ID NO: 3868
ccuacccuuccgggauaau

SEQ ID NO: 301023 - RNA, 19 nt, Artificial Sequence
  Description of Artificial Sequence: Synthetic oligonucleotide
  Antisense strand to SEQ ID NO: 301022
auuaucccggaaggguagg

SEQ ID NO: 301024 - RNA, 19 nt, Artificial Sequence
  Description of Artificial Sequence: Synthetic oligonucleotide
  Sense strand starting at position 2284 of SEQ ID NO: 3868
cuacccuuccgggauaauc

SEQ ID NO: 301025 - RNA, 19 nt, Artificial Sequence
  Description of Artificial Sequence: Synthetic oligonucleotide
  Antisense strand to SEQ ID NO: 301024
gauuaucccggaaggguag

SEQ ID NO: 301026 - RNA, 19 nt, Artificial Sequence
  Description of Artificial Sequence: Synthetic oligonucleotide
  Sense strand starting at position 2292 of SEQ ID NO: 3868
ccgggauaaucacuauuaa

SEQ ID NO: 301027 - RNA, 19 nt, Artificial Sequence
  Description of Artificial Sequence: Synthetic oligonucleotide
  Antisense strand to SEQ ID NO: 301026
uuaauagugauuaucccgg

SEQ ID NO: 301028 - RNA, 19 nt, Artificial Sequence
  Description of Artificial Sequence: Synthetic oligonucleotide
  Sense strand starting at position 2318 of SEQ ID NO: 3868
guguauugucugcccucua

SEQ ID NO: 301029 - RNA, 19 nt, Artificial Sequence
  Description of Artificial Sequence: Synthetic oligonucleotide
  Antisense strand to SEQ ID NO: 301028
uagagggcagacaauacac

SEQ ID NO: 301030 - RNA, 19 nt, Artificial Sequence
  Description of Artificial Sequence: Synthetic oligonucleotide
  Sense strand starting at position 2438 of SEQ ID NO: 3868
cagguuaccgcuuacauua

SEQ ID NO: 301031 - RNA, 19 nt, Artificial Sequence
  Description of Artificial Sequence: Synthetic oligonucleotide
  Antisense strand to SEQ ID NO: 301030
uaauguaagcgguaaccug

SEQ ID NO: 301032 - RNA, 19 nt, Artificial Sequence
  Description of Artificial Sequence: Synthetic oligonucleotide
  Sense strand starting at position 2446 of SEQ ID NO: 3868
cgcuuacauuaguuuauua

SEQ ID NO: 301033 - RNA, 19 nt, Artificial Sequence
  Description of Artificial Sequence: Synthetic oligonucleotide
  Antisense strand to SEQ ID NO: 301032
uaauaaacuaauguaagcg

SEQ ID NO: 301034 - RNA, 19 nt, Artificial Sequence
  Description of Artificial Sequence: Synthetic oligonucleotide
  Sense strand starting at position 2510 of SEQ ID NO: 3868
ccuucuuaauuaguguauu

SEQ ID NO: 301035 - RNA, 19 nt, Artificial Sequence
  Description of Artificial Sequence: Synthetic oligonucleotide
  Antisense strand to SEQ ID NO: 301034
aauacacuaauuaagaagg

SEQ ID NO: 301036 - RNA, 19 nt, Artificial Sequence
  Description of Artificial Sequence: Synthetic oligonucleotide
  Sense strand starting at position 2669 of SEQ ID NO: 3868
gugcuuuggagacagugau

SEQ ID NO: 301037 - RNA, 19 nt, Artificial Sequence
  Description of Artificial Sequence: Synthetic oligonucleotide
  Antisense strand to SEQ ID NO: 301036
aucacugucuccaaagcac

SEQ ID NO: 301038 - RNA, 19 nt, Artificial Sequence
  Description of Artificial Sequence: Synthetic oligonucleotide
  Sense strand starting at position 3004 of SEQ ID NO: 3868
guugcagugaguuagccaa

SEQ ID NO: 301039 - RNA, 19 nt, Artificial Sequence
  Description of Artificial Sequence: Synthetic oligonucleotide
  Antisense strand to SEQ ID NO: 301038
uuggcuaacucacugcaac

SEQ ID NO: 301040 - RNA, 19 nt, Artificial Sequence
  Description of Artificial Sequence: Synthetic oligonucleotide
  Sense strand starting at position 3542 of SEQ ID NO: 3868
caguauucccacugcugga

SEQ ID NO: 301041 - RNA, 19 nt, Artificial Sequence
  Description of Artificial Sequence: Synthetic oligonucleotide
  Antisense strand to SEQ ID NO: 301040
uccagcagugggaauacug

SEQ ID NO: 301042 - RNA, 19 nt, Artificial Sequence
  Description of Artificial Sequence: Synthetic oligonucleotide
  Sense strand starting at position 3552 of SEQ ID NO: 3868
acugcuggauauguacaaa

SEQ ID NO: 301043 - RNA, 19 nt, Artificial Sequence
  Description of Artificial Sequence: Synthetic oligonucleotide
  Antisense strand to SEQ ID NO: 301042
uuuguacauauccagcagu

SEQ ID NO: 301044 - RNA, 19 nt, Artificial Sequence
  Description of Artificial Sequence: Synthetic oligonucleotide
  Sense strand starting at position 3859 of SEQ ID NO: 3868
aguagaggugguuaccaga

SEQ ID NO: 301045 - RNA, 19 nt, Artificial Sequence
  Description of Artificial Sequence: Synthetic oligonucleotide
  Antisense strand to SEQ ID NO: 301044
ucugguaaccaccucuacu

SEQ ID NO: 301046 - RNA, 19 nt, Artificial Sequence
  Description of Artificial Sequence: Synthetic oligonucleotide
  Sense strand starting at position 3951 of SEQ ID NO: 3868
agaguaaguucuguaguca

SEQ ID NO: 301047 - RNA, 19 nt, Artificial Sequence
  Description of Artificial Sequence: Synthetic oligonucleotide
  Antisense strand to SEQ ID NO: 301046
ugacuacagaacuuacucu

SEQ ID NO: 301048 - RNA, 19 nt, Artificial Sequence
  Description of Artificial Sequence: Synthetic oligonucleotide
  Sense strand starting at position 3952 of SEQ ID NO: 3868
gaguaaguucuguagucag

SEQ ID NO: 301049 - RNA, 19 nt, Artificial Sequence
  Description of Artificial Sequence: Synthetic oligonucleotide
  Antisense strand to SEQ ID NO: 301048
cugacuacagaacuuacuc

SEQ ID NO: 301050 - RNA, 19 nt, Artificial Sequence
  Description of Artificial Sequence: Synthetic oligonucleotide
  Sense strand starting at position 3955 of SEQ ID NO: 3868
uaaguucuguagucaguaa

SEQ ID NO: 301051 - RNA, 19 nt, Artificial Sequence
  Description of Artificial Sequence: Synthetic oligonucleotide
  Antisense strand to SEQ ID NO: 301050
uuacugacuacagaacuua

SEQ ID NO: 301052 - RNA, 19 nt, Artificial Sequence
  Description of Artificial Sequence: Synthetic oligonucleotide
  Sense strand starting at position 280 of SEQ ID NO: 3869
uuccaaggguuucuaaaua

SEQ ID NO: 301053 - RNA, 19 nt, Artificial Sequence
  Description of Artificial Sequence: Synthetic oligonucleotide
  Antisense strand to SEQ ID NO: 301052
uauuuagaaacccuuggaa

SEQ ID NO: 301054 - RNA, 19 nt, Artificial Sequence
  Description of Artificial Sequence: Synthetic oligonucleotide
  Sense strand starting at position 1097 of SEQ ID NO: 3869
cauaguagguguuuaacaa

SEQ ID NO: 301055 - RNA, 19 nt, Artificial Sequence
  Description of Artificial Sequence: Synthetic oligonucleotide
  Antisense strand to SEQ ID NO: 301054
uuguuaaacaccuacuaug

SEQ ID NO: 301056 - RNA, 19 nt, Artificial Sequence
  Description of Artificial Sequence: Synthetic oligonucleotide
  Sense strand starting at position 1143 of SEQ ID NO: 3869
acaaacauuugucagagau

SEQ ID NO: 301057 - RNA, 19 nt, Artificial Sequence
  Description of Artificial Sequence: Synthetic oligonucleotide
  Antisense strand to SEQ ID NO: 301056
aucucugacaaauguuugu

SEQ ID NO: 301058 - RNA, 19 nt, Artificial Sequence
  Description of Artificial Sequence: Synthetic oligonucleotide
  Sense strand starting at position 1145 of SEQ ID NO: 3869
aaacauuugucagagaugu

SEQ ID NO: 301059 - RNA, 19 nt, Artificial Sequence
  Description of Artificial Sequence: Synthetic oligonucleotide
  Antisense strand to SEQ ID NO: 301058
acaucucugacaaauguuu

SEQ ID NO: 301060 - RNA, 19 nt, Artificial Sequence
  Description of Artificial Sequence: Synthetic oligonucleotide
  Sense strand starting at position 1170 of SEQ ID NO: 3869
agggauauaugucuuuaag

SEQ ID NO: 301061 - RNA, 19 nt, Artificial Sequence
  Description of Artificial Sequence: Synthetic oligonucleotide
  Antisense strand to SEQ ID NO: 301060
cuuaaagacauauaucccu

SEQ ID NO: 301062 - RNA, 19 nt, Artificial Sequence
  Description of Artificial Sequence: Synthetic oligonucleotide
  Sense strand starting at position 1172 of SEQ ID NO: 3869
ggauauaugucuuuaaggg

SEQ ID NO: 301063 - RNA, 19 nt, Artificial Sequence
  Description of Artificial Sequence: Synthetic oligonucleotide
  Antisense strand to SEQ ID NO: 301062
cccuuaaagacauauaucc

SEQ ID NO: 301064 - RNA, 19 nt, Artificial Sequence
  Description of Artificial Sequence: Synthetic oligonucleotide
  Sense strand starting at position 1173 of SEQ ID NO: 3869
gauauaugucuuuaagggc

SEQ ID NO: 301065 - RNA, 19 nt, Artificial Sequence
  Description of Artificial Sequence: Synthetic oligonucleotide
  Antisense strand to SEQ ID NO: 301064
gcccuuaaagacauauauc

SEQ ID NO: 301066 - RNA, 19 nt, Artificial Sequence
  Description of Artificial Sequence: Synthetic oligonucleotide
  Sense strand starting at position 1406 of SEQ ID NO: 3869
uaagaaagugaccaucgua

SEQ ID NO: 301067 - RNA, 19 nt, Artificial Sequence
  Description of Artificial Sequence: Synthetic oligonucleotide
  Antisense strand to SEQ ID NO: 301066
uacgauggucacuuucuua

SEQ ID NO: 301068 - RNA, 19 nt, Artificial Sequence
  Description of Artificial Sequence: Synthetic oligonucleotide
  Sense strand starting at position 1409 of SEQ ID NO: 3869
gaaagugaccaucguacaa

SEQ ID NO: 301069 - RNA, 19 nt, Artificial Sequence
  Description of Artificial Sequence: Synthetic oligonucleotide
  Antisense strand to SEQ ID NO: 301068
uuguacgauggucacuuuc

SEQ ID NO: 301070 - RNA, 19 nt, Artificial Sequence
  Description of Artificial Sequence: Synthetic oligonucleotide
  Sense strand starting at position 1457 of SEQ ID NO: 3869
ggagacuauucucugguga

SEQ ID NO: 301071 - RNA, 19 nt, Artificial Sequence
  Description of Artificial Sequence: Synthetic oligonucleotide
  Antisense strand to SEQ ID NO: 301070
ucaccagagaauagucucc

SEQ ID NO: 301072 - RNA, 19 nt, Artificial Sequence
  Description of Artificial Sequence: Synthetic oligonucleotide
  Sense strand starting at position 1458 of SEQ ID NO: 3869
gagacuauucucuggugaa

SEQ ID NO: 301073 - RNA, 19 nt, Artificial Sequence
  Description of Artificial Sequence: Synthetic oligonucleotide
  Antisense strand to SEQ ID NO: 301072
uucaccagagaauagucuc

SEQ ID NO: 301074 - RNA, 19 nt, Artificial Sequence
  Description of Artificial Sequence: Synthetic oligonucleotide
  Sense strand starting at position 1462 of SEQ ID NO: 3869
cuauucucuggugaaaggu

SEQ ID NO: 301075 - RNA, 19 nt, Artificial Sequence
  Description of Artificial Sequence: Synthetic oligonucleotide
  Antisense strand to SEQ ID NO: 301074
accuuucaccagagaauag

SEQ ID NO: 301076 - RNA, 19 nt, Artificial Sequence
  Description of Artificial Sequence: Synthetic oligonucleotide
  Sense strand starting at position 1471 of SEQ ID NO: 3869
ggugaaagguaagcaaguu

SEQ ID NO: 301077 - RNA, 19 nt, Artificial Sequence
  Description of Artificial Sequence: Synthetic oligonucleotide
  Antisense strand to SEQ ID NO: 301076
aacuugcuuaccuuucacc

SEQ ID NO: 301078 - RNA, 19 nt, Artificial Sequence
  Description of Artificial Sequence: Synthetic oligonucleotide
  Sense strand starting at position 1472 of SEQ ID NO: 3869
gugaaagguaagcaaguuu

SEQ ID NO: 301079 - RNA, 19 nt, Artificial Sequence
  Description of Artificial Sequence: Synthetic oligonucleotide
  Antisense strand to SEQ ID NO: 301078
aaacuugcuuaccuuucac

SEQ ID NO: 301080 - RNA, 19 nt, Artificial Sequence
  Description of Artificial Sequence: Synthetic oligonucleotide
  Sense strand starting at position 1483 of SEQ ID NO: 3869
gcaaguuugcaggaggauu

SEQ ID NO: 301081 - RNA, 19 nt, Artificial Sequence
  Description of Artificial Sequence: Synthetic oligonucleotide
  Antisense strand to SEQ ID NO: 301080
aauccuccugcaaacuugc

SEQ ID NO: 301082 - RNA, 19 nt, Artificial Sequence
  Description of Artificial Sequence: Synthetic oligonucleotide
  Sense strand starting at position 1529 of SEQ ID NO: 3869
aaagcagacucgguaauua

SEQ ID NO: 301083 - RNA, 19 nt, Artificial Sequence
  Description of Artificial Sequence: Synthetic oligonucleotide
  Antisense strand to SEQ ID NO: 301082
uaauuaccgagucugcuuu

SEQ ID NO: 301084 - RNA, 19 nt, Artificial Sequence
  Description of Artificial Sequence: Synthetic oligonucleotide
  Sense strand starting at position 1555 of SEQ ID NO: 3869
ucaaaugaugccuaaacgu

SEQ ID NO: 301085 - RNA, 19 nt, Artificial Sequence
  Description of Artificial Sequence: Synthetic oligonucleotide
  Antisense strand to SEQ ID NO: 301084
acguuuaggcaucauuuga

SEQ ID NO: 301086 - RNA, 19 nt, Artificial Sequence
  Description of Artificial Sequence: Synthetic oligonucleotide
  Sense strand starting at position 1628 of SEQ ID NO: 3869
ccagaaggugcccaguaaa

SEQ ID NO: 301087 - RNA, 19 nt, Artificial Sequence
  Description of Artificial Sequence: Synthetic oligonucleotide
  Antisense strand to SEQ ID NO: 301086
uuuacugggcaccuucugg

SEQ ID NO: 301088 - RNA, 19 nt, Artificial Sequence
  Description of Artificial Sequence: Synthetic oligonucleotide
  Sense strand starting at position 1631 of SEQ ID NO: 3869
gaaggugcccaguaaauua

SEQ ID NO: 301089 - RNA, 19 nt, Artificial Sequence
  Description of Artificial Sequence: Synthetic oligonucleotide
  Antisense strand to SEQ ID NO: 301088
uaauuuacugggcaccuuc

SEQ ID NO: 301090 - RNA, 19 nt, Artificial Sequence
  Description of Artificial Sequence: Synthetic oligonucleotide
  Sense strand starting at position 1712 of SEQ ID NO: 3869
ggcugacucccacaaacau

SEQ ID NO: 301091 - RNA, 19 nt, Artificial Sequence
  Description of Artificial Sequence: Synthetic oligonucleotide
  Antisense strand to SEQ ID NO: 301090
auguuugugggagucagcc

SEQ ID NO: 301092 - RNA, 19 nt, Artificial Sequence
  Description of Artificial Sequence: Synthetic oligonucleotide
  Sense strand starting at position 1725 of SEQ ID NO: 3869
aaacauucucugggcgauu

SEQ ID NO: 301093 - RNA, 19 nt, Artificial Sequence
  Description of Artificial Sequence: Synthetic oligonucleotide
  Antisense strand to SEQ ID NO: 301092
aaucgcccagagaauguuu

SEQ ID NO: 301094 - RNA, 19 nt, Artificial Sequence
  Description of Artificial Sequence: Synthetic oligonucleotide
  Sense strand starting at position 1750 of SEQ ID NO: 3869
ccacguggagucgaggaau

SEQ ID NO: 301095 - RNA, 19 nt, Artificial Sequence
  Description of Artificial Sequence: Synthetic oligonucleotide
  Antisense strand to SEQ ID NO: 301094
auuccucgacuccacgugg

SEQ ID NO: 301096 - RNA, 19 nt, Artificial Sequence
  Description of Artificial Sequence: Synthetic oligonucleotide
  Sense strand starting at position 1752 of SEQ ID NO: 3869
acguggagucgaggaauga

SEQ ID NO: 301097 - RNA, 19 nt, Artificial Sequence
  Description of Artificial Sequence: Synthetic oligonucleotide
  Antisense strand to SEQ ID NO: 301096
ucauuccucgacuccacgu

SEQ ID NO: 301098 - RNA, 19 nt, Artificial Sequence
  Description of Artificial Sequence: Synthetic oligonucleotide
  Sense strand starting at position 1839 of SEQ ID NO: 3869
cgccgaauccuggcgauac

SEQ ID NO: 301099 - RNA, 19 nt, Artificial Sequence
  Description of Artificial Sequence: Synthetic oligonucleotide
  Antisense strand to SEQ ID NO: 301098
guaucgccaggauucggcg

SEQ ID NO: 301100 - RNA, 19 nt, Artificial Sequence
  Description of Artificial Sequence: Synthetic oligonucleotide
  Sense strand starting at position 1843 of SEQ ID NO: 3869
gaauccuggcgauaccaaa

SEQ ID NO: 301101 - RNA, 19 nt, Artificial Sequence
  Description of Artificial Sequence: Synthetic oligonucleotide
  Antisense strand to SEQ ID NO: 301100
uuugguaucgccaggauuc

SEQ ID NO: 301102 - RNA, 19 nt, Artificial Sequence
  Description of Artificial Sequence: Synthetic oligonucleotide
  Sense strand starting at position 1962 of SEQ ID NO: 3869
gcacgucggcgucugagaa

SEQ ID NO: 301103 - RNA, 19 nt, Artificial Sequence
  Description of Artificial Sequence: Synthetic oligonucleotide
  Antisense strand to SEQ ID NO: 301102
uucucagacgccgacgugc

SEQ ID NO: 301104 - RNA, 19 nt, Artificial Sequence
  Description of Artificial Sequence: Synthetic oligonucleotide
  Sense strand starting at position 2105 of SEQ ID NO: 3869
aggagucaucgcgagaauu

SEQ ID NO: 301105 - RNA, 19 nt, Artificial Sequence
  Description of Artificial Sequence: Synthetic oligonucleotide
  Antisense strand to SEQ ID NO: 301104
aauucucgcgaugacuccu

SEQ ID NO: 301106 - RNA, 19 nt, Artificial Sequence
  Description of Artificial Sequence: Synthetic oligonucleotide
  Sense strand starting at position 2107 of SEQ ID NO: 3869
gagucaucgcgagaauuga

SEQ ID NO: 301107 - RNA, 19 nt, Artificial Sequence
  Description of Artificial Sequence: Synthetic oligonucleotide
  Antisense strand to SEQ ID NO: 301106
ucaauucucgcgaugacuc

SEQ ID NO: 301108 - RNA, 19 nt, Artificial Sequence
  Description of Artificial Sequence: Synthetic oligonucleotide
  Sense strand starting at position 2287 of SEQ ID NO: 3869
cggucucuuguugaaugaa

SEQ ID NO: 301109 - RNA, 19 nt, Artificial Sequence
  Description of Artificial Sequence: Synthetic oligonucleotide
  Antisense strand to SEQ ID NO: 301108
uucauucaacaagagaccg

SEQ ID NO: 301110 - RNA, 19 nt, Artificial Sequence
  Description of Artificial Sequence: Synthetic oligonucleotide
  Sense strand starting at position 2432 of SEQ ID NO: 3869
ggaacgaguccagggaguu

SEQ ID NO: 301111 - RNA, 19 nt, Artificial Sequence
  Description of Artificial Sequence: Synthetic oligonucleotide
  Antisense strand to SEQ ID NO: 301110
aacucccuggacucguucc

SEQ ID NO: 301112 - RNA, 19 nt, Artificial Sequence
  Description of Artificial Sequence: Synthetic oligonucleotide
  Sense strand starting at position 2433 of SEQ ID NO: 3869
gaacgaguccagggaguuu

SEQ ID NO: 301113 - RNA, 19 nt, Artificial Sequence
  Description of Artificial Sequence: Synthetic oligonucleotide
  Antisense strand to SEQ ID NO: 301112
aaacucccuggacucguuc

SEQ ID NO: 301114 - RNA, 19 nt, Artificial Sequence
  Description of Artificial Sequence: Synthetic oligonucleotide
  Sense strand starting at position 2501 of SEQ ID NO: 3869
acgagaaggauucggacua

SEQ ID NO: 301115 - RNA, 19 nt, Artificial Sequence
  Description of Artificial Sequence: Synthetic oligonucleotide
  Antisense strand to SEQ ID NO: 301114
uaguccgaauccuucucgu

SEQ ID NO: 301116 - RNA, 19 nt, Artificial Sequence
  Description of Artificial Sequence: Synthetic oligonucleotide
  Sense strand starting at position 2522 of SEQ ID NO: 3869
augaguagugcugaaccaa

SEQ ID NO: 301117 - RNA, 19 nt, Artificial Sequence
  Description of Artificial Sequence: Synthetic oligonucleotide
  Antisense strand to SEQ ID NO: 301116
uugguucagcacuacucau

SEQ ID NO: 301118 - RNA, 19 nt, Artificial Sequence
  Description of Artificial Sequence: Synthetic oligonucleotide
  Sense strand starting at position 2752 of SEQ ID NO: 3869
ugcuauuaucaggaguauu

SEQ ID NO: 301119 - RNA, 19 nt, Artificial Sequence
  Description of Artificial Sequence: Synthetic oligonucleotide
  Antisense strand to SEQ ID NO: 301118
aauacuccugauaauagca

SEQ ID NO: 301120 - RNA, 19 nt, Artificial Sequence
  Description of Artificial Sequence: Synthetic oligonucleotide
  Sense strand starting at position 2802 of SEQ ID NO: 3869
aaacguuaaugacuuaagu

SEQ ID NO: 301121 - RNA, 19 nt, Artificial Sequence
  Description of Artificial Sequence: Synthetic oligonucleotide
  Antisense strand to SEQ ID NO: 301120
acuuaagucauuaacguuu

SEQ ID NO: 301122 - RNA, 19 nt, Artificial Sequence
  Description of Artificial Sequence: Synthetic oligonucleotide
  Sense strand starting at position 2882 of SEQ ID NO: 3869
ccacauaauguauguauca

SEQ ID NO: 301123 - RNA, 19 nt, Artificial Sequence
  Description of Artificial Sequence: Synthetic oligonucleotide
  Antisense strand to SEQ ID NO: 301122
ugauacauacauuaugugg

SEQ ID NO: 301124 - RNA, 19 nt, Artificial Sequence
  Description of Artificial Sequence: Synthetic oligonucleotide
  Sense strand starting at position 2940 of SEQ ID NO: 3869
guauguauucuccagcaau

SEQ ID NO: 301125 - RNA, 19 nt, Artificial Sequence
  Description of Artificial Sequence: Synthetic oligonucleotide
  Antisense strand to SEQ ID NO: 301124
auugcuggagaauacauac

SEQ ID NO: 301126 - RNA, 19 nt, Artificial Sequence
  Description of Artificial Sequence: Synthetic oligonucleotide
  Sense strand starting at position 3333 of SEQ ID NO: 3869
ugugcauuauuuccaguuu

SEQ ID NO: 301127 - RNA, 19 nt, Artificial Sequence
  Description of Artificial Sequence: Synthetic oligonucleotide
  Antisense strand to SEQ ID NO: 301126
aaacuggaaauaaugcaca

SEQ ID NO: 301128 - RNA, 19 nt, Artificial Sequence
  Description of Artificial Sequence: Synthetic oligonucleotide
  Sense strand starting at position 3412 of SEQ ID NO: 3869
acgguucuccaccauaauu

SEQ ID NO: 301129 - RNA, 19 nt, Artificial Sequence
  Description of Artificial Sequence: Synthetic oligonucleotide
  Antisense strand to SEQ ID NO: 301128
aauuaugguggagaaccgu

SEQ ID NO: 301130 - RNA, 19 nt, Artificial Sequence
  Description of Artificial Sequence: Synthetic oligonucleotide
  Sense strand starting at position 3529 of SEQ ID NO: 3869
uugaaaugcuacuuuacag

SEQ ID NO: 301131 - RNA, 19 nt, Artificial Sequence
  Description of Artificial Sequence: Synthetic oligonucleotide
  Antisense strand to SEQ ID NO: 301130
cuguaaaguagcauuucaa

SEQ ID NO: 301132 - RNA, 19 nt, Artificial Sequence
  Description of Artificial Sequence: Synthetic oligonucleotide
  Sense strand starting at position 208 of SEQ ID NO: 3870
uuccaaggguuucuaaaua

SEQ ID NO: 301133 - RNA, 19 nt, Artificial Sequence
  Description of Artificial Sequence: Synthetic oligonucleotide
  Antisense strand to SEQ ID NO: 301132
uauuuagaaacccuuggaa

SEQ ID NO: 301134 - RNA, 19 nt, Artificial Sequence
  Description of Artificial Sequence: Synthetic oligonucleotide
  Sense strand starting at position 1025 of SEQ ID NO: 3870
cauaguagguguuuaacaa

SEQ ID NO: 301135 - RNA, 19 nt, Artificial Sequence
  Description of Artificial Sequence: Synthetic oligonucleotide
  Antisense strand to SEQ ID NO: 301134
uuguuaaacaccuacuaug

SEQ ID NO: 301136 - RNA, 19 nt, Artificial Sequence
  Description of Artificial Sequence: Synthetic oligonucleotide
  Sense strand starting at position 1071 of SEQ ID NO: 3870
acaaacauuugucagagau

SEQ ID NO: 301137 - RNA, 19 nt, Artificial Sequence
  Description of Artificial Sequence: Synthetic oligonucleotide
  Antisense strand to SEQ ID NO: 301136
aucucugacaaauguuugu

SEQ ID NO: 301138 - RNA, 19 nt, Artificial Sequence
  Description of Artificial Sequence: Synthetic oligonucleotide
  Sense strand starting at position 1098 of SEQ ID NO: 3870
agggauauaugucuuuaag

SEQ ID NO: 301139 - RNA, 19 nt, Artificial Sequence
  Description of Artificial Sequence: Synthetic oligonucleotide
  Antisense strand to SEQ ID NO: 301138
cuuaaagacauauaucccu

SEQ ID NO: 301140 - RNA, 19 nt, Artificial Sequence
  Description of Artificial Sequence: Synthetic oligonucleotide
  Sense strand starting at position 1100 of SEQ ID NO: 3870
ggauauaugucuuuaaggg

SEQ ID NO: 301141 - RNA, 19 nt, Artificial Sequence
  Description of Artificial Sequence: Synthetic oligonucleotide
  Antisense strand to SEQ ID NO: 301140
cccuuaaagacauauaucc

SEQ ID NO: 301142 - RNA, 19 nt, Artificial Sequence
  Description of Artificial Sequence: Synthetic oligonucleotide
  Sense strand starting at position 1101 of SEQ ID NO: 3870
gauauaugucuuuaagggc

SEQ ID NO: 301143 - RNA, 19 nt, Artificial Sequence
  Description of Artificial Sequence: Synthetic oligonucleotide
  Antisense strand to SEQ ID NO: 301142
gcccuuaaagacauauauc

SEQ ID NO: 301144 - RNA, 19 nt, Artificial Sequence
  Description of Artificial Sequence: Synthetic oligonucleotide
  Sense strand starting at position 1334 of SEQ ID NO: 3870
uaagaaagugaccaucgua

SEQ ID NO: 301145 - RNA, 19 nt, Artificial Sequence
  Description of Artificial Sequence: Synthetic oligonucleotide
  Antisense strand to SEQ ID NO: 301144
uacgauggucacuuucuua

SEQ ID NO: 301146 - RNA, 19 nt, Artificial Sequence
  Description of Artificial Sequence: Synthetic oligonucleotide
  Sense strand starting at position 1337 of SEQ ID NO: 3870
gaaagugaccaucguacaa

SEQ ID NO: 301147 - RNA, 19 nt, Artificial Sequence
  Description of Artificial Sequence: Synthetic oligonucleotide
  Antisense strand to SEQ ID NO: 301146
uuguacgauggucacuuuc

SEQ ID NO: 301148 - RNA, 19 nt, Artificial Sequence
  Description of Artificial Sequence: Synthetic oligonucleotide
  Sense strand starting at position 1385 of SEQ ID NO: 3870
ggagacuauucucugguga

SEQ ID NO: 301149 - RNA, 19 nt, Artificial Sequence
  Description of Artificial Sequence: Synthetic oligonucleotide
  Antisense strand to SEQ ID NO: 301148
ucaccagagaauagucucc

SEQ ID NO: 301150 - RNA, 19 nt, Artificial Sequence
  Description of Artificial Sequence: Synthetic oligonucleotide
  Sense strand starting at position 1386 of SEQ ID NO: 3870
gagacuauucucuggugaa

SEQ ID NO: 301151 - RNA, 19 nt, Artificial Sequence
  Description of Artificial Sequence: Synthetic oligonucleotide
  Antisense strand to SEQ ID NO: 301150
uucaccagagaauagucuc

SEQ ID NO: 301152 - RNA, 19 nt, Artificial Sequence
  Description of Artificial Sequence: Synthetic oligonucleotide
  Sense strand starting at position 1390 of SEQ ID NO: 3870
cuauucucuggugaaaggu

SEQ ID NO: 301153 - RNA, 19 nt, Artificial Sequence
  Description of Artificial Sequence: Synthetic oligonucleotide
  Antisense strand to SEQ ID NO: 301152
accuuucaccagagaauag

SEQ ID NO: 301154 - RNA, 19 nt, Artificial Sequence
  Description of Artificial Sequence: Synthetic oligonucleotide
  Sense strand starting at position 1400 of SEQ ID NO: 3870
gugaaagguaagcaaguuu

SEQ ID NO: 301155 - RNA, 19 nt, Artificial Sequence
  Description of Artificial Sequence: Synthetic oligonucleotide
  Antisense strand to SEQ ID NO: 301154
aaacuugcuuaccuuucac

SEQ ID NO: 301156 - RNA, 19 nt, Artificial Sequence
  Description of Artificial Sequence: Synthetic oligonucleotide
  Sense strand starting at position 1411 of SEQ ID NO: 3870
gcaaguuugcaggaggauu

SEQ ID NO: 301157 - RNA, 19 nt, Artificial Sequence
  Description of Artificial Sequence: Synthetic oligonucleotide
  Antisense strand to SEQ ID NO: 301156
aauccuccugcaaacuugc

SEQ ID NO: 301158 - RNA, 19 nt, Artificial Sequence
  Description of Artificial Sequence: Synthetic oligonucleotide
  Sense strand starting at position 1457 of SEQ ID NO: 3870
aaagcagacucgguaauua

SEQ ID NO: 301159 - RNA, 19 nt, Artificial Sequence
  Description of Artificial Sequence: Synthetic oligonucleotide
  Antisense strand to SEQ ID NO: 301158
uaauuaccgagucugcuuu

SEQ ID NO: 301160 - RNA, 19 nt, Artificial Sequence
  Description of Artificial Sequence: Synthetic oligonucleotide
  Sense strand starting at position 1483 of SEQ ID NO: 3870
ucaaaugaugccuaaacgu

SEQ ID NO: 301161 - RNA, 19 nt, Artificial Sequence
  Description of Artificial Sequence: Synthetic oligonucleotide
  Antisense strand to SEQ ID NO: 301160
acguuuaggcaucauuuga

SEQ ID NO: 301162 - RNA, 19 nt, Artificial Sequence
  Description of Artificial Sequence: Synthetic oligonucleotide
  Sense strand starting at position 1556 of SEQ ID NO: 3870
ccagaaggugcccaguaaa

SEQ ID NO: 301163 - RNA, 19 nt, Artificial Sequence
  Description of Artificial Sequence: Synthetic oligonucleotide
  Antisense strand to SEQ ID NO: 301162
uuuacugggcaccuucugg

SEQ ID NO: 301164 - RNA, 19 nt, Artificial Sequence
  Description of Artificial Sequence: Synthetic oligonucleotide
  Sense strand starting at position 1559 of SEQ ID NO: 3870
gaaggugcccaguaaauua

SEQ ID NO: 301165 - RNA, 19 nt, Artificial Sequence
  Description of Artificial Sequence: Synthetic oligonucleotide
  Antisense strand to SEQ ID NO: 301164
uaauuuacugggcaccuuc

SEQ ID NO: 301166 - RNA, 19 nt, Artificial Sequence
  Description of Artificial Sequence: Synthetic oligonucleotide
  Sense strand starting at position 1640 of SEQ ID NO: 3870
ggcugacucccacaaacau

SEQ ID NO: 301167 - RNA, 19 nt, Artificial Sequence
  Description of Artificial Sequence: Synthetic oligonucleotide
  Antisense strand to SEQ ID NO: 301166
auguuugugggagucagcc

SEQ ID NO: 301168 - RNA, 19 nt, Artificial Sequence
  Description of Artificial Sequence: Synthetic oligonucleotide
  Sense strand starting at position 1678 of SEQ ID NO: 3870
ccacguggagucgaggaau

SEQ ID NO: 301169 - RNA, 19 nt, Artificial Sequence
  Description of Artificial Sequence: Synthetic oligonucleotide
  Antisense strand to SEQ ID NO: 301168
auuccucgacuccacgugg

SEQ ID NO: 301170 - RNA, 19 nt, Artificial Sequence
  Description of Artificial Sequence: Synthetic oligonucleotide
  Sense strand starting at position 1767 of SEQ ID NO: 3870
cgccgaauccuggcgauac

SEQ ID NO: 301171 - RNA, 19 nt, Artificial Sequence
  Description of Artificial Sequence: Synthetic oligonucleotide
  Antisense strand to SEQ ID NO: 301170
guaucgccaggauucggcg

SEQ ID NO: 301172 - RNA, 19 nt, Artificial Sequence
  Description of Artificial Sequence: Synthetic oligonucleotide
  Sense strand starting at position 1771 of SEQ ID NO: 3870
gaauccuggcgauaccaaa

SEQ ID NO: 301173 - RNA, 19 nt, Artificial Sequence
  Description of Artificial Sequence: Synthetic oligonucleotide
  Antisense strand to SEQ ID NO: 301172
uuugguaucgccaggauuc

SEQ ID NO: 301174 - RNA, 19 nt, Artificial Sequence
  Description of Artificial Sequence: Synthetic oligonucleotide
  Sense strand starting at position 1890 of SEQ ID NO: 3870
gcacgucggcgucugagaa

SEQ ID NO: 301175 - RNA, 19 nt, Artificial Sequence
  Description of Artificial Sequence: Synthetic oligonucleotide
  Antisense strand to SEQ ID NO: 301174
uucucagacgccgacgugc

SEQ ID NO: 301176 - RNA, 19 nt, Artificial Sequence
  Description of Artificial Sequence: Synthetic oligonucleotide
  Sense strand starting at position 2033 of SEQ ID NO: 3870
aggagucaucgcgagaauu

SEQ ID NO: 301177 - RNA, 19 nt, Artificial Sequence
  Description of Artificial Sequence: Synthetic oligonucleotide
  Antisense strand to SEQ ID NO: 301176
aauucucgcgaugacuccu

SEQ ID NO: 301178 - RNA, 19 nt, Artificial Sequence
  Description of Artificial Sequence: Synthetic oligonucleotide
  Sense strand starting at position 2035 of SEQ ID NO: 3870
gagucaucgcgagaauuga

SEQ ID NO: 301179 - RNA, 19 nt, Artificial Sequence
  Description of Artificial Sequence: Synthetic oligonucleotide
  Antisense strand to SEQ ID NO: 301178
ucaauucucgcgaugacuc

SEQ ID NO: 301180 - RNA, 19 nt, Artificial Sequence
  Description of Artificial Sequence: Synthetic oligonucleotide
  Sense strand starting at position 2215 of SEQ ID NO: 3870
cggucucuuguugaaugaa

SEQ ID NO: 301181 - RNA, 19 nt, Artificial Sequence
  Description of Artificial Sequence: Synthetic oligonucleotide
  Antisense strand to SEQ ID NO: 301180
uucauucaacaagagaccg

SEQ ID NO: 301182 - RNA, 19 nt, Artificial Sequence
  Description of Artificial Sequence: Synthetic oligonucleotide
  Sense strand starting at position 2360 of SEQ ID NO: 3870
ggaacgaguccagggaguu

SEQ ID NO: 301183 - RNA, 19 nt, Artificial Sequence
  Description of Artificial Sequence: Synthetic oligonucleotide
  Antisense strand to SEQ ID NO: 301182
aacucccuggacucguucc

SEQ ID NO: 301184 - RNA, 19 nt, Artificial Sequence
  Description of Artificial Sequence: Synthetic oligonucleotide
  Sense strand starting at position 2361 of SEQ ID NO: 3870
gaacgaguccagggaguuu

SEQ ID NO: 301185 - RNA, 19 nt, Artificial Sequence
  Description of Artificial Sequence: Synthetic oligonucleotide
  Antisense strand to SEQ ID NO: 301184
aaacucccuggacucguuc

SEQ ID NO: 301186 - RNA, 19 nt, Artificial Sequence
  Description of Artificial Sequence: Synthetic oligonucleotide
  Sense strand starting at position 2429 of SEQ ID NO: 3870
acgagaaggauucggacua

SEQ ID NO: 301187 - RNA, 19 nt, Artificial Sequence
  Description of Artificial Sequence: Synthetic oligonucleotide
  Antisense strand to SEQ ID NO: 301186
uaguccgaauccuucucgu

SEQ ID NO: 301188 - RNA, 19 nt, Artificial Sequence
  Description of Artificial Sequence: Synthetic oligonucleotide
  Sense strand starting at position 2450 of SEQ ID NO: 3870
augaguagugcugaaccaa

SEQ ID NO: 301189 - RNA, 19 nt, Artificial Sequence
  Description of Artificial Sequence: Synthetic oligonucleotide
  Antisense strand to SEQ ID NO: 301188
uugguucagcacuacucau

SEQ ID NO: 301190 - RNA, 19 nt, Artificial Sequence
  Description of Artificial Sequence: Synthetic oligonucleotide
  Sense strand starting at position 2680 of SEQ ID NO: 3870
ugcuauuaucaggaguauu

SEQ ID NO: 301191 - RNA, 19 nt, Artificial Sequence
  Description of Artificial Sequence: Synthetic oligonucleotide
  Antisense strand to SEQ ID NO: 301190
aauacuccugauaauagca

SEQ ID NO: 301192 - RNA, 19 nt, Artificial Sequence
  Description of Artificial Sequence: Synthetic oligonucleotide
  Sense strand starting at position 2730 of SEQ ID NO: 3870
aaacguuaaugacuuaagu

SEQ ID NO: 301193 - RNA, 19 nt, Artificial Sequence
  Description of Artificial Sequence: Synthetic oligonucleotide
  Antisense strand to SEQ ID NO: 301192
acuuaagucauuaacguuu

SEQ ID NO: 301194 - RNA, 19 nt, Artificial Sequence
  Description of Artificial Sequence: Synthetic oligonucleotide
  Sense strand starting at position 2810 of SEQ ID NO: 3870
ccacauaauguauguauca

SEQ ID NO: 301195 - RNA, 19 nt, Artificial Sequence
  Description of Artificial Sequence: Synthetic oligonucleotide
  Antisense strand to SEQ ID NO: 301194
ugauacauacauuaugugg

SEQ ID NO: 301196 - RNA, 19 nt, Artificial Sequence
  Description of Artificial Sequence: Synthetic oligonucleotide
  Sense strand starting at position 3261 of SEQ ID NO: 3870
ugugcauuauuuccaguuu

SEQ ID NO: 301197 - RNA, 19 nt, Artificial Sequence
  Description of Artificial Sequence: Synthetic oligonucleotide
  Antisense strand to SEQ ID NO: 301196
aaacuggaaauaaugcaca

SEQ ID NO: 301198 - RNA, 19 nt, Artificial Sequence
  Description of Artificial Sequence: Synthetic oligonucleotide
  Sense strand starting at position 3340 of SEQ ID NO: 3870
acgguucuccaccauaauu

SEQ ID NO: 301199 - RNA, 19 nt, Artificial Sequence
  Description of Artificial Sequence: Synthetic oligonucleotide
  Antisense strand to SEQ ID NO: 301198
aauuaugguggagaaccgu

SEQ ID NO: 301200 - RNA, 19 nt, Artificial Sequence
  Description of Artificial Sequence: Synthetic oligonucleotide
  Sense strand starting at position 3457 of SEQ ID NO: 3870
uugaaaugcuacuuuacag

SEQ ID NO: 301201 - RNA, 19 nt, Artificial Sequence
  Description of Artificial Sequence: Synthetic oligonucleotide
  Antisense strand to SEQ ID NO: 301200
cuguaaaguagcauuucaa

SEQ ID NO: 301202 - RNA, 19 nt, Artificial Sequence
  Description of Artificial Sequence: Synthetic oligonucleotide
  Sense strand starting at position 3949 of SEQ ID NO: 3870
caguuugaacaguaagcau

SEQ ID NO: 301203 - RNA, 19 nt, Artificial Sequence
  Description of Artificial Sequence: Synthetic oligonucleotide
  Antisense strand to SEQ ID NO: 301202
augcuuacuguucaaacug

SEQ ID NO: 301204 - RNA, 19 nt, Artificial Sequence
  Description of Artificial Sequence: Synthetic oligonucleotide
  Sense strand starting at position 3956 of SEQ ID NO: 3870
aacaguaagcauuguauga

SEQ ID NO: 301205 - RNA, 19 nt, Artificial Sequence
  Description of Artificial Sequence: Synthetic oligonucleotide
  Antisense strand to SEQ ID NO: 301204
ucauacaaugcuuacuguu

SEQ ID NO: 301206 - RNA, 19 nt, Artificial Sequence
  Description of Artificial Sequence: Synthetic oligonucleotide
  Sense strand starting at position 3960 of SEQ ID NO: 3870
guaagcauuguaugaauag

SEQ ID NO: 301207 - RNA, 19 nt, Artificial Sequence
  Description of Artificial Sequence: Synthetic oligonucleotide
  Antisense strand to SEQ ID NO: 301206
cuauucauacaaugcuuac

SEQ ID NO: 301208 - RNA, 19 nt, Artificial Sequence
  Description of Artificial Sequence: Synthetic oligonucleotide
  Sense strand starting at position 3967 of SEQ ID NO: 3870
uuguaugaauaguugaagu

SEQ ID NO: 301209 - RNA, 19 nt, Artificial Sequence
  Description of Artificial Sequence: Synthetic oligonucleotide
  Antisense strand to SEQ ID NO: 301208
acuucaacuauucauacaa

SEQ ID NO: 301210 - RNA, 19 nt, Artificial Sequence
  Description of Artificial Sequence: Synthetic oligonucleotide
  Sense strand starting at position 3969 of SEQ ID NO: 3870
guaugaauaguugaaguau

SEQ ID NO: 301211 - RNA, 19 nt, Artificial Sequence
  Description of Artificial Sequence: Synthetic oligonucleotide
  Antisense strand to SEQ ID NO: 301210
auacuucaacuauucauac

SEQ ID NO: 301212 - RNA, 19 nt, Artificial Sequence
  Description of Artificial Sequence: Synthetic oligonucleotide
  Sense strand starting at position 337 of SEQ ID NO: 3871
cacgguucccgacacauca

SEQ ID NO: 301213 - RNA, 19 nt, Artificial Sequence
  Description of Artificial Sequence: Synthetic oligonucleotide
  Antisense strand to SEQ ID NO: 301212
ugaugugucgggaaccgug

SEQ ID NO: 301214 - RNA, 19 nt, Artificial Sequence
  Description of Artificial Sequence: Synthetic oligonucleotide
  Sense strand starting at position 391 of SEQ ID NO: 3871
guagguuucgcguuccuca

SEQ ID NO: 301215 - RNA, 19 nt, Artificial Sequence
  Description of Artificial Sequence: Synthetic oligonucleotide
  Antisense strand to SEQ ID NO: 301214
ugaggaacgcgaaaccuac

SEQ ID NO: 301216 - RNA, 19 nt, Artificial Sequence
  Description of Artificial Sequence: Synthetic oligonucleotide
  Sense strand starting at position 592 of SEQ ID NO: 3871
ucagaagaacugggcuuau

SEQ ID NO: 301217 - RNA, 19 nt, Artificial Sequence
  Description of Artificial Sequence: Synthetic oligonucleotide
  Antisense strand to SEQ ID NO: 301216
auaagcccaguucuucuga

SEQ ID NO: 301218 - RNA, 19 nt, Artificial Sequence
  Description of Artificial Sequence: Synthetic oligonucleotide
  Sense strand starting at position 607 of SEQ ID NO: 3871
uuaucugaagucuggucaa

SEQ ID NO: 301219 - RNA, 19 nt, Artificial Sequence
  Description of Artificial Sequence: Synthetic oligonucleotide
  Antisense strand to SEQ ID NO: 301218
uugaccagacuucagauaa

SEQ ID NO: 301220 - RNA, 19 nt, Artificial Sequence
  Description of Artificial Sequence: Synthetic oligonucleotide
  Sense strand starting at position 814 of SEQ ID NO: 3871
ccgugacaucagugagaag

SEQ ID NO: 301221 - RNA, 19 nt, Artificial Sequence
  Description of Artificial Sequence: Synthetic oligonucleotide
  Antisense strand to SEQ ID NO: 301220
cuucucacugaugucacgg

SEQ ID NO: 301222 - RNA, 19 nt, Artificial Sequence
  Description of Artificial Sequence: Synthetic oligonucleotide
  Sense strand starting at position 1169 of SEQ ID NO: 3871
cuaagauagcucugaaauu

SEQ ID NO: 301223 - RNA, 19 nt, Artificial Sequence
  Description of Artificial Sequence: Synthetic oligonucleotide
  Antisense strand to SEQ ID NO: 301222
aauuucagagcuaucuuag

SEQ ID NO: 301224 - RNA, 19 nt, Artificial Sequence
  Description of Artificial Sequence: Synthetic oligonucleotide
  Sense strand starting at position 1282 of SEQ ID NO: 3871
aacuaauggcugugagaaa

SEQ ID NO: 301225 - RNA, 19 nt, Artificial Sequence
  Description of Artificial Sequence: Synthetic oligonucleotide
  Antisense strand to SEQ ID NO: 301224
uuucucacagccauuaguu

SEQ ID NO: 301226 - RNA, 19 nt, Artificial Sequence
  Description of Artificial Sequence: Synthetic oligonucleotide
  Sense strand starting at position 1329 of SEQ ID NO: 3871
ugcuguuauuugcucugaa

SEQ ID NO: 301227 - RNA, 19 nt, Artificial Sequence
  Description of Artificial Sequence: Synthetic oligonucleotide
  Antisense strand to SEQ ID NO: 301226
uucagagcaaauaacagca

SEQ ID NO: 301228 - RNA, 19 nt, Artificial Sequence
  Description of Artificial Sequence: Synthetic oligonucleotide
  Sense strand starting at position 1330 of SEQ ID NO: 3871
gcuguuauuugcucugaau

SEQ ID NO: 301229 - RNA, 19 nt, Artificial Sequence
  Description of Artificial Sequence: Synthetic oligonucleotide
  Antisense strand to SEQ ID NO: 301228
auucagagcaaauaacagc

SEQ ID NO: 301230 - RNA, 19 nt, Artificial Sequence
  Description of Artificial Sequence: Synthetic oligonucleotide
  Sense strand starting at position 1332 of SEQ ID NO: 3871
uguuauuugcucugaaucu

SEQ ID NO: 301231 - RNA, 19 nt, Artificial Sequence
  Description of Artificial Sequence: Synthetic oligonucleotide
  Antisense strand to SEQ ID NO: 301230
agauucagagcaaauaaca

SEQ ID NO: 301232 - RNA, 19 nt, Artificial Sequence
  Description of Artificial Sequence: Synthetic oligonucleotide
  Sense strand starting at position 1593 of SEQ ID NO: 3871
cagguuacuugagccuaga

SEQ ID NO: 301233 - RNA, 19 nt, Artificial Sequence
  Description of Artificial Sequence: Synthetic oligonucleotide
  Antisense strand to SEQ ID NO: 301232
ucuaggcucaaguaaccug

SEQ ID NO: 301234 - RNA, 19 nt, Artificial Sequence
  Description of Artificial Sequence: Synthetic oligonucleotide
  Sense strand starting at position 1596 of SEQ ID NO: 3871
guuacuugagccuagauau

SEQ ID NO: 301235 - RNA, 19 nt, Artificial Sequence
  Description of Artificial Sequence: Synthetic oligonucleotide
  Antisense strand to SEQ ID NO: 301234
auaucuaggcucaaguaac

SEQ ID NO: 301236 - RNA, 19 nt, Artificial Sequence
  Description of Artificial Sequence: Synthetic oligonucleotide
  Sense strand starting at position 1639 of SEQ ID NO: 3871
ccucaauaucuguguauuu

SEQ ID NO: 301237 - RNA, 19 nt, Artificial Sequence
  Description of Artificial Sequence: Synthetic oligonucleotide
  Antisense strand to SEQ ID NO: 301236
aaauacacagauauugagg

SEQ ID NO: 301238 - RNA, 19 nt, Artificial Sequence
  Description of Artificial Sequence: Synthetic oligonucleotide
  Sense strand starting at position 1729 of SEQ ID NO: 3871
cuagucuauuugucacuuu

SEQ ID NO: 301239 - RNA, 19 nt, Artificial Sequence
  Description of Artificial Sequence: Synthetic oligonucleotide
  Antisense strand to SEQ ID NO: 301238
aaagugacaaauagacuag

SEQ ID NO: 301240 - RNA, 19 nt, Artificial Sequence
  Description of Artificial Sequence: Synthetic oligonucleotide
  Sense strand starting at position 1732 of SEQ ID NO: 3871
gucuauuugucacuuucca

SEQ ID NO: 301241 - RNA, 19 nt, Artificial Sequence
  Description of Artificial Sequence: Synthetic oligonucleotide
  Antisense strand to SEQ ID NO: 301240
uggaaagugacaaauagac

SEQ ID NO: 301242 - RNA, 19 nt, Artificial Sequence
  Description of Artificial Sequence: Synthetic oligonucleotide
  Sense strand starting at position 1967 of SEQ ID NO: 3871
cugccaauugacgggaaau

SEQ ID NO: 301243 - RNA, 19 nt, Artificial Sequence
  Description of Artificial Sequence: Synthetic oligonucleotide
  Antisense strand to SEQ ID NO: 301242
auuucccgucaauuggcag

SEQ ID NO: 301244 - RNA, 19 nt, Artificial Sequence
  Description of Artificial Sequence: Synthetic oligonucleotide
  Sense strand starting at position 1968 of SEQ ID NO: 3871
ugccaauugacgggaaaug

SEQ ID NO: 301245 - RNA, 19 nt, Artificial Sequence
  Description of Artificial Sequence: Synthetic oligonucleotide
  Antisense strand to SEQ ID NO: 301244
cauuucccgucaauuggca

SEQ ID NO: 301246 - RNA, 19 nt, Artificial Sequence
  Description of Artificial Sequence: Synthetic oligonucleotide
  Sense strand starting at position 1969 of SEQ ID NO: 3871
gccaauugacgggaaaugu

SEQ ID NO: 301247 - RNA, 19 nt, Artificial Sequence
  Description of Artificial Sequence: Synthetic oligonucleotide
  Antisense strand to SEQ ID NO: 301246
acauuucccgucaauuggc

SEQ ID NO: 301248 - RNA, 19 nt, Artificial Sequence
  Description of Artificial Sequence: Synthetic oligonucleotide
  Sense strand starting at position 2018 of SEQ ID NO: 3871
agugaaugcuaacuuuaaa

SEQ ID NO: 301249 - RNA, 19 nt, Artificial Sequence
  Description of Artificial Sequence: Synthetic oligonucleotide
  Antisense strand to SEQ ID NO: 301248
uuuaaaguuagcauucacu

SEQ ID NO: 301250 - RNA, 19 nt, Artificial Sequence
  Description of Artificial Sequence: Synthetic oligonucleotide
  Sense strand starting at position 2047 of SEQ ID NO: 3871
ugggaauuguaguuccacu

SEQ ID NO: 301251 - RNA, 19 nt, Artificial Sequence
  Description of Artificial Sequence: Synthetic oligonucleotide
  Antisense strand to SEQ ID NO: 301250
aguggaacuacaauuccca

SEQ ID NO: 301252 - RNA, 19 nt, Artificial Sequence
  Description of Artificial Sequence: Synthetic oligonucleotide
  Sense strand starting at position 2055 of SEQ ID NO: 3871
guaguuccacuaugaaaga

SEQ ID NO: 301253 - RNA, 19 nt, Artificial Sequence
  Description of Artificial Sequence: Synthetic oligonucleotide
  Antisense strand to SEQ ID NO: 301252
ucuuucauaguggaacuac

SEQ ID NO: 301254 - RNA, 19 nt, Artificial Sequence
  Description of Artificial Sequence: Synthetic oligonucleotide
  Sense strand starting at position 2141 of SEQ ID NO: 3871
uuuggagguuaggugaauu

SEQ ID NO: 301255 - RNA, 19 nt, Artificial Sequence
  Description of Artificial Sequence: Synthetic oligonucleotide
  Antisense strand to SEQ ID NO: 301254
aauucaccuaaccuccaaa

SEQ ID NO: 301256 - RNA, 19 nt, Artificial Sequence
  Description of Artificial Sequence: Synthetic oligonucleotide
  Sense strand starting at position 2545 of SEQ ID NO: 3871
acacuuacugcuuaguaca

SEQ ID NO: 301257 - RNA, 19 nt, Artificial Sequence
  Description of Artificial Sequence: Synthetic oligonucleotide
  Antisense strand to SEQ ID NO: 301256
uguacuaagcaguaagugu

SEQ ID NO: 301258 - RNA, 19 nt, Artificial Sequence
  Description of Artificial Sequence: Synthetic oligonucleotide
  Sense strand starting at position 2629 of SEQ ID NO: 3871
ccaggaacaccgugauaug

SEQ ID NO: 301259 - RNA, 19 nt, Artificial Sequence
  Description of Artificial Sequence: Synthetic oligonucleotide
  Antisense strand to SEQ ID NO: 301258
cauaucacgguguuccugg

SEQ ID NO: 301260 - RNA, 19 nt, Artificial Sequence
  Description of Artificial Sequence: Synthetic oligonucleotide
  Sense strand starting at position 2630 of SEQ ID NO: 3871
caggaacaccgugauaugu

SEQ ID NO: 301261 - RNA, 19 nt, Artificial Sequence
  Description of Artificial Sequence: Synthetic oligonucleotide
  Antisense strand to SEQ ID NO: 301260
acauaucacgguguuccug

SEQ ID NO: 301262 - RNA, 19 nt, Artificial Sequence
  Description of Artificial Sequence: Synthetic oligonucleotide
  Sense strand starting at position 2847 of SEQ ID NO: 3871
auguuugauuuccucguua

SEQ ID NO: 301263 - RNA, 19 nt, Artificial Sequence
  Description of Artificial Sequence: Synthetic oligonucleotide
  Antisense strand to SEQ ID NO: 301262
uaacgaggaaaucaaacau

SEQ ID NO: 301264 - RNA, 19 nt, Artificial Sequence
  Description of Artificial Sequence: Synthetic oligonucleotide
  Sense strand starting at position 2849 of SEQ ID NO: 3871
guuugauuuccucguuaau

SEQ ID NO: 301265 - RNA, 19 nt, Artificial Sequence
  Description of Artificial Sequence: Synthetic oligonucleotide
  Antisense strand to SEQ ID NO: 301264
auuaacgaggaaaucaaac

SEQ ID NO: 301266 - RNA, 19 nt, Artificial Sequence
  Description of Artificial Sequence: Synthetic oligonucleotide
  Sense strand starting at position 2851 of SEQ ID NO: 3871
uugauuuccucguuaaucu

SEQ ID NO: 301267 - RNA, 19 nt, Artificial Sequence
  Description of Artificial Sequence: Synthetic oligonucleotide
  Antisense strand to SEQ ID NO: 301266
agauuaacgaggaaaucaa

SEQ ID NO: 301268 - RNA, 19 nt, Artificial Sequence
  Description of Artificial Sequence: Synthetic oligonucleotide
  Sense strand starting at position 2901 of SEQ ID NO: 3871
aagugaauuugauaagaug

SEQ ID NO: 301269 - RNA, 19 nt, Artificial Sequence
  Description of Artificial Sequence: Synthetic oligonucleotide
  Antisense strand to SEQ ID NO: 301268
caucuuaucaaauucacuu

SEQ ID NO: 301270 - RNA, 19 nt, Artificial Sequence
  Description of Artificial Sequence: Synthetic oligonucleotide
  Sense strand starting at position 2909 of SEQ ID NO: 3871
uugauaagauggccaauua

SEQ ID NO: 301271 - RNA, 19 nt, Artificial Sequence
  Description of Artificial Sequence: Synthetic oligonucleotide
  Antisense strand to SEQ ID NO: 301270
uaauuggccaucuuaucaa

SEQ ID NO: 301272 - RNA, 19 nt, Artificial Sequence
  Description of Artificial Sequence: Synthetic oligonucleotide
  Sense strand starting at position 3009 of SEQ ID NO: 3871
auguaaagagcuuaggagu

SEQ ID NO: 301273 - RNA, 19 nt, Artificial Sequence
  Description of Artificial Sequence: Synthetic oligonucleotide
  Antisense strand to SEQ ID NO: 301272
acuccuaagcucuuuacau

SEQ ID NO: 301274 - RNA, 19 nt, Artificial Sequence
  Description of Artificial Sequence: Synthetic oligonucleotide
  Sense strand starting at position 3136 of SEQ ID NO: 3871
agagaauagcagugagauc

SEQ ID NO: 301275 - RNA, 19 nt, Artificial Sequence
  Description of Artificial Sequence: Synthetic oligonucleotide
  Antisense strand to SEQ ID NO: 301274
gaucucacugcuauucucu

SEQ ID NO: 301276 - RNA, 19 nt, Artificial Sequence
  Description of Artificial Sequence: Synthetic oligonucleotide
  Sense strand starting at position 3202 of SEQ ID NO: 3871
ggaacuugauuuggacaaa

SEQ ID NO: 301277 - RNA, 19 nt, Artificial Sequence
  Description of Artificial Sequence: Synthetic oligonucleotide
  Antisense strand to SEQ ID NO: 301276
uuuguccaaaucaaguucc

SEQ ID NO: 301278 - RNA, 19 nt, Artificial Sequence
  Description of Artificial Sequence: Synthetic oligonucleotide
  Sense strand starting at position 3233 of SEQ ID NO: 3871
gaacauggcaggugugaga

SEQ ID NO: 301279 - RNA, 19 nt, Artificial Sequence
  Description of Artificial Sequence: Synthetic oligonucleotide
  Antisense strand to SEQ ID NO: 301278
ucucacaccugccauguuc

SEQ ID NO: 301280 - RNA, 19 nt, Artificial Sequence
  Description of Artificial Sequence: Synthetic oligonucleotide
  Sense strand starting at position 3337 of SEQ ID NO: 3871
caccucaugucucugggau

SEQ ID NO: 301281 - RNA, 19 nt, Artificial Sequence
  Description of Artificial Sequence: Synthetic oligonucleotide
  Antisense strand to SEQ ID NO: 301280
aucccagagacaugaggug

SEQ ID NO: 301282 - RNA, 19 nt, Artificial Sequence
  Description of Artificial Sequence: Synthetic oligonucleotide
  Sense strand starting at position 3338 of SEQ ID NO: 3871
accucaugucucugggaug

SEQ ID NO: 301283 - RNA, 19 nt, Artificial Sequence
  Description of Artificial Sequence: Synthetic oligonucleotide
  Antisense strand to SEQ ID NO: 301282
caucccagagacaugaggu

SEQ ID NO: 301284 - RNA, 19 nt, Artificial Sequence
  Description of Artificial Sequence: Synthetic oligonucleotide
  Sense strand starting at position 3366 of SEQ ID NO: 3871
aggugaccaccuugaaaug

SEQ ID NO: 301285 - RNA, 19 nt, Artificial Sequence
  Description of Artificial Sequence: Synthetic oligonucleotide
  Antisense strand to SEQ ID NO: 301284
cauuucaagguggucaccu

SEQ ID NO: 301286 - RNA, 19 nt, Artificial Sequence
  Description of Artificial Sequence: Synthetic oligonucleotide
  Sense strand starting at position 3525 of SEQ ID NO: 3871
gggaaagacacgugugaag

SEQ ID NO: 301287 - RNA, 19 nt, Artificial Sequence
  Description of Artificial Sequence: Synthetic oligonucleotide
  Antisense strand to SEQ ID NO: 301286
cuucacacgugucuuuccc

SEQ ID NO: 301288 - RNA, 19 nt, Artificial Sequence
  Description of Artificial Sequence: Synthetic oligonucleotide
  Sense strand starting at position 3678 of SEQ ID NO: 3871
gaaggcaugcucggagaaa

SEQ ID NO: 301289 - RNA, 19 nt, Artificial Sequence
  Description of Artificial Sequence: Synthetic oligonucleotide
  Antisense strand to SEQ ID NO: 301288
uuucuccgagcaugccuuc

SEQ ID NO: 301290 - RNA, 19 nt, Artificial Sequence
  Description of Artificial Sequence: Synthetic oligonucleotide
  Sense strand starting at position 3981 of SEQ ID NO: 3871
uguguuacugaauacugua

SEQ ID NO: 301291 - RNA, 19 nt, Artificial Sequence
  Description of Artificial Sequence: Synthetic oligonucleotide
  Antisense strand to SEQ ID NO: 301290
uacaguauucaguaacaca

SEQ ID NO: 301292 - RNA, 19 nt, Artificial Sequence
  Description of Artificial Sequence: Synthetic oligonucleotide
  Sense strand starting at position 66 of SEQ ID NO: 3872
ugaauaggauguuuaguca

SEQ ID NO: 301293 - RNA, 19 nt, Artificial Sequence
  Description of Artificial Sequence: Synthetic oligonucleotide
  Antisense strand to SEQ ID NO: 301292
ugacuaaacauccuauuca

SEQ ID NO: 301294 - RNA, 19 nt, Artificial Sequence
  Description of Artificial Sequence: Synthetic oligonucleotide
  Sense strand starting at position 129 of SEQ ID NO: 3872
uaaggcaaacucuguguuu

SEQ ID NO: 301295 - RNA, 19 nt, Artificial Sequence
  Description of Artificial Sequence: Synthetic oligonucleotide
  Antisense strand to SEQ ID NO: 301294
aaacacagaguuugccuua

SEQ ID NO: 301296 - RNA, 19 nt, Artificial Sequence
  Description of Artificial Sequence: Synthetic oligonucleotide
  Sense strand starting at position 130 of SEQ ID NO: 3872
aaggcaaacucuguguuua

SEQ ID NO: 301297 - RNA, 19 nt, Artificial Sequence
  Description of Artificial Sequence: Synthetic oligonucleotide
  Antisense strand to SEQ ID NO: 301296
uaaacacagaguuugccuu

SEQ ID NO: 301298 - RNA, 19 nt, Artificial Sequence
  Description of Artificial Sequence: Synthetic oligonucleotide
  Sense strand starting at position 131 of SEQ ID NO: 3872
aggcaaacucuguguuuaa

SEQ ID NO: 301299 - RNA, 19 nt, Artificial Sequence
  Description of Artificial Sequence: Synthetic oligonucleotide
  Antisense strand to SEQ ID NO: 301298
uuaaacacagaguuugccu

SEQ ID NO: 301300 - RNA, 19 nt, Artificial Sequence
  Description of Artificial Sequence: Synthetic oligonucleotide
  Sense strand starting at position 132 of SEQ ID NO: 3872
ggcaaacucuguguuuaag

SEQ ID NO: 301301 - RNA, 19 nt, Artificial Sequence
  Description of Artificial Sequence: Synthetic oligonucleotide
  Antisense strand to SEQ ID NO: 301300
cuuaaacacagaguuugcc

SEQ ID NO: 301302 - RNA, 19 nt, Artificial Sequence
  Description of Artificial Sequence: Synthetic oligonucleotide
  Sense strand starting at position 138 of SEQ ID NO: 3872
cucuguguuuaagaacaua

SEQ ID NO: 301303 - RNA, 19 nt, Artificial Sequence
  Description of Artificial Sequence: Synthetic oligonucleotide
  Antisense strand to SEQ ID NO: 301302
uauguucuuaaacacagag

SEQ ID NO: 301304 - RNA, 19 nt, Artificial Sequence
  Description of Artificial Sequence: Synthetic oligonucleotide
  Sense strand starting at position 236 of SEQ ID NO: 3872
ggacuuugaggccagaguu

SEQ ID NO: 301305 - RNA, 19 nt, Artificial Sequence
  Description of Artificial Sequence: Synthetic oligonucleotide
  Antisense strand to SEQ ID NO: 301304
aacucuggccucaaagucc

SEQ ID NO: 301306 - RNA, 19 nt, Artificial Sequence
  Description of Artificial Sequence: Synthetic oligonucleotide
  Sense strand starting at position 490 of SEQ ID NO: 3872
ggcccuaaugugcacauaa

SEQ ID NO: 301307 - RNA, 19 nt, Artificial Sequence
  Description of Artificial Sequence: Synthetic oligonucleotide
  Antisense strand to SEQ ID NO: 301306
uuaugugcacauuagggcc

SEQ ID NO: 301308 - RNA, 19 nt, Artificial Sequence
  Description of Artificial Sequence: Synthetic oligonucleotide
  Sense strand starting at position 686 of SEQ ID NO: 3872
ccucccauaccauguuaga

SEQ ID NO: 301309 - RNA, 19 nt, Artificial Sequence
  Description of Artificial Sequence: Synthetic oligonucleotide
  Antisense strand to SEQ ID NO: 301308
ucuaacaugguaugggagg

SEQ ID NO: 301310 - RNA, 19 nt, Artificial Sequence
  Description of Artificial Sequence: Synthetic oligonucleotide
  Sense strand starting at position 697 of SEQ ID NO: 3872
auguuagaccguugcaaca

SEQ ID NO: 301311 - RNA, 19 nt, Artificial Sequence
  Description of Artificial Sequence: Synthetic oligonucleotide
  Antisense strand to SEQ ID NO: 301310
uguugcaacggucuaacau

SEQ ID NO: 301312 - RNA, 19 nt, Artificial Sequence
  Description of Artificial Sequence: Synthetic oligonucleotide
  Sense strand starting at position 755 of SEQ ID NO: 3872
gacacaagcucugaaggaa

SEQ ID NO: 301313 - RNA, 19 nt, Artificial Sequence
  Description of Artificial Sequence: Synthetic oligonucleotide
  Antisense strand to SEQ ID NO: 301312
uuccuucagagcuuguguc

SEQ ID NO: 301314 - RNA, 19 nt, Artificial Sequence
  Description of Artificial Sequence: Synthetic oligonucleotide
  Sense strand starting at position 758 of SEQ ID NO: 3872
acaagcucugaaggaaauu

SEQ ID NO: 301315 - RNA, 19 nt, Artificial Sequence
  Description of Artificial Sequence: Synthetic oligonucleotide
  Antisense strand to SEQ ID NO: 301314
aauuuccuucagagcuugu

SEQ ID NO: 301316 - RNA, 19 nt, Artificial Sequence
  Description of Artificial Sequence: Synthetic oligonucleotide
  Sense strand starting at position 859 of SEQ ID NO: 3872
agcaaacuacugugaacuu

SEQ ID NO: 301317 - RNA, 19 nt, Artificial Sequence
  Description of Artificial Sequence: Synthetic oligonucleotide
  Antisense strand to SEQ ID NO: 301316
aaguucacaguaguuugcu

SEQ ID NO: 301318 - RNA, 19 nt, Artificial Sequence
  Description of Artificial Sequence: Synthetic oligonucleotide
  Sense strand starting at position 860 of SEQ ID NO: 3872
gcaaacuacugugaacuuu

SEQ ID NO: 301319 - RNA, 19 nt, Artificial Sequence
  Description of Artificial Sequence: Synthetic oligonucleotide
  Antisense strand to SEQ ID NO: 301318
aaaguucacaguaguuugc

SEQ ID NO: 301320 - RNA, 19 nt, Artificial Sequence
  Description of Artificial Sequence: Synthetic oligonucleotide
  Sense strand starting at position 991 of SEQ ID NO: 3872
ggugccucccgcguguaau

SEQ ID NO: 301321 - RNA, 19 nt, Artificial Sequence
  Description of Artificial Sequence: Synthetic oligonucleotide
  Antisense strand to SEQ ID NO: 301320
auuacacgcgggaggcacc

SEQ ID NO: 301322 - RNA, 19 nt, Artificial Sequence
  Description of Artificial Sequence: Synthetic oligonucleotide
  Sense strand starting at position 1001 of SEQ ID NO: 3872
gcguguaauccgcagaaau

SEQ ID NO: 301323 - RNA, 19 nt, Artificial Sequence
  Description of Artificial Sequence: Synthetic oligonucleotide
  Antisense strand to SEQ ID NO: 301322
auuucugcggauuacacgc

SEQ ID NO: 301324 - RNA, 19 nt, Artificial Sequence
  Description of Artificial Sequence: Synthetic oligonucleotide
  Sense strand starting at position 1003 of SEQ ID NO: 3872
guguaauccgcagaaaucu

SEQ ID NO: 301325 - RNA, 19 nt, Artificial Sequence
  Description of Artificial Sequence: Synthetic oligonucleotide
  Antisense strand to SEQ ID NO: 301324
agauuucugcggauuacac

SEQ ID NO: 301326 - RNA, 19 nt, Artificial Sequence
  Description of Artificial Sequence: Synthetic oligonucleotide
  Sense strand starting at position 1012 of SEQ ID NO: 3872
gcagaaaucucacugaaau

SEQ ID NO: 301327 - RNA, 19 nt, Artificial Sequence
  Description of Artificial Sequence: Synthetic oligonucleotide
  Antisense strand to SEQ ID NO: 301326
auuucagugagauuucugc

SEQ ID NO: 301328 - RNA, 19 nt, Artificial Sequence
  Description of Artificial Sequence: Synthetic oligonucleotide
  Sense strand starting at position 2449 of SEQ ID NO: 3872
aggugcucgccuuaucauu

SEQ ID NO: 301329 - RNA, 19 nt, Artificial Sequence
  Description of Artificial Sequence: Synthetic oligonucleotide
  Antisense strand to SEQ ID NO: 301328
aaugauaaggcgagcaccu

SEQ ID NO: 301330 - RNA, 19 nt, Artificial Sequence
  Description of Artificial Sequence: Synthetic oligonucleotide
  Sense strand starting at position 2807 of SEQ ID NO: 3872
gggcgaaagcguagccuuu

SEQ ID NO: 301331 - RNA, 19 nt, Artificial Sequence
  Description of Artificial Sequence: Synthetic oligonucleotide
  Antisense strand to SEQ ID NO: 301330
aaaggcuacgcuuucgccc

SEQ ID NO: 301332 - RNA, 19 nt, Artificial Sequence
  Description of Artificial Sequence: Synthetic oligonucleotide
  Sense strand starting at position 2846 of SEQ ID NO: 3872
auggaagcucuuuaacuuu

SEQ ID NO: 301333 - RNA, 19 nt, Artificial Sequence
  Description of Artificial Sequence: Synthetic oligonucleotide
  Antisense strand to SEQ ID NO: 301332
aaaguuaaagagcuuccau

SEQ ID NO: 301334 - RNA, 19 nt, Artificial Sequence
  Description of Artificial Sequence: Synthetic oligonucleotide
  Sense strand starting at position 2869 of SEQ ID NO: 3872
aaguuauugguagguugga

SEQ ID NO: 301335 - RNA, 19 nt, Artificial Sequence
  Description of Artificial Sequence: Synthetic oligonucleotide
  Antisense strand to SEQ ID NO: 301334
uccaaccuaccaauaacuu

SEQ ID NO: 301336 - RNA, 19 nt, Artificial Sequence
  Description of Artificial Sequence: Synthetic oligonucleotide
  Sense strand starting at position 2896 of SEQ ID NO: 3872
acgugacguguucaucaca

SEQ ID NO: 301337 - RNA, 19 nt, Artificial Sequence
  Description of Artificial Sequence: Synthetic oligonucleotide
  Antisense strand to SEQ ID NO: 301336
ugugaugaacacgucacgu

SEQ ID NO: 301338 - RNA, 19 nt, Artificial Sequence
  Description of Artificial Sequence: Synthetic oligonucleotide
  Sense strand starting at position 2899 of SEQ ID NO: 3872
ugacguguucaucacagua

SEQ ID NO: 301339 - RNA, 19 nt, Artificial Sequence
  Description of Artificial Sequence: Synthetic oligonucleotide
  Antisense strand to SEQ ID NO: 301338
uacugugaugaacacguca

SEQ ID NO: 301340 - RNA, 19 nt, Artificial Sequence
  Description of Artificial Sequence: Synthetic oligonucleotide
  Sense strand starting at position 2946 of SEQ ID NO: 3872
uuuaguaaccaguagauuc

SEQ ID NO: 301341 - RNA, 19 nt, Artificial Sequence
  Description of Artificial Sequence: Synthetic oligonucleotide
  Antisense strand to SEQ ID NO: 301340
gaaucuacugguuacuaaa

SEQ ID NO: 301342 - RNA, 19 nt, Artificial Sequence
  Description of Artificial Sequence: Synthetic oligonucleotide
  Sense strand starting at position 2954 of SEQ ID NO: 3872
ccaguagauucuccaagcu

SEQ ID NO: 301343 - RNA, 19 nt, Artificial Sequence
  Description of Artificial Sequence: Synthetic oligonucleotide
  Antisense strand to SEQ ID NO: 301342
agcuuggagaaucuacugg

SEQ ID NO: 301344 - RNA, 19 nt, Artificial Sequence
  Description of Artificial Sequence: Synthetic oligonucleotide
  Sense strand starting at position 3004 of SEQ ID NO: 3872
auuuguaucaucgggucuu

SEQ ID NO: 301345 - RNA, 19 nt, Artificial Sequence
  Description of Artificial Sequence: Synthetic oligonucleotide
  Antisense strand to SEQ ID NO: 301344
aagacccgaugauacaaau

SEQ ID NO: 301346 - RNA, 19 nt, Artificial Sequence
  Description of Artificial Sequence: Synthetic oligonucleotide
  Sense strand starting at position 3171 of SEQ ID NO: 3872
ccaguagcccuagaaauau

SEQ ID NO: 301347 - RNA, 19 nt, Artificial Sequence
  Description of Artificial Sequence: Synthetic oligonucleotide
  Antisense strand to SEQ ID NO: 301346
auauuucuagggcuacugg

SEQ ID NO: 301348 - RNA, 19 nt, Artificial Sequence
  Description of Artificial Sequence: Synthetic oligonucleotide
  Sense strand starting at position 3215 of SEQ ID NO: 3872
cauucuuugugggaacuga

SEQ ID NO: 301349 - RNA, 19 nt, Artificial Sequence
  Description of Artificial Sequence: Synthetic oligonucleotide
  Antisense strand to SEQ ID NO: 301348
ucaguucccacaaagaaug

SEQ ID NO: 301350 - RNA, 19 nt, Artificial Sequence
  Description of Artificial Sequence: Synthetic oligonucleotide
  Sense strand starting at position 3292 of SEQ ID NO: 3872
ugucauucugaaugggauu

SEQ ID NO: 301351 - RNA, 19 nt, Artificial Sequence
  Description of Artificial Sequence: Synthetic oligonucleotide
  Antisense strand to SEQ ID NO: 301350
aaucccauucagaaugaca

SEQ ID NO: 301352 - RNA, 19 nt, Artificial Sequence
  Description of Artificial Sequence: Synthetic oligonucleotide
  Sense strand starting at position 3380 of SEQ ID NO: 3872
guguauugccaauaucuau

SEQ ID NO: 301353 - RNA, 19 nt, Artificial Sequence
  Description of Artificial Sequence: Synthetic oligonucleotide
  Antisense strand to SEQ ID NO: 301352
auagauauuggcaauacac

SEQ ID NO: 301354 - RNA, 19 nt, Artificial Sequence
  Description of Artificial Sequence: Synthetic oligonucleotide
  Sense strand starting at position 3402 of SEQ ID NO: 3872
aaugauuuguagcagcuca

SEQ ID NO: 301355 - RNA, 19 nt, Artificial Sequence
  Description of Artificial Sequence: Synthetic oligonucleotide
  Antisense strand to SEQ ID NO: 301354
ugagcugcuacaaaucauu

SEQ ID NO: 301356 - RNA, 19 nt, Artificial Sequence
  Description of Artificial Sequence: Synthetic oligonucleotide
  Sense strand starting at position 3475 of SEQ ID NO: 3872
gcauguugaccagguguau

SEQ ID NO: 301357 - RNA, 19 nt, Artificial Sequence
  Description of Artificial Sequence: Synthetic oligonucleotide
  Antisense strand to SEQ ID NO: 301356
auacaccuggucaacaugc

SEQ ID NO: 301358 - RNA, 19 nt, Artificial Sequence
  Description of Artificial Sequence: Synthetic oligonucleotide
  Sense strand starting at position 3484 of SEQ ID NO: 3872
ccagguguauaucuuguga

SEQ ID NO: 301359 - RNA, 19 nt, Artificial Sequence
  Description of Artificial Sequence: Synthetic oligonucleotide
  Antisense strand to SEQ ID NO: 301358
ucacaagauauacaccugg

SEQ ID NO: 301360 - RNA, 19 nt, Artificial Sequence
  Description of Artificial Sequence: Synthetic oligonucleotide
  Sense strand starting at position 3495 of SEQ ID NO: 3872
ucuugugaaguuugucuuu

SEQ ID NO: 301361 - RNA, 19 nt, Artificial Sequence
  Description of Artificial Sequence: Synthetic oligonucleotide
  Antisense strand to SEQ ID NO: 301360
aaagacaaacuucacaaga

SEQ ID NO: 301362 - RNA, 19 nt, Artificial Sequence
  Description of Artificial Sequence: Synthetic oligonucleotide
  Sense strand starting at position 3521 of SEQ ID NO: 3872
accgucauucacgguugaa

SEQ ID NO: 301363 - RNA, 19 nt, Artificial Sequence
  Description of Artificial Sequence: Synthetic oligonucleotide
  Antisense strand to SEQ ID NO: 301362
uucaaccgugaaugacggu

SEQ ID NO: 301364 - RNA, 19 nt, Artificial Sequence
  Description of Artificial Sequence: Synthetic oligonucleotide
  Sense strand starting at position 3543 of SEQ ID NO: 3872
uuugcagcuguguacuauu

SEQ ID NO: 301365 - RNA, 19 nt, Artificial Sequence
  Description of Artificial Sequence: Synthetic oligonucleotide
  Antisense strand to SEQ ID NO: 301364
aauaguacacagcugcaaa

SEQ ID NO: 301366 - RNA, 19 nt, Artificial Sequence
  Description of Artificial Sequence: Synthetic oligonucleotide
  Sense strand starting at position 3602 of SEQ ID NO: 3872
agguguuauuguuugugau

SEQ ID NO: 301367 - RNA, 19 nt, Artificial Sequence
  Description of Artificial Sequence: Synthetic oligonucleotide
  Antisense strand to SEQ ID NO: 301366
aucacaaacaauaacaccu

SEQ ID NO: 301368 - RNA, 19 nt, Artificial Sequence
  Description of Artificial Sequence: Synthetic oligonucleotide
  Sense strand starting at position 3603 of SEQ ID NO: 3872
gguguuauuguuugugaug

SEQ ID NO: 301369 - RNA, 19 nt, Artificial Sequence
  Description of Artificial Sequence: Synthetic oligonucleotide
  Antisense strand to SEQ ID NO: 301368
caucacaaacaauaacacc

SEQ ID NO: 301370 - RNA, 19 nt, Artificial Sequence
  Description of Artificial Sequence: Synthetic oligonucleotide
  Sense strand starting at position 3950 of SEQ ID NO: 3872
gauucugguguccagacaa

SEQ ID NO: 301371 - RNA, 19 nt, Artificial Sequence
  Description of Artificial Sequence: Synthetic oligonucleotide
  Antisense strand to SEQ ID NO: 301370
uugucuggacaccagaauc

SEQ ID NO: 301372 - RNA, 19 nt, Artificial Sequence
  Description of Artificial Sequence: Synthetic oligonucleotide
  Sense strand starting at position 11 of SEQ ID NO: 3873
gccuaacacuggucacacu

SEQ ID NO: 301373 - RNA, 19 nt, Artificial Sequence
  Description of Artificial Sequence: Synthetic oligonucleotide
  Antisense strand to SEQ ID NO: 301372
agugugaccaguguuaggc

SEQ ID NO: 301374 - RNA, 19 nt, Artificial Sequence
  Description of Artificial Sequence: Synthetic oligonucleotide
  Sense strand starting at position 22 of SEQ ID NO: 3873
gucacacuuccacaucagu

SEQ ID NO: 301375 - RNA, 19 nt, Artificial Sequence
  Description of Artificial Sequence: Synthetic oligonucleotide
  Antisense strand to SEQ ID NO: 301374
acugauguggaagugugac

SEQ ID NO: 301376 - RNA, 19 nt, Artificial Sequence
  Description of Artificial Sequence: Synthetic oligonucleotide
  Sense strand starting at position 39 of SEQ ID NO: 3873
guuacuuucccaggagcca

SEQ ID NO: 301377 - RNA, 19 nt, Artificial Sequence
  Description of Artificial Sequence: Synthetic oligonucleotide
  Antisense strand to SEQ ID NO: 301376
uggcuccugggaaaguaac

SEQ ID NO: 301378 - RNA, 19 nt, Artificial Sequence
  Description of Artificial Sequence: Synthetic oligonucleotide
  Sense strand starting at position 77 of SEQ ID NO: 3873
gggcuugaacucugaacac

SEQ ID NO: 301379 - RNA, 19 nt, Artificial Sequence
  Description of Artificial Sequence: Synthetic oligonucleotide
  Antisense strand to SEQ ID NO: 301378
guguucagaguucaagccc

SEQ ID NO: 301380 - RNA, 19 nt, Artificial Sequence
  Description of Artificial Sequence: Synthetic oligonucleotide
  Sense strand starting at position 184 of SEQ ID NO: 3873
ucaguauuagcuuggacuu

SEQ ID NO: 301381 - RNA, 19 nt, Artificial Sequence
  Description of Artificial Sequence: Synthetic oligonucleotide
  Antisense strand to SEQ ID NO: 301380
aaguccaagcuaauacuga

SEQ ID NO: 301382 - RNA, 19 nt, Artificial Sequence
  Description of Artificial Sequence: Synthetic oligonucleotide
  Sense strand starting at position 185 of SEQ ID NO: 3873
caguauuagcuuggacuuu

SEQ ID NO: 301383 - RNA, 19 nt, Artificial Sequence
  Description of Artificial Sequence: Synthetic oligonucleotide
  Antisense strand to SEQ ID NO: 301382
aaaguccaagcuaauacug

SEQ ID NO: 301384 - RNA, 19 nt, Artificial Sequence
  Description of Artificial Sequence: Synthetic oligonucleotide
  Sense strand starting at position 393 of SEQ ID NO: 3873
aaguguaucucacuuagag

SEQ ID NO: 301385 - RNA, 19 nt, Artificial Sequence
  Description of Artificial Sequence: Synthetic oligonucleotide
  Antisense strand to SEQ ID NO: 301384
cucuaagugagauacacuu

SEQ ID NO: 301386 - RNA, 19 nt, Artificial Sequence
  Description of Artificial Sequence: Synthetic oligonucleotide
  Sense strand starting at position 450 of SEQ ID NO: 3873
gaaagugauuaugcuggga

SEQ ID NO: 301387 - RNA, 19 nt, Artificial Sequence
  Description of Artificial Sequence: Synthetic oligonucleotide
  Antisense strand to SEQ ID NO: 301386
ucccagcauaaucacuuuc

SEQ ID NO: 301388 - RNA, 19 nt, Artificial Sequence
  Description of Artificial Sequence: Synthetic oligonucleotide
  Sense strand starting at position 453 of SEQ ID NO: 3873
agugauuaugcugggacaa

SEQ ID NO: 301389 - RNA, 19 nt, Artificial Sequence
  Description of Artificial Sequence: Synthetic oligonucleotide
  Antisense strand to SEQ ID NO: 301388
uugucccagcauaaucacu

SEQ ID NO: 301390 - RNA, 19 nt, Artificial Sequence
  Description of Artificial Sequence: Synthetic oligonucleotide
  Sense strand starting at position 454 of SEQ ID NO: 3873
gugauuaugcugggacaau

SEQ ID NO: 301391 - RNA, 19 nt, Artificial Sequence
  Description of Artificial Sequence: Synthetic oligonucleotide
  Antisense strand to SEQ ID NO: 301390
auugucccagcauaaucac

SEQ ID NO: 301392 - RNA, 19 nt, Artificial Sequence
  Description of Artificial Sequence: Synthetic oligonucleotide
  Sense strand starting at position 472 of SEQ ID NO: 3873
ugguauaagccagaacucu

SEQ ID NO: 301393 - RNA, 19 nt, Artificial Sequence
  Description of Artificial Sequence: Synthetic oligonucleotide
  Antisense strand to SEQ ID NO: 301392
agaguucuggcuuauacca

SEQ ID NO: 301394 - RNA, 19 nt, Artificial Sequence
  Description of Artificial Sequence: Synthetic oligonucleotide
  Sense strand starting at position 568 of SEQ ID NO: 3873
aguuaacugcaguggauaa

SEQ ID NO: 301395 - RNA, 19 nt, Artificial Sequence
  Description of Artificial Sequence: Synthetic oligonucleotide
  Antisense strand to SEQ ID NO: 301394
uuauccacugcaguuaacu

SEQ ID NO: 301396 - RNA, 19 nt, Artificial Sequence
  Description of Artificial Sequence: Synthetic oligonucleotide
  Sense strand starting at position 636 of SEQ ID NO: 3873
gcuagcggugcccucaaua

SEQ ID NO: 301397 - RNA, 19 nt, Artificial Sequence
  Description of Artificial Sequence: Synthetic oligonucleotide
  Antisense strand to SEQ ID NO: 301396
uauugagggcaccgcuagc

SEQ ID NO: 301398 - RNA, 19 nt, Artificial Sequence
  Description of Artificial Sequence: Synthetic oligonucleotide
  Sense strand starting at position 666 of SEQ ID NO: 3873
uucugcaauucugugguaa

SEQ ID NO: 301399 - RNA, 19 nt, Artificial Sequence
  Description of Artificial Sequence: Synthetic oligonucleotide
  Antisense strand to SEQ ID NO: 301398
uuaccacagaauugcagaa

SEQ ID NO: 301400 - RNA, 19 nt, Artificial Sequence
  Description of Artificial Sequence: Synthetic oligonucleotide
  Sense strand starting at position 667 of SEQ ID NO: 3873
ucugcaauucugugguaag

SEQ ID NO: 301401 - RNA, 19 nt, Artificial Sequence
  Description of Artificial Sequence: Synthetic oligonucleotide
  Antisense strand to SEQ ID NO: 301400
cuuaccacagaauugcaga

SEQ ID NO: 301402 - RNA, 19 nt, Artificial Sequence
  Description of Artificial Sequence: Synthetic oligonucleotide
  Sense strand starting at position 776 of SEQ ID NO: 3873
gaaaccaucgcaggaguga

SEQ ID NO: 301403 - RNA, 19 nt, Artificial Sequence
  Description of Artificial Sequence: Synthetic oligonucleotide
  Antisense strand to SEQ ID NO: 301402
ucacuccugcgaugguuuc

SEQ ID NO: 301404 - RNA, 19 nt, Artificial Sequence
  Description of Artificial Sequence: Synthetic oligonucleotide
  Sense strand starting at position 1042 of SEQ ID NO: 3873
gcagcauucccaggccaau

SEQ ID NO: 301405 - RNA, 19 nt, Artificial Sequence
  Description of Artificial Sequence: Synthetic oligonucleotide
  Antisense strand to SEQ ID NO: 301404
auuggccugggaaugcugc

SEQ ID NO: 301406 - RNA, 19 nt, Artificial Sequence
  Description of Artificial Sequence: Synthetic oligonucleotide
  Sense strand starting at position 1179 of SEQ ID NO: 3873
cuaugagggcuccaagcau

SEQ ID NO: 301407 - RNA, 19 nt, Artificial Sequence
  Description of Artificial Sequence: Synthetic oligonucleotide
  Antisense strand to SEQ ID NO: 301406
augcuuggagcccucauag

SEQ ID NO: 301408 - RNA, 19 nt, Artificial Sequence
  Description of Artificial Sequence: Synthetic oligonucleotide
  Sense strand starting at position 2075 of SEQ ID NO: 3873
gcgcgaucccggaagcauc

SEQ ID NO: 301409 - RNA, 19 nt, Artificial Sequence
  Description of Artificial Sequence: Synthetic oligonucleotide
  Antisense strand to SEQ ID NO: 301408
gaugcuuccgggaucgcgc

SEQ ID NO: 301410 - RNA, 19 nt, Artificial Sequence
  Description of Artificial Sequence: Synthetic oligonucleotide
  Sense strand starting at position 2449 of SEQ ID NO: 3873
uaguaaacgcuuuauugac

SEQ ID NO: 301411 - RNA, 19 nt, Artificial Sequence
  Description of Artificial Sequence: Synthetic oligonucleotide
  Antisense strand to SEQ ID NO: 301410
gucaauaaagcguuuacua

SEQ ID NO: 301412 - RNA, 19 nt, Artificial Sequence
  Description of Artificial Sequence: Synthetic oligonucleotide
  Sense strand starting at position 2574 of SEQ ID NO: 3873
uuaagauucuugccucaug

SEQ ID NO: 301413 - RNA, 19 nt, Artificial Sequence
  Description of Artificial Sequence: Synthetic oligonucleotide
  Antisense strand to SEQ ID NO: 301412
caugaggcaagaaucuuaa

SEQ ID NO: 301414 - RNA, 19 nt, Artificial Sequence
  Description of Artificial Sequence: Synthetic oligonucleotide
  Sense strand starting at position 2588 of SEQ ID NO: 3873
ucaugucugcagcaucaga

SEQ ID NO: 301415 - RNA, 19 nt, Artificial Sequence
  Description of Artificial Sequence: Synthetic oligonucleotide
  Antisense strand to SEQ ID NO: 301414
ucugaugcugcagacauga

SEQ ID NO: 301416 - RNA, 19 nt, Artificial Sequence
  Description of Artificial Sequence: Synthetic oligonucleotide
  Sense strand starting at position 2773 of SEQ ID NO: 3873
uuauuaagcguaggucuau

SEQ ID NO: 301417 - RNA, 19 nt, Artificial Sequence
  Description of Artificial Sequence: Synthetic oligonucleotide
  Antisense strand to SEQ ID NO: 301416
auagaccuacgcuuaauaa

SEQ ID NO: 301418 - RNA, 19 nt, Artificial Sequence
  Description of Artificial Sequence: Synthetic oligonucleotide
  Sense strand starting at position 2774 of SEQ ID NO: 3873
uauuaagcguaggucuauu

SEQ ID NO: 301419 - RNA, 19 nt, Artificial Sequence
  Description of Artificial Sequence: Synthetic oligonucleotide
  Antisense strand to SEQ ID NO: 301418
aauagaccuacgcuuaaua

SEQ ID NO: 301420 - RNA, 19 nt, Artificial Sequence
  Description of Artificial Sequence: Synthetic oligonucleotide
  Sense strand starting at position 2784 of SEQ ID NO: 3873
aggucuauucuaggauaaa

SEQ ID NO: 301421 - RNA, 19 nt, Artificial Sequence
  Description of Artificial Sequence: Synthetic oligonucleotide
  Antisense strand to SEQ ID NO: 301420
uuuauccuagaauagaccu

SEQ ID NO: 301422 - RNA, 19 nt, Artificial Sequence
  Description of Artificial Sequence: Synthetic oligonucleotide
  Sense strand starting at position 3107 of SEQ ID NO: 3873
gguuucugcuuacucaacu

SEQ ID NO: 301423 - RNA, 19 nt, Artificial Sequence
  Description of Artificial Sequence: Synthetic oligonucleotide
  Antisense strand to SEQ ID NO: 301422
aguugaguaagcagaaacc

SEQ ID NO: 301424 - RNA, 19 nt, Artificial Sequence
  Description of Artificial Sequence: Synthetic oligonucleotide
  Sense strand starting at position 3396 of SEQ ID NO: 3873
uucuaucagguguacuuaa

SEQ ID NO: 301425 - RNA, 19 nt, Artificial Sequence
  Description of Artificial Sequence: Synthetic oligonucleotide
  Antisense strand to SEQ ID NO: 301424
uuaaguacaccugauagaa

SEQ ID NO: 301426 - RNA, 19 nt, Artificial Sequence
  Description of Artificial Sequence: Synthetic oligonucleotide
  Sense strand starting at position 3403 of SEQ ID NO: 3873
agguguacuuaaucacuca

SEQ ID NO: 301427 - RNA, 19 nt, Artificial Sequence
  Description of Artificial Sequence: Synthetic oligonucleotide
  Antisense strand to SEQ ID NO: 301426
ugagugauuaaguacaccu

SEQ ID NO: 301428 - RNA, 19 nt, Artificial Sequence
  Description of Artificial Sequence: Synthetic oligonucleotide
  Sense strand starting at position 3475 of SEQ ID NO: 3873
acagcacucauguguguua

SEQ ID NO: 301429 - RNA, 19 nt, Artificial Sequence
  Description of Artificial Sequence: Synthetic oligonucleotide
  Antisense strand to SEQ ID NO: 301428
uaacacacaugagugcugu

SEQ ID NO: 301430 - RNA, 19 nt, Artificial Sequence
  Description of Artificial Sequence: Synthetic oligonucleotide
  Sense strand starting at position 3477 of SEQ ID NO: 3873
agcacucauguguguuaca

SEQ ID NO: 301431 - RNA, 19 nt, Artificial Sequence
  Description of Artificial Sequence: Synthetic oligonucleotide
  Antisense strand to SEQ ID NO: 301430
uguaacacacaugagugcu

SEQ ID NO: 301432 - RNA, 19 nt, Artificial Sequence
  Description of Artificial Sequence: Synthetic oligonucleotide
  Sense strand starting at position 3496 of SEQ ID NO: 3873
gcguguguuacagacucaa

SEQ ID NO: 301433 - RNA, 19 nt, Artificial Sequence
  Description of Artificial Sequence: Synthetic oligonucleotide
  Antisense strand to SEQ ID NO: 301432
uugagucuguaacacacgc

SEQ ID NO: 301434 - RNA, 19 nt, Artificial Sequence
  Description of Artificial Sequence: Synthetic oligonucleotide
  Sense strand starting at position 3599 of SEQ ID NO: 3873
cuuugugauucugugggca

SEQ ID NO: 301435 - RNA, 19 nt, Artificial Sequence
  Description of Artificial Sequence: Synthetic oligonucleotide
  Antisense strand to SEQ ID NO: 301434
ugcccacagaaucacaaag

SEQ ID NO: 301436 - RNA, 19 nt, Artificial Sequence
  Description of Artificial Sequence: Synthetic oligonucleotide
  Sense strand starting at position 3627 of SEQ ID NO: 3873
gccagaagcucuucuguga

SEQ ID NO: 301437 - RNA, 19 nt, Artificial Sequence
  Description of Artificial Sequence: Synthetic oligonucleotide
  Antisense strand to SEQ ID NO: 301436
ucacagaagagcuucuggc

SEQ ID NO: 301438 - RNA, 19 nt, Artificial Sequence
  Description of Artificial Sequence: Synthetic oligonucleotide
  Sense strand starting at position 3631 of SEQ ID NO: 3873
gaagcucuucugugaauug

SEQ ID NO: 301439 - RNA, 19 nt, Artificial Sequence
  Description of Artificial Sequence: Synthetic oligonucleotide
  Antisense strand to SEQ ID NO: 301438
caauucacagaagagcuuc

SEQ ID NO: 301440 - RNA, 19 nt, Artificial Sequence
  Description of Artificial Sequence: Synthetic oligonucleotide
  Sense strand starting at position 3709 of SEQ ID NO: 3873
ggaaucucugccuggcaca

SEQ ID NO: 301441 - RNA, 19 nt, Artificial Sequence
  Description of Artificial Sequence: Synthetic oligonucleotide
  Antisense strand to SEQ ID NO: 301440
ugugccaggcagagauucc

SEQ ID NO: 301442 - RNA, 19 nt, Artificial Sequence
  Description of Artificial Sequence: Synthetic oligonucleotide
  Sense strand starting at position 3768 of SEQ ID NO: 3873
ggaaguuucuggcccauga

SEQ ID NO: 301443 - RNA, 19 nt, Artificial Sequence
  Description of Artificial Sequence: Synthetic oligonucleotide
  Antisense strand to SEQ ID NO: 301442
ucaugggccagaaacuucc

SEQ ID NO: 301444 - RNA, 19 nt, Artificial Sequence
  Description of Artificial Sequence: Synthetic oligonucleotide
  Sense strand starting at position 3772 of SEQ ID NO: 3873
guuucuggcccaugaggaa

SEQ ID NO: 301445 - RNA, 19 nt, Artificial Sequence
  Description of Artificial Sequence: Synthetic oligonucleotide
  Antisense strand to SEQ ID NO: 301444
uuccucaugggccagaaac

SEQ ID NO: 301446 - RNA, 19 nt, Artificial Sequence
  Description of Artificial Sequence: Synthetic oligonucleotide
  Sense strand starting at position 3909 of SEQ ID NO: 3873
uauugauuagagugcuuag

SEQ ID NO: 301447 - RNA, 19 nt, Artificial Sequence
  Description of Artificial Sequence: Synthetic oligonucleotide
  Antisense strand to SEQ ID NO: 301446
cuaagcacucuaaucaaua

SEQ ID NO: 301448 - RNA, 19 nt, Artificial Sequence
  Description of Artificial Sequence: Synthetic oligonucleotide
  Sense strand starting at position 3912 of SEQ ID NO: 3873
ugauuagagugcuuagcug

SEQ ID NO: 301449 - RNA, 19 nt, Artificial Sequence
  Description of Artificial Sequence: Synthetic oligonucleotide
  Antisense strand to SEQ ID NO: 301448
cagcuaagcacucuaauca

SEQ ID NO: 301450 - RNA, 19 nt, Artificial Sequence
  Description of Artificial Sequence: Synthetic oligonucleotide
  Sense strand starting at position 3923 of SEQ ID NO: 3873
cuuagcugucuauaacguu

SEQ ID NO: 301451 - RNA, 19 nt, Artificial Sequence
  Description of Artificial Sequence: Synthetic oligonucleotide
  Antisense strand to SEQ ID NO: 301450
aacguuauagacagcuaag

SEQ ID NO: 301452 - RNA, 19 nt, Artificial Sequence
  Description of Artificial Sequence: Synthetic oligonucleotide
  Sense strand starting at position 124 of SEQ ID NO: 3874
gagaaaguuccauagccuc

SEQ ID NO: 301453 - RNA, 19 nt, Artificial Sequence
  Description of Artificial Sequence: Synthetic oligonucleotide
  Antisense strand to SEQ ID NO: 301452
gaggcuauggaacuuucuc

SEQ ID NO: 301454 - RNA, 19 nt, Artificial Sequence
  Description of Artificial Sequence: Synthetic oligonucleotide
  Sense strand starting at position 184 of SEQ ID NO: 3874
ggaaccuugcucuggaaga

SEQ ID NO: 301455 - RNA, 19 nt, Artificial Sequence
  Description of Artificial Sequence: Synthetic oligonucleotide
  Antisense strand to SEQ ID NO: 301454
ucuuccagagcaagguucc

SEQ ID NO: 301456 - RNA, 19 nt, Artificial Sequence
  Description of Artificial Sequence: Synthetic oligonucleotide
  Sense strand starting at position 493 of SEQ ID NO: 3874
cgaucagaucugugagggu

SEQ ID NO: 301457 - RNA, 19 nt, Artificial Sequence
  Description of Artificial Sequence: Synthetic oligonucleotide
  Antisense strand to SEQ ID NO: 301456
acccucacagaucugaucg

SEQ ID NO: 301458 - RNA, 19 nt, Artificial Sequence
  Description of Artificial Sequence: Synthetic oligonucleotide
  Sense strand starting at position 712 of SEQ ID NO: 3874
uuuccucagugaccagaau

SEQ ID NO: 301459 - RNA, 19 nt, Artificial Sequence
  Description of Artificial Sequence: Synthetic oligonucleotide
  Antisense strand to SEQ ID NO: 301458
auucuggucacugaggaaa

SEQ ID NO: 301460 - RNA, 19 nt, Artificial Sequence
  Description of Artificial Sequence: Synthetic oligonucleotide
  Sense strand starting at position 713 of SEQ ID NO: 3874
uuccucagugaccagaauu

SEQ ID NO: 301461 - RNA, 19 nt, Artificial Sequence
  Description of Artificial Sequence: Synthetic oligonucleotide
  Antisense strand to SEQ ID NO: 301460
aauucuggucacugaggaa

SEQ ID NO: 301462 - RNA, 19 nt, Artificial Sequence
  Description of Artificial Sequence: Synthetic oligonucleotide
  Sense strand starting at position 720 of SEQ ID NO: 3874
gugaccagaauugguacua

SEQ ID NO: 301463 - RNA, 19 nt, Artificial Sequence
  Description of Artificial Sequence: Synthetic oligonucleotide
  Antisense strand to SEQ ID NO: 301462
uaguaccaauucuggucac

SEQ ID NO: 301464 - RNA, 19 nt, Artificial Sequence
  Description of Artificial Sequence: Synthetic oligonucleotide
  Sense strand starting at position 923 of SEQ ID NO: 3874
gagccuuuggaugguugau

SEQ ID NO: 301465 - RNA, 19 nt, Artificial Sequence
  Description of Artificial Sequence: Synthetic oligonucleotide
  Antisense strand to SEQ ID NO: 301464
aucaaccauccaaaggcuc

SEQ ID NO: 301466 - RNA, 19 nt, Artificial Sequence
  Description of Artificial Sequence: Synthetic oligonucleotide
  Sense strand starting at position 925 of SEQ ID NO: 3874
gccuuuggaugguugauau

SEQ ID NO: 301467 - RNA, 19 nt, Artificial Sequence
  Description of Artificial Sequence: Synthetic oligonucleotide
  Antisense strand to SEQ ID NO: 301466
auaucaaccauccaaaggc

SEQ ID NO: 301468 - RNA, 19 nt, Artificial Sequence
  Description of Artificial Sequence: Synthetic oligonucleotide
  Sense strand starting at position 967 of SEQ ID NO: 3874
ggagcaguccuagagcaca

SEQ ID NO: 301469 - RNA, 19 nt, Artificial Sequence
  Description of Artificial Sequence: Synthetic oligonucleotide
  Antisense strand to SEQ ID NO: 301468
ugugcucuaggacugcucc

SEQ ID NO: 301470 - RNA, 19 nt, Artificial Sequence
  Description of Artificial Sequence: Synthetic oligonucleotide
  Sense strand starting at position 991 of SEQ ID NO: 3874
ucaaacugucacuggcaaa

SEQ ID NO: 301471 - RNA, 19 nt, Artificial Sequence
  Description of Artificial Sequence: Synthetic oligonucleotide
  Antisense strand to SEQ ID NO: 301470
uuugccagugacaguuuga

SEQ ID NO: 301472 - RNA, 19 nt, Artificial Sequence
  Description of Artificial Sequence: Synthetic oligonucleotide
  Sense strand starting at position 1207 of SEQ ID NO: 3874
ggaccaguagucuaguauu

SEQ ID NO: 301473 - RNA, 19 nt, Artificial Sequence
  Description of Artificial Sequence: Synthetic oligonucleotide
  Antisense strand to SEQ ID NO: 301472
aauacuagacuacuggucc

SEQ ID NO: 301474 - RNA, 19 nt, Artificial Sequence
  Description of Artificial Sequence: Synthetic oligonucleotide
  Sense strand starting at position 1416 of SEQ ID NO: 3874
gggugcuuuaugugaagga

SEQ ID NO: 301475 - RNA, 19 nt, Artificial Sequence
  Description of Artificial Sequence: Synthetic oligonucleotide
  Antisense strand to SEQ ID NO: 301474
uccuucacauaaagcaccc

SEQ ID NO: 301476 - RNA, 19 nt, Artificial Sequence
  Description of Artificial Sequence: Synthetic oligonucleotide
  Sense strand starting at position 1420 of SEQ ID NO: 3874
gcuuuaugugaaggaagga

SEQ ID NO: 301477 - RNA, 19 nt, Artificial Sequence
  Description of Artificial Sequence: Synthetic oligonucleotide
  Antisense strand to SEQ ID NO: 301476
uccuuccuucacauaaagc

SEQ ID NO: 301478 - RNA, 19 nt, Artificial Sequence
  Description of Artificial Sequence: Synthetic oligonucleotide
  Sense strand starting at position 1480 of SEQ ID NO: 3874
ccuaguguugaagagguuu

SEQ ID NO: 301479 - RNA, 19 nt, Artificial Sequence
  Description of Artificial Sequence: Synthetic oligonucleotide
  Antisense strand to SEQ ID NO: 301478
aaaccucuucaacacuagg

SEQ ID NO: 301480 - RNA, 19 nt, Artificial Sequence
  Description of Artificial Sequence: Synthetic oligonucleotide
  Sense strand starting at position 2083 of SEQ ID NO: 3874
acaguuagccucuagacca

SEQ ID NO: 301481 - RNA, 19 nt, Artificial Sequence
  Description of Artificial Sequence: Synthetic oligonucleotide
  Antisense strand to SEQ ID NO: 301480
uggucuagaggcuaacugu

SEQ ID NO: 301482 - RNA, 19 nt, Artificial Sequence
  Description of Artificial Sequence: Synthetic oligonucleotide
  Sense strand starting at position 2135 of SEQ ID NO: 3874
auggcaguccuguaucaag

SEQ ID NO: 301483 - RNA, 19 nt, Artificial Sequence
  Description of Artificial Sequence: Synthetic oligonucleotide
  Antisense strand to SEQ ID NO: 301482
cuugauacaggacugccau

SEQ ID NO: 301484 - RNA, 19 nt, Artificial Sequence
  Description of Artificial Sequence: Synthetic oligonucleotide
  Sense strand starting at position 2170 of SEQ ID NO: 3874
ucuacaacuguguaaauca

SEQ ID NO: 301485 - RNA, 19 nt, Artificial Sequence
  Description of Artificial Sequence: Synthetic oligonucleotide
  Antisense strand to SEQ ID NO: 301484
ugauuuacacaguuguaga

SEQ ID NO: 301486 - RNA, 19 nt, Artificial Sequence
  Description of Artificial Sequence: Synthetic oligonucleotide
  Sense strand starting at position 2178 of SEQ ID NO: 3874
uguguaaaucaugauucca

SEQ ID NO: 301487 - RNA, 19 nt, Artificial Sequence
  Description of Artificial Sequence: Synthetic oligonucleotide
  Antisense strand to SEQ ID NO: 301486
uggaaucaugauuuacaca

SEQ ID NO: 301488 - RNA, 19 nt, Artificial Sequence
  Description of Artificial Sequence: Synthetic oligonucleotide
  Sense strand starting at position 2266 of SEQ ID NO: 3874
agagaaagcuugguccuca

SEQ ID NO: 301489 - RNA, 19 nt, Artificial Sequence
  Description of Artificial Sequence: Synthetic oligonucleotide
  Antisense strand to SEQ ID NO: 301488
ugaggaccaagcuuucucu

SEQ ID NO: 301490 - RNA, 19 nt, Artificial Sequence
  Description of Artificial Sequence: Synthetic oligonucleotide
  Sense strand starting at position 2277 of SEQ ID NO: 3874
gguccucaccaaugagaaa

SEQ ID NO: 301491 - RNA, 19 nt, Artificial Sequence
  Description of Artificial Sequence: Synthetic oligonucleotide
  Antisense strand to SEQ ID NO: 301490
uuucucauuggugaggacc

SEQ ID NO: 301492 - RNA, 19 nt, Artificial Sequence
  Description of Artificial Sequence: Synthetic oligonucleotide
  Sense strand starting at position 2506 of SEQ ID NO: 3874
ucaaccucagagcguuaaa

SEQ ID NO: 301493 - RNA, 19 nt, Artificial Sequence
  Description of Artificial Sequence: Synthetic oligonucleotide
  Antisense strand to SEQ ID NO: 301492
uuuaacgcucugagguuga

SEQ ID NO: 301494 - RNA, 19 nt, Artificial Sequence
  Description of Artificial Sequence: Synthetic oligonucleotide
  Sense strand starting at position 2700 of SEQ ID NO: 3874
aaacuaagaugguugguca

SEQ ID NO: 301495 - RNA, 19 nt, Artificial Sequence
  Description of Artificial Sequence: Synthetic oligonucleotide
  Antisense strand to SEQ ID NO: 301494
ugaccaaccaucuuaguuu

SEQ ID NO: 301496 - RNA, 19 nt, Artificial Sequence
  Description of Artificial Sequence: Synthetic oligonucleotide
  Sense strand starting at position 2701 of SEQ ID NO: 3874
aacuaagaugguuggucau

SEQ ID NO: 301497 - RNA, 19 nt, Artificial Sequence
  Description of Artificial Sequence: Synthetic oligonucleotide
  Antisense strand to SEQ ID NO: 301496
augaccaaccaucuuaguu

SEQ ID NO: 301498 - RNA, 19 nt, Artificial Sequence
  Description of Artificial Sequence: Synthetic oligonucleotide
  Sense strand starting at position 2724 of SEQ ID NO: 3874
guggauaaccaguguucua

SEQ ID NO: 301499 - RNA, 19 nt, Artificial Sequence
  Description of Artificial Sequence: Synthetic oligonucleotide
  Antisense strand to SEQ ID NO: 301498
uagaacacugguuauccac

SEQ ID NO: 301500 - RNA, 19 nt, Artificial Sequence
  Description of Artificial Sequence: Synthetic oligonucleotide
  Sense strand starting at position 2753 of SEQ ID NO: 3874
uaauccuaggaccguuaua

SEQ ID NO: 301501 - RNA, 19 nt, Artificial Sequence
  Description of Artificial Sequence: Synthetic oligonucleotide
  Antisense strand to SEQ ID NO: 301500
uauaacgguccuaggauua

SEQ ID NO: 301502 - RNA, 19 nt, Artificial Sequence
  Description of Artificial Sequence: Synthetic oligonucleotide
  Sense strand starting at position 2811 of SEQ ID NO: 3874
uggacugaguucucugguu

SEQ ID NO: 301503 - RNA, 19 nt, Artificial Sequence
  Description of Artificial Sequence: Synthetic oligonucleotide
  Antisense strand to SEQ ID NO: 301502
aaccagagaacucagucca

SEQ ID NO: 301504 - RNA, 19 nt, Artificial Sequence
  Description of Artificial Sequence: Synthetic oligonucleotide
  Sense strand starting at position 2855 of SEQ ID NO: 3874
gccuaacacuggucacacu

SEQ ID NO: 301505 - RNA, 19 nt, Artificial Sequence
  Description of Artificial Sequence: Synthetic oligonucleotide
  Antisense strand to SEQ ID NO: 301504
agugugaccaguguuaggc

SEQ ID NO: 301506 - RNA, 19 nt, Artificial Sequence
  Description of Artificial Sequence: Synthetic oligonucleotide
  Sense strand starting at position 2866 of SEQ ID NO: 3874
gucacacuuccacaucagu

SEQ ID NO: 301507 - RNA, 19 nt, Artificial Sequence
  Description of Artificial Sequence: Synthetic oligonucleotide
  Antisense strand to SEQ ID NO: 301506
acugauguggaagugugac

SEQ ID NO: 301508 - RNA, 19 nt, Artificial Sequence
  Description of Artificial Sequence: Synthetic oligonucleotide
  Sense strand starting at position 2883 of SEQ ID NO: 3874
guuacuuucccaggagcca

SEQ ID NO: 301509 - RNA, 19 nt, Artificial Sequence
  Description of Artificial Sequence: Synthetic oligonucleotide
  Antisense strand to SEQ ID NO: 301508
uggcuccugggaaaguaac

SEQ ID NO: 301510 - RNA, 19 nt, Artificial Sequence
  Description of Artificial Sequence: Synthetic oligonucleotide
  Sense strand starting at position 2921 of SEQ ID NO: 3874
gggcuugaacucugaacac

SEQ ID NO: 301511 - RNA, 19 nt, Artificial Sequence
  Description of Artificial Sequence: Synthetic oligonucleotide
  Antisense strand to SEQ ID NO: 301510
guguucagaguucaagccc

SEQ ID NO: 301512 - RNA, 19 nt, Artificial Sequence
  Description of Artificial Sequence: Synthetic oligonucleotide
  Sense strand starting at position 3028 of SEQ ID NO: 3874
ucaguauuagcuuggacuu

SEQ ID NO: 301513 - RNA, 19 nt, Artificial Sequence
  Description of Artificial Sequence: Synthetic oligonucleotide
  Antisense strand to SEQ ID NO: 301512
aaguccaagcuaauacuga

SEQ ID NO: 301514 - RNA, 19 nt, Artificial Sequence
  Description of Artificial Sequence: Synthetic oligonucleotide
  Sense strand starting at position 3029 of SEQ ID NO: 3874
caguauuagcuuggacuuu

SEQ ID NO: 301515 - RNA, 19 nt, Artificial Sequence
  Description of Artificial Sequence: Synthetic oligonucleotide
  Antisense strand to SEQ ID NO: 301514
aaaguccaagcuaauacug

SEQ ID NO: 301516 - RNA, 19 nt, Artificial Sequence
  Description of Artificial Sequence: Synthetic oligonucleotide
  Sense strand starting at position 3237 of SEQ ID NO: 3874
aaguguaucucacuuagag

SEQ ID NO: 301517 - RNA, 19 nt, Artificial Sequence
  Description of Artificial Sequence: Synthetic oligonucleotide
  Antisense strand to SEQ ID NO: 301516
cucuaagugagauacacuu

SEQ ID NO: 301518 - RNA, 19 nt, Artificial Sequence
  Description of Artificial Sequence: Synthetic oligonucleotide
  Sense strand starting at position 3294 of SEQ ID NO: 3874
gaaagugauuaugcuggga

SEQ ID NO: 301519 - RNA, 19 nt, Artificial Sequence
  Description of Artificial Sequence: Synthetic oligonucleotide
  Antisense strand to SEQ ID NO: 301518
ucccagcauaaucacuuuc

SEQ ID NO: 301520 - RNA, 19 nt, Artificial Sequence
  Description of Artificial Sequence: Synthetic oligonucleotide
  Sense strand starting at position 3297 of SEQ ID NO: 3874
agugauuaugcugggacaa

SEQ ID NO: 301521 - RNA, 19 nt, Artificial Sequence
  Description of Artificial Sequence: Synthetic oligonucleotide
  Antisense strand to SEQ ID NO: 301520
uugucccagcauaaucacu

SEQ ID NO: 301522 - RNA, 19 nt, Artificial Sequence
  Description of Artificial Sequence: Synthetic oligonucleotide
  Sense strand starting at position 3298 of SEQ ID NO: 3874
gugauuaugcugggacaau

SEQ ID NO: 301523 - RNA, 19 nt, Artificial Sequence
  Description of Artificial Sequence: Synthetic oligonucleotide
  Antisense strand to SEQ ID NO: 301522
auugucccagcauaaucac

SEQ ID NO: 301524 - RNA, 19 nt, Artificial Sequence
  Description of Artificial Sequence: Synthetic oligonucleotide
  Sense strand starting at position 3316 of SEQ ID NO: 3874
ugguauaagccagaacucu

SEQ ID NO: 301525 - RNA, 19 nt, Artificial Sequence
  Description of Artificial Sequence: Synthetic oligonucleotide
  Antisense strand to SEQ ID NO: 301524
agaguucuggcuuauacca

SEQ ID NO: 301526 - RNA, 19 nt, Artificial Sequence
  Description of Artificial Sequence: Synthetic oligonucleotide
  Sense strand starting at position 3412 of SEQ ID NO: 3874
aguuaacugcaguggauaa

SEQ ID NO: 301527 - RNA, 19 nt, Artificial Sequence
  Description of Artificial Sequence: Synthetic oligonucleotide
  Antisense strand to SEQ ID NO: 301526
uuauccacugcaguuaacu

SEQ ID NO: 301528 - RNA, 19 nt, Artificial Sequence
  Description of Artificial Sequence: Synthetic oligonucleotide
  Sense strand starting at position 3480 of SEQ ID NO: 3874
gcuagcggugcccucaaua

SEQ ID NO: 301529 - RNA, 19 nt, Artificial Sequence
  Description of Artificial Sequence: Synthetic oligonucleotide
  Antisense strand to SEQ ID NO: 301528
uauugagggcaccgcuagc

SEQ ID NO: 301530 - RNA, 19 nt, Artificial Sequence
  Description of Artificial Sequence: Synthetic oligonucleotide
  Sense strand starting at position 3620 of SEQ ID NO: 3874
gaaaccaucgcaggaguga

SEQ ID NO: 301531 - RNA, 19 nt, Artificial Sequence
  Description of Artificial Sequence: Synthetic oligonucleotide
  Antisense strand to SEQ ID NO: 301530
ucacuccugcgaugguuuc

SEQ ID NO: 301532 - RNA, 19 nt, Artificial Sequence
  Description of Artificial Sequence: Synthetic oligonucleotide
  Sense strand starting at position 76 of SEQ ID NO: 3875
guaucaggcugacuuacaa

SEQ ID NO: 301533 - RNA, 19 nt, Artificial Sequence
  Description of Artificial Sequence: Synthetic oligonucleotide
  Antisense strand to SEQ ID NO: 301532
uuguaagucagccugauac

SEQ ID NO: 301534 - RNA, 19 nt, Artificial Sequence
  Description of Artificial Sequence: Synthetic oligonucleotide
  Sense strand starting at position 122 of SEQ ID NO: 3875
aaugauaaauaggugaguu

SEQ ID NO: 301535 - RNA, 19 nt, Artificial Sequence
  Description of Artificial Sequence: Synthetic oligonucleotide
  Antisense strand to SEQ ID NO: 301534
aacucaccuauuuaucauu

SEQ ID NO: 301536 - RNA, 19 nt, Artificial Sequence
  Description of Artificial Sequence: Synthetic oligonucleotide
  Sense strand starting at position 123 of SEQ ID NO: 3875
augauaaauaggugaguug

SEQ ID NO: 301537 - RNA, 19 nt, Artificial Sequence
  Description of Artificial Sequence: Synthetic oligonucleotide
  Antisense strand to SEQ ID NO: 301536
caacucaccuauuuaucau

SEQ ID NO: 301538 - RNA, 19 nt, Artificial Sequence
  Description of Artificial Sequence: Synthetic oligonucleotide
  Sense strand starting at position 130 of SEQ ID NO: 3875
auaggugaguugccaagau

SEQ ID NO: 301539 - RNA, 19 nt, Artificial Sequence
  Description of Artificial Sequence: Synthetic oligonucleotide
  Antisense strand to SEQ ID NO: 301538
aucuuggcaacucaccuau

SEQ ID NO: 301540 - RNA, 19 nt, Artificial Sequence
  Description of Artificial Sequence: Synthetic oligonucleotide
  Sense strand starting at position 606 of SEQ ID NO: 3875
aguacaaguucugcuaaga

SEQ ID NO: 301541 - RNA, 19 nt, Artificial Sequence
  Description of Artificial Sequence: Synthetic oligonucleotide
  Antisense strand to SEQ ID NO: 301540
ucuuagcagaacuuguacu

SEQ ID NO: 301542 - RNA, 19 nt, Artificial Sequence
  Description of Artificial Sequence: Synthetic oligonucleotide
  Sense strand starting at position 658 of SEQ ID NO: 3875
aauuaaggucuugguaacu

SEQ ID NO: 301543 - RNA, 19 nt, Artificial Sequence
  Description of Artificial Sequence: Synthetic oligonucleotide
  Antisense strand to SEQ ID NO: 301542
aguuaccaagaccuuaauu

SEQ ID NO: 301544 - RNA, 19 nt, Artificial Sequence
  Description of Artificial Sequence: Synthetic oligonucleotide
  Sense strand starting at position 724 of SEQ ID NO: 3875
uaucuugguugaucugaaa

SEQ ID NO: 301545 - RNA, 19 nt, Artificial Sequence
  Description of Artificial Sequence: Synthetic oligonucleotide
  Antisense strand to SEQ ID NO: 301544
uuucagaucaaccaagaua

SEQ ID NO: 301546 - RNA, 19 nt, Artificial Sequence
  Description of Artificial Sequence: Synthetic oligonucleotide
  Sense strand starting at position 808 of SEQ ID NO: 3875
ugguguguugggcaagaga

SEQ ID NO: 301547 - RNA, 19 nt, Artificial Sequence
  Description of Artificial Sequence: Synthetic oligonucleotide
  Antisense strand to SEQ ID NO: 301546
ucucuugcccaacacacca

SEQ ID NO: 301548 - RNA, 19 nt, Artificial Sequence
  Description of Artificial Sequence: Synthetic oligonucleotide
  Sense strand starting at position 866 of SEQ ID NO: 3875
gacuuuguagcuuauguga

SEQ ID NO: 301549 - RNA, 19 nt, Artificial Sequence
  Description of Artificial Sequence: Synthetic oligonucleotide
  Antisense strand to SEQ ID NO: 301548
ucacauaagcuacaaaguc

SEQ ID NO: 301550 - RNA, 19 nt, Artificial Sequence
  Description of Artificial Sequence: Synthetic oligonucleotide
  Sense strand starting at position 915 of SEQ ID NO: 3875
cgguaaagugacuaaugga

SEQ ID NO: 301551 - RNA, 19 nt, Artificial Sequence
  Description of Artificial Sequence: Synthetic oligonucleotide
  Antisense strand to SEQ ID NO: 301550
uccauuagucacuuuaccg

SEQ ID NO: 301552 - RNA, 19 nt, Artificial Sequence
  Description of Artificial Sequence: Synthetic oligonucleotide
  Sense strand starting at position 1092 of SEQ ID NO: 3875
auaggagaaucugaagaaa

SEQ ID NO: 301553 - RNA, 19 nt, Artificial Sequence
  Description of Artificial Sequence: Synthetic oligonucleotide
  Antisense strand to SEQ ID NO: 301552
uuucuucagauucuccuau

SEQ ID NO: 301554 - RNA, 19 nt, Artificial Sequence
  Description of Artificial Sequence: Synthetic oligonucleotide
  Sense strand starting at position 1312 of SEQ ID NO: 3875
ggcauuuaguauucugcua

SEQ ID NO: 301555 - RNA, 19 nt, Artificial Sequence
  Description of Artificial Sequence: Synthetic oligonucleotide
  Antisense strand to SEQ ID NO: 301554
uagcagaauacuaaaugcc

SEQ ID NO: 301556 - RNA, 19 nt, Artificial Sequence
  Description of Artificial Sequence: Synthetic oligonucleotide
  Sense strand starting at position 1388 of SEQ ID NO: 3875
acugcauacccagguauau

SEQ ID NO: 301557 - RNA, 19 nt, Artificial Sequence
  Description of Artificial Sequence: Synthetic oligonucleotide
  Antisense strand to SEQ ID NO: 301556
auauaccuggguaugcagu

SEQ ID NO: 301558 - RNA, 19 nt, Artificial Sequence
  Description of Artificial Sequence: Synthetic oligonucleotide
  Sense strand starting at position 1500 of SEQ ID NO: 3875
gaacaugguugacuuuaau

SEQ ID NO: 301559 - RNA, 19 nt, Artificial Sequence
  Description of Artificial Sequence: Synthetic oligonucleotide
  Antisense strand to SEQ ID NO: 301558
auuaaagucaaccauguuc

SEQ ID NO: 301560 - RNA, 19 nt, Artificial Sequence
  Description of Artificial Sequence: Synthetic oligonucleotide
  Sense strand starting at position 1598 of SEQ ID NO: 3875
aauagcaguuauguuagaa

SEQ ID NO: 301561 - RNA, 19 nt, Artificial Sequence
  Description of Artificial Sequence: Synthetic oligonucleotide
  Antisense strand to SEQ ID NO: 301560
uucuaacauaacugcuauu

SEQ ID NO: 301562 - RNA, 19 nt, Artificial Sequence
  Description of Artificial Sequence: Synthetic oligonucleotide
  Sense strand starting at position 1624 of SEQ ID NO: 3875
gcaugcguucucucugacu

SEQ ID NO: 301563 - RNA, 19 nt, Artificial Sequence
  Description of Artificial Sequence: Synthetic oligonucleotide
  Antisense strand to SEQ ID NO: 301562
agucagagagaacgcaugc

SEQ ID NO: 301564 - RNA, 19 nt, Artificial Sequence
  Description of Artificial Sequence: Synthetic oligonucleotide
  Sense strand starting at position 1640 of SEQ ID NO: 3875
acuaaauggugagcucuuu

SEQ ID NO: 301565 - RNA, 19 nt, Artificial Sequence
  Description of Artificial Sequence: Synthetic oligonucleotide
  Antisense strand to SEQ ID NO: 301564
aaagagcucaccauuuagu

SEQ ID NO: 301566 - RNA, 19 nt, Artificial Sequence
  Description of Artificial Sequence: Synthetic oligonucleotide
  Sense strand starting at position 1666 of SEQ ID NO: 3875
gggauccugacuugcucua

SEQ ID NO: 301567 - RNA, 19 nt, Artificial Sequence
  Description of Artificial Sequence: Synthetic oligonucleotide
  Antisense strand to SEQ ID NO: 301566
uagagcaagucaggauccc

SEQ ID NO: 301568 - RNA, 19 nt, Artificial Sequence
  Description of Artificial Sequence: Synthetic oligonucleotide
  Sense strand starting at position 1701 of SEQ ID NO: 3875
cccagcauuguauaugaca

SEQ ID NO: 301569 - RNA, 19 nt, Artificial Sequence
  Description of Artificial Sequence: Synthetic oligonucleotide
  Antisense strand to SEQ ID NO: 301568
ugucauauacaaugcuggg

SEQ ID NO: 301570 - RNA, 19 nt, Artificial Sequence
  Description of Artificial Sequence: Synthetic oligonucleotide
  Sense strand starting at position 1768 of SEQ ID NO: 3875
ugccuaguacuuuaugaug

SEQ ID NO: 301571 - RNA, 19 nt, Artificial Sequence
  Description of Artificial Sequence: Synthetic oligonucleotide
  Antisense strand to SEQ ID NO: 301570
caucauaaaguacuaggca

SEQ ID NO: 301572 - RNA, 19 nt, Artificial Sequence
  Description of Artificial Sequence: Synthetic oligonucleotide
  Sense strand starting at position 1774 of SEQ ID NO: 3875
guacuuuaugaugaggcaa

SEQ ID NO: 301573 - RNA, 19 nt, Artificial Sequence
  Description of Artificial Sequence: Synthetic oligonucleotide
  Antisense strand to SEQ ID NO: 301572
uugccucaucauaaaguac

SEQ ID NO: 301574 - RNA, 19 nt, Artificial Sequence
  Description of Artificial Sequence: Synthetic oligonucleotide
  Sense strand starting at position 1923 of SEQ ID NO: 3875
augucuuucccacaucuga

SEQ ID NO: 301575 - RNA, 19 nt, Artificial Sequence
  Description of Artificial Sequence: Synthetic oligonucleotide
  Antisense strand to SEQ ID NO: 301574
ucagaugugggaaagacau

SEQ ID NO: 301576 - RNA, 19 nt, Artificial Sequence
  Description of Artificial Sequence: Synthetic oligonucleotide
  Sense strand starting at position 1948 of SEQ ID NO: 3875
ugauuuaccugcuaauuug

SEQ ID NO: 301577 - RNA, 19 nt, Artificial Sequence
  Description of Artificial Sequence: Synthetic oligonucleotide
  Antisense strand to SEQ ID NO: 301576
caaauuagcagguaaauca

SEQ ID NO: 301578 - RNA, 19 nt, Artificial Sequence
  Description of Artificial Sequence: Synthetic oligonucleotide
  Sense strand starting at position 1989 of SEQ ID NO: 3875
cuguguuaugcaucguuuc

SEQ ID NO: 301579 - RNA, 19 nt, Artificial Sequence
  Description of Artificial Sequence: Synthetic oligonucleotide
  Antisense strand to SEQ ID NO: 301578
gaaacgaugcauaacacag

SEQ ID NO: 301580 - RNA, 19 nt, Artificial Sequence
  Description of Artificial Sequence: Synthetic oligonucleotide
  Sense strand starting at position 2088 of SEQ ID NO: 3875
cacuguggcguguccuaau

SEQ ID NO: 301581 - RNA, 19 nt, Artificial Sequence
  Description of Artificial Sequence: Synthetic oligonucleotide
  Antisense strand to SEQ ID NO: 301580
auuaggacacgccacagug

SEQ ID NO: 301582 - RNA, 19 nt, Artificial Sequence
  Description of Artificial Sequence: Synthetic oligonucleotide
  Sense strand starting at position 2217 of SEQ ID NO: 3875
cugccauuacaguaaaugu

SEQ ID NO: 301583 - RNA, 19 nt, Artificial Sequence
  Description of Artificial Sequence: Synthetic oligonucleotide
  Antisense strand to SEQ ID NO: 301582
acauuuacuguaauggcag

SEQ ID NO: 301584 - RNA, 19 nt, Artificial Sequence
  Description of Artificial Sequence: Synthetic oligonucleotide
  Sense strand starting at position 2278 of SEQ ID NO: 3875
cuccaucacgaguaauuag

SEQ ID NO: 301585 - RNA, 19 nt, Artificial Sequence
  Description of Artificial Sequence: Synthetic oligonucleotide
  Antisense strand to SEQ ID NO: 301584
cuaauuacucgugauggag

SEQ ID NO: 301586 - RNA, 19 nt, Artificial Sequence
  Description of Artificial Sequence: Synthetic oligonucleotide
  Sense strand starting at position 2626 of SEQ ID NO: 3875
gaguauaauguaugagaac

SEQ ID NO: 301587 - RNA, 19 nt, Artificial Sequence
  Description of Artificial Sequence: Synthetic oligonucleotide
  Antisense strand to SEQ ID NO: 301586
guucucauacauuauacuc

SEQ ID NO: 301588 - RNA, 19 nt, Artificial Sequence
  Description of Artificial Sequence: Synthetic oligonucleotide
  Sense strand starting at position 2703 of SEQ ID NO: 3875
ugggcuccgccguuaacua

SEQ ID NO: 301589 - RNA, 19 nt, Artificial Sequence
  Description of Artificial Sequence: Synthetic oligonucleotide
  Antisense strand to SEQ ID NO: 301588
uaguuaacggcggagccca

SEQ ID NO: 301590 - RNA, 19 nt, Artificial Sequence
  Description of Artificial Sequence: Synthetic oligonucleotide
  Sense strand starting at position 2733 of SEQ ID NO: 3875
ucagaaaugucgcugauuu

SEQ ID NO: 301591 - RNA, 19 nt, Artificial Sequence
  Description of Artificial Sequence: Synthetic oligonucleotide
  Antisense strand to SEQ ID NO: 301590
aaaucagcgacauuucuga

SEQ ID NO: 301592 - RNA, 19 nt, Artificial Sequence
  Description of Artificial Sequence: Synthetic oligonucleotide
  Sense strand starting at position 2734 of SEQ ID NO: 3875
cagaaaugucgcugauuuc

SEQ ID NO: 301593 - RNA, 19 nt, Artificial Sequence
  Description of Artificial Sequence: Synthetic oligonucleotide
  Antisense strand to SEQ ID NO: 301592
gaaaucagcgacauuucug

SEQ ID NO: 301594 - RNA, 19 nt, Artificial Sequence
  Description of Artificial Sequence: Synthetic oligonucleotide
  Sense strand starting at position 2831 of SEQ ID NO: 3875
auuuaaagccaucgucacu

SEQ ID NO: 301595 - RNA, 19 nt, Artificial Sequence
  Description of Artificial Sequence: Synthetic oligonucleotide
  Antisense strand to SEQ ID NO: 301594
agugacgauggcuuuaaau

SEQ ID NO: 301596 - RNA, 19 nt, Artificial Sequence
  Description of Artificial Sequence: Synthetic oligonucleotide
  Sense strand starting at position 2844 of SEQ ID NO: 3875
gucacuuuagguuagccaa

SEQ ID NO: 301597 - RNA, 19 nt, Artificial Sequence
  Description of Artificial Sequence: Synthetic oligonucleotide
  Antisense strand to SEQ ID NO: 301596
uuggcuaaccuaaagugac

SEQ ID NO: 301598 - RNA, 19 nt, Artificial Sequence
  Description of Artificial Sequence: Synthetic oligonucleotide
  Sense strand starting at position 2989 of SEQ ID NO: 3875
aguacuagccacuaucauu

SEQ ID NO: 301599 - RNA, 19 nt, Artificial Sequence
  Description of Artificial Sequence: Synthetic oligonucleotide
  Antisense strand to SEQ ID NO: 301598
aaugauaguggcuaguacu

SEQ ID NO: 301600 - RNA, 19 nt, Artificial Sequence
  Description of Artificial Sequence: Synthetic oligonucleotide
  Sense strand starting at position 3660 of SEQ ID NO: 3875
auauccaaaccguauugua

SEQ ID NO: 301601 - RNA, 19 nt, Artificial Sequence
  Description of Artificial Sequence: Synthetic oligonucleotide
  Antisense strand to SEQ ID NO: 301600
uacaauacgguuuggauau

SEQ ID NO: 301602 - RNA, 19 nt, Artificial Sequence
  Description of Artificial Sequence: Synthetic oligonucleotide
  Sense strand starting at position 3761 of SEQ ID NO: 3875
gguugacuucccuguggga

SEQ ID NO: 301603 - RNA, 19 nt, Artificial Sequence
  Description of Artificial Sequence: Synthetic oligonucleotide
  Antisense strand to SEQ ID NO: 301602
ucccacagggaagucaacc

SEQ ID NO: 301604 - RNA, 19 nt, Artificial Sequence
  Description of Artificial Sequence: Synthetic oligonucleotide
  Sense strand starting at position 3763 of SEQ ID NO: 3875
uugacuucccugugggacu

SEQ ID NO: 301605 - RNA, 19 nt, Artificial Sequence
  Description of Artificial Sequence: Synthetic oligonucleotide
  Antisense strand to SEQ ID NO: 301604
agucccacagggaagucaa

SEQ ID NO: 301606 - RNA, 19 nt, Artificial Sequence
  Description of Artificial Sequence: Synthetic oligonucleotide
  Sense strand starting at position 3892 of SEQ ID NO: 3875
aucauugaccacugucuga

SEQ ID NO: 301607 - RNA, 19 nt, Artificial Sequence
  Description of Artificial Sequence: Synthetic oligonucleotide
  Antisense strand to SEQ ID NO: 301606
ucagacaguggucaaugau

SEQ ID NO: 301608 - RNA, 19 nt, Artificial Sequence
  Description of Artificial Sequence: Synthetic oligonucleotide
  Sense strand starting at position 3895 of SEQ ID NO: 3875
auugaccacugucugaauu

SEQ ID NO: 301609 - RNA, 19 nt, Artificial Sequence
  Description of Artificial Sequence: Synthetic oligonucleotide
  Antisense strand to SEQ ID NO: 301608
aauucagacaguggucaau

SEQ ID NO: 301610 - RNA, 19 nt, Artificial Sequence
  Description of Artificial Sequence: Synthetic oligonucleotide
  Sense strand starting at position 3905 of SEQ ID NO: 3875
gucugaauuuacuguauuu

SEQ ID NO: 301611 - RNA, 19 nt, Artificial Sequence
  Description of Artificial Sequence: Synthetic oligonucleotide
  Antisense strand to SEQ ID NO: 301610
aaauacaguaaauucagac

SEQ ID NO: 301612 - RNA, 19 nt, Artificial Sequence
  Description of Artificial Sequence: Synthetic oligonucleotide
  Sense strand starting at position 69 of SEQ ID NO: 3876
cgugguguuacagaaauaa

SEQ ID NO: 301613 - RNA, 19 nt, Artificial Sequence
  Description of Artificial Sequence: Synthetic oligonucleotide
  Antisense strand to SEQ ID NO: 301612
uuauuucuguaacaccacg

SEQ ID NO: 301614 - RNA, 19 nt, Artificial Sequence
  Description of Artificial Sequence: Synthetic oligonucleotide
  Sense strand starting at position 94 of SEQ ID NO: 3876
uccaauguuccagggaaga

SEQ ID NO: 301615 - RNA, 19 nt, Artificial Sequence
  Description of Artificial Sequence: Synthetic oligonucleotide
  Antisense strand to SEQ ID NO: 301614
ucuucccuggaacauugga

SEQ ID NO: 301616 - RNA, 19 nt, Artificial Sequence
  Description of Artificial Sequence: Synthetic oligonucleotide
  Sense strand starting at position 107 of SEQ ID NO: 3876
ggaagauucccaugguaau

SEQ ID NO: 301617 - RNA, 19 nt, Artificial Sequence
  Description of Artificial Sequence: Synthetic oligonucleotide
  Antisense strand to SEQ ID NO: 301616
auuaccaugggaaucuucc

SEQ ID NO: 301618 - RNA, 19 nt, Artificial Sequence
  Description of Artificial Sequence: Synthetic oligonucleotide
  Sense strand starting at position 108 of SEQ ID NO: 3876
gaagauucccaugguaauu

SEQ ID NO: 301619 - RNA, 19 nt, Artificial Sequence
  Description of Artificial Sequence: Synthetic oligonucleotide
  Antisense strand to SEQ ID NO: 301618
aauuaccaugggaaucuuc

SEQ ID NO: 301620 - RNA, 19 nt, Artificial Sequence
  Description of Artificial Sequence: Synthetic oligonucleotide
  Sense strand starting at position 148 of SEQ ID NO: 3876
gggcuuuaaagcuagagag

SEQ ID NO: 301621 - RNA, 19 nt, Artificial Sequence
  Description of Artificial Sequence: Synthetic oligonucleotide
  Antisense strand to SEQ ID NO: 301620
cucucuagcuuuaaagccc

SEQ ID NO: 301622 - RNA, 19 nt, Artificial Sequence
  Description of Artificial Sequence: Synthetic oligonucleotide
  Sense strand starting at position 150 of SEQ ID NO: 3876
gcuuuaaagcuagagagac

SEQ ID NO: 301623 - RNA, 19 nt, Artificial Sequence
  Description of Artificial Sequence: Synthetic oligonucleotide
  Antisense strand to SEQ ID NO: 301622
gucucucuagcuuuaaagc

SEQ ID NO: 301624 - RNA, 19 nt, Artificial Sequence
  Description of Artificial Sequence: Synthetic oligonucleotide
  Sense strand starting at position 321 of SEQ ID NO: 3876
ucaggauugccuuaacuuu

SEQ ID NO: 301625 - RNA, 19 nt, Artificial Sequence
  Description of Artificial Sequence: Synthetic oligonucleotide
  Antisense strand to SEQ ID NO: 301624
aaaguuaaggcaauccuga

SEQ ID NO: 301626 - RNA, 19 nt, Artificial Sequence
  Description of Artificial Sequence: Synthetic oligonucleotide
  Sense strand starting at position 359 of SEQ ID NO: 3876
gagcaacuuggguggaauu

SEQ ID NO: 301627 - RNA, 19 nt, Artificial Sequence
  Description of Artificial Sequence: Synthetic oligonucleotide
  Antisense strand to SEQ ID NO: 301626
aauuccacccaaguugcuc

SEQ ID NO: 301628 - RNA, 19 nt, Artificial Sequence
  Description of Artificial Sequence: Synthetic oligonucleotide
  Sense strand starting at position 369 of SEQ ID NO: 3876
gguggaauuucagagauua

SEQ ID NO: 301629 - RNA, 19 nt, Artificial Sequence
  Description of Artificial Sequence: Synthetic oligonucleotide
  Antisense strand to SEQ ID NO: 301628
uaaucucugaaauuccacc

SEQ ID NO: 301630 - RNA, 19 nt, Artificial Sequence
  Description of Artificial Sequence: Synthetic oligonucleotide
  Sense strand starting at position 689 of SEQ ID NO: 3876
cuaugucauggucauauag

SEQ ID NO: 301631 - RNA, 19 nt, Artificial Sequence
  Description of Artificial Sequence: Synthetic oligonucleotide
  Antisense strand to SEQ ID NO: 301630
cuauaugaccaugacauag

SEQ ID NO: 301632 - RNA, 19 nt, Artificial Sequence
  Description of Artificial Sequence: Synthetic oligonucleotide
  Sense strand starting at position 787 of SEQ ID NO: 3876
guugcaugacuugaauaaa

SEQ ID NO: 301633 - RNA, 19 nt, Artificial Sequence
  Description of Artificial Sequence: Synthetic oligonucleotide
  Antisense strand to SEQ ID NO: 301632
uuuauucaagucaugcaac

SEQ ID NO: 301634 - RNA, 19 nt, Artificial Sequence
  Description of Artificial Sequence: Synthetic oligonucleotide
  Sense strand starting at position 797 of SEQ ID NO: 3876
uugaauaaauucucggacu

SEQ ID NO: 301635 - RNA, 19 nt, Artificial Sequence
  Description of Artificial Sequence: Synthetic oligonucleotide
  Antisense strand to SEQ ID NO: 301634
aguccgagaauuuauucaa

SEQ ID NO: 301636 - RNA, 19 nt, Artificial Sequence
  Description of Artificial Sequence: Synthetic oligonucleotide
  Sense strand starting at position 913 of SEQ ID NO: 3876
gaacaugugccugacacau

SEQ ID NO: 301637 - RNA, 19 nt, Artificial Sequence
  Description of Artificial Sequence: Synthetic oligonucleotide
  Antisense strand to SEQ ID NO: 301636
augugucaggcacauguuc

SEQ ID NO: 301638 - RNA, 19 nt, Artificial Sequence
  Description of Artificial Sequence: Synthetic oligonucleotide
  Sense strand starting at position 1323 of SEQ ID NO: 3876
aacuaugaggccugcaaga

SEQ ID NO: 301639 - RNA, 19 nt, Artificial Sequence
  Description of Artificial Sequence: Synthetic oligonucleotide
  Antisense strand to SEQ ID NO: 301638
ucuugcaggccucauaguu

SEQ ID NO: 301640 - RNA, 19 nt, Artificial Sequence
  Description of Artificial Sequence: Synthetic oligonucleotide
  Sense strand starting at position 1328 of SEQ ID NO: 3876
ugaggccugcaagaguaua

SEQ ID NO: 301641 - RNA, 19 nt, Artificial Sequence
  Description of Artificial Sequence: Synthetic oligonucleotide
  Antisense strand to SEQ ID NO: 301640
uauacucuugcaggccuca

SEQ ID NO: 301642 - RNA, 19 nt, Artificial Sequence
  Description of Artificial Sequence: Synthetic oligonucleotide
  Sense strand starting at position 1333 of SEQ ID NO: 3876
ccugcaagaguauauuauu

SEQ ID NO: 301643 - RNA, 19 nt, Artificial Sequence
  Description of Artificial Sequence: Synthetic oligonucleotide
  Antisense strand to SEQ ID NO: 301642
aauaauauacucuugcagg

SEQ ID NO: 301644 - RNA, 19 nt, Artificial Sequence
  Description of Artificial Sequence: Synthetic oligonucleotide
  Sense strand starting at position 1472 of SEQ ID NO: 3876
guaacugaacuuggagauu

SEQ ID NO: 301645 - RNA, 19 nt, Artificial Sequence
  Description of Artificial Sequence: Synthetic oligonucleotide
  Antisense strand to SEQ ID NO: 301644
aaucuccaaguucaguuac

SEQ ID NO: 301646 - RNA, 19 nt, Artificial Sequence
  Description of Artificial Sequence: Synthetic oligonucleotide
  Sense strand starting at position 1531 of SEQ ID NO: 3876
gccagauucuaauuacagg

SEQ ID NO: 301647 - RNA, 19 nt, Artificial Sequence
  Description of Artificial Sequence: Synthetic oligonucleotide
  Antisense strand to SEQ ID NO: 301646
ccuguaauuagaaucuggc

SEQ ID NO: 301648 - RNA, 19 nt, Artificial Sequence
  Description of Artificial Sequence: Synthetic oligonucleotide
  Sense strand starting at position 1576 of SEQ ID NO: 3876
ggaaauaacuugccucaac

SEQ ID NO: 301649 - RNA, 19 nt, Artificial Sequence
  Description of Artificial Sequence: Synthetic oligonucleotide
  Antisense strand to SEQ ID NO: 301648
guugaggcaaguuauuucc

SEQ ID NO: 301650 - RNA, 19 nt, Artificial Sequence
  Description of Artificial Sequence: Synthetic oligonucleotide
  Sense strand starting at position 1606 of SEQ ID NO: 3876
aaacuugagcccugagaag

SEQ ID NO: 301651 - RNA, 19 nt, Artificial Sequence
  Description of Artificial Sequence: Synthetic oligonucleotide
  Antisense strand to SEQ ID NO: 301650
cuucucagggcucaaguuu

SEQ ID NO: 301652 - RNA, 19 nt, Artificial Sequence
  Description of Artificial Sequence: Synthetic oligonucleotide
  Sense strand starting at position 1637 of SEQ ID NO: 3876
uuugcuauacaaggaaaga

SEQ ID NO: 301653 - RNA, 19 nt, Artificial Sequence
  Description of Artificial Sequence: Synthetic oligonucleotide
  Antisense strand to SEQ ID NO: 301652
ucuuuccuuguauagcaaa

SEQ ID NO: 301654 - RNA, 19 nt, Artificial Sequence
  Description of Artificial Sequence: Synthetic oligonucleotide
  Sense strand starting at position 2209 of SEQ ID NO: 3876
gcaccagaauggguuagaa

SEQ ID NO: 301655 - RNA, 19 nt, Artificial Sequence
  Description of Artificial Sequence: Synthetic oligonucleotide
  Antisense strand to SEQ ID NO: 301654
uucuaacccauucuggugc

SEQ ID NO: 301656 - RNA, 19 nt, Artificial Sequence
  Description of Artificial Sequence: Synthetic oligonucleotide
  Sense strand starting at position 2221 of SEQ ID NO: 3876
guuagaaucacagguggaa

SEQ ID NO: 301657 - RNA, 19 nt, Artificial Sequence
  Description of Artificial Sequence: Synthetic oligonucleotide
  Antisense strand to SEQ ID NO: 301656
uuccaccugugauucuaac

SEQ ID NO: 301658 - RNA, 19 nt, Artificial Sequence
  Description of Artificial Sequence: Synthetic oligonucleotide
  Sense strand starting at position 2486 of SEQ ID NO: 3876
uuggaaucuccaggacgga

SEQ ID NO: 301659 - RNA, 19 nt, Artificial Sequence
  Description of Artificial Sequence: Synthetic oligonucleotide
  Antisense strand to SEQ ID NO: 301658
uccguccuggagauuccaa

SEQ ID NO: 301660 - RNA, 19 nt, Artificial Sequence
  Description of Artificial Sequence: Synthetic oligonucleotide
  Sense strand starting at position 2513 of SEQ ID NO: 3876
guuccuguucucuaacaaa

SEQ ID NO: 301661 - RNA, 19 nt, Artificial Sequence
  Description of Artificial Sequence: Synthetic oligonucleotide
  Antisense strand to SEQ ID NO: 301660
uuuguuagagaacaggaac

SEQ ID NO: 301662 - RNA, 19 nt, Artificial Sequence
  Description of Artificial Sequence: Synthetic oligonucleotide
  Sense strand starting at position 2731 of SEQ ID NO: 3876
caagauaaacagcgugaaa

SEQ ID NO: 301663 - RNA, 19 nt, Artificial Sequence
  Description of Artificial Sequence: Synthetic oligonucleotide
  Antisense strand to SEQ ID NO: 301662
uuucacgcuguuuaucuug

SEQ ID NO: 301664 - RNA, 19 nt, Artificial Sequence
  Description of Artificial Sequence: Synthetic oligonucleotide
  Sense strand starting at position 2733 of SEQ ID NO: 3876
agauaaacagcgugaaauu

SEQ ID NO: 301665 - RNA, 19 nt, Artificial Sequence
  Description of Artificial Sequence: Synthetic oligonucleotide
  Antisense strand to SEQ ID NO: 301664
aauuucacgcuguuuaucu

SEQ ID NO: 301666 - RNA, 19 nt, Artificial Sequence
  Description of Artificial Sequence: Synthetic oligonucleotide
  Sense strand starting at position 2734 of SEQ ID NO: 3876
gauaaacagcgugaaauua

SEQ ID NO: 301667 - RNA, 19 nt, Artificial Sequence
  Description of Artificial Sequence: Synthetic oligonucleotide
  Antisense strand to SEQ ID NO: 301666
uaauuucacgcuguuuauc

SEQ ID NO: 301668 - RNA, 19 nt, Artificial Sequence
  Description of Artificial Sequence: Synthetic oligonucleotide
  Sense strand starting at position 2763 of SEQ ID NO: 3876
uguauauugagucaguuau

SEQ ID NO: 301669 - RNA, 19 nt, Artificial Sequence
  Description of Artificial Sequence: Synthetic oligonucleotide
  Antisense strand to SEQ ID NO: 301668
auaacugacucaauauaca

SEQ ID NO: 301670 - RNA, 19 nt, Artificial Sequence
  Description of Artificial Sequence: Synthetic oligonucleotide
  Sense strand starting at position 2985 of SEQ ID NO: 3876
uccuaagacucuucugaug

SEQ ID NO: 301671 - RNA, 19 nt, Artificial Sequence
  Description of Artificial Sequence: Synthetic oligonucleotide
  Antisense strand to SEQ ID NO: 301670
caucagaagagucuuagga

SEQ ID NO: 301672 - RNA, 19 nt, Artificial Sequence
  Description of Artificial Sequence: Synthetic oligonucleotide
  Sense strand starting at position 3541 of SEQ ID NO: 3876
ccacccugucuugaggauu

SEQ ID NO: 301673 - RNA, 19 nt, Artificial Sequence
  Description of Artificial Sequence: Synthetic oligonucleotide
  Antisense strand to SEQ ID NO: 301672
aauccucaagacagggugg

SEQ ID NO: 301674 - RNA, 19 nt, Artificial Sequence
  Description of Artificial Sequence: Synthetic oligonucleotide
  Sense strand starting at position 3592 of SEQ ID NO: 3876
gggcuuagaggauggugaa

SEQ ID NO: 301675 - RNA, 19 nt, Artificial Sequence
  Description of Artificial Sequence: Synthetic oligonucleotide
  Antisense strand to SEQ ID NO: 301674
uucaccauccucuaagccc

SEQ ID NO: 301676 - RNA, 19 nt, Artificial Sequence
  Description of Artificial Sequence: Synthetic oligonucleotide
  Sense strand starting at position 3605 of SEQ ID NO: 3876
ggugaaguugaaugacuca

SEQ ID NO: 301677 - RNA, 19 nt, Artificial Sequence
  Description of Artificial Sequence: Synthetic oligonucleotide
  Antisense strand to SEQ ID NO: 301676
ugagucauucaacuucacc

SEQ ID NO: 301678 - RNA, 19 nt, Artificial Sequence
  Description of Artificial Sequence: Synthetic oligonucleotide
  Sense strand starting at position 3697 of SEQ ID NO: 3876
ucuugaguccagcaugaag

SEQ ID NO: 301679 - RNA, 19 nt, Artificial Sequence
  Description of Artificial Sequence: Synthetic oligonucleotide
  Antisense strand to SEQ ID NO: 301678
cuucaugcuggacucaaga

SEQ ID NO: 301680 - RNA, 19 nt, Artificial Sequence
  Description of Artificial Sequence: Synthetic oligonucleotide
  Sense strand starting at position 3708 of SEQ ID NO: 3876
gcaugaaggauguguaaga

SEQ ID NO: 301681 - RNA, 19 nt, Artificial Sequence
  Description of Artificial Sequence: Synthetic oligonucleotide
  Antisense strand to SEQ ID NO: 301680
ucuuacacauccuucaugc

SEQ ID NO: 301682 - RNA, 19 nt, Artificial Sequence
  Description of Artificial Sequence: Synthetic oligonucleotide
  Sense strand starting at position 3798 of SEQ ID NO: 3876
guguuauuagagcauaaag

SEQ ID NO: 301683 - RNA, 19 nt, Artificial Sequence
  Description of Artificial Sequence: Synthetic oligonucleotide
  Antisense strand to SEQ ID NO: 301682
cuuuaugcucuaauaacac

SEQ ID NO: 301684 - RNA, 19 nt, Artificial Sequence
  Description of Artificial Sequence: Synthetic oligonucleotide
  Sense strand starting at position 3800 of SEQ ID NO: 3876
guuauuagagcauaaagua

SEQ ID NO: 301685 - RNA, 19 nt, Artificial Sequence
  Description of Artificial Sequence: Synthetic oligonucleotide
  Antisense strand to SEQ ID NO: 301684
uacuuuaugcucuaauaac

SEQ ID NO: 301686 - RNA, 19 nt, Artificial Sequence
  Description of Artificial Sequence: Synthetic oligonucleotide
  Sense strand starting at position 3807 of SEQ ID NO: 3876
gagcauaaaguauaugagu

SEQ ID NO: 301687 - RNA, 19 nt, Artificial Sequence
  Description of Artificial Sequence: Synthetic oligonucleotide
  Antisense strand to SEQ ID NO: 301686
acucauauacuuuaugcuc

SEQ ID NO: 301688 - RNA, 19 nt, Artificial Sequence
  Description of Artificial Sequence: Synthetic oligonucleotide
  Sense strand starting at position 3812 of SEQ ID NO: 3876
uaaaguauaugaguggagu

SEQ ID NO: 301689 - RNA, 19 nt, Artificial Sequence
  Description of Artificial Sequence: Synthetic oligonucleotide
  Antisense strand to SEQ ID NO: 301688
acuccacucauauacuuua

SEQ ID NO: 301690 - RNA, 19 nt, Artificial Sequence
  Description of Artificial Sequence: Synthetic oligonucleotide
  Sense strand starting at position 3813 of SEQ ID NO: 3876
aaaguauaugaguggagua

SEQ ID NO: 301691 - RNA, 19 nt, Artificial Sequence
  Description of Artificial Sequence: Synthetic oligonucleotide
  Antisense strand to SEQ ID NO: 301690
uacuccacucauauacuuu

SEQ ID NO: 301692 - RNA, 19 nt, Artificial Sequence
  Description of Artificial Sequence: Synthetic oligonucleotide
  Sense strand starting at position 284 of SEQ ID NO: 3877
aaaguuaaguggucagaua

SEQ ID NO: 301693 - RNA, 19 nt, Artificial Sequence
  Description of Artificial Sequence: Synthetic oligonucleotide
  Antisense strand to SEQ ID NO: 301692
uaucugaccacuuaacuuu

SEQ ID NO: 301694 - RNA, 19 nt, Artificial Sequence
  Description of Artificial Sequence: Synthetic oligonucleotide
  Sense strand starting at position 285 of SEQ ID NO: 3877
aaguuaaguggucagauac

SEQ ID NO: 301695 - RNA, 19 nt, Artificial Sequence
  Description of Artificial Sequence: Synthetic oligonucleotide
  Antisense strand to SEQ ID NO: 301694
guaucugaccacuuaacuu

SEQ ID NO: 301696 - RNA, 19 nt, Artificial Sequence
  Description of Artificial Sequence: Synthetic oligonucleotide
  Sense strand starting at position 392 of SEQ ID NO: 3877
aaugcugaugacugucaua

SEQ ID NO: 301697 - RNA, 19 nt, Artificial Sequence
  Description of Artificial Sequence: Synthetic oligonucleotide
  Antisense strand to SEQ ID NO: 301696
uaugacagucaucagcauu

SEQ ID NO: 301698 - RNA, 19 nt, Artificial Sequence
  Description of Artificial Sequence: Synthetic oligonucleotide
  Sense strand starting at position 544 of SEQ ID NO: 3877
cuuucugagccucaggaau

SEQ ID NO: 301699 - RNA, 19 nt, Artificial Sequence
  Description of Artificial Sequence: Synthetic oligonucleotide
  Antisense strand to SEQ ID NO: 301698
auuccugaggcucagaaag

SEQ ID NO: 301700 - RNA, 19 nt, Artificial Sequence
  Description of Artificial Sequence: Synthetic oligonucleotide
  Sense strand starting at position 717 of SEQ ID NO: 3877
uuauuagagagcugcaaag

SEQ ID NO: 301701 - RNA, 19 nt, Artificial Sequence
  Description of Artificial Sequence: Synthetic oligonucleotide
  Antisense strand to SEQ ID NO: 301700
cuuugcagcucucuaauaa

SEQ ID NO: 301702 - RNA, 19 nt, Artificial Sequence
  Description of Artificial Sequence: Synthetic oligonucleotide
  Sense strand starting at position 839 of SEQ ID NO: 3877
ucaagaacucauugagcuu

SEQ ID NO: 301703 - RNA, 19 nt, Artificial Sequence
  Description of Artificial Sequence: Synthetic oligonucleotide
  Antisense strand to SEQ ID NO: 301702
aagcucaaugaguucuuga

SEQ ID NO: 301704 - RNA, 19 nt, Artificial Sequence
  Description of Artificial Sequence: Synthetic oligonucleotide
  Sense strand starting at position 858 of SEQ ID NO: 3877
uucuucuuccgagaaaugc

SEQ ID NO: 301705 - RNA, 19 nt, Artificial Sequence
  Description of Artificial Sequence: Synthetic oligonucleotide
  Antisense strand to SEQ ID NO: 301704
gcauuucucggaagaagaa

SEQ ID NO: 301706 - RNA, 19 nt, Artificial Sequence
  Description of Artificial Sequence: Synthetic oligonucleotide
  Sense strand starting at position 887 of SEQ ID NO: 3877
aggaucaacucauccgaua

SEQ ID NO: 301707 - RNA, 19 nt, Artificial Sequence
  Description of Artificial Sequence: Synthetic oligonucleotide
  Antisense strand to SEQ ID NO: 301706
uaucggaugaguugauccu

SEQ ID NO: 301708 - RNA, 19 nt, Artificial Sequence
  Description of Artificial Sequence: Synthetic oligonucleotide
  Sense strand starting at position 898 of SEQ ID NO: 3877
auccgauaauaccucgaaa

SEQ ID NO: 301709 - RNA, 19 nt, Artificial Sequence
  Description of Artificial Sequence: Synthetic oligonucleotide
  Antisense strand to SEQ ID NO: 301708
uuucgagguauuaucggau

SEQ ID NO: 301710 - RNA, 19 nt, Artificial Sequence
  Description of Artificial Sequence: Synthetic oligonucleotide
  Sense strand starting at position 1042 of SEQ ID NO: 3877
ugucaaucacaacaguagu

SEQ ID NO: 301711 - RNA, 19 nt, Artificial Sequence
  Description of Artificial Sequence: Synthetic oligonucleotide
  Antisense strand to SEQ ID NO: 301710
acuacuguugugauugaca

SEQ ID NO: 301712 - RNA, 19 nt, Artificial Sequence
  Description of Artificial Sequence: Synthetic oligonucleotide
  Sense strand starting at position 1106 of SEQ ID NO: 3877
auauuccuucugggugaga

SEQ ID NO: 301713 - RNA, 19 nt, Artificial Sequence
  Description of Artificial Sequence: Synthetic oligonucleotide
  Antisense strand to SEQ ID NO: 301712
ucucacccagaaggaauau

SEQ ID NO: 301714 - RNA, 19 nt, Artificial Sequence
  Description of Artificial Sequence: Synthetic oligonucleotide
  Sense strand starting at position 1107 of SEQ ID NO: 3877
uauuccuucugggugagau

SEQ ID NO: 301715 - RNA, 19 nt, Artificial Sequence
  Description of Artificial Sequence: Synthetic oligonucleotide
  Antisense strand to SEQ ID NO: 301714
aucucacccagaaggaaua

SEQ ID NO: 301716 - RNA, 19 nt, Artificial Sequence
  Description of Artificial Sequence: Synthetic oligonucleotide
  Sense strand starting at position 1108 of SEQ ID NO: 3877
auuccuucugggugagauu

SEQ ID NO: 301717 - RNA, 19 nt, Artificial Sequence
  Description of Artificial Sequence: Synthetic oligonucleotide
  Antisense strand to SEQ ID NO: 301716
aaucucacccagaaggaau

SEQ ID NO: 301718 - RNA, 19 nt, Artificial Sequence
  Description of Artificial Sequence: Synthetic oligonucleotide
  Sense strand starting at position 1117 of SEQ ID NO: 3877
gggugagauuuccaaaucc

SEQ ID NO: 301719 - RNA, 19 nt, Artificial Sequence
  Description of Artificial Sequence: Synthetic oligonucleotide
  Antisense strand to SEQ ID NO: 301718
ggauuuggaaaucucaccc

SEQ ID NO: 301720 - RNA, 19 nt, Artificial Sequence
  Description of Artificial Sequence: Synthetic oligonucleotide
  Sense strand starting at position 1353 of SEQ ID NO: 3877
gggagacggcuguaaagau

SEQ ID NO: 301721 - RNA, 19 nt, Artificial Sequence
  Description of Artificial Sequence: Synthetic oligonucleotide
  Antisense strand to SEQ ID NO: 301720
aucuuuacagccgucuccc

SEQ ID NO: 301722 - RNA, 19 nt, Artificial Sequence
  Description of Artificial Sequence: Synthetic oligonucleotide
  Sense strand starting at position 1354 of SEQ ID NO: 3877
ggagacggcuguaaagaua

SEQ ID NO: 301723 - RNA, 19 nt, Artificial Sequence
  Description of Artificial Sequence: Synthetic oligonucleotide
  Antisense strand to SEQ ID NO: 301722
uaucuuuacagccgucucc

SEQ ID NO: 301724 - RNA, 19 nt, Artificial Sequence
  Description of Artificial Sequence: Synthetic oligonucleotide
  Sense strand starting at position 1432 of SEQ ID NO: 3877
ggaagguucgacgaguucu

SEQ ID NO: 301725 - RNA, 19 nt, Artificial Sequence
  Description of Artificial Sequence: Synthetic oligonucleotide
  Antisense strand to SEQ ID NO: 301724
agaacucgucgaaccuucc

SEQ ID NO: 301726 - RNA, 19 nt, Artificial Sequence
  Description of Artificial Sequence: Synthetic oligonucleotide
  Sense strand starting at position 1535 of SEQ ID NO: 3877
ugcuaaagugaagggauua

SEQ ID NO: 301727 - RNA, 19 nt, Artificial Sequence
  Description of Artificial Sequence: Synthetic oligonucleotide
  Antisense strand to SEQ ID NO: 301726
uaaucccuucacuuuagca

SEQ ID NO: 301728 - RNA, 19 nt, Artificial Sequence
  Description of Artificial Sequence: Synthetic oligonucleotide
  Sense strand starting at position 1536 of SEQ ID NO: 3877
gcuaaagugaagggauuaa

SEQ ID NO: 301729 - RNA, 19 nt, Artificial Sequence
  Description of Artificial Sequence: Synthetic oligonucleotide
  Antisense strand to SEQ ID NO: 301728
uuaaucccuucacuuuagc

SEQ ID NO: 301730 - RNA, 19 nt, Artificial Sequence
  Description of Artificial Sequence: Synthetic oligonucleotide
  Sense strand starting at position 1546 of SEQ ID NO: 3877
agggauuaauugagagggu

SEQ ID NO: 301731 - RNA, 19 nt, Artificial Sequence
  Description of Artificial Sequence: Synthetic oligonucleotide
  Antisense strand to SEQ ID NO: 301730
acccucucaauuaaucccu

SEQ ID NO: 301732 - RNA, 19 nt, Artificial Sequence
  Description of Artificial Sequence: Synthetic oligonucleotide
  Sense strand starting at position 1581 of SEQ ID NO: 3877
ucaccucguccucacagau

SEQ ID NO: 301733 - RNA, 19 nt, Artificial Sequence
  Description of Artificial Sequence: Synthetic oligonucleotide
  Antisense strand to SEQ ID NO: 301732
aucugugaggacgagguga

SEQ ID NO: 301734 - RNA, 19 nt, Artificial Sequence
  Description of Artificial Sequence: Synthetic oligonucleotide
  Sense strand starting at position 1658 of SEQ ID NO: 3877
gguguccacggagaacaau

SEQ ID NO: 301735 - RNA, 19 nt, Artificial Sequence
  Description of Artificial Sequence: Synthetic oligonucleotide
  Antisense strand to SEQ ID NO: 301734
auuguucuccguggacacc

SEQ ID NO: 301736 - RNA, 19 nt, Artificial Sequence
  Description of Artificial Sequence: Synthetic oligonucleotide
  Sense strand starting at position 1852 of SEQ ID NO: 3877
agcgguuauggcuacagga

SEQ ID NO: 301737 - RNA, 19 nt, Artificial Sequence
  Description of Artificial Sequence: Synthetic oligonucleotide
  Antisense strand to SEQ ID NO: 301736
uccuguagccauaaccgcu

SEQ ID NO: 301738 - RNA, 19 nt, Artificial Sequence
  Description of Artificial Sequence: Synthetic oligonucleotide
  Sense strand starting at position 1854 of SEQ ID NO: 3877
cgguuauggcuacaggaua

SEQ ID NO: 301739 - RNA, 19 nt, Artificial Sequence
  Description of Artificial Sequence: Synthetic oligonucleotide
  Antisense strand to SEQ ID NO: 301738
uauccuguagccauaaccg

SEQ ID NO: 301740 - RNA, 19 nt, Artificial Sequence
  Description of Artificial Sequence: Synthetic oligonucleotide
  Sense strand starting at position 2165 of SEQ ID NO: 3877
ucacgauuugcgugaacuu

SEQ ID NO: 301741 - RNA, 19 nt, Artificial Sequence
  Description of Artificial Sequence: Synthetic oligonucleotide
  Antisense strand to SEQ ID NO: 301740
aaguucacgcaaaucguga

SEQ ID NO: 301742 - RNA, 19 nt, Artificial Sequence
  Description of Artificial Sequence: Synthetic oligonucleotide
  Sense strand starting at position 2166 of SEQ ID NO: 3877
cacgauuugcgugaacuuu

SEQ ID NO: 301743 - RNA, 19 nt, Artificial Sequence
  Description of Artificial Sequence: Synthetic oligonucleotide
  Antisense strand to SEQ ID NO: 301742
aaaguucacgcaaaucgug

SEQ ID NO: 301744 - RNA, 19 nt, Artificial Sequence
  Description of Artificial Sequence: Synthetic oligonucleotide
  Sense strand starting at position 2199 of SEQ ID NO: 3877
gcggauucgaguguuucga

SEQ ID NO: 301745 - RNA, 19 nt, Artificial Sequence
  Description of Artificial Sequence: Synthetic oligonucleotide
  Antisense strand to SEQ ID NO: 301744
ucgaaacacucgaauccgc

SEQ ID NO: 301746 - RNA, 19 nt, Artificial Sequence
  Description of Artificial Sequence: Synthetic oligonucleotide
  Sense strand starting at position 2206 of SEQ ID NO: 3877
cgaguguuucgaccgcgaa

SEQ ID NO: 301747 - RNA, 19 nt, Artificial Sequence
  Description of Artificial Sequence: Synthetic oligonucleotide
  Antisense strand to SEQ ID NO: 301746
uucgcggucgaaacacucg

SEQ ID NO: 301748 - RNA, 19 nt, Artificial Sequence
  Description of Artificial Sequence: Synthetic oligonucleotide
  Sense strand starting at position 2208 of SEQ ID NO: 3877
aguguuucgaccgcgaauu

SEQ ID NO: 301749 - RNA, 19 nt, Artificial Sequence
  Description of Artificial Sequence: Synthetic oligonucleotide
  Antisense strand to SEQ ID NO: 301748
aauucgcggucgaaacacu

SEQ ID NO: 301750 - RNA, 19 nt, Artificial Sequence
  Description of Artificial Sequence: Synthetic oligonucleotide
  Sense strand starting at position 2523 of SEQ ID NO: 3877
auugacagucuguaaucuu

SEQ ID NO: 301751 - RNA, 19 nt, Artificial Sequence
  Description of Artificial Sequence: Synthetic oligonucleotide
  Antisense strand to SEQ ID NO: 301750
aagauuacagacugucaau

SEQ ID NO: 301752 - RNA, 19 nt, Artificial Sequence
  Description of Artificial Sequence: Synthetic oligonucleotide
  Sense strand starting at position 2716 of SEQ ID NO: 3877
guuggugcuagccagauuu

SEQ ID NO: 301753 - RNA, 19 nt, Artificial Sequence
  Description of Artificial Sequence: Synthetic oligonucleotide
  Antisense strand to SEQ ID NO: 301752
aaaucuggcuagcaccaac

SEQ ID NO: 301754 - RNA, 19 nt, Artificial Sequence
  Description of Artificial Sequence: Synthetic oligonucleotide
  Sense strand starting at position 2782 of SEQ ID NO: 3877
ugcauuucuuccguguauu

SEQ ID NO: 301755 - RNA, 19 nt, Artificial Sequence
  Description of Artificial Sequence: Synthetic oligonucleotide
  Antisense strand to SEQ ID NO: 301754
aauacacggaagaaaugca

SEQ ID NO: 301756 - RNA, 19 nt, Artificial Sequence
  Description of Artificial Sequence: Synthetic oligonucleotide
  Sense strand starting at position 2783 of SEQ ID NO: 3877
gcauuucuuccguguauug

SEQ ID NO: 301757 - RNA, 19 nt, Artificial Sequence
  Description of Artificial Sequence: Synthetic oligonucleotide
  Antisense strand to SEQ ID NO: 301756
caauacacggaagaaaugc

SEQ ID NO: 301758 - RNA, 19 nt, Artificial Sequence
  Description of Artificial Sequence: Synthetic oligonucleotide
  Sense strand starting at position 3103 of SEQ ID NO: 3877
gaacgaggauccgucucaa

SEQ ID NO: 301759 - RNA, 19 nt, Artificial Sequence
  Description of Artificial Sequence: Synthetic oligonucleotide
  Antisense strand to SEQ ID NO: 301758
uugagacggauccucguuc

SEQ ID NO: 301760 - RNA, 19 nt, Artificial Sequence
  Description of Artificial Sequence: Synthetic oligonucleotide
  Sense strand starting at position 3246 of SEQ ID NO: 3877
agagcucugaaaugugauu

SEQ ID NO: 301761 - RNA, 19 nt, Artificial Sequence
  Description of Artificial Sequence: Synthetic oligonucleotide
  Antisense strand to SEQ ID NO: 301760
aaucacauuucagagcucu

SEQ ID NO: 301762 - RNA, 19 nt, Artificial Sequence
  Description of Artificial Sequence: Synthetic oligonucleotide
  Sense strand starting at position 3267 of SEQ ID NO: 3877
guauacucuguaugcauuu

SEQ ID NO: 301763 - RNA, 19 nt, Artificial Sequence
  Description of Artificial Sequence: Synthetic oligonucleotide
  Antisense strand to SEQ ID NO: 301762
aaaugcauacagaguauac

SEQ ID NO: 301764 - RNA, 19 nt, Artificial Sequence
  Description of Artificial Sequence: Synthetic oligonucleotide
  Sense strand starting at position 3318 of SEQ ID NO: 3877
guaauccuaugucuaggaa

SEQ ID NO: 301765 - RNA, 19 nt, Artificial Sequence
  Description of Artificial Sequence: Synthetic oligonucleotide
  Antisense strand to SEQ ID NO: 301764
uuccuagacauaggauuac

SEQ ID NO: 301766 - RNA, 19 nt, Artificial Sequence
  Description of Artificial Sequence: Synthetic oligonucleotide
  Sense strand starting at position 3321 of SEQ ID NO: 3877
auccuaugucuaggaaucu

SEQ ID NO: 301767 - RNA, 19 nt, Artificial Sequence
  Description of Artificial Sequence: Synthetic oligonucleotide
  Antisense strand to SEQ ID NO: 301766
agauuccuagacauaggau

SEQ ID NO: 301768 - RNA, 19 nt, Artificial Sequence
  Description of Artificial Sequence: Synthetic oligonucleotide
  Sense strand starting at position 3371 of SEQ ID NO: 3877
agauuuaugugccaagaua

SEQ ID NO: 301769 - RNA, 19 nt, Artificial Sequence
  Description of Artificial Sequence: Synthetic oligonucleotide
  Antisense strand to SEQ ID NO: 301768
uaucuuggcacauaaaucu

SEQ ID NO: 301770 - RNA, 19 nt, Artificial Sequence
  Description of Artificial Sequence: Synthetic oligonucleotide
  Sense strand starting at position 3856 of SEQ ID NO: 3877
uaaucagaucuguaguguu

SEQ ID NO: 301771 - RNA, 19 nt, Artificial Sequence
  Description of Artificial Sequence: Synthetic oligonucleotide
  Antisense strand to SEQ ID NO: 301770
aacacuacagaucugauua

SEQ ID NO: 301772 - RNA, 19 nt, Artificial Sequence
  Description of Artificial Sequence: Synthetic oligonucleotide
  Sense strand starting at position 124 of SEQ ID NO: 3878
cauagucaucaaugagggu

SEQ ID NO: 301773 - RNA, 19 nt, Artificial Sequence
  Description of Artificial Sequence: Synthetic oligonucleotide
  Antisense strand to SEQ ID NO: 301772
acccucauugaugacuaug

SEQ ID NO: 301774 - RNA, 19 nt, Artificial Sequence
  Description of Artificial Sequence: Synthetic oligonucleotide
  Sense strand starting at position 267 of SEQ ID NO: 3878
ccagauccaucagagacau

SEQ ID NO: 301775 - RNA, 19 nt, Artificial Sequence
  Description of Artificial Sequence: Synthetic oligonucleotide
  Antisense strand to SEQ ID NO: 301774
augucucugauggaucugg

SEQ ID NO: 301776 - RNA, 19 nt, Artificial Sequence
  Description of Artificial Sequence: Synthetic oligonucleotide
  Sense strand starting at position 335 of SEQ ID NO: 3878
agacuugaaggucgaaauu

SEQ ID NO: 301777 - RNA, 19 nt, Artificial Sequence
  Description of Artificial Sequence: Synthetic oligonucleotide
  Antisense strand to SEQ ID NO: 301776
aauuucgaccuucaagucu

SEQ ID NO: 301778 - RNA, 19 nt, Artificial Sequence
  Description of Artificial Sequence: Synthetic oligonucleotide
  Sense strand starting at position 570 of SEQ ID NO: 3878
cgggcuuugcuguuccauu

SEQ ID NO: 301779 - RNA, 19 nt, Artificial Sequence
  Description of Artificial Sequence: Synthetic oligonucleotide
  Antisense strand to SEQ ID NO: 301778
aauggaacagcaaagcccg

SEQ ID NO: 301780 - RNA, 19 nt, Artificial Sequence
  Description of Artificial Sequence: Synthetic oligonucleotide
  Sense strand starting at position 587 of SEQ ID NO: 3878
uuuauauagcacggguaga

SEQ ID NO: 301781 - RNA, 19 nt, Artificial Sequence
  Description of Artificial Sequence: Synthetic oligonucleotide
  Antisense strand to SEQ ID NO: 301780
ucuacccgugcuauauaaa

SEQ ID NO: 301782 - RNA, 19 nt, Artificial Sequence
  Description of Artificial Sequence: Synthetic oligonucleotide
  Sense strand starting at position 1365 of SEQ ID NO: 3878
auugcagagucauuaauuc

SEQ ID NO: 301783 - RNA, 19 nt, Artificial Sequence
  Description of Artificial Sequence: Synthetic oligonucleotide
  Antisense strand to SEQ ID NO: 301782
gaauuaaugacucugcaau

SEQ ID NO: 301784 - RNA, 19 nt, Artificial Sequence
  Description of Artificial Sequence: Synthetic oligonucleotide
  Sense strand starting at position 1372 of SEQ ID NO: 3878
agucauuaauucgccuaau

SEQ ID NO: 301785 - RNA, 19 nt, Artificial Sequence
  Description of Artificial Sequence: Synthetic oligonucleotide
  Antisense strand to SEQ ID NO: 301784
auuaggcgaauuaaugacu

SEQ ID NO: 301786 - RNA, 19 nt, Artificial Sequence
  Description of Artificial Sequence: Synthetic oligonucleotide
  Sense strand starting at position 1734 of SEQ ID NO: 3878
ccuaucugcgaagcguaau

SEQ ID NO: 301787 - RNA, 19 nt, Artificial Sequence
  Description of Artificial Sequence: Synthetic oligonucleotide
  Antisense strand to SEQ ID NO: 301786
auuacgcuucgcagauagg

SEQ ID NO: 301788 - RNA, 19 nt, Artificial Sequence
  Description of Artificial Sequence: Synthetic oligonucleotide
  Sense strand starting at position 1737 of SEQ ID NO: 3878
aucugcgaagcguaauaaa

SEQ ID NO: 301789 - RNA, 19 nt, Artificial Sequence
  Description of Artificial Sequence: Synthetic oligonucleotide
  Antisense strand to SEQ ID NO: 301788
uuuauuacgcuucgcagau

SEQ ID NO: 301790 - RNA, 19 nt, Artificial Sequence
  Description of Artificial Sequence: Synthetic oligonucleotide
  Sense strand starting at position 1757 of SEQ ID NO: 3878
cgagguaugccauaguaca

SEQ ID NO: 301791 - RNA, 19 nt, Artificial Sequence
  Description of Artificial Sequence: Synthetic oligonucleotide
  Antisense strand to SEQ ID NO: 301790
uguacuauggcauaccucg

SEQ ID NO: 301792 - RNA, 19 nt, Artificial Sequence
  Description of Artificial Sequence: Synthetic oligonucleotide
  Sense strand starting at position 2675 of SEQ ID NO: 3878
ugucguagaguuuggagga

SEQ ID NO: 301793 - RNA, 19 nt, Artificial Sequence
  Description of Artificial Sequence: Synthetic oligonucleotide
  Antisense strand to SEQ ID NO: 301792
uccuccaaacucuacgaca

SEQ ID NO: 301794 - RNA, 19 nt, Artificial Sequence
  Description of Artificial Sequence: Synthetic oligonucleotide
  Sense strand starting at position 2745 of SEQ ID NO: 3878
ggaauuaucuuccugagac

SEQ ID NO: 301795 - RNA, 19 nt, Artificial Sequence
  Description of Artificial Sequence: Synthetic oligonucleotide
  Antisense strand to SEQ ID NO: 301794
gucucaggaagauaauucc

SEQ ID NO: 301796 - RNA, 19 nt, Artificial Sequence
  Description of Artificial Sequence: Synthetic oligonucleotide
  Sense strand starting at position 2905 of SEQ ID NO: 3878
gcagaaguaucuuuacuua

SEQ ID NO: 301797 - RNA, 19 nt, Artificial Sequence
  Description of Artificial Sequence: Synthetic oligonucleotide
  Antisense strand to SEQ ID NO: 301796
uaaguaaagauacuucugc

SEQ ID NO: 301798 - RNA, 19 nt, Artificial Sequence
  Description of Artificial Sequence: Synthetic oligonucleotide
  Sense strand starting at position 2947 of SEQ ID NO: 3878
gagguagaauauguuccuu

SEQ ID NO: 301799 - RNA, 19 nt, Artificial Sequence
  Description of Artificial Sequence: Synthetic oligonucleotide
  Antisense strand to SEQ ID NO: 301798
aaggaacauauucuaccuc

SEQ ID NO: 301800 - RNA, 19 nt, Artificial Sequence
  Description of Artificial Sequence: Synthetic oligonucleotide
  Sense strand starting at position 2969 of SEQ ID NO: 3878
cucuucuaguagucuagua

SEQ ID NO: 301801 - RNA, 19 nt, Artificial Sequence
  Description of Artificial Sequence: Synthetic oligonucleotide
  Antisense strand to SEQ ID NO: 301800
uacuagacuacuagaagag

SEQ ID NO: 301802 - RNA, 19 nt, Artificial Sequence
  Description of Artificial Sequence: Synthetic oligonucleotide
  Sense strand starting at position 2971 of SEQ ID NO: 3878
cuucuaguagucuaguaaa

SEQ ID NO: 301803 - RNA, 19 nt, Artificial Sequence
  Description of Artificial Sequence: Synthetic oligonucleotide
  Antisense strand to SEQ ID NO: 301802
uuuacuagacuacuagaag

SEQ ID NO: 301804 - RNA, 19 nt, Artificial Sequence
  Description of Artificial Sequence: Synthetic oligonucleotide
  Sense strand starting at position 3044 of SEQ ID NO: 3878
ccaucuguuugacuguaga

SEQ ID NO: 301805 - RNA, 19 nt, Artificial Sequence
  Description of Artificial Sequence: Synthetic oligonucleotide
  Antisense strand to SEQ ID NO: 301804
ucuacagucaaacagaugg

SEQ ID NO: 301806 - RNA, 19 nt, Artificial Sequence
  Description of Artificial Sequence: Synthetic oligonucleotide
  Sense strand starting at position 3082 of SEQ ID NO: 3878
gccauuguugcucaaacca

SEQ ID NO: 301807 - RNA, 19 nt, Artificial Sequence
  Description of Artificial Sequence: Synthetic oligonucleotide
  Antisense strand to SEQ ID NO: 301806
ugguuugagcaacaauggc

SEQ ID NO: 301808 - RNA, 19 nt, Artificial Sequence
  Description of Artificial Sequence: Synthetic oligonucleotide
  Sense strand starting at position 3132 of SEQ ID NO: 3878
gggugugauaagggucaga

SEQ ID NO: 301809 - RNA, 19 nt, Artificial Sequence
  Description of Artificial Sequence: Synthetic oligonucleotide
  Antisense strand to SEQ ID NO: 301808
ucugacccuuaucacaccc

SEQ ID NO: 301810 - RNA, 19 nt, Artificial Sequence
  Description of Artificial Sequence: Synthetic oligonucleotide
  Sense strand starting at position 3156 of SEQ ID NO: 3878
cucagcgaugcuuaaagau

SEQ ID NO: 301811 - RNA, 19 nt, Artificial Sequence
  Description of Artificial Sequence: Synthetic oligonucleotide
  Antisense strand to SEQ ID NO: 301810
aucuuuaagcaucgcugag

SEQ ID NO: 301812 - RNA, 19 nt, Artificial Sequence
  Description of Artificial Sequence: Synthetic oligonucleotide
  Sense strand starting at position 3165 of SEQ ID NO: 3878
gcuuaaagaugcuugugaa

SEQ ID NO: 301813 - RNA, 19 nt, Artificial Sequence
  Description of Artificial Sequence: Synthetic oligonucleotide
  Antisense strand to SEQ ID NO: 301812
uucacaagcaucuuuaagc

SEQ ID NO: 301814 - RNA, 19 nt, Artificial Sequence
  Description of Artificial Sequence: Synthetic oligonucleotide
  Sense strand starting at position 3166 of SEQ ID NO: 3878
cuuaaagaugcuugugaac

SEQ ID NO: 301815 - RNA, 19 nt, Artificial Sequence
  Description of Artificial Sequence: Synthetic oligonucleotide
  Antisense strand to SEQ ID NO: 301814
guucacaagcaucuuuaag

SEQ ID NO: 301816 - RNA, 19 nt, Artificial Sequence
  Description of Artificial Sequence: Synthetic oligonucleotide
  Sense strand starting at position 3175 of SEQ ID NO: 3878
gcuugugaacauugcuaac

SEQ ID NO: 301817 - RNA, 19 nt, Artificial Sequence
  Description of Artificial Sequence: Synthetic oligonucleotide
  Antisense strand to SEQ ID NO: 301816
guuagcaauguucacaagc

SEQ ID NO: 301818 - RNA, 19 nt, Artificial Sequence
  Description of Artificial Sequence: Synthetic oligonucleotide
  Sense strand starting at position 3177 of SEQ ID NO: 3878
uugugaacauugcuaacua

SEQ ID NO: 301819 - RNA, 19 nt, Artificial Sequence
  Description of Artificial Sequence: Synthetic oligonucleotide
  Antisense strand to SEQ ID NO: 301818
uaguuagcaauguucacaa

SEQ ID NO: 301820 - RNA, 19 nt, Artificial Sequence
  Description of Artificial Sequence: Synthetic oligonucleotide
  Sense strand starting at position 3192 of SEQ ID NO: 3878
acuauugcgauauaaacgu

SEQ ID NO: 301821 - RNA, 19 nt, Artificial Sequence
  Description of Artificial Sequence: Synthetic oligonucleotide
  Antisense strand to SEQ ID NO: 301820
acguuuauaucgcaauagu

SEQ ID NO: 301822 - RNA, 19 nt, Artificial Sequence
  Description of Artificial Sequence: Synthetic oligonucleotide
  Sense strand starting at position 3196 of SEQ ID NO: 3878
uugcgauauaaacguaaag

SEQ ID NO: 301823 - RNA, 19 nt, Artificial Sequence
  Description of Artificial Sequence: Synthetic oligonucleotide
  Antisense strand to SEQ ID NO: 301822
cuuuacguuuauaucgcaa

SEQ ID NO: 301824 - RNA, 19 nt, Artificial Sequence
  Description of Artificial Sequence: Synthetic oligonucleotide
  Sense strand starting at position 3198 of SEQ ID NO: 3878
gcgauauaaacguaaagug

SEQ ID NO: 301825 - RNA, 19 nt, Artificial Sequence
  Description of Artificial Sequence: Synthetic oligonucleotide
  Antisense strand to SEQ ID NO: 301824
cacuuuacguuuauaucgc

SEQ ID NO: 301826 - RNA, 19 nt, Artificial Sequence
  Description of Artificial Sequence: Synthetic oligonucleotide
  Sense strand starting at position 3223 of SEQ ID NO: 3878
cuauuaguuuagguuguga

SEQ ID NO: 301827 - RNA, 19 nt, Artificial Sequence
  Description of Artificial Sequence: Synthetic oligonucleotide
  Antisense strand to SEQ ID NO: 301826
ucacaaccuaaacuaauag

SEQ ID NO: 301828 - RNA, 19 nt, Artificial Sequence
  Description of Artificial Sequence: Synthetic oligonucleotide
  Sense strand starting at position 3266 of SEQ ID NO: 3878
ggguguuuccaauacagag

SEQ ID NO: 301829 - RNA, 19 nt, Artificial Sequence
  Description of Artificial Sequence: Synthetic oligonucleotide
  Antisense strand to SEQ ID NO: 301828
cucuguauuggaaacaccc

SEQ ID NO: 301830 - RNA, 19 nt, Artificial Sequence
  Description of Artificial Sequence: Synthetic oligonucleotide
  Sense strand starting at position 3280 of SEQ ID NO: 3878
cagagaguacugugcaaau

SEQ ID NO: 301831 - RNA, 19 nt, Artificial Sequence
  Description of Artificial Sequence: Synthetic oligonucleotide
  Antisense strand to SEQ ID NO: 301830
auuugcacaguacucucug

SEQ ID NO: 301832 - RNA, 19 nt, Artificial Sequence
  Description of Artificial Sequence: Synthetic oligonucleotide
  Sense strand starting at position 3282 of SEQ ID NO: 3878
gagaguacugugcaaauuc

SEQ ID NO: 301833 - RNA, 19 nt, Artificial Sequence
  Description of Artificial Sequence: Synthetic oligonucleotide
  Antisense strand to SEQ ID NO: 301832
gaauuugcacaguacucuc

SEQ ID NO: 301834 - RNA, 19 nt, Artificial Sequence
  Description of Artificial Sequence: Synthetic oligonucleotide
  Sense strand starting at position 3329 of SEQ ID NO: 3878
gcagguagguccucaggaa

SEQ ID NO: 301835 - RNA, 19 nt, Artificial Sequence
  Description of Artificial Sequence: Synthetic oligonucleotide
  Antisense strand to SEQ ID NO: 301834
uuccugaggaccuaccugc

SEQ ID NO: 301836 - RNA, 19 nt, Artificial Sequence
  Description of Artificial Sequence: Synthetic oligonucleotide
  Sense strand starting at position 3330 of SEQ ID NO: 3878
cagguagguccucaggaau

SEQ ID NO: 301837 - RNA, 19 nt, Artificial Sequence
  Description of Artificial Sequence: Synthetic oligonucleotide
  Antisense strand to SEQ ID NO: 301836
auuccugaggaccuaccug

SEQ ID NO: 301838 - RNA, 19 nt, Artificial Sequence
  Description of Artificial Sequence: Synthetic oligonucleotide
  Sense strand starting at position 3361 of SEQ ID NO: 3878
cugagaggucucugcuacu

SEQ ID NO: 301839 - RNA, 19 nt, Artificial Sequence
  Description of Artificial Sequence: Synthetic oligonucleotide
  Antisense strand to SEQ ID NO: 301838
aguagcagagaccucucag

SEQ ID NO: 301840 - RNA, 19 nt, Artificial Sequence
  Description of Artificial Sequence: Synthetic oligonucleotide
  Sense strand starting at position 3367 of SEQ ID NO: 3878
ggucucugcuacuugagaa

SEQ ID NO: 301841 - RNA, 19 nt, Artificial Sequence
  Description of Artificial Sequence: Synthetic oligonucleotide
  Antisense strand to SEQ ID NO: 301840
uucucaaguagcagagacc

SEQ ID NO: 301842 - RNA, 19 nt, Artificial Sequence
  Description of Artificial Sequence: Synthetic oligonucleotide
  Sense strand starting at position 3380 of SEQ ID NO: 3878
ugagaaagucuuugcccga

SEQ ID NO: 301843 - RNA, 19 nt, Artificial Sequence
  Description of Artificial Sequence: Synthetic oligonucleotide
  Antisense strand to SEQ ID NO: 301842
ucgggcaaagacuuucuca

SEQ ID NO: 301844 - RNA, 19 nt, Artificial Sequence
  Description of Artificial Sequence: Synthetic oligonucleotide
  Sense strand starting at position 3634 of SEQ ID NO: 3878
gggagucugcaguaagaau

SEQ ID NO: 301845 - RNA, 19 nt, Artificial Sequence
  Description of Artificial Sequence: Synthetic oligonucleotide
  Antisense strand to SEQ ID NO: 301844
auucuuacugcagacuccc

SEQ ID NO: 301846 - RNA, 19 nt, Artificial Sequence
  Description of Artificial Sequence: Synthetic oligonucleotide
  Sense strand starting at position 3641 of SEQ ID NO: 3878
ugcaguaagaaugguaaua

SEQ ID NO: 301847 - RNA, 19 nt, Artificial Sequence
  Description of Artificial Sequence: Synthetic oligonucleotide
  Antisense strand to SEQ ID NO: 301846
uauuaccauucuuacugca

SEQ ID NO: 301848 - RNA, 19 nt, Artificial Sequence
  Description of Artificial Sequence: Synthetic oligonucleotide
  Sense strand starting at position 3646 of SEQ ID NO: 3878
uaagaaugguaauaaugga

SEQ ID NO: 301849 - RNA, 19 nt, Artificial Sequence
  Description of Artificial Sequence: Synthetic oligonucleotide
  Antisense strand to SEQ ID NO: 301848
uccauuauuaccauucuua

SEQ ID NO: 301850 - RNA, 19 nt, Artificial Sequence
  Description of Artificial Sequence: Synthetic oligonucleotide
  Sense strand starting at position 3662 of SEQ ID NO: 3878
ggacuuccacagggaucuu

SEQ ID NO: 301851 - RNA, 19 nt, Artificial Sequence
  Description of Artificial Sequence: Synthetic oligonucleotide
  Antisense strand to SEQ ID NO: 301850
aagaucccuguggaagucc

SEQ ID NO: 301852 - RNA, 19 nt, Artificial Sequence
  Description of Artificial Sequence: Synthetic oligonucleotide
  Sense strand starting at position 288 of SEQ ID NO: 3880
gggaauggauauuaaaguu

SEQ ID NO: 301853 - RNA, 19 nt, Artificial Sequence
  Description of Artificial Sequence: Synthetic oligonucleotide
  Antisense strand to SEQ ID NO: 301852
aacuuuaauauccauuccc

SEQ ID NO: 301854 - RNA, 19 nt, Artificial Sequence
  Description of Artificial Sequence: Synthetic oligonucleotide
  Sense strand starting at position 861 of SEQ ID NO: 3880
gcccucucuggcuauucua

SEQ ID NO: 301855 - RNA, 19 nt, Artificial Sequence
  Description of Artificial Sequence: Synthetic oligonucleotide
  Antisense strand to SEQ ID NO: 301854
uagaauagccagagagggc

SEQ ID NO: 301856 - RNA, 19 nt, Artificial Sequence
  Description of Artificial Sequence: Synthetic oligonucleotide
  Sense strand starting at position 1000 of SEQ ID NO: 3880
cuuguugaacuagauguga

SEQ ID NO: 301857 - RNA, 19 nt, Artificial Sequence
  Description of Artificial Sequence: Synthetic oligonucleotide
  Antisense strand to SEQ ID NO: 301856
ucacaucuaguucaacaag

SEQ ID NO: 301858 - RNA, 19 nt, Artificial Sequence
  Description of Artificial Sequence: Synthetic oligonucleotide
  Sense strand starting at position 1002 of SEQ ID NO: 3880
uguugaacuagaugugaga

SEQ ID NO: 301859 - RNA, 19 nt, Artificial Sequence
  Description of Artificial Sequence: Synthetic oligonucleotide
  Antisense strand to SEQ ID NO: 301858
ucucacaucuaguucaaca

SEQ ID NO: 301860 - RNA, 19 nt, Artificial Sequence
  Description of Artificial Sequence: Synthetic oligonucleotide
  Sense strand starting at position 1034 of SEQ ID NO: 3880
gcugcuuuguauccuauuu

SEQ ID NO: 301861 - RNA, 19 nt, Artificial Sequence
  Description of Artificial Sequence: Synthetic oligonucleotide
  Antisense strand to SEQ ID NO: 301860
aaauaggauacaaagcagc

SEQ ID NO: 301862 - RNA, 19 nt, Artificial Sequence
  Description of Artificial Sequence: Synthetic oligonucleotide
  Sense strand starting at position 1055 of SEQ ID NO: 3880
auauaaacguuaccaugaa

SEQ ID NO: 301863 - RNA, 19 nt, Artificial Sequence
  Description of Artificial Sequence: Synthetic oligonucleotide
  Antisense strand to SEQ ID NO: 301862
uucaugguaacguuuauau

SEQ ID NO: 301864 - RNA, 19 nt, Artificial Sequence
  Description of Artificial Sequence: Synthetic oligonucleotide
  Sense strand starting at position 1069 of SEQ ID NO: 3880
augaaauaugcacauccga

SEQ ID NO: 301865 - RNA, 19 nt, Artificial Sequence
  Description of Artificial Sequence: Synthetic oligonucleotide
  Antisense strand to SEQ ID NO: 301864
ucggaugugcauauuucau

SEQ ID NO: 301866 - RNA, 19 nt, Artificial Sequence
  Description of Artificial Sequence: Synthetic oligonucleotide
  Sense strand starting at position 1106 of SEQ ID NO: 3880
gcugguaugaccugaaauu

SEQ ID NO: 301867 - RNA, 19 nt, Artificial Sequence
  Description of Artificial Sequence: Synthetic oligonucleotide
  Antisense strand to SEQ ID NO: 301866
aauuucaggucauaccagc

SEQ ID NO: 301868 - RNA, 19 nt, Artificial Sequence
  Description of Artificial Sequence: Synthetic oligonucleotide
  Sense strand starting at position 1132 of SEQ ID NO: 3880
ucugucucugcccaagagu

SEQ ID NO: 301869 - RNA, 19 nt, Artificial Sequence
  Description of Artificial Sequence: Synthetic oligonucleotide
  Antisense strand to SEQ ID NO: 301868
acucuugggcagagacaga

SEQ ID NO: 301870 - RNA, 19 nt, Artificial Sequence
  Description of Artificial Sequence: Synthetic oligonucleotide
  Sense strand starting at position 1135 of SEQ ID NO: 3880
gucucugcccaagaguuaa

SEQ ID NO: 301871 - RNA, 19 nt, Artificial Sequence
  Description of Artificial Sequence: Synthetic oligonucleotide
  Antisense strand to SEQ ID NO: 301870
uuaacucuugggcagagac

SEQ ID NO: 301872 - RNA, 19 nt, Artificial Sequence
  Description of Artificial Sequence: Synthetic oligonucleotide
  Sense strand starting at position 1340 of SEQ ID NO: 3880
agcaauuuggaguguagua

SEQ ID NO: 301873 - RNA, 19 nt, Artificial Sequence
  Description of Artificial Sequence: Synthetic oligonucleotide
  Antisense strand to SEQ ID NO: 301872
uacuacacuccaaauugcu

SEQ ID NO: 301874 - RNA, 19 nt, Artificial Sequence
  Description of Artificial Sequence: Synthetic oligonucleotide
  Sense strand starting at position 1367 of SEQ ID NO: 3880
gcuguacugccuuuauugu

SEQ ID NO: 301875 - RNA, 19 nt, Artificial Sequence
  Description of Artificial Sequence: Synthetic oligonucleotide
  Antisense strand to SEQ ID NO: 301874
acaauaaaggcaguacagc

SEQ ID NO: 301876 - RNA, 19 nt, Artificial Sequence
  Description of Artificial Sequence: Synthetic oligonucleotide
  Sense strand starting at position 1463 of SEQ ID NO: 3880
gucuuacagguauacuuaa

SEQ ID NO: 301877 - RNA, 19 nt, Artificial Sequence
  Description of Artificial Sequence: Synthetic oligonucleotide
  Antisense strand to SEQ ID NO: 301876
uuaaguauaccuguaagac

SEQ ID NO: 301878 - RNA, 19 nt, Artificial Sequence
  Description of Artificial Sequence: Synthetic oligonucleotide
  Sense strand starting at position 1549 of SEQ ID NO: 3880
ccguaucaguacuccaaag

SEQ ID NO: 301879 - RNA, 19 nt, Artificial Sequence
  Description of Artificial Sequence: Synthetic oligonucleotide
  Antisense strand to SEQ ID NO: 301878
cuuuggaguacugauacgg

SEQ ID NO: 301880 - RNA, 19 nt, Artificial Sequence
  Description of Artificial Sequence: Synthetic oligonucleotide
  Sense strand starting at position 1629 of SEQ ID NO: 3880
cucacauugugacuucuua

SEQ ID NO: 301881 - RNA, 19 nt, Artificial Sequence
  Description of Artificial Sequence: Synthetic oligonucleotide
  Antisense strand to SEQ ID NO: 301880
uaagaagucacaaugugag

SEQ ID NO: 301882 - RNA, 19 nt, Artificial Sequence
  Description of Artificial Sequence: Synthetic oligonucleotide
  Sense strand starting at position 1745 of SEQ ID NO: 3880
ucacuuacguagucuauuu

SEQ ID NO: 301883 - RNA, 19 nt, Artificial Sequence
  Description of Artificial Sequence: Synthetic oligonucleotide
  Antisense strand to SEQ ID NO: 301882
aaauagacuacguaaguga

SEQ ID NO: 301884 - RNA, 19 nt, Artificial Sequence
  Description of Artificial Sequence: Synthetic oligonucleotide
  Sense strand starting at position 1755 of SEQ ID NO: 3880
agucuauuuccuggcacuu

SEQ ID NO: 301885 - RNA, 19 nt, Artificial Sequence
  Description of Artificial Sequence: Synthetic oligonucleotide
  Antisense strand to SEQ ID NO: 301884
aagugccaggaaauagacu

SEQ ID NO: 301886 - RNA, 19 nt, Artificial Sequence
  Description of Artificial Sequence: Synthetic oligonucleotide
  Sense strand starting at position 1783 of SEQ ID NO: 3880
uggcuaucccuuuaaggcu

SEQ ID NO: 301887 - RNA, 19 nt, Artificial Sequence
  Description of Artificial Sequence: Synthetic oligonucleotide
  Antisense strand to SEQ ID NO: 301886
agccuuaaagggauagcca

SEQ ID NO: 301888 - RNA, 19 nt, Artificial Sequence
  Description of Artificial Sequence: Synthetic oligonucleotide
  Sense strand starting at position 1798 of SEQ ID NO: 3880
ggcuuuauuuguuaaacag

SEQ ID NO: 301889 - RNA, 19 nt, Artificial Sequence
  Description of Artificial Sequence: Synthetic oligonucleotide
  Antisense strand to SEQ ID NO: 301888
cuguuuaacaaauaaagcc

SEQ ID NO: 301890 - RNA, 19 nt, Artificial Sequence
  Description of Artificial Sequence: Synthetic oligonucleotide
  Sense strand starting at position 1983 of SEQ ID NO: 3880
uuugaaagugcuuguaaua

SEQ ID NO: 301891 - RNA, 19 nt, Artificial Sequence
  Description of Artificial Sequence: Synthetic oligonucleotide
  Antisense strand to SEQ ID NO: 301890
uauuacaagcacuuucaaa

SEQ ID NO: 301892 - RNA, 19 nt, Artificial Sequence
  Description of Artificial Sequence: Synthetic oligonucleotide
  Sense strand starting at position 2056 of SEQ ID NO: 3880
ggaguaacauacuccugua

SEQ ID NO: 301893 - RNA, 19 nt, Artificial Sequence
  Description of Artificial Sequence: Synthetic oligonucleotide
  Antisense strand to SEQ ID NO: 301892
uacaggaguauguuacucc

SEQ ID NO: 301894 - RNA, 19 nt, Artificial Sequence
  Description of Artificial Sequence: Synthetic oligonucleotide
  Sense strand starting at position 2107 of SEQ ID NO: 3880
aucccuaggucuguacaau

SEQ ID NO: 301895 - RNA, 19 nt, Artificial Sequence
  Description of Artificial Sequence: Synthetic oligonucleotide
  Antisense strand to SEQ ID NO: 301894
auuguacagaccuagggau

SEQ ID NO: 301896 - RNA, 19 nt, Artificial Sequence
  Description of Artificial Sequence: Synthetic oligonucleotide
  Sense strand starting at position 2108 of SEQ ID NO: 3880
ucccuaggucuguacaauu

SEQ ID NO: 301897 - RNA, 19 nt, Artificial Sequence
  Description of Artificial Sequence: Synthetic oligonucleotide
  Antisense strand to SEQ ID NO: 301896
aauuguacagaccuaggga

SEQ ID NO: 301898 - RNA, 19 nt, Artificial Sequence
  Description of Artificial Sequence: Synthetic oligonucleotide
  Sense strand starting at position 2125 of SEQ ID NO: 3880
uuauuucucugguauacau

SEQ ID NO: 301899 - RNA, 19 nt, Artificial Sequence
  Description of Artificial Sequence: Synthetic oligonucleotide
  Antisense strand to SEQ ID NO: 301898
auguauaccagagaaauaa

SEQ ID NO: 301900 - RNA, 19 nt, Artificial Sequence
  Description of Artificial Sequence: Synthetic oligonucleotide
  Sense strand starting at position 2577 of SEQ ID NO: 3880
ucaccaauccuuugagaug

SEQ ID NO: 301901 - RNA, 19 nt, Artificial Sequence
  Description of Artificial Sequence: Synthetic oligonucleotide
  Antisense strand to SEQ ID NO: 301900
caucucaaaggauugguga

SEQ ID NO: 301902 - RNA, 19 nt, Artificial Sequence
  Description of Artificial Sequence: Synthetic oligonucleotide
  Sense strand starting at position 2588 of SEQ ID NO: 3880
uugagaugugauggguaaa

SEQ ID NO: 301903 - RNA, 19 nt, Artificial Sequence
  Description of Artificial Sequence: Synthetic oligonucleotide
  Antisense strand to SEQ ID NO: 301902
uuuacccaucacaucucaa

SEQ ID NO: 301904 - RNA, 19 nt, Artificial Sequence
  Description of Artificial Sequence: Synthetic oligonucleotide
  Sense strand starting at position 2687 of SEQ ID NO: 3880
cguacaaguuuguuacaua

SEQ ID NO: 301905 - RNA, 19 nt, Artificial Sequence
  Description of Artificial Sequence: Synthetic oligonucleotide
  Antisense strand to SEQ ID NO: 301904
uauguaacaaacuuguacg

SEQ ID NO: 301906 - RNA, 19 nt, Artificial Sequence
  Description of Artificial Sequence: Synthetic oligonucleotide
  Sense strand starting at position 2722 of SEQ ID NO: 3880
ggugguuugcuauaaccau

SEQ ID NO: 301907 - RNA, 19 nt, Artificial Sequence
  Description of Artificial Sequence: Synthetic oligonucleotide
  Antisense strand to SEQ ID NO: 301906
augguuauagcaaaccacc

SEQ ID NO: 301908 - RNA, 19 nt, Artificial Sequence
  Description of Artificial Sequence: Synthetic oligonucleotide
  Sense strand starting at position 2875 of SEQ ID NO: 3880
acuuaagaguaagaacaua

SEQ ID NO: 301909 - RNA, 19 nt, Artificial Sequence
  Description of Artificial Sequence: Synthetic oligonucleotide
  Antisense strand to SEQ ID NO: 301908
uauguucuuacucuuaagu

SEQ ID NO: 301910 - RNA, 19 nt, Artificial Sequence
  Description of Artificial Sequence: Synthetic oligonucleotide
  Sense strand starting at position 3665 of SEQ ID NO: 3880
agguccagaagugauguua

SEQ ID NO: 301911 - RNA, 19 nt, Artificial Sequence
  Description of Artificial Sequence: Synthetic oligonucleotide
  Antisense strand to SEQ ID NO: 301910
uaacaucacuucuggaccu

SEQ ID NO: 301912 - RNA, 19 nt, Artificial Sequence
  Description of Artificial Sequence: Synthetic oligonucleotide
  Sense strand starting at position 3673 of SEQ ID NO: 3880
aagugauguuauguaucau

SEQ ID NO: 301913 - RNA, 19 nt, Artificial Sequence
  Description of Artificial Sequence: Synthetic oligonucleotide
  Antisense strand to SEQ ID NO: 301912
augauacauaacaucacuu

SEQ ID NO: 301914 - RNA, 19 nt, Artificial Sequence
  Description of Artificial Sequence: Synthetic oligonucleotide
  Sense strand starting at position 3674 of SEQ ID NO: 3880
agugauguuauguaucauc

SEQ ID NO: 301915 - RNA, 19 nt, Artificial Sequence
  Description of Artificial Sequence: Synthetic oligonucleotide
  Antisense strand to SEQ ID NO: 301914
gaugauacauaacaucacu

SEQ ID NO: 301916 - RNA, 19 nt, Artificial Sequence
  Description of Artificial Sequence: Synthetic oligonucleotide
  Sense strand starting at position 3679 of SEQ ID NO: 3880
uguuauguaucaucaggau

SEQ ID NO: 301917 - RNA, 19 nt, Artificial Sequence
  Description of Artificial Sequence: Synthetic oligonucleotide
  Antisense strand to SEQ ID NO: 301916
auccugaugauacauaaca

SEQ ID NO: 301918 - RNA, 19 nt, Artificial Sequence
  Description of Artificial Sequence: Synthetic oligonucleotide
  Sense strand starting at position 3700 of SEQ ID NO: 3880
ggaacagucugucugucua

SEQ ID NO: 301919 - RNA, 19 nt, Artificial Sequence
  Description of Artificial Sequence: Synthetic oligonucleotide
  Antisense strand to SEQ ID NO: 301918
uagacagacagacuguucc

SEQ ID NO: 301920 - RNA, 19 nt, Artificial Sequence
  Description of Artificial Sequence: Synthetic oligonucleotide
  Sense strand starting at position 3711 of SEQ ID NO: 3880
ucugucuaucuagguuuau

SEQ ID NO: 301921 - RNA, 19 nt, Artificial Sequence
  Description of Artificial Sequence: Synthetic oligonucleotide
  Antisense strand to SEQ ID NO: 301920
auaaaccuagauagacaga

SEQ ID NO: 301922 - RNA, 19 nt, Artificial Sequence
  Description of Artificial Sequence: Synthetic oligonucleotide
  Sense strand starting at position 3712 of SEQ ID NO: 3880
cugucuaucuagguuuaua

SEQ ID NO: 301923 - RNA, 19 nt, Artificial Sequence
  Description of Artificial Sequence: Synthetic oligonucleotide
  Antisense strand to SEQ ID NO: 301922
uauaaaccuagauagacag

SEQ ID NO: 301924 - RNA, 19 nt, Artificial Sequence
  Description of Artificial Sequence: Synthetic oligonucleotide
  Sense strand starting at position 3744 of SEQ ID NO: 3880
guuguauaguucccacaua

SEQ ID NO: 301925 - RNA, 19 nt, Artificial Sequence
  Description of Artificial Sequence: Synthetic oligonucleotide
  Antisense strand to SEQ ID NO: 301924
uaugugggaacuauacaac

SEQ ID NO: 301926 - RNA, 19 nt, Artificial Sequence
  Description of Artificial Sequence: Synthetic oligonucleotide
  Sense strand starting at position 3869 of SEQ ID NO: 3880
agucaaauggguugucaug

SEQ ID NO: 301927 - RNA, 19 nt, Artificial Sequence
  Description of Artificial Sequence: Synthetic oligonucleotide
  Antisense strand to SEQ ID NO: 301926
caugacaacccauuugacu

SEQ ID NO: 301928 - RNA, 19 nt, Artificial Sequence
  Description of Artificial Sequence: Synthetic oligonucleotide
  Sense strand starting at position 3875 of SEQ ID NO: 3880
auggguugucaugguuacu

SEQ ID NO: 301929 - RNA, 19 nt, Artificial Sequence
  Description of Artificial Sequence: Synthetic oligonucleotide
  Antisense strand to SEQ ID NO: 301928
aguaaccaugacaacccau

SEQ ID NO: 301930 - RNA, 19 nt, Artificial Sequence
  Description of Artificial Sequence: Synthetic oligonucleotide
  Sense strand starting at position 3881 of SEQ ID NO: 3880
ugucaugguuacucaguua

SEQ ID NO: 301931 - RNA, 19 nt, Artificial Sequence
  Description of Artificial Sequence: Synthetic oligonucleotide
  Antisense strand to SEQ ID NO: 301930
uaacugaguaaccaugaca

SEQ ID NO: 301932 - RNA, 19 nt, Artificial Sequence
  Description of Artificial Sequence: Synthetic oligonucleotide
  Sense strand starting at position 31 of SEQ ID NO: 3881
caaagcuuuccgugaauuu

SEQ ID NO: 301933 - RNA, 19 nt, Artificial Sequence
  Description of Artificial Sequence: Synthetic oligonucleotide
  Antisense strand to SEQ ID NO: 301932
aaauucacggaaagcuuug

SEQ ID NO: 301934 - RNA, 19 nt, Artificial Sequence
  Description of Artificial Sequence: Synthetic oligonucleotide
  Sense strand starting at position 249 of SEQ ID NO: 3881
cgaagcucuugauuucuuu

SEQ ID NO: 301935 - RNA, 19 nt, Artificial Sequence
  Description of Artificial Sequence: Synthetic oligonucleotide
  Antisense strand to SEQ ID NO: 301934
aaagaaaucaagagcuucg

SEQ ID NO: 301936 - RNA, 19 nt, Artificial Sequence
  Description of Artificial Sequence: Synthetic oligonucleotide
  Sense strand starting at position 275 of SEQ ID NO: 3881
ucacuagacgguugaacuu

SEQ ID NO: 301937 - RNA, 19 nt, Artificial Sequence
  Description of Artificial Sequence: Synthetic oligonucleotide
  Antisense strand to SEQ ID NO: 301936
aaguucaaccgucuaguga

SEQ ID NO: 301938 - RNA, 19 nt, Artificial Sequence
  Description of Artificial Sequence: Synthetic oligonucleotide
  Sense strand starting at position 354 of SEQ ID NO: 3881
cuaccaauugcggaugaau

SEQ ID NO: 301939 - RNA, 19 nt, Artificial Sequence
  Description of Artificial Sequence: Synthetic oligonucleotide
  Antisense strand to SEQ ID NO: 301938
auucauccgcaauugguag

SEQ ID NO: 301940 - RNA, 19 nt, Artificial Sequence
  Description of Artificial Sequence: Synthetic oligonucleotide
  Sense strand starting at position 356 of SEQ ID NO: 3881
accaauugcggaugaauac

SEQ ID NO: 301941 - RNA, 19 nt, Artificial Sequence
  Description of Artificial Sequence: Synthetic oligonucleotide
  Antisense strand to SEQ ID NO: 301940
guauucauccgcaauuggu

SEQ ID NO: 301942 - RNA, 19 nt, Artificial Sequence
  Description of Artificial Sequence: Synthetic oligonucleotide
  Sense strand starting at position 366 of SEQ ID NO: 3881
gaugaauaccgcuaagcuu

SEQ ID NO: 301943 - RNA, 19 nt, Artificial Sequence
  Description of Artificial Sequence: Synthetic oligonucleotide
  Antisense strand to SEQ ID NO: 301942
aagcuuagcgguauucauc

SEQ ID NO: 301944 - RNA, 19 nt, Artificial Sequence
  Description of Artificial Sequence: Synthetic oligonucleotide
  Sense strand starting at position 389 of SEQ ID NO: 3881
cagacuaaagagcguuaaa

SEQ ID NO: 301945 - RNA, 19 nt, Artificial Sequence
  Description of Artificial Sequence: Synthetic oligonucleotide
  Antisense strand to SEQ ID NO: 301944
uuuaacgcucuuuagucug

SEQ ID NO: 301946 - RNA, 19 nt, Artificial Sequence
  Description of Artificial Sequence: Synthetic oligonucleotide
  Sense strand starting at position 519 of SEQ ID NO: 3881
gugccuuacaagcugugua

SEQ ID NO: 301947 - RNA, 19 nt, Artificial Sequence
  Description of Artificial Sequence: Synthetic oligonucleotide
  Antisense strand to SEQ ID NO: 301946
uacacagcuuguaaggcac

SEQ ID NO: 301948 - RNA, 19 nt, Artificial Sequence
  Description of Artificial Sequence: Synthetic oligonucleotide
  Sense strand starting at position 613 of SEQ ID NO: 3881
gcguguuugcaauaaccuu

SEQ ID NO: 301949 - RNA, 19 nt, Artificial Sequence
  Description of Artificial Sequence: Synthetic oligonucleotide
  Antisense strand to SEQ ID NO: 301948
aagguuauugcaaacacgc

SEQ ID NO: 301950 - RNA, 19 nt, Artificial Sequence
  Description of Artificial Sequence: Synthetic oligonucleotide
  Sense strand starting at position 684 of SEQ ID NO: 3881
cuacuugcagcagagaaua

SEQ ID NO: 301951 - RNA, 19 nt, Artificial Sequence
  Description of Artificial Sequence: Synthetic oligonucleotide
  Antisense strand to SEQ ID NO: 301950
uauucucugcugcaaguag

SEQ ID NO: 301952 - RNA, 19 nt, Artificial Sequence
  Description of Artificial Sequence: Synthetic oligonucleotide
  Sense strand starting at position 736 of SEQ ID NO: 3881
gagagaaaguugcaaccau

SEQ ID NO: 301953 - RNA, 19 nt, Artificial Sequence
  Description of Artificial Sequence: Synthetic oligonucleotide
  Antisense strand to SEQ ID NO: 301952
augguugcaacuuucucuc

SEQ ID NO: 301954 - RNA, 19 nt, Artificial Sequence
  Description of Artificial Sequence: Synthetic oligonucleotide
  Sense strand starting at position 784 of SEQ ID NO: 3881
cgagucagucugucguuua

SEQ ID NO: 301955 - RNA, 19 nt, Artificial Sequence
  Description of Artificial Sequence: Synthetic oligonucleotide
  Antisense strand to SEQ ID NO: 301954
uaaacgacagacugacucg

SEQ ID NO: 301956 - RNA, 19 nt, Artificial Sequence
  Description of Artificial Sequence: Synthetic oligonucleotide
  Sense strand starting at position 789 of SEQ ID NO: 3881
cagucugucguuuaaauug

SEQ ID NO: 301957 - RNA, 19 nt, Artificial Sequence
  Description of Artificial Sequence: Synthetic oligonucleotide
  Antisense strand to SEQ ID NO: 301956
caauuuaaacgacagacug

SEQ ID NO: 301958 - RNA, 19 nt, Artificial Sequence
  Description of Artificial Sequence: Synthetic oligonucleotide
  Sense strand starting at position 827 of SEQ ID NO: 3881
ggaucaaagucugcccaga

SEQ ID NO: 301959 - RNA, 19 nt, Artificial Sequence
  Description of Artificial Sequence: Synthetic oligonucleotide
  Antisense strand to SEQ ID NO: 301958
ucugggcagacuuugaucc

SEQ ID NO: 301960 - RNA, 19 nt, Artificial Sequence
  Description of Artificial Sequence: Synthetic oligonucleotide
  Sense strand starting at position 829 of SEQ ID NO: 3881
aucaaagucugcccagaua

SEQ ID NO: 301961 - RNA, 19 nt, Artificial Sequence
  Description of Artificial Sequence: Synthetic oligonucleotide
  Antisense strand to SEQ ID NO: 301960
uaucugggcagacuuugau

SEQ ID NO: 301962 - RNA, 19 nt, Artificial Sequence
  Description of Artificial Sequence: Synthetic oligonucleotide
  Sense strand starting at position 1414 of SEQ ID NO: 3881
gcgugugauucagcaggga

SEQ ID NO: 301963 - RNA, 19 nt, Artificial Sequence
  Description of Artificial Sequence: Synthetic oligonucleotide
  Antisense strand to SEQ ID NO: 301962
ucccugcugaaucacacgc

SEQ ID NO: 301964 - RNA, 19 nt, Artificial Sequence
  Description of Artificial Sequence: Synthetic oligonucleotide
  Sense strand starting at position 1981 of SEQ ID NO: 3881
ggguaaccucugcaucagu

SEQ ID NO: 301965 - RNA, 19 nt, Artificial Sequence
  Description of Artificial Sequence: Synthetic oligonucleotide
  Antisense strand to SEQ ID NO: 301964
acugaugcagagguuaccc

SEQ ID NO: 301966 - RNA, 19 nt, Artificial Sequence
  Description of Artificial Sequence: Synthetic oligonucleotide
  Sense strand starting at position 2431 of SEQ ID NO: 3881
ucgggaguucaaugugauc

SEQ ID NO: 301967 - RNA, 19 nt, Artificial Sequence
  Description of Artificial Sequence: Synthetic oligonucleotide
  Antisense strand to SEQ ID NO: 301966
gaucacauugaacucccga

SEQ ID NO: 301968 - RNA, 19 nt, Artificial Sequence
  Description of Artificial Sequence: Synthetic oligonucleotide
  Sense strand starting at position 2433 of SEQ ID NO: 3881
gggaguucaaugugaucgu

SEQ ID NO: 301969 - RNA, 19 nt, Artificial Sequence
  Description of Artificial Sequence: Synthetic oligonucleotide
  Antisense strand to SEQ ID NO: 301968
acgaucacauugaacuccc

SEQ ID NO: 301970 - RNA, 19 nt, Artificial Sequence
  Description of Artificial Sequence: Synthetic oligonucleotide
  Sense strand starting at position 2472 of SEQ ID NO: 3881
aguugagaguuccuucuuu

SEQ ID NO: 301971 - RNA, 19 nt, Artificial Sequence
  Description of Artificial Sequence: Synthetic oligonucleotide
  Antisense strand to SEQ ID NO: 301970
aaagaaggaacucucaacu

SEQ ID NO: 301972 - RNA, 19 nt, Artificial Sequence
  Description of Artificial Sequence: Synthetic oligonucleotide
  Sense strand starting at position 2476 of SEQ ID NO: 3881
gagaguuccuucuuucuug

SEQ ID NO: 301973 - RNA, 19 nt, Artificial Sequence
  Description of Artificial Sequence: Synthetic oligonucleotide
  Antisense strand to SEQ ID NO: 301972
caagaaagaaggaacucuc

SEQ ID NO: 301974 - RNA, 19 nt, Artificial Sequence
  Description of Artificial Sequence: Synthetic oligonucleotide
  Sense strand starting at position 2496 of SEQ ID NO: 3881
cccucuguacugugcagaa

SEQ ID NO: 301975 - RNA, 19 nt, Artificial Sequence
  Description of Artificial Sequence: Synthetic oligonucleotide
  Antisense strand to SEQ ID NO: 301974
uucugcacaguacagaggg

SEQ ID NO: 301976 - RNA, 19 nt, Artificial Sequence
  Description of Artificial Sequence: Synthetic oligonucleotide
  Sense strand starting at position 2681 of SEQ ID NO: 3881
gacuguaugguauagcaau

SEQ ID NO: 301977 - RNA, 19 nt, Artificial Sequence
  Description of Artificial Sequence: Synthetic oligonucleotide
  Antisense strand to SEQ ID NO: 301976
auugcuauaccauacaguc

SEQ ID NO: 301978 - RNA, 19 nt, Artificial Sequence
  Description of Artificial Sequence: Synthetic oligonucleotide
  Sense strand starting at position 2793 of SEQ ID NO: 3881
aagguaugguuucuagaaa

SEQ ID NO: 301979 - RNA, 19 nt, Artificial Sequence
  Description of Artificial Sequence: Synthetic oligonucleotide
  Antisense strand to SEQ ID NO: 301978
uuucuagaaaccauaccuu

SEQ ID NO: 301980 - RNA, 19 nt, Artificial Sequence
  Description of Artificial Sequence: Synthetic oligonucleotide
  Sense strand starting at position 2894 of SEQ ID NO: 3881
gauagaguguagcuuucua

SEQ ID NO: 301981 - RNA, 19 nt, Artificial Sequence
  Description of Artificial Sequence: Synthetic oligonucleotide
  Antisense strand to SEQ ID NO: 301980
uagaaagcuacacucuauc

SEQ ID NO: 301982 - RNA, 19 nt, Artificial Sequence
  Description of Artificial Sequence: Synthetic oligonucleotide
  Sense strand starting at position 2898 of SEQ ID NO: 3881
gaguguagcuuucuacaga

SEQ ID NO: 301983 - RNA, 19 nt, Artificial Sequence
  Description of Artificial Sequence: Synthetic oligonucleotide
  Antisense strand to SEQ ID NO: 301982
ucuguagaaagcuacacuc

SEQ ID NO: 301984 - RNA, 19 nt, Artificial Sequence
  Description of Artificial Sequence: Synthetic oligonucleotide
  Sense strand starting at position 3045 of SEQ ID NO: 3881
augauauagcgcuacugca

SEQ ID NO: 301985 - RNA, 19 nt, Artificial Sequence
  Description of Artificial Sequence: Synthetic oligonucleotide
  Antisense strand to SEQ ID NO: 301984
ugcaguagcgcuauaucau

SEQ ID NO: 301986 - RNA, 19 nt, Artificial Sequence
  Description of Artificial Sequence: Synthetic oligonucleotide
  Sense strand starting at position 3133 of SEQ ID NO: 3881
ucgcauuucucauaguaau

SEQ ID NO: 301987 - RNA, 19 nt, Artificial Sequence
  Description of Artificial Sequence: Synthetic oligonucleotide
  Antisense strand to SEQ ID NO: 301986
auuacuaugagaaaugcga

SEQ ID NO: 301988 - RNA, 19 nt, Artificial Sequence
  Description of Artificial Sequence: Synthetic oligonucleotide
  Sense strand starting at position 3184 of SEQ ID NO: 3881
gaaccuugauugucaguua

SEQ ID NO: 301989 - RNA, 19 nt, Artificial Sequence
  Description of Artificial Sequence: Synthetic oligonucleotide
  Antisense strand to SEQ ID NO: 301988
uaacugacaaucaagguuc

SEQ ID NO: 301990 - RNA, 19 nt, Artificial Sequence
  Description of Artificial Sequence: Synthetic oligonucleotide
  Sense strand starting at position 3187 of SEQ ID NO: 3881
ccuugauugucaguuaucu

SEQ ID NO: 301991 - RNA, 19 nt, Artificial Sequence
  Description of Artificial Sequence: Synthetic oligonucleotide
  Antisense strand to SEQ ID NO: 301990
agauaacugacaaucaagg

SEQ ID NO: 301992 - RNA, 19 nt, Artificial Sequence
  Description of Artificial Sequence: Synthetic oligonucleotide
  Sense strand starting at position 3192 of SEQ ID NO: 3881
auugucaguuaucuccaga

SEQ ID NO: 301993 - RNA, 19 nt, Artificial Sequence
  Description of Artificial Sequence: Synthetic oligonucleotide
  Antisense strand to SEQ ID NO: 301992
ucuggagauaacugacaau

SEQ ID NO: 301994 - RNA, 19 nt, Artificial Sequence
  Description of Artificial Sequence: Synthetic oligonucleotide
  Sense strand starting at position 3195 of SEQ ID NO: 3881
gucaguuaucuccagaagu

SEQ ID NO: 301995 - RNA, 19 nt, Artificial Sequence
  Description of Artificial Sequence: Synthetic oligonucleotide
  Antisense strand to SEQ ID NO: 301994
acuucuggagauaacugac

SEQ ID NO: 301996 - RNA, 19 nt, Artificial Sequence
  Description of Artificial Sequence: Synthetic oligonucleotide
  Sense strand starting at position 3223 of SEQ ID NO: 3881
ugccuugugcuuuagauac

SEQ ID NO: 301997 - RNA, 19 nt, Artificial Sequence
  Description of Artificial Sequence: Synthetic oligonucleotide
  Antisense strand to SEQ ID NO: 301996
guaucuaaagcacaaggca

SEQ ID NO: 301998 - RNA, 19 nt, Artificial Sequence
  Description of Artificial Sequence: Synthetic oligonucleotide
  Sense strand starting at position 3282 of SEQ ID NO: 3881
agggacaucucacaaacaa

SEQ ID NO: 301999 - RNA, 19 nt, Artificial Sequence
  Description of Artificial Sequence: Synthetic oligonucleotide
  Antisense strand to SEQ ID NO: 301998
uuguuugugagaugucccu

SEQ ID NO: 302000 - RNA, 19 nt, Artificial Sequence
  Description of Artificial Sequence: Synthetic oligonucleotide
  Sense strand starting at position 3687 of SEQ ID NO: 3881
guguauaccucccugaaac

SEQ ID NO: 302001 - RNA, 19 nt, Artificial Sequence
  Description of Artificial Sequence: Synthetic oligonucleotide
  Antisense strand to SEQ ID NO: 302000
guuucagggagguauacac

SEQ ID NO: 302002 - RNA, 19 nt, Artificial Sequence
  Description of Artificial Sequence: Synthetic oligonucleotide
  Sense strand starting at position 3718 of SEQ ID NO: 3881
gaagauggugaauguaucu

SEQ ID NO: 302003 - RNA, 19 nt, Artificial Sequence
  Description of Artificial Sequence: Synthetic oligonucleotide
  Antisense strand to SEQ ID NO: 302002
agauacauucaccaucuuc

SEQ ID NO: 302004 - RNA, 19 nt, Artificial Sequence
  Description of Artificial Sequence: Synthetic oligonucleotide
  Sense strand starting at position 3723 of SEQ ID NO: 3881
uggugaauguaucuaucac

SEQ ID NO: 302005 - RNA, 19 nt, Artificial Sequence
  Description of Artificial Sequence: Synthetic oligonucleotide
  Antisense strand to SEQ ID NO: 302004
gugauagauacauucacca

SEQ ID NO: 302006 - RNA, 19 nt, Artificial Sequence
  Description of Artificial Sequence: Synthetic oligonucleotide
  Sense strand starting at position 3744 of SEQ ID NO: 3881
uccaaaguuuccucuuugu

SEQ ID NO: 302007 - RNA, 19 nt, Artificial Sequence
  Description of Artificial Sequence: Synthetic oligonucleotide
  Antisense strand to SEQ ID NO: 302006
acaaagaggaaacuuugga

SEQ ID NO: 302008 - RNA, 19 nt, Artificial Sequence
  Description of Artificial Sequence: Synthetic oligonucleotide
  Sense strand starting at position 3799 of SEQ ID NO: 3881
acagaucuuucugucauau

SEQ ID NO: 302009 - RNA, 19 nt, Artificial Sequence
  Description of Artificial Sequence: Synthetic oligonucleotide
  Antisense strand to SEQ ID NO: 302008
auaugacagaaagaucugu

SEQ ID NO: 302010 - RNA, 19 nt, Artificial Sequence
  Description of Artificial Sequence: Synthetic oligonucleotide
  Sense strand starting at position 3809 of SEQ ID NO: 3881
cugucauauggguagcuuu

SEQ ID NO: 302011 - RNA, 19 nt, Artificial Sequence
  Description of Artificial Sequence: Synthetic oligonucleotide
  Antisense strand to SEQ ID NO: 302010
aaagcuacccauaugacag

SEQ ID NO: 302012 - RNA, 19 nt, Artificial Sequence
  Description of Artificial Sequence: Synthetic oligonucleotide
  Sense strand starting at position 11 of SEQ ID NO: 3879
auggauauuugccugucuu

SEQ ID NO: 302013 - RNA, 19 nt, Artificial Sequence
  Description of Artificial Sequence: Synthetic oligonucleotide
  Antisense strand to SEQ ID NO: 302012
aagacaggcaaauauccau

SEQ ID NO: 302014 - RNA, 19 nt, Artificial Sequence
  Description of Artificial Sequence: Synthetic oligonucleotide
  Sense strand starting at position 12 of SEQ ID NO: 3879
uggauauuugccugucuuc

SEQ ID NO: 302015 - RNA, 19 nt, Artificial Sequence
  Description of Artificial Sequence: Synthetic oligonucleotide
  Antisense strand to SEQ ID NO: 302014
gaagacaggcaaauaucca

SEQ ID NO: 302016 - RNA, 19 nt, Artificial Sequence
  Description of Artificial Sequence: Synthetic oligonucleotide
  Sense strand starting at position 47 of SEQ ID NO: 3879
augcuuggccuccaagauc

SEQ ID NO: 302017 - RNA, 19 nt, Artificial Sequence
  Description of Artificial Sequence: Synthetic oligonucleotide
  Antisense strand to SEQ ID NO: 302016
gaucuuggaggccaagcau

SEQ ID NO: 302018 - RNA, 19 nt, Artificial Sequence
  Description of Artificial Sequence: Synthetic oligonucleotide
  Sense strand starting at position 110 of SEQ ID NO: 3879
agagcugggccucagagaa

SEQ ID NO: 302019 - RNA, 19 nt, Artificial Sequence
  Description of Artificial Sequence: Synthetic oligonucleotide
  Antisense strand to SEQ ID NO: 302018
uucucugaggcccagcucu

SEQ ID NO: 302020 - RNA, 19 nt, Artificial Sequence
  Description of Artificial Sequence: Synthetic oligonucleotide
  Sense strand starting at position 219 of SEQ ID NO: 3879
ccuguucugccagaggaca

SEQ ID NO: 302021 - RNA, 19 nt, Artificial Sequence
  Description of Artificial Sequence: Synthetic oligonucleotide
  Antisense strand to SEQ ID NO: 302020
uguccucuggcagaacagg

SEQ ID NO: 302022 - RNA, 19 nt, Artificial Sequence
  Description of Artificial Sequence: Synthetic oligonucleotide
  Sense strand starting at position 319 of SEQ ID NO: 3879
ggaaguccuuuccucaaga

SEQ ID NO: 302023 - RNA, 19 nt, Artificial Sequence
  Description of Artificial Sequence: Synthetic oligonucleotide
  Antisense strand to SEQ ID NO: 302022
ucuugaggaaaggacuucc

SEQ ID NO: 302024 - RNA, 19 nt, Artificial Sequence
  Description of Artificial Sequence: Synthetic oligonucleotide
  Sense strand starting at position 320 of SEQ ID NO: 3879
gaaguccuuuccucaagag

SEQ ID NO: 302025 - RNA, 19 nt, Artificial Sequence
  Description of Artificial Sequence: Synthetic oligonucleotide
  Antisense strand to SEQ ID NO: 302024
cucuugaggaaaggacuuc

SEQ ID NO: 302026 - RNA, 19 nt, Artificial Sequence
  Description of Artificial Sequence: Synthetic oligonucleotide
  Sense strand starting at position 342 of SEQ ID NO: 3879
gggugcaaacuuugcauuu

SEQ ID NO: 302027 - RNA, 19 nt, Artificial Sequence
  Description of Artificial Sequence: Synthetic oligonucleotide
  Antisense strand to SEQ ID NO: 302026
aaaugcaaaguuugcaccc

SEQ ID NO: 302028 - RNA, 19 nt, Artificial Sequence
  Description of Artificial Sequence: Synthetic oligonucleotide
  Sense strand starting at position 423 of SEQ ID NO: 3879
uagguauugccuccgccua

SEQ ID NO: 302029 - RNA, 19 nt, Artificial Sequence
  Description of Artificial Sequence: Synthetic oligonucleotide
  Antisense strand to SEQ ID NO: 302028
uaggcggaggcaauaccua

SEQ ID NO: 302030 - RNA, 19 nt, Artificial Sequence
  Description of Artificial Sequence: Synthetic oligonucleotide
  Sense strand starting at position 1040 of SEQ ID NO: 3879
agauaagaucugugacauu

SEQ ID NO: 302031 - RNA, 19 nt, Artificial Sequence
  Description of Artificial Sequence: Synthetic oligonucleotide
  Antisense strand to SEQ ID NO: 302030
aaugucacagaucuuaucu

SEQ ID NO: 302032 - RNA, 19 nt, Artificial Sequence
  Description of Artificial Sequence: Synthetic oligonucleotide
  Sense strand starting at position 1366 of SEQ ID NO: 3879
uggugucuuggcguauuga

SEQ ID NO: 302033 - RNA, 19 nt, Artificial Sequence
  Description of Artificial Sequence: Synthetic oligonucleotide
  Antisense strand to SEQ ID NO: 302032
ucaauacgccaagacacca

SEQ ID NO: 302034 - RNA, 19 nt, Artificial Sequence
  Description of Artificial Sequence: Synthetic oligonucleotide
  Sense strand starting at position 1420 of SEQ ID NO: 3879
guuacauaaucauucugga

SEQ ID NO: 302035 - RNA, 19 nt, Artificial Sequence
  Description of Artificial Sequence: Synthetic oligonucleotide
  Antisense strand to SEQ ID NO: 302034
uccagaaugauuauguaac

SEQ ID NO: 302036 - RNA, 19 nt, Artificial Sequence
  Description of Artificial Sequence: Synthetic oligonucleotide
  Sense strand starting at position 1518 of SEQ ID NO: 3879
uugguaaauggccagaguu

SEQ ID NO: 302037 - RNA, 19 nt, Artificial Sequence
  Description of Artificial Sequence: Synthetic oligonucleotide
  Antisense strand to SEQ ID NO: 302036
aacucuggccauuuaccaa

SEQ ID NO: 302038 - RNA, 19 nt, Artificial Sequence
  Description of Artificial Sequence: Synthetic oligonucleotide
  Sense strand starting at position 1520 of SEQ ID NO: 3879
gguaaauggccagaguuag

SEQ ID NO: 302039 - RNA, 19 nt, Artificial Sequence
  Description of Artificial Sequence: Synthetic oligonucleotide
  Antisense strand to SEQ ID NO: 302038
cuaacucuggccauuuacc

SEQ ID NO: 302040 - RNA, 19 nt, Artificial Sequence
  Description of Artificial Sequence: Synthetic oligonucleotide
  Sense strand starting at position 1528 of SEQ ID NO: 3879
gccagaguuaggcaaagga

SEQ ID NO: 302041 - RNA, 19 nt, Artificial Sequence
  Description of Artificial Sequence: Synthetic oligonucleotide
  Antisense strand to SEQ ID NO: 302040
uccuuugccuaacucuggc

SEQ ID NO: 302042 - RNA, 19 nt, Artificial Sequence
  Description of Artificial Sequence: Synthetic oligonucleotide
  Sense strand starting at position 1592 of SEQ ID NO: 3879
cccguauaucuggagccaa

SEQ ID NO: 302043 - RNA, 19 nt, Artificial Sequence
  Description of Artificial Sequence: Synthetic oligonucleotide
  Antisense strand to SEQ ID NO: 302042
uuggcuccagauauacggg

SEQ ID NO: 302044 - RNA, 19 nt, Artificial Sequence
  Description of Artificial Sequence: Synthetic oligonucleotide
  Sense strand starting at position 1855 of SEQ ID NO: 3879
ucaagaugucaccgggauu

SEQ ID NO: 302045 - RNA, 19 nt, Artificial Sequence
  Description of Artificial Sequence: Synthetic oligonucleotide
  Antisense strand to SEQ ID NO: 302044
aaucccggugacaucuuga

SEQ ID NO: 302046 - RNA, 19 nt, Artificial Sequence
  Description of Artificial Sequence: Synthetic oligonucleotide
  Sense strand starting at position 1856 of SEQ ID NO: 3879
caagaugucaccgggauug

SEQ ID NO: 302047 - RNA, 19 nt, Artificial Sequence
  Description of Artificial Sequence: Synthetic oligonucleotide
  Antisense strand to SEQ ID NO: 302046
caaucccggugacaucuug

SEQ ID NO: 302048 - RNA, 19 nt, Artificial Sequence
  Description of Artificial Sequence: Synthetic oligonucleotide
  Sense strand starting at position 1858 of SEQ ID NO: 3879
agaugucaccgggauuggu

SEQ ID NO: 302049 - RNA, 19 nt, Artificial Sequence
  Description of Artificial Sequence: Synthetic oligonucleotide
  Antisense strand to SEQ ID NO: 302048
accaaucccggugacaucu

SEQ ID NO: 302050 - RNA, 19 nt, Artificial Sequence
  Description of Artificial Sequence: Synthetic oligonucleotide
  Sense strand starting at position 1868 of SEQ ID NO: 3879
gggauugguucuuccugga

SEQ ID NO: 302051 - RNA, 19 nt, Artificial Sequence
  Description of Artificial Sequence: Synthetic oligonucleotide
  Antisense strand to SEQ ID NO: 302050
uccaggaagaaccaauccc

SEQ ID NO: 302052 - RNA, 19 nt, Artificial Sequence
  Description of Artificial Sequence: Synthetic oligonucleotide
  Sense strand starting at position 1998 of SEQ ID NO: 3879
cuucuaggacacugaucau

SEQ ID NO: 302053 - RNA, 19 nt, Artificial Sequence
  Description of Artificial Sequence: Synthetic oligonucleotide
  Antisense strand to SEQ ID NO: 302052
augaucaguguccuagaag

SEQ ID NO: 302054 - RNA, 19 nt, Artificial Sequence
  Description of Artificial Sequence: Synthetic oligonucleotide
  Sense strand starting at position 2004 of SEQ ID NO: 3879
ggacacugaucauugcauu

SEQ ID NO: 302055 - RNA, 19 nt, Artificial Sequence
  Description of Artificial Sequence: Synthetic oligonucleotide
  Antisense strand to SEQ ID NO: 302054
aaugcaaugaucagugucc

SEQ ID NO: 302056 - RNA, 19 nt, Artificial Sequence
  Description of Artificial Sequence: Synthetic oligonucleotide
  Sense strand starting at position 2031 of SEQ ID NO: 3879
gcccuaacccaguaugauc

SEQ ID NO: 302057 - RNA, 19 nt, Artificial Sequence
  Description of Artificial Sequence: Synthetic oligonucleotide
  Antisense strand to SEQ ID NO: 302056
gaucauacuggguuagggc

SEQ ID NO: 302058 - RNA, 19 nt, Artificial Sequence
  Description of Artificial Sequence: Synthetic oligonucleotide
  Sense strand starting at position 2381 of SEQ ID NO: 3879
augauaucaccuuguacau

SEQ ID NO: 302059 - RNA, 19 nt, Artificial Sequence
  Description of Artificial Sequence: Synthetic oligonucleotide
  Antisense strand to SEQ ID NO: 302058
auguacaaggugauaucau

SEQ ID NO: 302060 - RNA, 19 nt, Artificial Sequence
  Description of Artificial Sequence: Synthetic oligonucleotide
  Sense strand starting at position 2799 of SEQ ID NO: 3879
uugacuaugguaugaauau

SEQ ID NO: 302061 - RNA, 19 nt, Artificial Sequence
  Description of Artificial Sequence: Synthetic oligonucleotide
  Antisense strand to SEQ ID NO: 302060
auauucauaccauagucaa

SEQ ID NO: 302062 - RNA, 19 nt, Artificial Sequence
  Description of Artificial Sequence: Synthetic oligonucleotide
  Sense strand starting at position 2806 of SEQ ID NO: 3879
ugguaugaauaucccauaa

SEQ ID NO: 302063 - RNA, 19 nt, Artificial Sequence
  Description of Artificial Sequence: Synthetic oligonucleotide
  Antisense strand to SEQ ID NO: 302062
uuaugggauauucauacca

SEQ ID NO: 302064 - RNA, 19 nt, Artificial Sequence
  Description of Artificial Sequence: Synthetic oligonucleotide
  Sense strand starting at position 2894 of SEQ ID NO: 3879
uuaugaacauccuuggaug

SEQ ID NO: 302065 - RNA, 19 nt, Artificial Sequence
  Description of Artificial Sequence: Synthetic oligonucleotide
  Antisense strand to SEQ ID NO: 302064
cauccaaggauguucauaa

SEQ ID NO: 302066 - RNA, 19 nt, Artificial Sequence
  Description of Artificial Sequence: Synthetic oligonucleotide
  Sense strand starting at position 2927 of SEQ ID NO: 3879
uuauacacaugugugagaa

SEQ ID NO: 302067 - RNA, 19 nt, Artificial Sequence
  Description of Artificial Sequence: Synthetic oligonucleotide
  Antisense strand to SEQ ID NO: 302066
uucucacacauguguauaa

SEQ ID NO: 302068 - RNA, 19 nt, Artificial Sequence
  Description of Artificial Sequence: Synthetic oligonucleotide
  Sense strand starting at position 2928 of SEQ ID NO: 3879
uauacacaugugugagaau

SEQ ID NO: 302069 - RNA, 19 nt, Artificial Sequence
  Description of Artificial Sequence: Synthetic oligonucleotide
  Antisense strand to SEQ ID NO: 302068
auucucacacauguguaua

SEQ ID NO: 302070 - RNA, 19 nt, Artificial Sequence
  Description of Artificial Sequence: Synthetic oligonucleotide
  Sense strand starting at position 2996 of SEQ ID NO: 3879
cuuucuauucuuuggaaga

SEQ ID NO: 302071 - RNA, 19 nt, Artificial Sequence
  Description of Artificial Sequence: Synthetic oligonucleotide
  Antisense strand to SEQ ID NO: 302070
ucuuccaaagaauagaaag

SEQ ID NO: 302072 - RNA, 19 nt, Artificial Sequence
  Description of Artificial Sequence: Synthetic oligonucleotide
  Sense strand starting at position 3054 of SEQ ID NO: 3879
cuaacacuggguuguaaau

SEQ ID NO: 302073 - RNA, 19 nt, Artificial Sequence
  Description of Artificial Sequence: Synthetic oligonucleotide
  Antisense strand to SEQ ID NO: 302072
auuuacaacccaguguuag

SEQ ID NO: 302074 - RNA, 19 nt, Artificial Sequence
  Description of Artificial Sequence: Synthetic oligonucleotide
  Sense strand starting at position 3061 of SEQ ID NO: 3879
uggguuguaaauugaguga

SEQ ID NO: 302075 - RNA, 19 nt, Artificial Sequence
  Description of Artificial Sequence: Synthetic oligonucleotide
  Antisense strand to SEQ ID NO: 302074
ucacucaauuuacaaccca

SEQ ID NO: 302076 - RNA, 19 nt, Artificial Sequence
  Description of Artificial Sequence: Synthetic oligonucleotide
  Sense strand starting at position 3212 of SEQ ID NO: 3879
auguuaggacuaugauugu

SEQ ID NO: 302077 - RNA, 19 nt, Artificial Sequence
  Description of Artificial Sequence: Synthetic oligonucleotide
  Antisense strand to SEQ ID NO: 302076
acaaucauaguccuaacau

SEQ ID NO: 302078 - RNA, 19 nt, Artificial Sequence
  Description of Artificial Sequence: Synthetic oligonucleotide
  Sense strand starting at position 3372 of SEQ ID NO: 3879
uugugccuccuguauauuu

SEQ ID NO: 302079 - RNA, 19 nt, Artificial Sequence
  Description of Artificial Sequence: Synthetic oligonucleotide
  Antisense strand to SEQ ID NO: 302078
aaauauacaggaggcacaa

SEQ ID NO: 302080 - RNA, 19 nt, Artificial Sequence
  Description of Artificial Sequence: Synthetic oligonucleotide
  Sense strand starting at position 3826 of SEQ ID NO: 3879
uuugguauuucucuucuuu

SEQ ID NO: 302081 - RNA, 19 nt, Artificial Sequence
  Description of Artificial Sequence: Synthetic oligonucleotide
  Antisense strand to SEQ ID NO: 302080
aaagaagagaaauaccaaa

SEQ ID NO: 302082 - RNA, 19 nt, Artificial Sequence
  Description of Artificial Sequence: Synthetic oligonucleotide
  Sense strand starting at position 3932 of SEQ ID NO: 3879
ggguacuauuuauauauga

SEQ ID NO: 302083 - RNA, 19 nt, Artificial Sequence
  Description of Artificial Sequence: Synthetic oligonucleotide
  Antisense strand to SEQ ID NO: 302082
ucauauauaaauaguaccc

SEQ ID NO: 302084 - RNA, 19 nt, Artificial Sequence
  Description of Artificial Sequence: Synthetic oligonucleotide
  Sense strand starting at position 3965 of SEQ ID NO: 3879
ugguucgaauucucuagaa

SEQ ID NO: 302085 - RNA, 19 nt, Artificial Sequence
  Description of Artificial Sequence: Synthetic oligonucleotide
  Antisense strand to SEQ ID NO: 302084
uucuagagaauucgaacca

SEQ ID NO: 302086 - RNA, 19 nt, Artificial Sequence
  Description of Artificial Sequence: Synthetic oligonucleotide
  Sense strand starting at position 3967 of SEQ ID NO: 3879
guucgaauucucuagaagu

SEQ ID NO: 302087 - RNA, 19 nt, Artificial Sequence
  Description of Artificial Sequence: Synthetic oligonucleotide
  Antisense strand to SEQ ID NO: 302086
acuucuagagaauucgaac

SEQ ID NO: 302088 - RNA, 19 nt, Artificial Sequence
  Description of Artificial Sequence: Synthetic oligonucleotide
  Sense strand starting at position 3969 of SEQ ID NO: 3879
ucgaauucucuagaaguuu

SEQ ID NO: 302089 - RNA, 19 nt, Artificial Sequence
  Description of Artificial Sequence: Synthetic oligonucleotide
  Antisense strand to SEQ ID NO: 302088
aaacuucuagagaauucga

SEQ ID NO: 302090 - RNA, 19 nt, Artificial Sequence
  Description of Artificial Sequence: Synthetic oligonucleotide
  Sense strand starting at position 3975 of SEQ ID NO: 3879
ucucuagaaguuuacugau

SEQ ID NO: 302091 - RNA, 19 nt, Artificial Sequence
  Description of Artificial Sequence: Synthetic oligonucleotide
  Antisense strand to SEQ ID NO: 302090
aucaguaaacuucuagaga

SEQ ID NO: 302092 - RNA, 19 nt, Artificial Sequence
  Description of Artificial Sequence: Synthetic oligonucleotide
  Sense strand starting at position 1158 of SEQ ID NO: 3882
ucuagugggaggugugaaa

SEQ ID NO: 302093 - RNA, 19 nt, Artificial Sequence
  Description of Artificial Sequence: Synthetic oligonucleotide
  Antisense strand to SEQ ID NO: 302092
uuucacaccucccacuaga

SEQ ID NO: 302094 - RNA, 19 nt, Artificial Sequence
  Description of Artificial Sequence: Synthetic oligonucleotide
  Sense strand starting at position 1180 of SEQ ID NO: 3882
guccuugaguuggagcaga

SEQ ID NO: 302095 - RNA, 19 nt, Artificial Sequence
  Description of Artificial Sequence: Synthetic oligonucleotide
  Antisense strand to SEQ ID NO: 302094
ucugcuccaacucaaggac

SEQ ID NO: 302096 - RNA, 19 nt, Artificial Sequence
  Description of Artificial Sequence: Synthetic oligonucleotide
  Sense strand starting at position 1194 of SEQ ID NO: 3882
gcagaaagcuaagaaauga

SEQ ID NO: 302097 - RNA, 19 nt, Artificial Sequence
  Description of Artificial Sequence: Synthetic oligonucleotide
  Antisense strand to SEQ ID NO: 302096
ucauuucuuagcuuucugc

SEQ ID NO: 302098 - RNA, 19 nt, Artificial Sequence
  Description of Artificial Sequence: Synthetic oligonucleotide
  Sense strand starting at position 2352 of SEQ ID NO: 3882
gauggauccuucuggccaa

SEQ ID NO: 302099 - RNA, 19 nt, Artificial Sequence
  Description of Artificial Sequence: Synthetic oligonucleotide
  Antisense strand to SEQ ID NO: 302098
uuggccagaaggauccauc

SEQ ID NO: 302100 - RNA, 19 nt, Artificial Sequence
  Description of Artificial Sequence: Synthetic oligonucleotide
  Sense strand starting at position 2392 of SEQ ID NO: 3882
ccgccuaaaugcucucgaa

SEQ ID NO: 302101 - RNA, 19 nt, Artificial Sequence
  Description of Artificial Sequence: Synthetic oligonucleotide
  Antisense strand to SEQ ID NO: 302100
uucgagagcauuuaggcgg

SEQ ID NO: 302102 - RNA, 19 nt, Artificial Sequence
  Description of Artificial Sequence: Synthetic oligonucleotide
  Sense strand starting at position 2395 of SEQ ID NO: 3882
ccuaaaugcucucgaagac

SEQ ID NO: 302103 - RNA, 19 nt, Artificial Sequence
  Description of Artificial Sequence: Synthetic oligonucleotide
  Antisense strand to SEQ ID NO: 302102
gucuucgagagcauuuagg

SEQ ID NO: 302104 - RNA, 19 nt, Artificial Sequence
  Description of Artificial Sequence: Synthetic oligonucleotide
  Sense strand starting at position 2411 of SEQ ID NO: 3882
gaccaaaucucguuguggu

SEQ ID NO: 302105 - RNA, 19 nt, Artificial Sequence
  Description of Artificial Sequence: Synthetic oligonucleotide
  Antisense strand to SEQ ID NO: 302104
accacaacgagauuugguc

SEQ ID NO: 302106 - RNA, 19 nt, Artificial Sequence
  Description of Artificial Sequence: Synthetic oligonucleotide
  Sense strand starting at position 2412 of SEQ ID NO: 3882
accaaaucucguugugguu

SEQ ID NO: 302107 - RNA, 19 nt, Artificial Sequence
  Description of Artificial Sequence: Synthetic oligonucleotide
  Antisense strand to SEQ ID NO: 302106
aaccacaacgagauuuggu

SEQ ID NO: 302108 - RNA, 19 nt, Artificial Sequence
  Description of Artificial Sequence: Synthetic oligonucleotide
  Sense strand starting at position 2611 of SEQ ID NO: 3882
gguaauugguguccugugu

SEQ ID NO: 302109 - RNA, 19 nt, Artificial Sequence
  Description of Artificial Sequence: Synthetic oligonucleotide
  Antisense strand to SEQ ID NO: 302108
acacaggacaccaauuacc

SEQ ID NO: 302110 - RNA, 19 nt, Artificial Sequence
  Description of Artificial Sequence: Synthetic oligonucleotide
  Sense strand starting at position 2620 of SEQ ID NO: 3882
uguccuguguuuccuagaa

SEQ ID NO: 302111 - RNA, 19 nt, Artificial Sequence
  Description of Artificial Sequence: Synthetic oligonucleotide
  Antisense strand to SEQ ID NO: 302110
uucuaggaaacacaggaca

SEQ ID NO: 302112 - RNA, 19 nt, Artificial Sequence
  Description of Artificial Sequence: Synthetic oligonucleotide
  Sense strand starting at position 2622 of SEQ ID NO: 3882
uccuguguuuccuagaauu

SEQ ID NO: 302113 - RNA, 19 nt, Artificial Sequence
  Description of Artificial Sequence: Synthetic oligonucleotide
  Antisense strand to SEQ ID NO: 302112
aauucuaggaaacacagga

SEQ ID NO: 302114 - RNA, 19 nt, Artificial Sequence
  Description of Artificial Sequence: Synthetic oligonucleotide
  Sense strand starting at position 2743 of SEQ ID NO: 3882
gggaguccucaaugcagga

SEQ ID NO: 302115 - RNA, 19 nt, Artificial Sequence
  Description of Artificial Sequence: Synthetic oligonucleotide
  Antisense strand to SEQ ID NO: 302114
uccugcauugaggacuccc

SEQ ID NO: 302116 - RNA, 19 nt, Artificial Sequence
  Description of Artificial Sequence: Synthetic oligonucleotide
  Sense strand starting at position 2771 of SEQ ID NO: 3882
uccauucugugccuaggaa

SEQ ID NO: 302117 - RNA, 19 nt, Artificial Sequence
  Description of Artificial Sequence: Synthetic oligonucleotide
  Antisense strand to SEQ ID NO: 302116
uuccuaggcacagaaugga

SEQ ID NO: 302118 - RNA, 19 nt, Artificial Sequence
  Description of Artificial Sequence: Synthetic oligonucleotide
  Sense strand starting at position 2784 of SEQ ID NO: 3882
uaggaagucuguucucaca

SEQ ID NO: 302119 - RNA, 19 nt, Artificial Sequence
  Description of Artificial Sequence: Synthetic oligonucleotide
  Antisense strand to SEQ ID NO: 302118
ugugagaacagacuuccua

SEQ ID NO: 302120 - RNA, 19 nt, Artificial Sequence
  Description of Artificial Sequence: Synthetic oligonucleotide
  Sense strand starting at position 2786 of SEQ ID NO: 3882
ggaagucuguucucacacu

SEQ ID NO: 302121 - RNA, 19 nt, Artificial Sequence
  Description of Artificial Sequence: Synthetic oligonucleotide
  Antisense strand to SEQ ID NO: 302120
agugugagaacagacuucc

SEQ ID NO: 302122 - RNA, 19 nt, Artificial Sequence
  Description of Artificial Sequence: Synthetic oligonucleotide
  Sense strand starting at position 2884 of SEQ ID NO: 3882
gccgccuuguuucccauaa

SEQ ID NO: 302123 - RNA, 19 nt, Artificial Sequence
  Description of Artificial Sequence: Synthetic oligonucleotide
  Antisense strand to SEQ ID NO: 302122
uuaugggaaacaaggcggc

SEQ ID NO: 302124 - RNA, 19 nt, Artificial Sequence
  Description of Artificial Sequence: Synthetic oligonucleotide
  Sense strand starting at position 2885 of SEQ ID NO: 3882
ccgccuuguuucccauaaa

SEQ ID NO: 302125 - RNA, 19 nt, Artificial Sequence
  Description of Artificial Sequence: Synthetic oligonucleotide
  Antisense strand to SEQ ID NO: 302124
uuuaugggaaacaaggcgg

SEQ ID NO: 302126 - RNA, 19 nt, Artificial Sequence
  Description of Artificial Sequence: Synthetic oligonucleotide
  Sense strand starting at position 2886 of SEQ ID NO: 3882
cgccuuguuucccauaaac

SEQ ID NO: 302127 - RNA, 19 nt, Artificial Sequence
  Description of Artificial Sequence: Synthetic oligonucleotide
  Antisense strand to SEQ ID NO: 302126
guuuaugggaaacaaggcg

SEQ ID NO: 302128 - RNA, 19 nt, Artificial Sequence
  Description of Artificial Sequence: Synthetic oligonucleotide
  Sense strand starting at position 2985 of SEQ ID NO: 3882
ccuugugaccucuggccau

SEQ ID NO: 302129 - RNA, 19 nt, Artificial Sequence
  Description of Artificial Sequence: Synthetic oligonucleotide
  Antisense strand to SEQ ID NO: 302128
auggccagaggucacaagg

SEQ ID NO: 302130 - RNA, 19 nt, Artificial Sequence
  Description of Artificial Sequence: Synthetic oligonucleotide
  Sense strand starting at position 2989 of SEQ ID NO: 3882
gugaccucuggccaugaau

SEQ ID NO: 302131 - RNA, 19 nt, Artificial Sequence
  Description of Artificial Sequence: Synthetic oligonucleotide
  Antisense strand to SEQ ID NO: 302130
auucauggccagaggucac

SEQ ID NO: 302132 - RNA, 19 nt, Artificial Sequence
  Description of Artificial Sequence: Synthetic oligonucleotide
  Sense strand starting at position 3023 of SEQ ID NO: 3882
gcgugaacucugcguccuu

SEQ ID NO: 302133 - RNA, 19 nt, Artificial Sequence
  Description of Artificial Sequence: Synthetic oligonucleotide
  Antisense strand to SEQ ID NO: 302132
aaggacgcagaguucacgc

SEQ ID NO: 302134 - RNA, 19 nt, Artificial Sequence
  Description of Artificial Sequence: Synthetic oligonucleotide
  Sense strand starting at position 3117 of SEQ ID NO: 3882
cgcgguaaucggguuagcu

SEQ ID NO: 302135 - RNA, 19 nt, Artificial Sequence
  Description of Artificial Sequence: Synthetic oligonucleotide
  Antisense strand to SEQ ID NO: 302134
agcuaacccgauuaccgcg

SEQ ID NO: 302136 - RNA, 19 nt, Artificial Sequence
  Description of Artificial Sequence: Synthetic oligonucleotide
  Sense strand starting at position 3118 of SEQ ID NO: 3882
gcgguaaucggguuagcug

SEQ ID NO: 302137 - RNA, 19 nt, Artificial Sequence
  Description of Artificial Sequence: Synthetic oligonucleotide
  Antisense strand to SEQ ID NO: 302136
cagcuaacccgauuaccgc

SEQ ID NO: 302138 - RNA, 19 nt, Artificial Sequence
  Description of Artificial Sequence: Synthetic oligonucleotide
  Sense strand starting at position 3129 of SEQ ID NO: 3882
guuagcugggccggaauua

SEQ ID NO: 302139 - RNA, 19 nt, Artificial Sequence
  Description of Artificial Sequence: Synthetic oligonucleotide
  Antisense strand to SEQ ID NO: 302138
uaauuccggcccagcuaac

SEQ ID NO: 302140 - RNA, 19 nt, Artificial Sequence
  Description of Artificial Sequence: Synthetic oligonucleotide
  Sense strand starting at position 3393 of SEQ ID NO: 3882
accgaaaugcuuuguaagu

SEQ ID NO: 302141 - RNA, 19 nt, Artificial Sequence
  Description of Artificial Sequence: Synthetic oligonucleotide
  Antisense strand to SEQ ID NO: 302140
acuuacaaagcauuucggu

SEQ ID NO: 302142 - RNA, 19 nt, Artificial Sequence
  Description of Artificial Sequence: Synthetic oligonucleotide
  Sense strand starting at position 3394 of SEQ ID NO: 3882
ccgaaaugcuuuguaaguc

SEQ ID NO: 302143 - RNA, 19 nt, Artificial Sequence
  Description of Artificial Sequence: Synthetic oligonucleotide
  Antisense strand to SEQ ID NO: 302142
gacuuacaaagcauuucgg

SEQ ID NO: 302144 - RNA, 19 nt, Artificial Sequence
  Description of Artificial Sequence: Synthetic oligonucleotide
  Sense strand starting at position 3395 of SEQ ID NO: 3882
cgaaaugcuuuguaagucu

SEQ ID NO: 302145 - RNA, 19 nt, Artificial Sequence
  Description of Artificial Sequence: Synthetic oligonucleotide
  Antisense strand to SEQ ID NO: 302144
agacuuacaaagcauuucg

SEQ ID NO: 302146 - RNA, 19 nt, Artificial Sequence
  Description of Artificial Sequence: Synthetic oligonucleotide
  Sense strand starting at position 3578 of SEQ ID NO: 3882
ggcaucugggcagaaagau

SEQ ID NO: 302147 - RNA, 19 nt, Artificial Sequence
  Description of Artificial Sequence: Synthetic oligonucleotide
  Antisense strand to SEQ ID NO: 302146
aucuuucugcccagaugcc

SEQ ID NO: 302148 - RNA, 19 nt, Artificial Sequence
  Description of Artificial Sequence: Synthetic oligonucleotide
  Sense strand starting at position 3698 of SEQ ID NO: 3882
ggaggaauagugggcauua

SEQ ID NO: 302149 - RNA, 19 nt, Artificial Sequence
  Description of Artificial Sequence: Synthetic oligonucleotide
  Antisense strand to SEQ ID NO: 302148
uaaugcccacuauuccucc

SEQ ID NO: 302150 - RNA, 19 nt, Artificial Sequence
  Description of Artificial Sequence: Synthetic oligonucleotide
  Sense strand starting at position 3699 of SEQ ID NO: 3882
gaggaauagugggcauuaa

SEQ ID NO: 302151 - RNA, 19 nt, Artificial Sequence
  Description of Artificial Sequence: Synthetic oligonucleotide
  Antisense strand to SEQ ID NO: 302150
uuaaugcccacuauuccuc

SEQ ID NO: 302152 - RNA, 19 nt, Artificial Sequence
  Description of Artificial Sequence: Synthetic oligonucleotide
  Sense strand starting at position 3708 of SEQ ID NO: 3882
ugggcauuaauauguguca

SEQ ID NO: 302153 - RNA, 19 nt, Artificial Sequence
  Description of Artificial Sequence: Synthetic oligonucleotide
  Antisense strand to SEQ ID NO: 302152
ugacacauauuaaugccca

SEQ ID NO: 302154 - RNA, 19 nt, Artificial Sequence
  Description of Artificial Sequence: Synthetic oligonucleotide
  Sense strand starting at position 3709 of SEQ ID NO: 3882
gggcauuaauaugugucaa

SEQ ID NO: 302155 - RNA, 19 nt, Artificial Sequence
  Description of Artificial Sequence: Synthetic oligonucleotide
  Antisense strand to SEQ ID NO: 302154
uugacacauauuaaugccc

SEQ ID NO: 302156 - RNA, 19 nt, Artificial Sequence
  Description of Artificial Sequence: Synthetic oligonucleotide
  Sense strand starting at position 17 of SEQ ID NO: 3883
agccuucuacagggaagaa

SEQ ID NO: 302157 - RNA, 19 nt, Artificial Sequence
  Description of Artificial Sequence: Synthetic oligonucleotide
  Antisense strand to SEQ ID NO: 302156
uucuucccuguagaaggcu

SEQ ID NO: 302158 - RNA, 19 nt, Artificial Sequence
  Description of Artificial Sequence: Synthetic oligonucleotide
  Sense strand starting at position 190 of SEQ ID NO: 3883
aggaacagauucuuuguga

SEQ ID NO: 302159 - RNA, 19 nt, Artificial Sequence
  Description of Artificial Sequence: Synthetic oligonucleotide
  Antisense strand to SEQ ID NO: 302158
ucacaaagaaucuguuccu

SEQ ID NO: 302160 - RNA, 19 nt, Artificial Sequence
  Description of Artificial Sequence: Synthetic oligonucleotide
  Sense strand starting at position 191 of SEQ ID NO: 3883
ggaacagauucuuugugau

SEQ ID NO: 302161 - RNA, 19 nt, Artificial Sequence
  Description of Artificial Sequence: Synthetic oligonucleotide
  Antisense strand to SEQ ID NO: 302160
aucacaaagaaucuguucc

SEQ ID NO: 302162 - RNA, 19 nt, Artificial Sequence
  Description of Artificial Sequence: Synthetic oligonucleotide
  Sense strand starting at position 198 of SEQ ID NO: 3883
auucuuugugaugguaaag

SEQ ID NO: 302163 - RNA, 19 nt, Artificial Sequence
  Description of Artificial Sequence: Synthetic oligonucleotide
  Antisense strand to SEQ ID NO: 302162
cuuuaccaucacaaagaau

SEQ ID NO: 302164 - RNA, 19 nt, Artificial Sequence
  Description of Artificial Sequence: Synthetic oligonucleotide
  Sense strand starting at position 240 of SEQ ID NO: 3883
ggauaauaccagcagcagu

SEQ ID NO: 302165 - RNA, 19 nt, Artificial Sequence
  Description of Artificial Sequence: Synthetic oligonucleotide
  Antisense strand to SEQ ID NO: 302164
acugcugcugguauuaucc

SEQ ID NO: 302166 - RNA, 19 nt, Artificial Sequence
  Description of Artificial Sequence: Synthetic oligonucleotide
  Sense strand starting at position 253 of SEQ ID NO: 3883
agcaguaacugaucauaau

SEQ ID NO: 302167 - RNA, 19 nt, Artificial Sequence
  Description of Artificial Sequence: Synthetic oligonucleotide
  Antisense strand to SEQ ID NO: 302166
auuaugaucaguuacugcu

SEQ ID NO: 302168 - RNA, 19 nt, Artificial Sequence
  Description of Artificial Sequence: Synthetic oligonucleotide
  Sense strand starting at position 254 of SEQ ID NO: 3883
gcaguaacugaucauaauu

SEQ ID NO: 302169 - RNA, 19 nt, Artificial Sequence
  Description of Artificial Sequence: Synthetic oligonucleotide
  Antisense strand to SEQ ID NO: 302168
aauuaugaucaguuacugc

SEQ ID NO: 302170 - RNA, 19 nt, Artificial Sequence
  Description of Artificial Sequence: Synthetic oligonucleotide
  Sense strand starting at position 441 of SEQ ID NO: 3883
acuuguaagcgggagguaa

SEQ ID NO: 302171 - RNA, 19 nt, Artificial Sequence
  Description of Artificial Sequence: Synthetic oligonucleotide
  Antisense strand to SEQ ID NO: 302170
uuaccucccgcuuacaagu

SEQ ID NO: 302172 - RNA, 19 nt, Artificial Sequence
  Description of Artificial Sequence: Synthetic oligonucleotide
  Sense strand starting at position 577 of SEQ ID NO: 3883
gcuuaauaucuggaugacg

SEQ ID NO: 302173 - RNA, 19 nt, Artificial Sequence
  Description of Artificial Sequence: Synthetic oligonucleotide
  Antisense strand to SEQ ID NO: 302172
cgucauccagauauuaagc

SEQ ID NO: 302174 - RNA, 19 nt, Artificial Sequence
  Description of Artificial Sequence: Synthetic oligonucleotide
  Sense strand starting at position 579 of SEQ ID NO: 3883
uuaauaucuggaugacgaa

SEQ ID NO: 302175 - RNA, 19 nt, Artificial Sequence
  Description of Artificial Sequence: Synthetic oligonucleotide
  Antisense strand to SEQ ID NO: 302174
uucgucauccagauauuaa

SEQ ID NO: 302176 - RNA, 19 nt, Artificial Sequence
  Description of Artificial Sequence: Synthetic oligonucleotide
  Sense strand starting at position 937 of SEQ ID NO: 3883
aaaugauuugcuugcagug

SEQ ID NO: 302177 - RNA, 19 nt, Artificial Sequence
  Description of Artificial Sequence: Synthetic oligonucleotide
  Antisense strand to SEQ ID NO: 302176
cacugcaagcaaaucauuu

SEQ ID NO: 302178 - RNA, 19 nt, Artificial Sequence
  Description of Artificial Sequence: Synthetic oligonucleotide
  Sense strand starting at position 942 of SEQ ID NO: 3883
auuugcuugcagugguaua

SEQ ID NO: 302179 - RNA, 19 nt, Artificial Sequence
  Description of Artificial Sequence: Synthetic oligonucleotide
  Antisense strand to SEQ ID NO: 302178
uauaccacugcaagcaaau

SEQ ID NO: 302180 - RNA, 19 nt, Artificial Sequence
  Description of Artificial Sequence: Synthetic oligonucleotide
  Sense strand starting at position 1340 of SEQ ID NO: 3883
ccaggcuagucaucauaca

SEQ ID NO: 302181 - RNA, 19 nt, Artificial Sequence
  Description of Artificial Sequence: Synthetic oligonucleotide
  Antisense strand to SEQ ID NO: 302180
uguaugaugacuagccugg

SEQ ID NO: 302182 - RNA, 19 nt, Artificial Sequence
  Description of Artificial Sequence: Synthetic oligonucleotide
  Sense strand starting at position 1358 of SEQ ID NO: 3883
augggaauguuucuacuca

SEQ ID NO: 302183 - RNA, 19 nt, Artificial Sequence
  Description of Artificial Sequence: Synthetic oligonucleotide
  Antisense strand to SEQ ID NO: 302182
ugaguagaaacauucccau

SEQ ID NO: 302184 - RNA, 19 nt, Artificial Sequence
  Description of Artificial Sequence: Synthetic oligonucleotide
  Sense strand starting at position 1411 of SEQ ID NO: 3883
uucuguaaauacuuagaga

SEQ ID NO: 302185 - RNA, 19 nt, Artificial Sequence
  Description of Artificial Sequence: Synthetic oligonucleotide
  Antisense strand to SEQ ID NO: 302184
ucucuaaguauuuacagaa

SEQ ID NO: 302186 - RNA, 19 nt, Artificial Sequence
  Description of Artificial Sequence: Synthetic oligonucleotide
  Sense strand starting at position 1506 of SEQ ID NO: 3883
gcccuaccuguacagaaau

SEQ ID NO: 302187 - RNA, 19 nt, Artificial Sequence
  Description of Artificial Sequence: Synthetic oligonucleotide
  Antisense strand to SEQ ID NO: 302186
auuucuguacagguagggc

SEQ ID NO: 302188 - RNA, 19 nt, Artificial Sequence
  Description of Artificial Sequence: Synthetic oligonucleotide
  Sense strand starting at position 1512 of SEQ ID NO: 3883
ccuguacagaaaugugaga

SEQ ID NO: 302189 - RNA, 19 nt, Artificial Sequence
  Description of Artificial Sequence: Synthetic oligonucleotide
  Antisense strand to SEQ ID NO: 302188
ucucacauuucuguacagg

SEQ ID NO: 302190 - RNA, 19 nt, Artificial Sequence
  Description of Artificial Sequence: Synthetic oligonucleotide
  Sense strand starting at position 1791 of SEQ ID NO: 3883
cuccuauaauuccugggaa

SEQ ID NO: 302191 - RNA, 19 nt, Artificial Sequence
  Description of Artificial Sequence: Synthetic oligonucleotide
  Antisense strand to SEQ ID NO: 302190
uucccaggaauuauaggag

SEQ ID NO: 302192 - RNA, 19 nt, Artificial Sequence
  Description of Artificial Sequence: Synthetic oligonucleotide
  Sense strand starting at position 1794 of SEQ ID NO: 3883
cuauaauuccugggaacca

SEQ ID NO: 302193 - RNA, 19 nt, Artificial Sequence
  Description of Artificial Sequence: Synthetic oligonucleotide
  Antisense strand to SEQ ID NO: 302192
ugguucccaggaauuauag

SEQ ID NO: 302194 - RNA, 19 nt, Artificial Sequence
  Description of Artificial Sequence: Synthetic oligonucleotide
  Sense strand starting at position 1876 of SEQ ID NO: 3883
agguaucgcauugagaacu

SEQ ID NO: 302195 - RNA, 19 nt, Artificial Sequence
  Description of Artificial Sequence: Synthetic oligonucleotide
  Antisense strand to SEQ ID NO: 302194
aguucucaaugcgauaccu

SEQ ID NO: 302196 - RNA, 19 nt, Artificial Sequence
  Description of Artificial Sequence: Synthetic oligonucleotide
  Sense strand starting at position 1920 of SEQ ID NO: 3883
ggcugaauccauugcagga

SEQ ID NO: 302197 - RNA, 19 nt, Artificial Sequence
  Description of Artificial Sequence: Synthetic oligonucleotide
  Antisense strand to SEQ ID NO: 302196
uccugcaauggauucagcc

SEQ ID NO: 302198 - RNA, 19 nt, Artificial Sequence
  Description of Artificial Sequence: Synthetic oligonucleotide
  Sense strand starting at position 2221 of SEQ ID NO: 3883
acgauaagcuccuuuaaua

SEQ ID NO: 302199 - RNA, 19 nt, Artificial Sequence
  Description of Artificial Sequence: Synthetic oligonucleotide
  Antisense strand to SEQ ID NO: 302198
uauuaaaggagcuuaucgu

SEQ ID NO: 302200 - RNA, 19 nt, Artificial Sequence
  Description of Artificial Sequence: Synthetic oligonucleotide
  Sense strand starting at position 2304 of SEQ ID NO: 3883
cuguucuaucgauauuauu

SEQ ID NO: 302201 - RNA, 19 nt, Artificial Sequence
  Description of Artificial Sequence: Synthetic oligonucleotide
  Antisense strand to SEQ ID NO: 302200
aauaauaucgauagaacag

SEQ ID NO: 302202 - RNA, 19 nt, Artificial Sequence
  Description of Artificial Sequence: Synthetic oligonucleotide
  Sense strand starting at position 2366 of SEQ ID NO: 3883
aaugaacacguaugagaug

SEQ ID NO: 302203 - RNA, 19 nt, Artificial Sequence
  Description of Artificial Sequence: Synthetic oligonucleotide
  Antisense strand to SEQ ID NO: 302202
caucucauacguguucauu

SEQ ID NO: 302204 - RNA, 19 nt, Artificial Sequence
  Description of Artificial Sequence: Synthetic oligonucleotide
  Sense strand starting at position 2373 of SEQ ID NO: 3883
acguaugagauguggagaa

SEQ ID NO: 302205 - RNA, 19 nt, Artificial Sequence
  Description of Artificial Sequence: Synthetic oligonucleotide
  Antisense strand to SEQ ID NO: 302204
uucuccacaucucauacgu

SEQ ID NO: 302206 - RNA, 19 nt, Artificial Sequence
  Description of Artificial Sequence: Synthetic oligonucleotide
  Sense strand starting at position 2392 of SEQ ID NO: 3883
agguauuuccucugcugca

SEQ ID NO: 302207 - RNA, 19 nt, Artificial Sequence
  Description of Artificial Sequence: Synthetic oligonucleotide
  Antisense strand to SEQ ID NO: 302206
ugcagcagaggaaauaccu

SEQ ID NO: 302208 - RNA, 19 nt, Artificial Sequence
  Description of Artificial Sequence: Synthetic oligonucleotide
  Sense strand starting at position 2393 of SEQ ID NO: 3883
gguauuuccucugcugcaa

SEQ ID NO: 302209 - RNA, 19 nt, Artificial Sequence
  Description of Artificial Sequence: Synthetic oligonucleotide
  Antisense strand to SEQ ID NO: 302208
uugcagcagaggaaauacc

SEQ ID NO: 302210 - RNA, 19 nt, Artificial Sequence
  Description of Artificial Sequence: Synthetic oligonucleotide
  Sense strand starting at position 2476 of SEQ ID NO: 3883
uccaguguugcagacuaac

SEQ ID NO: 302211 - RNA, 19 nt, Artificial Sequence
  Description of Artificial Sequence: Synthetic oligonucleotide
  Antisense strand to SEQ ID NO: 302210
guuagucugcaacacugga

SEQ ID NO: 302212 - RNA, 19 nt, Artificial Sequence
  Description of Artificial Sequence: Synthetic oligonucleotide
  Sense strand starting at position 2580 of SEQ ID NO: 3883
ugaggagauuaucauauuu

SEQ ID NO: 302213 - RNA, 19 nt, Artificial Sequence
  Description of Artificial Sequence: Synthetic oligonucleotide
  Antisense strand to SEQ ID NO: 302212
aaauaugauaaucuccuca

SEQ ID NO: 302214 - RNA, 19 nt, Artificial Sequence
  Description of Artificial Sequence: Synthetic oligonucleotide
  Sense strand starting at position 2682 of SEQ ID NO: 3883
uggugagcuccuugagaaa

SEQ ID NO: 302215 - RNA, 19 nt, Artificial Sequence
  Description of Artificial Sequence: Synthetic oligonucleotide
  Antisense strand to SEQ ID NO: 302214
uuucucaaggagcucacca

SEQ ID NO: 302216 - RNA, 19 nt, Artificial Sequence
  Description of Artificial Sequence: Synthetic oligonucleotide
  Sense strand starting at position 2701 of SEQ ID NO: 3883
agacuaucaguuggcauaa

SEQ ID NO: 302217 - RNA, 19 nt, Artificial Sequence
  Description of Artificial Sequence: Synthetic oligonucleotide
  Antisense strand to SEQ ID NO: 302216
uuaugccaacugauagucu

SEQ ID NO: 302218 - RNA, 19 nt, Artificial Sequence
  Description of Artificial Sequence: Synthetic oligonucleotide
  Sense strand starting at position 3085 of SEQ ID NO: 3883
ggucaugguaguuacugaa

SEQ ID NO: 302219 - RNA, 19 nt, Artificial Sequence
  Description of Artificial Sequence: Synthetic oligonucleotide
  Antisense strand to SEQ ID NO: 302218
uucaguaacuaccaugacc

SEQ ID NO: 302220 - RNA, 19 nt, Artificial Sequence
  Description of Artificial Sequence: Synthetic oligonucleotide
  Sense strand starting at position 3291 of SEQ ID NO: 3883
aguucaaguggguggaaau

SEQ ID NO: 302221 - RNA, 19 nt, Artificial Sequence
  Description of Artificial Sequence: Synthetic oligonucleotide
  Antisense strand to SEQ ID NO: 302220
auuuccacccacuugaacu

SEQ ID NO: 302222 - RNA, 19 nt, Artificial Sequence
  Description of Artificial Sequence: Synthetic oligonucleotide
  Sense strand starting at position 3292 of SEQ ID NO: 3883
guucaaguggguggaaaua

SEQ ID NO: 302223 - RNA, 19 nt, Artificial Sequence
  Description of Artificial Sequence: Synthetic oligonucleotide
  Antisense strand to SEQ ID NO: 302222
uauuuccacccacuugaac

SEQ ID NO: 302224 - RNA, 19 nt, Artificial Sequence
  Description of Artificial Sequence: Synthetic oligonucleotide
  Sense strand starting at position 3427 of SEQ ID NO: 3883
gcuguugggaauggugaaa

SEQ ID NO: 302225 - RNA, 19 nt, Artificial Sequence
  Description of Artificial Sequence: Synthetic oligonucleotide
  Antisense strand to SEQ ID NO: 302224
uuucaccauucccaacagc

SEQ ID NO: 302226 - RNA, 19 nt, Artificial Sequence
  Description of Artificial Sequence: Synthetic oligonucleotide
  Sense strand starting at position 3439 of SEQ ID NO: 3883
ggugaaauaauguaugcag

SEQ ID NO: 302227 - RNA, 19 nt, Artificial Sequence
  Description of Artificial Sequence: Synthetic oligonucleotide
  Antisense strand to SEQ ID NO: 302226
cugcauacauuauuucacc

SEQ ID NO: 302228 - RNA, 19 nt, Artificial Sequence
  Description of Artificial Sequence: Synthetic oligonucleotide
  Sense strand starting at position 3609 of SEQ ID NO: 3883
guuacuggaccucagugaa

SEQ ID NO: 302229 - RNA, 19 nt, Artificial Sequence
  Description of Artificial Sequence: Synthetic oligonucleotide
  Antisense strand to SEQ ID NO: 302228
uucacugagguccaguaac

SEQ ID NO: 302230 - RNA, 19 nt, Artificial Sequence
  Description of Artificial Sequence: Synthetic oligonucleotide
  Sense strand starting at position 3612 of SEQ ID NO: 3883
acuggaccucagugaaaug

SEQ ID NO: 302231 - RNA, 19 nt, Artificial Sequence
  Description of Artificial Sequence: Synthetic oligonucleotide
  Antisense strand to SEQ ID NO: 302230
cauuucacugagguccagu

SEQ ID NO: 302232 - RNA, 19 nt, Artificial Sequence
  Description of Artificial Sequence: Synthetic oligonucleotide
  Sense strand starting at position 3629 of SEQ ID NO: 3883
ugugaaauccuuuguauga

SEQ ID NO: 302233 - RNA, 19 nt, Artificial Sequence
  Description of Artificial Sequence: Synthetic oligonucleotide
  Antisense strand to SEQ ID NO: 302232
ucauacaaaggauuucaca

SEQ ID NO: 302234 - RNA, 19 nt, Artificial Sequence
  Description of Artificial Sequence: Synthetic oligonucleotide
  Sense strand starting at position 3630 of SEQ ID NO: 3883
gugaaauccuuuguaugaa

SEQ ID NO: 302235 - RNA, 19 nt, Artificial Sequence
  Description of Artificial Sequence: Synthetic oligonucleotide
  Antisense strand to SEQ ID NO: 302234
uucauacaaaggauuucac

SEQ ID NO: 302236 - RNA, 19 nt, Artificial Sequence
  Description of Artificial Sequence: Synthetic oligonucleotide
  Sense strand starting at position 129 of SEQ ID NO: 3884
gugggagcucauuaauauc

SEQ ID NO: 302237 - RNA, 19 nt, Artificial Sequence
  Description of Artificial Sequence: Synthetic oligonucleotide
  Antisense strand to SEQ ID NO: 302236
gauauuaaugagcucccac

SEQ ID NO: 302238 - RNA, 19 nt, Artificial Sequence
  Description of Artificial Sequence: Synthetic oligonucleotide
  Sense strand starting at position 185 of SEQ ID NO: 3884
ugucgacuucuggauauca

SEQ ID NO: 302239 - RNA, 19 nt, Artificial Sequence
  Description of Artificial Sequence: Synthetic oligonucleotide
  Antisense strand to SEQ ID NO: 302238
ugauauccagaagucgaca

SEQ ID NO: 302240 - RNA, 19 nt, Artificial Sequence
  Description of Artificial Sequence: Synthetic oligonucleotide
  Sense strand starting at position 187 of SEQ ID NO: 3884
ucgacuucuggauaucauu

SEQ ID NO: 302241 - RNA, 19 nt, Artificial Sequence
  Description of Artificial Sequence: Synthetic oligonucleotide
  Antisense strand to SEQ ID NO: 302240
aaugauauccagaagucga

SEQ ID NO: 302242 - RNA, 19 nt, Artificial Sequence
  Description of Artificial Sequence: Synthetic oligonucleotide
  Sense strand starting at position 249 of SEQ ID NO: 3884
aucuuaggguuggaagauu

SEQ ID NO: 302243 - RNA, 19 nt, Artificial Sequence
  Description of Artificial Sequence: Synthetic oligonucleotide
  Antisense strand to SEQ ID NO: 302242
aaucuuccaacccuaagau

SEQ ID NO: 302244 - RNA, 19 nt, Artificial Sequence
  Description of Artificial Sequence: Synthetic oligonucleotide
  Sense strand starting at position 317 of SEQ ID NO: 3884
ggcccaugucaugaucaga

SEQ ID NO: 302245 - RNA, 19 nt, Artificial Sequence
  Description of Artificial Sequence: Synthetic oligonucleotide
  Antisense strand to SEQ ID NO: 302244
ucugaucaugacaugggcc

SEQ ID NO: 302246 - RNA, 19 nt, Artificial Sequence
  Description of Artificial Sequence: Synthetic oligonucleotide
  Sense strand starting at position 345 of SEQ ID NO: 3884
agcagaacuucuucccaga

SEQ ID NO: 302247 - RNA, 19 nt, Artificial Sequence
  Description of Artificial Sequence: Synthetic oligonucleotide
  Antisense strand to SEQ ID NO: 302246
ucugggaagaaguucugcu

SEQ ID NO: 302248 - RNA, 19 nt, Artificial Sequence
  Description of Artificial Sequence: Synthetic oligonucleotide
  Sense strand starting at position 348 of SEQ ID NO: 3884
agaacuucuucccagagaa

SEQ ID NO: 302249 - RNA, 19 nt, Artificial Sequence
  Description of Artificial Sequence: Synthetic oligonucleotide
  Antisense strand to SEQ ID NO: 302248
uucucugggaagaaguucu

SEQ ID NO: 302250 - RNA, 19 nt, Artificial Sequence
  Description of Artificial Sequence: Synthetic oligonucleotide
  Sense strand starting at position 360 of SEQ ID NO: 3884
cagagaauuguaugagcuu

SEQ ID NO: 302251 - RNA, 19 nt, Artificial Sequence
  Description of Artificial Sequence: Synthetic oligonucleotide
  Antisense strand to SEQ ID NO: 302250
aagcucauacaauucucug

SEQ ID NO: 302252 - RNA, 19 nt, Artificial Sequence
  Description of Artificial Sequence: Synthetic oligonucleotide
  Sense strand starting at position 363 of SEQ ID NO: 3884
agaauuguaugagcuucca

SEQ ID NO: 302253 - RNA, 19 nt, Artificial Sequence
  Description of Artificial Sequence: Synthetic oligonucleotide
  Antisense strand to SEQ ID NO: 302252
uggaagcucauacaauucu

SEQ ID NO: 302254 - RNA, 19 nt, Artificial Sequence
  Description of Artificial Sequence: Synthetic oligonucleotide
  Sense strand starting at position 426 of SEQ ID NO: 3884
guguguuucccuucucugu

SEQ ID NO: 302255 - RNA, 19 nt, Artificial Sequence
  Description of Artificial Sequence: Synthetic oligonucleotide
  Antisense strand to SEQ ID NO: 302254
acagagaagggaaacacac

SEQ ID NO: 302256 - RNA, 19 nt, Artificial Sequence
  Description of Artificial Sequence: Synthetic oligonucleotide
  Sense strand starting at position 1295 of SEQ ID NO: 3884
gggcaaagucauggugaua

SEQ ID NO: 302257 - RNA, 19 nt, Artificial Sequence
  Description of Artificial Sequence: Synthetic oligonucleotide
  Antisense strand to SEQ ID NO: 302256
uaucaccaugacuuugccc

SEQ ID NO: 302258 - RNA, 19 nt, Artificial Sequence
  Description of Artificial Sequence: Synthetic oligonucleotide
  Sense strand starting at position 2094 of SEQ ID NO: 3884
gacgacgccucacuaauaa

SEQ ID NO: 302259 - RNA, 19 nt, Artificial Sequence
  Description of Artificial Sequence: Synthetic oligonucleotide
  Antisense strand to SEQ ID NO: 302258
uuauuagugaggcgucguc

SEQ ID NO: 302260 - RNA, 19 nt, Artificial Sequence
  Description of Artificial Sequence: Synthetic oligonucleotide
  Sense strand starting at position 2143 of SEQ ID NO: 3884
acaugauacugauaggaag

SEQ ID NO: 302261 - RNA, 19 nt, Artificial Sequence
  Description of Artificial Sequence: Synthetic oligonucleotide
  Antisense strand to SEQ ID NO: 302260
cuuccuaucaguaucaugu

SEQ ID NO: 302262 - RNA, 19 nt, Artificial Sequence
  Description of Artificial Sequence: Synthetic oligonucleotide
  Sense strand starting at position 2242 of SEQ ID NO: 3884
gguccuucuuuggcuauua

SEQ ID NO: 302263 - RNA, 19 nt, Artificial Sequence
  Description of Artificial Sequence: Synthetic oligonucleotide
  Antisense strand to SEQ ID NO: 302262
uaauagccaaagaaggacc

SEQ ID NO: 302264 - RNA, 19 nt, Artificial Sequence
  Description of Artificial Sequence: Synthetic oligonucleotide
  Sense strand starting at position 2385 of SEQ ID NO: 3884
aucuuaaugccgugaagua

SEQ ID NO: 302265 - RNA, 19 nt, Artificial Sequence
  Description of Artificial Sequence: Synthetic oligonucleotide
  Antisense strand to SEQ ID NO: 302264
uacuucacggcauuaagau

SEQ ID NO: 302266 - RNA, 19 nt, Artificial Sequence
  Description of Artificial Sequence: Synthetic oligonucleotide
  Sense strand starting at position 2386 of SEQ ID NO: 3884
ucuuaaugccgugaaguau

SEQ ID NO: 302267 - RNA, 19 nt, Artificial Sequence
  Description of Artificial Sequence: Synthetic oligonucleotide
  Antisense strand to SEQ ID NO: 302266
auacuucacggcauuaaga

SEQ ID NO: 302268 - RNA, 19 nt, Artificial Sequence
  Description of Artificial Sequence: Synthetic oligonucleotide
  Sense strand starting at position 2412 of SEQ ID NO: 3884
cauggcuaugcggauuaaa

SEQ ID NO: 302269 - RNA, 19 nt, Artificial Sequence
  Description of Artificial Sequence: Synthetic oligonucleotide
  Antisense strand to SEQ ID NO: 302268
uuuaauccgcauagccaug

SEQ ID NO: 302270 - RNA, 19 nt, Artificial Sequence
  Description of Artificial Sequence: Synthetic oligonucleotide
  Sense strand starting at position 2415 of SEQ ID NO: 3884
ggcuaugcggauuaaauua

SEQ ID NO: 302271 - RNA, 19 nt, Artificial Sequence
  Description of Artificial Sequence: Synthetic oligonucleotide
  Antisense strand to SEQ ID NO: 302270
uaauuuaauccgcauagcc

SEQ ID NO: 302272 - RNA, 19 nt, Artificial Sequence
  Description of Artificial Sequence: Synthetic oligonucleotide
  Sense strand starting at position 2447 of SEQ ID NO: 3884
ggccguuuguuucccauuu

SEQ ID NO: 302273 - RNA, 19 nt, Artificial Sequence
  Description of Artificial Sequence: Synthetic oligonucleotide
  Antisense strand to SEQ ID NO: 302272
aaaugggaaacaaacggcc

SEQ ID NO: 302274 - RNA, 19 nt, Artificial Sequence
  Description of Artificial Sequence: Synthetic oligonucleotide
  Sense strand starting at position 2598 of SEQ ID NO: 3884
aggugcuuuccucaaguca

SEQ ID NO: 302275 - RNA, 19 nt, Artificial Sequence
  Description of Artificial Sequence: Synthetic oligonucleotide
  Antisense strand to SEQ ID NO: 302274
ugacuugaggaaagcaccu

SEQ ID NO: 302276 - RNA, 19 nt, Artificial Sequence
  Description of Artificial Sequence: Synthetic oligonucleotide
  Sense strand starting at position 2624 of SEQ ID NO: 3884
gaaguccuacauugagaug

SEQ ID NO: 302277 - RNA, 19 nt, Artificial Sequence
  Description of Artificial Sequence: Synthetic oligonucleotide
  Antisense strand to SEQ ID NO: 302276
caucucaauguaggacuuc

SEQ ID NO: 302278 - RNA, 19 nt, Artificial Sequence
  Description of Artificial Sequence: Synthetic oligonucleotide
  Sense strand starting at position 2651 of SEQ ID NO: 3884
uacuguuagguaggucuua

SEQ ID NO: 302279 - RNA, 19 nt, Artificial Sequence
  Description of Artificial Sequence: Synthetic oligonucleotide
  Antisense strand to SEQ ID NO: 302278
uaagaccuaccuaacagua

SEQ ID NO: 302280 - RNA, 19 nt, Artificial Sequence
  Description of Artificial Sequence: Synthetic oligonucleotide
  Sense strand starting at position 2652 of SEQ ID NO: 3884
acuguuagguaggucuuaa

SEQ ID NO: 302281 - RNA, 19 nt, Artificial Sequence
  Description of Artificial Sequence: Synthetic oligonucleotide
  Antisense strand to SEQ ID NO: 302280
uuaagaccuaccuaacagu

SEQ ID NO: 302282 - RNA, 19 nt, Artificial Sequence
  Description of Artificial Sequence: Synthetic oligonucleotide
  Sense strand starting at position 2670 of SEQ ID NO: 3884
acccucaucucagugaaga

SEQ ID NO: 302283 - RNA, 19 nt, Artificial Sequence
  Description of Artificial Sequence: Synthetic oligonucleotide
  Antisense strand to SEQ ID NO: 302282
ucuucacugagaugagggu

SEQ ID NO: 302284 - RNA, 19 nt, Artificial Sequence
  Description of Artificial Sequence: Synthetic oligonucleotide
  Sense strand starting at position 2683 of SEQ ID NO: 3884
ugaagaaugcaguagcaaa

SEQ ID NO: 302285 - RNA, 19 nt, Artificial Sequence
  Description of Artificial Sequence: Synthetic oligonucleotide
  Antisense strand to SEQ ID NO: 302284
uuugcuacugcauucuuca

SEQ ID NO: 302286 - RNA, 19 nt, Artificial Sequence
  Description of Artificial Sequence: Synthetic oligonucleotide
  Sense strand starting at position 2716 of SEQ ID NO: 3884
ugaggaaguucugaaauau

SEQ ID NO: 302287 - RNA, 19 nt, Artificial Sequence
  Description of Artificial Sequence: Synthetic oligonucleotide
  Antisense strand to SEQ ID NO: 302286
auauuucagaacuuccuca

SEQ ID NO: 302288 - RNA, 19 nt, Artificial Sequence
  Description of Artificial Sequence: Synthetic oligonucleotide
  Sense strand starting at position 2894 of SEQ ID NO: 3884
gaguuucugugguuccaaa

SEQ ID NO: 302289 - RNA, 19 nt, Artificial Sequence
  Description of Artificial Sequence: Synthetic oligonucleotide
  Antisense strand to SEQ ID NO: 302288
uuuggaaccacagaaacuc

SEQ ID NO: 302290 - RNA, 19 nt, Artificial Sequence
  Description of Artificial Sequence: Synthetic oligonucleotide
  Sense strand starting at position 2918 of SEQ ID NO: 3884
aguucuuuccaugacacca

SEQ ID NO: 302291 - RNA, 19 nt, Artificial Sequence
  Description of Artificial Sequence: Synthetic oligonucleotide
  Antisense strand to SEQ ID NO: 302290
uggugucauggaaagaacu

SEQ ID NO: 302292 - RNA, 19 nt, Artificial Sequence
  Description of Artificial Sequence: Synthetic oligonucleotide
  Sense strand starting at position 2949 of SEQ ID NO: 3884
guugaccaacucuguuuaa

SEQ ID NO: 302293 - RNA, 19 nt, Artificial Sequence
  Description of Artificial Sequence: Synthetic oligonucleotide
  Antisense strand to SEQ ID NO: 302292
uuaaacagaguuggucaac

SEQ ID NO: 302294 - RNA, 19 nt, Artificial Sequence
  Description of Artificial Sequence: Synthetic oligonucleotide
  Sense strand starting at position 2962 of SEQ ID NO: 3884
guuuaaagugcuuaucuca

SEQ ID NO: 302295 - RNA, 19 nt, Artificial Sequence
  Description of Artificial Sequence: Synthetic oligonucleotide
  Antisense strand to SEQ ID NO: 302294
ugagauaagcacuuuaaac

SEQ ID NO: 302296 - RNA, 19 nt, Artificial Sequence
  Description of Artificial Sequence: Synthetic oligonucleotide
  Sense strand starting at position 2981 of SEQ ID NO: 3884
uguuaauagcuauagguca

SEQ ID NO: 302297 - RNA, 19 nt, Artificial Sequence
  Description of Artificial Sequence: Synthetic oligonucleotide
  Antisense strand to SEQ ID NO: 302296
ugaccuauagcuauuaaca

SEQ ID NO: 302298 - RNA, 19 nt, Artificial Sequence
  Description of Artificial Sequence: Synthetic oligonucleotide
  Sense strand starting at position 3451 of SEQ ID NO: 3884
auaguuuaaguaggaguua

SEQ ID NO: 302299 - RNA, 19 nt, Artificial Sequence
  Description of Artificial Sequence: Synthetic oligonucleotide
  Antisense strand to SEQ ID NO: 302298
uaacuccuacuuaaacuau

SEQ ID NO: 302300 - RNA, 19 nt, Artificial Sequence
  Description of Artificial Sequence: Synthetic oligonucleotide
  Sense strand starting at position 3584 of SEQ ID NO: 3884
gugugaucucaccagagca

SEQ ID NO: 302301 - RNA, 19 nt, Artificial Sequence
  Description of Artificial Sequence: Synthetic oligonucleotide
  Antisense strand to SEQ ID NO: 302300
ugcucuggugagaucacac

SEQ ID NO: 302302 - RNA, 19 nt, Artificial Sequence
  Description of Artificial Sequence: Synthetic oligonucleotide
  Sense strand starting at position 3656 of SEQ ID NO: 3884
ggugaaaugcauggcccau

SEQ ID NO: 302303 - RNA, 19 nt, Artificial Sequence
  Description of Artificial Sequence: Synthetic oligonucleotide
  Antisense strand to SEQ ID NO: 302302
augggccaugcauuucacc

SEQ ID NO: 302304 - RNA, 19 nt, Artificial Sequence
  Description of Artificial Sequence: Synthetic oligonucleotide
  Sense strand starting at position 3672 of SEQ ID NO: 3884
cauggaaucuguccagauc

SEQ ID NO: 302305 - RNA, 19 nt, Artificial Sequence
  Description of Artificial Sequence: Synthetic oligonucleotide
  Antisense strand to SEQ ID NO: 302304
gaucuggacagauuccaug

SEQ ID NO: 302306 - RNA, 19 nt, Artificial Sequence
  Description of Artificial Sequence: Synthetic oligonucleotide
  Sense strand starting at position 3681 of SEQ ID NO: 3884
uguccagaucccugacauu

SEQ ID NO: 302307 - RNA, 19 nt, Artificial Sequence
  Description of Artificial Sequence: Synthetic oligonucleotide
  Antisense strand to SEQ ID NO: 302306
aaugucagggaucuggaca

SEQ ID NO: 302308 - RNA, 19 nt, Artificial Sequence
  Description of Artificial Sequence: Synthetic oligonucleotide
  Sense strand starting at position 3841 of SEQ ID NO: 3884
cagguuaggugucugauga

SEQ ID NO: 302309 - RNA, 19 nt, Artificial Sequence
  Description of Artificial Sequence: Synthetic oligonucleotide
  Antisense strand to SEQ ID NO: 302308
ucaucagacaccuaaccug

SEQ ID NO: 302310 - RNA, 19 nt, Artificial Sequence
  Description of Artificial Sequence: Synthetic oligonucleotide
  Sense strand starting at position 3842 of SEQ ID NO: 3884
agguuaggugucugaugaa

SEQ ID NO: 302311 - RNA, 19 nt, Artificial Sequence
  Description of Artificial Sequence: Synthetic oligonucleotide
  Antisense strand to SEQ ID NO: 302310
uucaucagacaccuaaccu

SEQ ID NO: 302312 - RNA, 19 nt, Artificial Sequence
  Description of Artificial Sequence: Synthetic oligonucleotide
  Sense strand starting at position 3883 of SEQ ID NO: 3884
ucgucugaguccucauaug

SEQ ID NO: 302313 - RNA, 19 nt, Artificial Sequence
  Description of Artificial Sequence: Synthetic oligonucleotide
  Antisense strand to SEQ ID NO: 302312
cauaugaggacucagacga

SEQ ID NO: 302314 - RNA, 19 nt, Artificial Sequence
  Description of Artificial Sequence: Synthetic oligonucleotide
  Sense strand starting at position 3959 of SEQ ID NO: 3884
ggaaucucacucugugcaa

SEQ ID NO: 302315 - RNA, 19 nt, Artificial Sequence
  Description of Artificial Sequence: Synthetic oligonucleotide
  Antisense strand to SEQ ID NO: 302314
uugcacagagugagauucc

SEQ ID NO: 302316 - RNA, 19 nt, Artificial Sequence
  Description of Artificial Sequence: Synthetic oligonucleotide
  Sense strand starting at position 65 of SEQ ID NO: 3885
aucuaauaggguugcauau

SEQ ID NO: 302317 - RNA, 19 nt, Artificial Sequence
  Description of Artificial Sequence: Synthetic oligonucleotide
  Antisense strand to SEQ ID NO: 302316
auaugcaacccuauuagau

SEQ ID NO: 302318 - RNA, 19 nt, Artificial Sequence
  Description of Artificial Sequence: Synthetic oligonucleotide
  Sense strand starting at position 82 of SEQ ID NO: 3885
aucucaacuugucuuugua

SEQ ID NO: 302319 - RNA, 19 nt, Artificial Sequence
  Description of Artificial Sequence: Synthetic oligonucleotide
  Antisense strand to SEQ ID NO: 302318
uacaaagacaaguugagau

SEQ ID NO: 302320 - RNA, 19 nt, Artificial Sequence
  Description of Artificial Sequence: Synthetic oligonucleotide
  Sense strand starting at position 84 of SEQ ID NO: 3885
cucaacuugucuuuguaaa

SEQ ID NO: 302321 - RNA, 19 nt, Artificial Sequence
  Description of Artificial Sequence: Synthetic oligonucleotide
  Antisense strand to SEQ ID NO: 302320
uuuacaaagacaaguugag

SEQ ID NO: 302322 - RNA, 19 nt, Artificial Sequence
  Description of Artificial Sequence: Synthetic oligonucleotide
  Sense strand starting at position 85 of SEQ ID NO: 3885
ucaacuugucuuuguaaag

SEQ ID NO: 302323 - RNA, 19 nt, Artificial Sequence
  Description of Artificial Sequence: Synthetic oligonucleotide
  Antisense strand to SEQ ID NO: 302322
cuuuacaaagacaaguuga

SEQ ID NO: 302324 - RNA, 19 nt, Artificial Sequence
  Description of Artificial Sequence: Synthetic oligonucleotide
  Sense strand starting at position 183 of SEQ ID NO: 3885
cugaguuacaguuggucau

SEQ ID NO: 302325 - RNA, 19 nt, Artificial Sequence
  Description of Artificial Sequence: Synthetic oligonucleotide
  Antisense strand to SEQ ID NO: 302324
augaccaacuguaacucag

SEQ ID NO: 302326 - RNA, 19 nt, Artificial Sequence
  Description of Artificial Sequence: Synthetic oligonucleotide
  Sense strand starting at position 184 of SEQ ID NO: 3885
ugaguuacaguuggucauu

SEQ ID NO: 302327 - RNA, 19 nt, Artificial Sequence
  Description of Artificial Sequence: Synthetic oligonucleotide
  Antisense strand to SEQ ID NO: 302326
aaugaccaacuguaacuca

SEQ ID NO: 302328 - RNA, 19 nt, Artificial Sequence
  Description of Artificial Sequence: Synthetic oligonucleotide
  Sense strand starting at position 487 of SEQ ID NO: 3885
cuauuuaauuaggaagcuu

SEQ ID NO: 302329 - RNA, 19 nt, Artificial Sequence
  Description of Artificial Sequence: Synthetic oligonucleotide
  Antisense strand to SEQ ID NO: 302328
aagcuuccuaauuaaauag

SEQ ID NO: 302330 - RNA, 19 nt, Artificial Sequence
  Description of Artificial Sequence: Synthetic oligonucleotide
  Sense strand starting at position 525 of SEQ ID NO: 3885
aagcguucgccgucagaau

SEQ ID NO: 302331 - RNA, 19 nt, Artificial Sequence
  Description of Artificial Sequence: Synthetic oligonucleotide
  Antisense strand to SEQ ID NO: 302330
auucugacggcgaacgcuu

SEQ ID NO: 302332 - RNA, 19 nt, Artificial Sequence
  Description of Artificial Sequence: Synthetic oligonucleotide
  Sense strand starting at position 587 of SEQ ID NO: 3885
acagaagccuguccagaaa

SEQ ID NO: 302333 - RNA, 19 nt, Artificial Sequence
  Description of Artificial Sequence: Synthetic oligonucleotide
  Antisense strand to SEQ ID NO: 302332
uuucuggacaggcuucugu

SEQ ID NO: 302334 - RNA, 19 nt, Artificial Sequence
  Description of Artificial Sequence: Synthetic oligonucleotide
  Sense strand starting at position 913 of SEQ ID NO: 3885
ucuagaaucugugugaccu

SEQ ID NO: 302335 - RNA, 19 nt, Artificial Sequence
  Description of Artificial Sequence: Synthetic oligonucleotide
  Antisense strand to SEQ ID NO: 302334
aggucacacagauucuaga

SEQ ID NO: 302336 - RNA, 19 nt, Artificial Sequence
  Description of Artificial Sequence: Synthetic oligonucleotide
  Sense strand starting at position 914 of SEQ ID NO: 3885
cuagaaucugugugaccug

SEQ ID NO: 302337 - RNA, 19 nt, Artificial Sequence
  Description of Artificial Sequence: Synthetic oligonucleotide
  Antisense strand to SEQ ID NO: 302336
caggucacacagauucuag

SEQ ID NO: 302338 - RNA, 19 nt, Artificial Sequence
  Description of Artificial Sequence: Synthetic oligonucleotide
  Sense strand starting at position 929 of SEQ ID NO: 3885
ccuggucuucaacgggaga

SEQ ID NO: 302339 - RNA, 19 nt, Artificial Sequence
  Description of Artificial Sequence: Synthetic oligonucleotide
  Antisense strand to SEQ ID NO: 302338
ucucccguugaagaccagg

SEQ ID NO: 302340 - RNA, 19 nt, Artificial Sequence
  Description of Artificial Sequence: Synthetic oligonucleotide
  Sense strand starting at position 964 of SEQ ID NO: 3885
gcaccuuugccaggaauca

SEQ ID NO: 302341 - RNA, 19 nt, Artificial Sequence
  Description of Artificial Sequence: Synthetic oligonucleotide
  Antisense strand to SEQ ID NO: 302340
ugauuccuggcaaaggugc

SEQ ID NO: 302342 - RNA, 19 nt, Artificial Sequence
  Description of Artificial Sequence: Synthetic oligonucleotide
  Sense strand starting at position 1204 of SEQ ID NO: 3885
augcaaagguuuccugcua

SEQ ID NO: 302343 - RNA, 19 nt, Artificial Sequence
  Description of Artificial Sequence: Synthetic oligonucleotide
  Antisense strand to SEQ ID NO: 302342
uagcaggaaaccuuugcau

SEQ ID NO: 302344 - RNA, 19 nt, Artificial Sequence
  Description of Artificial Sequence: Synthetic oligonucleotide
  Sense strand starting at position 1283 of SEQ ID NO: 3885
cuuguuucucuggauagag

SEQ ID NO: 302345 - RNA, 19 nt, Artificial Sequence
  Description of Artificial Sequence: Synthetic oligonucleotide
  Antisense strand to SEQ ID NO: 302344
cucuauccagagaaacaag

SEQ ID NO: 302346 - RNA, 19 nt, Artificial Sequence
  Description of Artificial Sequence: Synthetic oligonucleotide
  Sense strand starting at position 1295 of SEQ ID NO: 3885
gauagaggugggugguauu

SEQ ID NO: 302347 - RNA, 19 nt, Artificial Sequence
  Description of Artificial Sequence: Synthetic oligonucleotide
  Antisense strand to SEQ ID NO: 302346
aauaccacccaccucuauc

SEQ ID NO: 302348 - RNA, 19 nt, Artificial Sequence
  Description of Artificial Sequence: Synthetic oligonucleotide
  Sense strand starting at position 1454 of SEQ ID NO: 3885
gggcguuuggcagucacuu

SEQ ID NO: 302349 - RNA, 19 nt, Artificial Sequence
  Description of Artificial Sequence: Synthetic oligonucleotide
  Antisense strand to SEQ ID NO: 302348
aagugacugccaaacgccc

SEQ ID NO: 302350 - RNA, 19 nt, Artificial Sequence
  Description of Artificial Sequence: Synthetic oligonucleotide
  Sense strand starting at position 1455 of SEQ ID NO: 3885
ggcguuuggcagucacuua

SEQ ID NO: 302351 - RNA, 19 nt, Artificial Sequence
  Description of Artificial Sequence: Synthetic oligonucleotide
  Antisense strand to SEQ ID NO: 302350
uaagugacugccaaacgcc

SEQ ID NO: 302352 - RNA, 19 nt, Artificial Sequence
  Description of Artificial Sequence: Synthetic oligonucleotide
  Sense strand starting at position 1762 of SEQ ID NO: 3885
gcaugaucucgagaguuuc

SEQ ID NO: 302353 - RNA, 19 nt, Artificial Sequence
  Description of Artificial Sequence: Synthetic oligonucleotide
  Antisense strand to SEQ ID NO: 302352
gaaacucucgagaucaugc

SEQ ID NO: 302354 - RNA, 19 nt, Artificial Sequence
  Description of Artificial Sequence: Synthetic oligonucleotide
  Sense strand starting at position 2776 of SEQ ID NO: 3885
aagcguucgcagguuugaa

SEQ ID NO: 302355 - RNA, 19 nt, Artificial Sequence
  Description of Artificial Sequence: Synthetic oligonucleotide
  Antisense strand to SEQ ID NO: 302354
uucaaaccugcgaacgcuu

SEQ ID NO: 302356 - RNA, 19 nt, Artificial Sequence
  Description of Artificial Sequence: Synthetic oligonucleotide
  Sense strand starting at position 2777 of SEQ ID NO: 3885
agcguucgcagguuugaau

SEQ ID NO: 302357 - RNA, 19 nt, Artificial Sequence
  Description of Artificial Sequence: Synthetic oligonucleotide
  Antisense strand to SEQ ID NO: 302356
auucaaaccugcgaacgcu

SEQ ID NO: 302358 - RNA, 19 nt, Artificial Sequence
  Description of Artificial Sequence: Synthetic oligonucleotide
  Sense strand starting at position 2824 of SEQ ID NO: 3885
gcccguagccuauuagugu

SEQ ID NO: 302359 - RNA, 19 nt, Artificial Sequence
  Description of Artificial Sequence: Synthetic oligonucleotide
  Antisense strand to SEQ ID NO: 302358
acacuaauaggcuacgggc

SEQ ID NO: 302360 - RNA, 19 nt, Artificial Sequence
  Description of Artificial Sequence: Synthetic oligonucleotide
  Sense strand starting at position 2861 of SEQ ID NO: 3885
gucagauguguuuggaagg

SEQ ID NO: 302361 - RNA, 19 nt, Artificial Sequence
  Description of Artificial Sequence: Synthetic oligonucleotide
  Antisense strand to SEQ ID NO: 302360
ccuuccaaacacaucugac

SEQ ID NO: 302362 - RNA, 19 nt, Artificial Sequence
  Description of Artificial Sequence: Synthetic oligonucleotide
  Sense strand starting at position 2866 of SEQ ID NO: 3885
auguguuuggaaggucaga

SEQ ID NO: 302363 - RNA, 19 nt, Artificial Sequence
  Description of Artificial Sequence: Synthetic oligonucleotide
  Antisense strand to SEQ ID NO: 302362
ucugaccuuccaaacacau

SEQ ID NO: 302364 - RNA, 19 nt, Artificial Sequence
  Description of Artificial Sequence: Synthetic oligonucleotide
  Sense strand starting at position 2878 of SEQ ID NO: 3885
ggucagauuggucgggaca

SEQ ID NO: 302365 - RNA, 19 nt, Artificial Sequence
  Description of Artificial Sequence: Synthetic oligonucleotide
  Antisense strand to SEQ ID NO: 302364
ugucccgaccaaucugacc

SEQ ID NO: 302366 - RNA, 19 nt, Artificial Sequence
  Description of Artificial Sequence: Synthetic oligonucleotide
  Sense strand starting at position 2879 of SEQ ID NO: 3885
gucagauuggucgggacaa

SEQ ID NO: 302367 - RNA, 19 nt, Artificial Sequence
  Description of Artificial Sequence: Synthetic oligonucleotide
  Antisense strand to SEQ ID NO: 302366
uugucccgaccaaucugac

SEQ ID NO: 302368 - RNA, 19 nt, Artificial Sequence
  Description of Artificial Sequence: Synthetic oligonucleotide
  Sense strand starting at position 2881 of SEQ ID NO: 3885
cagauuggucgggacaagu

SEQ ID NO: 302369 - RNA, 19 nt, Artificial Sequence
  Description of Artificial Sequence: Synthetic oligonucleotide
  Antisense strand to SEQ ID NO: 302368
acuugucccgaccaaucug

SEQ ID NO: 302370 - RNA, 19 nt, Artificial Sequence
  Description of Artificial Sequence: Synthetic oligonucleotide
  Sense strand starting at position 2892 of SEQ ID NO: 3885
ggacaaguggucugagaga

SEQ ID NO: 302371 - RNA, 19 nt, Artificial Sequence
  Description of Artificial Sequence: Synthetic oligonucleotide
  Antisense strand to SEQ ID NO: 302370
ucucucagaccacuugucc

SEQ ID NO: 302372 - RNA, 19 nt, Artificial Sequence
  Description of Artificial Sequence: Synthetic oligonucleotide
  Sense strand starting at position 2913 of SEQ ID NO: 3885
gagaaaggcuccucugcau

SEQ ID NO: 302373 - RNA, 19 nt, Artificial Sequence
  Description of Artificial Sequence: Synthetic oligonucleotide
  Antisense strand to SEQ ID NO: 302372
augcagaggagccuuucuc

SEQ ID NO: 302374 - RNA, 19 nt, Artificial Sequence
  Description of Artificial Sequence: Synthetic oligonucleotide
  Sense strand starting at position 3079 of SEQ ID NO: 3885
ggucuaacucggcaggagu

SEQ ID NO: 302375 - RNA, 19 nt, Artificial Sequence
  Description of Artificial Sequence: Synthetic oligonucleotide
  Antisense strand to SEQ ID NO: 302374
acuccugccgaguuagacc

SEQ ID NO: 302376 - RNA, 19 nt, Artificial Sequence
  Description of Artificial Sequence: Synthetic oligonucleotide
  Sense strand starting at position 3267 of SEQ ID NO: 3885
ggaacaucuuucuuccaug

SEQ ID NO: 302377 - RNA, 19 nt, Artificial Sequence
  Description of Artificial Sequence: Synthetic oligonucleotide
  Antisense strand to SEQ ID NO: 302376
cauggaagaaagauguucc

SEQ ID NO: 302378 - RNA, 19 nt, Artificial Sequence
  Description of Artificial Sequence: Synthetic oligonucleotide
  Sense strand starting at position 3348 of SEQ ID NO: 3885
gugugugauuauucaguga

SEQ ID NO: 302379 - RNA, 19 nt, Artificial Sequence
  Description of Artificial Sequence: Synthetic oligonucleotide
  Antisense strand to SEQ ID NO: 302378
ucacugaauaaucacacac

SEQ ID NO: 302380 - RNA, 19 nt, Artificial Sequence
  Description of Artificial Sequence: Synthetic oligonucleotide
  Sense strand starting at position 3518 of SEQ ID NO: 3885
cccugaauuuaggagagca

SEQ ID NO: 302381 - RNA, 19 nt, Artificial Sequence
  Description of Artificial Sequence: Synthetic oligonucleotide
  Antisense strand to SEQ ID NO: 302380
ugcucuccuaaauucaggg

SEQ ID NO: 302382 - RNA, 19 nt, Artificial Sequence
  Description of Artificial Sequence: Synthetic oligonucleotide
  Sense strand starting at position 3644 of SEQ ID NO: 3885
aacaaauuguacccgagua

SEQ ID NO: 302383 - RNA, 19 nt, Artificial Sequence
  Description of Artificial Sequence: Synthetic oligonucleotide
  Antisense strand to SEQ ID NO: 302382
uacucggguacaauuuguu

SEQ ID NO: 302384 - RNA, 19 nt, Artificial Sequence
  Description of Artificial Sequence: Synthetic oligonucleotide
  Sense strand starting at position 3646 of SEQ ID NO: 3885
caaauuguacccgaguaau

SEQ ID NO: 302385 - RNA, 19 nt, Artificial Sequence
  Description of Artificial Sequence: Synthetic oligonucleotide
  Antisense strand to SEQ ID NO: 302384
auuacucggguacaauuug

SEQ ID NO: 302386 - RNA, 19 nt, Artificial Sequence
  Description of Artificial Sequence: Synthetic oligonucleotide
  Sense strand starting at position 3649 of SEQ ID NO: 3885
auuguacccgaguaauccu

SEQ ID NO: 302387 - RNA, 19 nt, Artificial Sequence
  Description of Artificial Sequence: Synthetic oligonucleotide
  Antisense strand to SEQ ID NO: 302386
aggauuacucggguacaau

SEQ ID NO: 302388 - RNA, 19 nt, Artificial Sequence
  Description of Artificial Sequence: Synthetic oligonucleotide
  Sense strand starting at position 3721 of SEQ ID NO: 3885
cuuugagagaugugaucgu

SEQ ID NO: 302389 - RNA, 19 nt, Artificial Sequence
  Description of Artificial Sequence: Synthetic oligonucleotide
  Antisense strand to SEQ ID NO: 302388
acgaucacaucucucaaag

SEQ ID NO: 302390 - RNA, 19 nt, Artificial Sequence
  Description of Artificial Sequence: Synthetic oligonucleotide
  Sense strand starting at position 3725 of SEQ ID NO: 3885
gagagaugugaucgugcag

SEQ ID NO: 302391 - RNA, 19 nt, Artificial Sequence
  Description of Artificial Sequence: Synthetic oligonucleotide
  Antisense strand to SEQ ID NO: 302390
cugcacgaucacaucucuc

SEQ ID NO: 302392 - RNA, 19 nt, Artificial Sequence
  Description of Artificial Sequence: Synthetic oligonucleotide
  Sense strand starting at position 3895 of SEQ ID NO: 3885
agcagaucccagcauucua

SEQ ID NO: 302393 - RNA, 19 nt, Artificial Sequence
  Description of Artificial Sequence: Synthetic oligonucleotide
  Antisense strand to SEQ ID NO: 302392
uagaaugcugggaucugcu

SEQ ID NO: 302394 - RNA, 19 nt, Artificial Sequence
  Description of Artificial Sequence: Synthetic oligonucleotide
  Sense strand starting at position 3972 of SEQ ID NO: 3885
agacguuggaggcaucaga

SEQ ID NO: 302395 - RNA, 19 nt, Artificial Sequence
  Description of Artificial Sequence: Synthetic oligonucleotide
  Antisense strand to SEQ ID NO: 302394
ucugaugccuccaacgucu

SEQ ID NO: 302396 - RNA, 19 nt, Artificial Sequence
  Description of Artificial Sequence: Synthetic oligonucleotide
  Sense strand starting at position 151 of SEQ ID NO: 3886
cagaguaugguccgaugca

SEQ ID NO: 302397 - RNA, 19 nt, Artificial Sequence
  Description of Artificial Sequence: Synthetic oligonucleotide
  Antisense strand to SEQ ID NO: 302396
ugcaucggaccauacucug

SEQ ID NO: 302398 - RNA, 19 nt, Artificial Sequence
  Description of Artificial Sequence: Synthetic oligonucleotide
  Sense strand starting at position 152 of SEQ ID NO: 3886
agaguaugguccgaugcac

SEQ ID NO: 302399 - RNA, 19 nt, Artificial Sequence
  Description of Artificial Sequence: Synthetic oligonucleotide
  Antisense strand to SEQ ID NO: 302398
gugcaucggaccauacucu

SEQ ID NO: 302400 - RNA, 19 nt, Artificial Sequence
  Description of Artificial Sequence: Synthetic oligonucleotide
  Sense strand starting at position 220 of SEQ ID NO: 3886
ggagguaacacgcagauau

SEQ ID NO: 302401 - RNA, 19 nt, Artificial Sequence
  Description of Artificial Sequence: Synthetic oligonucleotide
  Antisense strand to SEQ ID NO: 302400
auaucugcguguuaccucc

SEQ ID NO: 302402 - RNA, 19 nt, Artificial Sequence
  Description of Artificial Sequence: Synthetic oligonucleotide
  Sense strand starting at position 231 of SEQ ID NO: 3886
gcagauaucuaacaggaag

SEQ ID NO: 302403 - RNA, 19 nt, Artificial Sequence
  Description of Artificial Sequence: Synthetic oligonucleotide
  Antisense strand to SEQ ID NO: 302402
cuuccuguuagauaucugc

SEQ ID NO: 302404 - RNA, 19 nt, Artificial Sequence
  Description of Artificial Sequence: Synthetic oligonucleotide
  Sense strand starting at position 267 of SEQ ID NO: 3886
gcaguaaacaucuggaaug

SEQ ID NO: 302405 - RNA, 19 nt, Artificial Sequence
  Description of Artificial Sequence: Synthetic oligonucleotide
  Antisense strand to SEQ ID NO: 302404
cauuccagauguuuacugc

SEQ ID NO: 302406 - RNA, 19 nt, Artificial Sequence
  Description of Artificial Sequence: Synthetic oligonucleotide
  Sense strand starting at position 285 of SEQ ID NO: 3886
gcaucacagccagggaaua

SEQ ID NO: 302407 - RNA, 19 nt, Artificial Sequence
  Description of Artificial Sequence: Synthetic oligonucleotide
  Antisense strand to SEQ ID NO: 302406
uauucccuggcugugaugc

SEQ ID NO: 302408 - RNA, 19 nt, Artificial Sequence
  Description of Artificial Sequence: Synthetic oligonucleotide
  Sense strand starting at position 368 of SEQ ID NO: 3886
gaugaacuaugcuguuacu

SEQ ID NO: 302409 - RNA, 19 nt, Artificial Sequence
  Description of Artificial Sequence: Synthetic oligonucleotide
  Antisense strand to SEQ ID NO: 302408
aguaacagcauaguucauc

SEQ ID NO: 302410 - RNA, 19 nt, Artificial Sequence
  Description of Artificial Sequence: Synthetic oligonucleotide
  Sense strand starting at position 371 of SEQ ID NO: 3886
gaacuaugcuguuacuaag

SEQ ID NO: 302411 - RNA, 19 nt, Artificial Sequence
  Description of Artificial Sequence: Synthetic oligonucleotide
  Antisense strand to SEQ ID NO: 302410
cuuaguaacagcauaguuc

SEQ ID NO: 302412 - RNA, 19 nt, Artificial Sequence
  Description of Artificial Sequence: Synthetic oligonucleotide
  Sense strand starting at position 399 of SEQ ID NO: 3886
ggguacauugaucauuguu

SEQ ID NO: 302413 - RNA, 19 nt, Artificial Sequence
  Description of Artificial Sequence: Synthetic oligonucleotide
  Antisense strand to SEQ ID NO: 302412
aacaaugaucaauguaccc

SEQ ID NO: 302414 - RNA, 19 nt, Artificial Sequence
  Description of Artificial Sequence: Synthetic oligonucleotide
  Sense strand starting at position 401 of SEQ ID NO: 3886
guacauugaucauuguuag

SEQ ID NO: 302415 - RNA, 19 nt, Artificial Sequence
  Description of Artificial Sequence: Synthetic oligonucleotide
  Antisense strand to SEQ ID NO: 302414
cuaacaaugaucaauguac

SEQ ID NO: 302416 - RNA, 19 nt, Artificial Sequence
  Description of Artificial Sequence: Synthetic oligonucleotide
  Sense strand starting at position 404 of SEQ ID NO: 3886
cauugaucauuguuagggu

SEQ ID NO: 302417 - RNA, 19 nt, Artificial Sequence
  Description of Artificial Sequence: Synthetic oligonucleotide
  Antisense strand to SEQ ID NO: 302416
acccuaacaaugaucaaug

SEQ ID NO: 302418 - RNA, 19 nt, Artificial Sequence
  Description of Artificial Sequence: Synthetic oligonucleotide
  Sense strand starting at position 405 of SEQ ID NO: 3886
auugaucauuguuagggua

SEQ ID NO: 302419 - RNA, 19 nt, Artificial Sequence
  Description of Artificial Sequence: Synthetic oligonucleotide
  Antisense strand to SEQ ID NO: 302418
uacccuaacaaugaucaau

SEQ ID NO: 302420 - RNA, 19 nt, Artificial Sequence
  Description of Artificial Sequence: Synthetic oligonucleotide
  Sense strand starting at position 407 of SEQ ID NO: 3886
ugaucauuguuaggguaaa

SEQ ID NO: 302421 - RNA, 19 nt, Artificial Sequence
  Description of Artificial Sequence: Synthetic oligonucleotide
  Antisense strand to SEQ ID NO: 302420
uuuacccuaacaaugauca

SEQ ID NO: 302422 - RNA, 19 nt, Artificial Sequence
  Description of Artificial Sequence: Synthetic oligonucleotide
  Sense strand starting at position 531 of SEQ ID NO: 3886
cugucuaucuggccggaaa

SEQ ID NO: 302423 - RNA, 19 nt, Artificial Sequence
  Description of Artificial Sequence: Synthetic oligonucleotide
  Antisense strand to SEQ ID NO: 302422
uuuccggccagauagacag

SEQ ID NO: 302424 - RNA, 19 nt, Artificial Sequence
  Description of Artificial Sequence: Synthetic oligonucleotide
  Sense strand starting at position 532 of SEQ ID NO: 3886
ugucuaucuggccggaaag

SEQ ID NO: 302425 - RNA, 19 nt, Artificial Sequence
  Description of Artificial Sequence: Synthetic oligonucleotide
  Antisense strand to SEQ ID NO: 302424
cuuuccggccagauagaca

SEQ ID NO: 302426 - RNA, 19 nt, Artificial Sequence
  Description of Artificial Sequence: Synthetic oligonucleotide
  Sense strand starting at position 544 of SEQ ID NO: 3886
cggaaagcaugaugaugaa

SEQ ID NO: 302427 - RNA, 19 nt, Artificial Sequence
  Description of Artificial Sequence: Synthetic oligonucleotide
  Antisense strand to SEQ ID NO: 302426
uucaucaucaugcuuuccg

SEQ ID NO: 302428 - RNA, 19 nt, Artificial Sequence
  Description of Artificial Sequence: Synthetic oligonucleotide
  Sense strand starting at position 610 of SEQ ID NO: 3886
ccacauuccgacuguugua

SEQ ID NO: 302429 - RNA, 19 nt, Artificial Sequence
  Description of Artificial Sequence: Synthetic oligonucleotide
  Antisense strand to SEQ ID NO: 302428
uacaacagucggaaugugg

SEQ ID NO: 302430 - RNA, 19 nt, Artificial Sequence
  Description of Artificial Sequence: Synthetic oligonucleotide
  Sense strand starting at position 641 of SEQ ID NO: 3886
auggaacggucuuccgauu

SEQ ID NO: 302431 - RNA, 19 nt, Artificial Sequence
  Description of Artificial Sequence: Synthetic oligonucleotide
  Antisense strand to SEQ ID NO: 302430
aaucggaagaccguuccau

SEQ ID NO: 302432 - RNA, 19 nt, Artificial Sequence
  Description of Artificial Sequence: Synthetic oligonucleotide
  Sense strand starting at position 647 of SEQ ID NO: 3886
cggucuuccgauuaccuaa

SEQ ID NO: 302433 - RNA, 19 nt, Artificial Sequence
  Description of Artificial Sequence: Synthetic oligonucleotide
  Antisense strand to SEQ ID NO: 302432
uuagguaaucggaagaccg

SEQ ID NO: 302434 - RNA, 19 nt, Artificial Sequence
  Description of Artificial Sequence: Synthetic oligonucleotide
  Sense strand starting at position 693 of SEQ ID NO: 3886
uacgcauccgauuaccaua

SEQ ID NO: 302435 - RNA, 19 nt, Artificial Sequence
  Description of Artificial Sequence: Synthetic oligonucleotide
  Antisense strand to SEQ ID NO: 302434
uaugguaaucggaugcgua

SEQ ID NO: 302436 - RNA, 19 nt, Artificial Sequence
  Description of Artificial Sequence: Synthetic oligonucleotide
  Sense strand starting at position 696 of SEQ ID NO: 3886
gcauccgauuaccauagaa

SEQ ID NO: 302437 - RNA, 19 nt, Artificial Sequence
  Description of Artificial Sequence: Synthetic oligonucleotide
  Antisense strand to SEQ ID NO: 302436
uucuaugguaaucggaugc

SEQ ID NO: 302438 - RNA, 19 nt, Artificial Sequence
  Description of Artificial Sequence: Synthetic oligonucleotide
  Sense strand starting at position 819 of SEQ ID NO: 3886
aggccagcuaacugugaua

SEQ ID NO: 302439 - RNA, 19 nt, Artificial Sequence
  Description of Artificial Sequence: Synthetic oligonucleotide
  Antisense strand to SEQ ID NO: 302438
uaucacaguuagcuggccu

SEQ ID NO: 302440 - RNA, 19 nt, Artificial Sequence
  Description of Artificial Sequence: Synthetic oligonucleotide
  Sense strand starting at position 929 of SEQ ID NO: 3886
guaggugcuuagcugaaua

SEQ ID NO: 302441 - RNA, 19 nt, Artificial Sequence
  Description of Artificial Sequence: Synthetic oligonucleotide
  Antisense strand to SEQ ID NO: 302440
uauucagcuaagcaccuac

SEQ ID NO: 302442 - RNA, 19 nt, Artificial Sequence
  Description of Artificial Sequence: Synthetic oligonucleotide
  Sense strand starting at position 1038 of SEQ ID NO: 3886
gugucuggucccuggcuau

SEQ ID NO: 302443 - RNA, 19 nt, Artificial Sequence
  Description of Artificial Sequence: Synthetic oligonucleotide
  Antisense strand to SEQ ID NO: 302442
auagccagggaccagacac

SEQ ID NO: 302444 - RNA, 19 nt, Artificial Sequence
  Description of Artificial Sequence: Synthetic oligonucleotide
  Sense strand starting at position 1686 of SEQ ID NO: 3886
cggcuacugcuagagcaaa

SEQ ID NO: 302445 - RNA, 19 nt, Artificial Sequence
  Description of Artificial Sequence: Synthetic oligonucleotide
  Antisense strand to SEQ ID NO: 302444
uuugcucuagcaguagccg

SEQ ID NO: 302446 - RNA, 19 nt, Artificial Sequence
  Description of Artificial Sequence: Synthetic oligonucleotide
  Sense strand starting at position 2619 of SEQ ID NO: 3886
ggcaaagaagucugcgacu

SEQ ID NO: 302447 - RNA, 19 nt, Artificial Sequence
  Description of Artificial Sequence: Synthetic oligonucleotide
  Antisense strand to SEQ ID NO: 302446
agucgcagacuucuuugcc

SEQ ID NO: 302448 - RNA, 19 nt, Artificial Sequence
  Description of Artificial Sequence: Synthetic oligonucleotide
  Sense strand starting at position 2621 of SEQ ID NO: 3886
caaagaagucugcgacugu

SEQ ID NO: 302449 - RNA, 19 nt, Artificial Sequence
  Description of Artificial Sequence: Synthetic oligonucleotide
  Antisense strand to SEQ ID NO: 302448
acagucgcagacuucuuug

SEQ ID NO: 302450 - RNA, 19 nt, Artificial Sequence
  Description of Artificial Sequence: Synthetic oligonucleotide
  Sense strand starting at position 2622 of SEQ ID NO: 3886
aaagaagucugcgacuguu

SEQ ID NO: 302451 - RNA, 19 nt, Artificial Sequence
  Description of Artificial Sequence: Synthetic oligonucleotide
  Antisense strand to SEQ ID NO: 302450
aacagucgcagacuucuuu

SEQ ID NO: 302452 - RNA, 19 nt, Artificial Sequence
  Description of Artificial Sequence: Synthetic oligonucleotide
  Sense strand starting at position 2672 of SEQ ID NO: 3886
ugucaagggaauuguguua

SEQ ID NO: 302453 - RNA, 19 nt, Artificial Sequence
  Description of Artificial Sequence: Synthetic oligonucleotide
  Antisense strand to SEQ ID NO: 302452
uaacacaauucccuugaca

SEQ ID NO: 302454 - RNA, 19 nt, Artificial Sequence
  Description of Artificial Sequence: Synthetic oligonucleotide
  Sense strand starting at position 2752 of SEQ ID NO: 3886
gcgacuggauggucacauu

SEQ ID NO: 302455 - RNA, 19 nt, Artificial Sequence
  Description of Artificial Sequence: Synthetic oligonucleotide
  Antisense strand to SEQ ID NO: 302454
aaugugaccauccagucgc

SEQ ID NO: 302456 - RNA, 19 nt, Artificial Sequence
  Description of Artificial Sequence: Synthetic oligonucleotide
  Sense strand starting at position 2821 of SEQ ID NO: 3886
uuagaaagaugccuccaga

SEQ ID NO: 302457 - RNA, 19 nt, Artificial Sequence
  Description of Artificial Sequence: Synthetic oligonucleotide
  Antisense strand to SEQ ID NO: 302456
ucuggaggcaucuuucuaa

SEQ ID NO: 302458 - RNA, 19 nt, Artificial Sequence
  Description of Artificial Sequence: Synthetic oligonucleotide
  Sense strand starting at position 3222 of SEQ ID NO: 3886
gcuugauuccagugcuagc

SEQ ID NO: 302459 - RNA, 19 nt, Artificial Sequence
  Description of Artificial Sequence: Synthetic oligonucleotide
  Antisense strand to SEQ ID NO: 302458
gcuagcacuggaaucaagc

SEQ ID NO: 302460 - RNA, 19 nt, Artificial Sequence
  Description of Artificial Sequence: Synthetic oligonucleotide
  Sense strand starting at position 3441 of SEQ ID NO: 3886
ccaggaugacuuugaggua

SEQ ID NO: 302461 - RNA, 19 nt, Artificial Sequence
  Description of Artificial Sequence: Synthetic oligonucleotide
  Antisense strand to SEQ ID NO: 302460
uaccucaaagucauccugg

SEQ ID NO: 302462 - RNA, 19 nt, Artificial Sequence
  Description of Artificial Sequence: Synthetic oligonucleotide
  Sense strand starting at position 3465 of SEQ ID NO: 3886
gcugguugggaccagaauu

SEQ ID NO: 302463 - RNA, 19 nt, Artificial Sequence
  Description of Artificial Sequence: Synthetic oligonucleotide
  Antisense strand to SEQ ID NO: 302462
aauucuggucccaaccagc

SEQ ID NO: 302464 - RNA, 19 nt, Artificial Sequence
  Description of Artificial Sequence: Synthetic oligonucleotide
  Sense strand starting at position 3476 of SEQ ID NO: 3886
ccagaauuauugccuguuu

SEQ ID NO: 302465 - RNA, 19 nt, Artificial Sequence
  Description of Artificial Sequence: Synthetic oligonucleotide
  Antisense strand to SEQ ID NO: 302464
aaacaggcaauaauucugg

SEQ ID NO: 302466 - RNA, 19 nt, Artificial Sequence
  Description of Artificial Sequence: Synthetic oligonucleotide
  Sense strand starting at position 3568 of SEQ ID NO: 3886
gguguuagcugcuguuaau

SEQ ID NO: 302467 - RNA, 19 nt, Artificial Sequence
  Description of Artificial Sequence: Synthetic oligonucleotide
  Antisense strand to SEQ ID NO: 302466
auuaacagcagcuaacacc

SEQ ID NO: 302468 - RNA, 19 nt, Artificial Sequence
  Description of Artificial Sequence: Synthetic oligonucleotide
  Sense strand starting at position 3569 of SEQ ID NO: 3886
guguuagcugcuguuaauu

SEQ ID NO: 302469 - RNA, 19 nt, Artificial Sequence
  Description of Artificial Sequence: Synthetic oligonucleotide
  Antisense strand to SEQ ID NO: 302468
aauuaacagcagcuaacac

SEQ ID NO: 302470 - RNA, 19 nt, Artificial Sequence
  Description of Artificial Sequence: Synthetic oligonucleotide
  Sense strand starting at position 3924 of SEQ ID NO: 3886
cagggacucuugugggaag

SEQ ID NO: 302471 - RNA, 19 nt, Artificial Sequence
  Description of Artificial Sequence: Synthetic oligonucleotide
  Antisense strand to SEQ ID NO: 302470
cuucccacaagagucccug

SEQ ID NO: 302472 - RNA, 19 nt, Artificial Sequence
  Description of Artificial Sequence: Synthetic oligonucleotide
  Sense strand starting at position 306 of SEQ ID NO: 3887
gcagaucuguggccaauga

SEQ ID NO: 302473 - RNA, 19 nt, Artificial Sequence
  Description of Artificial Sequence: Synthetic oligonucleotide
  Antisense strand to SEQ ID NO: 302472
ucauuggccacagaucugc

SEQ ID NO: 302474 - RNA, 19 nt, Artificial Sequence
  Description of Artificial Sequence: Synthetic oligonucleotide
  Sense strand starting at position 307 of SEQ ID NO: 3887
cagaucuguggccaaugau

SEQ ID NO: 302475 - RNA, 19 nt, Artificial Sequence
  Description of Artificial Sequence: Synthetic oligonucleotide
  Antisense strand to SEQ ID NO: 302474
aucauuggccacagaucug

SEQ ID NO: 302476 - RNA, 19 nt, Artificial Sequence
  Description of Artificial Sequence: Synthetic oligonucleotide
  Sense strand starting at position 310 of SEQ ID NO: 3887
aucuguggccaaugaugua

SEQ ID NO: 302477 - RNA, 19 nt, Artificial Sequence
  Description of Artificial Sequence: Synthetic oligonucleotide
  Antisense strand to SEQ ID NO: 302476
uacaucauuggccacagau

SEQ ID NO: 302478 - RNA, 19 nt, Artificial Sequence
  Description of Artificial Sequence: Synthetic oligonucleotide
  Sense strand starting at position 353 of SEQ ID NO: 3887
guccuaaagcggcaauauu

SEQ ID NO: 302479 - RNA, 19 nt, Artificial Sequence
  Description of Artificial Sequence: Synthetic oligonucleotide
  Antisense strand to SEQ ID NO: 302478
aauauugccgcuuuaggac

SEQ ID NO: 302480 - RNA, 19 nt, Artificial Sequence
  Description of Artificial Sequence: Synthetic oligonucleotide
  Sense strand starting at position 416 of SEQ ID NO: 3887
agacgacaauucuuugaau

SEQ ID NO: 302481 - RNA, 19 nt, Artificial Sequence
  Description of Artificial Sequence: Synthetic oligonucleotide
  Antisense strand to SEQ ID NO: 302480
auucaaagaauugucgucu

SEQ ID NO: 302482 - RNA, 19 nt, Artificial Sequence
  Description of Artificial Sequence: Synthetic oligonucleotide
  Sense strand starting at position 418 of SEQ ID NO: 3887
acgacaauucuuugaauaa

SEQ ID NO: 302483 - RNA, 19 nt, Artificial Sequence
  Description of Artificial Sequence: Synthetic oligonucleotide
  Antisense strand to SEQ ID NO: 302482
uuauucaaagaauugucgu

SEQ ID NO: 302484 - RNA, 19 nt, Artificial Sequence
  Description of Artificial Sequence: Synthetic oligonucleotide
  Sense strand starting at position 448 of SEQ ID NO: 3887
guuaacucagacuaagguu

SEQ ID NO: 302485 - RNA, 19 nt, Artificial Sequence
  Description of Artificial Sequence: Synthetic oligonucleotide
  Antisense strand to SEQ ID NO: 302484
aaccuuagucugaguuaac

SEQ ID NO: 302486 - RNA, 19 nt, Artificial Sequence
  Description of Artificial Sequence: Synthetic oligonucleotide
  Sense strand starting at position 457 of SEQ ID NO: 3887
gacuaagguugcuuagaga

SEQ ID NO: 302487 - RNA, 19 nt, Artificial Sequence
  Description of Artificial Sequence: Synthetic oligonucleotide
  Antisense strand to SEQ ID NO: 302486
ucucuaagcaaccuuaguc

SEQ ID NO: 302488 - RNA, 19 nt, Artificial Sequence
  Description of Artificial Sequence: Synthetic oligonucleotide
  Sense strand starting at position 474 of SEQ ID NO: 3887
gaguuagauaagggaaugu

SEQ ID NO: 302489 - RNA, 19 nt, Artificial Sequence
  Description of Artificial Sequence: Synthetic oligonucleotide
  Antisense strand to SEQ ID NO: 302488
acauucccuuaucuaacuc

SEQ ID NO: 302490 - RNA, 19 nt, Artificial Sequence
  Description of Artificial Sequence: Synthetic oligonucleotide
  Sense strand starting at position 485 of SEQ ID NO: 3887
gggaauguaauguggacaa

SEQ ID NO: 302491 - RNA, 19 nt, Artificial Sequence
  Description of Artificial Sequence: Synthetic oligonucleotide
  Antisense strand to SEQ ID NO: 302490
uuguccacauuacauuccc

SEQ ID NO: 302492 - RNA, 19 nt, Artificial Sequence
  Description of Artificial Sequence: Synthetic oligonucleotide
  Sense strand starting at position 603 of SEQ ID NO: 3887
agucauaaaguagaauguu

SEQ ID NO: 302493 - RNA, 19 nt, Artificial Sequence
  Description of Artificial Sequence: Synthetic oligonucleotide
  Antisense strand to SEQ ID NO: 302492
aacauucuacuuuaugacu

SEQ ID NO: 302494 - RNA, 19 nt, Artificial Sequence
  Description of Artificial Sequence: Synthetic oligonucleotide
  Sense strand starting at position 612 of SEQ ID NO: 3887
guagaauguuaacucuaaa

SEQ ID NO: 302495 - RNA, 19 nt, Artificial Sequence
  Description of Artificial Sequence: Synthetic oligonucleotide
  Antisense strand to SEQ ID NO: 302494
uuuagaguuaacauucuac

SEQ ID NO: 302496 - RNA, 19 nt, Artificial Sequence
  Description of Artificial Sequence: Synthetic oligonucleotide
  Sense strand starting at position 765 of SEQ ID NO: 3887
acaugucccuuggcucaaa

SEQ ID NO: 302497 - RNA, 19 nt, Artificial Sequence
  Description of Artificial Sequence: Synthetic oligonucleotide
  Antisense strand to SEQ ID NO: 302496
uuugagccaagggacaugu

SEQ ID NO: 302498 - RNA, 19 nt, Artificial Sequence
  Description of Artificial Sequence: Synthetic oligonucleotide
  Sense strand starting at position 788 of SEQ ID NO: 3887
gguaguguagaugaaauua

SEQ ID NO: 302499 - RNA, 19 nt, Artificial Sequence
  Description of Artificial Sequence: Synthetic oligonucleotide
  Antisense strand to SEQ ID NO: 302498
uaauuucaucuacacuacc

SEQ ID NO: 302500 - RNA, 19 nt, Artificial Sequence
  Description of Artificial Sequence: Synthetic oligonucleotide
  Sense strand starting at position 866 of SEQ ID NO: 3887
gcagcaguacaauacuaau

SEQ ID NO: 302501 - RNA, 19 nt, Artificial Sequence
  Description of Artificial Sequence: Synthetic oligonucleotide
  Antisense strand to SEQ ID NO: 302500
auuaguauuguacugcugc

SEQ ID NO: 302502 - RNA, 19 nt, Artificial Sequence
  Description of Artificial Sequence: Synthetic oligonucleotide
  Sense strand starting at position 1142 of SEQ ID NO: 3887
cgaagaaaugucugaacaa

SEQ ID NO: 302503 - RNA, 19 nt, Artificial Sequence
  Description of Artificial Sequence: Synthetic oligonucleotide
  Antisense strand to SEQ ID NO: 302502
uuguucagacauuucuucg

SEQ ID NO: 302504 - RNA, 19 nt, Artificial Sequence
  Description of Artificial Sequence: Synthetic oligonucleotide
  Sense strand starting at position 1211 of SEQ ID NO: 3887
aaaguaagcucugucugca

SEQ ID NO: 302505 - RNA, 19 nt, Artificial Sequence
  Description of Artificial Sequence: Synthetic oligonucleotide
  Antisense strand to SEQ ID NO: 302504
ugcagacagagcuuacuuu

SEQ ID NO: 302506 - RNA, 19 nt, Artificial Sequence
  Description of Artificial Sequence: Synthetic oligonucleotide
  Sense strand starting at position 1216 of SEQ ID NO: 3887
aagcucugucugcaugcaa

SEQ ID NO: 302507 - RNA, 19 nt, Artificial Sequence
  Description of Artificial Sequence: Synthetic oligonucleotide
  Antisense strand to SEQ ID NO: 302506
uugcaugcagacagagcuu

SEQ ID NO: 302508 - RNA, 19 nt, Artificial Sequence
  Description of Artificial Sequence: Synthetic oligonucleotide
  Sense strand starting at position 1273 of SEQ ID NO: 3887
accuauucgccgcaauaaa

SEQ ID NO: 302509 - RNA, 19 nt, Artificial Sequence
  Description of Artificial Sequence: Synthetic oligonucleotide
  Antisense strand to SEQ ID NO: 302508
uuuauugcggcgaauaggu

SEQ ID NO: 302510 - RNA, 19 nt, Artificial Sequence
  Description of Artificial Sequence: Synthetic oligonucleotide
  Sense strand starting at position 1340 of SEQ ID NO: 3887
acgagaagucaggaaguuu

SEQ ID NO: 302511 - RNA, 19 nt, Artificial Sequence
  Description of Artificial Sequence: Synthetic oligonucleotide
  Antisense strand to SEQ ID NO: 302510
aaacuuccugacuucucgu

SEQ ID NO: 302512 - RNA, 19 nt, Artificial Sequence
  Description of Artificial Sequence: Synthetic oligonucleotide
  Sense strand starting at position 2516 of SEQ ID NO: 3887
gcggaagguccguuccagu

SEQ ID NO: 302513 - RNA, 19 nt, Artificial Sequence
  Description of Artificial Sequence: Synthetic oligonucleotide
  Antisense strand to SEQ ID NO: 302512
acuggaacggaccuuccgc

SEQ ID NO: 302514 - RNA, 19 nt, Artificial Sequence
  Description of Artificial Sequence: Synthetic oligonucleotide
  Sense strand starting at position 2533 of SEQ ID NO: 3887
gugacucuuccugguggca

SEQ ID NO: 302515 - RNA, 19 nt, Artificial Sequence
  Description of Artificial Sequence: Synthetic oligonucleotide
  Antisense strand to SEQ ID NO: 302514
ugccaccaggaagagucac

SEQ ID NO: 302516 - RNA, 19 nt, Artificial Sequence
  Description of Artificial Sequence: Synthetic oligonucleotide
  Sense strand starting at position 2567 of SEQ ID NO: 3887
cgcuuugacgucgagaaua

SEQ ID NO: 302517 - RNA, 19 nt, Artificial Sequence
  Description of Artificial Sequence: Synthetic oligonucleotide
  Antisense strand to SEQ ID NO: 302516
uauucucgacgucaaagcg

SEQ ID NO: 302518 - RNA, 19 nt, Artificial Sequence
  Description of Artificial Sequence: Synthetic oligonucleotide
  Sense strand starting at position 2645 of SEQ ID NO: 3887
auccuugggucuuccaaau

SEQ ID NO: 302519 - RNA, 19 nt, Artificial Sequence
  Description of Artificial Sequence: Synthetic oligonucleotide
  Antisense strand to SEQ ID NO: 302518
auuuggaagacccaaggau

SEQ ID NO: 302520 - RNA, 19 nt, Artificial Sequence
  Description of Artificial Sequence: Synthetic oligonucleotide
  Sense strand starting at position 2781 of SEQ ID NO: 3887
acagacugcucuuuagaau

SEQ ID NO: 302521 - RNA, 19 nt, Artificial Sequence
  Description of Artificial Sequence: Synthetic oligonucleotide
  Antisense strand to SEQ ID NO: 302520
auucuaaagagcagucugu

SEQ ID NO: 302522 - RNA, 19 nt, Artificial Sequence
  Description of Artificial Sequence: Synthetic oligonucleotide
  Sense strand starting at position 2814 of SEQ ID NO: 3887
uuccucucucgaggaagaa

SEQ ID NO: 302523 - RNA, 19 nt, Artificial Sequence
  Description of Artificial Sequence: Synthetic oligonucleotide
  Antisense strand to SEQ ID NO: 302522
uucuuccucgagagaggaa

SEQ ID NO: 302524 - RNA, 19 nt, Artificial Sequence
  Description of Artificial Sequence: Synthetic oligonucleotide
  Sense strand starting at position 2978 of SEQ ID NO: 3887
aagaaacgcugucucacua

SEQ ID NO: 302525 - RNA, 19 nt, Artificial Sequence
  Description of Artificial Sequence: Synthetic oligonucleotide
  Antisense strand to SEQ ID NO: 302524
uagugagacagcguuucuu

SEQ ID NO: 302526 - RNA, 19 nt, Artificial Sequence
  Description of Artificial Sequence: Synthetic oligonucleotide
  Sense strand starting at position 3189 of SEQ ID NO: 3887
ggcuguugucuccaagacu

SEQ ID NO: 302527 - RNA, 19 nt, Artificial Sequence
  Description of Artificial Sequence: Synthetic oligonucleotide
  Antisense strand to SEQ ID NO: 302526
agucuuggagacaacagcc

SEQ ID NO: 302528 - RNA, 19 nt, Artificial Sequence
  Description of Artificial Sequence: Synthetic oligonucleotide
  Sense strand starting at position 3192 of SEQ ID NO: 3887
uguugucuccaagacuuaa

SEQ ID NO: 302529 - RNA, 19 nt, Artificial Sequence
  Description of Artificial Sequence: Synthetic oligonucleotide
  Antisense strand to SEQ ID NO: 302528
uuaagucuuggagacaaca

SEQ ID NO: 302530 - RNA, 19 nt, Artificial Sequence
  Description of Artificial Sequence: Synthetic oligonucleotide
  Sense strand starting at position 3263 of SEQ ID NO: 3887
gcuuguagcccagagacau

SEQ ID NO: 302531 - RNA, 19 nt, Artificial Sequence
  Description of Artificial Sequence: Synthetic oligonucleotide
  Antisense strand to SEQ ID NO: 302530
augucucugggcuacaagc

SEQ ID NO: 302532 - RNA, 19 nt, Artificial Sequence
  Description of Artificial Sequence: Synthetic oligonucleotide
  Sense strand starting at position 3283 of SEQ ID NO: 3887
uuacuuuccuuagcuguau

SEQ ID NO: 302533 - RNA, 19 nt, Artificial Sequence
  Description of Artificial Sequence: Synthetic oligonucleotide
  Antisense strand to SEQ ID NO: 302532
auacagcuaaggaaaguaa

SEQ ID NO: 302534 - RNA, 19 nt, Artificial Sequence
  Description of Artificial Sequence: Synthetic oligonucleotide
  Sense strand starting at position 3297 of SEQ ID NO: 3887
uguauuuguugagugaguc

SEQ ID NO: 302535 - RNA, 19 nt, Artificial Sequence
  Description of Artificial Sequence: Synthetic oligonucleotide
  Antisense strand to SEQ ID NO: 302534
gacucacucaacaaauaca

SEQ ID NO: 302536 - RNA, 19 nt, Artificial Sequence
  Description of Artificial Sequence: Synthetic oligonucleotide
  Sense strand starting at position 3301 of SEQ ID NO: 3887
uuuguugagugagucgaua

SEQ ID NO: 302537 - RNA, 19 nt, Artificial Sequence
  Description of Artificial Sequence: Synthetic oligonucleotide
  Antisense strand to SEQ ID NO: 302536
uaucgacucacucaacaaa

SEQ ID NO: 302538 - RNA, 19 nt, Artificial Sequence
  Description of Artificial Sequence: Synthetic oligonucleotide
  Sense strand starting at position 3303 of SEQ ID NO: 3887
uguugagugagucgauaua

SEQ ID NO: 302539 - RNA, 19 nt, Artificial Sequence
  Description of Artificial Sequence: Synthetic oligonucleotide
  Antisense strand to SEQ ID NO: 302538
uauaucgacucacucaaca

SEQ ID NO: 302540 - RNA, 19 nt, Artificial Sequence
  Description of Artificial Sequence: Synthetic oligonucleotide
  Sense strand starting at position 3309 of SEQ ID NO: 3887
gugagucgauauaugugua

SEQ ID NO: 302541 - RNA, 19 nt, Artificial Sequence
  Description of Artificial Sequence: Synthetic oligonucleotide
  Antisense strand to SEQ ID NO: 302540
uacacauauaucgacucac

SEQ ID NO: 302542 - RNA, 19 nt, Artificial Sequence
  Description of Artificial Sequence: Synthetic oligonucleotide
  Sense strand starting at position 3310 of SEQ ID NO: 3887
ugagucgauauauguguaa

SEQ ID NO: 302543 - RNA, 19 nt, Artificial Sequence
  Description of Artificial Sequence: Synthetic oligonucleotide
  Antisense strand to SEQ ID NO: 302542
uuacacauauaucgacuca

SEQ ID NO: 302544 - RNA, 19 nt, Artificial Sequence
  Description of Artificial Sequence: Synthetic oligonucleotide
  Sense strand starting at position 3312 of SEQ ID NO: 3887
agucgauauauguguaagg

SEQ ID NO: 302545 - RNA, 19 nt, Artificial Sequence
  Description of Artificial Sequence: Synthetic oligonucleotide
  Antisense strand to SEQ ID NO: 302544
ccuuacacauauaucgacu

SEQ ID NO: 302546 - RNA, 19 nt, Artificial Sequence
  Description of Artificial Sequence: Synthetic oligonucleotide
  Sense strand starting at position 3481 of SEQ ID NO: 3887
augaccuuagccuaaugau

SEQ ID NO: 302547 - RNA, 19 nt, Artificial Sequence
  Description of Artificial Sequence: Synthetic oligonucleotide
  Antisense strand to SEQ ID NO: 302546
aucauuaggcuaaggucau

SEQ ID NO: 302548 - RNA, 19 nt, Artificial Sequence
  Description of Artificial Sequence: Synthetic oligonucleotide
  Sense strand starting at position 3758 of SEQ ID NO: 3887
gcacuauacccucgacaag

SEQ ID NO: 302549 - RNA, 19 nt, Artificial Sequence
  Description of Artificial Sequence: Synthetic oligonucleotide
  Antisense strand to SEQ ID NO: 302548
cuugucgaggguauagugc

SEQ ID NO: 302550 - RNA, 19 nt, Artificial Sequence
  Description of Artificial Sequence: Synthetic oligonucleotide
  Sense strand starting at position 3918 of SEQ ID NO: 3887
gcaagagauuucuggaagg

SEQ ID NO: 302551 - RNA, 19 nt, Artificial Sequence
  Description of Artificial Sequence: Synthetic oligonucleotide
  Antisense strand to SEQ ID NO: 302550
ccuuccagaaaucucuugc

SEQ ID NO: 302552 - RNA, 19 nt, Artificial Sequence
  Description of Artificial Sequence: Synthetic oligonucleotide
  Sense strand starting at position 9 of SEQ ID NO: 3888
aucugagggcuccagcuua

SEQ ID NO: 302553 - RNA, 19 nt, Artificial Sequence
  Description of Artificial Sequence: Synthetic oligonucleotide
  Antisense strand to SEQ ID NO: 302552
uaagcuggagcccucagau

SEQ ID NO: 302554 - RNA, 19 nt, Artificial Sequence
  Description of Artificial Sequence: Synthetic oligonucleotide
  Sense strand starting at position 118 of SEQ ID NO: 3888
gccucacuccugggaggau

SEQ ID NO: 302555 - RNA, 19 nt, Artificial Sequence
  Description of Artificial Sequence: Synthetic oligonucleotide
  Antisense strand to SEQ ID NO: 302554
auccucccaggagugaggc

SEQ ID NO: 302556 - RNA, 19 nt, Artificial Sequence
  Description of Artificial Sequence: Synthetic oligonucleotide
  Sense strand starting at position 185 of SEQ ID NO: 3888
guaacugucaaguaguguu

SEQ ID NO: 302557 - RNA, 19 nt, Artificial Sequence
  Description of Artificial Sequence: Synthetic oligonucleotide
  Antisense strand to SEQ ID NO: 302556
aacacuacuugacaguuac

SEQ ID NO: 302558 - RNA, 19 nt, Artificial Sequence
  Description of Artificial Sequence: Synthetic oligonucleotide
  Sense strand starting at position 193 of SEQ ID NO: 3888
caaguaguguuguuauuaa

SEQ ID NO: 302559 - RNA, 19 nt, Artificial Sequence
  Description of Artificial Sequence: Synthetic oligonucleotide
  Antisense strand to SEQ ID NO: 302558
uuaauaacaacacuacuug

SEQ ID NO: 302560 - RNA, 19 nt, Artificial Sequence
  Description of Artificial Sequence: Synthetic oligonucleotide
  Sense strand starting at position 213 of SEQ ID NO: 3888
uggcucuuaggauacuuau

SEQ ID NO: 302561 - RNA, 19 nt, Artificial Sequence
  Description of Artificial Sequence: Synthetic oligonucleotide
  Antisense strand to SEQ ID NO: 302560
auaaguauccuaagagcca

SEQ ID NO: 302562 - RNA, 19 nt, Artificial Sequence
  Description of Artificial Sequence: Synthetic oligonucleotide
  Sense strand starting at position 222 of SEQ ID NO: 3888
ggauacuuauuguuccuga

SEQ ID NO: 302563 - RNA, 19 nt, Artificial Sequence
  Description of Artificial Sequence: Synthetic oligonucleotide
  Antisense strand to SEQ ID NO: 302562
ucaggaacaauaaguaucc

SEQ ID NO: 302564 - RNA, 19 nt, Artificial Sequence
  Description of Artificial Sequence: Synthetic oligonucleotide
  Sense strand starting at position 247 of SEQ ID NO: 3888
aggacagcucuuugcuuga

SEQ ID NO: 302565 - RNA, 19 nt, Artificial Sequence
  Description of Artificial Sequence: Synthetic oligonucleotide
  Antisense strand to SEQ ID NO: 302564
ucaagcaaagagcuguccu

SEQ ID NO: 302566 - RNA, 19 nt, Artificial Sequence
  Description of Artificial Sequence: Synthetic oligonucleotide
  Sense strand starting at position 697 of SEQ ID NO: 3888
gaagcuuuagagcaagguu

SEQ ID NO: 302567 - RNA, 19 nt, Artificial Sequence
  Description of Artificial Sequence: Synthetic oligonucleotide
  Antisense strand to SEQ ID NO: 302566
aaccuugcucuaaagcuuc

SEQ ID NO: 302568 - RNA, 19 nt, Artificial Sequence
  Description of Artificial Sequence: Synthetic oligonucleotide
  Sense strand starting at position 906 of SEQ ID NO: 3888
aguugaggucccuaaggcu

SEQ ID NO: 302569 - RNA, 19 nt, Artificial Sequence
  Description of Artificial Sequence: Synthetic oligonucleotide
  Antisense strand to SEQ ID NO: 302568
agccuuagggaccucaacu

SEQ ID NO: 302570 - RNA, 19 nt, Artificial Sequence
  Description of Artificial Sequence: Synthetic oligonucleotide
  Sense strand starting at position 972 of SEQ ID NO: 3888
ggaaauugcccuggcuaga

SEQ ID NO: 302571 - RNA, 19 nt, Artificial Sequence
  Description of Artificial Sequence: Synthetic oligonucleotide
  Antisense strand to SEQ ID NO: 302570
ucuagccagggcaauuucc

SEQ ID NO: 302572 - RNA, 19 nt, Artificial Sequence
  Description of Artificial Sequence: Synthetic oligonucleotide
  Sense strand starting at position 1189 of SEQ ID NO: 3888
uccauaugccagugaugga

SEQ ID NO: 302573 - RNA, 19 nt, Artificial Sequence
  Description of Artificial Sequence: Synthetic oligonucleotide
  Antisense strand to SEQ ID NO: 302572
uccaucacuggcauaugga

SEQ ID NO: 302574 - RNA, 19 nt, Artificial Sequence
  Description of Artificial Sequence: Synthetic oligonucleotide
  Sense strand starting at position 1330 of SEQ ID NO: 3888
ugagauguuucugccacaa

SEQ ID NO: 302575 - RNA, 19 nt, Artificial Sequence
  Description of Artificial Sequence: Synthetic oligonucleotide
  Antisense strand to SEQ ID NO: 302574
uuguggcagaaacaucuca

SEQ ID NO: 302576 - RNA, 19 nt, Artificial Sequence
  Description of Artificial Sequence: Synthetic oligonucleotide
  Sense strand starting at position 2379 of SEQ ID NO: 3888
aacggugaguccucuagga

SEQ ID NO: 302577 - RNA, 19 nt, Artificial Sequence
  Description of Artificial Sequence: Synthetic oligonucleotide
  Antisense strand to SEQ ID NO: 302576
uccuagaggacucaccguu

SEQ ID NO: 302578 - RNA, 19 nt, Artificial Sequence
  Description of Artificial Sequence: Synthetic oligonucleotide
  Sense strand starting at position 2381 of SEQ ID NO: 3888
cggugaguccucuaggaag

SEQ ID NO: 302579 - RNA, 19 nt, Artificial Sequence
  Description of Artificial Sequence: Synthetic oligonucleotide
  Antisense strand to SEQ ID NO: 302578
cuuccuagaggacucaccg

SEQ ID NO: 302580 - RNA, 19 nt, Artificial Sequence
  Description of Artificial Sequence: Synthetic oligonucleotide
  Sense strand starting at position 2383 of SEQ ID NO: 3888
gugaguccucuaggaagcu

SEQ ID NO: 302581 - RNA, 19 nt, Artificial Sequence
  Description of Artificial Sequence: Synthetic oligonucleotide
  Antisense strand to SEQ ID NO: 302580
agcuuccuagaggacucac

SEQ ID NO: 302582 - RNA, 19 nt, Artificial Sequence
  Description of Artificial Sequence: Synthetic oligonucleotide
  Sense strand starting at position 2466 of SEQ ID NO: 3888
caaagacuuggcuguuucu

SEQ ID NO: 302583 - RNA, 19 nt, Artificial Sequence
  Description of Artificial Sequence: Synthetic oligonucleotide
  Antisense strand to SEQ ID NO: 302582
agaaacagccaagucuuug

SEQ ID NO: 302584 - RNA, 19 nt, Artificial Sequence
  Description of Artificial Sequence: Synthetic oligonucleotide
  Sense strand starting at position 2472 of SEQ ID NO: 3888
cuuggcuguuucuuaagaa

SEQ ID NO: 302585 - RNA, 19 nt, Artificial Sequence
  Description of Artificial Sequence: Synthetic oligonucleotide
  Antisense strand to SEQ ID NO: 302584
uucuuaagaaacagccaag

SEQ ID NO: 302586 - RNA, 19 nt, Artificial Sequence
  Description of Artificial Sequence: Synthetic oligonucleotide
  Sense strand starting at position 2571 of SEQ ID NO: 3888
ugcuuuccugcauacaagu

SEQ ID NO: 302587 - RNA, 19 nt, Artificial Sequence
  Description of Artificial Sequence: Synthetic oligonucleotide
  Antisense strand to SEQ ID NO: 302586
acuuguaugcaggaaagca

SEQ ID NO: 302588 - RNA, 19 nt, Artificial Sequence
  Description of Artificial Sequence: Synthetic oligonucleotide
  Sense strand starting at position 2595 of SEQ ID NO: 3888
auguacuagccagaaauca

SEQ ID NO: 302589 - RNA, 19 nt, Artificial Sequence
  Description of Artificial Sequence: Synthetic oligonucleotide
  Antisense strand to SEQ ID NO: 302588
ugauuucuggcuaguacau

SEQ ID NO: 302590 - RNA, 19 nt, Artificial Sequence
  Description of Artificial Sequence: Synthetic oligonucleotide
  Sense strand starting at position 2603 of SEQ ID NO: 3888
gccagaaaucaguguccaa

SEQ ID NO: 302591 - RNA, 19 nt, Artificial Sequence
  Description of Artificial Sequence: Synthetic oligonucleotide
  Antisense strand to SEQ ID NO: 302590
uuggacacugauuucuggc

SEQ ID NO: 302592 - RNA, 19 nt, Artificial Sequence
  Description of Artificial Sequence: Synthetic oligonucleotide
  Sense strand starting at position 2694 of SEQ ID NO: 3888
gacacauguaggugucagu

SEQ ID NO: 302593 - RNA, 19 nt, Artificial Sequence
  Description of Artificial Sequence: Synthetic oligonucleotide
  Antisense strand to SEQ ID NO: 302592
acugacaccuacauguguc

SEQ ID NO: 302594 - RNA, 19 nt, Artificial Sequence
  Description of Artificial Sequence: Synthetic oligonucleotide
  Sense strand starting at position 2707 of SEQ ID NO: 3888
gucaguguagaguagguaa

SEQ ID NO: 302595 - RNA, 19 nt, Artificial Sequence
  Description of Artificial Sequence: Synthetic oligonucleotide
  Antisense strand to SEQ ID NO: 302594
uuaccuacucuacacugac

SEQ ID NO: 302596 - RNA, 19 nt, Artificial Sequence
  Description of Artificial Sequence: Synthetic oligonucleotide
  Sense strand starting at position 2739 of SEQ ID NO: 3888
caguguugguaagcaaaga

SEQ ID NO: 302597 - RNA, 19 nt, Artificial Sequence
  Description of Artificial Sequence: Synthetic oligonucleotide
  Antisense strand to SEQ ID NO: 302596
ucuuugcuuaccaacacug

SEQ ID NO: 302598 - RNA, 19 nt, Artificial Sequence
  Description of Artificial Sequence: Synthetic oligonucleotide
  Sense strand starting at position 2837 of SEQ ID NO: 3888
aaacuuacaggcuaugagu

SEQ ID NO: 302599 - RNA, 19 nt, Artificial Sequence
  Description of Artificial Sequence: Synthetic oligonucleotide
  Antisense strand to SEQ ID NO: 302598
acucauagccuguaaguuu

SEQ ID NO: 302600 - RNA, 19 nt, Artificial Sequence
  Description of Artificial Sequence: Synthetic oligonucleotide
  Sense strand starting at position 2853 of SEQ ID NO: 3888
agugcauuccuggauguuu

SEQ ID NO: 302601 - RNA, 19 nt, Artificial Sequence
  Description of Artificial Sequence: Synthetic oligonucleotide
  Antisense strand to SEQ ID NO: 302600
aaacauccaggaaugcacu

SEQ ID NO: 302602 - RNA, 19 nt, Artificial Sequence
  Description of Artificial Sequence: Synthetic oligonucleotide
  Sense strand starting at position 3192 of SEQ ID NO: 3888
cccggauguuucuuaaauu

SEQ ID NO: 302603 - RNA, 19 nt, Artificial Sequence
  Description of Artificial Sequence: Synthetic oligonucleotide
  Antisense strand to SEQ ID NO: 302602
aauuuaagaaacauccggg

SEQ ID NO: 302604 - RNA, 19 nt, Artificial Sequence
  Description of Artificial Sequence: Synthetic oligonucleotide
  Sense strand starting at position 3206 of SEQ ID NO: 3888
aaauuauugcaagggugga

SEQ ID NO: 302605 - RNA, 19 nt, Artificial Sequence
  Description of Artificial Sequence: Synthetic oligonucleotide
  Antisense strand to SEQ ID NO: 302604
uccacccuugcaauaauuu

SEQ ID NO: 302606 - RNA, 19 nt, Artificial Sequence
  Description of Artificial Sequence: Synthetic oligonucleotide
  Sense strand starting at position 3210 of SEQ ID NO: 3888
uauugcaaggguggaaaua

SEQ ID NO: 302607 - RNA, 19 nt, Artificial Sequence
  Description of Artificial Sequence: Synthetic oligonucleotide
  Antisense strand to SEQ ID NO: 302606
uauuuccacccuugcaaua

SEQ ID NO: 302608 - RNA, 19 nt, Artificial Sequence
  Description of Artificial Sequence: Synthetic oligonucleotide
  Sense strand starting at position 3251 of SEQ ID NO: 3888
cuggcauucugucucaaag

SEQ ID NO: 302609 - RNA, 19 nt, Artificial Sequence
  Description of Artificial Sequence: Synthetic oligonucleotide
  Antisense strand to SEQ ID NO: 302608
cuuugagacagaaugccag

SEQ ID NO: 302610 - RNA, 19 nt, Artificial Sequence
  Description of Artificial Sequence: Synthetic oligonucleotide
  Sense strand starting at position 3291 of SEQ ID NO: 3888
gcccuugugagaugacaga

SEQ ID NO: 302611 - RNA, 19 nt, Artificial Sequence
  Description of Artificial Sequence: Synthetic oligonucleotide
  Antisense strand to SEQ ID NO: 302610
ucugucaucucacaagggc

SEQ ID NO: 302612 - RNA, 19 nt, Artificial Sequence
  Description of Artificial Sequence: Synthetic oligonucleotide
  Sense strand starting at position 3378 of SEQ ID NO: 3888
aggcaaaggcuaugugaaa

SEQ ID NO: 302613 - RNA, 19 nt, Artificial Sequence
  Description of Artificial Sequence: Synthetic oligonucleotide
  Antisense strand to SEQ ID NO: 302612
uuucacauagccuuugccu

SEQ ID NO: 302614 - RNA, 19 nt, Artificial Sequence
  Description of Artificial Sequence: Synthetic oligonucleotide
  Sense strand starting at position 3403 of SEQ ID NO: 3888
gguccugugcuuuagagaa

SEQ ID NO: 302615 - RNA, 19 nt, Artificial Sequence
  Description of Artificial Sequence: Synthetic oligonucleotide
  Antisense strand to SEQ ID NO: 302614
uucucuaaagcacaggacc

SEQ ID NO: 302616 - RNA, 19 nt, Artificial Sequence
  Description of Artificial Sequence: Synthetic oligonucleotide
  Sense strand starting at position 3411 of SEQ ID NO: 3888
gcuuuagagaaguagagca

SEQ ID NO: 302617 - RNA, 19 nt, Artificial Sequence
  Description of Artificial Sequence: Synthetic oligonucleotide
  Antisense strand to SEQ ID NO: 302616
ugcucuacuucucuaaagc

SEQ ID NO: 302618 - RNA, 19 nt, Artificial Sequence
  Description of Artificial Sequence: Synthetic oligonucleotide
  Sense strand starting at position 3815 of SEQ ID NO: 3888
agagcccuguccuuaaaca

SEQ ID NO: 302619 - RNA, 19 nt, Artificial Sequence
  Description of Artificial Sequence: Synthetic oligonucleotide
  Antisense strand to SEQ ID NO: 302618
uguuuaaggacagggcucu

SEQ ID NO: 302620 - RNA, 19 nt, Artificial Sequence
  Description of Artificial Sequence: Synthetic oligonucleotide
  Sense strand starting at position 3861 of SEQ ID NO: 3888
caagaaguauggcugugua

SEQ ID NO: 302621 - RNA, 19 nt, Artificial Sequence
  Description of Artificial Sequence: Synthetic oligonucleotide
  Antisense strand to SEQ ID NO: 302620
uacacagccauacuucuug

SEQ ID NO: 302622 - RNA, 19 nt, Artificial Sequence
  Description of Artificial Sequence: Synthetic oligonucleotide
  Sense strand starting at position 3873 of SEQ ID NO: 3888
cuguguagugaucacugua

SEQ ID NO: 302623 - RNA, 19 nt, Artificial Sequence
  Description of Artificial Sequence: Synthetic oligonucleotide
  Antisense strand to SEQ ID NO: 302622
uacagugaucacuacacag

SEQ ID NO: 302624 - RNA, 19 nt, Artificial Sequence
  Description of Artificial Sequence: Synthetic oligonucleotide
  Sense strand starting at position 3876 of SEQ ID NO: 3888
uguagugaucacuguacaa

SEQ ID NO: 302625 - RNA, 19 nt, Artificial Sequence
  Description of Artificial Sequence: Synthetic oligonucleotide
  Antisense strand to SEQ ID NO: 302624
uuguacagugaucacuaca

SEQ ID NO: 302626 - RNA, 19 nt, Artificial Sequence
  Description of Artificial Sequence: Synthetic oligonucleotide
  Sense strand starting at position 3895 of SEQ ID NO: 3888
gcacaccuggcugaauaaa

SEQ ID NO: 302627 - RNA, 19 nt, Artificial Sequence
  Description of Artificial Sequence: Synthetic oligonucleotide
  Antisense strand to SEQ ID NO: 302626
uuuauucagccaggugugc

SEQ ID NO: 302628 - RNA, 19 nt, Artificial Sequence
  Description of Artificial Sequence: Synthetic oligonucleotide
  Sense strand starting at position 3953 of SEQ ID NO: 3888
ugcuuugugccucaggaca

SEQ ID NO: 302629 - RNA, 19 nt, Artificial Sequence
  Description of Artificial Sequence: Synthetic oligonucleotide
  Antisense strand to SEQ ID NO: 302628
uguccugaggcacaaagca

SEQ ID NO: 302630 - RNA, 19 nt, Artificial Sequence
  Description of Artificial Sequence: Synthetic oligonucleotide
  Sense strand starting at position 3975 of SEQ ID NO: 3888
gugugcuuccuugcuaauu

SEQ ID NO: 302631 - RNA, 19 nt, Artificial Sequence
  Description of Artificial Sequence: Synthetic oligonucleotide
  Antisense strand to SEQ ID NO: 302630
aauuagcaaggaagcacac

SEQ ID NO: 302632 - RNA, 19 nt, Artificial Sequence
  Description of Artificial Sequence: Synthetic oligonucleotide
  Sense strand starting at position 19 of SEQ ID NO: 3889
augaaauuccguugaccag

SEQ ID NO: 302633 - RNA, 19 nt, Artificial Sequence
  Description of Artificial Sequence: Synthetic oligonucleotide
  Antisense strand to SEQ ID NO: 302632
cuggucaacggaauuucau

SEQ ID NO: 302634 - RNA, 19 nt, Artificial Sequence
  Description of Artificial Sequence: Synthetic oligonucleotide
  Sense strand starting at position 20 of SEQ ID NO: 3889
ugaaauuccguugaccaga

SEQ ID NO: 302635 - RNA, 19 nt, Artificial Sequence
  Description of Artificial Sequence: Synthetic oligonucleotide
  Antisense strand to SEQ ID NO: 302634
ucuggucaacggaauuuca

SEQ ID NO: 302636 - RNA, 19 nt, Artificial Sequence
  Description of Artificial Sequence: Synthetic oligonucleotide
  Sense strand starting at position 254 of SEQ ID NO: 3889
cuacgauauuagcuggaga

SEQ ID NO: 302637 - RNA, 19 nt, Artificial Sequence
  Description of Artificial Sequence: Synthetic oligonucleotide
  Antisense strand to SEQ ID NO: 302636
ucuccagcuaauaucguag

SEQ ID NO: 302638 - RNA, 19 nt, Artificial Sequence
  Description of Artificial Sequence: Synthetic oligonucleotide
  Sense strand starting at position 360 of SEQ ID NO: 3889
gcaucuaguuaugugagaa

SEQ ID NO: 302639 - RNA, 19 nt, Artificial Sequence
  Description of Artificial Sequence: Synthetic oligonucleotide
  Antisense strand to SEQ ID NO: 302638
uucucacauaacuagaugc

SEQ ID NO: 302640 - RNA, 19 nt, Artificial Sequence
  Description of Artificial Sequence: Synthetic oligonucleotide
  Sense strand starting at position 393 of SEQ ID NO: 3889
gcaacagaggugcagaauu

SEQ ID NO: 302641 - RNA, 19 nt, Artificial Sequence
  Description of Artificial Sequence: Synthetic oligonucleotide
  Antisense strand to SEQ ID NO: 302640
aauucugcaccucuguugc

SEQ ID NO: 302642 - RNA, 19 nt, Artificial Sequence
  Description of Artificial Sequence: Synthetic oligonucleotide
  Sense strand starting at position 453 of SEQ ID NO: 3889
gcggauucucugggaacug

SEQ ID NO: 302643 - RNA, 19 nt, Artificial Sequence
  Description of Artificial Sequence: Synthetic oligonucleotide
  Antisense strand to SEQ ID NO: 302642
caguucccagagaauccgc

SEQ ID NO: 302644 - RNA, 19 nt, Artificial Sequence
  Description of Artificial Sequence: Synthetic oligonucleotide
  Sense strand starting at position 520 of SEQ ID NO: 3889
ggagaaagagaucgugcau

SEQ ID NO: 302645 - RNA, 19 nt, Artificial Sequence
  Description of Artificial Sequence: Synthetic oligonucleotide
  Antisense strand to SEQ ID NO: 302644
augcacgaucucuuucucc

SEQ ID NO: 302646 - RNA, 19 nt, Artificial Sequence
  Description of Artificial Sequence: Synthetic oligonucleotide
  Sense strand starting at position 532 of SEQ ID NO: 3889
cgugcauccgaacacuaaa

SEQ ID NO: 302647 - RNA, 19 nt, Artificial Sequence
  Description of Artificial Sequence: Synthetic oligonucleotide
  Antisense strand to SEQ ID NO: 302646
uuuaguguucggaugcacg

SEQ ID NO: 302648 - RNA, 19 nt, Artificial Sequence
  Description of Artificial Sequence: Synthetic oligonucleotide
  Sense strand starting at position 689 of SEQ ID NO: 3889
agggccuggcugcaagaau

SEQ ID NO: 302649 - RNA, 19 nt, Artificial Sequence
  Description of Artificial Sequence: Synthetic oligonucleotide
  Antisense strand to SEQ ID NO: 302648
auucuugcagccaggcccu

SEQ ID NO: 302650 - RNA, 19 nt, Artificial Sequence
  Description of Artificial Sequence: Synthetic oligonucleotide
  Sense strand starting at position 1060 of SEQ ID NO: 3889
guggcauccauccagauga

SEQ ID NO: 302651 - RNA, 19 nt, Artificial Sequence
  Description of Artificial Sequence: Synthetic oligonucleotide
  Antisense strand to SEQ ID NO: 302650
ucaucuggauggaugccac

SEQ ID NO: 302652 - RNA, 19 nt, Artificial Sequence
  Description of Artificial Sequence: Synthetic oligonucleotide
  Sense strand starting at position 1076 of SEQ ID NO: 3889
ugagguugguggcccaaau

SEQ ID NO: 302653 - RNA, 19 nt, Artificial Sequence
  Description of Artificial Sequence: Synthetic oligonucleotide
  Antisense strand to SEQ ID NO: 302652
auuugggccaccaaccuca

SEQ ID NO: 302654 - RNA, 19 nt, Artificial Sequence
  Description of Artificial Sequence: Synthetic oligonucleotide
  Sense strand starting at position 1153 of SEQ ID NO: 3889
ccgcguccgcgauuagaau

SEQ ID NO: 302655 - RNA, 19 nt, Artificial Sequence
  Description of Artificial Sequence: Synthetic oligonucleotide
  Antisense strand to SEQ ID NO: 302654
auucuaaucgcggacgcgg

SEQ ID NO: 302656 - RNA, 19 nt, Artificial Sequence
  Description of Artificial Sequence: Synthetic oligonucleotide
  Sense strand starting at position 2583 of SEQ ID NO: 3889
ccaguuucucccuggagca

SEQ ID NO: 302657 - RNA, 19 nt, Artificial Sequence
  Description of Artificial Sequence: Synthetic oligonucleotide
  Antisense strand to SEQ ID NO: 302656
ugcuccagggagaaacugg

SEQ ID NO: 302658 - RNA, 19 nt, Artificial Sequence
  Description of Artificial Sequence: Synthetic oligonucleotide
  Sense strand starting at position 2645 of SEQ ID NO: 3889
auagaagaugcuugaacuc

SEQ ID NO: 302659 - RNA, 19 nt, Artificial Sequence
  Description of Artificial Sequence: Synthetic oligonucleotide
  Antisense strand to SEQ ID NO: 302658
gaguucaagcaucuucuau

SEQ ID NO: 302660 - RNA, 19 nt, Artificial Sequence
  Description of Artificial Sequence: Synthetic oligonucleotide
  Sense strand starting at position 2693 of SEQ ID NO: 3889
gccuuugucccauacaguu

SEQ ID NO: 302661 - RNA, 19 nt, Artificial Sequence
  Description of Artificial Sequence: Synthetic oligonucleotide
  Antisense strand to SEQ ID NO: 302660
aacuguaugggacaaaggc

SEQ ID NO: 302662 - RNA, 19 nt, Artificial Sequence
  Description of Artificial Sequence: Synthetic oligonucleotide
  Sense strand starting at position 2727 of SEQ ID NO: 3889
cuaagucuugugugaucuu

SEQ ID NO: 302663 - RNA, 19 nt, Artificial Sequence
  Description of Artificial Sequence: Synthetic oligonucleotide
  Antisense strand to SEQ ID NO: 302662
aagaucacacaagacuuag

SEQ ID NO: 302664 - RNA, 19 nt, Artificial Sequence
  Description of Artificial Sequence: Synthetic oligonucleotide
  Sense strand starting at position 2828 of SEQ ID NO: 3889
ggcugaucucaccagugag

SEQ ID NO: 302665 - RNA, 19 nt, Artificial Sequence
  Description of Artificial Sequence: Synthetic oligonucleotide
  Antisense strand to SEQ ID NO: 302664
cucacuggugagaucagcc

SEQ ID NO: 302666 - RNA, 19 nt, Artificial Sequence
  Description of Artificial Sequence: Synthetic oligonucleotide
  Sense strand starting at position 2871 of SEQ ID NO: 3889
cucucuugaugcccagaga

SEQ ID NO: 302667 - RNA, 19 nt, Artificial Sequence
  Description of Artificial Sequence: Synthetic oligonucleotide
  Antisense strand to SEQ ID NO: 302666
ucucugggcaucaagagag

SEQ ID NO: 302668 - RNA, 19 nt, Artificial Sequence
  Description of Artificial Sequence: Synthetic oligonucleotide
  Sense strand starting at position 2900 of SEQ ID NO: 3889
aggaccugcuguuuaauaa

SEQ ID NO: 302669 - RNA, 19 nt, Artificial Sequence
  Description of Artificial Sequence: Synthetic oligonucleotide
  Antisense strand to SEQ ID NO: 302668
uuauuaaacagcagguccu

SEQ ID NO: 302670 - RNA, 19 nt, Artificial Sequence
  Description of Artificial Sequence: Synthetic oligonucleotide
  Sense strand starting at position 2901 of SEQ ID NO: 3889
ggaccugcuguuuaauaaa

SEQ ID NO: 302671 - RNA, 19 nt, Artificial Sequence
  Description of Artificial Sequence: Synthetic oligonucleotide
  Antisense strand to SEQ ID NO: 302670
uuuauuaaacagcaggucc

SEQ ID NO: 302672 - RNA, 19 nt, Artificial Sequence
  Description of Artificial Sequence: Synthetic oligonucleotide
  Sense strand starting at position 2972 of SEQ ID NO: 3889
uugguaugcuaaguuugaa

SEQ ID NO: 302673 - RNA, 19 nt, Artificial Sequence
  Description of Artificial Sequence: Synthetic oligonucleotide
  Antisense strand to SEQ ID NO: 302672
uucaaacuuagcauaccaa

SEQ ID NO: 302674 - RNA, 19 nt, Artificial Sequence
  Description of Artificial Sequence: Synthetic oligonucleotide
  Sense strand starting at position 2975 of SEQ ID NO: 3889
guaugcuaaguuugaacua

SEQ ID NO: 302675 - RNA, 19 nt, Artificial Sequence
  Description of Artificial Sequence: Synthetic oligonucleotide
  Antisense strand to SEQ ID NO: 302674
uaguucaaacuuagcauac

SEQ ID NO: 302676 - RNA, 19 nt, Artificial Sequence
  Description of Artificial Sequence: Synthetic oligonucleotide
  Sense strand starting at position 3183 of SEQ ID NO: 3889
agaccuaccuugucugaua

SEQ ID NO: 302677 - RNA, 19 nt, Artificial Sequence
  Description of Artificial Sequence: Synthetic oligonucleotide
  Antisense strand to SEQ ID NO: 302676
uaucagacaagguaggucu

SEQ ID NO: 302678 - RNA, 19 nt, Artificial Sequence
  Description of Artificial Sequence: Synthetic oligonucleotide
  Sense strand starting at position 3229 of SEQ ID NO: 3889
gagguccugcucuauacau

SEQ ID NO: 302679 - RNA, 19 nt, Artificial Sequence
  Description of Artificial Sequence: Synthetic oligonucleotide
  Antisense strand to SEQ ID NO: 302678
auguauagagcaggaccuc

SEQ ID NO: 302680 - RNA, 19 nt, Artificial Sequence
  Description of Artificial Sequence: Synthetic oligonucleotide
  Sense strand starting at position 3341 of SEQ ID NO: 3889
uuucuauaaggcuguccau

SEQ ID NO: 302681 - RNA, 19 nt, Artificial Sequence
  Description of Artificial Sequence: Synthetic oligonucleotide
  Antisense strand to SEQ ID NO: 302680
auggacagccuuauagaaa

SEQ ID NO: 302682 - RNA, 19 nt, Artificial Sequence
  Description of Artificial Sequence: Synthetic oligonucleotide
  Sense strand starting at position 3452 of SEQ ID NO: 3889
ucaauaaauuuguuacgcu

SEQ ID NO: 302683 - RNA, 19 nt, Artificial Sequence
  Description of Artificial Sequence: Synthetic oligonucleotide
  Antisense strand to SEQ ID NO: 302682
agcguaacaaauuuauuga

SEQ ID NO: 302684 - RNA, 19 nt, Artificial Sequence
  Description of Artificial Sequence: Synthetic oligonucleotide
  Sense strand starting at position 3593 of SEQ ID NO: 3889
uccggcuuucgucuuuaga

SEQ ID NO: 302685 - RNA, 19 nt, Artificial Sequence
  Description of Artificial Sequence: Synthetic oligonucleotide
  Antisense strand to SEQ ID NO: 302684
ucuaaagacgaaagccgga

SEQ ID NO: 302686 - RNA, 19 nt, Artificial Sequence
  Description of Artificial Sequence: Synthetic oligonucleotide
  Sense strand starting at position 3594 of SEQ ID NO: 3889
ccggcuuucgucuuuagau

SEQ ID NO: 302687 - RNA, 19 nt, Artificial Sequence
  Description of Artificial Sequence: Synthetic oligonucleotide
  Antisense strand to SEQ ID NO: 302686
aucuaaagacgaaagccgg

SEQ ID NO: 302688 - RNA, 19 nt, Artificial Sequence
  Description of Artificial Sequence: Synthetic oligonucleotide
  Sense strand starting at position 3596 of SEQ ID NO: 3889
ggcuuucgucuuuagauug

SEQ ID NO: 302689 - RNA, 19 nt, Artificial Sequence
  Description of Artificial Sequence: Synthetic oligonucleotide
  Antisense strand to SEQ ID NO: 302688
caaucuaaagacgaaagcc

SEQ ID NO: 302690 - RNA, 19 nt, Artificial Sequence
  Description of Artificial Sequence: Synthetic oligonucleotide
  Sense strand starting at position 3674 of SEQ ID NO: 3889
ccuccucguuucuugaaga

SEQ ID NO: 302691 - RNA, 19 nt, Artificial Sequence
  Description of Artificial Sequence: Synthetic oligonucleotide
  Antisense strand to SEQ ID NO: 302690
ucuucaagaaacgaggagg

SEQ ID NO: 302692 - RNA, 19 nt, Artificial Sequence
  Description of Artificial Sequence: Synthetic oligonucleotide
  Sense strand starting at position 3719 of SEQ ID NO: 3889
cuuugcuugugauugaaau

SEQ ID NO: 302693 - RNA, 19 nt, Artificial Sequence
  Description of Artificial Sequence: Synthetic oligonucleotide
  Antisense strand to SEQ ID NO: 302692
auuucaaucacaagcaaag

SEQ ID NO: 302694 - RNA, 19 nt, Artificial Sequence
  Description of Artificial Sequence: Synthetic oligonucleotide
  Sense strand starting at position 3720 of SEQ ID NO: 3889
uuugcuugugauugaaaug

SEQ ID NO: 302695 - RNA, 19 nt, Artificial Sequence
  Description of Artificial Sequence: Synthetic oligonucleotide
  Antisense strand to SEQ ID NO: 302694
cauuucaaucacaagcaaa

SEQ ID NO: 302696 - RNA, 19 nt, Artificial Sequence
  Description of Artificial Sequence: Synthetic oligonucleotide
  Sense strand starting at position 3721 of SEQ ID NO: 3889
uugcuugugauugaaauga

SEQ ID NO: 302697 - RNA, 19 nt, Artificial Sequence
  Description of Artificial Sequence: Synthetic oligonucleotide
  Antisense strand to SEQ ID NO: 302696
ucauuucaaucacaagcaa

SEQ ID NO: 302698 - RNA, 19 nt, Artificial Sequence
  Description of Artificial Sequence: Synthetic oligonucleotide
  Sense strand starting at position 3760 of SEQ ID NO: 3889
uguggugcacuggaaauau

SEQ ID NO: 302699 - RNA, 19 nt, Artificial Sequence
  Description of Artificial Sequence: Synthetic oligonucleotide
  Antisense strand to SEQ ID NO: 302698
auauuuccagugcaccaca

SEQ ID NO: 302700 - RNA, 19 nt, Artificial Sequence
  Description of Artificial Sequence: Synthetic oligonucleotide
  Sense strand starting at position 3811 of SEQ ID NO: 3889
uuuguugcugcuguuauua

SEQ ID NO: 302701 - RNA, 19 nt, Artificial Sequence
  Description of Artificial Sequence: Synthetic oligonucleotide
  Antisense strand to SEQ ID NO: 302700
uaauaacagcagcaacaaa

SEQ ID NO: 302702 - RNA, 19 nt, Artificial Sequence
  Description of Artificial Sequence: Synthetic oligonucleotide
  Sense strand starting at position 3849 of SEQ ID NO: 3889
augagaagaucugaguuga

SEQ ID NO: 302703 - RNA, 19 nt, Artificial Sequence
  Description of Artificial Sequence: Synthetic oligonucleotide
  Antisense strand to SEQ ID NO: 302702
ucaacucagaucuucucau

SEQ ID NO: 302704 - RNA, 19 nt, Artificial Sequence
  Description of Artificial Sequence: Synthetic oligonucleotide
  Sense strand starting at position 3859 of SEQ ID NO: 3889
cugaguugaccuugaccaa

SEQ ID NO: 302705 - RNA, 19 nt, Artificial Sequence
  Description of Artificial Sequence: Synthetic oligonucleotide
  Antisense strand to SEQ ID NO: 302704
uuggucaaggucaacucag

SEQ ID NO: 302706 - RNA, 19 nt, Artificial Sequence
  Description of Artificial Sequence: Synthetic oligonucleotide
  Sense strand starting at position 3924 of SEQ ID NO: 3889
agaguugaacuacgucauu

SEQ ID NO: 302707 - RNA, 19 nt, Artificial Sequence
  Description of Artificial Sequence: Synthetic oligonucleotide
  Antisense strand to SEQ ID NO: 302706
aaugacguaguucaacucu

SEQ ID NO: 302708 - RNA, 19 nt, Artificial Sequence
  Description of Artificial Sequence: Synthetic oligonucleotide
  Sense strand starting at position 3978 of SEQ ID NO: 3889
augcuaugauuacuuggau

SEQ ID NO: 302709 - RNA, 19 nt, Artificial Sequence
  Description of Artificial Sequence: Synthetic oligonucleotide
  Antisense strand to SEQ ID NO: 302708
auccaaguaaucauagcau

SEQ ID NO: 302710 - RNA, 19 nt, Artificial Sequence
  Description of Artificial Sequence: Synthetic oligonucleotide
  Sense strand starting at position 3979 of SEQ ID NO: 3889
ugcuaugauuacuuggaua

SEQ ID NO: 302711 - RNA, 19 nt, Artificial Sequence
  Description of Artificial Sequence: Synthetic oligonucleotide
  Antisense strand to SEQ ID NO: 302710
uauccaaguaaucauagca

SEQ ID NO: 302712 - RNA, 19 nt, Artificial Sequence
  Description of Artificial Sequence: Synthetic oligonucleotide
  Sense strand starting at position 114 of SEQ ID NO: 3890
uucugccuggaucaugaaa

SEQ ID NO: 302713 - RNA, 19 nt, Artificial Sequence
  Description of Artificial Sequence: Synthetic oligonucleotide
  Antisense strand to SEQ ID NO: 302712
uuucaugauccaggcagaa

SEQ ID NO: 302714 - RNA, 19 nt, Artificial Sequence
  Description of Artificial Sequence: Synthetic oligonucleotide
  Sense strand starting at position 321 of SEQ ID NO: 3890
cuggcacaccucuaagaau

SEQ ID NO: 302715 - RNA, 19 nt, Artificial Sequence
  Description of Artificial Sequence: Synthetic oligonucleotide
  Antisense strand to SEQ ID NO: 302714
auucuuagaggugugccag

SEQ ID NO: 302716 - RNA, 19 nt, Artificial Sequence
  Description of Artificial Sequence: Synthetic oligonucleotide
  Sense strand starting at position 503 of SEQ ID NO: 3890
aacaccuugucauugggau

SEQ ID NO: 302717 - RNA, 19 nt, Artificial Sequence
  Description of Artificial Sequence: Synthetic oligonucleotide
  Antisense strand to SEQ ID NO: 302716
aucccaaugacaagguguu

SEQ ID NO: 302718 - RNA, 19 nt, Artificial Sequence
  Description of Artificial Sequence: Synthetic oligonucleotide
  Sense strand starting at position 529 of SEQ ID NO: 3890
agaggaguuauauguuucu

SEQ ID NO: 302719 - RNA, 19 nt, Artificial Sequence
  Description of Artificial Sequence: Synthetic oligonucleotide
  Antisense strand to SEQ ID NO: 302718
agaaacauauaacuccucu

SEQ ID NO: 302720 - RNA, 19 nt, Artificial Sequence
  Description of Artificial Sequence: Synthetic oligonucleotide
  Sense strand starting at position 548 of SEQ ID NO: 3890
gcaacaacacuuugagcuu

SEQ ID NO: 302721 - RNA, 19 nt, Artificial Sequence
  Description of Artificial Sequence: Synthetic oligonucleotide
  Antisense strand to SEQ ID NO: 302720
aagcucaaaguguuguugc

SEQ ID NO: 302722 - RNA, 19 nt, Artificial Sequence
  Description of Artificial Sequence: Synthetic oligonucleotide
  Sense strand starting at position 562 of SEQ ID NO: 3890
agcuuuccuguuugaauuu

SEQ ID NO: 302723 - RNA, 19 nt, Artificial Sequence
  Description of Artificial Sequence: Synthetic oligonucleotide
  Antisense strand to SEQ ID NO: 302722
aaauucaaacaggaaagcu

SEQ ID NO: 302724 - RNA, 19 nt, Artificial Sequence
  Description of Artificial Sequence: Synthetic oligonucleotide
  Sense strand starting at position 644 of SEQ ID NO: 3890
acuuaaguaguagaguuaa

SEQ ID NO: 302725 - RNA, 19 nt, Artificial Sequence
  Description of Artificial Sequence: Synthetic oligonucleotide
  Antisense strand to SEQ ID NO: 302724
uuaacucuacuacuuaagu

SEQ ID NO: 302726 - RNA, 19 nt, Artificial Sequence
  Description of Artificial Sequence: Synthetic oligonucleotide
  Sense strand starting at position 671 of SEQ ID NO: 3890
uggauaaacuaucuagcaa

SEQ ID NO: 302727 - RNA, 19 nt, Artificial Sequence
  Description of Artificial Sequence: Synthetic oligonucleotide
  Antisense strand to SEQ ID NO: 302726
uugcuagauaguuuaucca

SEQ ID NO: 302728 - RNA, 19 nt, Artificial Sequence
  Description of Artificial Sequence: Synthetic oligonucleotide
  Sense strand starting at position 733 of SEQ ID NO: 3890
uugaaucugucagcaacaa

SEQ ID NO: 302729 - RNA, 19 nt, Artificial Sequence
  Description of Artificial Sequence: Synthetic oligonucleotide
  Antisense strand to SEQ ID NO: 302728
uuguugcugacagauucaa

SEQ ID NO: 302730 - RNA, 19 nt, Artificial Sequence
  Description of Artificial Sequence: Synthetic oligonucleotide
  Sense strand starting at position 734 of SEQ ID NO: 3890
ugaaucugucagcaacaaa

SEQ ID NO: 302731 - RNA, 19 nt, Artificial Sequence
  Description of Artificial Sequence: Synthetic oligonucleotide
  Antisense strand to SEQ ID NO: 302730
uuuguugcugacagauuca

SEQ ID NO: 302732 - RNA, 19 nt, Artificial Sequence
  Description of Artificial Sequence: Synthetic oligonucleotide
  Sense strand starting at position 737 of SEQ ID NO: 3890
aucugucagcaacaaagau

SEQ ID NO: 302733 - RNA, 19 nt, Artificial Sequence
  Description of Artificial Sequence: Synthetic oligonucleotide
  Antisense strand to SEQ ID NO: 302732
aucuuuguugcugacagau

SEQ ID NO: 302734 - RNA, 19 nt, Artificial Sequence
  Description of Artificial Sequence: Synthetic oligonucleotide
  Sense strand starting at position 819 of SEQ ID NO: 3890
guagcuguccaacaagaac

SEQ ID NO: 302735 - RNA, 19 nt, Artificial Sequence
  Description of Artificial Sequence: Synthetic oligonucleotide
  Antisense strand to SEQ ID NO: 302734
guucuuguuggacagcuac

SEQ ID NO: 302736 - RNA, 19 nt, Artificial Sequence
  Description of Artificial Sequence: Synthetic oligonucleotide
  Sense strand starting at position 867 of SEQ ID NO: 3890
ggaggaagugauggucuga

SEQ ID NO: 302737 - RNA, 19 nt, Artificial Sequence
  Description of Artificial Sequence: Synthetic oligonucleotide
  Antisense strand to SEQ ID NO: 302736
ucagaccaucacuuccucc

SEQ ID NO: 302738 - RNA, 19 nt, Artificial Sequence
  Description of Artificial Sequence: Synthetic oligonucleotide
  Sense strand starting at position 909 of SEQ ID NO: 3890
uccaauuggcuuugugaau

SEQ ID NO: 302739 - RNA, 19 nt, Artificial Sequence
  Description of Artificial Sequence: Synthetic oligonucleotide
  Antisense strand to SEQ ID NO: 302738
auucacaaagccaauugga

SEQ ID NO: 302740 - RNA, 19 nt, Artificial Sequence
  Description of Artificial Sequence: Synthetic oligonucleotide
  Sense strand starting at position 910 of SEQ ID NO: 3890
ccaauuggcuuugugaauc

SEQ ID NO: 302741 - RNA, 19 nt, Artificial Sequence
  Description of Artificial Sequence: Synthetic oligonucleotide
  Antisense strand to SEQ ID NO: 302740
gauucacaaagccaauugg

SEQ ID NO: 302742 - RNA, 19 nt, Artificial Sequence
  Description of Artificial Sequence: Synthetic oligonucleotide
  Sense strand starting at position 920 of SEQ ID NO: 3890
uugugaauccuagguggua

SEQ ID NO: 302743 - RNA, 19 nt, Artificial Sequence
  Description of Artificial Sequence: Synthetic oligonucleotide
  Antisense strand to SEQ ID NO: 302742
uaccaccuaggauucacaa

SEQ ID NO: 302744 - RNA, 19 nt, Artificial Sequence
  Description of Artificial Sequence: Synthetic oligonucleotide
  Sense strand starting at position 948 of SEQ ID NO: 3890
aaaggaugauggcauuuau

SEQ ID NO: 302745 - RNA, 19 nt, Artificial Sequence
  Description of Artificial Sequence: Synthetic oligonucleotide
  Antisense strand to SEQ ID NO: 302744
auaaaugccaucauccuuu

SEQ ID NO: 302746 - RNA, 19 nt, Artificial Sequence
  Description of Artificial Sequence: Synthetic oligonucleotide
  Sense strand starting at position 1039 of SEQ ID NO: 3890
ccaucuggauuguuaagac

SEQ ID NO: 302747 - RNA, 19 nt, Artificial Sequence
  Description of Artificial Sequence: Synthetic oligonucleotide
  Antisense strand to SEQ ID NO: 302746
gucuuaacaauccagaugg

SEQ ID NO: 302748 - RNA, 19 nt, Artificial Sequence
  Description of Artificial Sequence: Synthetic oligonucleotide
  Sense strand starting at position 1377 of SEQ ID NO: 3890
ggucucaaaccugguaaag

SEQ ID NO: 302749 - RNA, 19 nt, Artificial Sequence
  Description of Artificial Sequence: Synthetic oligonucleotide
  Antisense strand to SEQ ID NO: 302748
cuuuaccagguuugagacc

SEQ ID NO: 302750 - RNA, 19 nt, Artificial Sequence
  Description of Artificial Sequence: Synthetic oligonucleotide
  Sense strand starting at position 1441 of SEQ ID NO: 3890
ggaggugggccugaguuua

SEQ ID NO: 302751 - RNA, 19 nt, Artificial Sequence
  Description of Artificial Sequence: Synthetic oligonucleotide
  Antisense strand to SEQ ID NO: 302750
uaaacucaggcccaccucc

SEQ ID NO: 302752 - RNA, 19 nt, Artificial Sequence
  Description of Artificial Sequence: Synthetic oligonucleotide
  Sense strand starting at position 1478 of SEQ ID NO: 3890
ucucuugguucuguggaaa

SEQ ID NO: 302753 - RNA, 19 nt, Artificial Sequence
  Description of Artificial Sequence: Synthetic oligonucleotide
  Antisense strand to SEQ ID NO: 302752
uuuccacagaaccaagaga

SEQ ID NO: 302754 - RNA, 19 nt, Artificial Sequence
  Description of Artificial Sequence: Synthetic oligonucleotide
  Sense strand starting at position 1735 of SEQ ID NO: 3890
uuaauuaaucgugagagcu

SEQ ID NO: 302755 - RNA, 19 nt, Artificial Sequence
  Description of Artificial Sequence: Synthetic oligonucleotide
  Antisense strand to SEQ ID NO: 302754
agcucucacgauuaauuaa

SEQ ID NO: 302756 - RNA, 19 nt, Artificial Sequence
  Description of Artificial Sequence: Synthetic oligonucleotide
  Sense strand starting at position 2063 of SEQ ID NO: 3890
ccucgaaugucccugagac

SEQ ID NO: 302757 - RNA, 19 nt, Artificial Sequence
  Description of Artificial Sequence: Synthetic oligonucleotide
  Antisense strand to SEQ ID NO: 302756
gucucagggacauucgagg

SEQ ID NO: 302758 - RNA, 19 nt, Artificial Sequence
  Description of Artificial Sequence: Synthetic oligonucleotide
  Sense strand starting at position 2511 of SEQ ID NO: 3890
gaaacaugcugugcaauua

SEQ ID NO: 302759 - RNA, 19 nt, Artificial Sequence
  Description of Artificial Sequence: Synthetic oligonucleotide
  Antisense strand to SEQ ID NO: 302758
uaauugcacagcauguuuc

SEQ ID NO: 302760 - RNA, 19 nt, Artificial Sequence
  Description of Artificial Sequence: Synthetic oligonucleotide
  Sense strand starting at position 2558 of SEQ ID NO: 3890
auucuauaugcuuaaugug

SEQ ID NO: 302761 - RNA, 19 nt, Artificial Sequence
  Description of Artificial Sequence: Synthetic oligonucleotide
  Antisense strand to SEQ ID NO: 302760
cacauuaagcauauagaau

SEQ ID NO: 302762 - RNA, 19 nt, Artificial Sequence
  Description of Artificial Sequence: Synthetic oligonucleotide
  Sense strand starting at position 2563 of SEQ ID NO: 3890
auaugcuuaaugugaguga

SEQ ID NO: 302763 - RNA, 19 nt, Artificial Sequence
  Description of Artificial Sequence: Synthetic oligonucleotide
  Antisense strand to SEQ ID NO: 302762
ucacucacauuaagcauau

SEQ ID NO: 302764 - RNA, 19 nt, Artificial Sequence
  Description of Artificial Sequence: Synthetic oligonucleotide
  Sense strand starting at position 2566 of SEQ ID NO: 3890
ugcuuaaugugagugauua

SEQ ID NO: 302765 - RNA, 19 nt, Artificial Sequence
  Description of Artificial Sequence: Synthetic oligonucleotide
  Antisense strand to SEQ ID NO: 302764
uaaucacucacauuaagca

SEQ ID NO: 302766 - RNA, 19 nt, Artificial Sequence
  Description of Artificial Sequence: Synthetic oligonucleotide
  Sense strand starting at position 2567 of SEQ ID NO: 3890
gcuuaaugugagugauuag

SEQ ID NO: 302767 - RNA, 19 nt, Artificial Sequence
  Description of Artificial Sequence: Synthetic oligonucleotide
  Antisense strand to SEQ ID NO: 302766
cuaaucacucacauuaagc

SEQ ID NO: 302768 - RNA, 19 nt, Artificial Sequence
  Description of Artificial Sequence: Synthetic oligonucleotide
  Sense strand starting at position 2570 of SEQ ID NO: 3890
uaaugugagugauuaggaa

SEQ ID NO: 302769 - RNA, 19 nt, Artificial Sequence
  Description of Artificial Sequence: Synthetic oligonucleotide
  Antisense strand to SEQ ID NO: 302768
uuccuaaucacucacauua

SEQ ID NO: 302770 - RNA, 19 nt, Artificial Sequence
  Description of Artificial Sequence: Synthetic oligonucleotide
  Sense strand starting at position 2627 of SEQ ID NO: 3890
cauagugagucucucauag

SEQ ID NO: 302771 - RNA, 19 nt, Artificial Sequence
  Description of Artificial Sequence: Synthetic oligonucleotide
  Antisense strand to SEQ ID NO: 302770
cuaugagagacucacuaug

SEQ ID NO: 302772 - RNA, 19 nt, Artificial Sequence
  Description of Artificial Sequence: Synthetic oligonucleotide
  Sense strand starting at position 2695 of SEQ ID NO: 3890
ccuuaacuugggugaagga

SEQ ID NO: 302773 - RNA, 19 nt, Artificial Sequence
  Description of Artificial Sequence: Synthetic oligonucleotide
  Antisense strand to SEQ ID NO: 302772
uccuucacccaaguuaagg

SEQ ID NO: 302774 - RNA, 19 nt, Artificial Sequence
  Description of Artificial Sequence: Synthetic oligonucleotide
  Sense strand starting at position 2709 of SEQ ID NO: 3890
aaggaaggccuuuguaaac

SEQ ID NO: 302775 - RNA, 19 nt, Artificial Sequence
  Description of Artificial Sequence: Synthetic oligonucleotide
  Antisense strand to SEQ ID NO: 302774
guuuacaaaggccuuccuu

SEQ ID NO: 302776 - RNA, 19 nt, Artificial Sequence
  Description of Artificial Sequence: Synthetic oligonucleotide
  Sense strand starting at position 2784 of SEQ ID NO: 3890
aguguaaauccucauugaa

SEQ ID NO: 302777 - RNA, 19 nt, Artificial Sequence
  Description of Artificial Sequence: Synthetic oligonucleotide
  Antisense strand to SEQ ID NO: 302776
uucaaugaggauuuacacu

SEQ ID NO: 302778 - RNA, 19 nt, Artificial Sequence
  Description of Artificial Sequence: Synthetic oligonucleotide
  Sense strand starting at position 2856 of SEQ ID NO: 3890
agauaaauuguuuguuggu

SEQ ID NO: 302779 - RNA, 19 nt, Artificial Sequence
  Description of Artificial Sequence: Synthetic oligonucleotide
  Antisense strand to SEQ ID NO: 302778
accaacaaacaauuuaucu

SEQ ID NO: 302780 - RNA, 19 nt, Artificial Sequence
  Description of Artificial Sequence: Synthetic oligonucleotide
  Sense strand starting at position 2983 of SEQ ID NO: 3890
ccacuagauucggccaaca

SEQ ID NO: 302781 - RNA, 19 nt, Artificial Sequence
  Description of Artificial Sequence: Synthetic oligonucleotide
  Antisense strand to SEQ ID NO: 302780
uguuggccgaaucuagugg

SEQ ID NO: 302782 - RNA, 19 nt, Artificial Sequence
  Description of Artificial Sequence: Synthetic oligonucleotide
  Sense strand starting at position 2994 of SEQ ID NO: 3890
ggccaacagccuuauacau

SEQ ID NO: 302783 - RNA, 19 nt, Artificial Sequence
  Description of Artificial Sequence: Synthetic oligonucleotide
  Antisense strand to SEQ ID NO: 302782
auguauaaggcuguuggcc

SEQ ID NO: 302784 - RNA, 19 nt, Artificial Sequence
  Description of Artificial Sequence: Synthetic oligonucleotide
  Sense strand starting at position 3212 of SEQ ID NO: 3890
aguguugaugcaggaauga

SEQ ID NO: 302785 - RNA, 19 nt, Artificial Sequence
  Description of Artificial Sequence: Synthetic oligonucleotide
  Antisense strand to SEQ ID NO: 302784
ucauuccugcaucaacacu

SEQ ID NO: 302786 - RNA, 19 nt, Artificial Sequence
  Description of Artificial Sequence: Synthetic oligonucleotide
  Sense strand starting at position 3303 of SEQ ID NO: 3890
auguuuaugcucuaugaca

SEQ ID NO: 302787 - RNA, 19 nt, Artificial Sequence
  Description of Artificial Sequence: Synthetic oligonucleotide
  Antisense strand to SEQ ID NO: 302786
ugucauagagcauaaacau

SEQ ID NO: 302788 - RNA, 19 nt, Artificial Sequence
  Description of Artificial Sequence: Synthetic oligonucleotide
  Sense strand starting at position 3378 of SEQ ID NO: 3890
ggauguagucuugaguagu

SEQ ID NO: 302789 - RNA, 19 nt, Artificial Sequence
  Description of Artificial Sequence: Synthetic oligonucleotide
  Antisense strand to SEQ ID NO: 302788
acuacucaagacuacaucc

SEQ ID NO: 302790 - RNA, 19 nt, Artificial Sequence
  Description of Artificial Sequence: Synthetic oligonucleotide
  Sense strand starting at position 3381 of SEQ ID NO: 3890
uguagucuugaguagugaa

SEQ ID NO: 302791 - RNA, 19 nt, Artificial Sequence
  Description of Artificial Sequence: Synthetic oligonucleotide
  Antisense strand to SEQ ID NO: 302790
uucacuacucaagacuaca

SEQ ID NO: 302792 - RNA, 19 nt, Artificial Sequence
  Description of Artificial Sequence: Synthetic oligonucleotide
  Sense strand starting at position 24 of SEQ ID NO: 3891
ucauguuagaaguauugug

SEQ ID NO: 302793 - RNA, 19 nt, Artificial Sequence
  Description of Artificial Sequence: Synthetic oligonucleotide
  Antisense strand to SEQ ID NO: 302792
cacaauacuucuaacauga

SEQ ID NO: 302794 - RNA, 19 nt, Artificial Sequence
  Description of Artificial Sequence: Synthetic oligonucleotide
  Sense strand starting at position 180 of SEQ ID NO: 3891
aguugaguucuguaaaugg

SEQ ID NO: 302795 - RNA, 19 nt, Artificial Sequence
  Description of Artificial Sequence: Synthetic oligonucleotide
  Antisense strand to SEQ ID NO: 302794
ccauuuacagaacucaacu

SEQ ID NO: 302796 - RNA, 19 nt, Artificial Sequence
  Description of Artificial Sequence: Synthetic oligonucleotide
  Sense strand starting at position 616 of SEQ ID NO: 3891
gcaagugaucaaggugaca

SEQ ID NO: 302797 - RNA, 19 nt, Artificial Sequence
  Description of Artificial Sequence: Synthetic oligonucleotide
  Antisense strand to SEQ ID NO: 302796
ugucaccuugaucacuugc

SEQ ID NO: 302798 - RNA, 19 nt, Artificial Sequence
  Description of Artificial Sequence: Synthetic oligonucleotide
  Sense strand starting at position 723 of SEQ ID NO: 3891
agcagaguugaaugaugaa

SEQ ID NO: 302799 - RNA, 19 nt, Artificial Sequence
  Description of Artificial Sequence: Synthetic oligonucleotide
  Antisense strand to SEQ ID NO: 302798
uucaucauucaacucugcu

SEQ ID NO: 302800 - RNA, 19 nt, Artificial Sequence
  Description of Artificial Sequence: Synthetic oligonucleotide
  Sense strand starting at position 768 of SEQ ID NO: 3891
guugucuaccaucaugaug

SEQ ID NO: 302801 - RNA, 19 nt, Artificial Sequence
  Description of Artificial Sequence: Synthetic oligonucleotide
  Antisense strand to SEQ ID NO: 302800
caucaugaugguagacaac

SEQ ID NO: 302802 - RNA, 19 nt, Artificial Sequence
  Description of Artificial Sequence: Synthetic oligonucleotide
  Sense strand starting at position 798 of SEQ ID NO: 3891
aacuguucuggaggaaacu

SEQ ID NO: 302803 - RNA, 19 nt, Artificial Sequence
  Description of Artificial Sequence: Synthetic oligonucleotide
  Antisense strand to SEQ ID NO: 302802
aguuuccuccagaacaguu

SEQ ID NO: 302804 - RNA, 19 nt, Artificial Sequence
  Description of Artificial Sequence: Synthetic oligonucleotide
  Sense strand starting at position 804 of SEQ ID NO: 3891
ucuggaggaaacuguguua

SEQ ID NO: 302805 - RNA, 19 nt, Artificial Sequence
  Description of Artificial Sequence: Synthetic oligonucleotide
  Antisense strand to SEQ ID NO: 302804
uaacacaguuuccuccaga

SEQ ID NO: 302806 - RNA, 19 nt, Artificial Sequence
  Description of Artificial Sequence: Synthetic oligonucleotide
  Sense strand starting at position 807 of SEQ ID NO: 3891
ggaggaaacuguguuauca

SEQ ID NO: 302807 - RNA, 19 nt, Artificial Sequence
  Description of Artificial Sequence: Synthetic oligonucleotide
  Antisense strand to SEQ ID NO: 302806
ugauaacacaguuuccucc

SEQ ID NO: 302808 - RNA, 19 nt, Artificial Sequence
  Description of Artificial Sequence: Synthetic oligonucleotide
  Sense strand starting at position 811 of SEQ ID NO: 3891
gaaacuguguuaucacuug

SEQ ID NO: 302809 - RNA, 19 nt, Artificial Sequence
  Description of Artificial Sequence: Synthetic oligonucleotide
  Antisense strand to SEQ ID NO: 302808
caagugauaacacaguuuc

SEQ ID NO: 302810 - RNA, 19 nt, Artificial Sequence
  Description of Artificial Sequence: Synthetic oligonucleotide
  Sense strand starting at position 817 of SEQ ID NO: 3891
guguuaucacuugacauca

SEQ ID NO: 302811 - RNA, 19 nt, Artificial Sequence
  Description of Artificial Sequence: Synthetic oligonucleotide
  Antisense strand to SEQ ID NO: 302810
ugaugucaagugauaacac

SEQ ID NO: 302812 - RNA, 19 nt, Artificial Sequence
  Description of Artificial Sequence: Synthetic oligonucleotide
  Sense strand starting at position 966 of SEQ ID NO: 3891
aguggauggugguuugaaa

SEQ ID NO: 302813 - RNA, 19 nt, Artificial Sequence
  Description of Artificial Sequence: Synthetic oligonucleotide
  Antisense strand to SEQ ID NO: 302812
uuucaaaccaccauccacu

SEQ ID NO: 302814 - RNA, 19 nt, Artificial Sequence
  Description of Artificial Sequence: Synthetic oligonucleotide
  Sense strand starting at position 973 of SEQ ID NO: 3891
ggugguuugaaaggacuca

SEQ ID NO: 302815 - RNA, 19 nt, Artificial Sequence
  Description of Artificial Sequence: Synthetic oligonucleotide
  Antisense strand to SEQ ID NO: 302814
ugaguccuuucaaaccacc

SEQ ID NO: 302816 - RNA, 19 nt, Artificial Sequence
  Description of Artificial Sequence: Synthetic oligonucleotide
  Sense strand starting at position 974 of SEQ ID NO: 3891
gugguuugaaaggacucau

SEQ ID NO: 302817 - RNA, 19 nt, Artificial Sequence
  Description of Artificial Sequence: Synthetic oligonucleotide
  Antisense strand to SEQ ID NO: 302816
augaguccuuucaaaccac

SEQ ID NO: 302818 - RNA, 19 nt, Artificial Sequence
  Description of Artificial Sequence: Synthetic oligonucleotide
  Sense strand starting at position 1006 of SEQ ID NO: 3891
uaaugucuucuacgagaaa

SEQ ID NO: 302819 - RNA, 19 nt, Artificial Sequence
  Description of Artificial Sequence: Synthetic oligonucleotide
  Antisense strand to SEQ ID NO: 302818
uuucucguagaagacauua

SEQ ID NO: 302820 - RNA, 19 nt, Artificial Sequence
  Description of Artificial Sequence: Synthetic oligonucleotide
  Sense strand starting at position 1132 of SEQ ID NO: 3891
cucgucauccuggacagaa

SEQ ID NO: 302821 - RNA, 19 nt, Artificial Sequence
  Description of Artificial Sequence: Synthetic oligonucleotide
  Antisense strand to SEQ ID NO: 302820
uucuguccaggaugacgag

SEQ ID NO: 302822 - RNA, 19 nt, Artificial Sequence
  Description of Artificial Sequence: Synthetic oligonucleotide
  Sense strand starting at position 1257 of SEQ ID NO: 3891
ggguuucuccgggacaaug

SEQ ID NO: 302823 - RNA, 19 nt, Artificial Sequence
  Description of Artificial Sequence: Synthetic oligonucleotide
  Antisense strand to SEQ ID NO: 302822
cauugucccggagaaaccc

SEQ ID NO: 302824 - RNA, 19 nt, Artificial Sequence
  Description of Artificial Sequence: Synthetic oligonucleotide
  Sense strand starting at position 1259 of SEQ ID NO: 3891
guuucuccgggacaaugau

SEQ ID NO: 302825 - RNA, 19 nt, Artificial Sequence
  Description of Artificial Sequence: Synthetic oligonucleotide
  Antisense strand to SEQ ID NO: 302824
aucauugucccggagaaac

SEQ ID NO: 302826 - RNA, 19 nt, Artificial Sequence
  Description of Artificial Sequence: Synthetic oligonucleotide
  Sense strand starting at position 2001 of SEQ ID NO: 3891
ggaacuguaaaucgguaca

SEQ ID NO: 302827 - RNA, 19 nt, Artificial Sequence
  Description of Artificial Sequence: Synthetic oligonucleotide
  Antisense strand to SEQ ID NO: 302826
uguaccgauuuacaguucc

SEQ ID NO: 302828 - RNA, 19 nt, Artificial Sequence
  Description of Artificial Sequence: Synthetic oligonucleotide
  Sense strand starting at position 2014 of SEQ ID NO: 3891
gguacaaccuuucuggaga

SEQ ID NO: 302829 - RNA, 19 nt, Artificial Sequence
  Description of Artificial Sequence: Synthetic oligonucleotide
  Antisense strand to SEQ ID NO: 302828
ucuccagaaagguuguacc

SEQ ID NO: 302830 - RNA, 19 nt, Artificial Sequence
  Description of Artificial Sequence: Synthetic oligonucleotide
  Sense strand starting at position 2052 of SEQ ID NO: 3891
gagcuuaaagaaugucuag

SEQ ID NO: 302831 - RNA, 19 nt, Artificial Sequence
  Description of Artificial Sequence: Synthetic oligonucleotide
  Antisense strand to SEQ ID NO: 302830
cuagacauucuuuaagcuc

SEQ ID NO: 302832 - RNA, 19 nt, Artificial Sequence
  Description of Artificial Sequence: Synthetic oligonucleotide
  Sense strand starting at position 2058 of SEQ ID NO: 3891
aaagaaugucuagaggugu

SEQ ID NO: 302833 - RNA, 19 nt, Artificial Sequence
  Description of Artificial Sequence: Synthetic oligonucleotide
  Antisense strand to SEQ ID NO: 302832
acaccucuagacauucuuu

SEQ ID NO: 302834 - RNA, 19 nt, Artificial Sequence
  Description of Artificial Sequence: Synthetic oligonucleotide
  Sense strand starting at position 2099 of SEQ ID NO: 3891
gacaucaugugacugauua

SEQ ID NO: 302835 - RNA, 19 nt, Artificial Sequence
  Description of Artificial Sequence: Synthetic oligonucleotide
  Antisense strand to SEQ ID NO: 302834
uaaucagucacaugauguc

SEQ ID NO: 302836 - RNA, 19 nt, Artificial Sequence
  Description of Artificial Sequence: Synthetic oligonucleotide
  Sense strand starting at position 2100 of SEQ ID NO: 3891
acaucaugugacugauuau

SEQ ID NO: 302837 - RNA, 19 nt, Artificial Sequence
  Description of Artificial Sequence: Synthetic oligonucleotide
  Antisense strand to SEQ ID NO: 302836
auaaucagucacaugaugu

SEQ ID NO: 302838 - RNA, 19 nt, Artificial Sequence
  Description of Artificial Sequence: Synthetic oligonucleotide
  Sense strand starting at position 2140 of SEQ ID NO: 3891
ugggcaacugauuaaaugu

SEQ ID NO: 302839 - RNA, 19 nt, Artificial Sequence
  Description of Artificial Sequence: Synthetic oligonucleotide
  Antisense strand to SEQ ID NO: 302838
acauuuaaucaguugccca

SEQ ID NO: 302840 - RNA, 19 nt, Artificial Sequence
  Description of Artificial Sequence: Synthetic oligonucleotide
  Sense strand starting at position 2207 of SEQ ID NO: 3891
gcuugcaaaggauauugaa

SEQ ID NO: 302841 - RNA, 19 nt, Artificial Sequence
  Description of Artificial Sequence: Synthetic oligonucleotide
  Antisense strand to SEQ ID NO: 302840
uucaauauccuuugcaagc

SEQ ID NO: 302842 - RNA, 19 nt, Artificial Sequence
  Description of Artificial Sequence: Synthetic oligonucleotide
  Sense strand starting at position 2227 of SEQ ID NO: 3891
gguauaguuuaacuuuaug

SEQ ID NO: 302843 - RNA, 19 nt, Artificial Sequence
  Description of Artificial Sequence: Synthetic oligonucleotide
  Antisense strand to SEQ ID NO: 302842
cauaaaguuaaacuauacc

SEQ ID NO: 302844 - RNA, 19 nt, Artificial Sequence
  Description of Artificial Sequence: Synthetic oligonucleotide
  Sense strand starting at position 2564 of SEQ ID NO: 3891
gacugaaaucuguaugugu

SEQ ID NO: 302845 - RNA, 19 nt, Artificial Sequence
  Description of Artificial Sequence: Synthetic oligonucleotide
  Antisense strand to SEQ ID NO: 302844
acacauacagauuucaguc

SEQ ID NO: 302846 - RNA, 19 nt, Artificial Sequence
  Description of Artificial Sequence: Synthetic oligonucleotide
  Sense strand starting at position 3225 of SEQ ID NO: 3891
acuuuaucuuggcuuggga

SEQ ID NO: 302847 - RNA, 19 nt, Artificial Sequence
  Description of Artificial Sequence: Synthetic oligonucleotide
  Antisense strand to SEQ ID NO: 302846
ucccaagccaagauaaagu

SEQ ID NO: 302848 - RNA, 19 nt, Artificial Sequence
  Description of Artificial Sequence: Synthetic oligonucleotide
  Sense strand starting at position 3349 of SEQ ID NO: 3891
ugucaucuugcuucuguuu

SEQ ID NO: 302849 - RNA, 19 nt, Artificial Sequence
  Description of Artificial Sequence: Synthetic oligonucleotide
  Antisense strand to SEQ ID NO: 302848
aaacagaagcaagaugaca

SEQ ID NO: 302850 - RNA, 19 nt, Artificial Sequence
  Description of Artificial Sequence: Synthetic oligonucleotide
  Sense strand starting at position 3385 of SEQ ID NO: 3891
gcaaucauacuguaaguac

SEQ ID NO: 302851 - RNA, 19 nt, Artificial Sequence
  Description of Artificial Sequence: Synthetic oligonucleotide
  Antisense strand to SEQ ID NO: 302850
guacuuacaguaugauugc

SEQ ID NO: 302852 - RNA, 19 nt, Artificial Sequence
  Description of Artificial Sequence: Synthetic oligonucleotide
  Sense strand starting at position 3456 of SEQ ID NO: 3891
ugucauugaguguagauuc

SEQ ID NO: 302853 - RNA, 19 nt, Artificial Sequence
  Description of Artificial Sequence: Synthetic oligonucleotide
  Antisense strand to SEQ ID NO: 302852
gaaucuacacucaaugaca

SEQ ID NO: 302854 - RNA, 19 nt, Artificial Sequence
  Description of Artificial Sequence: Synthetic oligonucleotide
  Sense strand starting at position 3484 of SEQ ID NO: 3891
gcucuuugugaucauacca

SEQ ID NO: 302855 - RNA, 19 nt, Artificial Sequence
  Description of Artificial Sequence: Synthetic oligonucleotide
  Antisense strand to SEQ ID NO: 302854
ugguaugaucacaaagagc

SEQ ID NO: 302856 - RNA, 19 nt, Artificial Sequence
  Description of Artificial Sequence: Synthetic oligonucleotide
  Sense strand starting at position 3516 of SEQ ID NO: 3891
cauucuacuguugaugagu

SEQ ID NO: 302857 - RNA, 19 nt, Artificial Sequence
  Description of Artificial Sequence: Synthetic oligonucleotide
  Antisense strand to SEQ ID NO: 302856
acucaucaacaguagaaug

SEQ ID NO: 302858 - RNA, 19 nt, Artificial Sequence
  Description of Artificial Sequence: Synthetic oligonucleotide
  Sense strand starting at position 3586 of SEQ ID NO: 3891
agaugccucuuggugaaca

SEQ ID NO: 302859 - RNA, 19 nt, Artificial Sequence
  Description of Artificial Sequence: Synthetic oligonucleotide
  Antisense strand to SEQ ID NO: 302858
uguucaccaagaggcaucu

SEQ ID NO: 302860 - RNA, 19 nt, Artificial Sequence
  Description of Artificial Sequence: Synthetic oligonucleotide
  Sense strand starting at position 3588 of SEQ ID NO: 3891
augccucuuggugaacaua

SEQ ID NO: 302861 - RNA, 19 nt, Artificial Sequence
  Description of Artificial Sequence: Synthetic oligonucleotide
  Antisense strand to SEQ ID NO: 302860
uauguucaccaagaggcau

SEQ ID NO: 302862 - RNA, 19 nt, Artificial Sequence
  Description of Artificial Sequence: Synthetic oligonucleotide
  Sense strand starting at position 3624 of SEQ ID NO: 3891
aguguauaucgagagugga

SEQ ID NO: 302863 - RNA, 19 nt, Artificial Sequence
  Description of Artificial Sequence: Synthetic oligonucleotide
  Antisense strand to SEQ ID NO: 302862
uccacucucgauauacacu

SEQ ID NO: 302864 - RNA, 19 nt, Artificial Sequence
  Description of Artificial Sequence: Synthetic oligonucleotide
  Sense strand starting at position 3627 of SEQ ID NO: 3891
guauaucgagaguggaauu

SEQ ID NO: 302865 - RNA, 19 nt, Artificial Sequence
  Description of Artificial Sequence: Synthetic oligonucleotide
  Antisense strand to SEQ ID NO: 302864
aauuccacucucgauauac

SEQ ID NO: 302866 - RNA, 19 nt, Artificial Sequence
  Description of Artificial Sequence: Synthetic oligonucleotide
  Sense strand starting at position 3648 of SEQ ID NO: 3891
cgugucauaggauacgaaa

SEQ ID NO: 302867 - RNA, 19 nt, Artificial Sequence
  Description of Artificial Sequence: Synthetic oligonucleotide
  Antisense strand to SEQ ID NO: 302866
uuucguauccuaugacacg

SEQ ID NO: 302868 - RNA, 19 nt, Artificial Sequence
  Description of Artificial Sequence: Synthetic oligonucleotide
  Sense strand starting at position 3650 of SEQ ID NO: 3891
ugucauaggauacgaaaga

SEQ ID NO: 302869 - RNA, 19 nt, Artificial Sequence
  Description of Artificial Sequence: Synthetic oligonucleotide
  Antisense strand to SEQ ID NO: 302868
ucuuucguauccuaugaca

SEQ ID NO: 302870 - RNA, 19 nt, Artificial Sequence
  Description of Artificial Sequence: Synthetic oligonucleotide
  Sense strand starting at position 3976 of SEQ ID NO: 3891
gcuaauuagggauaugguc

SEQ ID NO: 302871 - RNA, 19 nt, Artificial Sequence
  Description of Artificial Sequence: Synthetic oligonucleotide
  Antisense strand to SEQ ID NO: 302870
gaccauaucccuaauuagc

SEQ ID NO: 302872 - RNA, 19 nt, Artificial Sequence
  Description of Artificial Sequence: Synthetic oligonucleotide
  Sense strand starting at position 351 of SEQ ID NO: 3892
agagaagucagccaguuuc

SEQ ID NO: 302873 - RNA, 19 nt, Artificial Sequence
  Description of Artificial Sequence: Synthetic oligonucleotide
  Antisense strand to SEQ ID NO: 302872
gaaacuggcugacuucucu

SEQ ID NO: 302874 - RNA, 19 nt, Artificial Sequence
  Description of Artificial Sequence: Synthetic oligonucleotide
  Sense strand starting at position 435 of SEQ ID NO: 3892
cagcauaguggugaagagu

SEQ ID NO: 302875 - RNA, 19 nt, Artificial Sequence
  Description of Artificial Sequence: Synthetic oligonucleotide
  Antisense strand to SEQ ID NO: 302874
acucuucaccacuaugcug

SEQ ID NO: 302876 - RNA, 19 nt, Artificial Sequence
  Description of Artificial Sequence: Synthetic oligonucleotide
  Sense strand starting at position 562 of SEQ ID NO: 3892
cggugaugagcacaugaau

SEQ ID NO: 302877 - RNA, 19 nt, Artificial Sequence
  Description of Artificial Sequence: Synthetic oligonucleotide
  Antisense strand to SEQ ID NO: 302876
auucaugugcucaucaccg

SEQ ID NO: 302878 - RNA, 19 nt, Artificial Sequence
  Description of Artificial Sequence: Synthetic oligonucleotide
  Sense strand starting at position 594 of SEQ ID NO: 3892
acauuuagugucuggcaca

SEQ ID NO: 302879 - RNA, 19 nt, Artificial Sequence
  Description of Artificial Sequence: Synthetic oligonucleotide
  Antisense strand to SEQ ID NO: 302878
ugugccagacacuaaaugu

SEQ ID NO: 302880 - RNA, 19 nt, Artificial Sequence
  Description of Artificial Sequence: Synthetic oligonucleotide
  Sense strand starting at position 702 of SEQ ID NO: 3892
augguaaagcccuaugauu

SEQ ID NO: 302881 - RNA, 19 nt, Artificial Sequence
  Description of Artificial Sequence: Synthetic oligonucleotide
  Antisense strand to SEQ ID NO: 302880
aaucauagggcuuuaccau

SEQ ID NO: 302882 - RNA, 19 nt, Artificial Sequence
  Description of Artificial Sequence: Synthetic oligonucleotide
  Sense strand starting at position 704 of SEQ ID NO: 3892
gguaaagcccuaugauuac

SEQ ID NO: 302883 - RNA, 19 nt, Artificial Sequence
  Description of Artificial Sequence: Synthetic oligonucleotide
  Antisense strand to SEQ ID NO: 302882
guaaucauagggcuuuacc

SEQ ID NO: 302884 - RNA, 19 nt, Artificial Sequence
  Description of Artificial Sequence: Synthetic oligonucleotide
  Sense strand starting at position 768 of SEQ ID NO: 3892
augcuagacucaguucuga

SEQ ID NO: 302885 - RNA, 19 nt, Artificial Sequence
  Description of Artificial Sequence: Synthetic oligonucleotide
  Antisense strand to SEQ ID NO: 302884
ucagaacugagucuagcau

SEQ ID NO: 302886 - RNA, 19 nt, Artificial Sequence
  Description of Artificial Sequence: Synthetic oligonucleotide
  Sense strand starting at position 1022 of SEQ ID NO: 3892
ugaggccaucaguauggau

SEQ ID NO: 302887 - RNA, 19 nt, Artificial Sequence
  Description of Artificial Sequence: Synthetic oligonucleotide
  Antisense strand to SEQ ID NO: 302886
auccauacugauggccuca

SEQ ID NO: 302888 - RNA, 19 nt, Artificial Sequence
  Description of Artificial Sequence: Synthetic oligonucleotide
  Sense strand starting at position 1070 of SEQ ID NO: 3892
agaagagauuaggaugcaa

SEQ ID NO: 302889 - RNA, 19 nt, Artificial Sequence
  Description of Artificial Sequence: Synthetic oligonucleotide
  Antisense strand to SEQ ID NO: 302888
uugcauccuaaucucuucu

SEQ ID NO: 302890 - RNA, 19 nt, Artificial Sequence
  Description of Artificial Sequence: Synthetic oligonucleotide
  Sense strand starting at position 1179 of SEQ ID NO: 3892
uuaacacccuggucuugaa

SEQ ID NO: 302891 - RNA, 19 nt, Artificial Sequence
  Description of Artificial Sequence: Synthetic oligonucleotide
  Antisense strand to SEQ ID NO: 302890
uucaagaccaggguguuaa

SEQ ID NO: 302892 - RNA, 19 nt, Artificial Sequence
  Description of Artificial Sequence: Synthetic oligonucleotide
  Sense strand starting at position 1411 of SEQ ID NO: 3892
uggccaaucuuguuugauu

SEQ ID NO: 302893 - RNA, 19 nt, Artificial Sequence
  Description of Artificial Sequence: Synthetic oligonucleotide
  Antisense strand to SEQ ID NO: 302892
aaucaaacaagauuggcca

SEQ ID NO: 302894 - RNA, 19 nt, Artificial Sequence
  Description of Artificial Sequence: Synthetic oligonucleotide
  Sense strand starting at position 1412 of SEQ ID NO: 3892
ggccaaucuuguuugauuu

SEQ ID NO: 302895 - RNA, 19 nt, Artificial Sequence
  Description of Artificial Sequence: Synthetic oligonucleotide
  Antisense strand to SEQ ID NO: 302894
aaaucaaacaagauuggcc

SEQ ID NO: 302896 - RNA, 19 nt, Artificial Sequence
  Description of Artificial Sequence: Synthetic oligonucleotide
  Sense strand starting at position 1413 of SEQ ID NO: 3892
gccaaucuuguuugauuuc

SEQ ID NO: 302897 - RNA, 19 nt, Artificial Sequence
  Description of Artificial Sequence: Synthetic oligonucleotide
  Antisense strand to SEQ ID NO: 302896
gaaaucaaacaagauuggc

SEQ ID NO: 302898 - RNA, 19 nt, Artificial Sequence
  Description of Artificial Sequence: Synthetic oligonucleotide
  Sense strand starting at position 1498 of SEQ ID NO: 3892
ccgugaauacgucaguaaa

SEQ ID NO: 302899 - RNA, 19 nt, Artificial Sequence
  Description of Artificial Sequence: Synthetic oligonucleotide
  Antisense strand to SEQ ID NO: 302898
uuuacugacguauucacgg

SEQ ID NO: 302900 - RNA, 19 nt, Artificial Sequence
  Description of Artificial Sequence: Synthetic oligonucleotide
  Sense strand starting at position 2276 of SEQ ID NO: 3892
ugaaaugcgucuuugauua

SEQ ID NO: 302901 - RNA, 19 nt, Artificial Sequence
  Description of Artificial Sequence: Synthetic oligonucleotide
  Antisense strand to SEQ ID NO: 302900
uaaucaaagacgcauuuca

SEQ ID NO: 302902 - RNA, 19 nt, Artificial Sequence
  Description of Artificial Sequence: Synthetic oligonucleotide
  Sense strand starting at position 2281 of SEQ ID NO: 3892
ugcgucuuugauuaauaca

SEQ ID NO: 302903 - RNA, 19 nt, Artificial Sequence
  Description of Artificial Sequence: Synthetic oligonucleotide
  Antisense strand to SEQ ID NO: 302902
uguauuaaucaaagacgca

SEQ ID NO: 302904 - RNA, 19 nt, Artificial Sequence
  Description of Artificial Sequence: Synthetic oligonucleotide
  Sense strand starting at position 2479 of SEQ ID NO: 3892
ggugucuuugaucaugcca

SEQ ID NO: 302905 - RNA, 19 nt, Artificial Sequence
  Description of Artificial Sequence: Synthetic oligonucleotide
  Antisense strand to SEQ ID NO: 302904
uggcaugaucaaagacacc

SEQ ID NO: 302906 - RNA, 19 nt, Artificial Sequence
  Description of Artificial Sequence: Synthetic oligonucleotide
  Sense strand starting at position 2566 of SEQ ID NO: 3892
uggugucuuugaucaugac

SEQ ID NO: 302907 - RNA, 19 nt, Artificial Sequence
  Description of Artificial Sequence: Synthetic oligonucleotide
  Antisense strand to SEQ ID NO: 302906
gucaugaucaaagacacca

SEQ ID NO: 302908 - RNA, 19 nt, Artificial Sequence
  Description of Artificial Sequence: Synthetic oligonucleotide
  Sense strand starting at position 2567 of SEQ ID NO: 3892
ggugucuuugaucaugaca

SEQ ID NO: 302909 - RNA, 19 nt, Artificial Sequence
  Description of Artificial Sequence: Synthetic oligonucleotide
  Antisense strand to SEQ ID NO: 302908
ugucaugaucaaagacacc

SEQ ID NO: 302910 - RNA, 19 nt, Artificial Sequence
  Description of Artificial Sequence: Synthetic oligonucleotide
  Sense strand starting at position 2610 of SEQ ID NO: 3892
ggugucuuugaucaucaca

SEQ ID NO: 302911 - RNA, 19 nt, Artificial Sequence
  Description of Artificial Sequence: Synthetic oligonucleotide
  Antisense strand to SEQ ID NO: 302910
ugugaugaucaaagacacc

SEQ ID NO: 302912 - RNA, 19 nt, Artificial Sequence
  Description of Artificial Sequence: Synthetic oligonucleotide
  Sense strand starting at position 2612 of SEQ ID NO: 3892
ugucuuugaucaucacaca

SEQ ID NO: 302913 - RNA, 19 nt, Artificial Sequence
  Description of Artificial Sequence: Synthetic oligonucleotide
  Antisense strand to SEQ ID NO: 302912
ugugugaugaucaaagaca

SEQ ID NO: 302914 - RNA, 19 nt, Artificial Sequence
  Description of Artificial Sequence: Synthetic oligonucleotide
  Sense strand starting at position 2812 of SEQ ID NO: 3892
agcucugagcuuuauguuu

SEQ ID NO: 302915 - RNA, 19 nt, Artificial Sequence
  Description of Artificial Sequence: Synthetic oligonucleotide
  Antisense strand to SEQ ID NO: 302914
aaacauaaagcucagagcu

SEQ ID NO: 302916 - RNA, 19 nt, Artificial Sequence
  Description of Artificial Sequence: Synthetic oligonucleotide
  Sense strand starting at position 2817 of SEQ ID NO: 3892
ugagcuuuauguuuauuac

SEQ ID NO: 302917 - RNA, 19 nt, Artificial Sequence
  Description of Artificial Sequence: Synthetic oligonucleotide
  Antisense strand to SEQ ID NO: 302916
guaauaaacauaaagcuca

SEQ ID NO: 302918 - RNA, 19 nt, Artificial Sequence
  Description of Artificial Sequence: Synthetic oligonucleotide
  Sense strand starting at position 2820 of SEQ ID NO: 3892
gcuuuauguuuauuaccau

SEQ ID NO: 302919 - RNA, 19 nt, Artificial Sequence
  Description of Artificial Sequence: Synthetic oligonucleotide
  Antisense strand to SEQ ID NO: 302918
augguaauaaacauaaagc

SEQ ID NO: 302920 - RNA, 19 nt, Artificial Sequence
  Description of Artificial Sequence: Synthetic oligonucleotide
  Sense strand starting at position 2925 of SEQ ID NO: 3892
ugcucugugagguagauga

SEQ ID NO: 302921 - RNA, 19 nt, Artificial Sequence
  Description of Artificial Sequence: Synthetic oligonucleotide
  Antisense strand to SEQ ID NO: 302920
ucaucuaccucacagagca

SEQ ID NO: 302922 - RNA, 19 nt, Artificial Sequence
  Description of Artificial Sequence: Synthetic oligonucleotide
  Sense strand starting at position 3019 of SEQ ID NO: 3892
ugcccaauccuuuacagag

SEQ ID NO: 302923 - RNA, 19 nt, Artificial Sequence
  Description of Artificial Sequence: Synthetic oligonucleotide
  Antisense strand to SEQ ID NO: 302922
cucuguaaaggauugggca

SEQ ID NO: 302924 - RNA, 19 nt, Artificial Sequence
  Description of Artificial Sequence: Synthetic oligonucleotide
  Sense strand starting at position 3025 of SEQ ID NO: 3892
auccuuuacagagggugaa

SEQ ID NO: 302925 - RNA, 19 nt, Artificial Sequence
  Description of Artificial Sequence: Synthetic oligonucleotide
  Antisense strand to SEQ ID NO: 302924
uucacccucuguaaaggau

SEQ ID NO: 302926 - RNA, 19 nt, Artificial Sequence
  Description of Artificial Sequence: Synthetic oligonucleotide
  Sense strand starting at position 3026 of SEQ ID NO: 3892
uccuuuacagagggugaaa

SEQ ID NO: 302927 - RNA, 19 nt, Artificial Sequence
  Description of Artificial Sequence: Synthetic oligonucleotide
  Antisense strand to SEQ ID NO: 302926
uuucacccucuguaaagga

SEQ ID NO: 302928 - RNA, 19 nt, Artificial Sequence
  Description of Artificial Sequence: Synthetic oligonucleotide
  Sense strand starting at position 3079 of SEQ ID NO: 3892
cuuacuagcugugugauaa

SEQ ID NO: 302929 - RNA, 19 nt, Artificial Sequence
  Description of Artificial Sequence: Synthetic oligonucleotide
  Antisense strand to SEQ ID NO: 302928
uuaucacacagcuaguaag

SEQ ID NO: 302930 - RNA, 19 nt, Artificial Sequence
  Description of Artificial Sequence: Synthetic oligonucleotide
  Sense strand starting at position 3080 of SEQ ID NO: 3892
uuacuagcugugugauaaa

SEQ ID NO: 302931 - RNA, 19 nt, Artificial Sequence
  Description of Artificial Sequence: Synthetic oligonucleotide
  Antisense strand to SEQ ID NO: 302930
uuuaucacacagcuaguaa

SEQ ID NO: 302932 - RNA, 19 nt, Artificial Sequence
  Description of Artificial Sequence: Synthetic oligonucleotide
  Sense strand starting at position 3100 of SEQ ID NO: 3892
ugaguugguguauauguaa

SEQ ID NO: 302933 - RNA, 19 nt, Artificial Sequence
  Description of Artificial Sequence: Synthetic oligonucleotide
  Antisense strand to SEQ ID NO: 302932
uuacauauacaccaacuca

SEQ ID NO: 302934 - RNA, 19 nt, Artificial Sequence
  Description of Artificial Sequence: Synthetic oligonucleotide
  Sense strand starting at position 3212 of SEQ ID NO: 3892
guuguuuguauguaaauag

SEQ ID NO: 302935 - RNA, 19 nt, Artificial Sequence
  Description of Artificial Sequence: Synthetic oligonucleotide
  Antisense strand to SEQ ID NO: 302934
cuauuuacauacaaacaac

SEQ ID NO: 302936 - RNA, 19 nt, Artificial Sequence
  Description of Artificial Sequence: Synthetic oligonucleotide
  Sense strand starting at position 3263 of SEQ ID NO: 3892
ggacauucuacagggcaaa

SEQ ID NO: 302937 - RNA, 19 nt, Artificial Sequence
  Description of Artificial Sequence: Synthetic oligonucleotide
  Antisense strand to SEQ ID NO: 302936
uuugcccuguagaaugucc

SEQ ID NO: 302938 - RNA, 19 nt, Artificial Sequence
  Description of Artificial Sequence: Synthetic oligonucleotide
  Sense strand starting at position 3275 of SEQ ID NO: 3892
gggcaaaugacgugguuua

SEQ ID NO: 302939 - RNA, 19 nt, Artificial Sequence
  Description of Artificial Sequence: Synthetic oligonucleotide
  Antisense strand to SEQ ID NO: 302938
uaaaccacgucauuugccc

SEQ ID NO: 302940 - RNA, 19 nt, Artificial Sequence
  Description of Artificial Sequence: Synthetic oligonucleotide
  Sense strand starting at position 3282 of SEQ ID NO: 3892
ugacgugguuuauccaaca

SEQ ID NO: 302941 - RNA, 19 nt, Artificial Sequence
  Description of Artificial Sequence: Synthetic oligonucleotide
  Antisense strand to SEQ ID NO: 302940
uguuggauaaaccacguca

SEQ ID NO: 302942 - RNA, 19 nt, Artificial Sequence
  Description of Artificial Sequence: Synthetic oligonucleotide
  Sense strand starting at position 3345 of SEQ ID NO: 3892
agacuugagagucauugca

SEQ ID NO: 302943 - RNA, 19 nt, Artificial Sequence
  Description of Artificial Sequence: Synthetic oligonucleotide
  Antisense strand to SEQ ID NO: 302942
ugcaaugacucucaagucu

SEQ ID NO: 302944 - RNA, 19 nt, Artificial Sequence
  Description of Artificial Sequence: Synthetic oligonucleotide
  Sense strand starting at position 3347 of SEQ ID NO: 3892
acuugagagucauugcagu

SEQ ID NO: 302945 - RNA, 19 nt, Artificial Sequence
  Description of Artificial Sequence: Synthetic oligonucleotide
  Antisense strand to SEQ ID NO: 302944
acugcaaugacucucaagu

SEQ ID NO: 302946 - RNA, 19 nt, Artificial Sequence
  Description of Artificial Sequence: Synthetic oligonucleotide
  Sense strand starting at position 3363 of SEQ ID NO: 3892
aguuaaaugcaauauguga

SEQ ID NO: 302947 - RNA, 19 nt, Artificial Sequence
  Description of Artificial Sequence: Synthetic oligonucleotide
  Antisense strand to SEQ ID NO: 302946
ucacauauugcauuuaacu

SEQ ID NO: 302948 - RNA, 19 nt, Artificial Sequence
  Description of Artificial Sequence: Synthetic oligonucleotide
  Sense strand starting at position 3821 of SEQ ID NO: 3892
ggaugaugacauggaguuu

SEQ ID NO: 302949 - RNA, 19 nt, Artificial Sequence
  Description of Artificial Sequence: Synthetic oligonucleotide
  Antisense strand to SEQ ID NO: 302948
aaacuccaugucaucaucc

SEQ ID NO: 302950 - RNA, 19 nt, Artificial Sequence
  Description of Artificial Sequence: Synthetic oligonucleotide
  Sense strand starting at position 3878 of SEQ ID NO: 3892
aguguuuacaggugaaaug

SEQ ID NO: 302951 - RNA, 19 nt, Artificial Sequence
  Description of Artificial Sequence: Synthetic oligonucleotide
  Antisense strand to SEQ ID NO: 302950
cauuucaccuguaaacacu

SEQ ID NO: 302952 - RNA, 19 nt, Artificial Sequence
  Description of Artificial Sequence: Synthetic oligonucleotide
  Sense strand starting at position 218 of SEQ ID NO: 3893
acaaauugaugcucugcaa

SEQ ID NO: 302953 - RNA, 19 nt, Artificial Sequence
  Description of Artificial Sequence: Synthetic oligonucleotide
  Antisense strand to SEQ ID NO: 302952
uugcagagcaucaauuugu

SEQ ID NO: 302954 - RNA, 19 nt, Artificial Sequence
  Description of Artificial Sequence: Synthetic oligonucleotide
  Sense strand starting at position 310 of SEQ ID NO: 3893
gagagugagugcccaaauc

SEQ ID NO: 302955 - RNA, 19 nt, Artificial Sequence
  Description of Artificial Sequence: Synthetic oligonucleotide
  Antisense strand to SEQ ID NO: 302954
gauuugggcacucacucuc

SEQ ID NO: 302956 - RNA, 19 nt, Artificial Sequence
  Description of Artificial Sequence: Synthetic oligonucleotide
  Sense strand starting at position 327 of SEQ ID NO: 3893
ucuggaaagcucuaguuua

SEQ ID NO: 302957 - RNA, 19 nt, Artificial Sequence
  Description of Artificial Sequence: Synthetic oligonucleotide
  Antisense strand to SEQ ID NO: 302956
uaaacuagagcuuuccaga

SEQ ID NO: 302958 - RNA, 19 nt, Artificial Sequence
  Description of Artificial Sequence: Synthetic oligonucleotide
  Sense strand starting at position 418 of SEQ ID NO: 3893
uuggaaagcagguguccua

SEQ ID NO: 302959 - RNA, 19 nt, Artificial Sequence
  Description of Artificial Sequence: Synthetic oligonucleotide
  Antisense strand to SEQ ID NO: 302958
uaggacaccugcuuuccaa

SEQ ID NO: 302960 - RNA, 19 nt, Artificial Sequence
  Description of Artificial Sequence: Synthetic oligonucleotide
  Sense strand starting at position 470 of SEQ ID NO: 3893
gccaacgauuggucucuga

SEQ ID NO: 302961 - RNA, 19 nt, Artificial Sequence
  Description of Artificial Sequence: Synthetic oligonucleotide
  Antisense strand to SEQ ID NO: 302960
ucagagaccaaucguuggc

SEQ ID NO: 302962 - RNA, 19 nt, Artificial Sequence
  Description of Artificial Sequence: Synthetic oligonucleotide
  Sense strand starting at position 473 of SEQ ID NO: 3893
aacgauuggucucugaagu

SEQ ID NO: 302963 - RNA, 19 nt, Artificial Sequence
  Description of Artificial Sequence: Synthetic oligonucleotide
  Antisense strand to SEQ ID NO: 302962
acuucagagaccaaucguu

SEQ ID NO: 302964 - RNA, 19 nt, Artificial Sequence
  Description of Artificial Sequence: Synthetic oligonucleotide
  Sense strand starting at position 474 of SEQ ID NO: 3893
acgauuggucucugaaguc

SEQ ID NO: 302965 - RNA, 19 nt, Artificial Sequence
  Description of Artificial Sequence: Synthetic oligonucleotide
  Antisense strand to SEQ ID NO: 302964
gacuucagagaccaaucgu

SEQ ID NO: 302966 - RNA, 19 nt, Artificial Sequence
  Description of Artificial Sequence: Synthetic oligonucleotide
  Sense strand starting at position 481 of SEQ ID NO: 3893
gucucugaagucuaaucca

SEQ ID NO: 302967 - RNA, 19 nt, Artificial Sequence
  Description of Artificial Sequence: Synthetic oligonucleotide
  Antisense strand to SEQ ID NO: 302966
uggauuagacuucagagac

SEQ ID NO: 302968 - RNA, 19 nt, Artificial Sequence
  Description of Artificial Sequence: Synthetic oligonucleotide
  Sense strand starting at position 901 of SEQ ID NO: 3893
gcaggauguggacgaaaga

SEQ ID NO: 302969 - RNA, 19 nt, Artificial Sequence
  Description of Artificial Sequence: Synthetic oligonucleotide
  Antisense strand to SEQ ID NO: 302968
ucuuucguccacauccugc

SEQ ID NO: 302970 - RNA, 19 nt, Artificial Sequence
  Description of Artificial Sequence: Synthetic oligonucleotide
  Sense strand starting at position 990 of SEQ ID NO: 3893
gcgggaaggaugcaagaau

SEQ ID NO: 302971 - RNA, 19 nt, Artificial Sequence
  Description of Artificial Sequence: Synthetic oligonucleotide
  Antisense strand to SEQ ID NO: 302970
auucuugcauccuucccgc

SEQ ID NO: 302972 - RNA, 19 nt, Artificial Sequence
  Description of Artificial Sequence: Synthetic oligonucleotide
  Sense strand starting at position 2151 of SEQ ID NO: 3893
ucuugucacuuguccaagu

SEQ ID NO: 302973 - RNA, 19 nt, Artificial Sequence
  Description of Artificial Sequence: Synthetic oligonucleotide
  Antisense strand to SEQ ID NO: 302972
acuuggacaagugacaaga

SEQ ID NO: 302974 - RNA, 19 nt, Artificial Sequence
  Description of Artificial Sequence: Synthetic oligonucleotide
  Sense strand starting at position 2152 of SEQ ID NO: 3893
cuugucacuuguccaaguu

SEQ ID NO: 302975 - RNA, 19 nt, Artificial Sequence
  Description of Artificial Sequence: Synthetic oligonucleotide
  Antisense strand to SEQ ID NO: 302974
aacuuggacaagugacaag

SEQ ID NO: 302976 - RNA, 19 nt, Artificial Sequence
  Description of Artificial Sequence: Synthetic oligonucleotide
  Sense strand starting at position 2235 of SEQ ID NO: 3893
gcguuuaacuccuuggaau

SEQ ID NO: 302977 - RNA, 19 nt, Artificial Sequence
  Description of Artificial Sequence: Synthetic oligonucleotide
  Antisense strand to SEQ ID NO: 302976
auuccaaggaguuaaacgc

SEQ ID NO: 302978 - RNA, 19 nt, Artificial Sequence
  Description of Artificial Sequence: Synthetic oligonucleotide
  Sense strand starting at position 2236 of SEQ ID NO: 3893
cguuuaacuccuuggaauc

SEQ ID NO: 302979 - RNA, 19 nt, Artificial Sequence
  Description of Artificial Sequence: Synthetic oligonucleotide
  Antisense strand to SEQ ID NO: 302978
gauuccaaggaguuaaacg

SEQ ID NO: 302980 - RNA, 19 nt, Artificial Sequence
  Description of Artificial Sequence: Synthetic oligonucleotide
  Sense strand starting at position 2237 of SEQ ID NO: 3893
guuuaacuccuuggaaucu

SEQ ID NO: 302981 - RNA, 19 nt, Artificial Sequence
  Description of Artificial Sequence: Synthetic oligonucleotide
  Antisense strand to SEQ ID NO: 302980
agauuccaaggaguuaaac

SEQ ID NO: 302982 - RNA, 19 nt, Artificial Sequence
  Description of Artificial Sequence: Synthetic oligonucleotide
  Sense strand starting at position 2249 of SEQ ID NO: 3893
ggaaucuugaucuggaguc

SEQ ID NO: 302983 - RNA, 19 nt, Artificial Sequence
  Description of Artificial Sequence: Synthetic oligonucleotide
  Antisense strand to SEQ ID NO: 302982
gacuccagaucaagauucc

SEQ ID NO: 302984 - RNA, 19 nt, Artificial Sequence
  Description of Artificial Sequence: Synthetic oligonucleotide
  Sense strand starting at position 2433 of SEQ ID NO: 3893
gugucaguggagcgauaga

SEQ ID NO: 302985 - RNA, 19 nt, Artificial Sequence
  Description of Artificial Sequence: Synthetic oligonucleotide
  Antisense strand to SEQ ID NO: 302984
ucuaucgcuccacugacac

SEQ ID NO: 302986 - RNA, 19 nt, Artificial Sequence
  Description of Artificial Sequence: Synthetic oligonucleotide
  Sense strand starting at position 2792 of SEQ ID NO: 3893
ccaagaauggcaggcagau

SEQ ID NO: 302987 - RNA, 19 nt, Artificial Sequence
  Description of Artificial Sequence: Synthetic oligonucleotide
  Antisense strand to SEQ ID NO: 302986
aucugccugccauucuugg

SEQ ID NO: 302988 - RNA, 19 nt, Artificial Sequence
  Description of Artificial Sequence: Synthetic oligonucleotide
  Sense strand starting at position 2847 of SEQ ID NO: 3893
ggugcuaagaguuaaucac

SEQ ID NO: 302989 - RNA, 19 nt, Artificial Sequence
  Description of Artificial Sequence: Synthetic oligonucleotide
  Antisense strand to SEQ ID NO: 302988
gugauuaacucuuagcacc

SEQ ID NO: 302990 - RNA, 19 nt, Artificial Sequence
  Description of Artificial Sequence: Synthetic oligonucleotide
  Sense strand starting at position 2976 of SEQ ID NO: 3893
aaaugcuuguguucuuaug

SEQ ID NO: 302991 - RNA, 19 nt, Artificial Sequence
  Description of Artificial Sequence: Synthetic oligonucleotide
  Antisense strand to SEQ ID NO: 302990
cauaagaacacaagcauuu

SEQ ID NO: 302992 - RNA, 19 nt, Artificial Sequence
  Description of Artificial Sequence: Synthetic oligonucleotide
  Sense strand starting at position 2986 of SEQ ID NO: 3893
guucuuaugcuaugaaaua

SEQ ID NO: 302993 - RNA, 19 nt, Artificial Sequence
  Description of Artificial Sequence: Synthetic oligonucleotide
  Antisense strand to SEQ ID NO: 302992
uauuucauagcauaagaac

SEQ ID NO: 302994 - RNA, 19 nt, Artificial Sequence
  Description of Artificial Sequence: Synthetic oligonucleotide
  Sense strand starting at position 3012 of SEQ ID NO: 3893
ugaagaaauuaugaggcau

SEQ ID NO: 302995 - RNA, 19 nt, Artificial Sequence
  Description of Artificial Sequence: Synthetic oligonucleotide
  Antisense strand to SEQ ID NO: 302994
augccucauaauuucuuca

SEQ ID NO: 302996 - RNA, 19 nt, Artificial Sequence
  Description of Artificial Sequence: Synthetic oligonucleotide
  Sense strand starting at position 3045 of SEQ ID NO: 3893
augucauuacuccaugauu

SEQ ID NO: 302997 - RNA, 19 nt, Artificial Sequence
  Description of Artificial Sequence: Synthetic oligonucleotide
  Antisense strand to SEQ ID NO: 302996
aaucauggaguaaugacau

SEQ ID NO: 302998 - RNA, 19 nt, Artificial Sequence
  Description of Artificial Sequence: Synthetic oligonucleotide
  Sense strand starting at position 3058 of SEQ ID NO: 3893
augauuuaaugggacuuau

SEQ ID NO: 302999 - RNA, 19 nt, Artificial Sequence
  Description of Artificial Sequence: Synthetic oligonucleotide
  Antisense strand to SEQ ID NO: 302998
auaagucccauuaaaucau

SEQ ID NO: 303000 - RNA, 19 nt, Artificial Sequence
  Description of Artificial Sequence: Synthetic oligonucleotide
  Sense strand starting at position 3133 of SEQ ID NO: 3893
gacaucuguaaagguggua

SEQ ID NO: 303001 - RNA, 19 nt, Artificial Sequence
  Description of Artificial Sequence: Synthetic oligonucleotide
  Antisense strand to SEQ ID NO: 303000
uaccaccuuuacagauguc

SEQ ID NO: 303002 - RNA, 19 nt, Artificial Sequence
  Description of Artificial Sequence: Synthetic oligonucleotide
  Sense strand starting at position 3136 of SEQ ID NO: 3893
aucuguaaaggugguauaa

SEQ ID NO: 303003 - RNA, 19 nt, Artificial Sequence
  Description of Artificial Sequence: Synthetic oligonucleotide
  Antisense strand to SEQ ID NO: 303002
uuauaccaccuuuacagau

SEQ ID NO: 303004 - RNA, 19 nt, Artificial Sequence
  Description of Artificial Sequence: Synthetic oligonucleotide
  Sense strand starting at position 3154 of SEQ ID NO: 3893
aggcucuugcugggauuua

SEQ ID NO: 303005 - RNA, 19 nt, Artificial Sequence
  Description of Artificial Sequence: Synthetic oligonucleotide
  Antisense strand to SEQ ID NO: 303004
uaaaucccagcaagagccu

SEQ ID NO: 303006 - RNA, 19 nt, Artificial Sequence
  Description of Artificial Sequence: Synthetic oligonucleotide
  Sense strand starting at position 3205 of SEQ ID NO: 3893
aggguacauuuccagugaa

SEQ ID NO: 303007 - RNA, 19 nt, Artificial Sequence
  Description of Artificial Sequence: Synthetic oligonucleotide
  Antisense strand to SEQ ID NO: 303006
uucacuggaaauguacccu

SEQ ID NO: 303008 - RNA, 19 nt, Artificial Sequence
  Description of Artificial Sequence: Synthetic oligonucleotide
  Sense strand starting at position 3313 of SEQ ID NO: 3893
cugaccugacagugugaau

SEQ ID NO: 303009 - RNA, 19 nt, Artificial Sequence
  Description of Artificial Sequence: Synthetic oligonucleotide
  Antisense strand to SEQ ID NO: 303008
auucacacugucaggucag

SEQ ID NO: 303010 - RNA, 19 nt, Artificial Sequence
  Description of Artificial Sequence: Synthetic oligonucleotide
  Sense strand starting at position 3325 of SEQ ID NO: 3893
ugugaauuauugcuuggau

SEQ ID NO: 303011 - RNA, 19 nt, Artificial Sequence
  Description of Artificial Sequence: Synthetic oligonucleotide
  Antisense strand to SEQ ID NO: 303010
auccaagcaauaauucaca

SEQ ID NO: 303012 - RNA, 19 nt, Artificial Sequence
  Description of Artificial Sequence: Synthetic oligonucleotide
  Sense strand starting at position 3326 of SEQ ID NO: 3893
gugaauuauugcuuggauu

SEQ ID NO: 303013 - RNA, 19 nt, Artificial Sequence
  Description of Artificial Sequence: Synthetic oligonucleotide
  Antisense strand to SEQ ID NO: 303012
aauccaagcaauaauucac

SEQ ID NO: 303014 - RNA, 19 nt, Artificial Sequence
  Description of Artificial Sequence: Synthetic oligonucleotide
  Sense strand starting at position 3367 of SEQ ID NO: 3893
uauggugagcucuagucua

SEQ ID NO: 303015 - RNA, 19 nt, Artificial Sequence
  Description of Artificial Sequence: Synthetic oligonucleotide
  Antisense strand to SEQ ID NO: 303014
uagacuagagcucaccaua

SEQ ID NO: 303016 - RNA, 19 nt, Artificial Sequence
  Description of Artificial Sequence: Synthetic oligonucleotide
  Sense strand starting at position 3372 of SEQ ID NO: 3893
ugagcucuagucuaauuaa

SEQ ID NO: 303017 - RNA, 19 nt, Artificial Sequence
  Description of Artificial Sequence: Synthetic oligonucleotide
  Antisense strand to SEQ ID NO: 303016
uuaauuagacuagagcuca

SEQ ID NO: 303018 - RNA, 19 nt, Artificial Sequence
  Description of Artificial Sequence: Synthetic oligonucleotide
  Sense strand starting at position 3375 of SEQ ID NO: 3893
gcucuagucuaauuaagga

SEQ ID NO: 303019 - RNA, 19 nt, Artificial Sequence
  Description of Artificial Sequence: Synthetic oligonucleotide
  Antisense strand to SEQ ID NO: 303018
uccuuaauuagacuagagc

SEQ ID NO: 303020 - RNA, 19 nt, Artificial Sequence
  Description of Artificial Sequence: Synthetic oligonucleotide
  Sense strand starting at position 3415 of SEQ ID NO: 3893
guguuccucucaccuauaa

SEQ ID NO: 303021 - RNA, 19 nt, Artificial Sequence
  Description of Artificial Sequence: Synthetic oligonucleotide
  Antisense strand to SEQ ID NO: 303020
uuauaggugagaggaacac

SEQ ID NO: 303022 - RNA, 19 nt, Artificial Sequence
  Description of Artificial Sequence: Synthetic oligonucleotide
  Sense strand starting at position 3466 of SEQ ID NO: 3893
aaaggagucuuagcuggau

SEQ ID NO: 303023 - RNA, 19 nt, Artificial Sequence
  Description of Artificial Sequence: Synthetic oligonucleotide
  Antisense strand to SEQ ID NO: 303022
auccagcuaagacuccuuu

SEQ ID NO: 303024 - RNA, 19 nt, Artificial Sequence
  Description of Artificial Sequence: Synthetic oligonucleotide
  Sense strand starting at position 3850 of SEQ ID NO: 3893
aggcacuucuguuuaaauu

SEQ ID NO: 303025 - RNA, 19 nt, Artificial Sequence
  Description of Artificial Sequence: Synthetic oligonucleotide
  Antisense strand to SEQ ID NO: 303024
aauuuaaacagaagugccu

SEQ ID NO: 303026 - RNA, 19 nt, Artificial Sequence
  Description of Artificial Sequence: Synthetic oligonucleotide
  Sense strand starting at position 3851 of SEQ ID NO: 3893
ggcacuucuguuuaaauua

SEQ ID NO: 303027 - RNA, 19 nt, Artificial Sequence
  Description of Artificial Sequence: Synthetic oligonucleotide
  Antisense strand to SEQ ID NO: 303026
uaauuuaaacagaagugcc

SEQ ID NO: 303028 - RNA, 19 nt, Artificial Sequence
  Description of Artificial Sequence: Synthetic oligonucleotide
  Sense strand starting at position 3901 of SEQ ID NO: 3893
gcuagaacucuuugaucau

SEQ ID NO: 303029 - RNA, 19 nt, Artificial Sequence
  Description of Artificial Sequence: Synthetic oligonucleotide
  Antisense strand to SEQ ID NO: 303028
augaucaaagaguucuagc

SEQ ID NO: 303030 - RNA, 19 nt, Artificial Sequence
  Description of Artificial Sequence: Synthetic oligonucleotide
  Sense strand starting at position 3957 of SEQ ID NO: 3893
uuaugucuauguuuaagac

SEQ ID NO: 303031 - RNA, 19 nt, Artificial Sequence
  Description of Artificial Sequence: Synthetic oligonucleotide
  Antisense strand to SEQ ID NO: 303030
gucuuaaacauagacauaa

SEQ ID NO: 303032 - RNA, 19 nt, Artificial Sequence
  Description of Artificial Sequence: Synthetic oligonucleotide
  Sense strand starting at position 63 of SEQ ID NO: 3894
gaaaucagauuuggaugca

SEQ ID NO: 303033 - RNA, 19 nt, Artificial Sequence
  Description of Artificial Sequence: Synthetic oligonucleotide
  Antisense strand to SEQ ID NO: 303032
ugcauccaaaucugauuuc

SEQ ID NO: 303034 - RNA, 19 nt, Artificial Sequence
  Description of Artificial Sequence: Synthetic oligonucleotide
  Sense strand starting at position 194 of SEQ ID NO: 3894
agcugaguuagccauggga

SEQ ID NO: 303035 - RNA, 19 nt, Artificial Sequence
  Description of Artificial Sequence: Synthetic oligonucleotide
  Antisense strand to SEQ ID NO: 303034
ucccauggcuaacucagcu

SEQ ID NO: 303036 - RNA, 19 nt, Artificial Sequence
  Description of Artificial Sequence: Synthetic oligonucleotide
  Sense strand starting at position 196 of SEQ ID NO: 3894
cugaguuagccaugggaag

SEQ ID NO: 303037 - RNA, 19 nt, Artificial Sequence
  Description of Artificial Sequence: Synthetic oligonucleotide
  Antisense strand to SEQ ID NO: 303036
cuucccauggcuaacucag

SEQ ID NO: 303038 - RNA, 19 nt, Artificial Sequence
  Description of Artificial Sequence: Synthetic oligonucleotide
  Sense strand starting at position 198 of SEQ ID NO: 3894
gaguuagccaugggaagga

SEQ ID NO: 303039 - RNA, 19 nt, Artificial Sequence
  Description of Artificial Sequence: Synthetic oligonucleotide
  Antisense strand to SEQ ID NO: 303038
uccuucccauggcuaacuc

SEQ ID NO: 303040 - RNA, 19 nt, Artificial Sequence
  Description of Artificial Sequence: Synthetic oligonucleotide
  Sense strand starting at position 220 of SEQ ID NO: 3894
aguugacauguuugagaaa

SEQ ID NO: 303041 - RNA, 19 nt, Artificial Sequence
  Description of Artificial Sequence: Synthetic oligonucleotide
  Antisense strand to SEQ ID NO: 303040
uuucucaaacaugucaacu

SEQ ID NO: 303042 - RNA, 19 nt, Artificial Sequence
  Description of Artificial Sequence: Synthetic oligonucleotide
  Sense strand starting at position 239 of SEQ ID NO: 3894
ugaagaauccgccaacuag

SEQ ID NO: 303043 - RNA, 19 nt, Artificial Sequence
  Description of Artificial Sequence: Synthetic oligonucleotide
  Antisense strand to SEQ ID NO: 303042
cuaguuggcggauucuuca

SEQ ID NO: 303044 - RNA, 19 nt, Artificial Sequence
  Description of Artificial Sequence: Synthetic oligonucleotide
  Sense strand starting at position 615 of SEQ ID NO: 3894
acaaauugaugcucugcaa

SEQ ID NO: 303045 - RNA, 19 nt, Artificial Sequence
  Description of Artificial Sequence: Synthetic oligonucleotide
  Antisense strand to SEQ ID NO: 303044
uugcagagcaucaauuugu

SEQ ID NO: 303046 - RNA, 19 nt, Artificial Sequence
  Description of Artificial Sequence: Synthetic oligonucleotide
  Sense strand starting at position 707 of SEQ ID NO: 3894
gagagugagugcccaaauc

SEQ ID NO: 303047 - RNA, 19 nt, Artificial Sequence
  Description of Artificial Sequence: Synthetic oligonucleotide
  Antisense strand to SEQ ID NO: 303046
gauuugggcacucacucuc

SEQ ID NO: 303048 - RNA, 19 nt, Artificial Sequence
  Description of Artificial Sequence: Synthetic oligonucleotide
  Sense strand starting at position 724 of SEQ ID NO: 3894
ucuggaaagcucuaguuua

SEQ ID NO: 303049 - RNA, 19 nt, Artificial Sequence
  Description of Artificial Sequence: Synthetic oligonucleotide
  Antisense strand to SEQ ID NO: 303048
uaaacuagagcuuuccaga

SEQ ID NO: 303050 - RNA, 19 nt, Artificial Sequence
  Description of Artificial Sequence: Synthetic oligonucleotide
  Sense strand starting at position 815 of SEQ ID NO: 3894
uuggaaagcagguguccua

SEQ ID NO: 303051 - RNA, 19 nt, Artificial Sequence
  Description of Artificial Sequence: Synthetic oligonucleotide
  Antisense strand to SEQ ID NO: 303050
uaggacaccugcuuuccaa

SEQ ID NO: 303052 - RNA, 19 nt, Artificial Sequence
  Description of Artificial Sequence: Synthetic oligonucleotide
  Sense strand starting at position 867 of SEQ ID NO: 3894
gccaacgauuggucucuga

SEQ ID NO: 303053 - RNA, 19 nt, Artificial Sequence
  Description of Artificial Sequence: Synthetic oligonucleotide
  Antisense strand to SEQ ID NO: 303052
ucagagaccaaucguuggc

SEQ ID NO: 303054 - RNA, 19 nt, Artificial Sequence
  Description of Artificial Sequence: Synthetic oligonucleotide
  Sense strand starting at position 870 of SEQ ID NO: 3894
aacgauuggucucugaagu

SEQ ID NO: 303055 - RNA, 19 nt, Artificial Sequence
  Description of Artificial Sequence: Synthetic oligonucleotide
  Antisense strand to SEQ ID NO: 303054
acuucagagaccaaucguu

SEQ ID NO: 303056 - RNA, 19 nt, Artificial Sequence
  Description of Artificial Sequence: Synthetic oligonucleotide
  Sense strand starting at position 871 of SEQ ID NO: 3894
acgauuggucucugaaguc

SEQ ID NO: 303057 - RNA, 19 nt, Artificial Sequence
  Description of Artificial Sequence: Synthetic oligonucleotide
  Antisense strand to SEQ ID NO: 303056
gacuucagagaccaaucgu

SEQ ID NO: 303058 - RNA, 19 nt, Artificial Sequence
  Description of Artificial Sequence: Synthetic oligonucleotide
  Sense strand starting at position 878 of SEQ ID NO: 3894
gucucugaagucuaaucca

SEQ ID NO: 303059 - RNA, 19 nt, Artificial Sequence
  Description of Artificial Sequence: Synthetic oligonucleotide
  Antisense strand to SEQ ID NO: 303058
uggauuagacuucagagac

SEQ ID NO: 303060 - RNA, 19 nt, Artificial Sequence
  Description of Artificial Sequence: Synthetic oligonucleotide
  Sense strand starting at position 1298 of SEQ ID NO: 3894
gcaggauguggacgaaaga

SEQ ID NO: 303061 - RNA, 19 nt, Artificial Sequence
  Description of Artificial Sequence: Synthetic oligonucleotide
  Antisense strand to SEQ ID NO: 303060
ucuuucguccacauccugc

SEQ ID NO: 303062 - RNA, 19 nt, Artificial Sequence
  Description of Artificial Sequence: Synthetic oligonucleotide
  Sense strand starting at position 1387 of SEQ ID NO: 3894
gcgggaaggaugcaagaau

SEQ ID NO: 303063 - RNA, 19 nt, Artificial Sequence
  Description of Artificial Sequence: Synthetic oligonucleotide
  Antisense strand to SEQ ID NO: 303062
auucuugcauccuucccgc

SEQ ID NO: 303064 - RNA, 19 nt, Artificial Sequence
  Description of Artificial Sequence: Synthetic oligonucleotide
  Sense strand starting at position 2632 of SEQ ID NO: 3894
gcguuuaacuccuuggaau

SEQ ID NO: 303065 - RNA, 19 nt, Artificial Sequence
  Description of Artificial Sequence: Synthetic oligonucleotide
  Antisense strand to SEQ ID NO: 303064
auuccaaggaguuaaacgc

SEQ ID NO: 303066 - RNA, 19 nt, Artificial Sequence
  Description of Artificial Sequence: Synthetic oligonucleotide
  Sense strand starting at position 2633 of SEQ ID NO: 3894
cguuuaacuccuuggaauc

SEQ ID NO: 303067 - RNA, 19 nt, Artificial Sequence
  Description of Artificial Sequence: Synthetic oligonucleotide
  Antisense strand to SEQ ID NO: 303066
gauuccaaggaguuaaacg

SEQ ID NO: 303068 - RNA, 19 nt, Artificial Sequence
  Description of Artificial Sequence: Synthetic oligonucleotide
  Sense strand starting at position 2634 of SEQ ID NO: 3894
guuuaacuccuuggaaucu

SEQ ID NO: 303069 - RNA, 19 nt, Artificial Sequence
  Description of Artificial Sequence: Synthetic oligonucleotide
  Antisense strand to SEQ ID NO: 303068
agauuccaaggaguuaaac

SEQ ID NO: 303070 - RNA, 19 nt, Artificial Sequence
  Description of Artificial Sequence: Synthetic oligonucleotide
  Sense strand starting at position 2646 of SEQ ID NO: 3894
ggaaucuugaucuggaguc

SEQ ID NO: 303071 - RNA, 19 nt, Artificial Sequence
  Description of Artificial Sequence: Synthetic oligonucleotide
  Antisense strand to SEQ ID NO: 303070
gacuccagaucaagauucc

SEQ ID NO: 303072 - RNA, 19 nt, Artificial Sequence
  Description of Artificial Sequence: Synthetic oligonucleotide
  Sense strand starting at position 2830 of SEQ ID NO: 3894
gugucaguggagcgauaga

SEQ ID NO: 303073 - RNA, 19 nt, Artificial Sequence
  Description of Artificial Sequence: Synthetic oligonucleotide
  Antisense strand to SEQ ID NO: 303072
ucuaucgcuccacugacac

SEQ ID NO: 303074 - RNA, 19 nt, Artificial Sequence
  Description of Artificial Sequence: Synthetic oligonucleotide
  Sense strand starting at position 3189 of SEQ ID NO: 3894
ccaagaauggcaggcagau

SEQ ID NO: 303075 - RNA, 19 nt, Artificial Sequence
  Description of Artificial Sequence: Synthetic oligonucleotide
  Antisense strand to SEQ ID NO: 303074
aucugccugccauucuugg

SEQ ID NO: 303076 - RNA, 19 nt, Artificial Sequence
  Description of Artificial Sequence: Synthetic oligonucleotide
  Sense strand starting at position 3244 of SEQ ID NO: 3894
ggugcuaagaguuaaucac

SEQ ID NO: 303077 - RNA, 19 nt, Artificial Sequence
  Description of Artificial Sequence: Synthetic oligonucleotide
  Antisense strand to SEQ ID NO: 303076
gugauuaacucuuagcacc

SEQ ID NO: 303078 - RNA, 19 nt, Artificial Sequence
  Description of Artificial Sequence: Synthetic oligonucleotide
  Sense strand starting at position 3373 of SEQ ID NO: 3894
aaaugcuuguguucuuaug

SEQ ID NO: 303079 - RNA, 19 nt, Artificial Sequence
  Description of Artificial Sequence: Synthetic oligonucleotide
  Antisense strand to SEQ ID NO: 303078
cauaagaacacaagcauuu

SEQ ID NO: 303080 - RNA, 19 nt, Artificial Sequence
  Description of Artificial Sequence: Synthetic oligonucleotide
  Sense strand starting at position 3383 of SEQ ID NO: 3894
guucuuaugcuaugaaaua

SEQ ID NO: 303081 - RNA, 19 nt, Artificial Sequence
  Description of Artificial Sequence: Synthetic oligonucleotide
  Antisense strand to SEQ ID NO: 303080
uauuucauagcauaagaac

SEQ ID NO: 303082 - RNA, 19 nt, Artificial Sequence
  Description of Artificial Sequence: Synthetic oligonucleotide
  Sense strand starting at position 3409 of SEQ ID NO: 3894
ugaagaaauuaugaggcau

SEQ ID NO: 303083 - RNA, 19 nt, Artificial Sequence
  Description of Artificial Sequence: Synthetic oligonucleotide
  Antisense strand to SEQ ID NO: 303082
augccucauaauuucuuca

SEQ ID NO: 303084 - RNA, 19 nt, Artificial Sequence
  Description of Artificial Sequence: Synthetic oligonucleotide
  Sense strand starting at position 3442 of SEQ ID NO: 3894
augucauuacuccaugauu

SEQ ID NO: 303085 - RNA, 19 nt, Artificial Sequence
  Description of Artificial Sequence: Synthetic oligonucleotide
  Antisense strand to SEQ ID NO: 303084
aaucauggaguaaugacau

SEQ ID NO: 303086 - RNA, 19 nt, Artificial Sequence
  Description of Artificial Sequence: Synthetic oligonucleotide
  Sense strand starting at position 3455 of SEQ ID NO: 3894
augauuuaaugggacuuau

SEQ ID NO: 303087 - RNA, 19 nt, Artificial Sequence
  Description of Artificial Sequence: Synthetic oligonucleotide
  Antisense strand to SEQ ID NO: 303086
auaagucccauuaaaucau

SEQ ID NO: 303088 - RNA, 19 nt, Artificial Sequence
  Description of Artificial Sequence: Synthetic oligonucleotide
  Sense strand starting at position 3530 of SEQ ID NO: 3894
gacaucuguaaagguggua

SEQ ID NO: 303089 - RNA, 19 nt, Artificial Sequence
  Description of Artificial Sequence: Synthetic oligonucleotide
  Antisense strand to SEQ ID NO: 303088
uaccaccuuuacagauguc

SEQ ID NO: 303090 - RNA, 19 nt, Artificial Sequence
  Description of Artificial Sequence: Synthetic oligonucleotide
  Sense strand starting at position 3533 of SEQ ID NO: 3894
aucuguaaaggugguauaa

SEQ ID NO: 303091 - RNA, 19 nt, Artificial Sequence
  Description of Artificial Sequence: Synthetic oligonucleotide
  Antisense strand to SEQ ID NO: 303090
uuauaccaccuuuacagau

SEQ ID NO: 303092 - RNA, 19 nt, Artificial Sequence
  Description of Artificial Sequence: Synthetic oligonucleotide
  Sense strand starting at position 3551 of SEQ ID NO: 3894
aggcucuugcugggauuua

SEQ ID NO: 303093 - RNA, 19 nt, Artificial Sequence
  Description of Artificial Sequence: Synthetic oligonucleotide
  Antisense strand to SEQ ID NO: 303092
uaaaucccagcaagagccu

SEQ ID NO: 303094 - RNA, 19 nt, Artificial Sequence
  Description of Artificial Sequence: Synthetic oligonucleotide
  Sense strand starting at position 3602 of SEQ ID NO: 3894
aggguacauuuccagugaa

SEQ ID NO: 303095 - RNA, 19 nt, Artificial Sequence
  Description of Artificial Sequence: Synthetic oligonucleotide
  Antisense strand to SEQ ID NO: 303094
uucacuggaaauguacccu

SEQ ID NO: 303096 - RNA, 19 nt, Artificial Sequence
  Description of Artificial Sequence: Synthetic oligonucleotide
  Sense strand starting at position 3710 of SEQ ID NO: 3894
cugaccugacagugugaau

SEQ ID NO: 303097 - RNA, 19 nt, Artificial Sequence
  Description of Artificial Sequence: Synthetic oligonucleotide
  Antisense strand to SEQ ID NO: 303096
auucacacugucaggucag

SEQ ID NO: 303098 - RNA, 19 nt, Artificial Sequence
  Description of Artificial Sequence: Synthetic oligonucleotide
  Sense strand starting at position 3722 of SEQ ID NO: 3894
ugugaauuauugcuuggau

SEQ ID NO: 303099 - RNA, 19 nt, Artificial Sequence
  Description of Artificial Sequence: Synthetic oligonucleotide
  Antisense strand to SEQ ID NO: 303098
auccaagcaauaauucaca

SEQ ID NO: 303100 - RNA, 19 nt, Artificial Sequence
  Description of Artificial Sequence: Synthetic oligonucleotide
  Sense strand starting at position 3723 of SEQ ID NO: 3894
gugaauuauugcuuggauu

SEQ ID NO: 303101 - RNA, 19 nt, Artificial Sequence
  Description of Artificial Sequence: Synthetic oligonucleotide
  Antisense strand to SEQ ID NO: 303100
aauccaagcaauaauucac

SEQ ID NO: 303102 - RNA, 19 nt, Artificial Sequence
  Description of Artificial Sequence: Synthetic oligonucleotide
  Sense strand starting at position 3764 of SEQ ID NO: 3894
uauggugagcucuagucua

SEQ ID NO: 303103 - RNA, 19 nt, Artificial Sequence
  Description of Artificial Sequence: Synthetic oligonucleotide
  Antisense strand to SEQ ID NO: 303102
uagacuagagcucaccaua

SEQ ID NO: 303104 - RNA, 19 nt, Artificial Sequence
  Description of Artificial Sequence: Synthetic oligonucleotide
  Sense strand starting at position 3769 of SEQ ID NO: 3894
ugagcucuagucuaauuaa

SEQ ID NO: 303105 - RNA, 19 nt, Artificial Sequence
  Description of Artificial Sequence: Synthetic oligonucleotide
  Antisense strand to SEQ ID NO: 303104
uuaauuagacuagagcuca

SEQ ID NO: 303106 - RNA, 19 nt, Artificial Sequence
  Description of Artificial Sequence: Synthetic oligonucleotide
  Sense strand starting at position 3772 of SEQ ID NO: 3894
gcucuagucuaauuaagga

SEQ ID NO: 303107 - RNA, 19 nt, Artificial Sequence
  Description of Artificial Sequence: Synthetic oligonucleotide
  Antisense strand to SEQ ID NO: 303106
uccuuaauuagacuagagc

SEQ ID NO: 303108 - RNA, 19 nt, Artificial Sequence
  Description of Artificial Sequence: Synthetic oligonucleotide
  Sense strand starting at position 3812 of SEQ ID NO: 3894
guguuccucucaccuauaa

SEQ ID NO: 303109 - RNA, 19 nt, Artificial Sequence
  Description of Artificial Sequence: Synthetic oligonucleotide
  Antisense strand to SEQ ID NO: 303108
uuauaggugagaggaacac

SEQ ID NO: 303110 - RNA, 19 nt, Artificial Sequence
  Description of Artificial Sequence: Synthetic oligonucleotide
  Sense strand starting at position 3863 of SEQ ID NO: 3894
aaaggagucuuagcuggau

SEQ ID NO: 303111 - RNA, 19 nt, Artificial Sequence
  Description of Artificial Sequence: Synthetic oligonucleotide
  Antisense strand to SEQ ID NO: 303110
auccagcuaagacuccuuu

SEQ ID NO: 303112 - RNA, 19 nt, Artificial Sequence
  Description of Artificial Sequence: Synthetic oligonucleotide
  Sense strand starting at position 33 of SEQ ID NO: 3895
agugaucugaguuguggag

SEQ ID NO: 303113 - RNA, 19 nt, Artificial Sequence
  Description of Artificial Sequence: Synthetic oligonucleotide
  Antisense strand to SEQ ID NO: 303112
cuccacaacucagaucacu

SEQ ID NO: 303114 - RNA, 19 nt, Artificial Sequence
  Description of Artificial Sequence: Synthetic oligonucleotide
  Sense strand starting at position 78 of SEQ ID NO: 3895
cagaaagugcccgaucugu

SEQ ID NO: 303115 - RNA, 19 nt, Artificial Sequence
  Description of Artificial Sequence: Synthetic oligonucleotide
  Antisense strand to SEQ ID NO: 303114
acagaucgggcacuuucug

SEQ ID NO: 303116 - RNA, 19 nt, Artificial Sequence
  Description of Artificial Sequence: Synthetic oligonucleotide
  Sense strand starting at position 86 of SEQ ID NO: 3895
gcccgaucuguagucugua

SEQ ID NO: 303117 - RNA, 19 nt, Artificial Sequence
  Description of Artificial Sequence: Synthetic oligonucleotide
  Antisense strand to SEQ ID NO: 303116
uacagacuacagaucgggc

SEQ ID NO: 303118 - RNA, 19 nt, Artificial Sequence
  Description of Artificial Sequence: Synthetic oligonucleotide
  Sense strand starting at position 307 of SEQ ID NO: 3895
ugggcuacucaccaaguau

SEQ ID NO: 303119 - RNA, 19 nt, Artificial Sequence
  Description of Artificial Sequence: Synthetic oligonucleotide
  Antisense strand to SEQ ID NO: 303118
auacuuggugaguagccca

SEQ ID NO: 303120 - RNA, 19 nt, Artificial Sequence
  Description of Artificial Sequence: Synthetic oligonucleotide
  Sense strand starting at position 540 of SEQ ID NO: 3895
uuacgaugauaauugguua

SEQ ID NO: 303121 - RNA, 19 nt, Artificial Sequence
  Description of Artificial Sequence: Synthetic oligonucleotide
  Antisense strand to SEQ ID NO: 303120
uaaccaauuaucaucguaa

SEQ ID NO: 303122 - RNA, 19 nt, Artificial Sequence
  Description of Artificial Sequence: Synthetic oligonucleotide
  Sense strand starting at position 543 of SEQ ID NO: 3895
cgaugauaauugguuauga

SEQ ID NO: 303123 - RNA, 19 nt, Artificial Sequence
  Description of Artificial Sequence: Synthetic oligonucleotide
  Antisense strand to SEQ ID NO: 303122
ucauaaccaauuaucaucg

SEQ ID NO: 303124 - RNA, 19 nt, Artificial Sequence
  Description of Artificial Sequence: Synthetic oligonucleotide
  Sense strand starting at position 544 of SEQ ID NO: 3895
gaugauaauugguuaugau

SEQ ID NO: 303125 - RNA, 19 nt, Artificial Sequence
  Description of Artificial Sequence: Synthetic oligonucleotide
  Antisense strand to SEQ ID NO: 303124
aucauaaccaauuaucauc

SEQ ID NO: 303126 - RNA, 19 nt, Artificial Sequence
  Description of Artificial Sequence: Synthetic oligonucleotide
  Sense strand starting at position 553 of SEQ ID NO: 3895
ugguuaugauaauugguga

SEQ ID NO: 303127 - RNA, 19 nt, Artificial Sequence
  Description of Artificial Sequence: Synthetic oligonucleotide
  Antisense strand to SEQ ID NO: 303126
ucaccaauuaucauaacca

SEQ ID NO: 303128 - RNA, 19 nt, Artificial Sequence
  Description of Artificial Sequence: Synthetic oligonucleotide
  Sense strand starting at position 556 of SEQ ID NO: 3895
uuaugauaauuggugacga

SEQ ID NO: 303129 - RNA, 19 nt, Artificial Sequence
  Description of Artificial Sequence: Synthetic oligonucleotide
  Antisense strand to SEQ ID NO: 303128
ucgucaccaauuaucauaa

SEQ ID NO: 303130 - RNA, 19 nt, Artificial Sequence
  Description of Artificial Sequence: Synthetic oligonucleotide
  Sense strand starting at position 575 of SEQ ID NO: 3895
caaggaaauuaagacgauu

SEQ ID NO: 303131 - RNA, 19 nt, Artificial Sequence
  Description of Artificial Sequence: Synthetic oligonucleotide
  Antisense strand to SEQ ID NO: 303130
aaucgucuuaauuuccuug

SEQ ID NO: 303132 - RNA, 19 nt, Artificial Sequence
  Description of Artificial Sequence: Synthetic oligonucleotide
  Sense strand starting at position 584 of SEQ ID NO: 3895
uaagacgauugcucaaaga

SEQ ID NO: 303133 - RNA, 19 nt, Artificial Sequence
  Description of Artificial Sequence: Synthetic oligonucleotide
  Antisense strand to SEQ ID NO: 303132
ucuuugagcaaucgucuua

SEQ ID NO: 303134 - RNA, 19 nt, Artificial Sequence
  Description of Artificial Sequence: Synthetic oligonucleotide
  Sense strand starting at position 651 of SEQ ID NO: 3895
acuccuuagucagcacuga

SEQ ID NO: 303135 - RNA, 19 nt, Artificial Sequence
  Description of Artificial Sequence: Synthetic oligonucleotide
  Antisense strand to SEQ ID NO: 303134
ucagugcugacuaaggagu

SEQ ID NO: 303136 - RNA, 19 nt, Artificial Sequence
  Description of Artificial Sequence: Synthetic oligonucleotide
  Sense strand starting at position 652 of SEQ ID NO: 3895
cuccuuagucagcacugaa

SEQ ID NO: 303137 - RNA, 19 nt, Artificial Sequence
  Description of Artificial Sequence: Synthetic oligonucleotide
  Antisense strand to SEQ ID NO: 303136
uucagugcugacuaaggag

SEQ ID NO: 303138 - RNA, 19 nt, Artificial Sequence
  Description of Artificial Sequence: Synthetic oligonucleotide
  Sense strand starting at position 815 of SEQ ID NO: 3895
ggcucagggaccugaagua

SEQ ID NO: 303139 - RNA, 19 nt, Artificial Sequence
  Description of Artificial Sequence: Synthetic oligonucleotide
  Antisense strand to SEQ ID NO: 303138
uacuucaggucccugagcc

SEQ ID NO: 303140 - RNA, 19 nt, Artificial Sequence
  Description of Artificial Sequence: Synthetic oligonucleotide
  Sense strand starting at position 1029 of SEQ ID NO: 3895
ccagaacuccugugucacu

SEQ ID NO: 303141 - RNA, 19 nt, Artificial Sequence
  Description of Artificial Sequence: Synthetic oligonucleotide
  Antisense strand to SEQ ID NO: 303140
agugacacaggaguucugg

SEQ ID NO: 303142 - RNA, 19 nt, Artificial Sequence
  Description of Artificial Sequence: Synthetic oligonucleotide
  Sense strand starting at position 1997 of SEQ ID NO: 3895
ugcccuucucacgaaacuu

SEQ ID NO: 303143 - RNA, 19 nt, Artificial Sequence
  Description of Artificial Sequence: Synthetic oligonucleotide
  Antisense strand to SEQ ID NO: 303142
aaguuucgugagaagggca

SEQ ID NO: 303144 - RNA, 19 nt, Artificial Sequence
  Description of Artificial Sequence: Synthetic oligonucleotide
  Sense strand starting at position 2033 of SEQ ID NO: 3895
cgguaauuucauggcauug

SEQ ID NO: 303145 - RNA, 19 nt, Artificial Sequence
  Description of Artificial Sequence: Synthetic oligonucleotide
  Antisense strand to SEQ ID NO: 303144
caaugccaugaaauuaccg

SEQ ID NO: 303146 - RNA, 19 nt, Artificial Sequence
  Description of Artificial Sequence: Synthetic oligonucleotide
  Sense strand starting at position 2044 of SEQ ID NO: 3895
uggcauugcuagguccaga

SEQ ID NO: 303147 - RNA, 19 nt, Artificial Sequence
  Description of Artificial Sequence: Synthetic oligonucleotide
  Antisense strand to SEQ ID NO: 303146
ucuggaccuagcaaugcca

SEQ ID NO: 303148 - RNA, 19 nt, Artificial Sequence
  Description of Artificial Sequence: Synthetic oligonucleotide
  Sense strand starting at position 2047 of SEQ ID NO: 3895
cauugcuagguccagauau

SEQ ID NO: 303149 - RNA, 19 nt, Artificial Sequence
  Description of Artificial Sequence: Synthetic oligonucleotide
  Antisense strand to SEQ ID NO: 303148
auaucuggaccuagcaaug

SEQ ID NO: 303150 - RNA, 19 nt, Artificial Sequence
  Description of Artificial Sequence: Synthetic oligonucleotide
  Sense strand starting at position 2067 of SEQ ID NO: 3895
gcgauauuuccuggugguc

SEQ ID NO: 303151 - RNA, 19 nt, Artificial Sequence
  Description of Artificial Sequence: Synthetic oligonucleotide
  Antisense strand to SEQ ID NO: 303150
gaccaccaggaaauaucgc

SEQ ID NO: 303152 - RNA, 19 nt, Artificial Sequence
  Description of Artificial Sequence: Synthetic oligonucleotide
  Sense strand starting at position 2150 of SEQ ID NO: 3895
ggcgucuuuaguucguuaa

SEQ ID NO: 303153 - RNA, 19 nt, Artificial Sequence
  Description of Artificial Sequence: Synthetic oligonucleotide
  Antisense strand to SEQ ID NO: 303152
uuaacgaacuaaagacgcc

SEQ ID NO: 303154 - RNA, 19 nt, Artificial Sequence
  Description of Artificial Sequence: Synthetic oligonucleotide
  Sense strand starting at position 2154 of SEQ ID NO: 3895
ucuuuaguucguuaacaga

SEQ ID NO: 303155 - RNA, 19 nt, Artificial Sequence
  Description of Artificial Sequence: Synthetic oligonucleotide
  Antisense strand to SEQ ID NO: 303154
ucuguuaacgaacuaaaga

SEQ ID NO: 303156 - RNA, 19 nt, Artificial Sequence
  Description of Artificial Sequence: Synthetic oligonucleotide
  Sense strand starting at position 2188 of SEQ ID NO: 3895
ggguggaauuuaggagguu

SEQ ID NO: 303157 - RNA, 19 nt, Artificial Sequence
  Description of Artificial Sequence: Synthetic oligonucleotide
  Antisense strand to SEQ ID NO: 303156
aaccuccuaaauuccaccc

SEQ ID NO: 303158 - RNA, 19 nt, Artificial Sequence
  Description of Artificial Sequence: Synthetic oligonucleotide
  Sense strand starting at position 2189 of SEQ ID NO: 3895
gguggaauuuaggagguuu

SEQ ID NO: 303159 - RNA, 19 nt, Artificial Sequence
  Description of Artificial Sequence: Synthetic oligonucleotide
  Antisense strand to SEQ ID NO: 303158
aaaccuccuaaauuccacc

SEQ ID NO: 303160 - RNA, 19 nt, Artificial Sequence
  Description of Artificial Sequence: Synthetic oligonucleotide
  Sense strand starting at position 2627 of SEQ ID NO: 3895
auguuagcucuugaacuag

SEQ ID NO: 303161 - RNA, 19 nt, Artificial Sequence
  Description of Artificial Sequence: Synthetic oligonucleotide
  Antisense strand to SEQ ID NO: 303160
cuaguucaagagcuaacau

SEQ ID NO: 303162 - RNA, 19 nt, Artificial Sequence
  Description of Artificial Sequence: Synthetic oligonucleotide
  Sense strand starting at position 2636 of SEQ ID NO: 3895
cuugaacuaguuuaauguu

SEQ ID NO: 303163 - RNA, 19 nt, Artificial Sequence
  Description of Artificial Sequence: Synthetic oligonucleotide
  Antisense strand to SEQ ID NO: 303162
aacauuaaacuaguucaag

SEQ ID NO: 303164 - RNA, 19 nt, Artificial Sequence
  Description of Artificial Sequence: Synthetic oligonucleotide
  Sense strand starting at position 2742 of SEQ ID NO: 3895
ggucauuucugcuuaugcu

SEQ ID NO: 303165 - RNA, 19 nt, Artificial Sequence
  Description of Artificial Sequence: Synthetic oligonucleotide
  Antisense strand to SEQ ID NO: 303164
agcauaagcagaaaugacc

SEQ ID NO: 303166 - RNA, 19 nt, Artificial Sequence
  Description of Artificial Sequence: Synthetic oligonucleotide
  Sense strand starting at position 2743 of SEQ ID NO: 3895
gucauuucugcuuaugcua

SEQ ID NO: 303167 - RNA, 19 nt, Artificial Sequence
  Description of Artificial Sequence: Synthetic oligonucleotide
  Antisense strand to SEQ ID NO: 303166
uagcauaagcagaaaugac

SEQ ID NO: 303168 - RNA, 19 nt, Artificial Sequence
  Description of Artificial Sequence: Synthetic oligonucleotide
  Sense strand starting at position 2785 of SEQ ID NO: 3895
aguguagaaggucaugguu

SEQ ID NO: 303169 - RNA, 19 nt, Artificial Sequence
  Description of Artificial Sequence: Synthetic oligonucleotide
  Antisense strand to SEQ ID NO: 303168
aaccaugaccuucuacacu

SEQ ID NO: 303170 - RNA, 19 nt, Artificial Sequence
  Description of Artificial Sequence: Synthetic oligonucleotide
  Sense strand starting at position 2793 of SEQ ID NO: 3895
aggucaugguuucuucuua

SEQ ID NO: 303171 - RNA, 19 nt, Artificial Sequence
  Description of Artificial Sequence: Synthetic oligonucleotide
  Antisense strand to SEQ ID NO: 303170
uaagaagaaaccaugaccu

SEQ ID NO: 303172 - RNA, 19 nt, Artificial Sequence
  Description of Artificial Sequence: Synthetic oligonucleotide
  Sense strand starting at position 2794 of SEQ ID NO: 3895
ggucaugguuucuucuuau

SEQ ID NO: 303173 - RNA, 19 nt, Artificial Sequence
  Description of Artificial Sequence: Synthetic oligonucleotide
  Antisense strand to SEQ ID NO: 303172
auaagaagaaaccaugacc

SEQ ID NO: 303174 - RNA, 19 nt, Artificial Sequence
  Description of Artificial Sequence: Synthetic oligonucleotide
  Sense strand starting at position 2868 of SEQ ID NO: 3895
ggaacaucccguuagguag

SEQ ID NO: 303175 - RNA, 19 nt, Artificial Sequence
  Description of Artificial Sequence: Synthetic oligonucleotide
  Antisense strand to SEQ ID NO: 303174
cuaccuaacgggauguucc

SEQ ID NO: 303176 - RNA, 19 nt, Artificial Sequence
  Description of Artificial Sequence: Synthetic oligonucleotide
  Sense strand starting at position 2946 of SEQ ID NO: 3895
uguugcugaguuugggaaa

SEQ ID NO: 303177 - RNA, 19 nt, Artificial Sequence
  Description of Artificial Sequence: Synthetic oligonucleotide
  Antisense strand to SEQ ID NO: 303176
uuucccaaacucagcaaca

SEQ ID NO: 303178 - RNA, 19 nt, Artificial Sequence
  Description of Artificial Sequence: Synthetic oligonucleotide
  Sense strand starting at position 3367 of SEQ ID NO: 3895
agggaauagaucuguccuc

SEQ ID NO: 303179 - RNA, 19 nt, Artificial Sequence
  Description of Artificial Sequence: Synthetic oligonucleotide
  Antisense strand to SEQ ID NO: 303178
gaggacagaucuauucccu

SEQ ID NO: 303180 - RNA, 19 nt, Artificial Sequence
  Description of Artificial Sequence: Synthetic oligonucleotide
  Sense strand starting at position 3368 of SEQ ID NO: 3895
gggaauagaucuguccucu

SEQ ID NO: 303181 - RNA, 19 nt, Artificial Sequence
  Description of Artificial Sequence: Synthetic oligonucleotide
  Antisense strand to SEQ ID NO: 303180
agaggacagaucuauuccc

SEQ ID NO: 303182 - RNA, 19 nt, Artificial Sequence
  Description of Artificial Sequence: Synthetic oligonucleotide
  Sense strand starting at position 3403 of SEQ ID NO: 3895
cuguguaucucccugauga

SEQ ID NO: 303183 - RNA, 19 nt, Artificial Sequence
  Description of Artificial Sequence: Synthetic oligonucleotide
  Antisense strand to SEQ ID NO: 303182
ucaucagggagauacacag

SEQ ID NO: 303184 - RNA, 19 nt, Artificial Sequence
  Description of Artificial Sequence: Synthetic oligonucleotide
  Sense strand starting at position 3404 of SEQ ID NO: 3895
uguguaucucccugaugau

SEQ ID NO: 303185 - RNA, 19 nt, Artificial Sequence
  Description of Artificial Sequence: Synthetic oligonucleotide
  Antisense strand to SEQ ID NO: 303184
aucaucagggagauacaca

SEQ ID NO: 303186 - RNA, 19 nt, Artificial Sequence
  Description of Artificial Sequence: Synthetic oligonucleotide
  Sense strand starting at position 3405 of SEQ ID NO: 3895
guguaucucccugaugaua

SEQ ID NO: 303187 - RNA, 19 nt, Artificial Sequence
  Description of Artificial Sequence: Synthetic oligonucleotide
  Antisense strand to SEQ ID NO: 303186
uaucaucagggagauacac

SEQ ID NO: 303188 - RNA, 19 nt, Artificial Sequence
  Description of Artificial Sequence: Synthetic oligonucleotide
  Sense strand starting at position 3420 of SEQ ID NO: 3895
gauauuucguuacuaugug

SEQ ID NO: 303189 - RNA, 19 nt, Artificial Sequence
  Description of Artificial Sequence: Synthetic oligonucleotide
  Antisense strand to SEQ ID NO: 303188
cacauaguaacgaaauauc

SEQ ID NO: 303190 - RNA, 19 nt, Artificial Sequence
  Description of Artificial Sequence: Synthetic oligonucleotide
  Sense strand starting at position 3424 of SEQ ID NO: 3895
uuucguuacuaugugaaac

SEQ ID NO: 303191 - RNA, 19 nt, Artificial Sequence
  Description of Artificial Sequence: Synthetic oligonucleotide
  Antisense strand to SEQ ID NO: 303190
guuucacauaguaacgaaa

SEQ ID NO: 303192 - RNA, 19 nt, Artificial Sequence
  Description of Artificial Sequence: Synthetic oligonucleotide
  Sense strand starting at position 85 of SEQ ID NO: 3896
guuuaaccuugauuaguuc

SEQ ID NO: 303193 - RNA, 19 nt, Artificial Sequence
  Description of Artificial Sequence: Synthetic oligonucleotide
  Antisense strand to SEQ ID NO: 303192
gaacuaaucaagguuaaac

SEQ ID NO: 303194 - RNA, 19 nt, Artificial Sequence
  Description of Artificial Sequence: Synthetic oligonucleotide
  Sense strand starting at position 294 of SEQ ID NO: 3896
ucuccaagucuuuggcaaa

SEQ ID NO: 303195 - RNA, 19 nt, Artificial Sequence
  Description of Artificial Sequence: Synthetic oligonucleotide
  Antisense strand to SEQ ID NO: 303194
uuugccaaagacuuggaga

SEQ ID NO: 303196 - RNA, 19 nt, Artificial Sequence
  Description of Artificial Sequence: Synthetic oligonucleotide
  Sense strand starting at position 408 of SEQ ID NO: 3896
acuguaagauagucuauca

SEQ ID NO: 303197 - RNA, 19 nt, Artificial Sequence
  Description of Artificial Sequence: Synthetic oligonucleotide
  Antisense strand to SEQ ID NO: 303196
ugauagacuaucuuacagu

SEQ ID NO: 303198 - RNA, 19 nt, Artificial Sequence
  Description of Artificial Sequence: Synthetic oligonucleotide
  Sense strand starting at position 601 of SEQ ID NO: 3896
cucaauaagcuuuaggcua

SEQ ID NO: 303199 - RNA, 19 nt, Artificial Sequence
  Description of Artificial Sequence: Synthetic oligonucleotide
  Antisense strand to SEQ ID NO: 303198
uagccuaaagcuuauugag

SEQ ID NO: 303200 - RNA, 19 nt, Artificial Sequence
  Description of Artificial Sequence: Synthetic oligonucleotide
  Sense strand starting at position 649 of SEQ ID NO: 3896
ugaaauaagcgcuagcuau

SEQ ID NO: 303201 - RNA, 19 nt, Artificial Sequence
  Description of Artificial Sequence: Synthetic oligonucleotide
  Antisense strand to SEQ ID NO: 303200
auagcuagcgcuuauuuca

SEQ ID NO: 303202 - RNA, 19 nt, Artificial Sequence
  Description of Artificial Sequence: Synthetic oligonucleotide
  Sense strand starting at position 819 of SEQ ID NO: 3896
gccaacaaacuugguuaaa

SEQ ID NO: 303203 - RNA, 19 nt, Artificial Sequence
  Description of Artificial Sequence: Synthetic oligonucleotide
  Antisense strand to SEQ ID NO: 303202
uuuaaccaaguuuguuggc

SEQ ID NO: 303204 - RNA, 19 nt, Artificial Sequence
  Description of Artificial Sequence: Synthetic oligonucleotide
  Sense strand starting at position 829 of SEQ ID NO: 3896
uugguuaaagcucaaauaa

SEQ ID NO: 303205 - RNA, 19 nt, Artificial Sequence
  Description of Artificial Sequence: Synthetic oligonucleotide
  Antisense strand to SEQ ID NO: 303204
uuauuugagcuuuaaccaa

SEQ ID NO: 303206 - RNA, 19 nt, Artificial Sequence
  Description of Artificial Sequence: Synthetic oligonucleotide
  Sense strand starting at position 1069 of SEQ ID NO: 3896
gaguuaguguauucuaaac

SEQ ID NO: 303207 - RNA, 19 nt, Artificial Sequence
  Description of Artificial Sequence: Synthetic oligonucleotide
  Antisense strand to SEQ ID NO: 303206
guuuagaauacacuaacuc

SEQ ID NO: 303208 - RNA, 19 nt, Artificial Sequence
  Description of Artificial Sequence: Synthetic oligonucleotide
  Sense strand starting at position 1175 of SEQ ID NO: 3896
agccaugucuacuuacuga

SEQ ID NO: 303209 - RNA, 19 nt, Artificial Sequence
  Description of Artificial Sequence: Synthetic oligonucleotide
  Antisense strand to SEQ ID NO: 303208
ucaguaaguagacauggcu

SEQ ID NO: 303210 - RNA, 19 nt, Artificial Sequence
  Description of Artificial Sequence: Synthetic oligonucleotide
  Sense strand starting at position 1253 of SEQ ID NO: 3896
aauccaguccgcuagaagu

SEQ ID NO: 303211 - RNA, 19 nt, Artificial Sequence
  Description of Artificial Sequence: Synthetic oligonucleotide
  Antisense strand to SEQ ID NO: 303210
acuucuagcggacuggauu

SEQ ID NO: 303212 - RNA, 19 nt, Artificial Sequence
  Description of Artificial Sequence: Synthetic oligonucleotide
  Sense strand starting at position 1260 of SEQ ID NO: 3896
uccgcuagaagugacauau

SEQ ID NO: 303213 - RNA, 19 nt, Artificial Sequence
  Description of Artificial Sequence: Synthetic oligonucleotide
  Antisense strand to SEQ ID NO: 303212
auaugucacuucuagcgga

SEQ ID NO: 303214 - RNA, 19 nt, Artificial Sequence
  Description of Artificial Sequence: Synthetic oligonucleotide
  Sense strand starting at position 1437 of SEQ ID NO: 3896
guucucuaucugcacagaa

SEQ ID NO: 303215 - RNA, 19 nt, Artificial Sequence
  Description of Artificial Sequence: Synthetic oligonucleotide
  Antisense strand to SEQ ID NO: 303214
uucugugcagauagagaac

SEQ ID NO: 303216 - RNA, 19 nt, Artificial Sequence
  Description of Artificial Sequence: Synthetic oligonucleotide
  Sense strand starting at position 1461 of SEQ ID NO: 3896
ugaaguaacuugccaucaa

SEQ ID NO: 303217 - RNA, 19 nt, Artificial Sequence
  Description of Artificial Sequence: Synthetic oligonucleotide
  Antisense strand to SEQ ID NO: 303216
uugauggcaaguuacuuca

SEQ ID NO: 303218 - RNA, 19 nt, Artificial Sequence
  Description of Artificial Sequence: Synthetic oligonucleotide
  Sense strand starting at position 1553 of SEQ ID NO: 3896
cucaguagcuuucuacaua

SEQ ID NO: 303219 - RNA, 19 nt, Artificial Sequence
  Description of Artificial Sequence: Synthetic oligonucleotide
  Antisense strand to SEQ ID NO: 303218
uauguagaaagcuacugag

SEQ ID NO: 303220 - RNA, 19 nt, Artificial Sequence
  Description of Artificial Sequence: Synthetic oligonucleotide
  Sense strand starting at position 1556 of SEQ ID NO: 3896
aguagcuuucuacauaucu

SEQ ID NO: 303221 - RNA, 19 nt, Artificial Sequence
  Description of Artificial Sequence: Synthetic oligonucleotide
  Antisense strand to SEQ ID NO: 303220
agauauguagaaagcuacu

SEQ ID NO: 303222 - RNA, 19 nt, Artificial Sequence
  Description of Artificial Sequence: Synthetic oligonucleotide
  Sense strand starting at position 2044 of SEQ ID NO: 3896
cugagaauugcuggcuauu

SEQ ID NO: 303223 - RNA, 19 nt, Artificial Sequence
  Description of Artificial Sequence: Synthetic oligonucleotide
  Antisense strand to SEQ ID NO: 303222
aauagccagcaauucucag

SEQ ID NO: 303224 - RNA, 19 nt, Artificial Sequence
  Description of Artificial Sequence: Synthetic oligonucleotide
  Sense strand starting at position 2150 of SEQ ID NO: 3896
acuggcucagauuaucauu

SEQ ID NO: 303225 - RNA, 19 nt, Artificial Sequence
  Description of Artificial Sequence: Synthetic oligonucleotide
  Antisense strand to SEQ ID NO: 303224
aaugauaaucugagccagu

SEQ ID NO: 303226 - RNA, 19 nt, Artificial Sequence
  Description of Artificial Sequence: Synthetic oligonucleotide
  Sense strand starting at position 2152 of SEQ ID NO: 3896
uggcucagauuaucauuau

SEQ ID NO: 303227 - RNA, 19 nt, Artificial Sequence
  Description of Artificial Sequence: Synthetic oligonucleotide
  Antisense strand to SEQ ID NO: 303226
auaaugauaaucugagcca

SEQ ID NO: 303228 - RNA, 19 nt, Artificial Sequence
  Description of Artificial Sequence: Synthetic oligonucleotide
  Sense strand starting at position 2238 of SEQ ID NO: 3896
cccaaaucuugugucugaa

SEQ ID NO: 303229 - RNA, 19 nt, Artificial Sequence
  Description of Artificial Sequence: Synthetic oligonucleotide
  Antisense strand to SEQ ID NO: 303228
uucagacacaagauuuggg

SEQ ID NO: 303230 - RNA, 19 nt, Artificial Sequence
  Description of Artificial Sequence: Synthetic oligonucleotide
  Sense strand starting at position 2253 of SEQ ID NO: 3896
ugaacaagcuccucuuagu

SEQ ID NO: 303231 - RNA, 19 nt, Artificial Sequence
  Description of Artificial Sequence: Synthetic oligonucleotide
  Antisense strand to SEQ ID NO: 303230
acuaagaggagcuuguuca

SEQ ID NO: 303232 - RNA, 19 nt, Artificial Sequence
  Description of Artificial Sequence: Synthetic oligonucleotide
  Sense strand starting at position 2259 of SEQ ID NO: 3896
agcuccucuuagucuagaa

SEQ ID NO: 303233 - RNA, 19 nt, Artificial Sequence
  Description of Artificial Sequence: Synthetic oligonucleotide
  Antisense strand to SEQ ID NO: 303232
uucuagacuaagaggagcu

SEQ ID NO: 303234 - RNA, 19 nt, Artificial Sequence
  Description of Artificial Sequence: Synthetic oligonucleotide
  Sense strand starting at position 2428 of SEQ ID NO: 3896
uuggucaaauagucuaaca

SEQ ID NO: 303235 - RNA, 19 nt, Artificial Sequence
  Description of Artificial Sequence: Synthetic oligonucleotide
  Antisense strand to SEQ ID NO: 303234
uguuagacuauuugaccaa

SEQ ID NO: 303236 - RNA, 19 nt, Artificial Sequence
  Description of Artificial Sequence: Synthetic oligonucleotide
  Sense strand starting at position 2500 of SEQ ID NO: 3896
ggucaagaauguucauggu

SEQ ID NO: 303237 - RNA, 19 nt, Artificial Sequence
  Description of Artificial Sequence: Synthetic oligonucleotide
  Antisense strand to SEQ ID NO: 303236
accaugaacauucuugacc

SEQ ID NO: 303238 - RNA, 19 nt, Artificial Sequence
  Description of Artificial Sequence: Synthetic oligonucleotide
  Sense strand starting at position 2517 of SEQ ID NO: 3896
guaacauaauuguugaaag

SEQ ID NO: 303239 - RNA, 19 nt, Artificial Sequence
  Description of Artificial Sequence: Synthetic oligonucleotide
  Antisense strand to SEQ ID NO: 303238
cuuucaacaauuauguuac

SEQ ID NO: 303240 - RNA, 19 nt, Artificial Sequence
  Description of Artificial Sequence: Synthetic oligonucleotide
  Sense strand starting at position 2811 of SEQ ID NO: 3896
ggcuuaacucuuuacagcu

SEQ ID NO: 303241 - RNA, 19 nt, Artificial Sequence
  Description of Artificial Sequence: Synthetic oligonucleotide
  Antisense strand to SEQ ID NO: 303240
agcuguaaagaguuaagcc

SEQ ID NO: 303242 - RNA, 19 nt, Artificial Sequence
  Description of Artificial Sequence: Synthetic oligonucleotide
  Sense strand starting at position 2855 of SEQ ID NO: 3896
ugauaugccagaggagagu

SEQ ID NO: 303243 - RNA, 19 nt, Artificial Sequence
  Description of Artificial Sequence: Synthetic oligonucleotide
  Antisense strand to SEQ ID NO: 303242
acucuccucuggcauauca

SEQ ID NO: 303244 - RNA, 19 nt, Artificial Sequence
  Description of Artificial Sequence: Synthetic oligonucleotide
  Sense strand starting at position 2880 of SEQ ID NO: 3896
cuaaguauuugugugcauu

SEQ ID NO: 303245 - RNA, 19 nt, Artificial Sequence
  Description of Artificial Sequence: Synthetic oligonucleotide
  Antisense strand to SEQ ID NO: 303244
aaugcacacaaauacuuag

SEQ ID NO: 303246 - RNA, 19 nt, Artificial Sequence
  Description of Artificial Sequence: Synthetic oligonucleotide
  Sense strand starting at position 3098 of SEQ ID NO: 3896
gcuauaugcaaucagaggu

SEQ ID NO: 303247 - RNA, 19 nt, Artificial Sequence
  Description of Artificial Sequence: Synthetic oligonucleotide
  Antisense strand to SEQ ID NO: 303246
accucugauugcauauagc

SEQ ID NO: 303248 - RNA, 19 nt, Artificial Sequence
  Description of Artificial Sequence: Synthetic oligonucleotide
  Sense strand starting at position 3446 of SEQ ID NO: 3896
agccauauagaauguuaca

SEQ ID NO: 303249 - RNA, 19 nt, Artificial Sequence
  Description of Artificial Sequence: Synthetic oligonucleotide
  Antisense strand to SEQ ID NO: 303248
uguaacauucuauauggcu

SEQ ID NO: 303250 - RNA, 19 nt, Artificial Sequence
  Description of Artificial Sequence: Synthetic oligonucleotide
  Sense strand starting at position 3667 of SEQ ID NO: 3896
ucuauucuguccuuugaga

SEQ ID NO: 303251 - RNA, 19 nt, Artificial Sequence
  Description of Artificial Sequence: Synthetic oligonucleotide
  Antisense strand to SEQ ID NO: 303250
ucucaaaggacagaauaga

SEQ ID NO: 303252 - RNA, 19 nt, Artificial Sequence
  Description of Artificial Sequence: Synthetic oligonucleotide
  Sense strand starting at position 3675 of SEQ ID NO: 3896
guccuuugagauugugaag

SEQ ID NO: 303253 - RNA, 19 nt, Artificial Sequence
  Description of Artificial Sequence: Synthetic oligonucleotide
  Antisense strand to SEQ ID NO: 303252
cuucacaaucucaaaggac

SEQ ID NO: 303254 - RNA, 19 nt, Artificial Sequence
  Description of Artificial Sequence: Synthetic oligonucleotide
  Sense strand starting at position 3684 of SEQ ID NO: 3896
gauugugaagcacaaguuu

SEQ ID NO: 303255 - RNA, 19 nt, Artificial Sequence
  Description of Artificial Sequence: Synthetic oligonucleotide
  Antisense strand to SEQ ID NO: 303254
aaacuugugcuucacaauc

SEQ ID NO: 303256 - RNA, 19 nt, Artificial Sequence
  Description of Artificial Sequence: Synthetic oligonucleotide
  Sense strand starting at position 3705 of SEQ ID NO: 3896
auccucugucugugacaga

SEQ ID NO: 303257 - RNA, 19 nt, Artificial Sequence
  Description of Artificial Sequence: Synthetic oligonucleotide
  Antisense strand to SEQ ID NO: 303256
ucugucacagacagaggau

SEQ ID NO: 303258 - RNA, 19 nt, Artificial Sequence
  Description of Artificial Sequence: Synthetic oligonucleotide
  Sense strand starting at position 3788 of SEQ ID NO: 3896
uauauagaggucuaagcua

SEQ ID NO: 303259 - RNA, 19 nt, Artificial Sequence
  Description of Artificial Sequence: Synthetic oligonucleotide
  Antisense strand to SEQ ID NO: 303258
uagcuuagaccucuauaua

SEQ ID NO: 303260 - RNA, 19 nt, Artificial Sequence
  Description of Artificial Sequence: Synthetic oligonucleotide
  Sense strand starting at position 3840 of SEQ ID NO: 3896
acgccuugagauugguaua

SEQ ID NO: 303261 - RNA, 19 nt, Artificial Sequence
  Description of Artificial Sequence: Synthetic oligonucleotide
  Antisense strand to SEQ ID NO: 303260
uauaccaaucucaaggcgu

SEQ ID NO: 303262 - RNA, 19 nt, Artificial Sequence
  Description of Artificial Sequence: Synthetic oligonucleotide
  Sense strand starting at position 3841 of SEQ ID NO: 3896
cgccuugagauugguauaa

SEQ ID NO: 303263 - RNA, 19 nt, Artificial Sequence
  Description of Artificial Sequence: Synthetic oligonucleotide
  Antisense strand to SEQ ID NO: 303262
uuauaccaaucucaaggcg

SEQ ID NO: 303264 - RNA, 19 nt, Artificial Sequence
  Description of Artificial Sequence: Synthetic oligonucleotide
  Sense strand starting at position 3903 of SEQ ID NO: 3896
ucaagugcuugauugaagu

SEQ ID NO: 303265 - RNA, 19 nt, Artificial Sequence
  Description of Artificial Sequence: Synthetic oligonucleotide
  Antisense strand to SEQ ID NO: 303264
acuucaaucaagcacuuga

SEQ ID NO: 303266 - RNA, 19 nt, Artificial Sequence
  Description of Artificial Sequence: Synthetic oligonucleotide
  Sense strand starting at position 3909 of SEQ ID NO: 3896
gcuugauugaagugagaca

SEQ ID NO: 303267 - RNA, 19 nt, Artificial Sequence
  Description of Artificial Sequence: Synthetic oligonucleotide
  Antisense strand to SEQ ID NO: 303266
ugucucacuucaaucaagc

SEQ ID NO: 303268 - RNA, 19 nt, Artificial Sequence
  Description of Artificial Sequence: Synthetic oligonucleotide
  Sense strand starting at position 3965 of SEQ ID NO: 3896
cuggaugcuggcuaagagu

SEQ ID NO: 303269 - RNA, 19 nt, Artificial Sequence
  Description of Artificial Sequence: Synthetic oligonucleotide
  Antisense strand to SEQ ID NO: 303268
acucuuagccagcauccag

SEQ ID NO: 303270 - RNA, 19 nt, Artificial Sequence
  Description of Artificial Sequence: Synthetic oligonucleotide
  Sense strand starting at position 3971 of SEQ ID NO: 3896
gcuggcuaagaguaauaau

SEQ ID NO: 303271 - RNA, 19 nt, Artificial Sequence
  Description of Artificial Sequence: Synthetic oligonucleotide
  Antisense strand to SEQ ID NO: 303270
auuauuacucuuagccagc

SEQ ID NO: 303272 - RNA, 19 nt, Artificial Sequence
  Description of Artificial Sequence: Synthetic oligonucleotide
  Sense strand starting at position 119 of SEQ ID NO: 3897
auuugcuauuguuaugaca

SEQ ID NO: 303273 - RNA, 19 nt, Artificial Sequence
  Description of Artificial Sequence: Synthetic oligonucleotide
  Antisense strand to SEQ ID NO: 303272
ugucauaacaauagcaaau

SEQ ID NO: 303274 - RNA, 19 nt, Artificial Sequence
  Description of Artificial Sequence: Synthetic oligonucleotide
  Sense strand starting at position 159 of SEQ ID NO: 3897
uuagauuagcaguguauaa

SEQ ID NO: 303275 - RNA, 19 nt, Artificial Sequence
  Description of Artificial Sequence: Synthetic oligonucleotide
  Antisense strand to SEQ ID NO: 303274
uuauacacugcuaaucuaa

SEQ ID NO: 303276 - RNA, 19 nt, Artificial Sequence
  Description of Artificial Sequence: Synthetic oligonucleotide
  Sense strand starting at position 224 of SEQ ID NO: 3897
caaacagcugugugguuau

SEQ ID NO: 303277 - RNA, 19 nt, Artificial Sequence
  Description of Artificial Sequence: Synthetic oligonucleotide
  Antisense strand to SEQ ID NO: 303276
auaaccacacagcuguuug

SEQ ID NO: 303278 - RNA, 19 nt, Artificial Sequence
  Description of Artificial Sequence: Synthetic oligonucleotide
  Sense strand starting at position 369 of SEQ ID NO: 3897
aucuaugaugcauacugau

SEQ ID NO: 303279 - RNA, 19 nt, Artificial Sequence
  Description of Artificial Sequence: Synthetic oligonucleotide
  Antisense strand to SEQ ID NO: 303278
aucaguaugcaucauagau

SEQ ID NO: 303280 - RNA, 19 nt, Artificial Sequence
  Description of Artificial Sequence: Synthetic oligonucleotide
  Sense strand starting at position 407 of SEQ ID NO: 3897
cggcgugagacgaguguuu

SEQ ID NO: 303281 - RNA, 19 nt, Artificial Sequence
  Description of Artificial Sequence: Synthetic oligonucleotide
  Antisense strand to SEQ ID NO: 303280
aaacacucgucucacgccg

SEQ ID NO: 303282 - RNA, 19 nt, Artificial Sequence
  Description of Artificial Sequence: Synthetic oligonucleotide
  Sense strand starting at position 423 of SEQ ID NO: 3897
uuugaagccuguuuccauu

SEQ ID NO: 303283 - RNA, 19 nt, Artificial Sequence
  Description of Artificial Sequence: Synthetic oligonucleotide
  Antisense strand to SEQ ID NO: 303282
aauggaaacaggcuucaaa

SEQ ID NO: 303284 - RNA, 19 nt, Artificial Sequence
  Description of Artificial Sequence: Synthetic oligonucleotide
  Sense strand starting at position 443 of SEQ ID NO: 3897
ccagguuugggaugaauga

SEQ ID NO: 303285 - RNA, 19 nt, Artificial Sequence
  Description of Artificial Sequence: Synthetic oligonucleotide
  Antisense strand to SEQ ID NO: 303284
ucauucaucccaaaccugg

SEQ ID NO: 303286 - RNA, 19 nt, Artificial Sequence
  Description of Artificial Sequence: Synthetic oligonucleotide
  Sense strand starting at position 497 of SEQ ID NO: 3897
cuggguccucucuaggagu

SEQ ID NO: 303287 - RNA, 19 nt, Artificial Sequence
  Description of Artificial Sequence: Synthetic oligonucleotide
  Antisense strand to SEQ ID NO: 303286
acuccuagagaggacccag

SEQ ID NO: 303288 - RNA, 19 nt, Artificial Sequence
  Description of Artificial Sequence: Synthetic oligonucleotide
  Sense strand starting at position 499 of SEQ ID NO: 3897
ggguccucucuaggaguuu

SEQ ID NO: 303289 - RNA, 19 nt, Artificial Sequence
  Description of Artificial Sequence: Synthetic oligonucleotide
  Antisense strand to SEQ ID NO: 303288
aaacuccuagagaggaccc

SEQ ID NO: 303290 - RNA, 19 nt, Artificial Sequence
  Description of Artificial Sequence: Synthetic oligonucleotide
  Sense strand starting at position 567 of SEQ ID NO: 3897
agggcucuggguuauaacu

SEQ ID NO: 303291 - RNA, 19 nt, Artificial Sequence
  Description of Artificial Sequence: Synthetic oligonucleotide
  Antisense strand to SEQ ID NO: 303290
aguuauaacccagagcccu

SEQ ID NO: 303292 - RNA, 19 nt, Artificial Sequence
  Description of Artificial Sequence: Synthetic oligonucleotide
  Sense strand starting at position 656 of SEQ ID NO: 3897
cacuaucuucgugauggag

SEQ ID NO: 303293 - RNA, 19 nt, Artificial Sequence
  Description of Artificial Sequence: Synthetic oligonucleotide
  Antisense strand to SEQ ID NO: 303292
cuccaucacgaagauagug

SEQ ID NO: 303294 - RNA, 19 nt, Artificial Sequence
  Description of Artificial Sequence: Synthetic oligonucleotide
  Sense strand starting at position 731 of SEQ ID NO: 3897
gacagaagucucugcgaau

SEQ ID NO: 303295 - RNA, 19 nt, Artificial Sequence
  Description of Artificial Sequence: Synthetic oligonucleotide
  Antisense strand to SEQ ID NO: 303294
auucgcagagacuucuguc

SEQ ID NO: 303296 - RNA, 19 nt, Artificial Sequence
  Description of Artificial Sequence: Synthetic oligonucleotide
  Sense strand starting at position 732 of SEQ ID NO: 3897
acagaagucucugcgaaug

SEQ ID NO: 303297 - RNA, 19 nt, Artificial Sequence
  Description of Artificial Sequence: Synthetic oligonucleotide
  Antisense strand to SEQ ID NO: 303296
cauucgcagagacuucugu

SEQ ID NO: 303298 - RNA, 19 nt, Artificial Sequence
  Description of Artificial Sequence: Synthetic oligonucleotide
  Sense strand starting at position 783 of SEQ ID NO: 3897
aaauguuguggccauuaaa

SEQ ID NO: 303299 - RNA, 19 nt, Artificial Sequence
  Description of Artificial Sequence: Synthetic oligonucleotide
  Antisense strand to SEQ ID NO: 303298
uuuaauggccacaacauuu

SEQ ID NO: 303300 - RNA, 19 nt, Artificial Sequence
  Description of Artificial Sequence: Synthetic oligonucleotide
  Sense strand starting at position 786 of SEQ ID NO: 3897
uguuguggccauuaaaguu

SEQ ID NO: 303301 - RNA, 19 nt, Artificial Sequence
  Description of Artificial Sequence: Synthetic oligonucleotide
  Antisense strand to SEQ ID NO: 303300
aacuuuaauggccacaaca

SEQ ID NO: 303302 - RNA, 19 nt, Artificial Sequence
  Description of Artificial Sequence: Synthetic oligonucleotide
  Sense strand starting at position 792 of SEQ ID NO: 3897
ggccauuaaaguuaguaag

SEQ ID NO: 303303 - RNA, 19 nt, Artificial Sequence
  Description of Artificial Sequence: Synthetic oligonucleotide
  Antisense strand to SEQ ID NO: 303302
cuuacuaacuuuaauggcc

SEQ ID NO: 303304 - RNA, 19 nt, Artificial Sequence
  Description of Artificial Sequence: Synthetic oligonucleotide
  Sense strand starting at position 794 of SEQ ID NO: 3897
ccauuaaaguuaguaagga

SEQ ID NO: 303305 - RNA, 19 nt, Artificial Sequence
  Description of Artificial Sequence: Synthetic oligonucleotide
  Antisense strand to SEQ ID NO: 303304
uccuuacuaacuuuaaugg

SEQ ID NO: 303306 - RNA, 19 nt, Artificial Sequence
  Description of Artificial Sequence: Synthetic oligonucleotide
  Sense strand starting at position 831 of SEQ ID NO: 3897
uauggagacguaggagaau

SEQ ID NO: 303307 - RNA, 19 nt, Artificial Sequence
  Description of Artificial Sequence: Synthetic oligonucleotide
  Antisense strand to SEQ ID NO: 303306
auucuccuacgucuccaua

SEQ ID NO: 303308 - RNA, 19 nt, Artificial Sequence
  Description of Artificial Sequence: Synthetic oligonucleotide
  Sense strand starting at position 847 of SEQ ID NO: 3897
aauguauuguggccaucca

SEQ ID NO: 303309 - RNA, 19 nt, Artificial Sequence
  Description of Artificial Sequence: Synthetic oligonucleotide
  Antisense strand to SEQ ID NO: 303308
uggauggccacaauacauu

SEQ ID NO: 303310 - RNA, 19 nt, Artificial Sequence
  Description of Artificial Sequence: Synthetic oligonucleotide
  Sense strand starting at position 848 of SEQ ID NO: 3897
auguauuguggccauccaa

SEQ ID NO: 303311 - RNA, 19 nt, Artificial Sequence
  Description of Artificial Sequence: Synthetic oligonucleotide
  Antisense strand to SEQ ID NO: 303310
uuggauggccacaauacau

SEQ ID NO: 303312 - RNA, 19 nt, Artificial Sequence
  Description of Artificial Sequence: Synthetic oligonucleotide
  Sense strand starting at position 903 of SEQ ID NO: 3897
cacgacaaucguuauccaa

SEQ ID NO: 303313 - RNA, 19 nt, Artificial Sequence
  Description of Artificial Sequence: Synthetic oligonucleotide
  Antisense strand to SEQ ID NO: 303312
uuggauaacgauugucgug

SEQ ID NO: 303314 - RNA, 19 nt, Artificial Sequence
  Description of Artificial Sequence: Synthetic oligonucleotide
  Sense strand starting at position 905 of SEQ ID NO: 3897
cgacaaucguuauccaacu

SEQ ID NO: 303315 - RNA, 19 nt, Artificial Sequence
  Description of Artificial Sequence: Synthetic oligonucleotide
  Antisense strand to SEQ ID NO: 303314
aguuggauaacgauugucg

SEQ ID NO: 303316 - RNA, 19 nt, Artificial Sequence
  Description of Artificial Sequence: Synthetic oligonucleotide
  Sense strand starting at position 989 of SEQ ID NO: 3897
gggaccagacgauguaaua

SEQ ID NO: 303317 - RNA, 19 nt, Artificial Sequence
  Description of Artificial Sequence: Synthetic oligonucleotide
  Antisense strand to SEQ ID NO: 303316
uauuacaucgucugguccc

SEQ ID NO: 303318 - RNA, 19 nt, Artificial Sequence
  Description of Artificial Sequence: Synthetic oligonucleotide
  Sense strand starting at position 1088 of SEQ ID NO: 3897
ccagcuuuagggcgaugaa

SEQ ID NO: 303319 - RNA, 19 nt, Artificial Sequence
  Description of Artificial Sequence: Synthetic oligonucleotide
  Antisense strand to SEQ ID NO: 303318
uucaucgcccuaaagcugg

SEQ ID NO: 303320 - RNA, 19 nt, Artificial Sequence
  Description of Artificial Sequence: Synthetic oligonucleotide
  Sense strand starting at position 1091 of SEQ ID NO: 3897
gcuuuagggcgaugaagau

SEQ ID NO: 303321 - RNA, 19 nt, Artificial Sequence
  Description of Artificial Sequence: Synthetic oligonucleotide
  Antisense strand to SEQ ID NO: 303320
aucuucaucgcccuaaagc

SEQ ID NO: 303322 - RNA, 19 nt, Artificial Sequence
  Description of Artificial Sequence: Synthetic oligonucleotide
  Sense strand starting at position 1151 of SEQ ID NO: 3897
gcgaccuaucgugucgaaa

SEQ ID NO: 303323 - RNA, 19 nt, Artificial Sequence
  Description of Artificial Sequence: Synthetic oligonucleotide
  Antisense strand to SEQ ID NO: 303322
uuucgacacgauaggucgc

SEQ ID NO: 303324 - RNA, 19 nt, Artificial Sequence
  Description of Artificial Sequence: Synthetic oligonucleotide
  Sense strand starting at position 1265 of SEQ ID NO: 3897
agaccaggacuucgaacau

SEQ ID NO: 303325 - RNA, 19 nt, Artificial Sequence
  Description of Artificial Sequence: Synthetic oligonucleotide
  Antisense strand to SEQ ID NO: 303324
auguucgaaguccuggucu

SEQ ID NO: 303326 - RNA, 19 nt, Artificial Sequence
  Description of Artificial Sequence: Synthetic oligonucleotide
  Sense strand starting at position 1448 of SEQ ID NO: 3897
aguagcuccauuggaugau

SEQ ID NO: 303327 - RNA, 19 nt, Artificial Sequence
  Description of Artificial Sequence: Synthetic oligonucleotide
  Antisense strand to SEQ ID NO: 303326
aucauccaauggagcuacu

SEQ ID NO: 303328 - RNA, 19 nt, Artificial Sequence
  Description of Artificial Sequence: Synthetic oligonucleotide
  Sense strand starting at position 1535 of SEQ ID NO: 3897
gguugaaguccuggaacag

SEQ ID NO: 303329 - RNA, 19 nt, Artificial Sequence
  Description of Artificial Sequence: Synthetic oligonucleotide
  Antisense strand to SEQ ID NO: 303328
cuguuccaggacuucaacc

SEQ ID NO: 303330 - RNA, 19 nt, Artificial Sequence
  Description of Artificial Sequence: Synthetic oligonucleotide
  Sense strand starting at position 2297 of SEQ ID NO: 3897
ggguguaucccuggcucaa

SEQ ID NO: 303331 - RNA, 19 nt, Artificial Sequence
  Description of Artificial Sequence: Synthetic oligonucleotide
  Antisense strand to SEQ ID NO: 303330
uugagccagggauacaccc

SEQ ID NO: 303332 - RNA, 19 nt, Artificial Sequence
  Description of Artificial Sequence: Synthetic oligonucleotide
  Sense strand starting at position 2356 of SEQ ID NO: 3897
gggccuuaccugggaugaa

SEQ ID NO: 303333 - RNA, 19 nt, Artificial Sequence
  Description of Artificial Sequence: Synthetic oligonucleotide
  Antisense strand to SEQ ID NO: 303332
uucaucccagguaaggccc

SEQ ID NO: 303334 - RNA, 19 nt, Artificial Sequence
  Description of Artificial Sequence: Synthetic oligonucleotide
  Sense strand starting at position 2632 of SEQ ID NO: 3897
ucaagugucuaguccucau

SEQ ID NO: 303335 - RNA, 19 nt, Artificial Sequence
  Description of Artificial Sequence: Synthetic oligonucleotide
  Antisense strand to SEQ ID NO: 303334
augaggacuagacacuuga

SEQ ID NO: 303336 - RNA, 19 nt, Artificial Sequence
  Description of Artificial Sequence: Synthetic oligonucleotide
  Sense strand starting at position 2777 of SEQ ID NO: 3897
cugagaaaccuaggcaaau

SEQ ID NO: 303337 - RNA, 19 nt, Artificial Sequence
  Description of Artificial Sequence: Synthetic oligonucleotide
  Antisense strand to SEQ ID NO: 303336
auuugccuagguuucucag

SEQ ID NO: 303338 - RNA, 19 nt, Artificial Sequence
  Description of Artificial Sequence: Synthetic oligonucleotide
  Sense strand starting at position 2817 of SEQ ID NO: 3897
ucaguuuccuggucuauga

SEQ ID NO: 303339 - RNA, 19 nt, Artificial Sequence
  Description of Artificial Sequence: Synthetic oligonucleotide
  Antisense strand to SEQ ID NO: 303338
ucauagaccaggaaacuga

SEQ ID NO: 303340 - RNA, 19 nt, Artificial Sequence
  Description of Artificial Sequence: Synthetic oligonucleotide
  Sense strand starting at position 2821 of SEQ ID NO: 3897
uuuccuggucuaugaaguu

SEQ ID NO: 303341 - RNA, 19 nt, Artificial Sequence
  Description of Artificial Sequence: Synthetic oligonucleotide
  Antisense strand to SEQ ID NO: 303340
aacuucauagaccaggaaa

SEQ ID NO: 303342 - RNA, 19 nt, Artificial Sequence
  Description of Artificial Sequence: Synthetic oligonucleotide
  Sense strand starting at position 3320 of SEQ ID NO: 3897
ggccucuuguuucuggaga

SEQ ID NO: 303343 - RNA, 19 nt, Artificial Sequence
  Description of Artificial Sequence: Synthetic oligonucleotide
  Antisense strand to SEQ ID NO: 303342
ucuccagaaacaagaggcc

SEQ ID NO: 303344 - RNA, 19 nt, Artificial Sequence
  Description of Artificial Sequence: Synthetic oligonucleotide
  Sense strand starting at position 3571 of SEQ ID NO: 3897
uuuagagaccugcaaguaa

SEQ ID NO: 303345 - RNA, 19 nt, Artificial Sequence
  Description of Artificial Sequence: Synthetic oligonucleotide
  Antisense strand to SEQ ID NO: 303344
uuacuugcaggucucuaaa

SEQ ID NO: 303346 - RNA, 19 nt, Artificial Sequence
  Description of Artificial Sequence: Synthetic oligonucleotide
  Sense strand starting at position 3721 of SEQ ID NO: 3897
ucaccuauguagucagaug

SEQ ID NO: 303347 - RNA, 19 nt, Artificial Sequence
  Description of Artificial Sequence: Synthetic oligonucleotide
  Antisense strand to SEQ ID NO: 303346
caucugacuacauagguga

SEQ ID NO: 303348 - RNA, 19 nt, Artificial Sequence
  Description of Artificial Sequence: Synthetic oligonucleotide
  Sense strand starting at position 3850 of SEQ ID NO: 3897
guaucaagguguccuguca

SEQ ID NO: 303349 - RNA, 19 nt, Artificial Sequence
  Description of Artificial Sequence: Synthetic oligonucleotide
  Antisense strand to SEQ ID NO: 303348
ugacaggacaccuugauac

SEQ ID NO: 303350 - RNA, 19 nt, Artificial Sequence
  Description of Artificial Sequence: Synthetic oligonucleotide
  Sense strand starting at position 3942 of SEQ ID NO: 3897
gagggaugcugucugccau

SEQ ID NO: 303351 - RNA, 19 nt, Artificial Sequence
  Description of Artificial Sequence: Synthetic oligonucleotide
  Antisense strand to SEQ ID NO: 303350
auggcagacagcaucccuc

SEQ ID NO: 303352 - RNA, 19 nt, Artificial Sequence
  Description of Artificial Sequence: Synthetic oligonucleotide
  Sense strand starting at position 37 of SEQ ID NO: 3898
gguucuuaagccuagucua

SEQ ID NO: 303353 - RNA, 19 nt, Artificial Sequence
  Description of Artificial Sequence: Synthetic oligonucleotide
  Antisense strand to SEQ ID NO: 303352
uagacuaggcuuaagaacc

SEQ ID NO: 303354 - RNA, 19 nt, Artificial Sequence
  Description of Artificial Sequence: Synthetic oligonucleotide
  Sense strand starting at position 216 of SEQ ID NO: 3898
gcaugucucaggcagaaca

SEQ ID NO: 303355 - RNA, 19 nt, Artificial Sequence
  Description of Artificial Sequence: Synthetic oligonucleotide
  Antisense strand to SEQ ID NO: 303354
uguucugccugagacaugc

SEQ ID NO: 303356 - RNA, 19 nt, Artificial Sequence
  Description of Artificial Sequence: Synthetic oligonucleotide
  Sense strand starting at position 246 of SEQ ID NO: 3898
aaguauuuaugugugucuu

SEQ ID NO: 303357 - RNA, 19 nt, Artificial Sequence
  Description of Artificial Sequence: Synthetic oligonucleotide
  Antisense strand to SEQ ID NO: 303356
aagacacacauaaauacuu

SEQ ID NO: 303358 - RNA, 19 nt, Artificial Sequence
  Description of Artificial Sequence: Synthetic oligonucleotide
  Sense strand starting at position 247 of SEQ ID NO: 3898
aguauuuaugugugucuuu

SEQ ID NO: 303359 - RNA, 19 nt, Artificial Sequence
  Description of Artificial Sequence: Synthetic oligonucleotide
  Antisense strand to SEQ ID NO: 303358
aaagacacacauaaauacu

SEQ ID NO: 303360 - RNA, 19 nt, Artificial Sequence
  Description of Artificial Sequence: Synthetic oligonucleotide
  Sense strand starting at position 250 of SEQ ID NO: 3898
auuuaugugugucuuugau

SEQ ID NO: 303361 - RNA, 19 nt, Artificial Sequence
  Description of Artificial Sequence: Synthetic oligonucleotide
  Antisense strand to SEQ ID NO: 303360
aucaaagacacacauaaau

SEQ ID NO: 303362 - RNA, 19 nt, Artificial Sequence
  Description of Artificial Sequence: Synthetic oligonucleotide
  Sense strand starting at position 256 of SEQ ID NO: 3898
gugugucuuugauuaacaa

SEQ ID NO: 303363 - RNA, 19 nt, Artificial Sequence
  Description of Artificial Sequence: Synthetic oligonucleotide
  Antisense strand to SEQ ID NO: 303362
uuguuaaucaaagacacac

SEQ ID NO: 303364 - RNA, 19 nt, Artificial Sequence
  Description of Artificial Sequence: Synthetic oligonucleotide
  Sense strand starting at position 301 of SEQ ID NO: 3898
uacuaaaugcgguaacaua

SEQ ID NO: 303365 - RNA, 19 nt, Artificial Sequence
  Description of Artificial Sequence: Synthetic oligonucleotide
  Antisense strand to SEQ ID NO: 303364
uauguuaccgcauuuagua

SEQ ID NO: 303366 - RNA, 19 nt, Artificial Sequence
  Description of Artificial Sequence: Synthetic oligonucleotide
  Sense strand starting at position 449 of SEQ ID NO: 3898
acaaguuguggcugaagga

SEQ ID NO: 303367 - RNA, 19 nt, Artificial Sequence
  Description of Artificial Sequence: Synthetic oligonucleotide
  Antisense strand to SEQ ID NO: 303366
uccuucagccacaacuugu

SEQ ID NO: 303368 - RNA, 19 nt, Artificial Sequence
  Description of Artificial Sequence: Synthetic oligonucleotide
  Sense strand starting at position 450 of SEQ ID NO: 3898
caaguuguggcugaaggaa

SEQ ID NO: 303369 - RNA, 19 nt, Artificial Sequence
  Description of Artificial Sequence: Synthetic oligonucleotide
  Antisense strand to SEQ ID NO: 303368
uuccuucagccacaacuug

SEQ ID NO: 303370 - RNA, 19 nt, Artificial Sequence
  Description of Artificial Sequence: Synthetic oligonucleotide
  Sense strand starting at position 462 of SEQ ID NO: 3898
gaaggaaugaguggucuag

SEQ ID NO: 303371 - RNA, 19 nt, Artificial Sequence
  Description of Artificial Sequence: Synthetic oligonucleotide
  Antisense strand to SEQ ID NO: 303370
cuagaccacucauuccuuc

SEQ ID NO: 303372 - RNA, 19 nt, Artificial Sequence
  Description of Artificial Sequence: Synthetic oligonucleotide
  Sense strand starting at position 502 of SEQ ID NO: 3898
gucuaaggcuacuucuaau

SEQ ID NO: 303373 - RNA, 19 nt, Artificial Sequence
  Description of Artificial Sequence: Synthetic oligonucleotide
  Antisense strand to SEQ ID NO: 303372
auuagaaguagccuuagac

SEQ ID NO: 303374 - RNA, 19 nt, Artificial Sequence
  Description of Artificial Sequence: Synthetic oligonucleotide
  Sense strand starting at position 668 of SEQ ID NO: 3898
agggcuucuauggguauua

SEQ ID NO: 303375 - RNA, 19 nt, Artificial Sequence
  Description of Artificial Sequence: Synthetic oligonucleotide
  Antisense strand to SEQ ID NO: 303374
uaauacccauagaagcccu

SEQ ID NO: 303376 - RNA, 19 nt, Artificial Sequence
  Description of Artificial Sequence: Synthetic oligonucleotide
  Sense strand starting at position 669 of SEQ ID NO: 3898
gggcuucuauggguauuaa

SEQ ID NO: 303377 - RNA, 19 nt, Artificial Sequence
  Description of Artificial Sequence: Synthetic oligonucleotide
  Antisense strand to SEQ ID NO: 303376
uuaauacccauagaagccc

SEQ ID NO: 303378 - RNA, 19 nt, Artificial Sequence
  Description of Artificial Sequence: Synthetic oligonucleotide
  Sense strand starting at position 670 of SEQ ID NO: 3898
ggcuucuauggguauuaaa

SEQ ID NO: 303379 - RNA, 19 nt, Artificial Sequence
  Description of Artificial Sequence: Synthetic oligonucleotide
  Antisense strand to SEQ ID NO: 303378
uuuaauacccauagaagcc

SEQ ID NO: 303380 - RNA, 19 nt, Artificial Sequence
  Description of Artificial Sequence: Synthetic oligonucleotide
  Sense strand starting at position 802 of SEQ ID NO: 3898
acugcaagauucccucagu

SEQ ID NO: 303381 - RNA, 19 nt, Artificial Sequence
  Description of Artificial Sequence: Synthetic oligonucleotide
  Antisense strand to SEQ ID NO: 303380
acugagggaaucuugcagu

SEQ ID NO: 303382 - RNA, 19 nt, Artificial Sequence
  Description of Artificial Sequence: Synthetic oligonucleotide
  Sense strand starting at position 803 of SEQ ID NO: 3898
cugcaagauucccucaguu

SEQ ID NO: 303383 - RNA, 19 nt, Artificial Sequence
  Description of Artificial Sequence: Synthetic oligonucleotide
  Antisense strand to SEQ ID NO: 303382
aacugagggaaucuugcag

SEQ ID NO: 303384 - RNA, 19 nt, Artificial Sequence
  Description of Artificial Sequence: Synthetic oligonucleotide
  Sense strand starting at position 828 of SEQ ID NO: 3898
uguggcagaaucugauaau

SEQ ID NO: 303385 - RNA, 19 nt, Artificial Sequence
  Description of Artificial Sequence: Synthetic oligonucleotide
  Antisense strand to SEQ ID NO: 303384
auuaucagauucugccaca

SEQ ID NO: 303386 - RNA, 19 nt, Artificial Sequence
  Description of Artificial Sequence: Synthetic oligonucleotide
  Sense strand starting at position 1051 of SEQ ID NO: 3898
aaaugugaagcucauggua

SEQ ID NO: 303387 - RNA, 19 nt, Artificial Sequence
  Description of Artificial Sequence: Synthetic oligonucleotide
  Antisense strand to SEQ ID NO: 303386
uaccaugagcuucacauuu

SEQ ID NO: 303388 - RNA, 19 nt, Artificial Sequence
  Description of Artificial Sequence: Synthetic oligonucleotide
  Sense strand starting at position 1089 of SEQ ID NO: 3898
guuggaacucuagguuucu

SEQ ID NO: 303389 - RNA, 19 nt, Artificial Sequence
  Description of Artificial Sequence: Synthetic oligonucleotide
  Antisense strand to SEQ ID NO: 303388
agaaaccuagaguuccaac

SEQ ID NO: 303390 - RNA, 19 nt, Artificial Sequence
  Description of Artificial Sequence: Synthetic oligonucleotide
  Sense strand starting at position 1119 of SEQ ID NO: 3898
guguccuucccagauccuu

SEQ ID NO: 303391 - RNA, 19 nt, Artificial Sequence
  Description of Artificial Sequence: Synthetic oligonucleotide
  Antisense strand to SEQ ID NO: 303390
aaggaucugggaaggacac

SEQ ID NO: 303392 - RNA, 19 nt, Artificial Sequence
  Description of Artificial Sequence: Synthetic oligonucleotide
  Sense strand starting at position 1368 of SEQ ID NO: 3898
uucucuagucuugagacca

SEQ ID NO: 303393 - RNA, 19 nt, Artificial Sequence
  Description of Artificial Sequence: Synthetic oligonucleotide
  Antisense strand to SEQ ID NO: 303392
uggucucaagacuagagaa

SEQ ID NO: 303394 - RNA, 19 nt, Artificial Sequence
  Description of Artificial Sequence: Synthetic oligonucleotide
  Sense strand starting at position 1383 of SEQ ID NO: 3898
accaaaggaaugcgagaua

SEQ ID NO: 303395 - RNA, 19 nt, Artificial Sequence
  Description of Artificial Sequence: Synthetic oligonucleotide
  Antisense strand to SEQ ID NO: 303394
uaucucgcauuccuuuggu

SEQ ID NO: 303396 - RNA, 19 nt, Artificial Sequence
  Description of Artificial Sequence: Synthetic oligonucleotide
  Sense strand starting at position 1447 of SEQ ID NO: 3898
ggccgugugcugaaagucu

SEQ ID NO: 303397 - RNA, 19 nt, Artificial Sequence
  Description of Artificial Sequence: Synthetic oligonucleotide
  Antisense strand to SEQ ID NO: 303396
agacuuucagcacacggcc

SEQ ID NO: 303398 - RNA, 19 nt, Artificial Sequence
  Description of Artificial Sequence: Synthetic oligonucleotide
  Sense strand starting at position 1579 of SEQ ID NO: 3898
gguugcuucuaauucuaaa

SEQ ID NO: 303399 - RNA, 19 nt, Artificial Sequence
  Description of Artificial Sequence: Synthetic oligonucleotide
  Antisense strand to SEQ ID NO: 303398
uuuagaauuagaagcaacc

SEQ ID NO: 303400 - RNA, 19 nt, Artificial Sequence
  Description of Artificial Sequence: Synthetic oligonucleotide
  Sense strand starting at position 2514 of SEQ ID NO: 3898
uuggaaauuuggccgcuua

SEQ ID NO: 303401 - RNA, 19 nt, Artificial Sequence
  Description of Artificial Sequence: Synthetic oligonucleotide
  Antisense strand to SEQ ID NO: 303400
uaagcggccaaauuuccaa

SEQ ID NO: 303402 - RNA, 19 nt, Artificial Sequence
  Description of Artificial Sequence: Synthetic oligonucleotide
  Sense strand starting at position 2515 of SEQ ID NO: 3898
uggaaauuuggccgcuuaa

SEQ ID NO: 303403 - RNA, 19 nt, Artificial Sequence
  Description of Artificial Sequence: Synthetic oligonucleotide
  Antisense strand to SEQ ID NO: 303402
uuaagcggccaaauuucca

SEQ ID NO: 303404 - RNA, 19 nt, Artificial Sequence
  Description of Artificial Sequence: Synthetic oligonucleotide
  Sense strand starting at position 2534 of SEQ ID NO: 3898
guaacacugacuuguaugu

SEQ ID NO: 303405 - RNA, 19 nt, Artificial Sequence
  Description of Artificial Sequence: Synthetic oligonucleotide
  Antisense strand to SEQ ID NO: 303404
acauacaagucaguguuac

SEQ ID NO: 303406 - RNA, 19 nt, Artificial Sequence
  Description of Artificial Sequence: Synthetic oligonucleotide
  Sense strand starting at position 2539 of SEQ ID NO: 3898
acugacuuguaugucuaau

SEQ ID NO: 303407 - RNA, 19 nt, Artificial Sequence
  Description of Artificial Sequence: Synthetic oligonucleotide
  Antisense strand to SEQ ID NO: 303406
auuagacauacaagucagu

SEQ ID NO: 303408 - RNA, 19 nt, Artificial Sequence
  Description of Artificial Sequence: Synthetic oligonucleotide
  Sense strand starting at position 2541 of SEQ ID NO: 3898
ugacuuguaugucuaaucu

SEQ ID NO: 303409 - RNA, 19 nt, Artificial Sequence
  Description of Artificial Sequence: Synthetic oligonucleotide
  Antisense strand to SEQ ID NO: 303408
agauuagacauacaaguca

SEQ ID NO: 303410 - RNA, 19 nt, Artificial Sequence
  Description of Artificial Sequence: Synthetic oligonucleotide
  Sense strand starting at position 2613 of SEQ ID NO: 3898
augacaagguucucuuaaa

SEQ ID NO: 303411 - RNA, 19 nt, Artificial Sequence
  Description of Artificial Sequence: Synthetic oligonucleotide
  Antisense strand to SEQ ID NO: 303410
uuuaagagaaccuugucau

SEQ ID NO: 303412 - RNA, 19 nt, Artificial Sequence
  Description of Artificial Sequence: Synthetic oligonucleotide
  Sense strand starting at position 2710 of SEQ ID NO: 3898
acugauaauuaggagauau

SEQ ID NO: 303413 - RNA, 19 nt, Artificial Sequence
  Description of Artificial Sequence: Synthetic oligonucleotide
  Antisense strand to SEQ ID NO: 303412
auaucuccuaauuaucagu

SEQ ID NO: 303414 - RNA, 19 nt, Artificial Sequence
  Description of Artificial Sequence: Synthetic oligonucleotide
  Sense strand starting at position 2801 of SEQ ID NO: 3898
cuaggacagucuucucuaa

SEQ ID NO: 303415 - RNA, 19 nt, Artificial Sequence
  Description of Artificial Sequence: Synthetic oligonucleotide
  Antisense strand to SEQ ID NO: 303414
uuagagaagacuguccuag

SEQ ID NO: 303416 - RNA, 19 nt, Artificial Sequence
  Description of Artificial Sequence: Synthetic oligonucleotide
  Sense strand starting at position 2803 of SEQ ID NO: 3898
aggacagucuucucuaauu

SEQ ID NO: 303417 - RNA, 19 nt, Artificial Sequence
  Description of Artificial Sequence: Synthetic oligonucleotide
  Antisense strand to SEQ ID NO: 303416
aauuagagaagacuguccu

SEQ ID NO: 303418 - RNA, 19 nt, Artificial Sequence
  Description of Artificial Sequence: Synthetic oligonucleotide
  Sense strand starting at position 2907 of SEQ ID NO: 3898
gucugaguaggauggacua

SEQ ID NO: 303419 - RNA, 19 nt, Artificial Sequence
  Description of Artificial Sequence: Synthetic oligonucleotide
  Antisense strand to SEQ ID NO: 303418
uaguccauccuacucagac

SEQ ID NO: 303420 - RNA, 19 nt, Artificial Sequence
  Description of Artificial Sequence: Synthetic oligonucleotide
  Sense strand starting at position 3016 of SEQ ID NO: 3898
gaaauuuccuuguaaggga

SEQ ID NO: 303421 - RNA, 19 nt, Artificial Sequence
  Description of Artificial Sequence: Synthetic oligonucleotide
  Antisense strand to SEQ ID NO: 303420
ucccuuacaaggaaauuuc

SEQ ID NO: 303422 - RNA, 19 nt, Artificial Sequence
  Description of Artificial Sequence: Synthetic oligonucleotide
  Sense strand starting at position 3146 of SEQ ID NO: 3898
gugcacuugcuucuugcaa

SEQ ID NO: 303423 - RNA, 19 nt, Artificial Sequence
  Description of Artificial Sequence: Synthetic oligonucleotide
  Antisense strand to SEQ ID NO: 303422
uugcaagaagcaagugcac

SEQ ID NO: 303424 - RNA, 19 nt, Artificial Sequence
  Description of Artificial Sequence: Synthetic oligonucleotide
  Sense strand starting at position 3247 of SEQ ID NO: 3898
uggguuguugaaugaugaa

SEQ ID NO: 303425 - RNA, 19 nt, Artificial Sequence
  Description of Artificial Sequence: Synthetic oligonucleotide
  Antisense strand to SEQ ID NO: 303424
uucaucauucaacaaccca

SEQ ID NO: 303426 - RNA, 19 nt, Artificial Sequence
  Description of Artificial Sequence: Synthetic oligonucleotide
  Sense strand starting at position 3437 of SEQ ID NO: 3898
aauguuaggaggugauagu

SEQ ID NO: 303427 - RNA, 19 nt, Artificial Sequence
  Description of Artificial Sequence: Synthetic oligonucleotide
  Antisense strand to SEQ ID NO: 303426
acuaucaccuccuaacauu

SEQ ID NO: 303428 - RNA, 19 nt, Artificial Sequence
  Description of Artificial Sequence: Synthetic oligonucleotide
  Sense strand starting at position 3438 of SEQ ID NO: 3898
auguuaggaggugauaguu

SEQ ID NO: 303429 - RNA, 19 nt, Artificial Sequence
  Description of Artificial Sequence: Synthetic oligonucleotide
  Antisense strand to SEQ ID NO: 303428
aacuaucaccuccuaacau

SEQ ID NO: 303430 - RNA, 19 nt, Artificial Sequence
  Description of Artificial Sequence: Synthetic oligonucleotide
  Sense strand starting at position 3920 of SEQ ID NO: 3898
gagagaccucucuguaaca

SEQ ID NO: 303431 - RNA, 19 nt, Artificial Sequence
  Description of Artificial Sequence: Synthetic oligonucleotide
  Antisense strand to SEQ ID NO: 303430
uguuacagagaggucucuc

SEQ ID NO: 303432 - RNA, 19 nt, Artificial Sequence
  Description of Artificial Sequence: Synthetic oligonucleotide
  Sense strand starting at position 291 of SEQ ID NO: 3899
acaauucuccuggaggcuu

SEQ ID NO: 303433 - RNA, 19 nt, Artificial Sequence
  Description of Artificial Sequence: Synthetic oligonucleotide
  Antisense strand to SEQ ID NO: 303432
aagccuccaggagaauugu

SEQ ID NO: 303434 - RNA, 19 nt, Artificial Sequence
  Description of Artificial Sequence: Synthetic oligonucleotide
  Sense strand starting at position 345 of SEQ ID NO: 3899
cucugaaguucuguaacuc

SEQ ID NO: 303435 - RNA, 19 nt, Artificial Sequence
  Description of Artificial Sequence: Synthetic oligonucleotide
  Antisense strand to SEQ ID NO: 303434
gaguuacagaacuucagag

SEQ ID NO: 303436 - RNA, 19 nt, Artificial Sequence
  Description of Artificial Sequence: Synthetic oligonucleotide
  Sense strand starting at position 346 of SEQ ID NO: 3899
ucugaaguucuguaacucu

SEQ ID NO: 303437 - RNA, 19 nt, Artificial Sequence
  Description of Artificial Sequence: Synthetic oligonucleotide
  Antisense strand to SEQ ID NO: 303436
agaguuacagaacuucaga

SEQ ID NO: 303438 - RNA, 19 nt, Artificial Sequence
  Description of Artificial Sequence: Synthetic oligonucleotide
  Sense strand starting at position 355 of SEQ ID NO: 3899
cuguaacucuugcugcaaa

SEQ ID NO: 303439 - RNA, 19 nt, Artificial Sequence
  Description of Artificial Sequence: Synthetic oligonucleotide
  Antisense strand to SEQ ID NO: 303438
uuugcagcaagaguuacag

SEQ ID NO: 303440 - RNA, 19 nt, Artificial Sequence
  Description of Artificial Sequence: Synthetic oligonucleotide
  Sense strand starting at position 392 of SEQ ID NO: 3899
ccauuauacugggccacua

SEQ ID NO: 303441 - RNA, 19 nt, Artificial Sequence
  Description of Artificial Sequence: Synthetic oligonucleotide
  Antisense strand to SEQ ID NO: 303440
uaguggcccaguauaaugg

SEQ ID NO: 303442 - RNA, 19 nt, Artificial Sequence
  Description of Artificial Sequence: Synthetic oligonucleotide
  Sense strand starting at position 446 of SEQ ID NO: 3899
ugugccuuucucuaggcaa

SEQ ID NO: 303443 - RNA, 19 nt, Artificial Sequence
  Description of Artificial Sequence: Synthetic oligonucleotide
  Antisense strand to SEQ ID NO: 303442
uugccuagagaaaggcaca

SEQ ID NO: 303444 - RNA, 19 nt, Artificial Sequence
  Description of Artificial Sequence: Synthetic oligonucleotide
  Sense strand starting at position 537 of SEQ ID NO: 3899
ugagcucccuuauuuagua

SEQ ID NO: 303445 - RNA, 19 nt, Artificial Sequence
  Description of Artificial Sequence: Synthetic oligonucleotide
  Antisense strand to SEQ ID NO: 303444
uacuaaauaagggagcuca

SEQ ID NO: 303446 - RNA, 19 nt, Artificial Sequence
  Description of Artificial Sequence: Synthetic oligonucleotide
  Sense strand starting at position 649 of SEQ ID NO: 3899
auauguaucccagguguaa

SEQ ID NO: 303447 - RNA, 19 nt, Artificial Sequence
  Description of Artificial Sequence: Synthetic oligonucleotide
  Antisense strand to SEQ ID NO: 303446
uuacaccugggauacauau

SEQ ID NO: 303448 - RNA, 19 nt, Artificial Sequence
  Description of Artificial Sequence: Synthetic oligonucleotide
  Sense strand starting at position 651 of SEQ ID NO: 3899
auguaucccagguguaaau

SEQ ID NO: 303449 - RNA, 19 nt, Artificial Sequence
  Description of Artificial Sequence: Synthetic oligonucleotide
  Antisense strand to SEQ ID NO: 303448
auuuacaccugggauacau

SEQ ID NO: 303450 - RNA, 19 nt, Artificial Sequence
  Description of Artificial Sequence: Synthetic oligonucleotide
  Sense strand starting at position 662 of SEQ ID NO: 3899
guguaaaugcuccagggag

SEQ ID NO: 303451 - RNA, 19 nt, Artificial Sequence
  Description of Artificial Sequence: Synthetic oligonucleotide
  Antisense strand to SEQ ID NO: 303450
cucccuggagcauuuacac

SEQ ID NO: 303452 - RNA, 19 nt, Artificial Sequence
  Description of Artificial Sequence: Synthetic oligonucleotide
  Sense strand starting at position 664 of SEQ ID NO: 3899
guaaaugcuccagggaguc

SEQ ID NO: 303453 - RNA, 19 nt, Artificial Sequence
  Description of Artificial Sequence: Synthetic oligonucleotide
  Antisense strand to SEQ ID NO: 303452
gacucccuggagcauuuac

SEQ ID NO: 303454 - RNA, 19 nt, Artificial Sequence
  Description of Artificial Sequence: Synthetic oligonucleotide
  Sense strand starting at position 678 of SEQ ID NO: 3899
gagucuccucccugucaga

SEQ ID NO: 303455 - RNA, 19 nt, Artificial Sequence
  Description of Artificial Sequence: Synthetic oligonucleotide
  Antisense strand to SEQ ID NO: 303454
ucugacagggaggagacuc

SEQ ID NO: 303456 - RNA, 19 nt, Artificial Sequence
  Description of Artificial Sequence: Synthetic oligonucleotide
  Sense strand starting at position 695 of SEQ ID NO: 3899
gacaauaugcccuguggua

SEQ ID NO: 303457 - RNA, 19 nt, Artificial Sequence
  Description of Artificial Sequence: Synthetic oligonucleotide
  Antisense strand to SEQ ID NO: 303456
uaccacagggcauauuguc

SEQ ID NO: 303458 - RNA, 19 nt, Artificial Sequence
  Description of Artificial Sequence: Synthetic oligonucleotide
  Sense strand starting at position 697 of SEQ ID NO: 3899
caauaugcccugugguaag

SEQ ID NO: 303459 - RNA, 19 nt, Artificial Sequence
  Description of Artificial Sequence: Synthetic oligonucleotide
  Antisense strand to SEQ ID NO: 303458
cuuaccacagggcauauug

SEQ ID NO: 303460 - RNA, 19 nt, Artificial Sequence
  Description of Artificial Sequence: Synthetic oligonucleotide
  Sense strand starting at position 713 of SEQ ID NO: 3899
aagggaccauguguaauaa

SEQ ID NO: 303461 - RNA, 19 nt, Artificial Sequence
  Description of Artificial Sequence: Synthetic oligonucleotide
  Antisense strand to SEQ ID NO: 303460
uuauuacacauggucccuu

SEQ ID NO: 303462 - RNA, 19 nt, Artificial Sequence
  Description of Artificial Sequence: Synthetic oligonucleotide
  Sense strand starting at position 723 of SEQ ID NO: 3899
guguaauaacccugcuaag

SEQ ID NO: 303463 - RNA, 19 nt, Artificial Sequence
  Description of Artificial Sequence: Synthetic oligonucleotide
  Antisense strand to SEQ ID NO: 303462
cuuagcaggguuauuacac

SEQ ID NO: 303464 - RNA, 19 nt, Artificial Sequence
  Description of Artificial Sequence: Synthetic oligonucleotide
  Sense strand starting at position 884 of SEQ ID NO: 3899
gauuaaugugcccaagaca

SEQ ID NO: 303465 - RNA, 19 nt, Artificial Sequence
  Description of Artificial Sequence: Synthetic oligonucleotide
  Antisense strand to SEQ ID NO: 303464
ugucuugggcacauuaauc

SEQ ID NO: 303466 - RNA, 19 nt, Artificial Sequence
  Description of Artificial Sequence: Synthetic oligonucleotide
  Sense strand starting at position 916 of SEQ ID NO: 3899
cugcaaagcuaaguaaauu

SEQ ID NO: 303467 - RNA, 19 nt, Artificial Sequence
  Description of Artificial Sequence: Synthetic oligonucleotide
  Antisense strand to SEQ ID NO: 303466
aauuuacuuagcuuugcag

SEQ ID NO: 303468 - RNA, 19 nt, Artificial Sequence
  Description of Artificial Sequence: Synthetic oligonucleotide
  Sense strand starting at position 993 of SEQ ID NO: 3899
aucuauaaaugugugggau

SEQ ID NO: 303469 - RNA, 19 nt, Artificial Sequence
  Description of Artificial Sequence: Synthetic oligonucleotide
  Antisense strand to SEQ ID NO: 303468
aucccacacauuuauagau

SEQ ID NO: 303470 - RNA, 19 nt, Artificial Sequence
  Description of Artificial Sequence: Synthetic oligonucleotide
  Sense strand starting at position 994 of SEQ ID NO: 3899
ucuauaaaugugugggaug

SEQ ID NO: 303471 - RNA, 19 nt, Artificial Sequence
  Description of Artificial Sequence: Synthetic oligonucleotide
  Antisense strand to SEQ ID NO: 303470
caucccacacauuuauaga

SEQ ID NO: 303472 - RNA, 19 nt, Artificial Sequence
  Description of Artificial Sequence: Synthetic oligonucleotide
  Sense strand starting at position 996 of SEQ ID NO: 3899
uauaaaugugugggaugaa

SEQ ID NO: 303473 - RNA, 19 nt, Artificial Sequence
  Description of Artificial Sequence: Synthetic oligonucleotide
  Antisense strand to SEQ ID NO: 303472
uucaucccacacauuuaua

SEQ ID NO: 303474 - RNA, 19 nt, Artificial Sequence
  Description of Artificial Sequence: Synthetic oligonucleotide
  Sense strand starting at position 1621 of SEQ ID NO: 3899
ucaauaugggauuguccaa

SEQ ID NO: 303475 - RNA, 19 nt, Artificial Sequence
  Description of Artificial Sequence: Synthetic oligonucleotide
  Antisense strand to SEQ ID NO: 303474
uuggacaaucccauauuga

SEQ ID NO: 303476 - RNA, 19 nt, Artificial Sequence
  Description of Artificial Sequence: Synthetic oligonucleotide
  Sense strand starting at position 3085 of SEQ ID NO: 3899
guguuagagaaaugacuua

SEQ ID NO: 303477 - RNA, 19 nt, Artificial Sequence
  Description of Artificial Sequence: Synthetic oligonucleotide
  Antisense strand to SEQ ID NO: 303476
uaagucauuucucuaacac

SEQ ID NO: 303478 - RNA, 19 nt, Artificial Sequence
  Description of Artificial Sequence: Synthetic oligonucleotide
  Sense strand starting at position 3168 of SEQ ID NO: 3899
cuuguuccugaguggguua

SEQ ID NO: 303479 - RNA, 19 nt, Artificial Sequence
  Description of Artificial Sequence: Synthetic oligonucleotide
  Antisense strand to SEQ ID NO: 303478
uaacccacucaggaacaag

SEQ ID NO: 303480 - RNA, 19 nt, Artificial Sequence
  Description of Artificial Sequence: Synthetic oligonucleotide
  Sense strand starting at position 3171 of SEQ ID NO: 3899
guuccugaguggguuacaa

SEQ ID NO: 303481 - RNA, 19 nt, Artificial Sequence
  Description of Artificial Sequence: Synthetic oligonucleotide
  Antisense strand to SEQ ID NO: 303480
uuguaacccacucaggaac

SEQ ID NO: 303482 - RNA, 19 nt, Artificial Sequence
  Description of Artificial Sequence: Synthetic oligonucleotide
  Sense strand starting at position 3217 of SEQ ID NO: 3899
ggaggaauguaccuaucuc

SEQ ID NO: 303483 - RNA, 19 nt, Artificial Sequence
  Description of Artificial Sequence: Synthetic oligonucleotide
  Antisense strand to SEQ ID NO: 303482
gagauagguacauuccucc

SEQ ID NO: 303484 - RNA, 19 nt, Artificial Sequence
  Description of Artificial Sequence: Synthetic oligonucleotide
  Sense strand starting at position 3225 of SEQ ID NO: 3899
guaccuaucucauuaaugu

SEQ ID NO: 303485 - RNA, 19 nt, Artificial Sequence
  Description of Artificial Sequence: Synthetic oligonucleotide
  Antisense strand to SEQ ID NO: 303484
acauuaaugagauagguac

SEQ ID NO: 303486 - RNA, 19 nt, Artificial Sequence
  Description of Artificial Sequence: Synthetic oligonucleotide
  Sense strand starting at position 3234 of SEQ ID NO: 3899
ucauuaaugucucugcuga

SEQ ID NO: 303487 - RNA, 19 nt, Artificial Sequence
  Description of Artificial Sequence: Synthetic oligonucleotide
  Antisense strand to SEQ ID NO: 303486
ucagcagagacauuaauga

SEQ ID NO: 303488 - RNA, 19 nt, Artificial Sequence
  Description of Artificial Sequence: Synthetic oligonucleotide
  Sense strand starting at position 3236 of SEQ ID NO: 3899
auuaaugucucugcugaug

SEQ ID NO: 303489 - RNA, 19 nt, Artificial Sequence
  Description of Artificial Sequence: Synthetic oligonucleotide
  Antisense strand to SEQ ID NO: 303488
caucagcagagacauuaau

SEQ ID NO: 303490 - RNA, 19 nt, Artificial Sequence
  Description of Artificial Sequence: Synthetic oligonucleotide
  Sense strand starting at position 3239 of SEQ ID NO: 3899
aaugucucugcugaugagu

SEQ ID NO: 303491 - RNA, 19 nt, Artificial Sequence
  Description of Artificial Sequence: Synthetic oligonucleotide
  Antisense strand to SEQ ID NO: 303490
acucaucagcagagacauu

SEQ ID NO: 303492 - RNA, 19 nt, Artificial Sequence
  Description of Artificial Sequence: Synthetic oligonucleotide
  Sense strand starting at position 3244 of SEQ ID NO: 3899
cucugcugaugaguugaaa

SEQ ID NO: 303493 - RNA, 19 nt, Artificial Sequence
  Description of Artificial Sequence: Synthetic oligonucleotide
  Antisense strand to SEQ ID NO: 303492
uuucaacucaucagcagag

SEQ ID NO: 303494 - RNA, 19 nt, Artificial Sequence
  Description of Artificial Sequence: Synthetic oligonucleotide
  Sense strand starting at position 3401 of SEQ ID NO: 3899
uccuuuaugucauuuaugu

SEQ ID NO: 303495 - RNA, 19 nt, Artificial Sequence
  Description of Artificial Sequence: Synthetic oligonucleotide
  Antisense strand to SEQ ID NO: 303494
acauaaaugacauaaagga

SEQ ID NO: 303496 - RNA, 19 nt, Artificial Sequence
  Description of Artificial Sequence: Synthetic oligonucleotide
  Sense strand starting at position 3408 of SEQ ID NO: 3899
ugucauuuaugugaggcau

SEQ ID NO: 303497 - RNA, 19 nt, Artificial Sequence
  Description of Artificial Sequence: Synthetic oligonucleotide
  Antisense strand to SEQ ID NO: 303496
augccucacauaaaugaca

SEQ ID NO: 303498 - RNA, 19 nt, Artificial Sequence
  Description of Artificial Sequence: Synthetic oligonucleotide
  Sense strand starting at position 3421 of SEQ ID NO: 3899
aggcauuuguggcauaaug

SEQ ID NO: 303499 - RNA, 19 nt, Artificial Sequence
  Description of Artificial Sequence: Synthetic oligonucleotide
  Antisense strand to SEQ ID NO: 303498
cauuaugccacaaaugccu

SEQ ID NO: 303500 - RNA, 19 nt, Artificial Sequence
  Description of Artificial Sequence: Synthetic oligonucleotide
  Sense strand starting at position 3429 of SEQ ID NO: 3899
guggcauaauggcauauuu

SEQ ID NO: 303501 - RNA, 19 nt, Artificial Sequence
  Description of Artificial Sequence: Synthetic oligonucleotide
  Antisense strand to SEQ ID NO: 303500
aaauaugccauuaugccac

SEQ ID NO: 303502 - RNA, 19 nt, Artificial Sequence
  Description of Artificial Sequence: Synthetic oligonucleotide
  Sense strand starting at position 3490 of SEQ ID NO: 3899
gggugcuuuaaacagauau

SEQ ID NO: 303503 - RNA, 19 nt, Artificial Sequence
  Description of Artificial Sequence: Synthetic oligonucleotide
  Antisense strand to SEQ ID NO: 303502
auaucuguuuaaagcaccc

SEQ ID NO: 303504 - RNA, 19 nt, Artificial Sequence
  Description of Artificial Sequence: Synthetic oligonucleotide
  Sense strand starting at position 3555 of SEQ ID NO: 3899
ggacauaacuacuaaguag

SEQ ID NO: 303505 - RNA, 19 nt, Artificial Sequence
  Description of Artificial Sequence: Synthetic oligonucleotide
  Antisense strand to SEQ ID NO: 303504
cuacuuaguaguuaugucc

SEQ ID NO: 303506 - RNA, 19 nt, Artificial Sequence
  Description of Artificial Sequence: Synthetic oligonucleotide
  Sense strand starting at position 3605 of SEQ ID NO: 3899
cuccuaucuggguggguau

SEQ ID NO: 303507 - RNA, 19 nt, Artificial Sequence
  Description of Artificial Sequence: Synthetic oligonucleotide
  Antisense strand to SEQ ID NO: 303506
auacccacccagauaggag

SEQ ID NO: 303508 - RNA, 19 nt, Artificial Sequence
  Description of Artificial Sequence: Synthetic oligonucleotide
  Sense strand starting at position 3643 of SEQ ID NO: 3899
agcacuaccuguuuaagac

SEQ ID NO: 303509 - RNA, 19 nt, Artificial Sequence
  Description of Artificial Sequence: Synthetic oligonucleotide
  Antisense strand to SEQ ID NO: 303508
gucuuaaacagguagugcu

SEQ ID NO: 303510 - RNA, 19 nt, Artificial Sequence
  Description of Artificial Sequence: Synthetic oligonucleotide
  Sense strand starting at position 3666 of SEQ ID NO: 3899
ucguuuaaauccucaugac

SEQ ID NO: 303511 - RNA, 19 nt, Artificial Sequence
  Description of Artificial Sequence: Synthetic oligonucleotide
  Antisense strand to SEQ ID NO: 303510
gucaugaggauuuaaacga

SEQ ID NO: 303512 - RNA, 19 nt, Artificial Sequence
  Description of Artificial Sequence: Synthetic oligonucleotide
  Sense strand starting at position 943 of SEQ ID NO: 3900
ggaagagccugucucaaag

SEQ ID NO: 303513 - RNA, 19 nt, Artificial Sequence
  Description of Artificial Sequence: Synthetic oligonucleotide
  Antisense strand to SEQ ID NO: 303512
cuuugagacaggcucuucc

SEQ ID NO: 303514 - RNA, 19 nt, Artificial Sequence
  Description of Artificial Sequence: Synthetic oligonucleotide
  Sense strand starting at position 1021 of SEQ ID NO: 3900
auuacagcucuugagucua

SEQ ID NO: 303515 - RNA, 19 nt, Artificial Sequence
  Description of Artificial Sequence: Synthetic oligonucleotide
  Antisense strand to SEQ ID NO: 303514
uagacucaagagcuguaau

SEQ ID NO: 303516 - RNA, 19 nt, Artificial Sequence
  Description of Artificial Sequence: Synthetic oligonucleotide
  Sense strand starting at position 1100 of SEQ ID NO: 3900
agcagagagguuggauaua

SEQ ID NO: 303517 - RNA, 19 nt, Artificial Sequence
  Description of Artificial Sequence: Synthetic oligonucleotide
  Antisense strand to SEQ ID NO: 303516
uauauccaaccucucugcu

SEQ ID NO: 303518 - RNA, 19 nt, Artificial Sequence
  Description of Artificial Sequence: Synthetic oligonucleotide
  Sense strand starting at position 1113 of SEQ ID NO: 3900
gauauagagguuugccuua

SEQ ID NO: 303519 - RNA, 19 nt, Artificial Sequence
  Description of Artificial Sequence: Synthetic oligonucleotide
  Antisense strand to SEQ ID NO: 303518
uaaggcaaaccucuauauc

SEQ ID NO: 303520 - RNA, 19 nt, Artificial Sequence
  Description of Artificial Sequence: Synthetic oligonucleotide
  Sense strand starting at position 1115 of SEQ ID NO: 3900
uauagagguuugccuuauu

SEQ ID NO: 303521 - RNA, 19 nt, Artificial Sequence
  Description of Artificial Sequence: Synthetic oligonucleotide
  Antisense strand to SEQ ID NO: 303520
aauaaggcaaaccucuaua

SEQ ID NO: 303522 - RNA, 19 nt, Artificial Sequence
  Description of Artificial Sequence: Synthetic oligonucleotide
  Sense strand starting at position 1143 of SEQ ID NO: 3900
gcuacuagucugggaagac

SEQ ID NO: 303523 - RNA, 19 nt, Artificial Sequence
  Description of Artificial Sequence: Synthetic oligonucleotide
  Antisense strand to SEQ ID NO: 303522
gucuucccagacuaguagc

SEQ ID NO: 303524 - RNA, 19 nt, Artificial Sequence
  Description of Artificial Sequence: Synthetic oligonucleotide
  Sense strand starting at position 1144 of SEQ ID NO: 3900
cuacuagucugggaagaca

SEQ ID NO: 303525 - RNA, 19 nt, Artificial Sequence
  Description of Artificial Sequence: Synthetic oligonucleotide
  Antisense strand to SEQ ID NO: 303524
ugucuucccagacuaguag

SEQ ID NO: 303526 - RNA, 19 nt, Artificial Sequence
  Description of Artificial Sequence: Synthetic oligonucleotide
  Sense strand starting at position 1230 of SEQ ID NO: 3900
guggcaaucuuucuccacu

SEQ ID NO: 303527 - RNA, 19 nt, Artificial Sequence
  Description of Artificial Sequence: Synthetic oligonucleotide
  Antisense strand to SEQ ID NO: 303526
aguggagaaagauugccac

SEQ ID NO: 303528 - RNA, 19 nt, Artificial Sequence
  Description of Artificial Sequence: Synthetic oligonucleotide
  Sense strand starting at position 1243 of SEQ ID NO: 3900
uccacuccucaguggaaga

SEQ ID NO: 303529 - RNA, 19 nt, Artificial Sequence
  Description of Artificial Sequence: Synthetic oligonucleotide
  Antisense strand to SEQ ID NO: 303528
ucuuccacugaggagugga

SEQ ID NO: 303530 - RNA, 19 nt, Artificial Sequence
  Description of Artificial Sequence: Synthetic oligonucleotide
  Sense strand starting at position 1256 of SEQ ID NO: 3900
ggaagaaccaggugucacu

SEQ ID NO: 303531 - RNA, 19 nt, Artificial Sequence
  Description of Artificial Sequence: Synthetic oligonucleotide
  Antisense strand to SEQ ID NO: 303530
agugacaccugguucuucc

SEQ ID NO: 303532 - RNA, 19 nt, Artificial Sequence
  Description of Artificial Sequence: Synthetic oligonucleotide
  Sense strand starting at position 1273 of SEQ ID NO: 3900
cuuauaauuccuggugagu

SEQ ID NO: 303533 - RNA, 19 nt, Artificial Sequence
  Description of Artificial Sequence: Synthetic oligonucleotide
  Antisense strand to SEQ ID NO: 303532
acucaccaggaauuauaag

SEQ ID NO: 303534 - RNA, 19 nt, Artificial Sequence
  Description of Artificial Sequence: Synthetic oligonucleotide
  Sense strand starting at position 1276 of SEQ ID NO: 3900
auaauuccuggugaguguu

SEQ ID NO: 303535 - RNA, 19 nt, Artificial Sequence
  Description of Artificial Sequence: Synthetic oligonucleotide
  Antisense strand to SEQ ID NO: 303534
aacacucaccaggaauuau

SEQ ID NO: 303536 - RNA, 19 nt, Artificial Sequence
  Description of Artificial Sequence: Synthetic oligonucleotide
  Sense strand starting at position 1350 of SEQ ID NO: 3900
ccugcugguuacuuaaaga

SEQ ID NO: 303537 - RNA, 19 nt, Artificial Sequence
  Description of Artificial Sequence: Synthetic oligonucleotide
  Antisense strand to SEQ ID NO: 303536
ucuuuaaguaaccagcagg

SEQ ID NO: 303538 - RNA, 19 nt, Artificial Sequence
  Description of Artificial Sequence: Synthetic oligonucleotide
  Sense strand starting at position 1377 of SEQ ID NO: 3900
cguguauaaugauccacag

SEQ ID NO: 303539 - RNA, 19 nt, Artificial Sequence
  Description of Artificial Sequence: Synthetic oligonucleotide
  Antisense strand to SEQ ID NO: 303538
cuguggaucauuauacacg

SEQ ID NO: 303540 - RNA, 19 nt, Artificial Sequence
  Description of Artificial Sequence: Synthetic oligonucleotide
  Sense strand starting at position 1547 of SEQ ID NO: 3900
ucaguuuacucaucuggga

SEQ ID NO: 303541 - RNA, 19 nt, Artificial Sequence
  Description of Artificial Sequence: Synthetic oligonucleotide
  Antisense strand to SEQ ID NO: 303540
ucccagaugaguaaacuga

SEQ ID NO: 303542 - RNA, 19 nt, Artificial Sequence
  Description of Artificial Sequence: Synthetic oligonucleotide
  Sense strand starting at position 2043 of SEQ ID NO: 3900
gggcucuccugagcgaaga

SEQ ID NO: 303543 - RNA, 19 nt, Artificial Sequence
  Description of Artificial Sequence: Synthetic oligonucleotide
  Antisense strand to SEQ ID NO: 303542
ucuucgcucaggagagccc

SEQ ID NO: 303544 - RNA, 19 nt, Artificial Sequence
  Description of Artificial Sequence: Synthetic oligonucleotide
  Sense strand starting at position 2549 of SEQ ID NO: 3900
cucguagagcuggaaggau

SEQ ID NO: 303545 - RNA, 19 nt, Artificial Sequence
  Description of Artificial Sequence: Synthetic oligonucleotide
  Antisense strand to SEQ ID NO: 303544
auccuuccagcucuacgag

SEQ ID NO: 303546 - RNA, 19 nt, Artificial Sequence
  Description of Artificial Sequence: Synthetic oligonucleotide
  Sense strand starting at position 2576 of SEQ ID NO: 3900
aguagugcuccucauaucu

SEQ ID NO: 303547 - RNA, 19 nt, Artificial Sequence
  Description of Artificial Sequence: Synthetic oligonucleotide
  Antisense strand to SEQ ID NO: 303546
agauaugaggagcacuacu

SEQ ID NO: 303548 - RNA, 19 nt, Artificial Sequence
  Description of Artificial Sequence: Synthetic oligonucleotide
  Sense strand starting at position 2585 of SEQ ID NO: 3900
ccucauaucuagggagaga

SEQ ID NO: 303549 - RNA, 19 nt, Artificial Sequence
  Description of Artificial Sequence: Synthetic oligonucleotide
  Antisense strand to SEQ ID NO: 303548
ucucucccuagauaugagg

SEQ ID NO: 303550 - RNA, 19 nt, Artificial Sequence
  Description of Artificial Sequence: Synthetic oligonucleotide
  Sense strand starting at position 2630 of SEQ ID NO: 3900
uaggaaagugcuggcuuua

SEQ ID NO: 303551 - RNA, 19 nt, Artificial Sequence
  Description of Artificial Sequence: Synthetic oligonucleotide
  Antisense strand to SEQ ID NO: 303550
uaaagccagcacuuuccua

SEQ ID NO: 303552 - RNA, 19 nt, Artificial Sequence
  Description of Artificial Sequence: Synthetic oligonucleotide
  Sense strand starting at position 2651 of SEQ ID NO: 3900
guugcuagugauuaaaccu

SEQ ID NO: 303553 - RNA, 19 nt, Artificial Sequence
  Description of Artificial Sequence: Synthetic oligonucleotide
  Antisense strand to SEQ ID NO: 303552
agguuuaaucacuagcaac

SEQ ID NO: 303554 - RNA, 19 nt, Artificial Sequence
  Description of Artificial Sequence: Synthetic oligonucleotide
  Sense strand starting at position 2658 of SEQ ID NO: 3900
gugauuaaaccucggguuu

SEQ ID NO: 303555 - RNA, 19 nt, Artificial Sequence
  Description of Artificial Sequence: Synthetic oligonucleotide
  Antisense strand to SEQ ID NO: 303554
aaacccgagguuuaaucac

SEQ ID NO: 303556 - RNA, 19 nt, Artificial Sequence
  Description of Artificial Sequence: Synthetic oligonucleotide
  Sense strand starting at position 2659 of SEQ ID NO: 3900
ugauuaaaccucggguuua

SEQ ID NO: 303557 - RNA, 19 nt, Artificial Sequence
  Description of Artificial Sequence: Synthetic oligonucleotide
  Antisense strand to SEQ ID NO: 303556
uaaacccgagguuuaauca

SEQ ID NO: 303558 - RNA, 19 nt, Artificial Sequence
  Description of Artificial Sequence: Synthetic oligonucleotide
  Sense strand starting at position 2669 of SEQ ID NO: 3900
ucggguuuaaugggcuaua

SEQ ID NO: 303559 - RNA, 19 nt, Artificial Sequence
  Description of Artificial Sequence: Synthetic oligonucleotide
  Antisense strand to SEQ ID NO: 303558
uauagcccauuaaacccga

SEQ ID NO: 303560 - RNA, 19 nt, Artificial Sequence
  Description of Artificial Sequence: Synthetic oligonucleotide
  Sense strand starting at position 2672 of SEQ ID NO: 3900
gguuuaaugggcuauacaa

SEQ ID NO: 303561 - RNA, 19 nt, Artificial Sequence
  Description of Artificial Sequence: Synthetic oligonucleotide
  Antisense strand to SEQ ID NO: 303560
uuguauagcccauuaaacc

SEQ ID NO: 303562 - RNA, 19 nt, Artificial Sequence
  Description of Artificial Sequence: Synthetic oligonucleotide
  Sense strand starting at position 3060 of SEQ ID NO: 3900
gccucugaguucuucucau

SEQ ID NO: 303563 - RNA, 19 nt, Artificial Sequence
  Description of Artificial Sequence: Synthetic oligonucleotide
  Antisense strand to SEQ ID NO: 303562
augagaagaacucagaggc

SEQ ID NO: 303564 - RNA, 19 nt, Artificial Sequence
  Description of Artificial Sequence: Synthetic oligonucleotide
  Sense strand starting at position 3129 of SEQ ID NO: 3900
ccuuccaggcaaugagaaa

SEQ ID NO: 303565 - RNA, 19 nt, Artificial Sequence
  Description of Artificial Sequence: Synthetic oligonucleotide
  Antisense strand to SEQ ID NO: 303564
uuucucauugccuggaagg

SEQ ID NO: 303566 - RNA, 19 nt, Artificial Sequence
  Description of Artificial Sequence: Synthetic oligonucleotide
  Sense strand starting at position 3180 of SEQ ID NO: 3900
ucccaaguuccagaugugu

SEQ ID NO: 303567 - RNA, 19 nt, Artificial Sequence
  Description of Artificial Sequence: Synthetic oligonucleotide
  Antisense strand to SEQ ID NO: 303566
acacaucuggaacuuggga

SEQ ID NO: 303568 - RNA, 19 nt, Artificial Sequence
  Description of Artificial Sequence: Synthetic oligonucleotide
  Sense strand starting at position 3182 of SEQ ID NO: 3900
ccaaguuccagauguguca

SEQ ID NO: 303569 - RNA, 19 nt, Artificial Sequence
  Description of Artificial Sequence: Synthetic oligonucleotide
  Antisense strand to SEQ ID NO: 303568
ugacacaucuggaacuugg

SEQ ID NO: 303570 - RNA, 19 nt, Artificial Sequence
  Description of Artificial Sequence: Synthetic oligonucleotide
  Sense strand starting at position 3191 of SEQ ID NO: 3900
agaugugucagggaagcga

SEQ ID NO: 303571 - RNA, 19 nt, Artificial Sequence
  Description of Artificial Sequence: Synthetic oligonucleotide
  Antisense strand to SEQ ID NO: 303570
ucgcuucccugacacaucu

SEQ ID NO: 303572 - RNA, 19 nt, Artificial Sequence
  Description of Artificial Sequence: Synthetic oligonucleotide
  Sense strand starting at position 3240 of SEQ ID NO: 3900
acagguuccugcucagaca

SEQ ID NO: 303573 - RNA, 19 nt, Artificial Sequence
  Description of Artificial Sequence: Synthetic oligonucleotide
  Antisense strand to SEQ ID NO: 303572
ugucugagcaggaaccugu

SEQ ID NO: 303574 - RNA, 19 nt, Artificial Sequence
  Description of Artificial Sequence: Synthetic oligonucleotide
  Sense strand starting at position 3241 of SEQ ID NO: 3900
cagguuccugcucagacau

SEQ ID NO: 303575 - RNA, 19 nt, Artificial Sequence
  Description of Artificial Sequence: Synthetic oligonucleotide
  Antisense strand to SEQ ID NO: 303574
augucugagcaggaaccug

SEQ ID NO: 303576 - RNA, 19 nt, Artificial Sequence
  Description of Artificial Sequence: Synthetic oligonucleotide
  Sense strand starting at position 3269 of SEQ ID NO: 3900
ggguguuaguauccuggga

SEQ ID NO: 303577 - RNA, 19 nt, Artificial Sequence
  Description of Artificial Sequence: Synthetic oligonucleotide
  Antisense strand to SEQ ID NO: 303576
ucccaggauacuaacaccc

SEQ ID NO: 303578 - RNA, 19 nt, Artificial Sequence
  Description of Artificial Sequence: Synthetic oligonucleotide
  Sense strand starting at position 3273 of SEQ ID NO: 3900
guuaguauccugggagccu

SEQ ID NO: 303579 - RNA, 19 nt, Artificial Sequence
  Description of Artificial Sequence: Synthetic oligonucleotide
  Antisense strand to SEQ ID NO: 303578
aggcucccaggauacuaac

SEQ ID NO: 303580 - RNA, 19 nt, Artificial Sequence
  Description of Artificial Sequence: Synthetic oligonucleotide
  Sense strand starting at position 3399 of SEQ ID NO: 3900
ugagauuccuaccugccau

SEQ ID NO: 303581 - RNA, 19 nt, Artificial Sequence
  Description of Artificial Sequence: Synthetic oligonucleotide
  Antisense strand to SEQ ID NO: 303580
auggcagguaggaaucuca

SEQ ID NO: 303582 - RNA, 19 nt, Artificial Sequence
  Description of Artificial Sequence: Synthetic oligonucleotide
  Sense strand starting at position 3413 of SEQ ID NO: 3900
gccauacugagguauuaug

SEQ ID NO: 303583 - RNA, 19 nt, Artificial Sequence
  Description of Artificial Sequence: Synthetic oligonucleotide
  Antisense strand to SEQ ID NO: 303582
cauaauaccucaguauggc

SEQ ID NO: 303584 - RNA, 19 nt, Artificial Sequence
  Description of Artificial Sequence: Synthetic oligonucleotide
  Sense strand starting at position 3421 of SEQ ID NO: 3900
gagguauuaugauaagaac

SEQ ID NO: 303585 - RNA, 19 nt, Artificial Sequence
  Description of Artificial Sequence: Synthetic oligonucleotide
  Antisense strand to SEQ ID NO: 303584
guucuuaucauaauaccuc

SEQ ID NO: 303586 - RNA, 19 nt, Artificial Sequence
  Description of Artificial Sequence: Synthetic oligonucleotide
  Sense strand starting at position 3481 of SEQ ID NO: 3900
cgaugcauuccuuaggaag

SEQ ID NO: 303587 - RNA, 19 nt, Artificial Sequence
  Description of Artificial Sequence: Synthetic oligonucleotide
  Antisense strand to SEQ ID NO: 303586
cuuccuaaggaaugcaucg

SEQ ID NO: 303588 - RNA, 19 nt, Artificial Sequence
  Description of Artificial Sequence: Synthetic oligonucleotide
  Sense strand starting at position 3536 of SEQ ID NO: 3900
gguucugagaaauagcauu

SEQ ID NO: 303589 - RNA, 19 nt, Artificial Sequence
  Description of Artificial Sequence: Synthetic oligonucleotide
  Antisense strand to SEQ ID NO: 303588
aaugcuauuucucagaacc

SEQ ID NO: 303590 - RNA, 19 nt, Artificial Sequence
  Description of Artificial Sequence: Synthetic oligonucleotide
  Sense strand starting at position 3934 of SEQ ID NO: 3900
uguggaucuguugauguaa

SEQ ID NO: 303591 - RNA, 19 nt, Artificial Sequence
  Description of Artificial Sequence: Synthetic oligonucleotide
  Antisense strand to SEQ ID NO: 303590
uuacaucaacagauccaca

SEQ ID NO: 303592 - RNA, 19 nt, Artificial Sequence
  Description of Artificial Sequence: Synthetic oligonucleotide
  Sense strand starting at position 442 of SEQ ID NO: 3902
cagugaaaccugggaggua

SEQ ID NO: 303593 - RNA, 19 nt, Artificial Sequence
  Description of Artificial Sequence: Synthetic oligonucleotide
  Antisense strand to SEQ ID NO: 303592
uaccucccagguuucacug

SEQ ID NO: 303594 - RNA, 19 nt, Artificial Sequence
  Description of Artificial Sequence: Synthetic oligonucleotide
  Sense strand starting at position 596 of SEQ ID NO: 3902
uggagagaacucugcucuu

SEQ ID NO: 303595 - RNA, 19 nt, Artificial Sequence
  Description of Artificial Sequence: Synthetic oligonucleotide
  Antisense strand to SEQ ID NO: 303594
aagagcagaguucucucca

SEQ ID NO: 303596 - RNA, 19 nt, Artificial Sequence
  Description of Artificial Sequence: Synthetic oligonucleotide
  Sense strand starting at position 599 of SEQ ID NO: 3902
agagaacucugcucuuaug

SEQ ID NO: 303597 - RNA, 19 nt, Artificial Sequence
  Description of Artificial Sequence: Synthetic oligonucleotide
  Antisense strand to SEQ ID NO: 303596
cauaagagcagaguucucu

SEQ ID NO: 303598 - RNA, 19 nt, Artificial Sequence
  Description of Artificial Sequence: Synthetic oligonucleotide
  Sense strand starting at position 626 of SEQ ID NO: 3902
auucuagugguugaguauu

SEQ ID NO: 303599 - RNA, 19 nt, Artificial Sequence
  Description of Artificial Sequence: Synthetic oligonucleotide
  Antisense strand to SEQ ID NO: 303598
aauacucaaccacuagaau

SEQ ID NO: 303600 - RNA, 19 nt, Artificial Sequence
  Description of Artificial Sequence: Synthetic oligonucleotide
  Sense strand starting at position 837 of SEQ ID NO: 3902
agggaaaguuucucugagu

SEQ ID NO: 303601 - RNA, 19 nt, Artificial Sequence
  Description of Artificial Sequence: Synthetic oligonucleotide
  Antisense strand to SEQ ID NO: 303600
acucagagaaacuuucccu

SEQ ID NO: 303602 - RNA, 19 nt, Artificial Sequence
  Description of Artificial Sequence: Synthetic oligonucleotide
  Sense strand starting at position 842 of SEQ ID NO: 3902
aaguuucucugaguuugag

SEQ ID NO: 303603 - RNA, 19 nt, Artificial Sequence
  Description of Artificial Sequence: Synthetic oligonucleotide
  Antisense strand to SEQ ID NO: 303602
cucaaacucagagaaacuu

SEQ ID NO: 303604 - RNA, 19 nt, Artificial Sequence
  Description of Artificial Sequence: Synthetic oligonucleotide
  Sense strand starting at position 848 of SEQ ID NO: 3902
cucugaguuugagcugaga

SEQ ID NO: 303605 - RNA, 19 nt, Artificial Sequence
  Description of Artificial Sequence: Synthetic oligonucleotide
  Antisense strand to SEQ ID NO: 303604
ucucagcucaaacucagag

SEQ ID NO: 303606 - RNA, 19 nt, Artificial Sequence
  Description of Artificial Sequence: Synthetic oligonucleotide
  Sense strand starting at position 910 of SEQ ID NO: 3902
agguuaaauugggcuugga

SEQ ID NO: 303607 - RNA, 19 nt, Artificial Sequence
  Description of Artificial Sequence: Synthetic oligonucleotide
  Antisense strand to SEQ ID NO: 303606
uccaagcccaauuuaaccu

SEQ ID NO: 303608 - RNA, 19 nt, Artificial Sequence
  Description of Artificial Sequence: Synthetic oligonucleotide
  Sense strand starting at position 913 of SEQ ID NO: 3902
uuaaauugggcuuggaaug

SEQ ID NO: 303609 - RNA, 19 nt, Artificial Sequence
  Description of Artificial Sequence: Synthetic oligonucleotide
  Antisense strand to SEQ ID NO: 303608
cauuccaagcccaauuuaa

SEQ ID NO: 303610 - RNA, 19 nt, Artificial Sequence
  Description of Artificial Sequence: Synthetic oligonucleotide
  Sense strand starting at position 1101 of SEQ ID NO: 3902
guugcauacacugggaaga

SEQ ID NO: 303611 - RNA, 19 nt, Artificial Sequence
  Description of Artificial Sequence: Synthetic oligonucleotide
  Antisense strand to SEQ ID NO: 303610
ucuucccaguguaugcaac

SEQ ID NO: 303612 - RNA, 19 nt, Artificial Sequence
  Description of Artificial Sequence: Synthetic oligonucleotide
  Sense strand starting at position 1205 of SEQ ID NO: 3902
agcauuacaguugagaagu

SEQ ID NO: 303613 - RNA, 19 nt, Artificial Sequence
  Description of Artificial Sequence: Synthetic oligonucleotide
  Antisense strand to SEQ ID NO: 303612
acuucucaacuguaaugcu

SEQ ID NO: 303614 - RNA, 19 nt, Artificial Sequence
  Description of Artificial Sequence: Synthetic oligonucleotide
  Sense strand starting at position 1362 of SEQ ID NO: 3902
ucguucgaacaguagauua

SEQ ID NO: 303615 - RNA, 19 nt, Artificial Sequence
  Description of Artificial Sequence: Synthetic oligonucleotide
  Antisense strand to SEQ ID NO: 303614
uaaucuacuguucgaacga

SEQ ID NO: 303616 - RNA, 19 nt, Artificial Sequence
  Description of Artificial Sequence: Synthetic oligonucleotide
  Sense strand starting at position 1364 of SEQ ID NO: 3902
guucgaacaguagauuaau

SEQ ID NO: 303617 - RNA, 19 nt, Artificial Sequence
  Description of Artificial Sequence: Synthetic oligonucleotide
  Antisense strand to SEQ ID NO: 303616
auuaaucuacuguucgaac

SEQ ID NO: 303618 - RNA, 19 nt, Artificial Sequence
  Description of Artificial Sequence: Synthetic oligonucleotide
  Sense strand starting at position 1381 of SEQ ID NO: 3902
augcaaguacuacaagauu

SEQ ID NO: 303619 - RNA, 19 nt, Artificial Sequence
  Description of Artificial Sequence: Synthetic oligonucleotide
  Antisense strand to SEQ ID NO: 303618
aaucuuguaguacuugcau

SEQ ID NO: 303620 - RNA, 19 nt, Artificial Sequence
  Description of Artificial Sequence: Synthetic oligonucleotide
  Sense strand starting at position 1473 of SEQ ID NO: 3902
cgcgcuauuguucuaaaga

SEQ ID NO: 303621 - RNA, 19 nt, Artificial Sequence
  Description of Artificial Sequence: Synthetic oligonucleotide
  Antisense strand to SEQ ID NO: 303620
ucuuuagaacaauagcgcg

SEQ ID NO: 303622 - RNA, 19 nt, Artificial Sequence
  Description of Artificial Sequence: Synthetic oligonucleotide
  Sense strand starting at position 1961 of SEQ ID NO: 3902
cgugguuuccuaaguggug

SEQ ID NO: 303623 - RNA, 19 nt, Artificial Sequence
  Description of Artificial Sequence: Synthetic oligonucleotide
  Antisense strand to SEQ ID NO: 303622
caccacuuaggaaaccacg

SEQ ID NO: 303624 - RNA, 19 nt, Artificial Sequence
  Description of Artificial Sequence: Synthetic oligonucleotide
  Sense strand starting at position 1981 of SEQ ID NO: 3902
cggugauuuguuugcggga

SEQ ID NO: 303625 - RNA, 19 nt, Artificial Sequence
  Description of Artificial Sequence: Synthetic oligonucleotide
  Antisense strand to SEQ ID NO: 303624
ucccgcaaacaaaucaccg

SEQ ID NO: 303626 - RNA, 19 nt, Artificial Sequence
  Description of Artificial Sequence: Synthetic oligonucleotide
  Sense strand starting at position 1982 of SEQ ID NO: 3902
ggugauuuguuugcgggaa

SEQ ID NO: 303627 - RNA, 19 nt, Artificial Sequence
  Description of Artificial Sequence: Synthetic oligonucleotide
  Antisense strand to SEQ ID NO: 303626
uucccgcaaacaaaucacc

SEQ ID NO: 303628 - RNA, 19 nt, Artificial Sequence
  Description of Artificial Sequence: Synthetic oligonucleotide
  Sense strand starting at position 2635 of SEQ ID NO: 3902
gaggaaugcguuuacucuc

SEQ ID NO: 303629 - RNA, 19 nt, Artificial Sequence
  Description of Artificial Sequence: Synthetic oligonucleotide
  Antisense strand to SEQ ID NO: 303628
gagaguaaacgcauuccuc

SEQ ID NO: 303630 - RNA, 19 nt, Artificial Sequence
  Description of Artificial Sequence: Synthetic oligonucleotide
  Sense strand starting at position 2644 of SEQ ID NO: 3902
guuuacucuccaggaccaa

SEQ ID NO: 303631 - RNA, 19 nt, Artificial Sequence
  Description of Artificial Sequence: Synthetic oligonucleotide
  Antisense strand to SEQ ID NO: 303630
uugguccuggagaguaaac

SEQ ID NO: 303632 - RNA, 19 nt, Artificial Sequence
  Description of Artificial Sequence: Synthetic oligonucleotide
  Sense strand starting at position 2694 of SEQ ID NO: 3902
guauuaauauaggcaauuc

SEQ ID NO: 303633 - RNA, 19 nt, Artificial Sequence
  Description of Artificial Sequence: Synthetic oligonucleotide
  Antisense strand to SEQ ID NO: 303632
gaauugccuauauuaauac

SEQ ID NO: 303634 - RNA, 19 nt, Artificial Sequence
  Description of Artificial Sequence: Synthetic oligonucleotide
  Sense strand starting at position 2741 of SEQ ID NO: 3902
aucccacaacuguguaaau

SEQ ID NO: 303635 - RNA, 19 nt, Artificial Sequence
  Description of Artificial Sequence: Synthetic oligonucleotide
  Antisense strand to SEQ ID NO: 303634
auuuacacaguugugggau

SEQ ID NO: 303636 - RNA, 19 nt, Artificial Sequence
  Description of Artificial Sequence: Synthetic oligonucleotide
  Sense strand starting at position 2743 of SEQ ID NO: 3902
cccacaacuguguaaauca

SEQ ID NO: 303637 - RNA, 19 nt, Artificial Sequence
  Description of Artificial Sequence: Synthetic oligonucleotide
  Antisense strand to SEQ ID NO: 303636
ugauuuacacaguuguggg

SEQ ID NO: 303638 - RNA, 19 nt, Artificial Sequence
  Description of Artificial Sequence: Synthetic oligonucleotide
  Sense strand starting at position 2831 of SEQ ID NO: 3902
ugauuugcaucguuugguu

SEQ ID NO: 303639 - RNA, 19 nt, Artificial Sequence
  Description of Artificial Sequence: Synthetic oligonucleotide
  Antisense strand to SEQ ID NO: 303638
aaccaaacgaugcaaauca

SEQ ID NO: 303640 - RNA, 19 nt, Artificial Sequence
  Description of Artificial Sequence: Synthetic oligonucleotide
  Sense strand starting at position 2960 of SEQ ID NO: 3902
ggaagaaugguguggauau

SEQ ID NO: 303641 - RNA, 19 nt, Artificial Sequence
  Description of Artificial Sequence: Synthetic oligonucleotide
  Antisense strand to SEQ ID NO: 303640
auauccacaccauucuucc

SEQ ID NO: 303642 - RNA, 19 nt, Artificial Sequence
  Description of Artificial Sequence: Synthetic oligonucleotide
  Sense strand starting at position 3019 of SEQ ID NO: 3902
agggaaagcgccuggaaau

SEQ ID NO: 303643 - RNA, 19 nt, Artificial Sequence
  Description of Artificial Sequence: Synthetic oligonucleotide
  Antisense strand to SEQ ID NO: 303642
auuuccaggcgcuuucccu

SEQ ID NO: 303644 - RNA, 19 nt, Artificial Sequence
  Description of Artificial Sequence: Synthetic oligonucleotide
  Sense strand starting at position 3060 of SEQ ID NO: 3902
gaaacagcacuuuguaaug

SEQ ID NO: 303645 - RNA, 19 nt, Artificial Sequence
  Description of Artificial Sequence: Synthetic oligonucleotide
  Antisense strand to SEQ ID NO: 303644
cauuacaaagugcuguuuc

SEQ ID NO: 303646 - RNA, 19 nt, Artificial Sequence
  Description of Artificial Sequence: Synthetic oligonucleotide
  Sense strand starting at position 3194 of SEQ ID NO: 3902
acaggaguauagcucuaau

SEQ ID NO: 303647 - RNA, 19 nt, Artificial Sequence
  Description of Artificial Sequence: Synthetic oligonucleotide
  Antisense strand to SEQ ID NO: 303646
auuagagcuauacuccugu

SEQ ID NO: 303648 - RNA, 19 nt, Artificial Sequence
  Description of Artificial Sequence: Synthetic oligonucleotide
  Sense strand starting at position 3197 of SEQ ID NO: 3902
ggaguauagcucuaaucug

SEQ ID NO: 303649 - RNA, 19 nt, Artificial Sequence
  Description of Artificial Sequence: Synthetic oligonucleotide
  Antisense strand to SEQ ID NO: 303648
cagauuagagcuauacucc

SEQ ID NO: 303650 - RNA, 19 nt, Artificial Sequence
  Description of Artificial Sequence: Synthetic oligonucleotide
  Sense strand starting at position 3221 of SEQ ID NO: 3902
cuguguuggcuuuaagaca

SEQ ID NO: 303651 - RNA, 19 nt, Artificial Sequence
  Description of Artificial Sequence: Synthetic oligonucleotide
  Antisense strand to SEQ ID NO: 303650
ugucuuaaagccaacacag

SEQ ID NO: 303652 - RNA, 19 nt, Artificial Sequence
  Description of Artificial Sequence: Synthetic oligonucleotide
  Sense strand starting at position 3380 of SEQ ID NO: 3902
ggagggagucagugugaaa

SEQ ID NO: 303653 - RNA, 19 nt, Artificial Sequence
  Description of Artificial Sequence: Synthetic oligonucleotide
  Antisense strand to SEQ ID NO: 303652
uuucacacugacucccucc

SEQ ID NO: 303654 - RNA, 19 nt, Artificial Sequence
  Description of Artificial Sequence: Synthetic oligonucleotide
  Sense strand starting at position 3454 of SEQ ID NO: 3902
guagccauccguguuagua

SEQ ID NO: 303655 - RNA, 19 nt, Artificial Sequence
  Description of Artificial Sequence: Synthetic oligonucleotide
  Antisense strand to SEQ ID NO: 303654
uacuaacacggauggcuac

SEQ ID NO: 303656 - RNA, 19 nt, Artificial Sequence
  Description of Artificial Sequence: Synthetic oligonucleotide
  Sense strand starting at position 3455 of SEQ ID NO: 3902
uagccauccguguuaguac

SEQ ID NO: 303657 - RNA, 19 nt, Artificial Sequence
  Description of Artificial Sequence: Synthetic oligonucleotide
  Antisense strand to SEQ ID NO: 303656
guacuaacacggauggcua

SEQ ID NO: 303658 - RNA, 19 nt, Artificial Sequence
  Description of Artificial Sequence: Synthetic oligonucleotide
  Sense strand starting at position 3655 of SEQ ID NO: 3902
auauauaggucucugggau

SEQ ID NO: 303659 - RNA, 19 nt, Artificial Sequence
  Description of Artificial Sequence: Synthetic oligonucleotide
  Antisense strand to SEQ ID NO: 303658
aucccagagaccuauauau

SEQ ID NO: 303660 - RNA, 19 nt, Artificial Sequence
  Description of Artificial Sequence: Synthetic oligonucleotide
  Sense strand starting at position 3656 of SEQ ID NO: 3902
uauauaggucucugggauu

SEQ ID NO: 303661 - RNA, 19 nt, Artificial Sequence
  Description of Artificial Sequence: Synthetic oligonucleotide
  Antisense strand to SEQ ID NO: 303660
aaucccagagaccuauaua

SEQ ID NO: 303662 - RNA, 19 nt, Artificial Sequence
  Description of Artificial Sequence: Synthetic oligonucleotide
  Sense strand starting at position 3773 of SEQ ID NO: 3902
guaggccgauuuguaaaua

SEQ ID NO: 303663 - RNA, 19 nt, Artificial Sequence
  Description of Artificial Sequence: Synthetic oligonucleotide
  Antisense strand to SEQ ID NO: 303662
uauuuacaaaucggccuac

SEQ ID NO: 303664 - RNA, 19 nt, Artificial Sequence
  Description of Artificial Sequence: Synthetic oligonucleotide
  Sense strand starting at position 3828 of SEQ ID NO: 3902
agaugugaaauguguacau

SEQ ID NO: 303665 - RNA, 19 nt, Artificial Sequence
  Description of Artificial Sequence: Synthetic oligonucleotide
  Antisense strand to SEQ ID NO: 303664
auguacacauuucacaucu

SEQ ID NO: 303666 - RNA, 19 nt, Artificial Sequence
  Description of Artificial Sequence: Synthetic oligonucleotide
  Sense strand starting at position 3830 of SEQ ID NO: 3902
augugaaauguguacauua

SEQ ID NO: 303667 - RNA, 19 nt, Artificial Sequence
  Description of Artificial Sequence: Synthetic oligonucleotide
  Antisense strand to SEQ ID NO: 303666
uaauguacacauuucacau

SEQ ID NO: 303668 - RNA, 19 nt, Artificial Sequence
  Description of Artificial Sequence: Synthetic oligonucleotide
  Sense strand starting at position 3858 of SEQ ID NO: 3902
ugcugaguuagucaaguaa

SEQ ID NO: 303669 - RNA, 19 nt, Artificial Sequence
  Description of Artificial Sequence: Synthetic oligonucleotide
  Antisense strand to SEQ ID NO: 303668
uuacuugacuaacucagca

SEQ ID NO: 303670 - RNA, 19 nt, Artificial Sequence
  Description of Artificial Sequence: Synthetic oligonucleotide
  Sense strand starting at position 3917 of SEQ ID NO: 3902
agaguacaguuucuaaagu

SEQ ID NO: 303671 - RNA, 19 nt, Artificial Sequence
  Description of Artificial Sequence: Synthetic oligonucleotide
  Antisense strand to SEQ ID NO: 303670
acuuuagaaacuguacucu

SEQ ID NO: 303672 - RNA, 19 nt, Artificial Sequence
  Description of Artificial Sequence: Synthetic oligonucleotide
  Sense strand starting at position 11 of SEQ ID NO: 3901
uggagagaacucugcucuu

SEQ ID NO: 303673 - RNA, 19 nt, Artificial Sequence
  Description of Artificial Sequence: Synthetic oligonucleotide
  Antisense strand to SEQ ID NO: 303672
aagagcagaguucucucca

SEQ ID NO: 303674 - RNA, 19 nt, Artificial Sequence
  Description of Artificial Sequence: Synthetic oligonucleotide
  Sense strand starting at position 14 of SEQ ID NO: 3901
agagaacucugcucuuaug

SEQ ID NO: 303675 - RNA, 19 nt, Artificial Sequence
  Description of Artificial Sequence: Synthetic oligonucleotide
  Antisense strand to SEQ ID NO: 303674
cauaagagcagaguucucu

SEQ ID NO: 303676 - RNA, 19 nt, Artificial Sequence
  Description of Artificial Sequence: Synthetic oligonucleotide
  Sense strand starting at position 41 of SEQ ID NO: 3901
auucuagugguugaguauu

SEQ ID NO: 303677 - RNA, 19 nt, Artificial Sequence
  Description of Artificial Sequence: Synthetic oligonucleotide
  Antisense strand to SEQ ID NO: 303676
aauacucaaccacuagaau

SEQ ID NO: 303678 - RNA, 19 nt, Artificial Sequence
  Description of Artificial Sequence: Synthetic oligonucleotide
  Sense strand starting at position 252 of SEQ ID NO: 3901
agggaaaguuucucugagu

SEQ ID NO: 303679 - RNA, 19 nt, Artificial Sequence
  Description of Artificial Sequence: Synthetic oligonucleotide
  Antisense strand to SEQ ID NO: 303678
acucagagaaacuuucccu

SEQ ID NO: 303680 - RNA, 19 nt, Artificial Sequence
  Description of Artificial Sequence: Synthetic oligonucleotide
  Sense strand starting at position 257 of SEQ ID NO: 3901
aaguuucucugaguuugag

SEQ ID NO: 303681 - RNA, 19 nt, Artificial Sequence
  Description of Artificial Sequence: Synthetic oligonucleotide
  Antisense strand to SEQ ID NO: 303680
cucaaacucagagaaacuu

SEQ ID NO: 303682 - RNA, 19 nt, Artificial Sequence
  Description of Artificial Sequence: Synthetic oligonucleotide
  Sense strand starting at position 325 of SEQ ID NO: 3901
agguuaaauugggcuugga

SEQ ID NO: 303683 - RNA, 19 nt, Artificial Sequence
  Description of Artificial Sequence: Synthetic oligonucleotide
  Antisense strand to SEQ ID NO: 303682
uccaagcccaauuuaaccu

SEQ ID NO: 303684 - RNA, 19 nt, Artificial Sequence
  Description of Artificial Sequence: Synthetic oligonucleotide
  Sense strand starting at position 328 of SEQ ID NO: 3901
uuaaauugggcuuggaaug

SEQ ID NO: 303685 - RNA, 19 nt, Artificial Sequence
  Description of Artificial Sequence: Synthetic oligonucleotide
  Antisense strand to SEQ ID NO: 303684
cauuccaagcccaauuuaa

SEQ ID NO: 303686 - RNA, 19 nt, Artificial Sequence
  Description of Artificial Sequence: Synthetic oligonucleotide
  Sense strand starting at position 516 of SEQ ID NO: 3901
guugcauacacugggaaga

SEQ ID NO: 303687 - RNA, 19 nt, Artificial Sequence
  Description of Artificial Sequence: Synthetic oligonucleotide
  Antisense strand to SEQ ID NO: 303686
ucuucccaguguaugcaac

SEQ ID NO: 303688 - RNA, 19 nt, Artificial Sequence
  Description of Artificial Sequence: Synthetic oligonucleotide
  Sense strand starting at position 620 of SEQ ID NO: 3901
agcauuacaguugagaagu

SEQ ID NO: 303689 - RNA, 19 nt, Artificial Sequence
  Description of Artificial Sequence: Synthetic oligonucleotide
  Antisense strand to SEQ ID NO: 303688
acuucucaacuguaaugcu

SEQ ID NO: 303690 - RNA, 19 nt, Artificial Sequence
  Description of Artificial Sequence: Synthetic oligonucleotide
  Sense strand starting at position 777 of SEQ ID NO: 3901
ucguucgaacaguagauua

SEQ ID NO: 303691 - RNA, 19 nt, Artificial Sequence
  Description of Artificial Sequence: Synthetic oligonucleotide
  Antisense strand to SEQ ID NO: 303690
uaaucuacuguucgaacga

SEQ ID NO: 303692 - RNA, 19 nt, Artificial Sequence
  Description of Artificial Sequence: Synthetic oligonucleotide
  Sense strand starting at position 779 of SEQ ID NO: 3901
guucgaacaguagauuaau

SEQ ID NO: 303693 - RNA, 19 nt, Artificial Sequence
  Description of Artificial Sequence: Synthetic oligonucleotide
  Antisense strand to SEQ ID NO: 303692
auuaaucuacuguucgaac

SEQ ID NO: 303694 - RNA, 19 nt, Artificial Sequence
  Description of Artificial Sequence: Synthetic oligonucleotide
  Sense strand starting at position 796 of SEQ ID NO: 3901
augcaaguacuacaagauu

SEQ ID NO: 303695 - RNA, 19 nt, Artificial Sequence
  Description of Artificial Sequence: Synthetic oligonucleotide
  Antisense strand to SEQ ID NO: 303694
aaucuuguaguacuugcau

SEQ ID NO: 303696 - RNA, 19 nt, Artificial Sequence
  Description of Artificial Sequence: Synthetic oligonucleotide
  Sense strand starting at position 888 of SEQ ID NO: 3901
cgcgcuauuguucuaaaga

SEQ ID NO: 303697 - RNA, 19 nt, Artificial Sequence
  Description of Artificial Sequence: Synthetic oligonucleotide
  Antisense strand to SEQ ID NO: 303696
ucuuuagaacaauagcgcg

SEQ ID NO: 303698 - RNA, 19 nt, Artificial Sequence
  Description of Artificial Sequence: Synthetic oligonucleotide
  Sense strand starting at position 1376 of SEQ ID NO: 3901
cgugguuuccuaaguggug

SEQ ID NO: 303699 - RNA, 19 nt, Artificial Sequence
  Description of Artificial Sequence: Synthetic oligonucleotide
  Antisense strand to SEQ ID NO: 303698
caccacuuaggaaaccacg

SEQ ID NO: 303700 - RNA, 19 nt, Artificial Sequence
  Description of Artificial Sequence: Synthetic oligonucleotide
  Sense strand starting at position 1397 of SEQ ID NO: 3901
ggugauuuguuugcgggaa

SEQ ID NO: 303701 - RNA, 19 nt, Artificial Sequence
  Description of Artificial Sequence: Synthetic oligonucleotide
  Antisense strand to SEQ ID NO: 303700
uucccgcaaacaaaucacc

SEQ ID NO: 303702 - RNA, 19 nt, Artificial Sequence
  Description of Artificial Sequence: Synthetic oligonucleotide
  Sense strand starting at position 2059 of SEQ ID NO: 3901
guuuacucuccaggaccaa

SEQ ID NO: 303703 - RNA, 19 nt, Artificial Sequence
  Description of Artificial Sequence: Synthetic oligonucleotide
  Antisense strand to SEQ ID NO: 303702
uugguccuggagaguaaac

SEQ ID NO: 303704 - RNA, 19 nt, Artificial Sequence
  Description of Artificial Sequence: Synthetic oligonucleotide
  Sense strand starting at position 2109 of SEQ ID NO: 3901
guauuaauauaggcaauuc

SEQ ID NO: 303705 - RNA, 19 nt, Artificial Sequence
  Description of Artificial Sequence: Synthetic oligonucleotide
  Antisense strand to SEQ ID NO: 303704
gaauugccuauauuaauac

SEQ ID NO: 303706 - RNA, 19 nt, Artificial Sequence
  Description of Artificial Sequence: Synthetic oligonucleotide
  Sense strand starting at position 2156 of SEQ ID NO: 3901
aucccacaacuguguaaau

SEQ ID NO: 303707 - RNA, 19 nt, Artificial Sequence
  Description of Artificial Sequence: Synthetic oligonucleotide
  Antisense strand to SEQ ID NO: 303706
auuuacacaguugugggau

SEQ ID NO: 303708 - RNA, 19 nt, Artificial Sequence
  Description of Artificial Sequence: Synthetic oligonucleotide
  Sense strand starting at position 2158 of SEQ ID NO: 3901
cccacaacuguguaaauca

SEQ ID NO: 303709 - RNA, 19 nt, Artificial Sequence
  Description of Artificial Sequence: Synthetic oligonucleotide
  Antisense strand to SEQ ID NO: 303708
ugauuuacacaguuguggg

SEQ ID NO: 303710 - RNA, 19 nt, Artificial Sequence
  Description of Artificial Sequence: Synthetic oligonucleotide
  Sense strand starting at position 2375 of SEQ ID NO: 3901
ggaagaaugguguggauau

SEQ ID NO: 303711 - RNA, 19 nt, Artificial Sequence
  Description of Artificial Sequence: Synthetic oligonucleotide
  Antisense strand to SEQ ID NO: 303710
auauccacaccauucuucc

SEQ ID NO: 303712 - RNA, 19 nt, Artificial Sequence
  Description of Artificial Sequence: Synthetic oligonucleotide
  Sense strand starting at position 2434 of SEQ ID NO: 3901
agggaaagcgccuggaaau

SEQ ID NO: 303713 - RNA, 19 nt, Artificial Sequence
  Description of Artificial Sequence: Synthetic oligonucleotide
  Antisense strand to SEQ ID NO: 303712
auuuccaggcgcuuucccu

SEQ ID NO: 303714 - RNA, 19 nt, Artificial Sequence
  Description of Artificial Sequence: Synthetic oligonucleotide
  Sense strand starting at position 2475 of SEQ ID NO: 3901
gaaacagcacuuuguaaug

SEQ ID NO: 303715 - RNA, 19 nt, Artificial Sequence
  Description of Artificial Sequence: Synthetic oligonucleotide
  Antisense strand to SEQ ID NO: 303714
cauuacaaagugcuguuuc

SEQ ID NO: 303716 - RNA, 19 nt, Artificial Sequence
  Description of Artificial Sequence: Synthetic oligonucleotide
  Sense strand starting at position 2609 of SEQ ID NO: 3901
acaggaguauagcucuaau

SEQ ID NO: 303717 - RNA, 19 nt, Artificial Sequence
  Description of Artificial Sequence: Synthetic oligonucleotide
  Antisense strand to SEQ ID NO: 303716
auuagagcuauacuccugu

SEQ ID NO: 303718 - RNA, 19 nt, Artificial Sequence
  Description of Artificial Sequence: Synthetic oligonucleotide
  Sense strand starting at position 2612 of SEQ ID NO: 3901
ggaguauagcucuaaucug

SEQ ID NO: 303719 - RNA, 19 nt, Artificial Sequence
  Description of Artificial Sequence: Synthetic oligonucleotide
  Antisense strand to SEQ ID NO: 303718
cagauuagagcuauacucc

SEQ ID NO: 303720 - RNA, 19 nt, Artificial Sequence
  Description of Artificial Sequence: Synthetic oligonucleotide
  Sense strand starting at position 2795 of SEQ ID NO: 3901
ggagggagucagugugaaa

SEQ ID NO: 303721 - RNA, 19 nt, Artificial Sequence
  Description of Artificial Sequence: Synthetic oligonucleotide
  Antisense strand to SEQ ID NO: 303720
uuucacacugacucccucc

SEQ ID NO: 303722 - RNA, 19 nt, Artificial Sequence
  Description of Artificial Sequence: Synthetic oligonucleotide
  Sense strand starting at position 2869 of SEQ ID NO: 3901
guagccauccguguuagua

SEQ ID NO: 303723 - RNA, 19 nt, Artificial Sequence
  Description of Artificial Sequence: Synthetic oligonucleotide
  Antisense strand to SEQ ID NO: 303722
uacuaacacggauggcuac

SEQ ID NO: 303724 - RNA, 19 nt, Artificial Sequence
  Description of Artificial Sequence: Synthetic oligonucleotide
  Sense strand starting at position 2870 of SEQ ID NO: 3901
uagccauccguguuaguac

SEQ ID NO: 303725 - RNA, 19 nt, Artificial Sequence
  Description of Artificial Sequence: Synthetic oligonucleotide
  Antisense strand to SEQ ID NO: 303724
guacuaacacggauggcua

SEQ ID NO: 303726 - RNA, 19 nt, Artificial Sequence
  Description of Artificial Sequence: Synthetic oligonucleotide
  Sense strand starting at position 3070 of SEQ ID NO: 3901
auauauaggucucugggau

SEQ ID NO: 303727 - RNA, 19 nt, Artificial Sequence
  Description of Artificial Sequence: Synthetic oligonucleotide
  Antisense strand to SEQ ID NO: 303726
aucccagagaccuauauau

SEQ ID NO: 303728 - RNA, 19 nt, Artificial Sequence
  Description of Artificial Sequence: Synthetic oligonucleotide
  Sense strand starting at position 3071 of SEQ ID NO: 3901
uauauaggucucugggauu

SEQ ID NO: 303729 - RNA, 19 nt, Artificial Sequence
  Description of Artificial Sequence: Synthetic oligonucleotide
  Antisense strand to SEQ ID NO: 303728
aaucccagagaccuauaua

SEQ ID NO: 303730 - RNA, 19 nt, Artificial Sequence
  Description of Artificial Sequence: Synthetic oligonucleotide
  Sense strand starting at position 3188 of SEQ ID NO: 3901
guaggccgauuuguaaaua

SEQ ID NO: 303731 - RNA, 19 nt, Artificial Sequence
  Description of Artificial Sequence: Synthetic oligonucleotide
  Antisense strand to SEQ ID NO: 303730
uauuuacaaaucggccuac

SEQ ID NO: 303732 - RNA, 19 nt, Artificial Sequence
  Description of Artificial Sequence: Synthetic oligonucleotide
  Sense strand starting at position 3243 of SEQ ID NO: 3901
agaugugaaauguguacau

SEQ ID NO: 303733 - RNA, 19 nt, Artificial Sequence
  Description of Artificial Sequence: Synthetic oligonucleotide
  Antisense strand to SEQ ID NO: 303732
auguacacauuucacaucu

SEQ ID NO: 303734 - RNA, 19 nt, Artificial Sequence
  Description of Artificial Sequence: Synthetic oligonucleotide
  Sense strand starting at position 3245 of SEQ ID NO: 3901
augugaaauguguacauua

SEQ ID NO: 303735 - RNA, 19 nt, Artificial Sequence
  Description of Artificial Sequence: Synthetic oligonucleotide
  Antisense strand to SEQ ID NO: 303734
uaauguacacauuucacau

SEQ ID NO: 303736 - RNA, 19 nt, Artificial Sequence
  Description of Artificial Sequence: Synthetic oligonucleotide
  Sense strand starting at position 3332 of SEQ ID NO: 3901
agaguacaguuucuaaagu

SEQ ID NO: 303737 - RNA, 19 nt, Artificial Sequence
  Description of Artificial Sequence: Synthetic oligonucleotide
  Antisense strand to SEQ ID NO: 303736
acuuuagaaacuguacucu

SEQ ID NO: 303738 - RNA, 19 nt, Artificial Sequence
  Description of Artificial Sequence: Synthetic oligonucleotide
  Sense strand starting at position 3405 of SEQ ID NO: 3901
augugaaaucugcgaaagg

SEQ ID NO: 303739 - RNA, 19 nt, Artificial Sequence
  Description of Artificial Sequence: Synthetic oligonucleotide
  Antisense strand to SEQ ID NO: 303738
ccuuucgcagauuucacau

SEQ ID NO: 303740 - RNA, 19 nt, Artificial Sequence
  Description of Artificial Sequence: Synthetic oligonucleotide
  Sense strand starting at position 3421 of SEQ ID NO: 3901
agguucucauacucaguga

SEQ ID NO: 303741 - RNA, 19 nt, Artificial Sequence
  Description of Artificial Sequence: Synthetic oligonucleotide
  Antisense strand to SEQ ID NO: 303740
ucacugaguaugagaaccu

SEQ ID NO: 303742 - RNA, 19 nt, Artificial Sequence
  Description of Artificial Sequence: Synthetic oligonucleotide
  Sense strand starting at position 3425 of SEQ ID NO: 3901
ucucauacucagugacuua

SEQ ID NO: 303743 - RNA, 19 nt, Artificial Sequence
  Description of Artificial Sequence: Synthetic oligonucleotide
  Antisense strand to SEQ ID NO: 303742
uaagucacugaguaugaga

SEQ ID NO: 303744 - RNA, 19 nt, Artificial Sequence
  Description of Artificial Sequence: Synthetic oligonucleotide
  Sense strand starting at position 3625 of SEQ ID NO: 3901
uauggaucgcuguaucaag

SEQ ID NO: 303745 - RNA, 19 nt, Artificial Sequence
  Description of Artificial Sequence: Synthetic oligonucleotide
  Antisense strand to SEQ ID NO: 303744
cuugauacagcgauccaua

SEQ ID NO: 303746 - RNA, 19 nt, Artificial Sequence
  Description of Artificial Sequence: Synthetic oligonucleotide
  Sense strand starting at position 3672 of SEQ ID NO: 3901
caagaagucucauugagac

SEQ ID NO: 303747 - RNA, 19 nt, Artificial Sequence
  Description of Artificial Sequence: Synthetic oligonucleotide
  Antisense strand to SEQ ID NO: 303746
gucucaaugagacuucuug

SEQ ID NO: 303748 - RNA, 19 nt, Artificial Sequence
  Description of Artificial Sequence: Synthetic oligonucleotide
  Sense strand starting at position 3699 of SEQ ID NO: 3901
ugaggaaauccauguugcu

SEQ ID NO: 303749 - RNA, 19 nt, Artificial Sequence
  Description of Artificial Sequence: Synthetic oligonucleotide
  Antisense strand to SEQ ID NO: 303748
agcaacauggauuuccuca

SEQ ID NO: 303750 - RNA, 19 nt, Artificial Sequence
  Description of Artificial Sequence: Synthetic oligonucleotide
  Sense strand starting at position 3745 of SEQ ID NO: 3901
uucuguauggcagacaaca

SEQ ID NO: 303751 - RNA, 19 nt, Artificial Sequence
  Description of Artificial Sequence: Synthetic oligonucleotide
  Antisense strand to SEQ ID NO: 303750
uguugucugccauacagaa

SEQ ID NO: 303752 - RNA, 19 nt, Artificial Sequence
  Description of Artificial Sequence: Synthetic oligonucleotide
  Sense strand starting at position 37 of SEQ ID NO: 3903
gcccaaugucagggaguuu

SEQ ID NO: 303753 - RNA, 19 nt, Artificial Sequence
  Description of Artificial Sequence: Synthetic oligonucleotide
  Antisense strand to SEQ ID NO: 303752
aaacucccugacauugggc

SEQ ID NO: 303754 - RNA, 19 nt, Artificial Sequence
  Description of Artificial Sequence: Synthetic oligonucleotide
  Sense strand starting at position 38 of SEQ ID NO: 3903
cccaaugucagggaguuua

SEQ ID NO: 303755 - RNA, 19 nt, Artificial Sequence
  Description of Artificial Sequence: Synthetic oligonucleotide
  Antisense strand to SEQ ID NO: 303754
uaaacucccugacauuggg

SEQ ID NO: 303756 - RNA, 19 nt, Artificial Sequence
  Description of Artificial Sequence: Synthetic oligonucleotide
  Sense strand starting at position 48 of SEQ ID NO: 3903
gggaguuuauaacuggcau

SEQ ID NO: 303757 - RNA, 19 nt, Artificial Sequence
  Description of Artificial Sequence: Synthetic oligonucleotide
  Antisense strand to SEQ ID NO: 303756
augccaguuauaaacuccc

SEQ ID NO: 303758 - RNA, 19 nt, Artificial Sequence
  Description of Artificial Sequence: Synthetic oligonucleotide
  Sense strand starting at position 367 of SEQ ID NO: 3903
gggucuagucuccaggcau

SEQ ID NO: 303759 - RNA, 19 nt, Artificial Sequence
  Description of Artificial Sequence: Synthetic oligonucleotide
  Antisense strand to SEQ ID NO: 303758
augccuggagacuagaccc

SEQ ID NO: 303760 - RNA, 19 nt, Artificial Sequence
  Description of Artificial Sequence: Synthetic oligonucleotide
  Sense strand starting at position 408 of SEQ ID NO: 3903
ggacuugugagcgguggaa

SEQ ID NO: 303761 - RNA, 19 nt, Artificial Sequence
  Description of Artificial Sequence: Synthetic oligonucleotide
  Antisense strand to SEQ ID NO: 303760
uuccaccgcucacaagucc

SEQ ID NO: 303762 - RNA, 19 nt, Artificial Sequence
  Description of Artificial Sequence: Synthetic oligonucleotide
  Sense strand starting at position 410 of SEQ ID NO: 3903
acuugugagcgguggaaga

SEQ ID NO: 303763 - RNA, 19 nt, Artificial Sequence
  Description of Artificial Sequence: Synthetic oligonucleotide
  Antisense strand to SEQ ID NO: 303762
ucuuccaccgcucacaagu

SEQ ID NO: 303764 - RNA, 19 nt, Artificial Sequence
  Description of Artificial Sequence: Synthetic oligonucleotide
  Sense strand starting at position 508 of SEQ ID NO: 3903
ggccucagcucuccuuaga

SEQ ID NO: 303765 - RNA, 19 nt, Artificial Sequence
  Description of Artificial Sequence: Synthetic oligonucleotide
  Antisense strand to SEQ ID NO: 303764
ucuaaggagagcugaggcc

SEQ ID NO: 303766 - RNA, 19 nt, Artificial Sequence
  Description of Artificial Sequence: Synthetic oligonucleotide
  Sense strand starting at position 546 of SEQ ID NO: 3903
cguggaagcucuguuuaac

SEQ ID NO: 303767 - RNA, 19 nt, Artificial Sequence
  Description of Artificial Sequence: Synthetic oligonucleotide
  Antisense strand to SEQ ID NO: 303766
guuaaacagagcuuccacg

SEQ ID NO: 303768 - RNA, 19 nt, Artificial Sequence
  Description of Artificial Sequence: Synthetic oligonucleotide
  Sense strand starting at position 549 of SEQ ID NO: 3903
ggaagcucuguuuaacaga

SEQ ID NO: 303769 - RNA, 19 nt, Artificial Sequence
  Description of Artificial Sequence: Synthetic oligonucleotide
  Antisense strand to SEQ ID NO: 303768
ucuguuaaacagagcuucc

SEQ ID NO: 303770 - RNA, 19 nt, Artificial Sequence
  Description of Artificial Sequence: Synthetic oligonucleotide
  Sense strand starting at position 603 of SEQ ID NO: 3903
agcagacaucucuggaagu

SEQ ID NO: 303771 - RNA, 19 nt, Artificial Sequence
  Description of Artificial Sequence: Synthetic oligonucleotide
  Antisense strand to SEQ ID NO: 303770
acuuccagagaugucugcu

SEQ ID NO: 303772 - RNA, 19 nt, Artificial Sequence
  Description of Artificial Sequence: Synthetic oligonucleotide
  Sense strand starting at position 1262 of SEQ ID NO: 3903
ggguguuugaauuguaaag

SEQ ID NO: 303773 - RNA, 19 nt, Artificial Sequence
  Description of Artificial Sequence: Synthetic oligonucleotide
  Antisense strand to SEQ ID NO: 303772
cuuuacaauucaaacaccc

SEQ ID NO: 303774 - RNA, 19 nt, Artificial Sequence
  Description of Artificial Sequence: Synthetic oligonucleotide
  Sense strand starting at position 1274 of SEQ ID NO: 3903
uguaaagaucuaggcugaa

SEQ ID NO: 303775 - RNA, 19 nt, Artificial Sequence
  Description of Artificial Sequence: Synthetic oligonucleotide
  Antisense strand to SEQ ID NO: 303774
uucagccuagaucuuuaca

SEQ ID NO: 303776 - RNA, 19 nt, Artificial Sequence
  Description of Artificial Sequence: Synthetic oligonucleotide
  Sense strand starting at position 1287 of SEQ ID NO: 3903
gcugaauucuuauuagaag

SEQ ID NO: 303777 - RNA, 19 nt, Artificial Sequence
  Description of Artificial Sequence: Synthetic oligonucleotide
  Antisense strand to SEQ ID NO: 303776
cuucuaauaagaauucagc

SEQ ID NO: 303778 - RNA, 19 nt, Artificial Sequence
  Description of Artificial Sequence: Synthetic oligonucleotide
  Sense strand starting at position 1306 of SEQ ID NO: 3903
ugcucuuaccgggaguugu

SEQ ID NO: 303779 - RNA, 19 nt, Artificial Sequence
  Description of Artificial Sequence: Synthetic oligonucleotide
  Antisense strand to SEQ ID NO: 303778
acaacucccgguaagagca

SEQ ID NO: 303780 - RNA, 19 nt, Artificial Sequence
  Description of Artificial Sequence: Synthetic oligonucleotide
  Sense strand starting at position 1362 of SEQ ID NO: 3903
aaguaauagugcccuaaag

SEQ ID NO: 303781 - RNA, 19 nt, Artificial Sequence
  Description of Artificial Sequence: Synthetic oligonucleotide
  Antisense strand to SEQ ID NO: 303780
cuuuagggcacuauuacuu

SEQ ID NO: 303782 - RNA, 19 nt, Artificial Sequence
  Description of Artificial Sequence: Synthetic oligonucleotide
  Sense strand starting at position 1364 of SEQ ID NO: 3903
guaauagugcccuaaaguu

SEQ ID NO: 303783 - RNA, 19 nt, Artificial Sequence
  Description of Artificial Sequence: Synthetic oligonucleotide
  Antisense strand to SEQ ID NO: 303782
aacuuuagggcacuauuac

SEQ ID NO: 303784 - RNA, 19 nt, Artificial Sequence
  Description of Artificial Sequence: Synthetic oligonucleotide
  Sense strand starting at position 1746 of SEQ ID NO: 3903
guacaugucaccugauguu

SEQ ID NO: 303785 - RNA, 19 nt, Artificial Sequence
  Description of Artificial Sequence: Synthetic oligonucleotide
  Antisense strand to SEQ ID NO: 303784
aacaucaggugacauguac

SEQ ID NO: 303786 - RNA, 19 nt, Artificial Sequence
  Description of Artificial Sequence: Synthetic oligonucleotide
  Sense strand starting at position 1788 of SEQ ID NO: 3903
aagcauguguuccuacagu

SEQ ID NO: 303787 - RNA, 19 nt, Artificial Sequence
  Description of Artificial Sequence: Synthetic oligonucleotide
  Antisense strand to SEQ ID NO: 303786
acuguaggaacacaugcuu

SEQ ID NO: 303788 - RNA, 19 nt, Artificial Sequence
  Description of Artificial Sequence: Synthetic oligonucleotide
  Sense strand starting at position 2136 of SEQ ID NO: 3903
gugugacaccuuugaggua

SEQ ID NO: 303789 - RNA, 19 nt, Artificial Sequence
  Description of Artificial Sequence: Synthetic oligonucleotide
  Antisense strand to SEQ ID NO: 303788
uaccucaaaggugucacac

SEQ ID NO: 303790 - RNA, 19 nt, Artificial Sequence
  Description of Artificial Sequence: Synthetic oligonucleotide
  Sense strand starting at position 2189 of SEQ ID NO: 3903
cuuugcugcccauaaggau

SEQ ID NO: 303791 - RNA, 19 nt, Artificial Sequence
  Description of Artificial Sequence: Synthetic oligonucleotide
  Antisense strand to SEQ ID NO: 303790
auccuuaugggcagcaaag

SEQ ID NO: 303792 - RNA, 19 nt, Artificial Sequence
  Description of Artificial Sequence: Synthetic oligonucleotide
  Sense strand starting at position 2198 of SEQ ID NO: 3903
ccauaaggauggcuuugaa

SEQ ID NO: 303793 - RNA, 19 nt, Artificial Sequence
  Description of Artificial Sequence: Synthetic oligonucleotide
  Antisense strand to SEQ ID NO: 303792
uucaaagccauccuuaugg

SEQ ID NO: 303794 - RNA, 19 nt, Artificial Sequence
  Description of Artificial Sequence: Synthetic oligonucleotide
  Sense strand starting at position 2287 of SEQ ID NO: 3903
aaugaagauuguguuggaa

SEQ ID NO: 303795 - RNA, 19 nt, Artificial Sequence
  Description of Artificial Sequence: Synthetic oligonucleotide
  Antisense strand to SEQ ID NO: 303794
uuccaacacaaucuucauu

SEQ ID NO: 303796 - RNA, 19 nt, Artificial Sequence
  Description of Artificial Sequence: Synthetic oligonucleotide
  Sense strand starting at position 2290 of SEQ ID NO: 3903
gaagauuguguuggaaaug

SEQ ID NO: 303797 - RNA, 19 nt, Artificial Sequence
  Description of Artificial Sequence: Synthetic oligonucleotide
  Antisense strand to SEQ ID NO: 303796
cauuuccaacacaaucuuc

SEQ ID NO: 303798 - RNA, 19 nt, Artificial Sequence
  Description of Artificial Sequence: Synthetic oligonucleotide
  Sense strand starting at position 2295 of SEQ ID NO: 3903
uuguguuggaaaugaguca

SEQ ID NO: 303799 - RNA, 19 nt, Artificial Sequence
  Description of Artificial Sequence: Synthetic oligonucleotide
  Antisense strand to SEQ ID NO: 303798
ugacucauuuccaacacaa

SEQ ID NO: 303800 - RNA, 19 nt, Artificial Sequence
  Description of Artificial Sequence: Synthetic oligonucleotide
  Sense strand starting at position 2327 of SEQ ID NO: 3903
ccuguuaugggcuaaacca

SEQ ID NO: 303801 - RNA, 19 nt, Artificial Sequence
  Description of Artificial Sequence: Synthetic oligonucleotide
  Antisense strand to SEQ ID NO: 303800
ugguuuagcccauaacagg

SEQ ID NO: 303802 - RNA, 19 nt, Artificial Sequence
  Description of Artificial Sequence: Synthetic oligonucleotide
  Sense strand starting at position 2451 of SEQ ID NO: 3903
aagugaaagugagaucauu

SEQ ID NO: 303803 - RNA, 19 nt, Artificial Sequence
  Description of Artificial Sequence: Synthetic oligonucleotide
  Antisense strand to SEQ ID NO: 303802
aaugaucucacuuucacuu

SEQ ID NO: 303804 - RNA, 19 nt, Artificial Sequence
  Description of Artificial Sequence: Synthetic oligonucleotide
  Sense strand starting at position 2462 of SEQ ID NO: 3903
agaucauuagggugggauc

SEQ ID NO: 303805 - RNA, 19 nt, Artificial Sequence
  Description of Artificial Sequence: Synthetic oligonucleotide
  Antisense strand to SEQ ID NO: 303804
gaucccacccuaaugaucu

SEQ ID NO: 303806 - RNA, 19 nt, Artificial Sequence
  Description of Artificial Sequence: Synthetic oligonucleotide
  Sense strand starting at position 2509 of SEQ ID NO: 3903
agaagaugaugaugugaag

SEQ ID NO: 303807 - RNA, 19 nt, Artificial Sequence
  Description of Artificial Sequence: Synthetic oligonucleotide
  Antisense strand to SEQ ID NO: 303806
cuucacaucaucaucuucu

SEQ ID NO: 303808 - RNA, 19 nt, Artificial Sequence
  Description of Artificial Sequence: Synthetic oligonucleotide
  Sense strand starting at position 2556 of SEQ ID NO: 3903
caaggagaccggcauugua

SEQ ID NO: 303809 - RNA, 19 nt, Artificial Sequence
  Description of Artificial Sequence: Synthetic oligonucleotide
  Antisense strand to SEQ ID NO: 303808
uacaaugccggucuccuug

SEQ ID NO: 303810 - RNA, 19 nt, Artificial Sequence
  Description of Artificial Sequence: Synthetic oligonucleotide
  Sense strand starting at position 2559 of SEQ ID NO: 3903
ggagaccggcauuguauua

SEQ ID NO: 303811 - RNA, 19 nt, Artificial Sequence
  Description of Artificial Sequence: Synthetic oligonucleotide
  Antisense strand to SEQ ID NO: 303810
uaauacaaugccggucucc

SEQ ID NO: 303812 - RNA, 19 nt, Artificial Sequence
  Description of Artificial Sequence: Synthetic oligonucleotide
  Sense strand starting at position 2614 of SEQ ID NO: 3903
acagaauuggcucaugcaa

SEQ ID NO: 303813 - RNA, 19 nt, Artificial Sequence
  Description of Artificial Sequence: Synthetic oligonucleotide
  Antisense strand to SEQ ID NO: 303812
uugcaugagccaauucugu

SEQ ID NO: 303814 - RNA, 19 nt, Artificial Sequence
  Description of Artificial Sequence: Synthetic oligonucleotide
  Sense strand starting at position 2682 of SEQ ID NO: 3903
cuggaaagcgggugguaua

SEQ ID NO: 303815 - RNA, 19 nt, Artificial Sequence
  Description of Artificial Sequence: Synthetic oligonucleotide
  Antisense strand to SEQ ID NO: 303814
uauaccacccgcuuuccag

SEQ ID NO: 303816 - RNA, 19 nt, Artificial Sequence
  Description of Artificial Sequence: Synthetic oligonucleotide
  Sense strand starting at position 2779 of SEQ ID NO: 3903
gacggaucaccucauguag

SEQ ID NO: 303817 - RNA, 19 nt, Artificial Sequence
  Description of Artificial Sequence: Synthetic oligonucleotide
  Antisense strand to SEQ ID NO: 303816
cuacaugaggugauccguc

SEQ ID NO: 303818 - RNA, 19 nt, Artificial Sequence
  Description of Artificial Sequence: Synthetic oligonucleotide
  Sense strand starting at position 2992 of SEQ ID NO: 3903
cacugacgucaacauguaa

SEQ ID NO: 303819 - RNA, 19 nt, Artificial Sequence
  Description of Artificial Sequence: Synthetic oligonucleotide
  Antisense strand to SEQ ID NO: 303818
uuacauguugacgucagug

SEQ ID NO: 303820 - RNA, 19 nt, Artificial Sequence
  Description of Artificial Sequence: Synthetic oligonucleotide
  Sense strand starting at position 3275 of SEQ ID NO: 3903
caucuuugguaguugaaag

SEQ ID NO: 303821 - RNA, 19 nt, Artificial Sequence
  Description of Artificial Sequence: Synthetic oligonucleotide
  Antisense strand to SEQ ID NO: 303820
cuuucaacuaccaaagaug

SEQ ID NO: 303822 - RNA, 19 nt, Artificial Sequence
  Description of Artificial Sequence: Synthetic oligonucleotide
  Sense strand starting at position 3282 of SEQ ID NO: 3903
gguaguugaaagcaggauu

SEQ ID NO: 303823 - RNA, 19 nt, Artificial Sequence
  Description of Artificial Sequence: Synthetic oligonucleotide
  Antisense strand to SEQ ID NO: 303822
aauccugcuuucaacuacc

SEQ ID NO: 303824 - RNA, 19 nt, Artificial Sequence
  Description of Artificial Sequence: Synthetic oligonucleotide
  Sense strand starting at position 3354 of SEQ ID NO: 3903
cggcugugugaucaaggga

SEQ ID NO: 303825 - RNA, 19 nt, Artificial Sequence
  Description of Artificial Sequence: Synthetic oligonucleotide
  Antisense strand to SEQ ID NO: 303824
ucccuugaucacacagccg

SEQ ID NO: 303826 - RNA, 19 nt, Artificial Sequence
  Description of Artificial Sequence: Synthetic oligonucleotide
  Sense strand starting at position 3383 of SEQ ID NO: 3903
auuuguaaaugggauaaag

SEQ ID NO: 303827 - RNA, 19 nt, Artificial Sequence
  Description of Artificial Sequence: Synthetic oligonucleotide
  Antisense strand to SEQ ID NO: 303826
cuuuaucccauuuacaaau

SEQ ID NO: 303828 - RNA, 19 nt, Artificial Sequence
  Description of Artificial Sequence: Synthetic oligonucleotide
  Sense strand starting at position 3479 of SEQ ID NO: 3903
uaggaauagcugcagucua

SEQ ID NO: 303829 - RNA, 19 nt, Artificial Sequence
  Description of Artificial Sequence: Synthetic oligonucleotide
  Antisense strand to SEQ ID NO: 303828
uagacugcagcuauuccua

SEQ ID NO: 303830 - RNA, 19 nt, Artificial Sequence
  Description of Artificial Sequence: Synthetic oligonucleotide
  Sense strand starting at position 3771 of SEQ ID NO: 3903
gagauuauagccuguuccu

SEQ ID NO: 303831 - RNA, 19 nt, Artificial Sequence
  Description of Artificial Sequence: Synthetic oligonucleotide
  Antisense strand to SEQ ID NO: 303830
aggaacaggcuauaaucuc

SEQ ID NO: 303832 - RNA, 19 nt, Artificial Sequence
  Description of Artificial Sequence: Synthetic oligonucleotide
  Sense strand starting at position 64 of SEQ ID NO: 3904
ggacaagugugcaguggaa

SEQ ID NO: 303833 - RNA, 19 nt, Artificial Sequence
  Description of Artificial Sequence: Synthetic oligonucleotide
  Antisense strand to SEQ ID NO: 303832
uuccacugcacacuugucc

SEQ ID NO: 303834 - RNA, 19 nt, Artificial Sequence
  Description of Artificial Sequence: Synthetic oligonucleotide
  Sense strand starting at position 154 of SEQ ID NO: 3904
cuuaaaucucucuggagcu

SEQ ID NO: 303835 - RNA, 19 nt, Artificial Sequence
  Description of Artificial Sequence: Synthetic oligonucleotide
  Antisense strand to SEQ ID NO: 303834
agcuccagagagauuuaag

SEQ ID NO: 303836 - RNA, 19 nt, Artificial Sequence
  Description of Artificial Sequence: Synthetic oligonucleotide
  Sense strand starting at position 221 of SEQ ID NO: 3904
uugcaugauuucuagugac

SEQ ID NO: 303837 - RNA, 19 nt, Artificial Sequence
  Description of Artificial Sequence: Synthetic oligonucleotide
  Antisense strand to SEQ ID NO: 303836
gucacuagaaaucaugcaa

SEQ ID NO: 303838 - RNA, 19 nt, Artificial Sequence
  Description of Artificial Sequence: Synthetic oligonucleotide
  Sense strand starting at position 272 of SEQ ID NO: 3904
uacugaguccaaugucaug

SEQ ID NO: 303839 - RNA, 19 nt, Artificial Sequence
  Description of Artificial Sequence: Synthetic oligonucleotide
  Antisense strand to SEQ ID NO: 303838
caugacauuggacucagua

SEQ ID NO: 303840 - RNA, 19 nt, Artificial Sequence
  Description of Artificial Sequence: Synthetic oligonucleotide
  Sense strand starting at position 457 of SEQ ID NO: 3904
cgucaacauccuggaaguu

SEQ ID NO: 303841 - RNA, 19 nt, Artificial Sequence
  Description of Artificial Sequence: Synthetic oligonucleotide
  Antisense strand to SEQ ID NO: 303840
aacuuccaggauguugacg

SEQ ID NO: 303842 - RNA, 19 nt, Artificial Sequence
  Description of Artificial Sequence: Synthetic oligonucleotide
  Sense strand starting at position 960 of SEQ ID NO: 3904
gguuucucccguuagguaa

SEQ ID NO: 303843 - RNA, 19 nt, Artificial Sequence
  Description of Artificial Sequence: Synthetic oligonucleotide
  Antisense strand to SEQ ID NO: 303842
uuaccuaacgggagaaacc

SEQ ID NO: 303844 - RNA, 19 nt, Artificial Sequence
  Description of Artificial Sequence: Synthetic oligonucleotide
  Sense strand starting at position 1022 of SEQ ID NO: 3904
uuugaaucuugauucuguu

SEQ ID NO: 303845 - RNA, 19 nt, Artificial Sequence
  Description of Artificial Sequence: Synthetic oligonucleotide
  Antisense strand to SEQ ID NO: 303844
aacagaaucaagauucaaa

SEQ ID NO: 303846 - RNA, 19 nt, Artificial Sequence
  Description of Artificial Sequence: Synthetic oligonucleotide
  Sense strand starting at position 1078 of SEQ ID NO: 3904
ucgguuaccucaucuauac

SEQ ID NO: 303847 - RNA, 19 nt, Artificial Sequence
  Description of Artificial Sequence: Synthetic oligonucleotide
  Antisense strand to SEQ ID NO: 303846
guauagaugagguaaccga

SEQ ID NO: 303848 - RNA, 19 nt, Artificial Sequence
  Description of Artificial Sequence: Synthetic oligonucleotide
  Sense strand starting at position 1130 of SEQ ID NO: 3904
guggcugagcguuuguaca

SEQ ID NO: 303849 - RNA, 19 nt, Artificial Sequence
  Description of Artificial Sequence: Synthetic oligonucleotide
  Antisense strand to SEQ ID NO: 303848
uguacaaacgcucagccac

SEQ ID NO: 303850 - RNA, 19 nt, Artificial Sequence
  Description of Artificial Sequence: Synthetic oligonucleotide
  Sense strand starting at position 1163 of SEQ ID NO: 3904
cucucuaauccuggagaca

SEQ ID NO: 303851 - RNA, 19 nt, Artificial Sequence
  Description of Artificial Sequence: Synthetic oligonucleotide
  Antisense strand to SEQ ID NO: 303850
ugucuccaggauuagagag

SEQ ID NO: 303852 - RNA, 19 nt, Artificial Sequence
  Description of Artificial Sequence: Synthetic oligonucleotide
  Sense strand starting at position 1300 of SEQ ID NO: 3904
aggaauguguagguucuua

SEQ ID NO: 303853 - RNA, 19 nt, Artificial Sequence
  Description of Artificial Sequence: Synthetic oligonucleotide
  Antisense strand to SEQ ID NO: 303852
uaagaaccuacacauuccu

SEQ ID NO: 303854 - RNA, 19 nt, Artificial Sequence
  Description of Artificial Sequence: Synthetic oligonucleotide
  Sense strand starting at position 1304 of SEQ ID NO: 3904
auguguagguucuuagcca

SEQ ID NO: 303855 - RNA, 19 nt, Artificial Sequence
  Description of Artificial Sequence: Synthetic oligonucleotide
  Antisense strand to SEQ ID NO: 303854
uggcuaagaaccuacacau

SEQ ID NO: 303856 - RNA, 19 nt, Artificial Sequence
  Description of Artificial Sequence: Synthetic oligonucleotide
  Sense strand starting at position 1308 of SEQ ID NO: 3904
guagguucuuagccaacau

SEQ ID NO: 303857 - RNA, 19 nt, Artificial Sequence
  Description of Artificial Sequence: Synthetic oligonucleotide
  Antisense strand to SEQ ID NO: 303856
auguuggcuaagaaccuac

SEQ ID NO: 303858 - RNA, 19 nt, Artificial Sequence
  Description of Artificial Sequence: Synthetic oligonucleotide
  Sense strand starting at position 1351 of SEQ ID NO: 3904
gaagccaaaucuucggaga

SEQ ID NO: 303859 - RNA, 19 nt, Artificial Sequence
  Description of Artificial Sequence: Synthetic oligonucleotide
  Antisense strand to SEQ ID NO: 303858
ucuccgaagauuuggcuuc

SEQ ID NO: 303860 - RNA, 19 nt, Artificial Sequence
  Description of Artificial Sequence: Synthetic oligonucleotide
  Sense strand starting at position 1391 of SEQ ID NO: 3904
gagccuuucccugaggugu

SEQ ID NO: 303861 - RNA, 19 nt, Artificial Sequence
  Description of Artificial Sequence: Synthetic oligonucleotide
  Antisense strand to SEQ ID NO: 303860
acaccucagggaaaggcuc

SEQ ID NO: 303862 - RNA, 19 nt, Artificial Sequence
  Description of Artificial Sequence: Synthetic oligonucleotide
  Sense strand starting at position 1466 of SEQ ID NO: 3904
gggagacggucuuccuaac

SEQ ID NO: 303863 - RNA, 19 nt, Artificial Sequence
  Description of Artificial Sequence: Synthetic oligonucleotide
  Antisense strand to SEQ ID NO: 303862
guuaggaagaccgucuccc

SEQ ID NO: 303864 - RNA, 19 nt, Artificial Sequence
  Description of Artificial Sequence: Synthetic oligonucleotide
  Sense strand starting at position 1514 of SEQ ID NO: 3904
agagacgcauccucuguua

SEQ ID NO: 303865 - RNA, 19 nt, Artificial Sequence
  Description of Artificial Sequence: Synthetic oligonucleotide
  Antisense strand to SEQ ID NO: 303864
uaacagaggaugcgucucu

SEQ ID NO: 303866 - RNA, 19 nt, Artificial Sequence
  Description of Artificial Sequence: Synthetic oligonucleotide
  Sense strand starting at position 1516 of SEQ ID NO: 3904
agacgcauccucuguuaca

SEQ ID NO: 303867 - RNA, 19 nt, Artificial Sequence
  Description of Artificial Sequence: Synthetic oligonucleotide
  Antisense strand to SEQ ID NO: 303866
uguaacagaggaugcgucu

SEQ ID NO: 303868 - RNA, 19 nt, Artificial Sequence
  Description of Artificial Sequence: Synthetic oligonucleotide
  Sense strand starting at position 1517 of SEQ ID NO: 3904
gacgcauccucuguuacau

SEQ ID NO: 303869 - RNA, 19 nt, Artificial Sequence
  Description of Artificial Sequence: Synthetic oligonucleotide
  Antisense strand to SEQ ID NO: 303868
auguaacagaggaugcguc

SEQ ID NO: 303870 - RNA, 19 nt, Artificial Sequence
  Description of Artificial Sequence: Synthetic oligonucleotide
  Sense strand starting at position 1578 of SEQ ID NO: 3904
gcgccucauuucucacaaa

SEQ ID NO: 303871 - RNA, 19 nt, Artificial Sequence
  Description of Artificial Sequence: Synthetic oligonucleotide
  Antisense strand to SEQ ID NO: 303870
uuugugagaaaugaggcgc

SEQ ID NO: 303872 - RNA, 19 nt, Artificial Sequence
  Description of Artificial Sequence: Synthetic oligonucleotide
  Sense strand starting at position 1608 of SEQ ID NO: 3904
augguaaacugaccaguaa

SEQ ID NO: 303873 - RNA, 19 nt, Artificial Sequence
  Description of Artificial Sequence: Synthetic oligonucleotide
  Antisense strand to SEQ ID NO: 303872
uuacuggucaguuuaccau

SEQ ID NO: 303874 - RNA, 19 nt, Artificial Sequence
  Description of Artificial Sequence: Synthetic oligonucleotide
  Sense strand starting at position 1619 of SEQ ID NO: 3904
accaguaagucacugguga

SEQ ID NO: 303875 - RNA, 19 nt, Artificial Sequence
  Description of Artificial Sequence: Synthetic oligonucleotide
  Antisense strand to SEQ ID NO: 303874
ucaccagugacuuacuggu

SEQ ID NO: 303876 - RNA, 19 nt, Artificial Sequence
  Description of Artificial Sequence: Synthetic oligonucleotide
  Sense strand starting at position 2310 of SEQ ID NO: 3904
cgcagauuccucgagggcu

SEQ ID NO: 303877 - RNA, 19 nt, Artificial Sequence
  Description of Artificial Sequence: Synthetic oligonucleotide
  Antisense strand to SEQ ID NO: 303876
agcccucgaggaaucugcg

SEQ ID NO: 303878 - RNA, 19 nt, Artificial Sequence
  Description of Artificial Sequence: Synthetic oligonucleotide
  Sense strand starting at position 2467 of SEQ ID NO: 3904
gcuuguuuagcgucucgga

SEQ ID NO: 303879 - RNA, 19 nt, Artificial Sequence
  Description of Artificial Sequence: Synthetic oligonucleotide
  Antisense strand to SEQ ID NO: 303878
uccgagacgcuaaacaagc

SEQ ID NO: 303880 - RNA, 19 nt, Artificial Sequence
  Description of Artificial Sequence: Synthetic oligonucleotide
  Sense strand starting at position 2489 of SEQ ID NO: 3904
ucgguuaguaagggaaaua

SEQ ID NO: 303881 - RNA, 19 nt, Artificial Sequence
  Description of Artificial Sequence: Synthetic oligonucleotide
  Antisense strand to SEQ ID NO: 303880
uauuucccuuacuaaccga

SEQ ID NO: 303882 - RNA, 19 nt, Artificial Sequence
  Description of Artificial Sequence: Synthetic oligonucleotide
  Sense strand starting at position 2623 of SEQ ID NO: 3904
ugaacuccucagggacuau

SEQ ID NO: 303883 - RNA, 19 nt, Artificial Sequence
  Description of Artificial Sequence: Synthetic oligonucleotide
  Antisense strand to SEQ ID NO: 303882
auagucccugaggaguuca

SEQ ID NO: 303884 - RNA, 19 nt, Artificial Sequence
  Description of Artificial Sequence: Synthetic oligonucleotide
  Sense strand starting at position 3017 of SEQ ID NO: 3904
ggaucugaguucuuaaaga

SEQ ID NO: 303885 - RNA, 19 nt, Artificial Sequence
  Description of Artificial Sequence: Synthetic oligonucleotide
  Antisense strand to SEQ ID NO: 303884
ucuuuaagaacucagaucc

SEQ ID NO: 303886 - RNA, 19 nt, Artificial Sequence
  Description of Artificial Sequence: Synthetic oligonucleotide
  Sense strand starting at position 3211 of SEQ ID NO: 3904
uggugacuuuacccaaaga

SEQ ID NO: 303887 - RNA, 19 nt, Artificial Sequence
  Description of Artificial Sequence: Synthetic oligonucleotide
  Antisense strand to SEQ ID NO: 303886
ucuuuggguaaagucacca

SEQ ID NO: 303888 - RNA, 19 nt, Artificial Sequence
  Description of Artificial Sequence: Synthetic oligonucleotide
  Sense strand starting at position 3257 of SEQ ID NO: 3904
ccuuuagagccaugugaga

SEQ ID NO: 303889 - RNA, 19 nt, Artificial Sequence
  Description of Artificial Sequence: Synthetic oligonucleotide
  Antisense strand to SEQ ID NO: 303888
ucucacauggcucuaaagg

SEQ ID NO: 303890 - RNA, 19 nt, Artificial Sequence
  Description of Artificial Sequence: Synthetic oligonucleotide
  Sense strand starting at position 3259 of SEQ ID NO: 3904
uuuagagccaugugagaaa

SEQ ID NO: 303891 - RNA, 19 nt, Artificial Sequence
  Description of Artificial Sequence: Synthetic oligonucleotide
  Antisense strand to SEQ ID NO: 303890
uuucucacauggcucuaaa

SEQ ID NO: 303892 - RNA, 19 nt, Artificial Sequence
  Description of Artificial Sequence: Synthetic oligonucleotide
  Sense strand starting at position 3282 of SEQ ID NO: 3904
gguaguuacaauugucugu

SEQ ID NO: 303893 - RNA, 19 nt, Artificial Sequence
  Description of Artificial Sequence: Synthetic oligonucleotide
  Antisense strand to SEQ ID NO: 303892
acagacaauuguaacuacc

SEQ ID NO: 303894 - RNA, 19 nt, Artificial Sequence
  Description of Artificial Sequence: Synthetic oligonucleotide
  Sense strand starting at position 3285 of SEQ ID NO: 3904
aguuacaauugucuguaua

SEQ ID NO: 303895 - RNA, 19 nt, Artificial Sequence
  Description of Artificial Sequence: Synthetic oligonucleotide
  Antisense strand to SEQ ID NO: 303894
uauacagacaauuguaacu

SEQ ID NO: 303896 - RNA, 19 nt, Artificial Sequence
  Description of Artificial Sequence: Synthetic oligonucleotide
  Sense strand starting at position 3286 of SEQ ID NO: 3904
guuacaauugucuguauau

SEQ ID NO: 303897 - RNA, 19 nt, Artificial Sequence
  Description of Artificial Sequence: Synthetic oligonucleotide
  Antisense strand to SEQ ID NO: 303896
auauacagacaauuguaac

SEQ ID NO: 303898 - RNA, 19 nt, Artificial Sequence
  Description of Artificial Sequence: Synthetic oligonucleotide
  Sense strand starting at position 3287 of SEQ ID NO: 3904
uuacaauugucuguauauc

SEQ ID NO: 303899 - RNA, 19 nt, Artificial Sequence
  Description of Artificial Sequence: Synthetic oligonucleotide
  Antisense strand to SEQ ID NO: 303898
gauauacagacaauuguaa

SEQ ID NO: 303900 - RNA, 19 nt, Artificial Sequence
  Description of Artificial Sequence: Synthetic oligonucleotide
  Sense strand starting at position 3295 of SEQ ID NO: 3904
gucuguauaucuuccacuu

SEQ ID NO: 303901 - RNA, 19 nt, Artificial Sequence
  Description of Artificial Sequence: Synthetic oligonucleotide
  Antisense strand to SEQ ID NO: 303900
aaguggaagauauacagac

SEQ ID NO: 303902 - RNA, 19 nt, Artificial Sequence
  Description of Artificial Sequence: Synthetic oligonucleotide
  Sense strand starting at position 3369 of SEQ ID NO: 3904
aguccuggagcuugacaaa

SEQ ID NO: 303903 - RNA, 19 nt, Artificial Sequence
  Description of Artificial Sequence: Synthetic oligonucleotide
  Antisense strand to SEQ ID NO: 303902
uuugucaagcuccaggacu

SEQ ID NO: 303904 - RNA, 19 nt, Artificial Sequence
  Description of Artificial Sequence: Synthetic oligonucleotide
  Sense strand starting at position 3473 of SEQ ID NO: 3904
aggccuaguccagguuuga

SEQ ID NO: 303905 - RNA, 19 nt, Artificial Sequence
  Description of Artificial Sequence: Synthetic oligonucleotide
  Antisense strand to SEQ ID NO: 303904
ucaaaccuggacuaggccu

SEQ ID NO: 303906 - RNA, 19 nt, Artificial Sequence
  Description of Artificial Sequence: Synthetic oligonucleotide
  Sense strand starting at position 3850 of SEQ ID NO: 3904
ggcucucccaggugagauu

SEQ ID NO: 303907 - RNA, 19 nt, Artificial Sequence
  Description of Artificial Sequence: Synthetic oligonucleotide
  Antisense strand to SEQ ID NO: 303906
aaucucaccugggagagcc

SEQ ID NO: 303908 - RNA, 19 nt, Artificial Sequence
  Description of Artificial Sequence: Synthetic oligonucleotide
  Sense strand starting at position 3896 of SEQ ID NO: 3904
gagggaagugccuggaauu

SEQ ID NO: 303909 - RNA, 19 nt, Artificial Sequence
  Description of Artificial Sequence: Synthetic oligonucleotide
  Antisense strand to SEQ ID NO: 303908
aauuccaggcacuucccuc

SEQ ID NO: 303910 - RNA, 19 nt, Artificial Sequence
  Description of Artificial Sequence: Synthetic oligonucleotide
  Sense strand starting at position 3897 of SEQ ID NO: 3904
agggaagugccuggaauua

SEQ ID NO: 303911 - RNA, 19 nt, Artificial Sequence
  Description of Artificial Sequence: Synthetic oligonucleotide
  Antisense strand to SEQ ID NO: 303910
uaauuccaggcacuucccu

SEQ ID NO: 303912 - RNA, 19 nt, Artificial Sequence
  Description of Artificial Sequence: Synthetic oligonucleotide
  Sense strand starting at position 133 of SEQ ID NO: 3905
ggagcaaacuucucuuccu

SEQ ID NO: 303913 - RNA, 19 nt, Artificial Sequence
  Description of Artificial Sequence: Synthetic oligonucleotide
  Antisense strand to SEQ ID NO: 303912
aggaagagaaguuugcucc

SEQ ID NO: 303914 - RNA, 19 nt, Artificial Sequence
  Description of Artificial Sequence: Synthetic oligonucleotide
  Sense strand starting at position 162 of SEQ ID NO: 3905
gaaguacacuuggcaaaga

SEQ ID NO: 303915 - RNA, 19 nt, Artificial Sequence
  Description of Artificial Sequence: Synthetic oligonucleotide
  Antisense strand to SEQ ID NO: 303914
ucuuugccaaguguacuuc

SEQ ID NO: 303916 - RNA, 19 nt, Artificial Sequence
  Description of Artificial Sequence: Synthetic oligonucleotide
  Sense strand starting at position 173 of SEQ ID NO: 3905
ggcaaagaucuuugcaggu

SEQ ID NO: 303917 - RNA, 19 nt, Artificial Sequence
  Description of Artificial Sequence: Synthetic oligonucleotide
  Antisense strand to SEQ ID NO: 303916
accugcaaagaucuuugcc

SEQ ID NO: 303918 - RNA, 19 nt, Artificial Sequence
  Description of Artificial Sequence: Synthetic oligonucleotide
  Sense strand starting at position 177 of SEQ ID NO: 3905
aagaucuuugcagguaugu

SEQ ID NO: 303919 - RNA, 19 nt, Artificial Sequence
  Description of Artificial Sequence: Synthetic oligonucleotide
  Antisense strand to SEQ ID NO: 303918
acauaccugcaaagaucuu

SEQ ID NO: 303920 - RNA, 19 nt, Artificial Sequence
  Description of Artificial Sequence: Synthetic oligonucleotide
  Sense strand starting at position 306 of SEQ ID NO: 3905
gcaggaagccaugagagua

SEQ ID NO: 303921 - RNA, 19 nt, Artificial Sequence
  Description of Artificial Sequence: Synthetic oligonucleotide
  Antisense strand to SEQ ID NO: 303920
uacucucauggcuuccugc

SEQ ID NO: 303922 - RNA, 19 nt, Artificial Sequence
  Description of Artificial Sequence: Synthetic oligonucleotide
  Sense strand starting at position 370 of SEQ ID NO: 3905
agaugugcagacuauaacu

SEQ ID NO: 303923 - RNA, 19 nt, Artificial Sequence
  Description of Artificial Sequence: Synthetic oligonucleotide
  Antisense strand to SEQ ID NO: 303922
aguuauagucugcacaucu

SEQ ID NO: 303924 - RNA, 19 nt, Artificial Sequence
  Description of Artificial Sequence: Synthetic oligonucleotide
  Sense strand starting at position 430 of SEQ ID NO: 3905
ggaggaaauggcugcacua

SEQ ID NO: 303925 - RNA, 19 nt, Artificial Sequence
  Description of Artificial Sequence: Synthetic oligonucleotide
  Antisense strand to SEQ ID NO: 303924
uagugcagccauuuccucc

SEQ ID NO: 303926 - RNA, 19 nt, Artificial Sequence
  Description of Artificial Sequence: Synthetic oligonucleotide
  Sense strand starting at position 475 of SEQ ID NO: 3905
cagcguguuccucugagua

SEQ ID NO: 303927 - RNA, 19 nt, Artificial Sequence
  Description of Artificial Sequence: Synthetic oligonucleotide
  Antisense strand to SEQ ID NO: 303926
uacucagaggaacacgcug

SEQ ID NO: 303928 - RNA, 19 nt, Artificial Sequence
  Description of Artificial Sequence: Synthetic oligonucleotide
  Sense strand starting at position 505 of SEQ ID NO: 3905
gugggaaguauuuguaguc

SEQ ID NO: 303929 - RNA, 19 nt, Artificial Sequence
  Description of Artificial Sequence: Synthetic oligonucleotide
  Antisense strand to SEQ ID NO: 303928
gacuacaaauacuucccac

SEQ ID NO: 303930 - RNA, 19 nt, Artificial Sequence
  Description of Artificial Sequence: Synthetic oligonucleotide
  Sense strand starting at position 574 of SEQ ID NO: 3905
ucuuuagaaccuggacauu

SEQ ID NO: 303931 - RNA, 19 nt, Artificial Sequence
  Description of Artificial Sequence: Synthetic oligonucleotide
  Antisense strand to SEQ ID NO: 303930
aauguccagguucuaaaga

SEQ ID NO: 303932 - RNA, 19 nt, Artificial Sequence
  Description of Artificial Sequence: Synthetic oligonucleotide
  Sense strand starting at position 621 of SEQ ID NO: 3905
caaacagugcuggaugagu

SEQ ID NO: 303933 - RNA, 19 nt, Artificial Sequence
  Description of Artificial Sequence: Synthetic oligonucleotide
  Antisense strand to SEQ ID NO: 303932
acucauccagcacuguuug

SEQ ID NO: 303934 - RNA, 19 nt, Artificial Sequence
  Description of Artificial Sequence: Synthetic oligonucleotide
  Sense strand starting at position 942 of SEQ ID NO: 3905
gggugacuacugcacguuu

SEQ ID NO: 303935 - RNA, 19 nt, Artificial Sequence
  Description of Artificial Sequence: Synthetic oligonucleotide
  Antisense strand to SEQ ID NO: 303934
aaacgugcaguagucaccc

SEQ ID NO: 303936 - RNA, 19 nt, Artificial Sequence
  Description of Artificial Sequence: Synthetic oligonucleotide
  Sense strand starting at position 1018 of SEQ ID NO: 3905
uucuaaguuuaugcagaaa

SEQ ID NO: 303937 - RNA, 19 nt, Artificial Sequence
  Description of Artificial Sequence: Synthetic oligonucleotide
  Antisense strand to SEQ ID NO: 303936
uuucugcauaaacuuagaa

SEQ ID NO: 303938 - RNA, 19 nt, Artificial Sequence
  Description of Artificial Sequence: Synthetic oligonucleotide
  Sense strand starting at position 1127 of SEQ ID NO: 3905
gcuagaugugccgagagau

SEQ ID NO: 303939 - RNA, 19 nt, Artificial Sequence
  Description of Artificial Sequence: Synthetic oligonucleotide
  Antisense strand to SEQ ID NO: 303938
aucucucggcacaucuagc

SEQ ID NO: 303940 - RNA, 19 nt, Artificial Sequence
  Description of Artificial Sequence: Synthetic oligonucleotide
  Sense strand starting at position 3006 of SEQ ID NO: 3905
ggagucgaaugccuaguaa

SEQ ID NO: 303941 - RNA, 19 nt, Artificial Sequence
  Description of Artificial Sequence: Synthetic oligonucleotide
  Antisense strand to SEQ ID NO: 303940
uuacuaggcauucgacucc

SEQ ID NO: 303942 - RNA, 19 nt, Artificial Sequence
  Description of Artificial Sequence: Synthetic oligonucleotide
  Sense strand starting at position 3035 of SEQ ID NO: 3905
uggagugcagucuagaguu

SEQ ID NO: 303943 - RNA, 19 nt, Artificial Sequence
  Description of Artificial Sequence: Synthetic oligonucleotide
  Antisense strand to SEQ ID NO: 303942
aacucuagacugcacucca

SEQ ID NO: 303944 - RNA, 19 nt, Artificial Sequence
  Description of Artificial Sequence: Synthetic oligonucleotide
  Sense strand starting at position 3108 of SEQ ID NO: 3905
cccucucagcuguauggaa

SEQ ID NO: 303945 - RNA, 19 nt, Artificial Sequence
  Description of Artificial Sequence: Synthetic oligonucleotide
  Antisense strand to SEQ ID NO: 303944
uuccauacagcugagaggg

SEQ ID NO: 303946 - RNA, 19 nt, Artificial Sequence
  Description of Artificial Sequence: Synthetic oligonucleotide
  Sense strand starting at position 3122 of SEQ ID NO: 3905
uggaaaccguucuuuaaau

SEQ ID NO: 303947 - RNA, 19 nt, Artificial Sequence
  Description of Artificial Sequence: Synthetic oligonucleotide
  Antisense strand to SEQ ID NO: 303946
auuuaaagaacgguuucca

SEQ ID NO: 303948 - RNA, 19 nt, Artificial Sequence
  Description of Artificial Sequence: Synthetic oligonucleotide
  Sense strand starting at position 3123 of SEQ ID NO: 3905
ggaaaccguucuuuaaauu

SEQ ID NO: 303949 - RNA, 19 nt, Artificial Sequence
  Description of Artificial Sequence: Synthetic oligonucleotide
  Antisense strand to SEQ ID NO: 303948
aauuuaaagaacgguuucc

SEQ ID NO: 303950 - RNA, 19 nt, Artificial Sequence
  Description of Artificial Sequence: Synthetic oligonucleotide
  Sense strand starting at position 3144 of SEQ ID NO: 3905
gggaaugugccaggaaagu

SEQ ID NO: 303951 - RNA, 19 nt, Artificial Sequence
  Description of Artificial Sequence: Synthetic oligonucleotide
  Antisense strand to SEQ ID NO: 303950
acuuuccuggcacauuccc

SEQ ID NO: 303952 - RNA, 19 nt, Artificial Sequence
  Description of Artificial Sequence: Synthetic oligonucleotide
  Sense strand starting at position 3199 of SEQ ID NO: 3905
uguugugaagguuaacguu

SEQ ID NO: 303953 - RNA, 19 nt, Artificial Sequence
  Description of Artificial Sequence: Synthetic oligonucleotide
  Antisense strand to SEQ ID NO: 303952
aacguuaaccuucacaaca

SEQ ID NO: 303954 - RNA, 19 nt, Artificial Sequence
  Description of Artificial Sequence: Synthetic oligonucleotide
  Sense strand starting at position 3213 of SEQ ID NO: 3905
acguuaauaggacaguuaa

SEQ ID NO: 303955 - RNA, 19 nt, Artificial Sequence
  Description of Artificial Sequence: Synthetic oligonucleotide
  Antisense strand to SEQ ID NO: 303954
uuaacuguccuauuaacgu

SEQ ID NO: 303956 - RNA, 19 nt, Artificial Sequence
  Description of Artificial Sequence: Synthetic oligonucleotide
  Sense strand starting at position 3248 of SEQ ID NO: 3905
uaguuacuugacuggcuua

SEQ ID NO: 303957 - RNA, 19 nt, Artificial Sequence
  Description of Artificial Sequence: Synthetic oligonucleotide
  Antisense strand to SEQ ID NO: 303956
uaagccagucaaguaacua

SEQ ID NO: 303958 - RNA, 19 nt, Artificial Sequence
  Description of Artificial Sequence: Synthetic oligonucleotide
  Sense strand starting at position 3251 of SEQ ID NO: 3905
uuacuugacuggcuuaaag

SEQ ID NO: 303959 - RNA, 19 nt, Artificial Sequence
  Description of Artificial Sequence: Synthetic oligonucleotide
  Antisense strand to SEQ ID NO: 303958
cuuuaagccagucaaguaa

SEQ ID NO: 303960 - RNA, 19 nt, Artificial Sequence
  Description of Artificial Sequence: Synthetic oligonucleotide
  Sense strand starting at position 3406 of SEQ ID NO: 3905
auagaauccugugcuaaua

SEQ ID NO: 303961 - RNA, 19 nt, Artificial Sequence
  Description of Artificial Sequence: Synthetic oligonucleotide
  Antisense strand to SEQ ID NO: 303960
uauuagcacaggauucuau

SEQ ID NO: 303962 - RNA, 19 nt, Artificial Sequence
  Description of Artificial Sequence: Synthetic oligonucleotide
  Sense strand starting at position 3427 of SEQ ID NO: 3905
guuauuaacguagaauaag

SEQ ID NO: 303963 - RNA, 19 nt, Artificial Sequence
  Description of Artificial Sequence: Synthetic oligonucleotide
  Antisense strand to SEQ ID NO: 303962
cuuauucuacguuaauaac

SEQ ID NO: 303964 - RNA, 19 nt, Artificial Sequence
  Description of Artificial Sequence: Synthetic oligonucleotide
  Sense strand starting at position 3476 of SEQ ID NO: 3905
uuuaccagucaccaguaau

SEQ ID NO: 303965 - RNA, 19 nt, Artificial Sequence
  Description of Artificial Sequence: Synthetic oligonucleotide
  Antisense strand to SEQ ID NO: 303964
auuacuggugacugguaaa

SEQ ID NO: 303966 - RNA, 19 nt, Artificial Sequence
  Description of Artificial Sequence: Synthetic oligonucleotide
  Sense strand starting at position 3479 of SEQ ID NO: 3905
accagucaccaguaauuau

SEQ ID NO: 303967 - RNA, 19 nt, Artificial Sequence
  Description of Artificial Sequence: Synthetic oligonucleotide
  Antisense strand to SEQ ID NO: 303966
auaauuacuggugacuggu

SEQ ID NO: 303968 - RNA, 19 nt, Artificial Sequence
  Description of Artificial Sequence: Synthetic oligonucleotide
  Sense strand starting at position 3517 of SEQ ID NO: 3905
agagauugcaugugcaucu

SEQ ID NO: 303969 - RNA, 19 nt, Artificial Sequence
  Description of Artificial Sequence: Synthetic oligonucleotide
  Antisense strand to SEQ ID NO: 303968
agaugcacaugcaaucucu

SEQ ID NO: 303970 - RNA, 19 nt, Artificial Sequence
  Description of Artificial Sequence: Synthetic oligonucleotide
  Sense strand starting at position 3526 of SEQ ID NO: 3905
augugcaucuucccaguaa

SEQ ID NO: 303971 - RNA, 19 nt, Artificial Sequence
  Description of Artificial Sequence: Synthetic oligonucleotide
  Antisense strand to SEQ ID NO: 303970
uuacugggaagaugcacau

SEQ ID NO: 303972 - RNA, 19 nt, Artificial Sequence
  Description of Artificial Sequence: Synthetic oligonucleotide
  Sense strand starting at position 3530 of SEQ ID NO: 3905
gcaucuucccaguaagcaa

SEQ ID NO: 303973 - RNA, 19 nt, Artificial Sequence
  Description of Artificial Sequence: Synthetic oligonucleotide
  Antisense strand to SEQ ID NO: 303972
uugcuuacugggaagaugc

SEQ ID NO: 303974 - RNA, 19 nt, Artificial Sequence
  Description of Artificial Sequence: Synthetic oligonucleotide
  Sense strand starting at position 3553 of SEQ ID NO: 3905
aucaguucuguuuagguca

SEQ ID NO: 303975 - RNA, 19 nt, Artificial Sequence
  Description of Artificial Sequence: Synthetic oligonucleotide
  Antisense strand to SEQ ID NO: 303974
ugaccuaaacagaacugau

SEQ ID NO: 303976 - RNA, 19 nt, Artificial Sequence
  Description of Artificial Sequence: Synthetic oligonucleotide
  Sense strand starting at position 3556 of SEQ ID NO: 3905
aguucuguuuaggucagaa

SEQ ID NO: 303977 - RNA, 19 nt, Artificial Sequence
  Description of Artificial Sequence: Synthetic oligonucleotide
  Antisense strand to SEQ ID NO: 303976
uucugaccuaaacagaacu

SEQ ID NO: 303978 - RNA, 19 nt, Artificial Sequence
  Description of Artificial Sequence: Synthetic oligonucleotide
  Sense strand starting at position 3558 of SEQ ID NO: 3905
uucuguuuaggucagaaua

SEQ ID NO: 303979 - RNA, 19 nt, Artificial Sequence
  Description of Artificial Sequence: Synthetic oligonucleotide
  Antisense strand to SEQ ID NO: 303978
uauucugaccuaaacagaa

SEQ ID NO: 303980 - RNA, 19 nt, Artificial Sequence
  Description of Artificial Sequence: Synthetic oligonucleotide
  Sense strand starting at position 3605 of SEQ ID NO: 3905
accagagauuuaggaagua

SEQ ID NO: 303981 - RNA, 19 nt, Artificial Sequence
  Description of Artificial Sequence: Synthetic oligonucleotide
  Antisense strand to SEQ ID NO: 303980
uacuuccuaaaucucuggu

SEQ ID NO: 303982 - RNA, 19 nt, Artificial Sequence
  Description of Artificial Sequence: Synthetic oligonucleotide
  Sense strand starting at position 3673 of SEQ ID NO: 3905
aagaguuaagggcgaguua

SEQ ID NO: 303983 - RNA, 19 nt, Artificial Sequence
  Description of Artificial Sequence: Synthetic oligonucleotide
  Antisense strand to SEQ ID NO: 303982
uaacucgcccuuaacucuu

SEQ ID NO: 303984 - RNA, 19 nt, Artificial Sequence
  Description of Artificial Sequence: Synthetic oligonucleotide
  Sense strand starting at position 3682 of SEQ ID NO: 3905
gggcgaguuaccuguggga

SEQ ID NO: 303985 - RNA, 19 nt, Artificial Sequence
  Description of Artificial Sequence: Synthetic oligonucleotide
  Antisense strand to SEQ ID NO: 303984
ucccacagguaacucgccc

SEQ ID NO: 303986 - RNA, 19 nt, Artificial Sequence
  Description of Artificial Sequence: Synthetic oligonucleotide
  Sense strand starting at position 3686 of SEQ ID NO: 3905
gaguuaccugugggaguga

SEQ ID NO: 303987 - RNA, 19 nt, Artificial Sequence
  Description of Artificial Sequence: Synthetic oligonucleotide
  Antisense strand to SEQ ID NO: 303986
ucacucccacagguaacuc

SEQ ID NO: 303988 - RNA, 19 nt, Artificial Sequence
  Description of Artificial Sequence: Synthetic oligonucleotide
  Sense strand starting at position 3793 of SEQ ID NO: 3905
guggcaaagcugggaauau

SEQ ID NO: 303989 - RNA, 19 nt, Artificial Sequence
  Description of Artificial Sequence: Synthetic oligonucleotide
  Antisense strand to SEQ ID NO: 303988
auauucccagcuuugccac

SEQ ID NO: 303990 - RNA, 19 nt, Artificial Sequence
  Description of Artificial Sequence: Synthetic oligonucleotide
  Sense strand starting at position 3860 of SEQ ID NO: 3905
uggcaccuuuaguuaagaa

SEQ ID NO: 303991 - RNA, 19 nt, Artificial Sequence
  Description of Artificial Sequence: Synthetic oligonucleotide
  Antisense strand to SEQ ID NO: 303990
uucuuaacuaaaggugcca

SEQ ID NO: 303992 - RNA, 19 nt, Artificial Sequence
  Description of Artificial Sequence: Synthetic oligonucleotide
  Sense strand starting at position 46 of SEQ ID NO: 3906
gaccguaucuuauucgaau

SEQ ID NO: 303993 - RNA, 19 nt, Artificial Sequence
  Description of Artificial Sequence: Synthetic oligonucleotide
  Antisense strand to SEQ ID NO: 303992
auucgaauaagauacgguc

SEQ ID NO: 303994 - RNA, 19 nt, Artificial Sequence
  Description of Artificial Sequence: Synthetic oligonucleotide
  Sense strand starting at position 47 of SEQ ID NO: 3906
accguaucuuauucgaauu

SEQ ID NO: 303995 - RNA, 19 nt, Artificial Sequence
  Description of Artificial Sequence: Synthetic oligonucleotide
  Antisense strand to SEQ ID NO: 303994
aauucgaauaagauacggu

SEQ ID NO: 303996 - RNA, 19 nt, Artificial Sequence
  Description of Artificial Sequence: Synthetic oligonucleotide
  Sense strand starting at position 49 of SEQ ID NO: 3906
cguaucuuauucgaauuaa

SEQ ID NO: 303997 - RNA, 19 nt, Artificial Sequence
  Description of Artificial Sequence: Synthetic oligonucleotide
  Antisense strand to SEQ ID NO: 303996
uuaauucgaauaagauacg

SEQ ID NO: 303998 - RNA, 19 nt, Artificial Sequence
  Description of Artificial Sequence: Synthetic oligonucleotide
  Sense strand starting at position 120 of SEQ ID NO: 3906
aucucuaagcaguguccua

SEQ ID NO: 303999 - RNA, 19 nt, Artificial Sequence
  Description of Artificial Sequence: Synthetic oligonucleotide
  Antisense strand to SEQ ID NO: 303998
uaggacacugcuuagagau

SEQ ID NO: 304000 - RNA, 19 nt, Artificial Sequence
  Description of Artificial Sequence: Synthetic oligonucleotide
  Sense strand starting at position 262 of SEQ ID NO: 3906
guggguuugaggugucauc

SEQ ID NO: 304001 - RNA, 19 nt, Artificial Sequence
  Description of Artificial Sequence: Synthetic oligonucleotide
  Antisense strand to SEQ ID NO: 304000
gaugacaccucaaacccac

SEQ ID NO: 304002 - RNA, 19 nt, Artificial Sequence
  Description of Artificial Sequence: Synthetic oligonucleotide
  Sense strand starting at position 272 of SEQ ID NO: 3906
ggugucaucccuuggagcu

SEQ ID NO: 304003 - RNA, 19 nt, Artificial Sequence
  Description of Artificial Sequence: Synthetic oligonucleotide
  Antisense strand to SEQ ID NO: 304002
agcuccaagggaugacacc

SEQ ID NO: 304004 - RNA, 19 nt, Artificial Sequence
  Description of Artificial Sequence: Synthetic oligonucleotide
  Sense strand starting at position 273 of SEQ ID NO: 3906
gugucaucccuuggagcuu

SEQ ID NO: 304005 - RNA, 19 nt, Artificial Sequence
  Description of Artificial Sequence: Synthetic oligonucleotide
  Antisense strand to SEQ ID NO: 304004
aagcuccaagggaugacac

SEQ ID NO: 304006 - RNA, 19 nt, Artificial Sequence
  Description of Artificial Sequence: Synthetic oligonucleotide
  Sense strand starting at position 369 of SEQ ID NO: 3906
agcagaucagucuagcacu

SEQ ID NO: 304007 - RNA, 19 nt, Artificial Sequence
  Description of Artificial Sequence: Synthetic oligonucleotide
  Antisense strand to SEQ ID NO: 304006
agugcuagacugaucugcu

SEQ ID NO: 304008 - RNA, 19 nt, Artificial Sequence
  Description of Artificial Sequence: Synthetic oligonucleotide
  Sense strand starting at position 414 of SEQ ID NO: 3906
gagguucugaacuaggguu

SEQ ID NO: 304009 - RNA, 19 nt, Artificial Sequence
  Description of Artificial Sequence: Synthetic oligonucleotide
  Antisense strand to SEQ ID NO: 304008
aacccuaguucagaaccuc

SEQ ID NO: 304010 - RNA, 19 nt, Artificial Sequence
  Description of Artificial Sequence: Synthetic oligonucleotide
  Sense strand starting at position 416 of SEQ ID NO: 3906
gguucugaacuaggguuaa

SEQ ID NO: 304011 - RNA, 19 nt, Artificial Sequence
  Description of Artificial Sequence: Synthetic oligonucleotide
  Antisense strand to SEQ ID NO: 304010
uuaacccuaguucagaacc

SEQ ID NO: 304012 - RNA, 19 nt, Artificial Sequence
  Description of Artificial Sequence: Synthetic oligonucleotide
  Sense strand starting at position 472 of SEQ ID NO: 3906
uaguguugguucuucuagu

SEQ ID NO: 304013 - RNA, 19 nt, Artificial Sequence
  Description of Artificial Sequence: Synthetic oligonucleotide
  Antisense strand to SEQ ID NO: 304012
acuagaagaaccaacacua

SEQ ID NO: 304014 - RNA, 19 nt, Artificial Sequence
  Description of Artificial Sequence: Synthetic oligonucleotide
  Sense strand starting at position 473 of SEQ ID NO: 3906
aguguugguucuucuaguu

SEQ ID NO: 304015 - RNA, 19 nt, Artificial Sequence
  Description of Artificial Sequence: Synthetic oligonucleotide
  Antisense strand to SEQ ID NO: 304014
aacuagaagaaccaacacu

SEQ ID NO: 304016 - RNA, 19 nt, Artificial Sequence
  Description of Artificial Sequence: Synthetic oligonucleotide
  Sense strand starting at position 503 of SEQ ID NO: 3906
guugcuguaucccuagauc

SEQ ID NO: 304017 - RNA, 19 nt, Artificial Sequence
  Description of Artificial Sequence: Synthetic oligonucleotide
  Antisense strand to SEQ ID NO: 304016
gaucuagggauacagcaac

SEQ ID NO: 304018 - RNA, 19 nt, Artificial Sequence
  Description of Artificial Sequence: Synthetic oligonucleotide
  Sense strand starting at position 668 of SEQ ID NO: 3906
gcuuucgaagcuuaucaaa

SEQ ID NO: 304019 - RNA, 19 nt, Artificial Sequence
  Description of Artificial Sequence: Synthetic oligonucleotide
  Antisense strand to SEQ ID NO: 304018
uuugauaagcuucgaaagc

SEQ ID NO: 304020 - RNA, 19 nt, Artificial Sequence
  Description of Artificial Sequence: Synthetic oligonucleotide
  Sense strand starting at position 760 of SEQ ID NO: 3906
auugcuuacgagcaagagu

SEQ ID NO: 304021 - RNA, 19 nt, Artificial Sequence
  Description of Artificial Sequence: Synthetic oligonucleotide
  Antisense strand to SEQ ID NO: 304020
acucuugcucguaagcaau

SEQ ID NO: 304022 - RNA, 19 nt, Artificial Sequence
  Description of Artificial Sequence: Synthetic oligonucleotide
  Sense strand starting at position 763 of SEQ ID NO: 3906
gcuuacgagcaagaguuaa

SEQ ID NO: 304023 - RNA, 19 nt, Artificial Sequence
  Description of Artificial Sequence: Synthetic oligonucleotide
  Antisense strand to SEQ ID NO: 304022
uuaacucuugcucguaagc

SEQ ID NO: 304024 - RNA, 19 nt, Artificial Sequence
  Description of Artificial Sequence: Synthetic oligonucleotide
  Sense strand starting at position 771 of SEQ ID NO: 3906
gcaagaguuaaguggcuaa

SEQ ID NO: 304025 - RNA, 19 nt, Artificial Sequence
  Description of Artificial Sequence: Synthetic oligonucleotide
  Antisense strand to SEQ ID NO: 304024
uuagccacuuaacucuugc

SEQ ID NO: 304026 - RNA, 19 nt, Artificial Sequence
  Description of Artificial Sequence: Synthetic oligonucleotide
  Sense strand starting at position 774 of SEQ ID NO: 3906
agaguuaaguggcuaacaa

SEQ ID NO: 304027 - RNA, 19 nt, Artificial Sequence
  Description of Artificial Sequence: Synthetic oligonucleotide
  Antisense strand to SEQ ID NO: 304026
uuguuagccacuuaacucu

SEQ ID NO: 304028 - RNA, 19 nt, Artificial Sequence
  Description of Artificial Sequence: Synthetic oligonucleotide
  Sense strand starting at position 775 of SEQ ID NO: 3906
gaguuaaguggcuaacaag

SEQ ID NO: 304029 - RNA, 19 nt, Artificial Sequence
  Description of Artificial Sequence: Synthetic oligonucleotide
  Antisense strand to SEQ ID NO: 304028
cuuguuagccacuuaacuc

SEQ ID NO: 304030 - RNA, 19 nt, Artificial Sequence
  Description of Artificial Sequence: Synthetic oligonucleotide
  Sense strand starting at position 785 of SEQ ID NO: 3906
gcuaacaagucaugaaauc

SEQ ID NO: 304031 - RNA, 19 nt, Artificial Sequence
  Description of Artificial Sequence: Synthetic oligonucleotide
  Antisense strand to SEQ ID NO: 304030
gauuucaugacuuguuagc

SEQ ID NO: 304032 - RNA, 19 nt, Artificial Sequence
  Description of Artificial Sequence: Synthetic oligonucleotide
  Sense strand starting at position 795 of SEQ ID NO: 3906
caugaaaucuuacggagaa

SEQ ID NO: 304033 - RNA, 19 nt, Artificial Sequence
  Description of Artificial Sequence: Synthetic oligonucleotide
  Antisense strand to SEQ ID NO: 304032
uucuccguaagauuucaug

SEQ ID NO: 304034 - RNA, 19 nt, Artificial Sequence
  Description of Artificial Sequence: Synthetic oligonucleotide
  Sense strand starting at position 796 of SEQ ID NO: 3906
augaaaucuuacggagaag

SEQ ID NO: 304035 - RNA, 19 nt, Artificial Sequence
  Description of Artificial Sequence: Synthetic oligonucleotide
  Antisense strand to SEQ ID NO: 304034
cuucuccguaagauuucau

SEQ ID NO: 304036 - RNA, 19 nt, Artificial Sequence
  Description of Artificial Sequence: Synthetic oligonucleotide
  Sense strand starting at position 2391 of SEQ ID NO: 3906
caauccucgcucuaggaga

SEQ ID NO: 304037 - RNA, 19 nt, Artificial Sequence
  Description of Artificial Sequence: Synthetic oligonucleotide
  Antisense strand to SEQ ID NO: 304036
ucuccuagagcgaggauug

SEQ ID NO: 304038 - RNA, 19 nt, Artificial Sequence
  Description of Artificial Sequence: Synthetic oligonucleotide
  Sense strand starting at position 2494 of SEQ ID NO: 3906
ggcugaguccuaagguggu

SEQ ID NO: 304039 - RNA, 19 nt, Artificial Sequence
  Description of Artificial Sequence: Synthetic oligonucleotide
  Antisense strand to SEQ ID NO: 304038
accaccuuaggacucagcc

SEQ ID NO: 304040 - RNA, 19 nt, Artificial Sequence
  Description of Artificial Sequence: Synthetic oligonucleotide
  Sense strand starting at position 2687 of SEQ ID NO: 3906
gcggguguuccuuaaaugc

SEQ ID NO: 304041 - RNA, 19 nt, Artificial Sequence
  Description of Artificial Sequence: Synthetic oligonucleotide
  Antisense strand to SEQ ID NO: 304040
gcauuuaaggaacacccgc

SEQ ID NO: 304042 - RNA, 19 nt, Artificial Sequence
  Description of Artificial Sequence: Synthetic oligonucleotide
  Sense strand starting at position 2825 of SEQ ID NO: 3906
ugaaguuaaccuugaggau

SEQ ID NO: 304043 - RNA, 19 nt, Artificial Sequence
  Description of Artificial Sequence: Synthetic oligonucleotide
  Antisense strand to SEQ ID NO: 304042
auccucaagguuaacuuca

SEQ ID NO: 304044 - RNA, 19 nt, Artificial Sequence
  Description of Artificial Sequence: Synthetic oligonucleotide
  Sense strand starting at position 2828 of SEQ ID NO: 3906
aguuaaccuugaggauaau

SEQ ID NO: 304045 - RNA, 19 nt, Artificial Sequence
  Description of Artificial Sequence: Synthetic oligonucleotide
  Antisense strand to SEQ ID NO: 304044
auuauccucaagguuaacu

SEQ ID NO: 304046 - RNA, 19 nt, Artificial Sequence
  Description of Artificial Sequence: Synthetic oligonucleotide
  Sense strand starting at position 2882 of SEQ ID NO: 3906
uuauuaacccauuguagga

SEQ ID NO: 304047 - RNA, 19 nt, Artificial Sequence
  Description of Artificial Sequence: Synthetic oligonucleotide
  Antisense strand to SEQ ID NO: 304046
uccuacaauggguuaauaa

SEQ ID NO: 304048 - RNA, 19 nt, Artificial Sequence
  Description of Artificial Sequence: Synthetic oligonucleotide
  Sense strand starting at position 2900 of SEQ ID NO: 3906
agugguauacugcaauuau

SEQ ID NO: 304049 - RNA, 19 nt, Artificial Sequence
  Description of Artificial Sequence: Synthetic oligonucleotide
  Antisense strand to SEQ ID NO: 304048
auaauugcaguauaccacu

SEQ ID NO: 304050 - RNA, 19 nt, Artificial Sequence
  Description of Artificial Sequence: Synthetic oligonucleotide
  Sense strand starting at position 2954 of SEQ ID NO: 3906
gugcaacaccguuagguaa

SEQ ID NO: 304051 - RNA, 19 nt, Artificial Sequence
  Description of Artificial Sequence: Synthetic oligonucleotide
  Antisense strand to SEQ ID NO: 304050
uuaccuaacgguguugcac

SEQ ID NO: 304052 - RNA, 19 nt, Artificial Sequence
  Description of Artificial Sequence: Synthetic oligonucleotide
  Sense strand starting at position 2968 of SEQ ID NO: 3906
gguaauaaguuccauaaau

SEQ ID NO: 304053 - RNA, 19 nt, Artificial Sequence
  Description of Artificial Sequence: Synthetic oligonucleotide
  Antisense strand to SEQ ID NO: 304052
auuuauggaacuuauuacc

SEQ ID NO: 304054 - RNA, 19 nt, Artificial Sequence
  Description of Artificial Sequence: Synthetic oligonucleotide
  Sense strand starting at position 2996 of SEQ ID NO: 3906
cggaguuaaggcuggucau

SEQ ID NO: 304055 - RNA, 19 nt, Artificial Sequence
  Description of Artificial Sequence: Synthetic oligonucleotide
  Antisense strand to SEQ ID NO: 304054
augaccagccuuaacuccg

SEQ ID NO: 304056 - RNA, 19 nt, Artificial Sequence
  Description of Artificial Sequence: Synthetic oligonucleotide
  Sense strand starting at position 2997 of SEQ ID NO: 3906
ggaguuaaggcuggucauu

SEQ ID NO: 304057 - RNA, 19 nt, Artificial Sequence
  Description of Artificial Sequence: Synthetic oligonucleotide
  Antisense strand to SEQ ID NO: 304056
aaugaccagccuuaacucc

SEQ ID NO: 304058 - RNA, 19 nt, Artificial Sequence
  Description of Artificial Sequence: Synthetic oligonucleotide
  Sense strand starting at position 3050 of SEQ ID NO: 3906
ugaaguauuaccgagcucu

SEQ ID NO: 304059 - RNA, 19 nt, Artificial Sequence
  Description of Artificial Sequence: Synthetic oligonucleotide
  Antisense strand to SEQ ID NO: 304058
agagcucgguaauacuuca

SEQ ID NO: 304060 - RNA, 19 nt, Artificial Sequence
  Description of Artificial Sequence: Synthetic oligonucleotide
  Sense strand starting at position 3058 of SEQ ID NO: 3906
uaccgagcucuuuaaagug

SEQ ID NO: 304061 - RNA, 19 nt, Artificial Sequence
  Description of Artificial Sequence: Synthetic oligonucleotide
  Antisense strand to SEQ ID NO: 304060
cacuuuaaagagcucggua

SEQ ID NO: 304062 - RNA, 19 nt, Artificial Sequence
  Description of Artificial Sequence: Synthetic oligonucleotide
  Sense strand starting at position 3063 of SEQ ID NO: 3906
agcucuuuaaagugggauu

SEQ ID NO: 304063 - RNA, 19 nt, Artificial Sequence
  Description of Artificial Sequence: Synthetic oligonucleotide
  Antisense strand to SEQ ID NO: 304062
aaucccacuuuaaagagcu

SEQ ID NO: 304064 - RNA, 19 nt, Artificial Sequence
  Description of Artificial Sequence: Synthetic oligonucleotide
  Sense strand starting at position 3076 of SEQ ID NO: 3906
gggauuugguggugacauc

SEQ ID NO: 304065 - RNA, 19 nt, Artificial Sequence
  Description of Artificial Sequence: Synthetic oligonucleotide
  Antisense strand to SEQ ID NO: 304064
gaugucaccaccaaauccc

SEQ ID NO: 304066 - RNA, 19 nt, Artificial Sequence
  Description of Artificial Sequence: Synthetic oligonucleotide
  Sense strand starting at position 3092 of SEQ ID NO: 3906
auccuaaauucgguccuga

SEQ ID NO: 304067 - RNA, 19 nt, Artificial Sequence
  Description of Artificial Sequence: Synthetic oligonucleotide
  Antisense strand to SEQ ID NO: 304066
ucaggaccgaauuuaggau

SEQ ID NO: 304068 - RNA, 19 nt, Artificial Sequence
  Description of Artificial Sequence: Synthetic oligonucleotide
  Sense strand starting at position 3475 of SEQ ID NO: 3906
agagcauaggcuuguguga

SEQ ID NO: 304069 - RNA, 19 nt, Artificial Sequence
  Description of Artificial Sequence: Synthetic oligonucleotide
  Antisense strand to SEQ ID NO: 304068
ucacacaagccuaugcucu

SEQ ID NO: 304070 - RNA, 19 nt, Artificial Sequence
  Description of Artificial Sequence: Synthetic oligonucleotide
  Sense strand starting at position 3541 of SEQ ID NO: 3906
ggcauaaacugaggugaga

SEQ ID NO: 304071 - RNA, 19 nt, Artificial Sequence
  Description of Artificial Sequence: Synthetic oligonucleotide
  Antisense strand to SEQ ID NO: 304070
ucucaccucaguuuaugcc

SEQ ID NO: 304072 - RNA, 19 nt, Artificial Sequence
  Description of Artificial Sequence: Synthetic oligonucleotide
  Sense strand starting at position 205 of SEQ ID NO: 3907
aauuaugaguugcccaaga

SEQ ID NO: 304073 - RNA, 19 nt, Artificial Sequence
  Description of Artificial Sequence: Synthetic oligonucleotide
  Antisense strand to SEQ ID NO: 304072
ucuugggcaacucauaauu

SEQ ID NO: 304074 - RNA, 19 nt, Artificial Sequence
  Description of Artificial Sequence: Synthetic oligonucleotide
  Sense strand starting at position 207 of SEQ ID NO: 3907
uuaugaguugcccaagaca

SEQ ID NO: 304075 - RNA, 19 nt, Artificial Sequence
  Description of Artificial Sequence: Synthetic oligonucleotide
  Antisense strand to SEQ ID NO: 304074
ugucuugggcaacucauaa

SEQ ID NO: 304076 - RNA, 19 nt, Artificial Sequence
  Description of Artificial Sequence: Synthetic oligonucleotide
  Sense strand starting at position 210 of SEQ ID NO: 3907
ugaguugcccaagacaauu

SEQ ID NO: 304077 - RNA, 19 nt, Artificial Sequence
  Description of Artificial Sequence: Synthetic oligonucleotide
  Antisense strand to SEQ ID NO: 304076
aauugucuugggcaacuca

SEQ ID NO: 304078 - RNA, 19 nt, Artificial Sequence
  Description of Artificial Sequence: Synthetic oligonucleotide
  Sense strand starting at position 274 of SEQ ID NO: 3907
gauuuaaaguguccuguuc

SEQ ID NO: 304079 - RNA, 19 nt, Artificial Sequence
  Description of Artificial Sequence: Synthetic oligonucleotide
  Antisense strand to SEQ ID NO: 304078
gaacaggacacuuuaaauc

SEQ ID NO: 304080 - RNA, 19 nt, Artificial Sequence
  Description of Artificial Sequence: Synthetic oligonucleotide
  Sense strand starting at position 462 of SEQ ID NO: 3907
uguagcauacauuaauaga

SEQ ID NO: 304081 - RNA, 19 nt, Artificial Sequence
  Description of Artificial Sequence: Synthetic oligonucleotide
  Antisense strand to SEQ ID NO: 304080
ucuauuaauguaugcuaca

SEQ ID NO: 304082 - RNA, 19 nt, Artificial Sequence
  Description of Artificial Sequence: Synthetic oligonucleotide
  Sense strand starting at position 584 of SEQ ID NO: 3907
ugauuauuagaggguuuga

SEQ ID NO: 304083 - RNA, 19 nt, Artificial Sequence
  Description of Artificial Sequence: Synthetic oligonucleotide
  Antisense strand to SEQ ID NO: 304082
ucaaacccucuaauaauca

SEQ ID NO: 304084 - RNA, 19 nt, Artificial Sequence
  Description of Artificial Sequence: Synthetic oligonucleotide
  Sense strand starting at position 614 of SEQ ID NO: 3907
aguuuaucugccuggauuu

SEQ ID NO: 304085 - RNA, 19 nt, Artificial Sequence
  Description of Artificial Sequence: Synthetic oligonucleotide
  Antisense strand to SEQ ID NO: 304084
aaauccaggcagauaaacu

SEQ ID NO: 304086 - RNA, 19 nt, Artificial Sequence
  Description of Artificial Sequence: Synthetic oligonucleotide
  Sense strand starting at position 615 of SEQ ID NO: 3907
guuuaucugccuggauuua

SEQ ID NO: 304087 - RNA, 19 nt, Artificial Sequence
  Description of Artificial Sequence: Synthetic oligonucleotide
  Antisense strand to SEQ ID NO: 304086
uaaauccaggcagauaaac

SEQ ID NO: 304088 - RNA, 19 nt, Artificial Sequence
  Description of Artificial Sequence: Synthetic oligonucleotide
  Sense strand starting at position 669 of SEQ ID NO: 3907
ugacaaauaugaguguauu

SEQ ID NO: 304089 - RNA, 19 nt, Artificial Sequence
  Description of Artificial Sequence: Synthetic oligonucleotide
  Antisense strand to SEQ ID NO: 304088
aauacacucauauuuguca

SEQ ID NO: 304090 - RNA, 19 nt, Artificial Sequence
  Description of Artificial Sequence: Synthetic oligonucleotide
  Sense strand starting at position 819 of SEQ ID NO: 3907
aaggcugugcauuacaaau

SEQ ID NO: 304091 - RNA, 19 nt, Artificial Sequence
  Description of Artificial Sequence: Synthetic oligonucleotide
  Antisense strand to SEQ ID NO: 304090
auuuguaaugcacagccuu

SEQ ID NO: 304092 - RNA, 19 nt, Artificial Sequence
  Description of Artificial Sequence: Synthetic oligonucleotide
  Sense strand starting at position 912 of SEQ ID NO: 3907
aacugugcuguuuagaaag

SEQ ID NO: 304093 - RNA, 19 nt, Artificial Sequence
  Description of Artificial Sequence: Synthetic oligonucleotide
  Antisense strand to SEQ ID NO: 304092
cuuucuaaacagcacaguu

SEQ ID NO: 304094 - RNA, 19 nt, Artificial Sequence
  Description of Artificial Sequence: Synthetic oligonucleotide
  Sense strand starting at position 1060 of SEQ ID NO: 3907
aucaauuuguaucaugaga

SEQ ID NO: 304095 - RNA, 19 nt, Artificial Sequence
  Description of Artificial Sequence: Synthetic oligonucleotide
  Antisense strand to SEQ ID NO: 304094
ucucaugauacaaauugau

SEQ ID NO: 304096 - RNA, 19 nt, Artificial Sequence
  Description of Artificial Sequence: Synthetic oligonucleotide
  Sense strand starting at position 1393 of SEQ ID NO: 3907
cucagaguccaugaagcaa

SEQ ID NO: 304097 - RNA, 19 nt, Artificial Sequence
  Description of Artificial Sequence: Synthetic oligonucleotide
  Antisense strand to SEQ ID NO: 304096
uugcuucauggacucugag

SEQ ID NO: 304098 - RNA, 19 nt, Artificial Sequence
  Description of Artificial Sequence: Synthetic oligonucleotide
  Sense strand starting at position 1454 of SEQ ID NO: 3907
ucugaaaucugauugcaaa

SEQ ID NO: 304099 - RNA, 19 nt, Artificial Sequence
  Description of Artificial Sequence: Synthetic oligonucleotide
  Antisense strand to SEQ ID NO: 304098
uuugcaaucagauuucaga

SEQ ID NO: 304100 - RNA, 19 nt, Artificial Sequence
  Description of Artificial Sequence: Synthetic oligonucleotide
  Sense strand starting at position 1455 of SEQ ID NO: 3907
cugaaaucugauugcaaau

SEQ ID NO: 304101 - RNA, 19 nt, Artificial Sequence
  Description of Artificial Sequence: Synthetic oligonucleotide
  Antisense strand to SEQ ID NO: 304100
auuugcaaucagauuucag

SEQ ID NO: 304102 - RNA, 19 nt, Artificial Sequence
  Description of Artificial Sequence: Synthetic oligonucleotide
  Sense strand starting at position 1507 of SEQ ID NO: 3907
uuucuaguugguuaaagaa

SEQ ID NO: 304103 - RNA, 19 nt, Artificial Sequence
  Description of Artificial Sequence: Synthetic oligonucleotide
  Antisense strand to SEQ ID NO: 304102
uucuuuaaccaacuagaaa

SEQ ID NO: 304104 - RNA, 19 nt, Artificial Sequence
  Description of Artificial Sequence: Synthetic oligonucleotide
  Sense strand starting at position 1729 of SEQ ID NO: 3907
aucagccuuguacagaaua

SEQ ID NO: 304105 - RNA, 19 nt, Artificial Sequence
  Description of Artificial Sequence: Synthetic oligonucleotide
  Antisense strand to SEQ ID NO: 304104
uauucuguacaaggcugau

SEQ ID NO: 304106 - RNA, 19 nt, Artificial Sequence
  Description of Artificial Sequence: Synthetic oligonucleotide
  Sense strand starting at position 1809 of SEQ ID NO: 3907
aggcucaugagugaagguu

SEQ ID NO: 304107 - RNA, 19 nt, Artificial Sequence
  Description of Artificial Sequence: Synthetic oligonucleotide
  Antisense strand to SEQ ID NO: 304106
aaccuucacucaugagccu

SEQ ID NO: 304108 - RNA, 19 nt, Artificial Sequence
  Description of Artificial Sequence: Synthetic oligonucleotide
  Sense strand starting at position 1817 of SEQ ID NO: 3907
gagugaagguucuuaccaa

SEQ ID NO: 304109 - RNA, 19 nt, Artificial Sequence
  Description of Artificial Sequence: Synthetic oligonucleotide
  Antisense strand to SEQ ID NO: 304108
uugguaagaaccuucacuc

SEQ ID NO: 304110 - RNA, 19 nt, Artificial Sequence
  Description of Artificial Sequence: Synthetic oligonucleotide
  Sense strand starting at position 1988 of SEQ ID NO: 3907
gcugaaaugugacugaaac

SEQ ID NO: 304111 - RNA, 19 nt, Artificial Sequence
  Description of Artificial Sequence: Synthetic oligonucleotide
  Antisense strand to SEQ ID NO: 304110
guuucagucacauuucagc

SEQ ID NO: 304112 - RNA, 19 nt, Artificial Sequence
  Description of Artificial Sequence: Synthetic oligonucleotide
  Sense strand starting at position 2158 of SEQ ID NO: 3907
auagaaugaucaucuaugu

SEQ ID NO: 304113 - RNA, 19 nt, Artificial Sequence
  Description of Artificial Sequence: Synthetic oligonucleotide
  Antisense strand to SEQ ID NO: 304112
acauagaugaucauucuau

SEQ ID NO: 304114 - RNA, 19 nt, Artificial Sequence
  Description of Artificial Sequence: Synthetic oligonucleotide
  Sense strand starting at position 2324 of SEQ ID NO: 3907
ucuuauuugcagugucaau

SEQ ID NO: 304115 - RNA, 19 nt, Artificial Sequence
  Description of Artificial Sequence: Synthetic oligonucleotide
  Antisense strand to SEQ ID NO: 304114
auugacacugcaaauaaga

SEQ ID NO: 304116 - RNA, 19 nt, Artificial Sequence
  Description of Artificial Sequence: Synthetic oligonucleotide
  Sense strand starting at position 2331 of SEQ ID NO: 3907
ugcagugucaauuauggga

SEQ ID NO: 304117 - RNA, 19 nt, Artificial Sequence
  Description of Artificial Sequence: Synthetic oligonucleotide
  Antisense strand to SEQ ID NO: 304116
ucccauaauugacacugca

SEQ ID NO: 304118 - RNA, 19 nt, Artificial Sequence
  Description of Artificial Sequence: Synthetic oligonucleotide
  Sense strand starting at position 2335 of SEQ ID NO: 3907
gugucaauuaugggauaug

SEQ ID NO: 304119 - RNA, 19 nt, Artificial Sequence
  Description of Artificial Sequence: Synthetic oligonucleotide
  Antisense strand to SEQ ID NO: 304118
cauaucccauaauugacac

SEQ ID NO: 304120 - RNA, 19 nt, Artificial Sequence
  Description of Artificial Sequence: Synthetic oligonucleotide
  Sense strand starting at position 2473 of SEQ ID NO: 3907
agugauauaugacuuccuu

SEQ ID NO: 304121 - RNA, 19 nt, Artificial Sequence
  Description of Artificial Sequence: Synthetic oligonucleotide
  Antisense strand to SEQ ID NO: 304120
aaggaagucauauaucacu

SEQ ID NO: 304122 - RNA, 19 nt, Artificial Sequence
  Description of Artificial Sequence: Synthetic oligonucleotide
  Sense strand starting at position 2529 of SEQ ID NO: 3907
gcagucuuugguguguuau

SEQ ID NO: 304123 - RNA, 19 nt, Artificial Sequence
  Description of Artificial Sequence: Synthetic oligonucleotide
  Antisense strand to SEQ ID NO: 304122
auaacacaccaaagacugc

SEQ ID NO: 304124 - RNA, 19 nt, Artificial Sequence
  Description of Artificial Sequence: Synthetic oligonucleotide
  Sense strand starting at position 2657 of SEQ ID NO: 3907
ccacaaauucuugaagugu

SEQ ID NO: 304125 - RNA, 19 nt, Artificial Sequence
  Description of Artificial Sequence: Synthetic oligonucleotide
  Antisense strand to SEQ ID NO: 304124
acacuucaagaauuugugg

SEQ ID NO: 304126 - RNA, 19 nt, Artificial Sequence
  Description of Artificial Sequence: Synthetic oligonucleotide
  Sense strand starting at position 2835 of SEQ ID NO: 3907
uagaauccuuggguaacau

SEQ ID NO: 304127 - RNA, 19 nt, Artificial Sequence
  Description of Artificial Sequence: Synthetic oligonucleotide
  Antisense strand to SEQ ID NO: 304126
auguuacccaaggauucua

SEQ ID NO: 304128 - RNA, 19 nt, Artificial Sequence
  Description of Artificial Sequence: Synthetic oligonucleotide
  Sense strand starting at position 2844 of SEQ ID NO: 3907
uggguaacauaucugauaa

SEQ ID NO: 304129 - RNA, 19 nt, Artificial Sequence
  Description of Artificial Sequence: Synthetic oligonucleotide
  Antisense strand to SEQ ID NO: 304128
uuaucagauauguuaccca

SEQ ID NO: 304130 - RNA, 19 nt, Artificial Sequence
  Description of Artificial Sequence: Synthetic oligonucleotide
  Sense strand starting at position 3189 of SEQ ID NO: 3907
gggauguaggcugagagua

SEQ ID NO: 304131 - RNA, 19 nt, Artificial Sequence
  Description of Artificial Sequence: Synthetic oligonucleotide
  Antisense strand to SEQ ID NO: 304130
uacucucagccuacauccc

SEQ ID NO: 304132 - RNA, 19 nt, Artificial Sequence
  Description of Artificial Sequence: Synthetic oligonucleotide
  Sense strand starting at position 3273 of SEQ ID NO: 3907
acugguggcacaugaaaga

SEQ ID NO: 304133 - RNA, 19 nt, Artificial Sequence
  Description of Artificial Sequence: Synthetic oligonucleotide
  Antisense strand to SEQ ID NO: 304132
ucuuucaugugccaccagu

SEQ ID NO: 304134 - RNA, 19 nt, Artificial Sequence
  Description of Artificial Sequence: Synthetic oligonucleotide
  Sense strand starting at position 3294 of SEQ ID NO: 3907
agggaauuguauccaaguu

SEQ ID NO: 304135 - RNA, 19 nt, Artificial Sequence
  Description of Artificial Sequence: Synthetic oligonucleotide
  Antisense strand to SEQ ID NO: 304134
aacuuggauacaauucccu

SEQ ID NO: 304136 - RNA, 19 nt, Artificial Sequence
  Description of Artificial Sequence: Synthetic oligonucleotide
  Sense strand starting at position 3295 of SEQ ID NO: 3907
gggaauuguauccaaguuc

SEQ ID NO: 304137 - RNA, 19 nt, Artificial Sequence
  Description of Artificial Sequence: Synthetic oligonucleotide
  Antisense strand to SEQ ID NO: 304136
gaacuuggauacaauuccc

SEQ ID NO: 304138 - RNA, 19 nt, Artificial Sequence
  Description of Artificial Sequence: Synthetic oligonucleotide
  Sense strand starting at position 3315 of SEQ ID NO: 3907
cagauaggguuagugaauu

SEQ ID NO: 304139 - RNA, 19 nt, Artificial Sequence
  Description of Artificial Sequence: Synthetic oligonucleotide
  Antisense strand to SEQ ID NO: 304138
aauucacuaacccuaucug

SEQ ID NO: 304140 - RNA, 19 nt, Artificial Sequence
  Description of Artificial Sequence: Synthetic oligonucleotide
  Sense strand starting at position 3328 of SEQ ID NO: 3907
ugaauuuaaguuuguugca

SEQ ID NO: 304141 - RNA, 19 nt, Artificial Sequence
  Description of Artificial Sequence: Synthetic oligonucleotide
  Antisense strand to SEQ ID NO: 304140
ugcaacaaacuuaaauuca

SEQ ID NO: 304142 - RNA, 19 nt, Artificial Sequence
  Description of Artificial Sequence: Synthetic oligonucleotide
  Sense strand starting at position 3653 of SEQ ID NO: 3907
caggaaaggguuugcaauu

SEQ ID NO: 304143 - RNA, 19 nt, Artificial Sequence
  Description of Artificial Sequence: Synthetic oligonucleotide
  Antisense strand to SEQ ID NO: 304142
aauugcaaacccuuuccug

SEQ ID NO: 304144 - RNA, 19 nt, Artificial Sequence
  Description of Artificial Sequence: Synthetic oligonucleotide
  Sense strand starting at position 3654 of SEQ ID NO: 3907
aggaaaggguuugcaauua

SEQ ID NO: 304145 - RNA, 19 nt, Artificial Sequence
  Description of Artificial Sequence: Synthetic oligonucleotide
  Antisense strand to SEQ ID NO: 304144
uaauugcaaacccuuuccu

SEQ ID NO: 304146 - RNA, 19 nt, Artificial Sequence
  Description of Artificial Sequence: Synthetic oligonucleotide
  Sense strand starting at position 3666 of SEQ ID NO: 3907
gcaauuaaucuuuaguuag

SEQ ID NO: 304147 - RNA, 19 nt, Artificial Sequence
  Description of Artificial Sequence: Synthetic oligonucleotide
  Antisense strand to SEQ ID NO: 304146
cuaacuaaagauuaauugc

SEQ ID NO: 304148 - RNA, 19 nt, Artificial Sequence
  Description of Artificial Sequence: Synthetic oligonucleotide
  Sense strand starting at position 3677 of SEQ ID NO: 3907
uuaguuaggccagauaacu

SEQ ID NO: 304149 - RNA, 19 nt, Artificial Sequence
  Description of Artificial Sequence: Synthetic oligonucleotide
  Antisense strand to SEQ ID NO: 304148
aguuaucuggccuaacuaa

SEQ ID NO: 304150 - RNA, 19 nt, Artificial Sequence
  Description of Artificial Sequence: Synthetic oligonucleotide
  Sense strand starting at position 3793 of SEQ ID NO: 3907
aguugcuuugaugaauuaa

SEQ ID NO: 304151 - RNA, 19 nt, Artificial Sequence
  Description of Artificial Sequence: Synthetic oligonucleotide
  Antisense strand to SEQ ID NO: 304150
uuaauucaucaaagcaacu

SEQ ID NO: 304152 - RNA, 19 nt, Artificial Sequence
  Description of Artificial Sequence: Synthetic oligonucleotide
  Sense strand starting at position 339 of SEQ ID NO: 3908
uugcaugaggcucagacuu

SEQ ID NO: 304153 - RNA, 19 nt, Artificial Sequence
  Description of Artificial Sequence: Synthetic oligonucleotide
  Antisense strand to SEQ ID NO: 304152
aagucugagccucaugcaa

SEQ ID NO: 304154 - RNA, 19 nt, Artificial Sequence
  Description of Artificial Sequence: Synthetic oligonucleotide
  Sense strand starting at position 386 of SEQ ID NO: 3908
cccugacugcuggaaacuu

SEQ ID NO: 304155 - RNA, 19 nt, Artificial Sequence
  Description of Artificial Sequence: Synthetic oligonucleotide
  Antisense strand to SEQ ID NO: 304154
aaguuuccagcagucaggg

SEQ ID NO: 304156 - RNA, 19 nt, Artificial Sequence
  Description of Artificial Sequence: Synthetic oligonucleotide
  Sense strand starting at position 485 of SEQ ID NO: 3908
gguucuugaguuuaaauau

SEQ ID NO: 304157 - RNA, 19 nt, Artificial Sequence
  Description of Artificial Sequence: Synthetic oligonucleotide
  Antisense strand to SEQ ID NO: 304156
auauuuaaacucaagaacc

SEQ ID NO: 304158 - RNA, 19 nt, Artificial Sequence
  Description of Artificial Sequence: Synthetic oligonucleotide
  Sense strand starting at position 494 of SEQ ID NO: 3908
guuuaaauaugagucucau

SEQ ID NO: 304159 - RNA, 19 nt, Artificial Sequence
  Description of Artificial Sequence: Synthetic oligonucleotide
  Antisense strand to SEQ ID NO: 304158
augagacucauauuuaaac

SEQ ID NO: 304160 - RNA, 19 nt, Artificial Sequence
  Description of Artificial Sequence: Synthetic oligonucleotide
  Sense strand starting at position 581 of SEQ ID NO: 3908
augucauauccuugaccag

SEQ ID NO: 304161 - RNA, 19 nt, Artificial Sequence
  Description of Artificial Sequence: Synthetic oligonucleotide
  Antisense strand to SEQ ID NO: 304160
cuggucaaggauaugacau

SEQ ID NO: 304162 - RNA, 19 nt, Artificial Sequence
  Description of Artificial Sequence: Synthetic oligonucleotide
  Sense strand starting at position 582 of SEQ ID NO: 3908
ugucauauccuugaccaga

SEQ ID NO: 304163 - RNA, 19 nt, Artificial Sequence
  Description of Artificial Sequence: Synthetic oligonucleotide
  Antisense strand to SEQ ID NO: 304162
ucuggucaaggauaugaca

SEQ ID NO: 304164 - RNA, 19 nt, Artificial Sequence
  Description of Artificial Sequence: Synthetic oligonucleotide
  Sense strand starting at position 648 of SEQ ID NO: 3908
uuaggaauuuccuaaauga

SEQ ID NO: 304165 - RNA, 19 nt, Artificial Sequence
  Description of Artificial Sequence: Synthetic oligonucleotide
  Antisense strand to SEQ ID NO: 304164
ucauuuaggaaauuccuaa

SEQ ID NO: 304166 - RNA, 19 nt, Artificial Sequence
  Description of Artificial Sequence: Synthetic oligonucleotide
  Sense strand starting at position 949 of SEQ ID NO: 3908
gcuaauacugcccauauga

SEQ ID NO: 304167 - RNA, 19 nt, Artificial Sequence
  Description of Artificial Sequence: Synthetic oligonucleotide
  Antisense strand to SEQ ID NO: 304166
ucauaugggcaguauuagc

SEQ ID NO: 304168 - RNA, 19 nt, Artificial Sequence
  Description of Artificial Sequence: Synthetic oligonucleotide
  Sense strand starting at position 956 of SEQ ID NO: 3908
cugcccauaugaucaauga

SEQ ID NO: 304169 - RNA, 19 nt, Artificial Sequence
  Description of Artificial Sequence: Synthetic oligonucleotide
  Antisense strand to SEQ ID NO: 304168
ucauugaucauaugggcag

SEQ ID NO: 304170 - RNA, 19 nt, Artificial Sequence
  Description of Artificial Sequence: Synthetic oligonucleotide
  Sense strand starting at position 1093 of SEQ ID NO: 3908
ugguuuaagcucuaacaaa

SEQ ID NO: 304171 - RNA, 19 nt, Artificial Sequence
  Description of Artificial Sequence: Synthetic oligonucleotide
  Antisense strand to SEQ ID NO: 304170
uuuguuagagcuuaaacca

SEQ ID NO: 304172 - RNA, 19 nt, Artificial Sequence
  Description of Artificial Sequence: Synthetic oligonucleotide
  Sense strand starting at position 1118 of SEQ ID NO: 3908
uugaauccuuugguuaaug

SEQ ID NO: 304173 - RNA, 19 nt, Artificial Sequence
  Description of Artificial Sequence: Synthetic oligonucleotide
  Antisense strand to SEQ ID NO: 304172
cauuaaccaaaggauucaa

SEQ ID NO: 304174 - RNA, 19 nt, Artificial Sequence
  Description of Artificial Sequence: Synthetic oligonucleotide
  Sense strand starting at position 1212 of SEQ ID NO: 3908
agacaaauacggcaauagu

SEQ ID NO: 304175 - RNA, 19 nt, Artificial Sequence
  Description of Artificial Sequence: Synthetic oligonucleotide
  Antisense strand to SEQ ID NO: 304174
acuauugccguauuugucu

SEQ ID NO: 304176 - RNA, 19 nt, Artificial Sequence
  Description of Artificial Sequence: Synthetic oligonucleotide
  Sense strand starting at position 1561 of SEQ ID NO: 3908
cugcuuggugcugugugaa

SEQ ID NO: 304177 - RNA, 19 nt, Artificial Sequence
  Description of Artificial Sequence: Synthetic oligonucleotide
  Antisense strand to SEQ ID NO: 304176
uucacacagcaccaagcag

SEQ ID NO: 304178 - RNA, 19 nt, Artificial Sequence
  Description of Artificial Sequence: Synthetic oligonucleotide
  Sense strand starting at position 2124 of SEQ ID NO: 3908
ggucacauuugugaaauaa

SEQ ID NO: 304179 - RNA, 19 nt, Artificial Sequence
  Description of Artificial Sequence: Synthetic oligonucleotide
  Antisense strand to SEQ ID NO: 304178
uuauuucacaaaugugacc

SEQ ID NO: 304180 - RNA, 19 nt, Artificial Sequence
  Description of Artificial Sequence: Synthetic oligonucleotide
  Sense strand starting at position 2134 of SEQ ID NO: 3908
gugaaauaaggugguccuu

SEQ ID NO: 304181 - RNA, 19 nt, Artificial Sequence
  Description of Artificial Sequence: Synthetic oligonucleotide
  Antisense strand to SEQ ID NO: 304180
aaggaccaccuuauuucac

SEQ ID NO: 304182 - RNA, 19 nt, Artificial Sequence
  Description of Artificial Sequence: Synthetic oligonucleotide
  Sense strand starting at position 2205 of SEQ ID NO: 3908
gaggcuuucccagagaggu

SEQ ID NO: 304183 - RNA, 19 nt, Artificial Sequence
  Description of Artificial Sequence: Synthetic oligonucleotide
  Antisense strand to SEQ ID NO: 304182
accucucugggaaagccuc

SEQ ID NO: 304184 - RNA, 19 nt, Artificial Sequence
  Description of Artificial Sequence: Synthetic oligonucleotide
  Sense strand starting at position 2211 of SEQ ID NO: 3908
uucccagagagguguuauu

SEQ ID NO: 304185 - RNA, 19 nt, Artificial Sequence
  Description of Artificial Sequence: Synthetic oligonucleotide
  Antisense strand to SEQ ID NO: 304184
aauaacaccucucugggaa

SEQ ID NO: 304186 - RNA, 19 nt, Artificial Sequence
  Description of Artificial Sequence: Synthetic oligonucleotide
  Sense strand starting at position 2293 of SEQ ID NO: 3908
uucuccugccuguaggaaa

SEQ ID NO: 304187 - RNA, 19 nt, Artificial Sequence
  Description of Artificial Sequence: Synthetic oligonucleotide
  Antisense strand to SEQ ID NO: 304186
uuuccuacaggcaggagaa

SEQ ID NO: 304188 - RNA, 19 nt, Artificial Sequence
  Description of Artificial Sequence: Synthetic oligonucleotide
  Sense strand starting at position 2300 of SEQ ID NO: 3908
gccuguaggaaauguaaca

SEQ ID NO: 304189 - RNA, 19 nt, Artificial Sequence
  Description of Artificial Sequence: Synthetic oligonucleotide
  Antisense strand to SEQ ID NO: 304188
uguuacauuuccuacaggc

SEQ ID NO: 304190 - RNA, 19 nt, Artificial Sequence
  Description of Artificial Sequence: Synthetic oligonucleotide
  Sense strand starting at position 2311 of SEQ ID NO: 3908
auguaacagucauugagug

SEQ ID NO: 304191 - RNA, 19 nt, Artificial Sequence
  Description of Artificial Sequence: Synthetic oligonucleotide
  Antisense strand to SEQ ID NO: 304190
cacucaaugacuguuacau

SEQ ID NO: 304192 - RNA, 19 nt, Artificial Sequence
  Description of Artificial Sequence: Synthetic oligonucleotide
  Sense strand starting at position 2532 of SEQ ID NO: 3908
cuaggauguuuggcaacau

SEQ ID NO: 304193 - RNA, 19 nt, Artificial Sequence
  Description of Artificial Sequence: Synthetic oligonucleotide
  Antisense strand to SEQ ID NO: 304192
auguugccaaacauccuag

SEQ ID NO: 304194 - RNA, 19 nt, Artificial Sequence
  Description of Artificial Sequence: Synthetic oligonucleotide
  Sense strand starting at position 2766 of SEQ ID NO: 3908
aggauaaacacacguagau

SEQ ID NO: 304195 - RNA, 19 nt, Artificial Sequence
  Description of Artificial Sequence: Synthetic oligonucleotide
  Antisense strand to SEQ ID NO: 304194
aucuacguguguuuauccu

SEQ ID NO: 304196 - RNA, 19 nt, Artificial Sequence
  Description of Artificial Sequence: Synthetic oligonucleotide
  Sense strand starting at position 2780 of SEQ ID NO: 3908
uagauacugugcucaugga

SEQ ID NO: 304197 - RNA, 19 nt, Artificial Sequence
  Description of Artificial Sequence: Synthetic oligonucleotide
  Antisense strand to SEQ ID NO: 304196
uccaugagcacaguaucua

SEQ ID NO: 304198 - RNA, 19 nt, Artificial Sequence
  Description of Artificial Sequence: Synthetic oligonucleotide
  Sense strand starting at position 2781 of SEQ ID NO: 3908
agauacugugcucauggaa

SEQ ID NO: 304199 - RNA, 19 nt, Artificial Sequence
  Description of Artificial Sequence: Synthetic oligonucleotide
  Antisense strand to SEQ ID NO: 304198
uuccaugagcacaguaucu

SEQ ID NO: 304200 - RNA, 19 nt, Artificial Sequence
  Description of Artificial Sequence: Synthetic oligonucleotide
  Sense strand starting at position 2838 of SEQ ID NO: 3908
cuacauaaaucagugagua

SEQ ID NO: 304201 - RNA, 19 nt, Artificial Sequence
  Description of Artificial Sequence: Synthetic oligonucleotide
  Antisense strand to SEQ ID NO: 304200
uacucacugauuuauguag

SEQ ID NO: 304202 - RNA, 19 nt, Artificial Sequence
  Description of Artificial Sequence: Synthetic oligonucleotide
  Sense strand starting at position 2842 of SEQ ID NO: 3908
auaaaucagugaguaagua

SEQ ID NO: 304203 - RNA, 19 nt, Artificial Sequence
  Description of Artificial Sequence: Synthetic oligonucleotide
  Antisense strand to SEQ ID NO: 304202
uacuuacucacugauuuau

SEQ ID NO: 304204 - RNA, 19 nt, Artificial Sequence
  Description of Artificial Sequence: Synthetic oligonucleotide
  Sense strand starting at position 2846 of SEQ ID NO: 3908
aucagugaguaaguacuua

SEQ ID NO: 304205 - RNA, 19 nt, Artificial Sequence
  Description of Artificial Sequence: Synthetic oligonucleotide
  Antisense strand to SEQ ID NO: 304204
uaaguacuuacucacugau

SEQ ID NO: 304206 - RNA, 19 nt, Artificial Sequence
  Description of Artificial Sequence: Synthetic oligonucleotide
  Sense strand starting at position 2987 of SEQ ID NO: 3908
gaggauggcaugugagauu

SEQ ID NO: 304207 - RNA, 19 nt, Artificial Sequence
  Description of Artificial Sequence: Synthetic oligonucleotide
  Antisense strand to SEQ ID NO: 304206
aaucucacaugccauccuc

SEQ ID NO: 304208 - RNA, 19 nt, Artificial Sequence
  Description of Artificial Sequence: Synthetic oligonucleotide
  Sense strand starting at position 3012 of SEQ ID NO: 3908
ugccaagugggugauguau

SEQ ID NO: 304209 - RNA, 19 nt, Artificial Sequence
  Description of Artificial Sequence: Synthetic oligonucleotide
  Antisense strand to SEQ ID NO: 304208
auacaucacccacuuggca

SEQ ID NO: 304210 - RNA, 19 nt, Artificial Sequence
  Description of Artificial Sequence: Synthetic oligonucleotide
  Sense strand starting at position 3023 of SEQ ID NO: 3908
ugauguauugacuggagga

SEQ ID NO: 304211 - RNA, 19 nt, Artificial Sequence
  Description of Artificial Sequence: Synthetic oligonucleotide
  Antisense strand to SEQ ID NO: 304210
uccuccagucaauacauca

SEQ ID NO: 304212 - RNA, 19 nt, Artificial Sequence
  Description of Artificial Sequence: Synthetic oligonucleotide
  Sense strand starting at position 3123 of SEQ ID NO: 3908
aaagguguugauugagauc

SEQ ID NO: 304213 - RNA, 19 nt, Artificial Sequence
  Description of Artificial Sequence: Synthetic oligonucleotide
  Antisense strand to SEQ ID NO: 304212
gaucucaaucaacaccuuu

SEQ ID NO: 304214 - RNA, 19 nt, Artificial Sequence
  Description of Artificial Sequence: Synthetic oligonucleotide
  Sense strand starting at position 3174 of SEQ ID NO: 3908
gauugaauuugggagguga

SEQ ID NO: 304215 - RNA, 19 nt, Artificial Sequence
  Description of Artificial Sequence: Synthetic oligonucleotide
  Antisense strand to SEQ ID NO: 304214
ucaccucccaaauucaauc

SEQ ID NO: 304216 - RNA, 19 nt, Artificial Sequence
  Description of Artificial Sequence: Synthetic oligonucleotide
  Sense strand starting at position 3295 of SEQ ID NO: 3908
gaucauguacuugguauaa

SEQ ID NO: 304217 - RNA, 19 nt, Artificial Sequence
  Description of Artificial Sequence: Synthetic oligonucleotide
  Antisense strand to SEQ ID NO: 304216
uuauaccaaguacaugauc

SEQ ID NO: 304218 - RNA, 19 nt, Artificial Sequence
  Description of Artificial Sequence: Synthetic oligonucleotide
  Sense strand starting at position 3361 of SEQ ID NO: 3908
gaaugauuauugguguaua

SEQ ID NO: 304219 - RNA, 19 nt, Artificial Sequence
  Description of Artificial Sequence: Synthetic oligonucleotide
  Antisense strand to SEQ ID NO: 304218
uauacaccaauaaucauuc

SEQ ID NO: 304220 - RNA, 19 nt, Artificial Sequence
  Description of Artificial Sequence: Synthetic oligonucleotide
  Sense strand starting at position 3364 of SEQ ID NO: 3908
ugauuauugguguauaagu

SEQ ID NO: 304221 - RNA, 19 nt, Artificial Sequence
  Description of Artificial Sequence: Synthetic oligonucleotide
  Antisense strand to SEQ ID NO: 304220
acuuauacaccaauaauca

SEQ ID NO: 304222 - RNA, 19 nt, Artificial Sequence
  Description of Artificial Sequence: Synthetic oligonucleotide
  Sense strand starting at position 3366 of SEQ ID NO: 3908
auuauugguguauaaguca

SEQ ID NO: 304223 - RNA, 19 nt, Artificial Sequence
  Description of Artificial Sequence: Synthetic oligonucleotide
  Antisense strand to SEQ ID NO: 304222
ugacuuauacaccaauaau

SEQ ID NO: 304224 - RNA, 19 nt, Artificial Sequence
  Description of Artificial Sequence: Synthetic oligonucleotide
  Sense strand starting at position 3768 of SEQ ID NO: 3908
guuugcuauuucuuccauu

SEQ ID NO: 304225 - RNA, 19 nt, Artificial Sequence
  Description of Artificial Sequence: Synthetic oligonucleotide
  Antisense strand to SEQ ID NO: 304224
aauggaagaaauagcaaac

SEQ ID NO: 304226 - RNA, 19 nt, Artificial Sequence
  Description of Artificial Sequence: Synthetic oligonucleotide
  Sense strand starting at position 3831 of SEQ ID NO: 3908
gcaucuuguaugcaggaga

SEQ ID NO: 304227 - RNA, 19 nt, Artificial Sequence
  Description of Artificial Sequence: Synthetic oligonucleotide
  Antisense strand to SEQ ID NO: 304226
ucuccugcauacaagaugc

SEQ ID NO: 304228 - RNA, 19 nt, Artificial Sequence
  Description of Artificial Sequence: Synthetic oligonucleotide
  Sense strand starting at position 3842 of SEQ ID NO: 3908
gcaggagauccuuagcaaa

SEQ ID NO: 304229 - RNA, 19 nt, Artificial Sequence
  Description of Artificial Sequence: Synthetic oligonucleotide
  Antisense strand to SEQ ID NO: 304228
uuugcuaaggaucuccugc

SEQ ID NO: 304230 - RNA, 19 nt, Artificial Sequence
  Description of Artificial Sequence: Synthetic oligonucleotide
  Sense strand starting at position 3915 of SEQ ID NO: 3908
auaucuauagauggcaaau

SEQ ID NO: 304231 - RNA, 19 nt, Artificial Sequence
  Description of Artificial Sequence: Synthetic oligonucleotide
  Antisense strand to SEQ ID NO: 304230
auuugccaucuauagauau

SEQ ID NO: 304232 - RNA, 19 nt, Artificial Sequence
  Description of Artificial Sequence: Synthetic oligonucleotide
  Sense strand starting at position 9 of SEQ ID NO: 3909
accaccucccugggaaauu

SEQ ID NO: 304233 - RNA, 19 nt, Artificial Sequence
  Description of Artificial Sequence: Synthetic oligonucleotide
  Antisense strand to SEQ ID NO: 304232
aauuucccagggagguggu

SEQ ID NO: 304234 - RNA, 19 nt, Artificial Sequence
  Description of Artificial Sequence: Synthetic oligonucleotide
  Sense strand starting at position 928 of SEQ ID NO: 3909
gaggucagcucuguaugga

SEQ ID NO: 304235 - RNA, 19 nt, Artificial Sequence
  Description of Artificial Sequence: Synthetic oligonucleotide
  Antisense strand to SEQ ID NO: 304234
uccauacagagcugaccuc

SEQ ID NO: 304236 - RNA, 19 nt, Artificial Sequence
  Description of Artificial Sequence: Synthetic oligonucleotide
  Sense strand starting at position 929 of SEQ ID NO: 3909
aggucagcucuguauggau

SEQ ID NO: 304237 - RNA, 19 nt, Artificial Sequence
  Description of Artificial Sequence: Synthetic oligonucleotide
  Antisense strand to SEQ ID NO: 304236
auccauacagagcugaccu

SEQ ID NO: 304238 - RNA, 19 nt, Artificial Sequence
  Description of Artificial Sequence: Synthetic oligonucleotide
  Sense strand starting at position 1534 of SEQ ID NO: 3909
cccagacaucccugccaga

SEQ ID NO: 304239 - RNA, 19 nt, Artificial Sequence
  Description of Artificial Sequence: Synthetic oligonucleotide
  Antisense strand to SEQ ID NO: 304238
ucuggcagggaugucuggg

SEQ ID NO: 304240 - RNA, 19 nt, Artificial Sequence
  Description of Artificial Sequence: Synthetic oligonucleotide
  Sense strand starting at position 1556 of SEQ ID NO: 3909
acagaaacaucugaagaca

SEQ ID NO: 304241 - RNA, 19 nt, Artificial Sequence
  Description of Artificial Sequence: Synthetic oligonucleotide
  Antisense strand to SEQ ID NO: 304240
ugucuucagauguuucugu

SEQ ID NO: 304242 - RNA, 19 nt, Artificial Sequence
  Description of Artificial Sequence: Synthetic oligonucleotide
  Sense strand starting at position 1605 of SEQ ID NO: 3909
uugccugacccagagacau

SEQ ID NO: 304243 - RNA, 19 nt, Artificial Sequence
  Description of Artificial Sequence: Synthetic oligonucleotide
  Antisense strand to SEQ ID NO: 304242
augucucugggucaggcaa

SEQ ID NO: 304244 - RNA, 19 nt, Artificial Sequence
  Description of Artificial Sequence: Synthetic oligonucleotide
  Sense strand starting at position 1654 of SEQ ID NO: 3909
uaaucugaucuguggucuu

SEQ ID NO: 304245 - RNA, 19 nt, Artificial Sequence
  Description of Artificial Sequence: Synthetic oligonucleotide
  Antisense strand to SEQ ID NO: 304244
aagaccacagaucagauua

SEQ ID NO: 304246 - RNA, 19 nt, Artificial Sequence
  Description of Artificial Sequence: Synthetic oligonucleotide
  Sense strand starting at position 1666 of SEQ ID NO: 3909
uggucuugacagcaucagu

SEQ ID NO: 304247 - RNA, 19 nt, Artificial Sequence
  Description of Artificial Sequence: Synthetic oligonucleotide
  Antisense strand to SEQ ID NO: 304246
acugaugcugucaagacca

SEQ ID NO: 304248 - RNA, 19 nt, Artificial Sequence
  Description of Artificial Sequence: Synthetic oligonucleotide
  Sense strand starting at position 1671 of SEQ ID NO: 3909
uugacagcaucaguaucaa

SEQ ID NO: 304249 - RNA, 19 nt, Artificial Sequence
  Description of Artificial Sequence: Synthetic oligonucleotide
  Antisense strand to SEQ ID NO: 304248
uugauacugaugcugucaa

SEQ ID NO: 304250 - RNA, 19 nt, Artificial Sequence
  Description of Artificial Sequence: Synthetic oligonucleotide
  Sense strand starting at position 1788 of SEQ ID NO: 3909
ucaccuuuccugcagagga

SEQ ID NO: 304251 - RNA, 19 nt, Artificial Sequence
  Description of Artificial Sequence: Synthetic oligonucleotide
  Antisense strand to SEQ ID NO: 304250
uccucugcaggaaagguga

SEQ ID NO: 304252 - RNA, 19 nt, Artificial Sequence
  Description of Artificial Sequence: Synthetic oligonucleotide
  Sense strand starting at position 2337 of SEQ ID NO: 3909
gacgcaggugcagagaaau

SEQ ID NO: 304253 - RNA, 19 nt, Artificial Sequence
  Description of Artificial Sequence: Synthetic oligonucleotide
  Antisense strand to SEQ ID NO: 304252
auuucucugcaccugcguc

SEQ ID NO: 304254 - RNA, 19 nt, Artificial Sequence
  Description of Artificial Sequence: Synthetic oligonucleotide
  Sense strand starting at position 2362 of SEQ ID NO: 3909
agggcuucuggguggagaa

SEQ ID NO: 304255 - RNA, 19 nt, Artificial Sequence
  Description of Artificial Sequence: Synthetic oligonucleotide
  Antisense strand to SEQ ID NO: 304254
uucuccacccagaagcccu

SEQ ID NO: 304256 - RNA, 19 nt, Artificial Sequence
  Description of Artificial Sequence: Synthetic oligonucleotide
  Sense strand starting at position 2375 of SEQ ID NO: 3909
ggagaagaauguuugcuga

SEQ ID NO: 304257 - RNA, 19 nt, Artificial Sequence
  Description of Artificial Sequence: Synthetic oligonucleotide
  Antisense strand to SEQ ID NO: 304256
ucagcaaacauucuucucc

SEQ ID NO: 304258 - RNA, 19 nt, Artificial Sequence
  Description of Artificial Sequence: Synthetic oligonucleotide
  Sense strand starting at position 2377 of SEQ ID NO: 3909
agaagaauguuugcugaga

SEQ ID NO: 304259 - RNA, 19 nt, Artificial Sequence
  Description of Artificial Sequence: Synthetic oligonucleotide
  Antisense strand to SEQ ID NO: 304258
ucucagcaaacauucuucu

SEQ ID NO: 304260 - RNA, 19 nt, Artificial Sequence
  Description of Artificial Sequence: Synthetic oligonucleotide
  Sense strand starting at position 2378 of SEQ ID NO: 3909
gaagaauguuugcugagau

SEQ ID NO: 304261 - RNA, 19 nt, Artificial Sequence
  Description of Artificial Sequence: Synthetic oligonucleotide
  Antisense strand to SEQ ID NO: 304260
aucucagcaaacauucuuc

SEQ ID NO: 304262 - RNA, 19 nt, Artificial Sequence
  Description of Artificial Sequence: Synthetic oligonucleotide
  Sense strand starting at position 2489 of SEQ ID NO: 3909
ccaggaaucucacuucuga

SEQ ID NO: 304263 - RNA, 19 nt, Artificial Sequence
  Description of Artificial Sequence: Synthetic oligonucleotide
  Antisense strand to SEQ ID NO: 304262
ucagaagugagauuccugg

SEQ ID NO: 304264 - RNA, 19 nt, Artificial Sequence
  Description of Artificial Sequence: Synthetic oligonucleotide
  Sense strand starting at position 2521 of SEQ ID NO: 3909
uuagcugucaaaugugaga

SEQ ID NO: 304265 - RNA, 19 nt, Artificial Sequence
  Description of Artificial Sequence: Synthetic oligonucleotide
  Antisense strand to SEQ ID NO: 304264
ucucacauuugacagcuaa

SEQ ID NO: 304266 - RNA, 19 nt, Artificial Sequence
  Description of Artificial Sequence: Synthetic oligonucleotide
  Sense strand starting at position 2523 of SEQ ID NO: 3909
agcugucaaaugugagaua

SEQ ID NO: 304267 - RNA, 19 nt, Artificial Sequence
  Description of Artificial Sequence: Synthetic oligonucleotide
  Antisense strand to SEQ ID NO: 304266
uaucucacauuugacagcu

SEQ ID NO: 304268 - RNA, 19 nt, Artificial Sequence
  Description of Artificial Sequence: Synthetic oligonucleotide
  Sense strand starting at position 2538 of SEQ ID NO: 3909
gauaguaaucucugcuguu

SEQ ID NO: 304269 - RNA, 19 nt, Artificial Sequence
  Description of Artificial Sequence: Synthetic oligonucleotide
  Antisense strand to SEQ ID NO: 304268
aacagcagagauuacuauc

SEQ ID NO: 304270 - RNA, 19 nt, Artificial Sequence
  Description of Artificial Sequence: Synthetic oligonucleotide
  Sense strand starting at position 2572 of SEQ ID NO: 3909
uaggacauuugugacugua

SEQ ID NO: 304271 - RNA, 19 nt, Artificial Sequence
  Description of Artificial Sequence: Synthetic oligonucleotide
  Antisense strand to SEQ ID NO: 304270
uacagucacaaauguccua

SEQ ID NO: 304272 - RNA, 19 nt, Artificial Sequence
  Description of Artificial Sequence: Synthetic oligonucleotide
  Sense strand starting at position 2606 of SEQ ID NO: 3909
uaagcugagcuccaguuaa

SEQ ID NO: 304273 - RNA, 19 nt, Artificial Sequence
  Description of Artificial Sequence: Synthetic oligonucleotide
  Antisense strand to SEQ ID NO: 304272
uuaacuggagcucagcuua

SEQ ID NO: 304274 - RNA, 19 nt, Artificial Sequence
  Description of Artificial Sequence: Synthetic oligonucleotide
  Sense strand starting at position 2675 of SEQ ID NO: 3909
uuggcagaaaugugauaaa

SEQ ID NO: 304275 - RNA, 19 nt, Artificial Sequence
  Description of Artificial Sequence: Synthetic oligonucleotide
  Antisense strand to SEQ ID NO: 304274
uuuaucacauuucugccaa

SEQ ID NO: 304276 - RNA, 19 nt, Artificial Sequence
  Description of Artificial Sequence: Synthetic oligonucleotide
  Sense strand starting at position 2714 of SEQ ID NO: 3909
auuguaggaguuuaccaua

SEQ ID NO: 304277 - RNA, 19 nt, Artificial Sequence
  Description of Artificial Sequence: Synthetic oligonucleotide
  Antisense strand to SEQ ID NO: 304276
uaugguaaacuccuacaau

SEQ ID NO: 304278 - RNA, 19 nt, Artificial Sequence
  Description of Artificial Sequence: Synthetic oligonucleotide
  Sense strand starting at position 2747 of SEQ ID NO: 3909
uuuguacaugcaugaaguu

SEQ ID NO: 304279 - RNA, 19 nt, Artificial Sequence
  Description of Artificial Sequence: Synthetic oligonucleotide
  Antisense strand to SEQ ID NO: 304278
aacuucaugcauguacaaa

SEQ ID NO: 304280 - RNA, 19 nt, Artificial Sequence
  Description of Artificial Sequence: Synthetic oligonucleotide
  Sense strand starting at position 2802 of SEQ ID NO: 3909
aguuuagagcaccauauga

SEQ ID NO: 304281 - RNA, 19 nt, Artificial Sequence
  Description of Artificial Sequence: Synthetic oligonucleotide
  Antisense strand to SEQ ID NO: 304280
ucauauggugcucuaaacu

SEQ ID NO: 304282 - RNA, 19 nt, Artificial Sequence
  Description of Artificial Sequence: Synthetic oligonucleotide
  Sense strand starting at position 2889 of SEQ ID NO: 3909
aucagaugcuggccacuaa

SEQ ID NO: 304283 - RNA, 19 nt, Artificial Sequence
  Description of Artificial Sequence: Synthetic oligonucleotide
  Antisense strand to SEQ ID NO: 304282
uuaguggccagcaucugau

SEQ ID NO: 304284 - RNA, 19 nt, Artificial Sequence
  Description of Artificial Sequence: Synthetic oligonucleotide
  Sense strand starting at position 2931 of SEQ ID NO: 3909
uucuaaucacccgguuauu

SEQ ID NO: 304285 - RNA, 19 nt, Artificial Sequence
  Description of Artificial Sequence: Synthetic oligonucleotide
  Antisense strand to SEQ ID NO: 304284
aauaaccgggugauuagaa

SEQ ID NO: 304286 - RNA, 19 nt, Artificial Sequence
  Description of Artificial Sequence: Synthetic oligonucleotide
  Sense strand starting at position 2942 of SEQ ID NO: 3909
cgguuauuauagcugaaga

SEQ ID NO: 304287 - RNA, 19 nt, Artificial Sequence
  Description of Artificial Sequence: Synthetic oligonucleotide
  Antisense strand to SEQ ID NO: 304286
ucuucagcuauaauaaccg

SEQ ID NO: 304288 - RNA, 19 nt, Artificial Sequence
  Description of Artificial Sequence: Synthetic oligonucleotide
  Sense strand starting at position 2943 of SEQ ID NO: 3909
gguuauuauagcugaagau

SEQ ID NO: 304289 - RNA, 19 nt, Artificial Sequence
  Description of Artificial Sequence: Synthetic oligonucleotide
  Antisense strand to SEQ ID NO: 304288
aucuucagcuauaauaacc

SEQ ID NO: 304290 - RNA, 19 nt, Artificial Sequence
  Description of Artificial Sequence: Synthetic oligonucleotide
  Sense strand starting at position 2944 of SEQ ID NO: 3909
guuauuauagcugaagauc

SEQ ID NO: 304291 - RNA, 19 nt, Artificial Sequence
  Description of Artificial Sequence: Synthetic oligonucleotide
  Antisense strand to SEQ ID NO: 304290
gaucuucagcuauaauaac

SEQ ID NO: 304292 - RNA, 19 nt, Artificial Sequence
  Description of Artificial Sequence: Synthetic oligonucleotide
  Sense strand starting at position 3137 of SEQ ID NO: 3909
caguuuccucugcgacaga

SEQ ID NO: 304293 - RNA, 19 nt, Artificial Sequence
  Description of Artificial Sequence: Synthetic oligonucleotide
  Antisense strand to SEQ ID NO: 304292
ucugucgcagaggaaacug

SEQ ID NO: 304294 - RNA, 19 nt, Artificial Sequence
  Description of Artificial Sequence: Synthetic oligonucleotide
  Sense strand starting at position 3456 of SEQ ID NO: 3909
gagcaagauuucguccucu

SEQ ID NO: 304295 - RNA, 19 nt, Artificial Sequence
  Description of Artificial Sequence: Synthetic oligonucleotide
  Antisense strand to SEQ ID NO: 304294
agaggacgaaaucuugcuc

SEQ ID NO: 304296 - RNA, 19 nt, Artificial Sequence
  Description of Artificial Sequence: Synthetic oligonucleotide
  Sense strand starting at position 3468 of SEQ ID NO: 3909
guccucuccuagcuggaaa

SEQ ID NO: 304297 - RNA, 19 nt, Artificial Sequence
  Description of Artificial Sequence: Synthetic oligonucleotide
  Antisense strand to SEQ ID NO: 304296
uuuccagcuaggagaggac

SEQ ID NO: 304298 - RNA, 19 nt, Artificial Sequence
  Description of Artificial Sequence: Synthetic oligonucleotide
  Sense strand starting at position 3543 of SEQ ID NO: 3909
gcagccucaaucugugaga

SEQ ID NO: 304299 - RNA, 19 nt, Artificial Sequence
  Description of Artificial Sequence: Synthetic oligonucleotide
  Antisense strand to SEQ ID NO: 304298
ucucacagauugaggcugc

SEQ ID NO: 304300 - RNA, 19 nt, Artificial Sequence
  Description of Artificial Sequence: Synthetic oligonucleotide
  Sense strand starting at position 3545 of SEQ ID NO: 3909
agccucaaucugugagagu

SEQ ID NO: 304301 - RNA, 19 nt, Artificial Sequence
  Description of Artificial Sequence: Synthetic oligonucleotide
  Antisense strand to SEQ ID NO: 304300
acucucacagauugaggcu

SEQ ID NO: 304302 - RNA, 19 nt, Artificial Sequence
  Description of Artificial Sequence: Synthetic oligonucleotide
  Sense strand starting at position 3563 of SEQ ID NO: 3909
uguggaugcuguccacaaa

SEQ ID NO: 304303 - RNA, 19 nt, Artificial Sequence
  Description of Artificial Sequence: Synthetic oligonucleotide
  Antisense strand to SEQ ID NO: 304302
uuuguggacagcauccaca

SEQ ID NO: 304304 - RNA, 19 nt, Artificial Sequence
  Description of Artificial Sequence: Synthetic oligonucleotide
  Sense strand starting at position 3564 of SEQ ID NO: 3909
guggaugcuguccacaaau

SEQ ID NO: 304305 - RNA, 19 nt, Artificial Sequence
  Description of Artificial Sequence: Synthetic oligonucleotide
  Antisense strand to SEQ ID NO: 304304
auuuguggacagcauccac

SEQ ID NO: 304306 - RNA, 19 nt, Artificial Sequence
  Description of Artificial Sequence: Synthetic oligonucleotide
  Sense strand starting at position 3774 of SEQ ID NO: 3909
gucagcucugcuuagauga

SEQ ID NO: 304307 - RNA, 19 nt, Artificial Sequence
  Description of Artificial Sequence: Synthetic oligonucleotide
  Antisense strand to SEQ ID NO: 304306
ucaucuaagcagagcugac

SEQ ID NO: 304308 - RNA, 19 nt, Artificial Sequence
  Description of Artificial Sequence: Synthetic oligonucleotide
  Sense strand starting at position 3782 of SEQ ID NO: 3909
ugcuuagaugagggaaguu

SEQ ID NO: 304309 - RNA, 19 nt, Artificial Sequence
  Description of Artificial Sequence: Synthetic oligonucleotide
  Antisense strand to SEQ ID NO: 304308
aacuucccucaucuaagca

SEQ ID NO: 304310 - RNA, 19 nt, Artificial Sequence
  Description of Artificial Sequence: Synthetic oligonucleotide
  Sense strand starting at position 3939 of SEQ ID NO: 3909
guauuaucccaacggacau

SEQ ID NO: 304311 - RNA, 19 nt, Artificial Sequence
  Description of Artificial Sequence: Synthetic oligonucleotide
  Antisense strand to SEQ ID NO: 304310
auguccguugggauaauac

SEQ ID NO: 304312 - RNA, 19 nt, Artificial Sequence
  Description of Artificial Sequence: Synthetic oligonucleotide
  Sense strand starting at position 103 of SEQ ID NO: 3910
acucuauggucaucugauc

SEQ ID NO: 304313 - RNA, 19 nt, Artificial Sequence
  Description of Artificial Sequence: Synthetic oligonucleotide
  Antisense strand to SEQ ID NO: 304312
gaucagaugaccauagagu

SEQ ID NO: 304314 - RNA, 19 nt, Artificial Sequence
  Description of Artificial Sequence: Synthetic oligonucleotide
  Sense strand starting at position 114 of SEQ ID NO: 3910
aucugaucuuaugcauaug

SEQ ID NO: 304315 - RNA, 19 nt, Artificial Sequence
  Description of Artificial Sequence: Synthetic oligonucleotide
  Antisense strand to SEQ ID NO: 304314
cauaugcauaagaucagau

SEQ ID NO: 304316 - RNA, 19 nt, Artificial Sequence
  Description of Artificial Sequence: Synthetic oligonucleotide
  Sense strand starting at position 168 of SEQ ID NO: 3910
aggaccaagucuucuuaga

SEQ ID NO: 304317 - RNA, 19 nt, Artificial Sequence
  Description of Artificial Sequence: Synthetic oligonucleotide
  Antisense strand to SEQ ID NO: 304316
ucuaagaagacuugguccu

SEQ ID NO: 304318 - RNA, 19 nt, Artificial Sequence
  Description of Artificial Sequence: Synthetic oligonucleotide
  Sense strand starting at position 179 of SEQ ID NO: 3910
uucuuagauucccuuaugu

SEQ ID NO: 304319 - RNA, 19 nt, Artificial Sequence
  Description of Artificial Sequence: Synthetic oligonucleotide
  Antisense strand to SEQ ID NO: 304318
acauaagggaaucuaagaa

SEQ ID NO: 304320 - RNA, 19 nt, Artificial Sequence
  Description of Artificial Sequence: Synthetic oligonucleotide
  Sense strand starting at position 181 of SEQ ID NO: 3910
cuuagauucccuuauguga

SEQ ID NO: 304321 - RNA, 19 nt, Artificial Sequence
  Description of Artificial Sequence: Synthetic oligonucleotide
  Antisense strand to SEQ ID NO: 304320
ucacauaagggaaucuaag

SEQ ID NO: 304322 - RNA, 19 nt, Artificial Sequence
  Description of Artificial Sequence: Synthetic oligonucleotide
  Sense strand starting at position 192 of SEQ ID NO: 3910
uuaugugaguucuugacug

SEQ ID NO: 304323 - RNA, 19 nt, Artificial Sequence
  Description of Artificial Sequence: Synthetic oligonucleotide
  Antisense strand to SEQ ID NO: 304322
cagucaagaacucacauaa

SEQ ID NO: 304324 - RNA, 19 nt, Artificial Sequence
  Description of Artificial Sequence: Synthetic oligonucleotide
  Sense strand starting at position 275 of SEQ ID NO: 3910
gagagaagcucaguaugau

SEQ ID NO: 304325 - RNA, 19 nt, Artificial Sequence
  Description of Artificial Sequence: Synthetic oligonucleotide
  Antisense strand to SEQ ID NO: 304324
aucauacugagcuucucuc

SEQ ID NO: 304326 - RNA, 19 nt, Artificial Sequence
  Description of Artificial Sequence: Synthetic oligonucleotide
  Sense strand starting at position 317 of SEQ ID NO: 3910
gggcguccgguguuaacau

SEQ ID NO: 304327 - RNA, 19 nt, Artificial Sequence
  Description of Artificial Sequence: Synthetic oligonucleotide
  Antisense strand to SEQ ID NO: 304326
auguuaacaccggacgccc

SEQ ID NO: 304328 - RNA, 19 nt, Artificial Sequence
  Description of Artificial Sequence: Synthetic oligonucleotide
  Sense strand starting at position 325 of SEQ ID NO: 3910
gguguuaacauguacauag

SEQ ID NO: 304329 - RNA, 19 nt, Artificial Sequence
  Description of Artificial Sequence: Synthetic oligonucleotide
  Antisense strand to SEQ ID NO: 304328
cuauguacauguuaacacc

SEQ ID NO: 304330 - RNA, 19 nt, Artificial Sequence
  Description of Artificial Sequence: Synthetic oligonucleotide
  Sense strand starting at position 484 of SEQ ID NO: 3910
ggauucaaguuggcugauu

SEQ ID NO: 304331 - RNA, 19 nt, Artificial Sequence
  Description of Artificial Sequence: Synthetic oligonucleotide
  Antisense strand to SEQ ID NO: 304330
aaucagccaacuugaaucc

SEQ ID NO: 304332 - RNA, 19 nt, Artificial Sequence
  Description of Artificial Sequence: Synthetic oligonucleotide
  Sense strand starting at position 618 of SEQ ID NO: 3910
ggucaaucccucugggaua

SEQ ID NO: 304333 - RNA, 19 nt, Artificial Sequence
  Description of Artificial Sequence: Synthetic oligonucleotide
  Antisense strand to SEQ ID NO: 304332
uaucccagagggauugacc

SEQ ID NO: 304334 - RNA, 19 nt, Artificial Sequence
  Description of Artificial Sequence: Synthetic oligonucleotide
  Sense strand starting at position 844 of SEQ ID NO: 3910
aguggugagcaugaucaga

SEQ ID NO: 304335 - RNA, 19 nt, Artificial Sequence
  Description of Artificial Sequence: Synthetic oligonucleotide
  Antisense strand to SEQ ID NO: 304334
ucugaucaugcucaccacu

SEQ ID NO: 304336 - RNA, 19 nt, Artificial Sequence
  Description of Artificial Sequence: Synthetic oligonucleotide
  Sense strand starting at position 846 of SEQ ID NO: 3910
uggugagcaugaucagaaa

SEQ ID NO: 304337 - RNA, 19 nt, Artificial Sequence
  Description of Artificial Sequence: Synthetic oligonucleotide
  Antisense strand to SEQ ID NO: 304336
uuucugaucaugcucacca

SEQ ID NO: 304338 - RNA, 19 nt, Artificial Sequence
  Description of Artificial Sequence: Synthetic oligonucleotide
  Sense strand starting at position 857 of SEQ ID NO: 3910
aucagaaaucuguauguca

SEQ ID NO: 304339 - RNA, 19 nt, Artificial Sequence
  Description of Artificial Sequence: Synthetic oligonucleotide
  Antisense strand to SEQ ID NO: 304338
ugacauacagauuucugau

SEQ ID NO: 304340 - RNA, 19 nt, Artificial Sequence
  Description of Artificial Sequence: Synthetic oligonucleotide
  Sense strand starting at position 860 of SEQ ID NO: 3910
agaaaucuguaugucacua

SEQ ID NO: 304341 - RNA, 19 nt, Artificial Sequence
  Description of Artificial Sequence: Synthetic oligonucleotide
  Antisense strand to SEQ ID NO: 304340
uagugacauacagauuucu

SEQ ID NO: 304342 - RNA, 19 nt, Artificial Sequence
  Description of Artificial Sequence: Synthetic oligonucleotide
  Sense strand starting at position 1006 of SEQ ID NO: 3910
ucacaugaucaguggaugu

SEQ ID NO: 304343 - RNA, 19 nt, Artificial Sequence
  Description of Artificial Sequence: Synthetic oligonucleotide
  Antisense strand to SEQ ID NO: 304342
acauccacugaucauguga

SEQ ID NO: 304344 - RNA, 19 nt, Artificial Sequence
  Description of Artificial Sequence: Synthetic oligonucleotide
  Sense strand starting at position 1010 of SEQ ID NO: 3910
augaucaguggauguuaua

SEQ ID NO: 304345 - RNA, 19 nt, Artificial Sequence
  Description of Artificial Sequence: Synthetic oligonucleotide
  Antisense strand to SEQ ID NO: 304344
uauaacauccacugaucau

SEQ ID NO: 304346 - RNA, 19 nt, Artificial Sequence
  Description of Artificial Sequence: Synthetic oligonucleotide
  Sense strand starting at position 1019 of SEQ ID NO: 3910
ggauguuauaacugguaga

SEQ ID NO: 304347 - RNA, 19 nt, Artificial Sequence
  Description of Artificial Sequence: Synthetic oligonucleotide
  Antisense strand to SEQ ID NO: 304346
ucuaccaguuauaacaucc

SEQ ID NO: 304348 - RNA, 19 nt, Artificial Sequence
  Description of Artificial Sequence: Synthetic oligonucleotide
  Sense strand starting at position 1020 of SEQ ID NO: 3910
gauguuauaacugguagag

SEQ ID NO: 304349 - RNA, 19 nt, Artificial Sequence
  Description of Artificial Sequence: Synthetic oligonucleotide
  Antisense strand to SEQ ID NO: 304348
cucuaccaguuauaacauc

SEQ ID NO: 304350 - RNA, 19 nt, Artificial Sequence
  Description of Artificial Sequence: Synthetic oligonucleotide
  Sense strand starting at position 1068 of SEQ ID NO: 3910
uugcuuuacagauggagaa

SEQ ID NO: 304351 - RNA, 19 nt, Artificial Sequence
  Description of Artificial Sequence: Synthetic oligonucleotide
  Antisense strand to SEQ ID NO: 304350
uucuccaucuguaaagcaa

SEQ ID NO: 304352 - RNA, 19 nt, Artificial Sequence
  Description of Artificial Sequence: Synthetic oligonucleotide
  Sense strand starting at position 1205 of SEQ ID NO: 3910
gggacuuaaccaggagugu

SEQ ID NO: 304353 - RNA, 19 nt, Artificial Sequence
  Description of Artificial Sequence: Synthetic oligonucleotide
  Antisense strand to SEQ ID NO: 304352
acacuccugguuaaguccc

SEQ ID NO: 304354 - RNA, 19 nt, Artificial Sequence
  Description of Artificial Sequence: Synthetic oligonucleotide
  Sense strand starting at position 1349 of SEQ ID NO: 3910
ucaguaaaucagcaucaga

SEQ ID NO: 304355 - RNA, 19 nt, Artificial Sequence
  Description of Artificial Sequence: Synthetic oligonucleotide
  Antisense strand to SEQ ID NO: 304354
ucugaugcugauuuacuga

SEQ ID NO: 304356 - RNA, 19 nt, Artificial Sequence
  Description of Artificial Sequence: Synthetic oligonucleotide
  Sense strand starting at position 1544 of SEQ ID NO: 3910
guagaauuaagauggcgaa

SEQ ID NO: 304357 - RNA, 19 nt, Artificial Sequence
  Description of Artificial Sequence: Synthetic oligonucleotide
  Antisense strand to SEQ ID NO: 304356
uucgccaucuuaauucuac

SEQ ID NO: 304358 - RNA, 19 nt, Artificial Sequence
  Description of Artificial Sequence: Synthetic oligonucleotide
  Sense strand starting at position 1575 of SEQ ID NO: 3910
gggaguaagugugcccaca

SEQ ID NO: 304359 - RNA, 19 nt, Artificial Sequence
  Description of Artificial Sequence: Synthetic oligonucleotide
  Antisense strand to SEQ ID NO: 304358
ugugggcacacuuacuccc

SEQ ID NO: 304360 - RNA, 19 nt, Artificial Sequence
  Description of Artificial Sequence: Synthetic oligonucleotide
  Sense strand starting at position 1655 of SEQ ID NO: 3910
gguggauucugcuuuacaa

SEQ ID NO: 304361 - RNA, 19 nt, Artificial Sequence
  Description of Artificial Sequence: Synthetic oligonucleotide
  Antisense strand to SEQ ID NO: 304360
uuguaaagcagaauccacc

SEQ ID NO: 304362 - RNA, 19 nt, Artificial Sequence
  Description of Artificial Sequence: Synthetic oligonucleotide
  Sense strand starting at position 1657 of SEQ ID NO: 3910
uggauucugcuuuacaagu

SEQ ID NO: 304363 - RNA, 19 nt, Artificial Sequence
  Description of Artificial Sequence: Synthetic oligonucleotide
  Antisense strand to SEQ ID NO: 304362
acuuguaaagcagaaucca

SEQ ID NO: 304364 - RNA, 19 nt, Artificial Sequence
  Description of Artificial Sequence: Synthetic oligonucleotide
  Sense strand starting at position 1712 of SEQ ID NO: 3910
uggguuuaggucugggaag

SEQ ID NO: 304365 - RNA, 19 nt, Artificial Sequence
  Description of Artificial Sequence: Synthetic oligonucleotide
  Antisense strand to SEQ ID NO: 304364
cuucccagaccuaaaccca

SEQ ID NO: 304366 - RNA, 19 nt, Artificial Sequence
  Description of Artificial Sequence: Synthetic oligonucleotide
  Sense strand starting at position 1989 of SEQ ID NO: 3910
cuaacauauugucugagga

SEQ ID NO: 304367 - RNA, 19 nt, Artificial Sequence
  Description of Artificial Sequence: Synthetic oligonucleotide
  Antisense strand to SEQ ID NO: 304366
uccucagacaauauguuag

SEQ ID NO: 304368 - RNA, 19 nt, Artificial Sequence
  Description of Artificial Sequence: Synthetic oligonucleotide
  Sense strand starting at position 1990 of SEQ ID NO: 3910
uaacauauugucugaggac

SEQ ID NO: 304369 - RNA, 19 nt, Artificial Sequence
  Description of Artificial Sequence: Synthetic oligonucleotide
  Antisense strand to SEQ ID NO: 304368
guccucagacaauauguua

SEQ ID NO: 304370 - RNA, 19 nt, Artificial Sequence
  Description of Artificial Sequence: Synthetic oligonucleotide
  Sense strand starting at position 2664 of SEQ ID NO: 3910
uuucucucagcuugacaga

SEQ ID NO: 304371 - RNA, 19 nt, Artificial Sequence
  Description of Artificial Sequence: Synthetic oligonucleotide
  Antisense strand to SEQ ID NO: 304370
ucugucaagcugagagaaa

SEQ ID NO: 304372 - RNA, 19 nt, Artificial Sequence
  Description of Artificial Sequence: Synthetic oligonucleotide
  Sense strand starting at position 2665 of SEQ ID NO: 3910
uucucucagcuugacagaa

SEQ ID NO: 304373 - RNA, 19 nt, Artificial Sequence
  Description of Artificial Sequence: Synthetic oligonucleotide
  Antisense strand to SEQ ID NO: 304372
uucugucaagcugagagaa

SEQ ID NO: 304374 - RNA, 19 nt, Artificial Sequence
  Description of Artificial Sequence: Synthetic oligonucleotide
  Sense strand starting at position 2719 of SEQ ID NO: 3910
cuuccuucucucuagggaa

SEQ ID NO: 304375 - RNA, 19 nt, Artificial Sequence
  Description of Artificial Sequence: Synthetic oligonucleotide
  Antisense strand to SEQ ID NO: 304374
uucccuagagagaaggaag

SEQ ID NO: 304376 - RNA, 19 nt, Artificial Sequence
  Description of Artificial Sequence: Synthetic oligonucleotide
  Sense strand starting at position 3022 of SEQ ID NO: 3910
acaugaagguuucucaauc

SEQ ID NO: 304377 - RNA, 19 nt, Artificial Sequence
  Description of Artificial Sequence: Synthetic oligonucleotide
  Antisense strand to SEQ ID NO: 304376
gauugagaaaccuucaugu

SEQ ID NO: 304378 - RNA, 19 nt, Artificial Sequence
  Description of Artificial Sequence: Synthetic oligonucleotide
  Sense strand starting at position 3071 of SEQ ID NO: 3910
uucguuauuguaggagauc

SEQ ID NO: 304379 - RNA, 19 nt, Artificial Sequence
  Description of Artificial Sequence: Synthetic oligonucleotide
  Antisense strand to SEQ ID NO: 304378
gaucuccuacaauaacgaa

SEQ ID NO: 304380 - RNA, 19 nt, Artificial Sequence
  Description of Artificial Sequence: Synthetic oligonucleotide
  Sense strand starting at position 3136 of SEQ ID NO: 3910
acuacauauccguagcacu

SEQ ID NO: 304381 - RNA, 19 nt, Artificial Sequence
  Description of Artificial Sequence: Synthetic oligonucleotide
  Antisense strand to SEQ ID NO: 304380
agugcuacggauauguagu

SEQ ID NO: 304382 - RNA, 19 nt, Artificial Sequence
  Description of Artificial Sequence: Synthetic oligonucleotide
  Sense strand starting at position 3424 of SEQ ID NO: 3910
gcaagaacucauugcagug

SEQ ID NO: 304383 - RNA, 19 nt, Artificial Sequence
  Description of Artificial Sequence: Synthetic oligonucleotide
  Antisense strand to SEQ ID NO: 304382
cacugcaaugaguucuugc

SEQ ID NO: 304384 - RNA, 19 nt, Artificial Sequence
  Description of Artificial Sequence: Synthetic oligonucleotide
  Sense strand starting at position 3444 of SEQ ID NO: 3910
ucccuaaaccuguagcgau

SEQ ID NO: 304385 - RNA, 19 nt, Artificial Sequence
  Description of Artificial Sequence: Synthetic oligonucleotide
  Antisense strand to SEQ ID NO: 304384
aucgcuacagguuuaggga

SEQ ID NO: 304386 - RNA, 19 nt, Artificial Sequence
  Description of Artificial Sequence: Synthetic oligonucleotide
  Sense strand starting at position 3482 of SEQ ID NO: 3910
cuuaaugugcuuuaacaag

SEQ ID NO: 304387 - RNA, 19 nt, Artificial Sequence
  Description of Artificial Sequence: Synthetic oligonucleotide
  Antisense strand to SEQ ID NO: 304386
cuuguuaaagcacauuaag

SEQ ID NO: 304388 - RNA, 19 nt, Artificial Sequence
  Description of Artificial Sequence: Synthetic oligonucleotide
  Sense strand starting at position 3591 of SEQ ID NO: 3910
gagacccugcuaugagaau

SEQ ID NO: 304389 - RNA, 19 nt, Artificial Sequence
  Description of Artificial Sequence: Synthetic oligonucleotide
  Antisense strand to SEQ ID NO: 304388
auucucauagcagggucuc

SEQ ID NO: 304390 - RNA, 19 nt, Artificial Sequence
  Description of Artificial Sequence: Synthetic oligonucleotide
  Sense strand starting at position 3600 of SEQ ID NO: 3910
cuaugagaauaacaggaau

SEQ ID NO: 304391 - RNA, 19 nt, Artificial Sequence
  Description of Artificial Sequence: Synthetic oligonucleotide
  Antisense strand to SEQ ID NO: 304390
auuccuguuauucucauag

SEQ ID NO: 304392 - RNA, 19 nt, Artificial Sequence
  Description of Artificial Sequence: Synthetic oligonucleotide
  Sense strand starting at position 122 of SEQ ID NO: 3911
ucacaugaucaguggaugu

SEQ ID NO: 304393 - RNA, 19 nt, Artificial Sequence
  Description of Artificial Sequence: Synthetic oligonucleotide
  Antisense strand to SEQ ID NO: 304392
acauccacugaucauguga

SEQ ID NO: 304394 - RNA, 19 nt, Artificial Sequence
  Description of Artificial Sequence: Synthetic oligonucleotide
  Sense strand starting at position 126 of SEQ ID NO: 3911
augaucaguggauguuaua

SEQ ID NO: 304395 - RNA, 19 nt, Artificial Sequence
  Description of Artificial Sequence: Synthetic oligonucleotide
  Antisense strand to SEQ ID NO: 304394
uauaacauccacugaucau

SEQ ID NO: 304396 - RNA, 19 nt, Artificial Sequence
  Description of Artificial Sequence: Synthetic oligonucleotide
  Sense strand starting at position 135 of SEQ ID NO: 3911
ggauguuauaacugguaga

SEQ ID NO: 304397 - RNA, 19 nt, Artificial Sequence
  Description of Artificial Sequence: Synthetic oligonucleotide
  Antisense strand to SEQ ID NO: 304396
ucuaccaguuauaacaucc

SEQ ID NO: 304398 - RNA, 19 nt, Artificial Sequence
  Description of Artificial Sequence: Synthetic oligonucleotide
  Sense strand starting at position 136 of SEQ ID NO: 3911
gauguuauaacugguagag

SEQ ID NO: 304399 - RNA, 19 nt, Artificial Sequence
  Description of Artificial Sequence: Synthetic oligonucleotide
  Antisense strand to SEQ ID NO: 304398
cucuaccaguuauaacauc

SEQ ID NO: 304400 - RNA, 19 nt, Artificial Sequence
  Description of Artificial Sequence: Synthetic oligonucleotide
  Sense strand starting at position 146 of SEQ ID NO: 3911
cugguagaguccuuagcua

SEQ ID NO: 304401 - RNA, 19 nt, Artificial Sequence
  Description of Artificial Sequence: Synthetic oligonucleotide
  Antisense strand to SEQ ID NO: 304400
uagcuaaggacucuaccag

SEQ ID NO: 304402 - RNA, 19 nt, Artificial Sequence
  Description of Artificial Sequence: Synthetic oligonucleotide
  Sense strand starting at position 184 of SEQ ID NO: 3911
uugcuuuacagauggagaa

SEQ ID NO: 304403 - RNA, 19 nt, Artificial Sequence
  Description of Artificial Sequence: Synthetic oligonucleotide
  Antisense strand to SEQ ID NO: 304402
uucuccaucuguaaagcaa

SEQ ID NO: 304404 - RNA, 19 nt, Artificial Sequence
  Description of Artificial Sequence: Synthetic oligonucleotide
  Sense strand starting at position 321 of SEQ ID NO: 3911
gggacuuaaccaggagugu

SEQ ID NO: 304405 - RNA, 19 nt, Artificial Sequence
  Description of Artificial Sequence: Synthetic oligonucleotide
  Antisense strand to SEQ ID NO: 304404
acacuccugguuaaguccc

SEQ ID NO: 304406 - RNA, 19 nt, Artificial Sequence
  Description of Artificial Sequence: Synthetic oligonucleotide
  Sense strand starting at position 465 of SEQ ID NO: 3911
ucaguaaaucagcaucaga

SEQ ID NO: 304407 - RNA, 19 nt, Artificial Sequence
  Description of Artificial Sequence: Synthetic oligonucleotide
  Antisense strand to SEQ ID NO: 304406
ucugaugcugauuuacuga

SEQ ID NO: 304408 - RNA, 19 nt, Artificial Sequence
  Description of Artificial Sequence: Synthetic oligonucleotide
  Sense strand starting at position 660 of SEQ ID NO: 3911
guagaauuaagauggcgaa

SEQ ID NO: 304409 - RNA, 19 nt, Artificial Sequence
  Description of Artificial Sequence: Synthetic oligonucleotide
  Antisense strand to SEQ ID NO: 304408
uucgccaucuuaauucuac

SEQ ID NO: 304410 - RNA, 19 nt, Artificial Sequence
  Description of Artificial Sequence: Synthetic oligonucleotide
  Sense strand starting at position 691 of SEQ ID NO: 3911
gggaguaagugugcccaca

SEQ ID NO: 304411 - RNA, 19 nt, Artificial Sequence
  Description of Artificial Sequence: Synthetic oligonucleotide
  Antisense strand to SEQ ID NO: 304410
ugugggcacacuuacuccc

SEQ ID NO: 304412 - RNA, 19 nt, Artificial Sequence
  Description of Artificial Sequence: Synthetic oligonucleotide
  Sense strand starting at position 771 of SEQ ID NO: 3911
gguggauucugcuuuacaa

SEQ ID NO: 304413 - RNA, 19 nt, Artificial Sequence
  Description of Artificial Sequence: Synthetic oligonucleotide
  Antisense strand to SEQ ID NO: 304412
uuguaaagcagaauccacc

SEQ ID NO: 304414 - RNA, 19 nt, Artificial Sequence
  Description of Artificial Sequence: Synthetic oligonucleotide
  Sense strand starting at position 773 of SEQ ID NO: 3911
uggauucugcuuuacaagu

SEQ ID NO: 304415 - RNA, 19 nt, Artificial Sequence
  Description of Artificial Sequence: Synthetic oligonucleotide
  Antisense strand to SEQ ID NO: 304414
acuuguaaagcagaaucca

SEQ ID NO: 304416 - RNA, 19 nt, Artificial Sequence
  Description of Artificial Sequence: Synthetic oligonucleotide
  Sense strand starting at position 828 of SEQ ID NO: 3911
uggguuuaggucugggaag

SEQ ID NO: 304417 - RNA, 19 nt, Artificial Sequence
  Description of Artificial Sequence: Synthetic oligonucleotide
  Antisense strand to SEQ ID NO: 304416
cuucccagaccuaaaccca

SEQ ID NO: 304418 - RNA, 19 nt, Artificial Sequence
  Description of Artificial Sequence: Synthetic oligonucleotide
  Sense strand starting at position 1105 of SEQ ID NO: 3911
cuaacauauugucugagga

SEQ ID NO: 304419 - RNA, 19 nt, Artificial Sequence
  Description of Artificial Sequence: Synthetic oligonucleotide
  Antisense strand to SEQ ID NO: 304418
uccucagacaauauguuag

SEQ ID NO: 304420 - RNA, 19 nt, Artificial Sequence
  Description of Artificial Sequence: Synthetic oligonucleotide
  Sense strand starting at position 1106 of SEQ ID NO: 3911
uaacauauugucugaggac

SEQ ID NO: 304421 - RNA, 19 nt, Artificial Sequence
  Description of Artificial Sequence: Synthetic oligonucleotide
  Antisense strand to SEQ ID NO: 304420
guccucagacaauauguua

SEQ ID NO: 304422 - RNA, 19 nt, Artificial Sequence
  Description of Artificial Sequence: Synthetic oligonucleotide
  Sense strand starting at position 1780 of SEQ ID NO: 3911
uuucucucagcuugacaga

SEQ ID NO: 304423 - RNA, 19 nt, Artificial Sequence
  Description of Artificial Sequence: Synthetic oligonucleotide
  Antisense strand to SEQ ID NO: 304422
ucugucaagcugagagaaa

SEQ ID NO: 304424 - RNA, 19 nt, Artificial Sequence
  Description of Artificial Sequence: Synthetic oligonucleotide
  Sense strand starting at position 1781 of SEQ ID NO: 3911
uucucucagcuugacagaa

SEQ ID NO: 304425 - RNA, 19 nt, Artificial Sequence
  Description of Artificial Sequence: Synthetic oligonucleotide
  Antisense strand to SEQ ID NO: 304424
uucugucaagcugagagaa

SEQ ID NO: 304426 - RNA, 19 nt, Artificial Sequence
  Description of Artificial Sequence: Synthetic oligonucleotide
  Sense strand starting at position 1835 of SEQ ID NO: 3911
cuuccuucucucuagggaa

SEQ ID NO: 304427 - RNA, 19 nt, Artificial Sequence
  Description of Artificial Sequence: Synthetic oligonucleotide
  Antisense strand to SEQ ID NO: 304426
uucccuagagagaaggaag

SEQ ID NO: 304428 - RNA, 19 nt, Artificial Sequence
  Description of Artificial Sequence: Synthetic oligonucleotide
  Sense strand starting at position 2138 of SEQ ID NO: 3911
acaugaagguuucucaauc

SEQ ID NO: 304429 - RNA, 19 nt, Artificial Sequence
  Description of Artificial Sequence: Synthetic oligonucleotide
  Antisense strand to SEQ ID NO: 304428
gauugagaaaccuucaugu

SEQ ID NO: 304430 - RNA, 19 nt, Artificial Sequence
  Description of Artificial Sequence: Synthetic oligonucleotide
  Sense strand starting at position 2187 of SEQ ID NO: 3911
uucguuauuguaggagauc

SEQ ID NO: 304431 - RNA, 19 nt, Artificial Sequence
  Description of Artificial Sequence: Synthetic oligonucleotide
  Antisense strand to SEQ ID NO: 304430
gaucuccuacaauaacgaa

SEQ ID NO: 304432 - RNA, 19 nt, Artificial Sequence
  Description of Artificial Sequence: Synthetic oligonucleotide
  Sense strand starting at position 2252 of SEQ ID NO: 3911
acuacauauccguagcacu

SEQ ID NO: 304433 - RNA, 19 nt, Artificial Sequence
  Description of Artificial Sequence: Synthetic oligonucleotide
  Antisense strand to SEQ ID NO: 304432
agugcuacggauauguagu

SEQ ID NO: 304434 - RNA, 19 nt, Artificial Sequence
  Description of Artificial Sequence: Synthetic oligonucleotide
  Sense strand starting at position 2540 of SEQ ID NO: 3911
gcaagaacucauugcagug

SEQ ID NO: 304435 - RNA, 19 nt, Artificial Sequence
  Description of Artificial Sequence: Synthetic oligonucleotide
  Antisense strand to SEQ ID NO: 304434
cacugcaaugaguucuugc

SEQ ID NO: 304436 - RNA, 19 nt, Artificial Sequence
  Description of Artificial Sequence: Synthetic oligonucleotide
  Sense strand starting at position 2560 of SEQ ID NO: 3911
ucccuaaaccuguagcgau

SEQ ID NO: 304437 - RNA, 19 nt, Artificial Sequence
  Description of Artificial Sequence: Synthetic oligonucleotide
  Antisense strand to SEQ ID NO: 304436
aucgcuacagguuuaggga

SEQ ID NO: 304438 - RNA, 19 nt, Artificial Sequence
  Description of Artificial Sequence: Synthetic oligonucleotide
  Sense strand starting at position 2598 of SEQ ID NO: 3911
cuuaaugugcuuuaacaag

SEQ ID NO: 304439 - RNA, 19 nt, Artificial Sequence
  Description of Artificial Sequence: Synthetic oligonucleotide
  Antisense strand to SEQ ID NO: 304438
cuuguuaaagcacauuaag

SEQ ID NO: 304440 - RNA, 19 nt, Artificial Sequence
  Description of Artificial Sequence: Synthetic oligonucleotide
  Sense strand starting at position 2707 of SEQ ID NO: 3911
gagacccugcuaugagaau

SEQ ID NO: 304441 - RNA, 19 nt, Artificial Sequence
  Description of Artificial Sequence: Synthetic oligonucleotide
  Antisense strand to SEQ ID NO: 304440
auucucauagcagggucuc

SEQ ID NO: 304442 - RNA, 19 nt, Artificial Sequence
  Description of Artificial Sequence: Synthetic oligonucleotide
  Sense strand starting at position 2716 of SEQ ID NO: 3911
cuaugagaauaacaggaau

SEQ ID NO: 304443 - RNA, 19 nt, Artificial Sequence
  Description of Artificial Sequence: Synthetic oligonucleotide
  Antisense strand to SEQ ID NO: 304442
auuccuguuauucucauag

SEQ ID NO: 304444 - RNA, 19 nt, Artificial Sequence
  Description of Artificial Sequence: Synthetic oligonucleotide
  Sense strand starting at position 3203 of SEQ ID NO: 3911
gguucuaacaaguguggaa

SEQ ID NO: 304445 - RNA, 19 nt, Artificial Sequence
  Description of Artificial Sequence: Synthetic oligonucleotide
  Antisense strand to SEQ ID NO: 304444
uuccacacuuguuagaacc

SEQ ID NO: 304446 - RNA, 19 nt, Artificial Sequence
  Description of Artificial Sequence: Synthetic oligonucleotide
  Sense strand starting at position 3458 of SEQ ID NO: 3911
aucugcaaucuggaagcua

SEQ ID NO: 304447 - RNA, 19 nt, Artificial Sequence
  Description of Artificial Sequence: Synthetic oligonucleotide
  Antisense strand to SEQ ID NO: 304446
uagcuuccagauugcagau

SEQ ID NO: 304448 - RNA, 19 nt, Artificial Sequence
  Description of Artificial Sequence: Synthetic oligonucleotide
  Sense strand starting at position 3492 of SEQ ID NO: 3911
gcgucuauugacuagaaga

SEQ ID NO: 304449 - RNA, 19 nt, Artificial Sequence
  Description of Artificial Sequence: Synthetic oligonucleotide
  Antisense strand to SEQ ID NO: 304448
ucuucuagucaauagacgc

SEQ ID NO: 304450 - RNA, 19 nt, Artificial Sequence
  Description of Artificial Sequence: Synthetic oligonucleotide
  Sense strand starting at position 3569 of SEQ ID NO: 3911
caugucugaggauguauaa

SEQ ID NO: 304451 - RNA, 19 nt, Artificial Sequence
  Description of Artificial Sequence: Synthetic oligonucleotide
  Antisense strand to SEQ ID NO: 304450
uuauacauccucagacaug

SEQ ID NO: 304452 - RNA, 19 nt, Artificial Sequence
  Description of Artificial Sequence: Synthetic oligonucleotide
  Sense strand starting at position 3609 of SEQ ID NO: 3911
ggauacacaucuguccaaa

SEQ ID NO: 304453 - RNA, 19 nt, Artificial Sequence
  Description of Artificial Sequence: Synthetic oligonucleotide
  Antisense strand to SEQ ID NO: 304452
uuuggacagauguguaucc

SEQ ID NO: 304454 - RNA, 19 nt, Artificial Sequence
  Description of Artificial Sequence: Synthetic oligonucleotide
  Sense strand starting at position 3630 of SEQ ID NO: 3911
cgaggaaagguuugaacca

SEQ ID NO: 304455 - RNA, 19 nt, Artificial Sequence
  Description of Artificial Sequence: Synthetic oligonucleotide
  Antisense strand to SEQ ID NO: 304454
ugguucaaaccuuuccucg

SEQ ID NO: 304456 - RNA, 19 nt, Artificial Sequence
  Description of Artificial Sequence: Synthetic oligonucleotide
  Sense strand starting at position 3631 of SEQ ID NO: 3911
gaggaaagguuugaaccaa

SEQ ID NO: 304457 - RNA, 19 nt, Artificial Sequence
  Description of Artificial Sequence: Synthetic oligonucleotide
  Antisense strand to SEQ ID NO: 304456
uugguucaaaccuuuccuc

SEQ ID NO: 304458 - RNA, 19 nt, Artificial Sequence
  Description of Artificial Sequence: Synthetic oligonucleotide
  Sense strand starting at position 3760 of SEQ ID NO: 3911
agaugaggaauguguaaug

SEQ ID NO: 304459 - RNA, 19 nt, Artificial Sequence
  Description of Artificial Sequence: Synthetic oligonucleotide
  Antisense strand to SEQ ID NO: 304458
cauuacacauuccucaucu

SEQ ID NO: 304460 - RNA, 19 nt, Artificial Sequence
  Description of Artificial Sequence: Synthetic oligonucleotide
  Sense strand starting at position 3852 of SEQ ID NO: 3911
auacuaaaguaucccagua

SEQ ID NO: 304461 - RNA, 19 nt, Artificial Sequence
  Description of Artificial Sequence: Synthetic oligonucleotide
  Antisense strand to SEQ ID NO: 304460
uacugggauacuuuaguau

SEQ ID NO: 304462 - RNA, 19 nt, Artificial Sequence
  Description of Artificial Sequence: Synthetic oligonucleotide
  Sense strand starting at position 3876 of SEQ ID NO: 3911
aguaguugaaagugccuaa

SEQ ID NO: 304463 - RNA, 19 nt, Artificial Sequence
  Description of Artificial Sequence: Synthetic oligonucleotide
  Antisense strand to SEQ ID NO: 304462
uuaggcacuuucaacuacu

SEQ ID NO: 304464 - RNA, 19 nt, Artificial Sequence
  Description of Artificial Sequence: Synthetic oligonucleotide
  Sense strand starting at position 3879 of SEQ ID NO: 3911
aguugaaagugccuaagau

SEQ ID NO: 304465 - RNA, 19 nt, Artificial Sequence
  Description of Artificial Sequence: Synthetic oligonucleotide
  Antisense strand to SEQ ID NO: 304464
aucuuaggcacuuucaacu

SEQ ID NO: 304466 - RNA, 19 nt, Artificial Sequence
  Description of Artificial Sequence: Synthetic oligonucleotide
  Sense strand starting at position 3880 of SEQ ID NO: 3911
guugaaagugccuaagauu

SEQ ID NO: 304467 - RNA, 19 nt, Artificial Sequence
  Description of Artificial Sequence: Synthetic oligonucleotide
  Antisense strand to SEQ ID NO: 304466
aaucuuaggcacuuucaac

SEQ ID NO: 304468 - RNA, 19 nt, Artificial Sequence
  Description of Artificial Sequence: Synthetic oligonucleotide
  Sense strand starting at position 3909 of SEQ ID NO: 3911
gagcccuuggucgauguaa

SEQ ID NO: 304469 - RNA, 19 nt, Artificial Sequence
  Description of Artificial Sequence: Synthetic oligonucleotide
  Antisense strand to SEQ ID NO: 304468
uuacaucgaccaagggcuc

SEQ ID NO: 304470 - RNA, 19 nt, Artificial Sequence
  Description of Artificial Sequence: Synthetic oligonucleotide
  Sense strand starting at position 3967 of SEQ ID NO: 3911
uguccuggguuccuacaau

SEQ ID NO: 304471 - RNA, 19 nt, Artificial Sequence
  Description of Artificial Sequence: Synthetic oligonucleotide
  Antisense strand to SEQ ID NO: 304470
auuguaggaacccaggaca

SEQ ID NO: 304472 - RNA, 19 nt, Artificial Sequence
  Description of Artificial Sequence: Synthetic oligonucleotide
  Sense strand starting at position 485 of SEQ ID NO: 3912
cagugaaacuuguucucag

SEQ ID NO: 304473 - RNA, 19 nt, Artificial Sequence
  Description of Artificial Sequence: Synthetic oligonucleotide
  Antisense strand to SEQ ID NO: 304472
cugagaacaaguuucacug

SEQ ID NO: 304474 - RNA, 19 nt, Artificial Sequence
  Description of Artificial Sequence: Synthetic oligonucleotide
  Sense strand starting at position 539 of SEQ ID NO: 3912
caaagagcuugaucuguga

SEQ ID NO: 304475 - RNA, 19 nt, Artificial Sequence
  Description of Artificial Sequence: Synthetic oligonucleotide
  Antisense strand to SEQ ID NO: 304474
ucacagaucaagcucuuug

SEQ ID NO: 304476 - RNA, 19 nt, Artificial Sequence
  Description of Artificial Sequence: Synthetic oligonucleotide
  Sense strand starting at position 542 of SEQ ID NO: 3912
agagcuugaucugugauua

SEQ ID NO: 304477 - RNA, 19 nt, Artificial Sequence
  Description of Artificial Sequence: Synthetic oligonucleotide
  Antisense strand to SEQ ID NO: 304476
uaaucacagaucaagcucu

SEQ ID NO: 304478 - RNA, 19 nt, Artificial Sequence
  Description of Artificial Sequence: Synthetic oligonucleotide
  Sense strand starting at position 607 of SEQ ID NO: 3912
guagcacacugauuccaga

SEQ ID NO: 304479 - RNA, 19 nt, Artificial Sequence
  Description of Artificial Sequence: Synthetic oligonucleotide
  Antisense strand to SEQ ID NO: 304478
ucuggaaucagugugcuac

SEQ ID NO: 304480 - RNA, 19 nt, Artificial Sequence
  Description of Artificial Sequence: Synthetic oligonucleotide
  Sense strand starting at position 936 of SEQ ID NO: 3912
gaccgcaauguguuugcua

SEQ ID NO: 304481 - RNA, 19 nt, Artificial Sequence
  Description of Artificial Sequence: Synthetic oligonucleotide
  Antisense strand to SEQ ID NO: 304480
uagcaaacacauugcgguc

SEQ ID NO: 304482 - RNA, 19 nt, Artificial Sequence
  Description of Artificial Sequence: Synthetic oligonucleotide
  Sense strand starting at position 1071 of SEQ ID NO: 3912
gagacagaguauguaauca

SEQ ID NO: 304483 - RNA, 19 nt, Artificial Sequence
  Description of Artificial Sequence: Synthetic oligonucleotide
  Antisense strand to SEQ ID NO: 304482
ugauuacauacucugucuc

SEQ ID NO: 304484 - RNA, 19 nt, Artificial Sequence
  Description of Artificial Sequence: Synthetic oligonucleotide
  Sense strand starting at position 1075 of SEQ ID NO: 3912
cagaguauguaaucaagca

SEQ ID NO: 304485 - RNA, 19 nt, Artificial Sequence
  Description of Artificial Sequence: Synthetic oligonucleotide
  Antisense strand to SEQ ID NO: 304484
ugcuugauuacauacucug

SEQ ID NO: 304486 - RNA, 19 nt, Artificial Sequence
  Description of Artificial Sequence: Synthetic oligonucleotide
  Sense strand starting at position 1220 of SEQ ID NO: 3912
cguccaugucaggagguua

SEQ ID NO: 304487 - RNA, 19 nt, Artificial Sequence
  Description of Artificial Sequence: Synthetic oligonucleotide
  Antisense strand to SEQ ID NO: 304486
uaaccuccugacauggacg

SEQ ID NO: 304488 - RNA, 19 nt, Artificial Sequence
  Description of Artificial Sequence: Synthetic oligonucleotide
  Sense strand starting at position 1352 of SEQ ID NO: 3912
gguaaugucaaauagugua

SEQ ID NO: 304489 - RNA, 19 nt, Artificial Sequence
  Description of Artificial Sequence: Synthetic oligonucleotide
  Antisense strand to SEQ ID NO: 304488
uacacuauuugacauuacc

SEQ ID NO: 304490 - RNA, 19 nt, Artificial Sequence
  Description of Artificial Sequence: Synthetic oligonucleotide
  Sense strand starting at position 1357 of SEQ ID NO: 3912
ugucaaauaguguaacagu

SEQ ID NO: 304491 - RNA, 19 nt, Artificial Sequence
  Description of Artificial Sequence: Synthetic oligonucleotide
  Antisense strand to SEQ ID NO: 304490
acuguuacacuauuugaca

SEQ ID NO: 304492 - RNA, 19 nt, Artificial Sequence
  Description of Artificial Sequence: Synthetic oligonucleotide
  Sense strand starting at position 1367 of SEQ ID NO: 3912
uguaacaguacugggaaua

SEQ ID NO: 304493 - RNA, 19 nt, Artificial Sequence
  Description of Artificial Sequence: Synthetic oligonucleotide
  Antisense strand to SEQ ID NO: 304492
uauucccaguacuguuaca

SEQ ID NO: 304494 - RNA, 19 nt, Artificial Sequence
  Description of Artificial Sequence: Synthetic oligonucleotide
  Sense strand starting at position 1368 of SEQ ID NO: 3912
guaacaguacugggaauaa

SEQ ID NO: 304495 - RNA, 19 nt, Artificial Sequence
  Description of Artificial Sequence: Synthetic oligonucleotide
  Antisense strand to SEQ ID NO: 304494
uuauucccaguacuguuac

SEQ ID NO: 304496 - RNA, 19 nt, Artificial Sequence
  Description of Artificial Sequence: Synthetic oligonucleotide
  Sense strand starting at position 1541 of SEQ ID NO: 3912
gaauucuaguuguuaagac

SEQ ID NO: 304497 - RNA, 19 nt, Artificial Sequence
  Description of Artificial Sequence: Synthetic oligonucleotide
  Antisense strand to SEQ ID NO: 304496
gucuuaacaacuagaauuc

SEQ ID NO: 304498 - RNA, 19 nt, Artificial Sequence
  Description of Artificial Sequence: Synthetic oligonucleotide
  Sense strand starting at position 1685 of SEQ ID NO: 3912
acaggaaugugucucagua

SEQ ID NO: 304499 - RNA, 19 nt, Artificial Sequence
  Description of Artificial Sequence: Synthetic oligonucleotide
  Antisense strand to SEQ ID NO: 304498
uacugagacacauuccugu

SEQ ID NO: 304500 - RNA, 19 nt, Artificial Sequence
  Description of Artificial Sequence: Synthetic oligonucleotide
  Sense strand starting at position 1816 of SEQ ID NO: 3912
gcuauaauggcccaaauua

SEQ ID NO: 304501 - RNA, 19 nt, Artificial Sequence
  Description of Artificial Sequence: Synthetic oligonucleotide
  Antisense strand to SEQ ID NO: 304500
uaauuugggccauuauagc

SEQ ID NO: 304502 - RNA, 19 nt, Artificial Sequence
  Description of Artificial Sequence: Synthetic oligonucleotide
  Sense strand starting at position 2041 of SEQ ID NO: 3912
uggauagcccgucaagaug

SEQ ID NO: 304503 - RNA, 19 nt, Artificial Sequence
  Description of Artificial Sequence: Synthetic oligonucleotide
  Antisense strand to SEQ ID NO: 304502
caucuugacgggcuaucca

SEQ ID NO: 304504 - RNA, 19 nt, Artificial Sequence
  Description of Artificial Sequence: Synthetic oligonucleotide
  Sense strand starting at position 2201 of SEQ ID NO: 3912
ggccgaaugaguuaggaag

SEQ ID NO: 304505 - RNA, 19 nt, Artificial Sequence
  Description of Artificial Sequence: Synthetic oligonucleotide
  Antisense strand to SEQ ID NO: 304504
cuuccuaacucauucggcc

SEQ ID NO: 304506 - RNA, 19 nt, Artificial Sequence
  Description of Artificial Sequence: Synthetic oligonucleotide
  Sense strand starting at position 2307 of SEQ ID NO: 3912
aguuaaauacccugugaaa

SEQ ID NO: 304507 - RNA, 19 nt, Artificial Sequence
  Description of Artificial Sequence: Synthetic oligonucleotide
  Antisense strand to SEQ ID NO: 304506
uuucacaggguauuuaacu

SEQ ID NO: 304508 - RNA, 19 nt, Artificial Sequence
  Description of Artificial Sequence: Synthetic oligonucleotide
  Sense strand starting at position 2576 of SEQ ID NO: 3912
cagagauguucuguaggaa

SEQ ID NO: 304509 - RNA, 19 nt, Artificial Sequence
  Description of Artificial Sequence: Synthetic oligonucleotide
  Antisense strand to SEQ ID NO: 304508
uuccuacagaacaucucug

SEQ ID NO: 304510 - RNA, 19 nt, Artificial Sequence
  Description of Artificial Sequence: Synthetic oligonucleotide
  Sense strand starting at position 2579 of SEQ ID NO: 3912
agauguucuguaggaaggu

SEQ ID NO: 304511 - RNA, 19 nt, Artificial Sequence
  Description of Artificial Sequence: Synthetic oligonucleotide
  Antisense strand to SEQ ID NO: 304510
accuuccuacagaacaucu

SEQ ID NO: 304512 - RNA, 19 nt, Artificial Sequence
  Description of Artificial Sequence: Synthetic oligonucleotide
  Sense strand starting at position 2658 of SEQ ID NO: 3912
ggcuguaucucaucaugaa

SEQ ID NO: 304513 - RNA, 19 nt, Artificial Sequence
  Description of Artificial Sequence: Synthetic oligonucleotide
  Antisense strand to SEQ ID NO: 304512
uucaugaugagauacagcc

SEQ ID NO: 304514 - RNA, 19 nt, Artificial Sequence
  Description of Artificial Sequence: Synthetic oligonucleotide
  Sense strand starting at position 2659 of SEQ ID NO: 3912
gcuguaucucaucaugaaa

SEQ ID NO: 304515 - RNA, 19 nt, Artificial Sequence
  Description of Artificial Sequence: Synthetic oligonucleotide
  Antisense strand to SEQ ID NO: 304514
uuucaugaugagauacagc

SEQ ID NO: 304516 - RNA, 19 nt, Artificial Sequence
  Description of Artificial Sequence: Synthetic oligonucleotide
  Sense strand starting at position 2701 of SEQ ID NO: 3912
ugaccugcuccugagacuu

SEQ ID NO: 304517 - RNA, 19 nt, Artificial Sequence
  Description of Artificial Sequence: Synthetic oligonucleotide
  Antisense strand to SEQ ID NO: 304516
aagucucaggagcagguca

SEQ ID NO: 304518 - RNA, 19 nt, Artificial Sequence
  Description of Artificial Sequence: Synthetic oligonucleotide
  Sense strand starting at position 2740 of SEQ ID NO: 3912
gaaguccuauggguuucua

SEQ ID NO: 304519 - RNA, 19 nt, Artificial Sequence
  Description of Artificial Sequence: Synthetic oligonucleotide
  Antisense strand to SEQ ID NO: 304518
uagaaacccauaggacuuc

SEQ ID NO: 304520 - RNA, 19 nt, Artificial Sequence
  Description of Artificial Sequence: Synthetic oligonucleotide
  Sense strand starting at position 2802 of SEQ ID NO: 3912
uccaaaugugacugaugcu

SEQ ID NO: 304521 - RNA, 19 nt, Artificial Sequence
  Description of Artificial Sequence: Synthetic oligonucleotide
  Antisense strand to SEQ ID NO: 304520
agcaucagucacauuugga

SEQ ID NO: 304522 - RNA, 19 nt, Artificial Sequence
  Description of Artificial Sequence: Synthetic oligonucleotide
  Sense strand starting at position 2814 of SEQ ID NO: 3912
ugaugcuuccucuagguaa

SEQ ID NO: 304523 - RNA, 19 nt, Artificial Sequence
  Description of Artificial Sequence: Synthetic oligonucleotide
  Antisense strand to SEQ ID NO: 304522
uuaccuagaggaagcauca

SEQ ID NO: 304524 - RNA, 19 nt, Artificial Sequence
  Description of Artificial Sequence: Synthetic oligonucleotide
  Sense strand starting at position 2817 of SEQ ID NO: 3912
ugcuuccucuagguaauuu

SEQ ID NO: 304525 - RNA, 19 nt, Artificial Sequence
  Description of Artificial Sequence: Synthetic oligonucleotide
  Antisense strand to SEQ ID NO: 304524
aaauuaccuagaggaagca

SEQ ID NO: 304526 - RNA, 19 nt, Artificial Sequence
  Description of Artificial Sequence: Synthetic oligonucleotide
  Sense strand starting at position 2885 of SEQ ID NO: 3912
guuagaagauguucugaag

SEQ ID NO: 304527 - RNA, 19 nt, Artificial Sequence
  Description of Artificial Sequence: Synthetic oligonucleotide
  Antisense strand to SEQ ID NO: 304526
cuucagaacaucuucuaac

SEQ ID NO: 304528 - RNA, 19 nt, Artificial Sequence
  Description of Artificial Sequence: Synthetic oligonucleotide
  Sense strand starting at position 2894 of SEQ ID NO: 3912
uguucugaagcccaagaau

SEQ ID NO: 304529 - RNA, 19 nt, Artificial Sequence
  Description of Artificial Sequence: Synthetic oligonucleotide
  Antisense strand to SEQ ID NO: 304528
auucuugggcuucagaaca

SEQ ID NO: 304530 - RNA, 19 nt, Artificial Sequence
  Description of Artificial Sequence: Synthetic oligonucleotide
  Sense strand starting at position 2902 of SEQ ID NO: 3912
agcccaagaaugugaugau

SEQ ID NO: 304531 - RNA, 19 nt, Artificial Sequence
  Description of Artificial Sequence: Synthetic oligonucleotide
  Antisense strand to SEQ ID NO: 304530
aucaucacauucuugggcu

SEQ ID NO: 304532 - RNA, 19 nt, Artificial Sequence
  Description of Artificial Sequence: Synthetic oligonucleotide
  Sense strand starting at position 2959 of SEQ ID NO: 3912
cccucaaaugggugaagau

SEQ ID NO: 304533 - RNA, 19 nt, Artificial Sequence
  Description of Artificial Sequence: Synthetic oligonucleotide
  Antisense strand to SEQ ID NO: 304532
aucuucacccauuugaggg

SEQ ID NO: 304534 - RNA, 19 nt, Artificial Sequence
  Description of Artificial Sequence: Synthetic oligonucleotide
  Sense strand starting at position 3017 of SEQ ID NO: 3912
aucagccaacagugauaua

SEQ ID NO: 304535 - RNA, 19 nt, Artificial Sequence
  Description of Artificial Sequence: Synthetic oligonucleotide
  Antisense strand to SEQ ID NO: 304534
uauaucacuguuggcugau

SEQ ID NO: 304536 - RNA, 19 nt, Artificial Sequence
  Description of Artificial Sequence: Synthetic oligonucleotide
  Sense strand starting at position 3075 of SEQ ID NO: 3912
ggguuuggauagagaggaa

SEQ ID NO: 304537 - RNA, 19 nt, Artificial Sequence
  Description of Artificial Sequence: Synthetic oligonucleotide
  Antisense strand to SEQ ID NO: 304536
uuccucucuauccaaaccc

SEQ ID NO: 304538 - RNA, 19 nt, Artificial Sequence
  Description of Artificial Sequence: Synthetic oligonucleotide
  Sense strand starting at position 3118 of SEQ ID NO: 3912
agaggauuccauggcucaa

SEQ ID NO: 304539 - RNA, 19 nt, Artificial Sequence
  Description of Artificial Sequence: Synthetic oligonucleotide
  Antisense strand to SEQ ID NO: 304538
uugagccauggaauccucu

SEQ ID NO: 304540 - RNA, 19 nt, Artificial Sequence
  Description of Artificial Sequence: Synthetic oligonucleotide
  Sense strand starting at position 3140 of SEQ ID NO: 3912
ugaguuacuguugggaaca

SEQ ID NO: 304541 - RNA, 19 nt, Artificial Sequence
  Description of Artificial Sequence: Synthetic oligonucleotide
  Antisense strand to SEQ ID NO: 304540
uguucccaacaguaacuca

SEQ ID NO: 304542 - RNA, 19 nt, Artificial Sequence
  Description of Artificial Sequence: Synthetic oligonucleotide
  Sense strand starting at position 3289 of SEQ ID NO: 3912
cagacucaggcuuggaauu

SEQ ID NO: 304543 - RNA, 19 nt, Artificial Sequence
  Description of Artificial Sequence: Synthetic oligonucleotide
  Antisense strand to SEQ ID NO: 304542
aauuccaagccugagucug

SEQ ID NO: 304544 - RNA, 19 nt, Artificial Sequence
  Description of Artificial Sequence: Synthetic oligonucleotide
  Sense strand starting at position 3376 of SEQ ID NO: 3912
uugggugaaguccagcuua

SEQ ID NO: 304545 - RNA, 19 nt, Artificial Sequence
  Description of Artificial Sequence: Synthetic oligonucleotide
  Antisense strand to SEQ ID NO: 304544
uaagcuggacuucacccaa

SEQ ID NO: 304546 - RNA, 19 nt, Artificial Sequence
  Description of Artificial Sequence: Synthetic oligonucleotide
  Sense strand starting at position 3448 of SEQ ID NO: 3912
augggauucuucuugggag

SEQ ID NO: 304547 - RNA, 19 nt, Artificial Sequence
  Description of Artificial Sequence: Synthetic oligonucleotide
  Antisense strand to SEQ ID NO: 304546
cucccaagaagaaucccau

SEQ ID NO: 304548 - RNA, 19 nt, Artificial Sequence
  Description of Artificial Sequence: Synthetic oligonucleotide
  Sense strand starting at position 3866 of SEQ ID NO: 3912
gcacguggcccuuuguuaa

SEQ ID NO: 304549 - RNA, 19 nt, Artificial Sequence
  Description of Artificial Sequence: Synthetic oligonucleotide
  Antisense strand to SEQ ID NO: 304548
uuaacaaagggccacgugc

SEQ ID NO: 304550 - RNA, 19 nt, Artificial Sequence
  Description of Artificial Sequence: Synthetic oligonucleotide
  Sense strand starting at position 3910 of SEQ ID NO: 3912
cagaaaggugggugguaaa

SEQ ID NO: 304551 - RNA, 19 nt, Artificial Sequence
  Description of Artificial Sequence: Synthetic oligonucleotide
  Antisense strand to SEQ ID NO: 304550
uuuaccacccaccuuucug

SEQ ID NO: 304552 - RNA, 19 nt, Artificial Sequence
  Description of Artificial Sequence: Synthetic oligonucleotide
  Sense strand starting at position 157 of SEQ ID NO: 3913
acugauuuauucugggaag

SEQ ID NO: 304553 - RNA, 19 nt, Artificial Sequence
  Description of Artificial Sequence: Synthetic oligonucleotide
  Antisense strand to SEQ ID NO: 304552
cuucccagaauaaaucagu

SEQ ID NO: 304554 - RNA, 19 nt, Artificial Sequence
  Description of Artificial Sequence: Synthetic oligonucleotide
  Sense strand starting at position 160 of SEQ ID NO: 3913
gauuuauucugggaagaug

SEQ ID NO: 304555 - RNA, 19 nt, Artificial Sequence
  Description of Artificial Sequence: Synthetic oligonucleotide
  Antisense strand to SEQ ID NO: 304554
caucuucccagaauaaauc

SEQ ID NO: 304556 - RNA, 19 nt, Artificial Sequence
  Description of Artificial Sequence: Synthetic oligonucleotide
  Sense strand starting at position 192 of SEQ ID NO: 3913
uccugagguucuuuauauu

SEQ ID NO: 304557 - RNA, 19 nt, Artificial Sequence
  Description of Artificial Sequence: Synthetic oligonucleotide
  Antisense strand to SEQ ID NO: 304556
aauauaaagaaccucagga

SEQ ID NO: 304558 - RNA, 19 nt, Artificial Sequence
  Description of Artificial Sequence: Synthetic oligonucleotide
  Sense strand starting at position 203 of SEQ ID NO: 3913
uuuauauugugacuccauu

SEQ ID NO: 304559 - RNA, 19 nt, Artificial Sequence
  Description of Artificial Sequence: Synthetic oligonucleotide
  Antisense strand to SEQ ID NO: 304558
aauggagucacaauauaaa

SEQ ID NO: 304560 - RNA, 19 nt, Artificial Sequence
  Description of Artificial Sequence: Synthetic oligonucleotide
  Sense strand starting at position 238 of SEQ ID NO: 3913
uggugauugccgagguacu

SEQ ID NO: 304561 - RNA, 19 nt, Artificial Sequence
  Description of Artificial Sequence: Synthetic oligonucleotide
  Antisense strand to SEQ ID NO: 304560
aguaccucggcaaucacca

SEQ ID NO: 304562 - RNA, 19 nt, Artificial Sequence
  Description of Artificial Sequence: Synthetic oligonucleotide
  Sense strand starting at position 300 of SEQ ID NO: 3913
uaaugacugcgaugaguaa

SEQ ID NO: 304563 - RNA, 19 nt, Artificial Sequence
  Description of Artificial Sequence: Synthetic oligonucleotide
  Antisense strand to SEQ ID NO: 304562
uuacucaucgcagucauua

SEQ ID NO: 304564 - RNA, 19 nt, Artificial Sequence
  Description of Artificial Sequence: Synthetic oligonucleotide
  Sense strand starting at position 301 of SEQ ID NO: 3913
aaugacugcgaugaguaau

SEQ ID NO: 304565 - RNA, 19 nt, Artificial Sequence
  Description of Artificial Sequence: Synthetic oligonucleotide
  Antisense strand to SEQ ID NO: 304564
auuacucaucgcagucauu

SEQ ID NO: 304566 - RNA, 19 nt, Artificial Sequence
  Description of Artificial Sequence: Synthetic oligonucleotide
  Sense strand starting at position 519 of SEQ ID NO: 3913
cuccuaauaugguugugaa

SEQ ID NO: 304567 - RNA, 19 nt, Artificial Sequence
  Description of Artificial Sequence: Synthetic oligonucleotide
  Antisense strand to SEQ ID NO: 304566
uucacaaccauauuaggag

SEQ ID NO: 304568 - RNA, 19 nt, Artificial Sequence
  Description of Artificial Sequence: Synthetic oligonucleotide
  Sense strand starting at position 520 of SEQ ID NO: 3913
uccuaauaugguugugaag

SEQ ID NO: 304569 - RNA, 19 nt, Artificial Sequence
  Description of Artificial Sequence: Synthetic oligonucleotide
  Antisense strand to SEQ ID NO: 304568
cuucacaaccauauuagga

SEQ ID NO: 304570 - RNA, 19 nt, Artificial Sequence
  Description of Artificial Sequence: Synthetic oligonucleotide
  Sense strand starting at position 621 of SEQ ID NO: 3913
cagauucugugacccugaa

SEQ ID NO: 304571 - RNA, 19 nt, Artificial Sequence
  Description of Artificial Sequence: Synthetic oligonucleotide
  Antisense strand to SEQ ID NO: 304570
uucagggucacagaaucug

SEQ ID NO: 304572 - RNA, 19 nt, Artificial Sequence
  Description of Artificial Sequence: Synthetic oligonucleotide
  Sense strand starting at position 830 of SEQ ID NO: 3913
ccaagacuguguccagaga

SEQ ID NO: 304573 - RNA, 19 nt, Artificial Sequence
  Description of Artificial Sequence: Synthetic oligonucleotide
  Antisense strand to SEQ ID NO: 304572
ucucuggacacagucuugg

SEQ ID NO: 304574 - RNA, 19 nt, Artificial Sequence
  Description of Artificial Sequence: Synthetic oligonucleotide
  Sense strand starting at position 1432 of SEQ ID NO: 3913
cagugaaacuuguucucag

SEQ ID NO: 304575 - RNA, 19 nt, Artificial Sequence
  Description of Artificial Sequence: Synthetic oligonucleotide
  Antisense strand to SEQ ID NO: 304574
cugagaacaaguuucacug

SEQ ID NO: 304576 - RNA, 19 nt, Artificial Sequence
  Description of Artificial Sequence: Synthetic oligonucleotide
  Sense strand starting at position 1486 of SEQ ID NO: 3913
caaagagcuugaucuguga

SEQ ID NO: 304577 - RNA, 19 nt, Artificial Sequence
  Description of Artificial Sequence: Synthetic oligonucleotide
  Antisense strand to SEQ ID NO: 304576
ucacagaucaagcucuuug

SEQ ID NO: 304578 - RNA, 19 nt, Artificial Sequence
  Description of Artificial Sequence: Synthetic oligonucleotide
  Sense strand starting at position 1489 of SEQ ID NO: 3913
agagcuugaucugugauua

SEQ ID NO: 304579 - RNA, 19 nt, Artificial Sequence
  Description of Artificial Sequence: Synthetic oligonucleotide
  Antisense strand to SEQ ID NO: 304578
uaaucacagaucaagcucu

SEQ ID NO: 304580 - RNA, 19 nt, Artificial Sequence
  Description of Artificial Sequence: Synthetic oligonucleotide
  Sense strand starting at position 1554 of SEQ ID NO: 3913
guagcacacugauuccaga

SEQ ID NO: 304581 - RNA, 19 nt, Artificial Sequence
  Description of Artificial Sequence: Synthetic oligonucleotide
  Antisense strand to SEQ ID NO: 304580
ucuggaaucagugugcuac

SEQ ID NO: 304582 - RNA, 19 nt, Artificial Sequence
  Description of Artificial Sequence: Synthetic oligonucleotide
  Sense strand starting at position 1883 of SEQ ID NO: 3913
gaccgcaauguguuugcua

SEQ ID NO: 304583 - RNA, 19 nt, Artificial Sequence
  Description of Artificial Sequence: Synthetic oligonucleotide
  Antisense strand to SEQ ID NO: 304582
uagcaaacacauugcgguc

SEQ ID NO: 304584 - RNA, 19 nt, Artificial Sequence
  Description of Artificial Sequence: Synthetic oligonucleotide
  Sense strand starting at position 2018 of SEQ ID NO: 3913
gagacagaguauguaauca

SEQ ID NO: 304585 - RNA, 19 nt, Artificial Sequence
  Description of Artificial Sequence: Synthetic oligonucleotide
  Antisense strand to SEQ ID NO: 304584
ugauuacauacucugucuc

SEQ ID NO: 304586 - RNA, 19 nt, Artificial Sequence
  Description of Artificial Sequence: Synthetic oligonucleotide
  Sense strand starting at position 2022 of SEQ ID NO: 3913
cagaguauguaaucaagca

SEQ ID NO: 304587 - RNA, 19 nt, Artificial Sequence
  Description of Artificial Sequence: Synthetic oligonucleotide
  Antisense strand to SEQ ID NO: 304586
ugcuugauuacauacucug

SEQ ID NO: 304588 - RNA, 19 nt, Artificial Sequence
  Description of Artificial Sequence: Synthetic oligonucleotide
  Sense strand starting at position 2299 of SEQ ID NO: 3913
gguaaugucaaauagugua

SEQ ID NO: 304589 - RNA, 19 nt, Artificial Sequence
  Description of Artificial Sequence: Synthetic oligonucleotide
  Antisense strand to SEQ ID NO: 304588
uacacuauuugacauuacc

SEQ ID NO: 304590 - RNA, 19 nt, Artificial Sequence
  Description of Artificial Sequence: Synthetic oligonucleotide
  Sense strand starting at position 2304 of SEQ ID NO: 3913
ugucaaauaguguaacagu

SEQ ID NO: 304591 - RNA, 19 nt, Artificial Sequence
  Description of Artificial Sequence: Synthetic oligonucleotide
  Antisense strand to SEQ ID NO: 304590
acuguuacacuauuugaca

SEQ ID NO: 304592 - RNA, 19 nt, Artificial Sequence
  Description of Artificial Sequence: Synthetic oligonucleotide
  Sense strand starting at position 2314 of SEQ ID NO: 3913
uguaacaguacugggaaua

SEQ ID NO: 304593 - RNA, 19 nt, Artificial Sequence
  Description of Artificial Sequence: Synthetic oligonucleotide
  Antisense strand to SEQ ID NO: 304592
uauucccaguacuguuaca

SEQ ID NO: 304594 - RNA, 19 nt, Artificial Sequence
  Description of Artificial Sequence: Synthetic oligonucleotide
  Sense strand starting at position 2315 of SEQ ID NO: 3913
guaacaguacugggaauaa

SEQ ID NO: 304595 - RNA, 19 nt, Artificial Sequence
  Description of Artificial Sequence: Synthetic oligonucleotide
  Antisense strand to SEQ ID NO: 304594
uuauucccaguacuguuac

SEQ ID NO: 304596 - RNA, 19 nt, Artificial Sequence
  Description of Artificial Sequence: Synthetic oligonucleotide
  Sense strand starting at position 2488 of SEQ ID NO: 3913
gaauucuaguuguuaagac

SEQ ID NO: 304597 - RNA, 19 nt, Artificial Sequence
  Description of Artificial Sequence: Synthetic oligonucleotide
  Antisense strand to SEQ ID NO: 304596
gucuuaacaacuagaauuc

SEQ ID NO: 304598 - RNA, 19 nt, Artificial Sequence
  Description of Artificial Sequence: Synthetic oligonucleotide
  Sense strand starting at position 2632 of SEQ ID NO: 3913
acaggaaugugucucagua

SEQ ID NO: 304599 - RNA, 19 nt, Artificial Sequence
  Description of Artificial Sequence: Synthetic oligonucleotide
  Antisense strand to SEQ ID NO: 304598
uacugagacacauuccugu

SEQ ID NO: 304600 - RNA, 19 nt, Artificial Sequence
  Description of Artificial Sequence: Synthetic oligonucleotide
  Sense strand starting at position 2763 of SEQ ID NO: 3913
gcuauaauggcccaaauua

SEQ ID NO: 304601 - RNA, 19 nt, Artificial Sequence
  Description of Artificial Sequence: Synthetic oligonucleotide
  Antisense strand to SEQ ID NO: 304600
uaauuugggccauuauagc

SEQ ID NO: 304602 - RNA, 19 nt, Artificial Sequence
  Description of Artificial Sequence: Synthetic oligonucleotide
  Sense strand starting at position 2988 of SEQ ID NO: 3913
uggauagcccgucaagaug

SEQ ID NO: 304603 - RNA, 19 nt, Artificial Sequence
  Description of Artificial Sequence: Synthetic oligonucleotide
  Antisense strand to SEQ ID NO: 304602
caucuugacgggcuaucca

SEQ ID NO: 304604 - RNA, 19 nt, Artificial Sequence
  Description of Artificial Sequence: Synthetic oligonucleotide
  Sense strand starting at position 3148 of SEQ ID NO: 3913
ggccgaaugaguuaggaag

SEQ ID NO: 304605 - RNA, 19 nt, Artificial Sequence
  Description of Artificial Sequence: Synthetic oligonucleotide
  Antisense strand to SEQ ID NO: 304604
cuuccuaacucauucggcc

SEQ ID NO: 304606 - RNA, 19 nt, Artificial Sequence
  Description of Artificial Sequence: Synthetic oligonucleotide
  Sense strand starting at position 3254 of SEQ ID NO: 3913
aguuaaauacccugugaaa

SEQ ID NO: 304607 - RNA, 19 nt, Artificial Sequence
  Description of Artificial Sequence: Synthetic oligonucleotide
  Antisense strand to SEQ ID NO: 304606
uuucacaggguauuuaacu

SEQ ID NO: 304608 - RNA, 19 nt, Artificial Sequence
  Description of Artificial Sequence: Synthetic oligonucleotide
  Sense strand starting at position 3523 of SEQ ID NO: 3913
cagagauguucuguaggaa

SEQ ID NO: 304609 - RNA, 19 nt, Artificial Sequence
  Description of Artificial Sequence: Synthetic oligonucleotide
  Antisense strand to SEQ ID NO: 304608
uuccuacagaacaucucug

SEQ ID NO: 304610 - RNA, 19 nt, Artificial Sequence
  Description of Artificial Sequence: Synthetic oligonucleotide
  Sense strand starting at position 3526 of SEQ ID NO: 3913
agauguucuguaggaaggu

SEQ ID NO: 304611 - RNA, 19 nt, Artificial Sequence
  Description of Artificial Sequence: Synthetic oligonucleotide
  Antisense strand to SEQ ID NO: 304610
accuuccuacagaacaucu

SEQ ID NO: 304612 - RNA, 19 nt, Artificial Sequence
  Description of Artificial Sequence: Synthetic oligonucleotide
  Sense strand starting at position 3606 of SEQ ID NO: 3913
gcuguaucucaucaugaaa

SEQ ID NO: 304613 - RNA, 19 nt, Artificial Sequence
  Description of Artificial Sequence: Synthetic oligonucleotide
  Antisense strand to SEQ ID NO: 304612
uuucaugaugagauacagc

SEQ ID NO: 304614 - RNA, 19 nt, Artificial Sequence
  Description of Artificial Sequence: Synthetic oligonucleotide
  Sense strand starting at position 3648 of SEQ ID NO: 3913
ugaccugcuccugagacuu

SEQ ID NO: 304615 - RNA, 19 nt, Artificial Sequence
  Description of Artificial Sequence: Synthetic oligonucleotide
  Antisense strand to SEQ ID NO: 304614
aagucucaggagcagguca

SEQ ID NO: 304616 - RNA, 19 nt, Artificial Sequence
  Description of Artificial Sequence: Synthetic oligonucleotide
  Sense strand starting at position 3687 of SEQ ID NO: 3913
gaaguccuauggguuucua

SEQ ID NO: 304617 - RNA, 19 nt, Artificial Sequence
  Description of Artificial Sequence: Synthetic oligonucleotide
  Antisense strand to SEQ ID NO: 304616
uagaaacccauaggacuuc

SEQ ID NO: 304618 - RNA, 19 nt, Artificial Sequence
  Description of Artificial Sequence: Synthetic oligonucleotide
  Sense strand starting at position 3761 of SEQ ID NO: 3913
ugaugcuuccucuagguaa

SEQ ID NO: 304619 - RNA, 19 nt, Artificial Sequence
  Description of Artificial Sequence: Synthetic oligonucleotide
  Antisense strand to SEQ ID NO: 304618
uuaccuagaggaagcauca

SEQ ID NO: 304620 - RNA, 19 nt, Artificial Sequence
  Description of Artificial Sequence: Synthetic oligonucleotide
  Sense strand starting at position 3764 of SEQ ID NO: 3913
ugcuuccucuagguaauuu

SEQ ID NO: 304621 - RNA, 19 nt, Artificial Sequence
  Description of Artificial Sequence: Synthetic oligonucleotide
  Antisense strand to SEQ ID NO: 304620
aaauuaccuagaggaagca

SEQ ID NO: 304622 - RNA, 19 nt, Artificial Sequence
  Description of Artificial Sequence: Synthetic oligonucleotide
  Sense strand starting at position 3832 of SEQ ID NO: 3913
guuagaagauguucugaag

SEQ ID NO: 304623 - RNA, 19 nt, Artificial Sequence
  Description of Artificial Sequence: Synthetic oligonucleotide
  Antisense strand to SEQ ID NO: 304622
cuucagaacaucuucuaac

SEQ ID NO: 304624 - RNA, 19 nt, Artificial Sequence
  Description of Artificial Sequence: Synthetic oligonucleotide
  Sense strand starting at position 3841 of SEQ ID NO: 3913
uguucugaagcccaagaau

SEQ ID NO: 304625 - RNA, 19 nt, Artificial Sequence
  Description of Artificial Sequence: Synthetic oligonucleotide
  Antisense strand to SEQ ID NO: 304624
auucuugggcuucagaaca

SEQ ID NO: 304626 - RNA, 19 nt, Artificial Sequence
  Description of Artificial Sequence: Synthetic oligonucleotide
  Sense strand starting at position 3849 of SEQ ID NO: 3913
agcccaagaaugugaugau

SEQ ID NO: 304627 - RNA, 19 nt, Artificial Sequence
  Description of Artificial Sequence: Synthetic oligonucleotide
  Antisense strand to SEQ ID NO: 304626
aucaucacauucuugggcu

SEQ ID NO: 304628 - RNA, 19 nt, Artificial Sequence
  Description of Artificial Sequence: Synthetic oligonucleotide
  Sense strand starting at position 3906 of SEQ ID NO: 3913
cccucaaaugggugaagau

SEQ ID NO: 304629 - RNA, 19 nt, Artificial Sequence
  Description of Artificial Sequence: Synthetic oligonucleotide
  Antisense strand to SEQ ID NO: 304628
aucuucacccauuugaggg

SEQ ID NO: 304630 - RNA, 19 nt, Artificial Sequence
  Description of Artificial Sequence: Synthetic oligonucleotide
  Sense strand starting at position 3964 of SEQ ID NO: 3913
aucagccaacagugauaua

SEQ ID NO: 304631 - RNA, 19 nt, Artificial Sequence
  Description of Artificial Sequence: Synthetic oligonucleotide
  Antisense strand to SEQ ID NO: 304630
uauaucacuguuggcugau

SEQ ID NO: 304632 - RNA, 19 nt, Artificial Sequence
  Description of Artificial Sequence: Synthetic oligonucleotide
  Sense strand starting at position 108 of SEQ ID NO: 3914
aggauaaaguaucccacuu

SEQ ID NO: 304633 - RNA, 19 nt, Artificial Sequence
  Description of Artificial Sequence: Synthetic oligonucleotide
  Antisense strand to SEQ ID NO: 304632
aagugggauacuuuauccu

SEQ ID NO: 304634 - RNA, 19 nt, Artificial Sequence
  Description of Artificial Sequence: Synthetic oligonucleotide
  Sense strand starting at position 140 of SEQ ID NO: 3914
ucauuccacgcauggaaau

SEQ ID NO: 304635 - RNA, 19 nt, Artificial Sequence
  Description of Artificial Sequence: Synthetic oligonucleotide
  Antisense strand to SEQ ID NO: 304634
auuuccaugcguggaauga

SEQ ID NO: 304636 - RNA, 19 nt, Artificial Sequence
  Description of Artificial Sequence: Synthetic oligonucleotide
  Sense strand starting at position 524 of SEQ ID NO: 3914
cuagcuaaugaugggauua

SEQ ID NO: 304637 - RNA, 19 nt, Artificial Sequence
  Description of Artificial Sequence: Synthetic oligonucleotide
  Antisense strand to SEQ ID NO: 304636
uaaucccaucauuagcuag

SEQ ID NO: 304638 - RNA, 19 nt, Artificial Sequence
  Description of Artificial Sequence: Synthetic oligonucleotide
  Sense strand starting at position 529 of SEQ ID NO: 3914
uaaugaugggauuaguugu

SEQ ID NO: 304639 - RNA, 19 nt, Artificial Sequence
  Description of Artificial Sequence: Synthetic oligonucleotide
  Antisense strand to SEQ ID NO: 304638
acaacuaaucccaucauua

SEQ ID NO: 304640 - RNA, 19 nt, Artificial Sequence
  Description of Artificial Sequence: Synthetic oligonucleotide
  Sense strand starting at position 536 of SEQ ID NO: 3914
gggauuaguuguuauuuaa

SEQ ID NO: 304641 - RNA, 19 nt, Artificial Sequence
  Description of Artificial Sequence: Synthetic oligonucleotide
  Antisense strand to SEQ ID NO: 304640
uuaaauaacaacuaauccc

SEQ ID NO: 304642 - RNA, 19 nt, Artificial Sequence
  Description of Artificial Sequence: Synthetic oligonucleotide
  Sense strand starting at position 543 of SEQ ID NO: 3914
guuguuauuuaacaaccau

SEQ ID NO: 304643 - RNA, 19 nt, Artificial Sequence
  Description of Artificial Sequence: Synthetic oligonucleotide
  Antisense strand to SEQ ID NO: 304642
augguuguuaaauaacaac

SEQ ID NO: 304644 - RNA, 19 nt, Artificial Sequence
  Description of Artificial Sequence: Synthetic oligonucleotide
  Sense strand starting at position 570 of SEQ ID NO: 3914
guggucuugacggugugua

SEQ ID NO: 304645 - RNA, 19 nt, Artificial Sequence
  Description of Artificial Sequence: Synthetic oligonucleotide
  Antisense strand to SEQ ID NO: 304644
uacacaccgucaagaccac

SEQ ID NO: 304646 - RNA, 19 nt, Artificial Sequence
  Description of Artificial Sequence: Synthetic oligonucleotide
  Sense strand starting at position 782 of SEQ ID NO: 3914
gaacgauauccuggcacac

SEQ ID NO: 304647 - RNA, 19 nt, Artificial Sequence
  Description of Artificial Sequence: Synthetic oligonucleotide
  Antisense strand to SEQ ID NO: 304646
gugugccaggauaucguuc

SEQ ID NO: 304648 - RNA, 19 nt, Artificial Sequence
  Description of Artificial Sequence: Synthetic oligonucleotide
  Sense strand starting at position 924 of SEQ ID NO: 3914
ugaccaucuuggguaguga

SEQ ID NO: 304649 - RNA, 19 nt, Artificial Sequence
  Description of Artificial Sequence: Synthetic oligonucleotide
  Antisense strand to SEQ ID NO: 304648
ucacuacccaagaugguca

SEQ ID NO: 304650 - RNA, 19 nt, Artificial Sequence
  Description of Artificial Sequence: Synthetic oligonucleotide
  Sense strand starting at position 989 of SEQ ID NO: 3914
uguuauguauguucugaau

SEQ ID NO: 304651 - RNA, 19 nt, Artificial Sequence
  Description of Artificial Sequence: Synthetic oligonucleotide
  Antisense strand to SEQ ID NO: 304650
auucagaacauacauaaca

SEQ ID NO: 304652 - RNA, 19 nt, Artificial Sequence
  Description of Artificial Sequence: Synthetic oligonucleotide
  Sense strand starting at position 1119 of SEQ ID NO: 3914
ucuuguuuagcguaauuua

SEQ ID NO: 304653 - RNA, 19 nt, Artificial Sequence
  Description of Artificial Sequence: Synthetic oligonucleotide
  Antisense strand to SEQ ID NO: 304652
uaaauuacgcuaaacaaga

SEQ ID NO: 304654 - RNA, 19 nt, Artificial Sequence
  Description of Artificial Sequence: Synthetic oligonucleotide
  Sense strand starting at position 1127 of SEQ ID NO: 3914
agcguaauuuacucacuca

SEQ ID NO: 304655 - RNA, 19 nt, Artificial Sequence
  Description of Artificial Sequence: Synthetic oligonucleotide
  Antisense strand to SEQ ID NO: 304654
ugagugaguaaauuacgcu

SEQ ID NO: 304656 - RNA, 19 nt, Artificial Sequence
  Description of Artificial Sequence: Synthetic oligonucleotide
  Sense strand starting at position 1156 of SEQ ID NO: 3914
uuggaaucaucguugagac

SEQ ID NO: 304657 - RNA, 19 nt, Artificial Sequence
  Description of Artificial Sequence: Synthetic oligonucleotide
  Antisense strand to SEQ ID NO: 304656
gucucaacgaugauuccaa

SEQ ID NO: 304658 - RNA, 19 nt, Artificial Sequence
  Description of Artificial Sequence: Synthetic oligonucleotide
  Sense strand starting at position 1196 of SEQ ID NO: 3914
auaucuaauccguaaaguc

SEQ ID NO: 304659 - RNA, 19 nt, Artificial Sequence
  Description of Artificial Sequence: Synthetic oligonucleotide
  Antisense strand to SEQ ID NO: 304658
gacuuuacggauuagauau

SEQ ID NO: 304660 - RNA, 19 nt, Artificial Sequence
  Description of Artificial Sequence: Synthetic oligonucleotide
  Sense strand starting at position 1299 of SEQ ID NO: 3914
ccuucugagugguuucuca

SEQ ID NO: 304661 - RNA, 19 nt, Artificial Sequence
  Description of Artificial Sequence: Synthetic oligonucleotide
  Antisense strand to SEQ ID NO: 304660
ugagaaaccacucagaagg

SEQ ID NO: 304662 - RNA, 19 nt, Artificial Sequence
  Description of Artificial Sequence: Synthetic oligonucleotide
  Sense strand starting at position 1303 of SEQ ID NO: 3914
cugagugguuucucacaau

SEQ ID NO: 304663 - RNA, 19 nt, Artificial Sequence
  Description of Artificial Sequence: Synthetic oligonucleotide
  Antisense strand to SEQ ID NO: 304662
auugugagaaaccacucag

SEQ ID NO: 304664 - RNA, 19 nt, Artificial Sequence
  Description of Artificial Sequence: Synthetic oligonucleotide
  Sense strand starting at position 1431 of SEQ ID NO: 3914
cacgguguuccacacucua

SEQ ID NO: 304665 - RNA, 19 nt, Artificial Sequence
  Description of Artificial Sequence: Synthetic oligonucleotide
  Antisense strand to SEQ ID NO: 304664
uagaguguggaacaccgug

SEQ ID NO: 304666 - RNA, 19 nt, Artificial Sequence
  Description of Artificial Sequence: Synthetic oligonucleotide
  Sense strand starting at position 1483 of SEQ ID NO: 3914
gccgcaauggccuucucua

SEQ ID NO: 304667 - RNA, 19 nt, Artificial Sequence
  Description of Artificial Sequence: Synthetic oligonucleotide
  Antisense strand to SEQ ID NO: 304666
uagagaaggccauugcggc

SEQ ID NO: 304668 - RNA, 19 nt, Artificial Sequence
  Description of Artificial Sequence: Synthetic oligonucleotide
  Sense strand starting at position 1526 of SEQ ID NO: 3914
ccgauucugcccuaucgga

SEQ ID NO: 304669 - RNA, 19 nt, Artificial Sequence
  Description of Artificial Sequence: Synthetic oligonucleotide
  Antisense strand to SEQ ID NO: 304668
uccgauagggcagaaucgg

SEQ ID NO: 304670 - RNA, 19 nt, Artificial Sequence
  Description of Artificial Sequence: Synthetic oligonucleotide
  Sense strand starting at position 1699 of SEQ ID NO: 3914
gaagaauccugcgccuauc

SEQ ID NO: 304671 - RNA, 19 nt, Artificial Sequence
  Description of Artificial Sequence: Synthetic oligonucleotide
  Antisense strand to SEQ ID NO: 304670
gauaggcgcaggauucuuc

SEQ ID NO: 304672 - RNA, 19 nt, Artificial Sequence
  Description of Artificial Sequence: Synthetic oligonucleotide
  Sense strand starting at position 1767 of SEQ ID NO: 3914
uaucauucucgugcugcau

SEQ ID NO: 304673 - RNA, 19 nt, Artificial Sequence
  Description of Artificial Sequence: Synthetic oligonucleotide
  Antisense strand to SEQ ID NO: 304672
augcagcacgagaaugaua

SEQ ID NO: 304674 - RNA, 19 nt, Artificial Sequence
  Description of Artificial Sequence: Synthetic oligonucleotide
  Sense strand starting at position 1799 of SEQ ID NO: 3914
ccucguugccgcuugagaa

SEQ ID NO: 304675 - RNA, 19 nt, Artificial Sequence
  Description of Artificial Sequence: Synthetic oligonucleotide
  Antisense strand to SEQ ID NO: 304674
uucucaagcggcaacgagg

SEQ ID NO: 304676 - RNA, 19 nt, Artificial Sequence
  Description of Artificial Sequence: Synthetic oligonucleotide
  Sense strand starting at position 1991 of SEQ ID NO: 3914
cgucuucuucgagccaguu

SEQ ID NO: 304677 - RNA, 19 nt, Artificial Sequence
  Description of Artificial Sequence: Synthetic oligonucleotide
  Antisense strand to SEQ ID NO: 304676
aacuggcucgaagaagacg

SEQ ID NO: 304678 - RNA, 19 nt, Artificial Sequence
  Description of Artificial Sequence: Synthetic oligonucleotide
  Sense strand starting at position 2257 of SEQ ID NO: 3914
accucaguuucuuccugua

SEQ ID NO: 304679 - RNA, 19 nt, Artificial Sequence
  Description of Artificial Sequence: Synthetic oligonucleotide
  Antisense strand to SEQ ID NO: 304678
uacaggaagaaacugaggu

SEQ ID NO: 304680 - RNA, 19 nt, Artificial Sequence
  Description of Artificial Sequence: Synthetic oligonucleotide
  Sense strand starting at position 2308 of SEQ ID NO: 3914
auacauuuccgcugcugga

SEQ ID NO: 304681 - RNA, 19 nt, Artificial Sequence
  Description of Artificial Sequence: Synthetic oligonucleotide
  Antisense strand to SEQ ID NO: 304680
uccagcagcggaaauguau

SEQ ID NO: 304682 - RNA, 19 nt, Artificial Sequence
  Description of Artificial Sequence: Synthetic oligonucleotide
  Sense strand starting at position 2641 of SEQ ID NO: 3914
gaguuuaaugcuggaacaa

SEQ ID NO: 304683 - RNA, 19 nt, Artificial Sequence
  Description of Artificial Sequence: Synthetic oligonucleotide
  Antisense strand to SEQ ID NO: 304682
uuguuccagcauuaaacuc

SEQ ID NO: 304684 - RNA, 19 nt, Artificial Sequence
  Description of Artificial Sequence: Synthetic oligonucleotide
  Sense strand starting at position 2668 of SEQ ID NO: 3914
uuugguaggugauugggaa

SEQ ID NO: 304685 - RNA, 19 nt, Artificial Sequence
  Description of Artificial Sequence: Synthetic oligonucleotide
  Antisense strand to SEQ ID NO: 304684
uucccaaucaccuaccaaa

SEQ ID NO: 304686 - RNA, 19 nt, Artificial Sequence
  Description of Artificial Sequence: Synthetic oligonucleotide
  Sense strand starting at position 2850 of SEQ ID NO: 3914
gugucuuugcaauagugag

SEQ ID NO: 304687 - RNA, 19 nt, Artificial Sequence
  Description of Artificial Sequence: Synthetic oligonucleotide
  Antisense strand to SEQ ID NO: 304686
cucacuauugcaaagacac

SEQ ID NO: 304688 - RNA, 19 nt, Artificial Sequence
  Description of Artificial Sequence: Synthetic oligonucleotide
  Sense strand starting at position 2866 of SEQ ID NO: 3914
gagugagugccaggaagau

SEQ ID NO: 304689 - RNA, 19 nt, Artificial Sequence
  Description of Artificial Sequence: Synthetic oligonucleotide
  Antisense strand to SEQ ID NO: 304688
aucuuccuggcacucacuc

SEQ ID NO: 304690 - RNA, 19 nt, Artificial Sequence
  Description of Artificial Sequence: Synthetic oligonucleotide
  Sense strand starting at position 3097 of SEQ ID NO: 3914
cagguauuucuuuguggca

SEQ ID NO: 304691 - RNA, 19 nt, Artificial Sequence
  Description of Artificial Sequence: Synthetic oligonucleotide
  Antisense strand to SEQ ID NO: 304690
ugccacaaagaaauaccug

SEQ ID NO: 304692 - RNA, 19 nt, Artificial Sequence
  Description of Artificial Sequence: Synthetic oligonucleotide
  Sense strand starting at position 3098 of SEQ ID NO: 3914
agguauuucuuuguggcaa

SEQ ID NO: 304693 - RNA, 19 nt, Artificial Sequence
  Description of Artificial Sequence: Synthetic oligonucleotide
  Antisense strand to SEQ ID NO: 304692
uugccacaaagaaauaccu

SEQ ID NO: 304694 - RNA, 19 nt, Artificial Sequence
  Description of Artificial Sequence: Synthetic oligonucleotide
  Sense strand starting at position 3389 of SEQ ID NO: 3914
aggagaaucacgugaucug

SEQ ID NO: 304695 - RNA, 19 nt, Artificial Sequence
  Description of Artificial Sequence: Synthetic oligonucleotide
  Antisense strand to SEQ ID NO: 304694
cagaucacgugauucuccu

SEQ ID NO: 304696 - RNA, 19 nt, Artificial Sequence
  Description of Artificial Sequence: Synthetic oligonucleotide
  Sense strand starting at position 3557 of SEQ ID NO: 3914
acauucuauuucugggaga

SEQ ID NO: 304697 - RNA, 19 nt, Artificial Sequence
  Description of Artificial Sequence: Synthetic oligonucleotide
  Antisense strand to SEQ ID NO: 304696
ucucccagaaauagaaugu

SEQ ID NO: 304698 - RNA, 19 nt, Artificial Sequence
  Description of Artificial Sequence: Synthetic oligonucleotide
  Sense strand starting at position 3558 of SEQ ID NO: 3914
cauucuauuucugggagac

SEQ ID NO: 304699 - RNA, 19 nt, Artificial Sequence
  Description of Artificial Sequence: Synthetic oligonucleotide
  Antisense strand to SEQ ID NO: 304698
gucucccagaaauagaaug

SEQ ID NO: 304700 - RNA, 19 nt, Artificial Sequence
  Description of Artificial Sequence: Synthetic oligonucleotide
  Sense strand starting at position 3560 of SEQ ID NO: 3914
uucuauuucugggagacac

SEQ ID NO: 304701 - RNA, 19 nt, Artificial Sequence
  Description of Artificial Sequence: Synthetic oligonucleotide
  Antisense strand to SEQ ID NO: 304700
gugucucccagaaauagaa

SEQ ID NO: 304702 - RNA, 19 nt, Artificial Sequence
  Description of Artificial Sequence: Synthetic oligonucleotide
  Sense strand starting at position 3643 of SEQ ID NO: 3914
auucuacaguuauccuaga

SEQ ID NO: 304703 - RNA, 19 nt, Artificial Sequence
  Description of Artificial Sequence: Synthetic oligonucleotide
  Antisense strand to SEQ ID NO: 304702
ucuaggauaacuguagaau

SEQ ID NO: 304704 - RNA, 19 nt, Artificial Sequence
  Description of Artificial Sequence: Synthetic oligonucleotide
  Sense strand starting at position 3713 of SEQ ID NO: 3914
agaacuguccugcagucua

SEQ ID NO: 304705 - RNA, 19 nt, Artificial Sequence
  Description of Artificial Sequence: Synthetic oligonucleotide
  Antisense strand to SEQ ID NO: 304704
uagacugcaggacaguucu

SEQ ID NO: 304706 - RNA, 19 nt, Artificial Sequence
  Description of Artificial Sequence: Synthetic oligonucleotide
  Sense strand starting at position 3817 of SEQ ID NO: 3914
gucuuaucagaucgaugua

SEQ ID NO: 304707 - RNA, 19 nt, Artificial Sequence
  Description of Artificial Sequence: Synthetic oligonucleotide
  Antisense strand to SEQ ID NO: 304706
uacaucgaucugauaagac

SEQ ID NO: 304708 - RNA, 19 nt, Artificial Sequence
  Description of Artificial Sequence: Synthetic oligonucleotide
  Sense strand starting at position 3820 of SEQ ID NO: 3914
uuaucagaucgauguaaca

SEQ ID NO: 304709 - RNA, 19 nt, Artificial Sequence
  Description of Artificial Sequence: Synthetic oligonucleotide
  Antisense strand to SEQ ID NO: 304708
uguuacaucgaucugauaa

SEQ ID NO: 304710 - RNA, 19 nt, Artificial Sequence
  Description of Artificial Sequence: Synthetic oligonucleotide
  Sense strand starting at position 3965 of SEQ ID NO: 3914
uccagugauccagguaaga

SEQ ID NO: 304711 - RNA, 19 nt, Artificial Sequence
  Description of Artificial Sequence: Synthetic oligonucleotide
  Antisense strand to SEQ ID NO: 304710
ucuuaccuggaucacugga

SEQ ID NO: 304712 - RNA, 19 nt, Artificial Sequence
  Description of Artificial Sequence: Synthetic oligonucleotide
  Sense strand starting at position 340 of SEQ ID NO: 3915
agacucacucgucauaauu

SEQ ID NO: 304713 - RNA, 19 nt, Artificial Sequence
  Description of Artificial Sequence: Synthetic oligonucleotide
  Antisense strand to SEQ ID NO: 304712
aauuaugacgagugagucu

SEQ ID NO: 304714 - RNA, 19 nt, Artificial Sequence
  Description of Artificial Sequence: Synthetic oligonucleotide
  Sense strand starting at position 354 of SEQ ID NO: 3915
uaauuaccagucgguaaua

SEQ ID NO: 304715 - RNA, 19 nt, Artificial Sequence
  Description of Artificial Sequence: Synthetic oligonucleotide
  Antisense strand to SEQ ID NO: 304714
uauuaccgacugguaauua

SEQ ID NO: 304716 - RNA, 19 nt, Artificial Sequence
  Description of Artificial Sequence: Synthetic oligonucleotide
  Sense strand starting at position 417 of SEQ ID NO: 3915
ggacuccugccuugucuaa

SEQ ID NO: 304717 - RNA, 19 nt, Artificial Sequence
  Description of Artificial Sequence: Synthetic oligonucleotide
  Antisense strand to SEQ ID NO: 304716
uuagacaaggcaggagucc

SEQ ID NO: 304718 - RNA, 19 nt, Artificial Sequence
  Description of Artificial Sequence: Synthetic oligonucleotide
  Sense strand starting at position 842 of SEQ ID NO: 3915
ggaacaaaugcgcgaaauu

SEQ ID NO: 304719 - RNA, 19 nt, Artificial Sequence
  Description of Artificial Sequence: Synthetic oligonucleotide
  Antisense strand to SEQ ID NO: 304718
aauuucgcgcauuuguucc

SEQ ID NO: 304720 - RNA, 19 nt, Artificial Sequence
  Description of Artificial Sequence: Synthetic oligonucleotide
  Sense strand starting at position 843 of SEQ ID NO: 3915
gaacaaaugcgcgaaauuc

SEQ ID NO: 304721 - RNA, 19 nt, Artificial Sequence
  Description of Artificial Sequence: Synthetic oligonucleotide
  Antisense strand to SEQ ID NO: 304720
gaauuucgcgcauuuguuc

SEQ ID NO: 304722 - RNA, 19 nt, Artificial Sequence
  Description of Artificial Sequence: Synthetic oligonucleotide
  Sense strand starting at position 978 of SEQ ID NO: 3915
agaccuguccgcuauagag

SEQ ID NO: 304723 - RNA, 19 nt, Artificial Sequence
  Description of Artificial Sequence: Synthetic oligonucleotide
  Antisense strand to SEQ ID NO: 304722
cucuauagcggacaggucu

SEQ ID NO: 304724 - RNA, 19 nt, Artificial Sequence
  Description of Artificial Sequence: Synthetic oligonucleotide
  Sense strand starting at position 1036 of SEQ ID NO: 3915
ggguuucccucacccacaa

SEQ ID NO: 304725 - RNA, 19 nt, Artificial Sequence
  Description of Artificial Sequence: Synthetic oligonucleotide
  Antisense strand to SEQ ID NO: 304724
uugugggugagggaaaccc

SEQ ID NO: 304726 - RNA, 19 nt, Artificial Sequence
  Description of Artificial Sequence: Synthetic oligonucleotide
  Sense strand starting at position 1057 of SEQ ID NO: 3915
cguugaugcgaacaucuaa

SEQ ID NO: 304727 - RNA, 19 nt, Artificial Sequence
  Description of Artificial Sequence: Synthetic oligonucleotide
  Antisense strand to SEQ ID NO: 304726
uuagauguucgcaucaacg

SEQ ID NO: 304728 - RNA, 19 nt, Artificial Sequence
  Description of Artificial Sequence: Synthetic oligonucleotide
  Sense strand starting at position 1159 of SEQ ID NO: 3915
gagugucaguuucccagau

SEQ ID NO: 304729 - RNA, 19 nt, Artificial Sequence
  Description of Artificial Sequence: Synthetic oligonucleotide
  Antisense strand to SEQ ID NO: 304728
aucugggaaacugacacuc

SEQ ID NO: 304730 - RNA, 19 nt, Artificial Sequence
  Description of Artificial Sequence: Synthetic oligonucleotide
  Sense strand starting at position 1163 of SEQ ID NO: 3915
gucaguuucccagaucggu

SEQ ID NO: 304731 - RNA, 19 nt, Artificial Sequence
  Description of Artificial Sequence: Synthetic oligonucleotide
  Antisense strand to SEQ ID NO: 304730
accgaucugggaaacugac

SEQ ID NO: 304732 - RNA, 19 nt, Artificial Sequence
  Description of Artificial Sequence: Synthetic oligonucleotide
  Sense strand starting at position 1166 of SEQ ID NO: 3915
aguuucccagaucgguaaa

SEQ ID NO: 304733 - RNA, 19 nt, Artificial Sequence
  Description of Artificial Sequence: Synthetic oligonucleotide
  Antisense strand to SEQ ID NO: 304732
uuuaccgaucugggaaacu

SEQ ID NO: 304734 - RNA, 19 nt, Artificial Sequence
  Description of Artificial Sequence: Synthetic oligonucleotide
  Sense strand starting at position 1282 of SEQ ID NO: 3915
uugauaagagcaggugaaa

SEQ ID NO: 304735 - RNA, 19 nt, Artificial Sequence
  Description of Artificial Sequence: Synthetic oligonucleotide
  Antisense strand to SEQ ID NO: 304734
uuucaccugcucuuaucaa

SEQ ID NO: 304736 - RNA, 19 nt, Artificial Sequence
  Description of Artificial Sequence: Synthetic oligonucleotide
  Sense strand starting at position 2009 of SEQ ID NO: 3915
cgcguuucucccgcccaaa

SEQ ID NO: 304737 - RNA, 19 nt, Artificial Sequence
  Description of Artificial Sequence: Synthetic oligonucleotide
  Antisense strand to SEQ ID NO: 304736
uuugggcgggagaaacgcg

SEQ ID NO: 304738 - RNA, 19 nt, Artificial Sequence
  Description of Artificial Sequence: Synthetic oligonucleotide
  Sense strand starting at position 2080 of SEQ ID NO: 3915
guuccagcgcuguccuaaa

SEQ ID NO: 304739 - RNA, 19 nt, Artificial Sequence
  Description of Artificial Sequence: Synthetic oligonucleotide
  Antisense strand to SEQ ID NO: 304738
uuuaggacagcgcuggaac

SEQ ID NO: 304740 - RNA, 19 nt, Artificial Sequence
  Description of Artificial Sequence: Synthetic oligonucleotide
  Sense strand starting at position 2165 of SEQ ID NO: 3915
ggugccucuugauugaaag

SEQ ID NO: 304741 - RNA, 19 nt, Artificial Sequence
  Description of Artificial Sequence: Synthetic oligonucleotide
  Antisense strand to SEQ ID NO: 304740
cuuucaaucaagaggcacc

SEQ ID NO: 304742 - RNA, 19 nt, Artificial Sequence
  Description of Artificial Sequence: Synthetic oligonucleotide
  Sense strand starting at position 2166 of SEQ ID NO: 3915
gugccucuugauugaaaga

SEQ ID NO: 304743 - RNA, 19 nt, Artificial Sequence
  Description of Artificial Sequence: Synthetic oligonucleotide
  Antisense strand to SEQ ID NO: 304742
ucuuucaaucaagaggcac

SEQ ID NO: 304744 - RNA, 19 nt, Artificial Sequence
  Description of Artificial Sequence: Synthetic oligonucleotide
  Sense strand starting at position 2241 of SEQ ID NO: 3915
aggaaaucucacggaaguu

SEQ ID NO: 304745 - RNA, 19 nt, Artificial Sequence
  Description of Artificial Sequence: Synthetic oligonucleotide
  Antisense strand to SEQ ID NO: 304744
aacuuccgugagauuuccu

SEQ ID NO: 304746 - RNA, 19 nt, Artificial Sequence
  Description of Artificial Sequence: Synthetic oligonucleotide
  Sense strand starting at position 2395 of SEQ ID NO: 3915
agaggauugccgcaaggau

SEQ ID NO: 304747 - RNA, 19 nt, Artificial Sequence
  Description of Artificial Sequence: Synthetic oligonucleotide
  Antisense strand to SEQ ID NO: 304746
auccuugcggcaauccucu

SEQ ID NO: 304748 - RNA, 19 nt, Artificial Sequence
  Description of Artificial Sequence: Synthetic oligonucleotide
  Sense strand starting at position 2439 of SEQ ID NO: 3915
ccuugauuggcacacauag

SEQ ID NO: 304749 - RNA, 19 nt, Artificial Sequence
  Description of Artificial Sequence: Synthetic oligonucleotide
  Antisense strand to SEQ ID NO: 304748
cuaugugugccaaucaagg

SEQ ID NO: 304750 - RNA, 19 nt, Artificial Sequence
  Description of Artificial Sequence: Synthetic oligonucleotide
  Sense strand starting at position 2631 of SEQ ID NO: 3915
acgucugcgccauuaacuu

SEQ ID NO: 304751 - RNA, 19 nt, Artificial Sequence
  Description of Artificial Sequence: Synthetic oligonucleotide
  Antisense strand to SEQ ID NO: 304750
aaguuaauggcgcagacgu

SEQ ID NO: 304752 - RNA, 19 nt, Artificial Sequence
  Description of Artificial Sequence: Synthetic oligonucleotide
  Sense strand starting at position 2637 of SEQ ID NO: 3915
gcgccauuaacuucggagu

SEQ ID NO: 304753 - RNA, 19 nt, Artificial Sequence
  Description of Artificial Sequence: Synthetic oligonucleotide
  Antisense strand to SEQ ID NO: 304752
acuccgaaguuaauggcgc

SEQ ID NO: 304754 - RNA, 19 nt, Artificial Sequence
  Description of Artificial Sequence: Synthetic oligonucleotide
  Sense strand starting at position 2653 of SEQ ID NO: 3915
agugguguucgcaggagca

SEQ ID NO: 304755 - RNA, 19 nt, Artificial Sequence
  Description of Artificial Sequence: Synthetic oligonucleotide
  Antisense strand to SEQ ID NO: 304754
ugcuccugcgaacaccacu

SEQ ID NO: 304756 - RNA, 19 nt, Artificial Sequence
  Description of Artificial Sequence: Synthetic oligonucleotide
  Sense strand starting at position 2674 of SEQ ID NO: 3915
ugucgcaguggucuuuaau

SEQ ID NO: 304757 - RNA, 19 nt, Artificial Sequence
  Description of Artificial Sequence: Synthetic oligonucleotide
  Antisense strand to SEQ ID NO: 304756
auuaaagaccacugcgaca

SEQ ID NO: 304758 - RNA, 19 nt, Artificial Sequence
  Description of Artificial Sequence: Synthetic oligonucleotide
  Sense strand starting at position 2675 of SEQ ID NO: 3915
gucgcaguggucuuuaauu

SEQ ID NO: 304759 - RNA, 19 nt, Artificial Sequence
  Description of Artificial Sequence: Synthetic oligonucleotide
  Antisense strand to SEQ ID NO: 304758
aauuaaagaccacugcgac

SEQ ID NO: 304760 - RNA, 19 nt, Artificial Sequence
  Description of Artificial Sequence: Synthetic oligonucleotide
  Sense strand starting at position 2683 of SEQ ID NO: 3915
ggucuuuaauugcuuuaag

SEQ ID NO: 304761 - RNA, 19 nt, Artificial Sequence
  Description of Artificial Sequence: Synthetic oligonucleotide
  Antisense strand to SEQ ID NO: 304760
cuuaaagcaauuaaagacc

SEQ ID NO: 304762 - RNA, 19 nt, Artificial Sequence
  Description of Artificial Sequence: Synthetic oligonucleotide
  Sense strand starting at position 2684 of SEQ ID NO: 3915
gucuuuaauugcuuuaagu

SEQ ID NO: 304763 - RNA, 19 nt, Artificial Sequence
  Description of Artificial Sequence: Synthetic oligonucleotide
  Antisense strand to SEQ ID NO: 304762
acuuaaagcaauuaaagac

SEQ ID NO: 304764 - RNA, 19 nt, Artificial Sequence
  Description of Artificial Sequence: Synthetic oligonucleotide
  Sense strand starting at position 2810 of SEQ ID NO: 3915
ccaacuuucccguaaagaa

SEQ ID NO: 304765 - RNA, 19 nt, Artificial Sequence
  Description of Artificial Sequence: Synthetic oligonucleotide
  Antisense strand to SEQ ID NO: 304764
uucuuuacgggaaaguugg

SEQ ID NO: 304766 - RNA, 19 nt, Artificial Sequence
  Description of Artificial Sequence: Synthetic oligonucleotide
  Sense strand starting at position 2842 of SEQ ID NO: 3915
agagccaagucuuucgaga

SEQ ID NO: 304767 - RNA, 19 nt, Artificial Sequence
  Description of Artificial Sequence: Synthetic oligonucleotide
  Antisense strand to SEQ ID NO: 304766
ucucgaaagacuuggcucu

SEQ ID NO: 304768 - RNA, 19 nt, Artificial Sequence
  Description of Artificial Sequence: Synthetic oligonucleotide
  Sense strand starting at position 3117 of SEQ ID NO: 3915
guaaguugcccugagcuaa

SEQ ID NO: 304769 - RNA, 19 nt, Artificial Sequence
  Description of Artificial Sequence: Synthetic oligonucleotide
  Antisense strand to SEQ ID NO: 304768
uuagcucagggcaacuuac

SEQ ID NO: 304770 - RNA, 19 nt, Artificial Sequence
  Description of Artificial Sequence: Synthetic oligonucleotide
  Sense strand starting at position 3229 of SEQ ID NO: 3915
ggauguaauuaccuauuau

SEQ ID NO: 304771 - RNA, 19 nt, Artificial Sequence
  Description of Artificial Sequence: Synthetic oligonucleotide
  Antisense strand to SEQ ID NO: 304770
auaauagguaauuacaucc

SEQ ID NO: 304772 - RNA, 19 nt, Artificial Sequence
  Description of Artificial Sequence: Synthetic oligonucleotide
  Sense strand starting at position 3417 of SEQ ID NO: 3915
uuuguuauuuccuucuguu

SEQ ID NO: 304773 - RNA, 19 nt, Artificial Sequence
  Description of Artificial Sequence: Synthetic oligonucleotide
  Antisense strand to SEQ ID NO: 304772
aacagaaggaaauaacaaa

SEQ ID NO: 304774 - RNA, 19 nt, Artificial Sequence
  Description of Artificial Sequence: Synthetic oligonucleotide
  Sense strand starting at position 3423 of SEQ ID NO: 3915
auuuccuucuguuuguuua

SEQ ID NO: 304775 - RNA, 19 nt, Artificial Sequence
  Description of Artificial Sequence: Synthetic oligonucleotide
  Antisense strand to SEQ ID NO: 304774
uaaacaaacagaaggaaau

SEQ ID NO: 304776 - RNA, 19 nt, Artificial Sequence
  Description of Artificial Sequence: Synthetic oligonucleotide
  Sense strand starting at position 3488 of SEQ ID NO: 3915
uuaagucauugacuuuaag

SEQ ID NO: 304777 - RNA, 19 nt, Artificial Sequence
  Description of Artificial Sequence: Synthetic oligonucleotide
  Antisense strand to SEQ ID NO: 304776
cuuaaagucaaugacuuaa

SEQ ID NO: 304778 - RNA, 19 nt, Artificial Sequence
  Description of Artificial Sequence: Synthetic oligonucleotide
  Sense strand starting at position 3491 of SEQ ID NO: 3915
agucauugacuuuaagucu

SEQ ID NO: 304779 - RNA, 19 nt, Artificial Sequence
  Description of Artificial Sequence: Synthetic oligonucleotide
  Antisense strand to SEQ ID NO: 304778
agacuuaaagucaaugacu

SEQ ID NO: 304780 - RNA, 19 nt, Artificial Sequence
  Description of Artificial Sequence: Synthetic oligonucleotide
  Sense strand starting at position 3615 of SEQ ID NO: 3915
aucuacuuucccuggugau

SEQ ID NO: 304781 - RNA, 19 nt, Artificial Sequence
  Description of Artificial Sequence: Synthetic oligonucleotide
  Antisense strand to SEQ ID NO: 304780
aucaccagggaaaguagau

SEQ ID NO: 304782 - RNA, 19 nt, Artificial Sequence
  Description of Artificial Sequence: Synthetic oligonucleotide
  Sense strand starting at position 3616 of SEQ ID NO: 3915
ucuacuuucccuggugauu

SEQ ID NO: 304783 - RNA, 19 nt, Artificial Sequence
  Description of Artificial Sequence: Synthetic oligonucleotide
  Antisense strand to SEQ ID NO: 304782
aaucaccagggaaaguaga

SEQ ID NO: 304784 - RNA, 19 nt, Artificial Sequence
  Description of Artificial Sequence: Synthetic oligonucleotide
  Sense strand starting at position 3657 of SEQ ID NO: 3915
uuagaaguagguugauuga

SEQ ID NO: 304785 - RNA, 19 nt, Artificial Sequence
  Description of Artificial Sequence: Synthetic oligonucleotide
  Antisense strand to SEQ ID NO: 304784
ucaaucaaccuacuucuaa

SEQ ID NO: 304786 - RNA, 19 nt, Artificial Sequence
  Description of Artificial Sequence: Synthetic oligonucleotide
  Sense strand starting at position 3832 of SEQ ID NO: 3915
cucagcauauggucagaua

SEQ ID NO: 304787 - RNA, 19 nt, Artificial Sequence
  Description of Artificial Sequence: Synthetic oligonucleotide
  Antisense strand to SEQ ID NO: 304786
uaucugaccauaugcugag

SEQ ID NO: 304788 - RNA, 19 nt, Artificial Sequence
  Description of Artificial Sequence: Synthetic oligonucleotide
  Sense strand starting at position 3843 of SEQ ID NO: 3915
gucagauacugaguaugaa

SEQ ID NO: 304789 - RNA, 19 nt, Artificial Sequence
  Description of Artificial Sequence: Synthetic oligonucleotide
  Antisense strand to SEQ ID NO: 304788
uucauacucaguaucugac

SEQ ID NO: 304790 - RNA, 19 nt, Artificial Sequence
  Description of Artificial Sequence: Synthetic oligonucleotide
  Sense strand starting at position 3847 of SEQ ID NO: 3915
gauacugaguaugaaauau

SEQ ID NO: 304791 - RNA, 19 nt, Artificial Sequence
  Description of Artificial Sequence: Synthetic oligonucleotide
  Antisense strand to SEQ ID NO: 304790
auauuucauacucaguauc

SEQ ID NO: 304792 - RNA, 19 nt, Artificial Sequence
  Description of Artificial Sequence: Synthetic oligonucleotide
  Sense strand starting at position 160 of SEQ ID NO: 3916
uuaggauuccucugaccaa

SEQ ID NO: 304793 - RNA, 19 nt, Artificial Sequence
  Description of Artificial Sequence: Synthetic oligonucleotide
  Antisense strand to SEQ ID NO: 304792
uuggucagaggaauccuaa

SEQ ID NO: 304794 - RNA, 19 nt, Artificial Sequence
  Description of Artificial Sequence: Synthetic oligonucleotide
  Sense strand starting at position 163 of SEQ ID NO: 3916
ggauuccucugaccaacua

SEQ ID NO: 304795 - RNA, 19 nt, Artificial Sequence
  Description of Artificial Sequence: Synthetic oligonucleotide
  Antisense strand to SEQ ID NO: 304794
uaguuggucagaggaaucc

SEQ ID NO: 304796 - RNA, 19 nt, Artificial Sequence
  Description of Artificial Sequence: Synthetic oligonucleotide
  Sense strand starting at position 288 of SEQ ID NO: 3916
cagacaggccugggagaau

SEQ ID NO: 304797 - RNA, 19 nt, Artificial Sequence
  Description of Artificial Sequence: Synthetic oligonucleotide
  Antisense strand to SEQ ID NO: 304796
auucucccaggccugucug

SEQ ID NO: 304798 - RNA, 19 nt, Artificial Sequence
  Description of Artificial Sequence: Synthetic oligonucleotide
  Sense strand starting at position 599 of SEQ ID NO: 3916
gaccacacguuauaagcua

SEQ ID NO: 304799 - RNA, 19 nt, Artificial Sequence
  Description of Artificial Sequence: Synthetic oligonucleotide
  Antisense strand to SEQ ID NO: 304798
uagcuuauaacgugugguc

SEQ ID NO: 304800 - RNA, 19 nt, Artificial Sequence
  Description of Artificial Sequence: Synthetic oligonucleotide
  Sense strand starting at position 640 of SEQ ID NO: 3916
aagcaaagucugugcaaga

SEQ ID NO: 304801 - RNA, 19 nt, Artificial Sequence
  Description of Artificial Sequence: Synthetic oligonucleotide
  Antisense strand to SEQ ID NO: 304800
ucuugcacagacuuugcuu

SEQ ID NO: 304802 - RNA, 19 nt, Artificial Sequence
  Description of Artificial Sequence: Synthetic oligonucleotide
  Sense strand starting at position 641 of SEQ ID NO: 3916
agcaaagucugugcaagaa

SEQ ID NO: 304803 - RNA, 19 nt, Artificial Sequence
  Description of Artificial Sequence: Synthetic oligonucleotide
  Antisense strand to SEQ ID NO: 304802
uucuugcacagacuuugcu

SEQ ID NO: 304804 - RNA, 19 nt, Artificial Sequence
  Description of Artificial Sequence: Synthetic oligonucleotide
  Sense strand starting at position 645 of SEQ ID NO: 3916
aagucugugcaagaauaag

SEQ ID NO: 304805 - RNA, 19 nt, Artificial Sequence
  Description of Artificial Sequence: Synthetic oligonucleotide
  Antisense strand to SEQ ID NO: 304804
cuuauucuugcacagacuu

SEQ ID NO: 304806 - RNA, 19 nt, Artificial Sequence
  Description of Artificial Sequence: Synthetic oligonucleotide
  Sense strand starting at position 798 of SEQ ID NO: 3916
uuggguccaccauggaaau

SEQ ID NO: 304807 - RNA, 19 nt, Artificial Sequence
  Description of Artificial Sequence: Synthetic oligonucleotide
  Antisense strand to SEQ ID NO: 304806
auuuccaugguggacccaa

SEQ ID NO: 304808 - RNA, 19 nt, Artificial Sequence
  Description of Artificial Sequence: Synthetic oligonucleotide
  Sense strand starting at position 835 of SEQ ID NO: 3916
agugacgcuccugagaguu

SEQ ID NO: 304809 - RNA, 19 nt, Artificial Sequence
  Description of Artificial Sequence: Synthetic oligonucleotide
  Antisense strand to SEQ ID NO: 304808
aacucucaggagcgucacu

SEQ ID NO: 304810 - RNA, 19 nt, Artificial Sequence
  Description of Artificial Sequence: Synthetic oligonucleotide
  Sense strand starting at position 847 of SEQ ID NO: 3916
gagaguuaccagggaguua

SEQ ID NO: 304811 - RNA, 19 nt, Artificial Sequence
  Description of Artificial Sequence: Synthetic oligonucleotide
  Antisense strand to SEQ ID NO: 304810
uaacucccugguaacucuc

SEQ ID NO: 304812 - RNA, 19 nt, Artificial Sequence
  Description of Artificial Sequence: Synthetic oligonucleotide
  Sense strand starting at position 858 of SEQ ID NO: 3916
gggaguuaccacgagccuu

SEQ ID NO: 304813 - RNA, 19 nt, Artificial Sequence
  Description of Artificial Sequence: Synthetic oligonucleotide
  Antisense strand to SEQ ID NO: 304812
aaggcucgugguaacuccc

SEQ ID NO: 304814 - RNA, 19 nt, Artificial Sequence
  Description of Artificial Sequence: Synthetic oligonucleotide
  Sense strand starting at position 898 of SEQ ID NO: 3916
gauguuuguugugcaauuu

SEQ ID NO: 304815 - RNA, 19 nt, Artificial Sequence
  Description of Artificial Sequence: Synthetic oligonucleotide
  Antisense strand to SEQ ID NO: 304814
aaauugcacaacaaacauc

SEQ ID NO: 304816 - RNA, 19 nt, Artificial Sequence
  Description of Artificial Sequence: Synthetic oligonucleotide
  Sense strand starting at position 908 of SEQ ID NO: 3916
gugcaauuucuauguaccu

SEQ ID NO: 304817 - RNA, 19 nt, Artificial Sequence
  Description of Artificial Sequence: Synthetic oligonucleotide
  Antisense strand to SEQ ID NO: 304816
agguacauagaaauugcac

SEQ ID NO: 304818 - RNA, 19 nt, Artificial Sequence
  Description of Artificial Sequence: Synthetic oligonucleotide
  Sense strand starting at position 940 of SEQ ID NO: 3916
ucaccagagccaugcuaau

SEQ ID NO: 304819 - RNA, 19 nt, Artificial Sequence
  Description of Artificial Sequence: Synthetic oligonucleotide
  Antisense strand to SEQ ID NO: 304818
auuagcauggcucugguga

SEQ ID NO: 304820 - RNA, 19 nt, Artificial Sequence
  Description of Artificial Sequence: Synthetic oligonucleotide
  Sense strand starting at position 1047 of SEQ ID NO: 3916
ugugcagcucuguuacagu

SEQ ID NO: 304821 - RNA, 19 nt, Artificial Sequence
  Description of Artificial Sequence: Synthetic oligonucleotide
  Antisense strand to SEQ ID NO: 304820
acuguaacagagcugcaca

SEQ ID NO: 304822 - RNA, 19 nt, Artificial Sequence
  Description of Artificial Sequence: Synthetic oligonucleotide
  Sense strand starting at position 1211 of SEQ ID NO: 3916
gugccuuccacgugcuaca

SEQ ID NO: 304823 - RNA, 19 nt, Artificial Sequence
  Description of Artificial Sequence: Synthetic oligonucleotide
  Antisense strand to SEQ ID NO: 304822
uguagcacguggaaggcac

SEQ ID NO: 304824 - RNA, 19 nt, Artificial Sequence
  Description of Artificial Sequence: Synthetic oligonucleotide
  Sense strand starting at position 1753 of SEQ ID NO: 3916
cgcccaccuccgugaugau

SEQ ID NO: 304825 - RNA, 19 nt, Artificial Sequence
  Description of Artificial Sequence: Synthetic oligonucleotide
  Antisense strand to SEQ ID NO: 304824
aucaucacggaggugggcg

SEQ ID NO: 304826 - RNA, 19 nt, Artificial Sequence
  Description of Artificial Sequence: Synthetic oligonucleotide
  Sense strand starting at position 2313 of SEQ ID NO: 3916
cugccugaggacugauuaa

SEQ ID NO: 304827 - RNA, 19 nt, Artificial Sequence
  Description of Artificial Sequence: Synthetic oligonucleotide
  Antisense strand to SEQ ID NO: 304826
uuaaucaguccucaggcag

SEQ ID NO: 304828 - RNA, 19 nt, Artificial Sequence
  Description of Artificial Sequence: Synthetic oligonucleotide
  Sense strand starting at position 2414 of SEQ ID NO: 3916
ggcacuaaguuaucccaaa

SEQ ID NO: 304829 - RNA, 19 nt, Artificial Sequence
  Description of Artificial Sequence: Synthetic oligonucleotide
  Antisense strand to SEQ ID NO: 304828
uuugggauaacuuagugcc

SEQ ID NO: 304830 - RNA, 19 nt, Artificial Sequence
  Description of Artificial Sequence: Synthetic oligonucleotide
  Sense strand starting at position 2452 of SEQ ID NO: 3916
cgcuguccuggcugguaau

SEQ ID NO: 304831 - RNA, 19 nt, Artificial Sequence
  Description of Artificial Sequence: Synthetic oligonucleotide
  Antisense strand to SEQ ID NO: 304830
auuaccagccaggacagcg

SEQ ID NO: 304832 - RNA, 19 nt, Artificial Sequence
  Description of Artificial Sequence: Synthetic oligonucleotide
  Sense strand starting at position 2453 of SEQ ID NO: 3916
gcuguccuggcugguaauu

SEQ ID NO: 304833 - RNA, 19 nt, Artificial Sequence
  Description of Artificial Sequence: Synthetic oligonucleotide
  Antisense strand to SEQ ID NO: 304832
aauuaccagccaggacagc

SEQ ID NO: 304834 - RNA, 19 nt, Artificial Sequence
  Description of Artificial Sequence: Synthetic oligonucleotide
  Sense strand starting at position 2455 of SEQ ID NO: 3916
uguccuggcugguaauuaa

SEQ ID NO: 304835 - RNA, 19 nt, Artificial Sequence
  Description of Artificial Sequence: Synthetic oligonucleotide
  Antisense strand to SEQ ID NO: 304834
uuaauuaccagccaggaca

SEQ ID NO: 304836 - RNA, 19 nt, Artificial Sequence
  Description of Artificial Sequence: Synthetic oligonucleotide
  Sense strand starting at position 2458 of SEQ ID NO: 3916
ccuggcugguaauuaauaa

SEQ ID NO: 304837 - RNA, 19 nt, Artificial Sequence
  Description of Artificial Sequence: Synthetic oligonucleotide
  Antisense strand to SEQ ID NO: 304836
uuauuaauuaccagccagg

SEQ ID NO: 304838 - RNA, 19 nt, Artificial Sequence
  Description of Artificial Sequence: Synthetic oligonucleotide
  Sense strand starting at position 2570 of SEQ ID NO: 3916
gaagguaaauggugacuaa

SEQ ID NO: 304839 - RNA, 19 nt, Artificial Sequence
  Description of Artificial Sequence: Synthetic oligonucleotide
  Antisense strand to SEQ ID NO: 304838
uuagucaccauuuaccuuc

SEQ ID NO: 304840 - RNA, 19 nt, Artificial Sequence
  Description of Artificial Sequence: Synthetic oligonucleotide
  Sense strand starting at position 2573 of SEQ ID NO: 3916
gguaaauggugacuaaaug

SEQ ID NO: 304841 - RNA, 19 nt, Artificial Sequence
  Description of Artificial Sequence: Synthetic oligonucleotide
  Antisense strand to SEQ ID NO: 304840
cauuuagucaccauuuacc

SEQ ID NO: 304842 - RNA, 19 nt, Artificial Sequence
  Description of Artificial Sequence: Synthetic oligonucleotide
  Sense strand starting at position 2583 of SEQ ID NO: 3916
gacuaaaugcugugucggu

SEQ ID NO: 304843 - RNA, 19 nt, Artificial Sequence
  Description of Artificial Sequence: Synthetic oligonucleotide
  Antisense strand to SEQ ID NO: 304842
accgacacagcauuuaguc

SEQ ID NO: 304844 - RNA, 19 nt, Artificial Sequence
  Description of Artificial Sequence: Synthetic oligonucleotide
  Sense strand starting at position 2592 of SEQ ID NO: 3916
cugugucggugcucugaaa

SEQ ID NO: 304845 - RNA, 19 nt, Artificial Sequence
  Description of Artificial Sequence: Synthetic oligonucleotide
  Antisense strand to SEQ ID NO: 304844
uuucagagcaccgacacag

SEQ ID NO: 304846 - RNA, 19 nt, Artificial Sequence
  Description of Artificial Sequence: Synthetic oligonucleotide
  Sense strand starting at position 2624 of SEQ ID NO: 3916
augccuaguuguccuacua

SEQ ID NO: 304847 - RNA, 19 nt, Artificial Sequence
  Description of Artificial Sequence: Synthetic oligonucleotide
  Antisense strand to SEQ ID NO: 304846
uaguaggacaacuaggcau

SEQ ID NO: 304848 - RNA, 19 nt, Artificial Sequence
  Description of Artificial Sequence: Synthetic oligonucleotide
  Sense strand starting at position 2637 of SEQ ID NO: 3916
cuacuagguguccgugauu

SEQ ID NO: 304849 - RNA, 19 nt, Artificial Sequence
  Description of Artificial Sequence: Synthetic oligonucleotide
  Antisense strand to SEQ ID NO: 304848
aaucacggacaccuaguag

SEQ ID NO: 304850 - RNA, 19 nt, Artificial Sequence
  Description of Artificial Sequence: Synthetic oligonucleotide
  Sense strand starting at position 2640 of SEQ ID NO: 3916
cuagguguccgugauucuu

SEQ ID NO: 304851 - RNA, 19 nt, Artificial Sequence
  Description of Artificial Sequence: Synthetic oligonucleotide
  Antisense strand to SEQ ID NO: 304850
aagaaucacggacaccuag

SEQ ID NO: 304852 - RNA, 19 nt, Artificial Sequence
  Description of Artificial Sequence: Synthetic oligonucleotide
  Sense strand starting at position 2642 of SEQ ID NO: 3916
agguguccgugauucuuua

SEQ ID NO: 304853 - RNA, 19 nt, Artificial Sequence
  Description of Artificial Sequence: Synthetic oligonucleotide
  Antisense strand to SEQ ID NO: 304852
uaaagaaucacggacaccu

SEQ ID NO: 304854 - RNA, 19 nt, Artificial Sequence
  Description of Artificial Sequence: Synthetic oligonucleotide
  Sense strand starting at position 2646 of SEQ ID NO: 3916
guccgugauucuuuaccac

SEQ ID NO: 304855 - RNA, 19 nt, Artificial Sequence
  Description of Artificial Sequence: Synthetic oligonucleotide
  Antisense strand to SEQ ID NO: 304854
gugguaaagaaucacggac

SEQ ID NO: 304856 - RNA, 19 nt, Artificial Sequence
  Description of Artificial Sequence: Synthetic oligonucleotide
  Sense strand starting at position 2698 of SEQ ID NO: 3916
agaaauccuuccggcgauu

SEQ ID NO: 304857 - RNA, 19 nt, Artificial Sequence
  Description of Artificial Sequence: Synthetic oligonucleotide
  Antisense strand to SEQ ID NO: 304856
aaucgccggaaggauuucu

SEQ ID NO: 304858 - RNA, 19 nt, Artificial Sequence
  Description of Artificial Sequence: Synthetic oligonucleotide
  Sense strand starting at position 2730 of SEQ ID NO: 3916
gucuguaguucuucuaaug

SEQ ID NO: 304859 - RNA, 19 nt, Artificial Sequence
  Description of Artificial Sequence: Synthetic oligonucleotide
  Antisense strand to SEQ ID NO: 304858
cauuagaagaacuacagac

SEQ ID NO: 304860 - RNA, 19 nt, Artificial Sequence
  Description of Artificial Sequence: Synthetic oligonucleotide
  Sense strand starting at position 3240 of SEQ ID NO: 3916
ggcuguaugguuuaucaac

SEQ ID NO: 304861 - RNA, 19 nt, Artificial Sequence
  Description of Artificial Sequence: Synthetic oligonucleotide
  Antisense strand to SEQ ID NO: 304860
guugauaaaccauacagcc

SEQ ID NO: 304862 - RNA, 19 nt, Artificial Sequence
  Description of Artificial Sequence: Synthetic oligonucleotide
  Sense strand starting at position 3242 of SEQ ID NO: 3916
cuguaugguuuaucaacaa

SEQ ID NO: 304863 - RNA, 19 nt, Artificial Sequence
  Description of Artificial Sequence: Synthetic oligonucleotide
  Antisense strand to SEQ ID NO: 304862
uuguugauaaaccauacag

SEQ ID NO: 304864 - RNA, 19 nt, Artificial Sequence
  Description of Artificial Sequence: Synthetic oligonucleotide
  Sense strand starting at position 3350 of SEQ ID NO: 3916
aguauagaauucuagaguu

SEQ ID NO: 304865 - RNA, 19 nt, Artificial Sequence
  Description of Artificial Sequence: Synthetic oligonucleotide
  Antisense strand to SEQ ID NO: 304864
aacucuagaauucuauacu

SEQ ID NO: 304866 - RNA, 19 nt, Artificial Sequence
  Description of Artificial Sequence: Synthetic oligonucleotide
  Sense strand starting at position 3435 of SEQ ID NO: 3916
aauauuagcugggugcaga

SEQ ID NO: 304867 - RNA, 19 nt, Artificial Sequence
  Description of Artificial Sequence: Synthetic oligonucleotide
  Antisense strand to SEQ ID NO: 304866
ucugcacccagcuaauauu

SEQ ID NO: 304868 - RNA, 19 nt, Artificial Sequence
  Description of Artificial Sequence: Synthetic oligonucleotide
  Sense strand starting at position 3953 of SEQ ID NO: 3916
guacuuuaaggauguuacu

SEQ ID NO: 304869 - RNA, 19 nt, Artificial Sequence
  Description of Artificial Sequence: Synthetic oligonucleotide
  Antisense strand to SEQ ID NO: 304868
aguaacauccuuaaaguac

SEQ ID NO: 304870 - RNA, 19 nt, Artificial Sequence
  Description of Artificial Sequence: Synthetic oligonucleotide
  Sense strand starting at position 3975 of SEQ ID NO: 3916
uugacuucuggcuugcgua

SEQ ID NO: 304871 - RNA, 19 nt, Artificial Sequence
  Description of Artificial Sequence: Synthetic oligonucleotide
  Antisense strand to SEQ ID NO: 304870
uacgcaagccagaagucaa

SEQ ID NO: 304872 - RNA, 19 nt, Artificial Sequence
  Description of Artificial Sequence: Synthetic oligonucleotide
  Sense strand starting at position 426 of SEQ ID NO: 3917
ccaucauaugaauaagugu

SEQ ID NO: 304873 - RNA, 19 nt, Artificial Sequence
  Description of Artificial Sequence: Synthetic oligonucleotide
  Antisense strand to SEQ ID NO: 304872
acacuuauucauaugaugg

SEQ ID NO: 304874 - RNA, 19 nt, Artificial Sequence
  Description of Artificial Sequence: Synthetic oligonucleotide
  Sense strand starting at position 429 of SEQ ID NO: 3917
ucauaugaauaagugugua

SEQ ID NO: 304875 - RNA, 19 nt, Artificial Sequence
  Description of Artificial Sequence: Synthetic oligonucleotide
  Antisense strand to SEQ ID NO: 304874
uacacacuuauucauauga

SEQ ID NO: 304876 - RNA, 19 nt, Artificial Sequence
  Description of Artificial Sequence: Synthetic oligonucleotide
  Sense strand starting at position 432 of SEQ ID NO: 3917
uaugaauaaguguguaaga

SEQ ID NO: 304877 - RNA, 19 nt, Artificial Sequence
  Description of Artificial Sequence: Synthetic oligonucleotide
  Antisense strand to SEQ ID NO: 304876
ucuuacacacuuauucaua

SEQ ID NO: 304878 - RNA, 19 nt, Artificial Sequence
  Description of Artificial Sequence: Synthetic oligonucleotide
  Sense strand starting at position 433 of SEQ ID NO: 3917
augaauaaguguguaagau

SEQ ID NO: 304879 - RNA, 19 nt, Artificial Sequence
  Description of Artificial Sequence: Synthetic oligonucleotide
  Antisense strand to SEQ ID NO: 304878
aucuuacacacuuauucau

SEQ ID NO: 304880 - RNA, 19 nt, Artificial Sequence
  Description of Artificial Sequence: Synthetic oligonucleotide
  Sense strand starting at position 483 of SEQ ID NO: 3917
uugcuaaaugucugagacu

SEQ ID NO: 304881 - RNA, 19 nt, Artificial Sequence
  Description of Artificial Sequence: Synthetic oligonucleotide
  Antisense strand to SEQ ID NO: 304880
agucucagacauuuagcaa

SEQ ID NO: 304882 - RNA, 19 nt, Artificial Sequence
  Description of Artificial Sequence: Synthetic oligonucleotide
  Sense strand starting at position 490 of SEQ ID NO: 3917
augucugagacuugcugga

SEQ ID NO: 304883 - RNA, 19 nt, Artificial Sequence
  Description of Artificial Sequence: Synthetic oligonucleotide
  Antisense strand to SEQ ID NO: 304882
uccagcaagucucagacau

SEQ ID NO: 304884 - RNA, 19 nt, Artificial Sequence
  Description of Artificial Sequence: Synthetic oligonucleotide
  Sense strand starting at position 492 of SEQ ID NO: 3917
gucugagacuugcuggaca

SEQ ID NO: 304885 - RNA, 19 nt, Artificial Sequence
  Description of Artificial Sequence: Synthetic oligonucleotide
  Antisense strand to SEQ ID NO: 304884
uguccagcaagucucagac

SEQ ID NO: 304886 - RNA, 19 nt, Artificial Sequence
  Description of Artificial Sequence: Synthetic oligonucleotide
  Sense strand starting at position 494 of SEQ ID NO: 3917
cugagacuugcuggacauu

SEQ ID NO: 304887 - RNA, 19 nt, Artificial Sequence
  Description of Artificial Sequence: Synthetic oligonucleotide
  Antisense strand to SEQ ID NO: 304886
aauguccagcaagucucag

SEQ ID NO: 304888 - RNA, 19 nt, Artificial Sequence
  Description of Artificial Sequence: Synthetic oligonucleotide
  Sense strand starting at position 843 of SEQ ID NO: 3917
gaauaacugcuaggaugau

SEQ ID NO: 304889 - RNA, 19 nt, Artificial Sequence
  Description of Artificial Sequence: Synthetic oligonucleotide
  Antisense strand to SEQ ID NO: 304888
aucauccuagcaguuauuc

SEQ ID NO: 304890 - RNA, 19 nt, Artificial Sequence
  Description of Artificial Sequence: Synthetic oligonucleotide
  Sense strand starting at position 921 of SEQ ID NO: 3917
gugucaugucaccaccauu

SEQ ID NO: 304891 - RNA, 19 nt, Artificial Sequence
  Description of Artificial Sequence: Synthetic oligonucleotide
  Antisense strand to SEQ ID NO: 304890
aaugguggugacaugacac

SEQ ID NO: 304892 - RNA, 19 nt, Artificial Sequence
  Description of Artificial Sequence: Synthetic oligonucleotide
  Sense strand starting at position 956 of SEQ ID NO: 3917
acuacuguaccucagacuu

SEQ ID NO: 304893 - RNA, 19 nt, Artificial Sequence
  Description of Artificial Sequence: Synthetic oligonucleotide
  Antisense strand to SEQ ID NO: 304892
aagucugagguacaguagu

SEQ ID NO: 304894 - RNA, 19 nt, Artificial Sequence
  Description of Artificial Sequence: Synthetic oligonucleotide
  Sense strand starting at position 991 of SEQ ID NO: 3917
gaucuaaaggucgggaaga

SEQ ID NO: 304895 - RNA, 19 nt, Artificial Sequence
  Description of Artificial Sequence: Synthetic oligonucleotide
  Antisense strand to SEQ ID NO: 304894
ucuucccgaccuuuagauc

SEQ ID NO: 304896 - RNA, 19 nt, Artificial Sequence
  Description of Artificial Sequence: Synthetic oligonucleotide
  Sense strand starting at position 1071 of SEQ ID NO: 3917
augaauauccugugaaguu

SEQ ID NO: 304897 - RNA, 19 nt, Artificial Sequence
  Description of Artificial Sequence: Synthetic oligonucleotide
  Antisense strand to SEQ ID NO: 304896
aacuucacaggauauucau

SEQ ID NO: 304898 - RNA, 19 nt, Artificial Sequence
  Description of Artificial Sequence: Synthetic oligonucleotide
  Sense strand starting at position 1226 of SEQ ID NO: 3917
aaaggacaugugcgaauau

SEQ ID NO: 304899 - RNA, 19 nt, Artificial Sequence
  Description of Artificial Sequence: Synthetic oligonucleotide
  Antisense strand to SEQ ID NO: 304898
auauucgcacauguccuuu

SEQ ID NO: 304900 - RNA, 19 nt, Artificial Sequence
  Description of Artificial Sequence: Synthetic oligonucleotide
  Sense strand starting at position 1411 of SEQ ID NO: 3917
gguuuaaugcccgacccua

SEQ ID NO: 304901 - RNA, 19 nt, Artificial Sequence
  Description of Artificial Sequence: Synthetic oligonucleotide
  Antisense strand to SEQ ID NO: 304900
uagggucgggcauuaaacc

SEQ ID NO: 304902 - RNA, 19 nt, Artificial Sequence
  Description of Artificial Sequence: Synthetic oligonucleotide
  Sense strand starting at position 1466 of SEQ ID NO: 3917
ugcuguauggcagaggaua

SEQ ID NO: 304903 - RNA, 19 nt, Artificial Sequence
  Description of Artificial Sequence: Synthetic oligonucleotide
  Antisense strand to SEQ ID NO: 304902
uauccucugccauacagca

SEQ ID NO: 304904 - RNA, 19 nt, Artificial Sequence
  Description of Artificial Sequence: Synthetic oligonucleotide
  Sense strand starting at position 1479 of SEQ ID NO: 3917
aggauaaggcgcuaugaga

SEQ ID NO: 304905 - RNA, 19 nt, Artificial Sequence
  Description of Artificial Sequence: Synthetic oligonucleotide
  Antisense strand to SEQ ID NO: 304904
ucucauagcgccuuauccu

SEQ ID NO: 304906 - RNA, 19 nt, Artificial Sequence
  Description of Artificial Sequence: Synthetic oligonucleotide
  Sense strand starting at position 1706 of SEQ ID NO: 3917
ggaaguugucaagggcaag

SEQ ID NO: 304907 - RNA, 19 nt, Artificial Sequence
  Description of Artificial Sequence: Synthetic oligonucleotide
  Antisense strand to SEQ ID NO: 304906
cuugcccuugacaacuucc

SEQ ID NO: 304908 - RNA, 19 nt, Artificial Sequence
  Description of Artificial Sequence: Synthetic oligonucleotide
  Sense strand starting at position 1741 of SEQ ID NO: 3917
acagcuuacucacuggagu

SEQ ID NO: 304909 - RNA, 19 nt, Artificial Sequence
  Description of Artificial Sequence: Synthetic oligonucleotide
  Antisense strand to SEQ ID NO: 304908
acuccagugaguaagcugu

SEQ ID NO: 304910 - RNA, 19 nt, Artificial Sequence
  Description of Artificial Sequence: Synthetic oligonucleotide
  Sense strand starting at position 2019 of SEQ ID NO: 3917
gcaagaccugcugggaauu

SEQ ID NO: 304911 - RNA, 19 nt, Artificial Sequence
  Description of Artificial Sequence: Synthetic oligonucleotide
  Antisense strand to SEQ ID NO: 304910
aauucccagcaggucuugc

SEQ ID NO: 304912 - RNA, 19 nt, Artificial Sequence
  Description of Artificial Sequence: Synthetic oligonucleotide
  Sense strand starting at position 2896 of SEQ ID NO: 3917
acuugauacggauguguaa

SEQ ID NO: 304913 - RNA, 19 nt, Artificial Sequence
  Description of Artificial Sequence: Synthetic oligonucleotide
  Antisense strand to SEQ ID NO: 304912
uuacacauccguaucaagu

SEQ ID NO: 304914 - RNA, 19 nt, Artificial Sequence
  Description of Artificial Sequence: Synthetic oligonucleotide
  Sense strand starting at position 2898 of SEQ ID NO: 3917
uugauacggauguguaaca

SEQ ID NO: 304915 - RNA, 19 nt, Artificial Sequence
  Description of Artificial Sequence: Synthetic oligonucleotide
  Antisense strand to SEQ ID NO: 304914
uguuacacauccguaucaa

SEQ ID NO: 304916 - RNA, 19 nt, Artificial Sequence
  Description of Artificial Sequence: Synthetic oligonucleotide
  Sense strand starting at position 3021 of SEQ ID NO: 3917
cuaugaucuuuguuaagau

SEQ ID NO: 304917 - RNA, 19 nt, Artificial Sequence
  Description of Artificial Sequence: Synthetic oligonucleotide
  Antisense strand to SEQ ID NO: 304916
aucuuaacaaagaucauag

SEQ ID NO: 304918 - RNA, 19 nt, Artificial Sequence
  Description of Artificial Sequence: Synthetic oligonucleotide
  Sense strand starting at position 3093 of SEQ ID NO: 3917
aagaguuacaucgggucau

SEQ ID NO: 304919 - RNA, 19 nt, Artificial Sequence
  Description of Artificial Sequence: Synthetic oligonucleotide
  Antisense strand to SEQ ID NO: 304918
augacccgauguaacucuu

SEQ ID NO: 304920 - RNA, 19 nt, Artificial Sequence
  Description of Artificial Sequence: Synthetic oligonucleotide
  Sense strand starting at position 3164 of SEQ ID NO: 3917
acccguguucuagaagaug

SEQ ID NO: 304921 - RNA, 19 nt, Artificial Sequence
  Description of Artificial Sequence: Synthetic oligonucleotide
  Antisense strand to SEQ ID NO: 304920
caucuucuagaacacgggu

SEQ ID NO: 304922 - RNA, 19 nt, Artificial Sequence
  Description of Artificial Sequence: Synthetic oligonucleotide
  Sense strand starting at position 3189 of SEQ ID NO: 3917
uugguuucuacagaaagug

SEQ ID NO: 304923 - RNA, 19 nt, Artificial Sequence
  Description of Artificial Sequence: Synthetic oligonucleotide
  Antisense strand to SEQ ID NO: 304922
cacuuucuguagaaaccaa

SEQ ID NO: 304924 - RNA, 19 nt, Artificial Sequence
  Description of Artificial Sequence: Synthetic oligonucleotide
  Sense strand starting at position 3268 of SEQ ID NO: 3917
cuuauaaagcuuuaucgua

SEQ ID NO: 304925 - RNA, 19 nt, Artificial Sequence
  Description of Artificial Sequence: Synthetic oligonucleotide
  Antisense strand to SEQ ID NO: 304924
uacgauaaagcuuuauaag

SEQ ID NO: 304926 - RNA, 19 nt, Artificial Sequence
  Description of Artificial Sequence: Synthetic oligonucleotide
  Sense strand starting at position 3310 of SEQ ID NO: 3917
aagggacugcacugaugua

SEQ ID NO: 304927 - RNA, 19 nt, Artificial Sequence
  Description of Artificial Sequence: Synthetic oligonucleotide
  Antisense strand to SEQ ID NO: 304926
uacaucagugcagucccuu

SEQ ID NO: 304928 - RNA, 19 nt, Artificial Sequence
  Description of Artificial Sequence: Synthetic oligonucleotide
  Sense strand starting at position 3325 of SEQ ID NO: 3917
uguacuugugaauacgaaa

SEQ ID NO: 304929 - RNA, 19 nt, Artificial Sequence
  Description of Artificial Sequence: Synthetic oligonucleotide
  Antisense strand to SEQ ID NO: 304928
uuucguauucacaaguaca

SEQ ID NO: 304930 - RNA, 19 nt, Artificial Sequence
  Description of Artificial Sequence: Synthetic oligonucleotide
  Sense strand starting at position 3509 of SEQ ID NO: 3917
aauagucugguguaucuaa

SEQ ID NO: 304931 - RNA, 19 nt, Artificial Sequence
  Description of Artificial Sequence: Synthetic oligonucleotide
  Antisense strand to SEQ ID NO: 304930
uuagauacaccagacuauu

SEQ ID NO: 304932 - RNA, 19 nt, Artificial Sequence
  Description of Artificial Sequence: Synthetic oligonucleotide
  Sense strand starting at position 3686 of SEQ ID NO: 3917
acuugcugacauugaguga

SEQ ID NO: 304933 - RNA, 19 nt, Artificial Sequence
  Description of Artificial Sequence: Synthetic oligonucleotide
  Antisense strand to SEQ ID NO: 304932
ucacucaaugucagcaagu

SEQ ID NO: 304934 - RNA, 19 nt, Artificial Sequence
  Description of Artificial Sequence: Synthetic oligonucleotide
  Sense strand starting at position 3687 of SEQ ID NO: 3917
cuugcugacauugagugaa

SEQ ID NO: 304935 - RNA, 19 nt, Artificial Sequence
  Description of Artificial Sequence: Synthetic oligonucleotide
  Antisense strand to SEQ ID NO: 304934
uucacucaaugucagcaag

SEQ ID NO: 304936 - RNA, 19 nt, Artificial Sequence
  Description of Artificial Sequence: Synthetic oligonucleotide
  Sense strand starting at position 3775 of SEQ ID NO: 3917
gugggaaggucagcuacaa

SEQ ID NO: 304937 - RNA, 19 nt, Artificial Sequence
  Description of Artificial Sequence: Synthetic oligonucleotide
  Antisense strand to SEQ ID NO: 304936
uuguagcugaccuucccac

SEQ ID NO: 304938 - RNA, 19 nt, Artificial Sequence
  Description of Artificial Sequence: Synthetic oligonucleotide
  Sense strand starting at position 3863 of SEQ ID NO: 3917
uuaaacacuuguguaauga

SEQ ID NO: 304939 - RNA, 19 nt, Artificial Sequence
  Description of Artificial Sequence: Synthetic oligonucleotide
  Antisense strand to SEQ ID NO: 304938
ucauuacacaaguguuuaa

SEQ ID NO: 304940 - RNA, 19 nt, Artificial Sequence
  Description of Artificial Sequence: Synthetic oligonucleotide
  Sense strand starting at position 3877 of SEQ ID NO: 3917
aaugauuacuuggcuguua

SEQ ID NO: 304941 - RNA, 19 nt, Artificial Sequence
  Description of Artificial Sequence: Synthetic oligonucleotide
  Antisense strand to SEQ ID NO: 304940
uaacagccaaguaaucauu

SEQ ID NO: 304942 - RNA, 19 nt, Artificial Sequence
  Description of Artificial Sequence: Synthetic oligonucleotide
  Sense strand starting at position 3878 of SEQ ID NO: 3917
augauuacuuggcuguuaa

SEQ ID NO: 304943 - RNA, 19 nt, Artificial Sequence
  Description of Artificial Sequence: Synthetic oligonucleotide
  Antisense strand to SEQ ID NO: 304942
uuaacagccaaguaaucau

SEQ ID NO: 304944 - RNA, 19 nt, Artificial Sequence
  Description of Artificial Sequence: Synthetic oligonucleotide
  Sense strand starting at position 3890 of SEQ ID NO: 3917
cuguuaacagauuaacagu

SEQ ID NO: 304945 - RNA, 19 nt, Artificial Sequence
  Description of Artificial Sequence: Synthetic oligonucleotide
  Antisense strand to SEQ ID NO: 304944
acuguuaaucuguuaacag

SEQ ID NO: 304946 - RNA, 19 nt, Artificial Sequence
  Description of Artificial Sequence: Synthetic oligonucleotide
  Sense strand starting at position 3896 of SEQ ID NO: 3917
acagauuaacaguguauug

SEQ ID NO: 304947 - RNA, 19 nt, Artificial Sequence
  Description of Artificial Sequence: Synthetic oligonucleotide
  Antisense strand to SEQ ID NO: 304946
caauacacuguuaaucugu

SEQ ID NO: 304948 - RNA, 19 nt, Artificial Sequence
  Description of Artificial Sequence: Synthetic oligonucleotide
  Sense strand starting at position 3905 of SEQ ID NO: 3917
caguguauugacuaugaug

SEQ ID NO: 304949 - RNA, 19 nt, Artificial Sequence
  Description of Artificial Sequence: Synthetic oligonucleotide
  Antisense strand to SEQ ID NO: 304948
caucauagucaauacacug

SEQ ID NO: 304950 - RNA, 19 nt, Artificial Sequence
  Description of Artificial Sequence: Synthetic oligonucleotide
  Sense strand starting at position 3942 of SEQ ID NO: 3917
uuggauaucuccuuagaau

SEQ ID NO: 304951 - RNA, 19 nt, Artificial Sequence
  Description of Artificial Sequence: Synthetic oligonucleotide
  Antisense strand to SEQ ID NO: 304950
auucuaaggagauauccaa

SEQ ID NO: 304952 - RNA, 19 nt, Artificial Sequence
  Description of Artificial Sequence: Synthetic oligonucleotide
  Sense strand starting at position 42 of SEQ ID NO: 3918
acaaguaucuguucuugau

SEQ ID NO: 304953 - RNA, 19 nt, Artificial Sequence
  Description of Artificial Sequence: Synthetic oligonucleotide
  Antisense strand to SEQ ID NO: 304952
aucaagaacagauacuugu

SEQ ID NO: 304954 - RNA, 19 nt, Artificial Sequence
  Description of Artificial Sequence: Synthetic oligonucleotide
  Sense strand starting at position 46 of SEQ ID NO: 3918
guaucuguucuugauuugu

SEQ ID NO: 304955 - RNA, 19 nt, Artificial Sequence
  Description of Artificial Sequence: Synthetic oligonucleotide
  Antisense strand to SEQ ID NO: 304954
acaaaucaagaacagauac

SEQ ID NO: 304956 - RNA, 19 nt, Artificial Sequence
  Description of Artificial Sequence: Synthetic oligonucleotide
  Sense strand starting at position 54 of SEQ ID NO: 3918
ucuugauuuguacgugaua

SEQ ID NO: 304957 - RNA, 19 nt, Artificial Sequence
  Description of Artificial Sequence: Synthetic oligonucleotide
  Antisense strand to SEQ ID NO: 304956
uaucacguacaaaucaaga

SEQ ID NO: 304958 - RNA, 19 nt, Artificial Sequence
  Description of Artificial Sequence: Synthetic oligonucleotide
  Sense strand starting at position 204 of SEQ ID NO: 3918
gagggcuuugcacaagaau

SEQ ID NO: 304959 - RNA, 19 nt, Artificial Sequence
  Description of Artificial Sequence: Synthetic oligonucleotide
  Antisense strand to SEQ ID NO: 304958
auucuugugcaaagcccuc

SEQ ID NO: 304960 - RNA, 19 nt, Artificial Sequence
  Description of Artificial Sequence: Synthetic oligonucleotide
  Sense strand starting at position 210 of SEQ ID NO: 3918
uuugcacaagaaugugauu

SEQ ID NO: 304961 - RNA, 19 nt, Artificial Sequence
  Description of Artificial Sequence: Synthetic oligonucleotide
  Antisense strand to SEQ ID NO: 304960
aaucacauucuugugcaaa

SEQ ID NO: 304962 - RNA, 19 nt, Artificial Sequence
  Description of Artificial Sequence: Synthetic oligonucleotide
  Sense strand starting at position 410 of SEQ ID NO: 3918
ggguguguaguggaaaucu

SEQ ID NO: 304963 - RNA, 19 nt, Artificial Sequence
  Description of Artificial Sequence: Synthetic oligonucleotide
  Antisense strand to SEQ ID NO: 304962
agauuuccacuacacaccc

SEQ ID NO: 304964 - RNA, 19 nt, Artificial Sequence
  Description of Artificial Sequence: Synthetic oligonucleotide
  Sense strand starting at position 418 of SEQ ID NO: 3918
aguggaaaucuagguggca

SEQ ID NO: 304965 - RNA, 19 nt, Artificial Sequence
  Description of Artificial Sequence: Synthetic oligonucleotide
  Antisense strand to SEQ ID NO: 304964
ugccaccuagauuuccacu

SEQ ID NO: 304966 - RNA, 19 nt, Artificial Sequence
  Description of Artificial Sequence: Synthetic oligonucleotide
  Sense strand starting at position 427 of SEQ ID NO: 3918
cuagguggcacguauuaac

SEQ ID NO: 304967 - RNA, 19 nt, Artificial Sequence
  Description of Artificial Sequence: Synthetic oligonucleotide
  Antisense strand to SEQ ID NO: 304966
guuaauacgugccaccuag

SEQ ID NO: 304968 - RNA, 19 nt, Artificial Sequence
  Description of Artificial Sequence: Synthetic oligonucleotide
  Sense strand starting at position 558 of SEQ ID NO: 3918
ggccaagugauuugccuaa

SEQ ID NO: 304969 - RNA, 19 nt, Artificial Sequence
  Description of Artificial Sequence: Synthetic oligonucleotide
  Antisense strand to SEQ ID NO: 304968
uuaggcaaaucacuuggcc

SEQ ID NO: 304970 - RNA, 19 nt, Artificial Sequence
  Description of Artificial Sequence: Synthetic oligonucleotide
  Sense strand starting at position 719 of SEQ ID NO: 3918
ucucaauaacuguguugag

SEQ ID NO: 304971 - RNA, 19 nt, Artificial Sequence
  Description of Artificial Sequence: Synthetic oligonucleotide
  Antisense strand to SEQ ID NO: 304970
cucaacacaguuauugaga

SEQ ID NO: 304972 - RNA, 19 nt, Artificial Sequence
  Description of Artificial Sequence: Synthetic oligonucleotide
  Sense strand starting at position 915 of SEQ ID NO: 3918
ccaguuuaguaacugugaa

SEQ ID NO: 304973 - RNA, 19 nt, Artificial Sequence
  Description of Artificial Sequence: Synthetic oligonucleotide
  Antisense strand to SEQ ID NO: 304972
uucacaguuacuaaacugg

SEQ ID NO: 304974 - RNA, 19 nt, Artificial Sequence
  Description of Artificial Sequence: Synthetic oligonucleotide
  Sense strand starting at position 972 of SEQ ID NO: 3918
ugaguaacacuguguaaua

SEQ ID NO: 304975 - RNA, 19 nt, Artificial Sequence
  Description of Artificial Sequence: Synthetic oligonucleotide
  Antisense strand to SEQ ID NO: 304974
uauuacacaguguuacuca

SEQ ID NO: 304976 - RNA, 19 nt, Artificial Sequence
  Description of Artificial Sequence: Synthetic oligonucleotide
  Sense strand starting at position 973 of SEQ ID NO: 3918
gaguaacacuguguaauau

SEQ ID NO: 304977 - RNA, 19 nt, Artificial Sequence
  Description of Artificial Sequence: Synthetic oligonucleotide
  Antisense strand to SEQ ID NO: 304976
auauuacacaguguuacuc

SEQ ID NO: 304978 - RNA, 19 nt, Artificial Sequence
  Description of Artificial Sequence: Synthetic oligonucleotide
  Sense strand starting at position 974 of SEQ ID NO: 3918
aguaacacuguguaauauu

SEQ ID NO: 304979 - RNA, 19 nt, Artificial Sequence
  Description of Artificial Sequence: Synthetic oligonucleotide
  Antisense strand to SEQ ID NO: 304978
aauauuacacaguguuacu

SEQ ID NO: 304980 - RNA, 19 nt, Artificial Sequence
  Description of Artificial Sequence: Synthetic oligonucleotide
  Sense strand starting at position 1171 of SEQ ID NO: 3918
uuucguagugaagagugaa

SEQ ID NO: 304981 - RNA, 19 nt, Artificial Sequence
  Description of Artificial Sequence: Synthetic oligonucleotide
  Antisense strand to SEQ ID NO: 304980
uucacucuucacuacgaaa

SEQ ID NO: 304982 - RNA, 19 nt, Artificial Sequence
  Description of Artificial Sequence: Synthetic oligonucleotide
  Sense strand starting at position 1223 of SEQ ID NO: 3918
acgcuuucuguugaauaaa

SEQ ID NO: 304983 - RNA, 19 nt, Artificial Sequence
  Description of Artificial Sequence: Synthetic oligonucleotide
  Antisense strand to SEQ ID NO: 304982
uuuauucaacagaaagcgu

SEQ ID NO: 304984 - RNA, 19 nt, Artificial Sequence
  Description of Artificial Sequence: Synthetic oligonucleotide
  Sense strand starting at position 1362 of SEQ ID NO: 3918
cagggcaggucauuaguaa

SEQ ID NO: 304985 - RNA, 19 nt, Artificial Sequence
  Description of Artificial Sequence: Synthetic oligonucleotide
  Antisense strand to SEQ ID NO: 304984
uuacuaaugaccugcccug

SEQ ID NO: 304986 - RNA, 19 nt, Artificial Sequence
  Description of Artificial Sequence: Synthetic oligonucleotide
  Sense strand starting at position 2096 of SEQ ID NO: 3918
ggacccuguacuuggaaau

SEQ ID NO: 304987 - RNA, 19 nt, Artificial Sequence
  Description of Artificial Sequence: Synthetic oligonucleotide
  Antisense strand to SEQ ID NO: 304986
auuuccaaguacagggucc

SEQ ID NO: 304988 - RNA, 19 nt, Artificial Sequence
  Description of Artificial Sequence: Synthetic oligonucleotide
  Sense strand starting at position 2097 of SEQ ID NO: 3918
gacccuguacuuggaaaug

SEQ ID NO: 304989 - RNA, 19 nt, Artificial Sequence
  Description of Artificial Sequence: Synthetic oligonucleotide
  Antisense strand to SEQ ID NO: 304988
cauuuccaaguacaggguc

SEQ ID NO: 304990 - RNA, 19 nt, Artificial Sequence
  Description of Artificial Sequence: Synthetic oligonucleotide
  Sense strand starting at position 2196 of SEQ ID NO: 3918
aagggagucgcuuaggcua

SEQ ID NO: 304991 - RNA, 19 nt, Artificial Sequence
  Description of Artificial Sequence: Synthetic oligonucleotide
  Antisense strand to SEQ ID NO: 304990
uagccuaagcgacucccuu

SEQ ID NO: 304992 - RNA, 19 nt, Artificial Sequence
  Description of Artificial Sequence: Synthetic oligonucleotide
  Sense strand starting at position 2234 of SEQ ID NO: 3918
ccuagaaaucaguguuucu

SEQ ID NO: 304993 - RNA, 19 nt, Artificial Sequence
  Description of Artificial Sequence: Synthetic oligonucleotide
  Antisense strand to SEQ ID NO: 304992
agaaacacugauuucuagg

SEQ ID NO: 304994 - RNA, 19 nt, Artificial Sequence
  Description of Artificial Sequence: Synthetic oligonucleotide
  Sense strand starting at position 2253 of SEQ ID NO: 3918
auggauuugucuuuguguu

SEQ ID NO: 304995 - RNA, 19 nt, Artificial Sequence
  Description of Artificial Sequence: Synthetic oligonucleotide
  Antisense strand to SEQ ID NO: 304994
aacacaaagacaaauccau

SEQ ID NO: 304996 - RNA, 19 nt, Artificial Sequence
  Description of Artificial Sequence: Synthetic oligonucleotide
  Sense strand starting at position 2306 of SEQ ID NO: 3918
gcaguacuuguauaauaaa

SEQ ID NO: 304997 - RNA, 19 nt, Artificial Sequence
  Description of Artificial Sequence: Synthetic oligonucleotide
  Antisense strand to SEQ ID NO: 304996
uuuauuauacaaguacugc

SEQ ID NO: 304998 - RNA, 19 nt, Artificial Sequence
  Description of Artificial Sequence: Synthetic oligonucleotide
  Sense strand starting at position 2344 of SEQ ID NO: 3918
gugauagauggguggguuu

SEQ ID NO: 304999 - RNA, 19 nt, Artificial Sequence
  Description of Artificial Sequence: Synthetic oligonucleotide
  Antisense strand to SEQ ID NO: 304998
aaacccacccaucuaucac

SEQ ID NO: 305000 - RNA, 19 nt, Artificial Sequence
  Description of Artificial Sequence: Synthetic oligonucleotide
  Sense strand starting at position 2346 of SEQ ID NO: 3918
gauagauggguggguuuaa

SEQ ID NO: 305001 - RNA, 19 nt, Artificial Sequence
  Description of Artificial Sequence: Synthetic oligonucleotide
  Antisense strand to SEQ ID NO: 305000
uuaaacccacccaucuauc

SEQ ID NO: 305002 - RNA, 19 nt, Artificial Sequence
  Description of Artificial Sequence: Synthetic oligonucleotide
  Sense strand starting at position 2347 of SEQ ID NO: 3918
auagauggguggguuuaau

SEQ ID NO: 305003 - RNA, 19 nt, Artificial Sequence
  Description of Artificial Sequence: Synthetic oligonucleotide
  Antisense strand to SEQ ID NO: 305002
auuaaacccacccaucuau

SEQ ID NO: 305004 - RNA, 19 nt, Artificial Sequence
  Description of Artificial Sequence: Synthetic oligonucleotide
  Sense strand starting at position 2357 of SEQ ID NO: 3918
ggguuuaaucccgaaguau

SEQ ID NO: 305005 - RNA, 19 nt, Artificial Sequence
  Description of Artificial Sequence: Synthetic oligonucleotide
  Antisense strand to SEQ ID NO: 305004
auacuucgggauuaaaccc

SEQ ID NO: 305006 - RNA, 19 nt, Artificial Sequence
  Description of Artificial Sequence: Synthetic oligonucleotide
  Sense strand starting at position 2397 of SEQ ID NO: 3918
aguuaauaucggcaaacag

SEQ ID NO: 305007 - RNA, 19 nt, Artificial Sequence
  Description of Artificial Sequence: Synthetic oligonucleotide
  Antisense strand to SEQ ID NO: 305006
cuguuugccgauauuaacu

SEQ ID NO: 305008 - RNA, 19 nt, Artificial Sequence
  Description of Artificial Sequence: Synthetic oligonucleotide
  Sense strand starting at position 2407 of SEQ ID NO: 3918
ggcaaacagagugguugaa

SEQ ID NO: 305009 - RNA, 19 nt, Artificial Sequence
  Description of Artificial Sequence: Synthetic oligonucleotide
  Antisense strand to SEQ ID NO: 305008
uucaaccacucuguuugcc

SEQ ID NO: 305010 - RNA, 19 nt, Artificial Sequence
  Description of Artificial Sequence: Synthetic oligonucleotide
  Sense strand starting at position 2409 of SEQ ID NO: 3918
caaacagagugguugaaua

SEQ ID NO: 305011 - RNA, 19 nt, Artificial Sequence
  Description of Artificial Sequence: Synthetic oligonucleotide
  Antisense strand to SEQ ID NO: 305010
uauucaaccacucuguuug

SEQ ID NO: 305012 - RNA, 19 nt, Artificial Sequence
  Description of Artificial Sequence: Synthetic oligonucleotide
  Sense strand starting at position 2419 of SEQ ID NO: 3918
gguugaauaggaugauucu

SEQ ID NO: 305013 - RNA, 19 nt, Artificial Sequence
  Description of Artificial Sequence: Synthetic oligonucleotide
  Antisense strand to SEQ ID NO: 305012
agaaucauccuauucaacc

SEQ ID NO: 305014 - RNA, 19 nt, Artificial Sequence
  Description of Artificial Sequence: Synthetic oligonucleotide
  Sense strand starting at position 2447 of SEQ ID NO: 3918
gccauugcuuacuugauuu

SEQ ID NO: 305015 - RNA, 19 nt, Artificial Sequence
  Description of Artificial Sequence: Synthetic oligonucleotide
  Antisense strand to SEQ ID NO: 305014
aaaucaaguaagcaauggc

SEQ ID NO: 305016 - RNA, 19 nt, Artificial Sequence
  Description of Artificial Sequence: Synthetic oligonucleotide
  Sense strand starting at position 2789 of SEQ ID NO: 3918
ccggccugcucauuugauu

SEQ ID NO: 305017 - RNA, 19 nt, Artificial Sequence
  Description of Artificial Sequence: Synthetic oligonucleotide
  Antisense strand to SEQ ID NO: 305016
aaucaaaugagcaggccgg

SEQ ID NO: 305018 - RNA, 19 nt, Artificial Sequence
  Description of Artificial Sequence: Synthetic oligonucleotide
  Sense strand starting at position 2910 of SEQ ID NO: 3918
uuccgucacggagaucaau

SEQ ID NO: 305019 - RNA, 19 nt, Artificial Sequence
  Description of Artificial Sequence: Synthetic oligonucleotide
  Antisense strand to SEQ ID NO: 305018
auugaucuccgugacggaa

SEQ ID NO: 305020 - RNA, 19 nt, Artificial Sequence
  Description of Artificial Sequence: Synthetic oligonucleotide
  Sense strand starting at position 2913 of SEQ ID NO: 3918
cgucacggagaucaauaaa

SEQ ID NO: 305021 - RNA, 19 nt, Artificial Sequence
  Description of Artificial Sequence: Synthetic oligonucleotide
  Antisense strand to SEQ ID NO: 305020
uuuauugaucuccgugacg

SEQ ID NO: 305022 - RNA, 19 nt, Artificial Sequence
  Description of Artificial Sequence: Synthetic oligonucleotide
  Sense strand starting at position 3048 of SEQ ID NO: 3918
gccauuucugcuggcccaa

SEQ ID NO: 305023 - RNA, 19 nt, Artificial Sequence
  Description of Artificial Sequence: Synthetic oligonucleotide
  Antisense strand to SEQ ID NO: 305022
uugggccagcagaaauggc

SEQ ID NO: 305024 - RNA, 19 nt, Artificial Sequence
  Description of Artificial Sequence: Synthetic oligonucleotide
  Sense strand starting at position 3122 of SEQ ID NO: 3918
agucuuuagucuuuggaga

SEQ ID NO: 305025 - RNA, 19 nt, Artificial Sequence
  Description of Artificial Sequence: Synthetic oligonucleotide
  Antisense strand to SEQ ID NO: 305024
ucuccaaagacuaaagacu

SEQ ID NO: 305026 - RNA, 19 nt, Artificial Sequence
  Description of Artificial Sequence: Synthetic oligonucleotide
  Sense strand starting at position 3212 of SEQ ID NO: 3918
ugcggugccggcuuucaua

SEQ ID NO: 305027 - RNA, 19 nt, Artificial Sequence
  Description of Artificial Sequence: Synthetic oligonucleotide
  Antisense strand to SEQ ID NO: 305026
uaugaaagccggcaccgca

SEQ ID NO: 305028 - RNA, 19 nt, Artificial Sequence
  Description of Artificial Sequence: Synthetic oligonucleotide
  Sense strand starting at position 3453 of SEQ ID NO: 3918
gaugaagcuccuuauggca

SEQ ID NO: 305029 - RNA, 19 nt, Artificial Sequence
  Description of Artificial Sequence: Synthetic oligonucleotide
  Antisense strand to SEQ ID NO: 305028
ugccauaaggagcuucauc

SEQ ID NO: 305030 - RNA, 19 nt, Artificial Sequence
  Description of Artificial Sequence: Synthetic oligonucleotide
  Sense strand starting at position 3833 of SEQ ID NO: 3918
gcuguucugggccagaaag

SEQ ID NO: 305031 - RNA, 19 nt, Artificial Sequence
  Description of Artificial Sequence: Synthetic oligonucleotide
  Antisense strand to SEQ ID NO: 305030
cuuucuggcccagaacagc

SEQ ID NO: 305032 - RNA, 19 nt, Artificial Sequence
  Description of Artificial Sequence: Synthetic oligonucleotide
  Sense strand starting at position 179 of SEQ ID NO: 3919
uuaauaaggccacgguaau

SEQ ID NO: 305033 - RNA, 19 nt, Artificial Sequence
  Description of Artificial Sequence: Synthetic oligonucleotide
  Antisense strand to SEQ ID NO: 305032
auuaccguggccuuauuaa

SEQ ID NO: 305034 - RNA, 19 nt, Artificial Sequence
  Description of Artificial Sequence: Synthetic oligonucleotide
  Sense strand starting at position 180 of SEQ ID NO: 3919
uaauaaggccacgguaauu

SEQ ID NO: 305035 - RNA, 19 nt, Artificial Sequence
  Description of Artificial Sequence: Synthetic oligonucleotide
  Antisense strand to SEQ ID NO: 305034
aauuaccguggccuuauua

SEQ ID NO: 305036 - RNA, 19 nt, Artificial Sequence
  Description of Artificial Sequence: Synthetic oligonucleotide
  Sense strand starting at position 193 of SEQ ID NO: 3919
guaauuaucccgcgaaucu

SEQ ID NO: 305037 - RNA, 19 nt, Artificial Sequence
  Description of Artificial Sequence: Synthetic oligonucleotide
  Antisense strand to SEQ ID NO: 305036
agauucgcgggauaauuac

SEQ ID NO: 305038 - RNA, 19 nt, Artificial Sequence
  Description of Artificial Sequence: Synthetic oligonucleotide
  Sense strand starting at position 2348 of SEQ ID NO: 3919
uucguagcucguucauguu

SEQ ID NO: 305039 - RNA, 19 nt, Artificial Sequence
  Description of Artificial Sequence: Synthetic oligonucleotide
  Antisense strand to SEQ ID NO: 305038
aacaugaacgagcuacgaa

SEQ ID NO: 305040 - RNA, 19 nt, Artificial Sequence
  Description of Artificial Sequence: Synthetic oligonucleotide
  Sense strand starting at position 2460 of SEQ ID NO: 3919
augcgcuuucaucgguauu

SEQ ID NO: 305041 - RNA, 19 nt, Artificial Sequence
  Description of Artificial Sequence: Synthetic oligonucleotide
  Antisense strand to SEQ ID NO: 305040
aauaccgaugaaagcgcau

SEQ ID NO: 305042 - RNA, 19 nt, Artificial Sequence
  Description of Artificial Sequence: Synthetic oligonucleotide
  Sense strand starting at position 2472 of SEQ ID NO: 3919
cgguauugcugccuggagu

SEQ ID NO: 305043 - RNA, 19 nt, Artificial Sequence
  Description of Artificial Sequence: Synthetic oligonucleotide
  Antisense strand to SEQ ID NO: 305042
acuccaggcagcaauaccg

SEQ ID NO: 305044 - RNA, 19 nt, Artificial Sequence
  Description of Artificial Sequence: Synthetic oligonucleotide
  Sense strand starting at position 2473 of SEQ ID NO: 3919
gguauugcugccuggaguu

SEQ ID NO: 305045 - RNA, 19 nt, Artificial Sequence
  Description of Artificial Sequence: Synthetic oligonucleotide
  Antisense strand to SEQ ID NO: 305044
aacuccaggcagcaauacc

SEQ ID NO: 305046 - RNA, 19 nt, Artificial Sequence
  Description of Artificial Sequence: Synthetic oligonucleotide
  Sense strand starting at position 2506 of SEQ ID NO: 3919
caugguaucucuccgacau

SEQ ID NO: 305047 - RNA, 19 nt, Artificial Sequence
  Description of Artificial Sequence: Synthetic oligonucleotide
  Antisense strand to SEQ ID NO: 305046
augucggagagauaccaug

SEQ ID NO: 305048 - RNA, 19 nt, Artificial Sequence
  Description of Artificial Sequence: Synthetic oligonucleotide
  Sense strand starting at position 2507 of SEQ ID NO: 3919
augguaucucuccgacauc

SEQ ID NO: 305049 - RNA, 19 nt, Artificial Sequence
  Description of Artificial Sequence: Synthetic oligonucleotide
  Antisense strand to SEQ ID NO: 305048
gaugucggagagauaccau

SEQ ID NO: 305050 - RNA, 19 nt, Artificial Sequence
  Description of Artificial Sequence: Synthetic oligonucleotide
  Sense strand starting at position 2799 of SEQ ID NO: 3919
uucuguuagccaggugaag

SEQ ID NO: 305051 - RNA, 19 nt, Artificial Sequence
  Description of Artificial Sequence: Synthetic oligonucleotide
  Antisense strand to SEQ ID NO: 305050
cuucaccuggcuaacagaa

SEQ ID NO: 305052 - RNA, 19 nt, Artificial Sequence
  Description of Artificial Sequence: Synthetic oligonucleotide
  Sense strand starting at position 2862 of SEQ ID NO: 3919
cccgaauuauucguaacuu

SEQ ID NO: 305053 - RNA, 19 nt, Artificial Sequence
  Description of Artificial Sequence: Synthetic oligonucleotide
  Antisense strand to SEQ ID NO: 305052
aaguuacgaauaauucggg

SEQ ID NO: 305054 - RNA, 19 nt, Artificial Sequence
  Description of Artificial Sequence: Synthetic oligonucleotide
  Sense strand starting at position 2870 of SEQ ID NO: 3919
auucguaacuuccuuggga

SEQ ID NO: 305055 - RNA, 19 nt, Artificial Sequence
  Description of Artificial Sequence: Synthetic oligonucleotide
  Antisense strand to SEQ ID NO: 305054
ucccaaggaaguuacgaau

SEQ ID NO: 305056 - RNA, 19 nt, Artificial Sequence
  Description of Artificial Sequence: Synthetic oligonucleotide
  Sense strand starting at position 2872 of SEQ ID NO: 3919
ucguaacuuccuugggaga

SEQ ID NO: 305057 - RNA, 19 nt, Artificial Sequence
  Description of Artificial Sequence: Synthetic oligonucleotide
  Antisense strand to SEQ ID NO: 305056
ucucccaaggaaguuacga

SEQ ID NO: 305058 - RNA, 19 nt, Artificial Sequence
  Description of Artificial Sequence: Synthetic oligonucleotide
  Sense strand starting at position 2873 of SEQ ID NO: 3919
cguaacuuccuugggagau

SEQ ID NO: 305059 - RNA, 19 nt, Artificial Sequence
  Description of Artificial Sequence: Synthetic oligonucleotide
  Antisense strand to SEQ ID NO: 305058
aucucccaaggaaguuacg

SEQ ID NO: 305060 - RNA, 19 nt, Artificial Sequence
  Description of Artificial Sequence: Synthetic oligonucleotide
  Sense strand starting at position 2874 of SEQ ID NO: 3919
guaacuuccuugggagauu

SEQ ID NO: 305061 - RNA, 19 nt, Artificial Sequence
  Description of Artificial Sequence: Synthetic oligonucleotide
  Antisense strand to SEQ ID NO: 305060
aaucucccaaggaaguuac

SEQ ID NO: 305062 - RNA, 19 nt, Artificial Sequence
  Description of Artificial Sequence: Synthetic oligonucleotide
  Sense strand starting at position 2971 of SEQ ID NO: 3919
cuaagauauccuggugaau

SEQ ID NO: 305063 - RNA, 19 nt, Artificial Sequence
  Description of Artificial Sequence: Synthetic oligonucleotide
  Antisense strand to SEQ ID NO: 305062
auucaccaggauaucuuag

SEQ ID NO: 305064 - RNA, 19 nt, Artificial Sequence
  Description of Artificial Sequence: Synthetic oligonucleotide
  Sense strand starting at position 2973 of SEQ ID NO: 3919
aagauauccuggugaauga

SEQ ID NO: 305065 - RNA, 19 nt, Artificial Sequence
  Description of Artificial Sequence: Synthetic oligonucleotide
  Antisense strand to SEQ ID NO: 305064
ucauucaccaggauaucuu

SEQ ID NO: 305066 - RNA, 19 nt, Artificial Sequence
  Description of Artificial Sequence: Synthetic oligonucleotide
  Sense strand starting at position 2984 of SEQ ID NO: 3919
gugaaugagaagcgaucua

SEQ ID NO: 305067 - RNA, 19 nt, Artificial Sequence
  Description of Artificial Sequence: Synthetic oligonucleotide
  Antisense strand to SEQ ID NO: 305066
uagaucgcuucucauucac

SEQ ID NO: 305068 - RNA, 19 nt, Artificial Sequence
  Description of Artificial Sequence: Synthetic oligonucleotide
  Sense strand starting at position 2989 of SEQ ID NO: 3919
ugagaagcgaucuaguaga

SEQ ID NO: 305069 - RNA, 19 nt, Artificial Sequence
  Description of Artificial Sequence: Synthetic oligonucleotide
  Antisense strand to SEQ ID NO: 305068
ucuacuagaucgcuucuca

SEQ ID NO: 305070 - RNA, 19 nt, Artificial Sequence
  Description of Artificial Sequence: Synthetic oligonucleotide
  Sense strand starting at position 2996 of SEQ ID NO: 3919
cgaucuaguagaggacaaa

SEQ ID NO: 305071 - RNA, 19 nt, Artificial Sequence
  Description of Artificial Sequence: Synthetic oligonucleotide
  Antisense strand to SEQ ID NO: 305070
uuuguccucuacuagaucg

SEQ ID NO: 305072 - RNA, 19 nt, Artificial Sequence
  Description of Artificial Sequence: Synthetic oligonucleotide
  Sense strand starting at position 3082 of SEQ ID NO: 3919
uuugcaugcguguaguaua

SEQ ID NO: 305073 - RNA, 19 nt, Artificial Sequence
  Description of Artificial Sequence: Synthetic oligonucleotide
  Antisense strand to SEQ ID NO: 305072
uauacuacacgcaugcaaa

SEQ ID NO: 305074 - RNA, 19 nt, Artificial Sequence
  Description of Artificial Sequence: Synthetic oligonucleotide
  Sense strand starting at position 3125 of SEQ ID NO: 3919
auuauuguccacuguagga

SEQ ID NO: 305075 - RNA, 19 nt, Artificial Sequence
  Description of Artificial Sequence: Synthetic oligonucleotide
  Antisense strand to SEQ ID NO: 305074
uccuacaguggacaauaau

SEQ ID NO: 305076 - RNA, 19 nt, Artificial Sequence
  Description of Artificial Sequence: Synthetic oligonucleotide
  Sense strand starting at position 3161 of SEQ ID NO: 3919
gggagcuauuuauaauuau

SEQ ID NO: 305077 - RNA, 19 nt, Artificial Sequence
  Description of Artificial Sequence: Synthetic oligonucleotide
  Antisense strand to SEQ ID NO: 305076
auaauuauaaauagcuccc

SEQ ID NO: 305078 - RNA, 19 nt, Artificial Sequence
  Description of Artificial Sequence: Synthetic oligonucleotide
  Sense strand starting at position 3189 of SEQ ID NO: 3919
ggacaacagucacucuaau

SEQ ID NO: 305079 - RNA, 19 nt, Artificial Sequence
  Description of Artificial Sequence: Synthetic oligonucleotide
  Antisense strand to SEQ ID NO: 305078
auuagagugacuguugucc

SEQ ID NO: 305080 - RNA, 19 nt, Artificial Sequence
  Description of Artificial Sequence: Synthetic oligonucleotide
  Sense strand starting at position 3210 of SEQ ID NO: 3919
ucaggaguccugggaaugu

SEQ ID NO: 305081 - RNA, 19 nt, Artificial Sequence
  Description of Artificial Sequence: Synthetic oligonucleotide
  Antisense strand to SEQ ID NO: 305080
acauucccaggacuccuga

SEQ ID NO: 305082 - RNA, 19 nt, Artificial Sequence
  Description of Artificial Sequence: Synthetic oligonucleotide
  Sense strand starting at position 3219 of SEQ ID NO: 3919
cugggaauguggccagaga

SEQ ID NO: 305083 - RNA, 19 nt, Artificial Sequence
  Description of Artificial Sequence: Synthetic oligonucleotide
  Antisense strand to SEQ ID NO: 305082
ucucuggccacauucccag

SEQ ID NO: 305084 - RNA, 19 nt, Artificial Sequence
  Description of Artificial Sequence: Synthetic oligonucleotide
  Sense strand starting at position 3455 of SEQ ID NO: 3919
agacacuuggccuguguua

SEQ ID NO: 305085 - RNA, 19 nt, Artificial Sequence
  Description of Artificial Sequence: Synthetic oligonucleotide
  Antisense strand to SEQ ID NO: 305084
uaacacaggccaagugucu

SEQ ID NO: 305086 - RNA, 19 nt, Artificial Sequence
  Description of Artificial Sequence: Synthetic oligonucleotide
  Sense strand starting at position 3473 of SEQ ID NO: 3919
aggaacagucucgaagcaa

SEQ ID NO: 305087 - RNA, 19 nt, Artificial Sequence
  Description of Artificial Sequence: Synthetic oligonucleotide
  Antisense strand to SEQ ID NO: 305086
uugcuucgagacuguuccu

SEQ ID NO: 305088 - RNA, 19 nt, Artificial Sequence
  Description of Artificial Sequence: Synthetic oligonucleotide
  Sense strand starting at position 3493 of SEQ ID NO: 3919
cccugcuguugagucagaa

SEQ ID NO: 305089 - RNA, 19 nt, Artificial Sequence
  Description of Artificial Sequence: Synthetic oligonucleotide
  Antisense strand to SEQ ID NO: 305088
uucugacucaacagcaggg

SEQ ID NO: 305090 - RNA, 19 nt, Artificial Sequence
  Description of Artificial Sequence: Synthetic oligonucleotide
  Sense strand starting at position 3497 of SEQ ID NO: 3919
gcuguugagucagaaagag

SEQ ID NO: 305091 - RNA, 19 nt, Artificial Sequence
  Description of Artificial Sequence: Synthetic oligonucleotide
  Antisense strand to SEQ ID NO: 305090
cucuuucugacucaacagc

SEQ ID NO: 305092 - RNA, 19 nt, Artificial Sequence
  Description of Artificial Sequence: Synthetic oligonucleotide
  Sense strand starting at position 3543 of SEQ ID NO: 3919
ccaagagagcuuuguaaua

SEQ ID NO: 305093 - RNA, 19 nt, Artificial Sequence
  Description of Artificial Sequence: Synthetic oligonucleotide
  Antisense strand to SEQ ID NO: 305092
uauuacaaagcucucuugg

SEQ ID NO: 305094 - RNA, 19 nt, Artificial Sequence
  Description of Artificial Sequence: Synthetic oligonucleotide
  Sense strand starting at position 3548 of SEQ ID NO: 3919
agagcuuuguaauaauuag

SEQ ID NO: 305095 - RNA, 19 nt, Artificial Sequence
  Description of Artificial Sequence: Synthetic oligonucleotide
  Antisense strand to SEQ ID NO: 305094
cuaauuauuacaaagcucu

SEQ ID NO: 305096 - RNA, 19 nt, Artificial Sequence
  Description of Artificial Sequence: Synthetic oligonucleotide
  Sense strand starting at position 3570 of SEQ ID NO: 3919
uugggacaccugugugcua

SEQ ID NO: 305097 - RNA, 19 nt, Artificial Sequence
  Description of Artificial Sequence: Synthetic oligonucleotide
  Antisense strand to SEQ ID NO: 305096
uagcacacaggugucccaa

SEQ ID NO: 305098 - RNA, 19 nt, Artificial Sequence
  Description of Artificial Sequence: Synthetic oligonucleotide
  Sense strand starting at position 3666 of SEQ ID NO: 3919
ucuguaagaugagaagcau

SEQ ID NO: 305099 - RNA, 19 nt, Artificial Sequence
  Description of Artificial Sequence: Synthetic oligonucleotide
  Antisense strand to SEQ ID NO: 305098
augcuucucaucuuacaga

SEQ ID NO: 305100 - RNA, 19 nt, Artificial Sequence
  Description of Artificial Sequence: Synthetic oligonucleotide
  Sense strand starting at position 3704 of SEQ ID NO: 3919
ucaugugguugcuuuagaa

SEQ ID NO: 305101 - RNA, 19 nt, Artificial Sequence
  Description of Artificial Sequence: Synthetic oligonucleotide
  Antisense strand to SEQ ID NO: 305100
uucuaaagcaaccacauga

SEQ ID NO: 305102 - RNA, 19 nt, Artificial Sequence
  Description of Artificial Sequence: Synthetic oligonucleotide
  Sense strand starting at position 3738 of SEQ ID NO: 3919
caggaaaucuaugaaggcu

SEQ ID NO: 305103 - RNA, 19 nt, Artificial Sequence
  Description of Artificial Sequence: Synthetic oligonucleotide
  Antisense strand to SEQ ID NO: 305102
agccuucauagauuuccug

SEQ ID NO: 305104 - RNA, 19 nt, Artificial Sequence
  Description of Artificial Sequence: Synthetic oligonucleotide
  Sense strand starting at position 3778 of SEQ ID NO: 3919
cugaguguuagggauccaa

SEQ ID NO: 305105 - RNA, 19 nt, Artificial Sequence
  Description of Artificial Sequence: Synthetic oligonucleotide
  Antisense strand to SEQ ID NO: 305104
uuggaucccuaacacucag

SEQ ID NO: 305106 - RNA, 19 nt, Artificial Sequence
  Description of Artificial Sequence: Synthetic oligonucleotide
  Sense strand starting at position 3782 of SEQ ID NO: 3919
guguuagggauccaauaug

SEQ ID NO: 305107 - RNA, 19 nt, Artificial Sequence
  Description of Artificial Sequence: Synthetic oligonucleotide
  Antisense strand to SEQ ID NO: 305106
cauauuggaucccuaacac

SEQ ID NO: 305108 - RNA, 19 nt, Artificial Sequence
  Description of Artificial Sequence: Synthetic oligonucleotide
  Sense strand starting at position 3858 of SEQ ID NO: 3919
ggaaacaaauaaugucauu

SEQ ID NO: 305109 - RNA, 19 nt, Artificial Sequence
  Description of Artificial Sequence: Synthetic oligonucleotide
  Antisense strand to SEQ ID NO: 305108
aaugacauuauuuguuucc

SEQ ID NO: 305110 - RNA, 19 nt, Artificial Sequence
  Description of Artificial Sequence: Synthetic oligonucleotide
  Sense strand starting at position 3876 of SEQ ID NO: 3919
uguguaacaauguggcaau

SEQ ID NO: 305111 - RNA, 19 nt, Artificial Sequence
  Description of Artificial Sequence: Synthetic oligonucleotide
  Antisense strand to SEQ ID NO: 305110
auugccacauuguuacaca

SEQ ID NO: 305112 - RNA, 19 nt, Artificial Sequence
  Description of Artificial Sequence: Synthetic oligonucleotide
  Sense strand starting at position 27 of SEQ ID NO: 3920
aucuucuacccuggagaga

SEQ ID NO: 305113 - RNA, 19 nt, Artificial Sequence
  Description of Artificial Sequence: Synthetic oligonucleotide
  Antisense strand to SEQ ID NO: 305112
ucucuccaggguagaagau

SEQ ID NO: 305114 - RNA, 19 nt, Artificial Sequence
  Description of Artificial Sequence: Synthetic oligonucleotide
  Sense strand starting at position 53 of SEQ ID NO: 3920
ccaagcaaaguuugaauca

SEQ ID NO: 305115 - RNA, 19 nt, Artificial Sequence
  Description of Artificial Sequence: Synthetic oligonucleotide
  Antisense strand to SEQ ID NO: 305114
ugauucaaacuuugcuugg

SEQ ID NO: 305116 - RNA, 19 nt, Artificial Sequence
  Description of Artificial Sequence: Synthetic oligonucleotide
  Sense strand starting at position 63 of SEQ ID NO: 3920
uuugaaucagaucgugauc

SEQ ID NO: 305117 - RNA, 19 nt, Artificial Sequence
  Description of Artificial Sequence: Synthetic oligonucleotide
  Antisense strand to SEQ ID NO: 305116
gaucacgaucugauucaaa

SEQ ID NO: 305118 - RNA, 19 nt, Artificial Sequence
  Description of Artificial Sequence: Synthetic oligonucleotide
  Sense strand starting at position 66 of SEQ ID NO: 3920
gaaucagaucgugaucgaa

SEQ ID NO: 305119 - RNA, 19 nt, Artificial Sequence
  Description of Artificial Sequence: Synthetic oligonucleotide
  Antisense strand to SEQ ID NO: 305118
uucgaucacgaucugauuc

SEQ ID NO: 305120 - RNA, 19 nt, Artificial Sequence
  Description of Artificial Sequence: Synthetic oligonucleotide
  Sense strand starting at position 68 of SEQ ID NO: 3920
aucagaucgugaucgaaua

SEQ ID NO: 305121 - RNA, 19 nt, Artificial Sequence
  Description of Artificial Sequence: Synthetic oligonucleotide
  Antisense strand to SEQ ID NO: 305120
uauucgaucacgaucugau

SEQ ID NO: 305122 - RNA, 19 nt, Artificial Sequence
  Description of Artificial Sequence: Synthetic oligonucleotide
  Sense strand starting at position 69 of SEQ ID NO: 3920
ucagaucgugaucgaauaa

SEQ ID NO: 305123 - RNA, 19 nt, Artificial Sequence
  Description of Artificial Sequence: Synthetic oligonucleotide
  Antisense strand to SEQ ID NO: 305122
uuauucgaucacgaucuga

SEQ ID NO: 305124 - RNA, 19 nt, Artificial Sequence
  Description of Artificial Sequence: Synthetic oligonucleotide
  Sense strand starting at position 113 of SEQ ID NO: 3920
ggcuuuaaucugcaaugac

SEQ ID NO: 305125 - RNA, 19 nt, Artificial Sequence
  Description of Artificial Sequence: Synthetic oligonucleotide
  Antisense strand to SEQ ID NO: 305124
gucauugcagauuaaagcc

SEQ ID NO: 305126 - RNA, 19 nt, Artificial Sequence
  Description of Artificial Sequence: Synthetic oligonucleotide
  Sense strand starting at position 116 of SEQ ID NO: 3920
uuuaaucugcaaugacaga

SEQ ID NO: 305127 - RNA, 19 nt, Artificial Sequence
  Description of Artificial Sequence: Synthetic oligonucleotide
  Antisense strand to SEQ ID NO: 305126
ucugucauugcagauuaaa

SEQ ID NO: 305128 - RNA, 19 nt, Artificial Sequence
  Description of Artificial Sequence: Synthetic oligonucleotide
  Sense strand starting at position 187 of SEQ ID NO: 3920
gugacuguucuccaaucaa

SEQ ID NO: 305129 - RNA, 19 nt, Artificial Sequence
  Description of Artificial Sequence: Synthetic oligonucleotide
  Antisense strand to SEQ ID NO: 305128
uugauuggagaacagucac

SEQ ID NO: 305130 - RNA, 19 nt, Artificial Sequence
  Description of Artificial Sequence: Synthetic oligonucleotide
  Sense strand starting at position 230 of SEQ ID NO: 3920
acuuucuugcauggaagaa

SEQ ID NO: 305131 - RNA, 19 nt, Artificial Sequence
  Description of Artificial Sequence: Synthetic oligonucleotide
  Antisense strand to SEQ ID NO: 305130
uucuuccaugcaagaaagu

SEQ ID NO: 305132 - RNA, 19 nt, Artificial Sequence
  Description of Artificial Sequence: Synthetic oligonucleotide
  Sense strand starting at position 264 of SEQ ID NO: 3920
gguguuaguauccaccaaa

SEQ ID NO: 305133 - RNA, 19 nt, Artificial Sequence
  Description of Artificial Sequence: Synthetic oligonucleotide
  Antisense strand to SEQ ID NO: 305132
uuugguggauacuaacacc

SEQ ID NO: 305134 - RNA, 19 nt, Artificial Sequence
  Description of Artificial Sequence: Synthetic oligonucleotide
  Sense strand starting at position 267 of SEQ ID NO: 3920
guuaguauccaccaaauug

SEQ ID NO: 305135 - RNA, 19 nt, Artificial Sequence
  Description of Artificial Sequence: Synthetic oligonucleotide
  Antisense strand to SEQ ID NO: 305134
caauuugguggauacuaac

SEQ ID NO: 305136 - RNA, 19 nt, Artificial Sequence
  Description of Artificial Sequence: Synthetic oligonucleotide
  Sense strand starting at position 311 of SEQ ID NO: 3920
cuguaaacucaagguuuga

SEQ ID NO: 305137 - RNA, 19 nt, Artificial Sequence
  Description of Artificial Sequence: Synthetic oligonucleotide
  Antisense strand to SEQ ID NO: 305136
ucaaaccuugaguuuacag

SEQ ID NO: 305138 - RNA, 19 nt, Artificial Sequence
  Description of Artificial Sequence: Synthetic oligonucleotide
  Sense strand starting at position 327 of SEQ ID NO: 3920
ugagucuugaauggucuga

SEQ ID NO: 305139 - RNA, 19 nt, Artificial Sequence
  Description of Artificial Sequence: Synthetic oligonucleotide
  Antisense strand to SEQ ID NO: 305138
ucagaccauucaagacuca

SEQ ID NO: 305140 - RNA, 19 nt, Artificial Sequence
  Description of Artificial Sequence: Synthetic oligonucleotide
  Sense strand starting at position 329 of SEQ ID NO: 3920
agucuugaauggucugaaa

SEQ ID NO: 305141 - RNA, 19 nt, Artificial Sequence
  Description of Artificial Sequence: Synthetic oligonucleotide
  Antisense strand to SEQ ID NO: 305140
uuucagaccauucaagacu

SEQ ID NO: 305142 - RNA, 19 nt, Artificial Sequence
  Description of Artificial Sequence: Synthetic oligonucleotide
  Sense strand starting at position 522 of SEQ ID NO: 3920
agccuuuacucuccaagga

SEQ ID NO: 305143 - RNA, 19 nt, Artificial Sequence
  Description of Artificial Sequence: Synthetic oligonucleotide
  Antisense strand to SEQ ID NO: 305142
uccuuggagaguaaaggcu

SEQ ID NO: 305144 - RNA, 19 nt, Artificial Sequence
  Description of Artificial Sequence: Synthetic oligonucleotide
  Sense strand starting at position 523 of SEQ ID NO: 3920
gccuuuacucuccaaggaa

SEQ ID NO: 305145 - RNA, 19 nt, Artificial Sequence
  Description of Artificial Sequence: Synthetic oligonucleotide
  Antisense strand to SEQ ID NO: 305144
uuccuuggagaguaaaggc

SEQ ID NO: 305146 - RNA, 19 nt, Artificial Sequence
  Description of Artificial Sequence: Synthetic oligonucleotide
  Sense strand starting at position 674 of SEQ ID NO: 3920
gggauauacuaguuaauau

SEQ ID NO: 305147 - RNA, 19 nt, Artificial Sequence
  Description of Artificial Sequence: Synthetic oligonucleotide
  Antisense strand to SEQ ID NO: 305146
auauuaacuaguauauccc

SEQ ID NO: 305148 - RNA, 19 nt, Artificial Sequence
  Description of Artificial Sequence: Synthetic oligonucleotide
  Sense strand starting at position 1290 of SEQ ID NO: 3920
cggcaaagugucuagauca

SEQ ID NO: 305149 - RNA, 19 nt, Artificial Sequence
  Description of Artificial Sequence: Synthetic oligonucleotide
  Antisense strand to SEQ ID NO: 305148
ugaucuagacacuuugccg

SEQ ID NO: 305150 - RNA, 19 nt, Artificial Sequence
  Description of Artificial Sequence: Synthetic oligonucleotide
  Sense strand starting at position 1776 of SEQ ID NO: 3920
auaaucuaaguuugcagau

SEQ ID NO: 305151 - RNA, 19 nt, Artificial Sequence
  Description of Artificial Sequence: Synthetic oligonucleotide
  Antisense strand to SEQ ID NO: 305150
aucugcaaacuuagauuau

SEQ ID NO: 305152 - RNA, 19 nt, Artificial Sequence
  Description of Artificial Sequence: Synthetic oligonucleotide
  Sense strand starting at position 1842 of SEQ ID NO: 3920
gcuccuacucuggaaauug

SEQ ID NO: 305153 - RNA, 19 nt, Artificial Sequence
  Description of Artificial Sequence: Synthetic oligonucleotide
  Antisense strand to SEQ ID NO: 305152
caauuuccagaguaggagc

SEQ ID NO: 305154 - RNA, 19 nt, Artificial Sequence
  Description of Artificial Sequence: Synthetic oligonucleotide
  Sense strand starting at position 1850 of SEQ ID NO: 3920
ucuggaaauuguguacuua

SEQ ID NO: 305155 - RNA, 19 nt, Artificial Sequence
  Description of Artificial Sequence: Synthetic oligonucleotide
  Antisense strand to SEQ ID NO: 305154
uaaguacacaauuuccaga

SEQ ID NO: 305156 - RNA, 19 nt, Artificial Sequence
  Description of Artificial Sequence: Synthetic oligonucleotide
  Sense strand starting at position 1851 of SEQ ID NO: 3920
cuggaaauuguguacuuac

SEQ ID NO: 305157 - RNA, 19 nt, Artificial Sequence
  Description of Artificial Sequence: Synthetic oligonucleotide
  Antisense strand to SEQ ID NO: 305156
guaaguacacaauuuccag

SEQ ID NO: 305158 - RNA, 19 nt, Artificial Sequence
  Description of Artificial Sequence: Synthetic oligonucleotide
  Sense strand starting at position 1860 of SEQ ID NO: 3920
guguacuuaccucagaaau

SEQ ID NO: 305159 - RNA, 19 nt, Artificial Sequence
  Description of Artificial Sequence: Synthetic oligonucleotide
  Antisense strand to SEQ ID NO: 305158
auuucugagguaaguacac

SEQ ID NO: 305160 - RNA, 19 nt, Artificial Sequence
  Description of Artificial Sequence: Synthetic oligonucleotide
  Sense strand starting at position 2041 of SEQ ID NO: 3920
guuuauaaaucucugaaga

SEQ ID NO: 305161 - RNA, 19 nt, Artificial Sequence
  Description of Artificial Sequence: Synthetic oligonucleotide
  Antisense strand to SEQ ID NO: 305160
ucuucagagauuuauaaac

SEQ ID NO: 305162 - RNA, 19 nt, Artificial Sequence
  Description of Artificial Sequence: Synthetic oligonucleotide
  Sense strand starting at position 2545 of SEQ ID NO: 3920
aagggagauuaauagagga

SEQ ID NO: 305163 - RNA, 19 nt, Artificial Sequence
  Description of Artificial Sequence: Synthetic oligonucleotide
  Antisense strand to SEQ ID NO: 305162
uccucuauuaaucucccuu

SEQ ID NO: 305164 - RNA, 19 nt, Artificial Sequence
  Description of Artificial Sequence: Synthetic oligonucleotide
  Sense strand starting at position 2561 of SEQ ID NO: 3920
ggagauaguugacucagua

SEQ ID NO: 305165 - RNA, 19 nt, Artificial Sequence
  Description of Artificial Sequence: Synthetic oligonucleotide
  Antisense strand to SEQ ID NO: 305164
uacugagucaacuaucucc

SEQ ID NO: 305166 - RNA, 19 nt, Artificial Sequence
  Description of Artificial Sequence: Synthetic oligonucleotide
  Sense strand starting at position 2565 of SEQ ID NO: 3920
auaguugacucaguaagaa

SEQ ID NO: 305167 - RNA, 19 nt, Artificial Sequence
  Description of Artificial Sequence: Synthetic oligonucleotide
  Antisense strand to SEQ ID NO: 305166
uucuuacugagucaacuau

SEQ ID NO: 305168 - RNA, 19 nt, Artificial Sequence
  Description of Artificial Sequence: Synthetic oligonucleotide
  Sense strand starting at position 2726 of SEQ ID NO: 3920
aaguuuauagauugcuuga

SEQ ID NO: 305169 - RNA, 19 nt, Artificial Sequence
  Description of Artificial Sequence: Synthetic oligonucleotide
  Antisense strand to SEQ ID NO: 305168
ucaagcaaucuauaaacuu

SEQ ID NO: 305170 - RNA, 19 nt, Artificial Sequence
  Description of Artificial Sequence: Synthetic oligonucleotide
  Sense strand starting at position 2775 of SEQ ID NO: 3920
ucuguugagagugagagua

SEQ ID NO: 305171 - RNA, 19 nt, Artificial Sequence
  Description of Artificial Sequence: Synthetic oligonucleotide
  Antisense strand to SEQ ID NO: 305170
uacucucacucucaacaga

SEQ ID NO: 305172 - RNA, 19 nt, Artificial Sequence
  Description of Artificial Sequence: Synthetic oligonucleotide
  Sense strand starting at position 2811 of SEQ ID NO: 3920
aaugucuccgcagaacuau

SEQ ID NO: 305173 - RNA, 19 nt, Artificial Sequence
  Description of Artificial Sequence: Synthetic oligonucleotide
  Antisense strand to SEQ ID NO: 305172
auaguucugcggagacauu

SEQ ID NO: 305174 - RNA, 19 nt, Artificial Sequence
  Description of Artificial Sequence: Synthetic oligonucleotide
  Sense strand starting at position 2873 of SEQ ID NO: 3920
ugcaucuauuucucgauga

SEQ ID NO: 305175 - RNA, 19 nt, Artificial Sequence
  Description of Artificial Sequence: Synthetic oligonucleotide
  Antisense strand to SEQ ID NO: 305174
ucaucgagaaauagaugca

SEQ ID NO: 305176 - RNA, 19 nt, Artificial Sequence
  Description of Artificial Sequence: Synthetic oligonucleotide
  Sense strand starting at position 3086 of SEQ ID NO: 3920
gaagacuuugcuggacaau

SEQ ID NO: 305177 - RNA, 19 nt, Artificial Sequence
  Description of Artificial Sequence: Synthetic oligonucleotide
  Antisense strand to SEQ ID NO: 305176
auuguccagcaaagucuuc

SEQ ID NO: 305178 - RNA, 19 nt, Artificial Sequence
  Description of Artificial Sequence: Synthetic oligonucleotide
  Sense strand starting at position 3120 of SEQ ID NO: 3920
gaaugucaccugcauaugu

SEQ ID NO: 305179 - RNA, 19 nt, Artificial Sequence
  Description of Artificial Sequence: Synthetic oligonucleotide
  Antisense strand to SEQ ID NO: 305178
acauaugcaggugacauuc

SEQ ID NO: 305180 - RNA, 19 nt, Artificial Sequence
  Description of Artificial Sequence: Synthetic oligonucleotide
  Sense strand starting at position 3167 of SEQ ID NO: 3920
gucugacucccacauuaca

SEQ ID NO: 305181 - RNA, 19 nt, Artificial Sequence
  Description of Artificial Sequence: Synthetic oligonucleotide
  Antisense strand to SEQ ID NO: 305180
uguaaugugggagucagac

SEQ ID NO: 305182 - RNA, 19 nt, Artificial Sequence
  Description of Artificial Sequence: Synthetic oligonucleotide
  Sense strand starting at position 3234 of SEQ ID NO: 3920
gaauauucccuguggucag

SEQ ID NO: 305183 - RNA, 19 nt, Artificial Sequence
  Description of Artificial Sequence: Synthetic oligonucleotide
  Antisense strand to SEQ ID NO: 305182
cugaccacagggaauauuc

SEQ ID NO: 305184 - RNA, 19 nt, Artificial Sequence
  Description of Artificial Sequence: Synthetic oligonucleotide
  Sense strand starting at position 3374 of SEQ ID NO: 3920
cucuuagaagcaggagaua

SEQ ID NO: 305185 - RNA, 19 nt, Artificial Sequence
  Description of Artificial Sequence: Synthetic oligonucleotide
  Antisense strand to SEQ ID NO: 305184
uaucuccugcuucuaagag

SEQ ID NO: 305186 - RNA, 19 nt, Artificial Sequence
  Description of Artificial Sequence: Synthetic oligonucleotide
  Sense strand starting at position 3592 of SEQ ID NO: 3920
gcugaugagcuuuaauaaa

SEQ ID NO: 305187 - RNA, 19 nt, Artificial Sequence
  Description of Artificial Sequence: Synthetic oligonucleotide
  Antisense strand to SEQ ID NO: 305186
uuuauuaaagcucaucagc

SEQ ID NO: 305188 - RNA, 19 nt, Artificial Sequence
  Description of Artificial Sequence: Synthetic oligonucleotide
  Sense strand starting at position 3638 of SEQ ID NO: 3920
caagaaagguuaggaauuu

SEQ ID NO: 305189 - RNA, 19 nt, Artificial Sequence
  Description of Artificial Sequence: Synthetic oligonucleotide
  Antisense strand to SEQ ID NO: 305188
aaauuccuaaccuuucuug

SEQ ID NO: 305190 - RNA, 19 nt, Artificial Sequence
  Description of Artificial Sequence: Synthetic oligonucleotide
  Sense strand starting at position 3712 of SEQ ID NO: 3920
cuuguuguaagguaugaac

SEQ ID NO: 305191 - RNA, 19 nt, Artificial Sequence
  Description of Artificial Sequence: Synthetic oligonucleotide
  Antisense strand to SEQ ID NO: 305190
guucauaccuuacaacaag

SEQ ID NO: 305192 - RNA, 19 nt, Artificial Sequence
  Description of Artificial Sequence: Synthetic oligonucleotide
  Sense strand starting at position 41 of SEQ ID NO: 3921
ccaagcaaaguuugaauca

SEQ ID NO: 305193 - RNA, 19 nt, Artificial Sequence
  Description of Artificial Sequence: Synthetic oligonucleotide
  Antisense strand to SEQ ID NO: 305192
ugauucaaacuuugcuugg

SEQ ID NO: 305194 - RNA, 19 nt, Artificial Sequence
  Description of Artificial Sequence: Synthetic oligonucleotide
  Sense strand starting at position 51 of SEQ ID NO: 3921
uuugaaucagaucgugauc

SEQ ID NO: 305195 - RNA, 19 nt, Artificial Sequence
  Description of Artificial Sequence: Synthetic oligonucleotide
  Antisense strand to SEQ ID NO: 305194
gaucacgaucugauucaaa

SEQ ID NO: 305196 - RNA, 19 nt, Artificial Sequence
  Description of Artificial Sequence: Synthetic oligonucleotide
  Sense strand starting at position 53 of SEQ ID NO: 3921
ugaaucagaucgugaucga

SEQ ID NO: 305197 - RNA, 19 nt, Artificial Sequence
  Description of Artificial Sequence: Synthetic oligonucleotide
  Antisense strand to SEQ ID NO: 305196
ucgaucacgaucugauuca

SEQ ID NO: 305198 - RNA, 19 nt, Artificial Sequence
  Description of Artificial Sequence: Synthetic oligonucleotide
  Sense strand starting at position 54 of SEQ ID NO: 3921
gaaucagaucgugaucgaa

SEQ ID NO: 305199 - RNA, 19 nt, Artificial Sequence
  Description of Artificial Sequence: Synthetic oligonucleotide
  Antisense strand to SEQ ID NO: 305198
uucgaucacgaucugauuc

SEQ ID NO: 305200 - RNA, 19 nt, Artificial Sequence
  Description of Artificial Sequence: Synthetic oligonucleotide
  Sense strand starting at position 56 of SEQ ID NO: 3921
aucagaucgugaucgaaua

SEQ ID NO: 305201 - RNA, 19 nt, Artificial Sequence
  Description of Artificial Sequence: Synthetic oligonucleotide
  Antisense strand to SEQ ID NO: 305200
uauucgaucacgaucugau

SEQ ID NO: 305202 - RNA, 19 nt, Artificial Sequence
  Description of Artificial Sequence: Synthetic oligonucleotide
  Sense strand starting at position 57 of SEQ ID NO: 3921
ucagaucgugaucgaauaa

SEQ ID NO: 305203 - RNA, 19 nt, Artificial Sequence
  Description of Artificial Sequence: Synthetic oligonucleotide
  Antisense strand to SEQ ID NO: 305202
uuauucgaucacgaucuga

SEQ ID NO: 305204 - RNA, 19 nt, Artificial Sequence
  Description of Artificial Sequence: Synthetic oligonucleotide
  Sense strand starting at position 174 of SEQ ID NO: 3921
agugacuguucuccaauca

SEQ ID NO: 305205 - RNA, 19 nt, Artificial Sequence
  Description of Artificial Sequence: Synthetic oligonucleotide
  Antisense strand to SEQ ID NO: 305204
ugauuggagaacagucacu

SEQ ID NO: 305206 - RNA, 19 nt, Artificial Sequence
  Description of Artificial Sequence: Synthetic oligonucleotide
  Sense strand starting at position 175 of SEQ ID NO: 3921
gugacuguucuccaaucaa

SEQ ID NO: 305207 - RNA, 19 nt, Artificial Sequence
  Description of Artificial Sequence: Synthetic oligonucleotide
  Antisense strand to SEQ ID NO: 305206
uugauuggagaacagucac

SEQ ID NO: 305208 - RNA, 19 nt, Artificial Sequence
  Description of Artificial Sequence: Synthetic oligonucleotide
  Sense strand starting at position 228 of SEQ ID NO: 3921
auggaagaaugucggauuu

SEQ ID NO: 305209 - RNA, 19 nt, Artificial Sequence
  Description of Artificial Sequence: Synthetic oligonucleotide
  Antisense strand to SEQ ID NO: 305208
aaauccgacauucuuccau

SEQ ID NO: 305210 - RNA, 19 nt, Artificial Sequence
  Description of Artificial Sequence: Synthetic oligonucleotide
  Sense strand starting at position 306 of SEQ ID NO: 3921
cucaaaguuugagucuuga

SEQ ID NO: 305211 - RNA, 19 nt, Artificial Sequence
  Description of Artificial Sequence: Synthetic oligonucleotide
  Antisense strand to SEQ ID NO: 305210
ucaagacucaaacuuugag

SEQ ID NO: 305212 - RNA, 19 nt, Artificial Sequence
  Description of Artificial Sequence: Synthetic oligonucleotide
  Sense strand starting at position 315 of SEQ ID NO: 3921
ugagucuugaacggucuga

SEQ ID NO: 305213 - RNA, 19 nt, Artificial Sequence
  Description of Artificial Sequence: Synthetic oligonucleotide
  Antisense strand to SEQ ID NO: 305212
ucagaccguucaagacuca

SEQ ID NO: 305214 - RNA, 19 nt, Artificial Sequence
  Description of Artificial Sequence: Synthetic oligonucleotide
  Sense strand starting at position 533 of SEQ ID NO: 3921
cagucaaaucaagguaagu

SEQ ID NO: 305215 - RNA, 19 nt, Artificial Sequence
  Description of Artificial Sequence: Synthetic oligonucleotide
  Antisense strand to SEQ ID NO: 305214
acuuaccuugauuugacug

SEQ ID NO: 305216 - RNA, 19 nt, Artificial Sequence
  Description of Artificial Sequence: Synthetic oligonucleotide
  Sense strand starting at position 1512 of SEQ ID NO: 3921
gcggcuauauuuccagcua

SEQ ID NO: 305217 - RNA, 19 nt, Artificial Sequence
  Description of Artificial Sequence: Synthetic oligonucleotide
  Antisense strand to SEQ ID NO: 305216
uagcuggaaauauagccgc

SEQ ID NO: 305218 - RNA, 19 nt, Artificial Sequence
  Description of Artificial Sequence: Synthetic oligonucleotide
  Sense strand starting at position 1783 of SEQ ID NO: 3921
auaaucuaaguuugcagau

SEQ ID NO: 305219 - RNA, 19 nt, Artificial Sequence
  Description of Artificial Sequence: Synthetic oligonucleotide
  Antisense strand to SEQ ID NO: 305218
aucugcaaacuuagauuau

SEQ ID NO: 305220 - RNA, 19 nt, Artificial Sequence
  Description of Artificial Sequence: Synthetic oligonucleotide
  Sense strand starting at position 1830 of SEQ ID NO: 3921
uuuguaaccuaauaguaga

SEQ ID NO: 305221 - RNA, 19 nt, Artificial Sequence
  Description of Artificial Sequence: Synthetic oligonucleotide
  Antisense strand to SEQ ID NO: 305220
ucuacuauuagguuacaaa

SEQ ID NO: 305222 - RNA, 19 nt, Artificial Sequence
  Description of Artificial Sequence: Synthetic oligonucleotide
  Sense strand starting at position 1843 of SEQ ID NO: 3921
aguagauccuucucuggaa

SEQ ID NO: 305223 - RNA, 19 nt, Artificial Sequence
  Description of Artificial Sequence: Synthetic oligonucleotide
  Antisense strand to SEQ ID NO: 305222
uuccagagaaggaucuacu

SEQ ID NO: 305224 - RNA, 19 nt, Artificial Sequence
  Description of Artificial Sequence: Synthetic oligonucleotide
  Sense strand starting at position 1844 of SEQ ID NO: 3921
guagauccuucucuggaaa

SEQ ID NO: 305225 - RNA, 19 nt, Artificial Sequence
  Description of Artificial Sequence: Synthetic oligonucleotide
  Antisense strand to SEQ ID NO: 305224
uuuccagagaaggaucuac

SEQ ID NO: 305226 - RNA, 19 nt, Artificial Sequence
  Description of Artificial Sequence: Synthetic oligonucleotide
  Sense strand starting at position 1846 of SEQ ID NO: 3921
agauccuucucuggaaauu

SEQ ID NO: 305227 - RNA, 19 nt, Artificial Sequence
  Description of Artificial Sequence: Synthetic oligonucleotide
  Antisense strand to SEQ ID NO: 305226
aauuuccagagaaggaucu

SEQ ID NO: 305228 - RNA, 19 nt, Artificial Sequence
  Description of Artificial Sequence: Synthetic oligonucleotide
  Sense strand starting at position 1908 of SEQ ID NO: 3921
gcugucgaaucagauggau

SEQ ID NO: 305229 - RNA, 19 nt, Artificial Sequence
  Description of Artificial Sequence: Synthetic oligonucleotide
  Antisense strand to SEQ ID NO: 305228
auccaucugauucgacagc

SEQ ID NO: 305230 - RNA, 19 nt, Artificial Sequence
  Description of Artificial Sequence: Synthetic oligonucleotide
  Sense strand starting at position 1910 of SEQ ID NO: 3921
ugucgaaucagauggauuc

SEQ ID NO: 305231 - RNA, 19 nt, Artificial Sequence
  Description of Artificial Sequence: Synthetic oligonucleotide
  Antisense strand to SEQ ID NO: 305230
gaauccaucugauucgaca

SEQ ID NO: 305232 - RNA, 19 nt, Artificial Sequence
  Description of Artificial Sequence: Synthetic oligonucleotide
  Sense strand starting at position 1911 of SEQ ID NO: 3921
gucgaaucagauggauuca

SEQ ID NO: 305233 - RNA, 19 nt, Artificial Sequence
  Description of Artificial Sequence: Synthetic oligonucleotide
  Antisense strand to SEQ ID NO: 305232
ugaauccaucugauucgac

SEQ ID NO: 305234 - RNA, 19 nt, Artificial Sequence
  Description of Artificial Sequence: Synthetic oligonucleotide
  Sense strand starting at position 1923 of SEQ ID NO: 3921
ggauucagcucagggauga

SEQ ID NO: 305235 - RNA, 19 nt, Artificial Sequence
  Description of Artificial Sequence: Synthetic oligonucleotide
  Antisense strand to SEQ ID NO: 305234
ucaucccugagcugaaucc

SEQ ID NO: 305236 - RNA, 19 nt, Artificial Sequence
  Description of Artificial Sequence: Synthetic oligonucleotide
  Sense strand starting at position 2312 of SEQ ID NO: 3921
ggauaaauggcgugauaug

SEQ ID NO: 305237 - RNA, 19 nt, Artificial Sequence
  Description of Artificial Sequence: Synthetic oligonucleotide
  Antisense strand to SEQ ID NO: 305236
cauaucacgccauuuaucc

SEQ ID NO: 305238 - RNA, 19 nt, Artificial Sequence
  Description of Artificial Sequence: Synthetic oligonucleotide
  Sense strand starting at position 2313 of SEQ ID NO: 3921
gauaaauggcgugauaugu

SEQ ID NO: 305239 - RNA, 19 nt, Artificial Sequence
  Description of Artificial Sequence: Synthetic oligonucleotide
  Antisense strand to SEQ ID NO: 305238
acauaucacgccauuuauc

SEQ ID NO: 305240 - RNA, 19 nt, Artificial Sequence
  Description of Artificial Sequence: Synthetic oligonucleotide
  Sense strand starting at position 2319 of SEQ ID NO: 3921
uggcgugauauguauucua

SEQ ID NO: 305241 - RNA, 19 nt, Artificial Sequence
  Description of Artificial Sequence: Synthetic oligonucleotide
  Antisense strand to SEQ ID NO: 305240
uagaauacauaucacgcca

SEQ ID NO: 305242 - RNA, 19 nt, Artificial Sequence
  Description of Artificial Sequence: Synthetic oligonucleotide
  Sense strand starting at position 2322 of SEQ ID NO: 3921
cgugauauguauucuaguu

SEQ ID NO: 305243 - RNA, 19 nt, Artificial Sequence
  Description of Artificial Sequence: Synthetic oligonucleotide
  Antisense strand to SEQ ID NO: 305242
aacuagaauacauaucacg

SEQ ID NO: 305244 - RNA, 19 nt, Artificial Sequence
  Description of Artificial Sequence: Synthetic oligonucleotide
  Sense strand starting at position 2395 of SEQ ID NO: 3921
caagauugggugugaggaa

SEQ ID NO: 305245 - RNA, 19 nt, Artificial Sequence
  Description of Artificial Sequence: Synthetic oligonucleotide
  Antisense strand to SEQ ID NO: 305244
uuccucacacccaaucuug

SEQ ID NO: 305246 - RNA, 19 nt, Artificial Sequence
  Description of Artificial Sequence: Synthetic oligonucleotide
  Sense strand starting at position 2487 of SEQ ID NO: 3921
uaauauaguguauggcuaa

SEQ ID NO: 305247 - RNA, 19 nt, Artificial Sequence
  Description of Artificial Sequence: Synthetic oligonucleotide
  Antisense strand to SEQ ID NO: 305246
uuagccauacacuauauua

SEQ ID NO: 305248 - RNA, 19 nt, Artificial Sequence
  Description of Artificial Sequence: Synthetic oligonucleotide
  Sense strand starting at position 2488 of SEQ ID NO: 3921
aauauaguguauggcuaaa

SEQ ID NO: 305249 - RNA, 19 nt, Artificial Sequence
  Description of Artificial Sequence: Synthetic oligonucleotide
  Antisense strand to SEQ ID NO: 305248
uuuagccauacacuauauu

SEQ ID NO: 305250 - RNA, 19 nt, Artificial Sequence
  Description of Artificial Sequence: Synthetic oligonucleotide
  Sense strand starting at position 2566 of SEQ ID NO: 3921
guagauaauugacucagua

SEQ ID NO: 305251 - RNA, 19 nt, Artificial Sequence
  Description of Artificial Sequence: Synthetic oligonucleotide
  Antisense strand to SEQ ID NO: 305250
uacugagucaauuaucuac

SEQ ID NO: 305252 - RNA, 19 nt, Artificial Sequence
  Description of Artificial Sequence: Synthetic oligonucleotide
  Sense strand starting at position 2580 of SEQ ID NO: 3921
caguaagaacugugaauaa

SEQ ID NO: 305253 - RNA, 19 nt, Artificial Sequence
  Description of Artificial Sequence: Synthetic oligonucleotide
  Antisense strand to SEQ ID NO: 305252
uuauucacaguucuuacug

SEQ ID NO: 305254 - RNA, 19 nt, Artificial Sequence
  Description of Artificial Sequence: Synthetic oligonucleotide
  Sense strand starting at position 2593 of SEQ ID NO: 3921
gaauaagcaucucaggaag

SEQ ID NO: 305255 - RNA, 19 nt, Artificial Sequence
  Description of Artificial Sequence: Synthetic oligonucleotide
  Antisense strand to SEQ ID NO: 305254
cuuccugagaugcuuauuc

SEQ ID NO: 305256 - RNA, 19 nt, Artificial Sequence
  Description of Artificial Sequence: Synthetic oligonucleotide
  Sense strand starting at position 3090 of SEQ ID NO: 3921
ggaagacuuugcuggacaa

SEQ ID NO: 305257 - RNA, 19 nt, Artificial Sequence
  Description of Artificial Sequence: Synthetic oligonucleotide
  Antisense strand to SEQ ID NO: 305256
uuguccagcaaagucuucc

SEQ ID NO: 305258 - RNA, 19 nt, Artificial Sequence
  Description of Artificial Sequence: Synthetic oligonucleotide
  Sense strand starting at position 3091 of SEQ ID NO: 3921
gaagacuuugcuggacaau

SEQ ID NO: 305259 - RNA, 19 nt, Artificial Sequence
  Description of Artificial Sequence: Synthetic oligonucleotide
  Antisense strand to SEQ ID NO: 305258
auuguccagcaaagucuuc

SEQ ID NO: 305260 - RNA, 19 nt, Artificial Sequence
  Description of Artificial Sequence: Synthetic oligonucleotide
  Sense strand starting at position 3121 of SEQ ID NO: 3921
augcaaaugucaccugcau

SEQ ID NO: 305261 - RNA, 19 nt, Artificial Sequence
  Description of Artificial Sequence: Synthetic oligonucleotide
  Antisense strand to SEQ ID NO: 305260
augcaggugacauuugcau

SEQ ID NO: 305262 - RNA, 19 nt, Artificial Sequence
  Description of Artificial Sequence: Synthetic oligonucleotide
  Sense strand starting at position 3316 of SEQ ID NO: 3921
ugaucaugguuaggauaag

SEQ ID NO: 305263 - RNA, 19 nt, Artificial Sequence
  Description of Artificial Sequence: Synthetic oligonucleotide
  Antisense strand to SEQ ID NO: 305262
cuuauccuaaccaugauca

SEQ ID NO: 305264 - RNA, 19 nt, Artificial Sequence
  Description of Artificial Sequence: Synthetic oligonucleotide
  Sense strand starting at position 3317 of SEQ ID NO: 3921
gaucaugguuaggauaaga

SEQ ID NO: 305265 - RNA, 19 nt, Artificial Sequence
  Description of Artificial Sequence: Synthetic oligonucleotide
  Antisense strand to SEQ ID NO: 305264
ucuuauccuaaccaugauc

SEQ ID NO: 305266 - RNA, 19 nt, Artificial Sequence
  Description of Artificial Sequence: Synthetic oligonucleotide
  Sense strand starting at position 3611 of SEQ ID NO: 3921
gcugaugagcuuugauaaa

SEQ ID NO: 305267 - RNA, 19 nt, Artificial Sequence
  Description of Artificial Sequence: Synthetic oligonucleotide
  Antisense strand to SEQ ID NO: 305266
uuuaucaaagcucaucagc

SEQ ID NO: 305268 - RNA, 19 nt, Artificial Sequence
  Description of Artificial Sequence: Synthetic oligonucleotide
  Sense strand starting at position 3732 of SEQ ID NO: 3921
ugggcaagcuuguucuaag

SEQ ID NO: 305269 - RNA, 19 nt, Artificial Sequence
  Description of Artificial Sequence: Synthetic oligonucleotide
  Antisense strand to SEQ ID NO: 305268
cuuagaacaagcuugccca

SEQ ID NO: 305270 - RNA, 19 nt, Artificial Sequence
  Description of Artificial Sequence: Synthetic oligonucleotide
  Sense strand starting at position 3742 of SEQ ID NO: 3921
uguucuaagguaugaacuu

SEQ ID NO: 305271 - RNA, 19 nt, Artificial Sequence
  Description of Artificial Sequence: Synthetic oligonucleotide
  Antisense strand to SEQ ID NO: 305270
aaguucauaccuuagaaca

SEQ ID NO: 305272 - RNA, 19 nt, Artificial Sequence
  Description of Artificial Sequence: Synthetic oligonucleotide
  Sense strand starting at position 1 of SEQ ID NO: 3922
agugcuggucuucagugaa

SEQ ID NO: 305273 - RNA, 19 nt, Artificial Sequence
  Description of Artificial Sequence: Synthetic oligonucleotide
  Antisense strand to SEQ ID NO: 305272
uucacugaagaccagcacu

SEQ ID NO: 305274 - RNA, 19 nt, Artificial Sequence
  Description of Artificial Sequence: Synthetic oligonucleotide
  Sense strand starting at position 4 of SEQ ID NO: 3922
gcuggucuucagugaaggu

SEQ ID NO: 305275 - RNA, 19 nt, Artificial Sequence
  Description of Artificial Sequence: Synthetic oligonucleotide
  Antisense strand to SEQ ID NO: 305274
accuucacugaagaccagc

SEQ ID NO: 305276 - RNA, 19 nt, Artificial Sequence
  Description of Artificial Sequence: Synthetic oligonucleotide
  Sense strand starting at position 158 of SEQ ID NO: 3922
aucacuuguguuuaacaca

SEQ ID NO: 305277 - RNA, 19 nt, Artificial Sequence
  Description of Artificial Sequence: Synthetic oligonucleotide
  Antisense strand to SEQ ID NO: 305276
uguguuaaacacaagugau

SEQ ID NO: 305278 - RNA, 19 nt, Artificial Sequence
  Description of Artificial Sequence: Synthetic oligonucleotide
  Sense strand starting at position 161 of SEQ ID NO: 3922
acuuguguuuaacacauuu

SEQ ID NO: 305279 - RNA, 19 nt, Artificial Sequence
  Description of Artificial Sequence: Synthetic oligonucleotide
  Antisense strand to SEQ ID NO: 305278
aaauguguuaaacacaagu

SEQ ID NO: 305280 - RNA, 19 nt, Artificial Sequence
  Description of Artificial Sequence: Synthetic oligonucleotide
  Sense strand starting at position 204 of SEQ ID NO: 3922
agaauacuuguuugggaug

SEQ ID NO: 305281 - RNA, 19 nt, Artificial Sequence
  Description of Artificial Sequence: Synthetic oligonucleotide
  Antisense strand to SEQ ID NO: 305280
caucccaaacaaguauucu

SEQ ID NO: 305282 - RNA, 19 nt, Artificial Sequence
  Description of Artificial Sequence: Synthetic oligonucleotide
  Sense strand starting at position 209 of SEQ ID NO: 3922
acuuguuugggauguucca

SEQ ID NO: 305283 - RNA, 19 nt, Artificial Sequence
  Description of Artificial Sequence: Synthetic oligonucleotide
  Antisense strand to SEQ ID NO: 305282
uggaacaucccaaacaagu

SEQ ID NO: 305284 - RNA, 19 nt, Artificial Sequence
  Description of Artificial Sequence: Synthetic oligonucleotide
  Sense strand starting at position 216 of SEQ ID NO: 3922
ugggauguuccaugucacu

SEQ ID NO: 305285 - RNA, 19 nt, Artificial Sequence
  Description of Artificial Sequence: Synthetic oligonucleotide
  Antisense strand to SEQ ID NO: 305284
agugacauggaacauccca

SEQ ID NO: 305286 - RNA, 19 nt, Artificial Sequence
  Description of Artificial Sequence: Synthetic oligonucleotide
  Sense strand starting at position 222 of SEQ ID NO: 3922
guuccaugucacugacaca

SEQ ID NO: 305287 - RNA, 19 nt, Artificial Sequence
  Description of Artificial Sequence: Synthetic oligonucleotide
  Antisense strand to SEQ ID NO: 305286
ugugucagugacauggaac

SEQ ID NO: 305288 - RNA, 19 nt, Artificial Sequence
  Description of Artificial Sequence: Synthetic oligonucleotide
  Sense strand starting at position 801 of SEQ ID NO: 3922
cuauacuaguaucugugaa

SEQ ID NO: 305289 - RNA, 19 nt, Artificial Sequence
  Description of Artificial Sequence: Synthetic oligonucleotide
  Antisense strand to SEQ ID NO: 305288
uucacagauacuaguauag

SEQ ID NO: 305290 - RNA, 19 nt, Artificial Sequence
  Description of Artificial Sequence: Synthetic oligonucleotide
  Sense strand starting at position 803 of SEQ ID NO: 3922
auacuaguaucugugaauu

SEQ ID NO: 305291 - RNA, 19 nt, Artificial Sequence
  Description of Artificial Sequence: Synthetic oligonucleotide
  Antisense strand to SEQ ID NO: 305290
aauucacagauacuaguau

SEQ ID NO: 305292 - RNA, 19 nt, Artificial Sequence
  Description of Artificial Sequence: Synthetic oligonucleotide
  Sense strand starting at position 805 of SEQ ID NO: 3922
acuaguaucugugaauuug

SEQ ID NO: 305293 - RNA, 19 nt, Artificial Sequence
  Description of Artificial Sequence: Synthetic oligonucleotide
  Antisense strand to SEQ ID NO: 305292
caaauucacagauacuagu

SEQ ID NO: 305294 - RNA, 19 nt, Artificial Sequence
  Description of Artificial Sequence: Synthetic oligonucleotide
  Sense strand starting at position 913 of SEQ ID NO: 3922
aagugaccucaguagcuuu

SEQ ID NO: 305295 - RNA, 19 nt, Artificial Sequence
  Description of Artificial Sequence: Synthetic oligonucleotide
  Antisense strand to SEQ ID NO: 305294
aaagcuacugaggucacuu

SEQ ID NO: 305296 - RNA, 19 nt, Artificial Sequence
  Description of Artificial Sequence: Synthetic oligonucleotide
  Sense strand starting at position 1174 of SEQ ID NO: 3922
gcucucgaagucugaaacu

SEQ ID NO: 305297 - RNA, 19 nt, Artificial Sequence
  Description of Artificial Sequence: Synthetic oligonucleotide
  Antisense strand to SEQ ID NO: 305296
aguuucagacuucgagagc

SEQ ID NO: 305298 - RNA, 19 nt, Artificial Sequence
  Description of Artificial Sequence: Synthetic oligonucleotide
  Sense strand starting at position 1268 of SEQ ID NO: 3922
gggucuacuuuccuuggua

SEQ ID NO: 305299 - RNA, 19 nt, Artificial Sequence
  Description of Artificial Sequence: Synthetic oligonucleotide
  Antisense strand to SEQ ID NO: 305298
uaccaaggaaaguagaccc

SEQ ID NO: 305300 - RNA, 19 nt, Artificial Sequence
  Description of Artificial Sequence: Synthetic oligonucleotide
  Sense strand starting at position 1270 of SEQ ID NO: 3922
gucuacuuuccuugguaga

SEQ ID NO: 305301 - RNA, 19 nt, Artificial Sequence
  Description of Artificial Sequence: Synthetic oligonucleotide
  Antisense strand to SEQ ID NO: 305300
ucuaccaaggaaaguagac

SEQ ID NO: 305302 - RNA, 19 nt, Artificial Sequence
  Description of Artificial Sequence: Synthetic oligonucleotide
  Sense strand starting at position 1272 of SEQ ID NO: 3922
cuacuuuccuugguagauc

SEQ ID NO: 305303 - RNA, 19 nt, Artificial Sequence
  Description of Artificial Sequence: Synthetic oligonucleotide
  Antisense strand to SEQ ID NO: 305302
gaucuaccaaggaaaguag

SEQ ID NO: 305304 - RNA, 19 nt, Artificial Sequence
  Description of Artificial Sequence: Synthetic oligonucleotide
  Sense strand starting at position 1354 of SEQ ID NO: 3922
ucaugcuugcucugggauu

SEQ ID NO: 305305 - RNA, 19 nt, Artificial Sequence
  Description of Artificial Sequence: Synthetic oligonucleotide
  Antisense strand to SEQ ID NO: 305304
aaucccagagcaagcauga

SEQ ID NO: 305306 - RNA, 19 nt, Artificial Sequence
  Description of Artificial Sequence: Synthetic oligonucleotide
  Sense strand starting at position 1483 of SEQ ID NO: 3922
acaggucugcauugcuuua

SEQ ID NO: 305307 - RNA, 19 nt, Artificial Sequence
  Description of Artificial Sequence: Synthetic oligonucleotide
  Antisense strand to SEQ ID NO: 305306
uaaagcaaugcagaccugu

SEQ ID NO: 305308 - RNA, 19 nt, Artificial Sequence
  Description of Artificial Sequence: Synthetic oligonucleotide
  Sense strand starting at position 2082 of SEQ ID NO: 3922
caauuuagcucauguaagg

SEQ ID NO: 305309 - RNA, 19 nt, Artificial Sequence
  Description of Artificial Sequence: Synthetic oligonucleotide
  Antisense strand to SEQ ID NO: 305308
ccuuacaugagcuaaauug

SEQ ID NO: 305310 - RNA, 19 nt, Artificial Sequence
  Description of Artificial Sequence: Synthetic oligonucleotide
  Sense strand starting at position 2106 of SEQ ID NO: 3922
cacagcugucauggaguga

SEQ ID NO: 305311 - RNA, 19 nt, Artificial Sequence
  Description of Artificial Sequence: Synthetic oligonucleotide
  Antisense strand to SEQ ID NO: 305310
ucacuccaugacagcugug

SEQ ID NO: 305312 - RNA, 19 nt, Artificial Sequence
  Description of Artificial Sequence: Synthetic oligonucleotide
  Sense strand starting at position 2110 of SEQ ID NO: 3922
gcugucauggagugaguga

SEQ ID NO: 305313 - RNA, 19 nt, Artificial Sequence
  Description of Artificial Sequence: Synthetic oligonucleotide
  Antisense strand to SEQ ID NO: 305312
ucacucacuccaugacagc

SEQ ID NO: 305314 - RNA, 19 nt, Artificial Sequence
  Description of Artificial Sequence: Synthetic oligonucleotide
  Sense strand starting at position 2148 of SEQ ID NO: 3922
gggugacucccuugagcaa

SEQ ID NO: 305315 - RNA, 19 nt, Artificial Sequence
  Description of Artificial Sequence: Synthetic oligonucleotide
  Antisense strand to SEQ ID NO: 305314
uugcucaagggagucaccc

SEQ ID NO: 305316 - RNA, 19 nt, Artificial Sequence
  Description of Artificial Sequence: Synthetic oligonucleotide
  Sense strand starting at position 2184 of SEQ ID NO: 3922
acugcuuacagugaaaggu

SEQ ID NO: 305317 - RNA, 19 nt, Artificial Sequence
  Description of Artificial Sequence: Synthetic oligonucleotide
  Antisense strand to SEQ ID NO: 305316
accuuucacuguaagcagu

SEQ ID NO: 305318 - RNA, 19 nt, Artificial Sequence
  Description of Artificial Sequence: Synthetic oligonucleotide
  Sense strand starting at position 2272 of SEQ ID NO: 3922
gcccuucuuccaggacagu

SEQ ID NO: 305319 - RNA, 19 nt, Artificial Sequence
  Description of Artificial Sequence: Synthetic oligonucleotide
  Antisense strand to SEQ ID NO: 305318
acuguccuggaagaagggc

SEQ ID NO: 305320 - RNA, 19 nt, Artificial Sequence
  Description of Artificial Sequence: Synthetic oligonucleotide
  Sense strand starting at position 2300 of SEQ ID NO: 3922
ucuaaaucugccuguguga

SEQ ID NO: 305321 - RNA, 19 nt, Artificial Sequence
  Description of Artificial Sequence: Synthetic oligonucleotide
  Antisense strand to SEQ ID NO: 305320
ucacacaggcagauuuaga

SEQ ID NO: 305322 - RNA, 19 nt, Artificial Sequence
  Description of Artificial Sequence: Synthetic oligonucleotide
  Sense strand starting at position 2302 of SEQ ID NO: 3922
uaaaucugccugugugaga

SEQ ID NO: 305323 - RNA, 19 nt, Artificial Sequence
  Description of Artificial Sequence: Synthetic oligonucleotide
  Antisense strand to SEQ ID NO: 305322
ucucacacaggcagauuua

SEQ ID NO: 305324 - RNA, 19 nt, Artificial Sequence
  Description of Artificial Sequence: Synthetic oligonucleotide
  Sense strand starting at position 2315 of SEQ ID NO: 3922
gugagaggcacccauacau

SEQ ID NO: 305325 - RNA, 19 nt, Artificial Sequence
  Description of Artificial Sequence: Synthetic oligonucleotide
  Antisense strand to SEQ ID NO: 305324
auguaugggugccucucac

SEQ ID NO: 305326 - RNA, 19 nt, Artificial Sequence
  Description of Artificial Sequence: Synthetic oligonucleotide
  Sense strand starting at position 2422 of SEQ ID NO: 3922
uccucaagacugugugauu

SEQ ID NO: 305327 - RNA, 19 nt, Artificial Sequence
  Description of Artificial Sequence: Synthetic oligonucleotide
  Antisense strand to SEQ ID NO: 305326
aaucacacagucuugagga

SEQ ID NO: 305328 - RNA, 19 nt, Artificial Sequence
  Description of Artificial Sequence: Synthetic oligonucleotide
  Sense strand starting at position 2551 of SEQ ID NO: 3922
gcuagaaaugacuguugug

SEQ ID NO: 305329 - RNA, 19 nt, Artificial Sequence
  Description of Artificial Sequence: Synthetic oligonucleotide
  Antisense strand to SEQ ID NO: 305328
cacaacagucauuucuagc

SEQ ID NO: 305330 - RNA, 19 nt, Artificial Sequence
  Description of Artificial Sequence: Synthetic oligonucleotide
  Sense strand starting at position 2602 of SEQ ID NO: 3922
cgaggaaaugugggauucu

SEQ ID NO: 305331 - RNA, 19 nt, Artificial Sequence
  Description of Artificial Sequence: Synthetic oligonucleotide
  Antisense strand to SEQ ID NO: 305330
agaaucccacauuuccucg

SEQ ID NO: 305332 - RNA, 19 nt, Artificial Sequence
  Description of Artificial Sequence: Synthetic oligonucleotide
  Sense strand starting at position 2603 of SEQ ID NO: 3922
gaggaaaugugggauucug

SEQ ID NO: 305333 - RNA, 19 nt, Artificial Sequence
  Description of Artificial Sequence: Synthetic oligonucleotide
  Antisense strand to SEQ ID NO: 305332
cagaaucccacauuuccuc

SEQ ID NO: 305334 - RNA, 19 nt, Artificial Sequence
  Description of Artificial Sequence: Synthetic oligonucleotide
  Sense strand starting at position 2611 of SEQ ID NO: 3922
gugggauucugguccguga

SEQ ID NO: 305335 - RNA, 19 nt, Artificial Sequence
  Description of Artificial Sequence: Synthetic oligonucleotide
  Antisense strand to SEQ ID NO: 305334
ucacggaccagaaucccac

SEQ ID NO: 305336 - RNA, 19 nt, Artificial Sequence
  Description of Artificial Sequence: Synthetic oligonucleotide
  Sense strand starting at position 2613 of SEQ ID NO: 3922
gggauucugguccgugaac

SEQ ID NO: 305337 - RNA, 19 nt, Artificial Sequence
  Description of Artificial Sequence: Synthetic oligonucleotide
  Antisense strand to SEQ ID NO: 305336
guucacggaccagaauccc

SEQ ID NO: 305338 - RNA, 19 nt, Artificial Sequence
  Description of Artificial Sequence: Synthetic oligonucleotide
  Sense strand starting at position 2614 of SEQ ID NO: 3922
ggauucugguccgugaaca

SEQ ID NO: 305339 - RNA, 19 nt, Artificial Sequence
  Description of Artificial Sequence: Synthetic oligonucleotide
  Antisense strand to SEQ ID NO: 305338
uguucacggaccagaaucc

SEQ ID NO: 305340 - RNA, 19 nt, Artificial Sequence
  Description of Artificial Sequence: Synthetic oligonucleotide
  Sense strand starting at position 2615 of SEQ ID NO: 3922
gauucugguccgugaacac

SEQ ID NO: 305341 - RNA, 19 nt, Artificial Sequence
  Description of Artificial Sequence: Synthetic oligonucleotide
  Antisense strand to SEQ ID NO: 305340
guguucacggaccagaauc

SEQ ID NO: 305342 - RNA, 19 nt, Artificial Sequence
  Description of Artificial Sequence: Synthetic oligonucleotide
  Sense strand starting at position 2655 of SEQ ID NO: 3922
acucaaauuuguuaggaaa

SEQ ID NO: 305343 - RNA, 19 nt, Artificial Sequence
  Description of Artificial Sequence: Synthetic oligonucleotide
  Antisense strand to SEQ ID NO: 305342
uuuccuaacaaauuugagu

SEQ ID NO: 305344 - RNA, 19 nt, Artificial Sequence
  Description of Artificial Sequence: Synthetic oligonucleotide
  Sense strand starting at position 2658 of SEQ ID NO: 3922
caaauuuguuaggaaauug

SEQ ID NO: 305345 - RNA, 19 nt, Artificial Sequence
  Description of Artificial Sequence: Synthetic oligonucleotide
  Antisense strand to SEQ ID NO: 305344
caauuuccuaacaaauuug

SEQ ID NO: 305346 - RNA, 19 nt, Artificial Sequence
  Description of Artificial Sequence: Synthetic oligonucleotide
  Sense strand starting at position 2857 of SEQ ID NO: 3922
acuugugagcacuggucuu

SEQ ID NO: 305347 - RNA, 19 nt, Artificial Sequence
  Description of Artificial Sequence: Synthetic oligonucleotide
  Antisense strand to SEQ ID NO: 305346
aagaccagugcucacaagu

SEQ ID NO: 305348 - RNA, 19 nt, Artificial Sequence
  Description of Artificial Sequence: Synthetic oligonucleotide
  Sense strand starting at position 2984 of SEQ ID NO: 3922
aauauaugccuugggauug

SEQ ID NO: 305349 - RNA, 19 nt, Artificial Sequence
  Description of Artificial Sequence: Synthetic oligonucleotide
  Antisense strand to SEQ ID NO: 305348
caaucccaaggcauauauu

SEQ ID NO: 305350 - RNA, 19 nt, Artificial Sequence
  Description of Artificial Sequence: Synthetic oligonucleotide
  Sense strand starting at position 2990 of SEQ ID NO: 3922
ugccuugggauuggaugaa

SEQ ID NO: 305351 - RNA, 19 nt, Artificial Sequence
  Description of Artificial Sequence: Synthetic oligonucleotide
  Antisense strand to SEQ ID NO: 305350
uucauccaaucccaaggca

SEQ ID NO: 305352 - RNA, 19 nt, Artificial Sequence
  Description of Artificial Sequence: Synthetic oligonucleotide
  Sense strand starting at position 804 of SEQ ID NO: 3924
cgcaaacugcuguaugaga

SEQ ID NO: 305353 - RNA, 19 nt, Artificial Sequence
  Description of Artificial Sequence: Synthetic oligonucleotide
  Antisense strand to SEQ ID NO: 305352
ucucauacagcaguuugcg

SEQ ID NO: 305354 - RNA, 19 nt, Artificial Sequence
  Description of Artificial Sequence: Synthetic oligonucleotide
  Sense strand starting at position 806 of SEQ ID NO: 3924
caaacugcuguaugagaua

SEQ ID NO: 305355 - RNA, 19 nt, Artificial Sequence
  Description of Artificial Sequence: Synthetic oligonucleotide
  Antisense strand to SEQ ID NO: 305354
uaucucauacagcaguuug

SEQ ID NO: 305356 - RNA, 19 nt, Artificial Sequence
  Description of Artificial Sequence: Synthetic oligonucleotide
  Sense strand starting at position 1100 of SEQ ID NO: 3924
guaacagagcgaugagacu

SEQ ID NO: 305357 - RNA, 19 nt, Artificial Sequence
  Description of Artificial Sequence: Synthetic oligonucleotide
  Antisense strand to SEQ ID NO: 305356
agucucaucgcucuguuac

SEQ ID NO: 305358 - RNA, 19 nt, Artificial Sequence
  Description of Artificial Sequence: Synthetic oligonucleotide
  Sense strand starting at position 1189 of SEQ ID NO: 3924
agaacuaggccuugcaaga

SEQ ID NO: 305359 - RNA, 19 nt, Artificial Sequence
  Description of Artificial Sequence: Synthetic oligonucleotide
  Antisense strand to SEQ ID NO: 305358
ucuugcaaggccuaguucu

SEQ ID NO: 305360 - RNA, 19 nt, Artificial Sequence
  Description of Artificial Sequence: Synthetic oligonucleotide
  Sense strand starting at position 1236 of SEQ ID NO: 3924
gacaguccuuggcuaaauc

SEQ ID NO: 305361 - RNA, 19 nt, Artificial Sequence
  Description of Artificial Sequence: Synthetic oligonucleotide
  Antisense strand to SEQ ID NO: 305360
gauuuagccaaggacuguc

SEQ ID NO: 305362 - RNA, 19 nt, Artificial Sequence
  Description of Artificial Sequence: Synthetic oligonucleotide
  Sense strand starting at position 1246 of SEQ ID NO: 3924
ggcuaaaucugacuuggag

SEQ ID NO: 305363 - RNA, 19 nt, Artificial Sequence
  Description of Artificial Sequence: Synthetic oligonucleotide
  Antisense strand to SEQ ID NO: 305362
cuccaagucagauuuagcc

SEQ ID NO: 305364 - RNA, 19 nt, Artificial Sequence
  Description of Artificial Sequence: Synthetic oligonucleotide
  Sense strand starting at position 1249 of SEQ ID NO: 3924
uaaaucugacuuggaguau

SEQ ID NO: 305365 - RNA, 19 nt, Artificial Sequence
  Description of Artificial Sequence: Synthetic oligonucleotide
  Antisense strand to SEQ ID NO: 305364
auacuccaagucagauuua

SEQ ID NO: 305366 - RNA, 19 nt, Artificial Sequence
  Description of Artificial Sequence: Synthetic oligonucleotide
  Sense strand starting at position 1544 of SEQ ID NO: 3924
ggugaaagauguguuguaa

SEQ ID NO: 305367 - RNA, 19 nt, Artificial Sequence
  Description of Artificial Sequence: Synthetic oligonucleotide
  Antisense strand to SEQ ID NO: 305366
uuacaacacaucuuucacc

SEQ ID NO: 305368 - RNA, 19 nt, Artificial Sequence
  Description of Artificial Sequence: Synthetic oligonucleotide
  Sense strand starting at position 1615 of SEQ ID NO: 3924
ugcuaaaugaggugucuga

SEQ ID NO: 305369 - RNA, 19 nt, Artificial Sequence
  Description of Artificial Sequence: Synthetic oligonucleotide
  Antisense strand to SEQ ID NO: 305368
ucagacaccucauuuagca

SEQ ID NO: 305370 - RNA, 19 nt, Artificial Sequence
  Description of Artificial Sequence: Synthetic oligonucleotide
  Sense strand starting at position 1619 of SEQ ID NO: 3924
aaaugaggugucugaucau

SEQ ID NO: 305371 - RNA, 19 nt, Artificial Sequence
  Description of Artificial Sequence: Synthetic oligonucleotide
  Antisense strand to SEQ ID NO: 305370
augaucagacaccucauuu

SEQ ID NO: 305372 - RNA, 19 nt, Artificial Sequence
  Description of Artificial Sequence: Synthetic oligonucleotide
  Sense strand starting at position 1648 of SEQ ID NO: 3924
augaacuacuucuuugagu

SEQ ID NO: 305373 - RNA, 19 nt, Artificial Sequence
  Description of Artificial Sequence: Synthetic oligonucleotide
  Antisense strand to SEQ ID NO: 305372
acucaaagaaguaguucau

SEQ ID NO: 305374 - RNA, 19 nt, Artificial Sequence
  Description of Artificial Sequence: Synthetic oligonucleotide
  Sense strand starting at position 1656 of SEQ ID NO: 3924
cuucuuugagucuagcaua

SEQ ID NO: 305375 - RNA, 19 nt, Artificial Sequence
  Description of Artificial Sequence: Synthetic oligonucleotide
  Antisense strand to SEQ ID NO: 305374
uaugcuagacucaaagaag

SEQ ID NO: 305376 - RNA, 19 nt, Artificial Sequence
  Description of Artificial Sequence: Synthetic oligonucleotide
  Sense strand starting at position 1862 of SEQ ID NO: 3924
uauugagucgucuuguggu

SEQ ID NO: 305377 - RNA, 19 nt, Artificial Sequence
  Description of Artificial Sequence: Synthetic oligonucleotide
  Antisense strand to SEQ ID NO: 305376
accacaagacgacucaaua

SEQ ID NO: 305378 - RNA, 19 nt, Artificial Sequence
  Description of Artificial Sequence: Synthetic oligonucleotide
  Sense strand starting at position 2135 of SEQ ID NO: 3924
gucucacugaacugugaag

SEQ ID NO: 305379 - RNA, 19 nt, Artificial Sequence
  Description of Artificial Sequence: Synthetic oligonucleotide
  Antisense strand to SEQ ID NO: 305378
cuucacaguucagugagac

SEQ ID NO: 305380 - RNA, 19 nt, Artificial Sequence
  Description of Artificial Sequence: Synthetic oligonucleotide
  Sense strand starting at position 2144 of SEQ ID NO: 3924
aacugugaagucugacuga

SEQ ID NO: 305381 - RNA, 19 nt, Artificial Sequence
  Description of Artificial Sequence: Synthetic oligonucleotide
  Antisense strand to SEQ ID NO: 305380
ucagucagacuucacaguu

SEQ ID NO: 305382 - RNA, 19 nt, Artificial Sequence
  Description of Artificial Sequence: Synthetic oligonucleotide
  Sense strand starting at position 2147 of SEQ ID NO: 3924
ugugaagucugacugauca

SEQ ID NO: 305383 - RNA, 19 nt, Artificial Sequence
  Description of Artificial Sequence: Synthetic oligonucleotide
  Antisense strand to SEQ ID NO: 305382
ugaucagucagacuucaca

SEQ ID NO: 305384 - RNA, 19 nt, Artificial Sequence
  Description of Artificial Sequence: Synthetic oligonucleotide
  Sense strand starting at position 2151 of SEQ ID NO: 3924
aagucugacugaucaacgu

SEQ ID NO: 305385 - RNA, 19 nt, Artificial Sequence
  Description of Artificial Sequence: Synthetic oligonucleotide
  Antisense strand to SEQ ID NO: 305384
acguugaucagucagacuu

SEQ ID NO: 305386 - RNA, 19 nt, Artificial Sequence
  Description of Artificial Sequence: Synthetic oligonucleotide
  Sense strand starting at position 2323 of SEQ ID NO: 3924
uaguauugugccuaaacag

SEQ ID NO: 305387 - RNA, 19 nt, Artificial Sequence
  Description of Artificial Sequence: Synthetic oligonucleotide
  Antisense strand to SEQ ID NO: 305386
cuguuuaggcacaauacua

SEQ ID NO: 305388 - RNA, 19 nt, Artificial Sequence
  Description of Artificial Sequence: Synthetic oligonucleotide
  Sense strand starting at position 2374 of SEQ ID NO: 3924
aagucuugugacggaauag

SEQ ID NO: 305389 - RNA, 19 nt, Artificial Sequence
  Description of Artificial Sequence: Synthetic oligonucleotide
  Antisense strand to SEQ ID NO: 305388
cuauuccgucacaagacuu

SEQ ID NO: 305390 - RNA, 19 nt, Artificial Sequence
  Description of Artificial Sequence: Synthetic oligonucleotide
  Sense strand starting at position 2389 of SEQ ID NO: 3924
auagguguuaaagaaguuu

SEQ ID NO: 305391 - RNA, 19 nt, Artificial Sequence
  Description of Artificial Sequence: Synthetic oligonucleotide
  Antisense strand to SEQ ID NO: 305390
aaacuucuuuaacaccuau

SEQ ID NO: 305392 - RNA, 19 nt, Artificial Sequence
  Description of Artificial Sequence: Synthetic oligonucleotide
  Sense strand starting at position 2425 of SEQ ID NO: 3924
agccucuaagccuaggauu

SEQ ID NO: 305393 - RNA, 19 nt, Artificial Sequence
  Description of Artificial Sequence: Synthetic oligonucleotide
  Antisense strand to SEQ ID NO: 305392
aauccuaggcuuagaggcu

SEQ ID NO: 305394 - RNA, 19 nt, Artificial Sequence
  Description of Artificial Sequence: Synthetic oligonucleotide
  Sense strand starting at position 2891 of SEQ ID NO: 3924
gaguaaauugagcaauggu

SEQ ID NO: 305395 - RNA, 19 nt, Artificial Sequence
  Description of Artificial Sequence: Synthetic oligonucleotide
  Antisense strand to SEQ ID NO: 305394
accauugcucaauuuacuc

SEQ ID NO: 305396 - RNA, 19 nt, Artificial Sequence
  Description of Artificial Sequence: Synthetic oligonucleotide
  Sense strand starting at position 2907 of SEQ ID NO: 3924
ggucucagauauucuggau

SEQ ID NO: 305397 - RNA, 19 nt, Artificial Sequence
  Description of Artificial Sequence: Synthetic oligonucleotide
  Antisense strand to SEQ ID NO: 305396
auccagaauaucugagacc

SEQ ID NO: 305398 - RNA, 19 nt, Artificial Sequence
  Description of Artificial Sequence: Synthetic oligonucleotide
  Sense strand starting at position 2945 of SEQ ID NO: 3924
ggccgugaccuuggacaaa

SEQ ID NO: 305399 - RNA, 19 nt, Artificial Sequence
  Description of Artificial Sequence: Synthetic oligonucleotide
  Antisense strand to SEQ ID NO: 305398
uuuguccaaggucacggcc

SEQ ID NO: 305400 - RNA, 19 nt, Artificial Sequence
  Description of Artificial Sequence: Synthetic oligonucleotide
  Sense strand starting at position 3015 of SEQ ID NO: 3924
ucaacagaguugucagcaa

SEQ ID NO: 305401 - RNA, 19 nt, Artificial Sequence
  Description of Artificial Sequence: Synthetic oligonucleotide
  Antisense strand to SEQ ID NO: 305400
uugcugacaacucuguuga

SEQ ID NO: 305402 - RNA, 19 nt, Artificial Sequence
  Description of Artificial Sequence: Synthetic oligonucleotide
  Sense strand starting at position 3019 of SEQ ID NO: 3924
cagaguugucagcaacaag

SEQ ID NO: 305403 - RNA, 19 nt, Artificial Sequence
  Description of Artificial Sequence: Synthetic oligonucleotide
  Antisense strand to SEQ ID NO: 305402
cuuguugcugacaacucug

SEQ ID NO: 305404 - RNA, 19 nt, Artificial Sequence
  Description of Artificial Sequence: Synthetic oligonucleotide
  Sense strand starting at position 3022 of SEQ ID NO: 3924
aguugucagcaacaagaaa

SEQ ID NO: 305405 - RNA, 19 nt, Artificial Sequence
  Description of Artificial Sequence: Synthetic oligonucleotide
  Antisense strand to SEQ ID NO: 305404
uuucuuguugcugacaacu

SEQ ID NO: 305406 - RNA, 19 nt, Artificial Sequence
  Description of Artificial Sequence: Synthetic oligonucleotide
  Sense strand starting at position 3106 of SEQ ID NO: 3924
agaaaugauugugcagaua

SEQ ID NO: 305407 - RNA, 19 nt, Artificial Sequence
  Description of Artificial Sequence: Synthetic oligonucleotide
  Antisense strand to SEQ ID NO: 305406
uaucugcacaaucauuucu

SEQ ID NO: 305408 - RNA, 19 nt, Artificial Sequence
  Description of Artificial Sequence: Synthetic oligonucleotide
  Sense strand starting at position 3263 of SEQ ID NO: 3924
acuucuauuuacugggaaa

SEQ ID NO: 305409 - RNA, 19 nt, Artificial Sequence
  Description of Artificial Sequence: Synthetic oligonucleotide
  Antisense strand to SEQ ID NO: 305408
uuucccaguaaauagaagu

SEQ ID NO: 305410 - RNA, 19 nt, Artificial Sequence
  Description of Artificial Sequence: Synthetic oligonucleotide
  Sense strand starting at position 3313 of SEQ ID NO: 3924
ugccaaagagaaugcaaau

SEQ ID NO: 305411 - RNA, 19 nt, Artificial Sequence
  Description of Artificial Sequence: Synthetic oligonucleotide
  Antisense strand to SEQ ID NO: 305410
auuugcauucucuuuggca

SEQ ID NO: 305412 - RNA, 19 nt, Artificial Sequence
  Description of Artificial Sequence: Synthetic oligonucleotide
  Sense strand starting at position 3411 of SEQ ID NO: 3924
uggguuauauuguugauac

SEQ ID NO: 305413 - RNA, 19 nt, Artificial Sequence
  Description of Artificial Sequence: Synthetic oligonucleotide
  Antisense strand to SEQ ID NO: 305412
guaucaacaauauaaccca

SEQ ID NO: 305414 - RNA, 19 nt, Artificial Sequence
  Description of Artificial Sequence: Synthetic oligonucleotide
  Sense strand starting at position 3413 of SEQ ID NO: 3924
gguuauauuguugauacaa

SEQ ID NO: 305415 - RNA, 19 nt, Artificial Sequence
  Description of Artificial Sequence: Synthetic oligonucleotide
  Antisense strand to SEQ ID NO: 305414
uuguaucaacaauauaacc

SEQ ID NO: 305416 - RNA, 19 nt, Artificial Sequence
  Description of Artificial Sequence: Synthetic oligonucleotide
  Sense strand starting at position 3594 of SEQ ID NO: 3924
uaaacuuaugcguacugau

SEQ ID NO: 305417 - RNA, 19 nt, Artificial Sequence
  Description of Artificial Sequence: Synthetic oligonucleotide
  Antisense strand to SEQ ID NO: 305416
aucaguacgcauaaguuua

SEQ ID NO: 305418 - RNA, 19 nt, Artificial Sequence
  Description of Artificial Sequence: Synthetic oligonucleotide
  Sense strand starting at position 3602 of SEQ ID NO: 3924
ugcguacugauauggaaag

SEQ ID NO: 305419 - RNA, 19 nt, Artificial Sequence
  Description of Artificial Sequence: Synthetic oligonucleotide
  Antisense strand to SEQ ID NO: 305418
cuuuccauaucaguacgca

SEQ ID NO: 305420 - RNA, 19 nt, Artificial Sequence
  Description of Artificial Sequence: Synthetic oligonucleotide
  Sense strand starting at position 3630 of SEQ ID NO: 3924
ucucauuuguguguaugua

SEQ ID NO: 305421 - RNA, 19 nt, Artificial Sequence
  Description of Artificial Sequence: Synthetic oligonucleotide
  Antisense strand to SEQ ID NO: 305420
uacauacacacaaaugaga

SEQ ID NO: 305422 - RNA, 19 nt, Artificial Sequence
  Description of Artificial Sequence: Synthetic oligonucleotide
  Sense strand starting at position 3714 of SEQ ID NO: 3924
ugaaacauacuucguuaau

SEQ ID NO: 305423 - RNA, 19 nt, Artificial Sequence
  Description of Artificial Sequence: Synthetic oligonucleotide
  Antisense strand to SEQ ID NO: 305422
auuaacgaaguauguuuca

SEQ ID NO: 305424 - RNA, 19 nt, Artificial Sequence
  Description of Artificial Sequence: Synthetic oligonucleotide
  Sense strand starting at position 3727 of SEQ ID NO: 3924
guuaauaaugacugccuuu

SEQ ID NO: 305425 - RNA, 19 nt, Artificial Sequence
  Description of Artificial Sequence: Synthetic oligonucleotide
  Antisense strand to SEQ ID NO: 305424
aaaggcagucauuauuaac

SEQ ID NO: 305426 - RNA, 19 nt, Artificial Sequence
  Description of Artificial Sequence: Synthetic oligonucleotide
  Sense strand starting at position 3799 of SEQ ID NO: 3924
cauugagacugauugucaa

SEQ ID NO: 305427 - RNA, 19 nt, Artificial Sequence
  Description of Artificial Sequence: Synthetic oligonucleotide
  Antisense strand to SEQ ID NO: 305426
uugacaaucagucucaaug

SEQ ID NO: 305428 - RNA, 19 nt, Artificial Sequence
  Description of Artificial Sequence: Synthetic oligonucleotide
  Sense strand starting at position 3803 of SEQ ID NO: 3924
gagacugauugucaauuua

SEQ ID NO: 305429 - RNA, 19 nt, Artificial Sequence
  Description of Artificial Sequence: Synthetic oligonucleotide
  Antisense strand to SEQ ID NO: 305428
uaaauugacaaucagucuc

SEQ ID NO: 305430 - RNA, 19 nt, Artificial Sequence
  Description of Artificial Sequence: Synthetic oligonucleotide
  Sense strand starting at position 3846 of SEQ ID NO: 3924
gcauaacagcuuuaaguac

SEQ ID NO: 305431 - RNA, 19 nt, Artificial Sequence
  Description of Artificial Sequence: Synthetic oligonucleotide
  Antisense strand to SEQ ID NO: 305430
guacuuaaagcuguuaugc

SEQ ID NO: 305432 - RNA, 19 nt, Artificial Sequence
  Description of Artificial Sequence: Synthetic oligonucleotide
  Sense strand starting at position 211 of SEQ ID NO: 3923
aggagacucugagacucaa

SEQ ID NO: 305433 - RNA, 19 nt, Artificial Sequence
  Description of Artificial Sequence: Synthetic oligonucleotide
  Antisense strand to SEQ ID NO: 305432
uugagucucagagucuccu

SEQ ID NO: 305434 - RNA, 19 nt, Artificial Sequence
  Description of Artificial Sequence: Synthetic oligonucleotide
  Sense strand starting at position 226 of SEQ ID NO: 3923
ucaacuugcuaggucuuua

SEQ ID NO: 305435 - RNA, 19 nt, Artificial Sequence
  Description of Artificial Sequence: Synthetic oligonucleotide
  Antisense strand to SEQ ID NO: 305434
uaaagaccuagcaaguuga

SEQ ID NO: 305436 - RNA, 19 nt, Artificial Sequence
  Description of Artificial Sequence: Synthetic oligonucleotide
  Sense strand starting at position 325 of SEQ ID NO: 3923
cggaguaaagcccggagau

SEQ ID NO: 305437 - RNA, 19 nt, Artificial Sequence
  Description of Artificial Sequence: Synthetic oligonucleotide
  Antisense strand to SEQ ID NO: 305436
aucuccgggcuuuacuccg

SEQ ID NO: 305438 - RNA, 19 nt, Artificial Sequence
  Description of Artificial Sequence: Synthetic oligonucleotide
  Sense strand starting at position 326 of SEQ ID NO: 3923
ggaguaaagcccggagauc

SEQ ID NO: 305439 - RNA, 19 nt, Artificial Sequence
  Description of Artificial Sequence: Synthetic oligonucleotide
  Antisense strand to SEQ ID NO: 305438
gaucuccgggcuuuacucc

SEQ ID NO: 305440 - RNA, 19 nt, Artificial Sequence
  Description of Artificial Sequence: Synthetic oligonucleotide
  Sense strand starting at position 427 of SEQ ID NO: 3923
acggauucacugcgcuauu

SEQ ID NO: 305441 - RNA, 19 nt, Artificial Sequence
  Description of Artificial Sequence: Synthetic oligonucleotide
  Antisense strand to SEQ ID NO: 305440
aauagcgcagugaauccgu

SEQ ID NO: 305442 - RNA, 19 nt, Artificial Sequence
  Description of Artificial Sequence: Synthetic oligonucleotide
  Sense strand starting at position 428 of SEQ ID NO: 3923
cggauucacugcgcuauua

SEQ ID NO: 305443 - RNA, 19 nt, Artificial Sequence
  Description of Artificial Sequence: Synthetic oligonucleotide
  Antisense strand to SEQ ID NO: 305442
uaauagcgcagugaauccg

SEQ ID NO: 305444 - RNA, 19 nt, Artificial Sequence
  Description of Artificial Sequence: Synthetic oligonucleotide
  Sense strand starting at position 601 of SEQ ID NO: 3923
caacauuugucuuaagggu

SEQ ID NO: 305445 - RNA, 19 nt, Artificial Sequence
  Description of Artificial Sequence: Synthetic oligonucleotide
  Antisense strand to SEQ ID NO: 305444
acccuuaagacaaauguug

SEQ ID NO: 305446 - RNA, 19 nt, Artificial Sequence
  Description of Artificial Sequence: Synthetic oligonucleotide
  Sense strand starting at position 638 of SEQ ID NO: 3923
guuaucuccucaccacgua

SEQ ID NO: 305447 - RNA, 19 nt, Artificial Sequence
  Description of Artificial Sequence: Synthetic oligonucleotide
  Antisense strand to SEQ ID NO: 305446
uacguggugaggagauaac

SEQ ID NO: 305448 - RNA, 19 nt, Artificial Sequence
  Description of Artificial Sequence: Synthetic oligonucleotide
  Sense strand starting at position 765 of SEQ ID NO: 3923
auuucuuauucugaggaag

SEQ ID NO: 305449 - RNA, 19 nt, Artificial Sequence
  Description of Artificial Sequence: Synthetic oligonucleotide
  Antisense strand to SEQ ID NO: 305448
cuuccucagaauaagaaau

SEQ ID NO: 305450 - RNA, 19 nt, Artificial Sequence
  Description of Artificial Sequence: Synthetic oligonucleotide
  Sense strand starting at position 842 of SEQ ID NO: 3923
ccucuaacuuguuccugua

SEQ ID NO: 305451 - RNA, 19 nt, Artificial Sequence
  Description of Artificial Sequence: Synthetic oligonucleotide
  Antisense strand to SEQ ID NO: 305450
uacaggaacaaguuagagg

SEQ ID NO: 305452 - RNA, 19 nt, Artificial Sequence
  Description of Artificial Sequence: Synthetic oligonucleotide
  Sense strand starting at position 907 of SEQ ID NO: 3923
auggacaaacguuguaaau

SEQ ID NO: 305453 - RNA, 19 nt, Artificial Sequence
  Description of Artificial Sequence: Synthetic oligonucleotide
  Antisense strand to SEQ ID NO: 305452
auuuacaacguuuguccau

SEQ ID NO: 305454 - RNA, 19 nt, Artificial Sequence
  Description of Artificial Sequence: Synthetic oligonucleotide
  Sense strand starting at position 909 of SEQ ID NO: 3923
ggacaaacguuguaaauaa

SEQ ID NO: 305455 - RNA, 19 nt, Artificial Sequence
  Description of Artificial Sequence: Synthetic oligonucleotide
  Antisense strand to SEQ ID NO: 305454
uuauuuacaacguuugucc

SEQ ID NO: 305456 - RNA, 19 nt, Artificial Sequence
  Description of Artificial Sequence: Synthetic oligonucleotide
  Sense strand starting at position 953 of SEQ ID NO: 3923
auaaauuaaucgccugacu

SEQ ID NO: 305457 - RNA, 19 nt, Artificial Sequence
  Description of Artificial Sequence: Synthetic oligonucleotide
  Antisense strand to SEQ ID NO: 305456
agucaggcgauuaauuuau

SEQ ID NO: 305458 - RNA, 19 nt, Artificial Sequence
  Description of Artificial Sequence: Synthetic oligonucleotide
  Sense strand starting at position 969 of SEQ ID NO: 3923
acucgcucugaaugcuaau

SEQ ID NO: 305459 - RNA, 19 nt, Artificial Sequence
  Description of Artificial Sequence: Synthetic oligonucleotide
  Antisense strand to SEQ ID NO: 305458
auuagcauucagagcgagu

SEQ ID NO: 305460 - RNA, 19 nt, Artificial Sequence
  Description of Artificial Sequence: Synthetic oligonucleotide
  Sense strand starting at position 1083 of SEQ ID NO: 3923
cuauuccucucagucaagu

SEQ ID NO: 305461 - RNA, 19 nt, Artificial Sequence
  Description of Artificial Sequence: Synthetic oligonucleotide
  Antisense strand to SEQ ID NO: 305460
acuugacugagaggaauag

SEQ ID NO: 305462 - RNA, 19 nt, Artificial Sequence
  Description of Artificial Sequence: Synthetic oligonucleotide
  Sense strand starting at position 1096 of SEQ ID NO: 3923
ucaaguuucucggcuucuu

SEQ ID NO: 305463 - RNA, 19 nt, Artificial Sequence
  Description of Artificial Sequence: Synthetic oligonucleotide
  Antisense strand to SEQ ID NO: 305462
aagaagccgagaaacuuga

SEQ ID NO: 305464 - RNA, 19 nt, Artificial Sequence
  Description of Artificial Sequence: Synthetic oligonucleotide
  Sense strand starting at position 2197 of SEQ ID NO: 3923
gcccgaucccuucgaggga

SEQ ID NO: 305465 - RNA, 19 nt, Artificial Sequence
  Description of Artificial Sequence: Synthetic oligonucleotide
  Antisense strand to SEQ ID NO: 305464
ucccucgaagggaucgggc

SEQ ID NO: 305466 - RNA, 19 nt, Artificial Sequence
  Description of Artificial Sequence: Synthetic oligonucleotide
  Sense strand starting at position 2231 of SEQ ID NO: 3923
uggagaucuacuugguauc

SEQ ID NO: 305467 - RNA, 19 nt, Artificial Sequence
  Description of Artificial Sequence: Synthetic oligonucleotide
  Antisense strand to SEQ ID NO: 305466
gauaccaaguagaucucca

SEQ ID NO: 305468 - RNA, 19 nt, Artificial Sequence
  Description of Artificial Sequence: Synthetic oligonucleotide
  Sense strand starting at position 2337 of SEQ ID NO: 3923
ggaucaggguucccuaaga

SEQ ID NO: 305469 - RNA, 19 nt, Artificial Sequence
  Description of Artificial Sequence: Synthetic oligonucleotide
  Antisense strand to SEQ ID NO: 305468
ucuuagggaacccugaucc

SEQ ID NO: 305470 - RNA, 19 nt, Artificial Sequence
  Description of Artificial Sequence: Synthetic oligonucleotide
  Sense strand starting at position 2402 of SEQ ID NO: 3923
agcucauaagcgugguuca

SEQ ID NO: 305471 - RNA, 19 nt, Artificial Sequence
  Description of Artificial Sequence: Synthetic oligonucleotide
  Antisense strand to SEQ ID NO: 305470
ugaaccacgcuuaugagcu

SEQ ID NO: 305472 - RNA, 19 nt, Artificial Sequence
  Description of Artificial Sequence: Synthetic oligonucleotide
  Sense strand starting at position 2403 of SEQ ID NO: 3923
gcucauaagcgugguucaa

SEQ ID NO: 305473 - RNA, 19 nt, Artificial Sequence
  Description of Artificial Sequence: Synthetic oligonucleotide
  Antisense strand to SEQ ID NO: 305472
uugaaccacgcuuaugagc

SEQ ID NO: 305474 - RNA, 19 nt, Artificial Sequence
  Description of Artificial Sequence: Synthetic oligonucleotide
  Sense strand starting at position 2861 of SEQ ID NO: 3923
ccggcuucuuacccguaga

SEQ ID NO: 305475 - RNA, 19 nt, Artificial Sequence
  Description of Artificial Sequence: Synthetic oligonucleotide
  Antisense strand to SEQ ID NO: 305474
ucuacggguaagaagccgg

SEQ ID NO: 305476 - RNA, 19 nt, Artificial Sequence
  Description of Artificial Sequence: Synthetic oligonucleotide
  Sense strand starting at position 2864 of SEQ ID NO: 3923
gcuucuuacccguagaguu

SEQ ID NO: 305477 - RNA, 19 nt, Artificial Sequence
  Description of Artificial Sequence: Synthetic oligonucleotide
  Antisense strand to SEQ ID NO: 305476
aacucuacggguaagaagc

SEQ ID NO: 305478 - RNA, 19 nt, Artificial Sequence
  Description of Artificial Sequence: Synthetic oligonucleotide
  Sense strand starting at position 3019 of SEQ ID NO: 3923
uuuccaggauaggaauuaa

SEQ ID NO: 305479 - RNA, 19 nt, Artificial Sequence
  Description of Artificial Sequence: Synthetic oligonucleotide
  Antisense strand to SEQ ID NO: 305478
uuaauuccuauccuggaaa

SEQ ID NO: 305480 - RNA, 19 nt, Artificial Sequence
  Description of Artificial Sequence: Synthetic oligonucleotide
  Sense strand starting at position 3029 of SEQ ID NO: 3923
aggaauuaaucauggagaa

SEQ ID NO: 305481 - RNA, 19 nt, Artificial Sequence
  Description of Artificial Sequence: Synthetic oligonucleotide
  Antisense strand to SEQ ID NO: 305480
uucuccaugauuaauuccu

SEQ ID NO: 305482 - RNA, 19 nt, Artificial Sequence
  Description of Artificial Sequence: Synthetic oligonucleotide
  Sense strand starting at position 3100 of SEQ ID NO: 3923
aguuauuucuaguagcaac

SEQ ID NO: 305483 - RNA, 19 nt, Artificial Sequence
  Description of Artificial Sequence: Synthetic oligonucleotide
  Antisense strand to SEQ ID NO: 305482
guugcuacuagaaauaacu

SEQ ID NO: 305484 - RNA, 19 nt, Artificial Sequence
  Description of Artificial Sequence: Synthetic oligonucleotide
  Sense strand starting at position 3250 of SEQ ID NO: 3923
gaccgaggauuauauuauc

SEQ ID NO: 305485 - RNA, 19 nt, Artificial Sequence
  Description of Artificial Sequence: Synthetic oligonucleotide
  Antisense strand to SEQ ID NO: 305484
gauaauauaauccucgguc

SEQ ID NO: 305486 - RNA, 19 nt, Artificial Sequence
  Description of Artificial Sequence: Synthetic oligonucleotide
  Sense strand starting at position 3271 of SEQ ID NO: 3923
caaaguaaccaucggccua

SEQ ID NO: 305487 - RNA, 19 nt, Artificial Sequence
  Description of Artificial Sequence: Synthetic oligonucleotide
  Antisense strand to SEQ ID NO: 305486
uaggccgaugguuacuuug

SEQ ID NO: 305488 - RNA, 19 nt, Artificial Sequence
  Description of Artificial Sequence: Synthetic oligonucleotide
  Sense strand starting at position 3296 of SEQ ID NO: 3923
ugccuacuuugguuauuga

SEQ ID NO: 305489 - RNA, 19 nt, Artificial Sequence
  Description of Artificial Sequence: Synthetic oligonucleotide
  Antisense strand to SEQ ID NO: 305488
ucaauaaccaaaguaggca

SEQ ID NO: 305490 - RNA, 19 nt, Artificial Sequence
  Description of Artificial Sequence: Synthetic oligonucleotide
  Sense strand starting at position 3297 of SEQ ID NO: 3923
gccuacuuugguuauugaa

SEQ ID NO: 305491 - RNA, 19 nt, Artificial Sequence
  Description of Artificial Sequence: Synthetic oligonucleotide
  Antisense strand to SEQ ID NO: 305490
uucaauaaccaaaguaggc

SEQ ID NO: 305492 - RNA, 19 nt, Artificial Sequence
  Description of Artificial Sequence: Synthetic oligonucleotide
  Sense strand starting at position 3378 of SEQ ID NO: 3923
ggaagacguuucuaauccu

SEQ ID NO: 305493 - RNA, 19 nt, Artificial Sequence
  Description of Artificial Sequence: Synthetic oligonucleotide
  Antisense strand to SEQ ID NO: 305492
aggauuagaaacgucuucc

SEQ ID NO: 305494 - RNA, 19 nt, Artificial Sequence
  Description of Artificial Sequence: Synthetic oligonucleotide
  Sense strand starting at position 3387 of SEQ ID NO: 3923
uucuaauccuggcugaguu

SEQ ID NO: 305495 - RNA, 19 nt, Artificial Sequence
  Description of Artificial Sequence: Synthetic oligonucleotide
  Antisense strand to SEQ ID NO: 305494
aacucagccaggauuagaa

SEQ ID NO: 305496 - RNA, 19 nt, Artificial Sequence
  Description of Artificial Sequence: Synthetic oligonucleotide
  Sense strand starting at position 3388 of SEQ ID NO: 3923
ucuaauccuggcugaguuu

SEQ ID NO: 305497 - RNA, 19 nt, Artificial Sequence
  Description of Artificial Sequence: Synthetic oligonucleotide
  Antisense strand to SEQ ID NO: 305496
aaacucagccaggauuaga

SEQ ID NO: 305498 - RNA, 19 nt, Artificial Sequence
  Description of Artificial Sequence: Synthetic oligonucleotide
  Sense strand starting at position 3389 of SEQ ID NO: 3923
cuaauccuggcugaguuua

SEQ ID NO: 305499 - RNA, 19 nt, Artificial Sequence
  Description of Artificial Sequence: Synthetic oligonucleotide
  Antisense strand to SEQ ID NO: 305498
uaaacucagccaggauuag

SEQ ID NO: 305500 - RNA, 19 nt, Artificial Sequence
  Description of Artificial Sequence: Synthetic oligonucleotide
  Sense strand starting at position 3400 of SEQ ID NO: 3923
ugaguuuacgccugucacu

SEQ ID NO: 305501 - RNA, 19 nt, Artificial Sequence
  Description of Artificial Sequence: Synthetic oligonucleotide
  Antisense strand to SEQ ID NO: 305500
agugacaggcguaaacuca

SEQ ID NO: 305502 - RNA, 19 nt, Artificial Sequence
  Description of Artificial Sequence: Synthetic oligonucleotide
  Sense strand starting at position 3406 of SEQ ID NO: 3923
uacgccugucacugaguua

SEQ ID NO: 305503 - RNA, 19 nt, Artificial Sequence
  Description of Artificial Sequence: Synthetic oligonucleotide
  Antisense strand to SEQ ID NO: 305502
uaacucagugacaggcgua

SEQ ID NO: 305504 - RNA, 19 nt, Artificial Sequence
  Description of Artificial Sequence: Synthetic oligonucleotide
  Sense strand starting at position 3407 of SEQ ID NO: 3923
acgccugucacugaguuau

SEQ ID NO: 305505 - RNA, 19 nt, Artificial Sequence
  Description of Artificial Sequence: Synthetic oligonucleotide
  Antisense strand to SEQ ID NO: 305504
auaacucagugacaggcgu

SEQ ID NO: 305506 - RNA, 19 nt, Artificial Sequence
  Description of Artificial Sequence: Synthetic oligonucleotide
  Sense strand starting at position 3409 of SEQ ID NO: 3923
gccugucacugaguuauuc

SEQ ID NO: 305507 - RNA, 19 nt, Artificial Sequence
  Description of Artificial Sequence: Synthetic oligonucleotide
  Antisense strand to SEQ ID NO: 305506
gaauaacucagugacaggc

SEQ ID NO: 305508 - RNA, 19 nt, Artificial Sequence
  Description of Artificial Sequence: Synthetic oligonucleotide
  Sense strand starting at position 3507 of SEQ ID NO: 3923
auugaucauucccucaguu

SEQ ID NO: 305509 - RNA, 19 nt, Artificial Sequence
  Description of Artificial Sequence: Synthetic oligonucleotide
  Antisense strand to SEQ ID NO: 305508
aacugagggaaugaucaau

SEQ ID NO: 305510 - RNA, 19 nt, Artificial Sequence
  Description of Artificial Sequence: Synthetic oligonucleotide
  Sense strand starting at position 3777 of SEQ ID NO: 3923
cacauuuagugauguauga

SEQ ID NO: 305511 - RNA, 19 nt, Artificial Sequence
  Description of Artificial Sequence: Synthetic oligonucleotide
  Antisense strand to SEQ ID NO: 305510
ucauacaucacuaaaugug

SEQ ID NO: 305512 - RNA, 19 nt, Artificial Sequence
  Description of Artificial Sequence: Synthetic oligonucleotide
  Sense strand starting at position 28 of SEQ ID NO: 3925
aaguguaccuccuuggaga

SEQ ID NO: 305513 - RNA, 19 nt, Artificial Sequence
  Description of Artificial Sequence: Synthetic oligonucleotide
  Antisense strand to SEQ ID NO: 305512
ucuccaaggagguacacuu

SEQ ID NO: 305514 - RNA, 19 nt, Artificial Sequence
  Description of Artificial Sequence: Synthetic oligonucleotide
  Sense strand starting at position 62 of SEQ ID NO: 3925
ugacauaaaguaugcucau

SEQ ID NO: 305515 - RNA, 19 nt, Artificial Sequence
  Description of Artificial Sequence: Synthetic oligonucleotide
  Antisense strand to SEQ ID NO: 305514
augagcauacuuuauguca

SEQ ID NO: 305516 - RNA, 19 nt, Artificial Sequence
  Description of Artificial Sequence: Synthetic oligonucleotide
  Sense strand starting at position 197 of SEQ ID NO: 3925
gaauguaaggucuauguug

SEQ ID NO: 305517 - RNA, 19 nt, Artificial Sequence
  Description of Artificial Sequence: Synthetic oligonucleotide
  Antisense strand to SEQ ID NO: 305516
caacauagaccuuacauuc

SEQ ID NO: 305518 - RNA, 19 nt, Artificial Sequence
  Description of Artificial Sequence: Synthetic oligonucleotide
  Sense strand starting at position 254 of SEQ ID NO: 3925
cagugccuugaguauggaa

SEQ ID NO: 305519 - RNA, 19 nt, Artificial Sequence
  Description of Artificial Sequence: Synthetic oligonucleotide
  Antisense strand to SEQ ID NO: 305518
uuccauacucaaggcacug

SEQ ID NO: 305520 - RNA, 19 nt, Artificial Sequence
  Description of Artificial Sequence: Synthetic oligonucleotide
  Sense strand starting at position 273 of SEQ ID NO: 3925
ggcagucaauuugcugaau

SEQ ID NO: 305521 - RNA, 19 nt, Artificial Sequence
  Description of Artificial Sequence: Synthetic oligonucleotide
  Antisense strand to SEQ ID NO: 305520
auucagcaaauugacugcc

SEQ ID NO: 305522 - RNA, 19 nt, Artificial Sequence
  Description of Artificial Sequence: Synthetic oligonucleotide
  Sense strand starting at position 274 of SEQ ID NO: 3925
gcagucaauuugcugaaua

SEQ ID NO: 305523 - RNA, 19 nt, Artificial Sequence
  Description of Artificial Sequence: Synthetic oligonucleotide
  Antisense strand to SEQ ID NO: 305522
uauucagcaaauugacugc

SEQ ID NO: 305524 - RNA, 19 nt, Artificial Sequence
  Description of Artificial Sequence: Synthetic oligonucleotide
  Sense strand starting at position 330 of SEQ ID NO: 3925
aguuguguuacacaggaac

SEQ ID NO: 305525 - RNA, 19 nt, Artificial Sequence
  Description of Artificial Sequence: Synthetic oligonucleotide
  Antisense strand to SEQ ID NO: 305524
guuccuguguaacacaacu

SEQ ID NO: 305526 - RNA, 19 nt, Artificial Sequence
  Description of Artificial Sequence: Synthetic oligonucleotide
  Sense strand starting at position 333 of SEQ ID NO: 3925
uguguuacacaggaacauu

SEQ ID NO: 305527 - RNA, 19 nt, Artificial Sequence
  Description of Artificial Sequence: Synthetic oligonucleotide
  Antisense strand to SEQ ID NO: 305526
aauguuccuguguaacaca

SEQ ID NO: 305528 - RNA, 19 nt, Artificial Sequence
  Description of Artificial Sequence: Synthetic oligonucleotide
  Sense strand starting at position 354 of SEQ ID NO: 3925
acucaaggacugugacuaa

SEQ ID NO: 305529 - RNA, 19 nt, Artificial Sequence
  Description of Artificial Sequence: Synthetic oligonucleotide
  Antisense strand to SEQ ID NO: 305528
uuagucacaguccuugagu

SEQ ID NO: 305530 - RNA, 19 nt, Artificial Sequence
  Description of Artificial Sequence: Synthetic oligonucleotide
  Sense strand starting at position 376 of SEQ ID NO: 3925
uugaaauaaucugcuagca

SEQ ID NO: 305531 - RNA, 19 nt, Artificial Sequence
  Description of Artificial Sequence: Synthetic oligonucleotide
  Antisense strand to SEQ ID NO: 305530
ugcuagcagauuauuucaa

SEQ ID NO: 305532 - RNA, 19 nt, Artificial Sequence
  Description of Artificial Sequence: Synthetic oligonucleotide
  Sense strand starting at position 384 of SEQ ID NO: 3925
aucugcuagcaauagauga

SEQ ID NO: 305533 - RNA, 19 nt, Artificial Sequence
  Description of Artificial Sequence: Synthetic oligonucleotide
  Antisense strand to SEQ ID NO: 305532
ucaucuauugcuagcagau

SEQ ID NO: 305534 - RNA, 19 nt, Artificial Sequence
  Description of Artificial Sequence: Synthetic oligonucleotide
  Sense strand starting at position 391 of SEQ ID NO: 3925
agcaauagaugauuagcau

SEQ ID NO: 305535 - RNA, 19 nt, Artificial Sequence
  Description of Artificial Sequence: Synthetic oligonucleotide
  Antisense strand to SEQ ID NO: 305534
augcuaaucaucuauugcu

SEQ ID NO: 305536 - RNA, 19 nt, Artificial Sequence
  Description of Artificial Sequence: Synthetic oligonucleotide
  Sense strand starting at position 392 of SEQ ID NO: 3925
gcaauagaugauuagcaua

SEQ ID NO: 305537 - RNA, 19 nt, Artificial Sequence
  Description of Artificial Sequence: Synthetic oligonucleotide
  Antisense strand to SEQ ID NO: 305536
uaugcuaaucaucuauugc

SEQ ID NO: 305538 - RNA, 19 nt, Artificial Sequence
  Description of Artificial Sequence: Synthetic oligonucleotide
  Sense strand starting at position 397 of SEQ ID NO: 3925
agaugauuagcauaagcuu

SEQ ID NO: 305539 - RNA, 19 nt, Artificial Sequence
  Description of Artificial Sequence: Synthetic oligonucleotide
  Antisense strand to SEQ ID NO: 305538
aagcuuaugcuaaucaucu

SEQ ID NO: 305540 - RNA, 19 nt, Artificial Sequence
  Description of Artificial Sequence: Synthetic oligonucleotide
  Sense strand starting at position 711 of SEQ ID NO: 3925
cuaggcuuuaggcaguuaa

SEQ ID NO: 305541 - RNA, 19 nt, Artificial Sequence
  Description of Artificial Sequence: Synthetic oligonucleotide
  Antisense strand to SEQ ID NO: 305540
uuaacugccuaaagccuag

SEQ ID NO: 305542 - RNA, 19 nt, Artificial Sequence
  Description of Artificial Sequence: Synthetic oligonucleotide
  Sense strand starting at position 849 of SEQ ID NO: 3925
cuuguaacaugauuauuga

SEQ ID NO: 305543 - RNA, 19 nt, Artificial Sequence
  Description of Artificial Sequence: Synthetic oligonucleotide
  Antisense strand to SEQ ID NO: 305542
ucaauaaucauguuacaag

SEQ ID NO: 305544 - RNA, 19 nt, Artificial Sequence
  Description of Artificial Sequence: Synthetic oligonucleotide
  Sense strand starting at position 1010 of SEQ ID NO: 3925
acagaaaguugagcuauua

SEQ ID NO: 305545 - RNA, 19 nt, Artificial Sequence
  Description of Artificial Sequence: Synthetic oligonucleotide
  Antisense strand to SEQ ID NO: 305544
uaauagcucaacuuucugu

SEQ ID NO: 305546 - RNA, 19 nt, Artificial Sequence
  Description of Artificial Sequence: Synthetic oligonucleotide
  Sense strand starting at position 1120 of SEQ ID NO: 3925
aguuauaaccauugguuua

SEQ ID NO: 305547 - RNA, 19 nt, Artificial Sequence
  Description of Artificial Sequence: Synthetic oligonucleotide
  Antisense strand to SEQ ID NO: 305546
uaaaccaaugguuauaacu

SEQ ID NO: 305548 - RNA, 19 nt, Artificial Sequence
  Description of Artificial Sequence: Synthetic oligonucleotide
  Sense strand starting at position 1176 of SEQ ID NO: 3925
cugagaugucuuugaauac

SEQ ID NO: 305549 - RNA, 19 nt, Artificial Sequence
  Description of Artificial Sequence: Synthetic oligonucleotide
  Antisense strand to SEQ ID NO: 305548
guauucaaagacaucucag

SEQ ID NO: 305550 - RNA, 19 nt, Artificial Sequence
  Description of Artificial Sequence: Synthetic oligonucleotide
  Sense strand starting at position 1963 of SEQ ID NO: 3925
uagcauaguguuucgcgaa

SEQ ID NO: 305551 - RNA, 19 nt, Artificial Sequence
  Description of Artificial Sequence: Synthetic oligonucleotide
  Antisense strand to SEQ ID NO: 305550
uucgcgaaacacuaugcua

SEQ ID NO: 305552 - RNA, 19 nt, Artificial Sequence
  Description of Artificial Sequence: Synthetic oligonucleotide
  Sense strand starting at position 2168 of SEQ ID NO: 3925
gugaccauccaaggaauau

SEQ ID NO: 305553 - RNA, 19 nt, Artificial Sequence
  Description of Artificial Sequence: Synthetic oligonucleotide
  Antisense strand to SEQ ID NO: 305552
auauuccuuggauggucac

SEQ ID NO: 305554 - RNA, 19 nt, Artificial Sequence
  Description of Artificial Sequence: Synthetic oligonucleotide
  Sense strand starting at position 2215 of SEQ ID NO: 3925
uucggaauguggguaaaga

SEQ ID NO: 305555 - RNA, 19 nt, Artificial Sequence
  Description of Artificial Sequence: Synthetic oligonucleotide
  Antisense strand to SEQ ID NO: 305554
ucuuuacccacauuccgaa

SEQ ID NO: 305556 - RNA, 19 nt, Artificial Sequence
  Description of Artificial Sequence: Synthetic oligonucleotide
  Sense strand starting at position 2264 of SEQ ID NO: 3925
gcucuuggacagcaagauu

SEQ ID NO: 305557 - RNA, 19 nt, Artificial Sequence
  Description of Artificial Sequence: Synthetic oligonucleotide
  Antisense strand to SEQ ID NO: 305556
aaucuugcuguccaagagc

SEQ ID NO: 305558 - RNA, 19 nt, Artificial Sequence
  Description of Artificial Sequence: Synthetic oligonucleotide
  Sense strand starting at position 2314 of SEQ ID NO: 3925
acugaaaucccaggcuuag

SEQ ID NO: 305559 - RNA, 19 nt, Artificial Sequence
  Description of Artificial Sequence: Synthetic oligonucleotide
  Antisense strand to SEQ ID NO: 305558
cuaagccugggauuucagu

SEQ ID NO: 305560 - RNA, 19 nt, Artificial Sequence
  Description of Artificial Sequence: Synthetic oligonucleotide
  Sense strand starting at position 2338 of SEQ ID NO: 3925
uugugucuugaacacggaa

SEQ ID NO: 305561 - RNA, 19 nt, Artificial Sequence
  Description of Artificial Sequence: Synthetic oligonucleotide
  Antisense strand to SEQ ID NO: 305560
uuccguguucaagacacaa

SEQ ID NO: 305562 - RNA, 19 nt, Artificial Sequence
  Description of Artificial Sequence: Synthetic oligonucleotide
  Sense strand starting at position 2376 of SEQ ID NO: 3925
gauguaugaguacagcuaa

SEQ ID NO: 305563 - RNA, 19 nt, Artificial Sequence
  Description of Artificial Sequence: Synthetic oligonucleotide
  Antisense strand to SEQ ID NO: 305562
uuagcuguacucauacauc

SEQ ID NO: 305564 - RNA, 19 nt, Artificial Sequence
  Description of Artificial Sequence: Synthetic oligonucleotide
  Sense strand starting at position 2553 of SEQ ID NO: 3925
gguugauucgaguacucac

SEQ ID NO: 305565 - RNA, 19 nt, Artificial Sequence
  Description of Artificial Sequence: Synthetic oligonucleotide
  Antisense strand to SEQ ID NO: 305564
gugaguacucgaaucaacc

SEQ ID NO: 305566 - RNA, 19 nt, Artificial Sequence
  Description of Artificial Sequence: Synthetic oligonucleotide
  Sense strand starting at position 2631 of SEQ ID NO: 3925
acgaaauagaagugucuua

SEQ ID NO: 305567 - RNA, 19 nt, Artificial Sequence
  Description of Artificial Sequence: Synthetic oligonucleotide
  Antisense strand to SEQ ID NO: 305566
uaagacacuucuauuucgu

SEQ ID NO: 305568 - RNA, 19 nt, Artificial Sequence
  Description of Artificial Sequence: Synthetic oligonucleotide
  Sense strand starting at position 2661 of SEQ ID NO: 3925
gguaucuuuggaggccaga

SEQ ID NO: 305569 - RNA, 19 nt, Artificial Sequence
  Description of Artificial Sequence: Synthetic oligonucleotide
  Antisense strand to SEQ ID NO: 305568
ucuggccuccaaagauacc

SEQ ID NO: 305570 - RNA, 19 nt, Artificial Sequence
  Description of Artificial Sequence: Synthetic oligonucleotide
  Sense strand starting at position 2674 of SEQ ID NO: 3925
gccagaguuauuuagcguu

SEQ ID NO: 305571 - RNA, 19 nt, Artificial Sequence
  Description of Artificial Sequence: Synthetic oligonucleotide
  Antisense strand to SEQ ID NO: 305570
aacgcuaaauaacucuggc

SEQ ID NO: 305572 - RNA, 19 nt, Artificial Sequence
  Description of Artificial Sequence: Synthetic oligonucleotide
  Sense strand starting at position 2676 of SEQ ID NO: 3925
cagaguuauuuagcguuaa

SEQ ID NO: 305573 - RNA, 19 nt, Artificial Sequence
  Description of Artificial Sequence: Synthetic oligonucleotide
  Antisense strand to SEQ ID NO: 305572
uuaacgcuaaauaacucug

SEQ ID NO: 305574 - RNA, 19 nt, Artificial Sequence
  Description of Artificial Sequence: Synthetic oligonucleotide
  Sense strand starting at position 3152 of SEQ ID NO: 3925
cucuuugcuggauauuagu

SEQ ID NO: 305575 - RNA, 19 nt, Artificial Sequence
  Description of Artificial Sequence: Synthetic oligonucleotide
  Antisense strand to SEQ ID NO: 305574
acuaauauccagcaaagag

SEQ ID NO: 305576 - RNA, 19 nt, Artificial Sequence
  Description of Artificial Sequence: Synthetic oligonucleotide
  Sense strand starting at position 3162 of SEQ ID NO: 3925
gauauuaguugacugggca

SEQ ID NO: 305577 - RNA, 19 nt, Artificial Sequence
  Description of Artificial Sequence: Synthetic oligonucleotide
  Antisense strand to SEQ ID NO: 305576
ugcccagucaacuaauauc

SEQ ID NO: 305578 - RNA, 19 nt, Artificial Sequence
  Description of Artificial Sequence: Synthetic oligonucleotide
  Sense strand starting at position 3163 of SEQ ID NO: 3925
auauuaguugacugggcaa

SEQ ID NO: 305579 - RNA, 19 nt, Artificial Sequence
  Description of Artificial Sequence: Synthetic oligonucleotide
  Antisense strand to SEQ ID NO: 305578
uugcccagucaacuaauau

SEQ ID NO: 305580 - RNA, 19 nt, Artificial Sequence
  Description of Artificial Sequence: Synthetic oligonucleotide
  Sense strand starting at position 3235 of SEQ ID NO: 3925
ccaacaauucuguguuaga

SEQ ID NO: 305581 - RNA, 19 nt, Artificial Sequence
  Description of Artificial Sequence: Synthetic oligonucleotide
  Antisense strand to SEQ ID NO: 305580
ucuaacacagaauuguugg

SEQ ID NO: 305582 - RNA, 19 nt, Artificial Sequence
  Description of Artificial Sequence: Synthetic oligonucleotide
  Sense strand starting at position 3413 of SEQ ID NO: 3925
auaauaaguuggucaagau

SEQ ID NO: 305583 - RNA, 19 nt, Artificial Sequence
  Description of Artificial Sequence: Synthetic oligonucleotide
  Antisense strand to SEQ ID NO: 305582
aucuugaccaacuuauuau

SEQ ID NO: 305584 - RNA, 19 nt, Artificial Sequence
  Description of Artificial Sequence: Synthetic oligonucleotide
  Sense strand starting at position 3417 of SEQ ID NO: 3925
uaaguuggucaagaugcau

SEQ ID NO: 305585 - RNA, 19 nt, Artificial Sequence
  Description of Artificial Sequence: Synthetic oligonucleotide
  Antisense strand to SEQ ID NO: 305584
augcaucuugaccaacuua

SEQ ID NO: 305586 - RNA, 19 nt, Artificial Sequence
  Description of Artificial Sequence: Synthetic oligonucleotide
  Sense strand starting at position 3423 of SEQ ID NO: 3925
ggucaagaugcauagcuga

SEQ ID NO: 305587 - RNA, 19 nt, Artificial Sequence
  Description of Artificial Sequence: Synthetic oligonucleotide
  Antisense strand to SEQ ID NO: 305586
ucagcuaugcaucuugacc

SEQ ID NO: 305588 - RNA, 19 nt, Artificial Sequence
  Description of Artificial Sequence: Synthetic oligonucleotide
  Sense strand starting at position 3450 of SEQ ID NO: 3925
auugcagaguuuccuauuu

SEQ ID NO: 305589 - RNA, 19 nt, Artificial Sequence
  Description of Artificial Sequence: Synthetic oligonucleotide
  Antisense strand to SEQ ID NO: 305588
aaauaggaaacucugcaau

SEQ ID NO: 305590 - RNA, 19 nt, Artificial Sequence
  Description of Artificial Sequence: Synthetic oligonucleotide
  Sense strand starting at position 3571 of SEQ ID NO: 3925
cugugaagucaaugugaau

SEQ ID NO: 305591 - RNA, 19 nt, Artificial Sequence
  Description of Artificial Sequence: Synthetic oligonucleotide
  Antisense strand to SEQ ID NO: 305590
auucacauugacuucacag

SEQ ID NO: 305592 - RNA, 19 nt, Artificial Sequence
  Description of Artificial Sequence: Synthetic oligonucleotide
  Sense strand starting at position 278 of SEQ ID NO: 3926
auggucaaaucaguccuaa

SEQ ID NO: 305593 - RNA, 19 nt, Artificial Sequence
  Description of Artificial Sequence: Synthetic oligonucleotide
  Antisense strand to SEQ ID NO: 305592
uuaggacugauuugaccau

SEQ ID NO: 305594 - RNA, 19 nt, Artificial Sequence
  Description of Artificial Sequence: Synthetic oligonucleotide
  Sense strand starting at position 308 of SEQ ID NO: 3926
caaucaggauugucuaguu

SEQ ID NO: 305595 - RNA, 19 nt, Artificial Sequence
  Description of Artificial Sequence: Synthetic oligonucleotide
  Antisense strand to SEQ ID NO: 305594
aacuagacaauccugauug

SEQ ID NO: 305596 - RNA, 19 nt, Artificial Sequence
  Description of Artificial Sequence: Synthetic oligonucleotide
  Sense strand starting at position 313 of SEQ ID NO: 3926
aggauugucuaguucuaag

SEQ ID NO: 305597 - RNA, 19 nt, Artificial Sequence
  Description of Artificial Sequence: Synthetic oligonucleotide
  Antisense strand to SEQ ID NO: 305596
cuuagaacuagacaauccu

SEQ ID NO: 305598 - RNA, 19 nt, Artificial Sequence
  Description of Artificial Sequence: Synthetic oligonucleotide
  Sense strand starting at position 593 of SEQ ID NO: 3926
ggugcauacaaggguuaca

SEQ ID NO: 305599 - RNA, 19 nt, Artificial Sequence
  Description of Artificial Sequence: Synthetic oligonucleotide
  Antisense strand to SEQ ID NO: 305598
uguaacccuuguaugcacc

SEQ ID NO: 305600 - RNA, 19 nt, Artificial Sequence
  Description of Artificial Sequence: Synthetic oligonucleotide
  Sense strand starting at position 661 of SEQ ID NO: 3926
ccaggagagagcugagauu

SEQ ID NO: 305601 - RNA, 19 nt, Artificial Sequence
  Description of Artificial Sequence: Synthetic oligonucleotide
  Antisense strand to SEQ ID NO: 305600
aaucucagcucucuccugg

SEQ ID NO: 305602 - RNA, 19 nt, Artificial Sequence
  Description of Artificial Sequence: Synthetic oligonucleotide
  Sense strand starting at position 897 of SEQ ID NO: 3926
cucuuagaauaagaggaaa

SEQ ID NO: 305603 - RNA, 19 nt, Artificial Sequence
  Description of Artificial Sequence: Synthetic oligonucleotide
  Antisense strand to SEQ ID NO: 305602
uuuccucuuauucuaagag

SEQ ID NO: 305604 - RNA, 19 nt, Artificial Sequence
  Description of Artificial Sequence: Synthetic oligonucleotide
  Sense strand starting at position 969 of SEQ ID NO: 3926
ugauaucaguucuuaggca

SEQ ID NO: 305605 - RNA, 19 nt, Artificial Sequence
  Description of Artificial Sequence: Synthetic oligonucleotide
  Antisense strand to SEQ ID NO: 305604
ugccuaagaacugauauca

SEQ ID NO: 305606 - RNA, 19 nt, Artificial Sequence
  Description of Artificial Sequence: Synthetic oligonucleotide
  Sense strand starting at position 1157 of SEQ ID NO: 3926
agucacaaccuuggaagua

SEQ ID NO: 305607 - RNA, 19 nt, Artificial Sequence
  Description of Artificial Sequence: Synthetic oligonucleotide
  Antisense strand to SEQ ID NO: 305606
uacuuccaagguugugacu

SEQ ID NO: 305608 - RNA, 19 nt, Artificial Sequence
  Description of Artificial Sequence: Synthetic oligonucleotide
  Sense strand starting at position 1215 of SEQ ID NO: 3926
cucucaugaucaguaucuu

SEQ ID NO: 305609 - RNA, 19 nt, Artificial Sequence
  Description of Artificial Sequence: Synthetic oligonucleotide
  Antisense strand to SEQ ID NO: 305608
aagauacugaucaugagag

SEQ ID NO: 305610 - RNA, 19 nt, Artificial Sequence
  Description of Artificial Sequence: Synthetic oligonucleotide
  Sense strand starting at position 1216 of SEQ ID NO: 3926
ucucaugaucaguaucuuu

SEQ ID NO: 305611 - RNA, 19 nt, Artificial Sequence
  Description of Artificial Sequence: Synthetic oligonucleotide
  Antisense strand to SEQ ID NO: 305610
aaagauacugaucaugaga

SEQ ID NO: 305612 - RNA, 19 nt, Artificial Sequence
  Description of Artificial Sequence: Synthetic oligonucleotide
  Sense strand starting at position 1221 of SEQ ID NO: 3926
ugaucaguaucuuuguauu

SEQ ID NO: 305613 - RNA, 19 nt, Artificial Sequence
  Description of Artificial Sequence: Synthetic oligonucleotide
  Antisense strand to SEQ ID NO: 305612
aauacaaagauacugauca

SEQ ID NO: 305614 - RNA, 19 nt, Artificial Sequence
  Description of Artificial Sequence: Synthetic oligonucleotide
  Sense strand starting at position 1223 of SEQ ID NO: 3926
aucaguaucuuuguauuag

SEQ ID NO: 305615 - RNA, 19 nt, Artificial Sequence
  Description of Artificial Sequence: Synthetic oligonucleotide
  Antisense strand to SEQ ID NO: 305614
cuaauacaaagauacugau

SEQ ID NO: 305616 - RNA, 19 nt, Artificial Sequence
  Description of Artificial Sequence: Synthetic oligonucleotide
  Sense strand starting at position 1229 of SEQ ID NO: 3926
aucuuuguauuagcacaua

SEQ ID NO: 305617 - RNA, 19 nt, Artificial Sequence
  Description of Artificial Sequence: Synthetic oligonucleotide
  Antisense strand to SEQ ID NO: 305616
uaugugcuaauacaaagau

SEQ ID NO: 305618 - RNA, 19 nt, Artificial Sequence
  Description of Artificial Sequence: Synthetic oligonucleotide
  Sense strand starting at position 1232 of SEQ ID NO: 3926
uuuguauuagcacauauag

SEQ ID NO: 305619 - RNA, 19 nt, Artificial Sequence
  Description of Artificial Sequence: Synthetic oligonucleotide
  Antisense strand to SEQ ID NO: 305618
cuauaugugcuaauacaaa

SEQ ID NO: 305620 - RNA, 19 nt, Artificial Sequence
  Description of Artificial Sequence: Synthetic oligonucleotide
  Sense strand starting at position 1241 of SEQ ID NO: 3926
gcacauauagaauagucuu

SEQ ID NO: 305621 - RNA, 19 nt, Artificial Sequence
  Description of Artificial Sequence: Synthetic oligonucleotide
  Antisense strand to SEQ ID NO: 305620
aagacuauucuauaugugc

SEQ ID NO: 305622 - RNA, 19 nt, Artificial Sequence
  Description of Artificial Sequence: Synthetic oligonucleotide
  Sense strand starting at position 1518 of SEQ ID NO: 3926
augcauuauuucuugaugu

SEQ ID NO: 305623 - RNA, 19 nt, Artificial Sequence
  Description of Artificial Sequence: Synthetic oligonucleotide
  Antisense strand to SEQ ID NO: 305622
acaucaagaaauaaugcau

SEQ ID NO: 305624 - RNA, 19 nt, Artificial Sequence
  Description of Artificial Sequence: Synthetic oligonucleotide
  Sense strand starting at position 1584 of SEQ ID NO: 3926
uuauguucccaauaggauu

SEQ ID NO: 305625 - RNA, 19 nt, Artificial Sequence
  Description of Artificial Sequence: Synthetic oligonucleotide
  Antisense strand to SEQ ID NO: 305624
aauccuauugggaacauaa

SEQ ID NO: 305626 - RNA, 19 nt, Artificial Sequence
  Description of Artificial Sequence: Synthetic oligonucleotide
  Sense strand starting at position 1607 of SEQ ID NO: 3926
cagauagucaguugcagag

SEQ ID NO: 305627 - RNA, 19 nt, Artificial Sequence
  Description of Artificial Sequence: Synthetic oligonucleotide
  Antisense strand to SEQ ID NO: 305626
cucugcaacugacuaucug

SEQ ID NO: 305628 - RNA, 19 nt, Artificial Sequence
  Description of Artificial Sequence: Synthetic oligonucleotide
  Sense strand starting at position 1806 of SEQ ID NO: 3926
acaacacuuugaggaauuu

SEQ ID NO: 305629 - RNA, 19 nt, Artificial Sequence
  Description of Artificial Sequence: Synthetic oligonucleotide
  Antisense strand to SEQ ID NO: 305628
aaauuccucaaaguguugu

SEQ ID NO: 305630 - RNA, 19 nt, Artificial Sequence
  Description of Artificial Sequence: Synthetic oligonucleotide
  Sense strand starting at position 1897 of SEQ ID NO: 3926
cguacuauucuacaaguua

SEQ ID NO: 305631 - RNA, 19 nt, Artificial Sequence
  Description of Artificial Sequence: Synthetic oligonucleotide
  Antisense strand to SEQ ID NO: 305630
uaacuuguagaauaguacg

SEQ ID NO: 305632 - RNA, 19 nt, Artificial Sequence
  Description of Artificial Sequence: Synthetic oligonucleotide
  Sense strand starting at position 2184 of SEQ ID NO: 3926
cgaguagggaauggauaau

SEQ ID NO: 305633 - RNA, 19 nt, Artificial Sequence
  Description of Artificial Sequence: Synthetic oligonucleotide
  Antisense strand to SEQ ID NO: 305632
auuauccauucccuacucg

SEQ ID NO: 305634 - RNA, 19 nt, Artificial Sequence
  Description of Artificial Sequence: Synthetic oligonucleotide
  Sense strand starting at position 2252 of SEQ ID NO: 3926
ugcucuuagcuugacaaua

SEQ ID NO: 305635 - RNA, 19 nt, Artificial Sequence
  Description of Artificial Sequence: Synthetic oligonucleotide
  Antisense strand to SEQ ID NO: 305634
uauugucaagcuaagagca

SEQ ID NO: 305636 - RNA, 19 nt, Artificial Sequence
  Description of Artificial Sequence: Synthetic oligonucleotide
  Sense strand starting at position 2345 of SEQ ID NO: 3926
gggaaaugcucauuauaga

SEQ ID NO: 305637 - RNA, 19 nt, Artificial Sequence
  Description of Artificial Sequence: Synthetic oligonucleotide
  Antisense strand to SEQ ID NO: 305636
ucuauaaugagcauuuccc

SEQ ID NO: 305638 - RNA, 19 nt, Artificial Sequence
  Description of Artificial Sequence: Synthetic oligonucleotide
  Sense strand starting at position 2497 of SEQ ID NO: 3926
aguauugggccaggcaaga

SEQ ID NO: 305639 - RNA, 19 nt, Artificial Sequence
  Description of Artificial Sequence: Synthetic oligonucleotide
  Antisense strand to SEQ ID NO: 305638
ucuugccuggcccaauacu

SEQ ID NO: 305640 - RNA, 19 nt, Artificial Sequence
  Description of Artificial Sequence: Synthetic oligonucleotide
  Sense strand starting at position 2518 of SEQ ID NO: 3926
gcaucauggaggugagcaa

SEQ ID NO: 305641 - RNA, 19 nt, Artificial Sequence
  Description of Artificial Sequence: Synthetic oligonucleotide
  Antisense strand to SEQ ID NO: 305640
uugcucaccuccaugaugc

SEQ ID NO: 305642 - RNA, 19 nt, Artificial Sequence
  Description of Artificial Sequence: Synthetic oligonucleotide
  Sense strand starting at position 2591 of SEQ ID NO: 3926
aagagcucuccucgaagaa

SEQ ID NO: 305643 - RNA, 19 nt, Artificial Sequence
  Description of Artificial Sequence: Synthetic oligonucleotide
  Antisense strand to SEQ ID NO: 305642
uucuucgaggagagcucuu

SEQ ID NO: 305644 - RNA, 19 nt, Artificial Sequence
  Description of Artificial Sequence: Synthetic oligonucleotide
  Sense strand starting at position 2592 of SEQ ID NO: 3926
agagcucuccucgaagaaa

SEQ ID NO: 305645 - RNA, 19 nt, Artificial Sequence
  Description of Artificial Sequence: Synthetic oligonucleotide
  Antisense strand to SEQ ID NO: 305644
uuucuucgaggagagcucu

SEQ ID NO: 305646 - RNA, 19 nt, Artificial Sequence
  Description of Artificial Sequence: Synthetic oligonucleotide
  Sense strand starting at position 2595 of SEQ ID NO: 3926
gcucuccucgaagaaauaa

SEQ ID NO: 305647 - RNA, 19 nt, Artificial Sequence
  Description of Artificial Sequence: Synthetic oligonucleotide
  Antisense strand to SEQ ID NO: 305646
uuauuucuucgaggagagc

SEQ ID NO: 305648 - RNA, 19 nt, Artificial Sequence
  Description of Artificial Sequence: Synthetic oligonucleotide
  Sense strand starting at position 2615 of SEQ ID NO: 3926
uaacaauugucagugggca

SEQ ID NO: 305649 - RNA, 19 nt, Artificial Sequence
  Description of Artificial Sequence: Synthetic oligonucleotide
  Antisense strand to SEQ ID NO: 305648
ugcccacugacaauuguua

SEQ ID NO: 305650 - RNA, 19 nt, Artificial Sequence
  Description of Artificial Sequence: Synthetic oligonucleotide
  Sense strand starting at position 2616 of SEQ ID NO: 3926
aacaauugucagugggcaa

SEQ ID NO: 305651 - RNA, 19 nt, Artificial Sequence
  Description of Artificial Sequence: Synthetic oligonucleotide
  Antisense strand to SEQ ID NO: 305650
uugcccacugacaauuguu

SEQ ID NO: 305652 - RNA, 19 nt, Artificial Sequence
  Description of Artificial Sequence: Synthetic oligonucleotide
  Sense strand starting at position 2629 of SEQ ID NO: 3926
gggcaacuuucggucauuu

SEQ ID NO: 305653 - RNA, 19 nt, Artificial Sequence
  Description of Artificial Sequence: Synthetic oligonucleotide
  Antisense strand to SEQ ID NO: 305652
aaaugaccgaaaguugccc

SEQ ID NO: 305654 - RNA, 19 nt, Artificial Sequence
  Description of Artificial Sequence: Synthetic oligonucleotide
  Sense strand starting at position 2776 of SEQ ID NO: 3926
ucaggaacugauugcacaa

SEQ ID NO: 305655 - RNA, 19 nt, Artificial Sequence
  Description of Artificial Sequence: Synthetic oligonucleotide
  Antisense strand to SEQ ID NO: 305654
uugugcaaucaguuccuga

SEQ ID NO: 305656 - RNA, 19 nt, Artificial Sequence
  Description of Artificial Sequence: Synthetic oligonucleotide
  Sense strand starting at position 2892 of SEQ ID NO: 3926
uaggguuguagugauaacu

SEQ ID NO: 305657 - RNA, 19 nt, Artificial Sequence
  Description of Artificial Sequence: Synthetic oligonucleotide
  Antisense strand to SEQ ID NO: 305656
aguuaucacuacaacccua

SEQ ID NO: 305658 - RNA, 19 nt, Artificial Sequence
  Description of Artificial Sequence: Synthetic oligonucleotide
  Sense strand starting at position 3037 of SEQ ID NO: 3926
ccaaguguuagguaguaag

SEQ ID NO: 305659 - RNA, 19 nt, Artificial Sequence
  Description of Artificial Sequence: Synthetic oligonucleotide
  Antisense strand to SEQ ID NO: 305658
cuuacuaccuaacacuugg

SEQ ID NO: 305660 - RNA, 19 nt, Artificial Sequence
  Description of Artificial Sequence: Synthetic oligonucleotide
  Sense strand starting at position 3151 of SEQ ID NO: 3926
agagaaaucucagaauuac

SEQ ID NO: 305661 - RNA, 19 nt, Artificial Sequence
  Description of Artificial Sequence: Synthetic oligonucleotide
  Antisense strand to SEQ ID NO: 305660
guaauucugagauuucucu

SEQ ID NO: 305662 - RNA, 19 nt, Artificial Sequence
  Description of Artificial Sequence: Synthetic oligonucleotide
  Sense strand starting at position 3828 of SEQ ID NO: 3926
aauggauccuugcuguaag

SEQ ID NO: 305663 - RNA, 19 nt, Artificial Sequence
  Description of Artificial Sequence: Synthetic oligonucleotide
  Antisense strand to SEQ ID NO: 305662
cuuacagcaaggauccauu

SEQ ID NO: 305664 - RNA, 19 nt, Artificial Sequence
  Description of Artificial Sequence: Synthetic oligonucleotide
  Sense strand starting at position 3831 of SEQ ID NO: 3926
ggauccuugcuguaaguaa

SEQ ID NO: 305665 - RNA, 19 nt, Artificial Sequence
  Description of Artificial Sequence: Synthetic oligonucleotide
  Antisense strand to SEQ ID NO: 305664
uuacuuacagcaaggaucc

SEQ ID NO: 305666 - RNA, 19 nt, Artificial Sequence
  Description of Artificial Sequence: Synthetic oligonucleotide
  Sense strand starting at position 3895 of SEQ ID NO: 3926
uaaguagagguguacauau

SEQ ID NO: 305667 - RNA, 19 nt, Artificial Sequence
  Description of Artificial Sequence: Synthetic oligonucleotide
  Antisense strand to SEQ ID NO: 305666
auauguacaccucuacuua

SEQ ID NO: 305668 - RNA, 19 nt, Artificial Sequence
  Description of Artificial Sequence: Synthetic oligonucleotide
  Sense strand starting at position 3897 of SEQ ID NO: 3926
aguagagguguacauauau

SEQ ID NO: 305669 - RNA, 19 nt, Artificial Sequence
  Description of Artificial Sequence: Synthetic oligonucleotide
  Antisense strand to SEQ ID NO: 305668
auauauguacaccucuacu

SEQ ID NO: 305670 - RNA, 19 nt, Artificial Sequence
  Description of Artificial Sequence: Synthetic oligonucleotide
  Sense strand starting at position 3903 of SEQ ID NO: 3926
gguguacauauauaaugua

SEQ ID NO: 305671 - RNA, 19 nt, Artificial Sequence
  Description of Artificial Sequence: Synthetic oligonucleotide
  Antisense strand to SEQ ID NO: 305670
uacauuauauauguacacc

SEQ ID NO: 305672 - RNA, 19 nt, Artificial Sequence
  Description of Artificial Sequence: Synthetic oligonucleotide
  Sense strand starting at position 33 of SEQ ID NO: 3928
augaauaauucugagagag

SEQ ID NO: 305673 - RNA, 19 nt, Artificial Sequence
  Description of Artificial Sequence: Synthetic oligonucleotide
  Antisense strand to SEQ ID NO: 305672
cucucucagaauuauucau

SEQ ID NO: 305674 - RNA, 19 nt, Artificial Sequence
  Description of Artificial Sequence: Synthetic oligonucleotide
  Sense strand starting at position 266 of SEQ ID NO: 3928
caaggaaguggcuaucuua

SEQ ID NO: 305675 - RNA, 19 nt, Artificial Sequence
  Description of Artificial Sequence: Synthetic oligonucleotide
  Antisense strand to SEQ ID NO: 305674
uaagauagccacuuccuug

SEQ ID NO: 305676 - RNA, 19 nt, Artificial Sequence
  Description of Artificial Sequence: Synthetic oligonucleotide
  Sense strand starting at position 269 of SEQ ID NO: 3928
ggaaguggcuaucuuagaa

SEQ ID NO: 305677 - RNA, 19 nt, Artificial Sequence
  Description of Artificial Sequence: Synthetic oligonucleotide
  Antisense strand to SEQ ID NO: 305676
uucuaagauagccacuucc

SEQ ID NO: 305678 - RNA, 19 nt, Artificial Sequence
  Description of Artificial Sequence: Synthetic oligonucleotide
  Sense strand starting at position 468 of SEQ ID NO: 3928
gauuauauucugggcuaca

SEQ ID NO: 305679 - RNA, 19 nt, Artificial Sequence
  Description of Artificial Sequence: Synthetic oligonucleotide
  Antisense strand to SEQ ID NO: 305678
uguagcccagaauauaauc

SEQ ID NO: 305680 - RNA, 19 nt, Artificial Sequence
  Description of Artificial Sequence: Synthetic oligonucleotide
  Sense strand starting at position 510 of SEQ ID NO: 3928
uaaacaguacgcgagauau

SEQ ID NO: 305681 - RNA, 19 nt, Artificial Sequence
  Description of Artificial Sequence: Synthetic oligonucleotide
  Antisense strand to SEQ ID NO: 305680
auaucucgcguacuguuua

SEQ ID NO: 305682 - RNA, 19 nt, Artificial Sequence
  Description of Artificial Sequence: Synthetic oligonucleotide
  Sense strand starting at position 512 of SEQ ID NO: 3928
aacaguacgcgagauauug

SEQ ID NO: 305683 - RNA, 19 nt, Artificial Sequence
  Description of Artificial Sequence: Synthetic oligonucleotide
  Antisense strand to SEQ ID NO: 305682
caauaucucgcguacuguu

SEQ ID NO: 305684 - RNA, 19 nt, Artificial Sequence
  Description of Artificial Sequence: Synthetic oligonucleotide
  Sense strand starting at position 532 of SEQ ID NO: 3928
ggaagcugccauuaaauaa

SEQ ID NO: 305685 - RNA, 19 nt, Artificial Sequence
  Description of Artificial Sequence: Synthetic oligonucleotide
  Antisense strand to SEQ ID NO: 305684
uuauuuaauggcagcuucc

SEQ ID NO: 305686 - RNA, 19 nt, Artificial Sequence
  Description of Artificial Sequence: Synthetic oligonucleotide
  Sense strand starting at position 552 of SEQ ID NO: 3928
gccaaaguuuaggauuuaa

SEQ ID NO: 305687 - RNA, 19 nt, Artificial Sequence
  Description of Artificial Sequence: Synthetic oligonucleotide
  Antisense strand to SEQ ID NO: 305686
uuaaauccuaaacuuuggc

SEQ ID NO: 305688 - RNA, 19 nt, Artificial Sequence
  Description of Artificial Sequence: Synthetic oligonucleotide
  Sense strand starting at position 619 of SEQ ID NO: 3928
gacugaagaguuuggcuca

SEQ ID NO: 305689 - RNA, 19 nt, Artificial Sequence
  Description of Artificial Sequence: Synthetic oligonucleotide
  Antisense strand to SEQ ID NO: 305688
ugagccaaacucuucaguc

SEQ ID NO: 305690 - RNA, 19 nt, Artificial Sequence
  Description of Artificial Sequence: Synthetic oligonucleotide
  Sense strand starting at position 622 of SEQ ID NO: 3928
ugaagaguuuggcucauua

SEQ ID NO: 305691 - RNA, 19 nt, Artificial Sequence
  Description of Artificial Sequence: Synthetic oligonucleotide
  Antisense strand to SEQ ID NO: 305690
uaaugagccaaacucuuca

SEQ ID NO: 305692 - RNA, 19 nt, Artificial Sequence
  Description of Artificial Sequence: Synthetic oligonucleotide
  Sense strand starting at position 624 of SEQ ID NO: 3928
aagaguuuggcucauuaau

SEQ ID NO: 305693 - RNA, 19 nt, Artificial Sequence
  Description of Artificial Sequence: Synthetic oligonucleotide
  Antisense strand to SEQ ID NO: 305692
auuaaugagccaaacucuu

SEQ ID NO: 305694 - RNA, 19 nt, Artificial Sequence
  Description of Artificial Sequence: Synthetic oligonucleotide
  Sense strand starting at position 626 of SEQ ID NO: 3928
gaguuuggcucauuaauca

SEQ ID NO: 305695 - RNA, 19 nt, Artificial Sequence
  Description of Artificial Sequence: Synthetic oligonucleotide
  Antisense strand to SEQ ID NO: 305694
ugauuaaugagccaaacuc

SEQ ID NO: 305696 - RNA, 19 nt, Artificial Sequence
  Description of Artificial Sequence: Synthetic oligonucleotide
  Sense strand starting at position 661 of SEQ ID NO: 3928
gaaucugucuuauccugga

SEQ ID NO: 305697 - RNA, 19 nt, Artificial Sequence
  Description of Artificial Sequence: Synthetic oligonucleotide
  Antisense strand to SEQ ID NO: 305696
uccaggauaagacagauuc

SEQ ID NO: 305698 - RNA, 19 nt, Artificial Sequence
  Description of Artificial Sequence: Synthetic oligonucleotide
  Sense strand starting at position 665 of SEQ ID NO: 3928
cugucuuauccuggaagca

SEQ ID NO: 305699 - RNA, 19 nt, Artificial Sequence
  Description of Artificial Sequence: Synthetic oligonucleotide
  Antisense strand to SEQ ID NO: 305698
ugcuuccaggauaagacag

SEQ ID NO: 305700 - RNA, 19 nt, Artificial Sequence
  Description of Artificial Sequence: Synthetic oligonucleotide
  Sense strand starting at position 666 of SEQ ID NO: 3928
ugucuuauccuggaagcag

SEQ ID NO: 305701 - RNA, 19 nt, Artificial Sequence
  Description of Artificial Sequence: Synthetic oligonucleotide
  Antisense strand to SEQ ID NO: 305700
cugcuuccaggauaagaca

SEQ ID NO: 305702 - RNA, 19 nt, Artificial Sequence
  Description of Artificial Sequence: Synthetic oligonucleotide
  Sense strand starting at position 685 of SEQ ID NO: 3928
auucgaaugcgacauccua

SEQ ID NO: 305703 - RNA, 19 nt, Artificial Sequence
  Description of Artificial Sequence: Synthetic oligonucleotide
  Antisense strand to SEQ ID NO: 305702
uaggaugucgcauucgaau

SEQ ID NO: 305704 - RNA, 19 nt, Artificial Sequence
  Description of Artificial Sequence: Synthetic oligonucleotide
  Sense strand starting at position 693 of SEQ ID NO: 3928
gcgacauccuacuucuaua

SEQ ID NO: 305705 - RNA, 19 nt, Artificial Sequence
  Description of Artificial Sequence: Synthetic oligonucleotide
  Antisense strand to SEQ ID NO: 305704
uauagaaguaggaugucgc

SEQ ID NO: 305706 - RNA, 19 nt, Artificial Sequence
  Description of Artificial Sequence: Synthetic oligonucleotide
  Sense strand starting at position 952 of SEQ ID NO: 3928
guaucaaguccaugaucac

SEQ ID NO: 305707 - RNA, 19 nt, Artificial Sequence
  Description of Artificial Sequence: Synthetic oligonucleotide
  Antisense strand to SEQ ID NO: 305706
gugaucauggacuugauac

SEQ ID NO: 305708 - RNA, 19 nt, Artificial Sequence
  Description of Artificial Sequence: Synthetic oligonucleotide
  Sense strand starting at position 963 of SEQ ID NO: 3928
augaucaccuaguuaucca

SEQ ID NO: 305709 - RNA, 19 nt, Artificial Sequence
  Description of Artificial Sequence: Synthetic oligonucleotide
  Antisense strand to SEQ ID NO: 305708
uggauaacuaggugaucau

SEQ ID NO: 305710 - RNA, 19 nt, Artificial Sequence
  Description of Artificial Sequence: Synthetic oligonucleotide
  Sense strand starting at position 1025 of SEQ ID NO: 3928
gccuuuacuguguauaauu

SEQ ID NO: 305711 - RNA, 19 nt, Artificial Sequence
  Description of Artificial Sequence: Synthetic oligonucleotide
  Antisense strand to SEQ ID NO: 305710
aauuauacacaguaaaggc

SEQ ID NO: 305712 - RNA, 19 nt, Artificial Sequence
  Description of Artificial Sequence: Synthetic oligonucleotide
  Sense strand starting at position 1114 of SEQ ID NO: 3928
gaaagaggcucagaaauga

SEQ ID NO: 305713 - RNA, 19 nt, Artificial Sequence
  Description of Artificial Sequence: Synthetic oligonucleotide
  Antisense strand to SEQ ID NO: 305712
ucauuucugagccucuuuc

SEQ ID NO: 305714 - RNA, 19 nt, Artificial Sequence
  Description of Artificial Sequence: Synthetic oligonucleotide
  Sense strand starting at position 1257 of SEQ ID NO: 3928
acgcgaagcagugaccaua

SEQ ID NO: 305715 - RNA, 19 nt, Artificial Sequence
  Description of Artificial Sequence: Synthetic oligonucleotide
  Antisense strand to SEQ ID NO: 305714
uauggucacugcuucgcgu

SEQ ID NO: 305716 - RNA, 19 nt, Artificial Sequence
  Description of Artificial Sequence: Synthetic oligonucleotide
  Sense strand starting at position 2468 of SEQ ID NO: 3928
ccagauuccugaccgauau

SEQ ID NO: 305717 - RNA, 19 nt, Artificial Sequence
  Description of Artificial Sequence: Synthetic oligonucleotide
  Antisense strand to SEQ ID NO: 305716
auaucggucaggaaucugg

SEQ ID NO: 305718 - RNA, 19 nt, Artificial Sequence
  Description of Artificial Sequence: Synthetic oligonucleotide
  Sense strand starting at position 2469 of SEQ ID NO: 3928
cagauuccugaccgauauu

SEQ ID NO: 305719 - RNA, 19 nt, Artificial Sequence
  Description of Artificial Sequence: Synthetic oligonucleotide
  Antisense strand to SEQ ID NO: 305718
aauaucggucaggaaucug

SEQ ID NO: 305720 - RNA, 19 nt, Artificial Sequence
  Description of Artificial Sequence: Synthetic oligonucleotide
  Sense strand starting at position 2666 of SEQ ID NO: 3928
agagcuucuggaugauaau

SEQ ID NO: 305721 - RNA, 19 nt, Artificial Sequence
  Description of Artificial Sequence: Synthetic oligonucleotide
  Antisense strand to SEQ ID NO: 305720
auuaucauccagaagcucu

SEQ ID NO: 305722 - RNA, 19 nt, Artificial Sequence
  Description of Artificial Sequence: Synthetic oligonucleotide
  Sense strand starting at position 2678 of SEQ ID NO: 3928
ugauaauggugacuuuauc

SEQ ID NO: 305723 - RNA, 19 nt, Artificial Sequence
  Description of Artificial Sequence: Synthetic oligonucleotide
  Antisense strand to SEQ ID NO: 305722
gauaaagucaccauuauca

SEQ ID NO: 305724 - RNA, 19 nt, Artificial Sequence
  Description of Artificial Sequence: Synthetic oligonucleotide
  Sense strand starting at position 2855 of SEQ ID NO: 3928
auaucauuggcagggauaa

SEQ ID NO: 305725 - RNA, 19 nt, Artificial Sequence
  Description of Artificial Sequence: Synthetic oligonucleotide
  Antisense strand to SEQ ID NO: 305724
uuaucccugccaaugauau

SEQ ID NO: 305726 - RNA, 19 nt, Artificial Sequence
  Description of Artificial Sequence: Synthetic oligonucleotide
  Sense strand starting at position 2856 of SEQ ID NO: 3928
uaucauuggcagggauaaa

SEQ ID NO: 305727 - RNA, 19 nt, Artificial Sequence
  Description of Artificial Sequence: Synthetic oligonucleotide
  Antisense strand to SEQ ID NO: 305726
uuuaucccugccaaugaua

SEQ ID NO: 305728 - RNA, 19 nt, Artificial Sequence
  Description of Artificial Sequence: Synthetic oligonucleotide
  Sense strand starting at position 2954 of SEQ ID NO: 3928
guuauuacauggucucaua

SEQ ID NO: 305729 - RNA, 19 nt, Artificial Sequence
  Description of Artificial Sequence: Synthetic oligonucleotide
  Antisense strand to SEQ ID NO: 305728
uaugagaccauguaauaac

SEQ ID NO: 305730 - RNA, 19 nt, Artificial Sequence
  Description of Artificial Sequence: Synthetic oligonucleotide
  Sense strand starting at position 2957 of SEQ ID NO: 3928
auuacauggucucauauuu

SEQ ID NO: 305731 - RNA, 19 nt, Artificial Sequence
  Description of Artificial Sequence: Synthetic oligonucleotide
  Antisense strand to SEQ ID NO: 305730
aaauaugagaccauguaau

SEQ ID NO: 305732 - RNA, 19 nt, Artificial Sequence
  Description of Artificial Sequence: Synthetic oligonucleotide
  Sense strand starting at position 3080 of SEQ ID NO: 3928
gagcacauauccucggaaa

SEQ ID NO: 305733 - RNA, 19 nt, Artificial Sequence
  Description of Artificial Sequence: Synthetic oligonucleotide
  Antisense strand to SEQ ID NO: 305732
uuuccgaggauaugugcuc

SEQ ID NO: 305734 - RNA, 19 nt, Artificial Sequence
  Description of Artificial Sequence: Synthetic oligonucleotide
  Sense strand starting at position 3081 of SEQ ID NO: 3928
agcacauauccucggaaau

SEQ ID NO: 305735 - RNA, 19 nt, Artificial Sequence
  Description of Artificial Sequence: Synthetic oligonucleotide
  Antisense strand to SEQ ID NO: 305734
auuuccgaggauaugugcu

SEQ ID NO: 305736 - RNA, 19 nt, Artificial Sequence
  Description of Artificial Sequence: Synthetic oligonucleotide
  Sense strand starting at position 3082 of SEQ ID NO: 3928
gcacauauccucggaaaug

SEQ ID NO: 305737 - RNA, 19 nt, Artificial Sequence
  Description of Artificial Sequence: Synthetic oligonucleotide
  Antisense strand to SEQ ID NO: 305736
cauuuccgaggauaugugc

SEQ ID NO: 305738 - RNA, 19 nt, Artificial Sequence
  Description of Artificial Sequence: Synthetic oligonucleotide
  Sense strand starting at position 3121 of SEQ ID NO: 3928
auaacaaacugagaaguua

SEQ ID NO: 305739 - RNA, 19 nt, Artificial Sequence
  Description of Artificial Sequence: Synthetic oligonucleotide
  Antisense strand to SEQ ID NO: 305738
uaacuucucaguuuguuau

SEQ ID NO: 305740 - RNA, 19 nt, Artificial Sequence
  Description of Artificial Sequence: Synthetic oligonucleotide
  Sense strand starting at position 3129 of SEQ ID NO: 3928
cugagaaguuauguuagag

SEQ ID NO: 305741 - RNA, 19 nt, Artificial Sequence
  Description of Artificial Sequence: Synthetic oligonucleotide
  Antisense strand to SEQ ID NO: 305740
cucuaacauaacuucucag

SEQ ID NO: 305742 - RNA, 19 nt, Artificial Sequence
  Description of Artificial Sequence: Synthetic oligonucleotide
  Sense strand starting at position 3135 of SEQ ID NO: 3928
aguuauguuagagggaaua

SEQ ID NO: 305743 - RNA, 19 nt, Artificial Sequence
  Description of Artificial Sequence: Synthetic oligonucleotide
  Antisense strand to SEQ ID NO: 305742
uauucccucuaacauaacu

SEQ ID NO: 305744 - RNA, 19 nt, Artificial Sequence
  Description of Artificial Sequence: Synthetic oligonucleotide
  Sense strand starting at position 3227 of SEQ ID NO: 3928
aggaaagaauguucuaagu

SEQ ID NO: 305745 - RNA, 19 nt, Artificial Sequence
  Description of Artificial Sequence: Synthetic oligonucleotide
  Antisense strand to SEQ ID NO: 305744
acuuagaacauucuuuccu

SEQ ID NO: 305746 - RNA, 19 nt, Artificial Sequence
  Description of Artificial Sequence: Synthetic oligonucleotide
  Sense strand starting at position 3284 of SEQ ID NO: 3928
ggagauuauuaauauagga

SEQ ID NO: 305747 - RNA, 19 nt, Artificial Sequence
  Description of Artificial Sequence: Synthetic oligonucleotide
  Antisense strand to SEQ ID NO: 305746
uccuauauuaauaaucucc

SEQ ID NO: 305748 - RNA, 19 nt, Artificial Sequence
  Description of Artificial Sequence: Synthetic oligonucleotide
  Sense strand starting at position 3375 of SEQ ID NO: 3928
ugaagauuauuuggaaaga

SEQ ID NO: 305749 - RNA, 19 nt, Artificial Sequence
  Description of Artificial Sequence: Synthetic oligonucleotide
  Antisense strand to SEQ ID NO: 305748
ucuuuccaaauaaucuuca

SEQ ID NO: 305750 - RNA, 19 nt, Artificial Sequence
  Description of Artificial Sequence: Synthetic oligonucleotide
  Sense strand starting at position 3388 of SEQ ID NO: 3928
gaaagaauauaaggaaaug

SEQ ID NO: 305751 - RNA, 19 nt, Artificial Sequence
  Description of Artificial Sequence: Synthetic oligonucleotide
  Antisense strand to SEQ ID NO: 305750
cauuuccuuauauucuuuc

SEQ ID NO: 305752 - RNA, 19 nt, Artificial Sequence
  Description of Artificial Sequence: Synthetic oligonucleotide
  Sense strand starting at position 17 of SEQ ID NO: 3927
ugaagucugacaggaugua

SEQ ID NO: 305753 - RNA, 19 nt, Artificial Sequence
  Description of Artificial Sequence: Synthetic oligonucleotide
  Antisense strand to SEQ ID NO: 305752
uacauccugucagacuuca

SEQ ID NO: 305754 - RNA, 19 nt, Artificial Sequence
  Description of Artificial Sequence: Synthetic oligonucleotide
  Sense strand starting at position 26 of SEQ ID NO: 3927
acaggauguagucaugguu

SEQ ID NO: 305755 - RNA, 19 nt, Artificial Sequence
  Description of Artificial Sequence: Synthetic oligonucleotide
  Antisense strand to SEQ ID NO: 305754
aaccaugacuacauccugu

SEQ ID NO: 305756 - RNA, 19 nt, Artificial Sequence
  Description of Artificial Sequence: Synthetic oligonucleotide
  Sense strand starting at position 128 of SEQ ID NO: 3927
gagugaguucaggagcaug

SEQ ID NO: 305757 - RNA, 19 nt, Artificial Sequence
  Description of Artificial Sequence: Synthetic oligonucleotide
  Antisense strand to SEQ ID NO: 305756
caugcuccugaacucacuc

SEQ ID NO: 305758 - RNA, 19 nt, Artificial Sequence
  Description of Artificial Sequence: Synthetic oligonucleotide
  Sense strand starting at position 172 of SEQ ID NO: 3927
ggcaguuguaucuauggaa

SEQ ID NO: 305759 - RNA, 19 nt, Artificial Sequence
  Description of Artificial Sequence: Synthetic oligonucleotide
  Antisense strand to SEQ ID NO: 305758
uuccauagauacaacugcc

SEQ ID NO: 305760 - RNA, 19 nt, Artificial Sequence
  Description of Artificial Sequence: Synthetic oligonucleotide
  Sense strand starting at position 269 of SEQ ID NO: 3927
uguagugugagauaaagau

SEQ ID NO: 305761 - RNA, 19 nt, Artificial Sequence
  Description of Artificial Sequence: Synthetic oligonucleotide
  Antisense strand to SEQ ID NO: 305760
aucuuuaucucacacuaca

SEQ ID NO: 305762 - RNA, 19 nt, Artificial Sequence
  Description of Artificial Sequence: Synthetic oligonucleotide
  Sense strand starting at position 390 of SEQ ID NO: 3927
aggaguugacaggguaaug

SEQ ID NO: 305763 - RNA, 19 nt, Artificial Sequence
  Description of Artificial Sequence: Synthetic oligonucleotide
  Antisense strand to SEQ ID NO: 305762
cauuacccugucaacuccu

SEQ ID NO: 305764 - RNA, 19 nt, Artificial Sequence
  Description of Artificial Sequence: Synthetic oligonucleotide
  Sense strand starting at position 408 of SEQ ID NO: 3927
gucaaaguuguccacagga

SEQ ID NO: 305765 - RNA, 19 nt, Artificial Sequence
  Description of Artificial Sequence: Synthetic oligonucleotide
  Antisense strand to SEQ ID NO: 305764
uccuguggacaacuuugac

SEQ ID NO: 305766 - RNA, 19 nt, Artificial Sequence
  Description of Artificial Sequence: Synthetic oligonucleotide
  Sense strand starting at position 425 of SEQ ID NO: 3927
gaaucuccagguugaggua

SEQ ID NO: 305767 - RNA, 19 nt, Artificial Sequence
  Description of Artificial Sequence: Synthetic oligonucleotide
  Antisense strand to SEQ ID NO: 305766
uaccucaaccuggagauuc

SEQ ID NO: 305768 - RNA, 19 nt, Artificial Sequence
  Description of Artificial Sequence: Synthetic oligonucleotide
  Sense strand starting at position 434 of SEQ ID NO: 3927
gguugagguagucaaauga

SEQ ID NO: 305769 - RNA, 19 nt, Artificial Sequence
  Description of Artificial Sequence: Synthetic oligonucleotide
  Antisense strand to SEQ ID NO: 305768
ucauuugacuaccucaacc

SEQ ID NO: 305770 - RNA, 19 nt, Artificial Sequence
  Description of Artificial Sequence: Synthetic oligonucleotide
  Sense strand starting at position 592 of SEQ ID NO: 3927
guagauacuggauguauag

SEQ ID NO: 305771 - RNA, 19 nt, Artificial Sequence
  Description of Artificial Sequence: Synthetic oligonucleotide
  Antisense strand to SEQ ID NO: 305770
cuauacauccaguaucuac

SEQ ID NO: 305772 - RNA, 19 nt, Artificial Sequence
  Description of Artificial Sequence: Synthetic oligonucleotide
  Sense strand starting at position 619 of SEQ ID NO: 3927
ccaagaagcuuggcucaga

SEQ ID NO: 305773 - RNA, 19 nt, Artificial Sequence
  Description of Artificial Sequence: Synthetic oligonucleotide
  Antisense strand to SEQ ID NO: 305772
ucugagccaagcuucuugg

SEQ ID NO: 305774 - RNA, 19 nt, Artificial Sequence
  Description of Artificial Sequence: Synthetic oligonucleotide
  Sense strand starting at position 693 of SEQ ID NO: 3927
uaaagaguacagcauguuu

SEQ ID NO: 305775 - RNA, 19 nt, Artificial Sequence
  Description of Artificial Sequence: Synthetic oligonucleotide
  Antisense strand to SEQ ID NO: 305774
aaacaugcuguacucuuua

SEQ ID NO: 305776 - RNA, 19 nt, Artificial Sequence
  Description of Artificial Sequence: Synthetic oligonucleotide
  Sense strand starting at position 913 of SEQ ID NO: 3927
gagcaacaauauucuguga

SEQ ID NO: 305777 - RNA, 19 nt, Artificial Sequence
  Description of Artificial Sequence: Synthetic oligonucleotide
  Antisense strand to SEQ ID NO: 305776
ucacagaauauuguugcuc

SEQ ID NO: 305778 - RNA, 19 nt, Artificial Sequence
  Description of Artificial Sequence: Synthetic oligonucleotide
  Sense strand starting at position 1144 of SEQ ID NO: 3927
uucuuacuccaagaggcaa

SEQ ID NO: 305779 - RNA, 19 nt, Artificial Sequence
  Description of Artificial Sequence: Synthetic oligonucleotide
  Antisense strand to SEQ ID NO: 305778
uugccucuuggaguaagaa

SEQ ID NO: 305780 - RNA, 19 nt, Artificial Sequence
  Description of Artificial Sequence: Synthetic oligonucleotide
  Sense strand starting at position 1196 of SEQ ID NO: 3927
auuaauuucugugcaaggu

SEQ ID NO: 305781 - RNA, 19 nt, Artificial Sequence
  Description of Artificial Sequence: Synthetic oligonucleotide
  Antisense strand to SEQ ID NO: 305780
accuugcacagaaauuaau

SEQ ID NO: 305782 - RNA, 19 nt, Artificial Sequence
  Description of Artificial Sequence: Synthetic oligonucleotide
  Sense strand starting at position 1342 of SEQ ID NO: 3927
caagauuaggccugaauug

SEQ ID NO: 305783 - RNA, 19 nt, Artificial Sequence
  Description of Artificial Sequence: Synthetic oligonucleotide
  Antisense strand to SEQ ID NO: 305782
caauucaggccuaaucuug

SEQ ID NO: 305784 - RNA, 19 nt, Artificial Sequence
  Description of Artificial Sequence: Synthetic oligonucleotide
  Sense strand starting at position 1385 of SEQ ID NO: 3927
ccugccagagcaugaauaa

SEQ ID NO: 305785 - RNA, 19 nt, Artificial Sequence
  Description of Artificial Sequence: Synthetic oligonucleotide
  Antisense strand to SEQ ID NO: 305784
uuauucaugcucuggcagg

SEQ ID NO: 305786 - RNA, 19 nt, Artificial Sequence
  Description of Artificial Sequence: Synthetic oligonucleotide
  Sense strand starting at position 1429 of SEQ ID NO: 3927
ccaaccugugcugaaugaa

SEQ ID NO: 305787 - RNA, 19 nt, Artificial Sequence
  Description of Artificial Sequence: Synthetic oligonucleotide
  Antisense strand to SEQ ID NO: 305786
uucauucagcacagguugg

SEQ ID NO: 305788 - RNA, 19 nt, Artificial Sequence
  Description of Artificial Sequence: Synthetic oligonucleotide
  Sense strand starting at position 1496 of SEQ ID NO: 3927
gcccacguuagagauauaa

SEQ ID NO: 305789 - RNA, 19 nt, Artificial Sequence
  Description of Artificial Sequence: Synthetic oligonucleotide
  Antisense strand to SEQ ID NO: 305788
uuauaucucuaacgugggc

SEQ ID NO: 305790 - RNA, 19 nt, Artificial Sequence
  Description of Artificial Sequence: Synthetic oligonucleotide
  Sense strand starting at position 1635 of SEQ ID NO: 3927
ugaguuggcaaaugggaau

SEQ ID NO: 305791 - RNA, 19 nt, Artificial Sequence
  Description of Artificial Sequence: Synthetic oligonucleotide
  Antisense strand to SEQ ID NO: 305790
auucccauuugccaacuca

SEQ ID NO: 305792 - RNA, 19 nt, Artificial Sequence
  Description of Artificial Sequence: Synthetic oligonucleotide
  Sense strand starting at position 1790 of SEQ ID NO: 3927
cucacuuauuuggaggaga

SEQ ID NO: 305793 - RNA, 19 nt, Artificial Sequence
  Description of Artificial Sequence: Synthetic oligonucleotide
  Antisense strand to SEQ ID NO: 305792
ucuccuccaaauaagugag

SEQ ID NO: 305794 - RNA, 19 nt, Artificial Sequence
  Description of Artificial Sequence: Synthetic oligonucleotide
  Sense strand starting at position 1822 of SEQ ID NO: 3927
agcguaauaccuguaugcu

SEQ ID NO: 305795 - RNA, 19 nt, Artificial Sequence
  Description of Artificial Sequence: Synthetic oligonucleotide
  Antisense strand to SEQ ID NO: 305794
agcauacagguauuacgcu

SEQ ID NO: 305796 - RNA, 19 nt, Artificial Sequence
  Description of Artificial Sequence: Synthetic oligonucleotide
  Sense strand starting at position 1916 of SEQ ID NO: 3927
cuaaacucgcuccacgaaa

SEQ ID NO: 305797 - RNA, 19 nt, Artificial Sequence
  Description of Artificial Sequence: Synthetic oligonucleotide
  Antisense strand to SEQ ID NO: 305796
uuucguggagcgaguuuag

SEQ ID NO: 305798 - RNA, 19 nt, Artificial Sequence
  Description of Artificial Sequence: Synthetic oligonucleotide
  Sense strand starting at position 2634 of SEQ ID NO: 3927
ugagauucugaguaaguug

SEQ ID NO: 305799 - RNA, 19 nt, Artificial Sequence
  Description of Artificial Sequence: Synthetic oligonucleotide
  Antisense strand to SEQ ID NO: 305798
caacuuacucagaaucuca

SEQ ID NO: 305800 - RNA, 19 nt, Artificial Sequence
  Description of Artificial Sequence: Synthetic oligonucleotide
  Sense strand starting at position 2643 of SEQ ID NO: 3927
gaguaaguuguauaucauu

SEQ ID NO: 305801 - RNA, 19 nt, Artificial Sequence
  Description of Artificial Sequence: Synthetic oligonucleotide
  Antisense strand to SEQ ID NO: 305800
aaugauauacaacuuacuc

SEQ ID NO: 305802 - RNA, 19 nt, Artificial Sequence
  Description of Artificial Sequence: Synthetic oligonucleotide
  Sense strand starting at position 2648 of SEQ ID NO: 3927
aguuguauaucauuagaga

SEQ ID NO: 305803 - RNA, 19 nt, Artificial Sequence
  Description of Artificial Sequence: Synthetic oligonucleotide
  Antisense strand to SEQ ID NO: 305802
ucucuaaugauauacaacu

SEQ ID NO: 305804 - RNA, 19 nt, Artificial Sequence
  Description of Artificial Sequence: Synthetic oligonucleotide
  Sense strand starting at position 2856 of SEQ ID NO: 3927
uagucauuaaagggugaga

SEQ ID NO: 305805 - RNA, 19 nt, Artificial Sequence
  Description of Artificial Sequence: Synthetic oligonucleotide
  Antisense strand to SEQ ID NO: 305804
ucucacccuuuaaugacua

SEQ ID NO: 305806 - RNA, 19 nt, Artificial Sequence
  Description of Artificial Sequence: Synthetic oligonucleotide
  Sense strand starting at position 2858 of SEQ ID NO: 3927
gucauuaaagggugagagu

SEQ ID NO: 305807 - RNA, 19 nt, Artificial Sequence
  Description of Artificial Sequence: Synthetic oligonucleotide
  Antisense strand to SEQ ID NO: 305806
acucucacccuuuaaugac

SEQ ID NO: 305808 - RNA, 19 nt, Artificial Sequence
  Description of Artificial Sequence: Synthetic oligonucleotide
  Sense strand starting at position 2867 of SEQ ID NO: 3927
gggugagaguagaaagauu

SEQ ID NO: 305809 - RNA, 19 nt, Artificial Sequence
  Description of Artificial Sequence: Synthetic oligonucleotide
  Antisense strand to SEQ ID NO: 305808
aaucuuucuacucucaccc

SEQ ID NO: 305810 - RNA, 19 nt, Artificial Sequence
  Description of Artificial Sequence: Synthetic oligonucleotide
  Sense strand starting at position 2938 of SEQ ID NO: 3927
uaucccaacgacugugaaa

SEQ ID NO: 305811 - RNA, 19 nt, Artificial Sequence
  Description of Artificial Sequence: Synthetic oligonucleotide
  Antisense strand to SEQ ID NO: 305810
uuucacagucguugggaua

SEQ ID NO: 305812 - RNA, 19 nt, Artificial Sequence
  Description of Artificial Sequence: Synthetic oligonucleotide
  Sense strand starting at position 2940 of SEQ ID NO: 3927
ucccaacgacugugaaaua

SEQ ID NO: 305813 - RNA, 19 nt, Artificial Sequence
  Description of Artificial Sequence: Synthetic oligonucleotide
  Antisense strand to SEQ ID NO: 305812
uauuucacagucguuggga

SEQ ID NO: 305814 - RNA, 19 nt, Artificial Sequence
  Description of Artificial Sequence: Synthetic oligonucleotide
  Sense strand starting at position 2998 of SEQ ID NO: 3927
gcuacuggagcauagaaua

SEQ ID NO: 305815 - RNA, 19 nt, Artificial Sequence
  Description of Artificial Sequence: Synthetic oligonucleotide
  Antisense strand to SEQ ID NO: 305814
uauucuaugcuccaguagc

SEQ ID NO: 305816 - RNA, 19 nt, Artificial Sequence
  Description of Artificial Sequence: Synthetic oligonucleotide
  Sense strand starting at position 3030 of SEQ ID NO: 3927
acaccugugccagaugaau

SEQ ID NO: 305817 - RNA, 19 nt, Artificial Sequence
  Description of Artificial Sequence: Synthetic oligonucleotide
  Antisense strand to SEQ ID NO: 305816
auucaucuggcacaggugu

SEQ ID NO: 305818 - RNA, 19 nt, Artificial Sequence
  Description of Artificial Sequence: Synthetic oligonucleotide
  Sense strand starting at position 3096 of SEQ ID NO: 3927
gcucuccugaguuaaggaa

SEQ ID NO: 305819 - RNA, 19 nt, Artificial Sequence
  Description of Artificial Sequence: Synthetic oligonucleotide
  Antisense strand to SEQ ID NO: 305818
uuccuuaacucaggagagc

SEQ ID NO: 305820 - RNA, 19 nt, Artificial Sequence
  Description of Artificial Sequence: Synthetic oligonucleotide
  Sense strand starting at position 3100 of SEQ ID NO: 3927
uccugaguuaaggaagugu

SEQ ID NO: 305821 - RNA, 19 nt, Artificial Sequence
  Description of Artificial Sequence: Synthetic oligonucleotide
  Antisense strand to SEQ ID NO: 305820
acacuuccuuaacucagga

SEQ ID NO: 305822 - RNA, 19 nt, Artificial Sequence
  Description of Artificial Sequence: Synthetic oligonucleotide
  Sense strand starting at position 3241 of SEQ ID NO: 3927
ggcucaucugaauaucuga

SEQ ID NO: 305823 - RNA, 19 nt, Artificial Sequence
  Description of Artificial Sequence: Synthetic oligonucleotide
  Antisense strand to SEQ ID NO: 305822
ucagauauucagaugagcc

SEQ ID NO: 305824 - RNA, 19 nt, Artificial Sequence
  Description of Artificial Sequence: Synthetic oligonucleotide
  Sense strand starting at position 3255 of SEQ ID NO: 3927
ucugauagauggucuauag

SEQ ID NO: 305825 - RNA, 19 nt, Artificial Sequence
  Description of Artificial Sequence: Synthetic oligonucleotide
  Antisense strand to SEQ ID NO: 305824
cuauagaccaucuaucaga

SEQ ID NO: 305826 - RNA, 19 nt, Artificial Sequence
  Description of Artificial Sequence: Synthetic oligonucleotide
  Sense strand starting at position 3337 of SEQ ID NO: 3927
uucucacucugugugauuu

SEQ ID NO: 305827 - RNA, 19 nt, Artificial Sequence
  Description of Artificial Sequence: Synthetic oligonucleotide
  Antisense strand to SEQ ID NO: 305826
aaaucacacagagugagaa

SEQ ID NO: 305828 - RNA, 19 nt, Artificial Sequence
  Description of Artificial Sequence: Synthetic oligonucleotide
  Sense strand starting at position 3416 of SEQ ID NO: 3927
uuacguguucaggugcuua

SEQ ID NO: 305829 - RNA, 19 nt, Artificial Sequence
  Description of Artificial Sequence: Synthetic oligonucleotide
  Antisense strand to SEQ ID NO: 305828
uaagcaccugaacacguaa

SEQ ID NO: 305830 - RNA, 19 nt, Artificial Sequence
  Description of Artificial Sequence: Synthetic oligonucleotide
  Sense strand starting at position 3915 of SEQ ID NO: 3927
augucugucauguaauuga

SEQ ID NO: 305831 - RNA, 19 nt, Artificial Sequence
  Description of Artificial Sequence: Synthetic oligonucleotide
  Antisense strand to SEQ ID NO: 305830
ucaauuacaugacagacau

SEQ ID NO: 305832 - RNA, 19 nt, Artificial Sequence
  Description of Artificial Sequence: Synthetic oligonucleotide
  Sense strand starting at position 36 of SEQ ID NO: 3929
uaaaccauacuguguggaa

SEQ ID NO: 305833 - RNA, 19 nt, Artificial Sequence
  Description of Artificial Sequence: Synthetic oligonucleotide
  Antisense strand to SEQ ID NO: 305832
uuccacacaguaugguuua

SEQ ID NO: 305834 - RNA, 19 nt, Artificial Sequence
  Description of Artificial Sequence: Synthetic oligonucleotide
  Sense strand starting at position 38 of SEQ ID NO: 3929
aaccauacuguguggaagu

SEQ ID NO: 305835 - RNA, 19 nt, Artificial Sequence
  Description of Artificial Sequence: Synthetic oligonucleotide
  Antisense strand to SEQ ID NO: 305834
acuuccacacaguaugguu

SEQ ID NO: 305836 - RNA, 19 nt, Artificial Sequence
  Description of Artificial Sequence: Synthetic oligonucleotide
  Sense strand starting at position 204 of SEQ ID NO: 3929
agaacuuacuguccugaaa

SEQ ID NO: 305837 - RNA, 19 nt, Artificial Sequence
  Description of Artificial Sequence: Synthetic oligonucleotide
  Antisense strand to SEQ ID NO: 305836
uuucaggacaguaaguucu

SEQ ID NO: 305838 - RNA, 19 nt, Artificial Sequence
  Description of Artificial Sequence: Synthetic oligonucleotide
  Sense strand starting at position 376 of SEQ ID NO: 3929
uagauagcuuaugugaucu

SEQ ID NO: 305839 - RNA, 19 nt, Artificial Sequence
  Description of Artificial Sequence: Synthetic oligonucleotide
  Antisense strand to SEQ ID NO: 305838
agaucacauaagcuaucua

SEQ ID NO: 305840 - RNA, 19 nt, Artificial Sequence
  Description of Artificial Sequence: Synthetic oligonucleotide
  Sense strand starting at position 464 of SEQ ID NO: 3929
agccuuagauuccucagau

SEQ ID NO: 305841 - RNA, 19 nt, Artificial Sequence
  Description of Artificial Sequence: Synthetic oligonucleotide
  Antisense strand to SEQ ID NO: 305840
aucugaggaaucuaaggcu

SEQ ID NO: 305842 - RNA, 19 nt, Artificial Sequence
  Description of Artificial Sequence: Synthetic oligonucleotide
  Sense strand starting at position 465 of SEQ ID NO: 3929
gccuuagauuccucagaua

SEQ ID NO: 305843 - RNA, 19 nt, Artificial Sequence
  Description of Artificial Sequence: Synthetic oligonucleotide
  Antisense strand to SEQ ID NO: 305842
uaucugaggaaucuaaggc

SEQ ID NO: 305844 - RNA, 19 nt, Artificial Sequence
  Description of Artificial Sequence: Synthetic oligonucleotide
  Sense strand starting at position 529 of SEQ ID NO: 3929
gggacauuauaauggauga

SEQ ID NO: 305845 - RNA, 19 nt, Artificial Sequence
  Description of Artificial Sequence: Synthetic oligonucleotide
  Antisense strand to SEQ ID NO: 305844
ucauccauuauaauguccc

SEQ ID NO: 305846 - RNA, 19 nt, Artificial Sequence
  Description of Artificial Sequence: Synthetic oligonucleotide
  Sense strand starting at position 540 of SEQ ID NO: 3929
auggaugacgugugugaac

SEQ ID NO: 305847 - RNA, 19 nt, Artificial Sequence
  Description of Artificial Sequence: Synthetic oligonucleotide
  Antisense strand to SEQ ID NO: 305846
guucacacacgucauccau

SEQ ID NO: 305848 - RNA, 19 nt, Artificial Sequence
  Description of Artificial Sequence: Synthetic oligonucleotide
  Sense strand starting at position 1015 of SEQ ID NO: 3929
ggcgguuuaacauacaaug

SEQ ID NO: 305849 - RNA, 19 nt, Artificial Sequence
  Description of Artificial Sequence: Synthetic oligonucleotide
  Antisense strand to SEQ ID NO: 305848
cauuguauguuaaaccgcc

SEQ ID NO: 305850 - RNA, 19 nt, Artificial Sequence
  Description of Artificial Sequence: Synthetic oligonucleotide
  Sense strand starting at position 1109 of SEQ ID NO: 3929
ggaaauagaucgcuuagac

SEQ ID NO: 305851 - RNA, 19 nt, Artificial Sequence
  Description of Artificial Sequence: Synthetic oligonucleotide
  Antisense strand to SEQ ID NO: 305850
gucuaagcgaucuauuucc

SEQ ID NO: 305852 - RNA, 19 nt, Artificial Sequence
  Description of Artificial Sequence: Synthetic oligonucleotide
  Sense strand starting at position 1127 of SEQ ID NO: 3929
cugugacgccaaugagaua

SEQ ID NO: 305853 - RNA, 19 nt, Artificial Sequence
  Description of Artificial Sequence: Synthetic oligonucleotide
  Antisense strand to SEQ ID NO: 305852
uaucucauuggcgucacag

SEQ ID NO: 305854 - RNA, 19 nt, Artificial Sequence
  Description of Artificial Sequence: Synthetic oligonucleotide
  Sense strand starting at position 1139 of SEQ ID NO: 3929
ugagauaaauacgagacaa

SEQ ID NO: 305855 - RNA, 19 nt, Artificial Sequence
  Description of Artificial Sequence: Synthetic oligonucleotide
  Antisense strand to SEQ ID NO: 305854
uugucucguauuuaucuca

SEQ ID NO: 305856 - RNA, 19 nt, Artificial Sequence
  Description of Artificial Sequence: Synthetic oligonucleotide
  Sense strand starting at position 1287 of SEQ ID NO: 3929
ccaugugagccacaguaga

SEQ ID NO: 305857 - RNA, 19 nt, Artificial Sequence
  Description of Artificial Sequence: Synthetic oligonucleotide
  Antisense strand to SEQ ID NO: 305856
ucuacuguggcucacaugg

SEQ ID NO: 305858 - RNA, 19 nt, Artificial Sequence
  Description of Artificial Sequence: Synthetic oligonucleotide
  Sense strand starting at position 1319 of SEQ ID NO: 3929
uccuguguggcauaggaaa

SEQ ID NO: 305859 - RNA, 19 nt, Artificial Sequence
  Description of Artificial Sequence: Synthetic oligonucleotide
  Antisense strand to SEQ ID NO: 305858
uuuccuaugccacacagga

SEQ ID NO: 305860 - RNA, 19 nt, Artificial Sequence
  Description of Artificial Sequence: Synthetic oligonucleotide
  Sense strand starting at position 1397 of SEQ ID NO: 3929
aacgcucauucgcugaaga

SEQ ID NO: 305861 - RNA, 19 nt, Artificial Sequence
  Description of Artificial Sequence: Synthetic oligonucleotide
  Antisense strand to SEQ ID NO: 305860
ucuucagcgaaugagcguu

SEQ ID NO: 305862 - RNA, 19 nt, Artificial Sequence
  Description of Artificial Sequence: Synthetic oligonucleotide
  Sense strand starting at position 1420 of SEQ ID NO: 3929
gugcuaaucgagccuucga

SEQ ID NO: 305863 - RNA, 19 nt, Artificial Sequence
  Description of Artificial Sequence: Synthetic oligonucleotide
  Antisense strand to SEQ ID NO: 305862
ucgaaggcucgauuagcac

SEQ ID NO: 305864 - RNA, 19 nt, Artificial Sequence
  Description of Artificial Sequence: Synthetic oligonucleotide
  Sense strand starting at position 1427 of SEQ ID NO: 3929
ucgagccuucgauauaaac

SEQ ID NO: 305865 - RNA, 19 nt, Artificial Sequence
  Description of Artificial Sequence: Synthetic oligonucleotide
  Antisense strand to SEQ ID NO: 305864
guuuauaucgaaggcucga

SEQ ID NO: 305866 - RNA, 19 nt, Artificial Sequence
  Description of Artificial Sequence: Synthetic oligonucleotide
  Sense strand starting at position 2049 of SEQ ID NO: 3929
caggcaucgccagaaacaa

SEQ ID NO: 305867 - RNA, 19 nt, Artificial Sequence
  Description of Artificial Sequence: Synthetic oligonucleotide
  Antisense strand to SEQ ID NO: 305866
uuguuucuggcgaugccug

SEQ ID NO: 305868 - RNA, 19 nt, Artificial Sequence
  Description of Artificial Sequence: Synthetic oligonucleotide
  Sense strand starting at position 2152 of SEQ ID NO: 3929
agcuuauauguguguauuu

SEQ ID NO: 305869 - RNA, 19 nt, Artificial Sequence
  Description of Artificial Sequence: Synthetic oligonucleotide
  Antisense strand to SEQ ID NO: 305868
aaauacacacauauaagcu

SEQ ID NO: 305870 - RNA, 19 nt, Artificial Sequence
  Description of Artificial Sequence: Synthetic oligonucleotide
  Sense strand starting at position 2196 of SEQ ID NO: 3929
ggaaauauuugacaacgaa

SEQ ID NO: 305871 - RNA, 19 nt, Artificial Sequence
  Description of Artificial Sequence: Synthetic oligonucleotide
  Antisense strand to SEQ ID NO: 305870
uucguugucaaauauuucc

SEQ ID NO: 305872 - RNA, 19 nt, Artificial Sequence
  Description of Artificial Sequence: Synthetic oligonucleotide
  Sense strand starting at position 2210 of SEQ ID NO: 3929
acgaaagaguaugcacaaa

SEQ ID NO: 305873 - RNA, 19 nt, Artificial Sequence
  Description of Artificial Sequence: Synthetic oligonucleotide
  Antisense strand to SEQ ID NO: 305872
uuugugcauacucuuucgu

SEQ ID NO: 305874 - RNA, 19 nt, Artificial Sequence
  Description of Artificial Sequence: Synthetic oligonucleotide
  Sense strand starting at position 2254 of SEQ ID NO: 3929
gaguucagccuucgugaga

SEQ ID NO: 305875 - RNA, 19 nt, Artificial Sequence
  Description of Artificial Sequence: Synthetic oligonucleotide
  Antisense strand to SEQ ID NO: 305874
ucucacgaaggcugaacuc

SEQ ID NO: 305876 - RNA, 19 nt, Artificial Sequence
  Description of Artificial Sequence: Synthetic oligonucleotide
  Sense strand starting at position 2377 of SEQ ID NO: 3929
uuuaaugucuucucuguau

SEQ ID NO: 305877 - RNA, 19 nt, Artificial Sequence
  Description of Artificial Sequence: Synthetic oligonucleotide
  Antisense strand to SEQ ID NO: 305876
auacagagaagacauuaaa

SEQ ID NO: 305878 - RNA, 19 nt, Artificial Sequence
  Description of Artificial Sequence: Synthetic oligonucleotide
  Sense strand starting at position 2445 of SEQ ID NO: 3929
ugggauguuucucuuucca

SEQ ID NO: 305879 - RNA, 19 nt, Artificial Sequence
  Description of Artificial Sequence: Synthetic oligonucleotide
  Antisense strand to SEQ ID NO: 305878
uggaaagagaaacauccca

SEQ ID NO: 305880 - RNA, 19 nt, Artificial Sequence
  Description of Artificial Sequence: Synthetic oligonucleotide
  Sense strand starting at position 2447 of SEQ ID NO: 3929
ggauguuucucuuuccacu

SEQ ID NO: 305881 - RNA, 19 nt, Artificial Sequence
  Description of Artificial Sequence: Synthetic oligonucleotide
  Antisense strand to SEQ ID NO: 305880
aguggaaagagaaacaucc

SEQ ID NO: 305882 - RNA, 19 nt, Artificial Sequence
  Description of Artificial Sequence: Synthetic oligonucleotide
  Sense strand starting at position 2534 of SEQ ID NO: 3929
cccuuuguucuugaagagu

SEQ ID NO: 305883 - RNA, 19 nt, Artificial Sequence
  Description of Artificial Sequence: Synthetic oligonucleotide
  Antisense strand to SEQ ID NO: 305882
acucuucaagaacaaaggg

SEQ ID NO: 305884 - RNA, 19 nt, Artificial Sequence
  Description of Artificial Sequence: Synthetic oligonucleotide
  Sense strand starting at position 2537 of SEQ ID NO: 3929
uuuguucuugaagaguuau

SEQ ID NO: 305885 - RNA, 19 nt, Artificial Sequence
  Description of Artificial Sequence: Synthetic oligonucleotide
  Antisense strand to SEQ ID NO: 305884
auaacucuucaagaacaaa

SEQ ID NO: 305886 - RNA, 19 nt, Artificial Sequence
  Description of Artificial Sequence: Synthetic oligonucleotide
  Sense strand starting at position 2577 of SEQ ID NO: 3929
uguguucuugaacaguuau

SEQ ID NO: 305887 - RNA, 19 nt, Artificial Sequence
  Description of Artificial Sequence: Synthetic oligonucleotide
  Antisense strand to SEQ ID NO: 305886
auaacuguucaagaacaca

SEQ ID NO: 305888 - RNA, 19 nt, Artificial Sequence
  Description of Artificial Sequence: Synthetic oligonucleotide
  Sense strand starting at position 2621 of SEQ ID NO: 3929
uguguugcacucgccagau

SEQ ID NO: 305889 - RNA, 19 nt, Artificial Sequence
  Description of Artificial Sequence: Synthetic oligonucleotide
  Antisense strand to SEQ ID NO: 305888
aucuggcgagugcaacaca

SEQ ID NO: 305890 - RNA, 19 nt, Artificial Sequence
  Description of Artificial Sequence: Synthetic oligonucleotide
  Sense strand starting at position 2625 of SEQ ID NO: 3929
uugcacucgccagaugaau

SEQ ID NO: 305891 - RNA, 19 nt, Artificial Sequence
  Description of Artificial Sequence: Synthetic oligonucleotide
  Antisense strand to SEQ ID NO: 305890
auucaucuggcgagugcaa

SEQ ID NO: 305892 - RNA, 19 nt, Artificial Sequence
  Description of Artificial Sequence: Synthetic oligonucleotide
  Sense strand starting at position 2627 of SEQ ID NO: 3929
gcacucgccagaugaauug

SEQ ID NO: 305893 - RNA, 19 nt, Artificial Sequence
  Description of Artificial Sequence: Synthetic oligonucleotide
  Antisense strand to SEQ ID NO: 305892
caauucaucuggcgagugc

SEQ ID NO: 305894 - RNA, 19 nt, Artificial Sequence
  Description of Artificial Sequence: Synthetic oligonucleotide
  Sense strand starting at position 2634 of SEQ ID NO: 3929
ccagaugaauuggaaugau

SEQ ID NO: 305895 - RNA, 19 nt, Artificial Sequence
  Description of Artificial Sequence: Synthetic oligonucleotide
  Antisense strand to SEQ ID NO: 305894
aucauuccaauucaucugg

SEQ ID NO: 305896 - RNA, 19 nt, Artificial Sequence
  Description of Artificial Sequence: Synthetic oligonucleotide
  Sense strand starting at position 2680 of SEQ ID NO: 3929
cuugcuuuguuucugacau

SEQ ID NO: 305897 - RNA, 19 nt, Artificial Sequence
  Description of Artificial Sequence: Synthetic oligonucleotide
  Antisense strand to SEQ ID NO: 305896
augucagaaacaaagcaag

SEQ ID NO: 305898 - RNA, 19 nt, Artificial Sequence
  Description of Artificial Sequence: Synthetic oligonucleotide
  Sense strand starting at position 2687 of SEQ ID NO: 3929
uguuucugacauuauucua

SEQ ID NO: 305899 - RNA, 19 nt, Artificial Sequence
  Description of Artificial Sequence: Synthetic oligonucleotide
  Antisense strand to SEQ ID NO: 305898
uagaauaaugucagaaaca

SEQ ID NO: 305900 - RNA, 19 nt, Artificial Sequence
  Description of Artificial Sequence: Synthetic oligonucleotide
  Sense strand starting at position 3106 of SEQ ID NO: 3929
uucuuaucucguguuuguu

SEQ ID NO: 305901 - RNA, 19 nt, Artificial Sequence
  Description of Artificial Sequence: Synthetic oligonucleotide
  Antisense strand to SEQ ID NO: 305900
aacaaacacgagauaagaa

SEQ ID NO: 305902 - RNA, 19 nt, Artificial Sequence
  Description of Artificial Sequence: Synthetic oligonucleotide
  Sense strand starting at position 3133 of SEQ ID NO: 3929
acccauucgucuguccuaa

SEQ ID NO: 305903 - RNA, 19 nt, Artificial Sequence
  Description of Artificial Sequence: Synthetic oligonucleotide
  Antisense strand to SEQ ID NO: 305902
uuaggacagacgaaugggu

SEQ ID NO: 305904 - RNA, 19 nt, Artificial Sequence
  Description of Artificial Sequence: Synthetic oligonucleotide
  Sense strand starting at position 3135 of SEQ ID NO: 3929
ccauucgucuguccuaaag

SEQ ID NO: 305905 - RNA, 19 nt, Artificial Sequence
  Description of Artificial Sequence: Synthetic oligonucleotide
  Antisense strand to SEQ ID NO: 305904
cuuuaggacagacgaaugg

SEQ ID NO: 305906 - RNA, 19 nt, Artificial Sequence
  Description of Artificial Sequence: Synthetic oligonucleotide
  Sense strand starting at position 3523 of SEQ ID NO: 3929
guuguugaguucuuauaug

SEQ ID NO: 305907 - RNA, 19 nt, Artificial Sequence
  Description of Artificial Sequence: Synthetic oligonucleotide
  Antisense strand to SEQ ID NO: 305906
cauauaagaacucaacaac

SEQ ID NO: 305908 - RNA, 19 nt, Artificial Sequence
  Description of Artificial Sequence: Synthetic oligonucleotide
  Sense strand starting at position 3534 of SEQ ID NO: 3929
cuuauaugcccaugcugau

SEQ ID NO: 305909 - RNA, 19 nt, Artificial Sequence
  Description of Artificial Sequence: Synthetic oligonucleotide
  Antisense strand to SEQ ID NO: 305908
aucagcaugggcauauaag

SEQ ID NO: 305910 - RNA, 19 nt, Artificial Sequence
  Description of Artificial Sequence: Synthetic oligonucleotide
  Sense strand starting at position 3983 of SEQ ID NO: 3929
guucccuucuggucuauua

SEQ ID NO: 305911 - RNA, 19 nt, Artificial Sequence
  Description of Artificial Sequence: Synthetic oligonucleotide
  Antisense strand to SEQ ID NO: 305910
uaauagaccagaagggaac

SEQ ID NO: 305912 - RNA, 19 nt, Artificial Sequence
  Description of Artificial Sequence: Synthetic oligonucleotide
  Sense strand starting at position 10 of SEQ ID NO: 3930
ucuggagaucccuguuuau

SEQ ID NO: 305913 - RNA, 19 nt, Artificial Sequence
  Description of Artificial Sequence: Synthetic oligonucleotide
  Antisense strand to SEQ ID NO: 305912
auaaacagggaucuccaga

SEQ ID NO: 305914 - RNA, 19 nt, Artificial Sequence
  Description of Artificial Sequence: Synthetic oligonucleotide
  Sense strand starting at position 13 of SEQ ID NO: 3930
ggagaucccuguuuauuag

SEQ ID NO: 305915 - RNA, 19 nt, Artificial Sequence
  Description of Artificial Sequence: Synthetic oligonucleotide
  Antisense strand to SEQ ID NO: 305914
cuaauaaacagggaucucc

SEQ ID NO: 305916 - RNA, 19 nt, Artificial Sequence
  Description of Artificial Sequence: Synthetic oligonucleotide
  Sense strand starting at position 48 of SEQ ID NO: 3930
cuggcaauggucugggaua

SEQ ID NO: 305917 - RNA, 19 nt, Artificial Sequence
  Description of Artificial Sequence: Synthetic oligonucleotide
  Antisense strand to SEQ ID NO: 305916
uaucccagaccauugccag

SEQ ID NO: 305918 - RNA, 19 nt, Artificial Sequence
  Description of Artificial Sequence: Synthetic oligonucleotide
  Sense strand starting at position 50 of SEQ ID NO: 3930
ggcaauggucugggauaug

SEQ ID NO: 305919 - RNA, 19 nt, Artificial Sequence
  Description of Artificial Sequence: Synthetic oligonucleotide
  Antisense strand to SEQ ID NO: 305918
cauaucccagaccauugcc

SEQ ID NO: 305920 - RNA, 19 nt, Artificial Sequence
  Description of Artificial Sequence: Synthetic oligonucleotide
  Sense strand starting at position 271 of SEQ ID NO: 3930
ugagcugaauagguucuua

SEQ ID NO: 305921 - RNA, 19 nt, Artificial Sequence
  Description of Artificial Sequence: Synthetic oligonucleotide
  Antisense strand to SEQ ID NO: 305920
uaagaaccuauucagcuca

SEQ ID NO: 305922 - RNA, 19 nt, Artificial Sequence
  Description of Artificial Sequence: Synthetic oligonucleotide
  Sense strand starting at position 275 of SEQ ID NO: 3930
cugaauagguucuuagaca

SEQ ID NO: 305923 - RNA, 19 nt, Artificial Sequence
  Description of Artificial Sequence: Synthetic oligonucleotide
  Antisense strand to SEQ ID NO: 305922
ugucuaagaaccuauucag

SEQ ID NO: 305924 - RNA, 19 nt, Artificial Sequence
  Description of Artificial Sequence: Synthetic oligonucleotide
  Sense strand starting at position 360 of SEQ ID NO: 3930
guaaauacaguguaaccua

SEQ ID NO: 305925 - RNA, 19 nt, Artificial Sequence
  Description of Artificial Sequence: Synthetic oligonucleotide
  Antisense strand to SEQ ID NO: 305924
uagguuacacuguauuuac

SEQ ID NO: 305926 - RNA, 19 nt, Artificial Sequence
  Description of Artificial Sequence: Synthetic oligonucleotide
  Sense strand starting at position 381 of SEQ ID NO: 3930
gcaucauucgcuucgcuua

SEQ ID NO: 305927 - RNA, 19 nt, Artificial Sequence
  Description of Artificial Sequence: Synthetic oligonucleotide
  Antisense strand to SEQ ID NO: 305926
uaagcgaagcgaaugaugc

SEQ ID NO: 305928 - RNA, 19 nt, Artificial Sequence
  Description of Artificial Sequence: Synthetic oligonucleotide
  Sense strand starting at position 613 of SEQ ID NO: 3930
caaccuucugcaggaguaa

SEQ ID NO: 305929 - RNA, 19 nt, Artificial Sequence
  Description of Artificial Sequence: Synthetic oligonucleotide
  Antisense strand to SEQ ID NO: 305928
uuacuccugcagaagguug

SEQ ID NO: 305930 - RNA, 19 nt, Artificial Sequence
  Description of Artificial Sequence: Synthetic oligonucleotide
  Sense strand starting at position 614 of SEQ ID NO: 3930
aaccuucugcaggaguaau

SEQ ID NO: 305931 - RNA, 19 nt, Artificial Sequence
  Description of Artificial Sequence: Synthetic oligonucleotide
  Antisense strand to SEQ ID NO: 305930
auuacuccugcagaagguu

SEQ ID NO: 305932 - RNA, 19 nt, Artificial Sequence
  Description of Artificial Sequence: Synthetic oligonucleotide
  Sense strand starting at position 737 of SEQ ID NO: 3930
guaguacugcaguggauuu

SEQ ID NO: 305933 - RNA, 19 nt, Artificial Sequence
  Description of Artificial Sequence: Synthetic oligonucleotide
  Antisense strand to SEQ ID NO: 305932
aaauccacugcaguacuac

SEQ ID NO: 305934 - RNA, 19 nt, Artificial Sequence
  Description of Artificial Sequence: Synthetic oligonucleotide
  Sense strand starting at position 969 of SEQ ID NO: 3930
aaguaaggguuucuuugaa

SEQ ID NO: 305935 - RNA, 19 nt, Artificial Sequence
  Description of Artificial Sequence: Synthetic oligonucleotide
  Antisense strand to SEQ ID NO: 305934
uucaaagaaacccuuacuu

SEQ ID NO: 305936 - RNA, 19 nt, Artificial Sequence
  Description of Artificial Sequence: Synthetic oligonucleotide
  Sense strand starting at position 1036 of SEQ ID NO: 3930
cuuccaaauugguuaagua

SEQ ID NO: 305937 - RNA, 19 nt, Artificial Sequence
  Description of Artificial Sequence: Synthetic oligonucleotide
  Antisense strand to SEQ ID NO: 305936
uacuuaaccaauuuggaag

SEQ ID NO: 305938 - RNA, 19 nt, Artificial Sequence
  Description of Artificial Sequence: Synthetic oligonucleotide
  Sense strand starting at position 1037 of SEQ ID NO: 3930
uuccaaauugguuaaguag

SEQ ID NO: 305939 - RNA, 19 nt, Artificial Sequence
  Description of Artificial Sequence: Synthetic oligonucleotide
  Antisense strand to SEQ ID NO: 305938
cuacuuaaccaauuuggaa

SEQ ID NO: 305940 - RNA, 19 nt, Artificial Sequence
  Description of Artificial Sequence: Synthetic oligonucleotide
  Sense strand starting at position 1046 of SEQ ID NO: 3930
gguuaaguagcuuaacauc

SEQ ID NO: 305941 - RNA, 19 nt, Artificial Sequence
  Description of Artificial Sequence: Synthetic oligonucleotide
  Antisense strand to SEQ ID NO: 305940
gauguuaagcuacuuaacc

SEQ ID NO: 305942 - RNA, 19 nt, Artificial Sequence
  Description of Artificial Sequence: Synthetic oligonucleotide
  Sense strand starting at position 1624 of SEQ ID NO: 3930
cuuugauggcuccaugacu

SEQ ID NO: 305943 - RNA, 19 nt, Artificial Sequence
  Description of Artificial Sequence: Synthetic oligonucleotide
  Antisense strand to SEQ ID NO: 305942
agucauggagccaucaaag

SEQ ID NO: 305944 - RNA, 19 nt, Artificial Sequence
  Description of Artificial Sequence: Synthetic oligonucleotide
  Sense strand starting at position 1829 of SEQ ID NO: 3930
cagagcauagucgagagua

SEQ ID NO: 305945 - RNA, 19 nt, Artificial Sequence
  Description of Artificial Sequence: Synthetic oligonucleotide
  Antisense strand to SEQ ID NO: 305944
uacucucgacuaugcucug

SEQ ID NO: 305946 - RNA, 19 nt, Artificial Sequence
  Description of Artificial Sequence: Synthetic oligonucleotide
  Sense strand starting at position 2055 of SEQ ID NO: 3930
gguggugucuuuacgucuu

SEQ ID NO: 305947 - RNA, 19 nt, Artificial Sequence
  Description of Artificial Sequence: Synthetic oligonucleotide
  Antisense strand to SEQ ID NO: 305946
aagacguaaagacaccacc

SEQ ID NO: 305948 - RNA, 19 nt, Artificial Sequence
  Description of Artificial Sequence: Synthetic oligonucleotide
  Sense strand starting at position 2058 of SEQ ID NO: 3930
ggugucuuuacgucuuugu

SEQ ID NO: 305949 - RNA, 19 nt, Artificial Sequence
  Description of Artificial Sequence: Synthetic oligonucleotide
  Antisense strand to SEQ ID NO: 305948
acaaagacguaaagacacc

SEQ ID NO: 305950 - RNA, 19 nt, Artificial Sequence
  Description of Artificial Sequence: Synthetic oligonucleotide
  Sense strand starting at position 2060 of SEQ ID NO: 3930
ugucuuuacgucuuuguua

SEQ ID NO: 305951 - RNA, 19 nt, Artificial Sequence
  Description of Artificial Sequence: Synthetic oligonucleotide
  Antisense strand to SEQ ID NO: 305950
uaacaaagacguaaagaca

SEQ ID NO: 305952 - RNA, 19 nt, Artificial Sequence
  Description of Artificial Sequence: Synthetic oligonucleotide
  Sense strand starting at position 2063 of SEQ ID NO: 3930
cuuuacgucuuuguuauuu

SEQ ID NO: 305953 - RNA, 19 nt, Artificial Sequence
  Description of Artificial Sequence: Synthetic oligonucleotide
  Antisense strand to SEQ ID NO: 305952
aaauaacaaagacguaaag

SEQ ID NO: 305954 - RNA, 19 nt, Artificial Sequence
  Description of Artificial Sequence: Synthetic oligonucleotide
  Sense strand starting at position 2104 of SEQ ID NO: 3930
augauauuacauggugguu

SEQ ID NO: 305955 - RNA, 19 nt, Artificial Sequence
  Description of Artificial Sequence: Synthetic oligonucleotide
  Antisense strand to SEQ ID NO: 305954
aaccaccauguaauaucau

SEQ ID NO: 305956 - RNA, 19 nt, Artificial Sequence
  Description of Artificial Sequence: Synthetic oligonucleotide
  Sense strand starting at position 2140 of SEQ ID NO: 3930
aaagucuaaugagcugaga

SEQ ID NO: 305957 - RNA, 19 nt, Artificial Sequence
  Description of Artificial Sequence: Synthetic oligonucleotide
  Antisense strand to SEQ ID NO: 305956
ucucagcucauuagacuuu

SEQ ID NO: 305958 - RNA, 19 nt, Artificial Sequence
  Description of Artificial Sequence: Synthetic oligonucleotide
  Sense strand starting at position 2142 of SEQ ID NO: 3930
agucuaaugagcugagaac

SEQ ID NO: 305959 - RNA, 19 nt, Artificial Sequence
  Description of Artificial Sequence: Synthetic oligonucleotide
  Antisense strand to SEQ ID NO: 305958
guucucagcucauuagacu

SEQ ID NO: 305960 - RNA, 19 nt, Artificial Sequence
  Description of Artificial Sequence: Synthetic oligonucleotide
  Sense strand starting at position 2172 of SEQ ID NO: 3930
uuuguuggccacuaggaua

SEQ ID NO: 305961 - RNA, 19 nt, Artificial Sequence
  Description of Artificial Sequence: Synthetic oligonucleotide
  Antisense strand to SEQ ID NO: 305960
uauccuaguggccaacaaa

SEQ ID NO: 305962 - RNA, 19 nt, Artificial Sequence
  Description of Artificial Sequence: Synthetic oligonucleotide
  Sense strand starting at position 2274 of SEQ ID NO: 3930
uuguacaugcuagauacua

SEQ ID NO: 305963 - RNA, 19 nt, Artificial Sequence
  Description of Artificial Sequence: Synthetic oligonucleotide
  Antisense strand to SEQ ID NO: 305962
uaguaucuagcauguacaa

SEQ ID NO: 305964 - RNA, 19 nt, Artificial Sequence
  Description of Artificial Sequence: Synthetic oligonucleotide
  Sense strand starting at position 2298 of SEQ ID NO: 3930
ucauucuuccaguauaggu

SEQ ID NO: 305965 - RNA, 19 nt, Artificial Sequence
  Description of Artificial Sequence: Synthetic oligonucleotide
  Antisense strand to SEQ ID NO: 305964
accuauacuggaagaauga

SEQ ID NO: 305966 - RNA, 19 nt, Artificial Sequence
  Description of Artificial Sequence: Synthetic oligonucleotide
  Sense strand starting at position 2327 of SEQ ID NO: 3930
uuucucuuccaguauaggu

SEQ ID NO: 305967 - RNA, 19 nt, Artificial Sequence
  Description of Artificial Sequence: Synthetic oligonucleotide
  Antisense strand to SEQ ID NO: 305966
accuauacuggaagagaaa

SEQ ID NO: 305968 - RNA, 19 nt, Artificial Sequence
  Description of Artificial Sequence: Synthetic oligonucleotide
  Sense strand starting at position 3118 of SEQ ID NO: 3930
uuaaauguuucugucagaa

SEQ ID NO: 305969 - RNA, 19 nt, Artificial Sequence
  Description of Artificial Sequence: Synthetic oligonucleotide
  Antisense strand to SEQ ID NO: 305968
uucugacagaaacauuuaa

SEQ ID NO: 305970 - RNA, 19 nt, Artificial Sequence
  Description of Artificial Sequence: Synthetic oligonucleotide
  Sense strand starting at position 3138 of SEQ ID NO: 3930
ugacauaaaucauuggcua

SEQ ID NO: 305971 - RNA, 19 nt, Artificial Sequence
  Description of Artificial Sequence: Synthetic oligonucleotide
  Antisense strand to SEQ ID NO: 305970
uagccaaugauuuauguca

SEQ ID NO: 305972 - RNA, 19 nt, Artificial Sequence
  Description of Artificial Sequence: Synthetic oligonucleotide
  Sense strand starting at position 3343 of SEQ ID NO: 3930
aggagaaauuuauguaaga

SEQ ID NO: 305973 - RNA, 19 nt, Artificial Sequence
  Description of Artificial Sequence: Synthetic oligonucleotide
  Antisense strand to SEQ ID NO: 305972
ucuuacauaaauuucuccu

SEQ ID NO: 305974 - RNA, 19 nt, Artificial Sequence
  Description of Artificial Sequence: Synthetic oligonucleotide
  Sense strand starting at position 3409 of SEQ ID NO: 3930
uaagcaauauuuggagaga

SEQ ID NO: 305975 - RNA, 19 nt, Artificial Sequence
  Description of Artificial Sequence: Synthetic oligonucleotide
  Antisense strand to SEQ ID NO: 305974
ucucuccaaauauugcuua

SEQ ID NO: 305976 - RNA, 19 nt, Artificial Sequence
  Description of Artificial Sequence: Synthetic oligonucleotide
  Sense strand starting at position 3410 of SEQ ID NO: 3930
aagcaauauuuggagagaa

SEQ ID NO: 305977 - RNA, 19 nt, Artificial Sequence
  Description of Artificial Sequence: Synthetic oligonucleotide
  Antisense strand to SEQ ID NO: 305976
uucucuccaaauauugcuu

SEQ ID NO: 305978 - RNA, 19 nt, Artificial Sequence
  Description of Artificial Sequence: Synthetic oligonucleotide
  Sense strand starting at position 3435 of SEQ ID NO: 3930
agucacauugaugguuuaa

SEQ ID NO: 305979 - RNA, 19 nt, Artificial Sequence
  Description of Artificial Sequence: Synthetic oligonucleotide
  Antisense strand to SEQ ID NO: 305978
uuaaaccaucaaugugacu

SEQ ID NO: 305980 - RNA, 19 nt, Artificial Sequence
  Description of Artificial Sequence: Synthetic oligonucleotide
  Sense strand starting at position 3437 of SEQ ID NO: 3930
ucacauugaugguuuaaau

SEQ ID NO: 305981 - RNA, 19 nt, Artificial Sequence
  Description of Artificial Sequence: Synthetic oligonucleotide
  Antisense strand to SEQ ID NO: 305980
auuuaaaccaucaauguga

SEQ ID NO: 305982 - RNA, 19 nt, Artificial Sequence
  Description of Artificial Sequence: Synthetic oligonucleotide
  Sense strand starting at position 3796 of SEQ ID NO: 3930
uggauauaacggugaacag

SEQ ID NO: 305983 - RNA, 19 nt, Artificial Sequence
  Description of Artificial Sequence: Synthetic oligonucleotide
  Antisense strand to SEQ ID NO: 305982
cuguucaccguuauaucca

SEQ ID NO: 305984 - RNA, 19 nt, Artificial Sequence
  Description of Artificial Sequence: Synthetic oligonucleotide
  Sense strand starting at position 3856 of SEQ ID NO: 3930
ggagaaagauaauaacaag

SEQ ID NO: 305985 - RNA, 19 nt, Artificial Sequence
  Description of Artificial Sequence: Synthetic oligonucleotide
  Antisense strand to SEQ ID NO: 305984
cuuguuauuaucuuucucc

SEQ ID NO: 305986 - RNA, 19 nt, Artificial Sequence
  Description of Artificial Sequence: Synthetic oligonucleotide
  Sense strand starting at position 3962 of SEQ ID NO: 3930
ggaggagauuguaguauga

SEQ ID NO: 305987 - RNA, 19 nt, Artificial Sequence
  Description of Artificial Sequence: Synthetic oligonucleotide
  Antisense strand to SEQ ID NO: 305986
ucauacuacaaucuccucc

SEQ ID NO: 305988 - RNA, 19 nt, Artificial Sequence
  Description of Artificial Sequence: Synthetic oligonucleotide
  Sense strand starting at position 3966 of SEQ ID NO: 3930
gagauuguaguaugaaaua

SEQ ID NO: 305989 - RNA, 19 nt, Artificial Sequence
  Description of Artificial Sequence: Synthetic oligonucleotide
  Antisense strand to SEQ ID NO: 305988
uauuucauacuacaaucuc

SEQ ID NO: 305990 - RNA, 19 nt, Artificial Sequence
  Description of Artificial Sequence: Synthetic oligonucleotide
  Sense strand starting at position 3977 of SEQ ID NO: 3930
augaaauaggguggucaga

SEQ ID NO: 305991 - RNA, 19 nt, Artificial Sequence
  Description of Artificial Sequence: Synthetic oligonucleotide
  Antisense strand to SEQ ID NO: 305990
ucugaccacccuauuucau

SEQ ID NO: 305992 - RNA, 19 nt, Artificial Sequence
  Description of Artificial Sequence: Synthetic oligonucleotide
  Sense strand starting at position 15 of SEQ ID NO: 3931
ugauauagccacuggucaa

SEQ ID NO: 305993 - RNA, 19 nt, Artificial Sequence
  Description of Artificial Sequence: Synthetic oligonucleotide
  Antisense strand to SEQ ID NO: 305992
uugaccaguggcuauauca

SEQ ID NO: 305994 - RNA, 19 nt, Artificial Sequence
  Description of Artificial Sequence: Synthetic oligonucleotide
  Sense strand starting at position 28 of SEQ ID NO: 3931
ggucaaauccuauagcaca

SEQ ID NO: 305995 - RNA, 19 nt, Artificial Sequence
  Description of Artificial Sequence: Synthetic oligonucleotide
  Antisense strand to SEQ ID NO: 305994
ugugcuauaggauuugacc

SEQ ID NO: 305996 - RNA, 19 nt, Artificial Sequence
  Description of Artificial Sequence: Synthetic oligonucleotide
  Sense strand starting at position 465 of SEQ ID NO: 3931
uggcauauguuauucuacu

SEQ ID NO: 305997 - RNA, 19 nt, Artificial Sequence
  Description of Artificial Sequence: Synthetic oligonucleotide
  Antisense strand to SEQ ID NO: 305996
aguagaauaacauaugcca

SEQ ID NO: 305998 - RNA, 19 nt, Artificial Sequence
  Description of Artificial Sequence: Synthetic oligonucleotide
  Sense strand starting at position 466 of SEQ ID NO: 3931
ggcauauguuauucuacua

SEQ ID NO: 305999 - RNA, 19 nt, Artificial Sequence
  Description of Artificial Sequence: Synthetic oligonucleotide
  Antisense strand to SEQ ID NO: 305998
uaguagaauaacauaugcc

SEQ ID NO: 306000 - RNA, 19 nt, Artificial Sequence
  Description of Artificial Sequence: Synthetic oligonucleotide
  Sense strand starting at position 893 of SEQ ID NO: 3931
agugaacuguguuucuauc

SEQ ID NO: 306001 - RNA, 19 nt, Artificial Sequence
  Description of Artificial Sequence: Synthetic oligonucleotide
  Antisense strand to SEQ ID NO: 306000
gauagaaacacaguucacu

SEQ ID NO: 306002 - RNA, 19 nt, Artificial Sequence
  Description of Artificial Sequence: Synthetic oligonucleotide
  Sense strand starting at position 923 of SEQ ID NO: 3931
cccucagugcuuuaggcau

SEQ ID NO: 306003 - RNA, 19 nt, Artificial Sequence
  Description of Artificial Sequence: Synthetic oligonucleotide
  Antisense strand to SEQ ID NO: 306002
augccuaaagcacugaggg

SEQ ID NO: 306004 - RNA, 19 nt, Artificial Sequence
  Description of Artificial Sequence: Synthetic oligonucleotide
  Sense strand starting at position 929 of SEQ ID NO: 3931
gugcuuuaggcauaacaca

SEQ ID NO: 306005 - RNA, 19 nt, Artificial Sequence
  Description of Artificial Sequence: Synthetic oligonucleotide
  Antisense strand to SEQ ID NO: 306004
uguguuaugccuaaagcac

SEQ ID NO: 306006 - RNA, 19 nt, Artificial Sequence
  Description of Artificial Sequence: Synthetic oligonucleotide
  Sense strand starting at position 1232 of SEQ ID NO: 3931
gaagacagucugugguuua

SEQ ID NO: 306007 - RNA, 19 nt, Artificial Sequence
  Description of Artificial Sequence: Synthetic oligonucleotide
  Antisense strand to SEQ ID NO: 306006
uaaaccacagacugucuuc

SEQ ID NO: 306008 - RNA, 19 nt, Artificial Sequence
  Description of Artificial Sequence: Synthetic oligonucleotide
  Sense strand starting at position 1237 of SEQ ID NO: 3931
cagucugugguuuacugaa

SEQ ID NO: 306009 - RNA, 19 nt, Artificial Sequence
  Description of Artificial Sequence: Synthetic oligonucleotide
  Antisense strand to SEQ ID NO: 306008
uucaguaaaccacagacug

SEQ ID NO: 306010 - RNA, 19 nt, Artificial Sequence
  Description of Artificial Sequence: Synthetic oligonucleotide
  Sense strand starting at position 1239 of SEQ ID NO: 3931
gucugugguuuacugaaua

SEQ ID NO: 306011 - RNA, 19 nt, Artificial Sequence
  Description of Artificial Sequence: Synthetic oligonucleotide
  Antisense strand to SEQ ID NO: 306010
uauucaguaaaccacagac

SEQ ID NO: 306012 - RNA, 19 nt, Artificial Sequence
  Description of Artificial Sequence: Synthetic oligonucleotide
  Sense strand starting at position 1244 of SEQ ID NO: 3931
ugguuuacugaauauuagu

SEQ ID NO: 306013 - RNA, 19 nt, Artificial Sequence
  Description of Artificial Sequence: Synthetic oligonucleotide
  Antisense strand to SEQ ID NO: 306012
acuaauauucaguaaacca

SEQ ID NO: 306014 - RNA, 19 nt, Artificial Sequence
  Description of Artificial Sequence: Synthetic oligonucleotide
  Sense strand starting at position 1252 of SEQ ID NO: 3931
ugaauauuaguguaccaau

SEQ ID NO: 306015 - RNA, 19 nt, Artificial Sequence
  Description of Artificial Sequence: Synthetic oligonucleotide
  Antisense strand to SEQ ID NO: 306014
auugguacacuaauauuca

SEQ ID NO: 306016 - RNA, 19 nt, Artificial Sequence
  Description of Artificial Sequence: Synthetic oligonucleotide
  Sense strand starting at position 1271 of SEQ ID NO: 3931
guuaauuucuaagcuguga

SEQ ID NO: 306017 - RNA, 19 nt, Artificial Sequence
  Description of Artificial Sequence: Synthetic oligonucleotide
  Antisense strand to SEQ ID NO: 306016
ucacagcuuagaaauuaac

SEQ ID NO: 306018 - RNA, 19 nt, Artificial Sequence
  Description of Artificial Sequence: Synthetic oligonucleotide
  Sense strand starting at position 1282 of SEQ ID NO: 3931
agcugugauaaauguacga

SEQ ID NO: 306019 - RNA, 19 nt, Artificial Sequence
  Description of Artificial Sequence: Synthetic oligonucleotide
  Antisense strand to SEQ ID NO: 306018
ucguacauuuaucacagcu

SEQ ID NO: 306020 - RNA, 19 nt, Artificial Sequence
  Description of Artificial Sequence: Synthetic oligonucleotide
  Sense strand starting at position 1284 of SEQ ID NO: 3931
cugugauaaauguacgaug

SEQ ID NO: 306021 - RNA, 19 nt, Artificial Sequence
  Description of Artificial Sequence: Synthetic oligonucleotide
  Antisense strand to SEQ ID NO: 306020
caucguacauuuaucacag

SEQ ID NO: 306022 - RNA, 19 nt, Artificial Sequence
  Description of Artificial Sequence: Synthetic oligonucleotide
  Sense strand starting at position 1286 of SEQ ID NO: 3931
gugauaaauguacgauggu

SEQ ID NO: 306023 - RNA, 19 nt, Artificial Sequence
  Description of Artificial Sequence: Synthetic oligonucleotide
  Antisense strand to SEQ ID NO: 306022
accaucguacauuuaucac

SEQ ID NO: 306024 - RNA, 19 nt, Artificial Sequence
  Description of Artificial Sequence: Synthetic oligonucleotide
  Sense strand starting at position 1296 of SEQ ID NO: 3931
uacgaugguuauguaaagu

SEQ ID NO: 306025 - RNA, 19 nt, Artificial Sequence
  Description of Artificial Sequence: Synthetic oligonucleotide
  Antisense strand to SEQ ID NO: 306024
acuuuacauaaccaucgua

SEQ ID NO: 306026 - RNA, 19 nt, Artificial Sequence
  Description of Artificial Sequence: Synthetic oligonucleotide
  Sense strand starting at position 1505 of SEQ ID NO: 3931
ugauaacuuccaggucaga

SEQ ID NO: 306027 - RNA, 19 nt, Artificial Sequence
  Description of Artificial Sequence: Synthetic oligonucleotide
  Antisense strand to SEQ ID NO: 306026
ucugaccuggaaguuauca

SEQ ID NO: 306028 - RNA, 19 nt, Artificial Sequence
  Description of Artificial Sequence: Synthetic oligonucleotide
  Sense strand starting at position 1521 of SEQ ID NO: 3931
agaagucauguucgggaca

SEQ ID NO: 306029 - RNA, 19 nt, Artificial Sequence
  Description of Artificial Sequence: Synthetic oligonucleotide
  Antisense strand to SEQ ID NO: 306028
ugucccgaacaugacuucu

SEQ ID NO: 306030 - RNA, 19 nt, Artificial Sequence
  Description of Artificial Sequence: Synthetic oligonucleotide
  Sense strand starting at position 1524 of SEQ ID NO: 3931
agucauguucgggacagga

SEQ ID NO: 306031 - RNA, 19 nt, Artificial Sequence
  Description of Artificial Sequence: Synthetic oligonucleotide
  Antisense strand to SEQ ID NO: 306030
uccugucccgaacaugacu

SEQ ID NO: 306032 - RNA, 19 nt, Artificial Sequence
  Description of Artificial Sequence: Synthetic oligonucleotide
  Sense strand starting at position 1939 of SEQ ID NO: 3931
aagucuuucuggcccagaa

SEQ ID NO: 306033 - RNA, 19 nt, Artificial Sequence
  Description of Artificial Sequence: Synthetic oligonucleotide
  Antisense strand to SEQ ID NO: 306032
uucugggccagaaagacuu

SEQ ID NO: 306034 - RNA, 19 nt, Artificial Sequence
  Description of Artificial Sequence: Synthetic oligonucleotide
  Sense strand starting at position 1941 of SEQ ID NO: 3931
gucuuucuggcccagaaca

SEQ ID NO: 306035 - RNA, 19 nt, Artificial Sequence
  Description of Artificial Sequence: Synthetic oligonucleotide
  Antisense strand to SEQ ID NO: 306034
uguucugggccagaaagac

SEQ ID NO: 306036 - RNA, 19 nt, Artificial Sequence
  Description of Artificial Sequence: Synthetic oligonucleotide
  Sense strand starting at position 1987 of SEQ ID NO: 3931
ucggaugugucaucaaucu

SEQ ID NO: 306037 - RNA, 19 nt, Artificial Sequence
  Description of Artificial Sequence: Synthetic oligonucleotide
  Antisense strand to SEQ ID NO: 306036
agauugaugacacauccga

SEQ ID NO: 306038 - RNA, 19 nt, Artificial Sequence
  Description of Artificial Sequence: Synthetic oligonucleotide
  Sense strand starting at position 2199 of SEQ ID NO: 3931
cggcgauuagccuuagcua

SEQ ID NO: 306039 - RNA, 19 nt, Artificial Sequence
  Description of Artificial Sequence: Synthetic oligonucleotide
  Antisense strand to SEQ ID NO: 306038
uagcuaaggcuaaucgccg

SEQ ID NO: 306040 - RNA, 19 nt, Artificial Sequence
  Description of Artificial Sequence: Synthetic oligonucleotide
  Sense strand starting at position 2200 of SEQ ID NO: 3931
ggcgauuagccuuagcuag

SEQ ID NO: 306041 - RNA, 19 nt, Artificial Sequence
  Description of Artificial Sequence: Synthetic oligonucleotide
  Antisense strand to SEQ ID NO: 306040
cuagcuaaggcuaaucgcc

SEQ ID NO: 306042 - RNA, 19 nt, Artificial Sequence
  Description of Artificial Sequence: Synthetic oligonucleotide
  Sense strand starting at position 2263 of SEQ ID NO: 3931
uguauugucauuuguaugu

SEQ ID NO: 306043 - RNA, 19 nt, Artificial Sequence
  Description of Artificial Sequence: Synthetic oligonucleotide
  Antisense strand to SEQ ID NO: 306042
acauacaaaugacaauaca

SEQ ID NO: 306044 - RNA, 19 nt, Artificial Sequence
  Description of Artificial Sequence: Synthetic oligonucleotide
  Sense strand starting at position 2267 of SEQ ID NO: 3931
uugucauuuguauguacuu

SEQ ID NO: 306045 - RNA, 19 nt, Artificial Sequence
  Description of Artificial Sequence: Synthetic oligonucleotide
  Antisense strand to SEQ ID NO: 306044
aaguacauacaaaugacaa

SEQ ID NO: 306046 - RNA, 19 nt, Artificial Sequence
  Description of Artificial Sequence: Synthetic oligonucleotide
  Sense strand starting at position 2389 of SEQ ID NO: 3931
ugcaaaguugaguaacaca

SEQ ID NO: 306047 - RNA, 19 nt, Artificial Sequence
  Description of Artificial Sequence: Synthetic oligonucleotide
  Antisense strand to SEQ ID NO: 306046
uguguuacucaacuuugca

SEQ ID NO: 306048 - RNA, 19 nt, Artificial Sequence
  Description of Artificial Sequence: Synthetic oligonucleotide
  Sense strand starting at position 2667 of SEQ ID NO: 3931
aagacuugugguggagaga

SEQ ID NO: 306049 - RNA, 19 nt, Artificial Sequence
  Description of Artificial Sequence: Synthetic oligonucleotide
  Antisense strand to SEQ ID NO: 306048
ucucuccaccacaagucuu

SEQ ID NO: 306050 - RNA, 19 nt, Artificial Sequence
  Description of Artificial Sequence: Synthetic oligonucleotide
  Sense strand starting at position 2865 of SEQ ID NO: 3931
uauugaucuccgugacgga

SEQ ID NO: 306051 - RNA, 19 nt, Artificial Sequence
  Description of Artificial Sequence: Synthetic oligonucleotide
  Antisense strand to SEQ ID NO: 306050
uccgucacggagaucaaua

SEQ ID NO: 306052 - RNA, 19 nt, Artificial Sequence
  Description of Artificial Sequence: Synthetic oligonucleotide
  Sense strand starting at position 2866 of SEQ ID NO: 3931
auugaucuccgugacggaa

SEQ ID NO: 306053 - RNA, 19 nt, Artificial Sequence
  Description of Artificial Sequence: Synthetic oligonucleotide
  Antisense strand to SEQ ID NO: 306052
uuccgucacggagaucaau

SEQ ID NO: 306054 - RNA, 19 nt, Artificial Sequence
  Description of Artificial Sequence: Synthetic oligonucleotide
  Sense strand starting at position 2922 of SEQ ID NO: 3931
gugguauugaguuaaggcu

SEQ ID NO: 306055 - RNA, 19 nt, Artificial Sequence
  Description of Artificial Sequence: Synthetic oligonucleotide
  Antisense strand to SEQ ID NO: 306054
agccuuaacucaauaccac

SEQ ID NO: 306056 - RNA, 19 nt, Artificial Sequence
  Description of Artificial Sequence: Synthetic oligonucleotide
  Sense strand starting at position 2930 of SEQ ID NO: 3931
gaguuaaggcuggaugagu

SEQ ID NO: 306057 - RNA, 19 nt, Artificial Sequence
  Description of Artificial Sequence: Synthetic oligonucleotide
  Antisense strand to SEQ ID NO: 306056
acucauccagccuuaacuc

SEQ ID NO: 306058 - RNA, 19 nt, Artificial Sequence
  Description of Artificial Sequence: Synthetic oligonucleotide
  Sense strand starting at position 2939 of SEQ ID NO: 3931
cuggaugaguaucuguuga

SEQ ID NO: 306059 - RNA, 19 nt, Artificial Sequence
  Description of Artificial Sequence: Synthetic oligonucleotide
  Antisense strand to SEQ ID NO: 306058
ucaacagauacucauccag

SEQ ID NO: 306060 - RNA, 19 nt, Artificial Sequence
  Description of Artificial Sequence: Synthetic oligonucleotide
  Sense strand starting at position 2941 of SEQ ID NO: 3931
ggaugaguaucuguugagu

SEQ ID NO: 306061 - RNA, 19 nt, Artificial Sequence
  Description of Artificial Sequence: Synthetic oligonucleotide
  Antisense strand to SEQ ID NO: 306060
acucaacagauacucaucc

SEQ ID NO: 306062 - RNA, 19 nt, Artificial Sequence
  Description of Artificial Sequence: Synthetic oligonucleotide
  Sense strand starting at position 2944 of SEQ ID NO: 3931
ugaguaucuguugagugua

SEQ ID NO: 306063 - RNA, 19 nt, Artificial Sequence
  Description of Artificial Sequence: Synthetic oligonucleotide
  Antisense strand to SEQ ID NO: 306062
uacacucaacagauacuca

SEQ ID NO: 306064 - RNA, 19 nt, Artificial Sequence
  Description of Artificial Sequence: Synthetic oligonucleotide
  Sense strand starting at position 2949 of SEQ ID NO: 3931
aucuguugaguguaugaaa

SEQ ID NO: 306065 - RNA, 19 nt, Artificial Sequence
  Description of Artificial Sequence: Synthetic oligonucleotide
  Antisense strand to SEQ ID NO: 306064
uuucauacacucaacagau

SEQ ID NO: 306066 - RNA, 19 nt, Artificial Sequence
  Description of Artificial Sequence: Synthetic oligonucleotide
  Sense strand starting at position 3378 of SEQ ID NO: 3931
ucuguuugccgauauuaac

SEQ ID NO: 306067 - RNA, 19 nt, Artificial Sequence
  Description of Artificial Sequence: Synthetic oligonucleotide
  Antisense strand to SEQ ID NO: 306066
guuaauaucggcaaacaga

SEQ ID NO: 306068 - RNA, 19 nt, Artificial Sequence
  Description of Artificial Sequence: Synthetic oligonucleotide
  Sense strand starting at position 3556 of SEQ ID NO: 3931
cuaggauaugcuggucaau

SEQ ID NO: 306069 - RNA, 19 nt, Artificial Sequence
  Description of Artificial Sequence: Synthetic oligonucleotide
  Antisense strand to SEQ ID NO: 306068
auugaccagcauauccuag

SEQ ID NO: 306070 - RNA, 19 nt, Artificial Sequence
  Description of Artificial Sequence: Synthetic oligonucleotide
  Sense strand starting at position 3629 of SEQ ID NO: 3931
auugccucugagugacaga

SEQ ID NO: 306071 - RNA, 19 nt, Artificial Sequence
  Description of Artificial Sequence: Synthetic oligonucleotide
  Antisense strand to SEQ ID NO: 306070
ucugucacucagaggcaau

SEQ ID NO: 306072 - RNA, 19 nt, Artificial Sequence
  Description of Artificial Sequence: Synthetic oligonucleotide
  Sense strand starting at position 238 of SEQ ID NO: 3932
acaagucaucaaugguaca

SEQ ID NO: 306073 - RNA, 19 nt, Artificial Sequence
  Description of Artificial Sequence: Synthetic oligonucleotide
  Antisense strand to SEQ ID NO: 306072
uguaccauugaugacuugu

SEQ ID NO: 306074 - RNA, 19 nt, Artificial Sequence
  Description of Artificial Sequence: Synthetic oligonucleotide
  Sense strand starting at position 251 of SEQ ID NO: 3932
gguacauugggauggcagu

SEQ ID NO: 306075 - RNA, 19 nt, Artificial Sequence
  Description of Artificial Sequence: Synthetic oligonucleotide
  Antisense strand to SEQ ID NO: 306074
acugccaucccaauguacc

SEQ ID NO: 306076 - RNA, 19 nt, Artificial Sequence
  Description of Artificial Sequence: Synthetic oligonucleotide
  Sense strand starting at position 257 of SEQ ID NO: 3932
uugggauggcaguggugau

SEQ ID NO: 306077 - RNA, 19 nt, Artificial Sequence
  Description of Artificial Sequence: Synthetic oligonucleotide
  Antisense strand to SEQ ID NO: 306076
aucaccacugccaucccaa

SEQ ID NO: 306078 - RNA, 19 nt, Artificial Sequence
  Description of Artificial Sequence: Synthetic oligonucleotide
  Sense strand starting at position 529 of SEQ ID NO: 3932
gccaauuagaugugauaga

SEQ ID NO: 306079 - RNA, 19 nt, Artificial Sequence
  Description of Artificial Sequence: Synthetic oligonucleotide
  Antisense strand to SEQ ID NO: 306078
ucuaucacaucuaauuggc

SEQ ID NO: 306080 - RNA, 19 nt, Artificial Sequence
  Description of Artificial Sequence: Synthetic oligonucleotide
  Sense strand starting at position 593 of SEQ ID NO: 3932
uugagaaaguuugcuauuc

SEQ ID NO: 306081 - RNA, 19 nt, Artificial Sequence
  Description of Artificial Sequence: Synthetic oligonucleotide
  Antisense strand to SEQ ID NO: 306080
gaauagcaaacuuucucaa

SEQ ID NO: 306082 - RNA, 19 nt, Artificial Sequence
  Description of Artificial Sequence: Synthetic oligonucleotide
  Sense strand starting at position 594 of SEQ ID NO: 3932
ugagaaaguuugcuauucu

SEQ ID NO: 306083 - RNA, 19 nt, Artificial Sequence
  Description of Artificial Sequence: Synthetic oligonucleotide
  Antisense strand to SEQ ID NO: 306082
agaauagcaaacuuucuca

SEQ ID NO: 306084 - RNA, 19 nt, Artificial Sequence
  Description of Artificial Sequence: Synthetic oligonucleotide
  Sense strand starting at position 709 of SEQ ID NO: 3932
ccucaagucuaaguaauga

SEQ ID NO: 306085 - RNA, 19 nt, Artificial Sequence
  Description of Artificial Sequence: Synthetic oligonucleotide
  Antisense strand to SEQ ID NO: 306084
ucauuacuuagacuugagg

SEQ ID NO: 306086 - RNA, 19 nt, Artificial Sequence
  Description of Artificial Sequence: Synthetic oligonucleotide
  Sense strand starting at position 772 of SEQ ID NO: 3932
uguucauuuggguggcagu

SEQ ID NO: 306087 - RNA, 19 nt, Artificial Sequence
  Description of Artificial Sequence: Synthetic oligonucleotide
  Antisense strand to SEQ ID NO: 306086
acugccacccaaaugaaca

SEQ ID NO: 306088 - RNA, 19 nt, Artificial Sequence
  Description of Artificial Sequence: Synthetic oligonucleotide
  Sense strand starting at position 1232 of SEQ ID NO: 3932
acgagugauucagugaaca

SEQ ID NO: 306089 - RNA, 19 nt, Artificial Sequence
  Description of Artificial Sequence: Synthetic oligonucleotide
  Antisense strand to SEQ ID NO: 306088
uguucacugaaucacucgu

SEQ ID NO: 306090 - RNA, 19 nt, Artificial Sequence
  Description of Artificial Sequence: Synthetic oligonucleotide
  Sense strand starting at position 1332 of SEQ ID NO: 3932
uaaguugaccgucauuaau

SEQ ID NO: 306091 - RNA, 19 nt, Artificial Sequence
  Description of Artificial Sequence: Synthetic oligonucleotide
  Antisense strand to SEQ ID NO: 306090
auuaaugacggucaacuua

SEQ ID NO: 306092 - RNA, 19 nt, Artificial Sequence
  Description of Artificial Sequence: Synthetic oligonucleotide
  Sense strand starting at position 1335 of SEQ ID NO: 3932
guugaccgucauuaauauu

SEQ ID NO: 306093 - RNA, 19 nt, Artificial Sequence
  Description of Artificial Sequence: Synthetic oligonucleotide
  Antisense strand to SEQ ID NO: 306092
aauauuaaugacggucaac

SEQ ID NO: 306094 - RNA, 19 nt, Artificial Sequence
  Description of Artificial Sequence: Synthetic oligonucleotide
  Sense strand starting at position 1341 of SEQ ID NO: 3932
cgucauuaauauuugcuga

SEQ ID NO: 306095 - RNA, 19 nt, Artificial Sequence
  Description of Artificial Sequence: Synthetic oligonucleotide
  Antisense strand to SEQ ID NO: 306094
ucagcaaauauuaaugacg

SEQ ID NO: 306096 - RNA, 19 nt, Artificial Sequence
  Description of Artificial Sequence: Synthetic oligonucleotide
  Sense strand starting at position 1360 of SEQ ID NO: 3932
augaaugagucagugauaa

SEQ ID NO: 306097 - RNA, 19 nt, Artificial Sequence
  Description of Artificial Sequence: Synthetic oligonucleotide
  Antisense strand to SEQ ID NO: 306096
uuaucacugacucauucau

SEQ ID NO: 306098 - RNA, 19 nt, Artificial Sequence
  Description of Artificial Sequence: Synthetic oligonucleotide
  Sense strand starting at position 2043 of SEQ ID NO: 3932
gggaucgugcuguaaugga

SEQ ID NO: 306099 - RNA, 19 nt, Artificial Sequence
  Description of Artificial Sequence: Synthetic oligonucleotide
  Antisense strand to SEQ ID NO: 306098
uccauuacagcacgauccc

SEQ ID NO: 306100 - RNA, 19 nt, Artificial Sequence
  Description of Artificial Sequence: Synthetic oligonucleotide
  Sense strand starting at position 2482 of SEQ ID NO: 3932
cugcaaucuuuguuagaau

SEQ ID NO: 306101 - RNA, 19 nt, Artificial Sequence
  Description of Artificial Sequence: Synthetic oligonucleotide
  Antisense strand to SEQ ID NO: 306100
auucuaacaaagauugcag

SEQ ID NO: 306102 - RNA, 19 nt, Artificial Sequence
  Description of Artificial Sequence: Synthetic oligonucleotide
  Sense strand starting at position 2684 of SEQ ID NO: 3932
uucuuaaguccaggaaauu

SEQ ID NO: 306103 - RNA, 19 nt, Artificial Sequence
  Description of Artificial Sequence: Synthetic oligonucleotide
  Antisense strand to SEQ ID NO: 306102
aauuuccuggacuuaagaa

SEQ ID NO: 306104 - RNA, 19 nt, Artificial Sequence
  Description of Artificial Sequence: Synthetic oligonucleotide
  Sense strand starting at position 2779 of SEQ ID NO: 3932
uuaagugaucuuugcagaa

SEQ ID NO: 306105 - RNA, 19 nt, Artificial Sequence
  Description of Artificial Sequence: Synthetic oligonucleotide
  Antisense strand to SEQ ID NO: 306104
uucugcaaagaucacuuaa

SEQ ID NO: 306106 - RNA, 19 nt, Artificial Sequence
  Description of Artificial Sequence: Synthetic oligonucleotide
  Sense strand starting at position 2783 of SEQ ID NO: 3932
gugaucuuugcagaaucuu

SEQ ID NO: 306107 - RNA, 19 nt, Artificial Sequence
  Description of Artificial Sequence: Synthetic oligonucleotide
  Antisense strand to SEQ ID NO: 306106
aagauucugcaaagaucac

SEQ ID NO: 306108 - RNA, 19 nt, Artificial Sequence
  Description of Artificial Sequence: Synthetic oligonucleotide
  Sense strand starting at position 2838 of SEQ ID NO: 3932
aucuuacuuuaguugacau

SEQ ID NO: 306109 - RNA, 19 nt, Artificial Sequence
  Description of Artificial Sequence: Synthetic oligonucleotide
  Antisense strand to SEQ ID NO: 306108
augucaacuaaaguaagau

SEQ ID NO: 306110 - RNA, 19 nt, Artificial Sequence
  Description of Artificial Sequence: Synthetic oligonucleotide
  Sense strand starting at position 2840 of SEQ ID NO: 3932
cuuacuuuaguugacauga

SEQ ID NO: 306111 - RNA, 19 nt, Artificial Sequence
  Description of Artificial Sequence: Synthetic oligonucleotide
  Antisense strand to SEQ ID NO: 306110
ucaugucaacuaaaguaag

SEQ ID NO: 306112 - RNA, 19 nt, Artificial Sequence
  Description of Artificial Sequence: Synthetic oligonucleotide
  Sense strand starting at position 2923 of SEQ ID NO: 3932
augccaauagguuauguaa

SEQ ID NO: 306113 - RNA, 19 nt, Artificial Sequence
  Description of Artificial Sequence: Synthetic oligonucleotide
  Antisense strand to SEQ ID NO: 306112
uuacauaaccuauuggcau

SEQ ID NO: 306114 - RNA, 19 nt, Artificial Sequence
  Description of Artificial Sequence: Synthetic oligonucleotide
  Sense strand starting at position 2926 of SEQ ID NO: 3932
ccaauagguuauguaagga

SEQ ID NO: 306115 - RNA, 19 nt, Artificial Sequence
  Description of Artificial Sequence: Synthetic oligonucleotide
  Antisense strand to SEQ ID NO: 306114
uccuuacauaaccuauugg

SEQ ID NO: 306116 - RNA, 19 nt, Artificial Sequence
  Description of Artificial Sequence: Synthetic oligonucleotide
  Sense strand starting at position 2976 of SEQ ID NO: 3932
aggcuuuaaggugaagcaa

SEQ ID NO: 306117 - RNA, 19 nt, Artificial Sequence
  Description of Artificial Sequence: Synthetic oligonucleotide
  Antisense strand to SEQ ID NO: 306116
uugcuucaccuuaaagccu

SEQ ID NO: 306118 - RNA, 19 nt, Artificial Sequence
  Description of Artificial Sequence: Synthetic oligonucleotide
  Sense strand starting at position 3004 of SEQ ID NO: 3932
ccgguuucucuuuaaagga

SEQ ID NO: 306119 - RNA, 19 nt, Artificial Sequence
  Description of Artificial Sequence: Synthetic oligonucleotide
  Antisense strand to SEQ ID NO: 306118
uccuuuaaagagaaaccgg

SEQ ID NO: 306120 - RNA, 19 nt, Artificial Sequence
  Description of Artificial Sequence: Synthetic oligonucleotide
  Sense strand starting at position 3184 of SEQ ID NO: 3932
cucaaugaaguguauaauc

SEQ ID NO: 306121 - RNA, 19 nt, Artificial Sequence
  Description of Artificial Sequence: Synthetic oligonucleotide
  Antisense strand to SEQ ID NO: 306120
gauuauacacuucauugag

SEQ ID NO: 306122 - RNA, 19 nt, Artificial Sequence
  Description of Artificial Sequence: Synthetic oligonucleotide
  Sense strand starting at position 3189 of SEQ ID NO: 3932
ugaaguguauaaucuugaa

SEQ ID NO: 306123 - RNA, 19 nt, Artificial Sequence
  Description of Artificial Sequence: Synthetic oligonucleotide
  Antisense strand to SEQ ID NO: 306122
uucaagauuauacacuuca

SEQ ID NO: 306124 - RNA, 19 nt, Artificial Sequence
  Description of Artificial Sequence: Synthetic oligonucleotide
  Sense strand starting at position 3193 of SEQ ID NO: 3932
guguauaaucuugaacugu

SEQ ID NO: 306125 - RNA, 19 nt, Artificial Sequence
  Description of Artificial Sequence: Synthetic oligonucleotide
  Antisense strand to SEQ ID NO: 306124
acaguucaagauuauacac

SEQ ID NO: 306126 - RNA, 19 nt, Artificial Sequence
  Description of Artificial Sequence: Synthetic oligonucleotide
  Sense strand starting at position 3207 of SEQ ID NO: 3932
acuguaaaccuuugguuau

SEQ ID NO: 306127 - RNA, 19 nt, Artificial Sequence
  Description of Artificial Sequence: Synthetic oligonucleotide
  Antisense strand to SEQ ID NO: 306126
auaaccaaagguuuacagu

SEQ ID NO: 306128 - RNA, 19 nt, Artificial Sequence
  Description of Artificial Sequence: Synthetic oligonucleotide
  Sense strand starting at position 3209 of SEQ ID NO: 3932
uguaaaccuuugguuauaa

SEQ ID NO: 306129 - RNA, 19 nt, Artificial Sequence
  Description of Artificial Sequence: Synthetic oligonucleotide
  Antisense strand to SEQ ID NO: 306128
uuauaaccaaagguuuaca

SEQ ID NO: 306130 - RNA, 19 nt, Artificial Sequence
  Description of Artificial Sequence: Synthetic oligonucleotide
  Sense strand starting at position 3210 of SEQ ID NO: 3932
guaaaccuuugguuauaag

SEQ ID NO: 306131 - RNA, 19 nt, Artificial Sequence
  Description of Artificial Sequence: Synthetic oligonucleotide
  Antisense strand to SEQ ID NO: 306130
cuuauaaccaaagguuuac

SEQ ID NO: 306132 - RNA, 19 nt, Artificial Sequence
  Description of Artificial Sequence: Synthetic oligonucleotide
  Sense strand starting at position 3314 of SEQ ID NO: 3932
auauuaauuuagccucgua

SEQ ID NO: 306133 - RNA, 19 nt, Artificial Sequence
  Description of Artificial Sequence: Synthetic oligonucleotide
  Antisense strand to SEQ ID NO: 306132
uacgaggcuaaauuaauau

SEQ ID NO: 306134 - RNA, 19 nt, Artificial Sequence
  Description of Artificial Sequence: Synthetic oligonucleotide
  Sense strand starting at position 3317 of SEQ ID NO: 3932
uuaauuuagccucguauuc

SEQ ID NO: 306135 - RNA, 19 nt, Artificial Sequence
  Description of Artificial Sequence: Synthetic oligonucleotide
  Antisense strand to SEQ ID NO: 306134
gaauacgaggcuaaauuaa

SEQ ID NO: 306136 - RNA, 19 nt, Artificial Sequence
  Description of Artificial Sequence: Synthetic oligonucleotide
  Sense strand starting at position 3341 of SEQ ID NO: 3932
acugaauucuguucuaagg

SEQ ID NO: 306137 - RNA, 19 nt, Artificial Sequence
  Description of Artificial Sequence: Synthetic oligonucleotide
  Antisense strand to SEQ ID NO: 306136
ccuuagaacagaauucagu

SEQ ID NO: 306138 - RNA, 19 nt, Artificial Sequence
  Description of Artificial Sequence: Synthetic oligonucleotide
  Sense strand starting at position 3349 of SEQ ID NO: 3932
cuguucuaagguugaauua

SEQ ID NO: 306139 - RNA, 19 nt, Artificial Sequence
  Description of Artificial Sequence: Synthetic oligonucleotide
  Antisense strand to SEQ ID NO: 306138
uaauucaaccuuagaacag

SEQ ID NO: 306140 - RNA, 19 nt, Artificial Sequence
  Description of Artificial Sequence: Synthetic oligonucleotide
  Sense strand starting at position 3350 of SEQ ID NO: 3932
uguucuaagguugaauuau

SEQ ID NO: 306141 - RNA, 19 nt, Artificial Sequence
  Description of Artificial Sequence: Synthetic oligonucleotide
  Antisense strand to SEQ ID NO: 306140
auaauucaaccuuagaaca

SEQ ID NO: 306142 - RNA, 19 nt, Artificial Sequence
  Description of Artificial Sequence: Synthetic oligonucleotide
  Sense strand starting at position 3549 of SEQ ID NO: 3932
guuccuuagcaguaacauu

SEQ ID NO: 306143 - RNA, 19 nt, Artificial Sequence
  Description of Artificial Sequence: Synthetic oligonucleotide
  Antisense strand to SEQ ID NO: 306142
aauguuacugcuaaggaac

SEQ ID NO: 306144 - RNA, 19 nt, Artificial Sequence
  Description of Artificial Sequence: Synthetic oligonucleotide
  Sense strand starting at position 3604 of SEQ ID NO: 3932
gucugauauccaugacccu

SEQ ID NO: 306145 - RNA, 19 nt, Artificial Sequence
  Description of Artificial Sequence: Synthetic oligonucleotide
  Antisense strand to SEQ ID NO: 306144
agggucauggauaucagac

SEQ ID NO: 306146 - RNA, 19 nt, Artificial Sequence
  Description of Artificial Sequence: Synthetic oligonucleotide
  Sense strand starting at position 3681 of SEQ ID NO: 3932
cgcucagugggacaaauau

SEQ ID NO: 306147 - RNA, 19 nt, Artificial Sequence
  Description of Artificial Sequence: Synthetic oligonucleotide
  Antisense strand to SEQ ID NO: 306146
auauuugucccacugagcg

SEQ ID NO: 306148 - RNA, 19 nt, Artificial Sequence
  Description of Artificial Sequence: Synthetic oligonucleotide
  Sense strand starting at position 3808 of SEQ ID NO: 3932
accauaacuggauggguau

SEQ ID NO: 306149 - RNA, 19 nt, Artificial Sequence
  Description of Artificial Sequence: Synthetic oligonucleotide
  Antisense strand to SEQ ID NO: 306148
auacccauccaguuauggu

SEQ ID NO: 306150 - RNA, 19 nt, Artificial Sequence
  Description of Artificial Sequence: Synthetic oligonucleotide
  Sense strand starting at position 3809 of SEQ ID NO: 3932
ccauaacuggauggguaua

SEQ ID NO: 306151 - RNA, 19 nt, Artificial Sequence
  Description of Artificial Sequence: Synthetic oligonucleotide
  Antisense strand to SEQ ID NO: 306150
uauacccauccaguuaugg

SEQ ID NO: 306152 - RNA, 19 nt, Artificial Sequence
  Description of Artificial Sequence: Synthetic oligonucleotide
  Sense strand starting at position 29 of SEQ ID NO: 3933
agucuaacuucuucuagga

SEQ ID NO: 306153 - RNA, 19 nt, Artificial Sequence
  Description of Artificial Sequence: Synthetic oligonucleotide
  Antisense strand to SEQ ID NO: 306152
uccuagaagaaguuagacu

SEQ ID NO: 306154 - RNA, 19 nt, Artificial Sequence
  Description of Artificial Sequence: Synthetic oligonucleotide
  Sense strand starting at position 927 of SEQ ID NO: 3933
ccaacagugugaccuuaaa

SEQ ID NO: 306155 - RNA, 19 nt, Artificial Sequence
  Description of Artificial Sequence: Synthetic oligonucleotide
  Antisense strand to SEQ ID NO: 306154
uuuaaggucacacuguugg

SEQ ID NO: 306156 - RNA, 19 nt, Artificial Sequence
  Description of Artificial Sequence: Synthetic oligonucleotide
  Sense strand starting at position 1373 of SEQ ID NO: 3933
agcauuaaaugacugagua

SEQ ID NO: 306157 - RNA, 19 nt, Artificial Sequence
  Description of Artificial Sequence: Synthetic oligonucleotide
  Antisense strand to SEQ ID NO: 306156
uacucagucauuuaaugcu

SEQ ID NO: 306158 - RNA, 19 nt, Artificial Sequence
  Description of Artificial Sequence: Synthetic oligonucleotide
  Sense strand starting at position 1374 of SEQ ID NO: 3933
gcauuaaaugacugaguac

SEQ ID NO: 306159 - RNA, 19 nt, Artificial Sequence
  Description of Artificial Sequence: Synthetic oligonucleotide
  Antisense strand to SEQ ID NO: 306158
guacucagucauuuaaugc

SEQ ID NO: 306160 - RNA, 19 nt, Artificial Sequence
  Description of Artificial Sequence: Synthetic oligonucleotide
  Sense strand starting at position 1422 of SEQ ID NO: 3933
uugccauugucauuauuac

SEQ ID NO: 306161 - RNA, 19 nt, Artificial Sequence
  Description of Artificial Sequence: Synthetic oligonucleotide
  Antisense strand to SEQ ID NO: 306160
guaauaaugacaauggcaa

SEQ ID NO: 306162 - RNA, 19 nt, Artificial Sequence
  Description of Artificial Sequence: Synthetic oligonucleotide
  Sense strand starting at position 1423 of SEQ ID NO: 3933
ugccauugucauuauuacu

SEQ ID NO: 306163 - RNA, 19 nt, Artificial Sequence
  Description of Artificial Sequence: Synthetic oligonucleotide
  Antisense strand to SEQ ID NO: 306162
aguaauaaugacaauggca

SEQ ID NO: 306164 - RNA, 19 nt, Artificial Sequence
  Description of Artificial Sequence: Synthetic oligonucleotide
  Sense strand starting at position 1567 of SEQ ID NO: 3933
gagaaucagucgcugccau

SEQ ID NO: 306165 - RNA, 19 nt, Artificial Sequence
  Description of Artificial Sequence: Synthetic oligonucleotide
  Antisense strand to SEQ ID NO: 306164
auggcagcgacugauucuc

SEQ ID NO: 306166 - RNA, 19 nt, Artificial Sequence
  Description of Artificial Sequence: Synthetic oligonucleotide
  Sense strand starting at position 2153 of SEQ ID NO: 3933
ggacgucuuggccaaagca

SEQ ID NO: 306167 - RNA, 19 nt, Artificial Sequence
  Description of Artificial Sequence: Synthetic oligonucleotide
  Antisense strand to SEQ ID NO: 306166
ugcuuuggccaagacgucc

SEQ ID NO: 306168 - RNA, 19 nt, Artificial Sequence
  Description of Artificial Sequence: Synthetic oligonucleotide
  Sense strand starting at position 2166 of SEQ ID NO: 3933
aaagcaguuugauuagaag

SEQ ID NO: 306169 - RNA, 19 nt, Artificial Sequence
  Description of Artificial Sequence: Synthetic oligonucleotide
  Antisense strand to SEQ ID NO: 306168
cuucuaaucaaacugcuuu

SEQ ID NO: 306170 - RNA, 19 nt, Artificial Sequence
  Description of Artificial Sequence: Synthetic oligonucleotide
  Sense strand starting at position 2173 of SEQ ID NO: 3933
uuugauuagaagggcuaga

SEQ ID NO: 306171 - RNA, 19 nt, Artificial Sequence
  Description of Artificial Sequence: Synthetic oligonucleotide
  Antisense strand to SEQ ID NO: 306170
ucuagcccuucuaaucaaa

SEQ ID NO: 306172 - RNA, 19 nt, Artificial Sequence
  Description of Artificial Sequence: Synthetic oligonucleotide
  Sense strand starting at position 2182 of SEQ ID NO: 3933
aagggcuagaguugugauu

SEQ ID NO: 306173 - RNA, 19 nt, Artificial Sequence
  Description of Artificial Sequence: Synthetic oligonucleotide
  Antisense strand to SEQ ID NO: 306172
aaucacaacucuagcccuu

SEQ ID NO: 306174 - RNA, 19 nt, Artificial Sequence
  Description of Artificial Sequence: Synthetic oligonucleotide
  Sense strand starting at position 2226 of SEQ ID NO: 3933
ucucgacaacccgaugaaa

SEQ ID NO: 306175 - RNA, 19 nt, Artificial Sequence
  Description of Artificial Sequence: Synthetic oligonucleotide
  Antisense strand to SEQ ID NO: 306174
uuucaucggguugucgaga

SEQ ID NO: 306176 - RNA, 19 nt, Artificial Sequence
  Description of Artificial Sequence: Synthetic oligonucleotide
  Sense strand starting at position 2371 of SEQ ID NO: 3933
ugggucuuucggcgaauga

SEQ ID NO: 306177 - RNA, 19 nt, Artificial Sequence
  Description of Artificial Sequence: Synthetic oligonucleotide
  Antisense strand to SEQ ID NO: 306176
ucauucgccgaaagaccca

SEQ ID NO: 306178 - RNA, 19 nt, Artificial Sequence
  Description of Artificial Sequence: Synthetic oligonucleotide
  Sense strand starting at position 2372 of SEQ ID NO: 3933
gggucuuucggcgaaugag

SEQ ID NO: 306179 - RNA, 19 nt, Artificial Sequence
  Description of Artificial Sequence: Synthetic oligonucleotide
  Antisense strand to SEQ ID NO: 306178
cucauucgccgaaagaccc

SEQ ID NO: 306180 - RNA, 19 nt, Artificial Sequence
  Description of Artificial Sequence: Synthetic oligonucleotide
  Sense strand starting at position 2413 of SEQ ID NO: 3933
uugacacugcucuacauga

SEQ ID NO: 306181 - RNA, 19 nt, Artificial Sequence
  Description of Artificial Sequence: Synthetic oligonucleotide
  Antisense strand to SEQ ID NO: 306180
ucauguagagcagugucaa

SEQ ID NO: 306182 - RNA, 19 nt, Artificial Sequence
  Description of Artificial Sequence: Synthetic oligonucleotide
  Sense strand starting at position 2491 of SEQ ID NO: 3933
gucggaacgcuguagaaga

SEQ ID NO: 306183 - RNA, 19 nt, Artificial Sequence
  Description of Artificial Sequence: Synthetic oligonucleotide
  Antisense strand to SEQ ID NO: 306182
ucuucuacagcguuccgac

SEQ ID NO: 306184 - RNA, 19 nt, Artificial Sequence
  Description of Artificial Sequence: Synthetic oligonucleotide
  Sense strand starting at position 2582 of SEQ ID NO: 3933
cuuugaaucuuccuagcag

SEQ ID NO: 306185 - RNA, 19 nt, Artificial Sequence
  Description of Artificial Sequence: Synthetic oligonucleotide
  Antisense strand to SEQ ID NO: 306184
cugcuaggaagauucaaag

SEQ ID NO: 306186 - RNA, 19 nt, Artificial Sequence
  Description of Artificial Sequence: Synthetic oligonucleotide
  Sense strand starting at position 2954 of SEQ ID NO: 3933
ggacuauggcuuuguccca

SEQ ID NO: 306187 - RNA, 19 nt, Artificial Sequence
  Description of Artificial Sequence: Synthetic oligonucleotide
  Antisense strand to SEQ ID NO: 306186
ugggacaaagccauagucc

SEQ ID NO: 306188 - RNA, 19 nt, Artificial Sequence
  Description of Artificial Sequence: Synthetic oligonucleotide
  Sense strand starting at position 2979 of SEQ ID NO: 3933
ugacaccuguacugagaua

SEQ ID NO: 306189 - RNA, 19 nt, Artificial Sequence
  Description of Artificial Sequence: Synthetic oligonucleotide
  Antisense strand to SEQ ID NO: 306188
uaucucaguacagguguca

SEQ ID NO: 306190 - RNA, 19 nt, Artificial Sequence
  Description of Artificial Sequence: Synthetic oligonucleotide
  Sense strand starting at position 2986 of SEQ ID NO: 3933
uguacugagauaugucaug

SEQ ID NO: 306191 - RNA, 19 nt, Artificial Sequence
  Description of Artificial Sequence: Synthetic oligonucleotide
  Antisense strand to SEQ ID NO: 306190
caugacauaucucaguaca

SEQ ID NO: 306192 - RNA, 19 nt, Artificial Sequence
  Description of Artificial Sequence: Synthetic oligonucleotide
  Sense strand starting at position 2991 of SEQ ID NO: 3933
ugagauaugucauguaaga

SEQ ID NO: 306193 - RNA, 19 nt, Artificial Sequence
  Description of Artificial Sequence: Synthetic oligonucleotide
  Antisense strand to SEQ ID NO: 306192
ucuuacaugacauaucuca

SEQ ID NO: 306194 - RNA, 19 nt, Artificial Sequence
  Description of Artificial Sequence: Synthetic oligonucleotide
  Sense strand starting at position 2993 of SEQ ID NO: 3933
agauaugucauguaagagc

SEQ ID NO: 306195 - RNA, 19 nt, Artificial Sequence
  Description of Artificial Sequence: Synthetic oligonucleotide
  Antisense strand to SEQ ID NO: 306194
gcucuuacaugacauaucu

SEQ ID NO: 306196 - RNA, 19 nt, Artificial Sequence
  Description of Artificial Sequence: Synthetic oligonucleotide
  Sense strand starting at position 3025 of SEQ ID NO: 3933
caggguaacucugaccaca

SEQ ID NO: 306197 - RNA, 19 nt, Artificial Sequence
  Description of Artificial Sequence: Synthetic oligonucleotide
  Antisense strand to SEQ ID NO: 306196
uguggucagaguuacccug

SEQ ID NO: 306198 - RNA, 19 nt, Artificial Sequence
  Description of Artificial Sequence: Synthetic oligonucleotide
  Sense strand starting at position 3210 of SEQ ID NO: 3933
gccggaccugacugugauu

SEQ ID NO: 306199 - RNA, 19 nt, Artificial Sequence
  Description of Artificial Sequence: Synthetic oligonucleotide
  Antisense strand to SEQ ID NO: 306198
aaucacagucagguccggc

SEQ ID NO: 306200 - RNA, 19 nt, Artificial Sequence
  Description of Artificial Sequence: Synthetic oligonucleotide
  Sense strand starting at position 3213 of SEQ ID NO: 3933
ggaccugacugugauugga

SEQ ID NO: 306201 - RNA, 19 nt, Artificial Sequence
  Description of Artificial Sequence: Synthetic oligonucleotide
  Antisense strand to SEQ ID NO: 306200
uccaaucacagucaggucc

SEQ ID NO: 306202 - RNA, 19 nt, Artificial Sequence
  Description of Artificial Sequence: Synthetic oligonucleotide
  Sense strand starting at position 3215 of SEQ ID NO: 3933
accugacugugauuggaga

SEQ ID NO: 306203 - RNA, 19 nt, Artificial Sequence
  Description of Artificial Sequence: Synthetic oligonucleotide
  Antisense strand to SEQ ID NO: 306202
ucuccaaucacagucaggu

SEQ ID NO: 306204 - RNA, 19 nt, Artificial Sequence
  Description of Artificial Sequence: Synthetic oligonucleotide
  Sense strand starting at position 3216 of SEQ ID NO: 3933
ccugacugugauuggagaa

SEQ ID NO: 306205 - RNA, 19 nt, Artificial Sequence
  Description of Artificial Sequence: Synthetic oligonucleotide
  Antisense strand to SEQ ID NO: 306204
uucuccaaucacagucagg

SEQ ID NO: 306206 - RNA, 19 nt, Artificial Sequence
  Description of Artificial Sequence: Synthetic oligonucleotide
  Sense strand starting at position 3665 of SEQ ID NO: 3933
gccagcacugucuaaacua

SEQ ID NO: 306207 - RNA, 19 nt, Artificial Sequence
  Description of Artificial Sequence: Synthetic oligonucleotide
  Antisense strand to SEQ ID NO: 306206
uaguuuagacagugcuggc

SEQ ID NO: 306208 - RNA, 19 nt, Artificial Sequence
  Description of Artificial Sequence: Synthetic oligonucleotide
  Sense strand starting at position 3762 of SEQ ID NO: 3933
cccguuaauccacauagua

SEQ ID NO: 306209 - RNA, 19 nt, Artificial Sequence
  Description of Artificial Sequence: Synthetic oligonucleotide
  Antisense strand to SEQ ID NO: 306208
uacuauguggauuaacggg

SEQ ID NO: 306210 - RNA, 19 nt, Artificial Sequence
  Description of Artificial Sequence: Synthetic oligonucleotide
  Sense strand starting at position 3819 of SEQ ID NO: 3933
uuaaaugugguaugcuaga

SEQ ID NO: 306211 - RNA, 19 nt, Artificial Sequence
  Description of Artificial Sequence: Synthetic oligonucleotide
  Antisense strand to SEQ ID NO: 306210
ucuagcauaccacauuuaa

SEQ ID NO: 306212 - RNA, 19 nt, Artificial Sequence
  Description of Artificial Sequence: Synthetic oligonucleotide
  Sense strand starting at position 3824 of SEQ ID NO: 3933
ugugguaugcuagaugaug

SEQ ID NO: 306213 - RNA, 19 nt, Artificial Sequence
  Description of Artificial Sequence: Synthetic oligonucleotide
  Antisense strand to SEQ ID NO: 306212
caucaucuagcauaccaca

SEQ ID NO: 306214 - RNA, 19 nt, Artificial Sequence
  Description of Artificial Sequence: Synthetic oligonucleotide
  Sense strand starting at position 3826 of SEQ ID NO: 3933
ugguaugcuagaugaugau

SEQ ID NO: 306215 - RNA, 19 nt, Artificial Sequence
  Description of Artificial Sequence: Synthetic oligonucleotide
  Antisense strand to SEQ ID NO: 306214
aucaucaucuagcauacca

SEQ ID NO: 306216 - RNA, 19 nt, Artificial Sequence
  Description of Artificial Sequence: Synthetic oligonucleotide
  Sense strand starting at position 3835 of SEQ ID NO: 3933
agaugaugauggugacuga

SEQ ID NO: 306217 - RNA, 19 nt, Artificial Sequence
  Description of Artificial Sequence: Synthetic oligonucleotide
  Antisense strand to SEQ ID NO: 306216
ucagucaccaucaucaucu

SEQ ID NO: 306218 - RNA, 19 nt, Artificial Sequence
  Description of Artificial Sequence: Synthetic oligonucleotide
  Sense strand starting at position 3838 of SEQ ID NO: 3933
ugaugauggugacugaagu

SEQ ID NO: 306219 - RNA, 19 nt, Artificial Sequence
  Description of Artificial Sequence: Synthetic oligonucleotide
  Antisense strand to SEQ ID NO: 306218
acuucagucaccaucauca

SEQ ID NO: 306220 - RNA, 19 nt, Artificial Sequence
  Description of Artificial Sequence: Synthetic oligonucleotide
  Sense strand starting at position 3846 of SEQ ID NO: 3933
gugacugaagucugccuaa

SEQ ID NO: 306221 - RNA, 19 nt, Artificial Sequence
  Description of Artificial Sequence: Synthetic oligonucleotide
  Antisense strand to SEQ ID NO: 306220
uuaggcagacuucagucac

SEQ ID NO: 306222 - RNA, 19 nt, Artificial Sequence
  Description of Artificial Sequence: Synthetic oligonucleotide
  Sense strand starting at position 3849 of SEQ ID NO: 3933
acugaagucugccuaaucu

SEQ ID NO: 306223 - RNA, 19 nt, Artificial Sequence
  Description of Artificial Sequence: Synthetic oligonucleotide
  Antisense strand to SEQ ID NO: 306222
agauuaggcagacuucagu

SEQ ID NO: 306224 - RNA, 19 nt, Artificial Sequence
  Description of Artificial Sequence: Synthetic oligonucleotide
  Sense strand starting at position 3931 of SEQ ID NO: 3933
uguacauagugaguggaaa

SEQ ID NO: 306225 - RNA, 19 nt, Artificial Sequence
  Description of Artificial Sequence: Synthetic oligonucleotide
  Antisense strand to SEQ ID NO: 306224
uuuccacucacuauguaca

SEQ ID NO: 306226 - RNA, 19 nt, Artificial Sequence
  Description of Artificial Sequence: Synthetic oligonucleotide
  Sense strand starting at position 3932 of SEQ ID NO: 3933
guacauagugaguggaaau

SEQ ID NO: 306227 - RNA, 19 nt, Artificial Sequence
  Description of Artificial Sequence: Synthetic oligonucleotide
  Antisense strand to SEQ ID NO: 306226
auuuccacucacuauguac

SEQ ID NO: 306228 - RNA, 19 nt, Artificial Sequence
  Description of Artificial Sequence: Synthetic oligonucleotide
  Sense strand starting at position 3950 of SEQ ID NO: 3933
uugagcaggcaaugaaaua

SEQ ID NO: 306229 - RNA, 19 nt, Artificial Sequence
  Description of Artificial Sequence: Synthetic oligonucleotide
  Antisense strand to SEQ ID NO: 306228
uauuucauugccugcucaa

SEQ ID NO: 306230 - RNA, 19 nt, Artificial Sequence
  Description of Artificial Sequence: Synthetic oligonucleotide
  Sense strand starting at position 3962 of SEQ ID NO: 3933
ugaaauaucuacuguagga

SEQ ID NO: 306231 - RNA, 19 nt, Artificial Sequence
  Description of Artificial Sequence: Synthetic oligonucleotide
  Antisense strand to SEQ ID NO: 306230
uccuacaguagauauuuca

SEQ ID NO: 306232 - RNA, 19 nt, Artificial Sequence
  Description of Artificial Sequence: Synthetic oligonucleotide
  Sense strand starting at position 670 of SEQ ID NO: 3934
gugugaggaacuuauacgu

SEQ ID NO: 306233 - RNA, 19 nt, Artificial Sequence
  Description of Artificial Sequence: Synthetic oligonucleotide
  Antisense strand to SEQ ID NO: 306232
acguauaaguuccucacac

SEQ ID NO: 306234 - RNA, 19 nt, Artificial Sequence
  Description of Artificial Sequence: Synthetic oligonucleotide
  Sense strand starting at position 675 of SEQ ID NO: 3934
aggaacuuauacgucaaau

SEQ ID NO: 306235 - RNA, 19 nt, Artificial Sequence
  Description of Artificial Sequence: Synthetic oligonucleotide
  Antisense strand to SEQ ID NO: 306234
auuugacguauaaguuccu

SEQ ID NO: 306236 - RNA, 19 nt, Artificial Sequence
  Description of Artificial Sequence: Synthetic oligonucleotide
  Sense strand starting at position 1347 of SEQ ID NO: 3934
ggcagaucgcccucgcuau

SEQ ID NO: 306237 - RNA, 19 nt, Artificial Sequence
  Description of Artificial Sequence: Synthetic oligonucleotide
  Antisense strand to SEQ ID NO: 306236
auagcgagggcgaucugcc

SEQ ID NO: 306238 - RNA, 19 nt, Artificial Sequence
  Description of Artificial Sequence: Synthetic oligonucleotide
  Sense strand starting at position 1811 of SEQ ID NO: 3934
uuacuuugccacggaagga

SEQ ID NO: 306239 - RNA, 19 nt, Artificial Sequence
  Description of Artificial Sequence: Synthetic oligonucleotide
  Antisense strand to SEQ ID NO: 306238
uccuuccguggcaaaguaa

SEQ ID NO: 306240 - RNA, 19 nt, Artificial Sequence
  Description of Artificial Sequence: Synthetic oligonucleotide
  Sense strand starting at position 1887 of SEQ ID NO: 3934
ucaaauauucuggacugca

SEQ ID NO: 306241 - RNA, 19 nt, Artificial Sequence
  Description of Artificial Sequence: Synthetic oligonucleotide
  Antisense strand to SEQ ID NO: 306240
ugcaguccagaauauuuga

SEQ ID NO: 306242 - RNA, 19 nt, Artificial Sequence
  Description of Artificial Sequence: Synthetic oligonucleotide
  Sense strand starting at position 2150 of SEQ ID NO: 3934
uagcgaaucggaggaagau

SEQ ID NO: 306243 - RNA, 19 nt, Artificial Sequence
  Description of Artificial Sequence: Synthetic oligonucleotide
  Antisense strand to SEQ ID NO: 306242
aucuuccuccgauucgcua

SEQ ID NO: 306244 - RNA, 19 nt, Artificial Sequence
  Description of Artificial Sequence: Synthetic oligonucleotide
  Sense strand starting at position 2151 of SEQ ID NO: 3934
agcgaaucggaggaagauu

SEQ ID NO: 306245 - RNA, 19 nt, Artificial Sequence
  Description of Artificial Sequence: Synthetic oligonucleotide
  Antisense strand to SEQ ID NO: 306244
aaucuuccuccgauucgcu

SEQ ID NO: 306246 - RNA, 19 nt, Artificial Sequence
  Description of Artificial Sequence: Synthetic oligonucleotide
  Sense strand starting at position 2206 of SEQ ID NO: 3934
auugguguggucuauacua

SEQ ID NO: 306247 - RNA, 19 nt, Artificial Sequence
  Description of Artificial Sequence: Synthetic oligonucleotide
  Antisense strand to SEQ ID NO: 306246
uaguauagaccacaccaau

SEQ ID NO: 306248 - RNA, 19 nt, Artificial Sequence
  Description of Artificial Sequence: Synthetic oligonucleotide
  Sense strand starting at position 2208 of SEQ ID NO: 3934
ugguguggucuauacuaau

SEQ ID NO: 306249 - RNA, 19 nt, Artificial Sequence
  Description of Artificial Sequence: Synthetic oligonucleotide
  Antisense strand to SEQ ID NO: 306248
auuaguauagaccacacca

SEQ ID NO: 306250 - RNA, 19 nt, Artificial Sequence
  Description of Artificial Sequence: Synthetic oligonucleotide
  Sense strand starting at position 2253 of SEQ ID NO: 3934
aguagagaucgucaguaca

SEQ ID NO: 306251 - RNA, 19 nt, Artificial Sequence
  Description of Artificial Sequence: Synthetic oligonucleotide
  Antisense strand to SEQ ID NO: 306250
uguacugacgaucucuacu

SEQ ID NO: 306252 - RNA, 19 nt, Artificial Sequence
  Description of Artificial Sequence: Synthetic oligonucleotide
  Sense strand starting at position 2255 of SEQ ID NO: 3934
uagagaucgucaguacaau

SEQ ID NO: 306253 - RNA, 19 nt, Artificial Sequence
  Description of Artificial Sequence: Synthetic oligonucleotide
  Antisense strand to SEQ ID NO: 306252
auuguacugacgaucucua

SEQ ID NO: 306254 - RNA, 19 nt, Artificial Sequence
  Description of Artificial Sequence: Synthetic oligonucleotide
  Sense strand starting at position 2256 of SEQ ID NO: 3934
agagaucgucaguacaaua

SEQ ID NO: 306255 - RNA, 19 nt, Artificial Sequence
  Description of Artificial Sequence: Synthetic oligonucleotide
  Antisense strand to SEQ ID NO: 306254
uauuguacugacgaucucu

SEQ ID NO: 306256 - RNA, 19 nt, Artificial Sequence
  Description of Artificial Sequence: Synthetic oligonucleotide
  Sense strand starting at position 2312 of SEQ ID NO: 3934
ggaguuaacuccuugaauu

SEQ ID NO: 306257 - RNA, 19 nt, Artificial Sequence
  Description of Artificial Sequence: Synthetic oligonucleotide
  Antisense strand to SEQ ID NO: 306256
aauucaaggaguuaacucc

SEQ ID NO: 306258 - RNA, 19 nt, Artificial Sequence
  Description of Artificial Sequence: Synthetic oligonucleotide
  Sense strand starting at position 2323 of SEQ ID NO: 3934
cuugaauucccuuggaauu

SEQ ID NO: 306259 - RNA, 19 nt, Artificial Sequence
  Description of Artificial Sequence: Synthetic oligonucleotide
  Antisense strand to SEQ ID NO: 306258
aauuccaagggaauucaag

SEQ ID NO: 306260 - RNA, 19 nt, Artificial Sequence
  Description of Artificial Sequence: Synthetic oligonucleotide
  Sense strand starting at position 2324 of SEQ ID NO: 3934
uugaauucccuuggaauua

SEQ ID NO: 306261 - RNA, 19 nt, Artificial Sequence
  Description of Artificial Sequence: Synthetic oligonucleotide
  Antisense strand to SEQ ID NO: 306260
uaauuccaagggaauucaa

SEQ ID NO: 306262 - RNA, 19 nt, Artificial Sequence
  Description of Artificial Sequence: Synthetic oligonucleotide
  Sense strand starting at position 2336 of SEQ ID NO: 3934
ggaauuagagcagguucuu

SEQ ID NO: 306263 - RNA, 19 nt, Artificial Sequence
  Description of Artificial Sequence: Synthetic oligonucleotide
  Antisense strand to SEQ ID NO: 306262
aagaaccugcucuaauucc

SEQ ID NO: 306264 - RNA, 19 nt, Artificial Sequence
  Description of Artificial Sequence: Synthetic oligonucleotide
  Sense strand starting at position 2454 of SEQ ID NO: 3934
ugugaaucuuaauugguac

SEQ ID NO: 306265 - RNA, 19 nt, Artificial Sequence
  Description of Artificial Sequence: Synthetic oligonucleotide
  Antisense strand to SEQ ID NO: 306264
guaccaauuaagauucaca

SEQ ID NO: 306266 - RNA, 19 nt, Artificial Sequence
  Description of Artificial Sequence: Synthetic oligonucleotide
  Sense strand starting at position 2588 of SEQ ID NO: 3934
ugucucugccaauaagaaa

SEQ ID NO: 306267 - RNA, 19 nt, Artificial Sequence
  Description of Artificial Sequence: Synthetic oligonucleotide
  Antisense strand to SEQ ID NO: 306266
uuucuuauuggcagagaca

SEQ ID NO: 306268 - RNA, 19 nt, Artificial Sequence
  Description of Artificial Sequence: Synthetic oligonucleotide
  Sense strand starting at position 2732 of SEQ ID NO: 3934
aguguuacugcccauaaau

SEQ ID NO: 306269 - RNA, 19 nt, Artificial Sequence
  Description of Artificial Sequence: Synthetic oligonucleotide
  Antisense strand to SEQ ID NO: 306268
auuuaugggcaguaacacu

SEQ ID NO: 306270 - RNA, 19 nt, Artificial Sequence
  Description of Artificial Sequence: Synthetic oligonucleotide
  Sense strand starting at position 2775 of SEQ ID NO: 3934
cuaucauacgguugauaac

SEQ ID NO: 306271 - RNA, 19 nt, Artificial Sequence
  Description of Artificial Sequence: Synthetic oligonucleotide
  Antisense strand to SEQ ID NO: 306270
guuaucaaccguaugauag

SEQ ID NO: 306272 - RNA, 19 nt, Artificial Sequence
  Description of Artificial Sequence: Synthetic oligonucleotide
  Sense strand starting at position 2784 of SEQ ID NO: 3934
gguugauaacgaugucaac

SEQ ID NO: 306273 - RNA, 19 nt, Artificial Sequence
  Description of Artificial Sequence: Synthetic oligonucleotide
  Antisense strand to SEQ ID NO: 306272
guugacaucguuaucaacc

SEQ ID NO: 306274 - RNA, 19 nt, Artificial Sequence
  Description of Artificial Sequence: Synthetic oligonucleotide
  Sense strand starting at position 2793 of SEQ ID NO: 3934
cgaugucaaccauaucaua

SEQ ID NO: 306275 - RNA, 19 nt, Artificial Sequence
  Description of Artificial Sequence: Synthetic oligonucleotide
  Antisense strand to SEQ ID NO: 306274
uaugauaugguugacaucg

SEQ ID NO: 306276 - RNA, 19 nt, Artificial Sequence
  Description of Artificial Sequence: Synthetic oligonucleotide
  Sense strand starting at position 2819 of SEQ ID NO: 3934
ucuauuagagacuguuuac

SEQ ID NO: 306277 - RNA, 19 nt, Artificial Sequence
  Description of Artificial Sequence: Synthetic oligonucleotide
  Antisense strand to SEQ ID NO: 306276
guaaacagucucuaauaga

SEQ ID NO: 306278 - RNA, 19 nt, Artificial Sequence
  Description of Artificial Sequence: Synthetic oligonucleotide
  Sense strand starting at position 2822 of SEQ ID NO: 3934
auuagagacuguuuacaua

SEQ ID NO: 306279 - RNA, 19 nt, Artificial Sequence
  Description of Artificial Sequence: Synthetic oligonucleotide
  Antisense strand to SEQ ID NO: 306278
uauguaaacagucucuaau

SEQ ID NO: 306280 - RNA, 19 nt, Artificial Sequence
  Description of Artificial Sequence: Synthetic oligonucleotide
  Sense strand starting at position 2891 of SEQ ID NO: 3934
agaagucugugggcuagaa

SEQ ID NO: 306281 - RNA, 19 nt, Artificial Sequence
  Description of Artificial Sequence: Synthetic oligonucleotide
  Antisense strand to SEQ ID NO: 306280
uucuagcccacagacuucu

SEQ ID NO: 306282 - RNA, 19 nt, Artificial Sequence
  Description of Artificial Sequence: Synthetic oligonucleotide
  Sense strand starting at position 2893 of SEQ ID NO: 3934
aagucugugggcuagaaag

SEQ ID NO: 306283 - RNA, 19 nt, Artificial Sequence
  Description of Artificial Sequence: Synthetic oligonucleotide
  Antisense strand to SEQ ID NO: 306282
cuuucuagcccacagacuu

SEQ ID NO: 306284 - RNA, 19 nt, Artificial Sequence
  Description of Artificial Sequence: Synthetic oligonucleotide
  Sense strand starting at position 2899 of SEQ ID NO: 3934
gugggcuagaaagguuuaa

SEQ ID NO: 306285 - RNA, 19 nt, Artificial Sequence
  Description of Artificial Sequence: Synthetic oligonucleotide
  Antisense strand to SEQ ID NO: 306284
uuaaaccuuucuagcccac

SEQ ID NO: 306286 - RNA, 19 nt, Artificial Sequence
  Description of Artificial Sequence: Synthetic oligonucleotide
  Sense strand starting at position 3168 of SEQ ID NO: 3934
guuaguaaacuuugaacuu

SEQ ID NO: 306287 - RNA, 19 nt, Artificial Sequence
  Description of Artificial Sequence: Synthetic oligonucleotide
  Antisense strand to SEQ ID NO: 306286
aaguucaaaguuuacuaac

SEQ ID NO: 306288 - RNA, 19 nt, Artificial Sequence
  Description of Artificial Sequence: Synthetic oligonucleotide
  Sense strand starting at position 3224 of SEQ ID NO: 3934
uggaguuguguaguucgua

SEQ ID NO: 306289 - RNA, 19 nt, Artificial Sequence
  Description of Artificial Sequence: Synthetic oligonucleotide
  Antisense strand to SEQ ID NO: 306288
uacgaacuacacaacucca

SEQ ID NO: 306290 - RNA, 19 nt, Artificial Sequence
  Description of Artificial Sequence: Synthetic oligonucleotide
  Sense strand starting at position 3236 of SEQ ID NO: 3934
guucguauuuacccaguau

SEQ ID NO: 306291 - RNA, 19 nt, Artificial Sequence
  Description of Artificial Sequence: Synthetic oligonucleotide
  Antisense strand to SEQ ID NO: 306290
auacuggguaaauacgaac

SEQ ID NO: 306292 - RNA, 19 nt, Artificial Sequence
  Description of Artificial Sequence: Synthetic oligonucleotide
  Sense strand starting at position 3247 of SEQ ID NO: 3934
cccaguaucacuggaagga

SEQ ID NO: 306293 - RNA, 19 nt, Artificial Sequence
  Description of Artificial Sequence: Synthetic oligonucleotide
  Antisense strand to SEQ ID NO: 306292
uccuuccagugauacuggg

SEQ ID NO: 306294 - RNA, 19 nt, Artificial Sequence
  Description of Artificial Sequence: Synthetic oligonucleotide
  Sense strand starting at position 3298 of SEQ ID NO: 3934
ucauaugacugacuuuaug

SEQ ID NO: 306295 - RNA, 19 nt, Artificial Sequence
  Description of Artificial Sequence: Synthetic oligonucleotide
  Antisense strand to SEQ ID NO: 306294
cauaaagucagucauauga

SEQ ID NO: 306296 - RNA, 19 nt, Artificial Sequence
  Description of Artificial Sequence: Synthetic oligonucleotide
  Sense strand starting at position 3443 of SEQ ID NO: 3934
gggacuuuggcucaccuaa

SEQ ID NO: 306297 - RNA, 19 nt, Artificial Sequence
  Description of Artificial Sequence: Synthetic oligonucleotide
  Antisense strand to SEQ ID NO: 306296
uuaggugagccaaaguccc

SEQ ID NO: 306298 - RNA, 19 nt, Artificial Sequence
  Description of Artificial Sequence: Synthetic oligonucleotide
  Sense strand starting at position 3475 of SEQ ID NO: 3934
gcaacuguggaauauuacu

SEQ ID NO: 306299 - RNA, 19 nt, Artificial Sequence
  Description of Artificial Sequence: Synthetic oligonucleotide
  Antisense strand to SEQ ID NO: 306298
aguaauauuccacaguugc

SEQ ID NO: 306300 - RNA, 19 nt, Artificial Sequence
  Description of Artificial Sequence: Synthetic oligonucleotide
  Sense strand starting at position 3480 of SEQ ID NO: 3934
uguggaauauuacuauaac

SEQ ID NO: 306301 - RNA, 19 nt, Artificial Sequence
  Description of Artificial Sequence: Synthetic oligonucleotide
  Antisense strand to SEQ ID NO: 306300
guuauaguaauauuccaca

SEQ ID NO: 306302 - RNA, 19 nt, Artificial Sequence
  Description of Artificial Sequence: Synthetic oligonucleotide
  Sense strand starting at position 3575 of SEQ ID NO: 3934
agaggauacugcucaguaa

SEQ ID NO: 306303 - RNA, 19 nt, Artificial Sequence
  Description of Artificial Sequence: Synthetic oligonucleotide
  Antisense strand to SEQ ID NO: 306302
uuacugagcaguauccucu

SEQ ID NO: 306304 - RNA, 19 nt, Artificial Sequence
  Description of Artificial Sequence: Synthetic oligonucleotide
  Sense strand starting at position 3576 of SEQ ID NO: 3934
gaggauacugcucaguaau

SEQ ID NO: 306305 - RNA, 19 nt, Artificial Sequence
  Description of Artificial Sequence: Synthetic oligonucleotide
  Antisense strand to SEQ ID NO: 306304
auuacugagcaguauccuc

SEQ ID NO: 306306 - RNA, 19 nt, Artificial Sequence
  Description of Artificial Sequence: Synthetic oligonucleotide
  Sense strand starting at position 3578 of SEQ ID NO: 3934
ggauacugcucaguaauaa

SEQ ID NO: 306307 - RNA, 19 nt, Artificial Sequence
  Description of Artificial Sequence: Synthetic oligonucleotide
  Antisense strand to SEQ ID NO: 306306
uuauuacugagcaguaucc

SEQ ID NO: 306308 - RNA, 19 nt, Artificial Sequence
  Description of Artificial Sequence: Synthetic oligonucleotide
  Sense strand starting at position 3641 of SEQ ID NO: 3934
augguucucccuugggaau

SEQ ID NO: 306309 - RNA, 19 nt, Artificial Sequence
  Description of Artificial Sequence: Synthetic oligonucleotide
  Antisense strand to SEQ ID NO: 306308
auucccaagggagaaccau

SEQ ID NO: 306310 - RNA, 19 nt, Artificial Sequence
  Description of Artificial Sequence: Synthetic oligonucleotide
  Sense strand starting at position 3699 of SEQ ID NO: 3934
ggcuuuguucuguugcuca

SEQ ID NO: 306311 - RNA, 19 nt, Artificial Sequence
  Description of Artificial Sequence: Synthetic oligonucleotide
  Antisense strand to SEQ ID NO: 306310
ugagcaacagaacaaagcc

SEQ ID NO: 306312 - RNA, 19 nt, Artificial Sequence
  Description of Artificial Sequence: Synthetic oligonucleotide
  Sense strand starting at position 20 of SEQ ID NO: 3935
acucauaugugacuguauu

SEQ ID NO: 306313 - RNA, 19 nt, Artificial Sequence
  Description of Artificial Sequence: Synthetic oligonucleotide
  Antisense strand to SEQ ID NO: 306312
aauacagucacauaugagu

SEQ ID NO: 306314 - RNA, 19 nt, Artificial Sequence
  Description of Artificial Sequence: Synthetic oligonucleotide
  Sense strand starting at position 21 of SEQ ID NO: 3935
cucauaugugacuguauuc

SEQ ID NO: 306315 - RNA, 19 nt, Artificial Sequence
  Description of Artificial Sequence: Synthetic oligonucleotide
  Antisense strand to SEQ ID NO: 306314
gaauacagucacauaugag

SEQ ID NO: 306316 - RNA, 19 nt, Artificial Sequence
  Description of Artificial Sequence: Synthetic oligonucleotide
  Sense strand starting at position 28 of SEQ ID NO: 3935
gugacuguauucuuuccaa

SEQ ID NO: 306317 - RNA, 19 nt, Artificial Sequence
  Description of Artificial Sequence: Synthetic oligonucleotide
  Antisense strand to SEQ ID NO: 306316
uuggaaagaauacagucac

SEQ ID NO: 306318 - RNA, 19 nt, Artificial Sequence
  Description of Artificial Sequence: Synthetic oligonucleotide
  Sense strand starting at position 110 of SEQ ID NO: 3935
cacaguguucuagaaacug

SEQ ID NO: 306319 - RNA, 19 nt, Artificial Sequence
  Description of Artificial Sequence: Synthetic oligonucleotide
  Antisense strand to SEQ ID NO: 306318
caguuucuagaacacugug

SEQ ID NO: 306320 - RNA, 19 nt, Artificial Sequence
  Description of Artificial Sequence: Synthetic oligonucleotide
  Sense strand starting at position 210 of SEQ ID NO: 3935
ggcauaauaccaggugucu

SEQ ID NO: 306321 - RNA, 19 nt, Artificial Sequence
  Description of Artificial Sequence: Synthetic oligonucleotide
  Antisense strand to SEQ ID NO: 306320
agacaccugguauuaugcc

SEQ ID NO: 306322 - RNA, 19 nt, Artificial Sequence
  Description of Artificial Sequence: Synthetic oligonucleotide
  Sense strand starting at position 285 of SEQ ID NO: 3935
gucauaauuuccuuuggca

SEQ ID NO: 306323 - RNA, 19 nt, Artificial Sequence
  Description of Artificial Sequence: Synthetic oligonucleotide
  Antisense strand to SEQ ID NO: 306322
ugccaaaggaaauuaugac

SEQ ID NO: 306324 - RNA, 19 nt, Artificial Sequence
  Description of Artificial Sequence: Synthetic oligonucleotide
  Sense strand starting at position 351 of SEQ ID NO: 3935
uuucuuaucugggucauca

SEQ ID NO: 306325 - RNA, 19 nt, Artificial Sequence
  Description of Artificial Sequence: Synthetic oligonucleotide
  Antisense strand to SEQ ID NO: 306324
ugaugacccagauaagaaa

SEQ ID NO: 306326 - RNA, 19 nt, Artificial Sequence
  Description of Artificial Sequence: Synthetic oligonucleotide
  Sense strand starting at position 353 of SEQ ID NO: 3935
ucuuaucugggucaucaua

SEQ ID NO: 306327 - RNA, 19 nt, Artificial Sequence
  Description of Artificial Sequence: Synthetic oligonucleotide
  Antisense strand to SEQ ID NO: 306326
uaugaugacccagauaaga

SEQ ID NO: 306328 - RNA, 19 nt, Artificial Sequence
  Description of Artificial Sequence: Synthetic oligonucleotide
  Sense strand starting at position 355 of SEQ ID NO: 3935
uuaucugggucaucauaag

SEQ ID NO: 306329 - RNA, 19 nt, Artificial Sequence
  Description of Artificial Sequence: Synthetic oligonucleotide
  Antisense strand to SEQ ID NO: 306328
cuuaugaugacccagauaa

SEQ ID NO: 306330 - RNA, 19 nt, Artificial Sequence
  Description of Artificial Sequence: Synthetic oligonucleotide
  Sense strand starting at position 773 of SEQ ID NO: 3935
ccuguacuuguaugguaag

SEQ ID NO: 306331 - RNA, 19 nt, Artificial Sequence
  Description of Artificial Sequence: Synthetic oligonucleotide
  Antisense strand to SEQ ID NO: 306330
cuuaccauacaaguacagg

SEQ ID NO: 306332 - RNA, 19 nt, Artificial Sequence
  Description of Artificial Sequence: Synthetic oligonucleotide
  Sense strand starting at position 866 of SEQ ID NO: 3935
aagugaucacagcguccaa

SEQ ID NO: 306333 - RNA, 19 nt, Artificial Sequence
  Description of Artificial Sequence: Synthetic oligonucleotide
  Antisense strand to SEQ ID NO: 306332
uuggacgcugugaucacuu

SEQ ID NO: 306334 - RNA, 19 nt, Artificial Sequence
  Description of Artificial Sequence: Synthetic oligonucleotide
  Sense strand starting at position 1978 of SEQ ID NO: 3935
gcuguuaugggugcgguua

SEQ ID NO: 306335 - RNA, 19 nt, Artificial Sequence
  Description of Artificial Sequence: Synthetic oligonucleotide
  Antisense strand to SEQ ID NO: 306334
uaaccgcacccauaacagc

SEQ ID NO: 306336 - RNA, 19 nt, Artificial Sequence
  Description of Artificial Sequence: Synthetic oligonucleotide
  Sense strand starting at position 2030 of SEQ ID NO: 3935
gccgguuuccuugucgcaa

SEQ ID NO: 306337 - RNA, 19 nt, Artificial Sequence
  Description of Artificial Sequence: Synthetic oligonucleotide
  Antisense strand to SEQ ID NO: 306336
uugcgacaaggaaaccggc

SEQ ID NO: 306338 - RNA, 19 nt, Artificial Sequence
  Description of Artificial Sequence: Synthetic oligonucleotide
  Sense strand starting at position 2335 of SEQ ID NO: 3935
gcgcucacugugucuguua

SEQ ID NO: 306339 - RNA, 19 nt, Artificial Sequence
  Description of Artificial Sequence: Synthetic oligonucleotide
  Antisense strand to SEQ ID NO: 306338
uaacagacacagugagcgc

SEQ ID NO: 306340 - RNA, 19 nt, Artificial Sequence
  Description of Artificial Sequence: Synthetic oligonucleotide
  Sense strand starting at position 2425 of SEQ ID NO: 3935
cacgguguggucgauaaua

SEQ ID NO: 306341 - RNA, 19 nt, Artificial Sequence
  Description of Artificial Sequence: Synthetic oligonucleotide
  Antisense strand to SEQ ID NO: 306340
uauuaucgaccacaccgug

SEQ ID NO: 306342 - RNA, 19 nt, Artificial Sequence
  Description of Artificial Sequence: Synthetic oligonucleotide
  Sense strand starting at position 2427 of SEQ ID NO: 3935
cgguguggucgauaauaau

SEQ ID NO: 306343 - RNA, 19 nt, Artificial Sequence
  Description of Artificial Sequence: Synthetic oligonucleotide
  Antisense strand to SEQ ID NO: 306342
auuauuaucgaccacaccg

SEQ ID NO: 306344 - RNA, 19 nt, Artificial Sequence
  Description of Artificial Sequence: Synthetic oligonucleotide
  Sense strand starting at position 2494 of SEQ ID NO: 3935
gaguuaucucuuggaauua

SEQ ID NO: 306345 - RNA, 19 nt, Artificial Sequence
  Description of Artificial Sequence: Synthetic oligonucleotide
  Antisense strand to SEQ ID NO: 306344
uaauuccaagagauaacuc

SEQ ID NO: 306346 - RNA, 19 nt, Artificial Sequence
  Description of Artificial Sequence: Synthetic oligonucleotide
  Sense strand starting at position 2504 of SEQ ID NO: 3935
uuggaauuacccuggaauu

SEQ ID NO: 306347 - RNA, 19 nt, Artificial Sequence
  Description of Artificial Sequence: Synthetic oligonucleotide
  Antisense strand to SEQ ID NO: 306346
aauuccaggguaauuccaa

SEQ ID NO: 306348 - RNA, 19 nt, Artificial Sequence
  Description of Artificial Sequence: Synthetic oligonucleotide
  Sense strand starting at position 2517 of SEQ ID NO: 3935
ggaauuagagcacguucuu

SEQ ID NO: 306349 - RNA, 19 nt, Artificial Sequence
  Description of Artificial Sequence: Synthetic oligonucleotide
  Antisense strand to SEQ ID NO: 306348
aagaacgugcucuaauucc

SEQ ID NO: 306350 - RNA, 19 nt, Artificial Sequence
  Description of Artificial Sequence: Synthetic oligonucleotide
  Sense strand starting at position 2636 of SEQ ID NO: 3935
ugugaaucuugauugguac

SEQ ID NO: 306351 - RNA, 19 nt, Artificial Sequence
  Description of Artificial Sequence: Synthetic oligonucleotide
  Antisense strand to SEQ ID NO: 306350
guaccaaucaagauucaca

SEQ ID NO: 306352 - RNA, 19 nt, Artificial Sequence
  Description of Artificial Sequence: Synthetic oligonucleotide
  Sense strand starting at position 2637 of SEQ ID NO: 3935
gugaaucuugauugguacu

SEQ ID NO: 306353 - RNA, 19 nt, Artificial Sequence
  Description of Artificial Sequence: Synthetic oligonucleotide
  Antisense strand to SEQ ID NO: 306352
aguaccaaucaagauucac

SEQ ID NO: 306354 - RNA, 19 nt, Artificial Sequence
  Description of Artificial Sequence: Synthetic oligonucleotide
  Sense strand starting at position 2785 of SEQ ID NO: 3935
gguagaaacguuggagaaa

SEQ ID NO: 306355 - RNA, 19 nt, Artificial Sequence
  Description of Artificial Sequence: Synthetic oligonucleotide
  Antisense strand to SEQ ID NO: 306354
uuucuccaacguuucuacc

SEQ ID NO: 306356 - RNA, 19 nt, Artificial Sequence
  Description of Artificial Sequence: Synthetic oligonucleotide
  Sense strand starting at position 2796 of SEQ ID NO: 3935
uggagaaaugcaugacuuc

SEQ ID NO: 306357 - RNA, 19 nt, Artificial Sequence
  Description of Artificial Sequence: Synthetic oligonucleotide
  Antisense strand to SEQ ID NO: 306356
gaagucaugcauuucucca

SEQ ID NO: 306358 - RNA, 19 nt, Artificial Sequence
  Description of Artificial Sequence: Synthetic oligonucleotide
  Sense strand starting at position 3048 of SEQ ID NO: 3935
uccagauucuuaguuugaa

SEQ ID NO: 306359 - RNA, 19 nt, Artificial Sequence
  Description of Artificial Sequence: Synthetic oligonucleotide
  Antisense strand to SEQ ID NO: 306358
uucaaacuaagaaucugga

SEQ ID NO: 306360 - RNA, 19 nt, Artificial Sequence
  Description of Artificial Sequence: Synthetic oligonucleotide
  Sense strand starting at position 3049 of SEQ ID NO: 3935
ccagauucuuaguuugaag

SEQ ID NO: 306361 - RNA, 19 nt, Artificial Sequence
  Description of Artificial Sequence: Synthetic oligonucleotide
  Antisense strand to SEQ ID NO: 306360
cuucaaacuaagaaucugg

SEQ ID NO: 306362 - RNA, 19 nt, Artificial Sequence
  Description of Artificial Sequence: Synthetic oligonucleotide
  Sense strand starting at position 3076 of SEQ ID NO: 3935
gcagguuugcuagacugua

SEQ ID NO: 306363 - RNA, 19 nt, Artificial Sequence
  Description of Artificial Sequence: Synthetic oligonucleotide
  Antisense strand to SEQ ID NO: 306362
uacagucuagcaaaccugc

SEQ ID NO: 306364 - RNA, 19 nt, Artificial Sequence
  Description of Artificial Sequence: Synthetic oligonucleotide
  Sense strand starting at position 3081 of SEQ ID NO: 3935
uuugcuagacuguacaaga

SEQ ID NO: 306365 - RNA, 19 nt, Artificial Sequence
  Description of Artificial Sequence: Synthetic oligonucleotide
  Antisense strand to SEQ ID NO: 306364
ucuuguacagucuagcaaa

SEQ ID NO: 306366 - RNA, 19 nt, Artificial Sequence
  Description of Artificial Sequence: Synthetic oligonucleotide
  Sense strand starting at position 3238 of SEQ ID NO: 3935
gggcuuaauuauuccauaa

SEQ ID NO: 306367 - RNA, 19 nt, Artificial Sequence
  Description of Artificial Sequence: Synthetic oligonucleotide
  Antisense strand to SEQ ID NO: 306366
uuauggaauaauuaagccc

SEQ ID NO: 306368 - RNA, 19 nt, Artificial Sequence
  Description of Artificial Sequence: Synthetic oligonucleotide
  Sense strand starting at position 3405 of SEQ ID NO: 3935
gguacuuguaaauagugua

SEQ ID NO: 306369 - RNA, 19 nt, Artificial Sequence
  Description of Artificial Sequence: Synthetic oligonucleotide
  Antisense strand to SEQ ID NO: 306368
uacacuauuuacaaguacc

SEQ ID NO: 306370 - RNA, 19 nt, Artificial Sequence
  Description of Artificial Sequence: Synthetic oligonucleotide
  Sense strand starting at position 3480 of SEQ ID NO: 3935
gggacagagcauugucuuu

SEQ ID NO: 306371 - RNA, 19 nt, Artificial Sequence
  Description of Artificial Sequence: Synthetic oligonucleotide
  Antisense strand to SEQ ID NO: 306370
aaagacaaugcucuguccc

SEQ ID NO: 306372 - RNA, 19 nt, Artificial Sequence
  Description of Artificial Sequence: Synthetic oligonucleotide
  Sense strand starting at position 3731 of SEQ ID NO: 3935
cccuguauucugcauauua

SEQ ID NO: 306373 - RNA, 19 nt, Artificial Sequence
  Description of Artificial Sequence: Synthetic oligonucleotide
  Antisense strand to SEQ ID NO: 306372
uaauaugcagaauacaggg

SEQ ID NO: 306374 - RNA, 19 nt, Artificial Sequence
  Description of Artificial Sequence: Synthetic oligonucleotide
  Sense strand starting at position 3733 of SEQ ID NO: 3935
cuguauucugcauauuacu

SEQ ID NO: 306375 - RNA, 19 nt, Artificial Sequence
  Description of Artificial Sequence: Synthetic oligonucleotide
  Antisense strand to SEQ ID NO: 306374
aguaauaugcagaauacag

SEQ ID NO: 306376 - RNA, 19 nt, Artificial Sequence
  Description of Artificial Sequence: Synthetic oligonucleotide
  Sense strand starting at position 3760 of SEQ ID NO: 3935
acaugugaaucagaaagau

SEQ ID NO: 306377 - RNA, 19 nt, Artificial Sequence
  Description of Artificial Sequence: Synthetic oligonucleotide
  Antisense strand to SEQ ID NO: 306376
aucuuucugauucacaugu

SEQ ID NO: 306378 - RNA, 19 nt, Artificial Sequence
  Description of Artificial Sequence: Synthetic oligonucleotide
  Sense strand starting at position 3780 of SEQ ID NO: 3935
aggcaacuugccugagaug

SEQ ID NO: 306379 - RNA, 19 nt, Artificial Sequence
  Description of Artificial Sequence: Synthetic oligonucleotide
  Antisense strand to SEQ ID NO: 306378
caucucaggcaaguugccu

SEQ ID NO: 306380 - RNA, 19 nt, Artificial Sequence
  Description of Artificial Sequence: Synthetic oligonucleotide
  Sense strand starting at position 3781 of SEQ ID NO: 3935
ggcaacuugccugagauga

SEQ ID NO: 306381 - RNA, 19 nt, Artificial Sequence
  Description of Artificial Sequence: Synthetic oligonucleotide
  Antisense strand to SEQ ID NO: 306380
ucaucucaggcaaguugcc

SEQ ID NO: 306382 - RNA, 19 nt, Artificial Sequence
  Description of Artificial Sequence: Synthetic oligonucleotide
  Sense strand starting at position 3850 of SEQ ID NO: 3935
guagguaauagucacugau

SEQ ID NO: 306383 - RNA, 19 nt, Artificial Sequence
  Description of Artificial Sequence: Synthetic oligonucleotide
  Antisense strand to SEQ ID NO: 306382
aucagugacuauuaccuac

SEQ ID NO: 306384 - RNA, 19 nt, Artificial Sequence
  Description of Artificial Sequence: Synthetic oligonucleotide
  Sense strand starting at position 3852 of SEQ ID NO: 3935
agguaauagucacugauga

SEQ ID NO: 306385 - RNA, 19 nt, Artificial Sequence
  Description of Artificial Sequence: Synthetic oligonucleotide
  Antisense strand to SEQ ID NO: 306384
ucaucagugacuauuaccu

SEQ ID NO: 306386 - RNA, 19 nt, Artificial Sequence
  Description of Artificial Sequence: Synthetic oligonucleotide
  Sense strand starting at position 3853 of SEQ ID NO: 3935
gguaauagucacugaugaa

SEQ ID NO: 306387 - RNA, 19 nt, Artificial Sequence
  Description of Artificial Sequence: Synthetic oligonucleotide
  Antisense strand to SEQ ID NO: 306386
uucaucagugacuauuacc

SEQ ID NO: 306388 - RNA, 19 nt, Artificial Sequence
  Description of Artificial Sequence: Synthetic oligonucleotide
  Sense strand starting at position 3886 of SEQ ID NO: 3935
cauguaugggcccaguuau

SEQ ID NO: 306389 - RNA, 19 nt, Artificial Sequence
  Description of Artificial Sequence: Synthetic oligonucleotide
  Antisense strand to SEQ ID NO: 306388
auaacugggcccauacaug

SEQ ID NO: 306390 - RNA, 19 nt, Artificial Sequence
  Description of Artificial Sequence: Synthetic oligonucleotide
  Sense strand starting at position 3969 of SEQ ID NO: 3935
uggguuggccaguggaaau

SEQ ID NO: 306391 - RNA, 19 nt, Artificial Sequence
  Description of Artificial Sequence: Synthetic oligonucleotide
  Antisense strand to SEQ ID NO: 306390
auuuccacuggccaaccca

SEQ ID NO: 306392 - RNA, 19 nt, Artificial Sequence
  Description of Artificial Sequence: Synthetic oligonucleotide
  Sense strand starting at position 65 of SEQ ID NO: 3936
uaacuaaauguuugaggua

SEQ ID NO: 306393 - RNA, 19 nt, Artificial Sequence
  Description of Artificial Sequence: Synthetic oligonucleotide
  Antisense strand to SEQ ID NO: 306392
uaccucaaacauuuaguua

SEQ ID NO: 306394 - RNA, 19 nt, Artificial Sequence
  Description of Artificial Sequence: Synthetic oligonucleotide
  Sense strand starting at position 66 of SEQ ID NO: 3936
aacuaaauguuugagguaa

SEQ ID NO: 306395 - RNA, 19 nt, Artificial Sequence
  Description of Artificial Sequence: Synthetic oligonucleotide
  Antisense strand to SEQ ID NO: 306394
uuaccucaaacauuuaguu

SEQ ID NO: 306396 - RNA, 19 nt, Artificial Sequence
  Description of Artificial Sequence: Synthetic oligonucleotide
  Sense strand starting at position 131 of SEQ ID NO: 3936
agaugaaaguuuguguuau

SEQ ID NO: 306397 - RNA, 19 nt, Artificial Sequence
  Description of Artificial Sequence: Synthetic oligonucleotide
  Antisense strand to SEQ ID NO: 306396
auaacacaaacuuucaucu

SEQ ID NO: 306398 - RNA, 19 nt, Artificial Sequence
  Description of Artificial Sequence: Synthetic oligonucleotide
  Sense strand starting at position 132 of SEQ ID NO: 3936
gaugaaaguuuguguuauu

SEQ ID NO: 306399 - RNA, 19 nt, Artificial Sequence
  Description of Artificial Sequence: Synthetic oligonucleotide
  Antisense strand to SEQ ID NO: 306398
aauaacacaaacuuucauc

SEQ ID NO: 306400 - RNA, 19 nt, Artificial Sequence
  Description of Artificial Sequence: Synthetic oligonucleotide
  Sense strand starting at position 135 of SEQ ID NO: 3936
gaaaguuuguguuauuaac

SEQ ID NO: 306401 - RNA, 19 nt, Artificial Sequence
  Description of Artificial Sequence: Synthetic oligonucleotide
  Antisense strand to SEQ ID NO: 306400
guuaauaacacaaacuuuc

SEQ ID NO: 306402 - RNA, 19 nt, Artificial Sequence
  Description of Artificial Sequence: Synthetic oligonucleotide
  Sense strand starting at position 233 of SEQ ID NO: 3936
uggguuugaguuugagauu

SEQ ID NO: 306403 - RNA, 19 nt, Artificial Sequence
  Description of Artificial Sequence: Synthetic oligonucleotide
  Antisense strand to SEQ ID NO: 306402
aaucucaaacucaaaccca

SEQ ID NO: 306404 - RNA, 19 nt, Artificial Sequence
  Description of Artificial Sequence: Synthetic oligonucleotide
  Sense strand starting at position 234 of SEQ ID NO: 3936
ggguuugaguuugagauuc

SEQ ID NO: 306405 - RNA, 19 nt, Artificial Sequence
  Description of Artificial Sequence: Synthetic oligonucleotide
  Antisense strand to SEQ ID NO: 306404
gaaucucaaacucaaaccc

SEQ ID NO: 306406 - RNA, 19 nt, Artificial Sequence
  Description of Artificial Sequence: Synthetic oligonucleotide
  Sense strand starting at position 236 of SEQ ID NO: 3936
guuugaguuugagauucua

SEQ ID NO: 306407 - RNA, 19 nt, Artificial Sequence
  Description of Artificial Sequence: Synthetic oligonucleotide
  Antisense strand to SEQ ID NO: 306406
uagaaucucaaacucaaac

SEQ ID NO: 306408 - RNA, 19 nt, Artificial Sequence
  Description of Artificial Sequence: Synthetic oligonucleotide
  Sense strand starting at position 244 of SEQ ID NO: 3936
uugagauucuagggaguau

SEQ ID NO: 306409 - RNA, 19 nt, Artificial Sequence
  Description of Artificial Sequence: Synthetic oligonucleotide
  Antisense strand to SEQ ID NO: 306408
auacucccuagaaucucaa

SEQ ID NO: 306410 - RNA, 19 nt, Artificial Sequence
  Description of Artificial Sequence: Synthetic oligonucleotide
  Sense strand starting at position 264 of SEQ ID NO: 3936
gcgccucaaugcuuccaaa

SEQ ID NO: 306411 - RNA, 19 nt, Artificial Sequence
  Description of Artificial Sequence: Synthetic oligonucleotide
  Antisense strand to SEQ ID NO: 306410
uuuggaagcauugaggcgc

SEQ ID NO: 306412 - RNA, 19 nt, Artificial Sequence
  Description of Artificial Sequence: Synthetic oligonucleotide
  Sense strand starting at position 288 of SEQ ID NO: 3936
uccugucccuccuucgaaa

SEQ ID NO: 306413 - RNA, 19 nt, Artificial Sequence
  Description of Artificial Sequence: Synthetic oligonucleotide
  Antisense strand to SEQ ID NO: 306412
uuucgaaggagggacagga

SEQ ID NO: 306414 - RNA, 19 nt, Artificial Sequence
  Description of Artificial Sequence: Synthetic oligonucleotide
  Sense strand starting at position 623 of SEQ ID NO: 3936
ucuguugccuacuugagaa

SEQ ID NO: 306415 - RNA, 19 nt, Artificial Sequence
  Description of Artificial Sequence: Synthetic oligonucleotide
  Antisense strand to SEQ ID NO: 306414
uucucaaguaggcaacaga

SEQ ID NO: 306416 - RNA, 19 nt, Artificial Sequence
  Description of Artificial Sequence: Synthetic oligonucleotide
  Sense strand starting at position 735 of SEQ ID NO: 3936
cuggucucacuuugguaaa

SEQ ID NO: 306417 - RNA, 19 nt, Artificial Sequence
  Description of Artificial Sequence: Synthetic oligonucleotide
  Antisense strand to SEQ ID NO: 306416
uuuaccaaagugagaccag

SEQ ID NO: 306418 - RNA, 19 nt, Artificial Sequence
  Description of Artificial Sequence: Synthetic oligonucleotide
  Sense strand starting at position 737 of SEQ ID NO: 3936
ggucucacuuugguaaagu

SEQ ID NO: 306419 - RNA, 19 nt, Artificial Sequence
  Description of Artificial Sequence: Synthetic oligonucleotide
  Antisense strand to SEQ ID NO: 306418
acuuuaccaaagugagacc

SEQ ID NO: 306420 - RNA, 19 nt, Artificial Sequence
  Description of Artificial Sequence: Synthetic oligonucleotide
  Sense strand starting at position 738 of SEQ ID NO: 3936
gucucacuuugguaaaguu

SEQ ID NO: 306421 - RNA, 19 nt, Artificial Sequence
  Description of Artificial Sequence: Synthetic oligonucleotide
  Antisense strand to SEQ ID NO: 306420
aacuuuaccaaagugagac

SEQ ID NO: 306422 - RNA, 19 nt, Artificial Sequence
  Description of Artificial Sequence: Synthetic oligonucleotide
  Sense strand starting at position 746 of SEQ ID NO: 3936
uugguaaaguucucucaac

SEQ ID NO: 306423 - RNA, 19 nt, Artificial Sequence
  Description of Artificial Sequence: Synthetic oligonucleotide
  Antisense strand to SEQ ID NO: 306422
guugagagaacuuuaccaa

SEQ ID NO: 306424 - RNA, 19 nt, Artificial Sequence
  Description of Artificial Sequence: Synthetic oligonucleotide
  Sense strand starting at position 747 of SEQ ID NO: 3936
ugguaaaguucucucaacu

SEQ ID NO: 306425 - RNA, 19 nt, Artificial Sequence
  Description of Artificial Sequence: Synthetic oligonucleotide
  Antisense strand to SEQ ID NO: 306424
aguugagagaacuuuacca

SEQ ID NO: 306426 - RNA, 19 nt, Artificial Sequence
  Description of Artificial Sequence: Synthetic oligonucleotide
  Sense strand starting at position 1429 of SEQ ID NO: 3936
agacccuugucugcucaau

SEQ ID NO: 306427 - RNA, 19 nt, Artificial Sequence
  Description of Artificial Sequence: Synthetic oligonucleotide
  Antisense strand to SEQ ID NO: 306426
auugagcagacaagggucu

SEQ ID NO: 306428 - RNA, 19 nt, Artificial Sequence
  Description of Artificial Sequence: Synthetic oligonucleotide
  Sense strand starting at position 1456 of SEQ ID NO: 3936
cuucgagcaucuguuacau

SEQ ID NO: 306429 - RNA, 19 nt, Artificial Sequence
  Description of Artificial Sequence: Synthetic oligonucleotide
  Antisense strand to SEQ ID NO: 306428
auguaacagaugcucgaag

SEQ ID NO: 306430 - RNA, 19 nt, Artificial Sequence
  Description of Artificial Sequence: Synthetic oligonucleotide
  Sense strand starting at position 1458 of SEQ ID NO: 3936
ucgagcaucuguuacauca

SEQ ID NO: 306431 - RNA, 19 nt, Artificial Sequence
  Description of Artificial Sequence: Synthetic oligonucleotide
  Antisense strand to SEQ ID NO: 306430
ugauguaacagaugcucga

SEQ ID NO: 306432 - RNA, 19 nt, Artificial Sequence
  Description of Artificial Sequence: Synthetic oligonucleotide
  Sense strand starting at position 1465 of SEQ ID NO: 3936
ucuguuacaucaggaucau

SEQ ID NO: 306433 - RNA, 19 nt, Artificial Sequence
  Description of Artificial Sequence: Synthetic oligonucleotide
  Antisense strand to SEQ ID NO: 306432
augauccugauguaacaga

SEQ ID NO: 306434 - RNA, 19 nt, Artificial Sequence
  Description of Artificial Sequence: Synthetic oligonucleotide
  Sense strand starting at position 1659 of SEQ ID NO: 3936
uuuaccucuucgccguaau

SEQ ID NO: 306435 - RNA, 19 nt, Artificial Sequence
  Description of Artificial Sequence: Synthetic oligonucleotide
  Antisense strand to SEQ ID NO: 306434
auuacggcgaagagguaaa

SEQ ID NO: 306436 - RNA, 19 nt, Artificial Sequence
  Description of Artificial Sequence: Synthetic oligonucleotide
  Sense strand starting at position 1999 of SEQ ID NO: 3936
aaugaaagguagucuagua

SEQ ID NO: 306437 - RNA, 19 nt, Artificial Sequence
  Description of Artificial Sequence: Synthetic oligonucleotide
  Antisense strand to SEQ ID NO: 306436
uacuagacuaccuuucauu

SEQ ID NO: 306438 - RNA, 19 nt, Artificial Sequence
  Description of Artificial Sequence: Synthetic oligonucleotide
  Sense strand starting at position 2004 of SEQ ID NO: 3936
aagguagucuaguauuuga

SEQ ID NO: 306439 - RNA, 19 nt, Artificial Sequence
  Description of Artificial Sequence: Synthetic oligonucleotide
  Antisense strand to SEQ ID NO: 306438
ucaaauacuagacuaccuu

SEQ ID NO: 306440 - RNA, 19 nt, Artificial Sequence
  Description of Artificial Sequence: Synthetic oligonucleotide
  Sense strand starting at position 2009 of SEQ ID NO: 3936
agucuaguauuugauacca

SEQ ID NO: 306441 - RNA, 19 nt, Artificial Sequence
  Description of Artificial Sequence: Synthetic oligonucleotide
  Antisense strand to SEQ ID NO: 306440
ugguaucaaauacuagacu

SEQ ID NO: 306442 - RNA, 19 nt, Artificial Sequence
  Description of Artificial Sequence: Synthetic oligonucleotide
  Sense strand starting at position 2014 of SEQ ID NO: 3936
aguauuugauaccagccaa

SEQ ID NO: 306443 - RNA, 19 nt, Artificial Sequence
  Description of Artificial Sequence: Synthetic oligonucleotide
  Antisense strand to SEQ ID NO: 306442
uuggcugguaucaaauacu

SEQ ID NO: 306444 - RNA, 19 nt, Artificial Sequence
  Description of Artificial Sequence: Synthetic oligonucleotide
  Sense strand starting at position 2202 of SEQ ID NO: 3936
gggaaucguuagguucguu

SEQ ID NO: 306445 - RNA, 19 nt, Artificial Sequence
  Description of Artificial Sequence: Synthetic oligonucleotide
  Antisense strand to SEQ ID NO: 306444
aacgaaccuaacgauuccc

SEQ ID NO: 306446 - RNA, 19 nt, Artificial Sequence
  Description of Artificial Sequence: Synthetic oligonucleotide
  Sense strand starting at position 2207 of SEQ ID NO: 3936
ucguuagguucguucugga

SEQ ID NO: 306447 - RNA, 19 nt, Artificial Sequence
  Description of Artificial Sequence: Synthetic oligonucleotide
  Antisense strand to SEQ ID NO: 306446
uccagaacgaaccuaacga

SEQ ID NO: 306448 - RNA, 19 nt, Artificial Sequence
  Description of Artificial Sequence: Synthetic oligonucleotide
  Sense strand starting at position 2587 of SEQ ID NO: 3936
ggcugugcgacucaugaag

SEQ ID NO: 306449 - RNA, 19 nt, Artificial Sequence
  Description of Artificial Sequence: Synthetic oligonucleotide
  Antisense strand to SEQ ID NO: 306448
cuucaugagucgcacagcc

SEQ ID NO: 306450 - RNA, 19 nt, Artificial Sequence
  Description of Artificial Sequence: Synthetic oligonucleotide
  Sense strand starting at position 2770 of SEQ ID NO: 3936
ggaggcugucaucgagaug

SEQ ID NO: 306451 - RNA, 19 nt, Artificial Sequence
  Description of Artificial Sequence: Synthetic oligonucleotide
  Antisense strand to SEQ ID NO: 306450
caucucgaugacagccucc

SEQ ID NO: 306452 - RNA, 19 nt, Artificial Sequence
  Description of Artificial Sequence: Synthetic oligonucleotide
  Sense strand starting at position 3382 of SEQ ID NO: 3936
gacuauagcuucugagcuu

SEQ ID NO: 306453 - RNA, 19 nt, Artificial Sequence
  Description of Artificial Sequence: Synthetic oligonucleotide
  Antisense strand to SEQ ID NO: 306452
aagcucagaagcuauaguc

SEQ ID NO: 306454 - RNA, 19 nt, Artificial Sequence
  Description of Artificial Sequence: Synthetic oligonucleotide
  Sense strand starting at position 3383 of SEQ ID NO: 3936
acuauagcuucugagcuuu

SEQ ID NO: 306455 - RNA, 19 nt, Artificial Sequence
  Description of Artificial Sequence: Synthetic oligonucleotide
  Antisense strand to SEQ ID NO: 306454
aaagcucagaagcuauagu

SEQ ID NO: 306456 - RNA, 19 nt, Artificial Sequence
  Description of Artificial Sequence: Synthetic oligonucleotide
  Sense strand starting at position 3405 of SEQ ID NO: 3936
ggcaaagucuugcuuucca

SEQ ID NO: 306457 - RNA, 19 nt, Artificial Sequence
  Description of Artificial Sequence: Synthetic oligonucleotide
  Antisense strand to SEQ ID NO: 306456
uggaaagcaagacuuugcc

SEQ ID NO: 306458 - RNA, 19 nt, Artificial Sequence
  Description of Artificial Sequence: Synthetic oligonucleotide
  Sense strand starting at position 3430 of SEQ ID NO: 3936
ucccgagucuuggaggaag

SEQ ID NO: 306459 - RNA, 19 nt, Artificial Sequence
  Description of Artificial Sequence: Synthetic oligonucleotide
  Antisense strand to SEQ ID NO: 306458
cuuccuccaagacucggga

SEQ ID NO: 306460 - RNA, 19 nt, Artificial Sequence
  Description of Artificial Sequence: Synthetic oligonucleotide
  Sense strand starting at position 3432 of SEQ ID NO: 3936
ccgagucuuggaggaagca

SEQ ID NO: 306461 - RNA, 19 nt, Artificial Sequence
  Description of Artificial Sequence: Synthetic oligonucleotide
  Antisense strand to SEQ ID NO: 306460
ugcuuccuccaagacucgg

SEQ ID NO: 306462 - RNA, 19 nt, Artificial Sequence
  Description of Artificial Sequence: Synthetic oligonucleotide
  Sense strand starting at position 3433 of SEQ ID NO: 3936
cgagucuuggaggaagcau

SEQ ID NO: 306463 - RNA, 19 nt, Artificial Sequence
  Description of Artificial Sequence: Synthetic oligonucleotide
  Antisense strand to SEQ ID NO: 306462
augcuuccuccaagacucg

SEQ ID NO: 306464 - RNA, 19 nt, Artificial Sequence
  Description of Artificial Sequence: Synthetic oligonucleotide
  Sense strand starting at position 3565 of SEQ ID NO: 3936
cuggcaucuuugugucaca

SEQ ID NO: 306465 - RNA, 19 nt, Artificial Sequence
  Description of Artificial Sequence: Synthetic oligonucleotide
  Antisense strand to SEQ ID NO: 306464
ugugacacaaagaugccag

SEQ ID NO: 306466 - RNA, 19 nt, Artificial Sequence
  Description of Artificial Sequence: Synthetic oligonucleotide
  Sense strand starting at position 3568 of SEQ ID NO: 3936
gcaucuuugugucacagac

SEQ ID NO: 306467 - RNA, 19 nt, Artificial Sequence
  Description of Artificial Sequence: Synthetic oligonucleotide
  Antisense strand to SEQ ID NO: 306466
gucugugacacaaagaugc

SEQ ID NO: 306468 - RNA, 19 nt, Artificial Sequence
  Description of Artificial Sequence: Synthetic oligonucleotide
  Sense strand starting at position 3570 of SEQ ID NO: 3936
aucuuugugucacagacua

SEQ ID NO: 306469 - RNA, 19 nt, Artificial Sequence
  Description of Artificial Sequence: Synthetic oligonucleotide
  Antisense strand to SEQ ID NO: 306468
uagucugugacacaaagau

SEQ ID NO: 306470 - RNA, 19 nt, Artificial Sequence
  Description of Artificial Sequence: Synthetic oligonucleotide
  Sense strand starting at position 3647 of SEQ ID NO: 3936
ugacauaagucccagguua

SEQ ID NO: 306471 - RNA, 19 nt, Artificial Sequence
  Description of Artificial Sequence: Synthetic oligonucleotide
  Antisense strand to SEQ ID NO: 306470
uaaccugggacuuauguca

SEQ ID NO: 306472 - RNA, 19 nt, Artificial Sequence
  Description of Artificial Sequence: Synthetic oligonucleotide
  Sense strand starting at position 139 of SEQ ID NO: 3937
acagacacuuguguucuua

SEQ ID NO: 306473 - RNA, 19 nt, Artificial Sequence
  Description of Artificial Sequence: Synthetic oligonucleotide
  Antisense strand to SEQ ID NO: 306472
uaagaacacaagugucugu

SEQ ID NO: 306474 - RNA, 19 nt, Artificial Sequence
  Description of Artificial Sequence: Synthetic oligonucleotide
  Sense strand starting at position 150 of SEQ ID NO: 3937
uguucuuaggcugagaggu

SEQ ID NO: 306475 - RNA, 19 nt, Artificial Sequence
  Description of Artificial Sequence: Synthetic oligonucleotide
  Antisense strand to SEQ ID NO: 306474
accucucagccuaagaaca

SEQ ID NO: 306476 - RNA, 19 nt, Artificial Sequence
  Description of Artificial Sequence: Synthetic oligonucleotide
  Sense strand starting at position 158 of SEQ ID NO: 3937
ggcugagaggugcaaagaa

SEQ ID NO: 306477 - RNA, 19 nt, Artificial Sequence
  Description of Artificial Sequence: Synthetic oligonucleotide
  Antisense strand to SEQ ID NO: 306476
uucuuugcaccucucagcc

SEQ ID NO: 306478 - RNA, 19 nt, Artificial Sequence
  Description of Artificial Sequence: Synthetic oligonucleotide
  Sense strand starting at position 243 of SEQ ID NO: 3937
agguaagucuacucuuaga

SEQ ID NO: 306479 - RNA, 19 nt, Artificial Sequence
  Description of Artificial Sequence: Synthetic oligonucleotide
  Antisense strand to SEQ ID NO: 306478
ucuaagaguagacuuaccu

SEQ ID NO: 306480 - RNA, 19 nt, Artificial Sequence
  Description of Artificial Sequence: Synthetic oligonucleotide
  Sense strand starting at position 253 of SEQ ID NO: 3937
acucuuagagcuugaaaca

SEQ ID NO: 306481 - RNA, 19 nt, Artificial Sequence
  Description of Artificial Sequence: Synthetic oligonucleotide
  Antisense strand to SEQ ID NO: 306480
uguuucaagcucuaagagu

SEQ ID NO: 306482 - RNA, 19 nt, Artificial Sequence
  Description of Artificial Sequence: Synthetic oligonucleotide
  Sense strand starting at position 254 of SEQ ID NO: 3937
cucuuagagcuugaaacau

SEQ ID NO: 306483 - RNA, 19 nt, Artificial Sequence
  Description of Artificial Sequence: Synthetic oligonucleotide
  Antisense strand to SEQ ID NO: 306482
auguuucaagcucuaagag

SEQ ID NO: 306484 - RNA, 19 nt, Artificial Sequence
  Description of Artificial Sequence: Synthetic oligonucleotide
  Sense strand starting at position 384 of SEQ ID NO: 3937
guguuauugaaaugagaag

SEQ ID NO: 306485 - RNA, 19 nt, Artificial Sequence
  Description of Artificial Sequence: Synthetic oligonucleotide
  Antisense strand to SEQ ID NO: 306484
cuucucauuucaauaacac

SEQ ID NO: 306486 - RNA, 19 nt, Artificial Sequence
  Description of Artificial Sequence: Synthetic oligonucleotide
  Sense strand starting at position 418 of SEQ ID NO: 3937
guuuaauuccauguagcgu

SEQ ID NO: 306487 - RNA, 19 nt, Artificial Sequence
  Description of Artificial Sequence: Synthetic oligonucleotide
  Antisense strand to SEQ ID NO: 306486
acgcuacauggaauuaaac

SEQ ID NO: 306488 - RNA, 19 nt, Artificial Sequence
  Description of Artificial Sequence: Synthetic oligonucleotide
  Sense strand starting at position 424 of SEQ ID NO: 3937
uuccauguagcguaacaaa

SEQ ID NO: 306489 - RNA, 19 nt, Artificial Sequence
  Description of Artificial Sequence: Synthetic oligonucleotide
  Antisense strand to SEQ ID NO: 306488
uuuguuacgcuacauggaa

SEQ ID NO: 306490 - RNA, 19 nt, Artificial Sequence
  Description of Artificial Sequence: Synthetic oligonucleotide
  Sense strand starting at position 450 of SEQ ID NO: 3937
agaaucaaguccuuagugu

SEQ ID NO: 306491 - RNA, 19 nt, Artificial Sequence
  Description of Artificial Sequence: Synthetic oligonucleotide
  Antisense strand to SEQ ID NO: 306490
acacuaaggacuugauucu

SEQ ID NO: 306492 - RNA, 19 nt, Artificial Sequence
  Description of Artificial Sequence: Synthetic oligonucleotide
  Sense strand starting at position 451 of SEQ ID NO: 3937
gaaucaaguccuuaguguu

SEQ ID NO: 306493 - RNA, 19 nt, Artificial Sequence
  Description of Artificial Sequence: Synthetic oligonucleotide
  Antisense strand to SEQ ID NO: 306492
aacacuaaggacuugauuc

SEQ ID NO: 306494 - RNA, 19 nt, Artificial Sequence
  Description of Artificial Sequence: Synthetic oligonucleotide
  Sense strand starting at position 496 of SEQ ID NO: 3937
cuggcauccuguccagaaa

SEQ ID NO: 306495 - RNA, 19 nt, Artificial Sequence
  Description of Artificial Sequence: Synthetic oligonucleotide
  Antisense strand to SEQ ID NO: 306494
uuucuggacaggaugccag

SEQ ID NO: 306496 - RNA, 19 nt, Artificial Sequence
  Description of Artificial Sequence: Synthetic oligonucleotide
  Sense strand starting at position 620 of SEQ ID NO: 3937
cgaggcaagacuuggagua

SEQ ID NO: 306497 - RNA, 19 nt, Artificial Sequence
  Description of Artificial Sequence: Synthetic oligonucleotide
  Antisense strand to SEQ ID NO: 306496
uacuccaagucuugccucg

SEQ ID NO: 306498 - RNA, 19 nt, Artificial Sequence
  Description of Artificial Sequence: Synthetic oligonucleotide
  Sense strand starting at position 621 of SEQ ID NO: 3937
gaggcaagacuuggaguaa

SEQ ID NO: 306499 - RNA, 19 nt, Artificial Sequence
  Description of Artificial Sequence: Synthetic oligonucleotide
  Antisense strand to SEQ ID NO: 306498
uuacuccaagucuugccuc

SEQ ID NO: 306500 - RNA, 19 nt, Artificial Sequence
  Description of Artificial Sequence: Synthetic oligonucleotide
  Sense strand starting at position 725 of SEQ ID NO: 3937
gagaaagucagcgaaucgu

SEQ ID NO: 306501 - RNA, 19 nt, Artificial Sequence
  Description of Artificial Sequence: Synthetic oligonucleotide
  Antisense strand to SEQ ID NO: 306500
acgauucgcugacuuucuc

SEQ ID NO: 306502 - RNA, 19 nt, Artificial Sequence
  Description of Artificial Sequence: Synthetic oligonucleotide
  Sense strand starting at position 939 of SEQ ID NO: 3937
cgguuuccucaacaaauaa

SEQ ID NO: 306503 - RNA, 19 nt, Artificial Sequence
  Description of Artificial Sequence: Synthetic oligonucleotide
  Antisense strand to SEQ ID NO: 306502
uuauuuguugaggaaaccg

SEQ ID NO: 306504 - RNA, 19 nt, Artificial Sequence
  Description of Artificial Sequence: Synthetic oligonucleotide
  Sense strand starting at position 1043 of SEQ ID NO: 3937
acaccuuauuagucgauca

SEQ ID NO: 306505 - RNA, 19 nt, Artificial Sequence
  Description of Artificial Sequence: Synthetic oligonucleotide
  Antisense strand to SEQ ID NO: 306504
ugaucgacuaauaaggugu

SEQ ID NO: 306506 - RNA, 19 nt, Artificial Sequence
  Description of Artificial Sequence: Synthetic oligonucleotide
  Sense strand starting at position 1045 of SEQ ID NO: 3937
accuuauuagucgaucaga

SEQ ID NO: 306507 - RNA, 19 nt, Artificial Sequence
  Description of Artificial Sequence: Synthetic oligonucleotide
  Antisense strand to SEQ ID NO: 306506
ucugaucgacuaauaaggu

SEQ ID NO: 306508 - RNA, 19 nt, Artificial Sequence
  Description of Artificial Sequence: Synthetic oligonucleotide
  Sense strand starting at position 1048 of SEQ ID NO: 3937
uuauuagucgaucagaaug

SEQ ID NO: 306509 - RNA, 19 nt, Artificial Sequence
  Description of Artificial Sequence: Synthetic oligonucleotide
  Antisense strand to SEQ ID NO: 306508
cauucugaucgacuaauaa

SEQ ID NO: 306510 - RNA, 19 nt, Artificial Sequence
  Description of Artificial Sequence: Synthetic oligonucleotide
  Sense strand starting at position 1056 of SEQ ID NO: 3937
cgaucagaaugguuccaac

SEQ ID NO: 306511 - RNA, 19 nt, Artificial Sequence
  Description of Artificial Sequence: Synthetic oligonucleotide
  Antisense strand to SEQ ID NO: 306510
guuggaaccauucugaucg

SEQ ID NO: 306512 - RNA, 19 nt, Artificial Sequence
  Description of Artificial Sequence: Synthetic oligonucleotide
  Sense strand starting at position 1090 of SEQ ID NO: 3937
uuaaguaacuaugugauga

SEQ ID NO: 306513 - RNA, 19 nt, Artificial Sequence
  Description of Artificial Sequence: Synthetic oligonucleotide
  Antisense strand to SEQ ID NO: 306512
ucaucacauaguuacuuaa

SEQ ID NO: 306514 - RNA, 19 nt, Artificial Sequence
  Description of Artificial Sequence: Synthetic oligonucleotide
  Sense strand starting at position 1158 of SEQ ID NO: 3937
acugauaaugcuuaagcca

SEQ ID NO: 306515 - RNA, 19 nt, Artificial Sequence
  Description of Artificial Sequence: Synthetic oligonucleotide
  Antisense strand to SEQ ID NO: 306514
uggcuuaagcauuaucagu

SEQ ID NO: 306516 - RNA, 19 nt, Artificial Sequence
  Description of Artificial Sequence: Synthetic oligonucleotide
  Sense strand starting at position 1178 of SEQ ID NO: 3937
gugauaaacaccuagacgu

SEQ ID NO: 306517 - RNA, 19 nt, Artificial Sequence
  Description of Artificial Sequence: Synthetic oligonucleotide
  Antisense strand to SEQ ID NO: 306516
acgucuagguguuuaucac

SEQ ID NO: 306518 - RNA, 19 nt, Artificial Sequence
  Description of Artificial Sequence: Synthetic oligonucleotide
  Sense strand starting at position 1333 of SEQ ID NO: 3937
cggauuucccgccagcuaa

SEQ ID NO: 306519 - RNA, 19 nt, Artificial Sequence
  Description of Artificial Sequence: Synthetic oligonucleotide
  Antisense strand to SEQ ID NO: 306518
uuagcuggcgggaaauccg

SEQ ID NO: 306520 - RNA, 19 nt, Artificial Sequence
  Description of Artificial Sequence: Synthetic oligonucleotide
  Sense strand starting at position 1803 of SEQ ID NO: 3937
cucuccauuguugaaauga

SEQ ID NO: 306521 - RNA, 19 nt, Artificial Sequence
  Description of Artificial Sequence: Synthetic oligonucleotide
  Antisense strand to SEQ ID NO: 306520
ucauuucaacaauggagag

SEQ ID NO: 306522 - RNA, 19 nt, Artificial Sequence
  Description of Artificial Sequence: Synthetic oligonucleotide
  Sense strand starting at position 1906 of SEQ ID NO: 3937
gguugaccuccgagcgguu

SEQ ID NO: 306523 - RNA, 19 nt, Artificial Sequence
  Description of Artificial Sequence: Synthetic oligonucleotide
  Antisense strand to SEQ ID NO: 306522
aaccgcucggaggucaacc

SEQ ID NO: 306524 - RNA, 19 nt, Artificial Sequence
  Description of Artificial Sequence: Synthetic oligonucleotide
  Sense strand starting at position 1955 of SEQ ID NO: 3937
ccuggaaucuaccuugaca

SEQ ID NO: 306525 - RNA, 19 nt, Artificial Sequence
  Description of Artificial Sequence: Synthetic oligonucleotide
  Antisense strand to SEQ ID NO: 306524
ugucaagguagauuccagg

SEQ ID NO: 306526 - RNA, 19 nt, Artificial Sequence
  Description of Artificial Sequence: Synthetic oligonucleotide
  Sense strand starting at position 2008 of SEQ ID NO: 3937
auccgucgucucgcgagau

SEQ ID NO: 306527 - RNA, 19 nt, Artificial Sequence
  Description of Artificial Sequence: Synthetic oligonucleotide
  Antisense strand to SEQ ID NO: 306526
aucucgcgagacgacggau

SEQ ID NO: 306528 - RNA, 19 nt, Artificial Sequence
  Description of Artificial Sequence: Synthetic oligonucleotide
  Sense strand starting at position 2020 of SEQ ID NO: 3937
gcgagauaacgguuccgcu

SEQ ID NO: 306529 - RNA, 19 nt, Artificial Sequence
  Description of Artificial Sequence: Synthetic oligonucleotide
  Antisense strand to SEQ ID NO: 306528
agcggaaccguuaucucgc

SEQ ID NO: 306530 - RNA, 19 nt, Artificial Sequence
  Description of Artificial Sequence: Synthetic oligonucleotide
  Sense strand starting at position 2131 of SEQ ID NO: 3937
augcguggucgcaaacuga

SEQ ID NO: 306531 - RNA, 19 nt, Artificial Sequence
  Description of Artificial Sequence: Synthetic oligonucleotide
  Antisense strand to SEQ ID NO: 306530
ucaguuugcgaccacgcau

SEQ ID NO: 306532 - RNA, 19 nt, Artificial Sequence
  Description of Artificial Sequence: Synthetic oligonucleotide
  Sense strand starting at position 2186 of SEQ ID NO: 3937
ccguuuguuacagcgaauu

SEQ ID NO: 306533 - RNA, 19 nt, Artificial Sequence
  Description of Artificial Sequence: Synthetic oligonucleotide
  Antisense strand to SEQ ID NO: 306532
aauucgcuguaacaaacgg

SEQ ID NO: 306534 - RNA, 19 nt, Artificial Sequence
  Description of Artificial Sequence: Synthetic oligonucleotide
  Sense strand starting at position 2236 of SEQ ID NO: 3937
cgcgguucuguuucuuaau

SEQ ID NO: 306535 - RNA, 19 nt, Artificial Sequence
  Description of Artificial Sequence: Synthetic oligonucleotide
  Antisense strand to SEQ ID NO: 306534
auuaagaaacagaaccgcg

SEQ ID NO: 306536 - RNA, 19 nt, Artificial Sequence
  Description of Artificial Sequence: Synthetic oligonucleotide
  Sense strand starting at position 2701 of SEQ ID NO: 3937
ggagcaugauacuuacaug

SEQ ID NO: 306537 - RNA, 19 nt, Artificial Sequence
  Description of Artificial Sequence: Synthetic oligonucleotide
  Antisense strand to SEQ ID NO: 306536
cauguaaguaucaugcucc

SEQ ID NO: 306538 - RNA, 19 nt, Artificial Sequence
  Description of Artificial Sequence: Synthetic oligonucleotide
  Sense strand starting at position 2706 of SEQ ID NO: 3937
augauacuuacaugcggaa

SEQ ID NO: 306539 - RNA, 19 nt, Artificial Sequence
  Description of Artificial Sequence: Synthetic oligonucleotide
  Antisense strand to SEQ ID NO: 306538
uuccgcauguaaguaucau

SEQ ID NO: 306540 - RNA, 19 nt, Artificial Sequence
  Description of Artificial Sequence: Synthetic oligonucleotide
  Sense strand starting at position 3010 of SEQ ID NO: 3937
gugcuauugggaggauuag

SEQ ID NO: 306541 - RNA, 19 nt, Artificial Sequence
  Description of Artificial Sequence: Synthetic oligonucleotide
  Antisense strand to SEQ ID NO: 306540
cuaauccucccaauagcac

SEQ ID NO: 306542 - RNA, 19 nt, Artificial Sequence
  Description of Artificial Sequence: Synthetic oligonucleotide
  Sense strand starting at position 3011 of SEQ ID NO: 3937
ugcuauugggaggauuagu

SEQ ID NO: 306543 - RNA, 19 nt, Artificial Sequence
  Description of Artificial Sequence: Synthetic oligonucleotide
  Antisense strand to SEQ ID NO: 306542
acuaauccucccaauagca

SEQ ID NO: 306544 - RNA, 19 nt, Artificial Sequence
  Description of Artificial Sequence: Synthetic oligonucleotide
  Sense strand starting at position 3361 of SEQ ID NO: 3937
acauaaagccagggauguu

SEQ ID NO: 306545 - RNA, 19 nt, Artificial Sequence
  Description of Artificial Sequence: Synthetic oligonucleotide
  Antisense strand to SEQ ID NO: 306544
aacaucccuggcuuuaugu

SEQ ID NO: 306546 - RNA, 19 nt, Artificial Sequence
  Description of Artificial Sequence: Synthetic oligonucleotide
  Sense strand starting at position 3364 of SEQ ID NO: 3937
uaaagccagggauguuaau

SEQ ID NO: 306547 - RNA, 19 nt, Artificial Sequence
  Description of Artificial Sequence: Synthetic oligonucleotide
  Antisense strand to SEQ ID NO: 306546
auuaacaucccuggcuuua

SEQ ID NO: 306548 - RNA, 19 nt, Artificial Sequence
  Description of Artificial Sequence: Synthetic oligonucleotide
  Sense strand starting at position 3890 of SEQ ID NO: 3937
gguuucuaaauaggaguaa

SEQ ID NO: 306549 - RNA, 19 nt, Artificial Sequence
  Description of Artificial Sequence: Synthetic oligonucleotide
  Antisense strand to SEQ ID NO: 306548
uuacuccuauuuagaaacc

SEQ ID NO: 306550 - RNA, 19 nt, Artificial Sequence
  Description of Artificial Sequence: Synthetic oligonucleotide
  Sense strand starting at position 3902 of SEQ ID NO: 3937
ggaguaagauucuuaaccu

SEQ ID NO: 306551 - RNA, 19 nt, Artificial Sequence
  Description of Artificial Sequence: Synthetic oligonucleotide
  Antisense strand to SEQ ID NO: 306550
agguuaagaaucuuacucc

SEQ ID NO: 306552 - RNA, 19 nt, Artificial Sequence
  Description of Artificial Sequence: Synthetic oligonucleotide
  Sense strand starting at position 59 of SEQ ID NO: 3939
cagagaggucauugucaga

SEQ ID NO: 306553 - RNA, 19 nt, Artificial Sequence
  Description of Artificial Sequence: Synthetic oligonucleotide
  Antisense strand to SEQ ID NO: 306552
ucugacaaugaccucucug

SEQ ID NO: 306554 - RNA, 19 nt, Artificial Sequence
  Description of Artificial Sequence: Synthetic oligonucleotide
  Sense strand starting at position 160 of SEQ ID NO: 3939
gaaggugacucagaacaga

SEQ ID NO: 306555 - RNA, 19 nt, Artificial Sequence
  Description of Artificial Sequence: Synthetic oligonucleotide
  Antisense strand to SEQ ID NO: 306554
ucuguucugagucaccuuc

SEQ ID NO: 306556 - RNA, 19 nt, Artificial Sequence
  Description of Artificial Sequence: Synthetic oligonucleotide
  Sense strand starting at position 237 of SEQ ID NO: 3939
uaaugagugagguagcaga

SEQ ID NO: 306557 - RNA, 19 nt, Artificial Sequence
  Description of Artificial Sequence: Synthetic oligonucleotide
  Antisense strand to SEQ ID NO: 306556
ucugcuaccucacucauua

SEQ ID NO: 306558 - RNA, 19 nt, Artificial Sequence
  Description of Artificial Sequence: Synthetic oligonucleotide
  Sense strand starting at position 290 of SEQ ID NO: 3939
aagaaaguguuucuaagug

SEQ ID NO: 306559 - RNA, 19 nt, Artificial Sequence
  Description of Artificial Sequence: Synthetic oligonucleotide
  Antisense strand to SEQ ID NO: 306558
cacuuagaaacacuuucuu

SEQ ID NO: 306560 - RNA, 19 nt, Artificial Sequence
  Description of Artificial Sequence: Synthetic oligonucleotide
  Sense strand starting at position 294 of SEQ ID NO: 3939
aaguguuucuaagugagag

SEQ ID NO: 306561 - RNA, 19 nt, Artificial Sequence
  Description of Artificial Sequence: Synthetic oligonucleotide
  Antisense strand to SEQ ID NO: 306560
cucucacuuagaaacacuu

SEQ ID NO: 306562 - RNA, 19 nt, Artificial Sequence
  Description of Artificial Sequence: Synthetic oligonucleotide
  Sense strand starting at position 295 of SEQ ID NO: 3939
aguguuucuaagugagagu

SEQ ID NO: 306563 - RNA, 19 nt, Artificial Sequence
  Description of Artificial Sequence: Synthetic oligonucleotide
  Antisense strand to SEQ ID NO: 306562
acucucacuuagaaacacu

SEQ ID NO: 306564 - RNA, 19 nt, Artificial Sequence
  Description of Artificial Sequence: Synthetic oligonucleotide
  Sense strand starting at position 308 of SEQ ID NO: 3939
gagagugguuggcuuugau

SEQ ID NO: 306565 - RNA, 19 nt, Artificial Sequence
  Description of Artificial Sequence: Synthetic oligonucleotide
  Antisense strand to SEQ ID NO: 306564
aucaaagccaaccacucuc

SEQ ID NO: 306566 - RNA, 19 nt, Artificial Sequence
  Description of Artificial Sequence: Synthetic oligonucleotide
  Sense strand starting at position 311 of SEQ ID NO: 3939
agugguuggcuuugauaaa

SEQ ID NO: 306567 - RNA, 19 nt, Artificial Sequence
  Description of Artificial Sequence: Synthetic oligonucleotide
  Antisense strand to SEQ ID NO: 306566
uuuaucaaagccaaccacu

SEQ ID NO: 306568 - RNA, 19 nt, Artificial Sequence
  Description of Artificial Sequence: Synthetic oligonucleotide
  Sense strand starting at position 432 of SEQ ID NO: 3939
gcaaguuuauauguugaug

SEQ ID NO: 306569 - RNA, 19 nt, Artificial Sequence
  Description of Artificial Sequence: Synthetic oligonucleotide
  Antisense strand to SEQ ID NO: 306568
caucaacauauaaacuugc

SEQ ID NO: 306570 - RNA, 19 nt, Artificial Sequence
  Description of Artificial Sequence: Synthetic oligonucleotide
  Sense strand starting at position 435 of SEQ ID NO: 3939
aguuuauauguugauggga

SEQ ID NO: 306571 - RNA, 19 nt, Artificial Sequence
  Description of Artificial Sequence: Synthetic oligonucleotide
  Antisense strand to SEQ ID NO: 306570
ucccaucaacauauaaacu

SEQ ID NO: 306572 - RNA, 19 nt, Artificial Sequence
  Description of Artificial Sequence: Synthetic oligonucleotide
  Sense strand starting at position 438 of SEQ ID NO: 3939
uuauauguugaugggaauu

SEQ ID NO: 306573 - RNA, 19 nt, Artificial Sequence
  Description of Artificial Sequence: Synthetic oligonucleotide
  Antisense strand to SEQ ID NO: 306572
aauucccaucaacauauaa

SEQ ID NO: 306574 - RNA, 19 nt, Artificial Sequence
  Description of Artificial Sequence: Synthetic oligonucleotide
  Sense strand starting at position 628 of SEQ ID NO: 3939
gcgccuaguacauagaaga

SEQ ID NO: 306575 - RNA, 19 nt, Artificial Sequence
  Description of Artificial Sequence: Synthetic oligonucleotide
  Antisense strand to SEQ ID NO: 306574
ucuucuauguacuaggcgc

SEQ ID NO: 306576 - RNA, 19 nt, Artificial Sequence
  Description of Artificial Sequence: Synthetic oligonucleotide
  Sense strand starting at position 799 of SEQ ID NO: 3939
uuaauaggguuuccucaaa

SEQ ID NO: 306577 - RNA, 19 nt, Artificial Sequence
  Description of Artificial Sequence: Synthetic oligonucleotide
  Antisense strand to SEQ ID NO: 306576
uuugaggaaacccuauuaa

SEQ ID NO: 306578 - RNA, 19 nt, Artificial Sequence
  Description of Artificial Sequence: Synthetic oligonucleotide
  Sense strand starting at position 1033 of SEQ ID NO: 3939
aaggaaugagaccgucaau

SEQ ID NO: 306579 - RNA, 19 nt, Artificial Sequence
  Description of Artificial Sequence: Synthetic oligonucleotide
  Antisense strand to SEQ ID NO: 306578
auugacggucucauuccuu

SEQ ID NO: 306580 - RNA, 19 nt, Artificial Sequence
  Description of Artificial Sequence: Synthetic oligonucleotide
  Sense strand starting at position 1551 of SEQ ID NO: 3939
acugaauguuaaucuugua

SEQ ID NO: 306581 - RNA, 19 nt, Artificial Sequence
  Description of Artificial Sequence: Synthetic oligonucleotide
  Antisense strand to SEQ ID NO: 306580
uacaagauuaacauucagu

SEQ ID NO: 306582 - RNA, 19 nt, Artificial Sequence
  Description of Artificial Sequence: Synthetic oligonucleotide
  Sense strand starting at position 2398 of SEQ ID NO: 3939
gaccguaagggugagugaa

SEQ ID NO: 306583 - RNA, 19 nt, Artificial Sequence
  Description of Artificial Sequence: Synthetic oligonucleotide
  Antisense strand to SEQ ID NO: 306582
uucacucacccuuacgguc

SEQ ID NO: 306584 - RNA, 19 nt, Artificial Sequence
  Description of Artificial Sequence: Synthetic oligonucleotide
  Sense strand starting at position 2468 of SEQ ID NO: 3939
gaggcuugggcucaagaug

SEQ ID NO: 306585 - RNA, 19 nt, Artificial Sequence
  Description of Artificial Sequence: Synthetic oligonucleotide
  Antisense strand to SEQ ID NO: 306584
caucuugagcccaagccuc

SEQ ID NO: 306586 - RNA, 19 nt, Artificial Sequence
  Description of Artificial Sequence: Synthetic oligonucleotide
  Sense strand starting at position 2864 of SEQ ID NO: 3939
gccagaauugggcaucauu

SEQ ID NO: 306587 - RNA, 19 nt, Artificial Sequence
  Description of Artificial Sequence: Synthetic oligonucleotide
  Antisense strand to SEQ ID NO: 306586
aaugaugcccaauucuggc

SEQ ID NO: 306588 - RNA, 19 nt, Artificial Sequence
  Description of Artificial Sequence: Synthetic oligonucleotide
  Sense strand starting at position 3011 of SEQ ID NO: 3939
cggugucuuccugaugauc

SEQ ID NO: 306589 - RNA, 19 nt, Artificial Sequence
  Description of Artificial Sequence: Synthetic oligonucleotide
  Antisense strand to SEQ ID NO: 306588
gaucaucaggaagacaccg

SEQ ID NO: 306590 - RNA, 19 nt, Artificial Sequence
  Description of Artificial Sequence: Synthetic oligonucleotide
  Sense strand starting at position 3020 of SEQ ID NO: 3939
ccugaugaucccugcaucu

SEQ ID NO: 306591 - RNA, 19 nt, Artificial Sequence
  Description of Artificial Sequence: Synthetic oligonucleotide
  Antisense strand to SEQ ID NO: 306590
agaugcagggaucaucagg

SEQ ID NO: 306592 - RNA, 19 nt, Artificial Sequence
  Description of Artificial Sequence: Synthetic oligonucleotide
  Sense strand starting at position 3022 of SEQ ID NO: 3939
ugaugaucccugcaucucu

SEQ ID NO: 306593 - RNA, 19 nt, Artificial Sequence
  Description of Artificial Sequence: Synthetic oligonucleotide
  Antisense strand to SEQ ID NO: 306592
agagaugcagggaucauca

SEQ ID NO: 306594 - RNA, 19 nt, Artificial Sequence
  Description of Artificial Sequence: Synthetic oligonucleotide
  Sense strand starting at position 3054 of SEQ ID NO: 3939
uaguuuguucuauacagag

SEQ ID NO: 306595 - RNA, 19 nt, Artificial Sequence
  Description of Artificial Sequence: Synthetic oligonucleotide
  Antisense strand to SEQ ID NO: 306594
cucuguauagaacaaacua

SEQ ID NO: 306596 - RNA, 19 nt, Artificial Sequence
  Description of Artificial Sequence: Synthetic oligonucleotide
  Sense strand starting at position 3056 of SEQ ID NO: 3939
guuuguucuauacagagag

SEQ ID NO: 306597 - RNA, 19 nt, Artificial Sequence
  Description of Artificial Sequence: Synthetic oligonucleotide
  Antisense strand to SEQ ID NO: 306596
cucucuguauagaacaaac

SEQ ID NO: 306598 - RNA, 19 nt, Artificial Sequence
  Description of Artificial Sequence: Synthetic oligonucleotide
  Sense strand starting at position 3060 of SEQ ID NO: 3939
guucuauacagagaggcua

SEQ ID NO: 306599 - RNA, 19 nt, Artificial Sequence
  Description of Artificial Sequence: Synthetic oligonucleotide
  Antisense strand to SEQ ID NO: 306598
uagccucucuguauagaac

SEQ ID NO: 306600 - RNA, 19 nt, Artificial Sequence
  Description of Artificial Sequence: Synthetic oligonucleotide
  Sense strand starting at position 3095 of SEQ ID NO: 3939
acagaaaucugaucaugug

SEQ ID NO: 306601 - RNA, 19 nt, Artificial Sequence
  Description of Artificial Sequence: Synthetic oligonucleotide
  Antisense strand to SEQ ID NO: 306600
cacaugaucagauuucugu

SEQ ID NO: 306602 - RNA, 19 nt, Artificial Sequence
  Description of Artificial Sequence: Synthetic oligonucleotide
  Sense strand starting at position 3345 of SEQ ID NO: 3939
cacuguccuuugguugaaa

SEQ ID NO: 306603 - RNA, 19 nt, Artificial Sequence
  Description of Artificial Sequence: Synthetic oligonucleotide
  Antisense strand to SEQ ID NO: 306602
uuucaaccaaaggacagug

SEQ ID NO: 306604 - RNA, 19 nt, Artificial Sequence
  Description of Artificial Sequence: Synthetic oligonucleotide
  Sense strand starting at position 3346 of SEQ ID NO: 3939
acuguccuuugguugaaau

SEQ ID NO: 306605 - RNA, 19 nt, Artificial Sequence
  Description of Artificial Sequence: Synthetic oligonucleotide
  Antisense strand to SEQ ID NO: 306604
auuucaaccaaaggacagu

SEQ ID NO: 306606 - RNA, 19 nt, Artificial Sequence
  Description of Artificial Sequence: Synthetic oligonucleotide
  Sense strand starting at position 3347 of SEQ ID NO: 3939
cuguccuuugguugaaaua

SEQ ID NO: 306607 - RNA, 19 nt, Artificial Sequence
  Description of Artificial Sequence: Synthetic oligonucleotide
  Antisense strand to SEQ ID NO: 306606
uauuucaaccaaaggacag

SEQ ID NO: 306608 - RNA, 19 nt, Artificial Sequence
  Description of Artificial Sequence: Synthetic oligonucleotide
  Sense strand starting at position 3348 of SEQ ID NO: 3939
uguccuuugguugaaauaa

SEQ ID NO: 306609 - RNA, 19 nt, Artificial Sequence
  Description of Artificial Sequence: Synthetic oligonucleotide
  Antisense strand to SEQ ID NO: 306608
uuauuucaaccaaaggaca

SEQ ID NO: 306610 - RNA, 19 nt, Artificial Sequence
  Description of Artificial Sequence: Synthetic oligonucleotide
  Sense strand starting at position 3461 of SEQ ID NO: 3939
uuguaaucugugugagagg

SEQ ID NO: 306611 - RNA, 19 nt, Artificial Sequence
  Description of Artificial Sequence: Synthetic oligonucleotide
  Antisense strand to SEQ ID NO: 306610
ccucucacacagauuacaa

SEQ ID NO: 306612 - RNA, 19 nt, Artificial Sequence
  Description of Artificial Sequence: Synthetic oligonucleotide
  Sense strand starting at position 3466 of SEQ ID NO: 3939
aucugugugagaggaguuu

SEQ ID NO: 306613 - RNA, 19 nt, Artificial Sequence
  Description of Artificial Sequence: Synthetic oligonucleotide
  Antisense strand to SEQ ID NO: 306612
aaacuccucucacacagau

SEQ ID NO: 306614 - RNA, 19 nt, Artificial Sequence
  Description of Artificial Sequence: Synthetic oligonucleotide
  Sense strand starting at position 3509 of SEQ ID NO: 3939
guaccuugugcuguuagua

SEQ ID NO: 306615 - RNA, 19 nt, Artificial Sequence
  Description of Artificial Sequence: Synthetic oligonucleotide
  Antisense strand to SEQ ID NO: 306614
uacuaacagcacaagguac

SEQ ID NO: 306616 - RNA, 19 nt, Artificial Sequence
  Description of Artificial Sequence: Synthetic oligonucleotide
  Sense strand starting at position 3522 of SEQ ID NO: 3939
uuaguacggucauuaaaug

SEQ ID NO: 306617 - RNA, 19 nt, Artificial Sequence
  Description of Artificial Sequence: Synthetic oligonucleotide
  Antisense strand to SEQ ID NO: 306616
cauuuaaugaccguacuaa

SEQ ID NO: 306618 - RNA, 19 nt, Artificial Sequence
  Description of Artificial Sequence: Synthetic oligonucleotide
  Sense strand starting at position 3523 of SEQ ID NO: 3939
uaguacggucauuaaaugu

SEQ ID NO: 306619 - RNA, 19 nt, Artificial Sequence
  Description of Artificial Sequence: Synthetic oligonucleotide
  Antisense strand to SEQ ID NO: 306618
acauuuaaugaccguacua

SEQ ID NO: 306620 - RNA, 19 nt, Artificial Sequence
  Description of Artificial Sequence: Synthetic oligonucleotide
  Sense strand starting at position 3653 of SEQ ID NO: 3939
agguuucuuuagcuuagga

SEQ ID NO: 306621 - RNA, 19 nt, Artificial Sequence
  Description of Artificial Sequence: Synthetic oligonucleotide
  Antisense strand to SEQ ID NO: 306620
uccuaagcuaaagaaaccu

SEQ ID NO: 306622 - RNA, 19 nt, Artificial Sequence
  Description of Artificial Sequence: Synthetic oligonucleotide
  Sense strand starting at position 3655 of SEQ ID NO: 3939
guuucuuuagcuuaggaag

SEQ ID NO: 306623 - RNA, 19 nt, Artificial Sequence
  Description of Artificial Sequence: Synthetic oligonucleotide
  Antisense strand to SEQ ID NO: 306622
cuuccuaagcuaaagaaac

SEQ ID NO: 306624 - RNA, 19 nt, Artificial Sequence
  Description of Artificial Sequence: Synthetic oligonucleotide
  Sense strand starting at position 3719 of SEQ ID NO: 3939
ugacaaaguacuggucagu

SEQ ID NO: 306625 - RNA, 19 nt, Artificial Sequence
  Description of Artificial Sequence: Synthetic oligonucleotide
  Antisense strand to SEQ ID NO: 306624
acugaccaguacuuuguca

SEQ ID NO: 306626 - RNA, 19 nt, Artificial Sequence
  Description of Artificial Sequence: Synthetic oligonucleotide
  Sense strand starting at position 3798 of SEQ ID NO: 3939
ggguuugaauucuuaacca

SEQ ID NO: 306627 - RNA, 19 nt, Artificial Sequence
  Description of Artificial Sequence: Synthetic oligonucleotide
  Antisense strand to SEQ ID NO: 306626
ugguuaagaauucaaaccc

SEQ ID NO: 306628 - RNA, 19 nt, Artificial Sequence
  Description of Artificial Sequence: Synthetic oligonucleotide
  Sense strand starting at position 3910 of SEQ ID NO: 3939
aggguugggccaggucaaa

SEQ ID NO: 306629 - RNA, 19 nt, Artificial Sequence
  Description of Artificial Sequence: Synthetic oligonucleotide
  Antisense strand to SEQ ID NO: 306628
uuugaccuggcccaacccu

SEQ ID NO: 306630 - RNA, 19 nt, Artificial Sequence
  Description of Artificial Sequence: Synthetic oligonucleotide
  Sense strand starting at position 3964 of SEQ ID NO: 3939
cuagauccgcugugggaua

SEQ ID NO: 306631 - RNA, 19 nt, Artificial Sequence
  Description of Artificial Sequence: Synthetic oligonucleotide
  Antisense strand to SEQ ID NO: 306630
uaucccacagcggaucuag

SEQ ID NO: 306632 - RNA, 19 nt, Artificial Sequence
  Description of Artificial Sequence: Synthetic oligonucleotide
  Sense strand starting at position 386 of SEQ ID NO: 3938
ugcuguacaucuuugagag

SEQ ID NO: 306633 - RNA, 19 nt, Artificial Sequence
  Description of Artificial Sequence: Synthetic oligonucleotide
  Antisense strand to SEQ ID NO: 306632
cucucaaagauguacagca

SEQ ID NO: 306634 - RNA, 19 nt, Artificial Sequence
  Description of Artificial Sequence: Synthetic oligonucleotide
  Sense strand starting at position 387 of SEQ ID NO: 3938
gcuguacaucuuugagagg

SEQ ID NO: 306635 - RNA, 19 nt, Artificial Sequence
  Description of Artificial Sequence: Synthetic oligonucleotide
  Antisense strand to SEQ ID NO: 306634
ccucucaaagauguacagc

SEQ ID NO: 306636 - RNA, 19 nt, Artificial Sequence
  Description of Artificial Sequence: Synthetic oligonucleotide
  Sense strand starting at position 402 of SEQ ID NO: 3938
gagguaauagugcaaguga

SEQ ID NO: 306637 - RNA, 19 nt, Artificial Sequence
  Description of Artificial Sequence: Synthetic oligonucleotide
  Antisense strand to SEQ ID NO: 306636
ucacuugcacuauuaccuc

SEQ ID NO: 306638 - RNA, 19 nt, Artificial Sequence
  Description of Artificial Sequence: Synthetic oligonucleotide
  Sense strand starting at position 434 of SEQ ID NO: 3938
cucagaaaccugggcacaa

SEQ ID NO: 306639 - RNA, 19 nt, Artificial Sequence
  Description of Artificial Sequence: Synthetic oligonucleotide
  Antisense strand to SEQ ID NO: 306638
uugugcccagguuucugag

SEQ ID NO: 306640 - RNA, 19 nt, Artificial Sequence
  Description of Artificial Sequence: Synthetic oligonucleotide
  Sense strand starting at position 446 of SEQ ID NO: 3938
ggcacaaauccugguucca

SEQ ID NO: 306641 - RNA, 19 nt, Artificial Sequence
  Description of Artificial Sequence: Synthetic oligonucleotide
  Antisense strand to SEQ ID NO: 306640
uggaaccaggauuugugcc

SEQ ID NO: 306642 - RNA, 19 nt, Artificial Sequence
  Description of Artificial Sequence: Synthetic oligonucleotide
  Sense strand starting at position 473 of SEQ ID NO: 3938
uggcuagcugaucaaguua

SEQ ID NO: 306643 - RNA, 19 nt, Artificial Sequence
  Description of Artificial Sequence: Synthetic oligonucleotide
  Antisense strand to SEQ ID NO: 306642
uaacuugaucagcuagcca

SEQ ID NO: 306644 - RNA, 19 nt, Artificial Sequence
  Description of Artificial Sequence: Synthetic oligonucleotide
  Sense strand starting at position 518 of SEQ ID NO: 3938
uuaucuguaaagugggaca

SEQ ID NO: 306645 - RNA, 19 nt, Artificial Sequence
  Description of Artificial Sequence: Synthetic oligonucleotide
  Antisense strand to SEQ ID NO: 306644
ugucccacuuuacagauaa

SEQ ID NO: 306646 - RNA, 19 nt, Artificial Sequence
  Description of Artificial Sequence: Synthetic oligonucleotide
  Sense strand starting at position 562 of SEQ ID NO: 3938
ugauuaaagugcucaggac

SEQ ID NO: 306647 - RNA, 19 nt, Artificial Sequence
  Description of Artificial Sequence: Synthetic oligonucleotide
  Antisense strand to SEQ ID NO: 306646
guccugagcacuuuaauca

SEQ ID NO: 306648 - RNA, 19 nt, Artificial Sequence
  Description of Artificial Sequence: Synthetic oligonucleotide
  Sense strand starting at position 604 of SEQ ID NO: 3938
gaaguaagcguugacuauu

SEQ ID NO: 306649 - RNA, 19 nt, Artificial Sequence
  Description of Artificial Sequence: Synthetic oligonucleotide
  Antisense strand to SEQ ID NO: 306648
aauagucaacgcuuacuuc

SEQ ID NO: 306650 - RNA, 19 nt, Artificial Sequence
  Description of Artificial Sequence: Synthetic oligonucleotide
  Sense strand starting at position 607 of SEQ ID NO: 3938
guaagcguugacuauuacu

SEQ ID NO: 306651 - RNA, 19 nt, Artificial Sequence
  Description of Artificial Sequence: Synthetic oligonucleotide
  Antisense strand to SEQ ID NO: 306650
aguaauagucaacgcuuac

SEQ ID NO: 306652 - RNA, 19 nt, Artificial Sequence
  Description of Artificial Sequence: Synthetic oligonucleotide
  Sense strand starting at position 733 of SEQ ID NO: 3938
cuaagugauugugcccaca

SEQ ID NO: 306653 - RNA, 19 nt, Artificial Sequence
  Description of Artificial Sequence: Synthetic oligonucleotide
  Antisense strand to SEQ ID NO: 306652
ugugggcacaaucacuuag

SEQ ID NO: 306654 - RNA, 19 nt, Artificial Sequence
  Description of Artificial Sequence: Synthetic oligonucleotide
  Sense strand starting at position 735 of SEQ ID NO: 3938
aagugauugugcccacaga

SEQ ID NO: 306655 - RNA, 19 nt, Artificial Sequence
  Description of Artificial Sequence: Synthetic oligonucleotide
  Antisense strand to SEQ ID NO: 306654
ucugugggcacaaucacuu

SEQ ID NO: 306656 - RNA, 19 nt, Artificial Sequence
  Description of Artificial Sequence: Synthetic oligonucleotide
  Sense strand starting at position 736 of SEQ ID NO: 3938
agugauugugcccacagag

SEQ ID NO: 306657 - RNA, 19 nt, Artificial Sequence
  Description of Artificial Sequence: Synthetic oligonucleotide
  Antisense strand to SEQ ID NO: 306656
cucugugggcacaaucacu

SEQ ID NO: 306658 - RNA, 19 nt, Artificial Sequence
  Description of Artificial Sequence: Synthetic oligonucleotide
  Sense strand starting at position 786 of SEQ ID NO: 3938
ggaacaggauuugagguua

SEQ ID NO: 306659 - RNA, 19 nt, Artificial Sequence
  Description of Artificial Sequence: Synthetic oligonucleotide
  Antisense strand to SEQ ID NO: 306658
uaaccucaaauccuguucc

SEQ ID NO: 306660 - RNA, 19 nt, Artificial Sequence
  Description of Artificial Sequence: Synthetic oligonucleotide
  Sense strand starting at position 925 of SEQ ID NO: 3938
ucccgagaucgccacagau

SEQ ID NO: 306661 - RNA, 19 nt, Artificial Sequence
  Description of Artificial Sequence: Synthetic oligonucleotide
  Antisense strand to SEQ ID NO: 306660
aucuguggcgaucucggga

SEQ ID NO: 306662 - RNA, 19 nt, Artificial Sequence
  Description of Artificial Sequence: Synthetic oligonucleotide
  Sense strand starting at position 927 of SEQ ID NO: 3938
ccgagaucgccacagauga

SEQ ID NO: 306663 - RNA, 19 nt, Artificial Sequence
  Description of Artificial Sequence: Synthetic oligonucleotide
  Antisense strand to SEQ ID NO: 306662
ucaucuguggcgaucucgg

SEQ ID NO: 306664 - RNA, 19 nt, Artificial Sequence
  Description of Artificial Sequence: Synthetic oligonucleotide
  Sense strand starting at position 1050 of SEQ ID NO: 3938
cgucacuugcgagaacuau

SEQ ID NO: 306665 - RNA, 19 nt, Artificial Sequence
  Description of Artificial Sequence: Synthetic oligonucleotide
  Antisense strand to SEQ ID NO: 306664
auaguucucgcaagugacg

SEQ ID NO: 306666 - RNA, 19 nt, Artificial Sequence
  Description of Artificial Sequence: Synthetic oligonucleotide
  Sense strand starting at position 1056 of SEQ ID NO: 3938
uugcgagaacuauggacaa

SEQ ID NO: 306667 - RNA, 19 nt, Artificial Sequence
  Description of Artificial Sequence: Synthetic oligonucleotide
  Antisense strand to SEQ ID NO: 306666
uuguccauaguucucgcaa

SEQ ID NO: 306668 - RNA, 19 nt, Artificial Sequence
  Description of Artificial Sequence: Synthetic oligonucleotide
  Sense strand starting at position 1163 of SEQ ID NO: 3938
aucucaugauaugcagaua

SEQ ID NO: 306669 - RNA, 19 nt, Artificial Sequence
  Description of Artificial Sequence: Synthetic oligonucleotide
  Antisense strand to SEQ ID NO: 306668
uaucugcauaucaugagau

SEQ ID NO: 306670 - RNA, 19 nt, Artificial Sequence
  Description of Artificial Sequence: Synthetic oligonucleotide
  Sense strand starting at position 2221 of SEQ ID NO: 3938
gggcucuuagccugggaga

SEQ ID NO: 306671 - RNA, 19 nt, Artificial Sequence
  Description of Artificial Sequence: Synthetic oligonucleotide
  Antisense strand to SEQ ID NO: 306670
ucucccaggcuaagagccc

SEQ ID NO: 306672 - RNA, 19 nt, Artificial Sequence
  Description of Artificial Sequence: Synthetic oligonucleotide
  Sense strand starting at position 2493 of SEQ ID NO: 3938
cggaguuccucuuuccaac

SEQ ID NO: 306673 - RNA, 19 nt, Artificial Sequence
  Description of Artificial Sequence: Synthetic oligonucleotide
  Antisense strand to SEQ ID NO: 306672
guuggaaagaggaacuccg

SEQ ID NO: 306674 - RNA, 19 nt, Artificial Sequence
  Description of Artificial Sequence: Synthetic oligonucleotide
  Sense strand starting at position 2530 of SEQ ID NO: 3938
ugaccuguccucuguggaa

SEQ ID NO: 306675 - RNA, 19 nt, Artificial Sequence
  Description of Artificial Sequence: Synthetic oligonucleotide
  Antisense strand to SEQ ID NO: 306674
uuccacagaggacagguca

SEQ ID NO: 306676 - RNA, 19 nt, Artificial Sequence
  Description of Artificial Sequence: Synthetic oligonucleotide
  Sense strand starting at position 2622 of SEQ ID NO: 3938
ggucuaagacugugaucaa

SEQ ID NO: 306677 - RNA, 19 nt, Artificial Sequence
  Description of Artificial Sequence: Synthetic oligonucleotide
  Antisense strand to SEQ ID NO: 306676
uugaucacagucuuagacc

SEQ ID NO: 306678 - RNA, 19 nt, Artificial Sequence
  Description of Artificial Sequence: Synthetic oligonucleotide
  Sense strand starting at position 2844 of SEQ ID NO: 3938
gcauuuaagugacacauug

SEQ ID NO: 306679 - RNA, 19 nt, Artificial Sequence
  Description of Artificial Sequence: Synthetic oligonucleotide
  Antisense strand to SEQ ID NO: 306678
caaugugucacuuaaaugc

SEQ ID NO: 306680 - RNA, 19 nt, Artificial Sequence
  Description of Artificial Sequence: Synthetic oligonucleotide
  Sense strand starting at position 2860 of SEQ ID NO: 3938
uuguaugguccagacugaa

SEQ ID NO: 306681 - RNA, 19 nt, Artificial Sequence
  Description of Artificial Sequence: Synthetic oligonucleotide
  Antisense strand to SEQ ID NO: 306680
uucagucuggaccauacaa

SEQ ID NO: 306682 - RNA, 19 nt, Artificial Sequence
  Description of Artificial Sequence: Synthetic oligonucleotide
  Sense strand starting at position 3077 of SEQ ID NO: 3938
cagggugauuaguugaaga

SEQ ID NO: 306683 - RNA, 19 nt, Artificial Sequence
  Description of Artificial Sequence: Synthetic oligonucleotide
  Antisense strand to SEQ ID NO: 306682
ucuucaacuaaucacccug

SEQ ID NO: 306684 - RNA, 19 nt, Artificial Sequence
  Description of Artificial Sequence: Synthetic oligonucleotide
  Sense strand starting at position 3090 of SEQ ID NO: 3938
ugaagacagucuuccuguu

SEQ ID NO: 306685 - RNA, 19 nt, Artificial Sequence
  Description of Artificial Sequence: Synthetic oligonucleotide
  Antisense strand to SEQ ID NO: 306684
aacaggaagacugucuuca

SEQ ID NO: 306686 - RNA, 19 nt, Artificial Sequence
  Description of Artificial Sequence: Synthetic oligonucleotide
  Sense strand starting at position 3297 of SEQ ID NO: 3938
gagacaguuuagucaagca

SEQ ID NO: 306687 - RNA, 19 nt, Artificial Sequence
  Description of Artificial Sequence: Synthetic oligonucleotide
  Antisense strand to SEQ ID NO: 306686
ugcuugacuaaacugucuc

SEQ ID NO: 306688 - RNA, 19 nt, Artificial Sequence
  Description of Artificial Sequence: Synthetic oligonucleotide
  Sense strand starting at position 3327 of SEQ ID NO: 3938
ccuggcuuacuccagucaa

SEQ ID NO: 306689 - RNA, 19 nt, Artificial Sequence
  Description of Artificial Sequence: Synthetic oligonucleotide
  Antisense strand to SEQ ID NO: 306688
uugacuggaguaagccagg

SEQ ID NO: 306690 - RNA, 19 nt, Artificial Sequence
  Description of Artificial Sequence: Synthetic oligonucleotide
  Sense strand starting at position 3379 of SEQ ID NO: 3938
gccuuugauggucaccaga

SEQ ID NO: 306691 - RNA, 19 nt, Artificial Sequence
  Description of Artificial Sequence: Synthetic oligonucleotide
  Antisense strand to SEQ ID NO: 306690
ucuggugaccaucaaaggc

SEQ ID NO: 306692 - RNA, 19 nt, Artificial Sequence
  Description of Artificial Sequence: Synthetic oligonucleotide
  Sense strand starting at position 3381 of SEQ ID NO: 3938
cuuugauggucaccagaac

SEQ ID NO: 306693 - RNA, 19 nt, Artificial Sequence
  Description of Artificial Sequence: Synthetic oligonucleotide
  Antisense strand to SEQ ID NO: 306692
guucuggugaccaucaaag

SEQ ID NO: 306694 - RNA, 19 nt, Artificial Sequence
  Description of Artificial Sequence: Synthetic oligonucleotide
  Sense strand starting at position 3401 of SEQ ID NO: 3938
ggauuucacuuggagagag

SEQ ID NO: 306695 - RNA, 19 nt, Artificial Sequence
  Description of Artificial Sequence: Synthetic oligonucleotide
  Antisense strand to SEQ ID NO: 306694
cucucuccaagugaaaucc

SEQ ID NO: 306696 - RNA, 19 nt, Artificial Sequence
  Description of Artificial Sequence: Synthetic oligonucleotide
  Sense strand starting at position 3412 of SEQ ID NO: 3938
ggagagagcgguuggauua

SEQ ID NO: 306697 - RNA, 19 nt, Artificial Sequence
  Description of Artificial Sequence: Synthetic oligonucleotide
  Antisense strand to SEQ ID NO: 306696
uaauccaaccgcucucucc

SEQ ID NO: 306698 - RNA, 19 nt, Artificial Sequence
  Description of Artificial Sequence: Synthetic oligonucleotide
  Sense strand starting at position 3438 of SEQ ID NO: 3938
ccgagaacacacugugauu

SEQ ID NO: 306699 - RNA, 19 nt, Artificial Sequence
  Description of Artificial Sequence: Synthetic oligonucleotide
  Antisense strand to SEQ ID NO: 306698
aaucacaguguguucucgg

SEQ ID NO: 306700 - RNA, 19 nt, Artificial Sequence
  Description of Artificial Sequence: Synthetic oligonucleotide
  Sense strand starting at position 3467 of SEQ ID NO: 3938
cuggcauuccugggaguca

SEQ ID NO: 306701 - RNA, 19 nt, Artificial Sequence
  Description of Artificial Sequence: Synthetic oligonucleotide
  Antisense strand to SEQ ID NO: 306700
ugacucccaggaaugccag

SEQ ID NO: 306702 - RNA, 19 nt, Artificial Sequence
  Description of Artificial Sequence: Synthetic oligonucleotide
  Sense strand starting at position 3528 of SEQ ID NO: 3938
gcgaccuuggcagaaauaa

SEQ ID NO: 306703 - RNA, 19 nt, Artificial Sequence
  Description of Artificial Sequence: Synthetic oligonucleotide
  Antisense strand to SEQ ID NO: 306702
uuauuucugccaaggucgc

SEQ ID NO: 306704 - RNA, 19 nt, Artificial Sequence
  Description of Artificial Sequence: Synthetic oligonucleotide
  Sense strand starting at position 3671 of SEQ ID NO: 3938
auguaugugugggcauaaa

SEQ ID NO: 306705 - RNA, 19 nt, Artificial Sequence
  Description of Artificial Sequence: Synthetic oligonucleotide
  Antisense strand to SEQ ID NO: 306704
uuuaugcccacacauacau

SEQ ID NO: 306706 - RNA, 19 nt, Artificial Sequence
  Description of Artificial Sequence: Synthetic oligonucleotide
  Sense strand starting at position 3906 of SEQ ID NO: 3938
uuuauuccuuccuuaguga

SEQ ID NO: 306707 - RNA, 19 nt, Artificial Sequence
  Description of Artificial Sequence: Synthetic oligonucleotide
  Antisense strand to SEQ ID NO: 306706
ucacuaaggaaggaauaaa

SEQ ID NO: 306708 - RNA, 19 nt, Artificial Sequence
  Description of Artificial Sequence: Synthetic oligonucleotide
  Sense strand starting at position 3958 of SEQ ID NO: 3938
gagguuuagaugggucagu

SEQ ID NO: 306709 - RNA, 19 nt, Artificial Sequence
  Description of Artificial Sequence: Synthetic oligonucleotide
  Antisense strand to SEQ ID NO: 306708
acugacccaucuaaaccuc

SEQ ID NO: 306710 - RNA, 19 nt, Artificial Sequence
  Description of Artificial Sequence: Synthetic oligonucleotide
  Sense strand starting at position 3963 of SEQ ID NO: 3938
uuagaugggucagucugaa

SEQ ID NO: 306711 - RNA, 19 nt, Artificial Sequence
  Description of Artificial Sequence: Synthetic oligonucleotide
  Antisense strand to SEQ ID NO: 306710
uucagacugacccaucuaa

SEQ ID NO: 306712 - RNA, 19 nt, Artificial Sequence
  Description of Artificial Sequence: Synthetic oligonucleotide
  Sense strand starting at position 33 of SEQ ID NO: 3940
gcuuaagcaccaggguaau

SEQ ID NO: 306713 - RNA, 19 nt, Artificial Sequence
  Description of Artificial Sequence: Synthetic oligonucleotide
  Antisense strand to SEQ ID NO: 306712
auuacccuggugcuuaagc

SEQ ID NO: 306714 - RNA, 19 nt, Artificial Sequence
  Description of Artificial Sequence: Synthetic oligonucleotide
  Sense strand starting at position 340 of SEQ ID NO: 3940
ggguccuuccauggaguca

SEQ ID NO: 306715 - RNA, 19 nt, Artificial Sequence
  Description of Artificial Sequence: Synthetic oligonucleotide
  Antisense strand to SEQ ID NO: 306714
ugacuccauggaaggaccc

SEQ ID NO: 306716 - RNA, 19 nt, Artificial Sequence
  Description of Artificial Sequence: Synthetic oligonucleotide
  Sense strand starting at position 391 of SEQ ID NO: 3940
aaaguugucccagguacua

SEQ ID NO: 306717 - RNA, 19 nt, Artificial Sequence
  Description of Artificial Sequence: Synthetic oligonucleotide
  Antisense strand to SEQ ID NO: 306716
uaguaccugggacaacuuu

SEQ ID NO: 306718 - RNA, 19 nt, Artificial Sequence
  Description of Artificial Sequence: Synthetic oligonucleotide
  Sense strand starting at position 393 of SEQ ID NO: 3940
aguugucccagguacuauu

SEQ ID NO: 306719 - RNA, 19 nt, Artificial Sequence
  Description of Artificial Sequence: Synthetic oligonucleotide
  Antisense strand to SEQ ID NO: 306718
aauaguaccugggacaacu

SEQ ID NO: 306720 - RNA, 19 nt, Artificial Sequence
  Description of Artificial Sequence: Synthetic oligonucleotide
  Sense strand starting at position 486 of SEQ ID NO: 3940
ucccaaaggcucugucuau

SEQ ID NO: 306721 - RNA, 19 nt, Artificial Sequence
  Description of Artificial Sequence: Synthetic oligonucleotide
  Antisense strand to SEQ ID NO: 306720
auagacagagccuuuggga

SEQ ID NO: 306722 - RNA, 19 nt, Artificial Sequence
  Description of Artificial Sequence: Synthetic oligonucleotide
  Sense strand starting at position 490 of SEQ ID NO: 3940
aaaggcucugucuauggaa

SEQ ID NO: 306723 - RNA, 19 nt, Artificial Sequence
  Description of Artificial Sequence: Synthetic oligonucleotide
  Antisense strand to SEQ ID NO: 306722
uuccauagacagagccuuu

SEQ ID NO: 306724 - RNA, 19 nt, Artificial Sequence
  Description of Artificial Sequence: Synthetic oligonucleotide
  Sense strand starting at position 647 of SEQ ID NO: 3940
aggugacucuuccuccgua

SEQ ID NO: 306725 - RNA, 19 nt, Artificial Sequence
  Description of Artificial Sequence: Synthetic oligonucleotide
  Antisense strand to SEQ ID NO: 306724
uacggaggaagagucaccu

SEQ ID NO: 306726 - RNA, 19 nt, Artificial Sequence
  Description of Artificial Sequence: Synthetic oligonucleotide
  Sense strand starting at position 648 of SEQ ID NO: 3940
ggugacucuuccuccguau

SEQ ID NO: 306727 - RNA, 19 nt, Artificial Sequence
  Description of Artificial Sequence: Synthetic oligonucleotide
  Antisense strand to SEQ ID NO: 306726
auacggaggaagagucacc

SEQ ID NO: 306728 - RNA, 19 nt, Artificial Sequence
  Description of Artificial Sequence: Synthetic oligonucleotide
  Sense strand starting at position 651 of SEQ ID NO: 3940
gacucuuccuccguaucga

SEQ ID NO: 306729 - RNA, 19 nt, Artificial Sequence
  Description of Artificial Sequence: Synthetic oligonucleotide
  Antisense strand to SEQ ID NO: 306728
ucgauacggaggaagaguc

SEQ ID NO: 306730 - RNA, 19 nt, Artificial Sequence
  Description of Artificial Sequence: Synthetic oligonucleotide
  Sense strand starting at position 652 of SEQ ID NO: 3940
acucuuccuccguaucgau

SEQ ID NO: 306731 - RNA, 19 nt, Artificial Sequence
  Description of Artificial Sequence: Synthetic oligonucleotide
  Antisense strand to SEQ ID NO: 306730
aucgauacggaggaagagu

SEQ ID NO: 306732 - RNA, 19 nt, Artificial Sequence
  Description of Artificial Sequence: Synthetic oligonucleotide
  Sense strand starting at position 678 of SEQ ID NO: 3940
uugucuuuggaauacaauu

SEQ ID NO: 306733 - RNA, 19 nt, Artificial Sequence
  Description of Artificial Sequence: Synthetic oligonucleotide
  Antisense strand to SEQ ID NO: 306732
aauuguauuccaaagacaa

SEQ ID NO: 306734 - RNA, 19 nt, Artificial Sequence
  Description of Artificial Sequence: Synthetic oligonucleotide
  Sense strand starting at position 713 of SEQ ID NO: 3940
gaauucuggcaaggaacau

SEQ ID NO: 306735 - RNA, 19 nt, Artificial Sequence
  Description of Artificial Sequence: Synthetic oligonucleotide
  Antisense strand to SEQ ID NO: 306734
auguuccuugccagaauuc

SEQ ID NO: 306736 - RNA, 19 nt, Artificial Sequence
  Description of Artificial Sequence: Synthetic oligonucleotide
  Sense strand starting at position 749 of SEQ ID NO: 3940
augcaauucccagaugacu

SEQ ID NO: 306737 - RNA, 19 nt, Artificial Sequence
  Description of Artificial Sequence: Synthetic oligonucleotide
  Antisense strand to SEQ ID NO: 306736
agucaucugggaauugcau

SEQ ID NO: 306738 - RNA, 19 nt, Artificial Sequence
  Description of Artificial Sequence: Synthetic oligonucleotide
  Sense strand starting at position 758 of SEQ ID NO: 3940
ccagaugacugugcagaga

SEQ ID NO: 306739 - RNA, 19 nt, Artificial Sequence
  Description of Artificial Sequence: Synthetic oligonucleotide
  Antisense strand to SEQ ID NO: 306738
ucucugcacagucaucugg

SEQ ID NO: 306740 - RNA, 19 nt, Artificial Sequence
  Description of Artificial Sequence: Synthetic oligonucleotide
  Sense strand starting at position 799 of SEQ ID NO: 3940
aggucaauaggaugugagu

SEQ ID NO: 306741 - RNA, 19 nt, Artificial Sequence
  Description of Artificial Sequence: Synthetic oligonucleotide
  Antisense strand to SEQ ID NO: 306740
acucacauccuauugaccu

SEQ ID NO: 306742 - RNA, 19 nt, Artificial Sequence
  Description of Artificial Sequence: Synthetic oligonucleotide
  Sense strand starting at position 808 of SEQ ID NO: 3940
ggaugugaguugaaccgau

SEQ ID NO: 306743 - RNA, 19 nt, Artificial Sequence
  Description of Artificial Sequence: Synthetic oligonucleotide
  Antisense strand to SEQ ID NO: 306742
aucgguucaacucacaucc

SEQ ID NO: 306744 - RNA, 19 nt, Artificial Sequence
  Description of Artificial Sequence: Synthetic oligonucleotide
  Sense strand starting at position 831 of SEQ ID NO: 3940
gcaacuucuggaugacauc

SEQ ID NO: 306745 - RNA, 19 nt, Artificial Sequence
  Description of Artificial Sequence: Synthetic oligonucleotide
  Antisense strand to SEQ ID NO: 306744
gaugucauccagaaguugc

SEQ ID NO: 306746 - RNA, 19 nt, Artificial Sequence
  Description of Artificial Sequence: Synthetic oligonucleotide
  Sense strand starting at position 843 of SEQ ID NO: 3940
ugacaucacuuacaaagga

SEQ ID NO: 306747 - RNA, 19 nt, Artificial Sequence
  Description of Artificial Sequence: Synthetic oligonucleotide
  Antisense strand to SEQ ID NO: 306746
uccuuuguaagugauguca

SEQ ID NO: 306748 - RNA, 19 nt, Artificial Sequence
  Description of Artificial Sequence: Synthetic oligonucleotide
  Sense strand starting at position 1004 of SEQ ID NO: 3940
guaagaucuuaauccaaug

SEQ ID NO: 306749 - RNA, 19 nt, Artificial Sequence
  Description of Artificial Sequence: Synthetic oligonucleotide
  Antisense strand to SEQ ID NO: 306748
cauuggauuaagaucuuac

SEQ ID NO: 306750 - RNA, 19 nt, Artificial Sequence
  Description of Artificial Sequence: Synthetic oligonucleotide
  Sense strand starting at position 1057 of SEQ ID NO: 3940
aggaaagguuuauaaucag

SEQ ID NO: 306751 - RNA, 19 nt, Artificial Sequence
  Description of Artificial Sequence: Synthetic oligonucleotide
  Antisense strand to SEQ ID NO: 306750
cugauuauaaaccuuuccu

SEQ ID NO: 306752 - RNA, 19 nt, Artificial Sequence
  Description of Artificial Sequence: Synthetic oligonucleotide
  Sense strand starting at position 1509 of SEQ ID NO: 3940
agguuucgaucuuuccgaa

SEQ ID NO: 306753 - RNA, 19 nt, Artificial Sequence
  Description of Artificial Sequence: Synthetic oligonucleotide
  Antisense strand to SEQ ID NO: 306752
uucggaaagaucgaaaccu

SEQ ID NO: 306754 - RNA, 19 nt, Artificial Sequence
  Description of Artificial Sequence: Synthetic oligonucleotide
  Sense strand starting at position 1533 of SEQ ID NO: 3940
uucugaugugcccgacaag

SEQ ID NO: 306755 - RNA, 19 nt, Artificial Sequence
  Description of Artificial Sequence: Synthetic oligonucleotide
  Antisense strand to SEQ ID NO: 306754
cuugucgggcacaucagaa

SEQ ID NO: 306756 - RNA, 19 nt, Artificial Sequence
  Description of Artificial Sequence: Synthetic oligonucleotide
  Sense strand starting at position 2371 of SEQ ID NO: 3940
gguccuguggccuaaugaa

SEQ ID NO: 306757 - RNA, 19 nt, Artificial Sequence
  Description of Artificial Sequence: Synthetic oligonucleotide
  Antisense strand to SEQ ID NO: 306756
uucauuaggccacaggacc

SEQ ID NO: 306758 - RNA, 19 nt, Artificial Sequence
  Description of Artificial Sequence: Synthetic oligonucleotide
  Sense strand starting at position 2452 of SEQ ID NO: 3940
ugucgagugcuccuuccuu

SEQ ID NO: 306759 - RNA, 19 nt, Artificial Sequence
  Description of Artificial Sequence: Synthetic oligonucleotide
  Antisense strand to SEQ ID NO: 306758
aaggaaggagcacucgaca

SEQ ID NO: 306760 - RNA, 19 nt, Artificial Sequence
  Description of Artificial Sequence: Synthetic oligonucleotide
  Sense strand starting at position 2640 of SEQ ID NO: 3940
ggcggagaguggcucuuaa

SEQ ID NO: 306761 - RNA, 19 nt, Artificial Sequence
  Description of Artificial Sequence: Synthetic oligonucleotide
  Antisense strand to SEQ ID NO: 306760
uuaagagccacucuccgcc

SEQ ID NO: 306762 - RNA, 19 nt, Artificial Sequence
  Description of Artificial Sequence: Synthetic oligonucleotide
  Sense strand starting at position 2696 of SEQ ID NO: 3940
ugcugcugcauuugagaua

SEQ ID NO: 306763 - RNA, 19 nt, Artificial Sequence
  Description of Artificial Sequence: Synthetic oligonucleotide
  Antisense strand to SEQ ID NO: 306762
uaucucaaaugcagcagca

SEQ ID NO: 306764 - RNA, 19 nt, Artificial Sequence
  Description of Artificial Sequence: Synthetic oligonucleotide
  Sense strand starting at position 2699 of SEQ ID NO: 3940
ugcugcauuugagauacaa

SEQ ID NO: 306765 - RNA, 19 nt, Artificial Sequence
  Description of Artificial Sequence: Synthetic oligonucleotide
  Antisense strand to SEQ ID NO: 306764
uuguaucucaaaugcagca

SEQ ID NO: 306766 - RNA, 19 nt, Artificial Sequence
  Description of Artificial Sequence: Synthetic oligonucleotide
  Sense strand starting at position 2724 of SEQ ID NO: 3940
ggcaaugaucaucagagcu

SEQ ID NO: 306767 - RNA, 19 nt, Artificial Sequence
  Description of Artificial Sequence: Synthetic oligonucleotide
  Antisense strand to SEQ ID NO: 306766
agcucugaugaucauugcc

SEQ ID NO: 306768 - RNA, 19 nt, Artificial Sequence
  Description of Artificial Sequence: Synthetic oligonucleotide
  Sense strand starting at position 2907 of SEQ ID NO: 3940
caucguugcccagauucca

SEQ ID NO: 306769 - RNA, 19 nt, Artificial Sequence
  Description of Artificial Sequence: Synthetic oligonucleotide
  Antisense strand to SEQ ID NO: 306768
uggaaucugggcaacgaug

SEQ ID NO: 306770 - RNA, 19 nt, Artificial Sequence
  Description of Artificial Sequence: Synthetic oligonucleotide
  Sense strand starting at position 2998 of SEQ ID NO: 3940
gcccgcucagagcagaaau

SEQ ID NO: 306771 - RNA, 19 nt, Artificial Sequence
  Description of Artificial Sequence: Synthetic oligonucleotide
  Antisense strand to SEQ ID NO: 306770
auuucugcucugagcgggc

SEQ ID NO: 306772 - RNA, 19 nt, Artificial Sequence
  Description of Artificial Sequence: Synthetic oligonucleotide
  Sense strand starting at position 3074 of SEQ ID NO: 3940
gagggauagaguuggucga

SEQ ID NO: 306773 - RNA, 19 nt, Artificial Sequence
  Description of Artificial Sequence: Synthetic oligonucleotide
  Antisense strand to SEQ ID NO: 306772
ucgaccaacucuaucccuc

SEQ ID NO: 306774 - RNA, 19 nt, Artificial Sequence
  Description of Artificial Sequence: Synthetic oligonucleotide
  Sense strand starting at position 3076 of SEQ ID NO: 3940
gggauagaguuggucgaga

SEQ ID NO: 306775 - RNA, 19 nt, Artificial Sequence
  Description of Artificial Sequence: Synthetic oligonucleotide
  Antisense strand to SEQ ID NO: 306774
ucucgaccaacucuauccc

SEQ ID NO: 306776 - RNA, 19 nt, Artificial Sequence
  Description of Artificial Sequence: Synthetic oligonucleotide
  Sense strand starting at position 3077 of SEQ ID NO: 3940
ggauagaguuggucgagaa

SEQ ID NO: 306777 - RNA, 19 nt, Artificial Sequence
  Description of Artificial Sequence: Synthetic oligonucleotide
  Antisense strand to SEQ ID NO: 306776
uucucgaccaacucuaucc

SEQ ID NO: 306778 - RNA, 19 nt, Artificial Sequence
  Description of Artificial Sequence: Synthetic oligonucleotide
  Sense strand starting at position 3078 of SEQ ID NO: 3940
gauagaguuggucgagaau

SEQ ID NO: 306779 - RNA, 19 nt, Artificial Sequence
  Description of Artificial Sequence: Synthetic oligonucleotide
  Antisense strand to SEQ ID NO: 306778
auucucgaccaacucuauc

SEQ ID NO: 306780 - RNA, 19 nt, Artificial Sequence
  Description of Artificial Sequence: Synthetic oligonucleotide
  Sense strand starting at position 3249 of SEQ ID NO: 3940
uaccgauguuuccugggau

SEQ ID NO: 306781 - RNA, 19 nt, Artificial Sequence
  Description of Artificial Sequence: Synthetic oligonucleotide
  Antisense strand to SEQ ID NO: 306780
aucccaggaaacaucggua

SEQ ID NO: 306782 - RNA, 19 nt, Artificial Sequence
  Description of Artificial Sequence: Synthetic oligonucleotide
  Sense strand starting at position 3252 of SEQ ID NO: 3940
cgauguuuccugggaucac

SEQ ID NO: 306783 - RNA, 19 nt, Artificial Sequence
  Description of Artificial Sequence: Synthetic oligonucleotide
  Antisense strand to SEQ ID NO: 306782
gugaucccaggaaacaucg

SEQ ID NO: 306784 - RNA, 19 nt, Artificial Sequence
  Description of Artificial Sequence: Synthetic oligonucleotide
  Sense strand starting at position 3368 of SEQ ID NO: 3940
ggcugaucaccuugaaagu

SEQ ID NO: 306785 - RNA, 19 nt, Artificial Sequence
  Description of Artificial Sequence: Synthetic oligonucleotide
  Antisense strand to SEQ ID NO: 306784
acuuucaaggugaucagcc

SEQ ID NO: 306786 - RNA, 19 nt, Artificial Sequence
  Description of Artificial Sequence: Synthetic oligonucleotide
  Sense strand starting at position 3369 of SEQ ID NO: 3940
gcugaucaccuugaaagug

SEQ ID NO: 306787 - RNA, 19 nt, Artificial Sequence
  Description of Artificial Sequence: Synthetic oligonucleotide
  Antisense strand to SEQ ID NO: 306786
cacuuucaaggugaucagc

SEQ ID NO: 306788 - RNA, 19 nt, Artificial Sequence
  Description of Artificial Sequence: Synthetic oligonucleotide
  Sense strand starting at position 3480 of SEQ ID NO: 3940
cguggaucucauuaggaac

SEQ ID NO: 306789 - RNA, 19 nt, Artificial Sequence
  Description of Artificial Sequence: Synthetic oligonucleotide
  Antisense strand to SEQ ID NO: 306788
guuccuaaugagauccacg

SEQ ID NO: 306790 - RNA, 19 nt, Artificial Sequence
  Description of Artificial Sequence: Synthetic oligonucleotide
  Sense strand starting at position 3827 of SEQ ID NO: 3940
gugucuguuagggagucuu

SEQ ID NO: 306791 - RNA, 19 nt, Artificial Sequence
  Description of Artificial Sequence: Synthetic oligonucleotide
  Antisense strand to SEQ ID NO: 306790
aagacucccuaacagacac

SEQ ID NO: 306792 - RNA, 19 nt, Artificial Sequence
  Description of Artificial Sequence: Synthetic oligonucleotide
  Sense strand starting at position 12 of SEQ ID NO: 3941
uuuccaaaguaguccuuau

SEQ ID NO: 306793 - RNA, 19 nt, Artificial Sequence
  Description of Artificial Sequence: Synthetic oligonucleotide
  Antisense strand to SEQ ID NO: 306792
auaaggacuacuuuggaaa

SEQ ID NO: 306794 - RNA, 19 nt, Artificial Sequence
  Description of Artificial Sequence: Synthetic oligonucleotide
  Sense strand starting at position 27 of SEQ ID NO: 3941
uuauuuguaucugaggaca

SEQ ID NO: 306795 - RNA, 19 nt, Artificial Sequence
  Description of Artificial Sequence: Synthetic oligonucleotide
  Antisense strand to SEQ ID NO: 306794
uguccucagauacaaauaa

SEQ ID NO: 306796 - RNA, 19 nt, Artificial Sequence
  Description of Artificial Sequence: Synthetic oligonucleotide
  Sense strand starting at position 306 of SEQ ID NO: 3941
gcagcaugcgccucuaauc

SEQ ID NO: 306797 - RNA, 19 nt, Artificial Sequence
  Description of Artificial Sequence: Synthetic oligonucleotide
  Antisense strand to SEQ ID NO: 306796
gauuagaggcgcaugcugc

SEQ ID NO: 306798 - RNA, 19 nt, Artificial Sequence
  Description of Artificial Sequence: Synthetic oligonucleotide
  Sense strand starting at position 558 of SEQ ID NO: 3941
accacugcuccagggauau

SEQ ID NO: 306799 - RNA, 19 nt, Artificial Sequence
  Description of Artificial Sequence: Synthetic oligonucleotide
  Antisense strand to SEQ ID NO: 306798
auaucccuggagcaguggu

SEQ ID NO: 306800 - RNA, 19 nt, Artificial Sequence
  Description of Artificial Sequence: Synthetic oligonucleotide
  Sense strand starting at position 650 of SEQ ID NO: 3941
cuggauggcucccuccaaa

SEQ ID NO: 306801 - RNA, 19 nt, Artificial Sequence
  Description of Artificial Sequence: Synthetic oligonucleotide
  Antisense strand to SEQ ID NO: 306800
uuuggagggagccauccag

SEQ ID NO: 306802 - RNA, 19 nt, Artificial Sequence
  Description of Artificial Sequence: Synthetic oligonucleotide
  Sense strand starting at position 760 of SEQ ID NO: 3941
accucucuauucgcagaaa

SEQ ID NO: 306803 - RNA, 19 nt, Artificial Sequence
  Description of Artificial Sequence: Synthetic oligonucleotide
  Antisense strand to SEQ ID NO: 306802
uuucugcgaauagagaggu

SEQ ID NO: 306804 - RNA, 19 nt, Artificial Sequence
  Description of Artificial Sequence: Synthetic oligonucleotide
  Sense strand starting at position 842 of SEQ ID NO: 3941
caaagugggugguuuaaau

SEQ ID NO: 306805 - RNA, 19 nt, Artificial Sequence
  Description of Artificial Sequence: Synthetic oligonucleotide
  Antisense strand to SEQ ID NO: 306804
auuuaaaccacccacuuug

SEQ ID NO: 306806 - RNA, 19 nt, Artificial Sequence
  Description of Artificial Sequence: Synthetic oligonucleotide
  Sense strand starting at position 947 of SEQ ID NO: 3941
aggugcugcaguuaaagaa

SEQ ID NO: 306807 - RNA, 19 nt, Artificial Sequence
  Description of Artificial Sequence: Synthetic oligonucleotide
  Antisense strand to SEQ ID NO: 306806
uucuuuaacugcagcaccu

SEQ ID NO: 306808 - RNA, 19 nt, Artificial Sequence
  Description of Artificial Sequence: Synthetic oligonucleotide
  Sense strand starting at position 956 of SEQ ID NO: 3941
aguuaaagaauaggugauu

SEQ ID NO: 306809 - RNA, 19 nt, Artificial Sequence
  Description of Artificial Sequence: Synthetic oligonucleotide
  Antisense strand to SEQ ID NO: 306808
aaucaccuauucuuuaacu

SEQ ID NO: 306810 - RNA, 19 nt, Artificial Sequence
  Description of Artificial Sequence: Synthetic oligonucleotide
  Sense strand starting at position 1084 of SEQ ID NO: 3941
uaaguaaguccggauuaag

SEQ ID NO: 306811 - RNA, 19 nt, Artificial Sequence
  Description of Artificial Sequence: Synthetic oligonucleotide
  Antisense strand to SEQ ID NO: 306810
cuuaauccggacuuacuua

SEQ ID NO: 306812 - RNA, 19 nt, Artificial Sequence
  Description of Artificial Sequence: Synthetic oligonucleotide
  Sense strand starting at position 1087 of SEQ ID NO: 3941
guaaguccggauuaaguau

SEQ ID NO: 306813 - RNA, 19 nt, Artificial Sequence
  Description of Artificial Sequence: Synthetic oligonucleotide
  Antisense strand to SEQ ID NO: 306812
auacuuaauccggacuuac

SEQ ID NO: 306814 - RNA, 19 nt, Artificial Sequence
  Description of Artificial Sequence: Synthetic oligonucleotide
  Sense strand starting at position 1338 of SEQ ID NO: 3941
cucagauccuguuugaauc

SEQ ID NO: 306815 - RNA, 19 nt, Artificial Sequence
  Description of Artificial Sequence: Synthetic oligonucleotide
  Antisense strand to SEQ ID NO: 306814
gauucaaacaggaucugag

SEQ ID NO: 306816 - RNA, 19 nt, Artificial Sequence
  Description of Artificial Sequence: Synthetic oligonucleotide
  Sense strand starting at position 1339 of SEQ ID NO: 3941
ucagauccuguuugaaucu

SEQ ID NO: 306817 - RNA, 19 nt, Artificial Sequence
  Description of Artificial Sequence: Synthetic oligonucleotide
  Antisense strand to SEQ ID NO: 306816
agauucaaacaggaucuga

SEQ ID NO: 306818 - RNA, 19 nt, Artificial Sequence
  Description of Artificial Sequence: Synthetic oligonucleotide
  Sense strand starting at position 1349 of SEQ ID NO: 3941
uuugaaucuguggaguuua

SEQ ID NO: 306819 - RNA, 19 nt, Artificial Sequence
  Description of Artificial Sequence: Synthetic oligonucleotide
  Antisense strand to SEQ ID NO: 306818
uaaacuccacagauucaaa

SEQ ID NO: 306820 - RNA, 19 nt, Artificial Sequence
  Description of Artificial Sequence: Synthetic oligonucleotide
  Sense strand starting at position 1360 of SEQ ID NO: 3941
ggaguuuaggaacguauuc

SEQ ID NO: 306821 - RNA, 19 nt, Artificial Sequence
  Description of Artificial Sequence: Synthetic oligonucleotide
  Antisense strand to SEQ ID NO: 306820
gaauacguuccuaaacucc

SEQ ID NO: 306822 - RNA, 19 nt, Artificial Sequence
  Description of Artificial Sequence: Synthetic oligonucleotide
  Sense strand starting at position 1362 of SEQ ID NO: 3941
aguuuaggaacguauucuu

SEQ ID NO: 306823 - RNA, 19 nt, Artificial Sequence
  Description of Artificial Sequence: Synthetic oligonucleotide
  Antisense strand to SEQ ID NO: 306822
aagaauacguuccuaaacu

SEQ ID NO: 306824 - RNA, 19 nt, Artificial Sequence
  Description of Artificial Sequence: Synthetic oligonucleotide
  Sense strand starting at position 1365 of SEQ ID NO: 3941
uuaggaacguauucuucua

SEQ ID NO: 306825 - RNA, 19 nt, Artificial Sequence
  Description of Artificial Sequence: Synthetic oligonucleotide
  Antisense strand to SEQ ID NO: 306824
uagaagaauacguuccuaa

SEQ ID NO: 306826 - RNA, 19 nt, Artificial Sequence
  Description of Artificial Sequence: Synthetic oligonucleotide
  Sense strand starting at position 1367 of SEQ ID NO: 3941
aggaacguauucuucuaca

SEQ ID NO: 306827 - RNA, 19 nt, Artificial Sequence
  Description of Artificial Sequence: Synthetic oligonucleotide
  Antisense strand to SEQ ID NO: 306826
uguagaagaauacguuccu

SEQ ID NO: 306828 - RNA, 19 nt, Artificial Sequence
  Description of Artificial Sequence: Synthetic oligonucleotide
  Sense strand starting at position 1372 of SEQ ID NO: 3941
cguauucuucuacagauac

SEQ ID NO: 306829 - RNA, 19 nt, Artificial Sequence
  Description of Artificial Sequence: Synthetic oligonucleotide
  Antisense strand to SEQ ID NO: 306828
guaucuguagaagaauacg

SEQ ID NO: 306830 - RNA, 19 nt, Artificial Sequence
  Description of Artificial Sequence: Synthetic oligonucleotide
  Sense strand starting at position 1411 of SEQ ID NO: 3941
agcagauauccauguuaaa

SEQ ID NO: 306831 - RNA, 19 nt, Artificial Sequence
  Description of Artificial Sequence: Synthetic oligonucleotide
  Antisense strand to SEQ ID NO: 306830
uuuaacauggauaucugcu

SEQ ID NO: 306832 - RNA, 19 nt, Artificial Sequence
  Description of Artificial Sequence: Synthetic oligonucleotide
  Sense strand starting at position 2117 of SEQ ID NO: 3941
agcggaauucugggagaug

SEQ ID NO: 306833 - RNA, 19 nt, Artificial Sequence
  Description of Artificial Sequence: Synthetic oligonucleotide
  Antisense strand to SEQ ID NO: 306832
caucucccagaauuccgcu

SEQ ID NO: 306834 - RNA, 19 nt, Artificial Sequence
  Description of Artificial Sequence: Synthetic oligonucleotide
  Sense strand starting at position 2144 of SEQ ID NO: 3941
ugguuaaagcucugaaagg

SEQ ID NO: 306835 - RNA, 19 nt, Artificial Sequence
  Description of Artificial Sequence: Synthetic oligonucleotide
  Antisense strand to SEQ ID NO: 306834
ccuuucagagcuuuaacca

SEQ ID NO: 306836 - RNA, 19 nt, Artificial Sequence
  Description of Artificial Sequence: Synthetic oligonucleotide
  Sense strand starting at position 2590 of SEQ ID NO: 3941
ugaguuugaccgcaggaaa

SEQ ID NO: 306837 - RNA, 19 nt, Artificial Sequence
  Description of Artificial Sequence: Synthetic oligonucleotide
  Antisense strand to SEQ ID NO: 306836
uuuccugcggucaaacuca

SEQ ID NO: 306838 - RNA, 19 nt, Artificial Sequence
  Description of Artificial Sequence: Synthetic oligonucleotide
  Sense strand starting at position 2610 of SEQ ID NO: 3941
gggagauugcccgauucac

SEQ ID NO: 306839 - RNA, 19 nt, Artificial Sequence
  Description of Artificial Sequence: Synthetic oligonucleotide
  Antisense strand to SEQ ID NO: 306838
gugaaucgggcaaucuccc

SEQ ID NO: 306840 - RNA, 19 nt, Artificial Sequence
  Description of Artificial Sequence: Synthetic oligonucleotide
  Sense strand starting at position 2714 of SEQ ID NO: 3941
aagugugaacguuaggaaa

SEQ ID NO: 306841 - RNA, 19 nt, Artificial Sequence
  Description of Artificial Sequence: Synthetic oligonucleotide
  Antisense strand to SEQ ID NO: 306840
uuuccuaacguucacacuu

SEQ ID NO: 306842 - RNA, 19 nt, Artificial Sequence
  Description of Artificial Sequence: Synthetic oligonucleotide
  Sense strand starting at position 2790 of SEQ ID NO: 3941
cucagauguccguagaccu

SEQ ID NO: 306843 - RNA, 19 nt, Artificial Sequence
  Description of Artificial Sequence: Synthetic oligonucleotide
  Antisense strand to SEQ ID NO: 306842
aggucuacggacaucugag

SEQ ID NO: 306844 - RNA, 19 nt, Artificial Sequence
  Description of Artificial Sequence: Synthetic oligonucleotide
  Sense strand starting at position 2797 of SEQ ID NO: 3941
guccguagaccugagagau

SEQ ID NO: 306845 - RNA, 19 nt, Artificial Sequence
  Description of Artificial Sequence: Synthetic oligonucleotide
  Antisense strand to SEQ ID NO: 306844
aucucucaggucuacggac

SEQ ID NO: 306846 - RNA, 19 nt, Artificial Sequence
  Description of Artificial Sequence: Synthetic oligonucleotide
  Sense strand starting at position 2807 of SEQ ID NO: 3941
cugagagauuuggagaucu

SEQ ID NO: 306847 - RNA, 19 nt, Artificial Sequence
  Description of Artificial Sequence: Synthetic oligonucleotide
  Antisense strand to SEQ ID NO: 306846
agaucuccaaaucucucag

SEQ ID NO: 306848 - RNA, 19 nt, Artificial Sequence
  Description of Artificial Sequence: Synthetic oligonucleotide
  Sense strand starting at position 2846 of SEQ ID NO: 3941
ggaucuuuccuaggcaauu

SEQ ID NO: 306849 - RNA, 19 nt, Artificial Sequence
  Description of Artificial Sequence: Synthetic oligonucleotide
  Antisense strand to SEQ ID NO: 306848
aauugccuaggaaagaucc

SEQ ID NO: 306850 - RNA, 19 nt, Artificial Sequence
  Description of Artificial Sequence: Synthetic oligonucleotide
  Sense strand starting at position 2856 of SEQ ID NO: 3941
uaggcaauuggcuacagaa

SEQ ID NO: 306851 - RNA, 19 nt, Artificial Sequence
  Description of Artificial Sequence: Synthetic oligonucleotide
  Antisense strand to SEQ ID NO: 306850
uucuguagccaauugccua

SEQ ID NO: 306852 - RNA, 19 nt, Artificial Sequence
  Description of Artificial Sequence: Synthetic oligonucleotide
  Sense strand starting at position 2858 of SEQ ID NO: 3941
ggcaauuggcuacagaaau

SEQ ID NO: 306853 - RNA, 19 nt, Artificial Sequence
  Description of Artificial Sequence: Synthetic oligonucleotide
  Antisense strand to SEQ ID NO: 306852
auuucuguagccaauugcc

SEQ ID NO: 306854 - RNA, 19 nt, Artificial Sequence
  Description of Artificial Sequence: Synthetic oligonucleotide
  Sense strand starting at position 2923 of SEQ ID NO: 3941
gaggaaggaucucaauaaa

SEQ ID NO: 306855 - RNA, 19 nt, Artificial Sequence
  Description of Artificial Sequence: Synthetic oligonucleotide
  Antisense strand to SEQ ID NO: 306854
uuuauugagauccuuccuc

SEQ ID NO: 306856 - RNA, 19 nt, Artificial Sequence
  Description of Artificial Sequence: Synthetic oligonucleotide
  Sense strand starting at position 2954 of SEQ ID NO: 3941
ucaacagucguugauggau

SEQ ID NO: 306857 - RNA, 19 nt, Artificial Sequence
  Description of Artificial Sequence: Synthetic oligonucleotide
  Antisense strand to SEQ ID NO: 306856
auccaucaacgacuguuga

SEQ ID NO: 306858 - RNA, 19 nt, Artificial Sequence
  Description of Artificial Sequence: Synthetic oligonucleotide
  Sense strand starting at position 2983 of SEQ ID NO: 3941
uuagauaauuuaugggaga

SEQ ID NO: 306859 - RNA, 19 nt, Artificial Sequence
  Description of Artificial Sequence: Synthetic oligonucleotide
  Antisense strand to SEQ ID NO: 306858
ucucccauaaauuaucuaa

SEQ ID NO: 306860 - RNA, 19 nt, Artificial Sequence
  Description of Artificial Sequence: Synthetic oligonucleotide
  Sense strand starting at position 2984 of SEQ ID NO: 3941
uagauaauuuaugggagaa

SEQ ID NO: 306861 - RNA, 19 nt, Artificial Sequence
  Description of Artificial Sequence: Synthetic oligonucleotide
  Antisense strand to SEQ ID NO: 306860
uucucccauaaauuaucua

SEQ ID NO: 306862 - RNA, 19 nt, Artificial Sequence
  Description of Artificial Sequence: Synthetic oligonucleotide
  Sense strand starting at position 3090 of SEQ ID NO: 3941
cuugaugugaugcaauuga

SEQ ID NO: 306863 - RNA, 19 nt, Artificial Sequence
  Description of Artificial Sequence: Synthetic oligonucleotide
  Antisense strand to SEQ ID NO: 306862
ucaauugcaucacaucaag

SEQ ID NO: 306864 - RNA, 19 nt, Artificial Sequence
  Description of Artificial Sequence: Synthetic oligonucleotide
  Sense strand starting at position 3094 of SEQ ID NO: 3941
augugaugcaauugaacag

SEQ ID NO: 306865 - RNA, 19 nt, Artificial Sequence
  Description of Artificial Sequence: Synthetic oligonucleotide
  Antisense strand to SEQ ID NO: 306864
cuguucaauugcaucacau

SEQ ID NO: 306866 - RNA, 19 nt, Artificial Sequence
  Description of Artificial Sequence: Synthetic oligonucleotide
  Sense strand starting at position 3150 of SEQ ID NO: 3941
aaaguugagugacucuaau

SEQ ID NO: 306867 - RNA, 19 nt, Artificial Sequence
  Description of Artificial Sequence: Synthetic oligonucleotide
  Antisense strand to SEQ ID NO: 306866
auuagagucacucaacuuu

SEQ ID NO: 306868 - RNA, 19 nt, Artificial Sequence
  Description of Artificial Sequence: Synthetic oligonucleotide
  Sense strand starting at position 3156 of SEQ ID NO: 3941
gagugacucuaaucaaguu

SEQ ID NO: 306869 - RNA, 19 nt, Artificial Sequence
  Description of Artificial Sequence: Synthetic oligonucleotide
  Antisense strand to SEQ ID NO: 306868
aacuugauuagagucacuc

SEQ ID NO: 306870 - RNA, 19 nt, Artificial Sequence
  Description of Artificial Sequence: Synthetic oligonucleotide
  Sense strand starting at position 3396 of SEQ ID NO: 3941
aucccaacacucugaggau

SEQ ID NO: 306871 - RNA, 19 nt, Artificial Sequence
  Description of Artificial Sequence: Synthetic oligonucleotide
  Antisense strand to SEQ ID NO: 306870
auccucagaguguugggau

SEQ ID NO: 306872 - RNA, 19 nt, Artificial Sequence
  Description of Artificial Sequence: Synthetic oligonucleotide
  Sense strand starting at position 110 of SEQ ID NO: 3942
cucuuuccugacuggagaa

SEQ ID NO: 306873 - RNA, 19 nt, Artificial Sequence
  Description of Artificial Sequence: Synthetic oligonucleotide
  Antisense strand to SEQ ID NO: 306872
uucuccagucaggaaagag

SEQ ID NO: 306874 - RNA, 19 nt, Artificial Sequence
  Description of Artificial Sequence: Synthetic oligonucleotide
  Sense strand starting at position 131 of SEQ ID NO: 3942
uuuggcaagccuuaucaaa

SEQ ID NO: 306875 - RNA, 19 nt, Artificial Sequence
  Description of Artificial Sequence: Synthetic oligonucleotide
  Antisense strand to SEQ ID NO: 306874
uuugauaaggcuugccaaa

SEQ ID NO: 306876 - RNA, 19 nt, Artificial Sequence
  Description of Artificial Sequence: Synthetic oligonucleotide
  Sense strand starting at position 133 of SEQ ID NO: 3942
uggcaagccuuaucaaaua

SEQ ID NO: 306877 - RNA, 19 nt, Artificial Sequence
  Description of Artificial Sequence: Synthetic oligonucleotide
  Antisense strand to SEQ ID NO: 306876
uauuugauaaggcuugcca

SEQ ID NO: 306878 - RNA, 19 nt, Artificial Sequence
  Description of Artificial Sequence: Synthetic oligonucleotide
  Sense strand starting at position 171 of SEQ ID NO: 3942
gcauacggugcuuucuauu

SEQ ID NO: 306879 - RNA, 19 nt, Artificial Sequence
  Description of Artificial Sequence: Synthetic oligonucleotide
  Antisense strand to SEQ ID NO: 306878
aauagaaagcaccguaugc

SEQ ID NO: 306880 - RNA, 19 nt, Artificial Sequence
  Description of Artificial Sequence: Synthetic oligonucleotide
  Sense strand starting at position 177 of SEQ ID NO: 3942
ggugcuuucuauuucuuaa

SEQ ID NO: 306881 - RNA, 19 nt, Artificial Sequence
  Description of Artificial Sequence: Synthetic oligonucleotide
  Antisense strand to SEQ ID NO: 306880
uuaagaaauagaaagcacc

SEQ ID NO: 306882 - RNA, 19 nt, Artificial Sequence
  Description of Artificial Sequence: Synthetic oligonucleotide
  Sense strand starting at position 207 of SEQ ID NO: 3942
acuguaacugugcaguaaa

SEQ ID NO: 306883 - RNA, 19 nt, Artificial Sequence
  Description of Artificial Sequence: Synthetic oligonucleotide
  Antisense strand to SEQ ID NO: 306882
uuuacugcacaguuacagu

SEQ ID NO: 306884 - RNA, 19 nt, Artificial Sequence
  Description of Artificial Sequence: Synthetic oligonucleotide
  Sense strand starting at position 568 of SEQ ID NO: 3942
auagaacauuucugaauug

SEQ ID NO: 306885 - RNA, 19 nt, Artificial Sequence
  Description of Artificial Sequence: Synthetic oligonucleotide
  Antisense strand to SEQ ID NO: 306884
caauucagaaauguucuau

SEQ ID NO: 306886 - RNA, 19 nt, Artificial Sequence
  Description of Artificial Sequence: Synthetic oligonucleotide
  Sense strand starting at position 643 of SEQ ID NO: 3942
gcaauaaucuucuuaguga

SEQ ID NO: 306887 - RNA, 19 nt, Artificial Sequence
  Description of Artificial Sequence: Synthetic oligonucleotide
  Antisense strand to SEQ ID NO: 306886
ucacuaagaagauuauugc

SEQ ID NO: 306888 - RNA, 19 nt, Artificial Sequence
  Description of Artificial Sequence: Synthetic oligonucleotide
  Sense strand starting at position 708 of SEQ ID NO: 3942
accagcauucucugagaca

SEQ ID NO: 306889 - RNA, 19 nt, Artificial Sequence
  Description of Artificial Sequence: Synthetic oligonucleotide
  Antisense strand to SEQ ID NO: 306888
ugucucagagaaugcuggu

SEQ ID NO: 306890 - RNA, 19 nt, Artificial Sequence
  Description of Artificial Sequence: Synthetic oligonucleotide
  Sense strand starting at position 804 of SEQ ID NO: 3942
agcauauuaucuuugggau

SEQ ID NO: 306891 - RNA, 19 nt, Artificial Sequence
  Description of Artificial Sequence: Synthetic oligonucleotide
  Antisense strand to SEQ ID NO: 306890
aucccaaagauaauaugcu

SEQ ID NO: 306892 - RNA, 19 nt, Artificial Sequence
  Description of Artificial Sequence: Synthetic oligonucleotide
  Sense strand starting at position 805 of SEQ ID NO: 3942
gcauauuaucuuugggaug

SEQ ID NO: 306893 - RNA, 19 nt, Artificial Sequence
  Description of Artificial Sequence: Synthetic oligonucleotide
  Antisense strand to SEQ ID NO: 306892
caucccaaagauaauaugc

SEQ ID NO: 306894 - RNA, 19 nt, Artificial Sequence
  Description of Artificial Sequence: Synthetic oligonucleotide
  Sense strand starting at position 952 of SEQ ID NO: 3942
cuaggaagaugagaaauca

SEQ ID NO: 306895 - RNA, 19 nt, Artificial Sequence
  Description of Artificial Sequence: Synthetic oligonucleotide
  Antisense strand to SEQ ID NO: 306894
ugauuucucaucuuccuag

SEQ ID NO: 306896 - RNA, 19 nt, Artificial Sequence
  Description of Artificial Sequence: Synthetic oligonucleotide
  Sense strand starting at position 1316 of SEQ ID NO: 3942
gcaaguguucugucacugu

SEQ ID NO: 306897 - RNA, 19 nt, Artificial Sequence
  Description of Artificial Sequence: Synthetic oligonucleotide
  Antisense strand to SEQ ID NO: 306896
acagugacagaacacuugc

SEQ ID NO: 306898 - RNA, 19 nt, Artificial Sequence
  Description of Artificial Sequence: Synthetic oligonucleotide
  Sense strand starting at position 1352 of SEQ ID NO: 3942
agcaguugauucccuuaaa

SEQ ID NO: 306899 - RNA, 19 nt, Artificial Sequence
  Description of Artificial Sequence: Synthetic oligonucleotide
  Antisense strand to SEQ ID NO: 306898
uuuaagggaaucaacugcu

SEQ ID NO: 306900 - RNA, 19 nt, Artificial Sequence
  Description of Artificial Sequence: Synthetic oligonucleotide
  Sense strand starting at position 1413 of SEQ ID NO: 3942
gcuauucuuggugugcuua

SEQ ID NO: 306901 - RNA, 19 nt, Artificial Sequence
  Description of Artificial Sequence: Synthetic oligonucleotide
  Antisense strand to SEQ ID NO: 306900
uaagcacaccaagaauagc

SEQ ID NO: 306902 - RNA, 19 nt, Artificial Sequence
  Description of Artificial Sequence: Synthetic oligonucleotide
  Sense strand starting at position 1647 of SEQ ID NO: 3942
agauuuaaauaauggguca

SEQ ID NO: 306903 - RNA, 19 nt, Artificial Sequence
  Description of Artificial Sequence: Synthetic oligonucleotide
  Antisense strand to SEQ ID NO: 306902
ugacccauuauuuaaaucu

SEQ ID NO: 306904 - RNA, 19 nt, Artificial Sequence
  Description of Artificial Sequence: Synthetic oligonucleotide
  Sense strand starting at position 1895 of SEQ ID NO: 3942
gugagccucuaauccuaaa

SEQ ID NO: 306905 - RNA, 19 nt, Artificial Sequence
  Description of Artificial Sequence: Synthetic oligonucleotide
  Antisense strand to SEQ ID NO: 306904
uuuaggauuagaggcucac

SEQ ID NO: 306906 - RNA, 19 nt, Artificial Sequence
  Description of Artificial Sequence: Synthetic oligonucleotide
  Sense strand starting at position 2144 of SEQ ID NO: 3942
ucugauugacagugcuaaa

SEQ ID NO: 306907 - RNA, 19 nt, Artificial Sequence
  Description of Artificial Sequence: Synthetic oligonucleotide
  Antisense strand to SEQ ID NO: 306906
uuuagcacugucaaucaga

SEQ ID NO: 306908 - RNA, 19 nt, Artificial Sequence
  Description of Artificial Sequence: Synthetic oligonucleotide
  Sense strand starting at position 2209 of SEQ ID NO: 3942
aaagaauaacuguguugag

SEQ ID NO: 306909 - RNA, 19 nt, Artificial Sequence
  Description of Artificial Sequence: Synthetic oligonucleotide
  Antisense strand to SEQ ID NO: 306908
cucaacacaguuauucuuu

SEQ ID NO: 306910 - RNA, 19 nt, Artificial Sequence
  Description of Artificial Sequence: Synthetic oligonucleotide
  Sense strand starting at position 2219 of SEQ ID NO: 3942
uguguugaggcucagagaa

SEQ ID NO: 306911 - RNA, 19 nt, Artificial Sequence
  Description of Artificial Sequence: Synthetic oligonucleotide
  Antisense strand to SEQ ID NO: 306910
uucucugagccucaacaca

SEQ ID NO: 306912 - RNA, 19 nt, Artificial Sequence
  Description of Artificial Sequence: Synthetic oligonucleotide
  Sense strand starting at position 2272 of SEQ ID NO: 3942
cagguuuaaagagguguga

SEQ ID NO: 306913 - RNA, 19 nt, Artificial Sequence
  Description of Artificial Sequence: Synthetic oligonucleotide
  Antisense strand to SEQ ID NO: 306912
ucacaccucuuuaaaccug

SEQ ID NO: 306914 - RNA, 19 nt, Artificial Sequence
  Description of Artificial Sequence: Synthetic oligonucleotide
  Sense strand starting at position 2274 of SEQ ID NO: 3942
gguuuaaagaggugugaca

SEQ ID NO: 306915 - RNA, 19 nt, Artificial Sequence
  Description of Artificial Sequence: Synthetic oligonucleotide
  Antisense strand to SEQ ID NO: 306914
ugucacaccucuuuaaacc

SEQ ID NO: 306916 - RNA, 19 nt, Artificial Sequence
  Description of Artificial Sequence: Synthetic oligonucleotide
  Sense strand starting at position 2276 of SEQ ID NO: 3942
uuuaaagaggugugacagu

SEQ ID NO: 306917 - RNA, 19 nt, Artificial Sequence
  Description of Artificial Sequence: Synthetic oligonucleotide
  Antisense strand to SEQ ID NO: 306916
acugucacaccucuuuaaa

SEQ ID NO: 306918 - RNA, 19 nt, Artificial Sequence
  Description of Artificial Sequence: Synthetic oligonucleotide
  Sense strand starting at position 2425 of SEQ ID NO: 3942
ggaaauuuaucucaagcau

SEQ ID NO: 306919 - RNA, 19 nt, Artificial Sequence
  Description of Artificial Sequence: Synthetic oligonucleotide
  Antisense strand to SEQ ID NO: 306918
augcuugagauaaauuucc

SEQ ID NO: 306920 - RNA, 19 nt, Artificial Sequence
  Description of Artificial Sequence: Synthetic oligonucleotide
  Sense strand starting at position 2458 of SEQ ID NO: 3942
ucugaagaaucaguugcua

SEQ ID NO: 306921 - RNA, 19 nt, Artificial Sequence
  Description of Artificial Sequence: Synthetic oligonucleotide
  Antisense strand to SEQ ID NO: 306920
uagcaacugauucuucaga

SEQ ID NO: 306922 - RNA, 19 nt, Artificial Sequence
  Description of Artificial Sequence: Synthetic oligonucleotide
  Sense strand starting at position 2616 of SEQ ID NO: 3942
uggaacucugcuuagguua

SEQ ID NO: 306923 - RNA, 19 nt, Artificial Sequence
  Description of Artificial Sequence: Synthetic oligonucleotide
  Antisense strand to SEQ ID NO: 306922
uaaccuaagcagaguucca

SEQ ID NO: 306924 - RNA, 19 nt, Artificial Sequence
  Description of Artificial Sequence: Synthetic oligonucleotide
  Sense strand starting at position 2676 of SEQ ID NO: 3942
uuugucuggcauuaauauu

SEQ ID NO: 306925 - RNA, 19 nt, Artificial Sequence
  Description of Artificial Sequence: Synthetic oligonucleotide
  Antisense strand to SEQ ID NO: 306924
aauauuaaugccagacaaa

SEQ ID NO: 306926 - RNA, 19 nt, Artificial Sequence
  Description of Artificial Sequence: Synthetic oligonucleotide
  Sense strand starting at position 2823 of SEQ ID NO: 3942
guggauaggaggugauaua

SEQ ID NO: 306927 - RNA, 19 nt, Artificial Sequence
  Description of Artificial Sequence: Synthetic oligonucleotide
  Antisense strand to SEQ ID NO: 306926
uauaucaccuccuauccac

SEQ ID NO: 306928 - RNA, 19 nt, Artificial Sequence
  Description of Artificial Sequence: Synthetic oligonucleotide
  Sense strand starting at position 2940 of SEQ ID NO: 3942
gugaaacucuacuuagagg

SEQ ID NO: 306929 - RNA, 19 nt, Artificial Sequence
  Description of Artificial Sequence: Synthetic oligonucleotide
  Antisense strand to SEQ ID NO: 306928
ccucuaaguagaguuucac

SEQ ID NO: 306930 - RNA, 19 nt, Artificial Sequence
  Description of Artificial Sequence: Synthetic oligonucleotide
  Sense strand starting at position 2965 of SEQ ID NO: 3942
aauugucuuguugauaaug

SEQ ID NO: 306931 - RNA, 19 nt, Artificial Sequence
  Description of Artificial Sequence: Synthetic oligonucleotide
  Antisense strand to SEQ ID NO: 306930
cauuaucaacaagacaauu

SEQ ID NO: 306932 - RNA, 19 nt, Artificial Sequence
  Description of Artificial Sequence: Synthetic oligonucleotide
  Sense strand starting at position 3212 of SEQ ID NO: 3942
gacgccauguacuuauuua

SEQ ID NO: 306933 - RNA, 19 nt, Artificial Sequence
  Description of Artificial Sequence: Synthetic oligonucleotide
  Antisense strand to SEQ ID NO: 306932
uaaauaaguacauggcguc

SEQ ID NO: 306934 - RNA, 19 nt, Artificial Sequence
  Description of Artificial Sequence: Synthetic oligonucleotide
  Sense strand starting at position 3255 of SEQ ID NO: 3942
ggugguaucuguauuggug

SEQ ID NO: 306935 - RNA, 19 nt, Artificial Sequence
  Description of Artificial Sequence: Synthetic oligonucleotide
  Antisense strand to SEQ ID NO: 306934
caccaauacagauaccacc

SEQ ID NO: 306936 - RNA, 19 nt, Artificial Sequence
  Description of Artificial Sequence: Synthetic oligonucleotide
  Sense strand starting at position 3379 of SEQ ID NO: 3942
agagauuuguguuacaaag

SEQ ID NO: 306937 - RNA, 19 nt, Artificial Sequence
  Description of Artificial Sequence: Synthetic oligonucleotide
  Antisense strand to SEQ ID NO: 306936
cuuuguaacacaaaucucu

SEQ ID NO: 306938 - RNA, 19 nt, Artificial Sequence
  Description of Artificial Sequence: Synthetic oligonucleotide
  Sense strand starting at position 3381 of SEQ ID NO: 3942
agauuuguguuacaaagaa

SEQ ID NO: 306939 - RNA, 19 nt, Artificial Sequence
  Description of Artificial Sequence: Synthetic oligonucleotide
  Antisense strand to SEQ ID NO: 306938
uucuuuguaacacaaaucu

SEQ ID NO: 306940 - RNA, 19 nt, Artificial Sequence
  Description of Artificial Sequence: Synthetic oligonucleotide
  Sense strand starting at position 3425 of SEQ ID NO: 3942
acuagaaauguaugaucuu

SEQ ID NO: 306941 - RNA, 19 nt, Artificial Sequence
  Description of Artificial Sequence: Synthetic oligonucleotide
  Antisense strand to SEQ ID NO: 306940
aagaucauacauuucuagu

SEQ ID NO: 306942 - RNA, 19 nt, Artificial Sequence
  Description of Artificial Sequence: Synthetic oligonucleotide
  Sense strand starting at position 3428 of SEQ ID NO: 3942
agaaauguaugaucuuucu

SEQ ID NO: 306943 - RNA, 19 nt, Artificial Sequence
  Description of Artificial Sequence: Synthetic oligonucleotide
  Antisense strand to SEQ ID NO: 306942
agaaagaucauacauuucu

SEQ ID NO: 306944 - RNA, 19 nt, Artificial Sequence
  Description of Artificial Sequence: Synthetic oligonucleotide
  Sense strand starting at position 3652 of SEQ ID NO: 3942
gccugcgucaucuugacau

SEQ ID NO: 306945 - RNA, 19 nt, Artificial Sequence
  Description of Artificial Sequence: Synthetic oligonucleotide
  Antisense strand to SEQ ID NO: 306944
augucaagaugacgcaggc

SEQ ID NO: 306946 - RNA, 19 nt, Artificial Sequence
  Description of Artificial Sequence: Synthetic oligonucleotide
  Sense strand starting at position 3659 of SEQ ID NO: 3942
ucaucuugacaugaugcaa

SEQ ID NO: 306947 - RNA, 19 nt, Artificial Sequence
  Description of Artificial Sequence: Synthetic oligonucleotide
  Antisense strand to SEQ ID NO: 306946
uugcaucaugucaagauga

SEQ ID NO: 306948 - RNA, 19 nt, Artificial Sequence
  Description of Artificial Sequence: Synthetic oligonucleotide
  Sense strand starting at position 3702 of SEQ ID NO: 3942
gauggaccauauguuauaa

SEQ ID NO: 306949 - RNA, 19 nt, Artificial Sequence
  Description of Artificial Sequence: Synthetic oligonucleotide
  Antisense strand to SEQ ID NO: 306948
uuauaacauaugguccauc

SEQ ID NO: 306950 - RNA, 19 nt, Artificial Sequence
  Description of Artificial Sequence: Synthetic oligonucleotide
  Sense strand starting at position 3733 of SEQ ID NO: 3942
gugucuguccucuuaagcu

SEQ ID NO: 306951 - RNA, 19 nt, Artificial Sequence
  Description of Artificial Sequence: Synthetic oligonucleotide
  Antisense strand to SEQ ID NO: 306950
agcuuaagaggacagacac

SEQ ID NO: 306952 - RNA, 19 nt, Artificial Sequence
  Description of Artificial Sequence: Synthetic oligonucleotide
  Sense strand starting at position 35 of SEQ ID NO: 3943
gcuaguaaguucuagaggu

SEQ ID NO: 306953 - RNA, 19 nt, Artificial Sequence
  Description of Artificial Sequence: Synthetic oligonucleotide
  Antisense strand to SEQ ID NO: 306952
accucuagaacuuacuagc

SEQ ID NO: 306954 - RNA, 19 nt, Artificial Sequence
  Description of Artificial Sequence: Synthetic oligonucleotide
  Sense strand starting at position 37 of SEQ ID NO: 3943
uaguaaguucuagagguag

SEQ ID NO: 306955 - RNA, 19 nt, Artificial Sequence
  Description of Artificial Sequence: Synthetic oligonucleotide
  Antisense strand to SEQ ID NO: 306954
cuaccucuagaacuuacua

SEQ ID NO: 306956 - RNA, 19 nt, Artificial Sequence
  Description of Artificial Sequence: Synthetic oligonucleotide
  Sense strand starting at position 106 of SEQ ID NO: 3943
gaagccauguaaugucaau

SEQ ID NO: 306957 - RNA, 19 nt, Artificial Sequence
  Description of Artificial Sequence: Synthetic oligonucleotide
  Antisense strand to SEQ ID NO: 306956
auugacauuacauggcuuc

SEQ ID NO: 306958 - RNA, 19 nt, Artificial Sequence
  Description of Artificial Sequence: Synthetic oligonucleotide
  Sense strand starting at position 137 of SEQ ID NO: 3943
auuauagcccgucacagua

SEQ ID NO: 306959 - RNA, 19 nt, Artificial Sequence
  Description of Artificial Sequence: Synthetic oligonucleotide
  Antisense strand to SEQ ID NO: 306958
uacugugacgggcuauaau

SEQ ID NO: 306960 - RNA, 19 nt, Artificial Sequence
  Description of Artificial Sequence: Synthetic oligonucleotide
  Sense strand starting at position 182 of SEQ ID NO: 3943
uugauuauguccugaucaa

SEQ ID NO: 306961 - RNA, 19 nt, Artificial Sequence
  Description of Artificial Sequence: Synthetic oligonucleotide
  Antisense strand to SEQ ID NO: 306960
uugaucaggacauaaucaa

SEQ ID NO: 306962 - RNA, 19 nt, Artificial Sequence
  Description of Artificial Sequence: Synthetic oligonucleotide
  Sense strand starting at position 214 of SEQ ID NO: 3943
cggguuggguaaggaaaua

SEQ ID NO: 306963 - RNA, 19 nt, Artificial Sequence
  Description of Artificial Sequence: Synthetic oligonucleotide
  Antisense strand to SEQ ID NO: 306962
uauuuccuuacccaacccg

SEQ ID NO: 306964 - RNA, 19 nt, Artificial Sequence
  Description of Artificial Sequence: Synthetic oligonucleotide
  Sense strand starting at position 326 of SEQ ID NO: 3943
ccugcucugugcucucgaa

SEQ ID NO: 306965 - RNA, 19 nt, Artificial Sequence
  Description of Artificial Sequence: Synthetic oligonucleotide
  Antisense strand to SEQ ID NO: 306964
uucgagagcacagagcagg

SEQ ID NO: 306966 - RNA, 19 nt, Artificial Sequence
  Description of Artificial Sequence: Synthetic oligonucleotide
  Sense strand starting at position 343 of SEQ ID NO: 3943
aaggcugacccuugagaac

SEQ ID NO: 306967 - RNA, 19 nt, Artificial Sequence
  Description of Artificial Sequence: Synthetic oligonucleotide
  Antisense strand to SEQ ID NO: 306966
guucucaagggucagccuu

SEQ ID NO: 306968 - RNA, 19 nt, Artificial Sequence
  Description of Artificial Sequence: Synthetic oligonucleotide
  Sense strand starting at position 392 of SEQ ID NO: 3943
ucuugcugguuuggucaau

SEQ ID NO: 306969 - RNA, 19 nt, Artificial Sequence
  Description of Artificial Sequence: Synthetic oligonucleotide
  Antisense strand to SEQ ID NO: 306968
auugaccaaaccagcaaga

SEQ ID NO: 306970 - RNA, 19 nt, Artificial Sequence
  Description of Artificial Sequence: Synthetic oligonucleotide
  Sense strand starting at position 489 of SEQ ID NO: 3943
ugcugugggugaccugaau

SEQ ID NO: 306971 - RNA, 19 nt, Artificial Sequence
  Description of Artificial Sequence: Synthetic oligonucleotide
  Antisense strand to SEQ ID NO: 306970
auucaggucacccacagca

SEQ ID NO: 306972 - RNA, 19 nt, Artificial Sequence
  Description of Artificial Sequence: Synthetic oligonucleotide
  Sense strand starting at position 618 of SEQ ID NO: 3943
cgucauuagugcugggaca

SEQ ID NO: 306973 - RNA, 19 nt, Artificial Sequence
  Description of Artificial Sequence: Synthetic oligonucleotide
  Antisense strand to SEQ ID NO: 306972
ugucccagcacuaaugacg

SEQ ID NO: 306974 - RNA, 19 nt, Artificial Sequence
  Description of Artificial Sequence: Synthetic oligonucleotide
  Sense strand starting at position 620 of SEQ ID NO: 3943
ucauuagugcugggacacu

SEQ ID NO: 306975 - RNA, 19 nt, Artificial Sequence
  Description of Artificial Sequence: Synthetic oligonucleotide
  Antisense strand to SEQ ID NO: 306974
agugucccagcacuaauga

SEQ ID NO: 306976 - RNA, 19 nt, Artificial Sequence
  Description of Artificial Sequence: Synthetic oligonucleotide
  Sense strand starting at position 648 of SEQ ID NO: 3943
uuuggugguuucuuuaaac

SEQ ID NO: 306977 - RNA, 19 nt, Artificial Sequence
  Description of Artificial Sequence: Synthetic oligonucleotide
  Antisense strand to SEQ ID NO: 306976
guuuaaagaaaccaccaaa

SEQ ID NO: 306978 - RNA, 19 nt, Artificial Sequence
  Description of Artificial Sequence: Synthetic oligonucleotide
  Sense strand starting at position 1031 of SEQ ID NO: 3943
uugggaaucuguuauguua

SEQ ID NO: 306979 - RNA, 19 nt, Artificial Sequence
  Description of Artificial Sequence: Synthetic oligonucleotide
  Antisense strand to SEQ ID NO: 306978
uaacauaacagauucccaa

SEQ ID NO: 306980 - RNA, 19 nt, Artificial Sequence
  Description of Artificial Sequence: Synthetic oligonucleotide
  Sense strand starting at position 1033 of SEQ ID NO: 3943
gggaaucuguuauguuaau

SEQ ID NO: 306981 - RNA, 19 nt, Artificial Sequence
  Description of Artificial Sequence: Synthetic oligonucleotide
  Antisense strand to SEQ ID NO: 306980
auuaacauaacagauuccc

SEQ ID NO: 306982 - RNA, 19 nt, Artificial Sequence
  Description of Artificial Sequence: Synthetic oligonucleotide
  Sense strand starting at position 1034 of SEQ ID NO: 3943
ggaaucuguuauguuaaug

SEQ ID NO: 306983 - RNA, 19 nt, Artificial Sequence
  Description of Artificial Sequence: Synthetic oligonucleotide
  Antisense strand to SEQ ID NO: 306982
cauuaacauaacagauucc

SEQ ID NO: 306984 - RNA, 19 nt, Artificial Sequence
  Description of Artificial Sequence: Synthetic oligonucleotide
  Sense strand starting at position 1358 of SEQ ID NO: 3943
aacgguugccuuuagguga

SEQ ID NO: 306985 - RNA, 19 nt, Artificial Sequence
  Description of Artificial Sequence: Synthetic oligonucleotide
  Antisense strand to SEQ ID NO: 306984
ucaccuaaaggcaaccguu

SEQ ID NO: 306986 - RNA, 19 nt, Artificial Sequence
  Description of Artificial Sequence: Synthetic oligonucleotide
  Sense strand starting at position 1362 of SEQ ID NO: 3943
guugccuuuaggugaacaa

SEQ ID NO: 306987 - RNA, 19 nt, Artificial Sequence
  Description of Artificial Sequence: Synthetic oligonucleotide
  Antisense strand to SEQ ID NO: 306986
uuguucaccuaaaggcaac

SEQ ID NO: 306988 - RNA, 19 nt, Artificial Sequence
  Description of Artificial Sequence: Synthetic oligonucleotide
  Sense strand starting at position 1473 of SEQ ID NO: 3943
aguuguuucgaguagcaca

SEQ ID NO: 306989 - RNA, 19 nt, Artificial Sequence
  Description of Artificial Sequence: Synthetic oligonucleotide
  Antisense strand to SEQ ID NO: 306988
ugugcuacucgaaacaacu

SEQ ID NO: 306990 - RNA, 19 nt, Artificial Sequence
  Description of Artificial Sequence: Synthetic oligonucleotide
  Sense strand starting at position 1985 of SEQ ID NO: 3943
cugauuggccauugcucaa

SEQ ID NO: 306991 - RNA, 19 nt, Artificial Sequence
  Description of Artificial Sequence: Synthetic oligonucleotide
  Antisense strand to SEQ ID NO: 306990
uugagcaauggccaaucag

SEQ ID NO: 306992 - RNA, 19 nt, Artificial Sequence
  Description of Artificial Sequence: Synthetic oligonucleotide
  Sense strand starting at position 1992 of SEQ ID NO: 3943
gccauugcucaacaugugu

SEQ ID NO: 306993 - RNA, 19 nt, Artificial Sequence
  Description of Artificial Sequence: Synthetic oligonucleotide
  Antisense strand to SEQ ID NO: 306992
acacauguugagcaauggc

SEQ ID NO: 306994 - RNA, 19 nt, Artificial Sequence
  Description of Artificial Sequence: Synthetic oligonucleotide
  Sense strand starting at position 2019 of SEQ ID NO: 3943
cgcucucugauuggaugua

SEQ ID NO: 306995 - RNA, 19 nt, Artificial Sequence
  Description of Artificial Sequence: Synthetic oligonucleotide
  Antisense strand to SEQ ID NO: 306994
uacauccaaucagagagcg

SEQ ID NO: 306996 - RNA, 19 nt, Artificial Sequence
  Description of Artificial Sequence: Synthetic oligonucleotide
  Sense strand starting at position 2099 of SEQ ID NO: 3943
gugucuucugaccaggguu

SEQ ID NO: 306997 - RNA, 19 nt, Artificial Sequence
  Description of Artificial Sequence: Synthetic oligonucleotide
  Antisense strand to SEQ ID NO: 306996
aacccuggucagaagacac

SEQ ID NO: 306998 - RNA, 19 nt, Artificial Sequence
  Description of Artificial Sequence: Synthetic oligonucleotide
  Sense strand starting at position 2139 of SEQ ID NO: 3943
cugugggucgcggaacauu

SEQ ID NO: 306999 - RNA, 19 nt, Artificial Sequence
  Description of Artificial Sequence: Synthetic oligonucleotide
  Antisense strand to SEQ ID NO: 306998
aauguuccgcgacccacag

SEQ ID NO: 307000 - RNA, 19 nt, Artificial Sequence
  Description of Artificial Sequence: Synthetic oligonucleotide
  Sense strand starting at position 3052 of SEQ ID NO: 3943
gggccaaguuugagaagug

SEQ ID NO: 307001 - RNA, 19 nt, Artificial Sequence
  Description of Artificial Sequence: Synthetic oligonucleotide
  Antisense strand to SEQ ID NO: 307000
cacuucucaaacuuggccc

SEQ ID NO: 307002 - RNA, 19 nt, Artificial Sequence
  Description of Artificial Sequence: Synthetic oligonucleotide
  Sense strand starting at position 3078 of SEQ ID NO: 3943
ggagaugcaaguugucuua

SEQ ID NO: 307003 - RNA, 19 nt, Artificial Sequence
  Description of Artificial Sequence: Synthetic oligonucleotide
  Antisense strand to SEQ ID NO: 307002
uaagacaacuugcaucucc

SEQ ID NO: 307004 - RNA, 19 nt, Artificial Sequence
  Description of Artificial Sequence: Synthetic oligonucleotide
  Sense strand starting at position 3080 of SEQ ID NO: 3943
agaugcaaguugucuuaau

SEQ ID NO: 307005 - RNA, 19 nt, Artificial Sequence
  Description of Artificial Sequence: Synthetic oligonucleotide
  Antisense strand to SEQ ID NO: 307004
auuaagacaacuugcaucu

SEQ ID NO: 307006 - RNA, 19 nt, Artificial Sequence
  Description of Artificial Sequence: Synthetic oligonucleotide
  Sense strand starting at position 3081 of SEQ ID NO: 3943
gaugcaaguugucuuaaua

SEQ ID NO: 307007 - RNA, 19 nt, Artificial Sequence
  Description of Artificial Sequence: Synthetic oligonucleotide
  Antisense strand to SEQ ID NO: 307006
uauuaagacaacuugcauc

SEQ ID NO: 307008 - RNA, 19 nt, Artificial Sequence
  Description of Artificial Sequence: Synthetic oligonucleotide
  Sense strand starting at position 3094 of SEQ ID NO: 3943
uuaauauauuggcagcagu

SEQ ID NO: 307009 - RNA, 19 nt, Artificial Sequence
  Description of Artificial Sequence: Synthetic oligonucleotide
  Antisense strand to SEQ ID NO: 307008
acugcugccaauauauuaa

SEQ ID NO: 307010 - RNA, 19 nt, Artificial Sequence
  Description of Artificial Sequence: Synthetic oligonucleotide
  Sense strand starting at position 3097 of SEQ ID NO: 3943
auauauuggcagcaguuau

SEQ ID NO: 307011 - RNA, 19 nt, Artificial Sequence
  Description of Artificial Sequence: Synthetic oligonucleotide
  Antisense strand to SEQ ID NO: 307010
auaacugcugccaauauau

SEQ ID NO: 307012 - RNA, 19 nt, Artificial Sequence
  Description of Artificial Sequence: Synthetic oligonucleotide
  Sense strand starting at position 3182 of SEQ ID NO: 3943
gaagaagucuugcuguguu

SEQ ID NO: 307013 - RNA, 19 nt, Artificial Sequence
  Description of Artificial Sequence: Synthetic oligonucleotide
  Antisense strand to SEQ ID NO: 307012
aacacagcaagacuucuuc

SEQ ID NO: 307014 - RNA, 19 nt, Artificial Sequence
  Description of Artificial Sequence: Synthetic oligonucleotide
  Sense strand starting at position 3252 of SEQ ID NO: 3943
ggccuagccugaggaauuu

SEQ ID NO: 307015 - RNA, 19 nt, Artificial Sequence
  Description of Artificial Sequence: Synthetic oligonucleotide
  Antisense strand to SEQ ID NO: 307014
aaauuccucaggcuaggcc

SEQ ID NO: 307016 - RNA, 19 nt, Artificial Sequence
  Description of Artificial Sequence: Synthetic oligonucleotide
  Sense strand starting at position 3285 of SEQ ID NO: 3943
uaagcuauuuauuggguca

SEQ ID NO: 307017 - RNA, 19 nt, Artificial Sequence
  Description of Artificial Sequence: Synthetic oligonucleotide
  Antisense strand to SEQ ID NO: 307016
ugacccaauaaauagcuua

SEQ ID NO: 307018 - RNA, 19 nt, Artificial Sequence
  Description of Artificial Sequence: Synthetic oligonucleotide
  Sense strand starting at position 3906 of SEQ ID NO: 3943
gcuauuuauugucucuaca

SEQ ID NO: 307019 - RNA, 19 nt, Artificial Sequence
  Description of Artificial Sequence: Synthetic oligonucleotide
  Antisense strand to SEQ ID NO: 307018
uguagagacaauaaauagc

SEQ ID NO: 307020 - RNA, 19 nt, Artificial Sequence
  Description of Artificial Sequence: Synthetic oligonucleotide
  Sense strand starting at position 3916 of SEQ ID NO: 3943
gucucuacauugucuacau

SEQ ID NO: 307021 - RNA, 19 nt, Artificial Sequence
  Description of Artificial Sequence: Synthetic oligonucleotide
  Antisense strand to SEQ ID NO: 307020
auguagacaauguagagac

SEQ ID NO: 307022 - RNA, 19 nt, Artificial Sequence
  Description of Artificial Sequence: Synthetic oligonucleotide
  Sense strand starting at position 3928 of SEQ ID NO: 3943
ucuacauugucuuugguau

SEQ ID NO: 307023 - RNA, 19 nt, Artificial Sequence
  Description of Artificial Sequence: Synthetic oligonucleotide
  Antisense strand to SEQ ID NO: 307022
auaccaaagacaauguaga

SEQ ID NO: 307024 - RNA, 19 nt, Artificial Sequence
  Description of Artificial Sequence: Synthetic oligonucleotide
  Sense strand starting at position 3929 of SEQ ID NO: 3943
cuacauugucuuugguauc

SEQ ID NO: 307025 - RNA, 19 nt, Artificial Sequence
  Description of Artificial Sequence: Synthetic oligonucleotide
  Antisense strand to SEQ ID NO: 307024
gauaccaaagacaauguag

SEQ ID NO: 307026 - RNA, 19 nt, Artificial Sequence
  Description of Artificial Sequence: Synthetic oligonucleotide
  Sense strand starting at position 3935 of SEQ ID NO: 3943
ugucuuugguaucacaaau

SEQ ID NO: 307027 - RNA, 19 nt, Artificial Sequence
  Description of Artificial Sequence: Synthetic oligonucleotide
  Antisense strand to SEQ ID NO: 307026
auuugugauaccaaagaca

SEQ ID NO: 307028 - RNA, 19 nt, Artificial Sequence
  Description of Artificial Sequence: Synthetic oligonucleotide
  Sense strand starting at position 47 of SEQ ID NO: 3944
guuagugacugaucccuuu

SEQ ID NO: 307029 - RNA, 19 nt, Artificial Sequence
  Description of Artificial Sequence: Synthetic oligonucleotide
  Antisense strand to SEQ ID NO: 307028
aaagggaucagucacuaac

SEQ ID NO: 307030 - RNA, 19 nt, Artificial Sequence
  Description of Artificial Sequence: Synthetic oligonucleotide
  Sense strand starting at position 50 of SEQ ID NO: 3944
agugacugaucccuuuauc

SEQ ID NO: 307031 - RNA, 19 nt, Artificial Sequence
  Description of Artificial Sequence: Synthetic oligonucleotide
  Antisense strand to SEQ ID NO: 307030
gauaaagggaucagucacu

SEQ ID NO: 307032 - RNA, 19 nt, Artificial Sequence
  Description of Artificial Sequence: Synthetic oligonucleotide
  Sense strand starting at position 53 of SEQ ID NO: 3944
gacugaucccuuuaucgcu

SEQ ID NO: 307033 - RNA, 19 nt, Artificial Sequence
  Description of Artificial Sequence: Synthetic oligonucleotide
  Antisense strand to SEQ ID NO: 307032
agcgauaaagggaucaguc

SEQ ID NO: 307034 - RNA, 19 nt, Artificial Sequence
  Description of Artificial Sequence: Synthetic oligonucleotide
  Sense strand starting at position 58 of SEQ ID NO: 3944
aucccuuuaucgcugugaa

SEQ ID NO: 307035 - RNA, 19 nt, Artificial Sequence
  Description of Artificial Sequence: Synthetic oligonucleotide
  Antisense strand to SEQ ID NO: 307034
uucacagcgauaaagggau

SEQ ID NO: 307036 - RNA, 19 nt, Artificial Sequence
  Description of Artificial Sequence: Synthetic oligonucleotide
  Sense strand starting at position 59 of SEQ ID NO: 3944
ucccuuuaucgcugugaaa

SEQ ID NO: 307037 - RNA, 19 nt, Artificial Sequence
  Description of Artificial Sequence: Synthetic oligonucleotide
  Antisense strand to SEQ ID NO: 307036
uuucacagcgauaaaggga

SEQ ID NO: 307038 - RNA, 19 nt, Artificial Sequence
  Description of Artificial Sequence: Synthetic oligonucleotide
  Sense strand starting at position 103 of SEQ ID NO: 3944
uaguaaguucuagaaguag

SEQ ID NO: 307039 - RNA, 19 nt, Artificial Sequence
  Description of Artificial Sequence: Synthetic oligonucleotide
  Antisense strand to SEQ ID NO: 307038
cuacuucuagaacuuacua

SEQ ID NO: 307040 - RNA, 19 nt, Artificial Sequence
  Description of Artificial Sequence: Synthetic oligonucleotide
  Sense strand starting at position 203 of SEQ ID NO: 3944
auuauagcccgucacagua

SEQ ID NO: 307041 - RNA, 19 nt, Artificial Sequence
  Description of Artificial Sequence: Synthetic oligonucleotide
  Antisense strand to SEQ ID NO: 307040
uacugugacgggcuauaau

SEQ ID NO: 307042 - RNA, 19 nt, Artificial Sequence
  Description of Artificial Sequence: Synthetic oligonucleotide
  Sense strand starting at position 248 of SEQ ID NO: 3944
uugauuauguccugaucaa

SEQ ID NO: 307043 - RNA, 19 nt, Artificial Sequence
  Description of Artificial Sequence: Synthetic oligonucleotide
  Antisense strand to SEQ ID NO: 307042
uugaucaggacauaaucaa

SEQ ID NO: 307044 - RNA, 19 nt, Artificial Sequence
  Description of Artificial Sequence: Synthetic oligonucleotide
  Sense strand starting at position 280 of SEQ ID NO: 3944
cggguuggguaaggaaaua

SEQ ID NO: 307045 - RNA, 19 nt, Artificial Sequence
  Description of Artificial Sequence: Synthetic oligonucleotide
  Antisense strand to SEQ ID NO: 307044
uauuuccuuacccaacccg

SEQ ID NO: 307046 - RNA, 19 nt, Artificial Sequence
  Description of Artificial Sequence: Synthetic oligonucleotide
  Sense strand starting at position 392 of SEQ ID NO: 3944
ccugcucugugcucucgaa

SEQ ID NO: 307047 - RNA, 19 nt, Artificial Sequence
  Description of Artificial Sequence: Synthetic oligonucleotide
  Antisense strand to SEQ ID NO: 307046
uucgagagcacagagcagg

SEQ ID NO: 307048 - RNA, 19 nt, Artificial Sequence
  Description of Artificial Sequence: Synthetic oligonucleotide
  Sense strand starting at position 409 of SEQ ID NO: 3944
aaggcugacccuugagaac

SEQ ID NO: 307049 - RNA, 19 nt, Artificial Sequence
  Description of Artificial Sequence: Synthetic oligonucleotide
  Antisense strand to SEQ ID NO: 307048
guucucaagggucagccuu

SEQ ID NO: 307050 - RNA, 19 nt, Artificial Sequence
  Description of Artificial Sequence: Synthetic oligonucleotide
  Sense strand starting at position 556 of SEQ ID NO: 3944
ugcugugggugaccugaau

SEQ ID NO: 307051 - RNA, 19 nt, Artificial Sequence
  Description of Artificial Sequence: Synthetic oligonucleotide
  Antisense strand to SEQ ID NO: 307050
auucaggucacccacagca

SEQ ID NO: 307052 - RNA, 19 nt, Artificial Sequence
  Description of Artificial Sequence: Synthetic oligonucleotide
  Sense strand starting at position 675 of SEQ ID NO: 3944
uguaauggcucccagacau

SEQ ID NO: 307053 - RNA, 19 nt, Artificial Sequence
  Description of Artificial Sequence: Synthetic oligonucleotide
  Antisense strand to SEQ ID NO: 307052
augucugggagccauuaca

SEQ ID NO: 307054 - RNA, 19 nt, Artificial Sequence
  Description of Artificial Sequence: Synthetic oligonucleotide
  Sense strand starting at position 848 of SEQ ID NO: 3944
agucccugucccuaugaaa

SEQ ID NO: 307055 - RNA, 19 nt, Artificial Sequence
  Description of Artificial Sequence: Synthetic oligonucleotide
  Antisense strand to SEQ ID NO: 307054
uuucauagggacagggacu

SEQ ID NO: 307056 - RNA, 19 nt, Artificial Sequence
  Description of Artificial Sequence: Synthetic oligonucleotide
  Sense strand starting at position 1011 of SEQ ID NO: 3944
gcauuuauugagugcuguc

SEQ ID NO: 307057 - RNA, 19 nt, Artificial Sequence
  Description of Artificial Sequence: Synthetic oligonucleotide
  Antisense strand to SEQ ID NO: 307056
gacagcacucaauaaaugc

SEQ ID NO: 307058 - RNA, 19 nt, Artificial Sequence
  Description of Artificial Sequence: Synthetic oligonucleotide
  Sense strand starting at position 1121 of SEQ ID NO: 3944
uugggaaucuguuauguua

SEQ ID NO: 307059 - RNA, 19 nt, Artificial Sequence
  Description of Artificial Sequence: Synthetic oligonucleotide
  Antisense strand to SEQ ID NO: 307058
uaacauaacagauucccaa

SEQ ID NO: 307060 - RNA, 19 nt, Artificial Sequence
  Description of Artificial Sequence: Synthetic oligonucleotide
  Sense strand starting at position 1124 of SEQ ID NO: 3944
ggaaucuguuauguuaaug

SEQ ID NO: 307061 - RNA, 19 nt, Artificial Sequence
  Description of Artificial Sequence: Synthetic oligonucleotide
  Antisense strand to SEQ ID NO: 307060
cauuaacauaacagauucc

SEQ ID NO: 307062 - RNA, 19 nt, Artificial Sequence
  Description of Artificial Sequence: Synthetic oligonucleotide
  Sense strand starting at position 1448 of SEQ ID NO: 3944
aacgguugccuuuagguga

SEQ ID NO: 307063 - RNA, 19 nt, Artificial Sequence
  Description of Artificial Sequence: Synthetic oligonucleotide
  Antisense strand to SEQ ID NO: 307062
ucaccuaaaggcaaccguu

SEQ ID NO: 307064 - RNA, 19 nt, Artificial Sequence
  Description of Artificial Sequence: Synthetic oligonucleotide
  Sense strand starting at position 1452 of SEQ ID NO: 3944
guugccuuuaggugaacaa

SEQ ID NO: 307065 - RNA, 19 nt, Artificial Sequence
  Description of Artificial Sequence: Synthetic oligonucleotide
  Antisense strand to SEQ ID NO: 307064
uuguucaccuaaaggcaac

SEQ ID NO: 307066 - RNA, 19 nt, Artificial Sequence
  Description of Artificial Sequence: Synthetic oligonucleotide
  Sense strand starting at position 1563 of SEQ ID NO: 3944
agcuguuuccaguagcaca

SEQ ID NO: 307067 - RNA, 19 nt, Artificial Sequence
  Description of Artificial Sequence: Synthetic oligonucleotide
  Antisense strand to SEQ ID NO: 307066
ugugcuacuggaaacagcu

SEQ ID NO: 307068 - RNA, 19 nt, Artificial Sequence
  Description of Artificial Sequence: Synthetic oligonucleotide
  Sense strand starting at position 1651 of SEQ ID NO: 3944
acgggauaccgucaauggu

SEQ ID NO: 307069 - RNA, 19 nt, Artificial Sequence
  Description of Artificial Sequence: Synthetic oligonucleotide
  Antisense strand to SEQ ID NO: 307068
accauugacgguaucccgu

SEQ ID NO: 307070 - RNA, 19 nt, Artificial Sequence
  Description of Artificial Sequence: Synthetic oligonucleotide
  Sense strand starting at position 1877 of SEQ ID NO: 3944
gggagugacccgggucuua

SEQ ID NO: 307071 - RNA, 19 nt, Artificial Sequence
  Description of Artificial Sequence: Synthetic oligonucleotide
  Antisense strand to SEQ ID NO: 307070
uaagacccgggucacuccc

SEQ ID NO: 307072 - RNA, 19 nt, Artificial Sequence
  Description of Artificial Sequence: Synthetic oligonucleotide
  Sense strand starting at position 1887 of SEQ ID NO: 3944
cgggucuuaccauggcgaa

SEQ ID NO: 307073 - RNA, 19 nt, Artificial Sequence
  Description of Artificial Sequence: Synthetic oligonucleotide
  Antisense strand to SEQ ID NO: 307072
uucgccaugguaagacccg

SEQ ID NO: 307074 - RNA, 19 nt, Artificial Sequence
  Description of Artificial Sequence: Synthetic oligonucleotide
  Sense strand starting at position 2076 of SEQ ID NO: 3944
cugauuggccguugcucaa

SEQ ID NO: 307075 - RNA, 19 nt, Artificial Sequence
  Description of Artificial Sequence: Synthetic oligonucleotide
  Antisense strand to SEQ ID NO: 307074
uugagcaacggccaaucag

SEQ ID NO: 307076 - RNA, 19 nt, Artificial Sequence
  Description of Artificial Sequence: Synthetic oligonucleotide
  Sense strand starting at position 2189 of SEQ ID NO: 3944
gugucuuccgaccaggauu

SEQ ID NO: 307077 - RNA, 19 nt, Artificial Sequence
  Description of Artificial Sequence: Synthetic oligonucleotide
  Antisense strand to SEQ ID NO: 307076
aauccuggucggaagacac

SEQ ID NO: 307078 - RNA, 19 nt, Artificial Sequence
  Description of Artificial Sequence: Synthetic oligonucleotide
  Sense strand starting at position 2229 of SEQ ID NO: 3944
cugugggucgcggaacauu

SEQ ID NO: 307079 - RNA, 19 nt, Artificial Sequence
  Description of Artificial Sequence: Synthetic oligonucleotide
  Antisense strand to SEQ ID NO: 307078
aauguuccgcgacccacag

SEQ ID NO: 307080 - RNA, 19 nt, Artificial Sequence
  Description of Artificial Sequence: Synthetic oligonucleotide
  Sense strand starting at position 2538 of SEQ ID NO: 3944
ucaagaguucccgagacca

SEQ ID NO: 307081 - RNA, 19 nt, Artificial Sequence
  Description of Artificial Sequence: Synthetic oligonucleotide
  Antisense strand to SEQ ID NO: 307080
uggucucgggaacucuuga

SEQ ID NO: 307082 - RNA, 19 nt, Artificial Sequence
  Description of Artificial Sequence: Synthetic oligonucleotide
  Sense strand starting at position 2813 of SEQ ID NO: 3944
ccagcucaugccuguaauu

SEQ ID NO: 307083 - RNA, 19 nt, Artificial Sequence
  Description of Artificial Sequence: Synthetic oligonucleotide
  Antisense strand to SEQ ID NO: 307082
aauuacaggcaugagcugg

SEQ ID NO: 307084 - RNA, 19 nt, Artificial Sequence
  Description of Artificial Sequence: Synthetic oligonucleotide
  Sense strand starting at position 3110 of SEQ ID NO: 3944
gggccaaguuugagaagug

SEQ ID NO: 307085 - RNA, 19 nt, Artificial Sequence
  Description of Artificial Sequence: Synthetic oligonucleotide
  Antisense strand to SEQ ID NO: 307084
cacuucucaaacuuggccc

SEQ ID NO: 307086 - RNA, 19 nt, Artificial Sequence
  Description of Artificial Sequence: Synthetic oligonucleotide
  Sense strand starting at position 3136 of SEQ ID NO: 3944
ggagaugcaaguugucuua

SEQ ID NO: 307087 - RNA, 19 nt, Artificial Sequence
  Description of Artificial Sequence: Synthetic oligonucleotide
  Antisense strand to SEQ ID NO: 307086
uaagacaacuugcaucucc

SEQ ID NO: 307088 - RNA, 19 nt, Artificial Sequence
  Description of Artificial Sequence: Synthetic oligonucleotide
  Sense strand starting at position 3138 of SEQ ID NO: 3944
agaugcaaguugucuuaaa

SEQ ID NO: 307089 - RNA, 19 nt, Artificial Sequence
  Description of Artificial Sequence: Synthetic oligonucleotide
  Antisense strand to SEQ ID NO: 307088
uuuaagacaacuugcaucu

SEQ ID NO: 307090 - RNA, 19 nt, Artificial Sequence
  Description of Artificial Sequence: Synthetic oligonucleotide
  Sense strand starting at position 3165 of SEQ ID NO: 3944
agcaguuauaaguggguuu

SEQ ID NO: 307091 - RNA, 19 nt, Artificial Sequence
  Description of Artificial Sequence: Synthetic oligonucleotide
  Antisense strand to SEQ ID NO: 307090
aaacccacuuauaacugcu

SEQ ID NO: 307092 - RNA, 19 nt, Artificial Sequence
  Description of Artificial Sequence: Synthetic oligonucleotide
  Sense strand starting at position 3236 of SEQ ID NO: 3944
agagaagucuugcuguguu

SEQ ID NO: 307093 - RNA, 19 nt, Artificial Sequence
  Description of Artificial Sequence: Synthetic oligonucleotide
  Antisense strand to SEQ ID NO: 307092
aacacagcaagacuucucu

SEQ ID NO: 307094 - RNA, 19 nt, Artificial Sequence
  Description of Artificial Sequence: Synthetic oligonucleotide
  Sense strand starting at position 3304 of SEQ ID NO: 3944
cuggccuagccugaggaau

SEQ ID NO: 307095 - RNA, 19 nt, Artificial Sequence
  Description of Artificial Sequence: Synthetic oligonucleotide
  Antisense strand to SEQ ID NO: 307094
auuccucaggcuaggccag

SEQ ID NO: 307096 - RNA, 19 nt, Artificial Sequence
  Description of Artificial Sequence: Synthetic oligonucleotide
  Sense strand starting at position 3306 of SEQ ID NO: 3944
ggccuagccugaggaauuu

SEQ ID NO: 307097 - RNA, 19 nt, Artificial Sequence
  Description of Artificial Sequence: Synthetic oligonucleotide
  Antisense strand to SEQ ID NO: 307096
aaauuccucaggcuaggcc

SEQ ID NO: 307098 - RNA, 19 nt, Artificial Sequence
  Description of Artificial Sequence: Synthetic oligonucleotide
  Sense strand starting at position 3945 of SEQ ID NO: 3944
gcuauuuauugucucuaca

SEQ ID NO: 307099 - RNA, 19 nt, Artificial Sequence
  Description of Artificial Sequence: Synthetic oligonucleotide
  Antisense strand to SEQ ID NO: 307098
uguagagacaauaaauagc

SEQ ID NO: 307100 - RNA, 19 nt, Artificial Sequence
  Description of Artificial Sequence: Synthetic oligonucleotide
  Sense strand starting at position 3955 of SEQ ID NO: 3944
gucucuacauugucuacau

SEQ ID NO: 307101 - RNA, 19 nt, Artificial Sequence
  Description of Artificial Sequence: Synthetic oligonucleotide
  Antisense strand to SEQ ID NO: 307100
auguagacaauguagagac

SEQ ID NO: 307102 - RNA, 19 nt, Artificial Sequence
  Description of Artificial Sequence: Synthetic oligonucleotide
  Sense strand starting at position 3967 of SEQ ID NO: 3944
ucuacauugucuuugguau

SEQ ID NO: 307103 - RNA, 19 nt, Artificial Sequence
  Description of Artificial Sequence: Synthetic oligonucleotide
  Antisense strand to SEQ ID NO: 307102
auaccaaagacaauguaga

SEQ ID NO: 307104 - RNA, 19 nt, Artificial Sequence
  Description of Artificial Sequence: Synthetic oligonucleotide
  Sense strand starting at position 3968 of SEQ ID NO: 3944
cuacauugucuuugguauc

SEQ ID NO: 307105 - RNA, 19 nt, Artificial Sequence
  Description of Artificial Sequence: Synthetic oligonucleotide
  Antisense strand to SEQ ID NO: 307104
gauaccaaagacaauguag

SEQ ID NO: 307106 - RNA, 19 nt, Artificial Sequence
  Description of Artificial Sequence: Synthetic oligonucleotide
  Sense strand starting at position 3974 of SEQ ID NO: 3944
ugucuuugguaucacaaau

SEQ ID NO: 307107 - RNA, 19 nt, Artificial Sequence
  Description of Artificial Sequence: Synthetic oligonucleotide
  Antisense strand to SEQ ID NO: 307106
auuugugauaccaaagaca

SEQ ID NO: 307108 - RNA, 19 nt, Artificial Sequence
  Description of Artificial Sequence: Synthetic oligonucleotide
  Sense strand starting at position 5 of SEQ ID NO: 3946
gggagaagcuuugagucau

SEQ ID NO: 307109 - RNA, 19 nt, Artificial Sequence
  Description of Artificial Sequence: Synthetic oligonucleotide
  Antisense strand to SEQ ID NO: 307108
augacucaaagcuucuccc

SEQ ID NO: 307110 - RNA, 19 nt, Artificial Sequence
  Description of Artificial Sequence: Synthetic oligonucleotide
  Sense strand starting at position 164 of SEQ ID NO: 3946
uggucuugucacugggcau

SEQ ID NO: 307111 - RNA, 19 nt, Artificial Sequence
  Description of Artificial Sequence: Synthetic oligonucleotide
  Antisense strand to SEQ ID NO: 307110
augcccagugacaagacca

SEQ ID NO: 307112 - RNA, 19 nt, Artificial Sequence
  Description of Artificial Sequence: Synthetic oligonucleotide
  Sense strand starting at position 193 of SEQ ID NO: 3946
ggcugaaucccauguucca

SEQ ID NO: 307113 - RNA, 19 nt, Artificial Sequence
  Description of Artificial Sequence: Synthetic oligonucleotide
  Antisense strand to SEQ ID NO: 307112
uggaacaugggauucagcc

SEQ ID NO: 307114 - RNA, 19 nt, Artificial Sequence
  Description of Artificial Sequence: Synthetic oligonucleotide
  Sense strand starting at position 274 of SEQ ID NO: 3946
augcauucacgcugaggga

SEQ ID NO: 307115 - RNA, 19 nt, Artificial Sequence
  Description of Artificial Sequence: Synthetic oligonucleotide
  Antisense strand to SEQ ID NO: 307114
ucccucagcgugaaugcau

SEQ ID NO: 307116 - RNA, 19 nt, Artificial Sequence
  Description of Artificial Sequence: Synthetic oligonucleotide
  Sense strand starting at position 275 of SEQ ID NO: 3946
ugcauucacgcugagggau

SEQ ID NO: 307117 - RNA, 19 nt, Artificial Sequence
  Description of Artificial Sequence: Synthetic oligonucleotide
  Antisense strand to SEQ ID NO: 307116
aucccucagcgugaaugca

SEQ ID NO: 307118 - RNA, 19 nt, Artificial Sequence
  Description of Artificial Sequence: Synthetic oligonucleotide
  Sense strand starting at position 377 of SEQ ID NO: 3946
ggaugacucaguuggcaag

SEQ ID NO: 307119 - RNA, 19 nt, Artificial Sequence
  Description of Artificial Sequence: Synthetic oligonucleotide
  Antisense strand to SEQ ID NO: 307118
cuugccaacugagucaucc

SEQ ID NO: 307120 - RNA, 19 nt, Artificial Sequence
  Description of Artificial Sequence: Synthetic oligonucleotide
  Sense strand starting at position 563 of SEQ ID NO: 3946
guuuccuagagguaugggu

SEQ ID NO: 307121 - RNA, 19 nt, Artificial Sequence
  Description of Artificial Sequence: Synthetic oligonucleotide
  Antisense strand to SEQ ID NO: 307120
acccauaccucuaggaaac

SEQ ID NO: 307122 - RNA, 19 nt, Artificial Sequence
  Description of Artificial Sequence: Synthetic oligonucleotide
  Sense strand starting at position 565 of SEQ ID NO: 3946
uuccuagagguauggguuu

SEQ ID NO: 307123 - RNA, 19 nt, Artificial Sequence
  Description of Artificial Sequence: Synthetic oligonucleotide
  Antisense strand to SEQ ID NO: 307122
aaacccauaccucuaggaa

SEQ ID NO: 307124 - RNA, 19 nt, Artificial Sequence
  Description of Artificial Sequence: Synthetic oligonucleotide
  Sense strand starting at position 571 of SEQ ID NO: 3946
gagguauggguuuacagcu

SEQ ID NO: 307125 - RNA, 19 nt, Artificial Sequence
  Description of Artificial Sequence: Synthetic oligonucleotide
  Antisense strand to SEQ ID NO: 307124
agcuguaaacccauaccuc

SEQ ID NO: 307126 - RNA, 19 nt, Artificial Sequence
  Description of Artificial Sequence: Synthetic oligonucleotide
  Sense strand starting at position 614 of SEQ ID NO: 3946
auuauuugcuuugaguaug

SEQ ID NO: 307127 - RNA, 19 nt, Artificial Sequence
  Description of Artificial Sequence: Synthetic oligonucleotide
  Antisense strand to SEQ ID NO: 307126
cauacucaaagcaaauaau

SEQ ID NO: 307128 - RNA, 19 nt, Artificial Sequence
  Description of Artificial Sequence: Synthetic oligonucleotide
  Sense strand starting at position 860 of SEQ ID NO: 3946
cggaaauagcggcgguaau

SEQ ID NO: 307129 - RNA, 19 nt, Artificial Sequence
  Description of Artificial Sequence: Synthetic oligonucleotide
  Antisense strand to SEQ ID NO: 307128
auuaccgccgcuauuuccg

SEQ ID NO: 307130 - RNA, 19 nt, Artificial Sequence
  Description of Artificial Sequence: Synthetic oligonucleotide
  Sense strand starting at position 871 of SEQ ID NO: 3946
gcgguaaugcuuguaagcu

SEQ ID NO: 307131 - RNA, 19 nt, Artificial Sequence
  Description of Artificial Sequence: Synthetic oligonucleotide
  Antisense strand to SEQ ID NO: 307130
agcuuacaagcauuaccgc

SEQ ID NO: 307132 - RNA, 19 nt, Artificial Sequence
  Description of Artificial Sequence: Synthetic oligonucleotide
  Sense strand starting at position 875 of SEQ ID NO: 3946
uaaugcuuguaagcucaga

SEQ ID NO: 307133 - RNA, 19 nt, Artificial Sequence
  Description of Artificial Sequence: Synthetic oligonucleotide
  Antisense strand to SEQ ID NO: 307132
ucugagcuuacaagcauua

SEQ ID NO: 307134 - RNA, 19 nt, Artificial Sequence
  Description of Artificial Sequence: Synthetic oligonucleotide
  Sense strand starting at position 953 of SEQ ID NO: 3946
cccugucagcccgaaauua

SEQ ID NO: 307135 - RNA, 19 nt, Artificial Sequence
  Description of Artificial Sequence: Synthetic oligonucleotide
  Antisense strand to SEQ ID NO: 307134
uaauuucgggcugacaggg

SEQ ID NO: 307136 - RNA, 19 nt, Artificial Sequence
  Description of Artificial Sequence: Synthetic oligonucleotide
  Sense strand starting at position 1030 of SEQ ID NO: 3946
gggugacgguuuccaaaua

SEQ ID NO: 307137 - RNA, 19 nt, Artificial Sequence
  Description of Artificial Sequence: Synthetic oligonucleotide
  Antisense strand to SEQ ID NO: 307136
uauuuggaaaccgucaccc

SEQ ID NO: 307138 - RNA, 19 nt, Artificial Sequence
  Description of Artificial Sequence: Synthetic oligonucleotide
  Sense strand starting at position 1164 of SEQ ID NO: 3946
acaguuauuucccagccca

SEQ ID NO: 307139 - RNA, 19 nt, Artificial Sequence
  Description of Artificial Sequence: Synthetic oligonucleotide
  Antisense strand to SEQ ID NO: 307138
ugggcugggaaauaacugu

SEQ ID NO: 307140 - RNA, 19 nt, Artificial Sequence
  Description of Artificial Sequence: Synthetic oligonucleotide
  Sense strand starting at position 1206 of SEQ ID NO: 3946
ccgcuccugggcuauaaau

SEQ ID NO: 307141 - RNA, 19 nt, Artificial Sequence
  Description of Artificial Sequence: Synthetic oligonucleotide
  Antisense strand to SEQ ID NO: 307140
auuuauagcccaggagcgg

SEQ ID NO: 307142 - RNA, 19 nt, Artificial Sequence
  Description of Artificial Sequence: Synthetic oligonucleotide
  Sense strand starting at position 1665 of SEQ ID NO: 3946
aggguuccucucuguuacu

SEQ ID NO: 307143 - RNA, 19 nt, Artificial Sequence
  Description of Artificial Sequence: Synthetic oligonucleotide
  Antisense strand to SEQ ID NO: 307142
aguaacagagaggaacccu

SEQ ID NO: 307144 - RNA, 19 nt, Artificial Sequence
  Description of Artificial Sequence: Synthetic oligonucleotide
  Sense strand starting at position 1829 of SEQ ID NO: 3946
ccgagcaugccuggaagaa

SEQ ID NO: 307145 - RNA, 19 nt, Artificial Sequence
  Description of Artificial Sequence: Synthetic oligonucleotide
  Antisense strand to SEQ ID NO: 307144
uucuuccaggcaugcucgg

SEQ ID NO: 307146 - RNA, 19 nt, Artificial Sequence
  Description of Artificial Sequence: Synthetic oligonucleotide
  Sense strand starting at position 2147 of SEQ ID NO: 3946
accugucccgcugggauua

SEQ ID NO: 307147 - RNA, 19 nt, Artificial Sequence
  Description of Artificial Sequence: Synthetic oligonucleotide
  Antisense strand to SEQ ID NO: 307146
uaaucccagcgggacaggu

SEQ ID NO: 307148 - RNA, 19 nt, Artificial Sequence
  Description of Artificial Sequence: Synthetic oligonucleotide
  Sense strand starting at position 2159 of SEQ ID NO: 3946
gggauuaagagucgcgauu

SEQ ID NO: 307149 - RNA, 19 nt, Artificial Sequence
  Description of Artificial Sequence: Synthetic oligonucleotide
  Antisense strand to SEQ ID NO: 307148
aaucgcgacucuuaauccc

SEQ ID NO: 307150 - RNA, 19 nt, Artificial Sequence
  Description of Artificial Sequence: Synthetic oligonucleotide
  Sense strand starting at position 2170 of SEQ ID NO: 3946
ucgcgauucgggcuuuaac

SEQ ID NO: 307151 - RNA, 19 nt, Artificial Sequence
  Description of Artificial Sequence: Synthetic oligonucleotide
  Antisense strand to SEQ ID NO: 307150
guuaaagcccgaaucgcga

SEQ ID NO: 307152 - RNA, 19 nt, Artificial Sequence
  Description of Artificial Sequence: Synthetic oligonucleotide
  Sense strand starting at position 2173 of SEQ ID NO: 3946
cgauucgggcuuuaaccau

SEQ ID NO: 307153 - RNA, 19 nt, Artificial Sequence
  Description of Artificial Sequence: Synthetic oligonucleotide
  Antisense strand to SEQ ID NO: 307152
augguuaaagcccgaaucg

SEQ ID NO: 307154 - RNA, 19 nt, Artificial Sequence
  Description of Artificial Sequence: Synthetic oligonucleotide
  Sense strand starting at position 2544 of SEQ ID NO: 3946
ccagauugccaaugccuua

SEQ ID NO: 307155 - RNA, 19 nt, Artificial Sequence
  Description of Artificial Sequence: Synthetic oligonucleotide
  Antisense strand to SEQ ID NO: 307154
uaaggcauuggcaaucugg

SEQ ID NO: 307156 - RNA, 19 nt, Artificial Sequence
  Description of Artificial Sequence: Synthetic oligonucleotide
  Sense strand starting at position 2643 of SEQ ID NO: 3946
gggucaguggcgcugucau

SEQ ID NO: 307157 - RNA, 19 nt, Artificial Sequence
  Description of Artificial Sequence: Synthetic oligonucleotide
  Antisense strand to SEQ ID NO: 307156
augacagcgccacugaccc

SEQ ID NO: 307158 - RNA, 19 nt, Artificial Sequence
  Description of Artificial Sequence: Synthetic oligonucleotide
  Sense strand starting at position 2754 of SEQ ID NO: 3946
uggauucuccuccaggcua

SEQ ID NO: 307159 - RNA, 19 nt, Artificial Sequence
  Description of Artificial Sequence: Synthetic oligonucleotide
  Antisense strand to SEQ ID NO: 307158
uagccuggaggagaaucca

SEQ ID NO: 307160 - RNA, 19 nt, Artificial Sequence
  Description of Artificial Sequence: Synthetic oligonucleotide
  Sense strand starting at position 2803 of SEQ ID NO: 3946
cucacugaguccuugacau

SEQ ID NO: 307161 - RNA, 19 nt, Artificial Sequence
  Description of Artificial Sequence: Synthetic oligonucleotide
  Antisense strand to SEQ ID NO: 307160
augucaaggacucagugag

SEQ ID NO: 307162 - RNA, 19 nt, Artificial Sequence
  Description of Artificial Sequence: Synthetic oligonucleotide
  Sense strand starting at position 2845 of SEQ ID NO: 3946
ugaugucauaguggaaaca

SEQ ID NO: 307163 - RNA, 19 nt, Artificial Sequence
  Description of Artificial Sequence: Synthetic oligonucleotide
  Antisense strand to SEQ ID NO: 307162
uguuuccacuaugacauca

SEQ ID NO: 307164 - RNA, 19 nt, Artificial Sequence
  Description of Artificial Sequence: Synthetic oligonucleotide
  Sense strand starting at position 2855 of SEQ ID NO: 3946
guggaaacauuguuguaag

SEQ ID NO: 307165 - RNA, 19 nt, Artificial Sequence
  Description of Artificial Sequence: Synthetic oligonucleotide
  Antisense strand to SEQ ID NO: 307164
cuuacaacaauguuuccac

SEQ ID NO: 307166 - RNA, 19 nt, Artificial Sequence
  Description of Artificial Sequence: Synthetic oligonucleotide
  Sense strand starting at position 2921 of SEQ ID NO: 3946
uucucauaucuuggaugau

SEQ ID NO: 307167 - RNA, 19 nt, Artificial Sequence
  Description of Artificial Sequence: Synthetic oligonucleotide
  Antisense strand to SEQ ID NO: 307166
aucauccaagauaugagaa

SEQ ID NO: 307168 - RNA, 19 nt, Artificial Sequence
  Description of Artificial Sequence: Synthetic oligonucleotide
  Sense strand starting at position 2922 of SEQ ID NO: 3946
ucucauaucuuggaugauu

SEQ ID NO: 307169 - RNA, 19 nt, Artificial Sequence
  Description of Artificial Sequence: Synthetic oligonucleotide
  Antisense strand to SEQ ID NO: 307168
aaucauccaagauaugaga

SEQ ID NO: 307170 - RNA, 19 nt, Artificial Sequence
  Description of Artificial Sequence: Synthetic oligonucleotide
  Sense strand starting at position 2924 of SEQ ID NO: 3946
ucauaucuuggaugauucu

SEQ ID NO: 307171 - RNA, 19 nt, Artificial Sequence
  Description of Artificial Sequence: Synthetic oligonucleotide
  Antisense strand to SEQ ID NO: 307170
agaaucauccaagauauga

SEQ ID NO: 307172 - RNA, 19 nt, Artificial Sequence
  Description of Artificial Sequence: Synthetic oligonucleotide
  Sense strand starting at position 2931 of SEQ ID NO: 3946
uuggaugauucugacucuu

SEQ ID NO: 307173 - RNA, 19 nt, Artificial Sequence
  Description of Artificial Sequence: Synthetic oligonucleotide
  Antisense strand to SEQ ID NO: 307172
aagagucagaaucauccaa

SEQ ID NO: 307174 - RNA, 19 nt, Artificial Sequence
  Description of Artificial Sequence: Synthetic oligonucleotide
  Sense strand starting at position 3437 of SEQ ID NO: 3946
cauggaugccuggaugauu

SEQ ID NO: 307175 - RNA, 19 nt, Artificial Sequence
  Description of Artificial Sequence: Synthetic oligonucleotide
  Antisense strand to SEQ ID NO: 307174
aaucauccaggcauccaug

SEQ ID NO: 307176 - RNA, 19 nt, Artificial Sequence
  Description of Artificial Sequence: Synthetic oligonucleotide
  Sense strand starting at position 3619 of SEQ ID NO: 3946
ucgccauauuguccagauu

SEQ ID NO: 307177 - RNA, 19 nt, Artificial Sequence
  Description of Artificial Sequence: Synthetic oligonucleotide
  Antisense strand to SEQ ID NO: 307176
aaucuggacaauauggcga

SEQ ID NO: 307178 - RNA, 19 nt, Artificial Sequence
  Description of Artificial Sequence: Synthetic oligonucleotide
  Sense strand starting at position 3756 of SEQ ID NO: 3946
gggaaagucaucuggcagu

SEQ ID NO: 307179 - RNA, 19 nt, Artificial Sequence
  Description of Artificial Sequence: Synthetic oligonucleotide
  Antisense strand to SEQ ID NO: 307178
acugccagaugacuuuccc

SEQ ID NO: 307180 - RNA, 19 nt, Artificial Sequence
  Description of Artificial Sequence: Synthetic oligonucleotide
  Sense strand starting at position 3821 of SEQ ID NO: 3946
ggcucuacaucacuuggaa

SEQ ID NO: 307181 - RNA, 19 nt, Artificial Sequence
  Description of Artificial Sequence: Synthetic oligonucleotide
  Antisense strand to SEQ ID NO: 307180
uuccaagugauguagagcc

SEQ ID NO: 307182 - RNA, 19 nt, Artificial Sequence
  Description of Artificial Sequence: Synthetic oligonucleotide
  Sense strand starting at position 3825 of SEQ ID NO: 3946
cuacaucacuuggaaagga

SEQ ID NO: 307183 - RNA, 19 nt, Artificial Sequence
  Description of Artificial Sequence: Synthetic oligonucleotide
  Antisense strand to SEQ ID NO: 307182
uccuuuccaagugauguag

SEQ ID NO: 307184 - RNA, 19 nt, Artificial Sequence
  Description of Artificial Sequence: Synthetic oligonucleotide
  Sense strand starting at position 3953 of SEQ ID NO: 3946
gaaauaugacaaggucuuu

SEQ ID NO: 307185 - RNA, 19 nt, Artificial Sequence
  Description of Artificial Sequence: Synthetic oligonucleotide
  Antisense strand to SEQ ID NO: 307184
aaagaccuugucauauuuc

SEQ ID NO: 307186 - RNA, 19 nt, Artificial Sequence
  Description of Artificial Sequence: Synthetic oligonucleotide
  Sense strand starting at position 3968 of SEQ ID NO: 3946
cuuucuucccaguagacuu

SEQ ID NO: 307187 - RNA, 19 nt, Artificial Sequence
  Description of Artificial Sequence: Synthetic oligonucleotide
  Antisense strand to SEQ ID NO: 307186
aagucuacugggaagaaag

SEQ ID NO: 307188 - RNA, 19 nt, Artificial Sequence
  Description of Artificial Sequence: Synthetic oligonucleotide
  Sense strand starting at position 209 of SEQ ID NO: 3945
gcgguaaugcuuguaagcu

SEQ ID NO: 307189 - RNA, 19 nt, Artificial Sequence
  Description of Artificial Sequence: Synthetic oligonucleotide
  Antisense strand to SEQ ID NO: 307188
agcuuacaagcauuaccgc

SEQ ID NO: 307190 - RNA, 19 nt, Artificial Sequence
  Description of Artificial Sequence: Synthetic oligonucleotide
  Sense strand starting at position 213 of SEQ ID NO: 3945
uaaugcuuguaagcucaga

SEQ ID NO: 307191 - RNA, 19 nt, Artificial Sequence
  Description of Artificial Sequence: Synthetic oligonucleotide
  Antisense strand to SEQ ID NO: 307190
ucugagcuuacaagcauua

SEQ ID NO: 307192 - RNA, 19 nt, Artificial Sequence
  Description of Artificial Sequence: Synthetic oligonucleotide
  Sense strand starting at position 291 of SEQ ID NO: 3945
cccugucagcccgaaauua

SEQ ID NO: 307193 - RNA, 19 nt, Artificial Sequence
  Description of Artificial Sequence: Synthetic oligonucleotide
  Antisense strand to SEQ ID NO: 307192
uaauuucgggcugacaggg

SEQ ID NO: 307194 - RNA, 19 nt, Artificial Sequence
  Description of Artificial Sequence: Synthetic oligonucleotide
  Sense strand starting at position 368 of SEQ ID NO: 3945
gggugacgguuuccaaaua

SEQ ID NO: 307195 - RNA, 19 nt, Artificial Sequence
  Description of Artificial Sequence: Synthetic oligonucleotide
  Antisense strand to SEQ ID NO: 307194
uauuuggaaaccgucaccc

SEQ ID NO: 307196 - RNA, 19 nt, Artificial Sequence
  Description of Artificial Sequence: Synthetic oligonucleotide
  Sense strand starting at position 544 of SEQ ID NO: 3945
ccgcuccugggcuauaaau

SEQ ID NO: 307197 - RNA, 19 nt, Artificial Sequence
  Description of Artificial Sequence: Synthetic oligonucleotide
  Antisense strand to SEQ ID NO: 307196
auuuauagcccaggagcgg

SEQ ID NO: 307198 - RNA, 19 nt, Artificial Sequence
  Description of Artificial Sequence: Synthetic oligonucleotide
  Sense strand starting at position 1003 of SEQ ID NO: 3945
aggguuccucucuguuacu

SEQ ID NO: 307199 - RNA, 19 nt, Artificial Sequence
  Description of Artificial Sequence: Synthetic oligonucleotide
  Antisense strand to SEQ ID NO: 307198
aguaacagagaggaacccu

SEQ ID NO: 307200 - RNA, 19 nt, Artificial Sequence
  Description of Artificial Sequence: Synthetic oligonucleotide
  Sense strand starting at position 1167 of SEQ ID NO: 3945
ccgagcaugccuggaagaa

SEQ ID NO: 307201 - RNA, 19 nt, Artificial Sequence
  Description of Artificial Sequence: Synthetic oligonucleotide
  Antisense strand to SEQ ID NO: 307200
uucuuccaggcaugcucgg

SEQ ID NO: 307202 - RNA, 19 nt, Artificial Sequence
  Description of Artificial Sequence: Synthetic oligonucleotide
  Sense strand starting at position 1497 of SEQ ID NO: 3945
gggauuaagagucgcgauu

SEQ ID NO: 307203 - RNA, 19 nt, Artificial Sequence
  Description of Artificial Sequence: Synthetic oligonucleotide
  Antisense strand to SEQ ID NO: 307202
aaucgcgacucuuaauccc

SEQ ID NO: 307204 - RNA, 19 nt, Artificial Sequence
  Description of Artificial Sequence: Synthetic oligonucleotide
  Sense strand starting at position 1508 of SEQ ID NO: 3945
ucgcgauucgggcuuuaac

SEQ ID NO: 307205 - RNA, 19 nt, Artificial Sequence
  Description of Artificial Sequence: Synthetic oligonucleotide
  Antisense strand to SEQ ID NO: 307204
guuaaagcccgaaucgcga

SEQ ID NO: 307206 - RNA, 19 nt, Artificial Sequence
  Description of Artificial Sequence: Synthetic oligonucleotide
  Sense strand starting at position 1511 of SEQ ID NO: 3945
cgauucgggcuuuaaccau

SEQ ID NO: 307207 - RNA, 19 nt, Artificial Sequence
  Description of Artificial Sequence: Synthetic oligonucleotide
  Antisense strand to SEQ ID NO: 307206
augguuaaagcccgaaucg

SEQ ID NO: 307208 - RNA, 19 nt, Artificial Sequence
  Description of Artificial Sequence: Synthetic oligonucleotide
  Sense strand starting at position 1882 of SEQ ID NO: 3945
ccagauugccaaugccuua

SEQ ID NO: 307209 - RNA, 19 nt, Artificial Sequence
  Description of Artificial Sequence: Synthetic oligonucleotide
  Antisense strand to SEQ ID NO: 307208
uaaggcauuggcaaucugg

SEQ ID NO: 307210 - RNA, 19 nt, Artificial Sequence
  Description of Artificial Sequence: Synthetic oligonucleotide
  Sense strand starting at position 1981 of SEQ ID NO: 3945
gggucaguggcgcugucau

SEQ ID NO: 307211 - RNA, 19 nt, Artificial Sequence
  Description of Artificial Sequence: Synthetic oligonucleotide
  Antisense strand to SEQ ID NO: 307210
augacagcgccacugaccc

SEQ ID NO: 307212 - RNA, 19 nt, Artificial Sequence
  Description of Artificial Sequence: Synthetic oligonucleotide
  Sense strand starting at position 2092 of SEQ ID NO: 3945
uggauucuccuccaggcua

SEQ ID NO: 307213 - RNA, 19 nt, Artificial Sequence
  Description of Artificial Sequence: Synthetic oligonucleotide
  Antisense strand to SEQ ID NO: 307212
uagccuggaggagaaucca

SEQ ID NO: 307214 - RNA, 19 nt, Artificial Sequence
  Description of Artificial Sequence: Synthetic oligonucleotide
  Sense strand starting at position 2141 of SEQ ID NO: 3945
cucacugaguccuugacau

SEQ ID NO: 307215 - RNA, 19 nt, Artificial Sequence
  Description of Artificial Sequence: Synthetic oligonucleotide
  Antisense strand to SEQ ID NO: 307214
augucaaggacucagugag

SEQ ID NO: 307216 - RNA, 19 nt, Artificial Sequence
  Description of Artificial Sequence: Synthetic oligonucleotide
  Sense strand starting at position 2183 of SEQ ID NO: 3945
ugaugucauaguggaaaca

SEQ ID NO: 307217 - RNA, 19 nt, Artificial Sequence
  Description of Artificial Sequence: Synthetic oligonucleotide
  Antisense strand to SEQ ID NO: 307216
uguuuccacuaugacauca

SEQ ID NO: 307218 - RNA, 19 nt, Artificial Sequence
  Description of Artificial Sequence: Synthetic oligonucleotide
  Sense strand starting at position 2193 of SEQ ID NO: 3945
guggaaacauuguuguaag

SEQ ID NO: 307219 - RNA, 19 nt, Artificial Sequence
  Description of Artificial Sequence: Synthetic oligonucleotide
  Antisense strand to SEQ ID NO: 307218
cuuacaacaauguuuccac

SEQ ID NO: 307220 - RNA, 19 nt, Artificial Sequence
  Description of Artificial Sequence: Synthetic oligonucleotide
  Sense strand starting at position 2259 of SEQ ID NO: 3945
uucucauaucuuggaugau

SEQ ID NO: 307221 - RNA, 19 nt, Artificial Sequence
  Description of Artificial Sequence: Synthetic oligonucleotide
  Antisense strand to SEQ ID NO: 307220
aucauccaagauaugagaa

SEQ ID NO: 307222 - RNA, 19 nt, Artificial Sequence
  Description of Artificial Sequence: Synthetic oligonucleotide
  Sense strand starting at position 2262 of SEQ ID NO: 3945
ucauaucuuggaugauucu

SEQ ID NO: 307223 - RNA, 19 nt, Artificial Sequence
  Description of Artificial Sequence: Synthetic oligonucleotide
  Antisense strand to SEQ ID NO: 307222
agaaucauccaagauauga

SEQ ID NO: 307224 - RNA, 19 nt, Artificial Sequence
  Description of Artificial Sequence: Synthetic oligonucleotide
  Sense strand starting at position 2775 of SEQ ID NO: 3945
cauggaugccuggaugauu

SEQ ID NO: 307225 - RNA, 19 nt, Artificial Sequence
  Description of Artificial Sequence: Synthetic oligonucleotide
  Antisense strand to SEQ ID NO: 307224
aaucauccaggcauccaug

SEQ ID NO: 307226 - RNA, 19 nt, Artificial Sequence
  Description of Artificial Sequence: Synthetic oligonucleotide
  Sense strand starting at position 3094 of SEQ ID NO: 3945
gggaaagucaucuggcagu

SEQ ID NO: 307227 - RNA, 19 nt, Artificial Sequence
  Description of Artificial Sequence: Synthetic oligonucleotide
  Antisense strand to SEQ ID NO: 307226
acugccagaugacuuuccc

SEQ ID NO: 307228 - RNA, 19 nt, Artificial Sequence
  Description of Artificial Sequence: Synthetic oligonucleotide
  Sense strand starting at position 3159 of SEQ ID NO: 3945
ggcucuacaucacuuggaa

SEQ ID NO: 307229 - RNA, 19 nt, Artificial Sequence
  Description of Artificial Sequence: Synthetic oligonucleotide
  Antisense strand to SEQ ID NO: 307228
uuccaagugauguagagcc

SEQ ID NO: 307230 - RNA, 19 nt, Artificial Sequence
  Description of Artificial Sequence: Synthetic oligonucleotide
  Sense strand starting at position 3163 of SEQ ID NO: 3945
cuacaucacuuggaaagga

SEQ ID NO: 307231 - RNA, 19 nt, Artificial Sequence
  Description of Artificial Sequence: Synthetic oligonucleotide
  Antisense strand to SEQ ID NO: 307230
uccuuuccaagugauguag

SEQ ID NO: 307232 - RNA, 19 nt, Artificial Sequence
  Description of Artificial Sequence: Synthetic oligonucleotide
  Sense strand starting at position 3291 of SEQ ID NO: 3945
gaaauaugacaaggucuuu

SEQ ID NO: 307233 - RNA, 19 nt, Artificial Sequence
  Description of Artificial Sequence: Synthetic oligonucleotide
  Antisense strand to SEQ ID NO: 307232
aaagaccuugucauauuuc

SEQ ID NO: 307234 - RNA, 19 nt, Artificial Sequence
  Description of Artificial Sequence: Synthetic oligonucleotide
  Sense strand starting at position 3306 of SEQ ID NO: 3945
cuuucuucccaguagacuu

SEQ ID NO: 307235 - RNA, 19 nt, Artificial Sequence
  Description of Artificial Sequence: Synthetic oligonucleotide
  Antisense strand to SEQ ID NO: 307234
aagucuacugggaagaaag

SEQ ID NO: 307236 - RNA, 19 nt, Artificial Sequence
  Description of Artificial Sequence: Synthetic oligonucleotide
  Sense strand starting at position 3323 of SEQ ID NO: 3945
uugccaucugauugggaga

SEQ ID NO: 307237 - RNA, 19 nt, Artificial Sequence
  Description of Artificial Sequence: Synthetic oligonucleotide
  Antisense strand to SEQ ID NO: 307236
ucucccaaucagauggcaa

SEQ ID NO: 307238 - RNA, 19 nt, Artificial Sequence
  Description of Artificial Sequence: Synthetic oligonucleotide
  Sense strand starting at position 3324 of SEQ ID NO: 3945
ugccaucugauugggagaa

SEQ ID NO: 307239 - RNA, 19 nt, Artificial Sequence
  Description of Artificial Sequence: Synthetic oligonucleotide
  Antisense strand to SEQ ID NO: 307238
uucucccaaucagauggca

SEQ ID NO: 307240 - RNA, 19 nt, Artificial Sequence
  Description of Artificial Sequence: Synthetic oligonucleotide
  Sense strand starting at position 3326 of SEQ ID NO: 3945
ccaucugauugggagaaca

SEQ ID NO: 307241 - RNA, 19 nt, Artificial Sequence
  Description of Artificial Sequence: Synthetic oligonucleotide
  Antisense strand to SEQ ID NO: 307240
uguucucccaaucagaugg

SEQ ID NO: 307242 - RNA, 19 nt, Artificial Sequence
  Description of Artificial Sequence: Synthetic oligonucleotide
  Sense strand starting at position 3404 of SEQ ID NO: 3945
aggucauggucccuacaaa

SEQ ID NO: 307243 - RNA, 19 nt, Artificial Sequence
  Description of Artificial Sequence: Synthetic oligonucleotide
  Antisense strand to SEQ ID NO: 307242
uuuguagggaccaugaccu

SEQ ID NO: 307244 - RNA, 19 nt, Artificial Sequence
  Description of Artificial Sequence: Synthetic oligonucleotide
  Sense strand starting at position 3405 of SEQ ID NO: 3945
ggucauggucccuacaaag

SEQ ID NO: 307245 - RNA, 19 nt, Artificial Sequence
  Description of Artificial Sequence: Synthetic oligonucleotide
  Antisense strand to SEQ ID NO: 307244
cuuuguagggaccaugacc

SEQ ID NO: 307246 - RNA, 19 nt, Artificial Sequence
  Description of Artificial Sequence: Synthetic oligonucleotide
  Sense strand starting at position 3512 of SEQ ID NO: 3945
gaaugaacauaguaagaga

SEQ ID NO: 307247 - RNA, 19 nt, Artificial Sequence
  Description of Artificial Sequence: Synthetic oligonucleotide
  Antisense strand to SEQ ID NO: 307246
ucucuuacuauguucauuc

SEQ ID NO: 307248 - RNA, 19 nt, Artificial Sequence
  Description of Artificial Sequence: Synthetic oligonucleotide
  Sense strand starting at position 3515 of SEQ ID NO: 3945
ugaacauaguaagagacuu

SEQ ID NO: 307249 - RNA, 19 nt, Artificial Sequence
  Description of Artificial Sequence: Synthetic oligonucleotide
  Antisense strand to SEQ ID NO: 307248
aagucucuuacuauguuca

SEQ ID NO: 307250 - RNA, 19 nt, Artificial Sequence
  Description of Artificial Sequence: Synthetic oligonucleotide
  Sense strand starting at position 3654 of SEQ ID NO: 3945
acaucaaggcacuguguaa

SEQ ID NO: 307251 - RNA, 19 nt, Artificial Sequence
  Description of Artificial Sequence: Synthetic oligonucleotide
  Antisense strand to SEQ ID NO: 307250
uuacacagugccuugaugu

SEQ ID NO: 307252 - RNA, 19 nt, Artificial Sequence
  Description of Artificial Sequence: Synthetic oligonucleotide
  Sense strand starting at position 3710 of SEQ ID NO: 3945
augcuauaguuauuugugu

SEQ ID NO: 307253 - RNA, 19 nt, Artificial Sequence
  Description of Artificial Sequence: Synthetic oligonucleotide
  Antisense strand to SEQ ID NO: 307252
acacaaauaacuauagcau

SEQ ID NO: 307254 - RNA, 19 nt, Artificial Sequence
  Description of Artificial Sequence: Synthetic oligonucleotide
  Sense strand starting at position 3711 of SEQ ID NO: 3945
ugcuauaguuauuugugua

SEQ ID NO: 307255 - RNA, 19 nt, Artificial Sequence
  Description of Artificial Sequence: Synthetic oligonucleotide
  Antisense strand to SEQ ID NO: 307254
uacacaaauaacuauagca

SEQ ID NO: 307256 - RNA, 19 nt, Artificial Sequence
  Description of Artificial Sequence: Synthetic oligonucleotide
  Sense strand starting at position 3712 of SEQ ID NO: 3945
gcuauaguuauuuguguac

SEQ ID NO: 307257 - RNA, 19 nt, Artificial Sequence
  Description of Artificial Sequence: Synthetic oligonucleotide
  Antisense strand to SEQ ID NO: 307256
guacacaaauaacuauagc

SEQ ID NO: 307258 - RNA, 19 nt, Artificial Sequence
  Description of Artificial Sequence: Synthetic oligonucleotide
  Sense strand starting at position 3724 of SEQ ID NO: 3945
uguguacauguccaucuua

SEQ ID NO: 307259 - RNA, 19 nt, Artificial Sequence
  Description of Artificial Sequence: Synthetic oligonucleotide
  Antisense strand to SEQ ID NO: 307258
uaagauggacauguacaca

SEQ ID NO: 307260 - RNA, 19 nt, Artificial Sequence
  Description of Artificial Sequence: Synthetic oligonucleotide
  Sense strand starting at position 3767 of SEQ ID NO: 3945
agguaaggacugugucuua

SEQ ID NO: 307261 - RNA, 19 nt, Artificial Sequence
  Description of Artificial Sequence: Synthetic oligonucleotide
  Antisense strand to SEQ ID NO: 307260
uaagacacaguccuuaccu

SEQ ID NO: 307262 - RNA, 19 nt, Artificial Sequence
  Description of Artificial Sequence: Synthetic oligonucleotide
  Sense strand starting at position 3770 of SEQ ID NO: 3945
uaaggacugugucuuauuc

SEQ ID NO: 307263 - RNA, 19 nt, Artificial Sequence
  Description of Artificial Sequence: Synthetic oligonucleotide
  Antisense strand to SEQ ID NO: 307262
gaauaagacacaguccuua

SEQ ID NO: 307264 - RNA, 19 nt, Artificial Sequence
  Description of Artificial Sequence: Synthetic oligonucleotide
  Sense strand starting at position 3827 of SEQ ID NO: 3945
cugguaagcauuugcuaag

SEQ ID NO: 307265 - RNA, 19 nt, Artificial Sequence
  Description of Artificial Sequence: Synthetic oligonucleotide
  Antisense strand to SEQ ID NO: 307264
cuuagcaaaugcuuaccag

SEQ ID NO: 307266 - RNA, 19 nt, Artificial Sequence
  Description of Artificial Sequence: Synthetic oligonucleotide
  Sense strand starting at position 3828 of SEQ ID NO: 3945
ugguaagcauuugcuaagu

SEQ ID NO: 307267 - RNA, 19 nt, Artificial Sequence
  Description of Artificial Sequence: Synthetic oligonucleotide
  Antisense strand to SEQ ID NO: 307266
acuuagcaaaugcuuacca

SEQ ID NO: 307268 - RNA, 19 nt, Artificial Sequence
  Description of Artificial Sequence: Synthetic oligonucleotide
  Sense strand starting at position 9 of SEQ ID NO: 3947
uagauauguuugggagaau

SEQ ID NO: 307269 - RNA, 19 nt, Artificial Sequence
  Description of Artificial Sequence: Synthetic oligonucleotide
  Antisense strand to SEQ ID NO: 307268
auucucccaaacauaucua

SEQ ID NO: 307270 - RNA, 19 nt, Artificial Sequence
  Description of Artificial Sequence: Synthetic oligonucleotide
  Sense strand starting at position 10 of SEQ ID NO: 3947
agauauguuugggagaaua

SEQ ID NO: 307271 - RNA, 19 nt, Artificial Sequence
  Description of Artificial Sequence: Synthetic oligonucleotide
  Antisense strand to SEQ ID NO: 307270
uauucucccaaacauaucu

SEQ ID NO: 307272 - RNA, 19 nt, Artificial Sequence
  Description of Artificial Sequence: Synthetic oligonucleotide
  Sense strand starting at position 34 of SEQ ID NO: 3947
ccgggugcucuugauuaau

SEQ ID NO: 307273 - RNA, 19 nt, Artificial Sequence
  Description of Artificial Sequence: Synthetic oligonucleotide
  Antisense strand to SEQ ID NO: 307272
auuaaucaagagcacccgg

SEQ ID NO: 307274 - RNA, 19 nt, Artificial Sequence
  Description of Artificial Sequence: Synthetic oligonucleotide
  Sense strand starting at position 36 of SEQ ID NO: 3947
gggugcucuugauuaaucu

SEQ ID NO: 307275 - RNA, 19 nt, Artificial Sequence
  Description of Artificial Sequence: Synthetic oligonucleotide
  Antisense strand to SEQ ID NO: 307274
agauuaaucaagagcaccc

SEQ ID NO: 307276 - RNA, 19 nt, Artificial Sequence
  Description of Artificial Sequence: Synthetic oligonucleotide
  Sense strand starting at position 37 of SEQ ID NO: 3947
ggugcucuugauuaaucua

SEQ ID NO: 307277 - RNA, 19 nt, Artificial Sequence
  Description of Artificial Sequence: Synthetic oligonucleotide
  Antisense strand to SEQ ID NO: 307276
uagauuaaucaagagcacc

SEQ ID NO: 307278 - RNA, 19 nt, Artificial Sequence
  Description of Artificial Sequence: Synthetic oligonucleotide
  Sense strand starting at position 53 of SEQ ID NO: 3947
cuaaauuccuucuguguga

SEQ ID NO: 307279 - RNA, 19 nt, Artificial Sequence
  Description of Artificial Sequence: Synthetic oligonucleotide
  Antisense strand to SEQ ID NO: 307278
ucacacagaaggaauuuag

SEQ ID NO: 307280 - RNA, 19 nt, Artificial Sequence
  Description of Artificial Sequence: Synthetic oligonucleotide
  Sense strand starting at position 55 of SEQ ID NO: 3947
aaauuccuucugugugaag

SEQ ID NO: 307281 - RNA, 19 nt, Artificial Sequence
  Description of Artificial Sequence: Synthetic oligonucleotide
  Antisense strand to SEQ ID NO: 307280
cuucacacagaaggaauuu

SEQ ID NO: 307282 - RNA, 19 nt, Artificial Sequence
  Description of Artificial Sequence: Synthetic oligonucleotide
  Sense strand starting at position 56 of SEQ ID NO: 3947
aauuccuucugugugaagu

SEQ ID NO: 307283 - RNA, 19 nt, Artificial Sequence
  Description of Artificial Sequence: Synthetic oligonucleotide
  Antisense strand to SEQ ID NO: 307282
acuucacacagaaggaauu

SEQ ID NO: 307284 - RNA, 19 nt, Artificial Sequence
  Description of Artificial Sequence: Synthetic oligonucleotide
  Sense strand starting at position 57 of SEQ ID NO: 3947
auuccuucugugugaagua

SEQ ID NO: 307285 - RNA, 19 nt, Artificial Sequence
  Description of Artificial Sequence: Synthetic oligonucleotide
  Antisense strand to SEQ ID NO: 307284
uacuucacacagaaggaau

SEQ ID NO: 307286 - RNA, 19 nt, Artificial Sequence
  Description of Artificial Sequence: Synthetic oligonucleotide
  Sense strand starting at position 97 of SEQ ID NO: 3947
caagaugugcgaggaacua

SEQ ID NO: 307287 - RNA, 19 nt, Artificial Sequence
  Description of Artificial Sequence: Synthetic oligonucleotide
  Antisense strand to SEQ ID NO: 307286
uaguuccucgcacaucuug

SEQ ID NO: 307288 - RNA, 19 nt, Artificial Sequence
  Description of Artificial Sequence: Synthetic oligonucleotide
  Sense strand starting at position 242 of SEQ ID NO: 3947
guggcucgagcuugucuaa

SEQ ID NO: 307289 - RNA, 19 nt, Artificial Sequence
  Description of Artificial Sequence: Synthetic oligonucleotide
  Antisense strand to SEQ ID NO: 307288
uuagacaagcucgagccac

SEQ ID NO: 307290 - RNA, 19 nt, Artificial Sequence
  Description of Artificial Sequence: Synthetic oligonucleotide
  Sense strand starting at position 267 of SEQ ID NO: 3947
uuggaaggugucuggugaa

SEQ ID NO: 307291 - RNA, 19 nt, Artificial Sequence
  Description of Artificial Sequence: Synthetic oligonucleotide
  Antisense strand to SEQ ID NO: 307290
uucaccagacaccuuccaa

SEQ ID NO: 307292 - RNA, 19 nt, Artificial Sequence
  Description of Artificial Sequence: Synthetic oligonucleotide
  Sense strand starting at position 310 of SEQ ID NO: 3947
aucgcucuuccagaggaaa

SEQ ID NO: 307293 - RNA, 19 nt, Artificial Sequence
  Description of Artificial Sequence: Synthetic oligonucleotide
  Antisense strand to SEQ ID NO: 307292
uuuccucuggaagagcgau

SEQ ID NO: 307294 - RNA, 19 nt, Artificial Sequence
  Description of Artificial Sequence: Synthetic oligonucleotide
  Sense strand starting at position 1020 of SEQ ID NO: 3947
gcgaccaucugucuaagua

SEQ ID NO: 307295 - RNA, 19 nt, Artificial Sequence
  Description of Artificial Sequence: Synthetic oligonucleotide
  Antisense strand to SEQ ID NO: 307294
uacuuagacagauggucgc

SEQ ID NO: 307296 - RNA, 19 nt, Artificial Sequence
  Description of Artificial Sequence: Synthetic oligonucleotide
  Sense strand starting at position 1021 of SEQ ID NO: 3947
cgaccaucugucuaaguau

SEQ ID NO: 307297 - RNA, 19 nt, Artificial Sequence
  Description of Artificial Sequence: Synthetic oligonucleotide
  Antisense strand to SEQ ID NO: 307296
auacuuagacagauggucg

SEQ ID NO: 307298 - RNA, 19 nt, Artificial Sequence
  Description of Artificial Sequence: Synthetic oligonucleotide
  Sense strand starting at position 1024 of SEQ ID NO: 3947
ccaucugucuaaguaucuu

SEQ ID NO: 307299 - RNA, 19 nt, Artificial Sequence
  Description of Artificial Sequence: Synthetic oligonucleotide
  Antisense strand to SEQ ID NO: 307298
aagauacuuagacagaugg

SEQ ID NO: 307300 - RNA, 19 nt, Artificial Sequence
  Description of Artificial Sequence: Synthetic oligonucleotide
  Sense strand starting at position 1151 of SEQ ID NO: 3947
cuuccuugcuaagaggaaa

SEQ ID NO: 307301 - RNA, 19 nt, Artificial Sequence
  Description of Artificial Sequence: Synthetic oligonucleotide
  Antisense strand to SEQ ID NO: 307300
uuuccucuuagcaaggaag

SEQ ID NO: 307302 - RNA, 19 nt, Artificial Sequence
  Description of Artificial Sequence: Synthetic oligonucleotide
  Sense strand starting at position 2003 of SEQ ID NO: 3947
ugggcuggguugcuaaaua

SEQ ID NO: 307303 - RNA, 19 nt, Artificial Sequence
  Description of Artificial Sequence: Synthetic oligonucleotide
  Antisense strand to SEQ ID NO: 307302
uauuuagcaacccagccca

SEQ ID NO: 307304 - RNA, 19 nt, Artificial Sequence
  Description of Artificial Sequence: Synthetic oligonucleotide
  Sense strand starting at position 2014 of SEQ ID NO: 3947
gcuaaauaguugucaggag

SEQ ID NO: 307305 - RNA, 19 nt, Artificial Sequence
  Description of Artificial Sequence: Synthetic oligonucleotide
  Antisense strand to SEQ ID NO: 307304
cuccugacaacuauuuagc

SEQ ID NO: 307306 - RNA, 19 nt, Artificial Sequence
  Description of Artificial Sequence: Synthetic oligonucleotide
  Sense strand starting at position 2256 of SEQ ID NO: 3947
ggcuuugucuacgccucaa

SEQ ID NO: 307307 - RNA, 19 nt, Artificial Sequence
  Description of Artificial Sequence: Synthetic oligonucleotide
  Antisense strand to SEQ ID NO: 307306
uugaggcguagacaaagcc

SEQ ID NO: 307308 - RNA, 19 nt, Artificial Sequence
  Description of Artificial Sequence: Synthetic oligonucleotide
  Sense strand starting at position 2562 of SEQ ID NO: 3947
cgccaagauccguggagau

SEQ ID NO: 307309 - RNA, 19 nt, Artificial Sequence
  Description of Artificial Sequence: Synthetic oligonucleotide
  Antisense strand to SEQ ID NO: 307308
aucuccacggaucuuggcg

SEQ ID NO: 307310 - RNA, 19 nt, Artificial Sequence
  Description of Artificial Sequence: Synthetic oligonucleotide
  Sense strand starting at position 3010 of SEQ ID NO: 3947
gcgcgagcgcguuugaagu

SEQ ID NO: 307311 - RNA, 19 nt, Artificial Sequence
  Description of Artificial Sequence: Synthetic oligonucleotide
  Antisense strand to SEQ ID NO: 307310
acuucaaacgcgcucgcgc

SEQ ID NO: 307312 - RNA, 19 nt, Artificial Sequence
  Description of Artificial Sequence: Synthetic oligonucleotide
  Sense strand starting at position 3088 of SEQ ID NO: 3947
cggcuuugaugccuuugaa

SEQ ID NO: 307313 - RNA, 19 nt, Artificial Sequence
  Description of Artificial Sequence: Synthetic oligonucleotide
  Antisense strand to SEQ ID NO: 307312
uucaaaggcaucaaagccg

SEQ ID NO: 307314 - RNA, 19 nt, Artificial Sequence
  Description of Artificial Sequence: Synthetic oligonucleotide
  Sense strand starting at position 3160 of SEQ ID NO: 3947
aggcaagccgcgugaucaa

SEQ ID NO: 307315 - RNA, 19 nt, Artificial Sequence
  Description of Artificial Sequence: Synthetic oligonucleotide
  Antisense strand to SEQ ID NO: 307314
uugaucacgcggcuugccu

SEQ ID NO: 307316 - RNA, 19 nt, Artificial Sequence
  Description of Artificial Sequence: Synthetic oligonucleotide
  Sense strand starting at position 3484 of SEQ ID NO: 3947
gcuucaguucggugccuaa

SEQ ID NO: 307317 - RNA, 19 nt, Artificial Sequence
  Description of Artificial Sequence: Synthetic oligonucleotide
  Antisense strand to SEQ ID NO: 307316
uuaggcaccgaacugaagc

SEQ ID NO: 307318 - RNA, 19 nt, Artificial Sequence
  Description of Artificial Sequence: Synthetic oligonucleotide
  Sense strand starting at position 3718 of SEQ ID NO: 3947
ggcuucacgucagauggaa

SEQ ID NO: 307319 - RNA, 19 nt, Artificial Sequence
  Description of Artificial Sequence: Synthetic oligonucleotide
  Antisense strand to SEQ ID NO: 307318
uuccaucugacgugaagcc

SEQ ID NO: 307320 - RNA, 19 nt, Artificial Sequence
  Description of Artificial Sequence: Synthetic oligonucleotide
  Sense strand starting at position 3766 of SEQ ID NO: 3947
ccugguuucuuugcucaga

SEQ ID NO: 307321 - RNA, 19 nt, Artificial Sequence
  Description of Artificial Sequence: Synthetic oligonucleotide
  Antisense strand to SEQ ID NO: 307320
ucugagcaaagaaaccagg

SEQ ID NO: 307322 - RNA, 19 nt, Artificial Sequence
  Description of Artificial Sequence: Synthetic oligonucleotide
  Sense strand starting at position 3769 of SEQ ID NO: 3947
gguuucuuugcucagagca

SEQ ID NO: 307323 - RNA, 19 nt, Artificial Sequence
  Description of Artificial Sequence: Synthetic oligonucleotide
  Antisense strand to SEQ ID NO: 307322
ugcucugagcaaagaaacc

SEQ ID NO: 307324 - RNA, 19 nt, Artificial Sequence
  Description of Artificial Sequence: Synthetic oligonucleotide
  Sense strand starting at position 3771 of SEQ ID NO: 3947
uuucuuugcucagagcagu

SEQ ID NO: 307325 - RNA, 19 nt, Artificial Sequence
  Description of Artificial Sequence: Synthetic oligonucleotide
  Antisense strand to SEQ ID NO: 307324
acugcucugagcaaagaaa

SEQ ID NO: 307326 - RNA, 19 nt, Artificial Sequence
  Description of Artificial Sequence: Synthetic oligonucleotide
  Sense strand starting at position 159 of SEQ ID NO: 3948
ugcagacaacuguaacaua

SEQ ID NO: 307327 - RNA, 19 nt, Artificial Sequence
  Description of Artificial Sequence: Synthetic oligonucleotide
  Antisense strand to SEQ ID NO: 307326
uauguuacaguugucugca

SEQ ID NO: 307328 - RNA, 19 nt, Artificial Sequence
  Description of Artificial Sequence: Synthetic oligonucleotide
  Sense strand starting at position 697 of SEQ ID NO: 3948
guaucucaggguuauuacu

SEQ ID NO: 307329 - RNA, 19 nt, Artificial Sequence
  Description of Artificial Sequence: Synthetic oligonucleotide
  Antisense strand to SEQ ID NO: 307328
aguaauaacccugagauac

SEQ ID NO: 307330 - RNA, 19 nt, Artificial Sequence
  Description of Artificial Sequence: Synthetic oligonucleotide
  Sense strand starting at position 705 of SEQ ID NO: 3948
ggguuauuacugcagaaau

SEQ ID NO: 307331 - RNA, 19 nt, Artificial Sequence
  Description of Artificial Sequence: Synthetic oligonucleotide
  Antisense strand to SEQ ID NO: 307330
auuucugcaguaauaaccc

SEQ ID NO: 307332 - RNA, 19 nt, Artificial Sequence
  Description of Artificial Sequence: Synthetic oligonucleotide
  Sense strand starting at position 707 of SEQ ID NO: 3948
guuauuacugcagaaauga

SEQ ID NO: 307333 - RNA, 19 nt, Artificial Sequence
  Description of Artificial Sequence: Synthetic oligonucleotide
  Antisense strand to SEQ ID NO: 307332
ucauuucugcaguaauaac

SEQ ID NO: 307334 - RNA, 19 nt, Artificial Sequence
  Description of Artificial Sequence: Synthetic oligonucleotide
  Sense strand starting at position 750 of SEQ ID NO: 3948
gaggcuguugcauaucaau

SEQ ID NO: 307335 - RNA, 19 nt, Artificial Sequence
  Description of Artificial Sequence: Synthetic oligonucleotide
  Antisense strand to SEQ ID NO: 307334
auugauaugcaacagccuc

SEQ ID NO: 307336 - RNA, 19 nt, Artificial Sequence
  Description of Artificial Sequence: Synthetic oligonucleotide
  Sense strand starting at position 756 of SEQ ID NO: 3948
guugcauaucaaugaacua

SEQ ID NO: 307337 - RNA, 19 nt, Artificial Sequence
  Description of Artificial Sequence: Synthetic oligonucleotide
  Antisense strand to SEQ ID NO: 307336
uaguucauugauaugcaac

SEQ ID NO: 307338 - RNA, 19 nt, Artificial Sequence
  Description of Artificial Sequence: Synthetic oligonucleotide
  Sense strand starting at position 882 of SEQ ID NO: 3948
cguugagcugaagagaaau

SEQ ID NO: 307339 - RNA, 19 nt, Artificial Sequence
  Description of Artificial Sequence: Synthetic oligonucleotide
  Antisense strand to SEQ ID NO: 307338
auuucucuucagcucaacg

SEQ ID NO: 307340 - RNA, 19 nt, Artificial Sequence
  Description of Artificial Sequence: Synthetic oligonucleotide
  Sense strand starting at position 971 of SEQ ID NO: 3948
aucuuuguaucuccauaga

SEQ ID NO: 307341 - RNA, 19 nt, Artificial Sequence
  Description of Artificial Sequence: Synthetic oligonucleotide
  Antisense strand to SEQ ID NO: 307340
ucuauggagauacaaagau

SEQ ID NO: 307342 - RNA, 19 nt, Artificial Sequence
  Description of Artificial Sequence: Synthetic oligonucleotide
  Sense strand starting at position 1173 of SEQ ID NO: 3948
cucccuaucgcccaagaaa

SEQ ID NO: 307343 - RNA, 19 nt, Artificial Sequence
  Description of Artificial Sequence: Synthetic oligonucleotide
  Antisense strand to SEQ ID NO: 307342
uuucuugggcgauagggag

SEQ ID NO: 307344 - RNA, 19 nt, Artificial Sequence
  Description of Artificial Sequence: Synthetic oligonucleotide
  Sense strand starting at position 1231 of SEQ ID NO: 3948
aggagaagauaauaagaua

SEQ ID NO: 307345 - RNA, 19 nt, Artificial Sequence
  Description of Artificial Sequence: Synthetic oligonucleotide
  Antisense strand to SEQ ID NO: 307344
uaucuuauuaucuucuccu

SEQ ID NO: 307346 - RNA, 19 nt, Artificial Sequence
  Description of Artificial Sequence: Synthetic oligonucleotide
  Sense strand starting at position 1265 of SEQ ID NO: 3948
gaagcugugcuccagggau

SEQ ID NO: 307347 - RNA, 19 nt, Artificial Sequence
  Description of Artificial Sequence: Synthetic oligonucleotide
  Antisense strand to SEQ ID NO: 307346
aucccuggagcacagcuuc

SEQ ID NO: 307348 - RNA, 19 nt, Artificial Sequence
  Description of Artificial Sequence: Synthetic oligonucleotide
  Sense strand starting at position 1291 of SEQ ID NO: 3948
gagaaugccuacccuggaa

SEQ ID NO: 307349 - RNA, 19 nt, Artificial Sequence
  Description of Artificial Sequence: Synthetic oligonucleotide
  Antisense strand to SEQ ID NO: 307348
uuccaggguaggcauucuc

SEQ ID NO: 307350 - RNA, 19 nt, Artificial Sequence
  Description of Artificial Sequence: Synthetic oligonucleotide
  Sense strand starting at position 1395 of SEQ ID NO: 3948
uggucagagcauugagaau

SEQ ID NO: 307351 - RNA, 19 nt, Artificial Sequence
  Description of Artificial Sequence: Synthetic oligonucleotide
  Antisense strand to SEQ ID NO: 307350
auucucaaugcucugacca

SEQ ID NO: 307352 - RNA, 19 nt, Artificial Sequence
  Description of Artificial Sequence: Synthetic oligonucleotide
  Sense strand starting at position 1583 of SEQ ID NO: 3948
gggccugguccuuaacuga

SEQ ID NO: 307353 - RNA, 19 nt, Artificial Sequence
  Description of Artificial Sequence: Synthetic oligonucleotide
  Antisense strand to SEQ ID NO: 307352
ucaguuaaggaccaggccc

SEQ ID NO: 307354 - RNA, 19 nt, Artificial Sequence
  Description of Artificial Sequence: Synthetic oligonucleotide
  Sense strand starting at position 1856 of SEQ ID NO: 3948
acgccugagaagugaaaga

SEQ ID NO: 307355 - RNA, 19 nt, Artificial Sequence
  Description of Artificial Sequence: Synthetic oligonucleotide
  Antisense strand to SEQ ID NO: 307354
ucuuucacuucucaggcgu

SEQ ID NO: 307356 - RNA, 19 nt, Artificial Sequence
  Description of Artificial Sequence: Synthetic oligonucleotide
  Sense strand starting at position 2259 of SEQ ID NO: 3948
gcuugaacugcguuuccau

SEQ ID NO: 307357 - RNA, 19 nt, Artificial Sequence
  Description of Artificial Sequence: Synthetic oligonucleotide
  Antisense strand to SEQ ID NO: 307356
auggaaacgcaguucaagc

SEQ ID NO: 307358 - RNA, 19 nt, Artificial Sequence
  Description of Artificial Sequence: Synthetic oligonucleotide
  Sense strand starting at position 2266 of SEQ ID NO: 3948
cugcguuuccauucuguua

SEQ ID NO: 307359 - RNA, 19 nt, Artificial Sequence
  Description of Artificial Sequence: Synthetic oligonucleotide
  Antisense strand to SEQ ID NO: 307358
uaacagaauggaaacgcag

SEQ ID NO: 307360 - RNA, 19 nt, Artificial Sequence
  Description of Artificial Sequence: Synthetic oligonucleotide
  Sense strand starting at position 2278 of SEQ ID NO: 3948
ucuguuaguguugaaugaa

SEQ ID NO: 307361 - RNA, 19 nt, Artificial Sequence
  Description of Artificial Sequence: Synthetic oligonucleotide
  Antisense strand to SEQ ID NO: 307360
uucauucaacacuaacaga

SEQ ID NO: 307362 - RNA, 19 nt, Artificial Sequence
  Description of Artificial Sequence: Synthetic oligonucleotide
  Sense strand starting at position 2281 of SEQ ID NO: 3948
guuaguguugaaugaacau

SEQ ID NO: 307363 - RNA, 19 nt, Artificial Sequence
  Description of Artificial Sequence: Synthetic oligonucleotide
  Antisense strand to SEQ ID NO: 307362
auguucauucaacacuaac

SEQ ID NO: 307364 - RNA, 19 nt, Artificial Sequence
  Description of Artificial Sequence: Synthetic oligonucleotide
  Sense strand starting at position 2334 of SEQ ID NO: 3948
uccuaaagucgaggcauaa

SEQ ID NO: 307365 - RNA, 19 nt, Artificial Sequence
  Description of Artificial Sequence: Synthetic oligonucleotide
  Antisense strand to SEQ ID NO: 307364
uuaugccucgacuuuagga

SEQ ID NO: 307366 - RNA, 19 nt, Artificial Sequence
  Description of Artificial Sequence: Synthetic oligonucleotide
  Sense strand starting at position 2338 of SEQ ID NO: 3948
aaagucgaggcauaaacau

SEQ ID NO: 307367 - RNA, 19 nt, Artificial Sequence
  Description of Artificial Sequence: Synthetic oligonucleotide
  Antisense strand to SEQ ID NO: 307366
auguuuaugccucgacuuu

SEQ ID NO: 307368 - RNA, 19 nt, Artificial Sequence
  Description of Artificial Sequence: Synthetic oligonucleotide
  Sense strand starting at position 2402 of SEQ ID NO: 3948
cggccagauccagauauag

SEQ ID NO: 307369 - RNA, 19 nt, Artificial Sequence
  Description of Artificial Sequence: Synthetic oligonucleotide
  Antisense strand to SEQ ID NO: 307368
cuauaucuggaucuggccg

SEQ ID NO: 307370 - RNA, 19 nt, Artificial Sequence
  Description of Artificial Sequence: Synthetic oligonucleotide
  Sense strand starting at position 2448 of SEQ ID NO: 3948
ccucuugacucuucgaaac

SEQ ID NO: 307371 - RNA, 19 nt, Artificial Sequence
  Description of Artificial Sequence: Synthetic oligonucleotide
  Antisense strand to SEQ ID NO: 307370
guuucgaagagucaagagg

SEQ ID NO: 307372 - RNA, 19 nt, Artificial Sequence
  Description of Artificial Sequence: Synthetic oligonucleotide
  Sense strand starting at position 2506 of SEQ ID NO: 3948
gcugaagaccuauguuagg

SEQ ID NO: 307373 - RNA, 19 nt, Artificial Sequence
  Description of Artificial Sequence: Synthetic oligonucleotide
  Antisense strand to SEQ ID NO: 307372
ccuaacauaggucuucagc

SEQ ID NO: 307374 - RNA, 19 nt, Artificial Sequence
  Description of Artificial Sequence: Synthetic oligonucleotide
  Sense strand starting at position 2534 of SEQ ID NO: 3948
ggcuguguccuguucuguu

SEQ ID NO: 307375 - RNA, 19 nt, Artificial Sequence
  Description of Artificial Sequence: Synthetic oligonucleotide
  Antisense strand to SEQ ID NO: 307374
aacagaacaggacacagcc

SEQ ID NO: 307376 - RNA, 19 nt, Artificial Sequence
  Description of Artificial Sequence: Synthetic oligonucleotide
  Sense strand starting at position 2566 of SEQ ID NO: 3948
guacauaaugcauaaugca

SEQ ID NO: 307377 - RNA, 19 nt, Artificial Sequence
  Description of Artificial Sequence: Synthetic oligonucleotide
  Antisense strand to SEQ ID NO: 307376
ugcauuaugcauuauguac

SEQ ID NO: 307378 - RNA, 19 nt, Artificial Sequence
  Description of Artificial Sequence: Synthetic oligonucleotide
  Sense strand starting at position 2575 of SEQ ID NO: 3948
gcauaaugcauggauguua

SEQ ID NO: 307379 - RNA, 19 nt, Artificial Sequence
  Description of Artificial Sequence: Synthetic oligonucleotide
  Antisense strand to SEQ ID NO: 307378
uaacauccaugcauuaugc

SEQ ID NO: 307380 - RNA, 19 nt, Artificial Sequence
  Description of Artificial Sequence: Synthetic oligonucleotide
  Sense strand starting at position 2970 of SEQ ID NO: 3948
ugcgcuugcgcacugagaa

SEQ ID NO: 307381 - RNA, 19 nt, Artificial Sequence
  Description of Artificial Sequence: Synthetic oligonucleotide
  Antisense strand to SEQ ID NO: 307380
uucucagugcgcaagcgca

SEQ ID NO: 307382 - RNA, 19 nt, Artificial Sequence
  Description of Artificial Sequence: Synthetic oligonucleotide
  Sense strand starting at position 3565 of SEQ ID NO: 3948
cucuuauaccugugaguac

SEQ ID NO: 307383 - RNA, 19 nt, Artificial Sequence
  Description of Artificial Sequence: Synthetic oligonucleotide
  Antisense strand to SEQ ID NO: 307382
guacucacagguauaagag

SEQ ID NO: 307384 - RNA, 19 nt, Artificial Sequence
  Description of Artificial Sequence: Synthetic oligonucleotide
  Sense strand starting at position 3572 of SEQ ID NO: 3948
accugugaguacuuuggga

SEQ ID NO: 307385 - RNA, 19 nt, Artificial Sequence
  Description of Artificial Sequence: Synthetic oligonucleotide
  Antisense strand to SEQ ID NO: 307384
ucccaaaguacucacaggu

SEQ ID NO: 307386 - RNA, 19 nt, Artificial Sequence
  Description of Artificial Sequence: Synthetic oligonucleotide
  Sense strand starting at position 3597 of SEQ ID NO: 3948
ggagcuugaaugugaugua

SEQ ID NO: 307387 - RNA, 19 nt, Artificial Sequence
  Description of Artificial Sequence: Synthetic oligonucleotide
  Antisense strand to SEQ ID NO: 307386
uacaucacauucaagcucc

SEQ ID NO: 307388 - RNA, 19 nt, Artificial Sequence
  Description of Artificial Sequence: Synthetic oligonucleotide
  Sense strand starting at position 3676 of SEQ ID NO: 3948
guucgcugucucucaacuu

SEQ ID NO: 307389 - RNA, 19 nt, Artificial Sequence
  Description of Artificial Sequence: Synthetic oligonucleotide
  Antisense strand to SEQ ID NO: 307388
aaguugagagacagcgaac

SEQ ID NO: 307390 - RNA, 19 nt, Artificial Sequence
  Description of Artificial Sequence: Synthetic oligonucleotide
  Sense strand starting at position 3693 of SEQ ID NO: 3948
uuaaucugauuuggauaca

SEQ ID NO: 307391 - RNA, 19 nt, Artificial Sequence
  Description of Artificial Sequence: Synthetic oligonucleotide
  Antisense strand to SEQ ID NO: 307390
uguauccaaaucagauuaa

SEQ ID NO: 307392 - RNA, 19 nt, Artificial Sequence
  Description of Artificial Sequence: Synthetic oligonucleotide
  Sense strand starting at position 3717 of SEQ ID NO: 3948
cguuuauuuaagggcugau

SEQ ID NO: 307393 - RNA, 19 nt, Artificial Sequence
  Description of Artificial Sequence: Synthetic oligonucleotide
  Antisense strand to SEQ ID NO: 307392
aucagcccuuaaauaaacg

SEQ ID NO: 307394 - RNA, 19 nt, Artificial Sequence
  Description of Artificial Sequence: Synthetic oligonucleotide
  Sense strand starting at position 3905 of SEQ ID NO: 3948
augcgaguuacuuaccuag

SEQ ID NO: 307395 - RNA, 19 nt, Artificial Sequence
  Description of Artificial Sequence: Synthetic oligonucleotide
  Antisense strand to SEQ ID NO: 307394
cuagguaaguaacucgcau

SEQ ID NO: 307396 - RNA, 19 nt, Artificial Sequence
  Description of Artificial Sequence: Synthetic oligonucleotide
  Sense strand starting at position 3908 of SEQ ID NO: 3948
cgaguuacuuaccuagaga

SEQ ID NO: 307397 - RNA, 19 nt, Artificial Sequence
  Description of Artificial Sequence: Synthetic oligonucleotide
  Antisense strand to SEQ ID NO: 307396
ucucuagguaaguaacucg

SEQ ID NO: 307398 - RNA, 19 nt, Artificial Sequence
  Description of Artificial Sequence: Synthetic oligonucleotide
  Sense strand starting at position 3934 of SEQ ID NO: 3948
gacauuucugugugucaca

SEQ ID NO: 307399 - RNA, 19 nt, Artificial Sequence
  Description of Artificial Sequence: Synthetic oligonucleotide
  Antisense strand to SEQ ID NO: 307398
ugugacacacagaaauguc

SEQ ID NO: 307400 - RNA, 19 nt, Artificial Sequence
  Description of Artificial Sequence: Synthetic oligonucleotide
  Sense strand starting at position 3935 of SEQ ID NO: 3948
acauuucugugugucacau

SEQ ID NO: 307401 - RNA, 19 nt, Artificial Sequence
  Description of Artificial Sequence: Synthetic oligonucleotide
  Antisense strand to SEQ ID NO: 307400
augugacacacagaaaugu

SEQ ID NO: 307402 - RNA, 19 nt, Artificial Sequence
  Description of Artificial Sequence: Synthetic oligonucleotide
  Sense strand starting at position 3959 of SEQ ID NO: 3948
ugaguucuguuacucauga

SEQ ID NO: 307403 - RNA, 19 nt, Artificial Sequence
  Description of Artificial Sequence: Synthetic oligonucleotide
  Antisense strand to SEQ ID NO: 307402
ucaugaguaacagaacuca

SEQ ID NO: 307404 - RNA, 19 nt, Artificial Sequence
  Description of Artificial Sequence: Synthetic oligonucleotide
  Sense strand starting at position 3960 of SEQ ID NO: 3948
gaguucuguuacucaugau

SEQ ID NO: 307405 - RNA, 19 nt, Artificial Sequence
  Description of Artificial Sequence: Synthetic oligonucleotide
  Antisense strand to SEQ ID NO: 307404
aucaugaguaacagaacuc

SEQ ID NO: 307406 - RNA, 19 nt, Artificial Sequence
  Description of Artificial Sequence: Synthetic oligonucleotide
  Sense strand starting at position 54 of SEQ ID NO: 3949
cagagaaaguuguuuguaa

SEQ ID NO: 307407 - RNA, 19 nt, Artificial Sequence
  Description of Artificial Sequence: Synthetic oligonucleotide
  Antisense strand to SEQ ID NO: 307406
uuacaaacaacuuucucug

SEQ ID NO: 307408 - RNA, 19 nt, Artificial Sequence
  Description of Artificial Sequence: Synthetic oligonucleotide
  Sense strand starting at position 55 of SEQ ID NO: 3949
agagaaaguuguuuguaau

SEQ ID NO: 307409 - RNA, 19 nt, Artificial Sequence
  Description of Artificial Sequence: Synthetic oligonucleotide
  Antisense strand to SEQ ID NO: 307408
auuacaaacaacuuucucu

SEQ ID NO: 307410 - RNA, 19 nt, Artificial Sequence
  Description of Artificial Sequence: Synthetic oligonucleotide
  Sense strand starting at position 56 of SEQ ID NO: 3949
gagaaaguuguuuguaauu

SEQ ID NO: 307411 - RNA, 19 nt, Artificial Sequence
  Description of Artificial Sequence: Synthetic oligonucleotide
  Antisense strand to SEQ ID NO: 307410
aauuacaaacaacuuucuc

SEQ ID NO: 307412 - RNA, 19 nt, Artificial Sequence
  Description of Artificial Sequence: Synthetic oligonucleotide
  Sense strand starting at position 109 of SEQ ID NO: 3949
guaugucuugucugaagag

SEQ ID NO: 307413 - RNA, 19 nt, Artificial Sequence
  Description of Artificial Sequence: Synthetic oligonucleotide
  Antisense strand to SEQ ID NO: 307412
cucuucagacaagacauac

SEQ ID NO: 307414 - RNA, 19 nt, Artificial Sequence
  Description of Artificial Sequence: Synthetic oligonucleotide
  Sense strand starting at position 208 of SEQ ID NO: 3949
gcaacuuacgucuagcaca

SEQ ID NO: 307415 - RNA, 19 nt, Artificial Sequence
  Description of Artificial Sequence: Synthetic oligonucleotide
  Antisense strand to SEQ ID NO: 307414
ugugcuagacguaaguugc

SEQ ID NO: 307416 - RNA, 19 nt, Artificial Sequence
  Description of Artificial Sequence: Synthetic oligonucleotide
  Sense strand starting at position 415 of SEQ ID NO: 3949
ggagcaguggcaggaucau

SEQ ID NO: 307417 - RNA, 19 nt, Artificial Sequence
  Description of Artificial Sequence: Synthetic oligonucleotide
  Antisense strand to SEQ ID NO: 307416
augauccugccacugcucc

SEQ ID NO: 307418 - RNA, 19 nt, Artificial Sequence
  Description of Artificial Sequence: Synthetic oligonucleotide
  Sense strand starting at position 707 of SEQ ID NO: 3949
uuguuugagaccgaguuua

SEQ ID NO: 307419 - RNA, 19 nt, Artificial Sequence
  Description of Artificial Sequence: Synthetic oligonucleotide
  Antisense strand to SEQ ID NO: 307418
uaaacucggucucaaacaa

SEQ ID NO: 307420 - RNA, 19 nt, Artificial Sequence
  Description of Artificial Sequence: Synthetic oligonucleotide
  Sense strand starting at position 893 of SEQ ID NO: 3949
ucuacuggcuggucuugaa

SEQ ID NO: 307421 - RNA, 19 nt, Artificial Sequence
  Description of Artificial Sequence: Synthetic oligonucleotide
  Antisense strand to SEQ ID NO: 307420
uucaagaccagccaguaga

SEQ ID NO: 307422 - RNA, 19 nt, Artificial Sequence
  Description of Artificial Sequence: Synthetic oligonucleotide
  Sense strand starting at position 989 of SEQ ID NO: 3949
ccagaacuguaauucuaug

SEQ ID NO: 307423 - RNA, 19 nt, Artificial Sequence
  Description of Artificial Sequence: Synthetic oligonucleotide
  Antisense strand to SEQ ID NO: 307422
cauagaauuacaguucugg

SEQ ID NO: 307424 - RNA, 19 nt, Artificial Sequence
  Description of Artificial Sequence: Synthetic oligonucleotide
  Sense strand starting at position 1245 of SEQ ID NO: 3949
acuagaaccuaaguaaguu

SEQ ID NO: 307425 - RNA, 19 nt, Artificial Sequence
  Description of Artificial Sequence: Synthetic oligonucleotide
  Antisense strand to SEQ ID NO: 307424
aacuuacuuagguucuagu

SEQ ID NO: 307426 - RNA, 19 nt, Artificial Sequence
  Description of Artificial Sequence: Synthetic oligonucleotide
  Sense strand starting at position 1261 of SEQ ID NO: 3949
guuagaauucaagacgagu

SEQ ID NO: 307427 - RNA, 19 nt, Artificial Sequence
  Description of Artificial Sequence: Synthetic oligonucleotide
  Antisense strand to SEQ ID NO: 307426
acucgucuugaauucuaac

SEQ ID NO: 307428 - RNA, 19 nt, Artificial Sequence
  Description of Artificial Sequence: Synthetic oligonucleotide
  Sense strand starting at position 1368 of SEQ ID NO: 3949
cugacagaugcggaguaaa

SEQ ID NO: 307429 - RNA, 19 nt, Artificial Sequence
  Description of Artificial Sequence: Synthetic oligonucleotide
  Antisense strand to SEQ ID NO: 307428
uuuacuccgcaucugucag

SEQ ID NO: 307430 - RNA, 19 nt, Artificial Sequence
  Description of Artificial Sequence: Synthetic oligonucleotide
  Sense strand starting at position 1447 of SEQ ID NO: 3949
augggacuuucuccggaaa

SEQ ID NO: 307431 - RNA, 19 nt, Artificial Sequence
  Description of Artificial Sequence: Synthetic oligonucleotide
  Antisense strand to SEQ ID NO: 307430
uuuccggagaaagucccau

SEQ ID NO: 307432 - RNA, 19 nt, Artificial Sequence
  Description of Artificial Sequence: Synthetic oligonucleotide
  Sense strand starting at position 1448 of SEQ ID NO: 3949
ugggacuuucuccggaaau

SEQ ID NO: 307433 - RNA, 19 nt, Artificial Sequence
  Description of Artificial Sequence: Synthetic oligonucleotide
  Antisense strand to SEQ ID NO: 307432
auuuccggagaaaguccca

SEQ ID NO: 307434 - RNA, 19 nt, Artificial Sequence
  Description of Artificial Sequence: Synthetic oligonucleotide
  Sense strand starting at position 1598 of SEQ ID NO: 3949
aagguaaagacgugucucu

SEQ ID NO: 307435 - RNA, 19 nt, Artificial Sequence
  Description of Artificial Sequence: Synthetic oligonucleotide
  Antisense strand to SEQ ID NO: 307434
agagacacgucuuuaccuu

SEQ ID NO: 307436 - RNA, 19 nt, Artificial Sequence
  Description of Artificial Sequence: Synthetic oligonucleotide
  Sense strand starting at position 1677 of SEQ ID NO: 3949
ugaacugcucccgagaaac

SEQ ID NO: 307437 - RNA, 19 nt, Artificial Sequence
  Description of Artificial Sequence: Synthetic oligonucleotide
  Antisense strand to SEQ ID NO: 307436
guuucucgggagcaguuca

SEQ ID NO: 307438 - RNA, 19 nt, Artificial Sequence
  Description of Artificial Sequence: Synthetic oligonucleotide
  Sense strand starting at position 2513 of SEQ ID NO: 3949
guuuguuuauuucccugau

SEQ ID NO: 307439 - RNA, 19 nt, Artificial Sequence
  Description of Artificial Sequence: Synthetic oligonucleotide
  Antisense strand to SEQ ID NO: 307438
aucagggaaauaaacaaac

SEQ ID NO: 307440 - RNA, 19 nt, Artificial Sequence
  Description of Artificial Sequence: Synthetic oligonucleotide
  Sense strand starting at position 2534 of SEQ ID NO: 3949
accuauccgucucuaauga

SEQ ID NO: 307441 - RNA, 19 nt, Artificial Sequence
  Description of Artificial Sequence: Synthetic oligonucleotide
  Antisense strand to SEQ ID NO: 307440
ucauuagagacggauaggu

SEQ ID NO: 307442 - RNA, 19 nt, Artificial Sequence
  Description of Artificial Sequence: Synthetic oligonucleotide
  Sense strand starting at position 2602 of SEQ ID NO: 3949
gauacaagugaucaaacgu

SEQ ID NO: 307443 - RNA, 19 nt, Artificial Sequence
  Description of Artificial Sequence: Synthetic oligonucleotide
  Antisense strand to SEQ ID NO: 307442
acguuugaucacuuguauc

SEQ ID NO: 307444 - RNA, 19 nt, Artificial Sequence
  Description of Artificial Sequence: Synthetic oligonucleotide
  Sense strand starting at position 2608 of SEQ ID NO: 3949
agugaucaaacgugauuag

SEQ ID NO: 307445 - RNA, 19 nt, Artificial Sequence
  Description of Artificial Sequence: Synthetic oligonucleotide
  Antisense strand to SEQ ID NO: 307444
cuaaucacguuugaucacu

SEQ ID NO: 307446 - RNA, 19 nt, Artificial Sequence
  Description of Artificial Sequence: Synthetic oligonucleotide
  Sense strand starting at position 2609 of SEQ ID NO: 3949
gugaucaaacgugauuagu

SEQ ID NO: 307447 - RNA, 19 nt, Artificial Sequence
  Description of Artificial Sequence: Synthetic oligonucleotide
  Antisense strand to SEQ ID NO: 307446
acuaaucacguuugaucac

SEQ ID NO: 307448 - RNA, 19 nt, Artificial Sequence
  Description of Artificial Sequence: Synthetic oligonucleotide
  Sense strand starting at position 2620 of SEQ ID NO: 3949
ugauuaguggcccagacau

SEQ ID NO: 307449 - RNA, 19 nt, Artificial Sequence
  Description of Artificial Sequence: Synthetic oligonucleotide
  Antisense strand to SEQ ID NO: 307448
augucugggccacuaauca

SEQ ID NO: 307450 - RNA, 19 nt, Artificial Sequence
  Description of Artificial Sequence: Synthetic oligonucleotide
  Sense strand starting at position 2650 of SEQ ID NO: 3949
gccauugcuugacuuaaag

SEQ ID NO: 307451 - RNA, 19 nt, Artificial Sequence
  Description of Artificial Sequence: Synthetic oligonucleotide
  Antisense strand to SEQ ID NO: 307450
cuuuaagucaagcaauggc

SEQ ID NO: 307452 - RNA, 19 nt, Artificial Sequence
  Description of Artificial Sequence: Synthetic oligonucleotide
  Sense strand starting at position 2760 of SEQ ID NO: 3949
cguuguagugagcugugau

SEQ ID NO: 307453 - RNA, 19 nt, Artificial Sequence
  Description of Artificial Sequence: Synthetic oligonucleotide
  Antisense strand to SEQ ID NO: 307452
aucacagcucacuacaacg

SEQ ID NO: 307454 - RNA, 19 nt, Artificial Sequence
  Description of Artificial Sequence: Synthetic oligonucleotide
  Sense strand starting at position 2843 of SEQ ID NO: 3949
ggcucaucuugucugaaca

SEQ ID NO: 307455 - RNA, 19 nt, Artificial Sequence
  Description of Artificial Sequence: Synthetic oligonucleotide
  Antisense strand to SEQ ID NO: 307454
uguucagacaagaugagcc

SEQ ID NO: 307456 - RNA, 19 nt, Artificial Sequence
  Description of Artificial Sequence: Synthetic oligonucleotide
  Sense strand starting at position 2844 of SEQ ID NO: 3949
gcucaucuugucugaacau

SEQ ID NO: 307457 - RNA, 19 nt, Artificial Sequence
  Description of Artificial Sequence: Synthetic oligonucleotide
  Antisense strand to SEQ ID NO: 307456
auguucagacaagaugagc

SEQ ID NO: 307458 - RNA, 19 nt, Artificial Sequence
  Description of Artificial Sequence: Synthetic oligonucleotide
  Sense strand starting at position 2917 of SEQ ID NO: 3949
caugaauguuugcugaaua

SEQ ID NO: 307459 - RNA, 19 nt, Artificial Sequence
  Description of Artificial Sequence: Synthetic oligonucleotide
  Antisense strand to SEQ ID NO: 307458
uauucagcaaacauucaug

SEQ ID NO: 307460 - RNA, 19 nt, Artificial Sequence
  Description of Artificial Sequence: Synthetic oligonucleotide
  Sense strand starting at position 2922 of SEQ ID NO: 3949
auguuugcugaauacauua

SEQ ID NO: 307461 - RNA, 19 nt, Artificial Sequence
  Description of Artificial Sequence: Synthetic oligonucleotide
  Antisense strand to SEQ ID NO: 307460
uaauguauucagcaaacau

SEQ ID NO: 307462 - RNA, 19 nt, Artificial Sequence
  Description of Artificial Sequence: Synthetic oligonucleotide
  Sense strand starting at position 2941 of SEQ ID NO: 3949
auaaauggguaagauugaa

SEQ ID NO: 307463 - RNA, 19 nt, Artificial Sequence
  Description of Artificial Sequence: Synthetic oligonucleotide
  Antisense strand to SEQ ID NO: 307462
uucaaucuuacccauuuau

SEQ ID NO: 307464 - RNA, 19 nt, Artificial Sequence
  Description of Artificial Sequence: Synthetic oligonucleotide
  Sense strand starting at position 2991 of SEQ ID NO: 3949
uaaugucaccuuggguaga

SEQ ID NO: 307465 - RNA, 19 nt, Artificial Sequence
  Description of Artificial Sequence: Synthetic oligonucleotide
  Antisense strand to SEQ ID NO: 307464
ucuacccaaggugacauua

SEQ ID NO: 307466 - RNA, 19 nt, Artificial Sequence
  Description of Artificial Sequence: Synthetic oligonucleotide
  Sense strand starting at position 3213 of SEQ ID NO: 3949
guuucugaauggcugauua

SEQ ID NO: 307467 - RNA, 19 nt, Artificial Sequence
  Description of Artificial Sequence: Synthetic oligonucleotide
  Antisense strand to SEQ ID NO: 307466
uaaucagccauucagaaac

SEQ ID NO: 307468 - RNA, 19 nt, Artificial Sequence
  Description of Artificial Sequence: Synthetic oligonucleotide
  Sense strand starting at position 3215 of SEQ ID NO: 3949
uucugaauggcugauuaua

SEQ ID NO: 307469 - RNA, 19 nt, Artificial Sequence
  Description of Artificial Sequence: Synthetic oligonucleotide
  Antisense strand to SEQ ID NO: 307468
uauaaucagccauucagaa

SEQ ID NO: 307470 - RNA, 19 nt, Artificial Sequence
  Description of Artificial Sequence: Synthetic oligonucleotide
  Sense strand starting at position 3251 of SEQ ID NO: 3949
gacauauggucacuugggu

SEQ ID NO: 307471 - RNA, 19 nt, Artificial Sequence
  Description of Artificial Sequence: Synthetic oligonucleotide
  Antisense strand to SEQ ID NO: 307470
acccaagugaccauauguc

SEQ ID NO: 307472 - RNA, 19 nt, Artificial Sequence
  Description of Artificial Sequence: Synthetic oligonucleotide
  Sense strand starting at position 3332 of SEQ ID NO: 3949
cagauuguaucguucccaa

SEQ ID NO: 307473 - RNA, 19 nt, Artificial Sequence
  Description of Artificial Sequence: Synthetic oligonucleotide
  Antisense strand to SEQ ID NO: 307472
uugggaacgauacaaucug

SEQ ID NO: 307474 - RNA, 19 nt, Artificial Sequence
  Description of Artificial Sequence: Synthetic oligonucleotide
  Sense strand starting at position 3335 of SEQ ID NO: 3949
auuguaucguucccaaaca

SEQ ID NO: 307475 - RNA, 19 nt, Artificial Sequence
  Description of Artificial Sequence: Synthetic oligonucleotide
  Antisense strand to SEQ ID NO: 307474
uguuugggaacgauacaau

SEQ ID NO: 307476 - RNA, 19 nt, Artificial Sequence
  Description of Artificial Sequence: Synthetic oligonucleotide
  Sense strand starting at position 3355 of SEQ ID NO: 3949
ugcagaacugcugauaaca

SEQ ID NO: 307477 - RNA, 19 nt, Artificial Sequence
  Description of Artificial Sequence: Synthetic oligonucleotide
  Antisense strand to SEQ ID NO: 307476
uguuaucagcaguucugca

SEQ ID NO: 307478 - RNA, 19 nt, Artificial Sequence
  Description of Artificial Sequence: Synthetic oligonucleotide
  Sense strand starting at position 3695 of SEQ ID NO: 3949
gaaaguuuauuucccgcuu

SEQ ID NO: 307479 - RNA, 19 nt, Artificial Sequence
  Description of Artificial Sequence: Synthetic oligonucleotide
  Antisense strand to SEQ ID NO: 307478
aagcgggaaauaaacuuuc

SEQ ID NO: 307480 - RNA, 19 nt, Artificial Sequence
  Description of Artificial Sequence: Synthetic oligonucleotide
  Sense strand starting at position 3738 of SEQ ID NO: 3949
augcuauugguguaaucau

SEQ ID NO: 307481 - RNA, 19 nt, Artificial Sequence
  Description of Artificial Sequence: Synthetic oligonucleotide
  Antisense strand to SEQ ID NO: 307480
augauuacaccaauagcau

SEQ ID NO: 307482 - RNA, 19 nt, Artificial Sequence
  Description of Artificial Sequence: Synthetic oligonucleotide
  Sense strand starting at position 3759 of SEQ ID NO: 3949
uacaguauugguuguauac

SEQ ID NO: 307483 - RNA, 19 nt, Artificial Sequence
  Description of Artificial Sequence: Synthetic oligonucleotide
  Antisense strand to SEQ ID NO: 307482
guauacaaccaauacugua

SEQ ID NO: 307484 - RNA, 19 nt, Artificial Sequence
  Description of Artificial Sequence: Synthetic oligonucleotide
  Sense strand starting at position 3978 of SEQ ID NO: 3949
ugauuaagaugcuuaacuc

SEQ ID NO: 307485 - RNA, 19 nt, Artificial Sequence
  Description of Artificial Sequence: Synthetic oligonucleotide
  Antisense strand to SEQ ID NO: 307484
gaguuaagcaucuuaauca

SEQ ID NO: 307486 - RNA, 19 nt, Artificial Sequence
  Description of Artificial Sequence: Synthetic oligonucleotide
  Sense strand starting at position 113 of SEQ ID NO: 3951
cugacaaagugugcuggau

SEQ ID NO: 307487 - RNA, 19 nt, Artificial Sequence
  Description of Artificial Sequence: Synthetic oligonucleotide
  Antisense strand to SEQ ID NO: 307486
auccagcacacuuugucag

SEQ ID NO: 307488 - RNA, 19 nt, Artificial Sequence
  Description of Artificial Sequence: Synthetic oligonucleotide
  Sense strand starting at position 548 of SEQ ID NO: 3951
cguuaagggauuugccgaa

SEQ ID NO: 307489 - RNA, 19 nt, Artificial Sequence
  Description of Artificial Sequence: Synthetic oligonucleotide
  Antisense strand to SEQ ID NO: 307488
uucggcaaaucccuuaacg

SEQ ID NO: 307490 - RNA, 19 nt, Artificial Sequence
  Description of Artificial Sequence: Synthetic oligonucleotide
  Sense strand starting at position 598 of SEQ ID NO: 3951
ccgucucuuggacaaucua

SEQ ID NO: 307491 - RNA, 19 nt, Artificial Sequence
  Description of Artificial Sequence: Synthetic oligonucleotide
  Antisense strand to SEQ ID NO: 307490
uagauuguccaagagacgg

SEQ ID NO: 307492 - RNA, 19 nt, Artificial Sequence
  Description of Artificial Sequence: Synthetic oligonucleotide
  Sense strand starting at position 621 of SEQ ID NO: 3951
uugucuacuuucucagaag

SEQ ID NO: 307493 - RNA, 19 nt, Artificial Sequence
  Description of Artificial Sequence: Synthetic oligonucleotide
  Antisense strand to SEQ ID NO: 307492
cuucugagaaaguagacaa

SEQ ID NO: 307494 - RNA, 19 nt, Artificial Sequence
  Description of Artificial Sequence: Synthetic oligonucleotide
  Sense strand starting at position 819 of SEQ ID NO: 3951
ucgcccauaugcuuauuua

SEQ ID NO: 307495 - RNA, 19 nt, Artificial Sequence
  Description of Artificial Sequence: Synthetic oligonucleotide
  Antisense strand to SEQ ID NO: 307494
uaaauaagcauaugggcga

SEQ ID NO: 307496 - RNA, 19 nt, Artificial Sequence
  Description of Artificial Sequence: Synthetic oligonucleotide
  Sense strand starting at position 820 of SEQ ID NO: 3951
cgcccauaugcuuauuuaa

SEQ ID NO: 307497 - RNA, 19 nt, Artificial Sequence
  Description of Artificial Sequence: Synthetic oligonucleotide
  Antisense strand to SEQ ID NO: 307496
uuaaauaagcauaugggcg

SEQ ID NO: 307498 - RNA, 19 nt, Artificial Sequence
  Description of Artificial Sequence: Synthetic oligonucleotide
  Sense strand starting at position 829 of SEQ ID NO: 3951
gcuuauuuaagguggcgau

SEQ ID NO: 307499 - RNA, 19 nt, Artificial Sequence
  Description of Artificial Sequence: Synthetic oligonucleotide
  Antisense strand to SEQ ID NO: 307498
aucgccaccuuaaauaagc

SEQ ID NO: 307500 - RNA, 19 nt, Artificial Sequence
  Description of Artificial Sequence: Synthetic oligonucleotide
  Sense strand starting at position 830 of SEQ ID NO: 3951
cuuauuuaagguggcgauu

SEQ ID NO: 307501 - RNA, 19 nt, Artificial Sequence
  Description of Artificial Sequence: Synthetic oligonucleotide
  Antisense strand to SEQ ID NO: 307500
aaucgccaccuuaaauaag

SEQ ID NO: 307502 - RNA, 19 nt, Artificial Sequence
  Description of Artificial Sequence: Synthetic oligonucleotide
  Sense strand starting at position 2254 of SEQ ID NO: 3951
gagacuaauggguguuguu

SEQ ID NO: 307503 - RNA, 19 nt, Artificial Sequence
  Description of Artificial Sequence: Synthetic oligonucleotide
  Antisense strand to SEQ ID NO: 307502
aacaacacccauuagucuc

SEQ ID NO: 307504 - RNA, 19 nt, Artificial Sequence
  Description of Artificial Sequence: Synthetic oligonucleotide
  Sense strand starting at position 2368 of SEQ ID NO: 3951
uagaauguauuuggagauu

SEQ ID NO: 307505 - RNA, 19 nt, Artificial Sequence
  Description of Artificial Sequence: Synthetic oligonucleotide
  Antisense strand to SEQ ID NO: 307504
aaucuccaaauacauucua

SEQ ID NO: 307506 - RNA, 19 nt, Artificial Sequence
  Description of Artificial Sequence: Synthetic oligonucleotide
  Sense strand starting at position 2441 of SEQ ID NO: 3951
agggaaguguccuucggau

SEQ ID NO: 307507 - RNA, 19 nt, Artificial Sequence
  Description of Artificial Sequence: Synthetic oligonucleotide
  Antisense strand to SEQ ID NO: 307506
auccgaaggacacuucccu

SEQ ID NO: 307508 - RNA, 19 nt, Artificial Sequence
  Description of Artificial Sequence: Synthetic oligonucleotide
  Sense strand starting at position 2443 of SEQ ID NO: 3951
ggaaguguccuucggauua

SEQ ID NO: 307509 - RNA, 19 nt, Artificial Sequence
  Description of Artificial Sequence: Synthetic oligonucleotide
  Antisense strand to SEQ ID NO: 307508
uaauccgaaggacacuucc

SEQ ID NO: 307510 - RNA, 19 nt, Artificial Sequence
  Description of Artificial Sequence: Synthetic oligonucleotide
  Sense strand starting at position 2453 of SEQ ID NO: 3951
uucggauuauuugaaaccu

SEQ ID NO: 307511 - RNA, 19 nt, Artificial Sequence
  Description of Artificial Sequence: Synthetic oligonucleotide
  Antisense strand to SEQ ID NO: 307510
agguuucaaauaauccgaa

SEQ ID NO: 307512 - RNA, 19 nt, Artificial Sequence
  Description of Artificial Sequence: Synthetic oligonucleotide
  Sense strand starting at position 2634 of SEQ ID NO: 3951
gagugauguugagucagaa

SEQ ID NO: 307513 - RNA, 19 nt, Artificial Sequence
  Description of Artificial Sequence: Synthetic oligonucleotide
  Antisense strand to SEQ ID NO: 307512
uucugacucaacaucacuc

SEQ ID NO: 307514 - RNA, 19 nt, Artificial Sequence
  Description of Artificial Sequence: Synthetic oligonucleotide
  Sense strand starting at position 2665 of SEQ ID NO: 3951
aaagcuuuagguggagaua

SEQ ID NO: 307515 - RNA, 19 nt, Artificial Sequence
  Description of Artificial Sequence: Synthetic oligonucleotide
  Antisense strand to SEQ ID NO: 307514
uaucuccaccuaaagcuuu

SEQ ID NO: 307516 - RNA, 19 nt, Artificial Sequence
  Description of Artificial Sequence: Synthetic oligonucleotide
  Sense strand starting at position 2674 of SEQ ID NO: 3951
gguggagauagugacaguu

SEQ ID NO: 307517 - RNA, 19 nt, Artificial Sequence
  Description of Artificial Sequence: Synthetic oligonucleotide
  Antisense strand to SEQ ID NO: 307516
aacugucacuaucuccacc

SEQ ID NO: 307518 - RNA, 19 nt, Artificial Sequence
  Description of Artificial Sequence: Synthetic oligonucleotide
  Sense strand starting at position 2850 of SEQ ID NO: 3951
guggauuccucucccacaa

SEQ ID NO: 307519 - RNA, 19 nt, Artificial Sequence
  Description of Artificial Sequence: Synthetic oligonucleotide
  Antisense strand to SEQ ID NO: 307518
uugugggagaggaauccac

SEQ ID NO: 307520 - RNA, 19 nt, Artificial Sequence
  Description of Artificial Sequence: Synthetic oligonucleotide
  Sense strand starting at position 2964 of SEQ ID NO: 3951
gacugagugagccaacgua

SEQ ID NO: 307521 - RNA, 19 nt, Artificial Sequence
  Description of Artificial Sequence: Synthetic oligonucleotide
  Antisense strand to SEQ ID NO: 307520
uacguuggcucacucaguc

SEQ ID NO: 307522 - RNA, 19 nt, Artificial Sequence
  Description of Artificial Sequence: Synthetic oligonucleotide
  Sense strand starting at position 2972 of SEQ ID NO: 3951
gagccaacguauuugcuua

SEQ ID NO: 307523 - RNA, 19 nt, Artificial Sequence
  Description of Artificial Sequence: Synthetic oligonucleotide
  Antisense strand to SEQ ID NO: 307522
uaagcaaauacguuggcuc

SEQ ID NO: 307524 - RNA, 19 nt, Artificial Sequence
  Description of Artificial Sequence: Synthetic oligonucleotide
  Sense strand starting at position 3015 of SEQ ID NO: 3951
ugguaaaggcuugauagca

SEQ ID NO: 307525 - RNA, 19 nt, Artificial Sequence
  Description of Artificial Sequence: Synthetic oligonucleotide
  Antisense strand to SEQ ID NO: 307524
ugcuaucaagccuuuacca

SEQ ID NO: 307526 - RNA, 19 nt, Artificial Sequence
  Description of Artificial Sequence: Synthetic oligonucleotide
  Sense strand starting at position 3036 of SEQ ID NO: 3951
ucuaaagaguaaguuacau

SEQ ID NO: 307527 - RNA, 19 nt, Artificial Sequence
  Description of Artificial Sequence: Synthetic oligonucleotide
  Antisense strand to SEQ ID NO: 307526
auguaacuuacucuuuaga

SEQ ID NO: 307528 - RNA, 19 nt, Artificial Sequence
  Description of Artificial Sequence: Synthetic oligonucleotide
  Sense strand starting at position 3384 of SEQ ID NO: 3951
ccagcuuuacacgauguga

SEQ ID NO: 307529 - RNA, 19 nt, Artificial Sequence
  Description of Artificial Sequence: Synthetic oligonucleotide
  Antisense strand to SEQ ID NO: 307528
ucacaucguguaaagcugg

SEQ ID NO: 307530 - RNA, 19 nt, Artificial Sequence
  Description of Artificial Sequence: Synthetic oligonucleotide
  Sense strand starting at position 3467 of SEQ ID NO: 3951
aaaggaaagcuguacguua

SEQ ID NO: 307531 - RNA, 19 nt, Artificial Sequence
  Description of Artificial Sequence: Synthetic oligonucleotide
  Antisense strand to SEQ ID NO: 307530
uaacguacagcuuuccuuu

SEQ ID NO: 307532 - RNA, 19 nt, Artificial Sequence
  Description of Artificial Sequence: Synthetic oligonucleotide
  Sense strand starting at position 3469 of SEQ ID NO: 3951
aggaaagcuguacguuaaa

SEQ ID NO: 307533 - RNA, 19 nt, Artificial Sequence
  Description of Artificial Sequence: Synthetic oligonucleotide
  Antisense strand to SEQ ID NO: 307532
uuuaacguacagcuuuccu

SEQ ID NO: 307534 - RNA, 19 nt, Artificial Sequence
  Description of Artificial Sequence: Synthetic oligonucleotide
  Sense strand starting at position 3472 of SEQ ID NO: 3951
aaagcuguacguuaaacau

SEQ ID NO: 307535 - RNA, 19 nt, Artificial Sequence
  Description of Artificial Sequence: Synthetic oligonucleotide
  Antisense strand to SEQ ID NO: 307534
auguuuaacguacagcuuu

SEQ ID NO: 307536 - RNA, 19 nt, Artificial Sequence
  Description of Artificial Sequence: Synthetic oligonucleotide
  Sense strand starting at position 3537 of SEQ ID NO: 3951
aggccaauugcugauagga

SEQ ID NO: 307537 - RNA, 19 nt, Artificial Sequence
  Description of Artificial Sequence: Synthetic oligonucleotide
  Antisense strand to SEQ ID NO: 307536
uccuaucagcaauuggccu

SEQ ID NO: 307538 - RNA, 19 nt, Artificial Sequence
  Description of Artificial Sequence: Synthetic oligonucleotide
  Sense strand starting at position 3588 of SEQ ID NO: 3951
uauuuaguuguuugguaac

SEQ ID NO: 307539 - RNA, 19 nt, Artificial Sequence
  Description of Artificial Sequence: Synthetic oligonucleotide
  Antisense strand to SEQ ID NO: 307538
guuaccaaacaacuaaaua

SEQ ID NO: 307540 - RNA, 19 nt, Artificial Sequence
  Description of Artificial Sequence: Synthetic oligonucleotide
  Sense strand starting at position 3599 of SEQ ID NO: 3951
uugguaacaucuucuacag

SEQ ID NO: 307541 - RNA, 19 nt, Artificial Sequence
  Description of Artificial Sequence: Synthetic oligonucleotide
  Antisense strand to SEQ ID NO: 307540
cuguagaagauguuaccaa

SEQ ID NO: 307542 - RNA, 19 nt, Artificial Sequence
  Description of Artificial Sequence: Synthetic oligonucleotide
  Sense strand starting at position 3619 of SEQ ID NO: 3951
agaaauaguauuggguuga

SEQ ID NO: 307543 - RNA, 19 nt, Artificial Sequence
  Description of Artificial Sequence: Synthetic oligonucleotide
  Antisense strand to SEQ ID NO: 307542
ucaacccaauacuauuucu

SEQ ID NO: 307544 - RNA, 19 nt, Artificial Sequence
  Description of Artificial Sequence: Synthetic oligonucleotide
  Sense strand starting at position 3644 of SEQ ID NO: 3951
agggaaguguauucuaauc

SEQ ID NO: 307545 - RNA, 19 nt, Artificial Sequence
  Description of Artificial Sequence: Synthetic oligonucleotide
  Antisense strand to SEQ ID NO: 307544
gauuagaauacacuucccu

SEQ ID NO: 307546 - RNA, 19 nt, Artificial Sequence
  Description of Artificial Sequence: Synthetic oligonucleotide
  Sense strand starting at position 3649 of SEQ ID NO: 3951
aguguauucuaauccucau

SEQ ID NO: 307547 - RNA, 19 nt, Artificial Sequence
  Description of Artificial Sequence: Synthetic oligonucleotide
  Antisense strand to SEQ ID NO: 307546
augaggauuagaauacacu

SEQ ID NO: 307548 - RNA, 19 nt, Artificial Sequence
  Description of Artificial Sequence: Synthetic oligonucleotide
  Sense strand starting at position 3660 of SEQ ID NO: 3951
auccucauucuacgaaguu

SEQ ID NO: 307549 - RNA, 19 nt, Artificial Sequence
  Description of Artificial Sequence: Synthetic oligonucleotide
  Antisense strand to SEQ ID NO: 307548
aacuucguagaaugaggau

SEQ ID NO: 307550 - RNA, 19 nt, Artificial Sequence
  Description of Artificial Sequence: Synthetic oligonucleotide
  Sense strand starting at position 3771 of SEQ ID NO: 3951
ccaugauuccgugauucuu

SEQ ID NO: 307551 - RNA, 19 nt, Artificial Sequence
  Description of Artificial Sequence: Synthetic oligonucleotide
  Antisense strand to SEQ ID NO: 307550
aagaaucacggaaucaugg

SEQ ID NO: 307552 - RNA, 19 nt, Artificial Sequence
  Description of Artificial Sequence: Synthetic oligonucleotide
  Sense strand starting at position 3797 of SEQ ID NO: 3951
cuugaagucauggaguuua

SEQ ID NO: 307553 - RNA, 19 nt, Artificial Sequence
  Description of Artificial Sequence: Synthetic oligonucleotide
  Antisense strand to SEQ ID NO: 307552
uaaacuccaugacuucaag

SEQ ID NO: 307554 - RNA, 19 nt, Artificial Sequence
  Description of Artificial Sequence: Synthetic oligonucleotide
  Sense strand starting at position 3802 of SEQ ID NO: 3951
agucauggaguuuaacuua

SEQ ID NO: 307555 - RNA, 19 nt, Artificial Sequence
  Description of Artificial Sequence: Synthetic oligonucleotide
  Antisense strand to SEQ ID NO: 307554
uaaguuaaacuccaugacu

SEQ ID NO: 307556 - RNA, 19 nt, Artificial Sequence
  Description of Artificial Sequence: Synthetic oligonucleotide
  Sense strand starting at position 3832 of SEQ ID NO: 3951
acagaauauuuaggaucua

SEQ ID NO: 307557 - RNA, 19 nt, Artificial Sequence
  Description of Artificial Sequence: Synthetic oligonucleotide
  Antisense strand to SEQ ID NO: 307556
uagauccuaaauauucugu

SEQ ID NO: 307558 - RNA, 19 nt, Artificial Sequence
  Description of Artificial Sequence: Synthetic oligonucleotide
  Sense strand starting at position 3847 of SEQ ID NO: 3951
ucuacuaacugcuugggaa

SEQ ID NO: 307559 - RNA, 19 nt, Artificial Sequence
  Description of Artificial Sequence: Synthetic oligonucleotide
  Antisense strand to SEQ ID NO: 307558
uucccaagcaguuaguaga

SEQ ID NO: 307560 - RNA, 19 nt, Artificial Sequence
  Description of Artificial Sequence: Synthetic oligonucleotide
  Sense strand starting at position 3848 of SEQ ID NO: 3951
cuacuaacugcuugggaaa

SEQ ID NO: 307561 - RNA, 19 nt, Artificial Sequence
  Description of Artificial Sequence: Synthetic oligonucleotide
  Antisense strand to SEQ ID NO: 307560
uuucccaagcaguuaguag

SEQ ID NO: 307562 - RNA, 19 nt, Artificial Sequence
  Description of Artificial Sequence: Synthetic oligonucleotide
  Sense strand starting at position 3870 of SEQ ID NO: 3951
gagugaaacaugggucaug

SEQ ID NO: 307563 - RNA, 19 nt, Artificial Sequence
  Description of Artificial Sequence: Synthetic oligonucleotide
  Antisense strand to SEQ ID NO: 307562
caugacccauguuucacuc

SEQ ID NO: 307564 - RNA, 19 nt, Artificial Sequence
  Description of Artificial Sequence: Synthetic oligonucleotide
  Sense strand starting at position 3943 of SEQ ID NO: 3951
ugagaagugcuguauuaaa

SEQ ID NO: 307565 - RNA, 19 nt, Artificial Sequence
  Description of Artificial Sequence: Synthetic oligonucleotide
  Antisense strand to SEQ ID NO: 307564
uuuaauacagcacuucuca

SEQ ID NO: 307566 - RNA, 19 nt, Artificial Sequence
  Description of Artificial Sequence: Synthetic oligonucleotide
  Sense strand starting at position 85 of SEQ ID NO: 3952
gucagaauguuagucuaau

SEQ ID NO: 307567 - RNA, 19 nt, Artificial Sequence
  Description of Artificial Sequence: Synthetic oligonucleotide
  Antisense strand to SEQ ID NO: 307566
auuagacuaacauucugac

SEQ ID NO: 307568 - RNA, 19 nt, Artificial Sequence
  Description of Artificial Sequence: Synthetic oligonucleotide
  Sense strand starting at position 86 of SEQ ID NO: 3952
ucagaauguuagucuaauc

SEQ ID NO: 307569 - RNA, 19 nt, Artificial Sequence
  Description of Artificial Sequence: Synthetic oligonucleotide
  Antisense strand to SEQ ID NO: 307568
gauuagacuaacauucuga

SEQ ID NO: 307570 - RNA, 19 nt, Artificial Sequence
  Description of Artificial Sequence: Synthetic oligonucleotide
  Sense strand starting at position 91 of SEQ ID NO: 3952
auguuagucuaaucucuac

SEQ ID NO: 307571 - RNA, 19 nt, Artificial Sequence
  Description of Artificial Sequence: Synthetic oligonucleotide
  Antisense strand to SEQ ID NO: 307570
guagagauuagacuaacau

SEQ ID NO: 307572 - RNA, 19 nt, Artificial Sequence
  Description of Artificial Sequence: Synthetic oligonucleotide
  Sense strand starting at position 114 of SEQ ID NO: 3952
ggacacucuuaacugaagu

SEQ ID NO: 307573 - RNA, 19 nt, Artificial Sequence
  Description of Artificial Sequence: Synthetic oligonucleotide
  Antisense strand to SEQ ID NO: 307572
acuucaguuaagagugucc

SEQ ID NO: 307574 - RNA, 19 nt, Artificial Sequence
  Description of Artificial Sequence: Synthetic oligonucleotide
  Sense strand starting at position 174 of SEQ ID NO: 3952
aguaauguugcuuacauac

SEQ ID NO: 307575 - RNA, 19 nt, Artificial Sequence
  Description of Artificial Sequence: Synthetic oligonucleotide
  Antisense strand to SEQ ID NO: 307574
guauguaagcaacauuacu

SEQ ID NO: 307576 - RNA, 19 nt, Artificial Sequence
  Description of Artificial Sequence: Synthetic oligonucleotide
  Sense strand starting at position 309 of SEQ ID NO: 3952
cugacaaagugugcuggau

SEQ ID NO: 307577 - RNA, 19 nt, Artificial Sequence
  Description of Artificial Sequence: Synthetic oligonucleotide
  Antisense strand to SEQ ID NO: 307576
auccagcacacuuugucag

SEQ ID NO: 307578 - RNA, 19 nt, Artificial Sequence
  Description of Artificial Sequence: Synthetic oligonucleotide
  Sense strand starting at position 744 of SEQ ID NO: 3952
cguuaagggauuugccgaa

SEQ ID NO: 307579 - RNA, 19 nt, Artificial Sequence
  Description of Artificial Sequence: Synthetic oligonucleotide
  Antisense strand to SEQ ID NO: 307578
uucggcaaaucccuuaacg

SEQ ID NO: 307580 - RNA, 19 nt, Artificial Sequence
  Description of Artificial Sequence: Synthetic oligonucleotide
  Sense strand starting at position 794 of SEQ ID NO: 3952
ccgucucuuggacaaucua

SEQ ID NO: 307581 - RNA, 19 nt, Artificial Sequence
  Description of Artificial Sequence: Synthetic oligonucleotide
  Antisense strand to SEQ ID NO: 307580
uagauuguccaagagacgg

SEQ ID NO: 307582 - RNA, 19 nt, Artificial Sequence
  Description of Artificial Sequence: Synthetic oligonucleotide
  Sense strand starting at position 817 of SEQ ID NO: 3952
uugucuacuuucucagaag

SEQ ID NO: 307583 - RNA, 19 nt, Artificial Sequence
  Description of Artificial Sequence: Synthetic oligonucleotide
  Antisense strand to SEQ ID NO: 307582
cuucugagaaaguagacaa

SEQ ID NO: 307584 - RNA, 19 nt, Artificial Sequence
  Description of Artificial Sequence: Synthetic oligonucleotide
  Sense strand starting at position 1015 of SEQ ID NO: 3952
ucgcccauaugcuuauuua

SEQ ID NO: 307585 - RNA, 19 nt, Artificial Sequence
  Description of Artificial Sequence: Synthetic oligonucleotide
  Antisense strand to SEQ ID NO: 307584
uaaauaagcauaugggcga

SEQ ID NO: 307586 - RNA, 19 nt, Artificial Sequence
  Description of Artificial Sequence: Synthetic oligonucleotide
  Sense strand starting at position 1016 of SEQ ID NO: 3952
cgcccauaugcuuauuuaa

SEQ ID NO: 307587 - RNA, 19 nt, Artificial Sequence
  Description of Artificial Sequence: Synthetic oligonucleotide
  Antisense strand to SEQ ID NO: 307586
uuaaauaagcauaugggcg

SEQ ID NO: 307588 - RNA, 19 nt, Artificial Sequence
  Description of Artificial Sequence: Synthetic oligonucleotide
  Sense strand starting at position 1025 of SEQ ID NO: 3952
gcuuauuuaagguggcgau

SEQ ID NO: 307589 - RNA, 19 nt, Artificial Sequence
  Description of Artificial Sequence: Synthetic oligonucleotide
  Antisense strand to SEQ ID NO: 307588
aucgccaccuuaaauaagc

SEQ ID NO: 307590 - RNA, 19 nt, Artificial Sequence
  Description of Artificial Sequence: Synthetic oligonucleotide
  Sense strand starting at position 1026 of SEQ ID NO: 3952
cuuauuuaagguggcgauu

SEQ ID NO: 307591 - RNA, 19 nt, Artificial Sequence
  Description of Artificial Sequence: Synthetic oligonucleotide
  Antisense strand to SEQ ID NO: 307590
aaucgccaccuuaaauaag

SEQ ID NO: 307592 - RNA, 19 nt, Artificial Sequence
  Description of Artificial Sequence: Synthetic oligonucleotide
  Sense strand starting at position 2450 of SEQ ID NO: 3952
gagacuaauggguguuguu

SEQ ID NO: 307593 - RNA, 19 nt, Artificial Sequence
  Description of Artificial Sequence: Synthetic oligonucleotide
  Antisense strand to SEQ ID NO: 307592
aacaacacccauuagucuc

SEQ ID NO: 307594 - RNA, 19 nt, Artificial Sequence
  Description of Artificial Sequence: Synthetic oligonucleotide
  Sense strand starting at position 2564 of SEQ ID NO: 3952
uagaauguauuuggagauu

SEQ ID NO: 307595 - RNA, 19 nt, Artificial Sequence
  Description of Artificial Sequence: Synthetic oligonucleotide
  Antisense strand to SEQ ID NO: 307594
aaucuccaaauacauucua

SEQ ID NO: 307596 - RNA, 19 nt, Artificial Sequence
  Description of Artificial Sequence: Synthetic oligonucleotide
  Sense strand starting at position 2637 of SEQ ID NO: 3952
agggaaguguccuucggau

SEQ ID NO: 307597 - RNA, 19 nt, Artificial Sequence
  Description of Artificial Sequence: Synthetic oligonucleotide
  Antisense strand to SEQ ID NO: 307596
auccgaaggacacuucccu

SEQ ID NO: 307598 - RNA, 19 nt, Artificial Sequence
  Description of Artificial Sequence: Synthetic oligonucleotide
  Sense strand starting at position 2639 of SEQ ID NO: 3952
ggaaguguccuucggauua

SEQ ID NO: 307599 - RNA, 19 nt, Artificial Sequence
  Description of Artificial Sequence: Synthetic oligonucleotide
  Antisense strand to SEQ ID NO: 307598
uaauccgaaggacacuucc

SEQ ID NO: 307600 - RNA, 19 nt, Artificial Sequence
  Description of Artificial Sequence: Synthetic oligonucleotide
  Sense strand starting at position 2649 of SEQ ID NO: 3952
uucggauuauuugaaaccu

SEQ ID NO: 307601 - RNA, 19 nt, Artificial Sequence
  Description of Artificial Sequence: Synthetic oligonucleotide
  Antisense strand to SEQ ID NO: 307600
agguuucaaauaauccgaa

SEQ ID NO: 307602 - RNA, 19 nt, Artificial Sequence
  Description of Artificial Sequence: Synthetic oligonucleotide
  Sense strand starting at position 2830 of SEQ ID NO: 3952
gagugauguugagucagaa

SEQ ID NO: 307603 - RNA, 19 nt, Artificial Sequence
  Description of Artificial Sequence: Synthetic oligonucleotide
  Antisense strand to SEQ ID NO: 307602
uucugacucaacaucacuc

SEQ ID NO: 307604 - RNA, 19 nt, Artificial Sequence
  Description of Artificial Sequence: Synthetic oligonucleotide
  Sense strand starting at position 2861 of SEQ ID NO: 3952
aaagcuuuagguggagaua

SEQ ID NO: 307605 - RNA, 19 nt, Artificial Sequence
  Description of Artificial Sequence: Synthetic oligonucleotide
  Antisense strand to SEQ ID NO: 307604
uaucuccaccuaaagcuuu

SEQ ID NO: 307606 - RNA, 19 nt, Artificial Sequence
  Description of Artificial Sequence: Synthetic oligonucleotide
  Sense strand starting at position 2870 of SEQ ID NO: 3952
gguggagauagugacaguu

SEQ ID NO: 307607 - RNA, 19 nt, Artificial Sequence
  Description of Artificial Sequence: Synthetic oligonucleotide
  Antisense strand to SEQ ID NO: 307606
aacugucacuaucuccacc

SEQ ID NO: 307608 - RNA, 19 nt, Artificial Sequence
  Description of Artificial Sequence: Synthetic oligonucleotide
  Sense strand starting at position 3046 of SEQ ID NO: 3952
guggauuccucucccacaa

SEQ ID NO: 307609 - RNA, 19 nt, Artificial Sequence
  Description of Artificial Sequence: Synthetic oligonucleotide
  Antisense strand to SEQ ID NO: 307608
uugugggagaggaauccac

SEQ ID NO: 307610 - RNA, 19 nt, Artificial Sequence
  Description of Artificial Sequence: Synthetic oligonucleotide
  Sense strand starting at position 3160 of SEQ ID NO: 3952
gacugagugagccaacgua

SEQ ID NO: 307611 - RNA, 19 nt, Artificial Sequence
  Description of Artificial Sequence: Synthetic oligonucleotide
  Antisense strand to SEQ ID NO: 307610
uacguuggcucacucaguc

SEQ ID NO: 307612 - RNA, 19 nt, Artificial Sequence
  Description of Artificial Sequence: Synthetic oligonucleotide
  Sense strand starting at position 3168 of SEQ ID NO: 3952
gagccaacguauuugcuua

SEQ ID NO: 307613 - RNA, 19 nt, Artificial Sequence
  Description of Artificial Sequence: Synthetic oligonucleotide
  Antisense strand to SEQ ID NO: 307612
uaagcaaauacguuggcuc

SEQ ID NO: 307614 - RNA, 19 nt, Artificial Sequence
  Description of Artificial Sequence: Synthetic oligonucleotide
  Sense strand starting at position 3211 of SEQ ID NO: 3952
ugguaaaggcuugauagca

SEQ ID NO: 307615 - RNA, 19 nt, Artificial Sequence
  Description of Artificial Sequence: Synthetic oligonucleotide
  Antisense strand to SEQ ID NO: 307614
ugcuaucaagccuuuacca

SEQ ID NO: 307616 - RNA, 19 nt, Artificial Sequence
  Description of Artificial Sequence: Synthetic oligonucleotide
  Sense strand starting at position 3232 of SEQ ID NO: 3952
ucuaaagaguaaguuacau

SEQ ID NO: 307617 - RNA, 19 nt, Artificial Sequence
  Description of Artificial Sequence: Synthetic oligonucleotide
  Antisense strand to SEQ ID NO: 307616
auguaacuuacucuuuaga

SEQ ID NO: 307618 - RNA, 19 nt, Artificial Sequence
  Description of Artificial Sequence: Synthetic oligonucleotide
  Sense strand starting at position 3580 of SEQ ID NO: 3952
ccagcuuuacacgauguga

SEQ ID NO: 307619 - RNA, 19 nt, Artificial Sequence
  Description of Artificial Sequence: Synthetic oligonucleotide
  Antisense strand to SEQ ID NO: 307618
ucacaucguguaaagcugg

SEQ ID NO: 307620 - RNA, 19 nt, Artificial Sequence
  Description of Artificial Sequence: Synthetic oligonucleotide
  Sense strand starting at position 3582 of SEQ ID NO: 3952
agcuuuacacgaugugaug

SEQ ID NO: 307621 - RNA, 19 nt, Artificial Sequence
  Description of Artificial Sequence: Synthetic oligonucleotide
  Antisense strand to SEQ ID NO: 307620
caucacaucguguaaagcu

SEQ ID NO: 307622 - RNA, 19 nt, Artificial Sequence
  Description of Artificial Sequence: Synthetic oligonucleotide
  Sense strand starting at position 3663 of SEQ ID NO: 3952
aaaggaaagcuguacguua

SEQ ID NO: 307623 - RNA, 19 nt, Artificial Sequence
  Description of Artificial Sequence: Synthetic oligonucleotide
  Antisense strand to SEQ ID NO: 307622
uaacguacagcuuuccuuu

SEQ ID NO: 307624 - RNA, 19 nt, Artificial Sequence
  Description of Artificial Sequence: Synthetic oligonucleotide
  Sense strand starting at position 3665 of SEQ ID NO: 3952
aggaaagcuguacguuaaa

SEQ ID NO: 307625 - RNA, 19 nt, Artificial Sequence
  Description of Artificial Sequence: Synthetic oligonucleotide
  Antisense strand to SEQ ID NO: 307624
uuuaacguacagcuuuccu

SEQ ID NO: 307626 - RNA, 19 nt, Artificial Sequence
  Description of Artificial Sequence: Synthetic oligonucleotide
  Sense strand starting at position 3668 of SEQ ID NO: 3952
aaagcuguacguuaaacau

SEQ ID NO: 307627 - RNA, 19 nt, Artificial Sequence
  Description of Artificial Sequence: Synthetic oligonucleotide
  Antisense strand to SEQ ID NO: 307626
auguuuaacguacagcuuu

SEQ ID NO: 307628 - RNA, 19 nt, Artificial Sequence
  Description of Artificial Sequence: Synthetic oligonucleotide
  Sense strand starting at position 3676 of SEQ ID NO: 3952
acguuaaacauggguucuu

SEQ ID NO: 307629 - RNA, 19 nt, Artificial Sequence
  Description of Artificial Sequence: Synthetic oligonucleotide
  Antisense strand to SEQ ID NO: 307628
aagaacccauguuuaacgu

SEQ ID NO: 307630 - RNA, 19 nt, Artificial Sequence
  Description of Artificial Sequence: Synthetic oligonucleotide
  Sense strand starting at position 3733 of SEQ ID NO: 3952
aggccaauugcugauagga

SEQ ID NO: 307631 - RNA, 19 nt, Artificial Sequence
  Description of Artificial Sequence: Synthetic oligonucleotide
  Antisense strand to SEQ ID NO: 307630
uccuaucagcaauuggccu

SEQ ID NO: 307632 - RNA, 19 nt, Artificial Sequence
  Description of Artificial Sequence: Synthetic oligonucleotide
  Sense strand starting at position 3784 of SEQ ID NO: 3952
uauuuaguuguuugguaac

SEQ ID NO: 307633 - RNA, 19 nt, Artificial Sequence
  Description of Artificial Sequence: Synthetic oligonucleotide
  Antisense strand to SEQ ID NO: 307632
guuaccaaacaacuaaaua

SEQ ID NO: 307634 - RNA, 19 nt, Artificial Sequence
  Description of Artificial Sequence: Synthetic oligonucleotide
  Sense strand starting at position 3795 of SEQ ID NO: 3952
uugguaacaucuucuacag

SEQ ID NO: 307635 - RNA, 19 nt, Artificial Sequence
  Description of Artificial Sequence: Synthetic oligonucleotide
  Antisense strand to SEQ ID NO: 307634
cuguagaagauguuaccaa

SEQ ID NO: 307636 - RNA, 19 nt, Artificial Sequence
  Description of Artificial Sequence: Synthetic oligonucleotide
  Sense strand starting at position 3815 of SEQ ID NO: 3952
agaaauaguauuggguuga

SEQ ID NO: 307637 - RNA, 19 nt, Artificial Sequence
  Description of Artificial Sequence: Synthetic oligonucleotide
  Antisense strand to SEQ ID NO: 307636
ucaacccaauacuauuucu

SEQ ID NO: 307638 - RNA, 19 nt, Artificial Sequence
  Description of Artificial Sequence: Synthetic oligonucleotide
  Sense strand starting at position 3840 of SEQ ID NO: 3952
agggaaguguauucuaauc

SEQ ID NO: 307639 - RNA, 19 nt, Artificial Sequence
  Description of Artificial Sequence: Synthetic oligonucleotide
  Antisense strand to SEQ ID NO: 307638
gauuagaauacacuucccu

SEQ ID NO: 307640 - RNA, 19 nt, Artificial Sequence
  Description of Artificial Sequence: Synthetic oligonucleotide
  Sense strand starting at position 3845 of SEQ ID NO: 3952
aguguauucuaauccucau

SEQ ID NO: 307641 - RNA, 19 nt, Artificial Sequence
  Description of Artificial Sequence: Synthetic oligonucleotide
  Antisense strand to SEQ ID NO: 307640
augaggauuagaauacacu

SEQ ID NO: 307642 - RNA, 19 nt, Artificial Sequence
  Description of Artificial Sequence: Synthetic oligonucleotide
  Sense strand starting at position 3856 of SEQ ID NO: 3952
auccucauucuacgaaguu

SEQ ID NO: 307643 - RNA, 19 nt, Artificial Sequence
  Description of Artificial Sequence: Synthetic oligonucleotide
  Antisense strand to SEQ ID NO: 307642
aacuucguagaaugaggau

SEQ ID NO: 307644 - RNA, 19 nt, Artificial Sequence
  Description of Artificial Sequence: Synthetic oligonucleotide
  Sense strand starting at position 3967 of SEQ ID NO: 3952
ccaugauuccgugauucuu

SEQ ID NO: 307645 - RNA, 19 nt, Artificial Sequence
  Description of Artificial Sequence: Synthetic oligonucleotide
  Antisense strand to SEQ ID NO: 307644
aagaaucacggaaucaugg

SEQ ID NO: 307646 - RNA, 19 nt, Artificial Sequence
  Description of Artificial Sequence: Synthetic oligonucleotide
  Sense strand starting at position 1 of SEQ ID NO: 3950
ugguuaaugcuguaaacau

SEQ ID NO: 307647 - RNA, 19 nt, Artificial Sequence
  Description of Artificial Sequence: Synthetic oligonucleotide
  Antisense strand to SEQ ID NO: 307646
auguuuacagcauuaacca

SEQ ID NO: 307648 - RNA, 19 nt, Artificial Sequence
  Description of Artificial Sequence: Synthetic oligonucleotide
  Sense strand starting at position 32 of SEQ ID NO: 3950
guauaauuacuagaguuug

SEQ ID NO: 307649 - RNA, 19 nt, Artificial Sequence
  Description of Artificial Sequence: Synthetic oligonucleotide
  Antisense strand to SEQ ID NO: 307648
caaacucuaguaauuauac

SEQ ID NO: 307650 - RNA, 19 nt, Artificial Sequence
  Description of Artificial Sequence: Synthetic oligonucleotide
  Sense strand starting at position 37 of SEQ ID NO: 3950
auuacuagaguuuguggau

SEQ ID NO: 307651 - RNA, 19 nt, Artificial Sequence
  Description of Artificial Sequence: Synthetic oligonucleotide
  Antisense strand to SEQ ID NO: 307650
auccacaaacucuaguaau

SEQ ID NO: 307652 - RNA, 19 nt, Artificial Sequence
  Description of Artificial Sequence: Synthetic oligonucleotide
  Sense strand starting at position 38 of SEQ ID NO: 3950
uuacuagaguuuguggaua

SEQ ID NO: 307653 - RNA, 19 nt, Artificial Sequence
  Description of Artificial Sequence: Synthetic oligonucleotide
  Antisense strand to SEQ ID NO: 307652
uauccacaaacucuaguaa

SEQ ID NO: 307654 - RNA, 19 nt, Artificial Sequence
  Description of Artificial Sequence: Synthetic oligonucleotide
  Sense strand starting at position 43 of SEQ ID NO: 3950
agaguuuguggauauucca

SEQ ID NO: 307655 - RNA, 19 nt, Artificial Sequence
  Description of Artificial Sequence: Synthetic oligonucleotide
  Antisense strand to SEQ ID NO: 307654
uggaauauccacaaacucu

SEQ ID NO: 307656 - RNA, 19 nt, Artificial Sequence
  Description of Artificial Sequence: Synthetic oligonucleotide
  Sense strand starting at position 46 of SEQ ID NO: 3950
guuuguggauauuccacua

SEQ ID NO: 307657 - RNA, 19 nt, Artificial Sequence
  Description of Artificial Sequence: Synthetic oligonucleotide
  Antisense strand to SEQ ID NO: 307656
uaguggaauauccacaaac

SEQ ID NO: 307658 - RNA, 19 nt, Artificial Sequence
  Description of Artificial Sequence: Synthetic oligonucleotide
  Sense strand starting at position 77 of SEQ ID NO: 3950
auaagagucucauugacag

SEQ ID NO: 307659 - RNA, 19 nt, Artificial Sequence
  Description of Artificial Sequence: Synthetic oligonucleotide
  Antisense strand to SEQ ID NO: 307658
cugucaaugagacucuuau

SEQ ID NO: 307660 - RNA, 19 nt, Artificial Sequence
  Description of Artificial Sequence: Synthetic oligonucleotide
  Sense strand starting at position 176 of SEQ ID NO: 3950
ccugcuguugaguauuaac

SEQ ID NO: 307661 - RNA, 19 nt, Artificial Sequence
  Description of Artificial Sequence: Synthetic oligonucleotide
  Antisense strand to SEQ ID NO: 307660
guuaauacucaacagcagg

SEQ ID NO: 307662 - RNA, 19 nt, Artificial Sequence
  Description of Artificial Sequence: Synthetic oligonucleotide
  Sense strand starting at position 340 of SEQ ID NO: 3950
ccaggaaaguuaccuguga

SEQ ID NO: 307663 - RNA, 19 nt, Artificial Sequence
  Description of Artificial Sequence: Synthetic oligonucleotide
  Antisense strand to SEQ ID NO: 307662
ucacagguaacuuuccugg

SEQ ID NO: 307664 - RNA, 19 nt, Artificial Sequence
  Description of Artificial Sequence: Synthetic oligonucleotide
  Sense strand starting at position 341 of SEQ ID NO: 3950
caggaaaguuaccugugau

SEQ ID NO: 307665 - RNA, 19 nt, Artificial Sequence
  Description of Artificial Sequence: Synthetic oligonucleotide
  Antisense strand to SEQ ID NO: 307664
aucacagguaacuuuccug

SEQ ID NO: 307666 - RNA, 19 nt, Artificial Sequence
  Description of Artificial Sequence: Synthetic oligonucleotide
  Sense strand starting at position 342 of SEQ ID NO: 3950
aggaaaguuaccugugaua

SEQ ID NO: 307667 - RNA, 19 nt, Artificial Sequence
  Description of Artificial Sequence: Synthetic oligonucleotide
  Antisense strand to SEQ ID NO: 307666
uaucacagguaacuuuccu

SEQ ID NO: 307668 - RNA, 19 nt, Artificial Sequence
  Description of Artificial Sequence: Synthetic oligonucleotide
  Sense strand starting at position 344 of SEQ ID NO: 3950
gaaaguuaccugugauaua

SEQ ID NO: 307669 - RNA, 19 nt, Artificial Sequence
  Description of Artificial Sequence: Synthetic oligonucleotide
  Antisense strand to SEQ ID NO: 307668
uauaucacagguaacuuuc

SEQ ID NO: 307670 - RNA, 19 nt, Artificial Sequence
  Description of Artificial Sequence: Synthetic oligonucleotide
  Sense strand starting at position 351 of SEQ ID NO: 3950
accugugauauacgauuga

SEQ ID NO: 307671 - RNA, 19 nt, Artificial Sequence
  Description of Artificial Sequence: Synthetic oligonucleotide
  Antisense strand to SEQ ID NO: 307670
ucaaucguauaucacaggu

SEQ ID NO: 307672 - RNA, 19 nt, Artificial Sequence
  Description of Artificial Sequence: Synthetic oligonucleotide
  Sense strand starting at position 355 of SEQ ID NO: 3950
gugauauacgauugaaagu

SEQ ID NO: 307673 - RNA, 19 nt, Artificial Sequence
  Description of Artificial Sequence: Synthetic oligonucleotide
  Antisense strand to SEQ ID NO: 307672
acuuucaaucguauaucac

SEQ ID NO: 307674 - RNA, 19 nt, Artificial Sequence
  Description of Artificial Sequence: Synthetic oligonucleotide
  Sense strand starting at position 362 of SEQ ID NO: 3950
acgauugaaagucauguuu

SEQ ID NO: 307675 - RNA, 19 nt, Artificial Sequence
  Description of Artificial Sequence: Synthetic oligonucleotide
  Antisense strand to SEQ ID NO: 307674
aaacaugacuuucaaucgu

SEQ ID NO: 307676 - RNA, 19 nt, Artificial Sequence
  Description of Artificial Sequence: Synthetic oligonucleotide
  Sense strand starting at position 506 of SEQ ID NO: 3950
acugcuaaucucuggaagu

SEQ ID NO: 307677 - RNA, 19 nt, Artificial Sequence
  Description of Artificial Sequence: Synthetic oligonucleotide
  Antisense strand to SEQ ID NO: 307676
acuuccagagauuagcagu

SEQ ID NO: 307678 - RNA, 19 nt, Artificial Sequence
  Description of Artificial Sequence: Synthetic oligonucleotide
  Sense strand starting at position 508 of SEQ ID NO: 3950
ugcuaaucucuggaagugu

SEQ ID NO: 307679 - RNA, 19 nt, Artificial Sequence
  Description of Artificial Sequence: Synthetic oligonucleotide
  Antisense strand to SEQ ID NO: 307678
acacuuccagagauuagca

SEQ ID NO: 307680 - RNA, 19 nt, Artificial Sequence
  Description of Artificial Sequence: Synthetic oligonucleotide
  Sense strand starting at position 628 of SEQ ID NO: 3950
gucagaauguuagucuaau

SEQ ID NO: 307681 - RNA, 19 nt, Artificial Sequence
  Description of Artificial Sequence: Synthetic oligonucleotide
  Antisense strand to SEQ ID NO: 307680
auuagacuaacauucugac

SEQ ID NO: 307682 - RNA, 19 nt, Artificial Sequence
  Description of Artificial Sequence: Synthetic oligonucleotide
  Sense strand starting at position 629 of SEQ ID NO: 3950
ucagaauguuagucuaauc

SEQ ID NO: 307683 - RNA, 19 nt, Artificial Sequence
  Description of Artificial Sequence: Synthetic oligonucleotide
  Antisense strand to SEQ ID NO: 307682
gauuagacuaacauucuga

SEQ ID NO: 307684 - RNA, 19 nt, Artificial Sequence
  Description of Artificial Sequence: Synthetic oligonucleotide
  Sense strand starting at position 634 of SEQ ID NO: 3950
auguuagucuaaucucuac

SEQ ID NO: 307685 - RNA, 19 nt, Artificial Sequence
  Description of Artificial Sequence: Synthetic oligonucleotide
  Antisense strand to SEQ ID NO: 307684
guagagauuagacuaacau

SEQ ID NO: 307686 - RNA, 19 nt, Artificial Sequence
  Description of Artificial Sequence: Synthetic oligonucleotide
  Sense strand starting at position 657 of SEQ ID NO: 3950
ggacacucuuaacugaagu

SEQ ID NO: 307687 - RNA, 19 nt, Artificial Sequence
  Description of Artificial Sequence: Synthetic oligonucleotide
  Antisense strand to SEQ ID NO: 307686
acuucaguuaagagugucc

SEQ ID NO: 307688 - RNA, 19 nt, Artificial Sequence
  Description of Artificial Sequence: Synthetic oligonucleotide
  Sense strand starting at position 717 of SEQ ID NO: 3950
aguaauguugcuuacauac

SEQ ID NO: 307689 - RNA, 19 nt, Artificial Sequence
  Description of Artificial Sequence: Synthetic oligonucleotide
  Antisense strand to SEQ ID NO: 307688
guauguaagcaacauuacu

SEQ ID NO: 307690 - RNA, 19 nt, Artificial Sequence
  Description of Artificial Sequence: Synthetic oligonucleotide
  Sense strand starting at position 1287 of SEQ ID NO: 3950
cguuaagggauuugccgaa

SEQ ID NO: 307691 - RNA, 19 nt, Artificial Sequence
  Description of Artificial Sequence: Synthetic oligonucleotide
  Antisense strand to SEQ ID NO: 307690
uucggcaaaucccuuaacg

SEQ ID NO: 307692 - RNA, 19 nt, Artificial Sequence
  Description of Artificial Sequence: Synthetic oligonucleotide
  Sense strand starting at position 1337 of SEQ ID NO: 3950
ccgucucuuggacaaucua

SEQ ID NO: 307693 - RNA, 19 nt, Artificial Sequence
  Description of Artificial Sequence: Synthetic oligonucleotide
  Antisense strand to SEQ ID NO: 307692
uagauuguccaagagacgg

SEQ ID NO: 307694 - RNA, 19 nt, Artificial Sequence
  Description of Artificial Sequence: Synthetic oligonucleotide
  Sense strand starting at position 1360 of SEQ ID NO: 3950
uugucuacuuucucagaag

SEQ ID NO: 307695 - RNA, 19 nt, Artificial Sequence
  Description of Artificial Sequence: Synthetic oligonucleotide
  Antisense strand to SEQ ID NO: 307694
cuucugagaaaguagacaa

SEQ ID NO: 307696 - RNA, 19 nt, Artificial Sequence
  Description of Artificial Sequence: Synthetic oligonucleotide
  Sense strand starting at position 1558 of SEQ ID NO: 3950
ucgcccauaugcuuauuua

SEQ ID NO: 307697 - RNA, 19 nt, Artificial Sequence
  Description of Artificial Sequence: Synthetic oligonucleotide
  Antisense strand to SEQ ID NO: 307696
uaaauaagcauaugggcga

SEQ ID NO: 307698 - RNA, 19 nt, Artificial Sequence
  Description of Artificial Sequence: Synthetic oligonucleotide
  Sense strand starting at position 1559 of SEQ ID NO: 3950
cgcccauaugcuuauuuaa

SEQ ID NO: 307699 - RNA, 19 nt, Artificial Sequence
  Description of Artificial Sequence: Synthetic oligonucleotide
  Antisense strand to SEQ ID NO: 307698
uuaaauaagcauaugggcg

SEQ ID NO: 307700 - RNA, 19 nt, Artificial Sequence
  Description of Artificial Sequence: Synthetic oligonucleotide
  Sense strand starting at position 1568 of SEQ ID NO: 3950
gcuuauuuaagguggcgau

SEQ ID NO: 307701 - RNA, 19 nt, Artificial Sequence
  Description of Artificial Sequence: Synthetic oligonucleotide
  Antisense strand to SEQ ID NO: 307700
aucgccaccuuaaauaagc

SEQ ID NO: 307702 - RNA, 19 nt, Artificial Sequence
  Description of Artificial Sequence: Synthetic oligonucleotide
  Sense strand starting at position 1569 of SEQ ID NO: 3950
cuuauuuaagguggcgauu

SEQ ID NO: 307703 - RNA, 19 nt, Artificial Sequence
  Description of Artificial Sequence: Synthetic oligonucleotide
  Antisense strand to SEQ ID NO: 307702
aaucgccaccuuaaauaag

SEQ ID NO: 307704 - RNA, 19 nt, Artificial Sequence
  Description of Artificial Sequence: Synthetic oligonucleotide
  Sense strand starting at position 2993 of SEQ ID NO: 3950
gagacuaauggguguuguu

SEQ ID NO: 307705 - RNA, 19 nt, Artificial Sequence
  Description of Artificial Sequence: Synthetic oligonucleotide
  Antisense strand to SEQ ID NO: 307704
aacaacacccauuagucuc

SEQ ID NO: 307706 - RNA, 19 nt, Artificial Sequence
  Description of Artificial Sequence: Synthetic oligonucleotide
  Sense strand starting at position 3180 of SEQ ID NO: 3950
agggaaguguccuucggau

SEQ ID NO: 307707 - RNA, 19 nt, Artificial Sequence
  Description of Artificial Sequence: Synthetic oligonucleotide
  Antisense strand to SEQ ID NO: 307706
auccgaaggacacuucccu

SEQ ID NO: 307708 - RNA, 19 nt, Artificial Sequence
  Description of Artificial Sequence: Synthetic oligonucleotide
  Sense strand starting at position 3192 of SEQ ID NO: 3950
uucggauuauuugaaaccu

SEQ ID NO: 307709 - RNA, 19 nt, Artificial Sequence
  Description of Artificial Sequence: Synthetic oligonucleotide
  Antisense strand to SEQ ID NO: 307708
agguuucaaauaauccgaa

SEQ ID NO: 307710 - RNA, 19 nt, Artificial Sequence
  Description of Artificial Sequence: Synthetic oligonucleotide
  Sense strand starting at position 3373 of SEQ ID NO: 3950
gagugauguugagucagaa

SEQ ID NO: 307711 - RNA, 19 nt, Artificial Sequence
  Description of Artificial Sequence: Synthetic oligonucleotide
  Antisense strand to SEQ ID NO: 307710
uucugacucaacaucacuc

SEQ ID NO: 307712 - RNA, 19 nt, Artificial Sequence
  Description of Artificial Sequence: Synthetic oligonucleotide
  Sense strand starting at position 3404 of SEQ ID NO: 3950
aaagcuuuagguggagaua

SEQ ID NO: 307713 - RNA, 19 nt, Artificial Sequence
  Description of Artificial Sequence: Synthetic oligonucleotide
  Antisense strand to SEQ ID NO: 307712
uaucuccaccuaaagcuuu

SEQ ID NO: 307714 - RNA, 19 nt, Artificial Sequence
  Description of Artificial Sequence: Synthetic oligonucleotide
  Sense strand starting at position 3413 of SEQ ID NO: 3950
gguggagauagugacaguu

SEQ ID NO: 307715 - RNA, 19 nt, Artificial Sequence
  Description of Artificial Sequence: Synthetic oligonucleotide
  Antisense strand to SEQ ID NO: 307714
aacugucacuaucuccacc

SEQ ID NO: 307716 - RNA, 19 nt, Artificial Sequence
  Description of Artificial Sequence: Synthetic oligonucleotide
  Sense strand starting at position 3589 of SEQ ID NO: 3950
guggauuccucucccacaa

SEQ ID NO: 307717 - RNA, 19 nt, Artificial Sequence
  Description of Artificial Sequence: Synthetic oligonucleotide
  Antisense strand to SEQ ID NO: 307716
uugugggagaggaauccac

SEQ ID NO: 307718 - RNA, 19 nt, Artificial Sequence
  Description of Artificial Sequence: Synthetic oligonucleotide
  Sense strand starting at position 3703 of SEQ ID NO: 3950
gacugagugagccaacgua

SEQ ID NO: 307719 - RNA, 19 nt, Artificial Sequence
  Description of Artificial Sequence: Synthetic oligonucleotide
  Antisense strand to SEQ ID NO: 307718
uacguuggcucacucaguc

SEQ ID NO: 307720 - RNA, 19 nt, Artificial Sequence
  Description of Artificial Sequence: Synthetic oligonucleotide
  Sense strand starting at position 3711 of SEQ ID NO: 3950
gagccaacguauuugcuua

SEQ ID NO: 307721 - RNA, 19 nt, Artificial Sequence
  Description of Artificial Sequence: Synthetic oligonucleotide
  Antisense strand to SEQ ID NO: 307720
uaagcaaauacguuggcuc

SEQ ID NO: 307722 - RNA, 19 nt, Artificial Sequence
  Description of Artificial Sequence: Synthetic oligonucleotide
  Sense strand starting at position 3754 of SEQ ID NO: 3950
ugguaaaggcuugauagca

SEQ ID NO: 307723 - RNA, 19 nt, Artificial Sequence
  Description of Artificial Sequence: Synthetic oligonucleotide
  Antisense strand to SEQ ID NO: 307722
ugcuaucaagccuuuacca

SEQ ID NO: 307724 - RNA, 19 nt, Artificial Sequence
  Description of Artificial Sequence: Synthetic oligonucleotide
  Sense strand starting at position 3775 of SEQ ID NO: 3950
ucuaaagaguaaguuacau

SEQ ID NO: 307725 - RNA, 19 nt, Artificial Sequence
  Description of Artificial Sequence: Synthetic oligonucleotide
  Antisense strand to SEQ ID NO: 307724
auguaacuuacucuuuaga

SEQ ID NO: 307726 - RNA, 19 nt, Artificial Sequence
  Description of Artificial Sequence: Synthetic oligonucleotide
  Sense strand starting at position 17 of SEQ ID NO: 3954
ucaagaggcuagcugaaua

SEQ ID NO: 307727 - RNA, 19 nt, Artificial Sequence
  Description of Artificial Sequence: Synthetic oligonucleotide
  Antisense strand to SEQ ID NO: 307726
uauucagcuagccucuuga

SEQ ID NO: 307728 - RNA, 19 nt, Artificial Sequence
  Description of Artificial Sequence: Synthetic oligonucleotide
  Sense strand starting at position 141 of SEQ ID NO: 3954
gcauuucgguaacagauca

SEQ ID NO: 307729 - RNA, 19 nt, Artificial Sequence
  Description of Artificial Sequence: Synthetic oligonucleotide
  Antisense strand to SEQ ID NO: 307728
ugaucuguuaccgaaaugc

SEQ ID NO: 307730 - RNA, 19 nt, Artificial Sequence
  Description of Artificial Sequence: Synthetic oligonucleotide
  Sense strand starting at position 159 of SEQ ID NO: 3954
agcuguucugaacagcauu

SEQ ID NO: 307731 - RNA, 19 nt, Artificial Sequence
  Description of Artificial Sequence: Synthetic oligonucleotide
  Antisense strand to SEQ ID NO: 307730
aaugcuguucagaacagcu

SEQ ID NO: 307732 - RNA, 19 nt, Artificial Sequence
  Description of Artificial Sequence: Synthetic oligonucleotide
  Sense strand starting at position 167 of SEQ ID NO: 3954
ugaacagcauucucaguuu

SEQ ID NO: 307733 - RNA, 19 nt, Artificial Sequence
  Description of Artificial Sequence: Synthetic oligonucleotide
  Antisense strand to SEQ ID NO: 307732
aaacugagaaugcuguuca

SEQ ID NO: 307734 - RNA, 19 nt, Artificial Sequence
  Description of Artificial Sequence: Synthetic oligonucleotide
  Sense strand starting at position 170 of SEQ ID NO: 3954
acagcauucucaguuucua

SEQ ID NO: 307735 - RNA, 19 nt, Artificial Sequence
  Description of Artificial Sequence: Synthetic oligonucleotide
  Antisense strand to SEQ ID NO: 307734
uagaaacugagaaugcugu

SEQ ID NO: 307736 - RNA, 19 nt, Artificial Sequence
  Description of Artificial Sequence: Synthetic oligonucleotide
  Sense strand starting at position 198 of SEQ ID NO: 3954
aguuguaauuggcccaguu

SEQ ID NO: 307737 - RNA, 19 nt, Artificial Sequence
  Description of Artificial Sequence: Synthetic oligonucleotide
  Antisense strand to SEQ ID NO: 307736
aacugggccaauuacaacu

SEQ ID NO: 307738 - RNA, 19 nt, Artificial Sequence
  Description of Artificial Sequence: Synthetic oligonucleotide
  Sense strand starting at position 264 of SEQ ID NO: 3954
gcaucuggugugcaacuua

SEQ ID NO: 307739 - RNA, 19 nt, Artificial Sequence
  Description of Artificial Sequence: Synthetic oligonucleotide
  Antisense strand to SEQ ID NO: 307738
uaaguugcacaccagaugc

SEQ ID NO: 307740 - RNA, 19 nt, Artificial Sequence
  Description of Artificial Sequence: Synthetic oligonucleotide
  Sense strand starting at position 288 of SEQ ID NO: 3954
gccaucaagugauauuuac

SEQ ID NO: 307741 - RNA, 19 nt, Artificial Sequence
  Description of Artificial Sequence: Synthetic oligonucleotide
  Antisense strand to SEQ ID NO: 307740
guaaauaucacuugauggc

SEQ ID NO: 307742 - RNA, 19 nt, Artificial Sequence
  Description of Artificial Sequence: Synthetic oligonucleotide
  Sense strand starting at position 401 of SEQ ID NO: 3954
acaauuccuuccgaaugga

SEQ ID NO: 307743 - RNA, 19 nt, Artificial Sequence
  Description of Artificial Sequence: Synthetic oligonucleotide
  Antisense strand to SEQ ID NO: 307742
uccauucggaaggaauugu

SEQ ID NO: 307744 - RNA, 19 nt, Artificial Sequence
  Description of Artificial Sequence: Synthetic oligonucleotide
  Sense strand starting at position 702 of SEQ ID NO: 3954
gcacuaagcuuggugugau

SEQ ID NO: 307745 - RNA, 19 nt, Artificial Sequence
  Description of Artificial Sequence: Synthetic oligonucleotide
  Antisense strand to SEQ ID NO: 307744
aucacaccaagcuuagugc

SEQ ID NO: 307746 - RNA, 19 nt, Artificial Sequence
  Description of Artificial Sequence: Synthetic oligonucleotide
  Sense strand starting at position 705 of SEQ ID NO: 3954
cuaagcuuggugugauucu

SEQ ID NO: 307747 - RNA, 19 nt, Artificial Sequence
  Description of Artificial Sequence: Synthetic oligonucleotide
  Antisense strand to SEQ ID NO: 307746
agaaucacaccaagcuuag

SEQ ID NO: 307748 - RNA, 19 nt, Artificial Sequence
  Description of Artificial Sequence: Synthetic oligonucleotide
  Sense strand starting at position 714 of SEQ ID NO: 3954
gugugauucugucucucaa

SEQ ID NO: 307749 - RNA, 19 nt, Artificial Sequence
  Description of Artificial Sequence: Synthetic oligonucleotide
  Antisense strand to SEQ ID NO: 307748
uugagagacagaaucacac

SEQ ID NO: 307750 - RNA, 19 nt, Artificial Sequence
  Description of Artificial Sequence: Synthetic oligonucleotide
  Sense strand starting at position 716 of SEQ ID NO: 3954
gugauucugucucucaauc

SEQ ID NO: 307751 - RNA, 19 nt, Artificial Sequence
  Description of Artificial Sequence: Synthetic oligonucleotide
  Antisense strand to SEQ ID NO: 307750
gauugagagacagaaucac

SEQ ID NO: 307752 - RNA, 19 nt, Artificial Sequence
  Description of Artificial Sequence: Synthetic oligonucleotide
  Sense strand starting at position 787 of SEQ ID NO: 3954
ccaggauuccucugcacca

SEQ ID NO: 307753 - RNA, 19 nt, Artificial Sequence
  Description of Artificial Sequence: Synthetic oligonucleotide
  Antisense strand to SEQ ID NO: 307752
uggugcagaggaauccugg

SEQ ID NO: 307754 - RNA, 19 nt, Artificial Sequence
  Description of Artificial Sequence: Synthetic oligonucleotide
  Sense strand starting at position 869 of SEQ ID NO: 3954
gucugauacccaggucuag

SEQ ID NO: 307755 - RNA, 19 nt, Artificial Sequence
  Description of Artificial Sequence: Synthetic oligonucleotide
  Antisense strand to SEQ ID NO: 307754
cuagaccuggguaucagac

SEQ ID NO: 307756 - RNA, 19 nt, Artificial Sequence
  Description of Artificial Sequence: Synthetic oligonucleotide
  Sense strand starting at position 972 of SEQ ID NO: 3954
agaagcuuucucuggcuau

SEQ ID NO: 307757 - RNA, 19 nt, Artificial Sequence
  Description of Artificial Sequence: Synthetic oligonucleotide
  Antisense strand to SEQ ID NO: 307756
auagccagagaaagcuucu

SEQ ID NO: 307758 - RNA, 19 nt, Artificial Sequence
  Description of Artificial Sequence: Synthetic oligonucleotide
  Sense strand starting at position 1147 of SEQ ID NO: 3954
ugcacuaauuguuccaaga

SEQ ID NO: 307759 - RNA, 19 nt, Artificial Sequence
  Description of Artificial Sequence: Synthetic oligonucleotide
  Antisense strand to SEQ ID NO: 307758
ucuuggaacaauuagugca

SEQ ID NO: 307760 - RNA, 19 nt, Artificial Sequence
  Description of Artificial Sequence: Synthetic oligonucleotide
  Sense strand starting at position 1182 of SEQ ID NO: 3954
ucuccuuugcugugguaaa

SEQ ID NO: 307761 - RNA, 19 nt, Artificial Sequence
  Description of Artificial Sequence: Synthetic oligonucleotide
  Antisense strand to SEQ ID NO: 307760
uuuaccacagcaaaggaga

SEQ ID NO: 307762 - RNA, 19 nt, Artificial Sequence
  Description of Artificial Sequence: Synthetic oligonucleotide
  Sense strand starting at position 1234 of SEQ ID NO: 3954
uagguaagcguccauacuu

SEQ ID NO: 307763 - RNA, 19 nt, Artificial Sequence
  Description of Artificial Sequence: Synthetic oligonucleotide
  Antisense strand to SEQ ID NO: 307762
aaguauggacgcuuaccua

SEQ ID NO: 307764 - RNA, 19 nt, Artificial Sequence
  Description of Artificial Sequence: Synthetic oligonucleotide
  Sense strand starting at position 2287 of SEQ ID NO: 3954
gggcuauccuucccugaag

SEQ ID NO: 307765 - RNA, 19 nt, Artificial Sequence
  Description of Artificial Sequence: Synthetic oligonucleotide
  Antisense strand to SEQ ID NO: 307764
cuucagggaaggauagccc

SEQ ID NO: 307766 - RNA, 19 nt, Artificial Sequence
  Description of Artificial Sequence: Synthetic oligonucleotide
  Sense strand starting at position 2289 of SEQ ID NO: 3954
gcuauccuucccugaagga

SEQ ID NO: 307767 - RNA, 19 nt, Artificial Sequence
  Description of Artificial Sequence: Synthetic oligonucleotide
  Antisense strand to SEQ ID NO: 307766
uccuucagggaaggauagc

SEQ ID NO: 307768 - RNA, 19 nt, Artificial Sequence
  Description of Artificial Sequence: Synthetic oligonucleotide
  Sense strand starting at position 2586 of SEQ ID NO: 3954
uagcguccugugugauuga

SEQ ID NO: 307769 - RNA, 19 nt, Artificial Sequence
  Description of Artificial Sequence: Synthetic oligonucleotide
  Antisense strand to SEQ ID NO: 307768
ucaaucacacaggacgcua

SEQ ID NO: 307770 - RNA, 19 nt, Artificial Sequence
  Description of Artificial Sequence: Synthetic oligonucleotide
  Sense strand starting at position 2589 of SEQ ID NO: 3954
cguccugugugauugacga

SEQ ID NO: 307771 - RNA, 19 nt, Artificial Sequence
  Description of Artificial Sequence: Synthetic oligonucleotide
  Antisense strand to SEQ ID NO: 307770
ucgucaaucacacaggacg

SEQ ID NO: 307772 - RNA, 19 nt, Artificial Sequence
  Description of Artificial Sequence: Synthetic oligonucleotide
  Sense strand starting at position 2729 of SEQ ID NO: 3954
agagguuucuaacagugga

SEQ ID NO: 307773 - RNA, 19 nt, Artificial Sequence
  Description of Artificial Sequence: Synthetic oligonucleotide
  Antisense strand to SEQ ID NO: 307772
uccacuguuagaaaccucu

SEQ ID NO: 307774 - RNA, 19 nt, Artificial Sequence
  Description of Artificial Sequence: Synthetic oligonucleotide
  Sense strand starting at position 2733 of SEQ ID NO: 3954
guuucuaacaguggaguga

SEQ ID NO: 307775 - RNA, 19 nt, Artificial Sequence
  Description of Artificial Sequence: Synthetic oligonucleotide
  Antisense strand to SEQ ID NO: 307774
ucacuccacuguuagaaac

SEQ ID NO: 307776 - RNA, 19 nt, Artificial Sequence
  Description of Artificial Sequence: Synthetic oligonucleotide
  Sense strand starting at position 2737 of SEQ ID NO: 3954
cuaacaguggagugacuau

SEQ ID NO: 307777 - RNA, 19 nt, Artificial Sequence
  Description of Artificial Sequence: Synthetic oligonucleotide
  Antisense strand to SEQ ID NO: 307776
auagucacuccacuguuag

SEQ ID NO: 307778 - RNA, 19 nt, Artificial Sequence
  Description of Artificial Sequence: Synthetic oligonucleotide
  Sense strand starting at position 2841 of SEQ ID NO: 3954
ccaugagcccaagaguuua

SEQ ID NO: 307779 - RNA, 19 nt, Artificial Sequence
  Description of Artificial Sequence: Synthetic oligonucleotide
  Antisense strand to SEQ ID NO: 307778
uaaacucuugggcucaugg

SEQ ID NO: 307780 - RNA, 19 nt, Artificial Sequence
  Description of Artificial Sequence: Synthetic oligonucleotide
  Sense strand starting at position 3076 of SEQ ID NO: 3954
aggcuuuggcucuaaguga

SEQ ID NO: 307781 - RNA, 19 nt, Artificial Sequence
  Description of Artificial Sequence: Synthetic oligonucleotide
  Antisense strand to SEQ ID NO: 307780
ucacuuagagccaaagccu

SEQ ID NO: 307782 - RNA, 19 nt, Artificial Sequence
  Description of Artificial Sequence: Synthetic oligonucleotide
  Sense strand starting at position 3087 of SEQ ID NO: 3954
cuaagugagucggugggaa

SEQ ID NO: 307783 - RNA, 19 nt, Artificial Sequence
  Description of Artificial Sequence: Synthetic oligonucleotide
  Antisense strand to SEQ ID NO: 307782
uucccaccgacucacuuag

SEQ ID NO: 307784 - RNA, 19 nt, Artificial Sequence
  Description of Artificial Sequence: Synthetic oligonucleotide
  Sense strand starting at position 3394 of SEQ ID NO: 3954
cagcaagacuguuuccaga

SEQ ID NO: 307785 - RNA, 19 nt, Artificial Sequence
  Description of Artificial Sequence: Synthetic oligonucleotide
  Antisense strand to SEQ ID NO: 307784
ucuggaaacagucuugcug

SEQ ID NO: 307786 - RNA, 19 nt, Artificial Sequence
  Description of Artificial Sequence: Synthetic oligonucleotide
  Sense strand starting at position 3396 of SEQ ID NO: 3954
gcaagacuguuuccagaaa

SEQ ID NO: 307787 - RNA, 19 nt, Artificial Sequence
  Description of Artificial Sequence: Synthetic oligonucleotide
  Antisense strand to SEQ ID NO: 307786
uuucuggaaacagucuugc

SEQ ID NO: 307788 - RNA, 19 nt, Artificial Sequence
  Description of Artificial Sequence: Synthetic oligonucleotide
  Sense strand starting at position 3440 of SEQ ID NO: 3954
uuguguuauuucuuguguu

SEQ ID NO: 307789 - RNA, 19 nt, Artificial Sequence
  Description of Artificial Sequence: Synthetic oligonucleotide
  Antisense strand to SEQ ID NO: 307788
aacacaagaaauaacacaa

SEQ ID NO: 307790 - RNA, 19 nt, Artificial Sequence
  Description of Artificial Sequence: Synthetic oligonucleotide
  Sense strand starting at position 3620 of SEQ ID NO: 3954
uggccuguuucccugacua

SEQ ID NO: 307791 - RNA, 19 nt, Artificial Sequence
  Description of Artificial Sequence: Synthetic oligonucleotide
  Antisense strand to SEQ ID NO: 307790
uagucagggaaacaggcca

SEQ ID NO: 307792 - RNA, 19 nt, Artificial Sequence
  Description of Artificial Sequence: Synthetic oligonucleotide
  Sense strand starting at position 3622 of SEQ ID NO: 3954
gccuguuucccugacuaag

SEQ ID NO: 307793 - RNA, 19 nt, Artificial Sequence
  Description of Artificial Sequence: Synthetic oligonucleotide
  Antisense strand to SEQ ID NO: 307792
cuuagucagggaaacaggc

SEQ ID NO: 307794 - RNA, 19 nt, Artificial Sequence
  Description of Artificial Sequence: Synthetic oligonucleotide
  Sense strand starting at position 3709 of SEQ ID NO: 3954
ggaacaugcaggugauuaa

SEQ ID NO: 307795 - RNA, 19 nt, Artificial Sequence
  Description of Artificial Sequence: Synthetic oligonucleotide
  Antisense strand to SEQ ID NO: 307794
uuaaucaccugcauguucc

SEQ ID NO: 307796 - RNA, 19 nt, Artificial Sequence
  Description of Artificial Sequence: Synthetic oligonucleotide
  Sense strand starting at position 3795 of SEQ ID NO: 3954
ugaagauugcaguguguga

SEQ ID NO: 307797 - RNA, 19 nt, Artificial Sequence
  Description of Artificial Sequence: Synthetic oligonucleotide
  Antisense strand to SEQ ID NO: 307796
ucacacacugcaaucuuca

SEQ ID NO: 307798 - RNA, 19 nt, Artificial Sequence
  Description of Artificial Sequence: Synthetic oligonucleotide
  Sense strand starting at position 3828 of SEQ ID NO: 3954
uggcgugagcacuugucuu

SEQ ID NO: 307799 - RNA, 19 nt, Artificial Sequence
  Description of Artificial Sequence: Synthetic oligonucleotide
  Antisense strand to SEQ ID NO: 307798
aagacaagugcucacgcca

SEQ ID NO: 307800 - RNA, 19 nt, Artificial Sequence
  Description of Artificial Sequence: Synthetic oligonucleotide
  Sense strand starting at position 3830 of SEQ ID NO: 3954
gcgugagcacuugucuuac

SEQ ID NO: 307801 - RNA, 19 nt, Artificial Sequence
  Description of Artificial Sequence: Synthetic oligonucleotide
  Antisense strand to SEQ ID NO: 307800
guaagacaagugcucacgc

SEQ ID NO: 307802 - RNA, 19 nt, Artificial Sequence
  Description of Artificial Sequence: Synthetic oligonucleotide
  Sense strand starting at position 3855 of SEQ ID NO: 3954
gcgucacugucugcagaau

SEQ ID NO: 307803 - RNA, 19 nt, Artificial Sequence
  Description of Artificial Sequence: Synthetic oligonucleotide
  Antisense strand to SEQ ID NO: 307802
auucugcagacagugacgc

SEQ ID NO: 307804 - RNA, 19 nt, Artificial Sequence
  Description of Artificial Sequence: Synthetic oligonucleotide
  Sense strand starting at position 3931 of SEQ ID NO: 3954
agucauuucuagcuccauu

SEQ ID NO: 307805 - RNA, 19 nt, Artificial Sequence
  Description of Artificial Sequence: Synthetic oligonucleotide
  Antisense strand to SEQ ID NO: 307804
aauggagcuagaaaugacu

SEQ ID NO: 307806 - RNA, 19 nt, Artificial Sequence
  Description of Artificial Sequence: Synthetic oligonucleotide
  Sense strand starting at position 111 of SEQ ID NO: 3953
agaauacgaucuucugaac

SEQ ID NO: 307807 - RNA, 19 nt, Artificial Sequence
  Description of Artificial Sequence: Synthetic oligonucleotide
  Antisense strand to SEQ ID NO: 307806
guucagaagaucguauucu

SEQ ID NO: 307808 - RNA, 19 nt, Artificial Sequence
  Description of Artificial Sequence: Synthetic oligonucleotide
  Sense strand starting at position 185 of SEQ ID NO: 3953
gaagcacuggucuaaaggu

SEQ ID NO: 307809 - RNA, 19 nt, Artificial Sequence
  Description of Artificial Sequence: Synthetic oligonucleotide
  Antisense strand to SEQ ID NO: 307808
accuuuagaccagugcuuc

SEQ ID NO: 307810 - RNA, 19 nt, Artificial Sequence
  Description of Artificial Sequence: Synthetic oligonucleotide
  Sense strand starting at position 381 of SEQ ID NO: 3953
cccucuuguggaugacaaa

SEQ ID NO: 307811 - RNA, 19 nt, Artificial Sequence
  Description of Artificial Sequence: Synthetic oligonucleotide
  Antisense strand to SEQ ID NO: 307810
uuugucauccacaagaggg

SEQ ID NO: 307812 - RNA, 19 nt, Artificial Sequence
  Description of Artificial Sequence: Synthetic oligonucleotide
  Sense strand starting at position 628 of SEQ ID NO: 3953
ucuugaauuccugagcgga

SEQ ID NO: 307813 - RNA, 19 nt, Artificial Sequence
  Description of Artificial Sequence: Synthetic oligonucleotide
  Antisense strand to SEQ ID NO: 307812
uccgcucaggaauucaaga

SEQ ID NO: 307814 - RNA, 19 nt, Artificial Sequence
  Description of Artificial Sequence: Synthetic oligonucleotide
  Sense strand starting at position 630 of SEQ ID NO: 3953
uugaauuccugagcggaag

SEQ ID NO: 307815 - RNA, 19 nt, Artificial Sequence
  Description of Artificial Sequence: Synthetic oligonucleotide
  Antisense strand to SEQ ID NO: 307814
cuuccgcucaggaauucaa

SEQ ID NO: 307816 - RNA, 19 nt, Artificial Sequence
  Description of Artificial Sequence: Synthetic oligonucleotide
  Sense strand starting at position 729 of SEQ ID NO: 3953
gaguguggucaugguuuca

SEQ ID NO: 307817 - RNA, 19 nt, Artificial Sequence
  Description of Artificial Sequence: Synthetic oligonucleotide
  Antisense strand to SEQ ID NO: 307816
ugaaaccaugaccacacuc

SEQ ID NO: 307818 - RNA, 19 nt, Artificial Sequence
  Description of Artificial Sequence: Synthetic oligonucleotide
  Sense strand starting at position 774 of SEQ ID NO: 3953
ugggcaauuuaguguauuu

SEQ ID NO: 307819 - RNA, 19 nt, Artificial Sequence
  Description of Artificial Sequence: Synthetic oligonucleotide
  Antisense strand to SEQ ID NO: 307818
aaauacacuaaauugccca

SEQ ID NO: 307820 - RNA, 19 nt, Artificial Sequence
  Description of Artificial Sequence: Synthetic oligonucleotide
  Sense strand starting at position 907 of SEQ ID NO: 3953
cagcuucgcccagagcaaa

SEQ ID NO: 307821 - RNA, 19 nt, Artificial Sequence
  Description of Artificial Sequence: Synthetic oligonucleotide
  Antisense strand to SEQ ID NO: 307820
uuugcucugggcgaagcug

SEQ ID NO: 307822 - RNA, 19 nt, Artificial Sequence
  Description of Artificial Sequence: Synthetic oligonucleotide
  Sense strand starting at position 933 of SEQ ID NO: 3953
gguucagcugaugaaguua

SEQ ID NO: 307823 - RNA, 19 nt, Artificial Sequence
  Description of Artificial Sequence: Synthetic oligonucleotide
  Antisense strand to SEQ ID NO: 307822
uaacuucaucagcugaacc

SEQ ID NO: 307824 - RNA, 19 nt, Artificial Sequence
  Description of Artificial Sequence: Synthetic oligonucleotide
  Sense strand starting at position 1076 of SEQ ID NO: 3953
aaggauuccuugucaugga

SEQ ID NO: 307825 - RNA, 19 nt, Artificial Sequence
  Description of Artificial Sequence: Synthetic oligonucleotide
  Antisense strand to SEQ ID NO: 307824
uccaugacaaggaauccuu

SEQ ID NO: 307826 - RNA, 19 nt, Artificial Sequence
  Description of Artificial Sequence: Synthetic oligonucleotide
  Sense strand starting at position 1163 of SEQ ID NO: 3953
ucgucagagucacccaaua

SEQ ID NO: 307827 - RNA, 19 nt, Artificial Sequence
  Description of Artificial Sequence: Synthetic oligonucleotide
  Antisense strand to SEQ ID NO: 307826
uauugggugacucugacga

SEQ ID NO: 307828 - RNA, 19 nt, Artificial Sequence
  Description of Artificial Sequence: Synthetic oligonucleotide
  Sense strand starting at position 1261 of SEQ ID NO: 3953
ucuggcugaccuugggaau

SEQ ID NO: 307829 - RNA, 19 nt, Artificial Sequence
  Description of Artificial Sequence: Synthetic oligonucleotide
  Antisense strand to SEQ ID NO: 307828
auucccaaggucagccaga

SEQ ID NO: 307830 - RNA, 19 nt, Artificial Sequence
  Description of Artificial Sequence: Synthetic oligonucleotide
  Sense strand starting at position 1267 of SEQ ID NO: 3953
ugaccuugggaaugcaaau

SEQ ID NO: 307831 - RNA, 19 nt, Artificial Sequence
  Description of Artificial Sequence: Synthetic oligonucleotide
  Antisense strand to SEQ ID NO: 307830
auuugcauucccaagguca

SEQ ID NO: 307832 - RNA, 19 nt, Artificial Sequence
  Description of Artificial Sequence: Synthetic oligonucleotide
  Sense strand starting at position 1308 of SEQ ID NO: 3953
agcacaacugcuugaacau

SEQ ID NO: 307833 - RNA, 19 nt, Artificial Sequence
  Description of Artificial Sequence: Synthetic oligonucleotide
  Antisense strand to SEQ ID NO: 307832
auguucaagcaguugugcu

SEQ ID NO: 307834 - RNA, 19 nt, Artificial Sequence
  Description of Artificial Sequence: Synthetic oligonucleotide
  Sense strand starting at position 1325 of SEQ ID NO: 3953
augaguucagcaggcagua

SEQ ID NO: 307835 - RNA, 19 nt, Artificial Sequence
  Description of Artificial Sequence: Synthetic oligonucleotide
  Antisense strand to SEQ ID NO: 307834
uacugccugcugaacucau

SEQ ID NO: 307836 - RNA, 19 nt, Artificial Sequence
  Description of Artificial Sequence: Synthetic oligonucleotide
  Sense strand starting at position 1337 of SEQ ID NO: 3953
ggcaguaaccuaggaaagu

SEQ ID NO: 307837 - RNA, 19 nt, Artificial Sequence
  Description of Artificial Sequence: Synthetic oligonucleotide
  Antisense strand to SEQ ID NO: 307836
acuuuccuagguuacugcc

SEQ ID NO: 307838 - RNA, 19 nt, Artificial Sequence
  Description of Artificial Sequence: Synthetic oligonucleotide
  Sense strand starting at position 1544 of SEQ ID NO: 3953
gucuucucugugggcagaa

SEQ ID NO: 307839 - RNA, 19 nt, Artificial Sequence
  Description of Artificial Sequence: Synthetic oligonucleotide
  Antisense strand to SEQ ID NO: 307838
uucugcccacagagaagac

SEQ ID NO: 307840 - RNA, 19 nt, Artificial Sequence
  Description of Artificial Sequence: Synthetic oligonucleotide
  Sense strand starting at position 1593 of SEQ ID NO: 3953
ucagauugcugguuuacua

SEQ ID NO: 307841 - RNA, 19 nt, Artificial Sequence
  Description of Artificial Sequence: Synthetic oligonucleotide
  Antisense strand to SEQ ID NO: 307840
uaguaaaccagcaaucuga

SEQ ID NO: 307842 - RNA, 19 nt, Artificial Sequence
  Description of Artificial Sequence: Synthetic oligonucleotide
  Sense strand starting at position 1615 of SEQ ID NO: 3953
ucaagucugugacuugcaa

SEQ ID NO: 307843 - RNA, 19 nt, Artificial Sequence
  Description of Artificial Sequence: Synthetic oligonucleotide
  Antisense strand to SEQ ID NO: 307842
uugcaagucacagacuuga

SEQ ID NO: 307844 - RNA, 19 nt, Artificial Sequence
  Description of Artificial Sequence: Synthetic oligonucleotide
  Sense strand starting at position 1622 of SEQ ID NO: 3953
ugugacuugcaagauauaa

SEQ ID NO: 307845 - RNA, 19 nt, Artificial Sequence
  Description of Artificial Sequence: Synthetic oligonucleotide
  Antisense strand to SEQ ID NO: 307844
uuauaucuugcaagucaca

SEQ ID NO: 307846 - RNA, 19 nt, Artificial Sequence
  Description of Artificial Sequence: Synthetic oligonucleotide
  Sense strand starting at position 1736 of SEQ ID NO: 3953
uucuaucguguguaucauu

SEQ ID NO: 307847 - RNA, 19 nt, Artificial Sequence
  Description of Artificial Sequence: Synthetic oligonucleotide
  Antisense strand to SEQ ID NO: 307846
aaugauacacacgauagaa

SEQ ID NO: 307848 - RNA, 19 nt, Artificial Sequence
  Description of Artificial Sequence: Synthetic oligonucleotide
  Sense strand starting at position 1783 of SEQ ID NO: 3953
aggccuaauuugggaaugu

SEQ ID NO: 307849 - RNA, 19 nt, Artificial Sequence
  Description of Artificial Sequence: Synthetic oligonucleotide
  Antisense strand to SEQ ID NO: 307848
acauucccaaauuaggccu

SEQ ID NO: 307850 - RNA, 19 nt, Artificial Sequence
  Description of Artificial Sequence: Synthetic oligonucleotide
  Sense strand starting at position 1784 of SEQ ID NO: 3953
ggccuaauuugggaauguu

SEQ ID NO: 307851 - RNA, 19 nt, Artificial Sequence
  Description of Artificial Sequence: Synthetic oligonucleotide
  Antisense strand to SEQ ID NO: 307850
aacauucccaaauuaggcc

SEQ ID NO: 307852 - RNA, 19 nt, Artificial Sequence
  Description of Artificial Sequence: Synthetic oligonucleotide
  Sense strand starting at position 1865 of SEQ ID NO: 3953
ucaagaggcuagcugaaua

SEQ ID NO: 307853 - RNA, 19 nt, Artificial Sequence
  Description of Artificial Sequence: Synthetic oligonucleotide
  Antisense strand to SEQ ID NO: 307852
uauucagcuagccucuuga

SEQ ID NO: 307854 - RNA, 19 nt, Artificial Sequence
  Description of Artificial Sequence: Synthetic oligonucleotide
  Sense strand starting at position 1989 of SEQ ID NO: 3953
gcauuucgguaacagauca

SEQ ID NO: 307855 - RNA, 19 nt, Artificial Sequence
  Description of Artificial Sequence: Synthetic oligonucleotide
  Antisense strand to SEQ ID NO: 307854
ugaucuguuaccgaaaugc

SEQ ID NO: 307856 - RNA, 19 nt, Artificial Sequence
  Description of Artificial Sequence: Synthetic oligonucleotide
  Sense strand starting at position 2007 of SEQ ID NO: 3953
agcuguucugaacagcauu

SEQ ID NO: 307857 - RNA, 19 nt, Artificial Sequence
  Description of Artificial Sequence: Synthetic oligonucleotide
  Antisense strand to SEQ ID NO: 307856
aaugcuguucagaacagcu

SEQ ID NO: 307858 - RNA, 19 nt, Artificial Sequence
  Description of Artificial Sequence: Synthetic oligonucleotide
  Sense strand starting at position 2015 of SEQ ID NO: 3953
ugaacagcauucucaguuu

SEQ ID NO: 307859 - RNA, 19 nt, Artificial Sequence
  Description of Artificial Sequence: Synthetic oligonucleotide
  Antisense strand to SEQ ID NO: 307858
aaacugagaaugcuguuca

SEQ ID NO: 307860 - RNA, 19 nt, Artificial Sequence
  Description of Artificial Sequence: Synthetic oligonucleotide
  Sense strand starting at position 2018 of SEQ ID NO: 3953
acagcauucucaguuucua

SEQ ID NO: 307861 - RNA, 19 nt, Artificial Sequence
  Description of Artificial Sequence: Synthetic oligonucleotide
  Antisense strand to SEQ ID NO: 307860
uagaaacugagaaugcugu

SEQ ID NO: 307862 - RNA, 19 nt, Artificial Sequence
  Description of Artificial Sequence: Synthetic oligonucleotide
  Sense strand starting at position 2046 of SEQ ID NO: 3953
aguuguaauuggcccaguu

SEQ ID NO: 307863 - RNA, 19 nt, Artificial Sequence
  Description of Artificial Sequence: Synthetic oligonucleotide
  Antisense strand to SEQ ID NO: 307862
aacugggccaauuacaacu

SEQ ID NO: 307864 - RNA, 19 nt, Artificial Sequence
  Description of Artificial Sequence: Synthetic oligonucleotide
  Sense strand starting at position 2112 of SEQ ID NO: 3953
gcaucuggugugcaacuua

SEQ ID NO: 307865 - RNA, 19 nt, Artificial Sequence
  Description of Artificial Sequence: Synthetic oligonucleotide
  Antisense strand to SEQ ID NO: 307864
uaaguugcacaccagaugc

SEQ ID NO: 307866 - RNA, 19 nt, Artificial Sequence
  Description of Artificial Sequence: Synthetic oligonucleotide
  Sense strand starting at position 2136 of SEQ ID NO: 3953
gccaucaagugauauuuac

SEQ ID NO: 307867 - RNA, 19 nt, Artificial Sequence
  Description of Artificial Sequence: Synthetic oligonucleotide
  Antisense strand to SEQ ID NO: 307866
guaaauaucacuugauggc

SEQ ID NO: 307868 - RNA, 19 nt, Artificial Sequence
  Description of Artificial Sequence: Synthetic oligonucleotide
  Sense strand starting at position 2553 of SEQ ID NO: 3953
cuaagcuuggugugauucu

SEQ ID NO: 307869 - RNA, 19 nt, Artificial Sequence
  Description of Artificial Sequence: Synthetic oligonucleotide
  Antisense strand to SEQ ID NO: 307868
agaaucacaccaagcuuag

SEQ ID NO: 307870 - RNA, 19 nt, Artificial Sequence
  Description of Artificial Sequence: Synthetic oligonucleotide
  Sense strand starting at position 2562 of SEQ ID NO: 3953
gugugauucugucucucaa

SEQ ID NO: 307871 - RNA, 19 nt, Artificial Sequence
  Description of Artificial Sequence: Synthetic oligonucleotide
  Antisense strand to SEQ ID NO: 307870
uugagagacagaaucacac

SEQ ID NO: 307872 - RNA, 19 nt, Artificial Sequence
  Description of Artificial Sequence: Synthetic oligonucleotide
  Sense strand starting at position 2564 of SEQ ID NO: 3953
gugauucugucucucaauc

SEQ ID NO: 307873 - RNA, 19 nt, Artificial Sequence
  Description of Artificial Sequence: Synthetic oligonucleotide
  Antisense strand to SEQ ID NO: 307872
gauugagagacagaaucac

SEQ ID NO: 307874 - RNA, 19 nt, Artificial Sequence
  Description of Artificial Sequence: Synthetic oligonucleotide
  Sense strand starting at position 2635 of SEQ ID NO: 3953
ccaggauuccucugcacca

SEQ ID NO: 307875 - RNA, 19 nt, Artificial Sequence
  Description of Artificial Sequence: Synthetic oligonucleotide
  Antisense strand to SEQ ID NO: 307874
uggugcagaggaauccugg

SEQ ID NO: 307876 - RNA, 19 nt, Artificial Sequence
  Description of Artificial Sequence: Synthetic oligonucleotide
  Sense strand starting at position 2717 of SEQ ID NO: 3953
gucugauacccaggucuag

SEQ ID NO: 307877 - RNA, 19 nt, Artificial Sequence
  Description of Artificial Sequence: Synthetic oligonucleotide
  Antisense strand to SEQ ID NO: 307876
cuagaccuggguaucagac

SEQ ID NO: 307878 - RNA, 19 nt, Artificial Sequence
  Description of Artificial Sequence: Synthetic oligonucleotide
  Sense strand starting at position 2820 of SEQ ID NO: 3953
agaagcuuucucuggcuau

SEQ ID NO: 307879 - RNA, 19 nt, Artificial Sequence
  Description of Artificial Sequence: Synthetic oligonucleotide
  Antisense strand to SEQ ID NO: 307878
auagccagagaaagcuucu

SEQ ID NO: 307880 - RNA, 19 nt, Artificial Sequence
  Description of Artificial Sequence: Synthetic oligonucleotide
  Sense strand starting at position 2995 of SEQ ID NO: 3953
ugcacuaauuguuccaaga

SEQ ID NO: 307881 - RNA, 19 nt, Artificial Sequence
  Description of Artificial Sequence: Synthetic oligonucleotide
  Antisense strand to SEQ ID NO: 307880
ucuuggaacaauuagugca

SEQ ID NO: 307882 - RNA, 19 nt, Artificial Sequence
  Description of Artificial Sequence: Synthetic oligonucleotide
  Sense strand starting at position 3030 of SEQ ID NO: 3953
ucuccuuugcugugguaaa

SEQ ID NO: 307883 - RNA, 19 nt, Artificial Sequence
  Description of Artificial Sequence: Synthetic oligonucleotide
  Antisense strand to SEQ ID NO: 307882
uuuaccacagcaaaggaga

SEQ ID NO: 307884 - RNA, 19 nt, Artificial Sequence
  Description of Artificial Sequence: Synthetic oligonucleotide
  Sense strand starting at position 3082 of SEQ ID NO: 3953
uagguaagcguccauacuu

SEQ ID NO: 307885 - RNA, 19 nt, Artificial Sequence
  Description of Artificial Sequence: Synthetic oligonucleotide
  Antisense strand to SEQ ID NO: 307884
aaguauggacgcuuaccua

SEQ ID NO: 307886 - RNA, 19 nt, Artificial Sequence
  Description of Artificial Sequence: Synthetic oligonucleotide
  Sense strand starting at position 87 of SEQ ID NO: 3955
cucaaauguuagcugcaau

SEQ ID NO: 307887 - RNA, 19 nt, Artificial Sequence
  Description of Artificial Sequence: Synthetic oligonucleotide
  Antisense strand to SEQ ID NO: 307886
auugcagcuaacauuugag

SEQ ID NO: 307888 - RNA, 19 nt, Artificial Sequence
  Description of Artificial Sequence: Synthetic oligonucleotide
  Sense strand starting at position 97 of SEQ ID NO: 3955
agcugcaauuauguuguua

SEQ ID NO: 307889 - RNA, 19 nt, Artificial Sequence
  Description of Artificial Sequence: Synthetic oligonucleotide
  Antisense strand to SEQ ID NO: 307888
uaacaacauaauugcagcu

SEQ ID NO: 307890 - RNA, 19 nt, Artificial Sequence
  Description of Artificial Sequence: Synthetic oligonucleotide
  Sense strand starting at position 199 of SEQ ID NO: 3955
gcuaccaaguuauuguuua

SEQ ID NO: 307891 - RNA, 19 nt, Artificial Sequence
  Description of Artificial Sequence: Synthetic oligonucleotide
  Antisense strand to SEQ ID NO: 307890
uaaacaauaacuugguagc

SEQ ID NO: 307892 - RNA, 19 nt, Artificial Sequence
  Description of Artificial Sequence: Synthetic oligonucleotide
  Sense strand starting at position 203 of SEQ ID NO: 3955
ccaaguuauuguuuaagga

SEQ ID NO: 307893 - RNA, 19 nt, Artificial Sequence
  Description of Artificial Sequence: Synthetic oligonucleotide
  Antisense strand to SEQ ID NO: 307892
uccuuaaacaauaacuugg

SEQ ID NO: 307894 - RNA, 19 nt, Artificial Sequence
  Description of Artificial Sequence: Synthetic oligonucleotide
  Sense strand starting at position 345 of SEQ ID NO: 3955
uuacaaguacuccgaagaa

SEQ ID NO: 307895 - RNA, 19 nt, Artificial Sequence
  Description of Artificial Sequence: Synthetic oligonucleotide
  Antisense strand to SEQ ID NO: 307894
uucuucggaguacuuguaa

SEQ ID NO: 307896 - RNA, 19 nt, Artificial Sequence
  Description of Artificial Sequence: Synthetic oligonucleotide
  Sense strand starting at position 386 of SEQ ID NO: 3955
auuguacucugucauuaau

SEQ ID NO: 307897 - RNA, 19 nt, Artificial Sequence
  Description of Artificial Sequence: Synthetic oligonucleotide
  Antisense strand to SEQ ID NO: 307896
auuaaugacagaguacaau

SEQ ID NO: 307898 - RNA, 19 nt, Artificial Sequence
  Description of Artificial Sequence: Synthetic oligonucleotide
  Sense strand starting at position 389 of SEQ ID NO: 3955
guacucugucauuaauccu

SEQ ID NO: 307899 - RNA, 19 nt, Artificial Sequence
  Description of Artificial Sequence: Synthetic oligonucleotide
  Antisense strand to SEQ ID NO: 307898
aggauuaaugacagaguac

SEQ ID NO: 307900 - RNA, 19 nt, Artificial Sequence
  Description of Artificial Sequence: Synthetic oligonucleotide
  Sense strand starting at position 515 of SEQ ID NO: 3955
cucagacugucccugacau

SEQ ID NO: 307901 - RNA, 19 nt, Artificial Sequence
  Description of Artificial Sequence: Synthetic oligonucleotide
  Antisense strand to SEQ ID NO: 307900
augucagggacagucugag

SEQ ID NO: 307902 - RNA, 19 nt, Artificial Sequence
  Description of Artificial Sequence: Synthetic oligonucleotide
  Sense strand starting at position 516 of SEQ ID NO: 3955
ucagacugucccugacauu

SEQ ID NO: 307903 - RNA, 19 nt, Artificial Sequence
  Description of Artificial Sequence: Synthetic oligonucleotide
  Antisense strand to SEQ ID NO: 307902
aaugucagggacagucuga

SEQ ID NO: 307904 - RNA, 19 nt, Artificial Sequence
  Description of Artificial Sequence: Synthetic oligonucleotide
  Sense strand starting at position 565 of SEQ ID NO: 3955
guaccaacucucuguaacu

SEQ ID NO: 307905 - RNA, 19 nt, Artificial Sequence
  Description of Artificial Sequence: Synthetic oligonucleotide
  Antisense strand to SEQ ID NO: 307904
aguuacagagaguugguac

SEQ ID NO: 307906 - RNA, 19 nt, Artificial Sequence
  Description of Artificial Sequence: Synthetic oligonucleotide
  Sense strand starting at position 585 of SEQ ID NO: 3955
acugcaaacucugaaaugu

SEQ ID NO: 307907 - RNA, 19 nt, Artificial Sequence
  Description of Artificial Sequence: Synthetic oligonucleotide
  Antisense strand to SEQ ID NO: 307906
acauuucagaguuugcagu

SEQ ID NO: 307908 - RNA, 19 nt, Artificial Sequence
  Description of Artificial Sequence: Synthetic oligonucleotide
  Sense strand starting at position 616 of SEQ ID NO: 3955
gucccaacaucugaugcau

SEQ ID NO: 307909 - RNA, 19 nt, Artificial Sequence
  Description of Artificial Sequence: Synthetic oligonucleotide
  Antisense strand to SEQ ID NO: 307908
augcaucagauguugggac

SEQ ID NO: 307910 - RNA, 19 nt, Artificial Sequence
  Description of Artificial Sequence: Synthetic oligonucleotide
  Sense strand starting at position 627 of SEQ ID NO: 3955
ugaugcaucgcuucuguca

SEQ ID NO: 307911 - RNA, 19 nt, Artificial Sequence
  Description of Artificial Sequence: Synthetic oligonucleotide
  Antisense strand to SEQ ID NO: 307910
ugacagaagcgaugcauca

SEQ ID NO: 307912 - RNA, 19 nt, Artificial Sequence
  Description of Artificial Sequence: Synthetic oligonucleotide
  Sense strand starting at position 649 of SEQ ID NO: 3955
gggcauuuguugucuccuu

SEQ ID NO: 307913 - RNA, 19 nt, Artificial Sequence
  Description of Artificial Sequence: Synthetic oligonucleotide
  Antisense strand to SEQ ID NO: 307912
aaggagacaacaaaugccc

SEQ ID NO: 307914 - RNA, 19 nt, Artificial Sequence
  Description of Artificial Sequence: Synthetic oligonucleotide
  Sense strand starting at position 680 of SEQ ID NO: 3955
ucacguaucagugagugaa

SEQ ID NO: 307915 - RNA, 19 nt, Artificial Sequence
  Description of Artificial Sequence: Synthetic oligonucleotide
  Antisense strand to SEQ ID NO: 307914
uucacucacugauacguga

SEQ ID NO: 307916 - RNA, 19 nt, Artificial Sequence
  Description of Artificial Sequence: Synthetic oligonucleotide
  Sense strand starting at position 682 of SEQ ID NO: 3955
acguaucagugagugaaca

SEQ ID NO: 307917 - RNA, 19 nt, Artificial Sequence
  Description of Artificial Sequence: Synthetic oligonucleotide
  Antisense strand to SEQ ID NO: 307916
uguucacucacugauacgu

SEQ ID NO: 307918 - RNA, 19 nt, Artificial Sequence
  Description of Artificial Sequence: Synthetic oligonucleotide
  Sense strand starting at position 683 of SEQ ID NO: 3955
cguaucagugagugaacaa

SEQ ID NO: 307919 - RNA, 19 nt, Artificial Sequence
  Description of Artificial Sequence: Synthetic oligonucleotide
  Antisense strand to SEQ ID NO: 307918
uuguucacucacugauacg

SEQ ID NO: 307920 - RNA, 19 nt, Artificial Sequence
  Description of Artificial Sequence: Synthetic oligonucleotide
  Sense strand starting at position 734 of SEQ ID NO: 3955
auuccugguucgcucagua

SEQ ID NO: 307921 - RNA, 19 nt, Artificial Sequence
  Description of Artificial Sequence: Synthetic oligonucleotide
  Antisense strand to SEQ ID NO: 307920
uacugagcgaaccaggaau

SEQ ID NO: 307922 - RNA, 19 nt, Artificial Sequence
  Description of Artificial Sequence: Synthetic oligonucleotide
  Sense strand starting at position 754 of SEQ ID NO: 3955
uuuguuuguucuccuggua

SEQ ID NO: 307923 - RNA, 19 nt, Artificial Sequence
  Description of Artificial Sequence: Synthetic oligonucleotide
  Antisense strand to SEQ ID NO: 307922
uaccaggagaacaaacaaa

SEQ ID NO: 307924 - RNA, 19 nt, Artificial Sequence
  Description of Artificial Sequence: Synthetic oligonucleotide
  Sense strand starting at position 771 of SEQ ID NO: 3955
uauggaggguauucuguaa

SEQ ID NO: 307925 - RNA, 19 nt, Artificial Sequence
  Description of Artificial Sequence: Synthetic oligonucleotide
  Antisense strand to SEQ ID NO: 307924
uuacagaauacccuccaua

SEQ ID NO: 307926 - RNA, 19 nt, Artificial Sequence
  Description of Artificial Sequence: Synthetic oligonucleotide
  Sense strand starting at position 775 of SEQ ID NO: 3955
gaggguauucuguaacuga

SEQ ID NO: 307927 - RNA, 19 nt, Artificial Sequence
  Description of Artificial Sequence: Synthetic oligonucleotide
  Antisense strand to SEQ ID NO: 307926
ucaguuacagaauacccuc

SEQ ID NO: 307928 - RNA, 19 nt, Artificial Sequence
  Description of Artificial Sequence: Synthetic oligonucleotide
  Sense strand starting at position 816 of SEQ ID NO: 3955
augucauuccagcauacca

SEQ ID NO: 307929 - RNA, 19 nt, Artificial Sequence
  Description of Artificial Sequence: Synthetic oligonucleotide
  Antisense strand to SEQ ID NO: 307928
ugguaugcuggaaugacau

SEQ ID NO: 307930 - RNA, 19 nt, Artificial Sequence
  Description of Artificial Sequence: Synthetic oligonucleotide
  Sense strand starting at position 913 of SEQ ID NO: 3955
cuucucucacagugacaga

SEQ ID NO: 307931 - RNA, 19 nt, Artificial Sequence
  Description of Artificial Sequence: Synthetic oligonucleotide
  Antisense strand to SEQ ID NO: 307930
ucugucacugugagagaag

SEQ ID NO: 307932 - RNA, 19 nt, Artificial Sequence
  Description of Artificial Sequence: Synthetic oligonucleotide
  Sense strand starting at position 2008 of SEQ ID NO: 3955
agcucagaauuuggagagu

SEQ ID NO: 307933 - RNA, 19 nt, Artificial Sequence
  Description of Artificial Sequence: Synthetic oligonucleotide
  Antisense strand to SEQ ID NO: 307932
acucuccaaauucugagcu

SEQ ID NO: 307934 - RNA, 19 nt, Artificial Sequence
  Description of Artificial Sequence: Synthetic oligonucleotide
  Sense strand starting at position 2251 of SEQ ID NO: 3955
guacucaccuuauaggaaa

SEQ ID NO: 307935 - RNA, 19 nt, Artificial Sequence
  Description of Artificial Sequence: Synthetic oligonucleotide
  Antisense strand to SEQ ID NO: 307934
uuuccuauaaggugaguac

SEQ ID NO: 307936 - RNA, 19 nt, Artificial Sequence
  Description of Artificial Sequence: Synthetic oligonucleotide
  Sense strand starting at position 2332 of SEQ ID NO: 3955
ucagauguacuuuaggcau

SEQ ID NO: 307937 - RNA, 19 nt, Artificial Sequence
  Description of Artificial Sequence: Synthetic oligonucleotide
  Antisense strand to SEQ ID NO: 307936
augccuaaaguacaucuga

SEQ ID NO: 307938 - RNA, 19 nt, Artificial Sequence
  Description of Artificial Sequence: Synthetic oligonucleotide
  Sense strand starting at position 2374 of SEQ ID NO: 3955
uuccuacuguuaucaaagu

SEQ ID NO: 307939 - RNA, 19 nt, Artificial Sequence
  Description of Artificial Sequence: Synthetic oligonucleotide
  Antisense strand to SEQ ID NO: 307938
acuuugauaacaguaggaa

SEQ ID NO: 307940 - RNA, 19 nt, Artificial Sequence
  Description of Artificial Sequence: Synthetic oligonucleotide
  Sense strand starting at position 2846 of SEQ ID NO: 3955
gguuauuccuggucuucua

SEQ ID NO: 307941 - RNA, 19 nt, Artificial Sequence
  Description of Artificial Sequence: Synthetic oligonucleotide
  Antisense strand to SEQ ID NO: 307940
uagaagaccaggaauaacc

SEQ ID NO: 307942 - RNA, 19 nt, Artificial Sequence
  Description of Artificial Sequence: Synthetic oligonucleotide
  Sense strand starting at position 2853 of SEQ ID NO: 3955
ccuggucuucuacaugagu

SEQ ID NO: 307943 - RNA, 19 nt, Artificial Sequence
  Description of Artificial Sequence: Synthetic oligonucleotide
  Antisense strand to SEQ ID NO: 307942
acucauguagaagaccagg

SEQ ID NO: 307944 - RNA, 19 nt, Artificial Sequence
  Description of Artificial Sequence: Synthetic oligonucleotide
  Sense strand starting at position 2856 of SEQ ID NO: 3955
ggucuucuacaugaguuaa

SEQ ID NO: 307945 - RNA, 19 nt, Artificial Sequence
  Description of Artificial Sequence: Synthetic oligonucleotide
  Antisense strand to SEQ ID NO: 307944
uuaacucauguagaagacc

SEQ ID NO: 307946 - RNA, 19 nt, Artificial Sequence
  Description of Artificial Sequence: Synthetic oligonucleotide
  Sense strand starting at position 2858 of SEQ ID NO: 3955
ucuucuacaugaguuaagu

SEQ ID NO: 307947 - RNA, 19 nt, Artificial Sequence
  Description of Artificial Sequence: Synthetic oligonucleotide
  Antisense strand to SEQ ID NO: 307946
acuuaacucauguagaaga

SEQ ID NO: 307948 - RNA, 19 nt, Artificial Sequence
  Description of Artificial Sequence: Synthetic oligonucleotide
  Sense strand starting at position 2864 of SEQ ID NO: 3955
acaugaguuaaguauguca

SEQ ID NO: 307949 - RNA, 19 nt, Artificial Sequence
  Description of Artificial Sequence: Synthetic oligonucleotide
  Antisense strand to SEQ ID NO: 307948
ugacauacuuaacucaugu

SEQ ID NO: 307950 - RNA, 19 nt, Artificial Sequence
  Description of Artificial Sequence: Synthetic oligonucleotide
  Sense strand starting at position 2867 of SEQ ID NO: 3955
ugaguuaaguaugucacga

SEQ ID NO: 307951 - RNA, 19 nt, Artificial Sequence
  Description of Artificial Sequence: Synthetic oligonucleotide
  Antisense strand to SEQ ID NO: 307950
ucgugacauacuuaacuca

SEQ ID NO: 307952 - RNA, 19 nt, Artificial Sequence
  Description of Artificial Sequence: Synthetic oligonucleotide
  Sense strand starting at position 2872 of SEQ ID NO: 3955
uaaguaugucacgaucauc

SEQ ID NO: 307953 - RNA, 19 nt, Artificial Sequence
  Description of Artificial Sequence: Synthetic oligonucleotide
  Antisense strand to SEQ ID NO: 307952
gaugaucgugacauacuua

SEQ ID NO: 307954 - RNA, 19 nt, Artificial Sequence
  Description of Artificial Sequence: Synthetic oligonucleotide
  Sense strand starting at position 2875 of SEQ ID NO: 3955
guaugucacgaucaucaua

SEQ ID NO: 307955 - RNA, 19 nt, Artificial Sequence
  Description of Artificial Sequence: Synthetic oligonucleotide
  Antisense strand to SEQ ID NO: 307954
uaugaugaucgugacauac

SEQ ID NO: 307956 - RNA, 19 nt, Artificial Sequence
  Description of Artificial Sequence: Synthetic oligonucleotide
  Sense strand starting at position 2877 of SEQ ID NO: 3955
augucacgaucaucauaua

SEQ ID NO: 307957 - RNA, 19 nt, Artificial Sequence
  Description of Artificial Sequence: Synthetic oligonucleotide
  Antisense strand to SEQ ID NO: 307956
uauaugaugaucgugacau

SEQ ID NO: 307958 - RNA, 19 nt, Artificial Sequence
  Description of Artificial Sequence: Synthetic oligonucleotide
  Sense strand starting at position 2878 of SEQ ID NO: 3955
ugucacgaucaucauauaa

SEQ ID NO: 307959 - RNA, 19 nt, Artificial Sequence
  Description of Artificial Sequence: Synthetic oligonucleotide
  Antisense strand to SEQ ID NO: 307958
uuauaugaugaucgugaca

SEQ ID NO: 307960 - RNA, 19 nt, Artificial Sequence
  Description of Artificial Sequence: Synthetic oligonucleotide
  Sense strand starting at position 3035 of SEQ ID NO: 3955
cugcuauuccuagaaguag

SEQ ID NO: 307961 - RNA, 19 nt, Artificial Sequence
  Description of Artificial Sequence: Synthetic oligonucleotide
  Antisense strand to SEQ ID NO: 307960
cuacuucuaggaauagcag

SEQ ID NO: 307962 - RNA, 19 nt, Artificial Sequence
  Description of Artificial Sequence: Synthetic oligonucleotide
  Sense strand starting at position 3179 of SEQ ID NO: 3955
gauccugccuucucaggau

SEQ ID NO: 307963 - RNA, 19 nt, Artificial Sequence
  Description of Artificial Sequence: Synthetic oligonucleotide
  Antisense strand to SEQ ID NO: 307962
auccugagaaggcaggauc

SEQ ID NO: 307964 - RNA, 19 nt, Artificial Sequence
  Description of Artificial Sequence: Synthetic oligonucleotide
  Sense strand starting at position 3249 of SEQ ID NO: 3955
gcucaauucuugucagaau

SEQ ID NO: 307965 - RNA, 19 nt, Artificial Sequence
  Description of Artificial Sequence: Synthetic oligonucleotide
  Antisense strand to SEQ ID NO: 307964
auucugacaagaauugagc

SEQ ID NO: 307966 - RNA, 19 nt, Artificial Sequence
  Description of Artificial Sequence: Synthetic oligonucleotide
  Sense strand starting at position 156 of SEQ ID NO: 3956
gcugaaguuccugaaauga

SEQ ID NO: 307967 - RNA, 19 nt, Artificial Sequence
  Description of Artificial Sequence: Synthetic oligonucleotide
  Antisense strand to SEQ ID NO: 307966
ucauuucaggaacuucagc

SEQ ID NO: 307968 - RNA, 19 nt, Artificial Sequence
  Description of Artificial Sequence: Synthetic oligonucleotide
  Sense strand starting at position 713 of SEQ ID NO: 3956
ggcccugauuauuugcuua

SEQ ID NO: 307969 - RNA, 19 nt, Artificial Sequence
  Description of Artificial Sequence: Synthetic oligonucleotide
  Antisense strand to SEQ ID NO: 307968
uaagcaaauaaucagggcc

SEQ ID NO: 307970 - RNA, 19 nt, Artificial Sequence
  Description of Artificial Sequence: Synthetic oligonucleotide
  Sense strand starting at position 765 of SEQ ID NO: 3956
aaaggcagagucuguaauu

SEQ ID NO: 307971 - RNA, 19 nt, Artificial Sequence
  Description of Artificial Sequence: Synthetic oligonucleotide
  Antisense strand to SEQ ID NO: 307970
aauuacagacucugccuuu

SEQ ID NO: 307972 - RNA, 19 nt, Artificial Sequence
  Description of Artificial Sequence: Synthetic oligonucleotide
  Sense strand starting at position 777 of SEQ ID NO: 3956
uguaauugucacuauugua

SEQ ID NO: 307973 - RNA, 19 nt, Artificial Sequence
  Description of Artificial Sequence: Synthetic oligonucleotide
  Antisense strand to SEQ ID NO: 307972
uacaauagugacaauuaca

SEQ ID NO: 307974 - RNA, 19 nt, Artificial Sequence
  Description of Artificial Sequence: Synthetic oligonucleotide
  Sense strand starting at position 848 of SEQ ID NO: 3956
uuaaaucaaguguaugcua

SEQ ID NO: 307975 - RNA, 19 nt, Artificial Sequence
  Description of Artificial Sequence: Synthetic oligonucleotide
  Antisense strand to SEQ ID NO: 307974
uagcauacacuugauuuaa

SEQ ID NO: 307976 - RNA, 19 nt, Artificial Sequence
  Description of Artificial Sequence: Synthetic oligonucleotide
  Sense strand starting at position 928 of SEQ ID NO: 3956
acaacugcucaguaagugu

SEQ ID NO: 307977 - RNA, 19 nt, Artificial Sequence
  Description of Artificial Sequence: Synthetic oligonucleotide
  Antisense strand to SEQ ID NO: 307976
acacuuacugagcaguugu

SEQ ID NO: 307978 - RNA, 19 nt, Artificial Sequence
  Description of Artificial Sequence: Synthetic oligonucleotide
  Sense strand starting at position 945 of SEQ ID NO: 3956
gugagcuuccauuaacacu

SEQ ID NO: 307979 - RNA, 19 nt, Artificial Sequence
  Description of Artificial Sequence: Synthetic oligonucleotide
  Antisense strand to SEQ ID NO: 307978
aguguuaauggaagcucac

SEQ ID NO: 307980 - RNA, 19 nt, Artificial Sequence
  Description of Artificial Sequence: Synthetic oligonucleotide
  Sense strand starting at position 1126 of SEQ ID NO: 3956
ucagcauauuuagaaagaa

SEQ ID NO: 307981 - RNA, 19 nt, Artificial Sequence
  Description of Artificial Sequence: Synthetic oligonucleotide
  Antisense strand to SEQ ID NO: 307980
uucuuucuaaauaugcuga

SEQ ID NO: 307982 - RNA, 19 nt, Artificial Sequence
  Description of Artificial Sequence: Synthetic oligonucleotide
  Sense strand starting at position 1472 of SEQ ID NO: 3956
auaggcauacuuuguauca

SEQ ID NO: 307983 - RNA, 19 nt, Artificial Sequence
  Description of Artificial Sequence: Synthetic oligonucleotide
  Antisense strand to SEQ ID NO: 307982
ugauacaaaguaugccuau

SEQ ID NO: 307984 - RNA, 19 nt, Artificial Sequence
  Description of Artificial Sequence: Synthetic oligonucleotide
  Sense strand starting at position 1505 of SEQ ID NO: 3956
ugcagcguucgccuuugaa

SEQ ID NO: 307985 - RNA, 19 nt, Artificial Sequence
  Description of Artificial Sequence: Synthetic oligonucleotide
  Antisense strand to SEQ ID NO: 307984
uucaaaggcgaacgcugca

SEQ ID NO: 307986 - RNA, 19 nt, Artificial Sequence
  Description of Artificial Sequence: Synthetic oligonucleotide
  Sense strand starting at position 2232 of SEQ ID NO: 3956
gugugugcucaccagagaa

SEQ ID NO: 307987 - RNA, 19 nt, Artificial Sequence
  Description of Artificial Sequence: Synthetic oligonucleotide
  Antisense strand to SEQ ID NO: 307986
uucucuggugagcacacac

SEQ ID NO: 307988 - RNA, 19 nt, Artificial Sequence
  Description of Artificial Sequence: Synthetic oligonucleotide
  Sense strand starting at position 2297 of SEQ ID NO: 3956
gagagacaucccugcauuc

SEQ ID NO: 307989 - RNA, 19 nt, Artificial Sequence
  Description of Artificial Sequence: Synthetic oligonucleotide
  Antisense strand to SEQ ID NO: 307988
gaaugcagggaugucucuc

SEQ ID NO: 307990 - RNA, 19 nt, Artificial Sequence
  Description of Artificial Sequence: Synthetic oligonucleotide
  Sense strand starting at position 2299 of SEQ ID NO: 3956
gagacaucccugcauucug

SEQ ID NO: 307991 - RNA, 19 nt, Artificial Sequence
  Description of Artificial Sequence: Synthetic oligonucleotide
  Antisense strand to SEQ ID NO: 307990
cagaaugcagggaugucuc

SEQ ID NO: 307992 - RNA, 19 nt, Artificial Sequence
  Description of Artificial Sequence: Synthetic oligonucleotide
  Sense strand starting at position 2310 of SEQ ID NO: 3956
gcauucugacaauguugaa

SEQ ID NO: 307993 - RNA, 19 nt, Artificial Sequence
  Description of Artificial Sequence: Synthetic oligonucleotide
  Antisense strand to SEQ ID NO: 307992
uucaacauugucagaaugc

SEQ ID NO: 307994 - RNA, 19 nt, Artificial Sequence
  Description of Artificial Sequence: Synthetic oligonucleotide
  Sense strand starting at position 2799 of SEQ ID NO: 3956
ccaguucuucgccucgcaa

SEQ ID NO: 307995 - RNA, 19 nt, Artificial Sequence
  Description of Artificial Sequence: Synthetic oligonucleotide
  Antisense strand to SEQ ID NO: 307994
uugcgaggcgaagaacugg

SEQ ID NO: 307996 - RNA, 19 nt, Artificial Sequence
  Description of Artificial Sequence: Synthetic oligonucleotide
  Sense strand starting at position 2800 of SEQ ID NO: 3956
caguucuucgccucgcaaa

SEQ ID NO: 307997 - RNA, 19 nt, Artificial Sequence
  Description of Artificial Sequence: Synthetic oligonucleotide
  Antisense strand to SEQ ID NO: 307996
uuugcgaggcgaagaacug

SEQ ID NO: 307998 - RNA, 19 nt, Artificial Sequence
  Description of Artificial Sequence: Synthetic oligonucleotide
  Sense strand starting at position 2802 of SEQ ID NO: 3956
guucuucgccucgcaaaua

SEQ ID NO: 307999 - RNA, 19 nt, Artificial Sequence
  Description of Artificial Sequence: Synthetic oligonucleotide
  Antisense strand to SEQ ID NO: 307998
uauuugcgaggcgaagaac

SEQ ID NO: 308000 - RNA, 19 nt, Artificial Sequence
  Description of Artificial Sequence: Synthetic oligonucleotide
  Sense strand starting at position 2988 of SEQ ID NO: 3956
gggaaacagucucuguaua

SEQ ID NO: 308001 - RNA, 19 nt, Artificial Sequence
  Description of Artificial Sequence: Synthetic oligonucleotide
  Antisense strand to SEQ ID NO: 308000
uauacagagacuguuuccc

SEQ ID NO: 308002 - RNA, 19 nt, Artificial Sequence
  Description of Artificial Sequence: Synthetic oligonucleotide
  Sense strand starting at position 2989 of SEQ ID NO: 3956
ggaaacagucucuguauag

SEQ ID NO: 308003 - RNA, 19 nt, Artificial Sequence
  Description of Artificial Sequence: Synthetic oligonucleotide
  Antisense strand to SEQ ID NO: 308002
cuauacagagacuguuucc

SEQ ID NO: 308004 - RNA, 19 nt, Artificial Sequence
  Description of Artificial Sequence: Synthetic oligonucleotide
  Sense strand starting at position 2990 of SEQ ID NO: 3956
gaaacagucucuguauagu

SEQ ID NO: 308005 - RNA, 19 nt, Artificial Sequence
  Description of Artificial Sequence: Synthetic oligonucleotide
  Antisense strand to SEQ ID NO: 308004
acuauacagagacuguuuc

SEQ ID NO: 308006 - RNA, 19 nt, Artificial Sequence
  Description of Artificial Sequence: Synthetic oligonucleotide
  Sense strand starting at position 3113 of SEQ ID NO: 3956
aggagaucgcugcagaucu

SEQ ID NO: 308007 - RNA, 19 nt, Artificial Sequence
  Description of Artificial Sequence: Synthetic oligonucleotide
  Antisense strand to SEQ ID NO: 308006
agaucugcagcgaucuccu

SEQ ID NO: 308008 - RNA, 19 nt, Artificial Sequence
  Description of Artificial Sequence: Synthetic oligonucleotide
  Sense strand starting at position 3125 of SEQ ID NO: 3956
cagaucucaugguuggaga

SEQ ID NO: 308009 - RNA, 19 nt, Artificial Sequence
  Description of Artificial Sequence: Synthetic oligonucleotide
  Antisense strand to SEQ ID NO: 308008
ucuccaaccaugagaucug

SEQ ID NO: 308010 - RNA, 19 nt, Artificial Sequence
  Description of Artificial Sequence: Synthetic oligonucleotide
  Sense strand starting at position 3127 of SEQ ID NO: 3956
gaucucaugguuggagagu

SEQ ID NO: 308011 - RNA, 19 nt, Artificial Sequence
  Description of Artificial Sequence: Synthetic oligonucleotide
  Antisense strand to SEQ ID NO: 308010
acucuccaaccaugagauc

SEQ ID NO: 308012 - RNA, 19 nt, Artificial Sequence
  Description of Artificial Sequence: Synthetic oligonucleotide
  Sense strand starting at position 3362 of SEQ ID NO: 3956
auccuuuccgaauaaaguc

SEQ ID NO: 308013 - RNA, 19 nt, Artificial Sequence
  Description of Artificial Sequence: Synthetic oligonucleotide
  Antisense strand to SEQ ID NO: 308012
gacuuuauucggaaaggau

SEQ ID NO: 308014 - RNA, 19 nt, Artificial Sequence
  Description of Artificial Sequence: Synthetic oligonucleotide
  Sense strand starting at position 3397 of SEQ ID NO: 3956
gggauuuauuuguaagucu

SEQ ID NO: 308015 - RNA, 19 nt, Artificial Sequence
  Description of Artificial Sequence: Synthetic oligonucleotide
  Antisense strand to SEQ ID NO: 308014
agacuuacaaauaaauccc

SEQ ID NO: 308016 - RNA, 19 nt, Artificial Sequence
  Description of Artificial Sequence: Synthetic oligonucleotide
  Sense strand starting at position 3432 of SEQ ID NO: 3956
gauugagauugauccucac

SEQ ID NO: 308017 - RNA, 19 nt, Artificial Sequence
  Description of Artificial Sequence: Synthetic oligonucleotide
  Antisense strand to SEQ ID NO: 308016
gugaggaucaaucucaauc

SEQ ID NO: 308018 - RNA, 19 nt, Artificial Sequence
  Description of Artificial Sequence: Synthetic oligonucleotide
  Sense strand starting at position 3435 of SEQ ID NO: 3956
ugagauugauccucaccua

SEQ ID NO: 308019 - RNA, 19 nt, Artificial Sequence
  Description of Artificial Sequence: Synthetic oligonucleotide
  Antisense strand to SEQ ID NO: 308018
uaggugaggaucaaucuca

SEQ ID NO: 308020 - RNA, 19 nt, Artificial Sequence
  Description of Artificial Sequence: Synthetic oligonucleotide
  Sense strand starting at position 3666 of SEQ ID NO: 3956
agaggauucuucccuuguc

SEQ ID NO: 308021 - RNA, 19 nt, Artificial Sequence
  Description of Artificial Sequence: Synthetic oligonucleotide
  Antisense strand to SEQ ID NO: 308020
gacaagggaagaauccucu

SEQ ID NO: 308022 - RNA, 19 nt, Artificial Sequence
  Description of Artificial Sequence: Synthetic oligonucleotide
  Sense strand starting at position 3667 of SEQ ID NO: 3956
gaggauucuucccuuguca

SEQ ID NO: 308023 - RNA, 19 nt, Artificial Sequence
  Description of Artificial Sequence: Synthetic oligonucleotide
  Antisense strand to SEQ ID NO: 308022
ugacaagggaagaauccuc

SEQ ID NO: 308024 - RNA, 19 nt, Artificial Sequence
  Description of Artificial Sequence: Synthetic oligonucleotide
  Sense strand starting at position 3689 of SEQ ID NO: 3956
aucaauugaccauggaugu

SEQ ID NO: 308025 - RNA, 19 nt, Artificial Sequence
  Description of Artificial Sequence: Synthetic oligonucleotide
  Antisense strand to SEQ ID NO: 308024
acauccauggucaauugau

SEQ ID NO: 308026 - RNA, 19 nt, Artificial Sequence
  Description of Artificial Sequence: Synthetic oligonucleotide
  Sense strand starting at position 3690 of SEQ ID NO: 3956
ucaauugaccauggaugua

SEQ ID NO: 308027 - RNA, 19 nt, Artificial Sequence
  Description of Artificial Sequence: Synthetic oligonucleotide
  Antisense strand to SEQ ID NO: 308026
uacauccauggucaauuga

SEQ ID NO: 308028 - RNA, 19 nt, Artificial Sequence
  Description of Artificial Sequence: Synthetic oligonucleotide
  Sense strand starting at position 3693 of SEQ ID NO: 3956
auugaccauggauguauaa

SEQ ID NO: 308029 - RNA, 19 nt, Artificial Sequence
  Description of Artificial Sequence: Synthetic oligonucleotide
  Antisense strand to SEQ ID NO: 308028
uuauacauccauggucaau

SEQ ID NO: 308030 - RNA, 19 nt, Artificial Sequence
  Description of Artificial Sequence: Synthetic oligonucleotide
  Sense strand starting at position 3734 of SEQ ID NO: 3956
cuauuccauugauuaugua

SEQ ID NO: 308031 - RNA, 19 nt, Artificial Sequence
  Description of Artificial Sequence: Synthetic oligonucleotide
  Antisense strand to SEQ ID NO: 308030
uacauaaucaauggaauag

SEQ ID NO: 308032 - RNA, 19 nt, Artificial Sequence
  Description of Artificial Sequence: Synthetic oligonucleotide
  Sense strand starting at position 3750 of SEQ ID NO: 3956
guaucuuaucuuuaugcua

SEQ ID NO: 308033 - RNA, 19 nt, Artificial Sequence
  Description of Artificial Sequence: Synthetic oligonucleotide
  Antisense strand to SEQ ID NO: 308032
uagcauaaagauaagauac

SEQ ID NO: 308034 - RNA, 19 nt, Artificial Sequence
  Description of Artificial Sequence: Synthetic oligonucleotide
  Sense strand starting at position 3807 of SEQ ID NO: 3956
uguauacagcuguauagua

SEQ ID NO: 308035 - RNA, 19 nt, Artificial Sequence
  Description of Artificial Sequence: Synthetic oligonucleotide
  Antisense strand to SEQ ID NO: 308034
uacuauacagcuguauaca

SEQ ID NO: 308036 - RNA, 19 nt, Artificial Sequence
  Description of Artificial Sequence: Synthetic oligonucleotide
  Sense strand starting at position 3820 of SEQ ID NO: 3956
auaguagcuguauagaaau

SEQ ID NO: 308037 - RNA, 19 nt, Artificial Sequence
  Description of Artificial Sequence: Synthetic oligonucleotide
  Antisense strand to SEQ ID NO: 308036
auuucuauacagcuacuau

SEQ ID NO: 308038 - RNA, 19 nt, Artificial Sequence
  Description of Artificial Sequence: Synthetic oligonucleotide
  Sense strand starting at position 3888 of SEQ ID NO: 3956
gucgcuugcaguucuguau

SEQ ID NO: 308039 - RNA, 19 nt, Artificial Sequence
  Description of Artificial Sequence: Synthetic oligonucleotide
  Antisense strand to SEQ ID NO: 308038
auacagaacugcaagcgac

SEQ ID NO: 308040 - RNA, 19 nt, Artificial Sequence
  Description of Artificial Sequence: Synthetic oligonucleotide
  Sense strand starting at position 3892 of SEQ ID NO: 3956
cuugcaguucuguaugaau

SEQ ID NO: 308041 - RNA, 19 nt, Artificial Sequence
  Description of Artificial Sequence: Synthetic oligonucleotide
  Antisense strand to SEQ ID NO: 308040
auucauacagaacugcaag

SEQ ID NO: 308042 - RNA, 19 nt, Artificial Sequence
  Description of Artificial Sequence: Synthetic oligonucleotide
  Sense strand starting at position 3894 of SEQ ID NO: 3956
ugcaguucuguaugaauuu

SEQ ID NO: 308043 - RNA, 19 nt, Artificial Sequence
  Description of Artificial Sequence: Synthetic oligonucleotide
  Antisense strand to SEQ ID NO: 308042
aaauucauacagaacugca

SEQ ID NO: 308044 - RNA, 19 nt, Artificial Sequence
  Description of Artificial Sequence: Synthetic oligonucleotide
  Sense strand starting at position 3979 of SEQ ID NO: 3956
cagggauugcuuugaauug

SEQ ID NO: 308045 - RNA, 19 nt, Artificial Sequence
  Description of Artificial Sequence: Synthetic oligonucleotide
  Antisense strand to SEQ ID NO: 308044
caauucaaagcaaucccug

SEQ ID NO: 308046 - RNA, 19 nt, Artificial Sequence
  Description of Artificial Sequence: Synthetic oligonucleotide
  Sense strand starting at position 163 of SEQ ID NO: 3957
aggaucaacugagauauua

SEQ ID NO: 308047 - RNA, 19 nt, Artificial Sequence
  Description of Artificial Sequence: Synthetic oligonucleotide
  Antisense strand to SEQ ID NO: 308046
uaauaucucaguugauccu

SEQ ID NO: 308048 - RNA, 19 nt, Artificial Sequence
  Description of Artificial Sequence: Synthetic oligonucleotide
  Sense strand starting at position 229 of SEQ ID NO: 3957
agcauagugucauuuacuu

SEQ ID NO: 308049 - RNA, 19 nt, Artificial Sequence
  Description of Artificial Sequence: Synthetic oligonucleotide
  Antisense strand to SEQ ID NO: 308048
aaguaaaugacacuaugcu

SEQ ID NO: 308050 - RNA, 19 nt, Artificial Sequence
  Description of Artificial Sequence: Synthetic oligonucleotide
  Sense strand starting at position 784 of SEQ ID NO: 3957
cuuugaaacuaauggauuu

SEQ ID NO: 308051 - RNA, 19 nt, Artificial Sequence
  Description of Artificial Sequence: Synthetic oligonucleotide
  Antisense strand to SEQ ID NO: 308050
aaauccauuaguuucaaag

SEQ ID NO: 308052 - RNA, 19 nt, Artificial Sequence
  Description of Artificial Sequence: Synthetic oligonucleotide
  Sense strand starting at position 1006 of SEQ ID NO: 3957
gccuaauggcccguuccua

SEQ ID NO: 308053 - RNA, 19 nt, Artificial Sequence
  Description of Artificial Sequence: Synthetic oligonucleotide
  Antisense strand to SEQ ID NO: 308052
uaggaacgggccauuaggc

SEQ ID NO: 308054 - RNA, 19 nt, Artificial Sequence
  Description of Artificial Sequence: Synthetic oligonucleotide
  Sense strand starting at position 1203 of SEQ ID NO: 3957
gggagauuucggcgggccu

SEQ ID NO: 308055 - RNA, 19 nt, Artificial Sequence
  Description of Artificial Sequence: Synthetic oligonucleotide
  Antisense strand to SEQ ID NO: 308054
aggcccgccgaaaucuccc

SEQ ID NO: 308056 - RNA, 19 nt, Artificial Sequence
  Description of Artificial Sequence: Synthetic oligonucleotide
  Sense strand starting at position 1484 of SEQ ID NO: 3957
gcaauugugcgagccgaca

SEQ ID NO: 308057 - RNA, 19 nt, Artificial Sequence
  Description of Artificial Sequence: Synthetic oligonucleotide
  Antisense strand to SEQ ID NO: 308056
ugucggcucgcacaauugc

SEQ ID NO: 308058 - RNA, 19 nt, Artificial Sequence
  Description of Artificial Sequence: Synthetic oligonucleotide
  Sense strand starting at position 1532 of SEQ ID NO: 3957
gcggcugagguauacaaga

SEQ ID NO: 308059 - RNA, 19 nt, Artificial Sequence
  Description of Artificial Sequence: Synthetic oligonucleotide
  Antisense strand to SEQ ID NO: 308058
ucuuguauaccucagccgc

SEQ ID NO: 308060 - RNA, 19 nt, Artificial Sequence
  Description of Artificial Sequence: Synthetic oligonucleotide
  Sense strand starting at position 2004 of SEQ ID NO: 3957
cgguaagagggaugacuaa

SEQ ID NO: 308061 - RNA, 19 nt, Artificial Sequence
  Description of Artificial Sequence: Synthetic oligonucleotide
  Antisense strand to SEQ ID NO: 308060
uuagucaucccucuuaccg

SEQ ID NO: 308062 - RNA, 19 nt, Artificial Sequence
  Description of Artificial Sequence: Synthetic oligonucleotide
  Sense strand starting at position 2015 of SEQ ID NO: 3957
augacuaaccgcuaagaca

SEQ ID NO: 308063 - RNA, 19 nt, Artificial Sequence
  Description of Artificial Sequence: Synthetic oligonucleotide
  Antisense strand to SEQ ID NO: 308062
ugucuuagcgguuagucau

SEQ ID NO: 308064 - RNA, 19 nt, Artificial Sequence
  Description of Artificial Sequence: Synthetic oligonucleotide
  Sense strand starting at position 2062 of SEQ ID NO: 3957
ugggaauuguaguccacuu

SEQ ID NO: 308065 - RNA, 19 nt, Artificial Sequence
  Description of Artificial Sequence: Synthetic oligonucleotide
  Antisense strand to SEQ ID NO: 308064
aaguggacuacaauuccca

SEQ ID NO: 308066 - RNA, 19 nt, Artificial Sequence
  Description of Artificial Sequence: Synthetic oligonucleotide
  Sense strand starting at position 2096 of SEQ ID NO: 3957
cauauuguggagcauguaa

SEQ ID NO: 308067 - RNA, 19 nt, Artificial Sequence
  Description of Artificial Sequence: Synthetic oligonucleotide
  Antisense strand to SEQ ID NO: 308066
uuacaugcuccacaauaug

SEQ ID NO: 308068 - RNA, 19 nt, Artificial Sequence
  Description of Artificial Sequence: Synthetic oligonucleotide
  Sense strand starting at position 2183 of SEQ ID NO: 3957
gggagaaauaagugucacu

SEQ ID NO: 308069 - RNA, 19 nt, Artificial Sequence
  Description of Artificial Sequence: Synthetic oligonucleotide
  Antisense strand to SEQ ID NO: 308068
agugacacuuauuucuccc

SEQ ID NO: 308070 - RNA, 19 nt, Artificial Sequence
  Description of Artificial Sequence: Synthetic oligonucleotide
  Sense strand starting at position 2249 of SEQ ID NO: 3957
aggaaauaguccucgcaug

SEQ ID NO: 308071 - RNA, 19 nt, Artificial Sequence
  Description of Artificial Sequence: Synthetic oligonucleotide
  Antisense strand to SEQ ID NO: 308070
caugcgaggacuauuuccu

SEQ ID NO: 308072 - RNA, 19 nt, Artificial Sequence
  Description of Artificial Sequence: Synthetic oligonucleotide
  Sense strand starting at position 2277 of SEQ ID NO: 3957
gggcuuugucgggauuaac

SEQ ID NO: 308073 - RNA, 19 nt, Artificial Sequence
  Description of Artificial Sequence: Synthetic oligonucleotide
  Antisense strand to SEQ ID NO: 308072
guuaaucccgacaaagccc

SEQ ID NO: 308074 - RNA, 19 nt, Artificial Sequence
  Description of Artificial Sequence: Synthetic oligonucleotide
  Sense strand starting at position 2369 of SEQ ID NO: 3957
uuuaauaaccuguagucca

SEQ ID NO: 308075 - RNA, 19 nt, Artificial Sequence
  Description of Artificial Sequence: Synthetic oligonucleotide
  Antisense strand to SEQ ID NO: 308074
uggacuacagguuauuaaa

SEQ ID NO: 308076 - RNA, 19 nt, Artificial Sequence
  Description of Artificial Sequence: Synthetic oligonucleotide
  Sense strand starting at position 2400 of SEQ ID NO: 3957
gaggaauugguagaacgca

SEQ ID NO: 308077 - RNA, 19 nt, Artificial Sequence
  Description of Artificial Sequence: Synthetic oligonucleotide
  Antisense strand to SEQ ID NO: 308076
ugcguucuaccaauuccuc

SEQ ID NO: 308078 - RNA, 19 nt, Artificial Sequence
  Description of Artificial Sequence: Synthetic oligonucleotide
  Sense strand starting at position 2540 of SEQ ID NO: 3957
agcuacuuuccaugguaau

SEQ ID NO: 308079 - RNA, 19 nt, Artificial Sequence
  Description of Artificial Sequence: Synthetic oligonucleotide
  Antisense strand to SEQ ID NO: 308078
auuaccauggaaaguagcu

SEQ ID NO: 308080 - RNA, 19 nt, Artificial Sequence
  Description of Artificial Sequence: Synthetic oligonucleotide
  Sense strand starting at position 2541 of SEQ ID NO: 3957
gcuacuuuccaugguaaua

SEQ ID NO: 308081 - RNA, 19 nt, Artificial Sequence
  Description of Artificial Sequence: Synthetic oligonucleotide
  Antisense strand to SEQ ID NO: 308080
uauuaccauggaaaguagc

SEQ ID NO: 308082 - RNA, 19 nt, Artificial Sequence
  Description of Artificial Sequence: Synthetic oligonucleotide
  Sense strand starting at position 2565 of SEQ ID NO: 3957
gagacuagauagugauuua

SEQ ID NO: 308083 - RNA, 19 nt, Artificial Sequence
  Description of Artificial Sequence: Synthetic oligonucleotide
  Antisense strand to SEQ ID NO: 308082
uaaaucacuaucuagucuc

SEQ ID NO: 308084 - RNA, 19 nt, Artificial Sequence
  Description of Artificial Sequence: Synthetic oligonucleotide
  Sense strand starting at position 2596 of SEQ ID NO: 3957
cugggagaauguccuauaa

SEQ ID NO: 308085 - RNA, 19 nt, Artificial Sequence
  Description of Artificial Sequence: Synthetic oligonucleotide
  Antisense strand to SEQ ID NO: 308084
uuauaggacauucucccag

SEQ ID NO: 308086 - RNA, 19 nt, Artificial Sequence
  Description of Artificial Sequence: Synthetic oligonucleotide
  Sense strand starting at position 2635 of SEQ ID NO: 3957
auuggcugccauuaaauga

SEQ ID NO: 308087 - RNA, 19 nt, Artificial Sequence
  Description of Artificial Sequence: Synthetic oligonucleotide
  Antisense strand to SEQ ID NO: 308086
ucauuuaauggcagccaau

SEQ ID NO: 308088 - RNA, 19 nt, Artificial Sequence
  Description of Artificial Sequence: Synthetic oligonucleotide
  Sense strand starting at position 2679 of SEQ ID NO: 3957
augaaaucacauggucugu

SEQ ID NO: 308089 - RNA, 19 nt, Artificial Sequence
  Description of Artificial Sequence: Synthetic oligonucleotide
  Antisense strand to SEQ ID NO: 308088
acagaccaugugauuucau

SEQ ID NO: 308090 - RNA, 19 nt, Artificial Sequence
  Description of Artificial Sequence: Synthetic oligonucleotide
  Sense strand starting at position 2681 of SEQ ID NO: 3957
gaaaucacauggucuguaa

SEQ ID NO: 308091 - RNA, 19 nt, Artificial Sequence
  Description of Artificial Sequence: Synthetic oligonucleotide
  Antisense strand to SEQ ID NO: 308090
uuacagaccaugugauuuc

SEQ ID NO: 308092 - RNA, 19 nt, Artificial Sequence
  Description of Artificial Sequence: Synthetic oligonucleotide
  Sense strand starting at position 2684 of SEQ ID NO: 3957
aucacauggucuguaauaa

SEQ ID NO: 308093 - RNA, 19 nt, Artificial Sequence
  Description of Artificial Sequence: Synthetic oligonucleotide
  Antisense strand to SEQ ID NO: 308092
uuauuacagaccaugugau

SEQ ID NO: 308094 - RNA, 19 nt, Artificial Sequence
  Description of Artificial Sequence: Synthetic oligonucleotide
  Sense strand starting at position 2685 of SEQ ID NO: 3957
ucacauggucuguaauaac

SEQ ID NO: 308095 - RNA, 19 nt, Artificial Sequence
  Description of Artificial Sequence: Synthetic oligonucleotide
  Antisense strand to SEQ ID NO: 308094
guuauuacagaccauguga

SEQ ID NO: 308096 - RNA, 19 nt, Artificial Sequence
  Description of Artificial Sequence: Synthetic oligonucleotide
  Sense strand starting at position 2798 of SEQ ID NO: 3957
ucugacaaucuuugcaaga

SEQ ID NO: 308097 - RNA, 19 nt, Artificial Sequence
  Description of Artificial Sequence: Synthetic oligonucleotide
  Antisense strand to SEQ ID NO: 308096
ucuugcaaagauugucaga

SEQ ID NO: 308098 - RNA, 19 nt, Artificial Sequence
  Description of Artificial Sequence: Synthetic oligonucleotide
  Sense strand starting at position 2799 of SEQ ID NO: 3957
cugacaaucuuugcaagau

SEQ ID NO: 308099 - RNA, 19 nt, Artificial Sequence
  Description of Artificial Sequence: Synthetic oligonucleotide
  Antisense strand to SEQ ID NO: 308098
aucuugcaaagauugucag

SEQ ID NO: 308100 - RNA, 19 nt, Artificial Sequence
  Description of Artificial Sequence: Synthetic oligonucleotide
  Sense strand starting at position 2953 of SEQ ID NO: 3957
acauaaugcugauuaggga

SEQ ID NO: 308101 - RNA, 19 nt, Artificial Sequence
  Description of Artificial Sequence: Synthetic oligonucleotide
  Antisense strand to SEQ ID NO: 308100
ucccuaaucagcauuaugu

SEQ ID NO: 308102 - RNA, 19 nt, Artificial Sequence
  Description of Artificial Sequence: Synthetic oligonucleotide
  Sense strand starting at position 2967 of SEQ ID NO: 3957
agggacaguugcuucuaua

SEQ ID NO: 308103 - RNA, 19 nt, Artificial Sequence
  Description of Artificial Sequence: Synthetic oligonucleotide
  Antisense strand to SEQ ID NO: 308102
uauagaagcaacugucccu

SEQ ID NO: 308104 - RNA, 19 nt, Artificial Sequence
  Description of Artificial Sequence: Synthetic oligonucleotide
  Sense strand starting at position 2986 of SEQ ID NO: 3957
ggacaacaauccuacagaa

SEQ ID NO: 308105 - RNA, 19 nt, Artificial Sequence
  Description of Artificial Sequence: Synthetic oligonucleotide
  Antisense strand to SEQ ID NO: 308104
uucuguaggauuguugucc

SEQ ID NO: 308106 - RNA, 19 nt, Artificial Sequence
  Description of Artificial Sequence: Synthetic oligonucleotide
  Sense strand starting at position 3073 of SEQ ID NO: 3957
ccaauagagcuaugucuuu

SEQ ID NO: 308107 - RNA, 19 nt, Artificial Sequence
  Description of Artificial Sequence: Synthetic oligonucleotide
  Antisense strand to SEQ ID NO: 308106
aaagacauagcucuauugg

SEQ ID NO: 308108 - RNA, 19 nt, Artificial Sequence
  Description of Artificial Sequence: Synthetic oligonucleotide
  Sense strand starting at position 3078 of SEQ ID NO: 3957
agagcuaugucuuuaauua

SEQ ID NO: 308109 - RNA, 19 nt, Artificial Sequence
  Description of Artificial Sequence: Synthetic oligonucleotide
  Antisense strand to SEQ ID NO: 308108
uaauuaaagacauagcucu

SEQ ID NO: 308110 - RNA, 19 nt, Artificial Sequence
  Description of Artificial Sequence: Synthetic oligonucleotide
  Sense strand starting at position 3145 of SEQ ID NO: 3957
uugucaaguguuuaucacu

SEQ ID NO: 308111 - RNA, 19 nt, Artificial Sequence
  Description of Artificial Sequence: Synthetic oligonucleotide
  Antisense strand to SEQ ID NO: 308110
agugauaaacacuugacaa

SEQ ID NO: 308112 - RNA, 19 nt, Artificial Sequence
  Description of Artificial Sequence: Synthetic oligonucleotide
  Sense strand starting at position 3218 of SEQ ID NO: 3957
agaagaaggcccugucuuu

SEQ ID NO: 308113 - RNA, 19 nt, Artificial Sequence
  Description of Artificial Sequence: Synthetic oligonucleotide
  Antisense strand to SEQ ID NO: 308112
aaagacagggccuucuucu

SEQ ID NO: 308114 - RNA, 19 nt, Artificial Sequence
  Description of Artificial Sequence: Synthetic oligonucleotide
  Sense strand starting at position 3242 of SEQ ID NO: 3957
uguacagucuagucaggaa

SEQ ID NO: 308115 - RNA, 19 nt, Artificial Sequence
  Description of Artificial Sequence: Synthetic oligonucleotide
  Antisense strand to SEQ ID NO: 308114
uuccugacuagacuguaca

SEQ ID NO: 308116 - RNA, 19 nt, Artificial Sequence
  Description of Artificial Sequence: Synthetic oligonucleotide
  Sense strand starting at position 3275 of SEQ ID NO: 3957
aaguaauuaugagugauga

SEQ ID NO: 308117 - RNA, 19 nt, Artificial Sequence
  Description of Artificial Sequence: Synthetic oligonucleotide
  Antisense strand to SEQ ID NO: 308116
ucaucacucauaauuacuu

SEQ ID NO: 308118 - RNA, 19 nt, Artificial Sequence
  Description of Artificial Sequence: Synthetic oligonucleotide
  Sense strand starting at position 3276 of SEQ ID NO: 3957
aguaauuaugagugaugau

SEQ ID NO: 308119 - RNA, 19 nt, Artificial Sequence
  Description of Artificial Sequence: Synthetic oligonucleotide
  Antisense strand to SEQ ID NO: 308118
aucaucacucauaauuacu

SEQ ID NO: 308120 - RNA, 19 nt, Artificial Sequence
  Description of Artificial Sequence: Synthetic oligonucleotide
  Sense strand starting at position 3297 of SEQ ID NO: 3957
augucacagaaggguaauu

SEQ ID NO: 308121 - RNA, 19 nt, Artificial Sequence
  Description of Artificial Sequence: Synthetic oligonucleotide
  Antisense strand to SEQ ID NO: 308120
aauuacccuucugugacau

SEQ ID NO: 308122 - RNA, 19 nt, Artificial Sequence
  Description of Artificial Sequence: Synthetic oligonucleotide
  Sense strand starting at position 3324 of SEQ ID NO: 3957
uacagaaguguaugaggau

SEQ ID NO: 308123 - RNA, 19 nt, Artificial Sequence
  Description of Artificial Sequence: Synthetic oligonucleotide
  Antisense strand to SEQ ID NO: 308122
auccucauacacuucugua

SEQ ID NO: 308124 - RNA, 19 nt, Artificial Sequence
  Description of Artificial Sequence: Synthetic oligonucleotide
  Sense strand starting at position 3513 of SEQ ID NO: 3957
aggagugugguacaaguga

SEQ ID NO: 308125 - RNA, 19 nt, Artificial Sequence
  Description of Artificial Sequence: Synthetic oligonucleotide
  Antisense strand to SEQ ID NO: 308124
ucacuuguaccacacuccu

SEQ ID NO: 308126 - RNA, 19 nt, Artificial Sequence
  Description of Artificial Sequence: Synthetic oligonucleotide
  Sense strand starting at position 1268 of SEQ ID NO: 3958
caccgagucgaauaugaug

SEQ ID NO: 308127 - RNA, 19 nt, Artificial Sequence
  Description of Artificial Sequence: Synthetic oligonucleotide
  Antisense strand to SEQ ID NO: 308126
caucauauucgacucggug

SEQ ID NO: 308128 - RNA, 19 nt, Artificial Sequence
  Description of Artificial Sequence: Synthetic oligonucleotide
  Sense strand starting at position 1911 of SEQ ID NO: 3958
gcgucuguacgguccaaga

SEQ ID NO: 308129 - RNA, 19 nt, Artificial Sequence
  Description of Artificial Sequence: Synthetic oligonucleotide
  Antisense strand to SEQ ID NO: 308128
ucuuggaccguacagacgc

SEQ ID NO: 308130 - RNA, 19 nt, Artificial Sequence
  Description of Artificial Sequence: Synthetic oligonucleotide
  Sense strand starting at position 1913 of SEQ ID NO: 3958
gucuguacgguccaagauu

SEQ ID NO: 308131 - RNA, 19 nt, Artificial Sequence
  Description of Artificial Sequence: Synthetic oligonucleotide
  Antisense strand to SEQ ID NO: 308130
aaucuuggaccguacagac

SEQ ID NO: 308132 - RNA, 19 nt, Artificial Sequence
  Description of Artificial Sequence: Synthetic oligonucleotide
  Sense strand starting at position 1997 of SEQ ID NO: 3958
ggcugucgccagccuuaua

SEQ ID NO: 308133 - RNA, 19 nt, Artificial Sequence
  Description of Artificial Sequence: Synthetic oligonucleotide
  Antisense strand to SEQ ID NO: 308132
uauaaggcuggcgacagcc

SEQ ID NO: 308134 - RNA, 19 nt, Artificial Sequence
  Description of Artificial Sequence: Synthetic oligonucleotide
  Sense strand starting at position 1998 of SEQ ID NO: 3958
gcugucgccagccuuauau

SEQ ID NO: 308135 - RNA, 19 nt, Artificial Sequence
  Description of Artificial Sequence: Synthetic oligonucleotide
  Antisense strand to SEQ ID NO: 308134
auauaaggcuggcgacagc

SEQ ID NO: 308136 - RNA, 19 nt, Artificial Sequence
  Description of Artificial Sequence: Synthetic oligonucleotide
  Sense strand starting at position 2010 of SEQ ID NO: 3958
cuuauauagugccaggaca

SEQ ID NO: 308137 - RNA, 19 nt, Artificial Sequence
  Description of Artificial Sequence: Synthetic oligonucleotide
  Antisense strand to SEQ ID NO: 308136
uguccuggcacuauauaag

SEQ ID NO: 308138 - RNA, 19 nt, Artificial Sequence
  Description of Artificial Sequence: Synthetic oligonucleotide
  Sense strand starting at position 2034 of SEQ ID NO: 3958
gacugacgucagcgaagaa

SEQ ID NO: 308139 - RNA, 19 nt, Artificial Sequence
  Description of Artificial Sequence: Synthetic oligonucleotide
  Antisense strand to SEQ ID NO: 308138
uucuucgcugacgucaguc

SEQ ID NO: 308140 - RNA, 19 nt, Artificial Sequence
  Description of Artificial Sequence: Synthetic oligonucleotide
  Sense strand starting at position 2052 of SEQ ID NO: 3958
acaugcacugauuguagaa

SEQ ID NO: 308141 - RNA, 19 nt, Artificial Sequence
  Description of Artificial Sequence: Synthetic oligonucleotide
  Antisense strand to SEQ ID NO: 308140
uucuacaaucagugcaugu

SEQ ID NO: 308142 - RNA, 19 nt, Artificial Sequence
  Description of Artificial Sequence: Synthetic oligonucleotide
  Sense strand starting at position 2207 of SEQ ID NO: 3958
cguaaagacugcucuggga

SEQ ID NO: 308143 - RNA, 19 nt, Artificial Sequence
  Description of Artificial Sequence: Synthetic oligonucleotide
  Antisense strand to SEQ ID NO: 308142
ucccagagcagucuuuacg

SEQ ID NO: 308144 - RNA, 19 nt, Artificial Sequence
  Description of Artificial Sequence: Synthetic oligonucleotide
  Sense strand starting at position 2303 of SEQ ID NO: 3958
cguguucugacacacgaaa

SEQ ID NO: 308145 - RNA, 19 nt, Artificial Sequence
  Description of Artificial Sequence: Synthetic oligonucleotide
  Antisense strand to SEQ ID NO: 308144
uuucgugugucagaacacg

SEQ ID NO: 308146 - RNA, 19 nt, Artificial Sequence
  Description of Artificial Sequence: Synthetic oligonucleotide
  Sense strand starting at position 2361 of SEQ ID NO: 3958
guccucugccucuagaagu

SEQ ID NO: 308147 - RNA, 19 nt, Artificial Sequence
  Description of Artificial Sequence: Synthetic oligonucleotide
  Antisense strand to SEQ ID NO: 308146
acuucuagaggcagaggac

SEQ ID NO: 308148 - RNA, 19 nt, Artificial Sequence
  Description of Artificial Sequence: Synthetic oligonucleotide
  Sense strand starting at position 2382 of SEQ ID NO: 3958
ccagaaaugugagaacgcu

SEQ ID NO: 308149 - RNA, 19 nt, Artificial Sequence
  Description of Artificial Sequence: Synthetic oligonucleotide
  Antisense strand to SEQ ID NO: 308148
agcguucucacauuucugg

SEQ ID NO: 308150 - RNA, 19 nt, Artificial Sequence
  Description of Artificial Sequence: Synthetic oligonucleotide
  Sense strand starting at position 2430 of SEQ ID NO: 3958
gcuaucaguucugcaaaug

SEQ ID NO: 308151 - RNA, 19 nt, Artificial Sequence
  Description of Artificial Sequence: Synthetic oligonucleotide
  Antisense strand to SEQ ID NO: 308150
cauuugcagaacugauagc

SEQ ID NO: 308152 - RNA, 19 nt, Artificial Sequence
  Description of Artificial Sequence: Synthetic oligonucleotide
  Sense strand starting at position 2594 of SEQ ID NO: 3958
aacagagggucucuagcau

SEQ ID NO: 308153 - RNA, 19 nt, Artificial Sequence
  Description of Artificial Sequence: Synthetic oligonucleotide
  Antisense strand to SEQ ID NO: 308152
augcuagagacccucuguu

SEQ ID NO: 308154 - RNA, 19 nt, Artificial Sequence
  Description of Artificial Sequence: Synthetic oligonucleotide
  Sense strand starting at position 2605 of SEQ ID NO: 3958
ucuagcauccgagugcuuu

SEQ ID NO: 308155 - RNA, 19 nt, Artificial Sequence
  Description of Artificial Sequence: Synthetic oligonucleotide
  Antisense strand to SEQ ID NO: 308154
aaagcacucggaugcuaga

SEQ ID NO: 308156 - RNA, 19 nt, Artificial Sequence
  Description of Artificial Sequence: Synthetic oligonucleotide
  Sense strand starting at position 2609 of SEQ ID NO: 3958
gcauccgagugcuuucaga

SEQ ID NO: 308157 - RNA, 19 nt, Artificial Sequence
  Description of Artificial Sequence: Synthetic oligonucleotide
  Antisense strand to SEQ ID NO: 308156
ucugaaagcacucggaugc

SEQ ID NO: 308158 - RNA, 19 nt, Artificial Sequence
  Description of Artificial Sequence: Synthetic oligonucleotide
  Sense strand starting at position 2661 of SEQ ID NO: 3958
gccaaaguaguuuagcaaa

SEQ ID NO: 308159 - RNA, 19 nt, Artificial Sequence
  Description of Artificial Sequence: Synthetic oligonucleotide
  Antisense strand to SEQ ID NO: 308158
uuugcuaaacuacuuuggc

SEQ ID NO: 308160 - RNA, 19 nt, Artificial Sequence
  Description of Artificial Sequence: Synthetic oligonucleotide
  Sense strand starting at position 2663 of SEQ ID NO: 3958
caaaguaguuuagcaaagu

SEQ ID NO: 308161 - RNA, 19 nt, Artificial Sequence
  Description of Artificial Sequence: Synthetic oligonucleotide
  Antisense strand to SEQ ID NO: 308160
acuuugcuaaacuacuuug

SEQ ID NO: 308162 - RNA, 19 nt, Artificial Sequence
  Description of Artificial Sequence: Synthetic oligonucleotide
  Sense strand starting at position 2664 of SEQ ID NO: 3958
aaaguaguuuagcaaaguu

SEQ ID NO: 308163 - RNA, 19 nt, Artificial Sequence
  Description of Artificial Sequence: Synthetic oligonucleotide
  Antisense strand to SEQ ID NO: 308162
aacuuugcuaaacuacuuu

SEQ ID NO: 308164 - RNA, 19 nt, Artificial Sequence
  Description of Artificial Sequence: Synthetic oligonucleotide
  Sense strand starting at position 2684 of SEQ ID NO: 3958
aguuucucuccugggaauc

SEQ ID NO: 308165 - RNA, 19 nt, Artificial Sequence
  Description of Artificial Sequence: Synthetic oligonucleotide
  Antisense strand to SEQ ID NO: 308164
gauucccaggagagaaacu

SEQ ID NO: 308166 - RNA, 19 nt, Artificial Sequence
  Description of Artificial Sequence: Synthetic oligonucleotide
  Sense strand starting at position 2685 of SEQ ID NO: 3958
guuucucuccugggaauca

SEQ ID NO: 308167 - RNA, 19 nt, Artificial Sequence
  Description of Artificial Sequence: Synthetic oligonucleotide
  Antisense strand to SEQ ID NO: 308166
ugauucccaggagagaaac

SEQ ID NO: 308168 - RNA, 19 nt, Artificial Sequence
  Description of Artificial Sequence: Synthetic oligonucleotide
  Sense strand starting at position 2686 of SEQ ID NO: 3958
uuucucuccugggaaucau

SEQ ID NO: 308169 - RNA, 19 nt, Artificial Sequence
  Description of Artificial Sequence: Synthetic oligonucleotide
  Antisense strand to SEQ ID NO: 308168
augauucccaggagagaaa

SEQ ID NO: 308170 - RNA, 19 nt, Artificial Sequence
  Description of Artificial Sequence: Synthetic oligonucleotide
  Sense strand starting at position 2695 of SEQ ID NO: 3958
ugggaaucauagcagcagu

SEQ ID NO: 308171 - RNA, 19 nt, Artificial Sequence
  Description of Artificial Sequence: Synthetic oligonucleotide
  Antisense strand to SEQ ID NO: 308170
acugcugcuaugauuccca

SEQ ID NO: 308172 - RNA, 19 nt, Artificial Sequence
  Description of Artificial Sequence: Synthetic oligonucleotide
  Sense strand starting at position 2698 of SEQ ID NO: 3958
gaaucauagcagcagugua

SEQ ID NO: 308173 - RNA, 19 nt, Artificial Sequence
  Description of Artificial Sequence: Synthetic oligonucleotide
  Antisense strand to SEQ ID NO: 308172
uacacugcugcuaugauuc

SEQ ID NO: 308174 - RNA, 19 nt, Artificial Sequence
  Description of Artificial Sequence: Synthetic oligonucleotide
  Sense strand starting at position 2805 of SEQ ID NO: 3958
gguccucauuuguaagacu

SEQ ID NO: 308175 - RNA, 19 nt, Artificial Sequence
  Description of Artificial Sequence: Synthetic oligonucleotide
  Antisense strand to SEQ ID NO: 308174
agucuuacaaaugaggacc

SEQ ID NO: 308176 - RNA, 19 nt, Artificial Sequence
  Description of Artificial Sequence: Synthetic oligonucleotide
  Sense strand starting at position 3164 of SEQ ID NO: 3958
uuuccagcucuagaaauga

SEQ ID NO: 308177 - RNA, 19 nt, Artificial Sequence
  Description of Artificial Sequence: Synthetic oligonucleotide
  Antisense strand to SEQ ID NO: 308176
ucauuucuagagcuggaaa

SEQ ID NO: 308178 - RNA, 19 nt, Artificial Sequence
  Description of Artificial Sequence: Synthetic oligonucleotide
  Sense strand starting at position 3324 of SEQ ID NO: 3958
ggguuagaguaacaaaugu

SEQ ID NO: 308179 - RNA, 19 nt, Artificial Sequence
  Description of Artificial Sequence: Synthetic oligonucleotide
  Antisense strand to SEQ ID NO: 308178
acauuuguuacucuaaccc

SEQ ID NO: 308180 - RNA, 19 nt, Artificial Sequence
  Description of Artificial Sequence: Synthetic oligonucleotide
  Sense strand starting at position 3337 of SEQ ID NO: 3958
aaaugugucuaugaagagu

SEQ ID NO: 308181 - RNA, 19 nt, Artificial Sequence
  Description of Artificial Sequence: Synthetic oligonucleotide
  Antisense strand to SEQ ID NO: 308180
acucuucauagacacauuu

SEQ ID NO: 308182 - RNA, 19 nt, Artificial Sequence
  Description of Artificial Sequence: Synthetic oligonucleotide
  Sense strand starting at position 3363 of SEQ ID NO: 3958
aguggcauuugcugggaua

SEQ ID NO: 308183 - RNA, 19 nt, Artificial Sequence
  Description of Artificial Sequence: Synthetic oligonucleotide
  Antisense strand to SEQ ID NO: 308182
uaucccagcaaaugccacu

SEQ ID NO: 308184 - RNA, 19 nt, Artificial Sequence
  Description of Artificial Sequence: Synthetic oligonucleotide
  Sense strand starting at position 3364 of SEQ ID NO: 3958
guggcauuugcugggauau

SEQ ID NO: 308185 - RNA, 19 nt, Artificial Sequence
  Description of Artificial Sequence: Synthetic oligonucleotide
  Antisense strand to SEQ ID NO: 308184
auaucccagcaaaugccac

SEQ ID NO: 308186 - RNA, 19 nt, Artificial Sequence
  Description of Artificial Sequence: Synthetic oligonucleotide
  Sense strand starting at position 3374 of SEQ ID NO: 3958
cugggauauggguguaaag

SEQ ID NO: 308187 - RNA, 19 nt, Artificial Sequence
  Description of Artificial Sequence: Synthetic oligonucleotide
  Antisense strand to SEQ ID NO: 308186
cuuuacacccauaucccag

SEQ ID NO: 308188 - RNA, 19 nt, Artificial Sequence
  Description of Artificial Sequence: Synthetic oligonucleotide
  Sense strand starting at position 3376 of SEQ ID NO: 3958
gggauauggguguaaaguu

SEQ ID NO: 308189 - RNA, 19 nt, Artificial Sequence
  Description of Artificial Sequence: Synthetic oligonucleotide
  Antisense strand to SEQ ID NO: 308188
aacuuuacacccauauccc

SEQ ID NO: 308190 - RNA, 19 nt, Artificial Sequence
  Description of Artificial Sequence: Synthetic oligonucleotide
  Sense strand starting at position 3377 of SEQ ID NO: 3958
ggauauggguguaaaguug

SEQ ID NO: 308191 - RNA, 19 nt, Artificial Sequence
  Description of Artificial Sequence: Synthetic oligonucleotide
  Antisense strand to SEQ ID NO: 308190
caacuuuacacccauaucc

SEQ ID NO: 308192 - RNA, 19 nt, Artificial Sequence
  Description of Artificial Sequence: Synthetic oligonucleotide
  Sense strand starting at position 3393 of SEQ ID NO: 3958
uugauaaggucaugaaggu

SEQ ID NO: 308193 - RNA, 19 nt, Artificial Sequence
  Description of Artificial Sequence: Synthetic oligonucleotide
  Antisense strand to SEQ ID NO: 308192
accuucaugaccuuaucaa

SEQ ID NO: 308194 - RNA, 19 nt, Artificial Sequence
  Description of Artificial Sequence: Synthetic oligonucleotide
  Sense strand starting at position 3434 of SEQ ID NO: 3958
cuaguauguggugggaaua

SEQ ID NO: 308195 - RNA, 19 nt, Artificial Sequence
  Description of Artificial Sequence: Synthetic oligonucleotide
  Antisense strand to SEQ ID NO: 308194
uauucccaccacauacuag

SEQ ID NO: 308196 - RNA, 19 nt, Artificial Sequence
  Description of Artificial Sequence: Synthetic oligonucleotide
  Sense strand starting at position 3435 of SEQ ID NO: 3958
uaguauguggugggaauaa

SEQ ID NO: 308197 - RNA, 19 nt, Artificial Sequence
  Description of Artificial Sequence: Synthetic oligonucleotide
  Antisense strand to SEQ ID NO: 308196
uuauucccaccacauacua

SEQ ID NO: 308198 - RNA, 19 nt, Artificial Sequence
  Description of Artificial Sequence: Synthetic oligonucleotide
  Sense strand starting at position 3472 of SEQ ID NO: 3958
uaaagcagucaguguacau

SEQ ID NO: 308199 - RNA, 19 nt, Artificial Sequence
  Description of Artificial Sequence: Synthetic oligonucleotide
  Antisense strand to SEQ ID NO: 308198
auguacacugacugcuuua

SEQ ID NO: 308200 - RNA, 19 nt, Artificial Sequence
  Description of Artificial Sequence: Synthetic oligonucleotide
  Sense strand starting at position 3515 of SEQ ID NO: 3958
gggugcuaguccucuuaag

SEQ ID NO: 308201 - RNA, 19 nt, Artificial Sequence
  Description of Artificial Sequence: Synthetic oligonucleotide
  Antisense strand to SEQ ID NO: 308200
cuuaagaggacuagcaccc

SEQ ID NO: 308202 - RNA, 19 nt, Artificial Sequence
  Description of Artificial Sequence: Synthetic oligonucleotide
  Sense strand starting at position 3517 of SEQ ID NO: 3958
gugcuaguccucuuaagcu

SEQ ID NO: 308203 - RNA, 19 nt, Artificial Sequence
  Description of Artificial Sequence: Synthetic oligonucleotide
  Antisense strand to SEQ ID NO: 308202
agcuuaagaggacuagcac

SEQ ID NO: 308204 - RNA, 19 nt, Artificial Sequence
  Description of Artificial Sequence: Synthetic oligonucleotide
  Sense strand starting at position 3803 of SEQ ID NO: 3958
gagggaucaugacaaagga

SEQ ID NO: 308205 - RNA, 19 nt, Artificial Sequence
  Description of Artificial Sequence: Synthetic oligonucleotide
  Antisense strand to SEQ ID NO: 308204
uccuuugucaugaucccuc

SEQ ID NO: 308206 - RNA, 19 nt, Artificial Sequence
  Description of Artificial Sequence: Synthetic oligonucleotide
  Sense strand starting at position 9 of SEQ ID NO: 3959
agcaccauuugagaugaaa

SEQ ID NO: 308207 - RNA, 19 nt, Artificial Sequence
  Description of Artificial Sequence: Synthetic oligonucleotide
  Antisense strand to SEQ ID NO: 308206
uuucaucucaaauggugcu

SEQ ID NO: 308208 - RNA, 19 nt, Artificial Sequence
  Description of Artificial Sequence: Synthetic oligonucleotide
  Sense strand starting at position 118 of SEQ ID NO: 3959
cagagaagcagacguaaga

SEQ ID NO: 308209 - RNA, 19 nt, Artificial Sequence
  Description of Artificial Sequence: Synthetic oligonucleotide
  Antisense strand to SEQ ID NO: 308208
ucuuacgucugcuucucug

SEQ ID NO: 308210 - RNA, 19 nt, Artificial Sequence
  Description of Artificial Sequence: Synthetic oligonucleotide
  Sense strand starting at position 131 of SEQ ID NO: 3959
guaagaaucucacugaagu

SEQ ID NO: 308211 - RNA, 19 nt, Artificial Sequence
  Description of Artificial Sequence: Synthetic oligonucleotide
  Antisense strand to SEQ ID NO: 308210
acuucagugagauucuuac

SEQ ID NO: 308212 - RNA, 19 nt, Artificial Sequence
  Description of Artificial Sequence: Synthetic oligonucleotide
  Sense strand starting at position 263 of SEQ ID NO: 3959
gugccauguggcuuugcau

SEQ ID NO: 308213 - RNA, 19 nt, Artificial Sequence
  Description of Artificial Sequence: Synthetic oligonucleotide
  Antisense strand to SEQ ID NO: 308212
augcaaagccacauggcac

SEQ ID NO: 308214 - RNA, 19 nt, Artificial Sequence
  Description of Artificial Sequence: Synthetic oligonucleotide
  Sense strand starting at position 275 of SEQ ID NO: 3959
uuugcaugauaagcauuau

SEQ ID NO: 308215 - RNA, 19 nt, Artificial Sequence
  Description of Artificial Sequence: Synthetic oligonucleotide
  Antisense strand to SEQ ID NO: 308214
auaaugcuuaucaugcaaa

SEQ ID NO: 308216 - RNA, 19 nt, Artificial Sequence
  Description of Artificial Sequence: Synthetic oligonucleotide
  Sense strand starting at position 292 of SEQ ID NO: 3959
auacuugcggcaugaugaa

SEQ ID NO: 308217 - RNA, 19 nt, Artificial Sequence
  Description of Artificial Sequence: Synthetic oligonucleotide
  Antisense strand to SEQ ID NO: 308216
uucaucaugccgcaaguau

SEQ ID NO: 308218 - RNA, 19 nt, Artificial Sequence
  Description of Artificial Sequence: Synthetic oligonucleotide
  Sense strand starting at position 607 of SEQ ID NO: 3959
uguauuguuacagggaaac

SEQ ID NO: 308219 - RNA, 19 nt, Artificial Sequence
  Description of Artificial Sequence: Synthetic oligonucleotide
  Antisense strand to SEQ ID NO: 308218
guuucccuguaacaauaca

SEQ ID NO: 308220 - RNA, 19 nt, Artificial Sequence
  Description of Artificial Sequence: Synthetic oligonucleotide
  Sense strand starting at position 757 of SEQ ID NO: 3959
ggucacuuccuuuaauaag

SEQ ID NO: 308221 - RNA, 19 nt, Artificial Sequence
  Description of Artificial Sequence: Synthetic oligonucleotide
  Antisense strand to SEQ ID NO: 308220
cuuauuaaaggaagugacc

SEQ ID NO: 308222 - RNA, 19 nt, Artificial Sequence
  Description of Artificial Sequence: Synthetic oligonucleotide
  Sense strand starting at position 775 of SEQ ID NO: 3959
guuucauguggccaggagu

SEQ ID NO: 308223 - RNA, 19 nt, Artificial Sequence
  Description of Artificial Sequence: Synthetic oligonucleotide
  Antisense strand to SEQ ID NO: 308222
acuccuggccacaugaaac

SEQ ID NO: 308224 - RNA, 19 nt, Artificial Sequence
  Description of Artificial Sequence: Synthetic oligonucleotide
  Sense strand starting at position 956 of SEQ ID NO: 3959
ggcuacaauuauuccaagu

SEQ ID NO: 308225 - RNA, 19 nt, Artificial Sequence
  Description of Artificial Sequence: Synthetic oligonucleotide
  Antisense strand to SEQ ID NO: 308224
acuuggaauaauuguagcc

SEQ ID NO: 308226 - RNA, 19 nt, Artificial Sequence
  Description of Artificial Sequence: Synthetic oligonucleotide
  Sense strand starting at position 980 of SEQ ID NO: 3959
ggugcuguuaaauagcuau

SEQ ID NO: 308227 - RNA, 19 nt, Artificial Sequence
  Description of Artificial Sequence: Synthetic oligonucleotide
  Antisense strand to SEQ ID NO: 308226
auagcuauuuaacagcacc

SEQ ID NO: 308228 - RNA, 19 nt, Artificial Sequence
  Description of Artificial Sequence: Synthetic oligonucleotide
  Sense strand starting at position 983 of SEQ ID NO: 3959
gcuguuaaauagcuauuua

SEQ ID NO: 308229 - RNA, 19 nt, Artificial Sequence
  Description of Artificial Sequence: Synthetic oligonucleotide
  Antisense strand to SEQ ID NO: 308228
uaaauagcuauuuaacagc

SEQ ID NO: 308230 - RNA, 19 nt, Artificial Sequence
  Description of Artificial Sequence: Synthetic oligonucleotide
  Sense strand starting at position 1023 of SEQ ID NO: 3959
aguguaagauucuugaagg

SEQ ID NO: 308231 - RNA, 19 nt, Artificial Sequence
  Description of Artificial Sequence: Synthetic oligonucleotide
  Antisense strand to SEQ ID NO: 308230
ccuucaagaaucuuacacu

SEQ ID NO: 308232 - RNA, 19 nt, Artificial Sequence
  Description of Artificial Sequence: Synthetic oligonucleotide
  Sense strand starting at position 1191 of SEQ ID NO: 3959
ugcagauucuggccaagga

SEQ ID NO: 308233 - RNA, 19 nt, Artificial Sequence
  Description of Artificial Sequence: Synthetic oligonucleotide
  Antisense strand to SEQ ID NO: 308232
uccuuggccagaaucugca

SEQ ID NO: 308234 - RNA, 19 nt, Artificial Sequence
  Description of Artificial Sequence: Synthetic oligonucleotide
  Sense strand starting at position 1192 of SEQ ID NO: 3959
gcagauucuggccaaggaa

SEQ ID NO: 308235 - RNA, 19 nt, Artificial Sequence
  Description of Artificial Sequence: Synthetic oligonucleotide
  Antisense strand to SEQ ID NO: 308234
uuccuuggccagaaucugc

SEQ ID NO: 308236 - RNA, 19 nt, Artificial Sequence
  Description of Artificial Sequence: Synthetic oligonucleotide
  Sense strand starting at position 1434 of SEQ ID NO: 3959
uucucaacucacugaggau

SEQ ID NO: 308237 - RNA, 19 nt, Artificial Sequence
  Description of Artificial Sequence: Synthetic oligonucleotide
  Antisense strand to SEQ ID NO: 308236
auccucagugaguugagaa

SEQ ID NO: 308238 - RNA, 19 nt, Artificial Sequence
  Description of Artificial Sequence: Synthetic oligonucleotide
  Sense strand starting at position 1447 of SEQ ID NO: 3959
gaggaucaagcuuggucua

SEQ ID NO: 308239 - RNA, 19 nt, Artificial Sequence
  Description of Artificial Sequence: Synthetic oligonucleotide
  Antisense strand to SEQ ID NO: 308238
uagaccaagcuugauccuc

SEQ ID NO: 308240 - RNA, 19 nt, Artificial Sequence
  Description of Artificial Sequence: Synthetic oligonucleotide
  Sense strand starting at position 1448 of SEQ ID NO: 3959
aggaucaagcuuggucuaa

SEQ ID NO: 308241 - RNA, 19 nt, Artificial Sequence
  Description of Artificial Sequence: Synthetic oligonucleotide
  Antisense strand to SEQ ID NO: 308240
uuagaccaagcuugauccu

SEQ ID NO: 308242 - RNA, 19 nt, Artificial Sequence
  Description of Artificial Sequence: Synthetic oligonucleotide
  Sense strand starting at position 1449 of SEQ ID NO: 3959
ggaucaagcuuggucuaaa

SEQ ID NO: 308243 - RNA, 19 nt, Artificial Sequence
  Description of Artificial Sequence: Synthetic oligonucleotide
  Antisense strand to SEQ ID NO: 308242
uuuagaccaagcuugaucc

SEQ ID NO: 308244 - RNA, 19 nt, Artificial Sequence
  Description of Artificial Sequence: Synthetic oligonucleotide
  Sense strand starting at position 1450 of SEQ ID NO: 3959
gaucaagcuuggucuaaau

SEQ ID NO: 308245 - RNA, 19 nt, Artificial Sequence
  Description of Artificial Sequence: Synthetic oligonucleotide
  Antisense strand to SEQ ID NO: 308244
auuuagaccaagcuugauc

SEQ ID NO: 308246 - RNA, 19 nt, Artificial Sequence
  Description of Artificial Sequence: Synthetic oligonucleotide
  Sense strand starting at position 1461 of SEQ ID NO: 3959
gucuaaauccaugguagga

SEQ ID NO: 308247 - RNA, 19 nt, Artificial Sequence
  Description of Artificial Sequence: Synthetic oligonucleotide
  Antisense strand to SEQ ID NO: 308246
uccuaccauggauuuagac

SEQ ID NO: 308248 - RNA, 19 nt, Artificial Sequence
  Description of Artificial Sequence: Synthetic oligonucleotide
  Sense strand starting at position 1577 of SEQ ID NO: 3959
agcgauaccuugccaagaa

SEQ ID NO: 308249 - RNA, 19 nt, Artificial Sequence
  Description of Artificial Sequence: Synthetic oligonucleotide
  Antisense strand to SEQ ID NO: 308248
uucuuggcaagguaucgcu

SEQ ID NO: 308250 - RNA, 19 nt, Artificial Sequence
  Description of Artificial Sequence: Synthetic oligonucleotide
  Sense strand starting at position 2216 of SEQ ID NO: 3959
aacagucagucggugaaau

SEQ ID NO: 308251 - RNA, 19 nt, Artificial Sequence
  Description of Artificial Sequence: Synthetic oligonucleotide
  Antisense strand to SEQ ID NO: 308250
auuucaccgacugacuguu

SEQ ID NO: 308252 - RNA, 19 nt, Artificial Sequence
  Description of Artificial Sequence: Synthetic oligonucleotide
  Sense strand starting at position 2249 of SEQ ID NO: 3959
gggacuuacucccuuaaac

SEQ ID NO: 308253 - RNA, 19 nt, Artificial Sequence
  Description of Artificial Sequence: Synthetic oligonucleotide
  Antisense strand to SEQ ID NO: 308252
guuuaagggaguaaguccc

SEQ ID NO: 308254 - RNA, 19 nt, Artificial Sequence
  Description of Artificial Sequence: Synthetic oligonucleotide
  Sense strand starting at position 2423 of SEQ ID NO: 3959
agccgcuugagcuuucuua

SEQ ID NO: 308255 - RNA, 19 nt, Artificial Sequence
  Description of Artificial Sequence: Synthetic oligonucleotide
  Antisense strand to SEQ ID NO: 308254
uaagaaagcucaagcggcu

SEQ ID NO: 308256 - RNA, 19 nt, Artificial Sequence
  Description of Artificial Sequence: Synthetic oligonucleotide
  Sense strand starting at position 2424 of SEQ ID NO: 3959
gccgcuugagcuuucuuau

SEQ ID NO: 308257 - RNA, 19 nt, Artificial Sequence
  Description of Artificial Sequence: Synthetic oligonucleotide
  Antisense strand to SEQ ID NO: 308256
auaagaaagcucaagcggc

SEQ ID NO: 308258 - RNA, 19 nt, Artificial Sequence
  Description of Artificial Sequence: Synthetic oligonucleotide
  Sense strand starting at position 2431 of SEQ ID NO: 3959
gagcuuucuuauucggaca

SEQ ID NO: 308259 - RNA, 19 nt, Artificial Sequence
  Description of Artificial Sequence: Synthetic oligonucleotide
  Antisense strand to SEQ ID NO: 308258
uguccgaauaagaaagcuc

SEQ ID NO: 308260 - RNA, 19 nt, Artificial Sequence
  Description of Artificial Sequence: Synthetic oligonucleotide
  Sense strand starting at position 2530 of SEQ ID NO: 3959
uggaauagguagcauuuaa

SEQ ID NO: 308261 - RNA, 19 nt, Artificial Sequence
  Description of Artificial Sequence: Synthetic oligonucleotide
  Antisense strand to SEQ ID NO: 308260
uuaaaugcuaccuauucca

SEQ ID NO: 308262 - RNA, 19 nt, Artificial Sequence
  Description of Artificial Sequence: Synthetic oligonucleotide
  Sense strand starting at position 2565 of SEQ ID NO: 3959
uaccucuuuggaggguaua

SEQ ID NO: 308263 - RNA, 19 nt, Artificial Sequence
  Description of Artificial Sequence: Synthetic oligonucleotide
  Antisense strand to SEQ ID NO: 308262
uauacccuccaaagaggua

SEQ ID NO: 308264 - RNA, 19 nt, Artificial Sequence
  Description of Artificial Sequence: Synthetic oligonucleotide
  Sense strand starting at position 2566 of SEQ ID NO: 3959
accucuuuggaggguauau

SEQ ID NO: 308265 - RNA, 19 nt, Artificial Sequence
  Description of Artificial Sequence: Synthetic oligonucleotide
  Antisense strand to SEQ ID NO: 308264
auauacccuccaaagaggu

SEQ ID NO: 308266 - RNA, 19 nt, Artificial Sequence
  Description of Artificial Sequence: Synthetic oligonucleotide
  Sense strand starting at position 3557 of SEQ ID NO: 3959
ccauguguagcagagcauu

SEQ ID NO: 308267 - RNA, 19 nt, Artificial Sequence
  Description of Artificial Sequence: Synthetic oligonucleotide
  Antisense strand to SEQ ID NO: 308266
aaugcucugcuacacaugg

SEQ ID NO: 308268 - RNA, 19 nt, Artificial Sequence
  Description of Artificial Sequence: Synthetic oligonucleotide
  Sense strand starting at position 3593 of SEQ ID NO: 3959
cugcuuucucuguauauug

SEQ ID NO: 308269 - RNA, 19 nt, Artificial Sequence
  Description of Artificial Sequence: Synthetic oligonucleotide
  Antisense strand to SEQ ID NO: 308268
caauauacagagaaagcag

SEQ ID NO: 308270 - RNA, 19 nt, Artificial Sequence
  Description of Artificial Sequence: Synthetic oligonucleotide
  Sense strand starting at position 3604 of SEQ ID NO: 3959
guauauugggcucggagag

SEQ ID NO: 308271 - RNA, 19 nt, Artificial Sequence
  Description of Artificial Sequence: Synthetic oligonucleotide
  Antisense strand to SEQ ID NO: 308270
cucuccgagcccaauauac

SEQ ID NO: 308272 - RNA, 19 nt, Artificial Sequence
  Description of Artificial Sequence: Synthetic oligonucleotide
  Sense strand starting at position 3605 of SEQ ID NO: 3959
uauauugggcucggagagu

SEQ ID NO: 308273 - RNA, 19 nt, Artificial Sequence
  Description of Artificial Sequence: Synthetic oligonucleotide
  Antisense strand to SEQ ID NO: 308272
acucuccgagcccaauaua

SEQ ID NO: 308274 - RNA, 19 nt, Artificial Sequence
  Description of Artificial Sequence: Synthetic oligonucleotide
  Sense strand starting at position 3627 of SEQ ID NO: 3959
cugggucucuaugugaaua

SEQ ID NO: 308275 - RNA, 19 nt, Artificial Sequence
  Description of Artificial Sequence: Synthetic oligonucleotide
  Antisense strand to SEQ ID NO: 308274
uauucacauagagacccag

SEQ ID NO: 308276 - RNA, 19 nt, Artificial Sequence
  Description of Artificial Sequence: Synthetic oligonucleotide
  Sense strand starting at position 3628 of SEQ ID NO: 3959
ugggucucuaugugaauau

SEQ ID NO: 308277 - RNA, 19 nt, Artificial Sequence
  Description of Artificial Sequence: Synthetic oligonucleotide
  Antisense strand to SEQ ID NO: 308276
auauucacauagagaccca

SEQ ID NO: 308278 - RNA, 19 nt, Artificial Sequence
  Description of Artificial Sequence: Synthetic oligonucleotide
  Sense strand starting at position 3803 of SEQ ID NO: 3959
gcauguuuaauugcgaugu

SEQ ID NO: 308279 - RNA, 19 nt, Artificial Sequence
  Description of Artificial Sequence: Synthetic oligonucleotide
  Antisense strand to SEQ ID NO: 308278
acaucgcaauuaaacaugc

SEQ ID NO: 308280 - RNA, 19 nt, Artificial Sequence
  Description of Artificial Sequence: Synthetic oligonucleotide
  Sense strand starting at position 3811 of SEQ ID NO: 3959
aauugcgauguuugacaca

SEQ ID NO: 308281 - RNA, 19 nt, Artificial Sequence
  Description of Artificial Sequence: Synthetic oligonucleotide
  Antisense strand to SEQ ID NO: 308280
ugugucaaacaucgcaauu

SEQ ID NO: 308282 - RNA, 19 nt, Artificial Sequence
  Description of Artificial Sequence: Synthetic oligonucleotide
  Sense strand starting at position 3892 of SEQ ID NO: 3959
ugccacucagugggagaau

SEQ ID NO: 308283 - RNA, 19 nt, Artificial Sequence
  Description of Artificial Sequence: Synthetic oligonucleotide
  Antisense strand to SEQ ID NO: 308282
auucucccacugaguggca

SEQ ID NO: 308284 - RNA, 19 nt, Artificial Sequence
  Description of Artificial Sequence: Synthetic oligonucleotide
  Sense strand starting at position 3913 of SEQ ID NO: 3959
gcagaaccucuaggaucuu

SEQ ID NO: 308285 - RNA, 19 nt, Artificial Sequence
  Description of Artificial Sequence: Synthetic oligonucleotide
  Antisense strand to SEQ ID NO: 308284
aagauccuagagguucugc

SEQ ID NO: 308286 - RNA, 19 nt, Artificial Sequence
  Description of Artificial Sequence: Synthetic oligonucleotide
  Sense strand starting at position 3 of SEQ ID NO: 3960
acuggugucaaagguuuau

SEQ ID NO: 308287 - RNA, 19 nt, Artificial Sequence
  Description of Artificial Sequence: Synthetic oligonucleotide
  Antisense strand to SEQ ID NO: 308286
auaaaccuuugacaccagu

SEQ ID NO: 308288 - RNA, 19 nt, Artificial Sequence
  Description of Artificial Sequence: Synthetic oligonucleotide
  Sense strand starting at position 7 of SEQ ID NO: 3960
gugucaaagguuuaugcca

SEQ ID NO: 308289 - RNA, 19 nt, Artificial Sequence
  Description of Artificial Sequence: Synthetic oligonucleotide
  Antisense strand to SEQ ID NO: 308288
uggcauaaaccuuugacac

SEQ ID NO: 308290 - RNA, 19 nt, Artificial Sequence
  Description of Artificial Sequence: Synthetic oligonucleotide
  Sense strand starting at position 15 of SEQ ID NO: 3960
gguuuaugccagcaccaau

SEQ ID NO: 308291 - RNA, 19 nt, Artificial Sequence
  Description of Artificial Sequence: Synthetic oligonucleotide
  Antisense strand to SEQ ID NO: 308290
auuggugcuggcauaaacc

SEQ ID NO: 308292 - RNA, 19 nt, Artificial Sequence
  Description of Artificial Sequence: Synthetic oligonucleotide
  Sense strand starting at position 63 of SEQ ID NO: 3960
ucauauacacguuacugau

SEQ ID NO: 308293 - RNA, 19 nt, Artificial Sequence
  Description of Artificial Sequence: Synthetic oligonucleotide
  Antisense strand to SEQ ID NO: 308292
aucaguaacguguauauga

SEQ ID NO: 308294 - RNA, 19 nt, Artificial Sequence
  Description of Artificial Sequence: Synthetic oligonucleotide
  Sense strand starting at position 65 of SEQ ID NO: 3960
auauacacguuacugauaa

SEQ ID NO: 308295 - RNA, 19 nt, Artificial Sequence
  Description of Artificial Sequence: Synthetic oligonucleotide
  Antisense strand to SEQ ID NO: 308294
uuaucaguaacguguauau

SEQ ID NO: 308296 - RNA, 19 nt, Artificial Sequence
  Description of Artificial Sequence: Synthetic oligonucleotide
  Sense strand starting at position 72 of SEQ ID NO: 3960
cguuacugauaaucucagu

SEQ ID NO: 308297 - RNA, 19 nt, Artificial Sequence
  Description of Artificial Sequence: Synthetic oligonucleotide
  Antisense strand to SEQ ID NO: 308296
acugagauuaucaguaacg

SEQ ID NO: 308298 - RNA, 19 nt, Artificial Sequence
  Description of Artificial Sequence: Synthetic oligonucleotide
  Sense strand starting at position 77 of SEQ ID NO: 3960
cugauaaucucaguugagg

SEQ ID NO: 308299 - RNA, 19 nt, Artificial Sequence
  Description of Artificial Sequence: Synthetic oligonucleotide
  Antisense strand to SEQ ID NO: 308298
ccucaacugagauuaucag

SEQ ID NO: 308300 - RNA, 19 nt, Artificial Sequence
  Description of Artificial Sequence: Synthetic oligonucleotide
  Sense strand starting at position 264 of SEQ ID NO: 3960
ccaguuucgcaauaaguga

SEQ ID NO: 308301 - RNA, 19 nt, Artificial Sequence
  Description of Artificial Sequence: Synthetic oligonucleotide
  Antisense strand to SEQ ID NO: 308300
ucacuuauugcgaaacugg

SEQ ID NO: 308302 - RNA, 19 nt, Artificial Sequence
  Description of Artificial Sequence: Synthetic oligonucleotide
  Sense strand starting at position 515 of SEQ ID NO: 3960
cgguacuacuaaccugauu

SEQ ID NO: 308303 - RNA, 19 nt, Artificial Sequence
  Description of Artificial Sequence: Synthetic oligonucleotide
  Antisense strand to SEQ ID NO: 308302
aaucagguuaguaguaccg

SEQ ID NO: 308304 - RNA, 19 nt, Artificial Sequence
  Description of Artificial Sequence: Synthetic oligonucleotide
  Sense strand starting at position 612 of SEQ ID NO: 3960
ggcagcucagaugacaauu

SEQ ID NO: 308305 - RNA, 19 nt, Artificial Sequence
  Description of Artificial Sequence: Synthetic oligonucleotide
  Antisense strand to SEQ ID NO: 308304
aauugucaucugagcugcc

SEQ ID NO: 308306 - RNA, 19 nt, Artificial Sequence
  Description of Artificial Sequence: Synthetic oligonucleotide
  Sense strand starting at position 645 of SEQ ID NO: 3960
ucgcaaauguuaucucaaa

SEQ ID NO: 308307 - RNA, 19 nt, Artificial Sequence
  Description of Artificial Sequence: Synthetic oligonucleotide
  Antisense strand to SEQ ID NO: 308306
uuugagauaacauuugcga

SEQ ID NO: 308308 - RNA, 19 nt, Artificial Sequence
  Description of Artificial Sequence: Synthetic oligonucleotide
  Sense strand starting at position 646 of SEQ ID NO: 3960
cgcaaauguuaucucaaau

SEQ ID NO: 308309 - RNA, 19 nt, Artificial Sequence
  Description of Artificial Sequence: Synthetic oligonucleotide
  Antisense strand to SEQ ID NO: 308308
auuugagauaacauuugcg

SEQ ID NO: 308310 - RNA, 19 nt, Artificial Sequence
  Description of Artificial Sequence: Synthetic oligonucleotide
  Sense strand starting at position 722 of SEQ ID NO: 3960
ccugaagcaacucgggaua

SEQ ID NO: 308311 - RNA, 19 nt, Artificial Sequence
  Description of Artificial Sequence: Synthetic oligonucleotide
  Antisense strand to SEQ ID NO: 308310
uaucccgaguugcuucagg

SEQ ID NO: 308312 - RNA, 19 nt, Artificial Sequence
  Description of Artificial Sequence: Synthetic oligonucleotide
  Sense strand starting at position 736 of SEQ ID NO: 3960
ggauauaagcagcagcauu

SEQ ID NO: 308313 - RNA, 19 nt, Artificial Sequence
  Description of Artificial Sequence: Synthetic oligonucleotide
  Antisense strand to SEQ ID NO: 308312
aaugcugcugcuuauaucc

SEQ ID NO: 308314 - RNA, 19 nt, Artificial Sequence
  Description of Artificial Sequence: Synthetic oligonucleotide
  Sense strand starting at position 1567 of SEQ ID NO: 3960
cgacccuucccguacauau

SEQ ID NO: 308315 - RNA, 19 nt, Artificial Sequence
  Description of Artificial Sequence: Synthetic oligonucleotide
  Antisense strand to SEQ ID NO: 308314
auauguacgggaagggucg

SEQ ID NO: 308316 - RNA, 19 nt, Artificial Sequence
  Description of Artificial Sequence: Synthetic oligonucleotide
  Sense strand starting at position 2195 of SEQ ID NO: 3960
agggaagccucgccaguau

SEQ ID NO: 308317 - RNA, 19 nt, Artificial Sequence
  Description of Artificial Sequence: Synthetic oligonucleotide
  Antisense strand to SEQ ID NO: 308316
auacuggcgaggcuucccu

SEQ ID NO: 308318 - RNA, 19 nt, Artificial Sequence
  Description of Artificial Sequence: Synthetic oligonucleotide
  Sense strand starting at position 2209 of SEQ ID NO: 3960
aguauaucucagugaggga

SEQ ID NO: 308319 - RNA, 19 nt, Artificial Sequence
  Description of Artificial Sequence: Synthetic oligonucleotide
  Antisense strand to SEQ ID NO: 308318
ucccucacugagauauacu

SEQ ID NO: 308320 - RNA, 19 nt, Artificial Sequence
  Description of Artificial Sequence: Synthetic oligonucleotide
  Sense strand starting at position 2234 of SEQ ID NO: 3960
cugagcacgacugguuauu

SEQ ID NO: 308321 - RNA, 19 nt, Artificial Sequence
  Description of Artificial Sequence: Synthetic oligonucleotide
  Antisense strand to SEQ ID NO: 308320
aauaaccagucgugcucag

SEQ ID NO: 308322 - RNA, 19 nt, Artificial Sequence
  Description of Artificial Sequence: Synthetic oligonucleotide
  Sense strand starting at position 2456 of SEQ ID NO: 3960
ggguuuaggcauugaagaa

SEQ ID NO: 308323 - RNA, 19 nt, Artificial Sequence
  Description of Artificial Sequence: Synthetic oligonucleotide
  Antisense strand to SEQ ID NO: 308322
uucuucaaugccuaaaccc

SEQ ID NO: 308324 - RNA, 19 nt, Artificial Sequence
  Description of Artificial Sequence: Synthetic oligonucleotide
  Sense strand starting at position 2468 of SEQ ID NO: 3960
ugaagaaagugacaaguga

SEQ ID NO: 308325 - RNA, 19 nt, Artificial Sequence
  Description of Artificial Sequence: Synthetic oligonucleotide
  Antisense strand to SEQ ID NO: 308324
ucacuugucacuuucuuca

SEQ ID NO: 308326 - RNA, 19 nt, Artificial Sequence
  Description of Artificial Sequence: Synthetic oligonucleotide
  Sense strand starting at position 2528 of SEQ ID NO: 3960
uuccuaauccuguagagcu

SEQ ID NO: 308327 - RNA, 19 nt, Artificial Sequence
  Description of Artificial Sequence: Synthetic oligonucleotide
  Antisense strand to SEQ ID NO: 308326
agcucuacaggauuaggaa

SEQ ID NO: 308328 - RNA, 19 nt, Artificial Sequence
  Description of Artificial Sequence: Synthetic oligonucleotide
  Sense strand starting at position 2578 of SEQ ID NO: 3960
guggaacuggccuaaguua

SEQ ID NO: 308329 - RNA, 19 nt, Artificial Sequence
  Description of Artificial Sequence: Synthetic oligonucleotide
  Antisense strand to SEQ ID NO: 308328
uaacuuaggccaguuccac

SEQ ID NO: 308330 - RNA, 19 nt, Artificial Sequence
  Description of Artificial Sequence: Synthetic oligonucleotide
  Sense strand starting at position 2586 of SEQ ID NO: 3960
ggccuaaguuacuccucaa

SEQ ID NO: 308331 - RNA, 19 nt, Artificial Sequence
  Description of Artificial Sequence: Synthetic oligonucleotide
  Antisense strand to SEQ ID NO: 308330
uugaggaguaacuuaggcc

SEQ ID NO: 308332 - RNA, 19 nt, Artificial Sequence
  Description of Artificial Sequence: Synthetic oligonucleotide
  Sense strand starting at position 2589 of SEQ ID NO: 3960
cuaaguuacuccucaagag

SEQ ID NO: 308333 - RNA, 19 nt, Artificial Sequence
  Description of Artificial Sequence: Synthetic oligonucleotide
  Antisense strand to SEQ ID NO: 308332
cucuugaggaguaacuuag

SEQ ID NO: 308334 - RNA, 19 nt, Artificial Sequence
  Description of Artificial Sequence: Synthetic oligonucleotide
  Sense strand starting at position 2618 of SEQ ID NO: 3960
uuugguagauucuugaagu

SEQ ID NO: 308335 - RNA, 19 nt, Artificial Sequence
  Description of Artificial Sequence: Synthetic oligonucleotide
  Antisense strand to SEQ ID NO: 308334
acuucaagaaucuaccaaa

SEQ ID NO: 308336 - RNA, 19 nt, Artificial Sequence
  Description of Artificial Sequence: Synthetic oligonucleotide
  Sense strand starting at position 2648 of SEQ ID NO: 3960
gaggauguuacacggaacu

SEQ ID NO: 308337 - RNA, 19 nt, Artificial Sequence
  Description of Artificial Sequence: Synthetic oligonucleotide
  Antisense strand to SEQ ID NO: 308336
aguuccguguaacauccuc

SEQ ID NO: 308338 - RNA, 19 nt, Artificial Sequence
  Description of Artificial Sequence: Synthetic oligonucleotide
  Sense strand starting at position 2979 of SEQ ID NO: 3960
gguucuacgucuuuauaug

SEQ ID NO: 308339 - RNA, 19 nt, Artificial Sequence
  Description of Artificial Sequence: Synthetic oligonucleotide
  Antisense strand to SEQ ID NO: 308338
cauauaaagacguagaacc

SEQ ID NO: 308340 - RNA, 19 nt, Artificial Sequence
  Description of Artificial Sequence: Synthetic oligonucleotide
  Sense strand starting at position 2986 of SEQ ID NO: 3960
cgucuuuauauggaaaugu

SEQ ID NO: 308341 - RNA, 19 nt, Artificial Sequence
  Description of Artificial Sequence: Synthetic oligonucleotide
  Antisense strand to SEQ ID NO: 308340
acauuuccauauaaagacg

SEQ ID NO: 308342 - RNA, 19 nt, Artificial Sequence
  Description of Artificial Sequence: Synthetic oligonucleotide
  Sense strand starting at position 3069 of SEQ ID NO: 3960
gguacuguguuucuuacau

SEQ ID NO: 308343 - RNA, 19 nt, Artificial Sequence
  Description of Artificial Sequence: Synthetic oligonucleotide
  Antisense strand to SEQ ID NO: 308342
auguaagaaacacaguacc

SEQ ID NO: 308344 - RNA, 19 nt, Artificial Sequence
  Description of Artificial Sequence: Synthetic oligonucleotide
  Sense strand starting at position 3164 of SEQ ID NO: 3960
uccagaugucuacaguuua

SEQ ID NO: 308345 - RNA, 19 nt, Artificial Sequence
  Description of Artificial Sequence: Synthetic oligonucleotide
  Antisense strand to SEQ ID NO: 308344
uaaacuguagacaucugga

SEQ ID NO: 308346 - RNA, 19 nt, Artificial Sequence
  Description of Artificial Sequence: Synthetic oligonucleotide
  Sense strand starting at position 3269 of SEQ ID NO: 3960
agucuuuaccaaugagcau

SEQ ID NO: 308347 - RNA, 19 nt, Artificial Sequence
  Description of Artificial Sequence: Synthetic oligonucleotide
  Antisense strand to SEQ ID NO: 308346
augcucauugguaaagacu

SEQ ID NO: 308348 - RNA, 19 nt, Artificial Sequence
  Description of Artificial Sequence: Synthetic oligonucleotide
  Sense strand starting at position 3329 of SEQ ID NO: 3960
aggguuacuuagccugcaa

SEQ ID NO: 308349 - RNA, 19 nt, Artificial Sequence
  Description of Artificial Sequence: Synthetic oligonucleotide
  Antisense strand to SEQ ID NO: 308348
uugcaggcuaaguaacccu

SEQ ID NO: 308350 - RNA, 19 nt, Artificial Sequence
  Description of Artificial Sequence: Synthetic oligonucleotide
  Sense strand starting at position 3722 of SEQ ID NO: 3960
gaugaucaguuacuguauu

SEQ ID NO: 308351 - RNA, 19 nt, Artificial Sequence
  Description of Artificial Sequence: Synthetic oligonucleotide
  Antisense strand to SEQ ID NO: 308350
aauacaguaacugaucauc

SEQ ID NO: 308352 - RNA, 19 nt, Artificial Sequence
  Description of Artificial Sequence: Synthetic oligonucleotide
  Sense strand starting at position 3816 of SEQ ID NO: 3960
caucuugauuuaugaguga

SEQ ID NO: 308353 - RNA, 19 nt, Artificial Sequence
  Description of Artificial Sequence: Synthetic oligonucleotide
  Antisense strand to SEQ ID NO: 308352
ucacucauaaaucaagaug

SEQ ID NO: 308354 - RNA, 19 nt, Artificial Sequence
  Description of Artificial Sequence: Synthetic oligonucleotide
  Sense strand starting at position 3844 of SEQ ID NO: 3960
gagauauaguaccaaaggu

SEQ ID NO: 308355 - RNA, 19 nt, Artificial Sequence
  Description of Artificial Sequence: Synthetic oligonucleotide
  Antisense strand to SEQ ID NO: 308354
accuuugguacuauaucuc

SEQ ID NO: 308356 - RNA, 19 nt, Artificial Sequence
  Description of Artificial Sequence: Synthetic oligonucleotide
  Sense strand starting at position 3921 of SEQ ID NO: 3960
gggcuacaucuguaacuac

SEQ ID NO: 308357 - RNA, 19 nt, Artificial Sequence
  Description of Artificial Sequence: Synthetic oligonucleotide
  Antisense strand to SEQ ID NO: 308356
guaguuacagauguagccc

SEQ ID NO: 308358 - RNA, 19 nt, Artificial Sequence
  Description of Artificial Sequence: Synthetic oligonucleotide
  Sense strand starting at position 3928 of SEQ ID NO: 3960
aucuguaacuacucaguca

SEQ ID NO: 308359 - RNA, 19 nt, Artificial Sequence
  Description of Artificial Sequence: Synthetic oligonucleotide
  Antisense strand to SEQ ID NO: 308358
ugacugaguaguuacagau

SEQ ID NO: 308360 - RNA, 19 nt, Artificial Sequence
  Description of Artificial Sequence: Synthetic oligonucleotide
  Sense strand starting at position 3931 of SEQ ID NO: 3960
uguaacuacucagucacua

SEQ ID NO: 308361 - RNA, 19 nt, Artificial Sequence
  Description of Artificial Sequence: Synthetic oligonucleotide
  Antisense strand to SEQ ID NO: 308360
uagugacugaguaguuaca

SEQ ID NO: 308362 - RNA, 19 nt, Artificial Sequence
  Description of Artificial Sequence: Synthetic oligonucleotide
  Sense strand starting at position 3942 of SEQ ID NO: 3960
agucacuaguucuuagaga

SEQ ID NO: 308363 - RNA, 19 nt, Artificial Sequence
  Description of Artificial Sequence: Synthetic oligonucleotide
  Antisense strand to SEQ ID NO: 308362
ucucuaagaacuagugacu

SEQ ID NO: 308364 - RNA, 19 nt, Artificial Sequence
  Description of Artificial Sequence: Synthetic oligonucleotide
  Sense strand starting at position 3970 of SEQ ID NO: 3960
cuagaagcuuaguuuccaa

SEQ ID NO: 308365 - RNA, 19 nt, Artificial Sequence
  Description of Artificial Sequence: Synthetic oligonucleotide
  Antisense strand to SEQ ID NO: 308364
uuggaaacuaagcuucuag

SEQ ID NO: 308366 - RNA, 19 nt, Artificial Sequence
  Description of Artificial Sequence: Synthetic oligonucleotide
  Sense strand starting at position 36 of SEQ ID NO: 3961
gguaucuuagagugaauca

SEQ ID NO: 308367 - RNA, 19 nt, Artificial Sequence
  Description of Artificial Sequence: Synthetic oligonucleotide
  Antisense strand to SEQ ID NO: 308366
ugauucacucuaagauacc

SEQ ID NO: 308368 - RNA, 19 nt, Artificial Sequence
  Description of Artificial Sequence: Synthetic oligonucleotide
  Sense strand starting at position 55 of SEQ ID NO: 3961
ugggaacuguaaucugaac

SEQ ID NO: 308369 - RNA, 19 nt, Artificial Sequence
  Description of Artificial Sequence: Synthetic oligonucleotide
  Antisense strand to SEQ ID NO: 308368
guucagauuacaguuccca

SEQ ID NO: 308370 - RNA, 19 nt, Artificial Sequence
  Description of Artificial Sequence: Synthetic oligonucleotide
  Sense strand starting at position 88 of SEQ ID NO: 3961
acaguaauguaccuauguu

SEQ ID NO: 308371 - RNA, 19 nt, Artificial Sequence
  Description of Artificial Sequence: Synthetic oligonucleotide
  Antisense strand to SEQ ID NO: 308370
aacauagguacauuacugu

SEQ ID NO: 308372 - RNA, 19 nt, Artificial Sequence
  Description of Artificial Sequence: Synthetic oligonucleotide
  Sense strand starting at position 119 of SEQ ID NO: 3961
uugacaaaugugcaacuuu

SEQ ID NO: 308373 - RNA, 19 nt, Artificial Sequence
  Description of Artificial Sequence: Synthetic oligonucleotide
  Antisense strand to SEQ ID NO: 308372
aaaguugcacauuugucaa

SEQ ID NO: 308374 - RNA, 19 nt, Artificial Sequence
  Description of Artificial Sequence: Synthetic oligonucleotide
  Sense strand starting at position 267 of SEQ ID NO: 3961
cagcaaaggcugugaaauc

SEQ ID NO: 308375 - RNA, 19 nt, Artificial Sequence
  Description of Artificial Sequence: Synthetic oligonucleotide
  Antisense strand to SEQ ID NO: 308374
gauuucacagccuuugcug

SEQ ID NO: 308376 - RNA, 19 nt, Artificial Sequence
  Description of Artificial Sequence: Synthetic oligonucleotide
  Sense strand starting at position 335 of SEQ ID NO: 3961
ggaacaccuuggguuuauu

SEQ ID NO: 308377 - RNA, 19 nt, Artificial Sequence
  Description of Artificial Sequence: Synthetic oligonucleotide
  Antisense strand to SEQ ID NO: 308376
aauaaacccaagguguucc

SEQ ID NO: 308378 - RNA, 19 nt, Artificial Sequence
  Description of Artificial Sequence: Synthetic oligonucleotide
  Sense strand starting at position 338 of SEQ ID NO: 3961
acaccuuggguuuauuaau

SEQ ID NO: 308379 - RNA, 19 nt, Artificial Sequence
  Description of Artificial Sequence: Synthetic oligonucleotide
  Antisense strand to SEQ ID NO: 308378
auuaauaaacccaaggugu

SEQ ID NO: 308380 - RNA, 19 nt, Artificial Sequence
  Description of Artificial Sequence: Synthetic oligonucleotide
  Sense strand starting at position 374 of SEQ ID NO: 3961
agaaguaacuuguccacuu

SEQ ID NO: 308381 - RNA, 19 nt, Artificial Sequence
  Description of Artificial Sequence: Synthetic oligonucleotide
  Antisense strand to SEQ ID NO: 308380
aaguggacaaguuacuucu

SEQ ID NO: 308382 - RNA, 19 nt, Artificial Sequence
  Description of Artificial Sequence: Synthetic oligonucleotide
  Sense strand starting at position 421 of SEQ ID NO: 3961
ccuuuaugguaacugaaua

SEQ ID NO: 308383 - RNA, 19 nt, Artificial Sequence
  Description of Artificial Sequence: Synthetic oligonucleotide
  Antisense strand to SEQ ID NO: 308382
uauucaguuaccauaaagg

SEQ ID NO: 308384 - RNA, 19 nt, Artificial Sequence
  Description of Artificial Sequence: Synthetic oligonucleotide
  Sense strand starting at position 600 of SEQ ID NO: 3961
caagcauagcguucgaucu

SEQ ID NO: 308385 - RNA, 19 nt, Artificial Sequence
  Description of Artificial Sequence: Synthetic oligonucleotide
  Antisense strand to SEQ ID NO: 308384
agaucgaacgcuaugcuug

SEQ ID NO: 308386 - RNA, 19 nt, Artificial Sequence
  Description of Artificial Sequence: Synthetic oligonucleotide
  Sense strand starting at position 604 of SEQ ID NO: 3961
cauagcguucgaucuguuu

SEQ ID NO: 308387 - RNA, 19 nt, Artificial Sequence
  Description of Artificial Sequence: Synthetic oligonucleotide
  Antisense strand to SEQ ID NO: 308386
aaacagaucgaacgcuaug

SEQ ID NO: 308388 - RNA, 19 nt, Artificial Sequence
  Description of Artificial Sequence: Synthetic oligonucleotide
  Sense strand starting at position 608 of SEQ ID NO: 3961
gcguucgaucuguuucgau

SEQ ID NO: 308389 - RNA, 19 nt, Artificial Sequence
  Description of Artificial Sequence: Synthetic oligonucleotide
  Antisense strand to SEQ ID NO: 308388
aucgaaacagaucgaacgc

SEQ ID NO: 308390 - RNA, 19 nt, Artificial Sequence
  Description of Artificial Sequence: Synthetic oligonucleotide
  Sense strand starting at position 686 of SEQ ID NO: 3961
uuaauaaagcgauguagaa

SEQ ID NO: 308391 - RNA, 19 nt, Artificial Sequence
  Description of Artificial Sequence: Synthetic oligonucleotide
  Antisense strand to SEQ ID NO: 308390
uucuacaucgcuuuauuaa

SEQ ID NO: 308392 - RNA, 19 nt, Artificial Sequence
  Description of Artificial Sequence: Synthetic oligonucleotide
  Sense strand starting at position 729 of SEQ ID NO: 3961
gggucaaaugauggccauu

SEQ ID NO: 308393 - RNA, 19 nt, Artificial Sequence
  Description of Artificial Sequence: Synthetic oligonucleotide
  Antisense strand to SEQ ID NO: 308392
aauggccaucauuugaccc

SEQ ID NO: 308394 - RNA, 19 nt, Artificial Sequence
  Description of Artificial Sequence: Synthetic oligonucleotide
  Sense strand starting at position 732 of SEQ ID NO: 3961
ucaaaugauggccauuacu

SEQ ID NO: 308395 - RNA, 19 nt, Artificial Sequence
  Description of Artificial Sequence: Synthetic oligonucleotide
  Antisense strand to SEQ ID NO: 308394
aguaauggccaucauuuga

SEQ ID NO: 308396 - RNA, 19 nt, Artificial Sequence
  Description of Artificial Sequence: Synthetic oligonucleotide
  Sense strand starting at position 797 of SEQ ID NO: 3961
cauaauaaguguuugugaa

SEQ ID NO: 308397 - RNA, 19 nt, Artificial Sequence
  Description of Artificial Sequence: Synthetic oligonucleotide
  Antisense strand to SEQ ID NO: 308396
uucacaaacacuuauuaug

SEQ ID NO: 308398 - RNA, 19 nt, Artificial Sequence
  Description of Artificial Sequence: Synthetic oligonucleotide
  Sense strand starting at position 798 of SEQ ID NO: 3961
auaauaaguguuugugaac

SEQ ID NO: 308399 - RNA, 19 nt, Artificial Sequence
  Description of Artificial Sequence: Synthetic oligonucleotide
  Antisense strand to SEQ ID NO: 308398
guucacaaacacuuauuau

SEQ ID NO: 308400 - RNA, 19 nt, Artificial Sequence
  Description of Artificial Sequence: Synthetic oligonucleotide
  Sense strand starting at position 799 of SEQ ID NO: 3961
uaauaaguguuugugaacu

SEQ ID NO: 308401 - RNA, 19 nt, Artificial Sequence
  Description of Artificial Sequence: Synthetic oligonucleotide
  Antisense strand to SEQ ID NO: 308400
aguucacaaacacuuauua

SEQ ID NO: 308402 - RNA, 19 nt, Artificial Sequence
  Description of Artificial Sequence: Synthetic oligonucleotide
  Sense strand starting at position 875 of SEQ ID NO: 3961
gaaagaguuuacuugcaua

SEQ ID NO: 308403 - RNA, 19 nt, Artificial Sequence
  Description of Artificial Sequence: Synthetic oligonucleotide
  Antisense strand to SEQ ID NO: 308402
uaugcaaguaaacucuuuc

SEQ ID NO: 308404 - RNA, 19 nt, Artificial Sequence
  Description of Artificial Sequence: Synthetic oligonucleotide
  Sense strand starting at position 880 of SEQ ID NO: 3961
aguuuacuugcauaccaga

SEQ ID NO: 308405 - RNA, 19 nt, Artificial Sequence
  Description of Artificial Sequence: Synthetic oligonucleotide
  Antisense strand to SEQ ID NO: 308404
ucugguaugcaaguaaacu

SEQ ID NO: 308406 - RNA, 19 nt, Artificial Sequence
  Description of Artificial Sequence: Synthetic oligonucleotide
  Sense strand starting at position 919 of SEQ ID NO: 3961
acuggugucaaagguuuau

SEQ ID NO: 308407 - RNA, 19 nt, Artificial Sequence
  Description of Artificial Sequence: Synthetic oligonucleotide
  Antisense strand to SEQ ID NO: 308406
auaaaccuuugacaccagu

SEQ ID NO: 308408 - RNA, 19 nt, Artificial Sequence
  Description of Artificial Sequence: Synthetic oligonucleotide
  Sense strand starting at position 923 of SEQ ID NO: 3961
gugucaaagguuuaugcca

SEQ ID NO: 308409 - RNA, 19 nt, Artificial Sequence
  Description of Artificial Sequence: Synthetic oligonucleotide
  Antisense strand to SEQ ID NO: 308408
uggcauaaaccuuugacac

SEQ ID NO: 308410 - RNA, 19 nt, Artificial Sequence
  Description of Artificial Sequence: Synthetic oligonucleotide
  Sense strand starting at position 931 of SEQ ID NO: 3961
gguuuaugccagcaccaau

SEQ ID NO: 308411 - RNA, 19 nt, Artificial Sequence
  Description of Artificial Sequence: Synthetic oligonucleotide
  Antisense strand to SEQ ID NO: 308410
auuggugcuggcauaaacc

SEQ ID NO: 308412 - RNA, 19 nt, Artificial Sequence
  Description of Artificial Sequence: Synthetic oligonucleotide
  Sense strand starting at position 979 of SEQ ID NO: 3961
ucauauacacguuacugau

SEQ ID NO: 308413 - RNA, 19 nt, Artificial Sequence
  Description of Artificial Sequence: Synthetic oligonucleotide
  Antisense strand to SEQ ID NO: 308412
aucaguaacguguauauga

SEQ ID NO: 308414 - RNA, 19 nt, Artificial Sequence
  Description of Artificial Sequence: Synthetic oligonucleotide
  Sense strand starting at position 981 of SEQ ID NO: 3961
auauacacguuacugauaa

SEQ ID NO: 308415 - RNA, 19 nt, Artificial Sequence
  Description of Artificial Sequence: Synthetic oligonucleotide
  Antisense strand to SEQ ID NO: 308414
uuaucaguaacguguauau

SEQ ID NO: 308416 - RNA, 19 nt, Artificial Sequence
  Description of Artificial Sequence: Synthetic oligonucleotide
  Sense strand starting at position 993 of SEQ ID NO: 3961
cugauaaucucaguugagg

SEQ ID NO: 308417 - RNA, 19 nt, Artificial Sequence
  Description of Artificial Sequence: Synthetic oligonucleotide
  Antisense strand to SEQ ID NO: 308416
ccucaacugagauuaucag

SEQ ID NO: 308418 - RNA, 19 nt, Artificial Sequence
  Description of Artificial Sequence: Synthetic oligonucleotide
  Sense strand starting at position 1180 of SEQ ID NO: 3961
ccaguuucgcaauaaguga

SEQ ID NO: 308419 - RNA, 19 nt, Artificial Sequence
  Description of Artificial Sequence: Synthetic oligonucleotide
  Antisense strand to SEQ ID NO: 308418
ucacuuauugcgaaacugg

SEQ ID NO: 308420 - RNA, 19 nt, Artificial Sequence
  Description of Artificial Sequence: Synthetic oligonucleotide
  Sense strand starting at position 1431 of SEQ ID NO: 3961
cgguacuacuaaccugauu

SEQ ID NO: 308421 - RNA, 19 nt, Artificial Sequence
  Description of Artificial Sequence: Synthetic oligonucleotide
  Antisense strand to SEQ ID NO: 308420
aaucagguuaguaguaccg

SEQ ID NO: 308422 - RNA, 19 nt, Artificial Sequence
  Description of Artificial Sequence: Synthetic oligonucleotide
  Sense strand starting at position 1528 of SEQ ID NO: 3961
ggcagcucagaugacaauu

SEQ ID NO: 308423 - RNA, 19 nt, Artificial Sequence
  Description of Artificial Sequence: Synthetic oligonucleotide
  Antisense strand to SEQ ID NO: 308422
aauugucaucugagcugcc

SEQ ID NO: 308424 - RNA, 19 nt, Artificial Sequence
  Description of Artificial Sequence: Synthetic oligonucleotide
  Sense strand starting at position 1638 of SEQ ID NO: 3961
ccugaagcaacucgggaua

SEQ ID NO: 308425 - RNA, 19 nt, Artificial Sequence
  Description of Artificial Sequence: Synthetic oligonucleotide
  Antisense strand to SEQ ID NO: 308424
uaucccgaguugcuucagg

SEQ ID NO: 308426 - RNA, 19 nt, Artificial Sequence
  Description of Artificial Sequence: Synthetic oligonucleotide
  Sense strand starting at position 1652 of SEQ ID NO: 3961
ggauauaagcagcagcauu

SEQ ID NO: 308427 - RNA, 19 nt, Artificial Sequence
  Description of Artificial Sequence: Synthetic oligonucleotide
  Antisense strand to SEQ ID NO: 308426
aaugcugcugcuuauaucc

SEQ ID NO: 308428 - RNA, 19 nt, Artificial Sequence
  Description of Artificial Sequence: Synthetic oligonucleotide
  Sense strand starting at position 3125 of SEQ ID NO: 3961
aguauaucucagugaggga

SEQ ID NO: 308429 - RNA, 19 nt, Artificial Sequence
  Description of Artificial Sequence: Synthetic oligonucleotide
  Antisense strand to SEQ ID NO: 308428
ucccucacugagauauacu

SEQ ID NO: 308430 - RNA, 19 nt, Artificial Sequence
  Description of Artificial Sequence: Synthetic oligonucleotide
  Sense strand starting at position 3372 of SEQ ID NO: 3961
ggguuuaggcauugaagaa

SEQ ID NO: 308431 - RNA, 19 nt, Artificial Sequence
  Description of Artificial Sequence: Synthetic oligonucleotide
  Antisense strand to SEQ ID NO: 308430
uucuucaaugccuaaaccc

SEQ ID NO: 308432 - RNA, 19 nt, Artificial Sequence
  Description of Artificial Sequence: Synthetic oligonucleotide
  Sense strand starting at position 3444 of SEQ ID NO: 3961
uuccuaauccuguagagcu

SEQ ID NO: 308433 - RNA, 19 nt, Artificial Sequence
  Description of Artificial Sequence: Synthetic oligonucleotide
  Antisense strand to SEQ ID NO: 308432
agcucuacaggauuaggaa

SEQ ID NO: 308434 - RNA, 19 nt, Artificial Sequence
  Description of Artificial Sequence: Synthetic oligonucleotide
  Sense strand starting at position 3494 of SEQ ID NO: 3961
guggaacuggccuaaguua

SEQ ID NO: 308435 - RNA, 19 nt, Artificial Sequence
  Description of Artificial Sequence: Synthetic oligonucleotide
  Antisense strand to SEQ ID NO: 308434
uaacuuaggccaguuccac

SEQ ID NO: 308436 - RNA, 19 nt, Artificial Sequence
  Description of Artificial Sequence: Synthetic oligonucleotide
  Sense strand starting at position 3502 of SEQ ID NO: 3961
ggccuaaguuacuccucaa

SEQ ID NO: 308437 - RNA, 19 nt, Artificial Sequence
  Description of Artificial Sequence: Synthetic oligonucleotide
  Antisense strand to SEQ ID NO: 308436
uugaggaguaacuuaggcc

SEQ ID NO: 308438 - RNA, 19 nt, Artificial Sequence
  Description of Artificial Sequence: Synthetic oligonucleotide
  Sense strand starting at position 3505 of SEQ ID NO: 3961
cuaaguuacuccucaagag

SEQ ID NO: 308439 - RNA, 19 nt, Artificial Sequence
  Description of Artificial Sequence: Synthetic oligonucleotide
  Antisense strand to SEQ ID NO: 308438
cucuugaggaguaacuuag

SEQ ID NO: 308440 - RNA, 19 nt, Artificial Sequence
  Description of Artificial Sequence: Synthetic oligonucleotide
  Sense strand starting at position 3534 of SEQ ID NO: 3961
uuugguagauucuugaagu

SEQ ID NO: 308441 - RNA, 19 nt, Artificial Sequence
  Description of Artificial Sequence: Synthetic oligonucleotide
  Antisense strand to SEQ ID NO: 308440
acuucaagaaucuaccaaa

SEQ ID NO: 308442 - RNA, 19 nt, Artificial Sequence
  Description of Artificial Sequence: Synthetic oligonucleotide
  Sense strand starting at position 3564 of SEQ ID NO: 3961
gaggauguuacacggaacu

SEQ ID NO: 308443 - RNA, 19 nt, Artificial Sequence
  Description of Artificial Sequence: Synthetic oligonucleotide
  Antisense strand to SEQ ID NO: 308442
aguuccguguaacauccuc

SEQ ID NO: 308444 - RNA, 19 nt, Artificial Sequence
  Description of Artificial Sequence: Synthetic oligonucleotide
  Sense strand starting at position 3902 of SEQ ID NO: 3961
cgucuuuauauggaaaugu

SEQ ID NO: 308445 - RNA, 19 nt, Artificial Sequence
  Description of Artificial Sequence: Synthetic oligonucleotide
  Antisense strand to SEQ ID NO: 308444
acauuuccauauaaagacg

SEQ ID NO: 308446 - RNA, 19 nt, Artificial Sequence
  Description of Artificial Sequence: Synthetic oligonucleotide
  Sense strand starting at position 188 of SEQ ID NO: 3962
aagugaaauggcugccaua

SEQ ID NO: 308447 - RNA, 19 nt, Artificial Sequence
  Description of Artificial Sequence: Synthetic oligonucleotide
  Antisense strand to SEQ ID NO: 308446
uauggcagccauuucacuu

SEQ ID NO: 308448 - RNA, 19 nt, Artificial Sequence
  Description of Artificial Sequence: Synthetic oligonucleotide
  Sense strand starting at position 207 of SEQ ID NO: 3962
uuugaugugcuaugaagga

SEQ ID NO: 308449 - RNA, 19 nt, Artificial Sequence
  Description of Artificial Sequence: Synthetic oligonucleotide
  Antisense strand to SEQ ID NO: 308448
uccuucauagcacaucaaa

SEQ ID NO: 308450 - RNA, 19 nt, Artificial Sequence
  Description of Artificial Sequence: Synthetic oligonucleotide
  Sense strand starting at position 288 of SEQ ID NO: 3962
gucaccuccgaaggugaua

SEQ ID NO: 308451 - RNA, 19 nt, Artificial Sequence
  Description of Artificial Sequence: Synthetic oligonucleotide
  Antisense strand to SEQ ID NO: 308450
uaucaccuucggaggugac

SEQ ID NO: 308452 - RNA, 19 nt, Artificial Sequence
  Description of Artificial Sequence: Synthetic oligonucleotide
  Sense strand starting at position 358 of SEQ ID NO: 3962
ccaguagauccucagccaa

SEQ ID NO: 308453 - RNA, 19 nt, Artificial Sequence
  Description of Artificial Sequence: Synthetic oligonucleotide
  Antisense strand to SEQ ID NO: 308452
uuggcugaggaucuacugg

SEQ ID NO: 308454 - RNA, 19 nt, Artificial Sequence
  Description of Artificial Sequence: Synthetic oligonucleotide
  Sense strand starting at position 360 of SEQ ID NO: 3962
aguagauccucagccaauc

SEQ ID NO: 308455 - RNA, 19 nt, Artificial Sequence
  Description of Artificial Sequence: Synthetic oligonucleotide
  Antisense strand to SEQ ID NO: 308454
gauuggcugaggaucuacu

SEQ ID NO: 308456 - RNA, 19 nt, Artificial Sequence
  Description of Artificial Sequence: Synthetic oligonucleotide
  Sense strand starting at position 373 of SEQ ID NO: 3962
ccaaucuuugcaggauaag

SEQ ID NO: 308457 - RNA, 19 nt, Artificial Sequence
  Description of Artificial Sequence: Synthetic oligonucleotide
  Antisense strand to SEQ ID NO: 308456
cuuauccugcaaagauugg

SEQ ID NO: 308458 - RNA, 19 nt, Artificial Sequence
  Description of Artificial Sequence: Synthetic oligonucleotide
  Sense strand starting at position 374 of SEQ ID NO: 3962
caaucuuugcaggauaagu

SEQ ID NO: 308459 - RNA, 19 nt, Artificial Sequence
  Description of Artificial Sequence: Synthetic oligonucleotide
  Antisense strand to SEQ ID NO: 308458
acuuauccugcaaagauug

SEQ ID NO: 308460 - RNA, 19 nt, Artificial Sequence
  Description of Artificial Sequence: Synthetic oligonucleotide
  Sense strand starting at position 376 of SEQ ID NO: 3962
aucuuugcaggauaaguga

SEQ ID NO: 308461 - RNA, 19 nt, Artificial Sequence
  Description of Artificial Sequence: Synthetic oligonucleotide
  Antisense strand to SEQ ID NO: 308460
ucacuuauccugcaaagau

SEQ ID NO: 308462 - RNA, 19 nt, Artificial Sequence
  Description of Artificial Sequence: Synthetic oligonucleotide
  Sense strand starting at position 395 of SEQ ID NO: 3962
augaacgcucucugaaaug

SEQ ID NO: 308463 - RNA, 19 nt, Artificial Sequence
  Description of Artificial Sequence: Synthetic oligonucleotide
  Antisense strand to SEQ ID NO: 308462
cauuucagagagcguucau

SEQ ID NO: 308464 - RNA, 19 nt, Artificial Sequence
  Description of Artificial Sequence: Synthetic oligonucleotide
  Sense strand starting at position 426 of SEQ ID NO: 3962
agaguaauucccuaacgcu

SEQ ID NO: 308465 - RNA, 19 nt, Artificial Sequence
  Description of Artificial Sequence: Synthetic oligonucleotide
  Antisense strand to SEQ ID NO: 308464
agcguuagggaauuacucu

SEQ ID NO: 308466 - RNA, 19 nt, Artificial Sequence
  Description of Artificial Sequence: Synthetic oligonucleotide
  Sense strand starting at position 490 of SEQ ID NO: 3962
uuucgaugaggaugugaau

SEQ ID NO: 308467 - RNA, 19 nt, Artificial Sequence
  Description of Artificial Sequence: Synthetic oligonucleotide
  Antisense strand to SEQ ID NO: 308466
auucacauccucaucgaaa

SEQ ID NO: 308468 - RNA, 19 nt, Artificial Sequence
  Description of Artificial Sequence: Synthetic oligonucleotide
  Sense strand starting at position 496 of SEQ ID NO: 3962
ugaggaugugaaugcuacu

SEQ ID NO: 308469 - RNA, 19 nt, Artificial Sequence
  Description of Artificial Sequence: Synthetic oligonucleotide
  Antisense strand to SEQ ID NO: 308468
aguagcauucacauccuca

SEQ ID NO: 308470 - RNA, 19 nt, Artificial Sequence
  Description of Artificial Sequence: Synthetic oligonucleotide
  Sense strand starting at position 679 of SEQ ID NO: 3962
agcuuuaaccagggucaca

SEQ ID NO: 308471 - RNA, 19 nt, Artificial Sequence
  Description of Artificial Sequence: Synthetic oligonucleotide
  Antisense strand to SEQ ID NO: 308470
ugugacccugguuaaagcu

SEQ ID NO: 308472 - RNA, 19 nt, Artificial Sequence
  Description of Artificial Sequence: Synthetic oligonucleotide
  Sense strand starting at position 874 of SEQ ID NO: 3962
auuacuauccacuggagca

SEQ ID NO: 308473 - RNA, 19 nt, Artificial Sequence
  Description of Artificial Sequence: Synthetic oligonucleotide
  Antisense strand to SEQ ID NO: 308472
ugcuccaguggauaguaau

SEQ ID NO: 308474 - RNA, 19 nt, Artificial Sequence
  Description of Artificial Sequence: Synthetic oligonucleotide
  Sense strand starting at position 910 of SEQ ID NO: 3962
aaggaaugcuuucccgaaa

SEQ ID NO: 308475 - RNA, 19 nt, Artificial Sequence
  Description of Artificial Sequence: Synthetic oligonucleotide
  Antisense strand to SEQ ID NO: 308474
uuucgggaaagcauuccuu

SEQ ID NO: 308476 - RNA, 19 nt, Artificial Sequence
  Description of Artificial Sequence: Synthetic oligonucleotide
  Sense strand starting at position 911 of SEQ ID NO: 3962
aggaaugcuuucccgaaau

SEQ ID NO: 308477 - RNA, 19 nt, Artificial Sequence
  Description of Artificial Sequence: Synthetic oligonucleotide
  Antisense strand to SEQ ID NO: 308476
auuucgggaaagcauuccu

SEQ ID NO: 308478 - RNA, 19 nt, Artificial Sequence
  Description of Artificial Sequence: Synthetic oligonucleotide
  Sense strand starting at position 972 of SEQ ID NO: 3962
gacucaaaccuaggaguca

SEQ ID NO: 308479 - RNA, 19 nt, Artificial Sequence
  Description of Artificial Sequence: Synthetic oligonucleotide
  Antisense strand to SEQ ID NO: 308478
ugacuccuagguuugaguc

SEQ ID NO: 308480 - RNA, 19 nt, Artificial Sequence
  Description of Artificial Sequence: Synthetic oligonucleotide
  Sense strand starting at position 1082 of SEQ ID NO: 3962
gaaagaauauacgcaugua

SEQ ID NO: 308481 - RNA, 19 nt, Artificial Sequence
  Description of Artificial Sequence: Synthetic oligonucleotide
  Antisense strand to SEQ ID NO: 308480
uacaugcguauauucuuuc

SEQ ID NO: 308482 - RNA, 19 nt, Artificial Sequence
  Description of Artificial Sequence: Synthetic oligonucleotide
  Sense strand starting at position 2099 of SEQ ID NO: 3962
gcugucaguccacaaaggu

SEQ ID NO: 308483 - RNA, 19 nt, Artificial Sequence
  Description of Artificial Sequence: Synthetic oligonucleotide
  Antisense strand to SEQ ID NO: 308482
accuuuguggacugacagc

SEQ ID NO: 308484 - RNA, 19 nt, Artificial Sequence
  Description of Artificial Sequence: Synthetic oligonucleotide
  Sense strand starting at position 2184 of SEQ ID NO: 3962
aguugaacuggcuggaauu

SEQ ID NO: 308485 - RNA, 19 nt, Artificial Sequence
  Description of Artificial Sequence: Synthetic oligonucleotide
  Antisense strand to SEQ ID NO: 308484
aauuccagccaguucaacu

SEQ ID NO: 308486 - RNA, 19 nt, Artificial Sequence
  Description of Artificial Sequence: Synthetic oligonucleotide
  Sense strand starting at position 2214 of SEQ ID NO: 3962
ucacauucuugagugaaca

SEQ ID NO: 308487 - RNA, 19 nt, Artificial Sequence
  Description of Artificial Sequence: Synthetic oligonucleotide
  Antisense strand to SEQ ID NO: 308486
uguucacucaagaauguga

SEQ ID NO: 308488 - RNA, 19 nt, Artificial Sequence
  Description of Artificial Sequence: Synthetic oligonucleotide
  Sense strand starting at position 2286 of SEQ ID NO: 3962
caacaaguguuaccagaga

SEQ ID NO: 308489 - RNA, 19 nt, Artificial Sequence
  Description of Artificial Sequence: Synthetic oligonucleotide
  Antisense strand to SEQ ID NO: 308488
ucucugguaacacuuguug

SEQ ID NO: 308490 - RNA, 19 nt, Artificial Sequence
  Description of Artificial Sequence: Synthetic oligonucleotide
  Sense strand starting at position 2315 of SEQ ID NO: 3962
cgacuauguagugaacaag

SEQ ID NO: 308491 - RNA, 19 nt, Artificial Sequence
  Description of Artificial Sequence: Synthetic oligonucleotide
  Antisense strand to SEQ ID NO: 308490
cuuguucacuacauagucg

SEQ ID NO: 308492 - RNA, 19 nt, Artificial Sequence
  Description of Artificial Sequence: Synthetic oligonucleotide
  Sense strand starting at position 2318 of SEQ ID NO: 3962
cuauguagugaacaaguua

SEQ ID NO: 308493 - RNA, 19 nt, Artificial Sequence
  Description of Artificial Sequence: Synthetic oligonucleotide
  Antisense strand to SEQ ID NO: 308492
uaacuuguucacuacauag

SEQ ID NO: 308494 - RNA, 19 nt, Artificial Sequence
  Description of Artificial Sequence: Synthetic oligonucleotide
  Sense strand starting at position 2618 of SEQ ID NO: 3962
cuuagaaaucgugaagcau

SEQ ID NO: 308495 - RNA, 19 nt, Artificial Sequence
  Description of Artificial Sequence: Synthetic oligonucleotide
  Antisense strand to SEQ ID NO: 308494
augcuucacgauuucuaag

SEQ ID NO: 308496 - RNA, 19 nt, Artificial Sequence
  Description of Artificial Sequence: Synthetic oligonucleotide
  Sense strand starting at position 2757 of SEQ ID NO: 3962
aggacaggccuuuauuagu

SEQ ID NO: 308497 - RNA, 19 nt, Artificial Sequence
  Description of Artificial Sequence: Synthetic oligonucleotide
  Antisense strand to SEQ ID NO: 308496
acuaauaaaggccuguccu

SEQ ID NO: 308498 - RNA, 19 nt, Artificial Sequence
  Description of Artificial Sequence: Synthetic oligonucleotide
  Sense strand starting at position 2788 of SEQ ID NO: 3962
gagccaguccuguaagaua

SEQ ID NO: 308499 - RNA, 19 nt, Artificial Sequence
  Description of Artificial Sequence: Synthetic oligonucleotide
  Antisense strand to SEQ ID NO: 308498
uaucuuacaggacuggcuc

SEQ ID NO: 308500 - RNA, 19 nt, Artificial Sequence
  Description of Artificial Sequence: Synthetic oligonucleotide
  Sense strand starting at position 3114 of SEQ ID NO: 3962
uuguguucuguggaacuca

SEQ ID NO: 308501 - RNA, 19 nt, Artificial Sequence
  Description of Artificial Sequence: Synthetic oligonucleotide
  Antisense strand to SEQ ID NO: 308500
ugaguuccacagaacacaa

SEQ ID NO: 308502 - RNA, 19 nt, Artificial Sequence
  Description of Artificial Sequence: Synthetic oligonucleotide
  Sense strand starting at position 3329 of SEQ ID NO: 3962
gaugacugauuugaaguca

SEQ ID NO: 308503 - RNA, 19 nt, Artificial Sequence
  Description of Artificial Sequence: Synthetic oligonucleotide
  Antisense strand to SEQ ID NO: 308502
ugacuucaaaucagucauc

SEQ ID NO: 308504 - RNA, 19 nt, Artificial Sequence
  Description of Artificial Sequence: Synthetic oligonucleotide
  Sense strand starting at position 3384 of SEQ ID NO: 3962
uuuauugaccauggacuau

SEQ ID NO: 308505 - RNA, 19 nt, Artificial Sequence
  Description of Artificial Sequence: Synthetic oligonucleotide
  Antisense strand to SEQ ID NO: 308504
auaguccauggucaauaaa

SEQ ID NO: 308506 - RNA, 19 nt, Artificial Sequence
  Description of Artificial Sequence: Synthetic oligonucleotide
  Sense strand starting at position 3543 of SEQ ID NO: 3962
augugcuuagaggaucaua

SEQ ID NO: 308507 - RNA, 19 nt, Artificial Sequence
  Description of Artificial Sequence: Synthetic oligonucleotide
  Antisense strand to SEQ ID NO: 308506
uaugauccucuaagcacau

SEQ ID NO: 308508 - RNA, 19 nt, Artificial Sequence
  Description of Artificial Sequence: Synthetic oligonucleotide
  Sense strand starting at position 3548 of SEQ ID NO: 3962
cuuagaggaucauagagaa

SEQ ID NO: 308509 - RNA, 19 nt, Artificial Sequence
  Description of Artificial Sequence: Synthetic oligonucleotide
  Antisense strand to SEQ ID NO: 308508
uucucuaugauccucuaag

SEQ ID NO: 308510 - RNA, 19 nt, Artificial Sequence
  Description of Artificial Sequence: Synthetic oligonucleotide
  Sense strand starting at position 3582 of SEQ ID NO: 3962
uuugguguccuaugggaca

SEQ ID NO: 308511 - RNA, 19 nt, Artificial Sequence
  Description of Artificial Sequence: Synthetic oligonucleotide
  Antisense strand to SEQ ID NO: 308510
ugucccauaggacaccaaa

SEQ ID NO: 308512 - RNA, 19 nt, Artificial Sequence
  Description of Artificial Sequence: Synthetic oligonucleotide
  Sense strand starting at position 3584 of SEQ ID NO: 3962
ugguguccuaugggacaua

SEQ ID NO: 308513 - RNA, 19 nt, Artificial Sequence
  Description of Artificial Sequence: Synthetic oligonucleotide
  Antisense strand to SEQ ID NO: 308512
uaugucccauaggacacca

SEQ ID NO: 308514 - RNA, 19 nt, Artificial Sequence
  Description of Artificial Sequence: Synthetic oligonucleotide
  Sense strand starting at position 3627 of SEQ ID NO: 3962
ucauucuucuccuuagagu

SEQ ID NO: 308515 - RNA, 19 nt, Artificial Sequence
  Description of Artificial Sequence: Synthetic oligonucleotide
  Antisense strand to SEQ ID NO: 308514
acucuaaggagaagaauga

SEQ ID NO: 308516 - RNA, 19 nt, Artificial Sequence
  Description of Artificial Sequence: Synthetic oligonucleotide
  Sense strand starting at position 3713 of SEQ ID NO: 3962
ccaagauucugggcaagca

SEQ ID NO: 308517 - RNA, 19 nt, Artificial Sequence
  Description of Artificial Sequence: Synthetic oligonucleotide
  Antisense strand to SEQ ID NO: 308516
ugcuugcccagaaucuugg

SEQ ID NO: 308518 - RNA, 19 nt, Artificial Sequence
  Description of Artificial Sequence: Synthetic oligonucleotide
  Sense strand starting at position 3812 of SEQ ID NO: 3962
gggugauaauucuuccaaa

SEQ ID NO: 308519 - RNA, 19 nt, Artificial Sequence
  Description of Artificial Sequence: Synthetic oligonucleotide
  Antisense strand to SEQ ID NO: 308518
uuuggaagaauuaucaccc

SEQ ID NO: 308520 - RNA, 19 nt, Artificial Sequence
  Description of Artificial Sequence: Synthetic oligonucleotide
  Sense strand starting at position 3813 of SEQ ID NO: 3962
ggugauaauucuuccaaag

SEQ ID NO: 308521 - RNA, 19 nt, Artificial Sequence
  Description of Artificial Sequence: Synthetic oligonucleotide
  Antisense strand to SEQ ID NO: 308520
cuuuggaagaauuaucacc

SEQ ID NO: 308522 - RNA, 19 nt, Artificial Sequence
  Description of Artificial Sequence: Synthetic oligonucleotide
  Sense strand starting at position 3889 of SEQ ID NO: 3962
auaagucaccacuguaaug

SEQ ID NO: 308523 - RNA, 19 nt, Artificial Sequence
  Description of Artificial Sequence: Synthetic oligonucleotide
  Antisense strand to SEQ ID NO: 308522
cauuacaguggugacuuau

SEQ ID NO: 308524 - RNA, 19 nt, Artificial Sequence
  Description of Artificial Sequence: Synthetic oligonucleotide
  Sense strand starting at position 3913 of SEQ ID NO: 3962
augacuuuccugcaucaug

SEQ ID NO: 308525 - RNA, 19 nt, Artificial Sequence
  Description of Artificial Sequence: Synthetic oligonucleotide
  Antisense strand to SEQ ID NO: 308524
caugaugcaggaaagucau

SEQ ID NO: 308526 - RNA, 19 nt, Artificial Sequence
  Description of Artificial Sequence: Synthetic oligonucleotide
  Sense strand starting at position 35 of SEQ ID NO: 3963
gaugguauuguauauugua

SEQ ID NO: 308527 - RNA, 19 nt, Artificial Sequence
  Description of Artificial Sequence: Synthetic oligonucleotide
  Antisense strand to SEQ ID NO: 308526
uacaauauacaauaccauc

SEQ ID NO: 308528 - RNA, 19 nt, Artificial Sequence
  Description of Artificial Sequence: Synthetic oligonucleotide
  Sense strand starting at position 88 of SEQ ID NO: 3963
uagugauguggcuggauac

SEQ ID NO: 308529 - RNA, 19 nt, Artificial Sequence
  Description of Artificial Sequence: Synthetic oligonucleotide
  Antisense strand to SEQ ID NO: 308528
guauccagccacaucacua

SEQ ID NO: 308530 - RNA, 19 nt, Artificial Sequence
  Description of Artificial Sequence: Synthetic oligonucleotide
  Sense strand starting at position 89 of SEQ ID NO: 3963
agugauguggcuggauaca

SEQ ID NO: 308531 - RNA, 19 nt, Artificial Sequence
  Description of Artificial Sequence: Synthetic oligonucleotide
  Antisense strand to SEQ ID NO: 308530
uguauccagccacaucacu

SEQ ID NO: 308532 - RNA, 19 nt, Artificial Sequence
  Description of Artificial Sequence: Synthetic oligonucleotide
  Sense strand starting at position 299 of SEQ ID NO: 3963
agacauauauguuccugaa

SEQ ID NO: 308533 - RNA, 19 nt, Artificial Sequence
  Description of Artificial Sequence: Synthetic oligonucleotide
  Antisense strand to SEQ ID NO: 308532
uucaggaacauauaugucu

SEQ ID NO: 308534 - RNA, 19 nt, Artificial Sequence
  Description of Artificial Sequence: Synthetic oligonucleotide
  Sense strand starting at position 339 of SEQ ID NO: 3963
agaugccagucuucucaau

SEQ ID NO: 308535 - RNA, 19 nt, Artificial Sequence
  Description of Artificial Sequence: Synthetic oligonucleotide
  Antisense strand to SEQ ID NO: 308534
auugagaagacuggcaucu

SEQ ID NO: 308536 - RNA, 19 nt, Artificial Sequence
  Description of Artificial Sequence: Synthetic oligonucleotide
  Sense strand starting at position 380 of SEQ ID NO: 3963
cguguaggacucuagucua

SEQ ID NO: 308537 - RNA, 19 nt, Artificial Sequence
  Description of Artificial Sequence: Synthetic oligonucleotide
  Antisense strand to SEQ ID NO: 308536
uagacuagaguccuacacg

SEQ ID NO: 308538 - RNA, 19 nt, Artificial Sequence
  Description of Artificial Sequence: Synthetic oligonucleotide
  Sense strand starting at position 439 of SEQ ID NO: 3963
gaaaguauugaagaguguu

SEQ ID NO: 308539 - RNA, 19 nt, Artificial Sequence
  Description of Artificial Sequence: Synthetic oligonucleotide
  Antisense strand to SEQ ID NO: 308538
aacacucuucaauacuuuc

SEQ ID NO: 308540 - RNA, 19 nt, Artificial Sequence
  Description of Artificial Sequence: Synthetic oligonucleotide
  Sense strand starting at position 442 of SEQ ID NO: 3963
aguauugaagaguguuuac

SEQ ID NO: 308541 - RNA, 19 nt, Artificial Sequence
  Description of Artificial Sequence: Synthetic oligonucleotide
  Antisense strand to SEQ ID NO: 308540
guaaacacucuucaauacu

SEQ ID NO: 308542 - RNA, 19 nt, Artificial Sequence
  Description of Artificial Sequence: Synthetic oligonucleotide
  Sense strand starting at position 445 of SEQ ID NO: 3963
auugaagaguguuuacaca

SEQ ID NO: 308543 - RNA, 19 nt, Artificial Sequence
  Description of Artificial Sequence: Synthetic oligonucleotide
  Antisense strand to SEQ ID NO: 308542
uguguaaacacucuucaau

SEQ ID NO: 308544 - RNA, 19 nt, Artificial Sequence
  Description of Artificial Sequence: Synthetic oligonucleotide
  Sense strand starting at position 529 of SEQ ID NO: 3963
acuacauuguauccaaagu

SEQ ID NO: 308545 - RNA, 19 nt, Artificial Sequence
  Description of Artificial Sequence: Synthetic oligonucleotide
  Antisense strand to SEQ ID NO: 308544
acuuuggauacaauguagu

SEQ ID NO: 308546 - RNA, 19 nt, Artificial Sequence
  Description of Artificial Sequence: Synthetic oligonucleotide
  Sense strand starting at position 586 of SEQ ID NO: 3963
cugucuguauugcucuaua

SEQ ID NO: 308547 - RNA, 19 nt, Artificial Sequence
  Description of Artificial Sequence: Synthetic oligonucleotide
  Antisense strand to SEQ ID NO: 308546
uauagagcaauacagacag

SEQ ID NO: 308548 - RNA, 19 nt, Artificial Sequence
  Description of Artificial Sequence: Synthetic oligonucleotide
  Sense strand starting at position 589 of SEQ ID NO: 3963
ucuguauugcucuauaaag

SEQ ID NO: 308549 - RNA, 19 nt, Artificial Sequence
  Description of Artificial Sequence: Synthetic oligonucleotide
  Antisense strand to SEQ ID NO: 308548
cuuuauagagcaauacaga

SEQ ID NO: 308550 - RNA, 19 nt, Artificial Sequence
  Description of Artificial Sequence: Synthetic oligonucleotide
  Sense strand starting at position 611 of SEQ ID NO: 3963
cccauaauuuauuggcaag

SEQ ID NO: 308551 - RNA, 19 nt, Artificial Sequence
  Description of Artificial Sequence: Synthetic oligonucleotide
  Antisense strand to SEQ ID NO: 308550
cuugccaauaaauuauggg

SEQ ID NO: 308552 - RNA, 19 nt, Artificial Sequence
  Description of Artificial Sequence: Synthetic oligonucleotide
  Sense strand starting at position 614 of SEQ ID NO: 3963
auaauuuauuggcaaguga

SEQ ID NO: 308553 - RNA, 19 nt, Artificial Sequence
  Description of Artificial Sequence: Synthetic oligonucleotide
  Antisense strand to SEQ ID NO: 308552
ucacuugccaauaaauuau

SEQ ID NO: 308554 - RNA, 19 nt, Artificial Sequence
  Description of Artificial Sequence: Synthetic oligonucleotide
  Sense strand starting at position 709 of SEQ ID NO: 3963
ugagauauugcauaugccu

SEQ ID NO: 308555 - RNA, 19 nt, Artificial Sequence
  Description of Artificial Sequence: Synthetic oligonucleotide
  Antisense strand to SEQ ID NO: 308554
aggcauaugcaauaucuca

SEQ ID NO: 308556 - RNA, 19 nt, Artificial Sequence
  Description of Artificial Sequence: Synthetic oligonucleotide
  Sense strand starting at position 872 of SEQ ID NO: 3963
gccugaauaugaucuauaa

SEQ ID NO: 308557 - RNA, 19 nt, Artificial Sequence
  Description of Artificial Sequence: Synthetic oligonucleotide
  Antisense strand to SEQ ID NO: 308556
uuauagaucauauucaggc

SEQ ID NO: 308558 - RNA, 19 nt, Artificial Sequence
  Description of Artificial Sequence: Synthetic oligonucleotide
  Sense strand starting at position 952 of SEQ ID NO: 3963
guacaugaauucgcacaaa

SEQ ID NO: 308559 - RNA, 19 nt, Artificial Sequence
  Description of Artificial Sequence: Synthetic oligonucleotide
  Antisense strand to SEQ ID NO: 308558
uuugugcgaauucauguac

SEQ ID NO: 308560 - RNA, 19 nt, Artificial Sequence
  Description of Artificial Sequence: Synthetic oligonucleotide
  Sense strand starting at position 1061 of SEQ ID NO: 3963
gccagauuauucuuaaugu

SEQ ID NO: 308561 - RNA, 19 nt, Artificial Sequence
  Description of Artificial Sequence: Synthetic oligonucleotide
  Antisense strand to SEQ ID NO: 308560
acauuaagaauaaucuggc

SEQ ID NO: 308562 - RNA, 19 nt, Artificial Sequence
  Description of Artificial Sequence: Synthetic oligonucleotide
  Sense strand starting at position 1062 of SEQ ID NO: 3963
ccagauuauucuuaaugug

SEQ ID NO: 308563 - RNA, 19 nt, Artificial Sequence
  Description of Artificial Sequence: Synthetic oligonucleotide
  Antisense strand to SEQ ID NO: 308562
cacauuaagaauaaucugg

SEQ ID NO: 308564 - RNA, 19 nt, Artificial Sequence
  Description of Artificial Sequence: Synthetic oligonucleotide
  Sense strand starting at position 2133 of SEQ ID NO: 3963
aucauuugcugagauaccu

SEQ ID NO: 308565 - RNA, 19 nt, Artificial Sequence
  Description of Artificial Sequence: Synthetic oligonucleotide
  Antisense strand to SEQ ID NO: 308564
agguaucucagcaaaugau

SEQ ID NO: 308566 - RNA, 19 nt, Artificial Sequence
  Description of Artificial Sequence: Synthetic oligonucleotide
  Sense strand starting at position 2177 of SEQ ID NO: 3963
agauuauggucuucgccuu

SEQ ID NO: 308567 - RNA, 19 nt, Artificial Sequence
  Description of Artificial Sequence: Synthetic oligonucleotide
  Antisense strand to SEQ ID NO: 308566
aaggcgaagaccauaaucu

SEQ ID NO: 308568 - RNA, 19 nt, Artificial Sequence
  Description of Artificial Sequence: Synthetic oligonucleotide
  Sense strand starting at position 2208 of SEQ ID NO: 3963
cgcugcaagugaguuuaga

SEQ ID NO: 308569 - RNA, 19 nt, Artificial Sequence
  Description of Artificial Sequence: Synthetic oligonucleotide
  Antisense strand to SEQ ID NO: 308568
ucuaaacucacuugcagcg

SEQ ID NO: 308570 - RNA, 19 nt, Artificial Sequence
  Description of Artificial Sequence: Synthetic oligonucleotide
  Sense strand starting at position 2255 of SEQ ID NO: 3963
ccuugaagauucggaaaga

SEQ ID NO: 308571 - RNA, 19 nt, Artificial Sequence
  Description of Artificial Sequence: Synthetic oligonucleotide
  Antisense strand to SEQ ID NO: 308570
ucuuuccgaaucuucaagg

SEQ ID NO: 308572 - RNA, 19 nt, Artificial Sequence
  Description of Artificial Sequence: Synthetic oligonucleotide
  Sense strand starting at position 2256 of SEQ ID NO: 3963
cuugaagauucggaaagau

SEQ ID NO: 308573 - RNA, 19 nt, Artificial Sequence
  Description of Artificial Sequence: Synthetic oligonucleotide
  Antisense strand to SEQ ID NO: 308572
aucuuuccgaaucuucaag

SEQ ID NO: 308574 - RNA, 19 nt, Artificial Sequence
  Description of Artificial Sequence: Synthetic oligonucleotide
  Sense strand starting at position 2310 of SEQ ID NO: 3963
uggaauuuaucccaaagca

SEQ ID NO: 308575 - RNA, 19 nt, Artificial Sequence
  Description of Artificial Sequence: Synthetic oligonucleotide
  Antisense strand to SEQ ID NO: 308574
ugcuuugggauaaauucca

SEQ ID NO: 308576 - RNA, 19 nt, Artificial Sequence
  Description of Artificial Sequence: Synthetic oligonucleotide
  Sense strand starting at position 2386 of SEQ ID NO: 3963
ucucauguuccagggaaag

SEQ ID NO: 308577 - RNA, 19 nt, Artificial Sequence
  Description of Artificial Sequence: Synthetic oligonucleotide
  Antisense strand to SEQ ID NO: 308576
cuuucccuggaacaugaga

SEQ ID NO: 308578 - RNA, 19 nt, Artificial Sequence
  Description of Artificial Sequence: Synthetic oligonucleotide
  Sense strand starting at position 2484 of SEQ ID NO: 3963
cugguugucuucuuccaua

SEQ ID NO: 308579 - RNA, 19 nt, Artificial Sequence
  Description of Artificial Sequence: Synthetic oligonucleotide
  Antisense strand to SEQ ID NO: 308578
uauggaagaagacaaccag

SEQ ID NO: 308580 - RNA, 19 nt, Artificial Sequence
  Description of Artificial Sequence: Synthetic oligonucleotide
  Sense strand starting at position 2646 of SEQ ID NO: 3963
ggcccaguccuugugcgaa

SEQ ID NO: 308581 - RNA, 19 nt, Artificial Sequence
  Description of Artificial Sequence: Synthetic oligonucleotide
  Antisense strand to SEQ ID NO: 308580
uucgcacaaggacugggcc

SEQ ID NO: 308582 - RNA, 19 nt, Artificial Sequence
  Description of Artificial Sequence: Synthetic oligonucleotide
  Sense strand starting at position 2648 of SEQ ID NO: 3963
cccaguccuugugcgaaca

SEQ ID NO: 308583 - RNA, 19 nt, Artificial Sequence
  Description of Artificial Sequence: Synthetic oligonucleotide
  Antisense strand to SEQ ID NO: 308582
uguucgcacaaggacuggg

SEQ ID NO: 308584 - RNA, 19 nt, Artificial Sequence
  Description of Artificial Sequence: Synthetic oligonucleotide
  Sense strand starting at position 2683 of SEQ ID NO: 3963
cucugugacugcucuacuu

SEQ ID NO: 308585 - RNA, 19 nt, Artificial Sequence
  Description of Artificial Sequence: Synthetic oligonucleotide
  Antisense strand to SEQ ID NO: 308584
aaguagagcagucacagag

SEQ ID NO: 308586 - RNA, 19 nt, Artificial Sequence
  Description of Artificial Sequence: Synthetic oligonucleotide
  Sense strand starting at position 2782 of SEQ ID NO: 3963
cuggaagucagaggugaug

SEQ ID NO: 308587 - RNA, 19 nt, Artificial Sequence
  Description of Artificial Sequence: Synthetic oligonucleotide
  Antisense strand to SEQ ID NO: 308586
caucaccucugacuuccag

SEQ ID NO: 308588 - RNA, 19 nt, Artificial Sequence
  Description of Artificial Sequence: Synthetic oligonucleotide
  Sense strand starting at position 2796 of SEQ ID NO: 3963
ugaugccaucucuguguuu

SEQ ID NO: 308589 - RNA, 19 nt, Artificial Sequence
  Description of Artificial Sequence: Synthetic oligonucleotide
  Antisense strand to SEQ ID NO: 308588
aaacacagagauggcauca

SEQ ID NO: 308590 - RNA, 19 nt, Artificial Sequence
  Description of Artificial Sequence: Synthetic oligonucleotide
  Sense strand starting at position 2837 of SEQ ID NO: 3963
augcuuugccuuugacgua

SEQ ID NO: 308591 - RNA, 19 nt, Artificial Sequence
  Description of Artificial Sequence: Synthetic oligonucleotide
  Antisense strand to SEQ ID NO: 308590
uacgucaaaggcaaagcau

SEQ ID NO: 308592 - RNA, 19 nt, Artificial Sequence
  Description of Artificial Sequence: Synthetic oligonucleotide
  Sense strand starting at position 2844 of SEQ ID NO: 3963
gccuuugacguaguuugua

SEQ ID NO: 308593 - RNA, 19 nt, Artificial Sequence
  Description of Artificial Sequence: Synthetic oligonucleotide
  Antisense strand to SEQ ID NO: 308592
uacaaacuacgucaaaggc

SEQ ID NO: 308594 - RNA, 19 nt, Artificial Sequence
  Description of Artificial Sequence: Synthetic oligonucleotide
  Sense strand starting at position 2902 of SEQ ID NO: 3963
caguguuggagaugaagca

SEQ ID NO: 308595 - RNA, 19 nt, Artificial Sequence
  Description of Artificial Sequence: Synthetic oligonucleotide
  Antisense strand to SEQ ID NO: 308594
ugcuucaucuccaacacug

SEQ ID NO: 308596 - RNA, 19 nt, Artificial Sequence
  Description of Artificial Sequence: Synthetic oligonucleotide
  Sense strand starting at position 2943 of SEQ ID NO: 3963
gggcauggaucccucauga

SEQ ID NO: 308597 - RNA, 19 nt, Artificial Sequence
  Description of Artificial Sequence: Synthetic oligonucleotide
  Antisense strand to SEQ ID NO: 308596
ucaugagggauccaugccc

SEQ ID NO: 308598 - RNA, 19 nt, Artificial Sequence
  Description of Artificial Sequence: Synthetic oligonucleotide
  Sense strand starting at position 3034 of SEQ ID NO: 3963
acauguaucccagaucucu

SEQ ID NO: 308599 - RNA, 19 nt, Artificial Sequence
  Description of Artificial Sequence: Synthetic oligonucleotide
  Antisense strand to SEQ ID NO: 308598
agagaucugggauacaugu

SEQ ID NO: 308600 - RNA, 19 nt, Artificial Sequence
  Description of Artificial Sequence: Synthetic oligonucleotide
  Sense strand starting at position 3267 of SEQ ID NO: 3963
gguccuguuacacacgaaa

SEQ ID NO: 308601 - RNA, 19 nt, Artificial Sequence
  Description of Artificial Sequence: Synthetic oligonucleotide
  Antisense strand to SEQ ID NO: 308600
uuucguguguaacaggacc

SEQ ID NO: 308602 - RNA, 19 nt, Artificial Sequence
  Description of Artificial Sequence: Synthetic oligonucleotide
  Sense strand starting at position 3306 of SEQ ID NO: 3963
gcagaccucucuuuagaga

SEQ ID NO: 308603 - RNA, 19 nt, Artificial Sequence
  Description of Artificial Sequence: Synthetic oligonucleotide
  Antisense strand to SEQ ID NO: 308602
ucucuaaagagaggucugc

SEQ ID NO: 308604 - RNA, 19 nt, Artificial Sequence
  Description of Artificial Sequence: Synthetic oligonucleotide
  Sense strand starting at position 3561 of SEQ ID NO: 3963
acccaauugucaggacaau

SEQ ID NO: 308605 - RNA, 19 nt, Artificial Sequence
  Description of Artificial Sequence: Synthetic oligonucleotide
  Antisense strand to SEQ ID NO: 308604
auuguccugacaauugggu

SEQ ID NO: 308606 - RNA, 19 nt, Artificial Sequence
  Description of Artificial Sequence: Synthetic oligonucleotide
  Sense strand starting at position 55 of SEQ ID NO: 3964
gaucuaaaucauggaaguu

SEQ ID NO: 308607 - RNA, 19 nt, Artificial Sequence
  Description of Artificial Sequence: Synthetic oligonucleotide
  Antisense strand to SEQ ID NO: 308606
aacuuccaugauuuagauc

SEQ ID NO: 308608 - RNA, 19 nt, Artificial Sequence
  Description of Artificial Sequence: Synthetic oligonucleotide
  Sense strand starting at position 74 of SEQ ID NO: 3964
cauacacauucggugaaua

SEQ ID NO: 308609 - RNA, 19 nt, Artificial Sequence
  Description of Artificial Sequence: Synthetic oligonucleotide
  Antisense strand to SEQ ID NO: 308608
uauucaccgaauguguaug

SEQ ID NO: 308610 - RNA, 19 nt, Artificial Sequence
  Description of Artificial Sequence: Synthetic oligonucleotide
  Sense strand starting at position 75 of SEQ ID NO: 3964
auacacauucggugaauau

SEQ ID NO: 308611 - RNA, 19 nt, Artificial Sequence
  Description of Artificial Sequence: Synthetic oligonucleotide
  Antisense strand to SEQ ID NO: 308610
auauucaccgaauguguau

SEQ ID NO: 308612 - RNA, 19 nt, Artificial Sequence
  Description of Artificial Sequence: Synthetic oligonucleotide
  Sense strand starting at position 76 of SEQ ID NO: 3964
uacacauucggugaauaug

SEQ ID NO: 308613 - RNA, 19 nt, Artificial Sequence
  Description of Artificial Sequence: Synthetic oligonucleotide
  Antisense strand to SEQ ID NO: 308612
cauauucaccgaaugugua

SEQ ID NO: 308614 - RNA, 19 nt, Artificial Sequence
  Description of Artificial Sequence: Synthetic oligonucleotide
  Sense strand starting at position 109 of SEQ ID NO: 3964
auucucucacgauguacau

SEQ ID NO: 308615 - RNA, 19 nt, Artificial Sequence
  Description of Artificial Sequence: Synthetic oligonucleotide
  Antisense strand to SEQ ID NO: 308614
auguacaucgugagagaau

SEQ ID NO: 308616 - RNA, 19 nt, Artificial Sequence
  Description of Artificial Sequence: Synthetic oligonucleotide
  Sense strand starting at position 269 of SEQ ID NO: 3964
gguggguuuggugauguga

SEQ ID NO: 308617 - RNA, 19 nt, Artificial Sequence
  Description of Artificial Sequence: Synthetic oligonucleotide
  Antisense strand to SEQ ID NO: 308616
ucacaucaccaaacccacc

SEQ ID NO: 308618 - RNA, 19 nt, Artificial Sequence
  Description of Artificial Sequence: Synthetic oligonucleotide
  Sense strand starting at position 285 of SEQ ID NO: 3964
ugaugagccucuccugaga

SEQ ID NO: 308619 - RNA, 19 nt, Artificial Sequence
  Description of Artificial Sequence: Synthetic oligonucleotide
  Antisense strand to SEQ ID NO: 308618
ucucaggagaggcucauca

SEQ ID NO: 308620 - RNA, 19 nt, Artificial Sequence
  Description of Artificial Sequence: Synthetic oligonucleotide
  Sense strand starting at position 288 of SEQ ID NO: 3964
ugagccucuccugagaaau

SEQ ID NO: 308621 - RNA, 19 nt, Artificial Sequence
  Description of Artificial Sequence: Synthetic oligonucleotide
  Antisense strand to SEQ ID NO: 308620
auuucucaggagaggcuca

SEQ ID NO: 308622 - RNA, 19 nt, Artificial Sequence
  Description of Artificial Sequence: Synthetic oligonucleotide
  Sense strand starting at position 395 of SEQ ID NO: 3964
uuccgccauuucuugauaa

SEQ ID NO: 308623 - RNA, 19 nt, Artificial Sequence
  Description of Artificial Sequence: Synthetic oligonucleotide
  Antisense strand to SEQ ID NO: 308622
uuaucaagaaauggcggaa

SEQ ID NO: 308624 - RNA, 19 nt, Artificial Sequence
  Description of Artificial Sequence: Synthetic oligonucleotide
  Sense strand starting at position 433 of SEQ ID NO: 3964
agaaucauuugagaugcaa

SEQ ID NO: 308625 - RNA, 19 nt, Artificial Sequence
  Description of Artificial Sequence: Synthetic oligonucleotide
  Antisense strand to SEQ ID NO: 308624
uugcaucucaaaugauucu

SEQ ID NO: 308626 - RNA, 19 nt, Artificial Sequence
  Description of Artificial Sequence: Synthetic oligonucleotide
  Sense strand starting at position 522 of SEQ ID NO: 3964
aucucuugacagcacagau

SEQ ID NO: 308627 - RNA, 19 nt, Artificial Sequence
  Description of Artificial Sequence: Synthetic oligonucleotide
  Antisense strand to SEQ ID NO: 308626
aucugugcugucaagagau

SEQ ID NO: 308628 - RNA, 19 nt, Artificial Sequence
  Description of Artificial Sequence: Synthetic oligonucleotide
  Sense strand starting at position 535 of SEQ ID NO: 3964
acagaucccugucuggaaa

SEQ ID NO: 308629 - RNA, 19 nt, Artificial Sequence
  Description of Artificial Sequence: Synthetic oligonucleotide
  Antisense strand to SEQ ID NO: 308628
uuuccagacagggaucugu

SEQ ID NO: 308630 - RNA, 19 nt, Artificial Sequence
  Description of Artificial Sequence: Synthetic oligonucleotide
  Sense strand starting at position 564 of SEQ ID NO: 3964
ugugucauucucuaaucac

SEQ ID NO: 308631 - RNA, 19 nt, Artificial Sequence
  Description of Artificial Sequence: Synthetic oligonucleotide
  Antisense strand to SEQ ID NO: 308630
gugauuagagaaugacaca

SEQ ID NO: 308632 - RNA, 19 nt, Artificial Sequence
  Description of Artificial Sequence: Synthetic oligonucleotide
  Sense strand starting at position 669 of SEQ ID NO: 3964
uggucaccugucuaucauu

SEQ ID NO: 308633 - RNA, 19 nt, Artificial Sequence
  Description of Artificial Sequence: Synthetic oligonucleotide
  Antisense strand to SEQ ID NO: 308632
aaugauagacaggugacca

SEQ ID NO: 308634 - RNA, 19 nt, Artificial Sequence
  Description of Artificial Sequence: Synthetic oligonucleotide
  Sense strand starting at position 710 of SEQ ID NO: 3964
uuaucaugucaacaauugu

SEQ ID NO: 308635 - RNA, 19 nt, Artificial Sequence
  Description of Artificial Sequence: Synthetic oligonucleotide
  Antisense strand to SEQ ID NO: 308634
acaauuguugacaugauaa

SEQ ID NO: 308636 - RNA, 19 nt, Artificial Sequence
  Description of Artificial Sequence: Synthetic oligonucleotide
  Sense strand starting at position 779 of SEQ ID NO: 3964
caggauggaucaguuccaa

SEQ ID NO: 308637 - RNA, 19 nt, Artificial Sequence
  Description of Artificial Sequence: Synthetic oligonucleotide
  Antisense strand to SEQ ID NO: 308636
uuggaacugauccauccug

SEQ ID NO: 308638 - RNA, 19 nt, Artificial Sequence
  Description of Artificial Sequence: Synthetic oligonucleotide
  Sense strand starting at position 863 of SEQ ID NO: 3964
accaacagucucuaugagu

SEQ ID NO: 308639 - RNA, 19 nt, Artificial Sequence
  Description of Artificial Sequence: Synthetic oligonucleotide
  Antisense strand to SEQ ID NO: 308638
acucauagagacuguuggu

SEQ ID NO: 308640 - RNA, 19 nt, Artificial Sequence
  Description of Artificial Sequence: Synthetic oligonucleotide
  Sense strand starting at position 905 of SEQ ID NO: 3964
uuacaaacauucgugucua

SEQ ID NO: 308641 - RNA, 19 nt, Artificial Sequence
  Description of Artificial Sequence: Synthetic oligonucleotide
  Antisense strand to SEQ ID NO: 308640
uagacacgaauguuuguaa

SEQ ID NO: 308642 - RNA, 19 nt, Artificial Sequence
  Description of Artificial Sequence: Synthetic oligonucleotide
  Sense strand starting at position 954 of SEQ ID NO: 3964
ccugaaauacgcuacuaga

SEQ ID NO: 308643 - RNA, 19 nt, Artificial Sequence
  Description of Artificial Sequence: Synthetic oligonucleotide
  Antisense strand to SEQ ID NO: 308642
ucuaguagcguauuucagg

SEQ ID NO: 308644 - RNA, 19 nt, Artificial Sequence
  Description of Artificial Sequence: Synthetic oligonucleotide
  Sense strand starting at position 2094 of SEQ ID NO: 3964
uuagcaaaucaacguguaa

SEQ ID NO: 308645 - RNA, 19 nt, Artificial Sequence
  Description of Artificial Sequence: Synthetic oligonucleotide
  Antisense strand to SEQ ID NO: 308644
uuacacguugauuugcuaa

SEQ ID NO: 308646 - RNA, 19 nt, Artificial Sequence
  Description of Artificial Sequence: Synthetic oligonucleotide
  Sense strand starting at position 2124 of SEQ ID NO: 3964
agugcccuccucuaguuaa

SEQ ID NO: 308647 - RNA, 19 nt, Artificial Sequence
  Description of Artificial Sequence: Synthetic oligonucleotide
  Antisense strand to SEQ ID NO: 308646
uuaacuagaggagggcacu

SEQ ID NO: 308648 - RNA, 19 nt, Artificial Sequence
  Description of Artificial Sequence: Synthetic oligonucleotide
  Sense strand starting at position 2196 of SEQ ID NO: 3964
gaccgaucaugacuaucuu

SEQ ID NO: 308649 - RNA, 19 nt, Artificial Sequence
  Description of Artificial Sequence: Synthetic oligonucleotide
  Antisense strand to SEQ ID NO: 308648
aagauagucaugaucgguc

SEQ ID NO: 308650 - RNA, 19 nt, Artificial Sequence
  Description of Artificial Sequence: Synthetic oligonucleotide
  Sense strand starting at position 2333 of SEQ ID NO: 3964
cucuguuaaccauguuuau

SEQ ID NO: 308651 - RNA, 19 nt, Artificial Sequence
  Description of Artificial Sequence: Synthetic oligonucleotide
  Antisense strand to SEQ ID NO: 308650
auaaacaugguuaacagag

SEQ ID NO: 308652 - RNA, 19 nt, Artificial Sequence
  Description of Artificial Sequence: Synthetic oligonucleotide
  Sense strand starting at position 2448 of SEQ ID NO: 3964
ucuucucauguaugaguaa

SEQ ID NO: 308653 - RNA, 19 nt, Artificial Sequence
  Description of Artificial Sequence: Synthetic oligonucleotide
  Antisense strand to SEQ ID NO: 308652
uuacucauacaugagaaga

SEQ ID NO: 308654 - RNA, 19 nt, Artificial Sequence
  Description of Artificial Sequence: Synthetic oligonucleotide
  Sense strand starting at position 2559 of SEQ ID NO: 3964
caggauauuucuuguaagg

SEQ ID NO: 308655 - RNA, 19 nt, Artificial Sequence
  Description of Artificial Sequence: Synthetic oligonucleotide
  Antisense strand to SEQ ID NO: 308654
ccuuacaagaaauauccug

SEQ ID NO: 308656 - RNA, 19 nt, Artificial Sequence
  Description of Artificial Sequence: Synthetic oligonucleotide
  Sense strand starting at position 2561 of SEQ ID NO: 3964
ggauauuucuuguaaggau

SEQ ID NO: 308657 - RNA, 19 nt, Artificial Sequence
  Description of Artificial Sequence: Synthetic oligonucleotide
  Antisense strand to SEQ ID NO: 308656
auccuuacaagaaauaucc

SEQ ID NO: 308658 - RNA, 19 nt, Artificial Sequence
  Description of Artificial Sequence: Synthetic oligonucleotide
  Sense strand starting at position 2599 of SEQ ID NO: 3964
aguggcugucaauauagaa

SEQ ID NO: 308659 - RNA, 19 nt, Artificial Sequence
  Description of Artificial Sequence: Synthetic oligonucleotide
  Antisense strand to SEQ ID NO: 308658
uucuauauugacagccacu

SEQ ID NO: 308660 - RNA, 19 nt, Artificial Sequence
  Description of Artificial Sequence: Synthetic oligonucleotide
  Sense strand starting at position 2673 of SEQ ID NO: 3964
uguugaggauucuccauau

SEQ ID NO: 308661 - RNA, 19 nt, Artificial Sequence
  Description of Artificial Sequence: Synthetic oligonucleotide
  Antisense strand to SEQ ID NO: 308660
auauggagaauccucaaca

SEQ ID NO: 308662 - RNA, 19 nt, Artificial Sequence
  Description of Artificial Sequence: Synthetic oligonucleotide
  Sense strand starting at position 2970 of SEQ ID NO: 3964
cagaaugggcugcacaauu

SEQ ID NO: 308663 - RNA, 19 nt, Artificial Sequence
  Description of Artificial Sequence: Synthetic oligonucleotide
  Antisense strand to SEQ ID NO: 308662
aauugugcagcccauucug

SEQ ID NO: 308664 - RNA, 19 nt, Artificial Sequence
  Description of Artificial Sequence: Synthetic oligonucleotide
  Sense strand starting at position 3033 of SEQ ID NO: 3964
ugccuuucuaaaggagaga

SEQ ID NO: 308665 - RNA, 19 nt, Artificial Sequence
  Description of Artificial Sequence: Synthetic oligonucleotide
  Antisense strand to SEQ ID NO: 308664
ucucuccuuuagaaaggca

SEQ ID NO: 308666 - RNA, 19 nt, Artificial Sequence
  Description of Artificial Sequence: Synthetic oligonucleotide
  Sense strand starting at position 3078 of SEQ ID NO: 3964
cccaaugaggcuuauccua

SEQ ID NO: 308667 - RNA, 19 nt, Artificial Sequence
  Description of Artificial Sequence: Synthetic oligonucleotide
  Antisense strand to SEQ ID NO: 308666
uaggauaagccucauuggg

SEQ ID NO: 308668 - RNA, 19 nt, Artificial Sequence
  Description of Artificial Sequence: Synthetic oligonucleotide
  Sense strand starting at position 3086 of SEQ ID NO: 3964
ggcuuauccuacuccagaa

SEQ ID NO: 308669 - RNA, 19 nt, Artificial Sequence
  Description of Artificial Sequence: Synthetic oligonucleotide
  Antisense strand to SEQ ID NO: 308668
uucuggaguaggauaagcc

SEQ ID NO: 308670 - RNA, 19 nt, Artificial Sequence
  Description of Artificial Sequence: Synthetic oligonucleotide
  Sense strand starting at position 3117 of SEQ ID NO: 3964
augugcugugcucacaaga

SEQ ID NO: 308671 - RNA, 19 nt, Artificial Sequence
  Description of Artificial Sequence: Synthetic oligonucleotide
  Antisense strand to SEQ ID NO: 308670
ucuugugagcacagcacau

SEQ ID NO: 308672 - RNA, 19 nt, Artificial Sequence
  Description of Artificial Sequence: Synthetic oligonucleotide
  Sense strand starting at position 3421 of SEQ ID NO: 3964
uugggaacuguccaguaga

SEQ ID NO: 308673 - RNA, 19 nt, Artificial Sequence
  Description of Artificial Sequence: Synthetic oligonucleotide
  Antisense strand to SEQ ID NO: 308672
ucuacuggacaguucccaa

SEQ ID NO: 308674 - RNA, 19 nt, Artificial Sequence
  Description of Artificial Sequence: Synthetic oligonucleotide
  Sense strand starting at position 3429 of SEQ ID NO: 3964
uguccaguagaggaugauu

SEQ ID NO: 308675 - RNA, 19 nt, Artificial Sequence
  Description of Artificial Sequence: Synthetic oligonucleotide
  Antisense strand to SEQ ID NO: 308674
aaucauccucuacuggaca

SEQ ID NO: 308676 - RNA, 19 nt, Artificial Sequence
  Description of Artificial Sequence: Synthetic oligonucleotide
  Sense strand starting at position 3441 of SEQ ID NO: 3964
gaugauuccugggaauuug

SEQ ID NO: 308677 - RNA, 19 nt, Artificial Sequence
  Description of Artificial Sequence: Synthetic oligonucleotide
  Antisense strand to SEQ ID NO: 308676
caaauucccaggaaucauc

SEQ ID NO: 308678 - RNA, 19 nt, Artificial Sequence
  Description of Artificial Sequence: Synthetic oligonucleotide
  Sense strand starting at position 3451 of SEQ ID NO: 3964
gggaauuuguaaggacaua

SEQ ID NO: 308679 - RNA, 19 nt, Artificial Sequence
  Description of Artificial Sequence: Synthetic oligonucleotide
  Antisense strand to SEQ ID NO: 308678
uauguccuuacaaauuccc

SEQ ID NO: 308680 - RNA, 19 nt, Artificial Sequence
  Description of Artificial Sequence: Synthetic oligonucleotide
  Sense strand starting at position 3675 of SEQ ID NO: 3964
gucaucugauuucuuguca

SEQ ID NO: 308681 - RNA, 19 nt, Artificial Sequence
  Description of Artificial Sequence: Synthetic oligonucleotide
  Antisense strand to SEQ ID NO: 308680
ugacaagaaaucagaugac

SEQ ID NO: 308682 - RNA, 19 nt, Artificial Sequence
  Description of Artificial Sequence: Synthetic oligonucleotide
  Sense strand starting at position 3716 of SEQ ID NO: 3964
ugaggaggcccauguaucu

SEQ ID NO: 308683 - RNA, 19 nt, Artificial Sequence
  Description of Artificial Sequence: Synthetic oligonucleotide
  Antisense strand to SEQ ID NO: 308682
agauacaugggccuccuca

SEQ ID NO: 308684 - RNA, 19 nt, Artificial Sequence
  Description of Artificial Sequence: Synthetic oligonucleotide
  Sense strand starting at position 3743 of SEQ ID NO: 3964
ggugguacuccagagaccu

SEQ ID NO: 308685 - RNA, 19 nt, Artificial Sequence
  Description of Artificial Sequence: Synthetic oligonucleotide
  Antisense strand to SEQ ID NO: 308684
aggucucuggaguaccacc

SEQ ID NO: 308686 - RNA, 19 nt, Artificial Sequence
  Description of Artificial Sequence: Synthetic oligonucleotide
  Sense strand starting at position 87 of SEQ ID NO: 3965
aaggauggcucccuuaaug

SEQ ID NO: 308687 - RNA, 19 nt, Artificial Sequence
  Description of Artificial Sequence: Synthetic oligonucleotide
  Antisense strand to SEQ ID NO: 308686
cauuaagggagccauccuu

SEQ ID NO: 308688 - RNA, 19 nt, Artificial Sequence
  Description of Artificial Sequence: Synthetic oligonucleotide
  Sense strand starting at position 495 of SEQ ID NO: 3965
cccaacuccuggucagaaa

SEQ ID NO: 308689 - RNA, 19 nt, Artificial Sequence
  Description of Artificial Sequence: Synthetic oligonucleotide
  Antisense strand to SEQ ID NO: 308688
uuucugaccaggaguuggg

SEQ ID NO: 308690 - RNA, 19 nt, Artificial Sequence
  Description of Artificial Sequence: Synthetic oligonucleotide
  Sense strand starting at position 665 of SEQ ID NO: 3965
guggucaccucuguaucuu

SEQ ID NO: 308691 - RNA, 19 nt, Artificial Sequence
  Description of Artificial Sequence: Synthetic oligonucleotide
  Antisense strand to SEQ ID NO: 308690
aagauacagaggugaccac

SEQ ID NO: 308692 - RNA, 19 nt, Artificial Sequence
  Description of Artificial Sequence: Synthetic oligonucleotide
  Sense strand starting at position 666 of SEQ ID NO: 3965
uggucaccucuguaucuuu

SEQ ID NO: 308693 - RNA, 19 nt, Artificial Sequence
  Description of Artificial Sequence: Synthetic oligonucleotide
  Antisense strand to SEQ ID NO: 308692
aaagauacagaggugacca

SEQ ID NO: 308694 - RNA, 19 nt, Artificial Sequence
  Description of Artificial Sequence: Synthetic oligonucleotide
  Sense strand starting at position 671 of SEQ ID NO: 3965
accucuguaucuuucgcaa

SEQ ID NO: 308695 - RNA, 19 nt, Artificial Sequence
  Description of Artificial Sequence: Synthetic oligonucleotide
  Antisense strand to SEQ ID NO: 308694
uugcgaaagauacagaggu

SEQ ID NO: 308696 - RNA, 19 nt, Artificial Sequence
  Description of Artificial Sequence: Synthetic oligonucleotide
  Sense strand starting at position 674 of SEQ ID NO: 3965
ucuguaucuuucgcaagau

SEQ ID NO: 308697 - RNA, 19 nt, Artificial Sequence
  Description of Artificial Sequence: Synthetic oligonucleotide
  Antisense strand to SEQ ID NO: 308696
aucuugcgaaagauacaga

SEQ ID NO: 308698 - RNA, 19 nt, Artificial Sequence
  Description of Artificial Sequence: Synthetic oligonucleotide
  Sense strand starting at position 678 of SEQ ID NO: 3965
uaucuuucgcaagauggga

SEQ ID NO: 308699 - RNA, 19 nt, Artificial Sequence
  Description of Artificial Sequence: Synthetic oligonucleotide
  Antisense strand to SEQ ID NO: 308698
ucccaucuugcgaaagaua

SEQ ID NO: 308700 - RNA, 19 nt, Artificial Sequence
  Description of Artificial Sequence: Synthetic oligonucleotide
  Sense strand starting at position 776 of SEQ ID NO: 3965
caggauggaucaguucuga

SEQ ID NO: 308701 - RNA, 19 nt, Artificial Sequence
  Description of Artificial Sequence: Synthetic oligonucleotide
  Antisense strand to SEQ ID NO: 308700
ucagaacugauccauccug

SEQ ID NO: 308702 - RNA, 19 nt, Artificial Sequence
  Description of Artificial Sequence: Synthetic oligonucleotide
  Sense strand starting at position 840 of SEQ ID NO: 3965
ugaagauggugccuuuaca

SEQ ID NO: 308703 - RNA, 19 nt, Artificial Sequence
  Description of Artificial Sequence: Synthetic oligonucleotide
  Antisense strand to SEQ ID NO: 308702
uguaaaggcaccaucuuca

SEQ ID NO: 308704 - RNA, 19 nt, Artificial Sequence
  Description of Artificial Sequence: Synthetic oligonucleotide
  Sense strand starting at position 858 of SEQ ID NO: 3965
aaacacuguccgugaguca

SEQ ID NO: 308705 - RNA, 19 nt, Artificial Sequence
  Description of Artificial Sequence: Synthetic oligonucleotide
  Antisense strand to SEQ ID NO: 308704
ugacucacggacaguguuu

SEQ ID NO: 308706 - RNA, 19 nt, Artificial Sequence
  Description of Artificial Sequence: Synthetic oligonucleotide
  Sense strand starting at position 886 of SEQ ID NO: 3965
uuguccauccucugacaga

SEQ ID NO: 308707 - RNA, 19 nt, Artificial Sequence
  Description of Artificial Sequence: Synthetic oligonucleotide
  Antisense strand to SEQ ID NO: 308706
ucugucagaggauggacaa

SEQ ID NO: 308708 - RNA, 19 nt, Artificial Sequence
  Description of Artificial Sequence: Synthetic oligonucleotide
  Sense strand starting at position 966 of SEQ ID NO: 3965
cucaacaguuuaucuguua

SEQ ID NO: 308709 - RNA, 19 nt, Artificial Sequence
  Description of Artificial Sequence: Synthetic oligonucleotide
  Antisense strand to SEQ ID NO: 308708
uaacagauaaacuguugag

SEQ ID NO: 308710 - RNA, 19 nt, Artificial Sequence
  Description of Artificial Sequence: Synthetic oligonucleotide
  Sense strand starting at position 967 of SEQ ID NO: 3965
ucaacaguuuaucuguuau

SEQ ID NO: 308711 - RNA, 19 nt, Artificial Sequence
  Description of Artificial Sequence: Synthetic oligonucleotide
  Antisense strand to SEQ ID NO: 308710
auaacagauaaacuguuga

SEQ ID NO: 308712 - RNA, 19 nt, Artificial Sequence
  Description of Artificial Sequence: Synthetic oligonucleotide
  Sense strand starting at position 1073 of SEQ ID NO: 3965
gaacauugauuggaugaag

SEQ ID NO: 308713 - RNA, 19 nt, Artificial Sequence
  Description of Artificial Sequence: Synthetic oligonucleotide
  Antisense strand to SEQ ID NO: 308712
cuucauccaaucaauguuc

SEQ ID NO: 308714 - RNA, 19 nt, Artificial Sequence
  Description of Artificial Sequence: Synthetic oligonucleotide
  Sense strand starting at position 2025 of SEQ ID NO: 3965
auuuguuuccuucgccuua

SEQ ID NO: 308715 - RNA, 19 nt, Artificial Sequence
  Description of Artificial Sequence: Synthetic oligonucleotide
  Antisense strand to SEQ ID NO: 308714
uaaggcgaaggaaacaaau

SEQ ID NO: 308716 - RNA, 19 nt, Artificial Sequence
  Description of Artificial Sequence: Synthetic oligonucleotide
  Sense strand starting at position 2037 of SEQ ID NO: 3965
cgccuuaauuaccuuguca

SEQ ID NO: 308717 - RNA, 19 nt, Artificial Sequence
  Description of Artificial Sequence: Synthetic oligonucleotide
  Antisense strand to SEQ ID NO: 308716
ugacaagguaauuaaggcg

SEQ ID NO: 308718 - RNA, 19 nt, Artificial Sequence
  Description of Artificial Sequence: Synthetic oligonucleotide
  Sense strand starting at position 2045 of SEQ ID NO: 3965
uuaccuugucauugagcca

SEQ ID NO: 308719 - RNA, 19 nt, Artificial Sequence
  Description of Artificial Sequence: Synthetic oligonucleotide
  Antisense strand to SEQ ID NO: 308718
uggcucaaugacaagguaa

SEQ ID NO: 308720 - RNA, 19 nt, Artificial Sequence
  Description of Artificial Sequence: Synthetic oligonucleotide
  Sense strand starting at position 2065 of SEQ ID NO: 3965
cuagcaaaucagcauguaa

SEQ ID NO: 308721 - RNA, 19 nt, Artificial Sequence
  Description of Artificial Sequence: Synthetic oligonucleotide
  Antisense strand to SEQ ID NO: 308720
uuacaugcugauuugcuag

SEQ ID NO: 308722 - RNA, 19 nt, Artificial Sequence
  Description of Artificial Sequence: Synthetic oligonucleotide
  Sense strand starting at position 2067 of SEQ ID NO: 3965
agcaaaucagcauguaauu

SEQ ID NO: 308723 - RNA, 19 nt, Artificial Sequence
  Description of Artificial Sequence: Synthetic oligonucleotide
  Antisense strand to SEQ ID NO: 308722
aauuacaugcugauuugcu

SEQ ID NO: 308724 - RNA, 19 nt, Artificial Sequence
  Description of Artificial Sequence: Synthetic oligonucleotide
  Sense strand starting at position 2073 of SEQ ID NO: 3965
ucagcauguaauuggaaga

SEQ ID NO: 308725 - RNA, 19 nt, Artificial Sequence
  Description of Artificial Sequence: Synthetic oligonucleotide
  Antisense strand to SEQ ID NO: 308724
ucuuccaauuacaugcuga

SEQ ID NO: 308726 - RNA, 19 nt, Artificial Sequence
  Description of Artificial Sequence: Synthetic oligonucleotide
  Sense strand starting at position 2290 of SEQ ID NO: 3965
acugccuucuacucuguua

SEQ ID NO: 308727 - RNA, 19 nt, Artificial Sequence
  Description of Artificial Sequence: Synthetic oligonucleotide
  Antisense strand to SEQ ID NO: 308726
uaacagaguagaaggcagu

SEQ ID NO: 308728 - RNA, 19 nt, Artificial Sequence
  Description of Artificial Sequence: Synthetic oligonucleotide
  Sense strand starting at position 2366 of SEQ ID NO: 3965
accacauguucucugcuga

SEQ ID NO: 308729 - RNA, 19 nt, Artificial Sequence
  Description of Artificial Sequence: Synthetic oligonucleotide
  Antisense strand to SEQ ID NO: 308728
ucagcagagaacauguggu

SEQ ID NO: 308730 - RNA, 19 nt, Artificial Sequence
  Description of Artificial Sequence: Synthetic oligonucleotide
  Sense strand starting at position 2367 of SEQ ID NO: 3965
ccacauguucucugcugaa

SEQ ID NO: 308731 - RNA, 19 nt, Artificial Sequence
  Description of Artificial Sequence: Synthetic oligonucleotide
  Antisense strand to SEQ ID NO: 308730
uucagcagagaacaugugg

SEQ ID NO: 308732 - RNA, 19 nt, Artificial Sequence
  Description of Artificial Sequence: Synthetic oligonucleotide
  Sense strand starting at position 2385 of SEQ ID NO: 3965
augugacgcuauuugcuaa

SEQ ID NO: 308733 - RNA, 19 nt, Artificial Sequence
  Description of Artificial Sequence: Synthetic oligonucleotide
  Antisense strand to SEQ ID NO: 308732
uuagcaaauagcgucacau

SEQ ID NO: 308734 - RNA, 19 nt, Artificial Sequence
  Description of Artificial Sequence: Synthetic oligonucleotide
  Sense strand starting at position 2471 of SEQ ID NO: 3965
gccagcuuucucuaaacag

SEQ ID NO: 308735 - RNA, 19 nt, Artificial Sequence
  Description of Artificial Sequence: Synthetic oligonucleotide
  Antisense strand to SEQ ID NO: 308734
cuguuuagagaaagcuggc

SEQ ID NO: 308736 - RNA, 19 nt, Artificial Sequence
  Description of Artificial Sequence: Synthetic oligonucleotide
  Sense strand starting at position 2643 of SEQ ID NO: 3965
ggcuuuauugaggauucuc

SEQ ID NO: 308737 - RNA, 19 nt, Artificial Sequence
  Description of Artificial Sequence: Synthetic oligonucleotide
  Antisense strand to SEQ ID NO: 308736
gagaauccucaauaaagcc

SEQ ID NO: 308738 - RNA, 19 nt, Artificial Sequence
  Description of Artificial Sequence: Synthetic oligonucleotide
  Sense strand starting at position 2899 of SEQ ID NO: 3965
gaagauuauggccaggcuu

SEQ ID NO: 308739 - RNA, 19 nt, Artificial Sequence
  Description of Artificial Sequence: Synthetic oligonucleotide
  Antisense strand to SEQ ID NO: 308738
aagccuggccauaaucuuc

SEQ ID NO: 308740 - RNA, 19 nt, Artificial Sequence
  Description of Artificial Sequence: Synthetic oligonucleotide
  Sense strand starting at position 3020 of SEQ ID NO: 3965
gaauuaaaugugugccuuu

SEQ ID NO: 308741 - RNA, 19 nt, Artificial Sequence
  Description of Artificial Sequence: Synthetic oligonucleotide
  Antisense strand to SEQ ID NO: 308740
aaaggcacacauuuaauuc

SEQ ID NO: 308742 - RNA, 19 nt, Artificial Sequence
  Description of Artificial Sequence: Synthetic oligonucleotide
  Sense strand starting at position 3023 of SEQ ID NO: 3965
uuaaaugugugccuuucua

SEQ ID NO: 308743 - RNA, 19 nt, Artificial Sequence
  Description of Artificial Sequence: Synthetic oligonucleotide
  Antisense strand to SEQ ID NO: 308742
uagaaaggcacacauuuaa

SEQ ID NO: 308744 - RNA, 19 nt, Artificial Sequence
  Description of Artificial Sequence: Synthetic oligonucleotide
  Sense strand starting at position 3251 of SEQ ID NO: 3965
ggcugaggcuucccuuaug

SEQ ID NO: 308745 - RNA, 19 nt, Artificial Sequence
  Description of Artificial Sequence: Synthetic oligonucleotide
  Antisense strand to SEQ ID NO: 308744
cauaagggaagccucagcc

SEQ ID NO: 308746 - RNA, 19 nt, Artificial Sequence
  Description of Artificial Sequence: Synthetic oligonucleotide
  Sense strand starting at position 3269 of SEQ ID NO: 3965
ggaggaaguuacucccauu

SEQ ID NO: 308747 - RNA, 19 nt, Artificial Sequence
  Description of Artificial Sequence: Synthetic oligonucleotide
  Antisense strand to SEQ ID NO: 308746
aaugggaguaacuuccucc

SEQ ID NO: 308748 - RNA, 19 nt, Artificial Sequence
  Description of Artificial Sequence: Synthetic oligonucleotide
  Sense strand starting at position 3342 of SEQ ID NO: 3965
agugaauggaugcguccau

SEQ ID NO: 308749 - RNA, 19 nt, Artificial Sequence
  Description of Artificial Sequence: Synthetic oligonucleotide
  Antisense strand to SEQ ID NO: 308748
auggacgcauccauucacu

SEQ ID NO: 308750 - RNA, 19 nt, Artificial Sequence
  Description of Artificial Sequence: Synthetic oligonucleotide
  Sense strand starting at position 3346 of SEQ ID NO: 3965
aauggaugcguccaucaga

SEQ ID NO: 308751 - RNA, 19 nt, Artificial Sequence
  Description of Artificial Sequence: Synthetic oligonucleotide
  Antisense strand to SEQ ID NO: 308750
ucugauggacgcauccauu

SEQ ID NO: 308752 - RNA, 19 nt, Artificial Sequence
  Description of Artificial Sequence: Synthetic oligonucleotide
  Sense strand starting at position 3417 of SEQ ID NO: 3965
cuguaagggcuugagaacu

SEQ ID NO: 308753 - RNA, 19 nt, Artificial Sequence
  Description of Artificial Sequence: Synthetic oligonucleotide
  Antisense strand to SEQ ID NO: 308752
aguucucaagcccuuacag

SEQ ID NO: 308754 - RNA, 19 nt, Artificial Sequence
  Description of Artificial Sequence: Synthetic oligonucleotide
  Sense strand starting at position 3642 of SEQ ID NO: 3965
guucuauuuccauguagug

SEQ ID NO: 308755 - RNA, 19 nt, Artificial Sequence
  Description of Artificial Sequence: Synthetic oligonucleotide
  Antisense strand to SEQ ID NO: 308754
cacuacauggaaauagaac

SEQ ID NO: 308756 - RNA, 19 nt, Artificial Sequence
  Description of Artificial Sequence: Synthetic oligonucleotide
  Sense strand starting at position 3687 of SEQ ID NO: 3965
uuauuuagauagugauguc

SEQ ID NO: 308757 - RNA, 19 nt, Artificial Sequence
  Description of Artificial Sequence: Synthetic oligonucleotide
  Antisense strand to SEQ ID NO: 308756
gacaucacuaucuaaauaa

SEQ ID NO: 308758 - RNA, 19 nt, Artificial Sequence
  Description of Artificial Sequence: Synthetic oligonucleotide
  Sense strand starting at position 3707 of SEQ ID NO: 3965
ucugauuucugguuacgug

SEQ ID NO: 308759 - RNA, 19 nt, Artificial Sequence
  Description of Artificial Sequence: Synthetic oligonucleotide
  Antisense strand to SEQ ID NO: 308758
cacguaaccagaaaucaga

SEQ ID NO: 308760 - RNA, 19 nt, Artificial Sequence
  Description of Artificial Sequence: Synthetic oligonucleotide
  Sense strand starting at position 3708 of SEQ ID NO: 3965
cugauuucugguuacgugu

SEQ ID NO: 308761 - RNA, 19 nt, Artificial Sequence
  Description of Artificial Sequence: Synthetic oligonucleotide
  Antisense strand to SEQ ID NO: 308760
acacguaaccagaaaucag

SEQ ID NO: 308762 - RNA, 19 nt, Artificial Sequence
  Description of Artificial Sequence: Synthetic oligonucleotide
  Sense strand starting at position 3835 of SEQ ID NO: 3965
auuccuggugccugggaaa

SEQ ID NO: 308763 - RNA, 19 nt, Artificial Sequence
  Description of Artificial Sequence: Synthetic oligonucleotide
  Antisense strand to SEQ ID NO: 308762
uuucccaggcaccaggaau

SEQ ID NO: 308764 - RNA, 19 nt, Artificial Sequence
  Description of Artificial Sequence: Synthetic oligonucleotide
  Sense strand starting at position 3931 of SEQ ID NO: 3965
gccaucagcauauguggua

SEQ ID NO: 308765 - RNA, 19 nt, Artificial Sequence
  Description of Artificial Sequence: Synthetic oligonucleotide
  Antisense strand to SEQ ID NO: 308764
uaccacauaugcugauggc

SEQ ID NO: 308766 - RNA, 19 nt, Artificial Sequence
  Description of Artificial Sequence: Synthetic oligonucleotide
  Sense strand starting at position 162 of SEQ ID NO: 3966
accauauuguugucacuaa

SEQ ID NO: 308767 - RNA, 19 nt, Artificial Sequence
  Description of Artificial Sequence: Synthetic oligonucleotide
  Antisense strand to SEQ ID NO: 308766
uuagugacaacaauauggu

SEQ ID NO: 308768 - RNA, 19 nt, Artificial Sequence
  Description of Artificial Sequence: Synthetic oligonucleotide
  Sense strand starting at position 169 of SEQ ID NO: 3966
uguugucacuaacuacaua

SEQ ID NO: 308769 - RNA, 19 nt, Artificial Sequence
  Description of Artificial Sequence: Synthetic oligonucleotide
  Antisense strand to SEQ ID NO: 308768
uauguaguuagugacaaca

SEQ ID NO: 308770 - RNA, 19 nt, Artificial Sequence
  Description of Artificial Sequence: Synthetic oligonucleotide
  Sense strand starting at position 227 of SEQ ID NO: 3966
gauauacuguaagugucaa

SEQ ID NO: 308771 - RNA, 19 nt, Artificial Sequence
  Description of Artificial Sequence: Synthetic oligonucleotide
  Antisense strand to SEQ ID NO: 308770
uugacacuuacaguauauc

SEQ ID NO: 308772 - RNA, 19 nt, Artificial Sequence
  Description of Artificial Sequence: Synthetic oligonucleotide
  Sense strand starting at position 240 of SEQ ID NO: 3966
ugucaaauauaugcuagau

SEQ ID NO: 308773 - RNA, 19 nt, Artificial Sequence
  Description of Artificial Sequence: Synthetic oligonucleotide
  Antisense strand to SEQ ID NO: 308772
aucuagcauauauuugaca

SEQ ID NO: 308774 - RNA, 19 nt, Artificial Sequence
  Description of Artificial Sequence: Synthetic oligonucleotide
  Sense strand starting at position 310 of SEQ ID NO: 3966
aggauaauauuugggauac

SEQ ID NO: 308775 - RNA, 19 nt, Artificial Sequence
  Description of Artificial Sequence: Synthetic oligonucleotide
  Antisense strand to SEQ ID NO: 308774
guaucccaaauauuauccu

SEQ ID NO: 308776 - RNA, 19 nt, Artificial Sequence
  Description of Artificial Sequence: Synthetic oligonucleotide
  Sense strand starting at position 320 of SEQ ID NO: 3966
uugggauacaucugguuaa

SEQ ID NO: 308777 - RNA, 19 nt, Artificial Sequence
  Description of Artificial Sequence: Synthetic oligonucleotide
  Antisense strand to SEQ ID NO: 308776
uuaaccagauguaucccaa

SEQ ID NO: 308778 - RNA, 19 nt, Artificial Sequence
  Description of Artificial Sequence: Synthetic oligonucleotide
  Sense strand starting at position 323 of SEQ ID NO: 3966
ggauacaucugguuaaaua

SEQ ID NO: 308779 - RNA, 19 nt, Artificial Sequence
  Description of Artificial Sequence: Synthetic oligonucleotide
  Antisense strand to SEQ ID NO: 308778
uauuuaaccagauguaucc

SEQ ID NO: 308780 - RNA, 19 nt, Artificial Sequence
  Description of Artificial Sequence: Synthetic oligonucleotide
  Sense strand starting at position 386 of SEQ ID NO: 3966
guuuaacaugcccacuaga

SEQ ID NO: 308781 - RNA, 19 nt, Artificial Sequence
  Description of Artificial Sequence: Synthetic oligonucleotide
  Antisense strand to SEQ ID NO: 308780
ucuagugggcauguuaaac

SEQ ID NO: 308782 - RNA, 19 nt, Artificial Sequence
  Description of Artificial Sequence: Synthetic oligonucleotide
  Sense strand starting at position 415 of SEQ ID NO: 3966
uuauguaugugguuuacau

SEQ ID NO: 308783 - RNA, 19 nt, Artificial Sequence
  Description of Artificial Sequence: Synthetic oligonucleotide
  Antisense strand to SEQ ID NO: 308782
auguaaaccacauacauaa

SEQ ID NO: 308784 - RNA, 19 nt, Artificial Sequence
  Description of Artificial Sequence: Synthetic oligonucleotide
  Sense strand starting at position 417 of SEQ ID NO: 3966
auguaugugguuuacauga

SEQ ID NO: 308785 - RNA, 19 nt, Artificial Sequence
  Description of Artificial Sequence: Synthetic oligonucleotide
  Antisense strand to SEQ ID NO: 308784
ucauguaaaccacauacau

SEQ ID NO: 308786 - RNA, 19 nt, Artificial Sequence
  Description of Artificial Sequence: Synthetic oligonucleotide
  Sense strand starting at position 433 of SEQ ID NO: 3966
ugauauuucuauuggacac

SEQ ID NO: 308787 - RNA, 19 nt, Artificial Sequence
  Description of Artificial Sequence: Synthetic oligonucleotide
  Antisense strand to SEQ ID NO: 308786
guguccaauagaaauauca

SEQ ID NO: 308788 - RNA, 19 nt, Artificial Sequence
  Description of Artificial Sequence: Synthetic oligonucleotide
  Sense strand starting at position 445 of SEQ ID NO: 3966
uggacacuucgguauuaga

SEQ ID NO: 308789 - RNA, 19 nt, Artificial Sequence
  Description of Artificial Sequence: Synthetic oligonucleotide
  Antisense strand to SEQ ID NO: 308788
ucuaauaccgaagugucca

SEQ ID NO: 308790 - RNA, 19 nt, Artificial Sequence
  Description of Artificial Sequence: Synthetic oligonucleotide
  Sense strand starting at position 455 of SEQ ID NO: 3966
gguauuagaccaugaaguu

SEQ ID NO: 308791 - RNA, 19 nt, Artificial Sequence
  Description of Artificial Sequence: Synthetic oligonucleotide
  Antisense strand to SEQ ID NO: 308790
aacuucauggucuaauacc

SEQ ID NO: 308792 - RNA, 19 nt, Artificial Sequence
  Description of Artificial Sequence: Synthetic oligonucleotide
  Sense strand starting at position 464 of SEQ ID NO: 3966
ccaugaaguuaaccuagua

SEQ ID NO: 308793 - RNA, 19 nt, Artificial Sequence
  Description of Artificial Sequence: Synthetic oligonucleotide
  Antisense strand to SEQ ID NO: 308792
uacuagguuaacuucaugg

SEQ ID NO: 308794 - RNA, 19 nt, Artificial Sequence
  Description of Artificial Sequence: Synthetic oligonucleotide
  Sense strand starting at position 550 of SEQ ID NO: 3966
gaaacugaacucuguguuu

SEQ ID NO: 308795 - RNA, 19 nt, Artificial Sequence
  Description of Artificial Sequence: Synthetic oligonucleotide
  Antisense strand to SEQ ID NO: 308794
aaacacagaguucaguuuc

SEQ ID NO: 308796 - RNA, 19 nt, Artificial Sequence
  Description of Artificial Sequence: Synthetic oligonucleotide
  Sense strand starting at position 623 of SEQ ID NO: 3966
ugagucaacuucuuugaaa

SEQ ID NO: 308797 - RNA, 19 nt, Artificial Sequence
  Description of Artificial Sequence: Synthetic oligonucleotide
  Antisense strand to SEQ ID NO: 308796
uuucaaagaaguugacuca

SEQ ID NO: 308798 - RNA, 19 nt, Artificial Sequence
  Description of Artificial Sequence: Synthetic oligonucleotide
  Sense strand starting at position 775 of SEQ ID NO: 3966
gcaagauuggauggaucag

SEQ ID NO: 308799 - RNA, 19 nt, Artificial Sequence
  Description of Artificial Sequence: Synthetic oligonucleotide
  Antisense strand to SEQ ID NO: 308798
cugauccauccaaucuugc

SEQ ID NO: 308800 - RNA, 19 nt, Artificial Sequence
  Description of Artificial Sequence: Synthetic oligonucleotide
  Sense strand starting at position 894 of SEQ ID NO: 3966
uugcccauccuuugacaga

SEQ ID NO: 308801 - RNA, 19 nt, Artificial Sequence
  Description of Artificial Sequence: Synthetic oligonucleotide
  Antisense strand to SEQ ID NO: 308800
ucugucaaaggaugggcaa

SEQ ID NO: 308802 - RNA, 19 nt, Artificial Sequence
  Description of Artificial Sequence: Synthetic oligonucleotide
  Sense strand starting at position 985 of SEQ ID NO: 3966
aguuuaucucacugaagac

SEQ ID NO: 308803 - RNA, 19 nt, Artificial Sequence
  Description of Artificial Sequence: Synthetic oligonucleotide
  Antisense strand to SEQ ID NO: 308802
gucuucagugagauaaacu

SEQ ID NO: 308804 - RNA, 19 nt, Artificial Sequence
  Description of Artificial Sequence: Synthetic oligonucleotide
  Sense strand starting at position 1027 of SEQ ID NO: 3966
augaaaucuuuggaaagau

SEQ ID NO: 308805 - RNA, 19 nt, Artificial Sequence
  Description of Artificial Sequence: Synthetic oligonucleotide
  Antisense strand to SEQ ID NO: 308804
aucuuuccaaagauuucau

SEQ ID NO: 308806 - RNA, 19 nt, Artificial Sequence
  Description of Artificial Sequence: Synthetic oligonucleotide
  Sense strand starting at position 1102 of SEQ ID NO: 3966
gaacauugauuggauaaag

SEQ ID NO: 308807 - RNA, 19 nt, Artificial Sequence
  Description of Artificial Sequence: Synthetic oligonucleotide
  Antisense strand to SEQ ID NO: 308806
cuuuauccaaucaauguuc

SEQ ID NO: 308808 - RNA, 19 nt, Artificial Sequence
  Description of Artificial Sequence: Synthetic oligonucleotide
  Sense strand starting at position 2074 of SEQ ID NO: 3966
uuaccuugucacugagaca

SEQ ID NO: 308809 - RNA, 19 nt, Artificial Sequence
  Description of Artificial Sequence: Synthetic oligonucleotide
  Antisense strand to SEQ ID NO: 308808
ugucucagugacaagguaa

SEQ ID NO: 308810 - RNA, 19 nt, Artificial Sequence
  Description of Artificial Sequence: Synthetic oligonucleotide
  Sense strand starting at position 2148 of SEQ ID NO: 3966
cccguuaaucuauaauugu

SEQ ID NO: 308811 - RNA, 19 nt, Artificial Sequence
  Description of Artificial Sequence: Synthetic oligonucleotide
  Antisense strand to SEQ ID NO: 308810
acaauuauagauuaacggg

SEQ ID NO: 308812 - RNA, 19 nt, Artificial Sequence
  Description of Artificial Sequence: Synthetic oligonucleotide
  Sense strand starting at position 2371 of SEQ ID NO: 3966
aggagucaccauugcccua

SEQ ID NO: 308813 - RNA, 19 nt, Artificial Sequence
  Description of Artificial Sequence: Synthetic oligonucleotide
  Antisense strand to SEQ ID NO: 308812
uagggcaauggugacuccu

SEQ ID NO: 308814 - RNA, 19 nt, Artificial Sequence
  Description of Artificial Sequence: Synthetic oligonucleotide
  Sense strand starting at position 2398 of SEQ ID NO: 3966
ccauauggucucugcugga

SEQ ID NO: 308815 - RNA, 19 nt, Artificial Sequence
  Description of Artificial Sequence: Synthetic oligonucleotide
  Antisense strand to SEQ ID NO: 308814
uccagcagagaccauaugg

SEQ ID NO: 308816 - RNA, 19 nt, Artificial Sequence
  Description of Artificial Sequence: Synthetic oligonucleotide
  Sense strand starting at position 2502 of SEQ ID NO: 3966
gccagcuuucuuuaaacag

SEQ ID NO: 308817 - RNA, 19 nt, Artificial Sequence
  Description of Artificial Sequence: Synthetic oligonucleotide
  Antisense strand to SEQ ID NO: 308816
cuguuuaaagaaagcuggc

SEQ ID NO: 308818 - RNA, 19 nt, Artificial Sequence
  Description of Artificial Sequence: Synthetic oligonucleotide
  Sense strand starting at position 2564 of SEQ ID NO: 3966
caggauauuucuuguaaag

SEQ ID NO: 308819 - RNA, 19 nt, Artificial Sequence
  Description of Artificial Sequence: Synthetic oligonucleotide
  Antisense strand to SEQ ID NO: 308818
cuuuacaagaaauauccug

SEQ ID NO: 308820 - RNA, 19 nt, Artificial Sequence
  Description of Artificial Sequence: Synthetic oligonucleotide
  Sense strand starting at position 2636 of SEQ ID NO: 3966
ggcugagcucaagauguga

SEQ ID NO: 308821 - RNA, 19 nt, Artificial Sequence
  Description of Artificial Sequence: Synthetic oligonucleotide
  Antisense strand to SEQ ID NO: 308820
ucacaucuugagcucagcc

SEQ ID NO: 308822 - RNA, 19 nt, Artificial Sequence
  Description of Artificial Sequence: Synthetic oligonucleotide
  Sense strand starting at position 2670 of SEQ ID NO: 3966
aaaggcuuuguugaggauu

SEQ ID NO: 308823 - RNA, 19 nt, Artificial Sequence
  Description of Artificial Sequence: Synthetic oligonucleotide
  Antisense strand to SEQ ID NO: 308822
aauccucaacaaagccuuu

SEQ ID NO: 308824 - RNA, 19 nt, Artificial Sequence
  Description of Artificial Sequence: Synthetic oligonucleotide
  Sense strand starting at position 2678 of SEQ ID NO: 3966
uguugaggauucuccaucu

SEQ ID NO: 308825 - RNA, 19 nt, Artificial Sequence
  Description of Artificial Sequence: Synthetic oligonucleotide
  Antisense strand to SEQ ID NO: 308824
agauggagaauccucaaca

SEQ ID NO: 308826 - RNA, 19 nt, Artificial Sequence
  Description of Artificial Sequence: Synthetic oligonucleotide
  Sense strand starting at position 2842 of SEQ ID NO: 3966
uccucuucugaaugcugaa

SEQ ID NO: 308827 - RNA, 19 nt, Artificial Sequence
  Description of Artificial Sequence: Synthetic oligonucleotide
  Antisense strand to SEQ ID NO: 308826
uucagcauucagaagagga

SEQ ID NO: 308828 - RNA, 19 nt, Artificial Sequence
  Description of Artificial Sequence: Synthetic oligonucleotide
  Sense strand starting at position 2873 of SEQ ID NO: 3966
cugcaagucugcuuagaga

SEQ ID NO: 308829 - RNA, 19 nt, Artificial Sequence
  Description of Artificial Sequence: Synthetic oligonucleotide
  Antisense strand to SEQ ID NO: 308828
ucucuaagcagacuugcag

SEQ ID NO: 308830 - RNA, 19 nt, Artificial Sequence
  Description of Artificial Sequence: Synthetic oligonucleotide
  Sense strand starting at position 2929 of SEQ ID NO: 3966
gaagauuauggucaggcuu

SEQ ID NO: 308831 - RNA, 19 nt, Artificial Sequence
  Description of Artificial Sequence: Synthetic oligonucleotide
  Antisense strand to SEQ ID NO: 308830
aagccugaccauaaucuuc

SEQ ID NO: 308832 - RNA, 19 nt, Artificial Sequence
  Description of Artificial Sequence: Synthetic oligonucleotide
  Sense strand starting at position 2979 of SEQ ID NO: 3966
uaagaaugguuccuccaga

SEQ ID NO: 308833 - RNA, 19 nt, Artificial Sequence
  Description of Artificial Sequence: Synthetic oligonucleotide
  Antisense strand to SEQ ID NO: 308832
ucuggaggaaccauucuua

SEQ ID NO: 308834 - RNA, 19 nt, Artificial Sequence
  Description of Artificial Sequence: Synthetic oligonucleotide
  Sense strand starting at position 3053 of SEQ ID NO: 3966
ugccuuucuaauggagaga

SEQ ID NO: 308835 - RNA, 19 nt, Artificial Sequence
  Description of Artificial Sequence: Synthetic oligonucleotide
  Antisense strand to SEQ ID NO: 308834
ucucuccauuagaaaggca

SEQ ID NO: 308836 - RNA, 19 nt, Artificial Sequence
  Description of Artificial Sequence: Synthetic oligonucleotide
  Sense strand starting at position 3088 of SEQ ID NO: 3966
uggucucacgcccaugaga

SEQ ID NO: 308837 - RNA, 19 nt, Artificial Sequence
  Description of Artificial Sequence: Synthetic oligonucleotide
  Antisense strand to SEQ ID NO: 308836
ucucaugggcgugagacca

SEQ ID NO: 308838 - RNA, 19 nt, Artificial Sequence
  Description of Artificial Sequence: Synthetic oligonucleotide
  Sense strand starting at position 3132 of SEQ ID NO: 3966
auacuugugcuuggcaaga

SEQ ID NO: 308839 - RNA, 19 nt, Artificial Sequence
  Description of Artificial Sequence: Synthetic oligonucleotide
  Antisense strand to SEQ ID NO: 308838
ucuugccaagcacaaguau

SEQ ID NO: 308840 - RNA, 19 nt, Artificial Sequence
  Description of Artificial Sequence: Synthetic oligonucleotide
  Sense strand starting at position 3804 of SEQ ID NO: 3966
gagggaguagcucauauuc

SEQ ID NO: 308841 - RNA, 19 nt, Artificial Sequence
  Description of Artificial Sequence: Synthetic oligonucleotide
  Antisense strand to SEQ ID NO: 308840
gaauaugagcuacucccuc

SEQ ID NO: 308842 - RNA, 19 nt, Artificial Sequence
  Description of Artificial Sequence: Synthetic oligonucleotide
  Sense strand starting at position 3819 of SEQ ID NO: 3966
auuccuggugcccaggaaa

SEQ ID NO: 308843 - RNA, 19 nt, Artificial Sequence
  Description of Artificial Sequence: Synthetic oligonucleotide
  Antisense strand to SEQ ID NO: 308842
uuuccugggcaccaggaau

SEQ ID NO: 308844 - RNA, 19 nt, Artificial Sequence
  Description of Artificial Sequence: Synthetic oligonucleotide
  Sense strand starting at position 3921 of SEQ ID NO: 3966
agcauaaguggugauugaa

SEQ ID NO: 308845 - RNA, 19 nt, Artificial Sequence
  Description of Artificial Sequence: Synthetic oligonucleotide
  Antisense strand to SEQ ID NO: 308844
uucaaucaccacuuaugcu

SEQ ID NO: 308846 - RNA, 19 nt, Artificial Sequence
  Description of Artificial Sequence: Synthetic oligonucleotide
  Sense strand starting at position 804 of SEQ ID NO: 3968
acccuuugauauguaagaa

SEQ ID NO: 308847 - RNA, 19 nt, Artificial Sequence
  Description of Artificial Sequence: Synthetic oligonucleotide
  Antisense strand to SEQ ID NO: 308846
uucuuacauaucaaagggu

SEQ ID NO: 308848 - RNA, 19 nt, Artificial Sequence
  Description of Artificial Sequence: Synthetic oligonucleotide
  Sense strand starting at position 953 of SEQ ID NO: 3968
auagcaacacuuugaagau

SEQ ID NO: 308849 - RNA, 19 nt, Artificial Sequence
  Description of Artificial Sequence: Synthetic oligonucleotide
  Antisense strand to SEQ ID NO: 308848
aucuucaaaguguugcuau

SEQ ID NO: 308850 - RNA, 19 nt, Artificial Sequence
  Description of Artificial Sequence: Synthetic oligonucleotide
  Sense strand starting at position 1023 of SEQ ID NO: 3968
cuggauuccucaucauuga

SEQ ID NO: 308851 - RNA, 19 nt, Artificial Sequence
  Description of Artificial Sequence: Synthetic oligonucleotide
  Antisense strand to SEQ ID NO: 308850
ucaaugaugaggaauccag

SEQ ID NO: 308852 - RNA, 19 nt, Artificial Sequence
  Description of Artificial Sequence: Synthetic oligonucleotide
  Sense strand starting at position 1039 of SEQ ID NO: 3968
ugacguugucuguuauguc

SEQ ID NO: 308853 - RNA, 19 nt, Artificial Sequence
  Description of Artificial Sequence: Synthetic oligonucleotide
  Antisense strand to SEQ ID NO: 308852
gacauaacagacaacguca

SEQ ID NO: 308854 - RNA, 19 nt, Artificial Sequence
  Description of Artificial Sequence: Synthetic oligonucleotide
  Sense strand starting at position 1057 of SEQ ID NO: 3968
ccaugaugugcgggaauuu

SEQ ID NO: 308855 - RNA, 19 nt, Artificial Sequence
  Description of Artificial Sequence: Synthetic oligonucleotide
  Antisense strand to SEQ ID NO: 308854
aaauucccgcacaucaugg

SEQ ID NO: 308856 - RNA, 19 nt, Artificial Sequence
  Description of Artificial Sequence: Synthetic oligonucleotide
  Sense strand starting at position 1139 of SEQ ID NO: 3968
acugaauucugaguuagca

SEQ ID NO: 308857 - RNA, 19 nt, Artificial Sequence
  Description of Artificial Sequence: Synthetic oligonucleotide
  Antisense strand to SEQ ID NO: 308856
ugcuaacucagaauucagu

SEQ ID NO: 308858 - RNA, 19 nt, Artificial Sequence
  Description of Artificial Sequence: Synthetic oligonucleotide
  Sense strand starting at position 1349 of SEQ ID NO: 3968
cuagguuugguuuauuaca

SEQ ID NO: 308859 - RNA, 19 nt, Artificial Sequence
  Description of Artificial Sequence: Synthetic oligonucleotide
  Antisense strand to SEQ ID NO: 308858
uguaauaaaccaaaccuag

SEQ ID NO: 308860 - RNA, 19 nt, Artificial Sequence
  Description of Artificial Sequence: Synthetic oligonucleotide
  Sense strand starting at position 1351 of SEQ ID NO: 3968
agguuugguuuauuacaaa

SEQ ID NO: 308861 - RNA, 19 nt, Artificial Sequence
  Description of Artificial Sequence: Synthetic oligonucleotide
  Antisense strand to SEQ ID NO: 308860
uuuguaauaaaccaaaccu

SEQ ID NO: 308862 - RNA, 19 nt, Artificial Sequence
  Description of Artificial Sequence: Synthetic oligonucleotide
  Sense strand starting at position 1544 of SEQ ID NO: 3968
cauaguaggcaugauugau

SEQ ID NO: 308863 - RNA, 19 nt, Artificial Sequence
  Description of Artificial Sequence: Synthetic oligonucleotide
  Antisense strand to SEQ ID NO: 308862
aucaaucaugccuacuaug

SEQ ID NO: 308864 - RNA, 19 nt, Artificial Sequence
  Description of Artificial Sequence: Synthetic oligonucleotide
  Sense strand starting at position 1550 of SEQ ID NO: 3968
aggcaugauugauuagauu

SEQ ID NO: 308865 - RNA, 19 nt, Artificial Sequence
  Description of Artificial Sequence: Synthetic oligonucleotide
  Antisense strand to SEQ ID NO: 308864
aaucuaaucaaucaugccu

SEQ ID NO: 308866 - RNA, 19 nt, Artificial Sequence
  Description of Artificial Sequence: Synthetic oligonucleotide
  Sense strand starting at position 1570 of SEQ ID NO: 3968
uugcccaucggugaucaaa

SEQ ID NO: 308867 - RNA, 19 nt, Artificial Sequence
  Description of Artificial Sequence: Synthetic oligonucleotide
  Antisense strand to SEQ ID NO: 308866
uuugaucaccgaugggcaa

SEQ ID NO: 308868 - RNA, 19 nt, Artificial Sequence
  Description of Artificial Sequence: Synthetic oligonucleotide
  Sense strand starting at position 1685 of SEQ ID NO: 3968
acauaaacuuaggugugau

SEQ ID NO: 308869 - RNA, 19 nt, Artificial Sequence
  Description of Artificial Sequence: Synthetic oligonucleotide
  Antisense strand to SEQ ID NO: 308868
aucacaccuaaguuuaugu

SEQ ID NO: 308870 - RNA, 19 nt, Artificial Sequence
  Description of Artificial Sequence: Synthetic oligonucleotide
  Sense strand starting at position 1697 of SEQ ID NO: 3968
gugugaucgaaagggaucu

SEQ ID NO: 308871 - RNA, 19 nt, Artificial Sequence
  Description of Artificial Sequence: Synthetic oligonucleotide
  Antisense strand to SEQ ID NO: 308870
agaucccuuucgaucacac

SEQ ID NO: 308872 - RNA, 19 nt, Artificial Sequence
  Description of Artificial Sequence: Synthetic oligonucleotide
  Sense strand starting at position 1774 of SEQ ID NO: 3968
aggagcuguguccaggaaa

SEQ ID NO: 308873 - RNA, 19 nt, Artificial Sequence
  Description of Artificial Sequence: Synthetic oligonucleotide
  Antisense strand to SEQ ID NO: 308872
uuuccuggacacagcuccu

SEQ ID NO: 308874 - RNA, 19 nt, Artificial Sequence
  Description of Artificial Sequence: Synthetic oligonucleotide
  Sense strand starting at position 1777 of SEQ ID NO: 3968
agcuguguccaggaaacaa

SEQ ID NO: 308875 - RNA, 19 nt, Artificial Sequence
  Description of Artificial Sequence: Synthetic oligonucleotide
  Antisense strand to SEQ ID NO: 308874
uuguuuccuggacacagcu

SEQ ID NO: 308876 - RNA, 19 nt, Artificial Sequence
  Description of Artificial Sequence: Synthetic oligonucleotide
  Sense strand starting at position 1847 of SEQ ID NO: 3968
guuacuugccuuuaggaaa

SEQ ID NO: 308877 - RNA, 19 nt, Artificial Sequence
  Description of Artificial Sequence: Synthetic oligonucleotide
  Antisense strand to SEQ ID NO: 308876
uuuccuaaaggcaaguaac

SEQ ID NO: 308878 - RNA, 19 nt, Artificial Sequence
  Description of Artificial Sequence: Synthetic oligonucleotide
  Sense strand starting at position 2073 of SEQ ID NO: 3968
gcaagaccuguguagaaac

SEQ ID NO: 308879 - RNA, 19 nt, Artificial Sequence
  Description of Artificial Sequence: Synthetic oligonucleotide
  Antisense strand to SEQ ID NO: 308878
guuucuacacaggucuugc

SEQ ID NO: 308880 - RNA, 19 nt, Artificial Sequence
  Description of Artificial Sequence: Synthetic oligonucleotide
  Sense strand starting at position 2171 of SEQ ID NO: 3968
acgcgaguuccuguuccca

SEQ ID NO: 308881 - RNA, 19 nt, Artificial Sequence
  Description of Artificial Sequence: Synthetic oligonucleotide
  Antisense strand to SEQ ID NO: 308880
ugggaacaggaacucgcgu

SEQ ID NO: 308882 - RNA, 19 nt, Artificial Sequence
  Description of Artificial Sequence: Synthetic oligonucleotide
  Sense strand starting at position 2231 of SEQ ID NO: 3968
ggagaagaagccugagcaa

SEQ ID NO: 308883 - RNA, 19 nt, Artificial Sequence
  Description of Artificial Sequence: Synthetic oligonucleotide
  Antisense strand to SEQ ID NO: 308882
uugcucaggcuucuucucc

SEQ ID NO: 308884 - RNA, 19 nt, Artificial Sequence
  Description of Artificial Sequence: Synthetic oligonucleotide
  Sense strand starting at position 2234 of SEQ ID NO: 3968
gaagaagccugagcaacau

SEQ ID NO: 308885 - RNA, 19 nt, Artificial Sequence
  Description of Artificial Sequence: Synthetic oligonucleotide
  Antisense strand to SEQ ID NO: 308884
auguugcucaggcuucuuc

SEQ ID NO: 308886 - RNA, 19 nt, Artificial Sequence
  Description of Artificial Sequence: Synthetic oligonucleotide
  Sense strand starting at position 2240 of SEQ ID NO: 3968
gccugagcaacaugauuag

SEQ ID NO: 308887 - RNA, 19 nt, Artificial Sequence
  Description of Artificial Sequence: Synthetic oligonucleotide
  Antisense strand to SEQ ID NO: 308886
cuaaucauguugcucaggc

SEQ ID NO: 308888 - RNA, 19 nt, Artificial Sequence
  Description of Artificial Sequence: Synthetic oligonucleotide
  Sense strand starting at position 2361 of SEQ ID NO: 3968
gcagccucccaagaggauu

SEQ ID NO: 308889 - RNA, 19 nt, Artificial Sequence
  Description of Artificial Sequence: Synthetic oligonucleotide
  Antisense strand to SEQ ID NO: 308888
aauccucuugggaggcugc

SEQ ID NO: 308890 - RNA, 19 nt, Artificial Sequence
  Description of Artificial Sequence: Synthetic oligonucleotide
  Sense strand starting at position 2380 of SEQ ID NO: 3968
ggcagcuuacaaugaucaa

SEQ ID NO: 308891 - RNA, 19 nt, Artificial Sequence
  Description of Artificial Sequence: Synthetic oligonucleotide
  Antisense strand to SEQ ID NO: 308890
uugaucauuguaagcugcc

SEQ ID NO: 308892 - RNA, 19 nt, Artificial Sequence
  Description of Artificial Sequence: Synthetic oligonucleotide
  Sense strand starting at position 2383 of SEQ ID NO: 3968
agcuuacaaugaucaaagu

SEQ ID NO: 308893 - RNA, 19 nt, Artificial Sequence
  Description of Artificial Sequence: Synthetic oligonucleotide
  Antisense strand to SEQ ID NO: 308892
acuuugaucauuguaagcu

SEQ ID NO: 308894 - RNA, 19 nt, Artificial Sequence
  Description of Artificial Sequence: Synthetic oligonucleotide
  Sense strand starting at position 2568 of SEQ ID NO: 3968
guaggaauagcgggaucaa

SEQ ID NO: 308895 - RNA, 19 nt, Artificial Sequence
  Description of Artificial Sequence: Synthetic oligonucleotide
  Antisense strand to SEQ ID NO: 308894
uugaucccgcuauuccuac

SEQ ID NO: 308896 - RNA, 19 nt, Artificial Sequence
  Description of Artificial Sequence: Synthetic oligonucleotide
  Sense strand starting at position 2577 of SEQ ID NO: 3968
gcgggaucaagagaugcua

SEQ ID NO: 308897 - RNA, 19 nt, Artificial Sequence
  Description of Artificial Sequence: Synthetic oligonucleotide
  Antisense strand to SEQ ID NO: 308896
uagcaucucuugaucccgc

SEQ ID NO: 308898 - RNA, 19 nt, Artificial Sequence
  Description of Artificial Sequence: Synthetic oligonucleotide
  Sense strand starting at position 2811 of SEQ ID NO: 3968
gcaaauuaagaagguauua

SEQ ID NO: 308899 - RNA, 19 nt, Artificial Sequence
  Description of Artificial Sequence: Synthetic oligonucleotide
  Antisense strand to SEQ ID NO: 308898
uaauaccuucuuaauuugc

SEQ ID NO: 308900 - RNA, 19 nt, Artificial Sequence
  Description of Artificial Sequence: Synthetic oligonucleotide
  Sense strand starting at position 2853 of SEQ ID NO: 3968
gagcuuugacuguacuaag

SEQ ID NO: 308901 - RNA, 19 nt, Artificial Sequence
  Description of Artificial Sequence: Synthetic oligonucleotide
  Antisense strand to SEQ ID NO: 308900
cuuaguacagucaaagcuc

SEQ ID NO: 308902 - RNA, 19 nt, Artificial Sequence
  Description of Artificial Sequence: Synthetic oligonucleotide
  Sense strand starting at position 2946 of SEQ ID NO: 3968
cuggcaugucuguucguca

SEQ ID NO: 308903 - RNA, 19 nt, Artificial Sequence
  Description of Artificial Sequence: Synthetic oligonucleotide
  Antisense strand to SEQ ID NO: 308902
ugacgaacagacaugccag

SEQ ID NO: 308904 - RNA, 19 nt, Artificial Sequence
  Description of Artificial Sequence: Synthetic oligonucleotide
  Sense strand starting at position 3104 of SEQ ID NO: 3968
ggcugaaugacucaggcuu

SEQ ID NO: 308905 - RNA, 19 nt, Artificial Sequence
  Description of Artificial Sequence: Synthetic oligonucleotide
  Antisense strand to SEQ ID NO: 308904
aagccugagucauucagcc

SEQ ID NO: 308906 - RNA, 19 nt, Artificial Sequence
  Description of Artificial Sequence: Synthetic oligonucleotide
  Sense strand starting at position 3168 of SEQ ID NO: 3968
caaaucucuguuggcaaga

SEQ ID NO: 308907 - RNA, 19 nt, Artificial Sequence
  Description of Artificial Sequence: Synthetic oligonucleotide
  Antisense strand to SEQ ID NO: 308906
ucuugccaacagagauuug

SEQ ID NO: 308908 - RNA, 19 nt, Artificial Sequence
  Description of Artificial Sequence: Synthetic oligonucleotide
  Sense strand starting at position 3244 of SEQ ID NO: 3968
caaagaugugcaugaaggu

SEQ ID NO: 308909 - RNA, 19 nt, Artificial Sequence
  Description of Artificial Sequence: Synthetic oligonucleotide
  Antisense strand to SEQ ID NO: 308908
accuucaugcacaucuuug

SEQ ID NO: 308910 - RNA, 19 nt, Artificial Sequence
  Description of Artificial Sequence: Synthetic oligonucleotide
  Sense strand starting at position 3306 of SEQ ID NO: 3968
uggagagguuugcuucuaa

SEQ ID NO: 308911 - RNA, 19 nt, Artificial Sequence
  Description of Artificial Sequence: Synthetic oligonucleotide
  Antisense strand to SEQ ID NO: 308910
uuagaagcaaaccucucca

SEQ ID NO: 308912 - RNA, 19 nt, Artificial Sequence
  Description of Artificial Sequence: Synthetic oligonucleotide
  Sense strand starting at position 3536 of SEQ ID NO: 3968
agauuagcucaccaaguua

SEQ ID NO: 308913 - RNA, 19 nt, Artificial Sequence
  Description of Artificial Sequence: Synthetic oligonucleotide
  Antisense strand to SEQ ID NO: 308912
uaacuuggugagcuaaucu

SEQ ID NO: 308914 - RNA, 19 nt, Artificial Sequence
  Description of Artificial Sequence: Synthetic oligonucleotide
  Sense strand starting at position 3741 of SEQ ID NO: 3968
gguucuuucgaaggaaauu

SEQ ID NO: 308915 - RNA, 19 nt, Artificial Sequence
  Description of Artificial Sequence: Synthetic oligonucleotide
  Antisense strand to SEQ ID NO: 308914
aauuuccuucgaaagaacc

SEQ ID NO: 308916 - RNA, 19 nt, Artificial Sequence
  Description of Artificial Sequence: Synthetic oligonucleotide
  Sense strand starting at position 3742 of SEQ ID NO: 3968
guucuuucgaaggaaauuc

SEQ ID NO: 308917 - RNA, 19 nt, Artificial Sequence
  Description of Artificial Sequence: Synthetic oligonucleotide
  Antisense strand to SEQ ID NO: 308916
gaauuuccuucgaaagaac

SEQ ID NO: 308918 - RNA, 19 nt, Artificial Sequence
  Description of Artificial Sequence: Synthetic oligonucleotide
  Sense strand starting at position 3767 of SEQ ID NO: 3968
ccuaccuggcccugagaaa

SEQ ID NO: 308919 - RNA, 19 nt, Artificial Sequence
  Description of Artificial Sequence: Synthetic oligonucleotide
  Antisense strand to SEQ ID NO: 308918
uuucucagggccagguagg

SEQ ID NO: 308920 - RNA, 19 nt, Artificial Sequence
  Description of Artificial Sequence: Synthetic oligonucleotide
  Sense strand starting at position 3768 of SEQ ID NO: 3968
cuaccuggcccugagaaau

SEQ ID NO: 308921 - RNA, 19 nt, Artificial Sequence
  Description of Artificial Sequence: Synthetic oligonucleotide
  Antisense strand to SEQ ID NO: 308920
auuucucagggccagguag

SEQ ID NO: 308922 - RNA, 19 nt, Artificial Sequence
  Description of Artificial Sequence: Synthetic oligonucleotide
  Sense strand starting at position 3793 of SEQ ID NO: 3968
ggcacuugauaagcaagaa

SEQ ID NO: 308923 - RNA, 19 nt, Artificial Sequence
  Description of Artificial Sequence: Synthetic oligonucleotide
  Antisense strand to SEQ ID NO: 308922
uucuugcuuaucaagugcc

SEQ ID NO: 308924 - RNA, 19 nt, Artificial Sequence
  Description of Artificial Sequence: Synthetic oligonucleotide
  Sense strand starting at position 3854 of SEQ ID NO: 3968
agagauguuugguuuccua

SEQ ID NO: 308925 - RNA, 19 nt, Artificial Sequence
  Description of Artificial Sequence: Synthetic oligonucleotide
  Antisense strand to SEQ ID NO: 308924
uaggaaaccaaacaucucu

SEQ ID NO: 308926 - RNA, 19 nt, Artificial Sequence
  Description of Artificial Sequence: Synthetic oligonucleotide
  Sense strand starting at position 143 of SEQ ID NO: 3967
cagagaaaucagcaggugu

SEQ ID NO: 308927 - RNA, 19 nt, Artificial Sequence
  Description of Artificial Sequence: Synthetic oligonucleotide
  Antisense strand to SEQ ID NO: 308926
acaccugcugauuucucug

SEQ ID NO: 308928 - RNA, 19 nt, Artificial Sequence
  Description of Artificial Sequence: Synthetic oligonucleotide
  Sense strand starting at position 145 of SEQ ID NO: 3967
gagaaaucagcagguguaa

SEQ ID NO: 308929 - RNA, 19 nt, Artificial Sequence
  Description of Artificial Sequence: Synthetic oligonucleotide
  Antisense strand to SEQ ID NO: 308928
uuacaccugcugauuucuc

SEQ ID NO: 308930 - RNA, 19 nt, Artificial Sequence
  Description of Artificial Sequence: Synthetic oligonucleotide
  Sense strand starting at position 179 of SEQ ID NO: 3967
gucuuugggaccuguuuga

SEQ ID NO: 308931 - RNA, 19 nt, Artificial Sequence
  Description of Artificial Sequence: Synthetic oligonucleotide
  Antisense strand to SEQ ID NO: 308930
ucaaacaggucccaaagac

SEQ ID NO: 308932 - RNA, 19 nt, Artificial Sequence
  Description of Artificial Sequence: Synthetic oligonucleotide
  Sense strand starting at position 197 of SEQ ID NO: 3967
aggcuuucucucugauaaa

SEQ ID NO: 308933 - RNA, 19 nt, Artificial Sequence
  Description of Artificial Sequence: Synthetic oligonucleotide
  Antisense strand to SEQ ID NO: 308932
uuuaucagagagaaagccu

SEQ ID NO: 308934 - RNA, 19 nt, Artificial Sequence
  Description of Artificial Sequence: Synthetic oligonucleotide
  Sense strand starting at position 423 of SEQ ID NO: 3967
ucaguaaauguguaggcuu

SEQ ID NO: 308935 - RNA, 19 nt, Artificial Sequence
  Description of Artificial Sequence: Synthetic oligonucleotide
  Antisense strand to SEQ ID NO: 308934
aagccuacacauuuacuga

SEQ ID NO: 308936 - RNA, 19 nt, Artificial Sequence
  Description of Artificial Sequence: Synthetic oligonucleotide
  Sense strand starting at position 434 of SEQ ID NO: 3967
guaggcuuugcagaccaaa

SEQ ID NO: 308937 - RNA, 19 nt, Artificial Sequence
  Description of Artificial Sequence: Synthetic oligonucleotide
  Antisense strand to SEQ ID NO: 308936
uuuggucugcaaagccuac

SEQ ID NO: 308938 - RNA, 19 nt, Artificial Sequence
  Description of Artificial Sequence: Synthetic oligonucleotide
  Sense strand starting at position 511 of SEQ ID NO: 3967
uuagcucugggccauauaa

SEQ ID NO: 308939 - RNA, 19 nt, Artificial Sequence
  Description of Artificial Sequence: Synthetic oligonucleotide
  Antisense strand to SEQ ID NO: 308938
uuauauggcccagagcuaa

SEQ ID NO: 308940 - RNA, 19 nt, Artificial Sequence
  Description of Artificial Sequence: Synthetic oligonucleotide
  Sense strand starting at position 702 of SEQ ID NO: 3967
cucuguuugaacugggaca

SEQ ID NO: 308941 - RNA, 19 nt, Artificial Sequence
  Description of Artificial Sequence: Synthetic oligonucleotide
  Antisense strand to SEQ ID NO: 308940
ugucccaguucaaacagag

SEQ ID NO: 308942 - RNA, 19 nt, Artificial Sequence
  Description of Artificial Sequence: Synthetic oligonucleotide
  Sense strand starting at position 703 of SEQ ID NO: 3967
ucuguuugaacugggacau

SEQ ID NO: 308943 - RNA, 19 nt, Artificial Sequence
  Description of Artificial Sequence: Synthetic oligonucleotide
  Antisense strand to SEQ ID NO: 308942
augucccaguucaaacaga

SEQ ID NO: 308944 - RNA, 19 nt, Artificial Sequence
  Description of Artificial Sequence: Synthetic oligonucleotide
  Sense strand starting at position 704 of SEQ ID NO: 3967
cuguuugaacugggacauu

SEQ ID NO: 308945 - RNA, 19 nt, Artificial Sequence
  Description of Artificial Sequence: Synthetic oligonucleotide
  Antisense strand to SEQ ID NO: 308944
aaugucccaguucaaacag

SEQ ID NO: 308946 - RNA, 19 nt, Artificial Sequence
  Description of Artificial Sequence: Synthetic oligonucleotide
  Sense strand starting at position 746 of SEQ ID NO: 3967
gugacugucccagauuauc

SEQ ID NO: 308947 - RNA, 19 nt, Artificial Sequence
  Description of Artificial Sequence: Synthetic oligonucleotide
  Antisense strand to SEQ ID NO: 308946
gauaaucugggacagucac

SEQ ID NO: 308948 - RNA, 19 nt, Artificial Sequence
  Description of Artificial Sequence: Synthetic oligonucleotide
  Sense strand starting at position 890 of SEQ ID NO: 3967
accguuucuccaggaaauc

SEQ ID NO: 308949 - RNA, 19 nt, Artificial Sequence
  Description of Artificial Sequence: Synthetic oligonucleotide
  Antisense strand to SEQ ID NO: 308948
gauuuccuggagaaacggu

SEQ ID NO: 308950 - RNA, 19 nt, Artificial Sequence
  Description of Artificial Sequence: Synthetic oligonucleotide
  Sense strand starting at position 1995 of SEQ ID NO: 3967
acccuuugauauguaagaa

SEQ ID NO: 308951 - RNA, 19 nt, Artificial Sequence
  Description of Artificial Sequence: Synthetic oligonucleotide
  Antisense strand to SEQ ID NO: 308950
uucuuacauaucaaagggu

SEQ ID NO: 308952 - RNA, 19 nt, Artificial Sequence
  Description of Artificial Sequence: Synthetic oligonucleotide
  Sense strand starting at position 2144 of SEQ ID NO: 3967
auagcaacacuuugaagau

SEQ ID NO: 308953 - RNA, 19 nt, Artificial Sequence
  Description of Artificial Sequence: Synthetic oligonucleotide
  Antisense strand to SEQ ID NO: 308952
aucuucaaaguguugcuau

SEQ ID NO: 308954 - RNA, 19 nt, Artificial Sequence
  Description of Artificial Sequence: Synthetic oligonucleotide
  Sense strand starting at position 2214 of SEQ ID NO: 3967
cuggauuccucaucauuga

SEQ ID NO: 308955 - RNA, 19 nt, Artificial Sequence
  Description of Artificial Sequence: Synthetic oligonucleotide
  Antisense strand to SEQ ID NO: 308954
ucaaugaugaggaauccag

SEQ ID NO: 308956 - RNA, 19 nt, Artificial Sequence
  Description of Artificial Sequence: Synthetic oligonucleotide
  Sense strand starting at position 2230 of SEQ ID NO: 3967
ugacguugucuguuauguc

SEQ ID NO: 308957 - RNA, 19 nt, Artificial Sequence
  Description of Artificial Sequence: Synthetic oligonucleotide
  Antisense strand to SEQ ID NO: 308956
gacauaacagacaacguca

SEQ ID NO: 308958 - RNA, 19 nt, Artificial Sequence
  Description of Artificial Sequence: Synthetic oligonucleotide
  Sense strand starting at position 2237 of SEQ ID NO: 3967
gucuguuauguccaugaug

SEQ ID NO: 308959 - RNA, 19 nt, Artificial Sequence
  Description of Artificial Sequence: Synthetic oligonucleotide
  Antisense strand to SEQ ID NO: 308958
caucauggacauaacagac

SEQ ID NO: 308960 - RNA, 19 nt, Artificial Sequence
  Description of Artificial Sequence: Synthetic oligonucleotide
  Sense strand starting at position 2248 of SEQ ID NO: 3967
ccaugaugugcgggaauuu

SEQ ID NO: 308961 - RNA, 19 nt, Artificial Sequence
  Description of Artificial Sequence: Synthetic oligonucleotide
  Antisense strand to SEQ ID NO: 308960
aaauucccgcacaucaugg

SEQ ID NO: 308962 - RNA, 19 nt, Artificial Sequence
  Description of Artificial Sequence: Synthetic oligonucleotide
  Sense strand starting at position 2330 of SEQ ID NO: 3967
acugaauucugaguuagca

SEQ ID NO: 308963 - RNA, 19 nt, Artificial Sequence
  Description of Artificial Sequence: Synthetic oligonucleotide
  Antisense strand to SEQ ID NO: 308962
ugcuaacucagaauucagu

SEQ ID NO: 308964 - RNA, 19 nt, Artificial Sequence
  Description of Artificial Sequence: Synthetic oligonucleotide
  Sense strand starting at position 2540 of SEQ ID NO: 3967
cuagguuugguuuauuaca

SEQ ID NO: 308965 - RNA, 19 nt, Artificial Sequence
  Description of Artificial Sequence: Synthetic oligonucleotide
  Antisense strand to SEQ ID NO: 308964
uguaauaaaccaaaccuag

SEQ ID NO: 308966 - RNA, 19 nt, Artificial Sequence
  Description of Artificial Sequence: Synthetic oligonucleotide
  Sense strand starting at position 2542 of SEQ ID NO: 3967
agguuugguuuauuacaaa

SEQ ID NO: 308967 - RNA, 19 nt, Artificial Sequence
  Description of Artificial Sequence: Synthetic oligonucleotide
  Antisense strand to SEQ ID NO: 308966
uuuguaauaaaccaaaccu

SEQ ID NO: 308968 - RNA, 19 nt, Artificial Sequence
  Description of Artificial Sequence: Synthetic oligonucleotide
  Sense strand starting at position 2735 of SEQ ID NO: 3967
cauaguaggcaugauugau

SEQ ID NO: 308969 - RNA, 19 nt, Artificial Sequence
  Description of Artificial Sequence: Synthetic oligonucleotide
  Antisense strand to SEQ ID NO: 308968
aucaaucaugccuacuaug

SEQ ID NO: 308970 - RNA, 19 nt, Artificial Sequence
  Description of Artificial Sequence: Synthetic oligonucleotide
  Sense strand starting at position 2741 of SEQ ID NO: 3967
aggcaugauugauuagauu

SEQ ID NO: 308971 - RNA, 19 nt, Artificial Sequence
  Description of Artificial Sequence: Synthetic oligonucleotide
  Antisense strand to SEQ ID NO: 308970
aaucuaaucaaucaugccu

SEQ ID NO: 308972 - RNA, 19 nt, Artificial Sequence
  Description of Artificial Sequence: Synthetic oligonucleotide
  Sense strand starting at position 2761 of SEQ ID NO: 3967
uugcccaucggugaucaaa

SEQ ID NO: 308973 - RNA, 19 nt, Artificial Sequence
  Description of Artificial Sequence: Synthetic oligonucleotide
  Antisense strand to SEQ ID NO: 308972
uuugaucaccgaugggcaa

SEQ ID NO: 308974 - RNA, 19 nt, Artificial Sequence
  Description of Artificial Sequence: Synthetic oligonucleotide
  Sense strand starting at position 2876 of SEQ ID NO: 3967
acauaaacuuaggugugau

SEQ ID NO: 308975 - RNA, 19 nt, Artificial Sequence
  Description of Artificial Sequence: Synthetic oligonucleotide
  Antisense strand to SEQ ID NO: 308974
aucacaccuaaguuuaugu

SEQ ID NO: 308976 - RNA, 19 nt, Artificial Sequence
  Description of Artificial Sequence: Synthetic oligonucleotide
  Sense strand starting at position 2879 of SEQ ID NO: 3967
uaaacuuaggugugaucga

SEQ ID NO: 308977 - RNA, 19 nt, Artificial Sequence
  Description of Artificial Sequence: Synthetic oligonucleotide
  Antisense strand to SEQ ID NO: 308976
ucgaucacaccuaaguuua

SEQ ID NO: 308978 - RNA, 19 nt, Artificial Sequence
  Description of Artificial Sequence: Synthetic oligonucleotide
  Sense strand starting at position 2888 of SEQ ID NO: 3967
gugugaucgaaagggaucu

SEQ ID NO: 308979 - RNA, 19 nt, Artificial Sequence
  Description of Artificial Sequence: Synthetic oligonucleotide
  Antisense strand to SEQ ID NO: 308978
agaucccuuucgaucacac

SEQ ID NO: 308980 - RNA, 19 nt, Artificial Sequence
  Description of Artificial Sequence: Synthetic oligonucleotide
  Sense strand starting at position 2965 of SEQ ID NO: 3967
aggagcuguguccaggaaa

SEQ ID NO: 308981 - RNA, 19 nt, Artificial Sequence
  Description of Artificial Sequence: Synthetic oligonucleotide
  Antisense strand to SEQ ID NO: 308980
uuuccuggacacagcuccu

SEQ ID NO: 308982 - RNA, 19 nt, Artificial Sequence
  Description of Artificial Sequence: Synthetic oligonucleotide
  Sense strand starting at position 2968 of SEQ ID NO: 3967
agcuguguccaggaaacaa

SEQ ID NO: 308983 - RNA, 19 nt, Artificial Sequence
  Description of Artificial Sequence: Synthetic oligonucleotide
  Antisense strand to SEQ ID NO: 308982
uuguuuccuggacacagcu

SEQ ID NO: 308984 - RNA, 19 nt, Artificial Sequence
  Description of Artificial Sequence: Synthetic oligonucleotide
  Sense strand starting at position 3038 of SEQ ID NO: 3967
guuacuugccuuuaggaaa

SEQ ID NO: 308985 - RNA, 19 nt, Artificial Sequence
  Description of Artificial Sequence: Synthetic oligonucleotide
  Antisense strand to SEQ ID NO: 308984
uuuccuaaaggcaaguaac

SEQ ID NO: 308986 - RNA, 19 nt, Artificial Sequence
  Description of Artificial Sequence: Synthetic oligonucleotide
  Sense strand starting at position 3264 of SEQ ID NO: 3967
gcaagaccuguguagaaac

SEQ ID NO: 308987 - RNA, 19 nt, Artificial Sequence
  Description of Artificial Sequence: Synthetic oligonucleotide
  Antisense strand to SEQ ID NO: 308986
guuucuacacaggucuugc

SEQ ID NO: 308988 - RNA, 19 nt, Artificial Sequence
  Description of Artificial Sequence: Synthetic oligonucleotide
  Sense strand starting at position 3362 of SEQ ID NO: 3967
acgcgaguuccuguuccca

SEQ ID NO: 308989 - RNA, 19 nt, Artificial Sequence
  Description of Artificial Sequence: Synthetic oligonucleotide
  Antisense strand to SEQ ID NO: 308988
ugggaacaggaacucgcgu

SEQ ID NO: 308990 - RNA, 19 nt, Artificial Sequence
  Description of Artificial Sequence: Synthetic oligonucleotide
  Sense strand starting at position 3422 of SEQ ID NO: 3967
ggagaagaagccugagcaa

SEQ ID NO: 308991 - RNA, 19 nt, Artificial Sequence
  Description of Artificial Sequence: Synthetic oligonucleotide
  Antisense strand to SEQ ID NO: 308990
uugcucaggcuucuucucc

SEQ ID NO: 308992 - RNA, 19 nt, Artificial Sequence
  Description of Artificial Sequence: Synthetic oligonucleotide
  Sense strand starting at position 3425 of SEQ ID NO: 3967
gaagaagccugagcaacau

SEQ ID NO: 308993 - RNA, 19 nt, Artificial Sequence
  Description of Artificial Sequence: Synthetic oligonucleotide
  Antisense strand to SEQ ID NO: 308992
auguugcucaggcuucuuc

SEQ ID NO: 308994 - RNA, 19 nt, Artificial Sequence
  Description of Artificial Sequence: Synthetic oligonucleotide
  Sense strand starting at position 3431 of SEQ ID NO: 3967
gccugagcaacaugauuag

SEQ ID NO: 308995 - RNA, 19 nt, Artificial Sequence
  Description of Artificial Sequence: Synthetic oligonucleotide
  Antisense strand to SEQ ID NO: 308994
cuaaucauguugcucaggc

SEQ ID NO: 308996 - RNA, 19 nt, Artificial Sequence
  Description of Artificial Sequence: Synthetic oligonucleotide
  Sense strand starting at position 3552 of SEQ ID NO: 3967
gcagccucccaagaggauu

SEQ ID NO: 308997 - RNA, 19 nt, Artificial Sequence
  Description of Artificial Sequence: Synthetic oligonucleotide
  Antisense strand to SEQ ID NO: 308996
aauccucuugggaggcugc

SEQ ID NO: 308998 - RNA, 19 nt, Artificial Sequence
  Description of Artificial Sequence: Synthetic oligonucleotide
  Sense strand starting at position 3571 of SEQ ID NO: 3967
ggcagcuuacaaugaucaa

SEQ ID NO: 308999 - RNA, 19 nt, Artificial Sequence
  Description of Artificial Sequence: Synthetic oligonucleotide
  Antisense strand to SEQ ID NO: 308998
uugaucauuguaagcugcc

SEQ ID NO: 309000 - RNA, 19 nt, Artificial Sequence
  Description of Artificial Sequence: Synthetic oligonucleotide
  Sense strand starting at position 3574 of SEQ ID NO: 3967
agcuuacaaugaucaaagu

SEQ ID NO: 309001 - RNA, 19 nt, Artificial Sequence
  Description of Artificial Sequence: Synthetic oligonucleotide
  Antisense strand to SEQ ID NO: 309000
acuuugaucauuguaagcu

SEQ ID NO: 309002 - RNA, 19 nt, Artificial Sequence
  Description of Artificial Sequence: Synthetic oligonucleotide
  Sense strand starting at position 3759 of SEQ ID NO: 3967
guaggaauagcgggaucaa

SEQ ID NO: 309003 - RNA, 19 nt, Artificial Sequence
  Description of Artificial Sequence: Synthetic oligonucleotide
  Antisense strand to SEQ ID NO: 309002
uugaucccgcuauuccuac

SEQ ID NO: 309004 - RNA, 19 nt, Artificial Sequence
  Description of Artificial Sequence: Synthetic oligonucleotide
  Sense strand starting at position 3768 of SEQ ID NO: 3967
gcgggaucaagagaugcua

SEQ ID NO: 309005 - RNA, 19 nt, Artificial Sequence
  Description of Artificial Sequence: Synthetic oligonucleotide
  Antisense strand to SEQ ID NO: 309004
uagcaucucuugaucccgc

SEQ ID NO: 309006 - RNA, 19 nt, Artificial Sequence
  Description of Artificial Sequence: Synthetic oligonucleotide
  Sense strand starting at position 65 of SEQ ID NO: 3969
gggaauaauuugcagauga

SEQ ID NO: 309007 - RNA, 19 nt, Artificial Sequence
  Description of Artificial Sequence: Synthetic oligonucleotide
  Antisense strand to SEQ ID NO: 309006
ucaucugcaaauuauuccc

SEQ ID NO: 309008 - RNA, 19 nt, Artificial Sequence
  Description of Artificial Sequence: Synthetic oligonucleotide
  Sense strand starting at position 349 of SEQ ID NO: 3969
ucauauucuugaguaggaa

SEQ ID NO: 309009 - RNA, 19 nt, Artificial Sequence
  Description of Artificial Sequence: Synthetic oligonucleotide
  Antisense strand to SEQ ID NO: 309008
uuccuacucaagaauauga

SEQ ID NO: 309010 - RNA, 19 nt, Artificial Sequence
  Description of Artificial Sequence: Synthetic oligonucleotide
  Sense strand starting at position 352 of SEQ ID NO: 3969
uauucuugaguaggaagau

SEQ ID NO: 309011 - RNA, 19 nt, Artificial Sequence
  Description of Artificial Sequence: Synthetic oligonucleotide
  Antisense strand to SEQ ID NO: 309010
aucuuccuacucaagaaua

SEQ ID NO: 309012 - RNA, 19 nt, Artificial Sequence
  Description of Artificial Sequence: Synthetic oligonucleotide
  Sense strand starting at position 619 of SEQ ID NO: 3969
augucaaaucuguaugcau

SEQ ID NO: 309013 - RNA, 19 nt, Artificial Sequence
  Description of Artificial Sequence: Synthetic oligonucleotide
  Antisense strand to SEQ ID NO: 309012
augcauacagauuugacau

SEQ ID NO: 309014 - RNA, 19 nt, Artificial Sequence
  Description of Artificial Sequence: Synthetic oligonucleotide
  Sense strand starting at position 633 of SEQ ID NO: 3969
ugcauugaccuguaaagau

SEQ ID NO: 309015 - RNA, 19 nt, Artificial Sequence
  Description of Artificial Sequence: Synthetic oligonucleotide
  Antisense strand to SEQ ID NO: 309014
aucuuuacaggucaaugca

SEQ ID NO: 309016 - RNA, 19 nt, Artificial Sequence
  Description of Artificial Sequence: Synthetic oligonucleotide
  Sense strand starting at position 699 of SEQ ID NO: 3969
ccagcaugauaguagauuu

SEQ ID NO: 309017 - RNA, 19 nt, Artificial Sequence
  Description of Artificial Sequence: Synthetic oligonucleotide
  Antisense strand to SEQ ID NO: 309016
aaaucuacuaucaugcugg

SEQ ID NO: 309018 - RNA, 19 nt, Artificial Sequence
  Description of Artificial Sequence: Synthetic oligonucleotide
  Sense strand starting at position 909 of SEQ ID NO: 3969
uagauugcagccuagauau

SEQ ID NO: 309019 - RNA, 19 nt, Artificial Sequence
  Description of Artificial Sequence: Synthetic oligonucleotide
  Antisense strand to SEQ ID NO: 309018
auaucuaggcugcaaucua

SEQ ID NO: 309020 - RNA, 19 nt, Artificial Sequence
  Description of Artificial Sequence: Synthetic oligonucleotide
  Sense strand starting at position 911 of SEQ ID NO: 3969
gauugcagccuagauauga

SEQ ID NO: 309021 - RNA, 19 nt, Artificial Sequence
  Description of Artificial Sequence: Synthetic oligonucleotide
  Antisense strand to SEQ ID NO: 309020
ucauaucuaggcugcaauc

SEQ ID NO: 309022 - RNA, 19 nt, Artificial Sequence
  Description of Artificial Sequence: Synthetic oligonucleotide
  Sense strand starting at position 1001 of SEQ ID NO: 3969
uuaagugaauugguacaaa

SEQ ID NO: 309023 - RNA, 19 nt, Artificial Sequence
  Description of Artificial Sequence: Synthetic oligonucleotide
  Antisense strand to SEQ ID NO: 309022
uuuguaccaauucacuuaa

SEQ ID NO: 309024 - RNA, 19 nt, Artificial Sequence
  Description of Artificial Sequence: Synthetic oligonucleotide
  Sense strand starting at position 2090 of SEQ ID NO: 3969
aaagaaggcguguacuuau

SEQ ID NO: 309025 - RNA, 19 nt, Artificial Sequence
  Description of Artificial Sequence: Synthetic oligonucleotide
  Antisense strand to SEQ ID NO: 309024
auaaguacacgccuucuuu

SEQ ID NO: 309026 - RNA, 19 nt, Artificial Sequence
  Description of Artificial Sequence: Synthetic oligonucleotide
  Sense strand starting at position 2180 of SEQ ID NO: 3969
ugagauaccugcuuauaug

SEQ ID NO: 309027 - RNA, 19 nt, Artificial Sequence
  Description of Artificial Sequence: Synthetic oligonucleotide
  Antisense strand to SEQ ID NO: 309026
cauauaagcagguaucuca

SEQ ID NO: 309028 - RNA, 19 nt, Artificial Sequence
  Description of Artificial Sequence: Synthetic oligonucleotide
  Sense strand starting at position 2181 of SEQ ID NO: 3969
gagauaccugcuuauaugu

SEQ ID NO: 309029 - RNA, 19 nt, Artificial Sequence
  Description of Artificial Sequence: Synthetic oligonucleotide
  Antisense strand to SEQ ID NO: 309028
acauauaagcagguaucuc

SEQ ID NO: 309030 - RNA, 19 nt, Artificial Sequence
  Description of Artificial Sequence: Synthetic oligonucleotide
  Sense strand starting at position 2254 of SEQ ID NO: 3969
gcugcaauaugaguuuaga

SEQ ID NO: 309031 - RNA, 19 nt, Artificial Sequence
  Description of Artificial Sequence: Synthetic oligonucleotide
  Antisense strand to SEQ ID NO: 309030
ucuaaacucauauugcagc

SEQ ID NO: 309032 - RNA, 19 nt, Artificial Sequence
  Description of Artificial Sequence: Synthetic oligonucleotide
  Sense strand starting at position 2297 of SEQ ID NO: 3969
uggccuugacgacauugaa

SEQ ID NO: 309033 - RNA, 19 nt, Artificial Sequence
  Description of Artificial Sequence: Synthetic oligonucleotide
  Antisense strand to SEQ ID NO: 309032
uucaaugucgucaaggcca

SEQ ID NO: 309034 - RNA, 19 nt, Artificial Sequence
  Description of Artificial Sequence: Synthetic oligonucleotide
  Sense strand starting at position 2300 of SEQ ID NO: 3969
ccuugacgacauugaaaga

SEQ ID NO: 309035 - RNA, 19 nt, Artificial Sequence
  Description of Artificial Sequence: Synthetic oligonucleotide
  Antisense strand to SEQ ID NO: 309034
ucuuucaaugucgucaagg

SEQ ID NO: 309036 - RNA, 19 nt, Artificial Sequence
  Description of Artificial Sequence: Synthetic oligonucleotide
  Sense strand starting at position 2326 of SEQ ID NO: 3969
gaaaguaaauuugaacgaa

SEQ ID NO: 309037 - RNA, 19 nt, Artificial Sequence
  Description of Artificial Sequence: Synthetic oligonucleotide
  Antisense strand to SEQ ID NO: 309036
uucguucaaauuuacuuuc

SEQ ID NO: 309038 - RNA, 19 nt, Artificial Sequence
  Description of Artificial Sequence: Synthetic oligonucleotide
  Sense strand starting at position 2354 of SEQ ID NO: 3969
uuuggaauuugucacaaag

SEQ ID NO: 309039 - RNA, 19 nt, Artificial Sequence
  Description of Artificial Sequence: Synthetic oligonucleotide
  Antisense strand to SEQ ID NO: 309038
cuuugugacaaauuccaaa

SEQ ID NO: 309040 - RNA, 19 nt, Artificial Sequence
  Description of Artificial Sequence: Synthetic oligonucleotide
  Sense strand starting at position 2356 of SEQ ID NO: 3969
uggaauuugucacaaagaa

SEQ ID NO: 309041 - RNA, 19 nt, Artificial Sequence
  Description of Artificial Sequence: Synthetic oligonucleotide
  Antisense strand to SEQ ID NO: 309040
uucuuugugacaaauucca

SEQ ID NO: 309042 - RNA, 19 nt, Artificial Sequence
  Description of Artificial Sequence: Synthetic oligonucleotide
  Sense strand starting at position 2710 of SEQ ID NO: 3969
uuuguccucugcccagaaa

SEQ ID NO: 309043 - RNA, 19 nt, Artificial Sequence
  Description of Artificial Sequence: Synthetic oligonucleotide
  Antisense strand to SEQ ID NO: 309042
uuucugggcagaggacaaa

SEQ ID NO: 309044 - RNA, 19 nt, Artificial Sequence
  Description of Artificial Sequence: Synthetic oligonucleotide
  Sense strand starting at position 2713 of SEQ ID NO: 3969
guccucugcccagaaagaa

SEQ ID NO: 309045 - RNA, 19 nt, Artificial Sequence
  Description of Artificial Sequence: Synthetic oligonucleotide
  Antisense strand to SEQ ID NO: 309044
uucuuucugggcagaggac

SEQ ID NO: 309046 - RNA, 19 nt, Artificial Sequence
  Description of Artificial Sequence: Synthetic oligonucleotide
  Sense strand starting at position 2739 of SEQ ID NO: 3969
ucucauguucgacggaaag

SEQ ID NO: 309047 - RNA, 19 nt, Artificial Sequence
  Description of Artificial Sequence: Synthetic oligonucleotide
  Antisense strand to SEQ ID NO: 309046
cuuuccgucgaacaugaga

SEQ ID NO: 309048 - RNA, 19 nt, Artificial Sequence
  Description of Artificial Sequence: Synthetic oligonucleotide
  Sense strand starting at position 2741 of SEQ ID NO: 3969
ucauguucgacggaaagag

SEQ ID NO: 309049 - RNA, 19 nt, Artificial Sequence
  Description of Artificial Sequence: Synthetic oligonucleotide
  Antisense strand to SEQ ID NO: 309048
cucuuuccgucgaacauga

SEQ ID NO: 309050 - RNA, 19 nt, Artificial Sequence
  Description of Artificial Sequence: Synthetic oligonucleotide
  Sense strand starting at position 2920 of SEQ ID NO: 3969
uucugaggccucugaaaug

SEQ ID NO: 309051 - RNA, 19 nt, Artificial Sequence
  Description of Artificial Sequence: Synthetic oligonucleotide
  Antisense strand to SEQ ID NO: 309050
cauuucagaggccucagaa

SEQ ID NO: 309052 - RNA, 19 nt, Artificial Sequence
  Description of Artificial Sequence: Synthetic oligonucleotide
  Sense strand starting at position 2939 of SEQ ID NO: 3969
cuguaaugagauugacaac

SEQ ID NO: 309053 - RNA, 19 nt, Artificial Sequence
  Description of Artificial Sequence: Synthetic oligonucleotide
  Antisense strand to SEQ ID NO: 309052
guugucaaucucauuacag

SEQ ID NO: 309054 - RNA, 19 nt, Artificial Sequence
  Description of Artificial Sequence: Synthetic oligonucleotide
  Sense strand starting at position 2977 of SEQ ID NO: 3969
ccagaaauuugauggaaug

SEQ ID NO: 309055 - RNA, 19 nt, Artificial Sequence
  Description of Artificial Sequence: Synthetic oligonucleotide
  Antisense strand to SEQ ID NO: 309054
cauuccaucaaauuucugg

SEQ ID NO: 309056 - RNA, 19 nt, Artificial Sequence
  Description of Artificial Sequence: Synthetic oligonucleotide
  Sense strand starting at position 3011 of SEQ ID NO: 3969
uuaaauggcuuuccucaga

SEQ ID NO: 309057 - RNA, 19 nt, Artificial Sequence
  Description of Artificial Sequence: Synthetic oligonucleotide
  Antisense strand to SEQ ID NO: 309056
ucugaggaaagccauuuaa

SEQ ID NO: 309058 - RNA, 19 nt, Artificial Sequence
  Description of Artificial Sequence: Synthetic oligonucleotide
  Sense strand starting at position 3177 of SEQ ID NO: 3969
ucaggaaucuauguauugu

SEQ ID NO: 309059 - RNA, 19 nt, Artificial Sequence
  Description of Artificial Sequence: Synthetic oligonucleotide
  Antisense strand to SEQ ID NO: 309058
acaauacauagauuccuga

SEQ ID NO: 309060 - RNA, 19 nt, Artificial Sequence
  Description of Artificial Sequence: Synthetic oligonucleotide
  Sense strand starting at position 3301 of SEQ ID NO: 3969
ugggaauucucauugcauu

SEQ ID NO: 309061 - RNA, 19 nt, Artificial Sequence
  Description of Artificial Sequence: Synthetic oligonucleotide
  Antisense strand to SEQ ID NO: 309060
aaugcaaugagaauuccca

SEQ ID NO: 309062 - RNA, 19 nt, Artificial Sequence
  Description of Artificial Sequence: Synthetic oligonucleotide
  Sense strand starting at position 3302 of SEQ ID NO: 3969
gggaauucucauugcauug

SEQ ID NO: 309063 - RNA, 19 nt, Artificial Sequence
  Description of Artificial Sequence: Synthetic oligonucleotide
  Antisense strand to SEQ ID NO: 309062
caaugcaaugagaauuccc

SEQ ID NO: 309064 - RNA, 19 nt, Artificial Sequence
  Description of Artificial Sequence: Synthetic oligonucleotide
  Sense strand starting at position 3322 of SEQ ID NO: 3969
gcugaauuccaucaugcag

SEQ ID NO: 309065 - RNA, 19 nt, Artificial Sequence
  Description of Artificial Sequence: Synthetic oligonucleotide
  Antisense strand to SEQ ID NO: 309064
cugcaugauggaauucagc

SEQ ID NO: 309066 - RNA, 19 nt, Artificial Sequence
  Description of Artificial Sequence: Synthetic oligonucleotide
  Sense strand starting at position 3389 of SEQ ID NO: 3969
gcauuucgugagggauuca

SEQ ID NO: 309067 - RNA, 19 nt, Artificial Sequence
  Description of Artificial Sequence: Synthetic oligonucleotide
  Antisense strand to SEQ ID NO: 309066
ugaaucccucacgaaaugc

SEQ ID NO: 309068 - RNA, 19 nt, Artificial Sequence
  Description of Artificial Sequence: Synthetic oligonucleotide
  Sense strand starting at position 3420 of SEQ ID NO: 3969
agggcauaauucuuguaga

SEQ ID NO: 309069 - RNA, 19 nt, Artificial Sequence
  Description of Artificial Sequence: Synthetic oligonucleotide
  Antisense strand to SEQ ID NO: 309068
ucuacaagaauuaugcccu

SEQ ID NO: 309070 - RNA, 19 nt, Artificial Sequence
  Description of Artificial Sequence: Synthetic oligonucleotide
  Sense strand starting at position 3492 of SEQ ID NO: 3969
gucacuuuccucuaguaca

SEQ ID NO: 309071 - RNA, 19 nt, Artificial Sequence
  Description of Artificial Sequence: Synthetic oligonucleotide
  Antisense strand to SEQ ID NO: 309070
uguacuagaggaaagugac

SEQ ID NO: 309072 - RNA, 19 nt, Artificial Sequence
  Description of Artificial Sequence: Synthetic oligonucleotide
  Sense strand starting at position 3573 of SEQ ID NO: 3969
ggccuaaaugcaugugaua

SEQ ID NO: 309073 - RNA, 19 nt, Artificial Sequence
  Description of Artificial Sequence: Synthetic oligonucleotide
  Antisense strand to SEQ ID NO: 309072
uaucacaugcauuuaggcc

SEQ ID NO: 309074 - RNA, 19 nt, Artificial Sequence
  Description of Artificial Sequence: Synthetic oligonucleotide
  Sense strand starting at position 3611 of SEQ ID NO: 3969
gcguuucuucucucuagua

SEQ ID NO: 309075 - RNA, 19 nt, Artificial Sequence
  Description of Artificial Sequence: Synthetic oligonucleotide
  Antisense strand to SEQ ID NO: 309074
uacuagagagaagaaacgc

SEQ ID NO: 309076 - RNA, 19 nt, Artificial Sequence
  Description of Artificial Sequence: Synthetic oligonucleotide
  Sense strand starting at position 3625 of SEQ ID NO: 3969
uaguaaauugcaugucaga

SEQ ID NO: 309077 - RNA, 19 nt, Artificial Sequence
  Description of Artificial Sequence: Synthetic oligonucleotide
  Antisense strand to SEQ ID NO: 309076
ucugacaugcaauuuacua

SEQ ID NO: 309078 - RNA, 19 nt, Artificial Sequence
  Description of Artificial Sequence: Synthetic oligonucleotide
  Sense strand starting at position 3804 of SEQ ID NO: 3969
uuacuugauagguaccgua

SEQ ID NO: 309079 - RNA, 19 nt, Artificial Sequence
  Description of Artificial Sequence: Synthetic oligonucleotide
  Antisense strand to SEQ ID NO: 309078
uacgguaccuaucaaguaa

SEQ ID NO: 309080 - RNA, 19 nt, Artificial Sequence
  Description of Artificial Sequence: Synthetic oligonucleotide
  Sense strand starting at position 3823 of SEQ ID NO: 3969
gauugagcucugccgcuau

SEQ ID NO: 309081 - RNA, 19 nt, Artificial Sequence
  Description of Artificial Sequence: Synthetic oligonucleotide
  Antisense strand to SEQ ID NO: 309080
auagcggcagagcucaauc

SEQ ID NO: 309082 - RNA, 19 nt, Artificial Sequence
  Description of Artificial Sequence: Synthetic oligonucleotide
  Sense strand starting at position 3825 of SEQ ID NO: 3969
uugagcucugccgcuauga

SEQ ID NO: 309083 - RNA, 19 nt, Artificial Sequence
  Description of Artificial Sequence: Synthetic oligonucleotide
  Antisense strand to SEQ ID NO: 309082
ucauagcggcagagcucaa

SEQ ID NO: 309084 - RNA, 19 nt, Artificial Sequence
  Description of Artificial Sequence: Synthetic oligonucleotide
  Sense strand starting at position 3826 of SEQ ID NO: 3969
ugagcucugccgcuaugau

SEQ ID NO: 309085 - RNA, 19 nt, Artificial Sequence
  Description of Artificial Sequence: Synthetic oligonucleotide
  Antisense strand to SEQ ID NO: 309084
aucauagcggcagagcuca

SEQ ID NO: 309086 - RNA, 19 nt, Artificial Sequence
  Description of Artificial Sequence: Synthetic oligonucleotide
  Sense strand starting at position 176 of SEQ ID NO: 3970
cauguaggacucuagucua

SEQ ID NO: 309087 - RNA, 19 nt, Artificial Sequence
  Description of Artificial Sequence: Synthetic oligonucleotide
  Antisense strand to SEQ ID NO: 309086
uagacuagaguccuacaug

SEQ ID NO: 309088 - RNA, 19 nt, Artificial Sequence
  Description of Artificial Sequence: Synthetic oligonucleotide
  Sense strand starting at position 179 of SEQ ID NO: 3970
guaggacucuagucuacua

SEQ ID NO: 309089 - RNA, 19 nt, Artificial Sequence
  Description of Artificial Sequence: Synthetic oligonucleotide
  Antisense strand to SEQ ID NO: 309088
uaguagacuagaguccuac

SEQ ID NO: 309090 - RNA, 19 nt, Artificial Sequence
  Description of Artificial Sequence: Synthetic oligonucleotide
  Sense strand starting at position 372 of SEQ ID NO: 3970
cuugucaaaucugucugua

SEQ ID NO: 309091 - RNA, 19 nt, Artificial Sequence
  Description of Artificial Sequence: Synthetic oligonucleotide
  Antisense strand to SEQ ID NO: 309090
uacagacagauuugacaag

SEQ ID NO: 309092 - RNA, 19 nt, Artificial Sequence
  Description of Artificial Sequence: Synthetic oligonucleotide
  Sense strand starting at position 374 of SEQ ID NO: 3970
ugucaaaucugucuguauu

SEQ ID NO: 309093 - RNA, 19 nt, Artificial Sequence
  Description of Artificial Sequence: Synthetic oligonucleotide
  Antisense strand to SEQ ID NO: 309092
aauacagacagauuugaca

SEQ ID NO: 309094 - RNA, 19 nt, Artificial Sequence
  Description of Artificial Sequence: Synthetic oligonucleotide
  Sense strand starting at position 375 of SEQ ID NO: 3970
gucaaaucugucuguauug

SEQ ID NO: 309095 - RNA, 19 nt, Artificial Sequence
  Description of Artificial Sequence: Synthetic oligonucleotide
  Antisense strand to SEQ ID NO: 309094
caauacagacagauuugac

SEQ ID NO: 309096 - RNA, 19 nt, Artificial Sequence
  Description of Artificial Sequence: Synthetic oligonucleotide
  Sense strand starting at position 377 of SEQ ID NO: 3970
caaaucugucuguauuggu

SEQ ID NO: 309097 - RNA, 19 nt, Artificial Sequence
  Description of Artificial Sequence: Synthetic oligonucleotide
  Antisense strand to SEQ ID NO: 309096
accaauacagacagauuug

SEQ ID NO: 309098 - RNA, 19 nt, Artificial Sequence
  Description of Artificial Sequence: Synthetic oligonucleotide
  Sense strand starting at position 382 of SEQ ID NO: 3970
cugucuguauugguguaua

SEQ ID NO: 309099 - RNA, 19 nt, Artificial Sequence
  Description of Artificial Sequence: Synthetic oligonucleotide
  Antisense strand to SEQ ID NO: 309098
uauacaccaauacagacag

SEQ ID NO: 309100 - RNA, 19 nt, Artificial Sequence
  Description of Artificial Sequence: Synthetic oligonucleotide
  Sense strand starting at position 385 of SEQ ID NO: 3970
ucuguauugguguauaaag

SEQ ID NO: 309101 - RNA, 19 nt, Artificial Sequence
  Description of Artificial Sequence: Synthetic oligonucleotide
  Antisense strand to SEQ ID NO: 309100
cuuuauacaccaauacaga

SEQ ID NO: 309102 - RNA, 19 nt, Artificial Sequence
  Description of Artificial Sequence: Synthetic oligonucleotide
  Sense strand starting at position 387 of SEQ ID NO: 3970
uguauugguguauaaagga

SEQ ID NO: 309103 - RNA, 19 nt, Artificial Sequence
  Description of Artificial Sequence: Synthetic oligonucleotide
  Antisense strand to SEQ ID NO: 309102
uccuuuauacaccaauaca

SEQ ID NO: 309104 - RNA, 19 nt, Artificial Sequence
  Description of Artificial Sequence: Synthetic oligonucleotide
  Sense strand starting at position 663 of SEQ ID NO: 3970
gugggcuaaauaugaucua

SEQ ID NO: 309105 - RNA, 19 nt, Artificial Sequence
  Description of Artificial Sequence: Synthetic oligonucleotide
  Antisense strand to SEQ ID NO: 309104
uagaucauauuuagcccac

SEQ ID NO: 309106 - RNA, 19 nt, Artificial Sequence
  Description of Artificial Sequence: Synthetic oligonucleotide
  Sense strand starting at position 666 of SEQ ID NO: 3970
ggcuaaauaugaucuauaa

SEQ ID NO: 309107 - RNA, 19 nt, Artificial Sequence
  Description of Artificial Sequence: Synthetic oligonucleotide
  Antisense strand to SEQ ID NO: 309106
uuauagaucauauuuagcc

SEQ ID NO: 309108 - RNA, 19 nt, Artificial Sequence
  Description of Artificial Sequence: Synthetic oligonucleotide
  Sense strand starting at position 935 of SEQ ID NO: 3970
guacauaaauuggcacaaa

SEQ ID NO: 309109 - RNA, 19 nt, Artificial Sequence
  Description of Artificial Sequence: Synthetic oligonucleotide
  Antisense strand to SEQ ID NO: 309108
uuugugccaauuuauguac

SEQ ID NO: 309110 - RNA, 19 nt, Artificial Sequence
  Description of Artificial Sequence: Synthetic oligonucleotide
  Sense strand starting at position 1044 of SEQ ID NO: 3970
gccagauuauuccuaaugu

SEQ ID NO: 309111 - RNA, 19 nt, Artificial Sequence
  Description of Artificial Sequence: Synthetic oligonucleotide
  Antisense strand to SEQ ID NO: 309110
acauuaggaauaaucuggc

SEQ ID NO: 309112 - RNA, 19 nt, Artificial Sequence
  Description of Artificial Sequence: Synthetic oligonucleotide
  Sense strand starting at position 1074 of SEQ ID NO: 3970
ggugacuuaccauaggcaa

SEQ ID NO: 309113 - RNA, 19 nt, Artificial Sequence
  Description of Artificial Sequence: Synthetic oligonucleotide
  Antisense strand to SEQ ID NO: 309112
uugccuaugguaagucacc

SEQ ID NO: 309114 - RNA, 19 nt, Artificial Sequence
  Description of Artificial Sequence: Synthetic oligonucleotide
  Sense strand starting at position 2035 of SEQ ID NO: 3970
gcguguauuuauccuguca

SEQ ID NO: 309115 - RNA, 19 nt, Artificial Sequence
  Description of Artificial Sequence: Synthetic oligonucleotide
  Antisense strand to SEQ ID NO: 309114
ugacaggauaaauacacgc

SEQ ID NO: 309116 - RNA, 19 nt, Artificial Sequence
  Description of Artificial Sequence: Synthetic oligonucleotide
  Sense strand starting at position 2136 of SEQ ID NO: 3970
acuuguauguaucucauaa

SEQ ID NO: 309117 - RNA, 19 nt, Artificial Sequence
  Description of Artificial Sequence: Synthetic oligonucleotide
  Antisense strand to SEQ ID NO: 309116
uuaugagauacauacaagu

SEQ ID NO: 309118 - RNA, 19 nt, Artificial Sequence
  Description of Artificial Sequence: Synthetic oligonucleotide
  Sense strand starting at position 2149 of SEQ ID NO: 3970
ucauaagaguacuauaaga

SEQ ID NO: 309119 - RNA, 19 nt, Artificial Sequence
  Description of Artificial Sequence: Synthetic oligonucleotide
  Antisense strand to SEQ ID NO: 309118
ucuuauaguacucuuauga

SEQ ID NO: 309120 - RNA, 19 nt, Artificial Sequence
  Description of Artificial Sequence: Synthetic oligonucleotide
  Sense strand starting at position 2157 of SEQ ID NO: 3970
guacuauaagaguagcuua

SEQ ID NO: 309121 - RNA, 19 nt, Artificial Sequence
  Description of Artificial Sequence: Synthetic oligonucleotide
  Antisense strand to SEQ ID NO: 309120
uaagcuacucuuauaguac

SEQ ID NO: 309122 - RNA, 19 nt, Artificial Sequence
  Description of Artificial Sequence: Synthetic oligonucleotide
  Sense strand starting at position 2162 of SEQ ID NO: 3970
auaagaguagcuuauaguc

SEQ ID NO: 309123 - RNA, 19 nt, Artificial Sequence
  Description of Artificial Sequence: Synthetic oligonucleotide
  Antisense strand to SEQ ID NO: 309122
gacuauaagcuacucuuau

SEQ ID NO: 309124 - RNA, 19 nt, Artificial Sequence
  Description of Artificial Sequence: Synthetic oligonucleotide
  Sense strand starting at position 2207 of SEQ ID NO: 3970
gcuguaacgugaguuuaga

SEQ ID NO: 309125 - RNA, 19 nt, Artificial Sequence
  Description of Artificial Sequence: Synthetic oligonucleotide
  Antisense strand to SEQ ID NO: 309124
ucuaaacucacguuacagc

SEQ ID NO: 309126 - RNA, 19 nt, Artificial Sequence
  Description of Artificial Sequence: Synthetic oligonucleotide
  Sense strand starting at position 2245 of SEQ ID NO: 3970
gcuuuaggaccuugaagau

SEQ ID NO: 309127 - RNA, 19 nt, Artificial Sequence
  Description of Artificial Sequence: Synthetic oligonucleotide
  Antisense strand to SEQ ID NO: 309126
aucuucaagguccuaaagc

SEQ ID NO: 309128 - RNA, 19 nt, Artificial Sequence
  Description of Artificial Sequence: Synthetic oligonucleotide
  Sense strand starting at position 2371 of SEQ ID NO: 3970
gaaagaaauugguauccua

SEQ ID NO: 309129 - RNA, 19 nt, Artificial Sequence
  Description of Artificial Sequence: Synthetic oligonucleotide
  Antisense strand to SEQ ID NO: 309128
uaggauaccaauuucuuuc

SEQ ID NO: 309130 - RNA, 19 nt, Artificial Sequence
  Description of Artificial Sequence: Synthetic oligonucleotide
  Sense strand starting at position 2374 of SEQ ID NO: 3970
agaaauugguauccuaugu

SEQ ID NO: 309131 - RNA, 19 nt, Artificial Sequence
  Description of Artificial Sequence: Synthetic oligonucleotide
  Antisense strand to SEQ ID NO: 309130
acauaggauaccaauuucu

SEQ ID NO: 309132 - RNA, 19 nt, Artificial Sequence
  Description of Artificial Sequence: Synthetic oligonucleotide
  Sense strand starting at position 2378 of SEQ ID NO: 3970
auugguauccuauguucca

SEQ ID NO: 309133 - RNA, 19 nt, Artificial Sequence
  Description of Artificial Sequence: Synthetic oligonucleotide
  Antisense strand to SEQ ID NO: 309132
uggaacauaggauaccaau

SEQ ID NO: 309134 - RNA, 19 nt, Artificial Sequence
  Description of Artificial Sequence: Synthetic oligonucleotide
  Sense strand starting at position 2379 of SEQ ID NO: 3970
uugguauccuauguuccaa

SEQ ID NO: 309135 - RNA, 19 nt, Artificial Sequence
  Description of Artificial Sequence: Synthetic oligonucleotide
  Antisense strand to SEQ ID NO: 309134
uuggaacauaggauaccaa

SEQ ID NO: 309136 - RNA, 19 nt, Artificial Sequence
  Description of Artificial Sequence: Synthetic oligonucleotide
  Sense strand starting at position 2459 of SEQ ID NO: 3970
gcaucucugcaaugcauaa

SEQ ID NO: 309137 - RNA, 19 nt, Artificial Sequence
  Description of Artificial Sequence: Synthetic oligonucleotide
  Antisense strand to SEQ ID NO: 309136
uuaugcauugcagagaugc

SEQ ID NO: 309138 - RNA, 19 nt, Artificial Sequence
  Description of Artificial Sequence: Synthetic oligonucleotide
  Sense strand starting at position 2511 of SEQ ID NO: 3970
cugagaggccucugaaaug

SEQ ID NO: 309139 - RNA, 19 nt, Artificial Sequence
  Description of Artificial Sequence: Synthetic oligonucleotide
  Antisense strand to SEQ ID NO: 309138
cauuucagaggccucucag

SEQ ID NO: 309140 - RNA, 19 nt, Artificial Sequence
  Description of Artificial Sequence: Synthetic oligonucleotide
  Sense strand starting at position 2520 of SEQ ID NO: 3970
cucugaaaugccgaaauga

SEQ ID NO: 309141 - RNA, 19 nt, Artificial Sequence
  Description of Artificial Sequence: Synthetic oligonucleotide
  Antisense strand to SEQ ID NO: 309140
ucauuucggcauuucagag

SEQ ID NO: 309142 - RNA, 19 nt, Artificial Sequence
  Description of Artificial Sequence: Synthetic oligonucleotide
  Sense strand starting at position 2753 of SEQ ID NO: 3970
acuugucucccucagucua

SEQ ID NO: 309143 - RNA, 19 nt, Artificial Sequence
  Description of Artificial Sequence: Synthetic oligonucleotide
  Antisense strand to SEQ ID NO: 309142
uagacugagggagacaagu

SEQ ID NO: 309144 - RNA, 19 nt, Artificial Sequence
  Description of Artificial Sequence: Synthetic oligonucleotide
  Sense strand starting at position 2781 of SEQ ID NO: 3970
cccugaggucaguggugau

SEQ ID NO: 309145 - RNA, 19 nt, Artificial Sequence
  Description of Artificial Sequence: Synthetic oligonucleotide
  Antisense strand to SEQ ID NO: 309144
aucaccacugaccucaggg

SEQ ID NO: 309146 - RNA, 19 nt, Artificial Sequence
  Description of Artificial Sequence: Synthetic oligonucleotide
  Sense strand starting at position 2796 of SEQ ID NO: 3970
ugaugucaucuuuguguuu

SEQ ID NO: 309147 - RNA, 19 nt, Artificial Sequence
  Description of Artificial Sequence: Synthetic oligonucleotide
  Antisense strand to SEQ ID NO: 309146
aaacacaaagaugacauca

SEQ ID NO: 309148 - RNA, 19 nt, Artificial Sequence
  Description of Artificial Sequence: Synthetic oligonucleotide
  Sense strand starting at position 2837 of SEQ ID NO: 3970
augcuaugccuuugauaua

SEQ ID NO: 309149 - RNA, 19 nt, Artificial Sequence
  Description of Artificial Sequence: Synthetic oligonucleotide
  Antisense strand to SEQ ID NO: 309148
uauaucaaaggcauagcau

SEQ ID NO: 309150 - RNA, 19 nt, Artificial Sequence
  Description of Artificial Sequence: Synthetic oligonucleotide
  Sense strand starting at position 2943 of SEQ ID NO: 3970
gggcaugguucccucauga

SEQ ID NO: 309151 - RNA, 19 nt, Artificial Sequence
  Description of Artificial Sequence: Synthetic oligonucleotide
  Antisense strand to SEQ ID NO: 309150
ucaugagggaaccaugccc

SEQ ID NO: 309152 - RNA, 19 nt, Artificial Sequence
  Description of Artificial Sequence: Synthetic oligonucleotide
  Sense strand starting at position 3011 of SEQ ID NO: 3970
guuguuuaaacguauguac

SEQ ID NO: 309153 - RNA, 19 nt, Artificial Sequence
  Description of Artificial Sequence: Synthetic oligonucleotide
  Antisense strand to SEQ ID NO: 309152
guacauacguuuaaacaac

SEQ ID NO: 309154 - RNA, 19 nt, Artificial Sequence
  Description of Artificial Sequence: Synthetic oligonucleotide
  Sense strand starting at position 3013 of SEQ ID NO: 3970
uguuuaaacguauguacca

SEQ ID NO: 309155 - RNA, 19 nt, Artificial Sequence
  Description of Artificial Sequence: Synthetic oligonucleotide
  Antisense strand to SEQ ID NO: 309154
ugguacauacguuuaaaca

SEQ ID NO: 309156 - RNA, 19 nt, Artificial Sequence
  Description of Artificial Sequence: Synthetic oligonucleotide
  Sense strand starting at position 3014 of SEQ ID NO: 3970
guuuaaacguauguaccaa

SEQ ID NO: 309157 - RNA, 19 nt, Artificial Sequence
  Description of Artificial Sequence: Synthetic oligonucleotide
  Antisense strand to SEQ ID NO: 309156
uugguacauacguuuaaac

SEQ ID NO: 309158 - RNA, 19 nt, Artificial Sequence
  Description of Artificial Sequence: Synthetic oligonucleotide
  Sense strand starting at position 3056 of SEQ ID NO: 3970
aggagaacuucuccaggcu

SEQ ID NO: 309159 - RNA, 19 nt, Artificial Sequence
  Description of Artificial Sequence: Synthetic oligonucleotide
  Antisense strand to SEQ ID NO: 309158
agccuggagaaguucuccu

SEQ ID NO: 309160 - RNA, 19 nt, Artificial Sequence
  Description of Artificial Sequence: Synthetic oligonucleotide
  Sense strand starting at position 3238 of SEQ ID NO: 3970
gguaacccaucagacuaaa

SEQ ID NO: 309161 - RNA, 19 nt, Artificial Sequence
  Description of Artificial Sequence: Synthetic oligonucleotide
  Antisense strand to SEQ ID NO: 309160
uuuagucugauggguuacc

SEQ ID NO: 309162 - RNA, 19 nt, Artificial Sequence
  Description of Artificial Sequence: Synthetic oligonucleotide
  Sense strand starting at position 3552 of SEQ ID NO: 3970
gcaucaacuagugggcaau

SEQ ID NO: 309163 - RNA, 19 nt, Artificial Sequence
  Description of Artificial Sequence: Synthetic oligonucleotide
  Antisense strand to SEQ ID NO: 309162
auugcccacuaguugaugc

SEQ ID NO: 309164 - RNA, 19 nt, Artificial Sequence
  Description of Artificial Sequence: Synthetic oligonucleotide
  Sense strand starting at position 3555 of SEQ ID NO: 3970
ucaacuagugggcaauaua

SEQ ID NO: 309165 - RNA, 19 nt, Artificial Sequence
  Description of Artificial Sequence: Synthetic oligonucleotide
  Antisense strand to SEQ ID NO: 309164
uauauugcccacuaguuga

SEQ ID NO: 309166 - RNA, 19 nt, Artificial Sequence
  Description of Artificial Sequence: Synthetic oligonucleotide
  Sense strand starting at position 7 of SEQ ID NO: 3971
ugguauaaauaucagagaa

SEQ ID NO: 309167 - RNA, 19 nt, Artificial Sequence
  Description of Artificial Sequence: Synthetic oligonucleotide
  Antisense strand to SEQ ID NO: 309166
uucucugauauuuauacca

SEQ ID NO: 309168 - RNA, 19 nt, Artificial Sequence
  Description of Artificial Sequence: Synthetic oligonucleotide
  Sense strand starting at position 24 of SEQ ID NO: 3971
aagggaauucuuugcaguu

SEQ ID NO: 309169 - RNA, 19 nt, Artificial Sequence
  Description of Artificial Sequence: Synthetic oligonucleotide
  Antisense strand to SEQ ID NO: 309168
aacugcaaagaauucccuu

SEQ ID NO: 309170 - RNA, 19 nt, Artificial Sequence
  Description of Artificial Sequence: Synthetic oligonucleotide
  Sense strand starting at position 25 of SEQ ID NO: 3971
agggaauucuuugcaguug

SEQ ID NO: 309171 - RNA, 19 nt, Artificial Sequence
  Description of Artificial Sequence: Synthetic oligonucleotide
  Antisense strand to SEQ ID NO: 309170
caacugcaaagaauucccu

SEQ ID NO: 309172 - RNA, 19 nt, Artificial Sequence
  Description of Artificial Sequence: Synthetic oligonucleotide
  Sense strand starting at position 36 of SEQ ID NO: 3971
ugcaguugacauuguauau

SEQ ID NO: 309173 - RNA, 19 nt, Artificial Sequence
  Description of Artificial Sequence: Synthetic oligonucleotide
  Antisense strand to SEQ ID NO: 309172
auauacaaugucaacugca

SEQ ID NO: 309174 - RNA, 19 nt, Artificial Sequence
  Description of Artificial Sequence: Synthetic oligonucleotide
  Sense strand starting at position 40 of SEQ ID NO: 3971
guugacauuguauauugua

SEQ ID NO: 309175 - RNA, 19 nt, Artificial Sequence
  Description of Artificial Sequence: Synthetic oligonucleotide
  Antisense strand to SEQ ID NO: 309174
uacaauauacaaugucaac

SEQ ID NO: 309176 - RNA, 19 nt, Artificial Sequence
  Description of Artificial Sequence: Synthetic oligonucleotide
  Sense strand starting at position 56 of SEQ ID NO: 3971
guacaucuacuguauacua

SEQ ID NO: 309177 - RNA, 19 nt, Artificial Sequence
  Description of Artificial Sequence: Synthetic oligonucleotide
  Antisense strand to SEQ ID NO: 309176
uaguauacaguagauguac

SEQ ID NO: 309178 - RNA, 19 nt, Artificial Sequence
  Description of Artificial Sequence: Synthetic oligonucleotide
  Sense strand starting at position 151 of SEQ ID NO: 3971
gucaguuacauguagaaau

SEQ ID NO: 309179 - RNA, 19 nt, Artificial Sequence
  Description of Artificial Sequence: Synthetic oligonucleotide
  Antisense strand to SEQ ID NO: 309178
auuucuacauguaacugac

SEQ ID NO: 309180 - RNA, 19 nt, Artificial Sequence
  Description of Artificial Sequence: Synthetic oligonucleotide
  Sense strand starting at position 206 of SEQ ID NO: 3971
augaaaugcugaggaauaa

SEQ ID NO: 309181 - RNA, 19 nt, Artificial Sequence
  Description of Artificial Sequence: Synthetic oligonucleotide
  Antisense strand to SEQ ID NO: 309180
uuauuccucagcauuucau

SEQ ID NO: 309182 - RNA, 19 nt, Artificial Sequence
  Description of Artificial Sequence: Synthetic oligonucleotide
  Sense strand starting at position 386 of SEQ ID NO: 3971
cauguagggcucuagucaa

SEQ ID NO: 309183 - RNA, 19 nt, Artificial Sequence
  Description of Artificial Sequence: Synthetic oligonucleotide
  Antisense strand to SEQ ID NO: 309182
uugacuagagcccuacaug

SEQ ID NO: 309184 - RNA, 19 nt, Artificial Sequence
  Description of Artificial Sequence: Synthetic oligonucleotide
  Sense strand starting at position 441 of SEQ ID NO: 3971
uaaggaaaguauuaaagag

SEQ ID NO: 309185 - RNA, 19 nt, Artificial Sequence
  Description of Artificial Sequence: Synthetic oligonucleotide
  Antisense strand to SEQ ID NO: 309184
cucuuuaauacuuuccuua

SEQ ID NO: 309186 - RNA, 19 nt, Artificial Sequence
  Description of Artificial Sequence: Synthetic oligonucleotide
  Sense strand starting at position 457 of SEQ ID NO: 3971
gaguguuuacacggcccua

SEQ ID NO: 309187 - RNA, 19 nt, Artificial Sequence
  Description of Artificial Sequence: Synthetic oligonucleotide
  Antisense strand to SEQ ID NO: 309186
uagggccguguaaacacuc

SEQ ID NO: 309188 - RNA, 19 nt, Artificial Sequence
  Description of Artificial Sequence: Synthetic oligonucleotide
  Sense strand starting at position 591 of SEQ ID NO: 3971
cugucuguauuggucuaua

SEQ ID NO: 309189 - RNA, 19 nt, Artificial Sequence
  Description of Artificial Sequence: Synthetic oligonucleotide
  Antisense strand to SEQ ID NO: 309188
uauagaccaauacagacag

SEQ ID NO: 309190 - RNA, 19 nt, Artificial Sequence
  Description of Artificial Sequence: Synthetic oligonucleotide
  Sense strand starting at position 594 of SEQ ID NO: 3971
ucuguauuggucuauaaag

SEQ ID NO: 309191 - RNA, 19 nt, Artificial Sequence
  Description of Artificial Sequence: Synthetic oligonucleotide
  Antisense strand to SEQ ID NO: 309190
cuuuauagaccaauacaga

SEQ ID NO: 309192 - RNA, 19 nt, Artificial Sequence
  Description of Artificial Sequence: Synthetic oligonucleotide
  Sense strand starting at position 596 of SEQ ID NO: 3971
uguauuggucuauaaaggu

SEQ ID NO: 309193 - RNA, 19 nt, Artificial Sequence
  Description of Artificial Sequence: Synthetic oligonucleotide
  Antisense strand to SEQ ID NO: 309192
accuuuauagaccaauaca

SEQ ID NO: 309194 - RNA, 19 nt, Artificial Sequence
  Description of Artificial Sequence: Synthetic oligonucleotide
  Sense strand starting at position 653 of SEQ ID NO: 3971
gaagaauauguccagccca

SEQ ID NO: 309195 - RNA, 19 nt, Artificial Sequence
  Description of Artificial Sequence: Synthetic oligonucleotide
  Antisense strand to SEQ ID NO: 309194
ugggcuggacauauucuuc

SEQ ID NO: 309196 - RNA, 19 nt, Artificial Sequence
  Description of Artificial Sequence: Synthetic oligonucleotide
  Sense strand starting at position 880 of SEQ ID NO: 3971
ggcugaauauguuccacaa

SEQ ID NO: 309197 - RNA, 19 nt, Artificial Sequence
  Description of Artificial Sequence: Synthetic oligonucleotide
  Antisense strand to SEQ ID NO: 309196
uuguggaacauauucagcc

SEQ ID NO: 309198 - RNA, 19 nt, Artificial Sequence
  Description of Artificial Sequence: Synthetic oligonucleotide
  Sense strand starting at position 1070 of SEQ ID NO: 3971
ggugaaguauucuuaaggu

SEQ ID NO: 309199 - RNA, 19 nt, Artificial Sequence
  Description of Artificial Sequence: Synthetic oligonucleotide
  Antisense strand to SEQ ID NO: 309198
accuuaagaauacuucacc

SEQ ID NO: 309200 - RNA, 19 nt, Artificial Sequence
  Description of Artificial Sequence: Synthetic oligonucleotide
  Sense strand starting at position 1992 of SEQ ID NO: 3971
cugggaaucuaagcuccua

SEQ ID NO: 309201 - RNA, 19 nt, Artificial Sequence
  Description of Artificial Sequence: Synthetic oligonucleotide
  Antisense strand to SEQ ID NO: 309200
uaggagcuuagauucccag

SEQ ID NO: 309202 - RNA, 19 nt, Artificial Sequence
  Description of Artificial Sequence: Synthetic oligonucleotide
  Sense strand starting at position 2014 of SEQ ID NO: 3971
uacaguaggugggagaaau

SEQ ID NO: 309203 - RNA, 19 nt, Artificial Sequence
  Description of Artificial Sequence: Synthetic oligonucleotide
  Antisense strand to SEQ ID NO: 309202
auuucucccaccuacugua

SEQ ID NO: 309204 - RNA, 19 nt, Artificial Sequence
  Description of Artificial Sequence: Synthetic oligonucleotide
  Sense strand starting at position 2091 of SEQ ID NO: 3971
aucagucacugacaaugau

SEQ ID NO: 309205 - RNA, 19 nt, Artificial Sequence
  Description of Artificial Sequence: Synthetic oligonucleotide
  Antisense strand to SEQ ID NO: 309204
aucauugucagugacugau

SEQ ID NO: 309206 - RNA, 19 nt, Artificial Sequence
  Description of Artificial Sequence: Synthetic oligonucleotide
  Sense strand starting at position 2222 of SEQ ID NO: 3971
cugcaauguuaaguuuaga

SEQ ID NO: 309207 - RNA, 19 nt, Artificial Sequence
  Description of Artificial Sequence: Synthetic oligonucleotide
  Antisense strand to SEQ ID NO: 309206
ucuaaacuuaacauugcag

SEQ ID NO: 309208 - RNA, 19 nt, Artificial Sequence
  Description of Artificial Sequence: Synthetic oligonucleotide
  Sense strand starting at position 2325 of SEQ ID NO: 3971
uggaauuugucccagagca

SEQ ID NO: 309209 - RNA, 19 nt, Artificial Sequence
  Description of Artificial Sequence: Synthetic oligonucleotide
  Antisense strand to SEQ ID NO: 309208
ugcucugggacaaauucca

SEQ ID NO: 309210 - RNA, 19 nt, Artificial Sequence
  Description of Artificial Sequence: Synthetic oligonucleotide
  Sense strand starting at position 2849 of SEQ ID NO: 3971
augcuaugccuuugacaua

SEQ ID NO: 309211 - RNA, 19 nt, Artificial Sequence
  Description of Artificial Sequence: Synthetic oligonucleotide
  Antisense strand to SEQ ID NO: 309210
uaugucaaaggcauagcau

SEQ ID NO: 309212 - RNA, 19 nt, Artificial Sequence
  Description of Artificial Sequence: Synthetic oligonucleotide
  Sense strand starting at position 2860 of SEQ ID NO: 3971
uugacauaguuuguauguu

SEQ ID NO: 309213 - RNA, 19 nt, Artificial Sequence
  Description of Artificial Sequence: Synthetic oligonucleotide
  Antisense strand to SEQ ID NO: 309212
aacauacaaacuaugucaa

SEQ ID NO: 309214 - RNA, 19 nt, Artificial Sequence
  Description of Artificial Sequence: Synthetic oligonucleotide
  Sense strand starting at position 2864 of SEQ ID NO: 3971
cauaguuuguauguuugua

SEQ ID NO: 309215 - RNA, 19 nt, Artificial Sequence
  Description of Artificial Sequence: Synthetic oligonucleotide
  Antisense strand to SEQ ID NO: 309214
uacaaacauacaaacuaug

SEQ ID NO: 309216 - RNA, 19 nt, Artificial Sequence
  Description of Artificial Sequence: Synthetic oligonucleotide
  Sense strand starting at position 2878 of SEQ ID NO: 3971
uuguauguuuggguuuaca

SEQ ID NO: 309217 - RNA, 19 nt, Artificial Sequence
  Description of Artificial Sequence: Synthetic oligonucleotide
  Antisense strand to SEQ ID NO: 309216
uguaaacccaaacauacaa

SEQ ID NO: 309218 - RNA, 19 nt, Artificial Sequence
  Description of Artificial Sequence: Synthetic oligonucleotide
  Sense strand starting at position 2881 of SEQ ID NO: 3971
uauguuuggguuuacaaau

SEQ ID NO: 309219 - RNA, 19 nt, Artificial Sequence
  Description of Artificial Sequence: Synthetic oligonucleotide
  Antisense strand to SEQ ID NO: 309218
auuuguaaacccaaacaua

SEQ ID NO: 309220 - RNA, 19 nt, Artificial Sequence
  Description of Artificial Sequence: Synthetic oligonucleotide
  Sense strand starting at position 3016 of SEQ ID NO: 3971
uugguucuaucauuacuuu

SEQ ID NO: 309221 - RNA, 19 nt, Artificial Sequence
  Description of Artificial Sequence: Synthetic oligonucleotide
  Antisense strand to SEQ ID NO: 309220
aaaguaaugauagaaccaa

SEQ ID NO: 309222 - RNA, 19 nt, Artificial Sequence
  Description of Artificial Sequence: Synthetic oligonucleotide
  Sense strand starting at position 3024 of SEQ ID NO: 3971
aucauuacuuugucccuga

SEQ ID NO: 309223 - RNA, 19 nt, Artificial Sequence
  Description of Artificial Sequence: Synthetic oligonucleotide
  Antisense strand to SEQ ID NO: 309222
ucagggacaaaguaaugau

SEQ ID NO: 309224 - RNA, 19 nt, Artificial Sequence
  Description of Artificial Sequence: Synthetic oligonucleotide
  Sense strand starting at position 3027 of SEQ ID NO: 3971
auuacuuugucccugaagu

SEQ ID NO: 309225 - RNA, 19 nt, Artificial Sequence
  Description of Artificial Sequence: Synthetic oligonucleotide
  Antisense strand to SEQ ID NO: 309224
acuucagggacaaaguaau

SEQ ID NO: 309226 - RNA, 19 nt, Artificial Sequence
  Description of Artificial Sequence: Synthetic oligonucleotide
  Sense strand starting at position 3028 of SEQ ID NO: 3971
uuacuuugucccugaaguc

SEQ ID NO: 309227 - RNA, 19 nt, Artificial Sequence
  Description of Artificial Sequence: Synthetic oligonucleotide
  Antisense strand to SEQ ID NO: 309226
gacuucagggacaaaguaa

SEQ ID NO: 309228 - RNA, 19 nt, Artificial Sequence
  Description of Artificial Sequence: Synthetic oligonucleotide
  Sense strand starting at position 3048 of SEQ ID NO: 3971
gguaauaucuugccaguaa

SEQ ID NO: 309229 - RNA, 19 nt, Artificial Sequence
  Description of Artificial Sequence: Synthetic oligonucleotide
  Antisense strand to SEQ ID NO: 309228
uuacuggcaagauauuacc

SEQ ID NO: 309230 - RNA, 19 nt, Artificial Sequence
  Description of Artificial Sequence: Synthetic oligonucleotide
  Sense strand starting at position 3052 of SEQ ID NO: 3971
auaucuugccaguaagaga

SEQ ID NO: 309231 - RNA, 19 nt, Artificial Sequence
  Description of Artificial Sequence: Synthetic oligonucleotide
  Antisense strand to SEQ ID NO: 309230
ucucuuacuggcaagauau

SEQ ID NO: 309232 - RNA, 19 nt, Artificial Sequence
  Description of Artificial Sequence: Synthetic oligonucleotide
  Sense strand starting at position 3222 of SEQ ID NO: 3971
auaugaaucugugagaaau

SEQ ID NO: 309233 - RNA, 19 nt, Artificial Sequence
  Description of Artificial Sequence: Synthetic oligonucleotide
  Antisense strand to SEQ ID NO: 309232
auuucucacagauucauau

SEQ ID NO: 309234 - RNA, 19 nt, Artificial Sequence
  Description of Artificial Sequence: Synthetic oligonucleotide
  Sense strand starting at position 3224 of SEQ ID NO: 3971
augaaucugugagaaauuc

SEQ ID NO: 309235 - RNA, 19 nt, Artificial Sequence
  Description of Artificial Sequence: Synthetic oligonucleotide
  Antisense strand to SEQ ID NO: 309234
gaauuucucacagauucau

SEQ ID NO: 309236 - RNA, 19 nt, Artificial Sequence
  Description of Artificial Sequence: Synthetic oligonucleotide
  Sense strand starting at position 3438 of SEQ ID NO: 3971
augaaugggcacugaaacu

SEQ ID NO: 309237 - RNA, 19 nt, Artificial Sequence
  Description of Artificial Sequence: Synthetic oligonucleotide
  Antisense strand to SEQ ID NO: 309236
aguuucagugcccauucau

SEQ ID NO: 309238 - RNA, 19 nt, Artificial Sequence
  Description of Artificial Sequence: Synthetic oligonucleotide
  Sense strand starting at position 3539 of SEQ ID NO: 3971
ugauguaauucuguaaagu

SEQ ID NO: 309239 - RNA, 19 nt, Artificial Sequence
  Description of Artificial Sequence: Synthetic oligonucleotide
  Antisense strand to SEQ ID NO: 309238
acuuuacagaauuacauca

SEQ ID NO: 309240 - RNA, 19 nt, Artificial Sequence
  Description of Artificial Sequence: Synthetic oligonucleotide
  Sense strand starting at position 3540 of SEQ ID NO: 3971
gauguaauucuguaaaguu

SEQ ID NO: 309241 - RNA, 19 nt, Artificial Sequence
  Description of Artificial Sequence: Synthetic oligonucleotide
  Antisense strand to SEQ ID NO: 309240
aacuuuacagaauuacauc

SEQ ID NO: 309242 - RNA, 19 nt, Artificial Sequence
  Description of Artificial Sequence: Synthetic oligonucleotide
  Sense strand starting at position 3830 of SEQ ID NO: 3971
gcaacuguuucuguuauug

SEQ ID NO: 309243 - RNA, 19 nt, Artificial Sequence
  Description of Artificial Sequence: Synthetic oligonucleotide
  Antisense strand to SEQ ID NO: 309242
caauaacagaaacaguugc

SEQ ID NO: 309244 - RNA, 19 nt, Artificial Sequence
  Description of Artificial Sequence: Synthetic oligonucleotide
  Sense strand starting at position 3862 of SEQ ID NO: 3971
ugcacaguaggcuauuaau

SEQ ID NO: 309245 - RNA, 19 nt, Artificial Sequence
  Description of Artificial Sequence: Synthetic oligonucleotide
  Antisense strand to SEQ ID NO: 309244
auuaauagccuacugugca

SEQ ID NO: 309246 - RNA, 19 nt, Artificial Sequence
  Description of Artificial Sequence: Synthetic oligonucleotide
  Sense strand starting at position 62 of SEQ ID NO: 3972
auaguuuaaguccaguuaa

SEQ ID NO: 309247 - RNA, 19 nt, Artificial Sequence
  Description of Artificial Sequence: Synthetic oligonucleotide
  Antisense strand to SEQ ID NO: 309246
uuaacuggacuuaaacuau

SEQ ID NO: 309248 - RNA, 19 nt, Artificial Sequence
  Description of Artificial Sequence: Synthetic oligonucleotide
  Sense strand starting at position 198 of SEQ ID NO: 3972
uuacaauucucacugugga

SEQ ID NO: 309249 - RNA, 19 nt, Artificial Sequence
  Description of Artificial Sequence: Synthetic oligonucleotide
  Antisense strand to SEQ ID NO: 309248
uccacagugagaauuguaa

SEQ ID NO: 309250 - RNA, 19 nt, Artificial Sequence
  Description of Artificial Sequence: Synthetic oligonucleotide
  Sense strand starting at position 211 of SEQ ID NO: 3972
uguggauuugccugugaaa

SEQ ID NO: 309251 - RNA, 19 nt, Artificial Sequence
  Description of Artificial Sequence: Synthetic oligonucleotide
  Antisense strand to SEQ ID NO: 309250
uuucacaggcaaauccaca

SEQ ID NO: 309252 - RNA, 19 nt, Artificial Sequence
  Description of Artificial Sequence: Synthetic oligonucleotide
  Sense strand starting at position 362 of SEQ ID NO: 3972
cugcuugggaccuguagaa

SEQ ID NO: 309253 - RNA, 19 nt, Artificial Sequence
  Description of Artificial Sequence: Synthetic oligonucleotide
  Antisense strand to SEQ ID NO: 309252
uucuacaggucccaagcag

SEQ ID NO: 309254 - RNA, 19 nt, Artificial Sequence
  Description of Artificial Sequence: Synthetic oligonucleotide
  Sense strand starting at position 813 of SEQ ID NO: 3972
gguaacaucuuccuagaug

SEQ ID NO: 309255 - RNA, 19 nt, Artificial Sequence
  Description of Artificial Sequence: Synthetic oligonucleotide
  Antisense strand to SEQ ID NO: 309254
caucuaggaagauguuacc

SEQ ID NO: 309256 - RNA, 19 nt, Artificial Sequence
  Description of Artificial Sequence: Synthetic oligonucleotide
  Sense strand starting at position 909 of SEQ ID NO: 3972
ggaggucacuuuccauguu

SEQ ID NO: 309257 - RNA, 19 nt, Artificial Sequence
  Description of Artificial Sequence: Synthetic oligonucleotide
  Antisense strand to SEQ ID NO: 309256
aacauggaaagugaccucc

SEQ ID NO: 309258 - RNA, 19 nt, Artificial Sequence
  Description of Artificial Sequence: Synthetic oligonucleotide
  Sense strand starting at position 1112 of SEQ ID NO: 3972
ccaugacuccgaggauagu

SEQ ID NO: 309259 - RNA, 19 nt, Artificial Sequence
  Description of Artificial Sequence: Synthetic oligonucleotide
  Antisense strand to SEQ ID NO: 309258
acuauccucggagucaugg

SEQ ID NO: 309260 - RNA, 19 nt, Artificial Sequence
  Description of Artificial Sequence: Synthetic oligonucleotide
  Sense strand starting at position 1144 of SEQ ID NO: 3972
uuggaaaucugacucgaaa

SEQ ID NO: 309261 - RNA, 19 nt, Artificial Sequence
  Description of Artificial Sequence: Synthetic oligonucleotide
  Antisense strand to SEQ ID NO: 309260
uuucgagucagauuuccaa

SEQ ID NO: 309262 - RNA, 19 nt, Artificial Sequence
  Description of Artificial Sequence: Synthetic oligonucleotide
  Sense strand starting at position 1224 of SEQ ID NO: 3972
agaacaguguuacugaaga

SEQ ID NO: 309263 - RNA, 19 nt, Artificial Sequence
  Description of Artificial Sequence: Synthetic oligonucleotide
  Antisense strand to SEQ ID NO: 309262
ucuucaguaacacuguucu

SEQ ID NO: 309264 - RNA, 19 nt, Artificial Sequence
  Description of Artificial Sequence: Synthetic oligonucleotide
  Sense strand starting at position 1229 of SEQ ID NO: 3972
aguguuacugaagagguca

SEQ ID NO: 309265 - RNA, 19 nt, Artificial Sequence
  Description of Artificial Sequence: Synthetic oligonucleotide
  Antisense strand to SEQ ID NO: 309264
ugaccucuucaguaacacu

SEQ ID NO: 309266 - RNA, 19 nt, Artificial Sequence
  Description of Artificial Sequence: Synthetic oligonucleotide
  Sense strand starting at position 1231 of SEQ ID NO: 3972
uguuacugaagaggucaaa

SEQ ID NO: 309267 - RNA, 19 nt, Artificial Sequence
  Description of Artificial Sequence: Synthetic oligonucleotide
  Antisense strand to SEQ ID NO: 309266
uuugaccucuucaguaaca

SEQ ID NO: 309268 - RNA, 19 nt, Artificial Sequence
  Description of Artificial Sequence: Synthetic oligonucleotide
  Sense strand starting at position 1291 of SEQ ID NO: 3972
aagcuucucggucacuaga

SEQ ID NO: 309269 - RNA, 19 nt, Artificial Sequence
  Description of Artificial Sequence: Synthetic oligonucleotide
  Antisense strand to SEQ ID NO: 309268
ucuagugaccgagaagcuu

SEQ ID NO: 309270 - RNA, 19 nt, Artificial Sequence
  Description of Artificial Sequence: Synthetic oligonucleotide
  Sense strand starting at position 1299 of SEQ ID NO: 3972
cggucacuagaaugagauu

SEQ ID NO: 309271 - RNA, 19 nt, Artificial Sequence
  Description of Artificial Sequence: Synthetic oligonucleotide
  Antisense strand to SEQ ID NO: 309270
aaucucauucuagugaccg

SEQ ID NO: 309272 - RNA, 19 nt, Artificial Sequence
  Description of Artificial Sequence: Synthetic oligonucleotide
  Sense strand starting at position 1356 of SEQ ID NO: 3972
uccggaauaguucagcaga

SEQ ID NO: 309273 - RNA, 19 nt, Artificial Sequence
  Description of Artificial Sequence: Synthetic oligonucleotide
  Antisense strand to SEQ ID NO: 309272
ucugcugaacuauuccgga

SEQ ID NO: 309274 - RNA, 19 nt, Artificial Sequence
  Description of Artificial Sequence: Synthetic oligonucleotide
  Sense strand starting at position 1636 of SEQ ID NO: 3972
uucggacaugcuuauacua

SEQ ID NO: 309275 - RNA, 19 nt, Artificial Sequence
  Description of Artificial Sequence: Synthetic oligonucleotide
  Antisense strand to SEQ ID NO: 309274
uaguauaagcauguccgaa

SEQ ID NO: 309276 - RNA, 19 nt, Artificial Sequence
  Description of Artificial Sequence: Synthetic oligonucleotide
  Sense strand starting at position 1780 of SEQ ID NO: 3972
gcaagcugucgggauuaaa

SEQ ID NO: 309277 - RNA, 19 nt, Artificial Sequence
  Description of Artificial Sequence: Synthetic oligonucleotide
  Antisense strand to SEQ ID NO: 309276
uuuaaucccgacagcuugc

SEQ ID NO: 309278 - RNA, 19 nt, Artificial Sequence
  Description of Artificial Sequence: Synthetic oligonucleotide
  Sense strand starting at position 2138 of SEQ ID NO: 3972
gagaaagucgcguccgcau

SEQ ID NO: 309279 - RNA, 19 nt, Artificial Sequence
  Description of Artificial Sequence: Synthetic oligonucleotide
  Antisense strand to SEQ ID NO: 309278
augcggacgcgacuuucuc

SEQ ID NO: 309280 - RNA, 19 nt, Artificial Sequence
  Description of Artificial Sequence: Synthetic oligonucleotide
  Sense strand starting at position 2358 of SEQ ID NO: 3972
ggcgguuggaguuaaccau

SEQ ID NO: 309281 - RNA, 19 nt, Artificial Sequence
  Description of Artificial Sequence: Synthetic oligonucleotide
  Antisense strand to SEQ ID NO: 309280
augguuaacuccaaccgcc

SEQ ID NO: 309282 - RNA, 19 nt, Artificial Sequence
  Description of Artificial Sequence: Synthetic oligonucleotide
  Sense strand starting at position 2454 of SEQ ID NO: 3972
gguuaaaucggagauaacg

SEQ ID NO: 309283 - RNA, 19 nt, Artificial Sequence
  Description of Artificial Sequence: Synthetic oligonucleotide
  Antisense strand to SEQ ID NO: 309282
cguuaucuccgauuuaacc

SEQ ID NO: 309284 - RNA, 19 nt, Artificial Sequence
  Description of Artificial Sequence: Synthetic oligonucleotide
  Sense strand starting at position 2519 of SEQ ID NO: 3972
ucacgaagccuuuauugaa

SEQ ID NO: 309285 - RNA, 19 nt, Artificial Sequence
  Description of Artificial Sequence: Synthetic oligonucleotide
  Antisense strand to SEQ ID NO: 309284
uucaauaaaggcuucguga

SEQ ID NO: 309286 - RNA, 19 nt, Artificial Sequence
  Description of Artificial Sequence: Synthetic oligonucleotide
  Sense strand starting at position 2572 of SEQ ID NO: 3972
gagaauaagccagguuucu

SEQ ID NO: 309287 - RNA, 19 nt, Artificial Sequence
  Description of Artificial Sequence: Synthetic oligonucleotide
  Antisense strand to SEQ ID NO: 309286
agaaaccuggcuuauucuc

SEQ ID NO: 309288 - RNA, 19 nt, Artificial Sequence
  Description of Artificial Sequence: Synthetic oligonucleotide
  Sense strand starting at position 2589 of SEQ ID NO: 3972
cuugccugccuagaaauga

SEQ ID NO: 309289 - RNA, 19 nt, Artificial Sequence
  Description of Artificial Sequence: Synthetic oligonucleotide
  Antisense strand to SEQ ID NO: 309288
ucauuucuaggcaggcaag

SEQ ID NO: 309290 - RNA, 19 nt, Artificial Sequence
  Description of Artificial Sequence: Synthetic oligonucleotide
  Sense strand starting at position 2630 of SEQ ID NO: 3972
cagagaguugcguaaaccu

SEQ ID NO: 309291 - RNA, 19 nt, Artificial Sequence
  Description of Artificial Sequence: Synthetic oligonucleotide
  Antisense strand to SEQ ID NO: 309290
agguuuacgcaacucucug

SEQ ID NO: 309292 - RNA, 19 nt, Artificial Sequence
  Description of Artificial Sequence: Synthetic oligonucleotide
  Sense strand starting at position 2710 of SEQ ID NO: 3972
uugacuuguguugauguga

SEQ ID NO: 309293 - RNA, 19 nt, Artificial Sequence
  Description of Artificial Sequence: Synthetic oligonucleotide
  Antisense strand to SEQ ID NO: 309292
ucacaucaacacaagucaa

SEQ ID NO: 309294 - RNA, 19 nt, Artificial Sequence
  Description of Artificial Sequence: Synthetic oligonucleotide
  Sense strand starting at position 2753 of SEQ ID NO: 3972
ugcauucuuggauguuaag

SEQ ID NO: 309295 - RNA, 19 nt, Artificial Sequence
  Description of Artificial Sequence: Synthetic oligonucleotide
  Antisense strand to SEQ ID NO: 309294
cuuaacauccaagaaugca

SEQ ID NO: 309296 - RNA, 19 nt, Artificial Sequence
  Description of Artificial Sequence: Synthetic oligonucleotide
  Sense strand starting at position 2759 of SEQ ID NO: 3972
cuuggauguuaaguuguaa

SEQ ID NO: 309297 - RNA, 19 nt, Artificial Sequence
  Description of Artificial Sequence: Synthetic oligonucleotide
  Antisense strand to SEQ ID NO: 309296
uuacaacuuaacauccaag

SEQ ID NO: 309298 - RNA, 19 nt, Artificial Sequence
  Description of Artificial Sequence: Synthetic oligonucleotide
  Sense strand starting at position 2875 of SEQ ID NO: 3972
cuuggaaugcacugaaaca

SEQ ID NO: 309299 - RNA, 19 nt, Artificial Sequence
  Description of Artificial Sequence: Synthetic oligonucleotide
  Antisense strand to SEQ ID NO: 309298
uguuucagugcauuccaag

SEQ ID NO: 309300 - RNA, 19 nt, Artificial Sequence
  Description of Artificial Sequence: Synthetic oligonucleotide
  Sense strand starting at position 2917 of SEQ ID NO: 3972
ugaguucuggauuagagcu

SEQ ID NO: 309301 - RNA, 19 nt, Artificial Sequence
  Description of Artificial Sequence: Synthetic oligonucleotide
  Antisense strand to SEQ ID NO: 309300
agcucuaauccagaacuca

SEQ ID NO: 309302 - RNA, 19 nt, Artificial Sequence
  Description of Artificial Sequence: Synthetic oligonucleotide
  Sense strand starting at position 2995 of SEQ ID NO: 3972
ugugcaauugucuuugcau

SEQ ID NO: 309303 - RNA, 19 nt, Artificial Sequence
  Description of Artificial Sequence: Synthetic oligonucleotide
  Antisense strand to SEQ ID NO: 309302
augcaaagacaauugcaca

SEQ ID NO: 309304 - RNA, 19 nt, Artificial Sequence
  Description of Artificial Sequence: Synthetic oligonucleotide
  Sense strand starting at position 3069 of SEQ ID NO: 3972
auggacauccacuguaaga

SEQ ID NO: 309305 - RNA, 19 nt, Artificial Sequence
  Description of Artificial Sequence: Synthetic oligonucleotide
  Antisense strand to SEQ ID NO: 309304
ucuuacaguggauguccau

SEQ ID NO: 309306 - RNA, 19 nt, Artificial Sequence
  Description of Artificial Sequence: Synthetic oligonucleotide
  Sense strand starting at position 3155 of SEQ ID NO: 3972
ccucccaaugucuaguaaa

SEQ ID NO: 309307 - RNA, 19 nt, Artificial Sequence
  Description of Artificial Sequence: Synthetic oligonucleotide
  Antisense strand to SEQ ID NO: 309306
uuuacuagacauugggagg

SEQ ID NO: 309308 - RNA, 19 nt, Artificial Sequence
  Description of Artificial Sequence: Synthetic oligonucleotide
  Sense strand starting at position 3351 of SEQ ID NO: 3972
guaccugacacuggugaua

SEQ ID NO: 309309 - RNA, 19 nt, Artificial Sequence
  Description of Artificial Sequence: Synthetic oligonucleotide
  Antisense strand to SEQ ID NO: 309308
uaucaccagugucagguac

SEQ ID NO: 309310 - RNA, 19 nt, Artificial Sequence
  Description of Artificial Sequence: Synthetic oligonucleotide
  Sense strand starting at position 3407 of SEQ ID NO: 3972
cuuggugucaugggagaaa

SEQ ID NO: 309311 - RNA, 19 nt, Artificial Sequence
  Description of Artificial Sequence: Synthetic oligonucleotide
  Antisense strand to SEQ ID NO: 309310
uuucucccaugacaccaag

SEQ ID NO: 309312 - RNA, 19 nt, Artificial Sequence
  Description of Artificial Sequence: Synthetic oligonucleotide
  Sense strand starting at position 3451 of SEQ ID NO: 3972
gccauaagacuguaagcau

SEQ ID NO: 309313 - RNA, 19 nt, Artificial Sequence
  Description of Artificial Sequence: Synthetic oligonucleotide
  Antisense strand to SEQ ID NO: 309312
augcuuacagucuuauggc

SEQ ID NO: 309314 - RNA, 19 nt, Artificial Sequence
  Description of Artificial Sequence: Synthetic oligonucleotide
  Sense strand starting at position 3480 of SEQ ID NO: 3972
uguguuuaaugacuagauc

SEQ ID NO: 309315 - RNA, 19 nt, Artificial Sequence
  Description of Artificial Sequence: Synthetic oligonucleotide
  Antisense strand to SEQ ID NO: 309314
gaucuagucauuaaacaca

SEQ ID NO: 309316 - RNA, 19 nt, Artificial Sequence
  Description of Artificial Sequence: Synthetic oligonucleotide
  Sense strand starting at position 3481 of SEQ ID NO: 3972
guguuuaaugacuagaucu

SEQ ID NO: 309317 - RNA, 19 nt, Artificial Sequence
  Description of Artificial Sequence: Synthetic oligonucleotide
  Antisense strand to SEQ ID NO: 309316
agaucuagucauuaaacac

SEQ ID NO: 309318 - RNA, 19 nt, Artificial Sequence
  Description of Artificial Sequence: Synthetic oligonucleotide
  Sense strand starting at position 3595 of SEQ ID NO: 3972
ugaguaguaguuuaucaag

SEQ ID NO: 309319 - RNA, 19 nt, Artificial Sequence
  Description of Artificial Sequence: Synthetic oligonucleotide
  Antisense strand to SEQ ID NO: 309318
cuugauaaacuacuacuca

SEQ ID NO: 309320 - RNA, 19 nt, Artificial Sequence
  Description of Artificial Sequence: Synthetic oligonucleotide
  Sense strand starting at position 3825 of SEQ ID NO: 3972
ggccauguugaugaguagu

SEQ ID NO: 309321 - RNA, 19 nt, Artificial Sequence
  Description of Artificial Sequence: Synthetic oligonucleotide
  Antisense strand to SEQ ID NO: 309320
acuacucaucaacauggcc

SEQ ID NO: 309322 - RNA, 19 nt, Artificial Sequence
  Description of Artificial Sequence: Synthetic oligonucleotide
  Sense strand starting at position 3827 of SEQ ID NO: 3972
ccauguugaugaguaguca

SEQ ID NO: 309323 - RNA, 19 nt, Artificial Sequence
  Description of Artificial Sequence: Synthetic oligonucleotide
  Antisense strand to SEQ ID NO: 309322
ugacuacucaucaacaugg

SEQ ID NO: 309324 - RNA, 19 nt, Artificial Sequence
  Description of Artificial Sequence: Synthetic oligonucleotide
  Sense strand starting at position 3828 of SEQ ID NO: 3972
cauguugaugaguagucaa

SEQ ID NO: 309325 - RNA, 19 nt, Artificial Sequence
  Description of Artificial Sequence: Synthetic oligonucleotide
  Antisense strand to SEQ ID NO: 309324
uugacuacucaucaacaug

SEQ ID NO: 309326 - RNA, 19 nt, Artificial Sequence
  Description of Artificial Sequence: Synthetic oligonucleotide
  Sense strand starting at position 62 of SEQ ID NO: 3973
aagaauuuguagggauaua

SEQ ID NO: 309327 - RNA, 19 nt, Artificial Sequence
  Description of Artificial Sequence: Synthetic oligonucleotide
  Antisense strand to SEQ ID NO: 309326
uauaucccuacaaauucuu

SEQ ID NO: 309328 - RNA, 19 nt, Artificial Sequence
  Description of Artificial Sequence: Synthetic oligonucleotide
  Sense strand starting at position 286 of SEQ ID NO: 3973
ugauuaaggauucgacuuc

SEQ ID NO: 309329 - RNA, 19 nt, Artificial Sequence
  Description of Artificial Sequence: Synthetic oligonucleotide
  Antisense strand to SEQ ID NO: 309328
gaagucgaauccuuaauca

SEQ ID NO: 309330 - RNA, 19 nt, Artificial Sequence
  Description of Artificial Sequence: Synthetic oligonucleotide
  Sense strand starting at position 495 of SEQ ID NO: 3973
ucacauuaauggguagaua

SEQ ID NO: 309331 - RNA, 19 nt, Artificial Sequence
  Description of Artificial Sequence: Synthetic oligonucleotide
  Antisense strand to SEQ ID NO: 309330
uaucuacccauuaauguga

SEQ ID NO: 309332 - RNA, 19 nt, Artificial Sequence
  Description of Artificial Sequence: Synthetic oligonucleotide
  Sense strand starting at position 507 of SEQ ID NO: 3973
guagauaagccuuaucuau

SEQ ID NO: 309333 - RNA, 19 nt, Artificial Sequence
  Description of Artificial Sequence: Synthetic oligonucleotide
  Antisense strand to SEQ ID NO: 309332
auagauaaggcuuaucuac

SEQ ID NO: 309334 - RNA, 19 nt, Artificial Sequence
  Description of Artificial Sequence: Synthetic oligonucleotide
  Sense strand starting at position 605 of SEQ ID NO: 3973
ucuggcuuacuauguauuu

SEQ ID NO: 309335 - RNA, 19 nt, Artificial Sequence
  Description of Artificial Sequence: Synthetic oligonucleotide
  Antisense strand to SEQ ID NO: 309334
aaauacauaguaagccaga

SEQ ID NO: 309336 - RNA, 19 nt, Artificial Sequence
  Description of Artificial Sequence: Synthetic oligonucleotide
  Sense strand starting at position 606 of SEQ ID NO: 3973
cuggcuuacuauguauuua

SEQ ID NO: 309337 - RNA, 19 nt, Artificial Sequence
  Description of Artificial Sequence: Synthetic oligonucleotide
  Antisense strand to SEQ ID NO: 309336
uaaauacauaguaagccag

SEQ ID NO: 309338 - RNA, 19 nt, Artificial Sequence
  Description of Artificial Sequence: Synthetic oligonucleotide
  Sense strand starting at position 646 of SEQ ID NO: 3973
cccuuucuacuaggaugua

SEQ ID NO: 309339 - RNA, 19 nt, Artificial Sequence
  Description of Artificial Sequence: Synthetic oligonucleotide
  Antisense strand to SEQ ID NO: 309338
uacauccuaguagaaaggg

SEQ ID NO: 309340 - RNA, 19 nt, Artificial Sequence
  Description of Artificial Sequence: Synthetic oligonucleotide
  Sense strand starting at position 649 of SEQ ID NO: 3973
uuucuacuaggauguaaac

SEQ ID NO: 309341 - RNA, 19 nt, Artificial Sequence
  Description of Artificial Sequence: Synthetic oligonucleotide
  Antisense strand to SEQ ID NO: 309340
guuuacauccuaguagaaa

SEQ ID NO: 309342 - RNA, 19 nt, Artificial Sequence
  Description of Artificial Sequence: Synthetic oligonucleotide
  Sense strand starting at position 689 of SEQ ID NO: 3973
guucuauuccagcacagag

SEQ ID NO: 309343 - RNA, 19 nt, Artificial Sequence
  Description of Artificial Sequence: Synthetic oligonucleotide
  Antisense strand to SEQ ID NO: 309342
cucugugcuggaauagaac

SEQ ID NO: 309344 - RNA, 19 nt, Artificial Sequence
  Description of Artificial Sequence: Synthetic oligonucleotide
  Sense strand starting at position 704 of SEQ ID NO: 3973
agagaauugugccuggcac

SEQ ID NO: 309345 - RNA, 19 nt, Artificial Sequence
  Description of Artificial Sequence: Synthetic oligonucleotide
  Antisense strand to SEQ ID NO: 309344
gugccaggcacaauucucu

SEQ ID NO: 309346 - RNA, 19 nt, Artificial Sequence
  Description of Artificial Sequence: Synthetic oligonucleotide
  Sense strand starting at position 1074 of SEQ ID NO: 3973
cguguaauugcauauauga

SEQ ID NO: 309347 - RNA, 19 nt, Artificial Sequence
  Description of Artificial Sequence: Synthetic oligonucleotide
  Antisense strand to SEQ ID NO: 309346
ucauauaugcaauuacacg

SEQ ID NO: 309348 - RNA, 19 nt, Artificial Sequence
  Description of Artificial Sequence: Synthetic oligonucleotide
  Sense strand starting at position 1168 of SEQ ID NO: 3973
ucagaaguggugcauuacu

SEQ ID NO: 309349 - RNA, 19 nt, Artificial Sequence
  Description of Artificial Sequence: Synthetic oligonucleotide
  Antisense strand to SEQ ID NO: 309348
aguaaugcaccacuucuga

SEQ ID NO: 309350 - RNA, 19 nt, Artificial Sequence
  Description of Artificial Sequence: Synthetic oligonucleotide
  Sense strand starting at position 1222 of SEQ ID NO: 3973
cacggcuuaugggucauaa

SEQ ID NO: 309351 - RNA, 19 nt, Artificial Sequence
  Description of Artificial Sequence: Synthetic oligonucleotide
  Antisense strand to SEQ ID NO: 309350
uuaugacccauaagccgug

SEQ ID NO: 309352 - RNA, 19 nt, Artificial Sequence
  Description of Artificial Sequence: Synthetic oligonucleotide
  Sense strand starting at position 1224 of SEQ ID NO: 3973
cggcuuaugggucauaauu

SEQ ID NO: 309353 - RNA, 19 nt, Artificial Sequence
  Description of Artificial Sequence: Synthetic oligonucleotide
  Antisense strand to SEQ ID NO: 309352
aauuaugacccauaagccg

SEQ ID NO: 309354 - RNA, 19 nt, Artificial Sequence
  Description of Artificial Sequence: Synthetic oligonucleotide
  Sense strand starting at position 1233 of SEQ ID NO: 3973
ggucauaauuuccagaauc

SEQ ID NO: 309355 - RNA, 19 nt, Artificial Sequence
  Description of Artificial Sequence: Synthetic oligonucleotide
  Antisense strand to SEQ ID NO: 309354
gauucuggaaauuaugacc

SEQ ID NO: 309356 - RNA, 19 nt, Artificial Sequence
  Description of Artificial Sequence: Synthetic oligonucleotide
  Sense strand starting at position 1305 of SEQ ID NO: 3973
uguuuauuggaauaggugu

SEQ ID NO: 309357 - RNA, 19 nt, Artificial Sequence
  Description of Artificial Sequence: Synthetic oligonucleotide
  Antisense strand to SEQ ID NO: 309356
acaccuauuccaauaaaca

SEQ ID NO: 309358 - RNA, 19 nt, Artificial Sequence
  Description of Artificial Sequence: Synthetic oligonucleotide
  Sense strand starting at position 1424 of SEQ ID NO: 3973
agcagauauucgccaaaca

SEQ ID NO: 309359 - RNA, 19 nt, Artificial Sequence
  Description of Artificial Sequence: Synthetic oligonucleotide
  Antisense strand to SEQ ID NO: 309358
uguuuggcgaauaucugcu

SEQ ID NO: 309360 - RNA, 19 nt, Artificial Sequence
  Description of Artificial Sequence: Synthetic oligonucleotide
  Sense strand starting at position 1425 of SEQ ID NO: 3973
gcagauauucgccaaacag

SEQ ID NO: 309361 - RNA, 19 nt, Artificial Sequence
  Description of Artificial Sequence: Synthetic oligonucleotide
  Antisense strand to SEQ ID NO: 309360
cuguuuggcgaauaucugc

SEQ ID NO: 309362 - RNA, 19 nt, Artificial Sequence
  Description of Artificial Sequence: Synthetic oligonucleotide
  Sense strand starting at position 1460 of SEQ ID NO: 3973
aggucacugggcuagaauu

SEQ ID NO: 309363 - RNA, 19 nt, Artificial Sequence
  Description of Artificial Sequence: Synthetic oligonucleotide
  Antisense strand to SEQ ID NO: 309362
aauucuagcccagugaccu

SEQ ID NO: 309364 - RNA, 19 nt, Artificial Sequence
  Description of Artificial Sequence: Synthetic oligonucleotide
  Sense strand starting at position 2698 of SEQ ID NO: 3973
uaaccaguuguggauauca

SEQ ID NO: 309365 - RNA, 19 nt, Artificial Sequence
  Description of Artificial Sequence: Synthetic oligonucleotide
  Antisense strand to SEQ ID NO: 309364
ugauauccacaacugguua

SEQ ID NO: 309366 - RNA, 19 nt, Artificial Sequence
  Description of Artificial Sequence: Synthetic oligonucleotide
  Sense strand starting at position 2700 of SEQ ID NO: 3973
accaguuguggauaucagu

SEQ ID NO: 309367 - RNA, 19 nt, Artificial Sequence
  Description of Artificial Sequence: Synthetic oligonucleotide
  Antisense strand to SEQ ID NO: 309366
acugauauccacaacuggu

SEQ ID NO: 309368 - RNA, 19 nt, Artificial Sequence
  Description of Artificial Sequence: Synthetic oligonucleotide
  Sense strand starting at position 2744 of SEQ ID NO: 3973
ugaaucaugcugugaggaa

SEQ ID NO: 309369 - RNA, 19 nt, Artificial Sequence
  Description of Artificial Sequence: Synthetic oligonucleotide
  Antisense strand to SEQ ID NO: 309368
uuccucacagcaugauuca

SEQ ID NO: 309370 - RNA, 19 nt, Artificial Sequence
  Description of Artificial Sequence: Synthetic oligonucleotide
  Sense strand starting at position 2748 of SEQ ID NO: 3973
ucaugcugugaggaaaugu

SEQ ID NO: 309371 - RNA, 19 nt, Artificial Sequence
  Description of Artificial Sequence: Synthetic oligonucleotide
  Antisense strand to SEQ ID NO: 309370
acauuuccucacagcauga

SEQ ID NO: 309372 - RNA, 19 nt, Artificial Sequence
  Description of Artificial Sequence: Synthetic oligonucleotide
  Sense strand starting at position 2757 of SEQ ID NO: 3973
gaggaaaugugguuuauua

SEQ ID NO: 309373 - RNA, 19 nt, Artificial Sequence
  Description of Artificial Sequence: Synthetic oligonucleotide
  Antisense strand to SEQ ID NO: 309372
uaauaaaccacauuuccuc

SEQ ID NO: 309374 - RNA, 19 nt, Artificial Sequence
  Description of Artificial Sequence: Synthetic oligonucleotide
  Sense strand starting at position 2761 of SEQ ID NO: 3973
aaaugugguuuauuacagu

SEQ ID NO: 309375 - RNA, 19 nt, Artificial Sequence
  Description of Artificial Sequence: Synthetic oligonucleotide
  Antisense strand to SEQ ID NO: 309374
acuguaauaaaccacauuu

SEQ ID NO: 309376 - RNA, 19 nt, Artificial Sequence
  Description of Artificial Sequence: Synthetic oligonucleotide
  Sense strand starting at position 2782 of SEQ ID NO: 3973
auuaaaugcacuuggguga

SEQ ID NO: 309377 - RNA, 19 nt, Artificial Sequence
  Description of Artificial Sequence: Synthetic oligonucleotide
  Antisense strand to SEQ ID NO: 309376
ucacccaagugcauuuaau

SEQ ID NO: 309378 - RNA, 19 nt, Artificial Sequence
  Description of Artificial Sequence: Synthetic oligonucleotide
  Sense strand starting at position 2951 of SEQ ID NO: 3973
gggugaagcaaucggaaua

SEQ ID NO: 309379 - RNA, 19 nt, Artificial Sequence
  Description of Artificial Sequence: Synthetic oligonucleotide
  Antisense strand to SEQ ID NO: 309378
uauuccgauugcuucaccc

SEQ ID NO: 309380 - RNA, 19 nt, Artificial Sequence
  Description of Artificial Sequence: Synthetic oligonucleotide
  Sense strand starting at position 3378 of SEQ ID NO: 3973
agcaaagauauugguguaa

SEQ ID NO: 309381 - RNA, 19 nt, Artificial Sequence
  Description of Artificial Sequence: Synthetic oligonucleotide
  Antisense strand to SEQ ID NO: 309380
uuacaccaauaucuuugcu

SEQ ID NO: 309382 - RNA, 19 nt, Artificial Sequence
  Description of Artificial Sequence: Synthetic oligonucleotide
  Sense strand starting at position 3389 of SEQ ID NO: 3973
ugguguaauccaugaaaug

SEQ ID NO: 309383 - RNA, 19 nt, Artificial Sequence
  Description of Artificial Sequence: Synthetic oligonucleotide
  Antisense strand to SEQ ID NO: 309382
cauuucauggauuacacca

SEQ ID NO: 309384 - RNA, 19 nt, Artificial Sequence
  Description of Artificial Sequence: Synthetic oligonucleotide
  Sense strand starting at position 3591 of SEQ ID NO: 3973
gaaagauucuaaguacagu

SEQ ID NO: 309385 - RNA, 19 nt, Artificial Sequence
  Description of Artificial Sequence: Synthetic oligonucleotide
  Antisense strand to SEQ ID NO: 309384
acuguacuuagaaucuuuc

SEQ ID NO: 309386 - RNA, 19 nt, Artificial Sequence
  Description of Artificial Sequence: Synthetic oligonucleotide
  Sense strand starting at position 3599 of SEQ ID NO: 3973
cuaaguacaguuuacucaa

SEQ ID NO: 309387 - RNA, 19 nt, Artificial Sequence
  Description of Artificial Sequence: Synthetic oligonucleotide
  Antisense strand to SEQ ID NO: 309386
uugaguaaacuguacuuag

SEQ ID NO: 309388 - RNA, 19 nt, Artificial Sequence
  Description of Artificial Sequence: Synthetic oligonucleotide
  Sense strand starting at position 3690 of SEQ ID NO: 3973
ucugaauauuaagagaaga

SEQ ID NO: 309389 - RNA, 19 nt, Artificial Sequence
  Description of Artificial Sequence: Synthetic oligonucleotide
  Antisense strand to SEQ ID NO: 309388
ucuucucuuaauauucaga

SEQ ID NO: 309390 - RNA, 19 nt, Artificial Sequence
  Description of Artificial Sequence: Synthetic oligonucleotide
  Sense strand starting at position 3735 of SEQ ID NO: 3973
gggagauacgaaugcagau

SEQ ID NO: 309391 - RNA, 19 nt, Artificial Sequence
  Description of Artificial Sequence: Synthetic oligonucleotide
  Antisense strand to SEQ ID NO: 309390
aucugcauucguaucuccc

SEQ ID NO: 309392 - RNA, 19 nt, Artificial Sequence
  Description of Artificial Sequence: Synthetic oligonucleotide
  Sense strand starting at position 3777 of SEQ ID NO: 3973
gcagaaauuauguguagga

SEQ ID NO: 309393 - RNA, 19 nt, Artificial Sequence
  Description of Artificial Sequence: Synthetic oligonucleotide
  Antisense strand to SEQ ID NO: 309392
uccuacacauaauuucugc

SEQ ID NO: 309394 - RNA, 19 nt, Artificial Sequence
  Description of Artificial Sequence: Synthetic oligonucleotide
  Sense strand starting at position 3778 of SEQ ID NO: 3973
cagaaauuauguguaggaa

SEQ ID NO: 309395 - RNA, 19 nt, Artificial Sequence
  Description of Artificial Sequence: Synthetic oligonucleotide
  Antisense strand to SEQ ID NO: 309394
uuccuacacauaauuucug

SEQ ID NO: 309396 - RNA, 19 nt, Artificial Sequence
  Description of Artificial Sequence: Synthetic oligonucleotide
  Sense strand starting at position 3781 of SEQ ID NO: 3973
aaauuauguguaggaauca

SEQ ID NO: 309397 - RNA, 19 nt, Artificial Sequence
  Description of Artificial Sequence: Synthetic oligonucleotide
  Antisense strand to SEQ ID NO: 309396
ugauuccuacacauaauuu

SEQ ID NO: 309398 - RNA, 19 nt, Artificial Sequence
  Description of Artificial Sequence: Synthetic oligonucleotide
  Sense strand starting at position 3800 of SEQ ID NO: 3973
gauggagacuuuguaugac

SEQ ID NO: 309399 - RNA, 19 nt, Artificial Sequence
  Description of Artificial Sequence: Synthetic oligonucleotide
  Antisense strand to SEQ ID NO: 309398
gucauacaaagucuccauc

SEQ ID NO: 309400 - RNA, 19 nt, Artificial Sequence
  Description of Artificial Sequence: Synthetic oligonucleotide
  Sense strand starting at position 3808 of SEQ ID NO: 3973
cuuuguaugacaggcuaga

SEQ ID NO: 309401 - RNA, 19 nt, Artificial Sequence
  Description of Artificial Sequence: Synthetic oligonucleotide
  Antisense strand to SEQ ID NO: 309400
ucuagccugucauacaaag

SEQ ID NO: 309402 - RNA, 19 nt, Artificial Sequence
  Description of Artificial Sequence: Synthetic oligonucleotide
  Sense strand starting at position 3841 of SEQ ID NO: 3973
ggccuuuaagcagagaagu

SEQ ID NO: 309403 - RNA, 19 nt, Artificial Sequence
  Description of Artificial Sequence: Synthetic oligonucleotide
  Antisense strand to SEQ ID NO: 309402
acuucucugcuuaaaggcc

SEQ ID NO: 309404 - RNA, 19 nt, Artificial Sequence
  Description of Artificial Sequence: Synthetic oligonucleotide
  Sense strand starting at position 3873 of SEQ ID NO: 3973
ccauuuaagugugaaugac

SEQ ID NO: 309405 - RNA, 19 nt, Artificial Sequence
  Description of Artificial Sequence: Synthetic oligonucleotide
  Antisense strand to SEQ ID NO: 309404
gucauucacacuuaaaugg

SEQ ID NO: 309406 - RNA, 19 nt, Artificial Sequence
  Description of Artificial Sequence: Synthetic oligonucleotide
  Sense strand starting at position 201 of SEQ ID NO: 3974
ccuucugcaguugauuaaa

SEQ ID NO: 309407 - RNA, 19 nt, Artificial Sequence
  Description of Artificial Sequence: Synthetic oligonucleotide
  Antisense strand to SEQ ID NO: 309406
uuuaaucaacugcagaagg

SEQ ID NO: 309408 - RNA, 19 nt, Artificial Sequence
  Description of Artificial Sequence: Synthetic oligonucleotide
  Sense strand starting at position 204 of SEQ ID NO: 3974
ucugcaguugauuaaacaa

SEQ ID NO: 309409 - RNA, 19 nt, Artificial Sequence
  Description of Artificial Sequence: Synthetic oligonucleotide
  Antisense strand to SEQ ID NO: 309408
uuguuuaaucaacugcaga

SEQ ID NO: 309410 - RNA, 19 nt, Artificial Sequence
  Description of Artificial Sequence: Synthetic oligonucleotide
  Sense strand starting at position 273 of SEQ ID NO: 3974
agcauuacugaauaaaugu

SEQ ID NO: 309411 - RNA, 19 nt, Artificial Sequence
  Description of Artificial Sequence: Synthetic oligonucleotide
  Antisense strand to SEQ ID NO: 309410
acauuuauucaguaaugcu

SEQ ID NO: 309412 - RNA, 19 nt, Artificial Sequence
  Description of Artificial Sequence: Synthetic oligonucleotide
  Sense strand starting at position 486 of SEQ ID NO: 3974
gggcuucuaugaguaauau

SEQ ID NO: 309413 - RNA, 19 nt, Artificial Sequence
  Description of Artificial Sequence: Synthetic oligonucleotide
  Antisense strand to SEQ ID NO: 309412
auauuacucauagaagccc

SEQ ID NO: 309414 - RNA, 19 nt, Artificial Sequence
  Description of Artificial Sequence: Synthetic oligonucleotide
  Sense strand starting at position 487 of SEQ ID NO: 3974
ggcuucuaugaguaauauc

SEQ ID NO: 309415 - RNA, 19 nt, Artificial Sequence
  Description of Artificial Sequence: Synthetic oligonucleotide
  Antisense strand to SEQ ID NO: 309414
gauauuacucauagaagcc

SEQ ID NO: 309416 - RNA, 19 nt, Artificial Sequence
  Description of Artificial Sequence: Synthetic oligonucleotide
  Sense strand starting at position 497 of SEQ ID NO: 3974
aguaauaucugagucugag

SEQ ID NO: 309417 - RNA, 19 nt, Artificial Sequence
  Description of Artificial Sequence: Synthetic oligonucleotide
  Antisense strand to SEQ ID NO: 309416
cucagacucagauauuacu

SEQ ID NO: 309418 - RNA, 19 nt, Artificial Sequence
  Description of Artificial Sequence: Synthetic oligonucleotide
  Sense strand starting at position 506 of SEQ ID NO: 3974
ugagucugagcuuacucaa

SEQ ID NO: 309419 - RNA, 19 nt, Artificial Sequence
  Description of Artificial Sequence: Synthetic oligonucleotide
  Antisense strand to SEQ ID NO: 309418
uugaguaagcucagacuca

SEQ ID NO: 309420 - RNA, 19 nt, Artificial Sequence
  Description of Artificial Sequence: Synthetic oligonucleotide
  Sense strand starting at position 630 of SEQ ID NO: 3974
uuauaauuagccggaauaa

SEQ ID NO: 309421 - RNA, 19 nt, Artificial Sequence
  Description of Artificial Sequence: Synthetic oligonucleotide
  Antisense strand to SEQ ID NO: 309420
uuauuccggcuaauuauaa

SEQ ID NO: 309422 - RNA, 19 nt, Artificial Sequence
  Description of Artificial Sequence: Synthetic oligonucleotide
  Sense strand starting at position 895 of SEQ ID NO: 3974
guuguaucuccucacuaaa

SEQ ID NO: 309423 - RNA, 19 nt, Artificial Sequence
  Description of Artificial Sequence: Synthetic oligonucleotide
  Antisense strand to SEQ ID NO: 309422
uuuagugaggagauacaac

SEQ ID NO: 309424 - RNA, 19 nt, Artificial Sequence
  Description of Artificial Sequence: Synthetic oligonucleotide
  Sense strand starting at position 898 of SEQ ID NO: 3974
guaucuccucacuaaaggu

SEQ ID NO: 309425 - RNA, 19 nt, Artificial Sequence
  Description of Artificial Sequence: Synthetic oligonucleotide
  Antisense strand to SEQ ID NO: 309424
accuuuagugaggagauac

SEQ ID NO: 309426 - RNA, 19 nt, Artificial Sequence
  Description of Artificial Sequence: Synthetic oligonucleotide
  Sense strand starting at position 912 of SEQ ID NO: 3974
aagguaugguaagcuaaga

SEQ ID NO: 309427 - RNA, 19 nt, Artificial Sequence
  Description of Artificial Sequence: Synthetic oligonucleotide
  Antisense strand to SEQ ID NO: 309426
ucuuagcuuaccauaccuu

SEQ ID NO: 309428 - RNA, 19 nt, Artificial Sequence
  Description of Artificial Sequence: Synthetic oligonucleotide
  Sense strand starting at position 964 of SEQ ID NO: 3974
cuucucuccaguggagaga

SEQ ID NO: 309429 - RNA, 19 nt, Artificial Sequence
  Description of Artificial Sequence: Synthetic oligonucleotide
  Antisense strand to SEQ ID NO: 309428
ucucuccacuggagagaag

SEQ ID NO: 309430 - RNA, 19 nt, Artificial Sequence
  Description of Artificial Sequence: Synthetic oligonucleotide
  Sense strand starting at position 1107 of SEQ ID NO: 3974
agauuuagaucugaacuuu

SEQ ID NO: 309431 - RNA, 19 nt, Artificial Sequence
  Description of Artificial Sequence: Synthetic oligonucleotide
  Antisense strand to SEQ ID NO: 309430
aaaguucagaucuaaaucu

SEQ ID NO: 309432 - RNA, 19 nt, Artificial Sequence
  Description of Artificial Sequence: Synthetic oligonucleotide
  Sense strand starting at position 1134 of SEQ ID NO: 3974
gguuuaugcaaacaggcau

SEQ ID NO: 309433 - RNA, 19 nt, Artificial Sequence
  Description of Artificial Sequence: Synthetic oligonucleotide
  Antisense strand to SEQ ID NO: 309432
augccuguuugcauaaacc

SEQ ID NO: 309434 - RNA, 19 nt, Artificial Sequence
  Description of Artificial Sequence: Synthetic oligonucleotide
  Sense strand starting at position 1234 of SEQ ID NO: 3974
guauauguccuuugaauag

SEQ ID NO: 309435 - RNA, 19 nt, Artificial Sequence
  Description of Artificial Sequence: Synthetic oligonucleotide
  Antisense strand to SEQ ID NO: 309434
cuauucaaaggacauauac

SEQ ID NO: 309436 - RNA, 19 nt, Artificial Sequence
  Description of Artificial Sequence: Synthetic oligonucleotide
  Sense strand starting at position 1241 of SEQ ID NO: 3974
uccuuugaauaggauauuu

SEQ ID NO: 309437 - RNA, 19 nt, Artificial Sequence
  Description of Artificial Sequence: Synthetic oligonucleotide
  Antisense strand to SEQ ID NO: 309436
aaauauccuauucaaagga

SEQ ID NO: 309438 - RNA, 19 nt, Artificial Sequence
  Description of Artificial Sequence: Synthetic oligonucleotide
  Sense strand starting at position 1375 of SEQ ID NO: 3974
auuaaugcucaguauaagu

SEQ ID NO: 309439 - RNA, 19 nt, Artificial Sequence
  Description of Artificial Sequence: Synthetic oligonucleotide
  Antisense strand to SEQ ID NO: 309438
acuuauacugagcauuaau

SEQ ID NO: 309440 - RNA, 19 nt, Artificial Sequence
  Description of Artificial Sequence: Synthetic oligonucleotide
  Sense strand starting at position 1560 of SEQ ID NO: 3974
auguauuaaagggaucguu

SEQ ID NO: 309441 - RNA, 19 nt, Artificial Sequence
  Description of Artificial Sequence: Synthetic oligonucleotide
  Antisense strand to SEQ ID NO: 309440
aacgaucccuuuaauacau

SEQ ID NO: 309442 - RNA, 19 nt, Artificial Sequence
  Description of Artificial Sequence: Synthetic oligonucleotide
  Sense strand starting at position 1563 of SEQ ID NO: 3974
uauuaaagggaucguuaga

SEQ ID NO: 309443 - RNA, 19 nt, Artificial Sequence
  Description of Artificial Sequence: Synthetic oligonucleotide
  Antisense strand to SEQ ID NO: 309442
ucuaacgaucccuuuaaua

SEQ ID NO: 309444 - RNA, 19 nt, Artificial Sequence
  Description of Artificial Sequence: Synthetic oligonucleotide
  Sense strand starting at position 1779 of SEQ ID NO: 3974
uuaauuauuugugccaguu

SEQ ID NO: 309445 - RNA, 19 nt, Artificial Sequence
  Description of Artificial Sequence: Synthetic oligonucleotide
  Antisense strand to SEQ ID NO: 309444
aacuggcacaaauaauuaa

SEQ ID NO: 309446 - RNA, 19 nt, Artificial Sequence
  Description of Artificial Sequence: Synthetic oligonucleotide
  Sense strand starting at position 1848 of SEQ ID NO: 3974
uguacugagacuuggaaua

SEQ ID NO: 309447 - RNA, 19 nt, Artificial Sequence
  Description of Artificial Sequence: Synthetic oligonucleotide
  Antisense strand to SEQ ID NO: 309446
uauuccaagucucaguaca

SEQ ID NO: 309448 - RNA, 19 nt, Artificial Sequence
  Description of Artificial Sequence: Synthetic oligonucleotide
  Sense strand starting at position 1872 of SEQ ID NO: 3974
agacacaugugcuuagaca

SEQ ID NO: 309449 - RNA, 19 nt, Artificial Sequence
  Description of Artificial Sequence: Synthetic oligonucleotide
  Antisense strand to SEQ ID NO: 309448
ugucuaagcacaugugucu

SEQ ID NO: 309450 - RNA, 19 nt, Artificial Sequence
  Description of Artificial Sequence: Synthetic oligonucleotide
  Sense strand starting at position 1873 of SEQ ID NO: 3974
gacacaugugcuuagacau

SEQ ID NO: 309451 - RNA, 19 nt, Artificial Sequence
  Description of Artificial Sequence: Synthetic oligonucleotide
  Antisense strand to SEQ ID NO: 309450
augucuaagcacauguguc

SEQ ID NO: 309452 - RNA, 19 nt, Artificial Sequence
  Description of Artificial Sequence: Synthetic oligonucleotide
  Sense strand starting at position 1880 of SEQ ID NO: 3974
gugcuuagacaugaaugua

SEQ ID NO: 309453 - RNA, 19 nt, Artificial Sequence
  Description of Artificial Sequence: Synthetic oligonucleotide
  Antisense strand to SEQ ID NO: 309452
uacauucaugucuaagcac

SEQ ID NO: 309454 - RNA, 19 nt, Artificial Sequence
  Description of Artificial Sequence: Synthetic oligonucleotide
  Sense strand starting at position 1990 of SEQ ID NO: 3974
uggugaagucccuaggaau

SEQ ID NO: 309455 - RNA, 19 nt, Artificial Sequence
  Description of Artificial Sequence: Synthetic oligonucleotide
  Antisense strand to SEQ ID NO: 309454
auuccuagggacuucacca

SEQ ID NO: 309456 - RNA, 19 nt, Artificial Sequence
  Description of Artificial Sequence: Synthetic oligonucleotide
  Sense strand starting at position 2195 of SEQ ID NO: 3974
gauaguggugacuggaaua

SEQ ID NO: 309457 - RNA, 19 nt, Artificial Sequence
  Description of Artificial Sequence: Synthetic oligonucleotide
  Antisense strand to SEQ ID NO: 309456
uauuccagucaccacuauc

SEQ ID NO: 309458 - RNA, 19 nt, Artificial Sequence
  Description of Artificial Sequence: Synthetic oligonucleotide
  Sense strand starting at position 2469 of SEQ ID NO: 3974
gaguaucuuggcuaaauua

SEQ ID NO: 309459 - RNA, 19 nt, Artificial Sequence
  Description of Artificial Sequence: Synthetic oligonucleotide
  Antisense strand to SEQ ID NO: 309458
uaauuuagccaagauacuc

SEQ ID NO: 309460 - RNA, 19 nt, Artificial Sequence
  Description of Artificial Sequence: Synthetic oligonucleotide
  Sense strand starting at position 2588 of SEQ ID NO: 3974
cuauuaggugcauaccaua

SEQ ID NO: 309461 - RNA, 19 nt, Artificial Sequence
  Description of Artificial Sequence: Synthetic oligonucleotide
  Antisense strand to SEQ ID NO: 309460
uaugguaugcaccuaauag

SEQ ID NO: 309462 - RNA, 19 nt, Artificial Sequence
  Description of Artificial Sequence: Synthetic oligonucleotide
  Sense strand starting at position 2798 of SEQ ID NO: 3974
gggauugagugaguucuca

SEQ ID NO: 309463 - RNA, 19 nt, Artificial Sequence
  Description of Artificial Sequence: Synthetic oligonucleotide
  Antisense strand to SEQ ID NO: 309462
ugagaacucacucaauccc

SEQ ID NO: 309464 - RNA, 19 nt, Artificial Sequence
  Description of Artificial Sequence: Synthetic oligonucleotide
  Sense strand starting at position 2826 of SEQ ID NO: 3974
ccuguuagaucuguuaaag

SEQ ID NO: 309465 - RNA, 19 nt, Artificial Sequence
  Description of Artificial Sequence: Synthetic oligonucleotide
  Antisense strand to SEQ ID NO: 309464
cuuuaacagaucuaacagg

SEQ ID NO: 309466 - RNA, 19 nt, Artificial Sequence
  Description of Artificial Sequence: Synthetic oligonucleotide
  Sense strand starting at position 3112 of SEQ ID NO: 3974
aagugcaaacuugaaaguu

SEQ ID NO: 309467 - RNA, 19 nt, Artificial Sequence
  Description of Artificial Sequence: Synthetic oligonucleotide
  Antisense strand to SEQ ID NO: 309466
aacuuucaaguuugcacuu

SEQ ID NO: 309468 - RNA, 19 nt, Artificial Sequence
  Description of Artificial Sequence: Synthetic oligonucleotide
  Sense strand starting at position 3347 of SEQ ID NO: 3974
cuccgccaugaugaauaua

SEQ ID NO: 309469 - RNA, 19 nt, Artificial Sequence
  Description of Artificial Sequence: Synthetic oligonucleotide
  Antisense strand to SEQ ID NO: 309468
uauauucaucauggcggag

SEQ ID NO: 309470 - RNA, 19 nt, Artificial Sequence
  Description of Artificial Sequence: Synthetic oligonucleotide
  Sense strand starting at position 3438 of SEQ ID NO: 3974
ccugcagaacuaugaguau

SEQ ID NO: 309471 - RNA, 19 nt, Artificial Sequence
  Description of Artificial Sequence: Synthetic oligonucleotide
  Antisense strand to SEQ ID NO: 309470
auacucauaguucugcagg

SEQ ID NO: 309472 - RNA, 19 nt, Artificial Sequence
  Description of Artificial Sequence: Synthetic oligonucleotide
  Sense strand starting at position 3441 of SEQ ID NO: 3974
gcagaacuaugaguauauu

SEQ ID NO: 309473 - RNA, 19 nt, Artificial Sequence
  Description of Artificial Sequence: Synthetic oligonucleotide
  Antisense strand to SEQ ID NO: 309472
aauauacucauaguucugc

SEQ ID NO: 309474 - RNA, 19 nt, Artificial Sequence
  Description of Artificial Sequence: Synthetic oligonucleotide
  Sense strand starting at position 3521 of SEQ ID NO: 3974
gacuuaauagaggguuucu

SEQ ID NO: 309475 - RNA, 19 nt, Artificial Sequence
  Description of Artificial Sequence: Synthetic oligonucleotide
  Antisense strand to SEQ ID NO: 309474
agaaacccucuauuaaguc

SEQ ID NO: 309476 - RNA, 19 nt, Artificial Sequence
  Description of Artificial Sequence: Synthetic oligonucleotide
  Sense strand starting at position 3559 of SEQ ID NO: 3974
uugguuauccauuaucuac

SEQ ID NO: 309477 - RNA, 19 nt, Artificial Sequence
  Description of Artificial Sequence: Synthetic oligonucleotide
  Antisense strand to SEQ ID NO: 309476
guagauaauggauaaccaa

SEQ ID NO: 309478 - RNA, 19 nt, Artificial Sequence
  Description of Artificial Sequence: Synthetic oligonucleotide
  Sense strand starting at position 3779 of SEQ ID NO: 3974
aaucauucugugggaggga

SEQ ID NO: 309479 - RNA, 19 nt, Artificial Sequence
  Description of Artificial Sequence: Synthetic oligonucleotide
  Antisense strand to SEQ ID NO: 309478
ucccucccacagaaugauu

SEQ ID NO: 309480 - RNA, 19 nt, Artificial Sequence
  Description of Artificial Sequence: Synthetic oligonucleotide
  Sense strand starting at position 3782 of SEQ ID NO: 3974
cauucugugggagggaaua

SEQ ID NO: 309481 - RNA, 19 nt, Artificial Sequence
  Description of Artificial Sequence: Synthetic oligonucleotide
  Antisense strand to SEQ ID NO: 309480
uauucccucccacagaaug

SEQ ID NO: 309482 - RNA, 19 nt, Artificial Sequence
  Description of Artificial Sequence: Synthetic oligonucleotide
  Sense strand starting at position 3851 of SEQ ID NO: 3974
uguaacauuccuggauacu

SEQ ID NO: 309483 - RNA, 19 nt, Artificial Sequence
  Description of Artificial Sequence: Synthetic oligonucleotide
  Antisense strand to SEQ ID NO: 309482
aguauccaggaauguuaca

SEQ ID NO: 309484 - RNA, 19 nt, Artificial Sequence
  Description of Artificial Sequence: Synthetic oligonucleotide
  Sense strand starting at position 3852 of SEQ ID NO: 3974
guaacauuccuggauacuu

SEQ ID NO: 309485 - RNA, 19 nt, Artificial Sequence
  Description of Artificial Sequence: Synthetic oligonucleotide
  Antisense strand to SEQ ID NO: 309484
aaguauccaggaauguuac

SEQ ID NO: 309486 - RNA, 19 nt, Artificial Sequence
  Description of Artificial Sequence: Synthetic oligonucleotide
  Sense strand starting at position 82 of SEQ ID NO: 3975
gcucauuaggaaugcaaag

SEQ ID NO: 309487 - RNA, 19 nt, Artificial Sequence
  Description of Artificial Sequence: Synthetic oligonucleotide
  Antisense strand to SEQ ID NO: 309486
cuuugcauuccuaaugagc

SEQ ID NO: 309488 - RNA, 19 nt, Artificial Sequence
  Description of Artificial Sequence: Synthetic oligonucleotide
  Sense strand starting at position 143 of SEQ ID NO: 3975
uuaacaaacucugugugau

SEQ ID NO: 309489 - RNA, 19 nt, Artificial Sequence
  Description of Artificial Sequence: Synthetic oligonucleotide
  Antisense strand to SEQ ID NO: 309488
aucacacagaguuuguuaa

SEQ ID NO: 309490 - RNA, 19 nt, Artificial Sequence
  Description of Artificial Sequence: Synthetic oligonucleotide
  Sense strand starting at position 260 of SEQ ID NO: 3975
cuggaaauauuccuuugga

SEQ ID NO: 309491 - RNA, 19 nt, Artificial Sequence
  Description of Artificial Sequence: Synthetic oligonucleotide
  Antisense strand to SEQ ID NO: 309490
uccaaaggaauauuuccag

SEQ ID NO: 309492 - RNA, 19 nt, Artificial Sequence
  Description of Artificial Sequence: Synthetic oligonucleotide
  Sense strand starting at position 261 of SEQ ID NO: 3975
uggaaauauuccuuuggau

SEQ ID NO: 309493 - RNA, 19 nt, Artificial Sequence
  Description of Artificial Sequence: Synthetic oligonucleotide
  Antisense strand to SEQ ID NO: 309492
auccaaaggaauauuucca

SEQ ID NO: 309494 - RNA, 19 nt, Artificial Sequence
  Description of Artificial Sequence: Synthetic oligonucleotide
  Sense strand starting at position 274 of SEQ ID NO: 3975
uuggauuccuaacugaauc

SEQ ID NO: 309495 - RNA, 19 nt, Artificial Sequence
  Description of Artificial Sequence: Synthetic oligonucleotide
  Antisense strand to SEQ ID NO: 309494
gauucaguuaggaauccaa

SEQ ID NO: 309496 - RNA, 19 nt, Artificial Sequence
  Description of Artificial Sequence: Synthetic oligonucleotide
  Sense strand starting at position 322 of SEQ ID NO: 3975
auugcucuacccuagugau

SEQ ID NO: 309497 - RNA, 19 nt, Artificial Sequence
  Description of Artificial Sequence: Synthetic oligonucleotide
  Antisense strand to SEQ ID NO: 309496
aucacuaggguagagcaau

SEQ ID NO: 309498 - RNA, 19 nt, Artificial Sequence
  Description of Artificial Sequence: Synthetic oligonucleotide
  Sense strand starting at position 409 of SEQ ID NO: 3975
ucuagaaauuuggauugac

SEQ ID NO: 309499 - RNA, 19 nt, Artificial Sequence
  Description of Artificial Sequence: Synthetic oligonucleotide
  Antisense strand to SEQ ID NO: 309498
gucaauccaaauuucuaga

SEQ ID NO: 309500 - RNA, 19 nt, Artificial Sequence
  Description of Artificial Sequence: Synthetic oligonucleotide
  Sense strand starting at position 417 of SEQ ID NO: 3975
uuuggauugacuuggucaa

SEQ ID NO: 309501 - RNA, 19 nt, Artificial Sequence
  Description of Artificial Sequence: Synthetic oligonucleotide
  Antisense strand to SEQ ID NO: 309500
uugaccaagucaauccaaa

SEQ ID NO: 309502 - RNA, 19 nt, Artificial Sequence
  Description of Artificial Sequence: Synthetic oligonucleotide
  Sense strand starting at position 418 of SEQ ID NO: 3975
uuggauugacuuggucaag

SEQ ID NO: 309503 - RNA, 19 nt, Artificial Sequence
  Description of Artificial Sequence: Synthetic oligonucleotide
  Antisense strand to SEQ ID NO: 309502
cuugaccaagucaauccaa

SEQ ID NO: 309504 - RNA, 19 nt, Artificial Sequence
  Description of Artificial Sequence: Synthetic oligonucleotide
  Sense strand starting at position 591 of SEQ ID NO: 3975
ugucccaacgucuaaugau

SEQ ID NO: 309505 - RNA, 19 nt, Artificial Sequence
  Description of Artificial Sequence: Synthetic oligonucleotide
  Antisense strand to SEQ ID NO: 309504
aucauuagacguugggaca

SEQ ID NO: 309506 - RNA, 19 nt, Artificial Sequence
  Description of Artificial Sequence: Synthetic oligonucleotide
  Sense strand starting at position 744 of SEQ ID NO: 3975
acccaauaugaauguaguu

SEQ ID NO: 309507 - RNA, 19 nt, Artificial Sequence
  Description of Artificial Sequence: Synthetic oligonucleotide
  Antisense strand to SEQ ID NO: 309506
aacuacauucauauugggu

SEQ ID NO: 309508 - RNA, 19 nt, Artificial Sequence
  Description of Artificial Sequence: Synthetic oligonucleotide
  Sense strand starting at position 872 of SEQ ID NO: 3975
uuaguaaaucgugacaaau

SEQ ID NO: 309509 - RNA, 19 nt, Artificial Sequence
  Description of Artificial Sequence: Synthetic oligonucleotide
  Antisense strand to SEQ ID NO: 309508
auuugucacgauuuacuaa

SEQ ID NO: 309510 - RNA, 19 nt, Artificial Sequence
  Description of Artificial Sequence: Synthetic oligonucleotide
  Sense strand starting at position 1043 of SEQ ID NO: 3975
ucuguuugggaugggcaaa

SEQ ID NO: 309511 - RNA, 19 nt, Artificial Sequence
  Description of Artificial Sequence: Synthetic oligonucleotide
  Antisense strand to SEQ ID NO: 309510
uuugcccaucccaaacaga

SEQ ID NO: 309512 - RNA, 19 nt, Artificial Sequence
  Description of Artificial Sequence: Synthetic oligonucleotide
  Sense strand starting at position 1044 of SEQ ID NO: 3975
cuguuugggaugggcaaau

SEQ ID NO: 309513 - RNA, 19 nt, Artificial Sequence
  Description of Artificial Sequence: Synthetic oligonucleotide
  Antisense strand to SEQ ID NO: 309512
auuugcccaucccaaacag

SEQ ID NO: 309514 - RNA, 19 nt, Artificial Sequence
  Description of Artificial Sequence: Synthetic oligonucleotide
  Sense strand starting at position 1157 of SEQ ID NO: 3975
augccucaugaugauuaau

SEQ ID NO: 309515 - RNA, 19 nt, Artificial Sequence
  Description of Artificial Sequence: Synthetic oligonucleotide
  Antisense strand to SEQ ID NO: 309514
auuaaucaucaugaggcau

SEQ ID NO: 309516 - RNA, 19 nt, Artificial Sequence
  Description of Artificial Sequence: Synthetic oligonucleotide
  Sense strand starting at position 1284 of SEQ ID NO: 3975
aaguaaauucuauguaagg

SEQ ID NO: 309517 - RNA, 19 nt, Artificial Sequence
  Description of Artificial Sequence: Synthetic oligonucleotide
  Antisense strand to SEQ ID NO: 309516
ccuuacauagaauuuacuu

SEQ ID NO: 309518 - RNA, 19 nt, Artificial Sequence
  Description of Artificial Sequence: Synthetic oligonucleotide
  Sense strand starting at position 1285 of SEQ ID NO: 3975
aguaaauucuauguaaggu

SEQ ID NO: 309519 - RNA, 19 nt, Artificial Sequence
  Description of Artificial Sequence: Synthetic oligonucleotide
  Antisense strand to SEQ ID NO: 309518
accuuacauagaauuuacu

SEQ ID NO: 309520 - RNA, 19 nt, Artificial Sequence
  Description of Artificial Sequence: Synthetic oligonucleotide
  Sense strand starting at position 1422 of SEQ ID NO: 3975
ggcugaacucuauagugag

SEQ ID NO: 309521 - RNA, 19 nt, Artificial Sequence
  Description of Artificial Sequence: Synthetic oligonucleotide
  Antisense strand to SEQ ID NO: 309520
cucacuauagaguucagcc

SEQ ID NO: 309522 - RNA, 19 nt, Artificial Sequence
  Description of Artificial Sequence: Synthetic oligonucleotide
  Sense strand starting at position 2004 of SEQ ID NO: 3975
agauguccucccugacaug

SEQ ID NO: 309523 - RNA, 19 nt, Artificial Sequence
  Description of Artificial Sequence: Synthetic oligonucleotide
  Antisense strand to SEQ ID NO: 309522
caugucagggaggacaucu

SEQ ID NO: 309524 - RNA, 19 nt, Artificial Sequence
  Description of Artificial Sequence: Synthetic oligonucleotide
  Sense strand starting at position 2123 of SEQ ID NO: 3975
uuguuaacuauuggugaga

SEQ ID NO: 309525 - RNA, 19 nt, Artificial Sequence
  Description of Artificial Sequence: Synthetic oligonucleotide
  Antisense strand to SEQ ID NO: 309524
ucucaccaauaguuaacaa

SEQ ID NO: 309526 - RNA, 19 nt, Artificial Sequence
  Description of Artificial Sequence: Synthetic oligonucleotide
  Sense strand starting at position 2124 of SEQ ID NO: 3975
uguuaacuauuggugagaa

SEQ ID NO: 309527 - RNA, 19 nt, Artificial Sequence
  Description of Artificial Sequence: Synthetic oligonucleotide
  Antisense strand to SEQ ID NO: 309526
uucucaccaauaguuaaca

SEQ ID NO: 309528 - RNA, 19 nt, Artificial Sequence
  Description of Artificial Sequence: Synthetic oligonucleotide
  Sense strand starting at position 2136 of SEQ ID NO: 3975
gugagaacuuucccuuaca

SEQ ID NO: 309529 - RNA, 19 nt, Artificial Sequence
  Description of Artificial Sequence: Synthetic oligonucleotide
  Antisense strand to SEQ ID NO: 309528
uguaagggaaaguucucac

SEQ ID NO: 309530 - RNA, 19 nt, Artificial Sequence
  Description of Artificial Sequence: Synthetic oligonucleotide
  Sense strand starting at position 2195 of SEQ ID NO: 3975
gcuuauuugcuuugagaca

SEQ ID NO: 309531 - RNA, 19 nt, Artificial Sequence
  Description of Artificial Sequence: Synthetic oligonucleotide
  Antisense strand to SEQ ID NO: 309530
ugucucaaagcaaauaagc

SEQ ID NO: 309532 - RNA, 19 nt, Artificial Sequence
  Description of Artificial Sequence: Synthetic oligonucleotide
  Sense strand starting at position 2214 of SEQ ID NO: 3975
acuguauauggauacgagu

SEQ ID NO: 309533 - RNA, 19 nt, Artificial Sequence
  Description of Artificial Sequence: Synthetic oligonucleotide
  Antisense strand to SEQ ID NO: 309532
acucguauccauauacagu

SEQ ID NO: 309534 - RNA, 19 nt, Artificial Sequence
  Description of Artificial Sequence: Synthetic oligonucleotide
  Sense strand starting at position 2283 of SEQ ID NO: 3975
caguacauacgagaacuuu

SEQ ID NO: 309535 - RNA, 19 nt, Artificial Sequence
  Description of Artificial Sequence: Synthetic oligonucleotide
  Antisense strand to SEQ ID NO: 309534
aaaguucucguauguacug

SEQ ID NO: 309536 - RNA, 19 nt, Artificial Sequence
  Description of Artificial Sequence: Synthetic oligonucleotide
  Sense strand starting at position 2359 of SEQ ID NO: 3975
auucuuugucaucacaagu

SEQ ID NO: 309537 - RNA, 19 nt, Artificial Sequence
  Description of Artificial Sequence: Synthetic oligonucleotide
  Antisense strand to SEQ ID NO: 309536
acuugugaugacaaagaau

SEQ ID NO: 309538 - RNA, 19 nt, Artificial Sequence
  Description of Artificial Sequence: Synthetic oligonucleotide
  Sense strand starting at position 2838 of SEQ ID NO: 3975
uggauuucuuuccaagaau

SEQ ID NO: 309539 - RNA, 19 nt, Artificial Sequence
  Description of Artificial Sequence: Synthetic oligonucleotide
  Antisense strand to SEQ ID NO: 309538
auucuuggaaagaaaucca

SEQ ID NO: 309540 - RNA, 19 nt, Artificial Sequence
  Description of Artificial Sequence: Synthetic oligonucleotide
  Sense strand starting at position 2871 of SEQ ID NO: 3975
agaaucaagugcucauauc

SEQ ID NO: 309541 - RNA, 19 nt, Artificial Sequence
  Description of Artificial Sequence: Synthetic oligonucleotide
  Antisense strand to SEQ ID NO: 309540
gauaugagcacuugauucu

SEQ ID NO: 309542 - RNA, 19 nt, Artificial Sequence
  Description of Artificial Sequence: Synthetic oligonucleotide
  Sense strand starting at position 2942 of SEQ ID NO: 3975
cuuggcaaauucuuugaau

SEQ ID NO: 309543 - RNA, 19 nt, Artificial Sequence
  Description of Artificial Sequence: Synthetic oligonucleotide
  Antisense strand to SEQ ID NO: 309542
auucaaagaauuugccaag

SEQ ID NO: 309544 - RNA, 19 nt, Artificial Sequence
  Description of Artificial Sequence: Synthetic oligonucleotide
  Sense strand starting at position 2943 of SEQ ID NO: 3975
uuggcaaauucuuugaaug

SEQ ID NO: 309545 - RNA, 19 nt, Artificial Sequence
  Description of Artificial Sequence: Synthetic oligonucleotide
  Antisense strand to SEQ ID NO: 309544
cauucaaagaauuugccaa

SEQ ID NO: 309546 - RNA, 19 nt, Artificial Sequence
  Description of Artificial Sequence: Synthetic oligonucleotide
  Sense strand starting at position 3150 of SEQ ID NO: 3975
uaaugaugacuaugaggca

SEQ ID NO: 309547 - RNA, 19 nt, Artificial Sequence
  Description of Artificial Sequence: Synthetic oligonucleotide
  Antisense strand to SEQ ID NO: 309546
ugccucauagucaucauua

SEQ ID NO: 309548 - RNA, 19 nt, Artificial Sequence
  Description of Artificial Sequence: Synthetic oligonucleotide
  Sense strand starting at position 3183 of SEQ ID NO: 3975
auguguguugccuuuguaa

SEQ ID NO: 309549 - RNA, 19 nt, Artificial Sequence
  Description of Artificial Sequence: Synthetic oligonucleotide
  Antisense strand to SEQ ID NO: 309548
uuacaaaggcaacacacau

SEQ ID NO: 309550 - RNA, 19 nt, Artificial Sequence
  Description of Artificial Sequence: Synthetic oligonucleotide
  Sense strand starting at position 3429 of SEQ ID NO: 3975
ggcauuuaccucuggcuuu

SEQ ID NO: 309551 - RNA, 19 nt, Artificial Sequence
  Description of Artificial Sequence: Synthetic oligonucleotide
  Antisense strand to SEQ ID NO: 309550
aaagccagagguaaaugcc

SEQ ID NO: 309552 - RNA, 19 nt, Artificial Sequence
  Description of Artificial Sequence: Synthetic oligonucleotide
  Sense strand starting at position 3484 of SEQ ID NO: 3975
aguaauuaauuaccacagu

SEQ ID NO: 309553 - RNA, 19 nt, Artificial Sequence
  Description of Artificial Sequence: Synthetic oligonucleotide
  Antisense strand to SEQ ID NO: 309552
acugugguaauuaauuacu

SEQ ID NO: 309554 - RNA, 19 nt, Artificial Sequence
  Description of Artificial Sequence: Synthetic oligonucleotide
  Sense strand starting at position 3501 of SEQ ID NO: 3975
gugaauuaacuagguugau

SEQ ID NO: 309555 - RNA, 19 nt, Artificial Sequence
  Description of Artificial Sequence: Synthetic oligonucleotide
  Antisense strand to SEQ ID NO: 309554
aucaaccuaguuaauucac

SEQ ID NO: 309556 - RNA, 19 nt, Artificial Sequence
  Description of Artificial Sequence: Synthetic oligonucleotide
  Sense strand starting at position 3502 of SEQ ID NO: 3975
ugaauuaacuagguugauu

SEQ ID NO: 309557 - RNA, 19 nt, Artificial Sequence
  Description of Artificial Sequence: Synthetic oligonucleotide
  Antisense strand to SEQ ID NO: 309556
aaucaaccuaguuaauuca

SEQ ID NO: 309558 - RNA, 19 nt, Artificial Sequence
  Description of Artificial Sequence: Synthetic oligonucleotide
  Sense strand starting at position 3548 of SEQ ID NO: 3975
gucaaccagugaucuugau

SEQ ID NO: 309559 - RNA, 19 nt, Artificial Sequence
  Description of Artificial Sequence: Synthetic oligonucleotide
  Antisense strand to SEQ ID NO: 309558
aucaagaucacugguugac

SEQ ID NO: 309560 - RNA, 19 nt, Artificial Sequence
  Description of Artificial Sequence: Synthetic oligonucleotide
  Sense strand starting at position 3613 of SEQ ID NO: 3975
uaacaacucggucagacau

SEQ ID NO: 309561 - RNA, 19 nt, Artificial Sequence
  Description of Artificial Sequence: Synthetic oligonucleotide
  Antisense strand to SEQ ID NO: 309560
augucugaccgaguuguua

SEQ ID NO: 309562 - RNA, 19 nt, Artificial Sequence
  Description of Artificial Sequence: Synthetic oligonucleotide
  Sense strand starting at position 3642 of SEQ ID NO: 3975
aauugucauuuggaugaag

SEQ ID NO: 309563 - RNA, 19 nt, Artificial Sequence
  Description of Artificial Sequence: Synthetic oligonucleotide
  Antisense strand to SEQ ID NO: 309562
cuucauccaaaugacaauu

SEQ ID NO: 309564 - RNA, 19 nt, Artificial Sequence
  Description of Artificial Sequence: Synthetic oligonucleotide
  Sense strand starting at position 3810 of SEQ ID NO: 3975
uuugauugacuguauugca

SEQ ID NO: 309565 - RNA, 19 nt, Artificial Sequence
  Description of Artificial Sequence: Synthetic oligonucleotide
  Antisense strand to SEQ ID NO: 309564
ugcaauacagucaaucaaa

SEQ ID NO: 309566 - RNA, 19 nt, Artificial Sequence
  Description of Artificial Sequence: Synthetic oligonucleotide
  Sense strand starting at position 155 of SEQ ID NO: 3976
cuuuacuuucuuuagaugu

SEQ ID NO: 309567 - RNA, 19 nt, Artificial Sequence
  Description of Artificial Sequence: Synthetic oligonucleotide
  Antisense strand to SEQ ID NO: 309566
acaucuaaagaaaguaaag

SEQ ID NO: 309568 - RNA, 19 nt, Artificial Sequence
  Description of Artificial Sequence: Synthetic oligonucleotide
  Sense strand starting at position 533 of SEQ ID NO: 3976
aguacuuguuccucauauu

SEQ ID NO: 309569 - RNA, 19 nt, Artificial Sequence
  Description of Artificial Sequence: Synthetic oligonucleotide
  Antisense strand to SEQ ID NO: 309568
aauaugaggaacaaguacu

SEQ ID NO: 309570 - RNA, 19 nt, Artificial Sequence
  Description of Artificial Sequence: Synthetic oligonucleotide
  Sense strand starting at position 534 of SEQ ID NO: 3976
guacuuguuccucauauua

SEQ ID NO: 309571 - RNA, 19 nt, Artificial Sequence
  Description of Artificial Sequence: Synthetic oligonucleotide
  Antisense strand to SEQ ID NO: 309570
uaauaugaggaacaaguac

SEQ ID NO: 309572 - RNA, 19 nt, Artificial Sequence
  Description of Artificial Sequence: Synthetic oligonucleotide
  Sense strand starting at position 562 of SEQ ID NO: 3976
acgauuaacuuuccaaguu

SEQ ID NO: 309573 - RNA, 19 nt, Artificial Sequence
  Description of Artificial Sequence: Synthetic oligonucleotide
  Antisense strand to SEQ ID NO: 309572
aacuuggaaaguuaaucgu

SEQ ID NO: 309574 - RNA, 19 nt, Artificial Sequence
  Description of Artificial Sequence: Synthetic oligonucleotide
  Sense strand starting at position 574 of SEQ ID NO: 3976
ccaaguugagcguaacaau

SEQ ID NO: 309575 - RNA, 19 nt, Artificial Sequence
  Description of Artificial Sequence: Synthetic oligonucleotide
  Antisense strand to SEQ ID NO: 309574
auuguuacgcucaacuugg

SEQ ID NO: 309576 - RNA, 19 nt, Artificial Sequence
  Description of Artificial Sequence: Synthetic oligonucleotide
  Sense strand starting at position 600 of SEQ ID NO: 3976
acacgacuuguaugugaga

SEQ ID NO: 309577 - RNA, 19 nt, Artificial Sequence
  Description of Artificial Sequence: Synthetic oligonucleotide
  Antisense strand to SEQ ID NO: 309576
ucucacauacaagucgugu

SEQ ID NO: 309578 - RNA, 19 nt, Artificial Sequence
  Description of Artificial Sequence: Synthetic oligonucleotide
  Sense strand starting at position 601 of SEQ ID NO: 3976
cacgacuuguaugugagau

SEQ ID NO: 309579 - RNA, 19 nt, Artificial Sequence
  Description of Artificial Sequence: Synthetic oligonucleotide
  Antisense strand to SEQ ID NO: 309578
aucucacauacaagucgug

SEQ ID NO: 309580 - RNA, 19 nt, Artificial Sequence
  Description of Artificial Sequence: Synthetic oligonucleotide
  Sense strand starting at position 602 of SEQ ID NO: 3976
acgacuuguaugugagaua

SEQ ID NO: 309581 - RNA, 19 nt, Artificial Sequence
  Description of Artificial Sequence: Synthetic oligonucleotide
  Antisense strand to SEQ ID NO: 309580
uaucucacauacaagucgu

SEQ ID NO: 309582 - RNA, 19 nt, Artificial Sequence
  Description of Artificial Sequence: Synthetic oligonucleotide
  Sense strand starting at position 723 of SEQ ID NO: 3976
aggauaauuuagggugaca

SEQ ID NO: 309583 - RNA, 19 nt, Artificial Sequence
  Description of Artificial Sequence: Synthetic oligonucleotide
  Antisense strand to SEQ ID NO: 309582
ugucacccuaaauuauccu

SEQ ID NO: 309584 - RNA, 19 nt, Artificial Sequence
  Description of Artificial Sequence: Synthetic oligonucleotide
  Sense strand starting at position 728 of SEQ ID NO: 3976
aauuuagggugacacaaau

SEQ ID NO: 309585 - RNA, 19 nt, Artificial Sequence
  Description of Artificial Sequence: Synthetic oligonucleotide
  Antisense strand to SEQ ID NO: 309584
auuugugucacccuaaauu

SEQ ID NO: 309586 - RNA, 19 nt, Artificial Sequence
  Description of Artificial Sequence: Synthetic oligonucleotide
  Sense strand starting at position 749 of SEQ ID NO: 3976
uggaaccucuaguuggaau

SEQ ID NO: 309587 - RNA, 19 nt, Artificial Sequence
  Description of Artificial Sequence: Synthetic oligonucleotide
  Antisense strand to SEQ ID NO: 309586
auuccaacuagagguucca

SEQ ID NO: 309588 - RNA, 19 nt, Artificial Sequence
  Description of Artificial Sequence: Synthetic oligonucleotide
  Sense strand starting at position 750 of SEQ ID NO: 3976
ggaaccucuaguuggaaua

SEQ ID NO: 309589 - RNA, 19 nt, Artificial Sequence
  Description of Artificial Sequence: Synthetic oligonucleotide
  Antisense strand to SEQ ID NO: 309588
uauuccaacuagagguucc

SEQ ID NO: 309590 - RNA, 19 nt, Artificial Sequence
  Description of Artificial Sequence: Synthetic oligonucleotide
  Sense strand starting at position 751 of SEQ ID NO: 3976
gaaccucuaguuggaauau

SEQ ID NO: 309591 - RNA, 19 nt, Artificial Sequence
  Description of Artificial Sequence: Synthetic oligonucleotide
  Antisense strand to SEQ ID NO: 309590
auauuccaacuagagguuc

SEQ ID NO: 309592 - RNA, 19 nt, Artificial Sequence
  Description of Artificial Sequence: Synthetic oligonucleotide
  Sense strand starting at position 806 of SEQ ID NO: 3976
cggaguugaaauuaaguua

SEQ ID NO: 309593 - RNA, 19 nt, Artificial Sequence
  Description of Artificial Sequence: Synthetic oligonucleotide
  Antisense strand to SEQ ID NO: 309592
uaacuuaauuucaacuccg

SEQ ID NO: 309594 - RNA, 19 nt, Artificial Sequence
  Description of Artificial Sequence: Synthetic oligonucleotide
  Sense strand starting at position 844 of SEQ ID NO: 3976
auugucuuuggucauuaaa

SEQ ID NO: 309595 - RNA, 19 nt, Artificial Sequence
  Description of Artificial Sequence: Synthetic oligonucleotide
  Antisense strand to SEQ ID NO: 309594
uuuaaugaccaaagacaau

SEQ ID NO: 309596 - RNA, 19 nt, Artificial Sequence
  Description of Artificial Sequence: Synthetic oligonucleotide
  Sense strand starting at position 847 of SEQ ID NO: 3976
gucuuuggucauuaaagug

SEQ ID NO: 309597 - RNA, 19 nt, Artificial Sequence
  Description of Artificial Sequence: Synthetic oligonucleotide
  Antisense strand to SEQ ID NO: 309596
cacuuuaaugaccaaagac

SEQ ID NO: 309598 - RNA, 19 nt, Artificial Sequence
  Description of Artificial Sequence: Synthetic oligonucleotide
  Sense strand starting at position 852 of SEQ ID NO: 3976
uggucauuaaagugacagu

SEQ ID NO: 309599 - RNA, 19 nt, Artificial Sequence
  Description of Artificial Sequence: Synthetic oligonucleotide
  Antisense strand to SEQ ID NO: 309598
acugucacuuuaaugacca

SEQ ID NO: 309600 - RNA, 19 nt, Artificial Sequence
  Description of Artificial Sequence: Synthetic oligonucleotide
  Sense strand starting at position 939 of SEQ ID NO: 3976
gucugaaagucuguggaaa

SEQ ID NO: 309601 - RNA, 19 nt, Artificial Sequence
  Description of Artificial Sequence: Synthetic oligonucleotide
  Antisense strand to SEQ ID NO: 309600
uuuccacagacuuucagac

SEQ ID NO: 309602 - RNA, 19 nt, Artificial Sequence
  Description of Artificial Sequence: Synthetic oligonucleotide
  Sense strand starting at position 940 of SEQ ID NO: 3976
ucugaaagucuguggaaau

SEQ ID NO: 309603 - RNA, 19 nt, Artificial Sequence
  Description of Artificial Sequence: Synthetic oligonucleotide
  Antisense strand to SEQ ID NO: 309602
auuuccacagacuuucaga

SEQ ID NO: 309604 - RNA, 19 nt, Artificial Sequence
  Description of Artificial Sequence: Synthetic oligonucleotide
  Sense strand starting at position 1131 of SEQ ID NO: 3976
ucuugcaagggucgagaau

SEQ ID NO: 309605 - RNA, 19 nt, Artificial Sequence
  Description of Artificial Sequence: Synthetic oligonucleotide
  Antisense strand to SEQ ID NO: 309604
auucucgacccuugcaaga

SEQ ID NO: 309606 - RNA, 19 nt, Artificial Sequence
  Description of Artificial Sequence: Synthetic oligonucleotide
  Sense strand starting at position 1132 of SEQ ID NO: 3976
cuugcaagggucgagaaua

SEQ ID NO: 309607 - RNA, 19 nt, Artificial Sequence
  Description of Artificial Sequence: Synthetic oligonucleotide
  Antisense strand to SEQ ID NO: 309606
uauucucgacccuugcaag

SEQ ID NO: 309608 - RNA, 19 nt, Artificial Sequence
  Description of Artificial Sequence: Synthetic oligonucleotide
  Sense strand starting at position 1244 of SEQ ID NO: 3976
auaacuaucccgggauggu

SEQ ID NO: 309609 - RNA, 19 nt, Artificial Sequence
  Description of Artificial Sequence: Synthetic oligonucleotide
  Antisense strand to SEQ ID NO: 309608
accaucccgggauaguuau

SEQ ID NO: 309610 - RNA, 19 nt, Artificial Sequence
  Description of Artificial Sequence: Synthetic oligonucleotide
  Sense strand starting at position 1245 of SEQ ID NO: 3976
uaacuaucccgggauggua

SEQ ID NO: 309611 - RNA, 19 nt, Artificial Sequence
  Description of Artificial Sequence: Synthetic oligonucleotide
  Antisense strand to SEQ ID NO: 309610
uaccaucccgggauaguua

SEQ ID NO: 309612 - RNA, 19 nt, Artificial Sequence
  Description of Artificial Sequence: Synthetic oligonucleotide
  Sense strand starting at position 1294 of SEQ ID NO: 3976
guaccauuaaagcggugaa

SEQ ID NO: 309613 - RNA, 19 nt, Artificial Sequence
  Description of Artificial Sequence: Synthetic oligonucleotide
  Antisense strand to SEQ ID NO: 309612
uucaccgcuuuaaugguac

SEQ ID NO: 309614 - RNA, 19 nt, Artificial Sequence
  Description of Artificial Sequence: Synthetic oligonucleotide
  Sense strand starting at position 1306 of SEQ ID NO: 3976
cggugaaugcuacacuaag

SEQ ID NO: 309615 - RNA, 19 nt, Artificial Sequence
  Description of Artificial Sequence: Synthetic oligonucleotide
  Antisense strand to SEQ ID NO: 309614
cuuaguguagcauucaccg

SEQ ID NO: 309616 - RNA, 19 nt, Artificial Sequence
  Description of Artificial Sequence: Synthetic oligonucleotide
  Sense strand starting at position 1411 of SEQ ID NO: 3976
ggcugaaguguuuaagaca

SEQ ID NO: 309617 - RNA, 19 nt, Artificial Sequence
  Description of Artificial Sequence: Synthetic oligonucleotide
  Antisense strand to SEQ ID NO: 309616
ugucuuaaacacuucagcc

SEQ ID NO: 309618 - RNA, 19 nt, Artificial Sequence
  Description of Artificial Sequence: Synthetic oligonucleotide
  Sense strand starting at position 1670 of SEQ ID NO: 3976
gaaacuuuccgagagccca

SEQ ID NO: 309619 - RNA, 19 nt, Artificial Sequence
  Description of Artificial Sequence: Synthetic oligonucleotide
  Antisense strand to SEQ ID NO: 309618
ugggcucucggaaaguuuc

SEQ ID NO: 309620 - RNA, 19 nt, Artificial Sequence
  Description of Artificial Sequence: Synthetic oligonucleotide
  Sense strand starting at position 3061 of SEQ ID NO: 3976
caguaagauccuugacgua

SEQ ID NO: 309621 - RNA, 19 nt, Artificial Sequence
  Description of Artificial Sequence: Synthetic oligonucleotide
  Antisense strand to SEQ ID NO: 309620
uacgucaaggaucuuacug

SEQ ID NO: 309622 - RNA, 19 nt, Artificial Sequence
  Description of Artificial Sequence: Synthetic oligonucleotide
  Sense strand starting at position 3098 of SEQ ID NO: 3976
aggaguguuugccugacau

SEQ ID NO: 309623 - RNA, 19 nt, Artificial Sequence
  Description of Artificial Sequence: Synthetic oligonucleotide
  Antisense strand to SEQ ID NO: 309622
augucaggcaaacacuccu

SEQ ID NO: 309624 - RNA, 19 nt, Artificial Sequence
  Description of Artificial Sequence: Synthetic oligonucleotide
  Sense strand starting at position 3108 of SEQ ID NO: 3976
gccugacaucgucucguuu

SEQ ID NO: 309625 - RNA, 19 nt, Artificial Sequence
  Description of Artificial Sequence: Synthetic oligonucleotide
  Antisense strand to SEQ ID NO: 309624
aaacgagacgaugucaggc

SEQ ID NO: 309626 - RNA, 19 nt, Artificial Sequence
  Description of Artificial Sequence: Synthetic oligonucleotide
  Sense strand starting at position 3199 of SEQ ID NO: 3976
agcgaauaacaaggauauu

SEQ ID NO: 309627 - RNA, 19 nt, Artificial Sequence
  Description of Artificial Sequence: Synthetic oligonucleotide
  Antisense strand to SEQ ID NO: 309626
aauauccuuguuauucgcu

SEQ ID NO: 309628 - RNA, 19 nt, Artificial Sequence
  Description of Artificial Sequence: Synthetic oligonucleotide
  Sense strand starting at position 3325 of SEQ ID NO: 3976
auagacaugugacugcaaa

SEQ ID NO: 309629 - RNA, 19 nt, Artificial Sequence
  Description of Artificial Sequence: Synthetic oligonucleotide
  Antisense strand to SEQ ID NO: 309628
uuugcagucacaugucuau

SEQ ID NO: 309630 - RNA, 19 nt, Artificial Sequence
  Description of Artificial Sequence: Synthetic oligonucleotide
  Sense strand starting at position 3326 of SEQ ID NO: 3976
uagacaugugacugcaaag

SEQ ID NO: 309631 - RNA, 19 nt, Artificial Sequence
  Description of Artificial Sequence: Synthetic oligonucleotide
  Antisense strand to SEQ ID NO: 309630
cuuugcagucacaugucua

SEQ ID NO: 309632 - RNA, 19 nt, Artificial Sequence
  Description of Artificial Sequence: Synthetic oligonucleotide
  Sense strand starting at position 3404 of SEQ ID NO: 3976
agucauucucucgauagcu

SEQ ID NO: 309633 - RNA, 19 nt, Artificial Sequence
  Description of Artificial Sequence: Synthetic oligonucleotide
  Antisense strand to SEQ ID NO: 309632
agcuaucgagagaaugacu

SEQ ID NO: 309634 - RNA, 19 nt, Artificial Sequence
  Description of Artificial Sequence: Synthetic oligonucleotide
  Sense strand starting at position 3406 of SEQ ID NO: 3976
ucauucucucgauagcuuu

SEQ ID NO: 309635 - RNA, 19 nt, Artificial Sequence
  Description of Artificial Sequence: Synthetic oligonucleotide
  Antisense strand to SEQ ID NO: 309634
aaagcuaucgagagaauga

SEQ ID NO: 309636 - RNA, 19 nt, Artificial Sequence
  Description of Artificial Sequence: Synthetic oligonucleotide
  Sense strand starting at position 3493 of SEQ ID NO: 3976
cugcuugaaguugauacua

SEQ ID NO: 309637 - RNA, 19 nt, Artificial Sequence
  Description of Artificial Sequence: Synthetic oligonucleotide
  Antisense strand to SEQ ID NO: 309636
uaguaucaacuucaagcag

SEQ ID NO: 309638 - RNA, 19 nt, Artificial Sequence
  Description of Artificial Sequence: Synthetic oligonucleotide
  Sense strand starting at position 3547 of SEQ ID NO: 3976
gcaggugauccuuaggauu

SEQ ID NO: 309639 - RNA, 19 nt, Artificial Sequence
  Description of Artificial Sequence: Synthetic oligonucleotide
  Antisense strand to SEQ ID NO: 309638
aauccuaaggaucaccugc

SEQ ID NO: 309640 - RNA, 19 nt, Artificial Sequence
  Description of Artificial Sequence: Synthetic oligonucleotide
  Sense strand starting at position 3553 of SEQ ID NO: 3976
gauccuuaggauuguaguu

SEQ ID NO: 309641 - RNA, 19 nt, Artificial Sequence
  Description of Artificial Sequence: Synthetic oligonucleotide
  Antisense strand to SEQ ID NO: 309640
aacuacaauccuaaggauc

SEQ ID NO: 309642 - RNA, 19 nt, Artificial Sequence
  Description of Artificial Sequence: Synthetic oligonucleotide
  Sense strand starting at position 3558 of SEQ ID NO: 3976
uuaggauuguaguucuauu

SEQ ID NO: 309643 - RNA, 19 nt, Artificial Sequence
  Description of Artificial Sequence: Synthetic oligonucleotide
  Antisense strand to SEQ ID NO: 309642
aauagaacuacaauccuaa

SEQ ID NO: 309644 - RNA, 19 nt, Artificial Sequence
  Description of Artificial Sequence: Synthetic oligonucleotide
  Sense strand starting at position 3654 of SEQ ID NO: 3976
acauucguuguccacucaa

SEQ ID NO: 309645 - RNA, 19 nt, Artificial Sequence
  Description of Artificial Sequence: Synthetic oligonucleotide
  Antisense strand to SEQ ID NO: 309644
uugaguggacaacgaaugu

SEQ ID NO: 309646 - RNA, 19 nt, Artificial Sequence
  Description of Artificial Sequence: Synthetic oligonucleotide
  Sense strand starting at position 14 of SEQ ID NO: 3977
agucuugugaaccacagua

SEQ ID NO: 309647 - RNA, 19 nt, Artificial Sequence
  Description of Artificial Sequence: Synthetic oligonucleotide
  Antisense strand to SEQ ID NO: 309646
uacugugguucacaagacu

SEQ ID NO: 309648 - RNA, 19 nt, Artificial Sequence
  Description of Artificial Sequence: Synthetic oligonucleotide
  Sense strand starting at position 16 of SEQ ID NO: 3977
ucuugugaaccacaguaaa

SEQ ID NO: 309649 - RNA, 19 nt, Artificial Sequence
  Description of Artificial Sequence: Synthetic oligonucleotide
  Antisense strand to SEQ ID NO: 309648
uuuacugugguucacaaga

SEQ ID NO: 309650 - RNA, 19 nt, Artificial Sequence
  Description of Artificial Sequence: Synthetic oligonucleotide
  Sense strand starting at position 206 of SEQ ID NO: 3977
agaguauugaguugaucag

SEQ ID NO: 309651 - RNA, 19 nt, Artificial Sequence
  Description of Artificial Sequence: Synthetic oligonucleotide
  Antisense strand to SEQ ID NO: 309650
cugaucaacucaauacucu

SEQ ID NO: 309652 - RNA, 19 nt, Artificial Sequence
  Description of Artificial Sequence: Synthetic oligonucleotide
  Sense strand starting at position 210 of SEQ ID NO: 3977
uauugaguugaucagcuua

SEQ ID NO: 309653 - RNA, 19 nt, Artificial Sequence
  Description of Artificial Sequence: Synthetic oligonucleotide
  Antisense strand to SEQ ID NO: 309652
uaagcugaucaacucaaua

SEQ ID NO: 309654 - RNA, 19 nt, Artificial Sequence
  Description of Artificial Sequence: Synthetic oligonucleotide
  Sense strand starting at position 212 of SEQ ID NO: 3977
uugaguugaucagcuuaua

SEQ ID NO: 309655 - RNA, 19 nt, Artificial Sequence
  Description of Artificial Sequence: Synthetic oligonucleotide
  Antisense strand to SEQ ID NO: 309654
uauaagcugaucaacucaa

SEQ ID NO: 309656 - RNA, 19 nt, Artificial Sequence
  Description of Artificial Sequence: Synthetic oligonucleotide
  Sense strand starting at position 215 of SEQ ID NO: 3977
aguugaucagcuuauaaca

SEQ ID NO: 309657 - RNA, 19 nt, Artificial Sequence
  Description of Artificial Sequence: Synthetic oligonucleotide
  Antisense strand to SEQ ID NO: 309656
uguuauaagcugaucaacu

SEQ ID NO: 309658 - RNA, 19 nt, Artificial Sequence
  Description of Artificial Sequence: Synthetic oligonucleotide
  Sense strand starting at position 253 of SEQ ID NO: 3977
ggccauuuacucugugcca

SEQ ID NO: 309659 - RNA, 19 nt, Artificial Sequence
  Description of Artificial Sequence: Synthetic oligonucleotide
  Antisense strand to SEQ ID NO: 309658
uggcacagaguaaauggcc

SEQ ID NO: 309660 - RNA, 19 nt, Artificial Sequence
  Description of Artificial Sequence: Synthetic oligonucleotide
  Sense strand starting at position 254 of SEQ ID NO: 3977
gccauuuacucugugccaa

SEQ ID NO: 309661 - RNA, 19 nt, Artificial Sequence
  Description of Artificial Sequence: Synthetic oligonucleotide
  Antisense strand to SEQ ID NO: 309660
uuggcacagaguaaauggc

SEQ ID NO: 309662 - RNA, 19 nt, Artificial Sequence
  Description of Artificial Sequence: Synthetic oligonucleotide
  Sense strand starting at position 255 of SEQ ID NO: 3977
ccauuuacucugugccaag

SEQ ID NO: 309663 - RNA, 19 nt, Artificial Sequence
  Description of Artificial Sequence: Synthetic oligonucleotide
  Antisense strand to SEQ ID NO: 309662
cuuggcacagaguaaaugg

SEQ ID NO: 309664 - RNA, 19 nt, Artificial Sequence
  Description of Artificial Sequence: Synthetic oligonucleotide
  Sense strand starting at position 275 of SEQ ID NO: 3977
gcuuaucaugguuaucuca

SEQ ID NO: 309665 - RNA, 19 nt, Artificial Sequence
  Description of Artificial Sequence: Synthetic oligonucleotide
  Antisense strand to SEQ ID NO: 309664
ugagauaaccaugauaagc

SEQ ID NO: 309666 - RNA, 19 nt, Artificial Sequence
  Description of Artificial Sequence: Synthetic oligonucleotide
  Sense strand starting at position 277 of SEQ ID NO: 3977
uuaucaugguuaucucacu

SEQ ID NO: 309667 - RNA, 19 nt, Artificial Sequence
  Description of Artificial Sequence: Synthetic oligonucleotide
  Antisense strand to SEQ ID NO: 309666
agugagauaaccaugauaa

SEQ ID NO: 309668 - RNA, 19 nt, Artificial Sequence
  Description of Artificial Sequence: Synthetic oligonucleotide
  Sense strand starting at position 390 of SEQ ID NO: 3977
aggacuguggcuuaaacua

SEQ ID NO: 309669 - RNA, 19 nt, Artificial Sequence
  Description of Artificial Sequence: Synthetic oligonucleotide
  Antisense strand to SEQ ID NO: 309668
uaguuuaagccacaguccu

SEQ ID NO: 309670 - RNA, 19 nt, Artificial Sequence
  Description of Artificial Sequence: Synthetic oligonucleotide
  Sense strand starting at position 440 of SEQ ID NO: 3977
augcaagacacguauugga

SEQ ID NO: 309671 - RNA, 19 nt, Artificial Sequence
  Description of Artificial Sequence: Synthetic oligonucleotide
  Antisense strand to SEQ ID NO: 309670
uccaauacgugucuugcau

SEQ ID NO: 309672 - RNA, 19 nt, Artificial Sequence
  Description of Artificial Sequence: Synthetic oligonucleotide
  Sense strand starting at position 449 of SEQ ID NO: 3977
acguauuggaaguaggaua

SEQ ID NO: 309673 - RNA, 19 nt, Artificial Sequence
  Description of Artificial Sequence: Synthetic oligonucleotide
  Antisense strand to SEQ ID NO: 309672
uauccuacuuccaauacgu

SEQ ID NO: 309674 - RNA, 19 nt, Artificial Sequence
  Description of Artificial Sequence: Synthetic oligonucleotide
  Sense strand starting at position 552 of SEQ ID NO: 3977
aagaaagaauuucgauaug

SEQ ID NO: 309675 - RNA, 19 nt, Artificial Sequence
  Description of Artificial Sequence: Synthetic oligonucleotide
  Antisense strand to SEQ ID NO: 309674
cauaucgaaauucuuucuu

SEQ ID NO: 309676 - RNA, 19 nt, Artificial Sequence
  Description of Artificial Sequence: Synthetic oligonucleotide
  Sense strand starting at position 558 of SEQ ID NO: 3977
gaauuucgauauggagaga

SEQ ID NO: 309677 - RNA, 19 nt, Artificial Sequence
  Description of Artificial Sequence: Synthetic oligonucleotide
  Antisense strand to SEQ ID NO: 309676
ucucuccauaucgaaauuc

SEQ ID NO: 309678 - RNA, 19 nt, Artificial Sequence
  Description of Artificial Sequence: Synthetic oligonucleotide
  Sense strand starting at position 590 of SEQ ID NO: 3977
uggauuuggcuguguugca

SEQ ID NO: 309679 - RNA, 19 nt, Artificial Sequence
  Description of Artificial Sequence: Synthetic oligonucleotide
  Antisense strand to SEQ ID NO: 309678
ugcaacacagccaaaucca

SEQ ID NO: 309680 - RNA, 19 nt, Artificial Sequence
  Description of Artificial Sequence: Synthetic oligonucleotide
  Sense strand starting at position 591 of SEQ ID NO: 3977
ggauuuggcuguguugcau

SEQ ID NO: 309681 - RNA, 19 nt, Artificial Sequence
  Description of Artificial Sequence: Synthetic oligonucleotide
  Antisense strand to SEQ ID NO: 309680
augcaacacagccaaaucc

SEQ ID NO: 309682 - RNA, 19 nt, Artificial Sequence
  Description of Artificial Sequence: Synthetic oligonucleotide
  Sense strand starting at position 657 of SEQ ID NO: 3977
uggcuaucuagauguggag

SEQ ID NO: 309683 - RNA, 19 nt, Artificial Sequence
  Description of Artificial Sequence: Synthetic oligonucleotide
  Antisense strand to SEQ ID NO: 309682
cuccacaucuagauagcca

SEQ ID NO: 309684 - RNA, 19 nt, Artificial Sequence
  Description of Artificial Sequence: Synthetic oligonucleotide
  Sense strand starting at position 749 of SEQ ID NO: 3977
ggaggaauauaagaguaaa

SEQ ID NO: 309685 - RNA, 19 nt, Artificial Sequence
  Description of Artificial Sequence: Synthetic oligonucleotide
  Antisense strand to SEQ ID NO: 309684
uuuacucuuauauuccucc

SEQ ID NO: 309686 - RNA, 19 nt, Artificial Sequence
  Description of Artificial Sequence: Synthetic oligonucleotide
  Sense strand starting at position 953 of SEQ ID NO: 3977
acagcaggaauucgucaau

SEQ ID NO: 309687 - RNA, 19 nt, Artificial Sequence
  Description of Artificial Sequence: Synthetic oligonucleotide
  Antisense strand to SEQ ID NO: 309686
auugacgaauuccugcugu

SEQ ID NO: 309688 - RNA, 19 nt, Artificial Sequence
  Description of Artificial Sequence: Synthetic oligonucleotide
  Sense strand starting at position 1183 of SEQ ID NO: 3977
guuagacacuugucaggaa

SEQ ID NO: 309689 - RNA, 19 nt, Artificial Sequence
  Description of Artificial Sequence: Synthetic oligonucleotide
  Antisense strand to SEQ ID NO: 309688
uuccugacaagugucuaac

SEQ ID NO: 309690 - RNA, 19 nt, Artificial Sequence
  Description of Artificial Sequence: Synthetic oligonucleotide
  Sense strand starting at position 1355 of SEQ ID NO: 3977
ugaucuggcggcuagaaau

SEQ ID NO: 309691 - RNA, 19 nt, Artificial Sequence
  Description of Artificial Sequence: Synthetic oligonucleotide
  Antisense strand to SEQ ID NO: 309690
auuucuagccgccagauca

SEQ ID NO: 309692 - RNA, 19 nt, Artificial Sequence
  Description of Artificial Sequence: Synthetic oligonucleotide
  Sense strand starting at position 1367 of SEQ ID NO: 3977
uagaaaugggcgcaaggaa

SEQ ID NO: 309693 - RNA, 19 nt, Artificial Sequence
  Description of Artificial Sequence: Synthetic oligonucleotide
  Antisense strand to SEQ ID NO: 309692
uuccuugcgcccauuucua

SEQ ID NO: 309694 - RNA, 19 nt, Artificial Sequence
  Description of Artificial Sequence: Synthetic oligonucleotide
  Sense strand starting at position 1414 of SEQ ID NO: 3977
ugcagugaggacuggucaa

SEQ ID NO: 309695 - RNA, 19 nt, Artificial Sequence
  Description of Artificial Sequence: Synthetic oligonucleotide
  Antisense strand to SEQ ID NO: 309694
uugaccaguccucacugca

SEQ ID NO: 309696 - RNA, 19 nt, Artificial Sequence
  Description of Artificial Sequence: Synthetic oligonucleotide
  Sense strand starting at position 1447 of SEQ ID NO: 3977
uggucaagagagugaauga

SEQ ID NO: 309697 - RNA, 19 nt, Artificial Sequence
  Description of Artificial Sequence: Synthetic oligonucleotide
  Antisense strand to SEQ ID NO: 309696
ucauucacucucuugacca

SEQ ID NO: 309698 - RNA, 19 nt, Artificial Sequence
  Description of Artificial Sequence: Synthetic oligonucleotide
  Sense strand starting at position 1454 of SEQ ID NO: 3977
gagagugaaugaguaucau

SEQ ID NO: 309699 - RNA, 19 nt, Artificial Sequence
  Description of Artificial Sequence: Synthetic oligonucleotide
  Antisense strand to SEQ ID NO: 309698
augauacucauucacucuc

SEQ ID NO: 309700 - RNA, 19 nt, Artificial Sequence
  Description of Artificial Sequence: Synthetic oligonucleotide
  Sense strand starting at position 1499 of SEQ ID NO: 3977
acgaaagucaccugaagag

SEQ ID NO: 309701 - RNA, 19 nt, Artificial Sequence
  Description of Artificial Sequence: Synthetic oligonucleotide
  Antisense strand to SEQ ID NO: 309700
cucuucaggugacuuucgu

SEQ ID NO: 309702 - RNA, 19 nt, Artificial Sequence
  Description of Artificial Sequence: Synthetic oligonucleotide
  Sense strand starting at position 1715 of SEQ ID NO: 3977
gggcgaacuccagaggagu

SEQ ID NO: 309703 - RNA, 19 nt, Artificial Sequence
  Description of Artificial Sequence: Synthetic oligonucleotide
  Antisense strand to SEQ ID NO: 309702
acuccucuggaguucgccc

SEQ ID NO: 309704 - RNA, 19 nt, Artificial Sequence
  Description of Artificial Sequence: Synthetic oligonucleotide
  Sense strand starting at position 2204 of SEQ ID NO: 3977
ucgggcaugcgcaauaguu

SEQ ID NO: 309705 - RNA, 19 nt, Artificial Sequence
  Description of Artificial Sequence: Synthetic oligonucleotide
  Antisense strand to SEQ ID NO: 309704
aacuauugcgcaugcccga

SEQ ID NO: 309706 - RNA, 19 nt, Artificial Sequence
  Description of Artificial Sequence: Synthetic oligonucleotide
  Sense strand starting at position 2888 of SEQ ID NO: 3977
gauuuauugcgcugaccaa

SEQ ID NO: 309707 - RNA, 19 nt, Artificial Sequence
  Description of Artificial Sequence: Synthetic oligonucleotide
  Antisense strand to SEQ ID NO: 309706
uuggucagcgcaauaaauc

SEQ ID NO: 309708 - RNA, 19 nt, Artificial Sequence
  Description of Artificial Sequence: Synthetic oligonucleotide
  Sense strand starting at position 2953 of SEQ ID NO: 3977
ggaauuccauggucaaucu

SEQ ID NO: 309709 - RNA, 19 nt, Artificial Sequence
  Description of Artificial Sequence: Synthetic oligonucleotide
  Antisense strand to SEQ ID NO: 309708
agauugaccauggaauucc

SEQ ID NO: 309710 - RNA, 19 nt, Artificial Sequence
  Description of Artificial Sequence: Synthetic oligonucleotide
  Sense strand starting at position 3384 of SEQ ID NO: 3977
ucucuaugccuggagugaa

SEQ ID NO: 309711 - RNA, 19 nt, Artificial Sequence
  Description of Artificial Sequence: Synthetic oligonucleotide
  Antisense strand to SEQ ID NO: 309710
uucacuccaggcauagaga

SEQ ID NO: 309712 - RNA, 19 nt, Artificial Sequence
  Description of Artificial Sequence: Synthetic oligonucleotide
  Sense strand starting at position 3394 of SEQ ID NO: 3977
uggagugaauguucuucuu

SEQ ID NO: 309713 - RNA, 19 nt, Artificial Sequence
  Description of Artificial Sequence: Synthetic oligonucleotide
  Antisense strand to SEQ ID NO: 309712
aagaagaacauucacucca

SEQ ID NO: 309714 - RNA, 19 nt, Artificial Sequence
  Description of Artificial Sequence: Synthetic oligonucleotide
  Sense strand starting at position 3396 of SEQ ID NO: 3977
gagugaauguucuucuuau

SEQ ID NO: 309715 - RNA, 19 nt, Artificial Sequence
  Description of Artificial Sequence: Synthetic oligonucleotide
  Antisense strand to SEQ ID NO: 309714
auaagaagaacauucacuc

SEQ ID NO: 309716 - RNA, 19 nt, Artificial Sequence
  Description of Artificial Sequence: Synthetic oligonucleotide
  Sense strand starting at position 3450 of SEQ ID NO: 3977
gguaccucuuccuugaacu

SEQ ID NO: 309717 - RNA, 19 nt, Artificial Sequence
  Description of Artificial Sequence: Synthetic oligonucleotide
  Antisense strand to SEQ ID NO: 309716
aguucaaggaagagguacc

SEQ ID NO: 309718 - RNA, 19 nt, Artificial Sequence
  Description of Artificial Sequence: Synthetic oligonucleotide
  Sense strand starting at position 3577 of SEQ ID NO: 3977
agccucuaacuuuaguaga

SEQ ID NO: 309719 - RNA, 19 nt, Artificial Sequence
  Description of Artificial Sequence: Synthetic oligonucleotide
  Antisense strand to SEQ ID NO: 309718
ucuacuaaaguuagaggcu

SEQ ID NO: 309720 - RNA, 19 nt, Artificial Sequence
  Description of Artificial Sequence: Synthetic oligonucleotide
  Sense strand starting at position 3831 of SEQ ID NO: 3977
gagcauaccugccugaaga

SEQ ID NO: 309721 - RNA, 19 nt, Artificial Sequence
  Description of Artificial Sequence: Synthetic oligonucleotide
  Antisense strand to SEQ ID NO: 309720
ucuucaggcagguaugcuc

SEQ ID NO: 309722 - RNA, 19 nt, Artificial Sequence
  Description of Artificial Sequence: Synthetic oligonucleotide
  Sense strand starting at position 3907 of SEQ ID NO: 3977
gaaauuguauuaucaggca

SEQ ID NO: 309723 - RNA, 19 nt, Artificial Sequence
  Description of Artificial Sequence: Synthetic oligonucleotide
  Antisense strand to SEQ ID NO: 309722
ugccugauaauacaauuuc

SEQ ID NO: 309724 - RNA, 19 nt, Artificial Sequence
  Description of Artificial Sequence: Synthetic oligonucleotide
  Sense strand starting at position 3962 of SEQ ID NO: 3977
ccauacguuuaaguacaaa

SEQ ID NO: 309725 - RNA, 19 nt, Artificial Sequence
  Description of Artificial Sequence: Synthetic oligonucleotide
  Antisense strand to SEQ ID NO: 309724
uuuguacuuaaacguaugg

SEQ ID NO: 309726 - RNA, 19 nt, Artificial Sequence
  Description of Artificial Sequence: Synthetic oligonucleotide
  Sense strand starting at position 394 of SEQ ID NO: 3979
aacugaucucucggucacu

SEQ ID NO: 309727 - RNA, 19 nt, Artificial Sequence
  Description of Artificial Sequence: Synthetic oligonucleotide
  Antisense strand to SEQ ID NO: 309726
agugaccgagagaucaguu

SEQ ID NO: 309728 - RNA, 19 nt, Artificial Sequence
  Description of Artificial Sequence: Synthetic oligonucleotide
  Sense strand starting at position 395 of SEQ ID NO: 3979
acugaucucucggucacua

SEQ ID NO: 309729 - RNA, 19 nt, Artificial Sequence
  Description of Artificial Sequence: Synthetic oligonucleotide
  Antisense strand to SEQ ID NO: 309728
uagugaccgagagaucagu

SEQ ID NO: 309730 - RNA, 19 nt, Artificial Sequence
  Description of Artificial Sequence: Synthetic oligonucleotide
  Sense strand starting at position 397 of SEQ ID NO: 3979
ugaucucucggucacuaua

SEQ ID NO: 309731 - RNA, 19 nt, Artificial Sequence
  Description of Artificial Sequence: Synthetic oligonucleotide
  Antisense strand to SEQ ID NO: 309730
uauagugaccgagagauca

SEQ ID NO: 309732 - RNA, 19 nt, Artificial Sequence
  Description of Artificial Sequence: Synthetic oligonucleotide
  Sense strand starting at position 400 of SEQ ID NO: 3979
ucucucggucacuauagau

SEQ ID NO: 309733 - RNA, 19 nt, Artificial Sequence
  Description of Artificial Sequence: Synthetic oligonucleotide
  Antisense strand to SEQ ID NO: 309732
aucuauagugaccgagaga

SEQ ID NO: 309734 - RNA, 19 nt, Artificial Sequence
  Description of Artificial Sequence: Synthetic oligonucleotide
  Sense strand starting at position 503 of SEQ ID NO: 3979
cauccauguuguugagcua

SEQ ID NO: 309735 - RNA, 19 nt, Artificial Sequence
  Description of Artificial Sequence: Synthetic oligonucleotide
  Antisense strand to SEQ ID NO: 309734
uagcucaacaacauggaug

SEQ ID NO: 309736 - RNA, 19 nt, Artificial Sequence
  Description of Artificial Sequence: Synthetic oligonucleotide
  Sense strand starting at position 510 of SEQ ID NO: 3979
guuguugagcuacagaucu

SEQ ID NO: 309737 - RNA, 19 nt, Artificial Sequence
  Description of Artificial Sequence: Synthetic oligonucleotide
  Antisense strand to SEQ ID NO: 309736
agaucuguagcucaacaac

SEQ ID NO: 309738 - RNA, 19 nt, Artificial Sequence
  Description of Artificial Sequence: Synthetic oligonucleotide
  Sense strand starting at position 529 of SEQ ID NO: 3979
uccuuuggauugcucagua

SEQ ID NO: 309739 - RNA, 19 nt, Artificial Sequence
  Description of Artificial Sequence: Synthetic oligonucleotide
  Antisense strand to SEQ ID NO: 309738
uacugagcaauccaaagga

SEQ ID NO: 309740 - RNA, 19 nt, Artificial Sequence
  Description of Artificial Sequence: Synthetic oligonucleotide
  Sense strand starting at position 533 of SEQ ID NO: 3979
uuggauugcucaguaauau

SEQ ID NO: 309741 - RNA, 19 nt, Artificial Sequence
  Description of Artificial Sequence: Synthetic oligonucleotide
  Antisense strand to SEQ ID NO: 309740
auauuacugagcaauccaa

SEQ ID NO: 309742 - RNA, 19 nt, Artificial Sequence
  Description of Artificial Sequence: Synthetic oligonucleotide
  Sense strand starting at position 534 of SEQ ID NO: 3979
uggauugcucaguaauauu

SEQ ID NO: 309743 - RNA, 19 nt, Artificial Sequence
  Description of Artificial Sequence: Synthetic oligonucleotide
  Antisense strand to SEQ ID NO: 309742
aauauuacugagcaaucca

SEQ ID NO: 309744 - RNA, 19 nt, Artificial Sequence
  Description of Artificial Sequence: Synthetic oligonucleotide
  Sense strand starting at position 914 of SEQ ID NO: 3979
gacgaugucucgcuguguu

SEQ ID NO: 309745 - RNA, 19 nt, Artificial Sequence
  Description of Artificial Sequence: Synthetic oligonucleotide
  Antisense strand to SEQ ID NO: 309744
aacacagcgagacaucguc

SEQ ID NO: 309746 - RNA, 19 nt, Artificial Sequence
  Description of Artificial Sequence: Synthetic oligonucleotide
  Sense strand starting at position 1024 of SEQ ID NO: 3979
gccguuugucccuguccua

SEQ ID NO: 309747 - RNA, 19 nt, Artificial Sequence
  Description of Artificial Sequence: Synthetic oligonucleotide
  Antisense strand to SEQ ID NO: 309746
uaggacagggacaaacggc

SEQ ID NO: 309748 - RNA, 19 nt, Artificial Sequence
  Description of Artificial Sequence: Synthetic oligonucleotide
  Sense strand starting at position 1025 of SEQ ID NO: 3979
ccguuugucccuguccuaa

SEQ ID NO: 309749 - RNA, 19 nt, Artificial Sequence
  Description of Artificial Sequence: Synthetic oligonucleotide
  Antisense strand to SEQ ID NO: 309748
uuaggacagggacaaacgg

SEQ ID NO: 309750 - RNA, 19 nt, Artificial Sequence
  Description of Artificial Sequence: Synthetic oligonucleotide
  Sense strand starting at position 1029 of SEQ ID NO: 3979
uugucccuguccuaaucau

SEQ ID NO: 309751 - RNA, 19 nt, Artificial Sequence
  Description of Artificial Sequence: Synthetic oligonucleotide
  Antisense strand to SEQ ID NO: 309750
augauuaggacagggacaa

SEQ ID NO: 309752 - RNA, 19 nt, Artificial Sequence
  Description of Artificial Sequence: Synthetic oligonucleotide
  Sense strand starting at position 1103 of SEQ ID NO: 3979
ugaacccaguggucagaaa

SEQ ID NO: 309753 - RNA, 19 nt, Artificial Sequence
  Description of Artificial Sequence: Synthetic oligonucleotide
  Antisense strand to SEQ ID NO: 309752
uuucugaccacuggguuca

SEQ ID NO: 309754 - RNA, 19 nt, Artificial Sequence
  Description of Artificial Sequence: Synthetic oligonucleotide
  Sense strand starting at position 1653 of SEQ ID NO: 3979
cccauuuacuaaugaggaa

SEQ ID NO: 309755 - RNA, 19 nt, Artificial Sequence
  Description of Artificial Sequence: Synthetic oligonucleotide
  Antisense strand to SEQ ID NO: 309754
uuccucauuaguaaauggg

SEQ ID NO: 309756 - RNA, 19 nt, Artificial Sequence
  Description of Artificial Sequence: Synthetic oligonucleotide
  Sense strand starting at position 1673 of SEQ ID NO: 3979
cugagaaguggcagcguua

SEQ ID NO: 309757 - RNA, 19 nt, Artificial Sequence
  Description of Artificial Sequence: Synthetic oligonucleotide
  Antisense strand to SEQ ID NO: 309756
uaacgcugccacuucucag

SEQ ID NO: 309758 - RNA, 19 nt, Artificial Sequence
  Description of Artificial Sequence: Synthetic oligonucleotide
  Sense strand starting at position 2573 of SEQ ID NO: 3979
cucccaaaucuccgcugaa

SEQ ID NO: 309759 - RNA, 19 nt, Artificial Sequence
  Description of Artificial Sequence: Synthetic oligonucleotide
  Antisense strand to SEQ ID NO: 309758
uucagcggagauuugggag

SEQ ID NO: 309760 - RNA, 19 nt, Artificial Sequence
  Description of Artificial Sequence: Synthetic oligonucleotide
  Sense strand starting at position 2574 of SEQ ID NO: 3979
ucccaaaucuccgcugaau

SEQ ID NO: 309761 - RNA, 19 nt, Artificial Sequence
  Description of Artificial Sequence: Synthetic oligonucleotide
  Antisense strand to SEQ ID NO: 309760
auucagcggagauuuggga

SEQ ID NO: 309762 - RNA, 19 nt, Artificial Sequence
  Description of Artificial Sequence: Synthetic oligonucleotide
  Sense strand starting at position 2576 of SEQ ID NO: 3979
ccaaaucuccgcugaauga

SEQ ID NO: 309763 - RNA, 19 nt, Artificial Sequence
  Description of Artificial Sequence: Synthetic oligonucleotide
  Antisense strand to SEQ ID NO: 309762
ucauucagcggagauuugg

SEQ ID NO: 309764 - RNA, 19 nt, Artificial Sequence
  Description of Artificial Sequence: Synthetic oligonucleotide
  Sense strand starting at position 2586 of SEQ ID NO: 3979
gcugaaugauucucaccaa

SEQ ID NO: 309765 - RNA, 19 nt, Artificial Sequence
  Description of Artificial Sequence: Synthetic oligonucleotide
  Antisense strand to SEQ ID NO: 309764
uuggugagaaucauucagc

SEQ ID NO: 309766 - RNA, 19 nt, Artificial Sequence
  Description of Artificial Sequence: Synthetic oligonucleotide
  Sense strand starting at position 2587 of SEQ ID NO: 3979
cugaaugauucucaccaag

SEQ ID NO: 309767 - RNA, 19 nt, Artificial Sequence
  Description of Artificial Sequence: Synthetic oligonucleotide
  Antisense strand to SEQ ID NO: 309766
cuuggugagaaucauucag

SEQ ID NO: 309768 - RNA, 19 nt, Artificial Sequence
  Description of Artificial Sequence: Synthetic oligonucleotide
  Sense strand starting at position 2634 of SEQ ID NO: 3979
aagcaucgcugucagagua

SEQ ID NO: 309769 - RNA, 19 nt, Artificial Sequence
  Description of Artificial Sequence: Synthetic oligonucleotide
  Antisense strand to SEQ ID NO: 309768
uacucugacagcgaugcuu

SEQ ID NO: 309770 - RNA, 19 nt, Artificial Sequence
  Description of Artificial Sequence: Synthetic oligonucleotide
  Sense strand starting at position 2667 of SEQ ID NO: 3979
agaaguuuaucugccgguu

SEQ ID NO: 309771 - RNA, 19 nt, Artificial Sequence
  Description of Artificial Sequence: Synthetic oligonucleotide
  Antisense strand to SEQ ID NO: 309770
aaccggcagauaaacuucu

SEQ ID NO: 309772 - RNA, 19 nt, Artificial Sequence
  Description of Artificial Sequence: Synthetic oligonucleotide
  Sense strand starting at position 2735 of SEQ ID NO: 3979
gaaagucuggcacagcgau

SEQ ID NO: 309773 - RNA, 19 nt, Artificial Sequence
  Description of Artificial Sequence: Synthetic oligonucleotide
  Antisense strand to SEQ ID NO: 309772
aucgcugugccagacuuuc

SEQ ID NO: 309774 - RNA, 19 nt, Artificial Sequence
  Description of Artificial Sequence: Synthetic oligonucleotide
  Sense strand starting at position 2754 of SEQ ID NO: 3979
gagcgaccagcacauaauu

SEQ ID NO: 309775 - RNA, 19 nt, Artificial Sequence
  Description of Artificial Sequence: Synthetic oligonucleotide
  Antisense strand to SEQ ID NO: 309774
aauuaugugcuggucgcuc

SEQ ID NO: 309776 - RNA, 19 nt, Artificial Sequence
  Description of Artificial Sequence: Synthetic oligonucleotide
  Sense strand starting at position 2763 of SEQ ID NO: 3979
gcacauaauugcggaauga

SEQ ID NO: 309777 - RNA, 19 nt, Artificial Sequence
  Description of Artificial Sequence: Synthetic oligonucleotide
  Antisense strand to SEQ ID NO: 309776
ucauuccgcaauuaugugc

SEQ ID NO: 309778 - RNA, 19 nt, Artificial Sequence
  Description of Artificial Sequence: Synthetic oligonucleotide
  Sense strand starting at position 2773 of SEQ ID NO: 3979
gcggaaugaacccaguaaa

SEQ ID NO: 309779 - RNA, 19 nt, Artificial Sequence
  Description of Artificial Sequence: Synthetic oligonucleotide
  Antisense strand to SEQ ID NO: 309778
uuuacuggguucauuccgc

SEQ ID NO: 309780 - RNA, 19 nt, Artificial Sequence
  Description of Artificial Sequence: Synthetic oligonucleotide
  Sense strand starting at position 2806 of SEQ ID NO: 3979
cuucucugcuaccuagaga

SEQ ID NO: 309781 - RNA, 19 nt, Artificial Sequence
  Description of Artificial Sequence: Synthetic oligonucleotide
  Antisense strand to SEQ ID NO: 309780
ucucuagguagcagagaag

SEQ ID NO: 309782 - RNA, 19 nt, Artificial Sequence
  Description of Artificial Sequence: Synthetic oligonucleotide
  Sense strand starting at position 2809 of SEQ ID NO: 3979
cucugcuaccuagagauca

SEQ ID NO: 309783 - RNA, 19 nt, Artificial Sequence
  Description of Artificial Sequence: Synthetic oligonucleotide
  Antisense strand to SEQ ID NO: 309782
ugaucucuagguagcagag

SEQ ID NO: 309784 - RNA, 19 nt, Artificial Sequence
  Description of Artificial Sequence: Synthetic oligonucleotide
  Sense strand starting at position 2819 of SEQ ID NO: 3979
uagagaucacacugguuaa

SEQ ID NO: 309785 - RNA, 19 nt, Artificial Sequence
  Description of Artificial Sequence: Synthetic oligonucleotide
  Antisense strand to SEQ ID NO: 309784
uuaaccagugugaucucua

SEQ ID NO: 309786 - RNA, 19 nt, Artificial Sequence
  Description of Artificial Sequence: Synthetic oligonucleotide
  Sense strand starting at position 2822 of SEQ ID NO: 3979
agaucacacugguuaauau

SEQ ID NO: 309787 - RNA, 19 nt, Artificial Sequence
  Description of Artificial Sequence: Synthetic oligonucleotide
  Antisense strand to SEQ ID NO: 309786
auauuaaccagugugaucu

SEQ ID NO: 309788 - RNA, 19 nt, Artificial Sequence
  Description of Artificial Sequence: Synthetic oligonucleotide
  Sense strand starting at position 2833 of SEQ ID NO: 3979
guuaauauaugacggucaa

SEQ ID NO: 309789 - RNA, 19 nt, Artificial Sequence
  Description of Artificial Sequence: Synthetic oligonucleotide
  Antisense strand to SEQ ID NO: 309788
uugaccgucauauauuaac

SEQ ID NO: 309790 - RNA, 19 nt, Artificial Sequence
  Description of Artificial Sequence: Synthetic oligonucleotide
  Sense strand starting at position 2834 of SEQ ID NO: 3979
uuaauauaugacggucaau

SEQ ID NO: 309791 - RNA, 19 nt, Artificial Sequence
  Description of Artificial Sequence: Synthetic oligonucleotide
  Antisense strand to SEQ ID NO: 309790
auugaccgucauauauuaa

SEQ ID NO: 309792 - RNA, 19 nt, Artificial Sequence
  Description of Artificial Sequence: Synthetic oligonucleotide
  Sense strand starting at position 3456 of SEQ ID NO: 3979
cuaccuuuguuaggcauua

SEQ ID NO: 309793 - RNA, 19 nt, Artificial Sequence
  Description of Artificial Sequence: Synthetic oligonucleotide
  Antisense strand to SEQ ID NO: 309792
uaaugccuaacaaagguag

SEQ ID NO: 309794 - RNA, 19 nt, Artificial Sequence
  Description of Artificial Sequence: Synthetic oligonucleotide
  Sense strand starting at position 3461 of SEQ ID NO: 3979
uuuguuaggcauuagugaa

SEQ ID NO: 309795 - RNA, 19 nt, Artificial Sequence
  Description of Artificial Sequence: Synthetic oligonucleotide
  Antisense strand to SEQ ID NO: 309794
uucacuaaugccuaacaaa

SEQ ID NO: 309796 - RNA, 19 nt, Artificial Sequence
  Description of Artificial Sequence: Synthetic oligonucleotide
  Sense strand starting at position 3532 of SEQ ID NO: 3979
uaagaaagcuucugucugu

SEQ ID NO: 309797 - RNA, 19 nt, Artificial Sequence
  Description of Artificial Sequence: Synthetic oligonucleotide
  Antisense strand to SEQ ID NO: 309796
acagacagaagcuuucuua

SEQ ID NO: 309798 - RNA, 19 nt, Artificial Sequence
  Description of Artificial Sequence: Synthetic oligonucleotide
  Sense strand starting at position 3700 of SEQ ID NO: 3979
ccuacugugugacaggauu

SEQ ID NO: 309799 - RNA, 19 nt, Artificial Sequence
  Description of Artificial Sequence: Synthetic oligonucleotide
  Antisense strand to SEQ ID NO: 309798
aauccugucacacaguagg

SEQ ID NO: 309800 - RNA, 19 nt, Artificial Sequence
  Description of Artificial Sequence: Synthetic oligonucleotide
  Sense strand starting at position 3747 of SEQ ID NO: 3979
guaaauaaguccuugauug

SEQ ID NO: 309801 - RNA, 19 nt, Artificial Sequence
  Description of Artificial Sequence: Synthetic oligonucleotide
  Antisense strand to SEQ ID NO: 309800
caaucaaggacuuauuuac

SEQ ID NO: 309802 - RNA, 19 nt, Artificial Sequence
  Description of Artificial Sequence: Synthetic oligonucleotide
  Sense strand starting at position 3748 of SEQ ID NO: 3979
uaaauaaguccuugauugg

SEQ ID NO: 309803 - RNA, 19 nt, Artificial Sequence
  Description of Artificial Sequence: Synthetic oligonucleotide
  Antisense strand to SEQ ID NO: 309802
ccaaucaaggacuuauuua

SEQ ID NO: 309804 - RNA, 19 nt, Artificial Sequence
  Description of Artificial Sequence: Synthetic oligonucleotide
  Sense strand starting at position 135 of SEQ ID NO: 3978
gaauguacauguguaucua

SEQ ID NO: 309805 - RNA, 19 nt, Artificial Sequence
  Description of Artificial Sequence: Synthetic oligonucleotide
  Antisense strand to SEQ ID NO: 309804
uagauacacauguacauuc

SEQ ID NO: 309806 - RNA, 19 nt, Artificial Sequence
  Description of Artificial Sequence: Synthetic oligonucleotide
  Sense strand starting at position 139 of SEQ ID NO: 3978
guacauguguaucuauaaa

SEQ ID NO: 309807 - RNA, 19 nt, Artificial Sequence
  Description of Artificial Sequence: Synthetic oligonucleotide
  Antisense strand to SEQ ID NO: 309806
uuuauagauacacauguac

SEQ ID NO: 309808 - RNA, 19 nt, Artificial Sequence
  Description of Artificial Sequence: Synthetic oligonucleotide
  Sense strand starting at position 258 of SEQ ID NO: 3978
gugacuaccuggccugaaa

SEQ ID NO: 309809 - RNA, 19 nt, Artificial Sequence
  Description of Artificial Sequence: Synthetic oligonucleotide
  Antisense strand to SEQ ID NO: 309808
uuucaggccagguagucac

SEQ ID NO: 309810 - RNA, 19 nt, Artificial Sequence
  Description of Artificial Sequence: Synthetic oligonucleotide
  Sense strand starting at position 269 of SEQ ID NO: 3978
gccugaaauaaaggacagu

SEQ ID NO: 309811 - RNA, 19 nt, Artificial Sequence
  Description of Artificial Sequence: Synthetic oligonucleotide
  Antisense strand to SEQ ID NO: 309810
acuguccuuuauuucaggc

SEQ ID NO: 309812 - RNA, 19 nt, Artificial Sequence
  Description of Artificial Sequence: Synthetic oligonucleotide
  Sense strand starting at position 285 of SEQ ID NO: 3978
aguuuauuagagcaaugac

SEQ ID NO: 309813 - RNA, 19 nt, Artificial Sequence
  Description of Artificial Sequence: Synthetic oligonucleotide
  Antisense strand to SEQ ID NO: 309812
gucauugcucuaauaaacu

SEQ ID NO: 309814 - RNA, 19 nt, Artificial Sequence
  Description of Artificial Sequence: Synthetic oligonucleotide
  Sense strand starting at position 288 of SEQ ID NO: 3978
uuauuagagcaaugacagu

SEQ ID NO: 309815 - RNA, 19 nt, Artificial Sequence
  Description of Artificial Sequence: Synthetic oligonucleotide
  Antisense strand to SEQ ID NO: 309814
acugucauugcucuaauaa

SEQ ID NO: 309816 - RNA, 19 nt, Artificial Sequence
  Description of Artificial Sequence: Synthetic oligonucleotide
  Sense strand starting at position 299 of SEQ ID NO: 3978
augacaguagccggaauau

SEQ ID NO: 309817 - RNA, 19 nt, Artificial Sequence
  Description of Artificial Sequence: Synthetic oligonucleotide
  Antisense strand to SEQ ID NO: 309816
auauuccggcuacugucau

SEQ ID NO: 309818 - RNA, 19 nt, Artificial Sequence
  Description of Artificial Sequence: Synthetic oligonucleotide
  Sense strand starting at position 311 of SEQ ID NO: 3978
ggaauauagcauugguguc

SEQ ID NO: 309819 - RNA, 19 nt, Artificial Sequence
  Description of Artificial Sequence: Synthetic oligonucleotide
  Antisense strand to SEQ ID NO: 309818
gacaccaaugcuauauucc

SEQ ID NO: 309820 - RNA, 19 nt, Artificial Sequence
  Description of Artificial Sequence: Synthetic oligonucleotide
  Sense strand starting at position 339 of SEQ ID NO: 3978
agugaauucccacaaggca

SEQ ID NO: 309821 - RNA, 19 nt, Artificial Sequence
  Description of Artificial Sequence: Synthetic oligonucleotide
  Antisense strand to SEQ ID NO: 309820
ugccuugugggaauucacu

SEQ ID NO: 309822 - RNA, 19 nt, Artificial Sequence
  Description of Artificial Sequence: Synthetic oligonucleotide
  Sense strand starting at position 413 of SEQ ID NO: 3978
cuuagagaaucugaaccau

SEQ ID NO: 309823 - RNA, 19 nt, Artificial Sequence
  Description of Artificial Sequence: Synthetic oligonucleotide
  Antisense strand to SEQ ID NO: 309822
augguucagauucucuaag

SEQ ID NO: 309824 - RNA, 19 nt, Artificial Sequence
  Description of Artificial Sequence: Synthetic oligonucleotide
  Sense strand starting at position 464 of SEQ ID NO: 3978
ugccuauccuagucuugaa

SEQ ID NO: 309825 - RNA, 19 nt, Artificial Sequence
  Description of Artificial Sequence: Synthetic oligonucleotide
  Antisense strand to SEQ ID NO: 309824
uucaagacuaggauaggca

SEQ ID NO: 309826 - RNA, 19 nt, Artificial Sequence
  Description of Artificial Sequence: Synthetic oligonucleotide
  Sense strand starting at position 621 of SEQ ID NO: 3978
acacgaacauccuuaacga

SEQ ID NO: 309827 - RNA, 19 nt, Artificial Sequence
  Description of Artificial Sequence: Synthetic oligonucleotide
  Antisense strand to SEQ ID NO: 309826
ucguuaaggauguucgugu

SEQ ID NO: 309828 - RNA, 19 nt, Artificial Sequence
  Description of Artificial Sequence: Synthetic oligonucleotide
  Sense strand starting at position 766 of SEQ ID NO: 3978
gugccuauugcucaagcau

SEQ ID NO: 309829 - RNA, 19 nt, Artificial Sequence
  Description of Artificial Sequence: Synthetic oligonucleotide
  Antisense strand to SEQ ID NO: 309828
augcuugagcaauaggcac

SEQ ID NO: 309830 - RNA, 19 nt, Artificial Sequence
  Description of Artificial Sequence: Synthetic oligonucleotide
  Sense strand starting at position 1085 of SEQ ID NO: 3978
uuagaaauaccauacguuu

SEQ ID NO: 309831 - RNA, 19 nt, Artificial Sequence
  Description of Artificial Sequence: Synthetic oligonucleotide
  Antisense strand to SEQ ID NO: 309830
aaacguaugguauuucuaa

SEQ ID NO: 309832 - RNA, 19 nt, Artificial Sequence
  Description of Artificial Sequence: Synthetic oligonucleotide
  Sense strand starting at position 1431 of SEQ ID NO: 3978
uacgauuauugagaagggu

SEQ ID NO: 309833 - RNA, 19 nt, Artificial Sequence
  Description of Artificial Sequence: Synthetic oligonucleotide
  Antisense strand to SEQ ID NO: 309832
acccuucucaauaaucgua

SEQ ID NO: 309834 - RNA, 19 nt, Artificial Sequence
  Description of Artificial Sequence: Synthetic oligonucleotide
  Sense strand starting at position 1544 of SEQ ID NO: 3978
cagugaccuagcggaagau

SEQ ID NO: 309835 - RNA, 19 nt, Artificial Sequence
  Description of Artificial Sequence: Synthetic oligonucleotide
  Antisense strand to SEQ ID NO: 309834
aucuuccgcuaggucacug

SEQ ID NO: 309836 - RNA, 19 nt, Artificial Sequence
  Description of Artificial Sequence: Synthetic oligonucleotide
  Sense strand starting at position 1545 of SEQ ID NO: 3978
agugaccuagcggaagauu

SEQ ID NO: 309837 - RNA, 19 nt, Artificial Sequence
  Description of Artificial Sequence: Synthetic oligonucleotide
  Antisense strand to SEQ ID NO: 309836
aaucuuccgcuaggucacu

SEQ ID NO: 309838 - RNA, 19 nt, Artificial Sequence
  Description of Artificial Sequence: Synthetic oligonucleotide
  Sense strand starting at position 2016 of SEQ ID NO: 3978
gacaaaucacgcugcagaa

SEQ ID NO: 309839 - RNA, 19 nt, Artificial Sequence
  Description of Artificial Sequence: Synthetic oligonucleotide
  Antisense strand to SEQ ID NO: 309838
uucugcagcgugauuuguc

SEQ ID NO: 309840 - RNA, 19 nt, Artificial Sequence
  Description of Artificial Sequence: Synthetic oligonucleotide
  Sense strand starting at position 2092 of SEQ ID NO: 3978
ggccuacugucguuuacag

SEQ ID NO: 309841 - RNA, 19 nt, Artificial Sequence
  Description of Artificial Sequence: Synthetic oligonucleotide
  Antisense strand to SEQ ID NO: 309840
cuguaaacgacaguaggcc

SEQ ID NO: 309842 - RNA, 19 nt, Artificial Sequence
  Description of Artificial Sequence: Synthetic oligonucleotide
  Sense strand starting at position 2093 of SEQ ID NO: 3978
gccuacugucguuuacagu

SEQ ID NO: 309843 - RNA, 19 nt, Artificial Sequence
  Description of Artificial Sequence: Synthetic oligonucleotide
  Antisense strand to SEQ ID NO: 309842
acuguaaacgacaguaggc

SEQ ID NO: 309844 - RNA, 19 nt, Artificial Sequence
  Description of Artificial Sequence: Synthetic oligonucleotide
  Sense strand starting at position 2094 of SEQ ID NO: 3978
ccuacugucguuuacaguu

SEQ ID NO: 309845 - RNA, 19 nt, Artificial Sequence
  Description of Artificial Sequence: Synthetic oligonucleotide
  Antisense strand to SEQ ID NO: 309844
aacuguaaacgacaguagg

SEQ ID NO: 309846 - RNA, 19 nt, Artificial Sequence
  Description of Artificial Sequence: Synthetic oligonucleotide
  Sense strand starting at position 2470 of SEQ ID NO: 3978
ccagauuugugccucgaaa

SEQ ID NO: 309847 - RNA, 19 nt, Artificial Sequence
  Description of Artificial Sequence: Synthetic oligonucleotide
  Antisense strand to SEQ ID NO: 309846
uuucgaggcacaaaucugg

SEQ ID NO: 309848 - RNA, 19 nt, Artificial Sequence
  Description of Artificial Sequence: Synthetic oligonucleotide
  Sense strand starting at position 2472 of SEQ ID NO: 3978
agauuugugccucgaaacc

SEQ ID NO: 309849 - RNA, 19 nt, Artificial Sequence
  Description of Artificial Sequence: Synthetic oligonucleotide
  Antisense strand to SEQ ID NO: 309848
gguuucgaggcacaaaucu

SEQ ID NO: 309850 - RNA, 19 nt, Artificial Sequence
  Description of Artificial Sequence: Synthetic oligonucleotide
  Sense strand starting at position 2697 of SEQ ID NO: 3978
cuuguuugcuuguuugaac

SEQ ID NO: 309851 - RNA, 19 nt, Artificial Sequence
  Description of Artificial Sequence: Synthetic oligonucleotide
  Antisense strand to SEQ ID NO: 309850
guucaaacaagcaaacaag

SEQ ID NO: 309852 - RNA, 19 nt, Artificial Sequence
  Description of Artificial Sequence: Synthetic oligonucleotide
  Sense strand starting at position 3039 of SEQ ID NO: 3978
gagugaaacucugucauac

SEQ ID NO: 309853 - RNA, 19 nt, Artificial Sequence
  Description of Artificial Sequence: Synthetic oligonucleotide
  Antisense strand to SEQ ID NO: 309852
guaugacagaguuucacuc

SEQ ID NO: 309854 - RNA, 19 nt, Artificial Sequence
  Description of Artificial Sequence: Synthetic oligonucleotide
  Sense strand starting at position 3115 of SEQ ID NO: 3978
gugugcaauuuacugaauu

SEQ ID NO: 309855 - RNA, 19 nt, Artificial Sequence
  Description of Artificial Sequence: Synthetic oligonucleotide
  Antisense strand to SEQ ID NO: 309854
aauucaguaaauugcacac

SEQ ID NO: 309856 - RNA, 19 nt, Artificial Sequence
  Description of Artificial Sequence: Synthetic oligonucleotide
  Sense strand starting at position 3128 of SEQ ID NO: 3978
ugaauucugacuugcggua

SEQ ID NO: 309857 - RNA, 19 nt, Artificial Sequence
  Description of Artificial Sequence: Synthetic oligonucleotide
  Antisense strand to SEQ ID NO: 309856
uaccgcaagucagaauuca

SEQ ID NO: 309858 - RNA, 19 nt, Artificial Sequence
  Description of Artificial Sequence: Synthetic oligonucleotide
  Sense strand starting at position 3133 of SEQ ID NO: 3978
ucugacuugcgguauaugu

SEQ ID NO: 309859 - RNA, 19 nt, Artificial Sequence
  Description of Artificial Sequence: Synthetic oligonucleotide
  Antisense strand to SEQ ID NO: 309858
acauauaccgcaagucaga

SEQ ID NO: 309860 - RNA, 19 nt, Artificial Sequence
  Description of Artificial Sequence: Synthetic oligonucleotide
  Sense strand starting at position 3135 of SEQ ID NO: 3978
ugacuugcgguauauguca

SEQ ID NO: 309861 - RNA, 19 nt, Artificial Sequence
  Description of Artificial Sequence: Synthetic oligonucleotide
  Antisense strand to SEQ ID NO: 309860
ugacauauaccgcaaguca

SEQ ID NO: 309862 - RNA, 19 nt, Artificial Sequence
  Description of Artificial Sequence: Synthetic oligonucleotide
  Sense strand starting at position 3137 of SEQ ID NO: 3978
acuugcgguauaugucaga

SEQ ID NO: 309863 - RNA, 19 nt, Artificial Sequence
  Description of Artificial Sequence: Synthetic oligonucleotide
  Antisense strand to SEQ ID NO: 309862
ucugacauauaccgcaagu

SEQ ID NO: 309864 - RNA, 19 nt, Artificial Sequence
  Description of Artificial Sequence: Synthetic oligonucleotide
  Sense strand starting at position 3143 of SEQ ID NO: 3978
gguauaugucagaggcguu

SEQ ID NO: 309865 - RNA, 19 nt, Artificial Sequence
  Description of Artificial Sequence: Synthetic oligonucleotide
  Antisense strand to SEQ ID NO: 309864
aacgccucugacauauacc

SEQ ID NO: 309866 - RNA, 19 nt, Artificial Sequence
  Description of Artificial Sequence: Synthetic oligonucleotide
  Sense strand starting at position 3144 of SEQ ID NO: 3978
guauaugucagaggcguuu

SEQ ID NO: 309867 - RNA, 19 nt, Artificial Sequence
  Description of Artificial Sequence: Synthetic oligonucleotide
  Antisense strand to SEQ ID NO: 309866
aaacgccucugacauauac

SEQ ID NO: 309868 - RNA, 19 nt, Artificial Sequence
  Description of Artificial Sequence: Synthetic oligonucleotide
  Sense strand starting at position 3242 of SEQ ID NO: 3978
guauuccuagccuagagau

SEQ ID NO: 309869 - RNA, 19 nt, Artificial Sequence
  Description of Artificial Sequence: Synthetic oligonucleotide
  Antisense strand to SEQ ID NO: 309868
aucucuaggcuaggaauac

SEQ ID NO: 309870 - RNA, 19 nt, Artificial Sequence
  Description of Artificial Sequence: Synthetic oligonucleotide
  Sense strand starting at position 3244 of SEQ ID NO: 3978
auuccuagccuagagaugu

SEQ ID NO: 309871 - RNA, 19 nt, Artificial Sequence
  Description of Artificial Sequence: Synthetic oligonucleotide
  Antisense strand to SEQ ID NO: 309870
acaucucuaggcuaggaau

SEQ ID NO: 309872 - RNA, 19 nt, Artificial Sequence
  Description of Artificial Sequence: Synthetic oligonucleotide
  Sense strand starting at position 3252 of SEQ ID NO: 3978
ccuagagaugucuacaguu

SEQ ID NO: 309873 - RNA, 19 nt, Artificial Sequence
  Description of Artificial Sequence: Synthetic oligonucleotide
  Antisense strand to SEQ ID NO: 309872
aacuguagacaucucuagg

SEQ ID NO: 309874 - RNA, 19 nt, Artificial Sequence
  Description of Artificial Sequence: Synthetic oligonucleotide
  Sense strand starting at position 3327 of SEQ ID NO: 3978
aucccaauaucuggagaau

SEQ ID NO: 309875 - RNA, 19 nt, Artificial Sequence
  Description of Artificial Sequence: Synthetic oligonucleotide
  Antisense strand to SEQ ID NO: 309874
auucuccagauauugggau

SEQ ID NO: 309876 - RNA, 19 nt, Artificial Sequence
  Description of Artificial Sequence: Synthetic oligonucleotide
  Sense strand starting at position 3479 of SEQ ID NO: 3978
cauuguagccaugguggau

SEQ ID NO: 309877 - RNA, 19 nt, Artificial Sequence
  Description of Artificial Sequence: Synthetic oligonucleotide
  Antisense strand to SEQ ID NO: 309876
auccaccauggcuacaaug

SEQ ID NO: 309878 - RNA, 19 nt, Artificial Sequence
  Description of Artificial Sequence: Synthetic oligonucleotide
  Sense strand starting at position 3527 of SEQ ID NO: 3978
cuauucugucaauggagua

SEQ ID NO: 309879 - RNA, 19 nt, Artificial Sequence
  Description of Artificial Sequence: Synthetic oligonucleotide
  Antisense strand to SEQ ID NO: 309878
uacuccauugacagaauag

SEQ ID NO: 309880 - RNA, 19 nt, Artificial Sequence
  Description of Artificial Sequence: Synthetic oligonucleotide
  Sense strand starting at position 3848 of SEQ ID NO: 3978
gcgacaccuggcuacuuua

SEQ ID NO: 309881 - RNA, 19 nt, Artificial Sequence
  Description of Artificial Sequence: Synthetic oligonucleotide
  Antisense strand to SEQ ID NO: 309880
uaaaguagccaggugucgc

SEQ ID NO: 309882 - RNA, 19 nt, Artificial Sequence
  Description of Artificial Sequence: Synthetic oligonucleotide
  Sense strand starting at position 3960 of SEQ ID NO: 3978
agggaucccuuuccuguaa

SEQ ID NO: 309883 - RNA, 19 nt, Artificial Sequence
  Description of Artificial Sequence: Synthetic oligonucleotide
  Antisense strand to SEQ ID NO: 309882
uuacaggaaagggaucccu

SEQ ID NO: 309884 - RNA, 19 nt, Artificial Sequence
  Description of Artificial Sequence: Synthetic oligonucleotide
  Sense strand starting at position 118 of SEQ ID NO: 3980
cucugacaguccuuauucu

SEQ ID NO: 309885 - RNA, 19 nt, Artificial Sequence
  Description of Artificial Sequence: Synthetic oligonucleotide
  Antisense strand to SEQ ID NO: 309884
agaauaaggacugucagag

SEQ ID NO: 309886 - RNA, 19 nt, Artificial Sequence
  Description of Artificial Sequence: Synthetic oligonucleotide
  Sense strand starting at position 119 of SEQ ID NO: 3980
ucugacaguccuuauucuu

SEQ ID NO: 309887 - RNA, 19 nt, Artificial Sequence
  Description of Artificial Sequence: Synthetic oligonucleotide
  Antisense strand to SEQ ID NO: 309886
aagaauaaggacugucaga

SEQ ID NO: 309888 - RNA, 19 nt, Artificial Sequence
  Description of Artificial Sequence: Synthetic oligonucleotide
  Sense strand starting at position 156 of SEQ ID NO: 3980
gucagucaccaucaggauu

SEQ ID NO: 309889 - RNA, 19 nt, Artificial Sequence
  Description of Artificial Sequence: Synthetic oligonucleotide
  Antisense strand to SEQ ID NO: 309888
aauccugauggugacugac

SEQ ID NO: 309890 - RNA, 19 nt, Artificial Sequence
  Description of Artificial Sequence: Synthetic oligonucleotide
  Sense strand starting at position 198 of SEQ ID NO: 3980
cacauugugcacuaagaug

SEQ ID NO: 309891 - RNA, 19 nt, Artificial Sequence
  Description of Artificial Sequence: Synthetic oligonucleotide
  Antisense strand to SEQ ID NO: 309890
caucuuagugcacaaugug

SEQ ID NO: 309892 - RNA, 19 nt, Artificial Sequence
  Description of Artificial Sequence: Synthetic oligonucleotide
  Sense strand starting at position 268 of SEQ ID NO: 3980
ugggacucucaguacuacu

SEQ ID NO: 309893 - RNA, 19 nt, Artificial Sequence
  Description of Artificial Sequence: Synthetic oligonucleotide
  Antisense strand to SEQ ID NO: 309892
aguaguacugagaguccca

SEQ ID NO: 309894 - RNA, 19 nt, Artificial Sequence
  Description of Artificial Sequence: Synthetic oligonucleotide
  Sense strand starting at position 454 of SEQ ID NO: 3980
gguggaauuacugauugca

SEQ ID NO: 309895 - RNA, 19 nt, Artificial Sequence
  Description of Artificial Sequence: Synthetic oligonucleotide
  Antisense strand to SEQ ID NO: 309894
ugcaaucaguaauuccacc

SEQ ID NO: 309896 - RNA, 19 nt, Artificial Sequence
  Description of Artificial Sequence: Synthetic oligonucleotide
  Sense strand starting at position 456 of SEQ ID NO: 3980
uggaauuacugauugcauc

SEQ ID NO: 309897 - RNA, 19 nt, Artificial Sequence
  Description of Artificial Sequence: Synthetic oligonucleotide
  Antisense strand to SEQ ID NO: 309896
gaugcaaucaguaauucca

SEQ ID NO: 309898 - RNA, 19 nt, Artificial Sequence
  Description of Artificial Sequence: Synthetic oligonucleotide
  Sense strand starting at position 457 of SEQ ID NO: 3980
ggaauuacugauugcauca

SEQ ID NO: 309899 - RNA, 19 nt, Artificial Sequence
  Description of Artificial Sequence: Synthetic oligonucleotide
  Antisense strand to SEQ ID NO: 309898
ugaugcaaucaguaauucc

SEQ ID NO: 309900 - RNA, 19 nt, Artificial Sequence
  Description of Artificial Sequence: Synthetic oligonucleotide
  Sense strand starting at position 565 of SEQ ID NO: 3980
gaagguaacagcgguaaau

SEQ ID NO: 309901 - RNA, 19 nt, Artificial Sequence
  Description of Artificial Sequence: Synthetic oligonucleotide
  Antisense strand to SEQ ID NO: 309900
auuuaccgcuguuaccuuc

SEQ ID NO: 309902 - RNA, 19 nt, Artificial Sequence
  Description of Artificial Sequence: Synthetic oligonucleotide
  Sense strand starting at position 567 of SEQ ID NO: 3980
agguaacagcgguaaauau

SEQ ID NO: 309903 - RNA, 19 nt, Artificial Sequence
  Description of Artificial Sequence: Synthetic oligonucleotide
  Antisense strand to SEQ ID NO: 309902
auauuuaccgcuguuaccu

SEQ ID NO: 309904 - RNA, 19 nt, Artificial Sequence
  Description of Artificial Sequence: Synthetic oligonucleotide
  Sense strand starting at position 908 of SEQ ID NO: 3980
gcaagaaaucaagggucca

SEQ ID NO: 309905 - RNA, 19 nt, Artificial Sequence
  Description of Artificial Sequence: Synthetic oligonucleotide
  Antisense strand to SEQ ID NO: 309904
uggacccuugauuucuugc

SEQ ID NO: 309906 - RNA, 19 nt, Artificial Sequence
  Description of Artificial Sequence: Synthetic oligonucleotide
  Sense strand starting at position 1052 of SEQ ID NO: 3980
aucucugggucuuuggaau

SEQ ID NO: 309907 - RNA, 19 nt, Artificial Sequence
  Description of Artificial Sequence: Synthetic oligonucleotide
  Antisense strand to SEQ ID NO: 309906
auuccaaagacccagagau

SEQ ID NO: 309908 - RNA, 19 nt, Artificial Sequence
  Description of Artificial Sequence: Synthetic oligonucleotide
  Sense strand starting at position 1175 of SEQ ID NO: 3980
gcagauuaauauuccugua

SEQ ID NO: 309909 - RNA, 19 nt, Artificial Sequence
  Description of Artificial Sequence: Synthetic oligonucleotide
  Antisense strand to SEQ ID NO: 309908
uacaggaauauuaaucugc

SEQ ID NO: 309910 - RNA, 19 nt, Artificial Sequence
  Description of Artificial Sequence: Synthetic oligonucleotide
  Sense strand starting at position 1318 of SEQ ID NO: 3980
cagaaaugcguaugaacaa

SEQ ID NO: 309911 - RNA, 19 nt, Artificial Sequence
  Description of Artificial Sequence: Synthetic oligonucleotide
  Antisense strand to SEQ ID NO: 309910
uuguucauacgcauuucug

SEQ ID NO: 309912 - RNA, 19 nt, Artificial Sequence
  Description of Artificial Sequence: Synthetic oligonucleotide
  Sense strand starting at position 1383 of SEQ ID NO: 3980
guagauauaauugguugga

SEQ ID NO: 309913 - RNA, 19 nt, Artificial Sequence
  Description of Artificial Sequence: Synthetic oligonucleotide
  Antisense strand to SEQ ID NO: 309912
uccaaccaauuauaucuac

SEQ ID NO: 309914 - RNA, 19 nt, Artificial Sequence
  Description of Artificial Sequence: Synthetic oligonucleotide
  Sense strand starting at position 1384 of SEQ ID NO: 3980
uagauauaauugguuggau

SEQ ID NO: 309915 - RNA, 19 nt, Artificial Sequence
  Description of Artificial Sequence: Synthetic oligonucleotide
  Antisense strand to SEQ ID NO: 309914
auccaaccaauuauaucua

SEQ ID NO: 309916 - RNA, 19 nt, Artificial Sequence
  Description of Artificial Sequence: Synthetic oligonucleotide
  Sense strand starting at position 1387 of SEQ ID NO: 3980
auauaauugguuggauaac

SEQ ID NO: 309917 - RNA, 19 nt, Artificial Sequence
  Description of Artificial Sequence: Synthetic oligonucleotide
  Antisense strand to SEQ ID NO: 309916
guuauccaaccaauuauau

SEQ ID NO: 309918 - RNA, 19 nt, Artificial Sequence
  Description of Artificial Sequence: Synthetic oligonucleotide
  Sense strand starting at position 1396 of SEQ ID NO: 3980
guuggauaacucuggcuua

SEQ ID NO: 309919 - RNA, 19 nt, Artificial Sequence
  Description of Artificial Sequence: Synthetic oligonucleotide
  Antisense strand to SEQ ID NO: 309918
uaagccagaguuauccaac

SEQ ID NO: 309920 - RNA, 19 nt, Artificial Sequence
  Description of Artificial Sequence: Synthetic oligonucleotide
  Sense strand starting at position 1399 of SEQ ID NO: 3980
ggauaacucuggcuuaagu

SEQ ID NO: 309921 - RNA, 19 nt, Artificial Sequence
  Description of Artificial Sequence: Synthetic oligonucleotide
  Antisense strand to SEQ ID NO: 309920
acuuaagccagaguuaucc

SEQ ID NO: 309922 - RNA, 19 nt, Artificial Sequence
  Description of Artificial Sequence: Synthetic oligonucleotide
  Sense strand starting at position 1482 of SEQ ID NO: 3980
gacaauugucuuuacguug

SEQ ID NO: 309923 - RNA, 19 nt, Artificial Sequence
  Description of Artificial Sequence: Synthetic oligonucleotide
  Antisense strand to SEQ ID NO: 309922
caacguaaagacaauuguc

SEQ ID NO: 309924 - RNA, 19 nt, Artificial Sequence
  Description of Artificial Sequence: Synthetic oligonucleotide
  Sense strand starting at position 1730 of SEQ ID NO: 3980
acauauugcuaguuaaaug

SEQ ID NO: 309925 - RNA, 19 nt, Artificial Sequence
  Description of Artificial Sequence: Synthetic oligonucleotide
  Antisense strand to SEQ ID NO: 309924
cauuuaacuagcaauaugu

SEQ ID NO: 309926 - RNA, 19 nt, Artificial Sequence
  Description of Artificial Sequence: Synthetic oligonucleotide
  Sense strand starting at position 1769 of SEQ ID NO: 3980
ugaauucaggugugaaaug

SEQ ID NO: 309927 - RNA, 19 nt, Artificial Sequence
  Description of Artificial Sequence: Synthetic oligonucleotide
  Antisense strand to SEQ ID NO: 309926
cauuucacaccugaauuca

SEQ ID NO: 309928 - RNA, 19 nt, Artificial Sequence
  Description of Artificial Sequence: Synthetic oligonucleotide
  Sense strand starting at position 1833 of SEQ ID NO: 3980
ucugauuccgcuuaaauug

SEQ ID NO: 309929 - RNA, 19 nt, Artificial Sequence
  Description of Artificial Sequence: Synthetic oligonucleotide
  Antisense strand to SEQ ID NO: 309928
caauuuaagcggaaucaga

SEQ ID NO: 309930 - RNA, 19 nt, Artificial Sequence
  Description of Artificial Sequence: Synthetic oligonucleotide
  Sense strand starting at position 1842 of SEQ ID NO: 3980
gcuuaaauuggugaauucu

SEQ ID NO: 309931 - RNA, 19 nt, Artificial Sequence
  Description of Artificial Sequence: Synthetic oligonucleotide
  Antisense strand to SEQ ID NO: 309930
agaauucaccaauuuaagc

SEQ ID NO: 309932 - RNA, 19 nt, Artificial Sequence
  Description of Artificial Sequence: Synthetic oligonucleotide
  Sense strand starting at position 1848 of SEQ ID NO: 3980
auuggugaauucucuagga

SEQ ID NO: 309933 - RNA, 19 nt, Artificial Sequence
  Description of Artificial Sequence: Synthetic oligonucleotide
  Antisense strand to SEQ ID NO: 309932
uccuagagaauucaccaau

SEQ ID NO: 309934 - RNA, 19 nt, Artificial Sequence
  Description of Artificial Sequence: Synthetic oligonucleotide
  Sense strand starting at position 1852 of SEQ ID NO: 3980
gugaauucucuaggagcag

SEQ ID NO: 309935 - RNA, 19 nt, Artificial Sequence
  Description of Artificial Sequence: Synthetic oligonucleotide
  Antisense strand to SEQ ID NO: 309934
cugcuccuagagaauucac

SEQ ID NO: 309936 - RNA, 19 nt, Artificial Sequence
  Description of Artificial Sequence: Synthetic oligonucleotide
  Sense strand starting at position 2087 of SEQ ID NO: 3980
ggacuacuguuucuaugua

SEQ ID NO: 309937 - RNA, 19 nt, Artificial Sequence
  Description of Artificial Sequence: Synthetic oligonucleotide
  Antisense strand to SEQ ID NO: 309936
uacauagaaacaguagucc

SEQ ID NO: 309938 - RNA, 19 nt, Artificial Sequence
  Description of Artificial Sequence: Synthetic oligonucleotide
  Sense strand starting at position 2171 of SEQ ID NO: 3980
cugugugacccuggauaug

SEQ ID NO: 309939 - RNA, 19 nt, Artificial Sequence
  Description of Artificial Sequence: Synthetic oligonucleotide
  Antisense strand to SEQ ID NO: 309938
cauauccagggucacacag

SEQ ID NO: 309940 - RNA, 19 nt, Artificial Sequence
  Description of Artificial Sequence: Synthetic oligonucleotide
  Sense strand starting at position 2182 of SEQ ID NO: 3980
uggauauguuaaucuguuu

SEQ ID NO: 309941 - RNA, 19 nt, Artificial Sequence
  Description of Artificial Sequence: Synthetic oligonucleotide
  Antisense strand to SEQ ID NO: 309940
aaacagauuaacauaucca

SEQ ID NO: 309942 - RNA, 19 nt, Artificial Sequence
  Description of Artificial Sequence: Synthetic oligonucleotide
  Sense strand starting at position 2286 of SEQ ID NO: 3980
caggguuuggcccacaaua

SEQ ID NO: 309943 - RNA, 19 nt, Artificial Sequence
  Description of Artificial Sequence: Synthetic oligonucleotide
  Antisense strand to SEQ ID NO: 309942
uauugugggccaaacccug

SEQ ID NO: 309944 - RNA, 19 nt, Artificial Sequence
  Description of Artificial Sequence: Synthetic oligonucleotide
  Sense strand starting at position 2288 of SEQ ID NO: 3980
ggguuuggcccacaauaag

SEQ ID NO: 309945 - RNA, 19 nt, Artificial Sequence
  Description of Artificial Sequence: Synthetic oligonucleotide
  Antisense strand to SEQ ID NO: 309944
cuuauugugggccaaaccc

SEQ ID NO: 309946 - RNA, 19 nt, Artificial Sequence
  Description of Artificial Sequence: Synthetic oligonucleotide
  Sense strand starting at position 2509 of SEQ ID NO: 3980
uuuagagcacuuuaguaca

SEQ ID NO: 309947 - RNA, 19 nt, Artificial Sequence
  Description of Artificial Sequence: Synthetic oligonucleotide
  Antisense strand to SEQ ID NO: 309946
uguacuaaagugcucuaaa

SEQ ID NO: 309948 - RNA, 19 nt, Artificial Sequence
  Description of Artificial Sequence: Synthetic oligonucleotide
  Sense strand starting at position 2625 of SEQ ID NO: 3980
aaggccuuccaguauguau

SEQ ID NO: 309949 - RNA, 19 nt, Artificial Sequence
  Description of Artificial Sequence: Synthetic oligonucleotide
  Antisense strand to SEQ ID NO: 309948
auacauacuggaaggccuu

SEQ ID NO: 309950 - RNA, 19 nt, Artificial Sequence
  Description of Artificial Sequence: Synthetic oligonucleotide
  Sense strand starting at position 2632 of SEQ ID NO: 3980
uccaguauguauccacuaa

SEQ ID NO: 309951 - RNA, 19 nt, Artificial Sequence
  Description of Artificial Sequence: Synthetic oligonucleotide
  Antisense strand to SEQ ID NO: 309950
uuaguggauacauacugga

SEQ ID NO: 309952 - RNA, 19 nt, Artificial Sequence
  Description of Artificial Sequence: Synthetic oligonucleotide
  Sense strand starting at position 3207 of SEQ ID NO: 3980
ggacuaugcuucccaggau

SEQ ID NO: 309953 - RNA, 19 nt, Artificial Sequence
  Description of Artificial Sequence: Synthetic oligonucleotide
  Antisense strand to SEQ ID NO: 309952
auccugggaagcauagucc

SEQ ID NO: 309954 - RNA, 19 nt, Artificial Sequence
  Description of Artificial Sequence: Synthetic oligonucleotide
  Sense strand starting at position 3274 of SEQ ID NO: 3980
acucuucugcuccaagagu

SEQ ID NO: 309955 - RNA, 19 nt, Artificial Sequence
  Description of Artificial Sequence: Synthetic oligonucleotide
  Antisense strand to SEQ ID NO: 309954
acucuuggagcagaagagu

SEQ ID NO: 309956 - RNA, 19 nt, Artificial Sequence
  Description of Artificial Sequence: Synthetic oligonucleotide
  Sense strand starting at position 3350 of SEQ ID NO: 3980
gugaguucgcggguccacu

SEQ ID NO: 309957 - RNA, 19 nt, Artificial Sequence
  Description of Artificial Sequence: Synthetic oligonucleotide
  Antisense strand to SEQ ID NO: 309956
aguggacccgcgaacucac

SEQ ID NO: 309958 - RNA, 19 nt, Artificial Sequence
  Description of Artificial Sequence: Synthetic oligonucleotide
  Sense strand starting at position 3656 of SEQ ID NO: 3980
cuuauauaagaguauagcu

SEQ ID NO: 309959 - RNA, 19 nt, Artificial Sequence
  Description of Artificial Sequence: Synthetic oligonucleotide
  Antisense strand to SEQ ID NO: 309958
agcuauacucuuauauaag

SEQ ID NO: 309960 - RNA, 19 nt, Artificial Sequence
  Description of Artificial Sequence: Synthetic oligonucleotide
  Sense strand starting at position 3661 of SEQ ID NO: 3980
auaagaguauagcuauaug

SEQ ID NO: 309961 - RNA, 19 nt, Artificial Sequence
  Description of Artificial Sequence: Synthetic oligonucleotide
  Antisense strand to SEQ ID NO: 309960
cauauagcuauacucuuau

SEQ ID NO: 309962 - RNA, 19 nt, Artificial Sequence
  Description of Artificial Sequence: Synthetic oligonucleotide
  Sense strand starting at position 3664 of SEQ ID NO: 3980
agaguauagcuauaugauc

SEQ ID NO: 309963 - RNA, 19 nt, Artificial Sequence
  Description of Artificial Sequence: Synthetic oligonucleotide
  Antisense strand to SEQ ID NO: 309962
gaucauauagcuauacucu

SEQ ID NO: 309964 - RNA, 19 nt, Artificial Sequence
  Description of Artificial Sequence: Synthetic oligonucleotide
  Sense strand starting at position 211 of SEQ ID NO: 3982
aauuauugauggucuguca

SEQ ID NO: 309965 - RNA, 19 nt, Artificial Sequence
  Description of Artificial Sequence: Synthetic oligonucleotide
  Antisense strand to SEQ ID NO: 309964
ugacagaccaucaauaauu

SEQ ID NO: 309966 - RNA, 19 nt, Artificial Sequence
  Description of Artificial Sequence: Synthetic oligonucleotide
  Sense strand starting at position 299 of SEQ ID NO: 3982
aaguuauucugagcugaaa

SEQ ID NO: 309967 - RNA, 19 nt, Artificial Sequence
  Description of Artificial Sequence: Synthetic oligonucleotide
  Antisense strand to SEQ ID NO: 309966
uuucagcucagaauaacuu

SEQ ID NO: 309968 - RNA, 19 nt, Artificial Sequence
  Description of Artificial Sequence: Synthetic oligonucleotide
  Sense strand starting at position 435 of SEQ ID NO: 3982
gcaguuuccagcuaggauc

SEQ ID NO: 309969 - RNA, 19 nt, Artificial Sequence
  Description of Artificial Sequence: Synthetic oligonucleotide
  Antisense strand to SEQ ID NO: 309968
gauccuagcuggaaacugc

SEQ ID NO: 309970 - RNA, 19 nt, Artificial Sequence
  Description of Artificial Sequence: Synthetic oligonucleotide
  Sense strand starting at position 1054 of SEQ ID NO: 3982
acgggcauuucugcuuaca

SEQ ID NO: 309971 - RNA, 19 nt, Artificial Sequence
  Description of Artificial Sequence: Synthetic oligonucleotide
  Antisense strand to SEQ ID NO: 309970
uguaagcagaaaugcccgu

SEQ ID NO: 309972 - RNA, 19 nt, Artificial Sequence
  Description of Artificial Sequence: Synthetic oligonucleotide
  Sense strand starting at position 1056 of SEQ ID NO: 3982
gggcauuucugcuuacaca

SEQ ID NO: 309973 - RNA, 19 nt, Artificial Sequence
  Description of Artificial Sequence: Synthetic oligonucleotide
  Antisense strand to SEQ ID NO: 309972
uguguaagcagaaaugccc

SEQ ID NO: 309974 - RNA, 19 nt, Artificial Sequence
  Description of Artificial Sequence: Synthetic oligonucleotide
  Sense strand starting at position 1158 of SEQ ID NO: 3982
aucuuuacucuugagguga

SEQ ID NO: 309975 - RNA, 19 nt, Artificial Sequence
  Description of Artificial Sequence: Synthetic oligonucleotide
  Antisense strand to SEQ ID NO: 309974
ucaccucaagaguaaagau

SEQ ID NO: 309976 - RNA, 19 nt, Artificial Sequence
  Description of Artificial Sequence: Synthetic oligonucleotide
  Sense strand starting at position 1162 of SEQ ID NO: 3982
uuacucuugaggugacaag

SEQ ID NO: 309977 - RNA, 19 nt, Artificial Sequence
  Description of Artificial Sequence: Synthetic oligonucleotide
  Antisense strand to SEQ ID NO: 309976
cuugucaccucaagaguaa

SEQ ID NO: 309978 - RNA, 19 nt, Artificial Sequence
  Description of Artificial Sequence: Synthetic oligonucleotide
  Sense strand starting at position 1223 of SEQ ID NO: 3982
gaagaagugugccuugaga

SEQ ID NO: 309979 - RNA, 19 nt, Artificial Sequence
  Description of Artificial Sequence: Synthetic oligonucleotide
  Antisense strand to SEQ ID NO: 309978
ucucaaggcacacuucuuc

SEQ ID NO: 309980 - RNA, 19 nt, Artificial Sequence
  Description of Artificial Sequence: Synthetic oligonucleotide
  Sense strand starting at position 1245 of SEQ ID NO: 3982
caggaagccucuccgacau

SEQ ID NO: 309981 - RNA, 19 nt, Artificial Sequence
  Description of Artificial Sequence: Synthetic oligonucleotide
  Antisense strand to SEQ ID NO: 309980
augucggagaggcuuccug

SEQ ID NO: 309982 - RNA, 19 nt, Artificial Sequence
  Description of Artificial Sequence: Synthetic oligonucleotide
  Sense strand starting at position 1366 of SEQ ID NO: 3982
ugggaaaccuucucaccau

SEQ ID NO: 309983 - RNA, 19 nt, Artificial Sequence
  Description of Artificial Sequence: Synthetic oligonucleotide
  Antisense strand to SEQ ID NO: 309982
auggugagaagguuuccca

SEQ ID NO: 309984 - RNA, 19 nt, Artificial Sequence
  Description of Artificial Sequence: Synthetic oligonucleotide
  Sense strand starting at position 1378 of SEQ ID NO: 3982
ucaccauccuuggucagaa

SEQ ID NO: 309985 - RNA, 19 nt, Artificial Sequence
  Description of Artificial Sequence: Synthetic oligonucleotide
  Antisense strand to SEQ ID NO: 309984
uucugaccaaggaugguga

SEQ ID NO: 309986 - RNA, 19 nt, Artificial Sequence
  Description of Artificial Sequence: Synthetic oligonucleotide
  Sense strand starting at position 1438 of SEQ ID NO: 3982
cugccuuguccagagauuc

SEQ ID NO: 309987 - RNA, 19 nt, Artificial Sequence
  Description of Artificial Sequence: Synthetic oligonucleotide
  Antisense strand to SEQ ID NO: 309986
gaaucucuggacaaggcag

SEQ ID NO: 309988 - RNA, 19 nt, Artificial Sequence
  Description of Artificial Sequence: Synthetic oligonucleotide
  Sense strand starting at position 1779 of SEQ ID NO: 3982
guguuucuuccucacugga

SEQ ID NO: 309989 - RNA, 19 nt, Artificial Sequence
  Description of Artificial Sequence: Synthetic oligonucleotide
  Antisense strand to SEQ ID NO: 309988
uccagugaggaagaaacac

SEQ ID NO: 309990 - RNA, 19 nt, Artificial Sequence
  Description of Artificial Sequence: Synthetic oligonucleotide
  Sense strand starting at position 1781 of SEQ ID NO: 3982
guuucuuccucacuggaca

SEQ ID NO: 309991 - RNA, 19 nt, Artificial Sequence
  Description of Artificial Sequence: Synthetic oligonucleotide
  Antisense strand to SEQ ID NO: 309990
uguccagugaggaagaaac

SEQ ID NO: 309992 - RNA, 19 nt, Artificial Sequence
  Description of Artificial Sequence: Synthetic oligonucleotide
  Sense strand starting at position 1885 of SEQ ID NO: 3982
ccucccauuugagaggaaa

SEQ ID NO: 309993 - RNA, 19 nt, Artificial Sequence
  Description of Artificial Sequence: Synthetic oligonucleotide
  Antisense strand to SEQ ID NO: 309992
uuuccucucaaaugggagg

SEQ ID NO: 309994 - RNA, 19 nt, Artificial Sequence
  Description of Artificial Sequence: Synthetic oligonucleotide
  Sense strand starting at position 1950 of SEQ ID NO: 3982
uugagaauguguucuuccu

SEQ ID NO: 309995 - RNA, 19 nt, Artificial Sequence
  Description of Artificial Sequence: Synthetic oligonucleotide
  Antisense strand to SEQ ID NO: 309994
aggaagaacacauucucaa

SEQ ID NO: 309996 - RNA, 19 nt, Artificial Sequence
  Description of Artificial Sequence: Synthetic oligonucleotide
  Sense strand starting at position 2017 of SEQ ID NO: 3982
cagagucuguugguuaaau

SEQ ID NO: 309997 - RNA, 19 nt, Artificial Sequence
  Description of Artificial Sequence: Synthetic oligonucleotide
  Antisense strand to SEQ ID NO: 309996
auuuaaccaacagacucug

SEQ ID NO: 309998 - RNA, 19 nt, Artificial Sequence
  Description of Artificial Sequence: Synthetic oligonucleotide
  Sense strand starting at position 2018 of SEQ ID NO: 3982
agagucuguugguuaaaua

SEQ ID NO: 309999 - RNA, 19 nt, Artificial Sequence
  Description of Artificial Sequence: Synthetic oligonucleotide
  Antisense strand to SEQ ID NO: 309998
uauuuaaccaacagacucu

SEQ ID NO: 310000 - RNA, 19 nt, Artificial Sequence
  Description of Artificial Sequence: Synthetic oligonucleotide
  Sense strand starting at position 2019 of SEQ ID NO: 3982
gagucuguugguuaaauaa

SEQ ID NO: 310001 - RNA, 19 nt, Artificial Sequence
  Description of Artificial Sequence: Synthetic oligonucleotide
  Antisense strand to SEQ ID NO: 310000
uuauuuaaccaacagacuc

SEQ ID NO: 310002 - RNA, 19 nt, Artificial Sequence
  Description of Artificial Sequence: Synthetic oligonucleotide
  Sense strand starting at position 2028 of SEQ ID NO: 3982
gguuaaauaaucuggugag

SEQ ID NO: 310003 - RNA, 19 nt, Artificial Sequence
  Description of Artificial Sequence: Synthetic oligonucleotide
  Antisense strand to SEQ ID NO: 310002
cucaccagauuauuuaacc

SEQ ID NO: 310004 - RNA, 19 nt, Artificial Sequence
  Description of Artificial Sequence: Synthetic oligonucleotide
  Sense strand starting at position 2096 of SEQ ID NO: 3982
ccagcaaugagaggugcua

SEQ ID NO: 310005 - RNA, 19 nt, Artificial Sequence
  Description of Artificial Sequence: Synthetic oligonucleotide
  Antisense strand to SEQ ID NO: 310004
uagcaccucucauugcugg

SEQ ID NO: 310006 - RNA, 19 nt, Artificial Sequence
  Description of Artificial Sequence: Synthetic oligonucleotide
  Sense strand starting at position 2143 of SEQ ID NO: 3982
ccggcuucggaauauaaau

SEQ ID NO: 310007 - RNA, 19 nt, Artificial Sequence
  Description of Artificial Sequence: Synthetic oligonucleotide
  Antisense strand to SEQ ID NO: 310006
auuuauauuccgaagccgg

SEQ ID NO: 310008 - RNA, 19 nt, Artificial Sequence
  Description of Artificial Sequence: Synthetic oligonucleotide
  Sense strand starting at position 2444 of SEQ ID NO: 3982
auuaaugaucagcagcauu

SEQ ID NO: 310009 - RNA, 19 nt, Artificial Sequence
  Description of Artificial Sequence: Synthetic oligonucleotide
  Antisense strand to SEQ ID NO: 310008
aaugcugcugaucauuaau

SEQ ID NO: 310010 - RNA, 19 nt, Artificial Sequence
  Description of Artificial Sequence: Synthetic oligonucleotide
  Sense strand starting at position 2481 of SEQ ID NO: 3982
ggguaaucuuauguuggga

SEQ ID NO: 310011 - RNA, 19 nt, Artificial Sequence
  Description of Artificial Sequence: Synthetic oligonucleotide
  Antisense strand to SEQ ID NO: 310010
ucccaacauaagauuaccc

SEQ ID NO: 310012 - RNA, 19 nt, Artificial Sequence
  Description of Artificial Sequence: Synthetic oligonucleotide
  Sense strand starting at position 2484 of SEQ ID NO: 3982
uaaucuuauguugggaagu

SEQ ID NO: 310013 - RNA, 19 nt, Artificial Sequence
  Description of Artificial Sequence: Synthetic oligonucleotide
  Antisense strand to SEQ ID NO: 310012
acuucccaacauaagauua

SEQ ID NO: 310014 - RNA, 19 nt, Artificial Sequence
  Description of Artificial Sequence: Synthetic oligonucleotide
  Sense strand starting at position 2812 of SEQ ID NO: 3982
ugucuuaaguuagugacau

SEQ ID NO: 310015 - RNA, 19 nt, Artificial Sequence
  Description of Artificial Sequence: Synthetic oligonucleotide
  Antisense strand to SEQ ID NO: 310014
augucacuaacuuaagaca

SEQ ID NO: 310016 - RNA, 19 nt, Artificial Sequence
  Description of Artificial Sequence: Synthetic oligonucleotide
  Sense strand starting at position 2825 of SEQ ID NO: 3982
ugacauagucugugucaag

SEQ ID NO: 310017 - RNA, 19 nt, Artificial Sequence
  Description of Artificial Sequence: Synthetic oligonucleotide
  Antisense strand to SEQ ID NO: 310016
cuugacacagacuauguca

SEQ ID NO: 310018 - RNA, 19 nt, Artificial Sequence
  Description of Artificial Sequence: Synthetic oligonucleotide
  Sense strand starting at position 2858 of SEQ ID NO: 3982
acacccaugcuguaugaaa

SEQ ID NO: 310019 - RNA, 19 nt, Artificial Sequence
  Description of Artificial Sequence: Synthetic oligonucleotide
  Antisense strand to SEQ ID NO: 310018
uuucauacagcaugggugu

SEQ ID NO: 310020 - RNA, 19 nt, Artificial Sequence
  Description of Artificial Sequence: Synthetic oligonucleotide
  Sense strand starting at position 2860 of SEQ ID NO: 3982
acccaugcuguaugaaacu

SEQ ID NO: 310021 - RNA, 19 nt, Artificial Sequence
  Description of Artificial Sequence: Synthetic oligonucleotide
  Antisense strand to SEQ ID NO: 310020
aguuucauacagcaugggu

SEQ ID NO: 310022 - RNA, 19 nt, Artificial Sequence
  Description of Artificial Sequence: Synthetic oligonucleotide
  Sense strand starting at position 2893 of SEQ ID NO: 3982
caggauuuguaccaugaaa

SEQ ID NO: 310023 - RNA, 19 nt, Artificial Sequence
  Description of Artificial Sequence: Synthetic oligonucleotide
  Antisense strand to SEQ ID NO: 310022
uuucaugguacaaauccug

SEQ ID NO: 310024 - RNA, 19 nt, Artificial Sequence
  Description of Artificial Sequence: Synthetic oligonucleotide
  Sense strand starting at position 2950 of SEQ ID NO: 3982
uuaguucuuucugugauaa

SEQ ID NO: 310025 - RNA, 19 nt, Artificial Sequence
  Description of Artificial Sequence: Synthetic oligonucleotide
  Antisense strand to SEQ ID NO: 310024
uuaucacagaaagaacuaa

SEQ ID NO: 310026 - RNA, 19 nt, Artificial Sequence
  Description of Artificial Sequence: Synthetic oligonucleotide
  Sense strand starting at position 2964 of SEQ ID NO: 3982
gauaacucacgcgauuauu

SEQ ID NO: 310027 - RNA, 19 nt, Artificial Sequence
  Description of Artificial Sequence: Synthetic oligonucleotide
  Antisense strand to SEQ ID NO: 310026
aauaaucgcgugaguuauc

SEQ ID NO: 310028 - RNA, 19 nt, Artificial Sequence
  Description of Artificial Sequence: Synthetic oligonucleotide
  Sense strand starting at position 2973 of SEQ ID NO: 3982
cgcgauuauuuagcacaua

SEQ ID NO: 310029 - RNA, 19 nt, Artificial Sequence
  Description of Artificial Sequence: Synthetic oligonucleotide
  Antisense strand to SEQ ID NO: 310028
uaugugcuaaauaaucgcg

SEQ ID NO: 310030 - RNA, 19 nt, Artificial Sequence
  Description of Artificial Sequence: Synthetic oligonucleotide
  Sense strand starting at position 3041 of SEQ ID NO: 3982
acuugagucagaggucuua

SEQ ID NO: 310031 - RNA, 19 nt, Artificial Sequence
  Description of Artificial Sequence: Synthetic oligonucleotide
  Antisense strand to SEQ ID NO: 310030
uaagaccucugacucaagu

SEQ ID NO: 310032 - RNA, 19 nt, Artificial Sequence
  Description of Artificial Sequence: Synthetic oligonucleotide
  Sense strand starting at position 3136 of SEQ ID NO: 3982
accaguauuuaggauggaa

SEQ ID NO: 310033 - RNA, 19 nt, Artificial Sequence
  Description of Artificial Sequence: Synthetic oligonucleotide
  Antisense strand to SEQ ID NO: 310032
uuccauccuaaauacuggu

SEQ ID NO: 310034 - RNA, 19 nt, Artificial Sequence
  Description of Artificial Sequence: Synthetic oligonucleotide
  Sense strand starting at position 3202 of SEQ ID NO: 3982
uuucucucggcacaaagaa

SEQ ID NO: 310035 - RNA, 19 nt, Artificial Sequence
  Description of Artificial Sequence: Synthetic oligonucleotide
  Antisense strand to SEQ ID NO: 310034
uucuuugugccgagagaaa

SEQ ID NO: 310036 - RNA, 19 nt, Artificial Sequence
  Description of Artificial Sequence: Synthetic oligonucleotide
  Sense strand starting at position 3840 of SEQ ID NO: 3982
cagcgauuagaauagcauu

SEQ ID NO: 310037 - RNA, 19 nt, Artificial Sequence
  Description of Artificial Sequence: Synthetic oligonucleotide
  Antisense strand to SEQ ID NO: 310036
aaugcuauucuaaucgcug

SEQ ID NO: 310038 - RNA, 19 nt, Artificial Sequence
  Description of Artificial Sequence: Synthetic oligonucleotide
  Sense strand starting at position 3858 of SEQ ID NO: 3982
uuggaauauaguuaagugu

SEQ ID NO: 310039 - RNA, 19 nt, Artificial Sequence
  Description of Artificial Sequence: Synthetic oligonucleotide
  Antisense strand to SEQ ID NO: 310038
acacuuaacuauauuccaa

SEQ ID NO: 310040 - RNA, 19 nt, Artificial Sequence
  Description of Artificial Sequence: Synthetic oligonucleotide
  Sense strand starting at position 3945 of SEQ ID NO: 3982
cuggucuucccacgacaca

SEQ ID NO: 310041 - RNA, 19 nt, Artificial Sequence
  Description of Artificial Sequence: Synthetic oligonucleotide
  Antisense strand to SEQ ID NO: 310040
ugugucgugggaagaccag

SEQ ID NO: 310042 - RNA, 19 nt, Artificial Sequence
  Description of Artificial Sequence: Synthetic oligonucleotide
  Sense strand starting at position 3946 of SEQ ID NO: 3982
uggucuucccacgacacaa

SEQ ID NO: 310043 - RNA, 19 nt, Artificial Sequence
  Description of Artificial Sequence: Synthetic oligonucleotide
  Antisense strand to SEQ ID NO: 310042
uugugucgugggaagacca

SEQ ID NO: 310044 - RNA, 19 nt, Artificial Sequence
  Description of Artificial Sequence: Synthetic oligonucleotide
  Sense strand starting at position 313 of SEQ ID NO: 3981
ugaaacugcuguucgaaga

SEQ ID NO: 310045 - RNA, 19 nt, Artificial Sequence
  Description of Artificial Sequence: Synthetic oligonucleotide
  Antisense strand to SEQ ID NO: 310044
ucuucgaacagcaguuuca

SEQ ID NO: 310046 - RNA, 19 nt, Artificial Sequence
  Description of Artificial Sequence: Synthetic oligonucleotide
  Sense strand starting at position 324 of SEQ ID NO: 3981
uucgaagaccuggguucua

SEQ ID NO: 310047 - RNA, 19 nt, Artificial Sequence
  Description of Artificial Sequence: Synthetic oligonucleotide
  Antisense strand to SEQ ID NO: 310046
uagaacccaggucuucgaa

SEQ ID NO: 310048 - RNA, 19 nt, Artificial Sequence
  Description of Artificial Sequence: Synthetic oligonucleotide
  Sense strand starting at position 388 of SEQ ID NO: 3981
cucuuacuaucugugugau

SEQ ID NO: 310049 - RNA, 19 nt, Artificial Sequence
  Description of Artificial Sequence: Synthetic oligonucleotide
  Antisense strand to SEQ ID NO: 310048
aucacacagauaguaagag

SEQ ID NO: 310050 - RNA, 19 nt, Artificial Sequence
  Description of Artificial Sequence: Synthetic oligonucleotide
  Sense strand starting at position 394 of SEQ ID NO: 3981
cuaucugugugaucaucca

SEQ ID NO: 310051 - RNA, 19 nt, Artificial Sequence
  Description of Artificial Sequence: Synthetic oligonucleotide
  Antisense strand to SEQ ID NO: 310050
uggaugaucacacagauag

SEQ ID NO: 310052 - RNA, 19 nt, Artificial Sequence
  Description of Artificial Sequence: Synthetic oligonucleotide
  Sense strand starting at position 485 of SEQ ID NO: 3981
aggguugcucaaugauuga

SEQ ID NO: 310053 - RNA, 19 nt, Artificial Sequence
  Description of Artificial Sequence: Synthetic oligonucleotide
  Antisense strand to SEQ ID NO: 310052
ucaaucauugagcaacccu

SEQ ID NO: 310054 - RNA, 19 nt, Artificial Sequence
  Description of Artificial Sequence: Synthetic oligonucleotide
  Sense strand starting at position 489 of SEQ ID NO: 3981
uugcucaaugauugagaca

SEQ ID NO: 310055 - RNA, 19 nt, Artificial Sequence
  Description of Artificial Sequence: Synthetic oligonucleotide
  Antisense strand to SEQ ID NO: 310054
ugucucaaucauugagcaa

SEQ ID NO: 310056 - RNA, 19 nt, Artificial Sequence
  Description of Artificial Sequence: Synthetic oligonucleotide
  Sense strand starting at position 492 of SEQ ID NO: 3981
cucaaugauugagacaaug

SEQ ID NO: 310057 - RNA, 19 nt, Artificial Sequence
  Description of Artificial Sequence: Synthetic oligonucleotide
  Antisense strand to SEQ ID NO: 310056
cauugucucaaucauugag

SEQ ID NO: 310058 - RNA, 19 nt, Artificial Sequence
  Description of Artificial Sequence: Synthetic oligonucleotide
  Sense strand starting at position 545 of SEQ ID NO: 3981
caacaaauguagguaguau

SEQ ID NO: 310059 - RNA, 19 nt, Artificial Sequence
  Description of Artificial Sequence: Synthetic oligonucleotide
  Antisense strand to SEQ ID NO: 310058
auacuaccuacauuuguug

SEQ ID NO: 310060 - RNA, 19 nt, Artificial Sequence
  Description of Artificial Sequence: Synthetic oligonucleotide
  Sense strand starting at position 808 of SEQ ID NO: 3981
cuuccuagagcucaacuga

SEQ ID NO: 310061 - RNA, 19 nt, Artificial Sequence
  Description of Artificial Sequence: Synthetic oligonucleotide
  Antisense strand to SEQ ID NO: 310060
ucaguugagcucuaggaag

SEQ ID NO: 310062 - RNA, 19 nt, Artificial Sequence
  Description of Artificial Sequence: Synthetic oligonucleotide
  Sense strand starting at position 864 of SEQ ID NO: 3981
gaaucagaucuugguaacg

SEQ ID NO: 310063 - RNA, 19 nt, Artificial Sequence
  Description of Artificial Sequence: Synthetic oligonucleotide
  Antisense strand to SEQ ID NO: 310062
cguuaccaagaucugauuc

SEQ ID NO: 310064 - RNA, 19 nt, Artificial Sequence
  Description of Artificial Sequence: Synthetic oligonucleotide
  Sense strand starting at position 953 of SEQ ID NO: 3981
gggagcuauuucuagucca

SEQ ID NO: 310065 - RNA, 19 nt, Artificial Sequence
  Description of Artificial Sequence: Synthetic oligonucleotide
  Antisense strand to SEQ ID NO: 310064
uggacuagaaauagcuccc

SEQ ID NO: 310066 - RNA, 19 nt, Artificial Sequence
  Description of Artificial Sequence: Synthetic oligonucleotide
  Sense strand starting at position 1118 of SEQ ID NO: 3981
caugcugugagcgaugaca

SEQ ID NO: 310067 - RNA, 19 nt, Artificial Sequence
  Description of Artificial Sequence: Synthetic oligonucleotide
  Antisense strand to SEQ ID NO: 310066
ugucaucgcucacagcaug

SEQ ID NO: 310068 - RNA, 19 nt, Artificial Sequence
  Description of Artificial Sequence: Synthetic oligonucleotide
  Sense strand starting at position 1120 of SEQ ID NO: 3981
ugcugugagcgaugacaga

SEQ ID NO: 310069 - RNA, 19 nt, Artificial Sequence
  Description of Artificial Sequence: Synthetic oligonucleotide
  Antisense strand to SEQ ID NO: 310068
ucugucaucgcucacagca

SEQ ID NO: 310070 - RNA, 19 nt, Artificial Sequence
  Description of Artificial Sequence: Synthetic oligonucleotide
  Sense strand starting at position 1311 of SEQ ID NO: 3981
agaguuaaacgcugaguaa

SEQ ID NO: 310071 - RNA, 19 nt, Artificial Sequence
  Description of Artificial Sequence: Synthetic oligonucleotide
  Antisense strand to SEQ ID NO: 310070
uuacucagcguuuaacucu

SEQ ID NO: 310072 - RNA, 19 nt, Artificial Sequence
  Description of Artificial Sequence: Synthetic oligonucleotide
  Sense strand starting at position 1312 of SEQ ID NO: 3981
gaguuaaacgcugaguaau

SEQ ID NO: 310073 - RNA, 19 nt, Artificial Sequence
  Description of Artificial Sequence: Synthetic oligonucleotide
  Antisense strand to SEQ ID NO: 310072
auuacucagcguuuaacuc

SEQ ID NO: 310074 - RNA, 19 nt, Artificial Sequence
  Description of Artificial Sequence: Synthetic oligonucleotide
  Sense strand starting at position 1314 of SEQ ID NO: 3981
guuaaacgcugaguaauuu

SEQ ID NO: 310075 - RNA, 19 nt, Artificial Sequence
  Description of Artificial Sequence: Synthetic oligonucleotide
  Antisense strand to SEQ ID NO: 310074
aaauuacucagcguuuaac

SEQ ID NO: 310076 - RNA, 19 nt, Artificial Sequence
  Description of Artificial Sequence: Synthetic oligonucleotide
  Sense strand starting at position 1365 of SEQ ID NO: 3981
ugccaauggccacaguauu

SEQ ID NO: 310077 - RNA, 19 nt, Artificial Sequence
  Description of Artificial Sequence: Synthetic oligonucleotide
  Antisense strand to SEQ ID NO: 310076
aauacuguggccauuggca

SEQ ID NO: 310078 - RNA, 19 nt, Artificial Sequence
  Description of Artificial Sequence: Synthetic oligonucleotide
  Sense strand starting at position 2264 of SEQ ID NO: 3981
gcuggauucguuucgcuga

SEQ ID NO: 310079 - RNA, 19 nt, Artificial Sequence
  Description of Artificial Sequence: Synthetic oligonucleotide
  Antisense strand to SEQ ID NO: 310078
ucagcgaaacgaauccagc

SEQ ID NO: 310080 - RNA, 19 nt, Artificial Sequence
  Description of Artificial Sequence: Synthetic oligonucleotide
  Sense strand starting at position 2416 of SEQ ID NO: 3981
uugaaugccugccucagaa

SEQ ID NO: 310081 - RNA, 19 nt, Artificial Sequence
  Description of Artificial Sequence: Synthetic oligonucleotide
  Antisense strand to SEQ ID NO: 310080
uucugaggcaggcauucaa

SEQ ID NO: 310082 - RNA, 19 nt, Artificial Sequence
  Description of Artificial Sequence: Synthetic oligonucleotide
  Sense strand starting at position 2476 of SEQ ID NO: 3981
uuagaauaucggcagcgaa

SEQ ID NO: 310083 - RNA, 19 nt, Artificial Sequence
  Description of Artificial Sequence: Synthetic oligonucleotide
  Antisense strand to SEQ ID NO: 310082
uucgcugccgauauucuaa

SEQ ID NO: 310084 - RNA, 19 nt, Artificial Sequence
  Description of Artificial Sequence: Synthetic oligonucleotide
  Sense strand starting at position 2744 of SEQ ID NO: 3981
uuaugagugcuguacugau

SEQ ID NO: 310085 - RNA, 19 nt, Artificial Sequence
  Description of Artificial Sequence: Synthetic oligonucleotide
  Antisense strand to SEQ ID NO: 310084
aucaguacagcacucauaa

SEQ ID NO: 310086 - RNA, 19 nt, Artificial Sequence
  Description of Artificial Sequence: Synthetic oligonucleotide
  Sense strand starting at position 2748 of SEQ ID NO: 3981
gagugcuguacugauugca

SEQ ID NO: 310087 - RNA, 19 nt, Artificial Sequence
  Description of Artificial Sequence: Synthetic oligonucleotide
  Antisense strand to SEQ ID NO: 310086
ugcaaucaguacagcacuc

SEQ ID NO: 310088 - RNA, 19 nt, Artificial Sequence
  Description of Artificial Sequence: Synthetic oligonucleotide
  Sense strand starting at position 2757 of SEQ ID NO: 3981
acugauugcauaggaggua

SEQ ID NO: 310089 - RNA, 19 nt, Artificial Sequence
  Description of Artificial Sequence: Synthetic oligonucleotide
  Antisense strand to SEQ ID NO: 310088
uaccuccuaugcaaucagu

SEQ ID NO: 310090 - RNA, 19 nt, Artificial Sequence
  Description of Artificial Sequence: Synthetic oligonucleotide
  Sense strand starting at position 2766 of SEQ ID NO: 3981
auaggagguaccuguguuu

SEQ ID NO: 310091 - RNA, 19 nt, Artificial Sequence
  Description of Artificial Sequence: Synthetic oligonucleotide
  Antisense strand to SEQ ID NO: 310090
aaacacagguaccuccuau

SEQ ID NO: 310092 - RNA, 19 nt, Artificial Sequence
  Description of Artificial Sequence: Synthetic oligonucleotide
  Sense strand starting at position 2769 of SEQ ID NO: 3981
ggagguaccuguguuuaaa

SEQ ID NO: 310093 - RNA, 19 nt, Artificial Sequence
  Description of Artificial Sequence: Synthetic oligonucleotide
  Antisense strand to SEQ ID NO: 310092
uuuaaacacagguaccucc

SEQ ID NO: 310094 - RNA, 19 nt, Artificial Sequence
  Description of Artificial Sequence: Synthetic oligonucleotide
  Sense strand starting at position 2818 of SEQ ID NO: 3981
ggagauguaucagaagauc

SEQ ID NO: 310095 - RNA, 19 nt, Artificial Sequence
  Description of Artificial Sequence: Synthetic oligonucleotide
  Antisense strand to SEQ ID NO: 310094
gaucuucugauacaucucc

SEQ ID NO: 310096 - RNA, 19 nt, Artificial Sequence
  Description of Artificial Sequence: Synthetic oligonucleotide
  Sense strand starting at position 2848 of SEQ ID NO: 3981
ggaagcuugucauuggauc

SEQ ID NO: 310097 - RNA, 19 nt, Artificial Sequence
  Description of Artificial Sequence: Synthetic oligonucleotide
  Antisense strand to SEQ ID NO: 310096
gauccaaugacaagcuucc

SEQ ID NO: 310098 - RNA, 19 nt, Artificial Sequence
  Description of Artificial Sequence: Synthetic oligonucleotide
  Sense strand starting at position 2849 of SEQ ID NO: 3981
gaagcuugucauuggaucu

SEQ ID NO: 310099 - RNA, 19 nt, Artificial Sequence
  Description of Artificial Sequence: Synthetic oligonucleotide
  Antisense strand to SEQ ID NO: 310098
agauccaaugacaagcuuc

SEQ ID NO: 310100 - RNA, 19 nt, Artificial Sequence
  Description of Artificial Sequence: Synthetic oligonucleotide
  Sense strand starting at position 3153 of SEQ ID NO: 3981
gugcaaaugaugugauucu

SEQ ID NO: 310101 - RNA, 19 nt, Artificial Sequence
  Description of Artificial Sequence: Synthetic oligonucleotide
  Antisense strand to SEQ ID NO: 310100
agaaucacaucauuugcac

SEQ ID NO: 310102 - RNA, 19 nt, Artificial Sequence
  Description of Artificial Sequence: Synthetic oligonucleotide
  Sense strand starting at position 3209 of SEQ ID NO: 3981
uguugagaaucccugacua

SEQ ID NO: 310103 - RNA, 19 nt, Artificial Sequence
  Description of Artificial Sequence: Synthetic oligonucleotide
  Antisense strand to SEQ ID NO: 310102
uagucagggauucucaaca

SEQ ID NO: 310104 - RNA, 19 nt, Artificial Sequence
  Description of Artificial Sequence: Synthetic oligonucleotide
  Sense strand starting at position 3271 of SEQ ID NO: 3981
augcaugcugcccauagau

SEQ ID NO: 310105 - RNA, 19 nt, Artificial Sequence
  Description of Artificial Sequence: Synthetic oligonucleotide
  Antisense strand to SEQ ID NO: 310104
aucuaugggcagcaugcau

SEQ ID NO: 310106 - RNA, 19 nt, Artificial Sequence
  Description of Artificial Sequence: Synthetic oligonucleotide
  Sense strand starting at position 3321 of SEQ ID NO: 3981
cugacucugacguguccaa

SEQ ID NO: 310107 - RNA, 19 nt, Artificial Sequence
  Description of Artificial Sequence: Synthetic oligonucleotide
  Antisense strand to SEQ ID NO: 310106
uuggacacgucagagucag

SEQ ID NO: 310108 - RNA, 19 nt, Artificial Sequence
  Description of Artificial Sequence: Synthetic oligonucleotide
  Sense strand starting at position 3622 of SEQ ID NO: 3981
ugaagcuucuaggcggauu

SEQ ID NO: 310109 - RNA, 19 nt, Artificial Sequence
  Description of Artificial Sequence: Synthetic oligonucleotide
  Antisense strand to SEQ ID NO: 310108
aauccgccuagaagcuuca

SEQ ID NO: 310110 - RNA, 19 nt, Artificial Sequence
  Description of Artificial Sequence: Synthetic oligonucleotide
  Sense strand starting at position 3623 of SEQ ID NO: 3981
gaagcuucuaggcggauuu

SEQ ID NO: 310111 - RNA, 19 nt, Artificial Sequence
  Description of Artificial Sequence: Synthetic oligonucleotide
  Antisense strand to SEQ ID NO: 310110
aaauccgccuagaagcuuc

SEQ ID NO: 310112 - RNA, 19 nt, Artificial Sequence
  Description of Artificial Sequence: Synthetic oligonucleotide
  Sense strand starting at position 3671 of SEQ ID NO: 3981
guugauagguauccuauua

SEQ ID NO: 310113 - RNA, 19 nt, Artificial Sequence
  Description of Artificial Sequence: Synthetic oligonucleotide
  Antisense strand to SEQ ID NO: 310112
uaauaggauaccuaucaac

SEQ ID NO: 310114 - RNA, 19 nt, Artificial Sequence
  Description of Artificial Sequence: Synthetic oligonucleotide
  Sense strand starting at position 3717 of SEQ ID NO: 3981
auuugccauuucuguacua

SEQ ID NO: 310115 - RNA, 19 nt, Artificial Sequence
  Description of Artificial Sequence: Synthetic oligonucleotide
  Antisense strand to SEQ ID NO: 310114
uaguacagaaauggcaaau

SEQ ID NO: 310116 - RNA, 19 nt, Artificial Sequence
  Description of Artificial Sequence: Synthetic oligonucleotide
  Sense strand starting at position 3794 of SEQ ID NO: 3981
caacuucugcccuguggga

SEQ ID NO: 310117 - RNA, 19 nt, Artificial Sequence
  Description of Artificial Sequence: Synthetic oligonucleotide
  Antisense strand to SEQ ID NO: 310116
ucccacagggcagaaguug

SEQ ID NO: 310118 - RNA, 19 nt, Artificial Sequence
  Description of Artificial Sequence: Synthetic oligonucleotide
  Sense strand starting at position 3796 of SEQ ID NO: 3981
acuucugcccugugggauu

SEQ ID NO: 310119 - RNA, 19 nt, Artificial Sequence
  Description of Artificial Sequence: Synthetic oligonucleotide
  Antisense strand to SEQ ID NO: 310118
aaucccacagggcagaagu

SEQ ID NO: 310120 - RNA, 19 nt, Artificial Sequence
  Description of Artificial Sequence: Synthetic oligonucleotide
  Sense strand starting at position 3835 of SEQ ID NO: 3981
agcagcugcaguugaaaua

SEQ ID NO: 310121 - RNA, 19 nt, Artificial Sequence
  Description of Artificial Sequence: Synthetic oligonucleotide
  Antisense strand to SEQ ID NO: 310120
uauuucaacugcagcugcu

SEQ ID NO: 310122 - RNA, 19 nt, Artificial Sequence
  Description of Artificial Sequence: Synthetic oligonucleotide
  Sense strand starting at position 3887 of SEQ ID NO: 3981
guuggugucccaggacacu

SEQ ID NO: 310123 - RNA, 19 nt, Artificial Sequence
  Description of Artificial Sequence: Synthetic oligonucleotide
  Antisense strand to SEQ ID NO: 310122
aguguccugggacaccaac

SEQ ID NO: 310124 - RNA, 19 nt, Artificial Sequence
  Description of Artificial Sequence: Synthetic oligonucleotide
  Sense strand starting at position 29 of SEQ ID NO: 3983
cuggucuugaacuguugaa

SEQ ID NO: 310125 - RNA, 19 nt, Artificial Sequence
  Description of Artificial Sequence: Synthetic oligonucleotide
  Antisense strand to SEQ ID NO: 310124
uucaacaguucaagaccag

SEQ ID NO: 310126 - RNA, 19 nt, Artificial Sequence
  Description of Artificial Sequence: Synthetic oligonucleotide
  Sense strand starting at position 129 of SEQ ID NO: 3983
uaggaaacuuuggcucaga

SEQ ID NO: 310127 - RNA, 19 nt, Artificial Sequence
  Description of Artificial Sequence: Synthetic oligonucleotide
  Antisense strand to SEQ ID NO: 310126
ucugagccaaaguuuccua

SEQ ID NO: 310128 - RNA, 19 nt, Artificial Sequence
  Description of Artificial Sequence: Synthetic oligonucleotide
  Sense strand starting at position 138 of SEQ ID NO: 3983
uuggcucagagguguuaaa

SEQ ID NO: 310129 - RNA, 19 nt, Artificial Sequence
  Description of Artificial Sequence: Synthetic oligonucleotide
  Antisense strand to SEQ ID NO: 310128
uuuaacaccucugagccaa

SEQ ID NO: 310130 - RNA, 19 nt, Artificial Sequence
  Description of Artificial Sequence: Synthetic oligonucleotide
  Sense strand starting at position 186 of SEQ ID NO: 3983
guagaagaucugggaguug

SEQ ID NO: 310131 - RNA, 19 nt, Artificial Sequence
  Description of Artificial Sequence: Synthetic oligonucleotide
  Antisense strand to SEQ ID NO: 310130
caacucccagaucuucuac

SEQ ID NO: 310132 - RNA, 19 nt, Artificial Sequence
  Description of Artificial Sequence: Synthetic oligonucleotide
  Sense strand starting at position 230 of SEQ ID NO: 3983
auuuguaacccgugugcua

SEQ ID NO: 310133 - RNA, 19 nt, Artificial Sequence
  Description of Artificial Sequence: Synthetic oligonucleotide
  Antisense strand to SEQ ID NO: 310132
uagcacacggguuacaaau

SEQ ID NO: 310134 - RNA, 19 nt, Artificial Sequence
  Description of Artificial Sequence: Synthetic oligonucleotide
  Sense strand starting at position 231 of SEQ ID NO: 3983
uuuguaacccgugugcuaa

SEQ ID NO: 310135 - RNA, 19 nt, Artificial Sequence
  Description of Artificial Sequence: Synthetic oligonucleotide
  Antisense strand to SEQ ID NO: 310134
uuagcacacggguuacaaa

SEQ ID NO: 310136 - RNA, 19 nt, Artificial Sequence
  Description of Artificial Sequence: Synthetic oligonucleotide
  Sense strand starting at position 248 of SEQ ID NO: 3983
aaauuagaugcagguacaa

SEQ ID NO: 310137 - RNA, 19 nt, Artificial Sequence
  Description of Artificial Sequence: Synthetic oligonucleotide
  Antisense strand to SEQ ID NO: 310136
uuguaccugcaucuaauuu

SEQ ID NO: 310138 - RNA, 19 nt, Artificial Sequence
  Description of Artificial Sequence: Synthetic oligonucleotide
  Sense strand starting at position 281 of SEQ ID NO: 3983
uuagcugauuggcuaaaga

SEQ ID NO: 310139 - RNA, 19 nt, Artificial Sequence
  Description of Artificial Sequence: Synthetic oligonucleotide
  Antisense strand to SEQ ID NO: 310138
ucuuuagccaaucagcuaa

SEQ ID NO: 310140 - RNA, 19 nt, Artificial Sequence
  Description of Artificial Sequence: Synthetic oligonucleotide
  Sense strand starting at position 291 of SEQ ID NO: 3983
ggcuaaagaaucugguuga

SEQ ID NO: 310141 - RNA, 19 nt, Artificial Sequence
  Description of Artificial Sequence: Synthetic oligonucleotide
  Antisense strand to SEQ ID NO: 310140
ucaaccagauucuuuagcc

SEQ ID NO: 310142 - RNA, 19 nt, Artificial Sequence
  Description of Artificial Sequence: Synthetic oligonucleotide
  Sense strand starting at position 295 of SEQ ID NO: 3983
aaagaaucugguugaugcu

SEQ ID NO: 310143 - RNA, 19 nt, Artificial Sequence
  Description of Artificial Sequence: Synthetic oligonucleotide
  Antisense strand to SEQ ID NO: 310142
agcaucaaccagauucuuu

SEQ ID NO: 310144 - RNA, 19 nt, Artificial Sequence
  Description of Artificial Sequence: Synthetic oligonucleotide
  Sense strand starting at position 296 of SEQ ID NO: 3983
aagaaucugguugaugcua

SEQ ID NO: 310145 - RNA, 19 nt, Artificial Sequence
  Description of Artificial Sequence: Synthetic oligonucleotide
  Antisense strand to SEQ ID NO: 310144
uagcaucaaccagauucuu

SEQ ID NO: 310146 - RNA, 19 nt, Artificial Sequence
  Description of Artificial Sequence: Synthetic oligonucleotide
  Sense strand starting at position 319 of SEQ ID NO: 3983
ccuaauuugugugcauaug

SEQ ID NO: 310147 - RNA, 19 nt, Artificial Sequence
  Description of Artificial Sequence: Synthetic oligonucleotide
  Antisense strand to SEQ ID NO: 310146
cauaugcacacaaauuagg

SEQ ID NO: 310148 - RNA, 19 nt, Artificial Sequence
  Description of Artificial Sequence: Synthetic oligonucleotide
  Sense strand starting at position 500 of SEQ ID NO: 3983
aagaaauccuuguugguug

SEQ ID NO: 310149 - RNA, 19 nt, Artificial Sequence
  Description of Artificial Sequence: Synthetic oligonucleotide
  Antisense strand to SEQ ID NO: 310148
caaccaacaaggauuucuu

SEQ ID NO: 310150 - RNA, 19 nt, Artificial Sequence
  Description of Artificial Sequence: Synthetic oligonucleotide
  Sense strand starting at position 502 of SEQ ID NO: 3983
gaaauccuuguugguugaa

SEQ ID NO: 310151 - RNA, 19 nt, Artificial Sequence
  Description of Artificial Sequence: Synthetic oligonucleotide
  Antisense strand to SEQ ID NO: 310150
uucaaccaacaaggauuuc

SEQ ID NO: 310152 - RNA, 19 nt, Artificial Sequence
  Description of Artificial Sequence: Synthetic oligonucleotide
  Sense strand starting at position 503 of SEQ ID NO: 3983
aaauccuuguugguugaau

SEQ ID NO: 310153 - RNA, 19 nt, Artificial Sequence
  Description of Artificial Sequence: Synthetic oligonucleotide
  Antisense strand to SEQ ID NO: 310152
auucaaccaacaaggauuu

SEQ ID NO: 310154 - RNA, 19 nt, Artificial Sequence
  Description of Artificial Sequence: Synthetic oligonucleotide
  Sense strand starting at position 505 of SEQ ID NO: 3983
auccuuguugguugaauga

SEQ ID NO: 310155 - RNA, 19 nt, Artificial Sequence
  Description of Artificial Sequence: Synthetic oligonucleotide
  Antisense strand to SEQ ID NO: 310154
ucauucaaccaacaaggau

SEQ ID NO: 310156 - RNA, 19 nt, Artificial Sequence
  Description of Artificial Sequence: Synthetic oligonucleotide
  Sense strand starting at position 692 of SEQ ID NO: 3983
cucaaauguacccgugaga

SEQ ID NO: 310157 - RNA, 19 nt, Artificial Sequence
  Description of Artificial Sequence: Synthetic oligonucleotide
  Antisense strand to SEQ ID NO: 310156
ucucacggguacauuugag

SEQ ID NO: 310158 - RNA, 19 nt, Artificial Sequence
  Description of Artificial Sequence: Synthetic oligonucleotide
  Sense strand starting at position 695 of SEQ ID NO: 3983
aaauguacccgugagaauc

SEQ ID NO: 310159 - RNA, 19 nt, Artificial Sequence
  Description of Artificial Sequence: Synthetic oligonucleotide
  Antisense strand to SEQ ID NO: 310158
gauucucacggguacauuu

SEQ ID NO: 310160 - RNA, 19 nt, Artificial Sequence
  Description of Artificial Sequence: Synthetic oligonucleotide
  Sense strand starting at position 952 of SEQ ID NO: 3983
cuccaaguucccuggagau

SEQ ID NO: 310161 - RNA, 19 nt, Artificial Sequence
  Description of Artificial Sequence: Synthetic oligonucleotide
  Antisense strand to SEQ ID NO: 310160
aucuccagggaacuuggag

SEQ ID NO: 310162 - RNA, 19 nt, Artificial Sequence
  Description of Artificial Sequence: Synthetic oligonucleotide
  Sense strand starting at position 1114 of SEQ ID NO: 3983
ccagcuguuccugacaucu

SEQ ID NO: 310163 - RNA, 19 nt, Artificial Sequence
  Description of Artificial Sequence: Synthetic oligonucleotide
  Antisense strand to SEQ ID NO: 310162
agaugucaggaacagcugg

SEQ ID NO: 310164 - RNA, 19 nt, Artificial Sequence
  Description of Artificial Sequence: Synthetic oligonucleotide
  Sense strand starting at position 1124 of SEQ ID NO: 3983
cugacaucuuugccuugga

SEQ ID NO: 310165 - RNA, 19 nt, Artificial Sequence
  Description of Artificial Sequence: Synthetic oligonucleotide
  Antisense strand to SEQ ID NO: 310164
uccaaggcaaagaugucag

SEQ ID NO: 310166 - RNA, 19 nt, Artificial Sequence
  Description of Artificial Sequence: Synthetic oligonucleotide
  Sense strand starting at position 1127 of SEQ ID NO: 3983
acaucuuugccuuggagau

SEQ ID NO: 310167 - RNA, 19 nt, Artificial Sequence
  Description of Artificial Sequence: Synthetic oligonucleotide
  Antisense strand to SEQ ID NO: 310166
aucuccaaggcaaagaugu

SEQ ID NO: 310168 - RNA, 19 nt, Artificial Sequence
  Description of Artificial Sequence: Synthetic oligonucleotide
  Sense strand starting at position 1128 of SEQ ID NO: 3983
caucuuugccuuggagaug

SEQ ID NO: 310169 - RNA, 19 nt, Artificial Sequence
  Description of Artificial Sequence: Synthetic oligonucleotide
  Antisense strand to SEQ ID NO: 310168
caucuccaaggcaaagaug

SEQ ID NO: 310170 - RNA, 19 nt, Artificial Sequence
  Description of Artificial Sequence: Synthetic oligonucleotide
  Sense strand starting at position 1200 of SEQ ID NO: 3983
aggaaugugucacuaggua

SEQ ID NO: 310171 - RNA, 19 nt, Artificial Sequence
  Description of Artificial Sequence: Synthetic oligonucleotide
  Antisense strand to SEQ ID NO: 310170
uaccuagugacacauuccu

SEQ ID NO: 310172 - RNA, 19 nt, Artificial Sequence
  Description of Artificial Sequence: Synthetic oligonucleotide
  Sense strand starting at position 2154 of SEQ ID NO: 3983
gacaccucugccuggugaa

SEQ ID NO: 310173 - RNA, 19 nt, Artificial Sequence
  Description of Artificial Sequence: Synthetic oligonucleotide
  Antisense strand to SEQ ID NO: 310172
uucaccaggcagagguguc

SEQ ID NO: 310174 - RNA, 19 nt, Artificial Sequence
  Description of Artificial Sequence: Synthetic oligonucleotide
  Sense strand starting at position 2214 of SEQ ID NO: 3983
gagugagcccuggagucuu

SEQ ID NO: 310175 - RNA, 19 nt, Artificial Sequence
  Description of Artificial Sequence: Synthetic oligonucleotide
  Antisense strand to SEQ ID NO: 310174
aagacuccagggcucacuc

SEQ ID NO: 310176 - RNA, 19 nt, Artificial Sequence
  Description of Artificial Sequence: Synthetic oligonucleotide
  Sense strand starting at position 2363 of SEQ ID NO: 3983
gagugcaucucacccagaa

SEQ ID NO: 310177 - RNA, 19 nt, Artificial Sequence
  Description of Artificial Sequence: Synthetic oligonucleotide
  Antisense strand to SEQ ID NO: 310176
uucugggugagaugcacuc

SEQ ID NO: 310178 - RNA, 19 nt, Artificial Sequence
  Description of Artificial Sequence: Synthetic oligonucleotide
  Sense strand starting at position 2450 of SEQ ID NO: 3983
ugucacugaucuguacacu

SEQ ID NO: 310179 - RNA, 19 nt, Artificial Sequence
  Description of Artificial Sequence: Synthetic oligonucleotide
  Antisense strand to SEQ ID NO: 310178
aguguacagaucagugaca

SEQ ID NO: 310180 - RNA, 19 nt, Artificial Sequence
  Description of Artificial Sequence: Synthetic oligonucleotide
  Sense strand starting at position 2451 of SEQ ID NO: 3983
gucacugaucuguacacuu

SEQ ID NO: 310181 - RNA, 19 nt, Artificial Sequence
  Description of Artificial Sequence: Synthetic oligonucleotide
  Antisense strand to SEQ ID NO: 310180
aaguguacagaucagugac

SEQ ID NO: 310182 - RNA, 19 nt, Artificial Sequence
  Description of Artificial Sequence: Synthetic oligonucleotide
  Sense strand starting at position 2706 of SEQ ID NO: 3983
cucucacugcuacagagaa

SEQ ID NO: 310183 - RNA, 19 nt, Artificial Sequence
  Description of Artificial Sequence: Synthetic oligonucleotide
  Antisense strand to SEQ ID NO: 310182
uucucuguagcagugagag

SEQ ID NO: 310184 - RNA, 19 nt, Artificial Sequence
  Description of Artificial Sequence: Synthetic oligonucleotide
  Sense strand starting at position 2954 of SEQ ID NO: 3983
gccucucuugaccaacaga

SEQ ID NO: 310185 - RNA, 19 nt, Artificial Sequence
  Description of Artificial Sequence: Synthetic oligonucleotide
  Antisense strand to SEQ ID NO: 310184
ucuguuggucaagagaggc

SEQ ID NO: 310186 - RNA, 19 nt, Artificial Sequence
  Description of Artificial Sequence: Synthetic oligonucleotide
  Sense strand starting at position 2999 of SEQ ID NO: 3983
agccucugugaauacagaa

SEQ ID NO: 310187 - RNA, 19 nt, Artificial Sequence
  Description of Artificial Sequence: Synthetic oligonucleotide
  Antisense strand to SEQ ID NO: 310186
uucuguauucacagaggcu

SEQ ID NO: 310188 - RNA, 19 nt, Artificial Sequence
  Description of Artificial Sequence: Synthetic oligonucleotide
  Sense strand starting at position 3123 of SEQ ID NO: 3983
agaggauuaacauguugua

SEQ ID NO: 310189 - RNA, 19 nt, Artificial Sequence
  Description of Artificial Sequence: Synthetic oligonucleotide
  Antisense strand to SEQ ID NO: 310188
uacaacauguuaauccucu

SEQ ID NO: 310190 - RNA, 19 nt, Artificial Sequence
  Description of Artificial Sequence: Synthetic oligonucleotide
  Sense strand starting at position 3425 of SEQ ID NO: 3983
gugggauccuaucucugaa

SEQ ID NO: 310191 - RNA, 19 nt, Artificial Sequence
  Description of Artificial Sequence: Synthetic oligonucleotide
  Antisense strand to SEQ ID NO: 310190
uucagagauaggaucccac

SEQ ID NO: 310192 - RNA, 19 nt, Artificial Sequence
  Description of Artificial Sequence: Synthetic oligonucleotide
  Sense strand starting at position 3507 of SEQ ID NO: 3983
agagcaugauucuuccaga

SEQ ID NO: 310193 - RNA, 19 nt, Artificial Sequence
  Description of Artificial Sequence: Synthetic oligonucleotide
  Antisense strand to SEQ ID NO: 310192
ucuggaagaaucaugcucu

SEQ ID NO: 310194 - RNA, 19 nt, Artificial Sequence
  Description of Artificial Sequence: Synthetic oligonucleotide
  Sense strand starting at position 3508 of SEQ ID NO: 3983
gagcaugauucuuccagag

SEQ ID NO: 310195 - RNA, 19 nt, Artificial Sequence
  Description of Artificial Sequence: Synthetic oligonucleotide
  Antisense strand to SEQ ID NO: 310194
cucuggaagaaucaugcuc

SEQ ID NO: 310196 - RNA, 19 nt, Artificial Sequence
  Description of Artificial Sequence: Synthetic oligonucleotide
  Sense strand starting at position 3533 of SEQ ID NO: 3983
uugccaaucuggucccaaa

SEQ ID NO: 310197 - RNA, 19 nt, Artificial Sequence
  Description of Artificial Sequence: Synthetic oligonucleotide
  Antisense strand to SEQ ID NO: 310196
uuugggaccagauuggcaa

SEQ ID NO: 310198 - RNA, 19 nt, Artificial Sequence
  Description of Artificial Sequence: Synthetic oligonucleotide
  Sense strand starting at position 3583 of SEQ ID NO: 3983
acaacagguuguuuccaau

SEQ ID NO: 310199 - RNA, 19 nt, Artificial Sequence
  Description of Artificial Sequence: Synthetic oligonucleotide
  Antisense strand to SEQ ID NO: 310198
auuggaaacaaccuguugu

SEQ ID NO: 310200 - RNA, 19 nt, Artificial Sequence
  Description of Artificial Sequence: Synthetic oligonucleotide
  Sense strand starting at position 3867 of SEQ ID NO: 3983
ugcuaagucccagaagaca

SEQ ID NO: 310201 - RNA, 19 nt, Artificial Sequence
  Description of Artificial Sequence: Synthetic oligonucleotide
  Antisense strand to SEQ ID NO: 310200
ugucuucugggacuuagca

SEQ ID NO: 310202 - RNA, 19 nt, Artificial Sequence
  Description of Artificial Sequence: Synthetic oligonucleotide
  Sense strand starting at position 3967 of SEQ ID NO: 3983
acuacagggucguugaaga

SEQ ID NO: 310203 - RNA, 19 nt, Artificial Sequence
  Description of Artificial Sequence: Synthetic oligonucleotide
  Antisense strand to SEQ ID NO: 310202
ucuucaacgacccuguagu

SEQ ID NO: 310204 - RNA, 19 nt, Artificial Sequence
  Description of Artificial Sequence: Synthetic oligonucleotide
  Sense strand starting at position 22 of SEQ ID NO: 3984
acaaguuucccgggagaga

SEQ ID NO: 310205 - RNA, 19 nt, Artificial Sequence
  Description of Artificial Sequence: Synthetic oligonucleotide
  Antisense strand to SEQ ID NO: 310204
ucucucccgggaaacuugu

SEQ ID NO: 310206 - RNA, 19 nt, Artificial Sequence
  Description of Artificial Sequence: Synthetic oligonucleotide
  Sense strand starting at position 626 of SEQ ID NO: 3984
guauuacuucuguaaucaa

SEQ ID NO: 310207 - RNA, 19 nt, Artificial Sequence
  Description of Artificial Sequence: Synthetic oligonucleotide
  Antisense strand to SEQ ID NO: 310206
uugauuacagaaguaauac

SEQ ID NO: 310208 - RNA, 19 nt, Artificial Sequence
  Description of Artificial Sequence: Synthetic oligonucleotide
  Sense strand starting at position 771 of SEQ ID NO: 3984
cuuccuugcucccuagaga

SEQ ID NO: 310209 - RNA, 19 nt, Artificial Sequence
  Description of Artificial Sequence: Synthetic oligonucleotide
  Antisense strand to SEQ ID NO: 310208
ucucuagggagcaaggaag

SEQ ID NO: 310210 - RNA, 19 nt, Artificial Sequence
  Description of Artificial Sequence: Synthetic oligonucleotide
  Sense strand starting at position 784 of SEQ ID NO: 3984
uagagagggccguagaaua

SEQ ID NO: 310211 - RNA, 19 nt, Artificial Sequence
  Description of Artificial Sequence: Synthetic oligonucleotide
  Antisense strand to SEQ ID NO: 310210
uauucuacggcccucucua

SEQ ID NO: 310212 - RNA, 19 nt, Artificial Sequence
  Description of Artificial Sequence: Synthetic oligonucleotide
  Sense strand starting at position 1116 of SEQ ID NO: 3984
ccgccugcuuaugcagaua

SEQ ID NO: 310213 - RNA, 19 nt, Artificial Sequence
  Description of Artificial Sequence: Synthetic oligonucleotide
  Antisense strand to SEQ ID NO: 310212
uaucugcauaagcaggcgg

SEQ ID NO: 310214 - RNA, 19 nt, Artificial Sequence
  Description of Artificial Sequence: Synthetic oligonucleotide
  Sense strand starting at position 1119 of SEQ ID NO: 3984
ccugcuuaugcagauauua

SEQ ID NO: 310215 - RNA, 19 nt, Artificial Sequence
  Description of Artificial Sequence: Synthetic oligonucleotide
  Antisense strand to SEQ ID NO: 310214
uaauaucugcauaagcagg

SEQ ID NO: 310216 - RNA, 19 nt, Artificial Sequence
  Description of Artificial Sequence: Synthetic oligonucleotide
  Sense strand starting at position 1190 of SEQ ID NO: 3984
gcugaugucucaucucgga

SEQ ID NO: 310217 - RNA, 19 nt, Artificial Sequence
  Description of Artificial Sequence: Synthetic oligonucleotide
  Antisense strand to SEQ ID NO: 310216
uccgagaugagacaucagc

SEQ ID NO: 310218 - RNA, 19 nt, Artificial Sequence
  Description of Artificial Sequence: Synthetic oligonucleotide
  Sense strand starting at position 1350 of SEQ ID NO: 3984
aguucucuucuccauguua

SEQ ID NO: 310219 - RNA, 19 nt, Artificial Sequence
  Description of Artificial Sequence: Synthetic oligonucleotide
  Antisense strand to SEQ ID NO: 310218
uaacauggagaagagaacu

SEQ ID NO: 310220 - RNA, 19 nt, Artificial Sequence
  Description of Artificial Sequence: Synthetic oligonucleotide
  Sense strand starting at position 1402 of SEQ ID NO: 3984
acacaaauccuuuguguuu

SEQ ID NO: 310221 - RNA, 19 nt, Artificial Sequence
  Description of Artificial Sequence: Synthetic oligonucleotide
  Antisense strand to SEQ ID NO: 310220
aaacacaaaggauuugugu

SEQ ID NO: 310222 - RNA, 19 nt, Artificial Sequence
  Description of Artificial Sequence: Synthetic oligonucleotide
  Sense strand starting at position 1557 of SEQ ID NO: 3984
acaacucuuugccuggaau

SEQ ID NO: 310223 - RNA, 19 nt, Artificial Sequence
  Description of Artificial Sequence: Synthetic oligonucleotide
  Antisense strand to SEQ ID NO: 310222
auuccaggcaaagaguugu

SEQ ID NO: 310224 - RNA, 19 nt, Artificial Sequence
  Description of Artificial Sequence: Synthetic oligonucleotide
  Sense strand starting at position 2066 of SEQ ID NO: 3984
guaauaggguucucagaag

SEQ ID NO: 310225 - RNA, 19 nt, Artificial Sequence
  Description of Artificial Sequence: Synthetic oligonucleotide
  Antisense strand to SEQ ID NO: 310224
cuucugagaacccuauuac

SEQ ID NO: 310226 - RNA, 19 nt, Artificial Sequence
  Description of Artificial Sequence: Synthetic oligonucleotide
  Sense strand starting at position 2083 of SEQ ID NO: 3984
agccaaaggucuucuaacu

SEQ ID NO: 310227 - RNA, 19 nt, Artificial Sequence
  Description of Artificial Sequence: Synthetic oligonucleotide
  Antisense strand to SEQ ID NO: 310226
aguuagaagaccuuuggcu

SEQ ID NO: 310228 - RNA, 19 nt, Artificial Sequence
  Description of Artificial Sequence: Synthetic oligonucleotide
  Sense strand starting at position 2092 of SEQ ID NO: 3984
ucuucuaacuugucaggaa

SEQ ID NO: 310229 - RNA, 19 nt, Artificial Sequence
  Description of Artificial Sequence: Synthetic oligonucleotide
  Antisense strand to SEQ ID NO: 310228
uuccugacaaguuagaaga

SEQ ID NO: 310230 - RNA, 19 nt, Artificial Sequence
  Description of Artificial Sequence: Synthetic oligonucleotide
  Sense strand starting at position 2093 of SEQ ID NO: 3984
cuucuaacuugucaggaau

SEQ ID NO: 310231 - RNA, 19 nt, Artificial Sequence
  Description of Artificial Sequence: Synthetic oligonucleotide
  Antisense strand to SEQ ID NO: 310230
auuccugacaaguuagaag

SEQ ID NO: 310232 - RNA, 19 nt, Artificial Sequence
  Description of Artificial Sequence: Synthetic oligonucleotide
  Sense strand starting at position 2154 of SEQ ID NO: 3984
uggaccuccugaucuagaa

SEQ ID NO: 310233 - RNA, 19 nt, Artificial Sequence
  Description of Artificial Sequence: Synthetic oligonucleotide
  Antisense strand to SEQ ID NO: 310232
uucuagaucaggaggucca

SEQ ID NO: 310234 - RNA, 19 nt, Artificial Sequence
  Description of Artificial Sequence: Synthetic oligonucleotide
  Sense strand starting at position 2334 of SEQ ID NO: 3984
uugaauaucugacuccagu

SEQ ID NO: 310235 - RNA, 19 nt, Artificial Sequence
  Description of Artificial Sequence: Synthetic oligonucleotide
  Antisense strand to SEQ ID NO: 310234
acuggagucagauauucaa

SEQ ID NO: 310236 - RNA, 19 nt, Artificial Sequence
  Description of Artificial Sequence: Synthetic oligonucleotide
  Sense strand starting at position 2351 of SEQ ID NO: 3984
guuucuagagacugagauc

SEQ ID NO: 310237 - RNA, 19 nt, Artificial Sequence
  Description of Artificial Sequence: Synthetic oligonucleotide
  Antisense strand to SEQ ID NO: 310236
gaucucagucucuagaaac

SEQ ID NO: 310238 - RNA, 19 nt, Artificial Sequence
  Description of Artificial Sequence: Synthetic oligonucleotide
  Sense strand starting at position 2415 of SEQ ID NO: 3984
aaauguauugcuggauaac

SEQ ID NO: 310239 - RNA, 19 nt, Artificial Sequence
  Description of Artificial Sequence: Synthetic oligonucleotide
  Antisense strand to SEQ ID NO: 310238
guuauccagcaauacauuu

SEQ ID NO: 310240 - RNA, 19 nt, Artificial Sequence
  Description of Artificial Sequence: Synthetic oligonucleotide
  Sense strand starting at position 2416 of SEQ ID NO: 3984
aauguauugcuggauaaca

SEQ ID NO: 310241 - RNA, 19 nt, Artificial Sequence
  Description of Artificial Sequence: Synthetic oligonucleotide
  Antisense strand to SEQ ID NO: 310240
uguuauccagcaauacauu

SEQ ID NO: 310242 - RNA, 19 nt, Artificial Sequence
  Description of Artificial Sequence: Synthetic oligonucleotide
  Sense strand starting at position 2482 of SEQ ID NO: 3984
ucuggaauacugugauccu

SEQ ID NO: 310243 - RNA, 19 nt, Artificial Sequence
  Description of Artificial Sequence: Synthetic oligonucleotide
  Antisense strand to SEQ ID NO: 310242
aggaucacaguauuccaga

SEQ ID NO: 310244 - RNA, 19 nt, Artificial Sequence
  Description of Artificial Sequence: Synthetic oligonucleotide
  Sense strand starting at position 2491 of SEQ ID NO: 3984
cugugauccugggcucuga

SEQ ID NO: 310245 - RNA, 19 nt, Artificial Sequence
  Description of Artificial Sequence: Synthetic oligonucleotide
  Antisense strand to SEQ ID NO: 310244
ucagagcccaggaucacag

SEQ ID NO: 310246 - RNA, 19 nt, Artificial Sequence
  Description of Artificial Sequence: Synthetic oligonucleotide
  Sense strand starting at position 2512 of SEQ ID NO: 3984
cagaaaguucuggguuacu

SEQ ID NO: 310247 - RNA, 19 nt, Artificial Sequence
  Description of Artificial Sequence: Synthetic oligonucleotide
  Antisense strand to SEQ ID NO: 310246
aguaacccagaacuuucug

SEQ ID NO: 310248 - RNA, 19 nt, Artificial Sequence
  Description of Artificial Sequence: Synthetic oligonucleotide
  Sense strand starting at position 2515 of SEQ ID NO: 3984
aaaguucuggguuacuagu

SEQ ID NO: 310249 - RNA, 19 nt, Artificial Sequence
  Description of Artificial Sequence: Synthetic oligonucleotide
  Antisense strand to SEQ ID NO: 310248
acuaguaacccagaacuuu

SEQ ID NO: 310250 - RNA, 19 nt, Artificial Sequence
  Description of Artificial Sequence: Synthetic oligonucleotide
  Sense strand starting at position 2517 of SEQ ID NO: 3984
aguucuggguuacuaguua

SEQ ID NO: 310251 - RNA, 19 nt, Artificial Sequence
  Description of Artificial Sequence: Synthetic oligonucleotide
  Antisense strand to SEQ ID NO: 310250
uaacuaguaacccagaacu

SEQ ID NO: 310252 - RNA, 19 nt, Artificial Sequence
  Description of Artificial Sequence: Synthetic oligonucleotide
  Sense strand starting at position 2567 of SEQ ID NO: 3984
ggaguuugcaggugcugau

SEQ ID NO: 310253 - RNA, 19 nt, Artificial Sequence
  Description of Artificial Sequence: Synthetic oligonucleotide
  Antisense strand to SEQ ID NO: 310252
aucagcaccugcaaacucc

SEQ ID NO: 310254 - RNA, 19 nt, Artificial Sequence
  Description of Artificial Sequence: Synthetic oligonucleotide
  Sense strand starting at position 2579 of SEQ ID NO: 3984
ugcugaugcuuagcucaga

SEQ ID NO: 310255 - RNA, 19 nt, Artificial Sequence
  Description of Artificial Sequence: Synthetic oligonucleotide
  Antisense strand to SEQ ID NO: 310254
ucugagcuaagcaucagca

SEQ ID NO: 310256 - RNA, 19 nt, Artificial Sequence
  Description of Artificial Sequence: Synthetic oligonucleotide
  Sense strand starting at position 2580 of SEQ ID NO: 3984
gcugaugcuuagcucagau

SEQ ID NO: 310257 - RNA, 19 nt, Artificial Sequence
  Description of Artificial Sequence: Synthetic oligonucleotide
  Antisense strand to SEQ ID NO: 310256
aucugagcuaagcaucagc

SEQ ID NO: 310258 - RNA, 19 nt, Artificial Sequence
  Description of Artificial Sequence: Synthetic oligonucleotide
  Sense strand starting at position 2593 of SEQ ID NO: 3984
ucagauggugcugguaaga

SEQ ID NO: 310259 - RNA, 19 nt, Artificial Sequence
  Description of Artificial Sequence: Synthetic oligonucleotide
  Antisense strand to SEQ ID NO: 310258
ucuuaccagcaccaucuga

SEQ ID NO: 310260 - RNA, 19 nt, Artificial Sequence
  Description of Artificial Sequence: Synthetic oligonucleotide
  Sense strand starting at position 2957 of SEQ ID NO: 3984
cuagcacagugucuauaau

SEQ ID NO: 310261 - RNA, 19 nt, Artificial Sequence
  Description of Artificial Sequence: Synthetic oligonucleotide
  Antisense strand to SEQ ID NO: 310260
auuauagacacugugcuag

SEQ ID NO: 310262 - RNA, 19 nt, Artificial Sequence
  Description of Artificial Sequence: Synthetic oligonucleotide
  Sense strand starting at position 3046 of SEQ ID NO: 3984
agagguaauugaucccagu

SEQ ID NO: 310263 - RNA, 19 nt, Artificial Sequence
  Description of Artificial Sequence: Synthetic oligonucleotide
  Antisense strand to SEQ ID NO: 310262
acugggaucaauuaccucu

SEQ ID NO: 310264 - RNA, 19 nt, Artificial Sequence
  Description of Artificial Sequence: Synthetic oligonucleotide
  Sense strand starting at position 3049 of SEQ ID NO: 3984
gguaauugaucccagucag

SEQ ID NO: 310265 - RNA, 19 nt, Artificial Sequence
  Description of Artificial Sequence: Synthetic oligonucleotide
  Antisense strand to SEQ ID NO: 310264
cugacugggaucaauuacc

SEQ ID NO: 310266 - RNA, 19 nt, Artificial Sequence
  Description of Artificial Sequence: Synthetic oligonucleotide
  Sense strand starting at position 3152 of SEQ ID NO: 3984
aucugaucuuccuugacag

SEQ ID NO: 310267 - RNA, 19 nt, Artificial Sequence
  Description of Artificial Sequence: Synthetic oligonucleotide
  Antisense strand to SEQ ID NO: 310266
cugucaaggaagaucagau

SEQ ID NO: 310268 - RNA, 19 nt, Artificial Sequence
  Description of Artificial Sequence: Synthetic oligonucleotide
  Sense strand starting at position 3153 of SEQ ID NO: 3984
ucugaucuuccuugacagu

SEQ ID NO: 310269 - RNA, 19 nt, Artificial Sequence
  Description of Artificial Sequence: Synthetic oligonucleotide
  Antisense strand to SEQ ID NO: 310268
acugucaaggaagaucaga

SEQ ID NO: 310270 - RNA, 19 nt, Artificial Sequence
  Description of Artificial Sequence: Synthetic oligonucleotide
  Sense strand starting at position 3159 of SEQ ID NO: 3984
cuuccuugacaguguuuau

SEQ ID NO: 310271 - RNA, 19 nt, Artificial Sequence
  Description of Artificial Sequence: Synthetic oligonucleotide
  Antisense strand to SEQ ID NO: 310270
auaaacacugucaaggaag

SEQ ID NO: 310272 - RNA, 19 nt, Artificial Sequence
  Description of Artificial Sequence: Synthetic oligonucleotide
  Sense strand starting at position 3162 of SEQ ID NO: 3984
ccuugacaguguuuaucaa

SEQ ID NO: 310273 - RNA, 19 nt, Artificial Sequence
  Description of Artificial Sequence: Synthetic oligonucleotide
  Antisense strand to SEQ ID NO: 310272
uugauaaacacugucaagg

SEQ ID NO: 310274 - RNA, 19 nt, Artificial Sequence
  Description of Artificial Sequence: Synthetic oligonucleotide
  Sense strand starting at position 3166 of SEQ ID NO: 3984
gacaguguuuaucaagaca

SEQ ID NO: 310275 - RNA, 19 nt, Artificial Sequence
  Description of Artificial Sequence: Synthetic oligonucleotide
  Antisense strand to SEQ ID NO: 310274
ugucuugauaaacacuguc

SEQ ID NO: 310276 - RNA, 19 nt, Artificial Sequence
  Description of Artificial Sequence: Synthetic oligonucleotide
  Sense strand starting at position 3257 of SEQ ID NO: 3984
gaggaaaugucagcuucuc

SEQ ID NO: 310277 - RNA, 19 nt, Artificial Sequence
  Description of Artificial Sequence: Synthetic oligonucleotide
  Antisense strand to SEQ ID NO: 310276
gagaagcugacauuuccuc

SEQ ID NO: 310278 - RNA, 19 nt, Artificial Sequence
  Description of Artificial Sequence: Synthetic oligonucleotide
  Sense strand starting at position 3624 of SEQ ID NO: 3984
uugagauguuucucucuug

SEQ ID NO: 310279 - RNA, 19 nt, Artificial Sequence
  Description of Artificial Sequence: Synthetic oligonucleotide
  Antisense strand to SEQ ID NO: 310278
caagagagaaacaucucaa

SEQ ID NO: 310280 - RNA, 19 nt, Artificial Sequence
  Description of Artificial Sequence: Synthetic oligonucleotide
  Sense strand starting at position 3625 of SEQ ID NO: 3984
ugagauguuucucucuugu

SEQ ID NO: 310281 - RNA, 19 nt, Artificial Sequence
  Description of Artificial Sequence: Synthetic oligonucleotide
  Antisense strand to SEQ ID NO: 310280
acaagagagaaacaucuca

SEQ ID NO: 310282 - RNA, 19 nt, Artificial Sequence
  Description of Artificial Sequence: Synthetic oligonucleotide
  Sense strand starting at position 3797 of SEQ ID NO: 3984
agggucuuaccauguuagu

SEQ ID NO: 310283 - RNA, 19 nt, Artificial Sequence
  Description of Artificial Sequence: Synthetic oligonucleotide
  Antisense strand to SEQ ID NO: 310282
acuaacaugguaagacccu

SEQ ID NO: 310284 - RNA, 19 nt, Artificial Sequence
  Description of Artificial Sequence: Synthetic oligonucleotide
  Sense strand starting at position 22 of SEQ ID NO: 3985
caaggugaugagugucaca

SEQ ID NO: 310285 - RNA, 19 nt, Artificial Sequence
  Description of Artificial Sequence: Synthetic oligonucleotide
  Antisense strand to SEQ ID NO: 310284
ugugacacucaucaccuug

SEQ ID NO: 310286 - RNA, 19 nt, Artificial Sequence
  Description of Artificial Sequence: Synthetic oligonucleotide
  Sense strand starting at position 96 of SEQ ID NO: 3985
cuggcaguccuacagauau

SEQ ID NO: 310287 - RNA, 19 nt, Artificial Sequence
  Description of Artificial Sequence: Synthetic oligonucleotide
  Antisense strand to SEQ ID NO: 310286
auaucuguaggacugccag

SEQ ID NO: 310288 - RNA, 19 nt, Artificial Sequence
  Description of Artificial Sequence: Synthetic oligonucleotide
  Sense strand starting at position 223 of SEQ ID NO: 3985
ggaauuccugaugguauaa

SEQ ID NO: 310289 - RNA, 19 nt, Artificial Sequence
  Description of Artificial Sequence: Synthetic oligonucleotide
  Antisense strand to SEQ ID NO: 310288
uuauaccaucaggaauucc

SEQ ID NO: 310290 - RNA, 19 nt, Artificial Sequence
  Description of Artificial Sequence: Synthetic oligonucleotide
  Sense strand starting at position 234 of SEQ ID NO: 3985
ugguauaacugccuugacu

SEQ ID NO: 310291 - RNA, 19 nt, Artificial Sequence
  Description of Artificial Sequence: Synthetic oligonucleotide
  Antisense strand to SEQ ID NO: 310290
agucaaggcaguuauacca

SEQ ID NO: 310292 - RNA, 19 nt, Artificial Sequence
  Description of Artificial Sequence: Synthetic oligonucleotide
  Sense strand starting at position 236 of SEQ ID NO: 3985
guauaacugccuugacuca

SEQ ID NO: 310293 - RNA, 19 nt, Artificial Sequence
  Description of Artificial Sequence: Synthetic oligonucleotide
  Antisense strand to SEQ ID NO: 310292
ugagucaaggcaguuauac

SEQ ID NO: 310294 - RNA, 19 nt, Artificial Sequence
  Description of Artificial Sequence: Synthetic oligonucleotide
  Sense strand starting at position 312 of SEQ ID NO: 3985
gaauguuucccagagcuaa

SEQ ID NO: 310295 - RNA, 19 nt, Artificial Sequence
  Description of Artificial Sequence: Synthetic oligonucleotide
  Antisense strand to SEQ ID NO: 310294
uuagcucugggaaacauuc

SEQ ID NO: 310296 - RNA, 19 nt, Artificial Sequence
  Description of Artificial Sequence: Synthetic oligonucleotide
  Sense strand starting at position 485 of SEQ ID NO: 3985
ccgagcucagaucaaacau

SEQ ID NO: 310297 - RNA, 19 nt, Artificial Sequence
  Description of Artificial Sequence: Synthetic oligonucleotide
  Antisense strand to SEQ ID NO: 310296
auguuugaucugagcucgg

SEQ ID NO: 310298 - RNA, 19 nt, Artificial Sequence
  Description of Artificial Sequence: Synthetic oligonucleotide
  Sense strand starting at position 938 of SEQ ID NO: 3985
ccgggaagagcuggguaau

SEQ ID NO: 310299 - RNA, 19 nt, Artificial Sequence
  Description of Artificial Sequence: Synthetic oligonucleotide
  Antisense strand to SEQ ID NO: 310298
auuacccagcucuucccgg

SEQ ID NO: 310300 - RNA, 19 nt, Artificial Sequence
  Description of Artificial Sequence: Synthetic oligonucleotide
  Sense strand starting at position 939 of SEQ ID NO: 3985
cgggaagagcuggguaauc

SEQ ID NO: 310301 - RNA, 19 nt, Artificial Sequence
  Description of Artificial Sequence: Synthetic oligonucleotide
  Antisense strand to SEQ ID NO: 310300
gauuacccagcucuucccg

SEQ ID NO: 310302 - RNA, 19 nt, Artificial Sequence
  Description of Artificial Sequence: Synthetic oligonucleotide
  Sense strand starting at position 948 of SEQ ID NO: 3985
cuggguaaucggucgcagu

SEQ ID NO: 310303 - RNA, 19 nt, Artificial Sequence
  Description of Artificial Sequence: Synthetic oligonucleotide
  Antisense strand to SEQ ID NO: 310302
acugcgaccgauuacccag

SEQ ID NO: 310304 - RNA, 19 nt, Artificial Sequence
  Description of Artificial Sequence: Synthetic oligonucleotide
  Sense strand starting at position 1006 of SEQ ID NO: 3985
cgcguucggcugagaggaa

SEQ ID NO: 310305 - RNA, 19 nt, Artificial Sequence
  Description of Artificial Sequence: Synthetic oligonucleotide
  Antisense strand to SEQ ID NO: 310304
uuccucucagccgaacgcg

SEQ ID NO: 310306 - RNA, 19 nt, Artificial Sequence
  Description of Artificial Sequence: Synthetic oligonucleotide
  Sense strand starting at position 1461 of SEQ ID NO: 3985
uccgaaugggccuagaacu

SEQ ID NO: 310307 - RNA, 19 nt, Artificial Sequence
  Description of Artificial Sequence: Synthetic oligonucleotide
  Antisense strand to SEQ ID NO: 310306
aguucuaggcccauucgga

SEQ ID NO: 310308 - RNA, 19 nt, Artificial Sequence
  Description of Artificial Sequence: Synthetic oligonucleotide
  Sense strand starting at position 1628 of SEQ ID NO: 3985
uaugaauugagagguguca

SEQ ID NO: 310309 - RNA, 19 nt, Artificial Sequence
  Description of Artificial Sequence: Synthetic oligonucleotide
  Antisense strand to SEQ ID NO: 310308
ugacaccucucaauucaua

SEQ ID NO: 310310 - RNA, 19 nt, Artificial Sequence
  Description of Artificial Sequence: Synthetic oligonucleotide
  Sense strand starting at position 2330 of SEQ ID NO: 3985
cuccguucuuucccagaga

SEQ ID NO: 310311 - RNA, 19 nt, Artificial Sequence
  Description of Artificial Sequence: Synthetic oligonucleotide
  Antisense strand to SEQ ID NO: 310310
ucucugggaaagaacggag

SEQ ID NO: 310312 - RNA, 19 nt, Artificial Sequence
  Description of Artificial Sequence: Synthetic oligonucleotide
  Sense strand starting at position 2333 of SEQ ID NO: 3985
cguucuuucccagagaagc

SEQ ID NO: 310313 - RNA, 19 nt, Artificial Sequence
  Description of Artificial Sequence: Synthetic oligonucleotide
  Antisense strand to SEQ ID NO: 310312
gcuucucugggaaagaacg

SEQ ID NO: 310314 - RNA, 19 nt, Artificial Sequence
  Description of Artificial Sequence: Synthetic oligonucleotide
  Sense strand starting at position 2370 of SEQ ID NO: 3985
ccgguucagcaggaucaau

SEQ ID NO: 310315 - RNA, 19 nt, Artificial Sequence
  Description of Artificial Sequence: Synthetic oligonucleotide
  Antisense strand to SEQ ID NO: 310314
auugauccugcugaaccgg

SEQ ID NO: 310316 - RNA, 19 nt, Artificial Sequence
  Description of Artificial Sequence: Synthetic oligonucleotide
  Sense strand starting at position 2602 of SEQ ID NO: 3985
aggcaagagugggcgaaua

SEQ ID NO: 310317 - RNA, 19 nt, Artificial Sequence
  Description of Artificial Sequence: Synthetic oligonucleotide
  Antisense strand to SEQ ID NO: 310316
uauucgcccacucuugccu

SEQ ID NO: 310318 - RNA, 19 nt, Artificial Sequence
  Description of Artificial Sequence: Synthetic oligonucleotide
  Sense strand starting at position 2604 of SEQ ID NO: 3985
gcaagagugggcgaauaag

SEQ ID NO: 310319 - RNA, 19 nt, Artificial Sequence
  Description of Artificial Sequence: Synthetic oligonucleotide
  Antisense strand to SEQ ID NO: 310318
cuuauucgcccacucuugc

SEQ ID NO: 310320 - RNA, 19 nt, Artificial Sequence
  Description of Artificial Sequence: Synthetic oligonucleotide
  Sense strand starting at position 2613 of SEQ ID NO: 3985
ggcgaauaaggcuagcaaa

SEQ ID NO: 310321 - RNA, 19 nt, Artificial Sequence
  Description of Artificial Sequence: Synthetic oligonucleotide
  Antisense strand to SEQ ID NO: 310320
uuugcuagccuuauucgcc

SEQ ID NO: 310322 - RNA, 19 nt, Artificial Sequence
  Description of Artificial Sequence: Synthetic oligonucleotide
  Sense strand starting at position 2708 of SEQ ID NO: 3985
cgcccagaggcucgagaau

SEQ ID NO: 310323 - RNA, 19 nt, Artificial Sequence
  Description of Artificial Sequence: Synthetic oligonucleotide
  Antisense strand to SEQ ID NO: 310322
auucucgagccucugggcg

SEQ ID NO: 310324 - RNA, 19 nt, Artificial Sequence
  Description of Artificial Sequence: Synthetic oligonucleotide
  Sense strand starting at position 3070 of SEQ ID NO: 3985
ggccuucuuugacucagaa

SEQ ID NO: 310325 - RNA, 19 nt, Artificial Sequence
  Description of Artificial Sequence: Synthetic oligonucleotide
  Antisense strand to SEQ ID NO: 310324
uucugagucaaagaaggcc

SEQ ID NO: 310326 - RNA, 19 nt, Artificial Sequence
  Description of Artificial Sequence: Synthetic oligonucleotide
  Sense strand starting at position 3099 of SEQ ID NO: 3985
acgaaagauugagaacgaa

SEQ ID NO: 310327 - RNA, 19 nt, Artificial Sequence
  Description of Artificial Sequence: Synthetic oligonucleotide
  Antisense strand to SEQ ID NO: 310326
uucguucucaaucuuucgu

SEQ ID NO: 310328 - RNA, 19 nt, Artificial Sequence
  Description of Artificial Sequence: Synthetic oligonucleotide
  Sense strand starting at position 3182 of SEQ ID NO: 3985
cucagacuuuccuucguuu

SEQ ID NO: 310329 - RNA, 19 nt, Artificial Sequence
  Description of Artificial Sequence: Synthetic oligonucleotide
  Antisense strand to SEQ ID NO: 310328
aaacgaaggaaagucugag

SEQ ID NO: 310330 - RNA, 19 nt, Artificial Sequence
  Description of Artificial Sequence: Synthetic oligonucleotide
  Sense strand starting at position 3276 of SEQ ID NO: 3985
uggauaugcccgugaaagu

SEQ ID NO: 310331 - RNA, 19 nt, Artificial Sequence
  Description of Artificial Sequence: Synthetic oligonucleotide
  Antisense strand to SEQ ID NO: 310330
acuuucacgggcauaucca

SEQ ID NO: 310332 - RNA, 19 nt, Artificial Sequence
  Description of Artificial Sequence: Synthetic oligonucleotide
  Sense strand starting at position 3277 of SEQ ID NO: 3985
ggauaugcccgugaaagug

SEQ ID NO: 310333 - RNA, 19 nt, Artificial Sequence
  Description of Artificial Sequence: Synthetic oligonucleotide
  Antisense strand to SEQ ID NO: 310332
cacuuucacgggcauaucc

SEQ ID NO: 310334 - RNA, 19 nt, Artificial Sequence
  Description of Artificial Sequence: Synthetic oligonucleotide
  Sense strand starting at position 3330 of SEQ ID NO: 3985
cuccauuaucccugugagu

SEQ ID NO: 310335 - RNA, 19 nt, Artificial Sequence
  Description of Artificial Sequence: Synthetic oligonucleotide
  Antisense strand to SEQ ID NO: 310334
acucacagggauaauggag

SEQ ID NO: 310336 - RNA, 19 nt, Artificial Sequence
  Description of Artificial Sequence: Synthetic oligonucleotide
  Sense strand starting at position 3336 of SEQ ID NO: 3985
uaucccugugagugggaaa

SEQ ID NO: 310337 - RNA, 19 nt, Artificial Sequence
  Description of Artificial Sequence: Synthetic oligonucleotide
  Antisense strand to SEQ ID NO: 310336
uuucccacucacagggaua

SEQ ID NO: 310338 - RNA, 19 nt, Artificial Sequence
  Description of Artificial Sequence: Synthetic oligonucleotide
  Sense strand starting at position 3348 of SEQ ID NO: 3985
ugggaaagcagguguauga

SEQ ID NO: 310339 - RNA, 19 nt, Artificial Sequence
  Description of Artificial Sequence: Synthetic oligonucleotide
  Antisense strand to SEQ ID NO: 310338
ucauacaccugcuuuccca

SEQ ID NO: 310340 - RNA, 19 nt, Artificial Sequence
  Description of Artificial Sequence: Synthetic oligonucleotide
  Sense strand starting at position 3374 of SEQ ID NO: 3985
cguguuucaguggcauagu

SEQ ID NO: 310341 - RNA, 19 nt, Artificial Sequence
  Description of Artificial Sequence: Synthetic oligonucleotide
  Antisense strand to SEQ ID NO: 310340
acuaugccacugaaacacg

SEQ ID NO: 310342 - RNA, 19 nt, Artificial Sequence
  Description of Artificial Sequence: Synthetic oligonucleotide
  Sense strand starting at position 3397 of SEQ ID NO: 3985
guccaaugugcaugugaau

SEQ ID NO: 310343 - RNA, 19 nt, Artificial Sequence
  Description of Artificial Sequence: Synthetic oligonucleotide
  Antisense strand to SEQ ID NO: 310342
auucacaugcacauuggac

SEQ ID NO: 310344 - RNA, 19 nt, Artificial Sequence
  Description of Artificial Sequence: Synthetic oligonucleotide
  Sense strand starting at position 3557 of SEQ ID NO: 3985
cgggaggucuugcugguaa

SEQ ID NO: 310345 - RNA, 19 nt, Artificial Sequence
  Description of Artificial Sequence: Synthetic oligonucleotide
  Antisense strand to SEQ ID NO: 310344
uuaccagcaagaccucccg

SEQ ID NO: 310346 - RNA, 19 nt, Artificial Sequence
  Description of Artificial Sequence: Synthetic oligonucleotide
  Sense strand starting at position 3559 of SEQ ID NO: 3985
ggaggucuugcugguaaua

SEQ ID NO: 310347 - RNA, 19 nt, Artificial Sequence
  Description of Artificial Sequence: Synthetic oligonucleotide
  Antisense strand to SEQ ID NO: 310346
uauuaccagcaagaccucc

SEQ ID NO: 310348 - RNA, 19 nt, Artificial Sequence
  Description of Artificial Sequence: Synthetic oligonucleotide
  Sense strand starting at position 3716 of SEQ ID NO: 3985
gcaggaaaggugggauuga

SEQ ID NO: 310349 - RNA, 19 nt, Artificial Sequence
  Description of Artificial Sequence: Synthetic oligonucleotide
  Antisense strand to SEQ ID NO: 310348
ucaaucccaccuuuccugc

SEQ ID NO: 310350 - RNA, 19 nt, Artificial Sequence
  Description of Artificial Sequence: Synthetic oligonucleotide
  Sense strand starting at position 3729 of SEQ ID NO: 3985
gauugagcccaaggcuuaa

SEQ ID NO: 310351 - RNA, 19 nt, Artificial Sequence
  Description of Artificial Sequence: Synthetic oligonucleotide
  Antisense strand to SEQ ID NO: 310350
uuaagccuugggcucaauc

SEQ ID NO: 310352 - RNA, 19 nt, Artificial Sequence
  Description of Artificial Sequence: Synthetic oligonucleotide
  Sense strand starting at position 3733 of SEQ ID NO: 3985
gagcccaaggcuuaaguua

SEQ ID NO: 310353 - RNA, 19 nt, Artificial Sequence
  Description of Artificial Sequence: Synthetic oligonucleotide
  Antisense strand to SEQ ID NO: 310352
uaacuuaagccuugggcuc

SEQ ID NO: 310354 - RNA, 19 nt, Artificial Sequence
  Description of Artificial Sequence: Synthetic oligonucleotide
  Sense strand starting at position 3780 of SEQ ID NO: 3985
ccuguaggugcugagaguu

SEQ ID NO: 310355 - RNA, 19 nt, Artificial Sequence
  Description of Artificial Sequence: Synthetic oligonucleotide
  Antisense strand to SEQ ID NO: 310354
aacucucagcaccuacagg

SEQ ID NO: 310356 - RNA, 19 nt, Artificial Sequence
  Description of Artificial Sequence: Synthetic oligonucleotide
  Sense strand starting at position 3818 of SEQ ID NO: 3985
gcuguaggaauguauaugu

SEQ ID NO: 310357 - RNA, 19 nt, Artificial Sequence
  Description of Artificial Sequence: Synthetic oligonucleotide
  Antisense strand to SEQ ID NO: 310356
acauauacauuccuacagc

SEQ ID NO: 310358 - RNA, 19 nt, Artificial Sequence
  Description of Artificial Sequence: Synthetic oligonucleotide
  Sense strand starting at position 3826 of SEQ ID NO: 3985
aauguauauguauguagga

SEQ ID NO: 310359 - RNA, 19 nt, Artificial Sequence
  Description of Artificial Sequence: Synthetic oligonucleotide
  Antisense strand to SEQ ID NO: 310358
uccuacauacauauacauu

SEQ ID NO: 310360 - RNA, 19 nt, Artificial Sequence
  Description of Artificial Sequence: Synthetic oligonucleotide
  Sense strand starting at position 3880 of SEQ ID NO: 3985
gggaaagugugauccagug

SEQ ID NO: 310361 - RNA, 19 nt, Artificial Sequence
  Description of Artificial Sequence: Synthetic oligonucleotide
  Antisense strand to SEQ ID NO: 310360
cacuggaucacacuuuccc

SEQ ID NO: 310362 - RNA, 19 nt, Artificial Sequence
  Description of Artificial Sequence: Synthetic oligonucleotide
  Sense strand starting at position 3882 of SEQ ID NO: 3985
gaaagugugauccagugga

SEQ ID NO: 310363 - RNA, 19 nt, Artificial Sequence
  Description of Artificial Sequence: Synthetic oligonucleotide
  Antisense strand to SEQ ID NO: 310362
uccacuggaucacacuuuc

SEQ ID NO: 310364 - RNA, 19 nt, Artificial Sequence
  Description of Artificial Sequence: Synthetic oligonucleotide
  Sense strand starting at position 34 of SEQ ID NO: 3986
aggagaccuuccuagaauc

SEQ ID NO: 310365 - RNA, 19 nt, Artificial Sequence
  Description of Artificial Sequence: Synthetic oligonucleotide
  Antisense strand to SEQ ID NO: 310364
gauucuaggaaggucuccu

SEQ ID NO: 310366 - RNA, 19 nt, Artificial Sequence
  Description of Artificial Sequence: Synthetic oligonucleotide
  Sense strand starting at position 110 of SEQ ID NO: 3986
accacauggugaugaaaua

SEQ ID NO: 310367 - RNA, 19 nt, Artificial Sequence
  Description of Artificial Sequence: Synthetic oligonucleotide
  Antisense strand to SEQ ID NO: 310366
uauuucaucaccauguggu

SEQ ID NO: 310368 - RNA, 19 nt, Artificial Sequence
  Description of Artificial Sequence: Synthetic oligonucleotide
  Sense strand starting at position 123 of SEQ ID NO: 3986
gaaauaaccuguuuguaag

SEQ ID NO: 310369 - RNA, 19 nt, Artificial Sequence
  Description of Artificial Sequence: Synthetic oligonucleotide
  Antisense strand to SEQ ID NO: 310368
cuuacaaacagguuauuuc

SEQ ID NO: 310370 - RNA, 19 nt, Artificial Sequence
  Description of Artificial Sequence: Synthetic oligonucleotide
  Sense strand starting at position 165 of SEQ ID NO: 3986
ccuagauauguuugucuuu

SEQ ID NO: 310371 - RNA, 19 nt, Artificial Sequence
  Description of Artificial Sequence: Synthetic oligonucleotide
  Antisense strand to SEQ ID NO: 310370
aaagacaaacauaucuagg

SEQ ID NO: 310372 - RNA, 19 nt, Artificial Sequence
  Description of Artificial Sequence: Synthetic oligonucleotide
  Sense strand starting at position 168 of SEQ ID NO: 3986
agauauguuugucuuugca

SEQ ID NO: 310373 - RNA, 19 nt, Artificial Sequence
  Description of Artificial Sequence: Synthetic oligonucleotide
  Antisense strand to SEQ ID NO: 310372
ugcaaagacaaacauaucu

SEQ ID NO: 310374 - RNA, 19 nt, Artificial Sequence
  Description of Artificial Sequence: Synthetic oligonucleotide
  Sense strand starting at position 982 of SEQ ID NO: 3986
uuaucugagcccuguugua

SEQ ID NO: 310375 - RNA, 19 nt, Artificial Sequence
  Description of Artificial Sequence: Synthetic oligonucleotide
  Antisense strand to SEQ ID NO: 310374
uacaacagggcucagauaa

SEQ ID NO: 310376 - RNA, 19 nt, Artificial Sequence
  Description of Artificial Sequence: Synthetic oligonucleotide
  Sense strand starting at position 1135 of SEQ ID NO: 3986
gcuucccaggcucaugaua

SEQ ID NO: 310377 - RNA, 19 nt, Artificial Sequence
  Description of Artificial Sequence: Synthetic oligonucleotide
  Antisense strand to SEQ ID NO: 310376
uaucaugagccugggaagc

SEQ ID NO: 310378 - RNA, 19 nt, Artificial Sequence
  Description of Artificial Sequence: Synthetic oligonucleotide
  Sense strand starting at position 1137 of SEQ ID NO: 3986
uucccaggcucaugauaga

SEQ ID NO: 310379 - RNA, 19 nt, Artificial Sequence
  Description of Artificial Sequence: Synthetic oligonucleotide
  Antisense strand to SEQ ID NO: 310378
ucuaucaugagccugggaa

SEQ ID NO: 310380 - RNA, 19 nt, Artificial Sequence
  Description of Artificial Sequence: Synthetic oligonucleotide
  Sense strand starting at position 1271 of SEQ ID NO: 3986
auuccuaguucugcugaau

SEQ ID NO: 310381 - RNA, 19 nt, Artificial Sequence
  Description of Artificial Sequence: Synthetic oligonucleotide
  Antisense strand to SEQ ID NO: 310380
auucagcagaacuaggaau

SEQ ID NO: 310382 - RNA, 19 nt, Artificial Sequence
  Description of Artificial Sequence: Synthetic oligonucleotide
  Sense strand starting at position 1455 of SEQ ID NO: 3986
ggcuguugcucauaugcua

SEQ ID NO: 310383 - RNA, 19 nt, Artificial Sequence
  Description of Artificial Sequence: Synthetic oligonucleotide
  Antisense strand to SEQ ID NO: 310382
uagcauaugagcaacagcc

SEQ ID NO: 310384 - RNA, 19 nt, Artificial Sequence
  Description of Artificial Sequence: Synthetic oligonucleotide
  Sense strand starting at position 1501 of SEQ ID NO: 3986
ccaggagugucagaggaau

SEQ ID NO: 310385 - RNA, 19 nt, Artificial Sequence
  Description of Artificial Sequence: Synthetic oligonucleotide
  Antisense strand to SEQ ID NO: 310384
auuccucugacacuccugg

SEQ ID NO: 310386 - RNA, 19 nt, Artificial Sequence
  Description of Artificial Sequence: Synthetic oligonucleotide
  Sense strand starting at position 1504 of SEQ ID NO: 3986
ggagugucagaggaauggu

SEQ ID NO: 310387 - RNA, 19 nt, Artificial Sequence
  Description of Artificial Sequence: Synthetic oligonucleotide
  Antisense strand to SEQ ID NO: 310386
accauuccucugacacucc

SEQ ID NO: 310388 - RNA, 19 nt, Artificial Sequence
  Description of Artificial Sequence: Synthetic oligonucleotide
  Sense strand starting at position 1513 of SEQ ID NO: 3986
gaggaauggugacacaaag

SEQ ID NO: 310389 - RNA, 19 nt, Artificial Sequence
  Description of Artificial Sequence: Synthetic oligonucleotide
  Antisense strand to SEQ ID NO: 310388
cuuugugucaccauuccuc

SEQ ID NO: 310390 - RNA, 19 nt, Artificial Sequence
  Description of Artificial Sequence: Synthetic oligonucleotide
  Sense strand starting at position 1655 of SEQ ID NO: 3986
cuagaaguuccagggcaau

SEQ ID NO: 310391 - RNA, 19 nt, Artificial Sequence
  Description of Artificial Sequence: Synthetic oligonucleotide
  Antisense strand to SEQ ID NO: 310390
auugcccuggaacuucuag

SEQ ID NO: 310392 - RNA, 19 nt, Artificial Sequence
  Description of Artificial Sequence: Synthetic oligonucleotide
  Sense strand starting at position 1668 of SEQ ID NO: 3986
ggcaauugggauggugaca

SEQ ID NO: 310393 - RNA, 19 nt, Artificial Sequence
  Description of Artificial Sequence: Synthetic oligonucleotide
  Antisense strand to SEQ ID NO: 310392
ugucaccaucccaauugcc

SEQ ID NO: 310394 - RNA, 19 nt, Artificial Sequence
  Description of Artificial Sequence: Synthetic oligonucleotide
  Sense strand starting at position 2193 of SEQ ID NO: 3986
ugagccucacucugucauu

SEQ ID NO: 310395 - RNA, 19 nt, Artificial Sequence
  Description of Artificial Sequence: Synthetic oligonucleotide
  Antisense strand to SEQ ID NO: 310394
aaugacagagugaggcuca

SEQ ID NO: 310396 - RNA, 19 nt, Artificial Sequence
  Description of Artificial Sequence: Synthetic oligonucleotide
  Sense strand starting at position 2472 of SEQ ID NO: 3986
ucccuuggcuucugaguga

SEQ ID NO: 310397 - RNA, 19 nt, Artificial Sequence
  Description of Artificial Sequence: Synthetic oligonucleotide
  Antisense strand to SEQ ID NO: 310396
ucacucagaagccaaggga

SEQ ID NO: 310398 - RNA, 19 nt, Artificial Sequence
  Description of Artificial Sequence: Synthetic oligonucleotide
  Sense strand starting at position 2476 of SEQ ID NO: 3986
uuggcuucugagugagcaa

SEQ ID NO: 310399 - RNA, 19 nt, Artificial Sequence
  Description of Artificial Sequence: Synthetic oligonucleotide
  Antisense strand to SEQ ID NO: 310398
uugcucacucagaagccaa

SEQ ID NO: 310400 - RNA, 19 nt, Artificial Sequence
  Description of Artificial Sequence: Synthetic oligonucleotide
  Sense strand starting at position 2635 of SEQ ID NO: 3986
gugaaugguucauggagaa

SEQ ID NO: 310401 - RNA, 19 nt, Artificial Sequence
  Description of Artificial Sequence: Synthetic oligonucleotide
  Antisense strand to SEQ ID NO: 310400
uucuccaugaaccauucac

SEQ ID NO: 310402 - RNA, 19 nt, Artificial Sequence
  Description of Artificial Sequence: Synthetic oligonucleotide
  Sense strand starting at position 2663 of SEQ ID NO: 3986
ggacucuaggguugcagaa

SEQ ID NO: 310403 - RNA, 19 nt, Artificial Sequence
  Description of Artificial Sequence: Synthetic oligonucleotide
  Antisense strand to SEQ ID NO: 310402
uucugcaacccuagagucc

SEQ ID NO: 310404 - RNA, 19 nt, Artificial Sequence
  Description of Artificial Sequence: Synthetic oligonucleotide
  Sense strand starting at position 2691 of SEQ ID NO: 3986
ccaggaaugcagggacuua

SEQ ID NO: 310405 - RNA, 19 nt, Artificial Sequence
  Description of Artificial Sequence: Synthetic oligonucleotide
  Antisense strand to SEQ ID NO: 310404
uaagucccugcauuccugg

SEQ ID NO: 310406 - RNA, 19 nt, Artificial Sequence
  Description of Artificial Sequence: Synthetic oligonucleotide
  Sense strand starting at position 2736 of SEQ ID NO: 3986
ggaggucucuuagaggucu

SEQ ID NO: 310407 - RNA, 19 nt, Artificial Sequence
  Description of Artificial Sequence: Synthetic oligonucleotide
  Antisense strand to SEQ ID NO: 310406
agaccucuaagagaccucc

SEQ ID NO: 310408 - RNA, 19 nt, Artificial Sequence
  Description of Artificial Sequence: Synthetic oligonucleotide
  Sense strand starting at position 2758 of SEQ ID NO: 3986
agaggucucuucucagcau

SEQ ID NO: 310409 - RNA, 19 nt, Artificial Sequence
  Description of Artificial Sequence: Synthetic oligonucleotide
  Antisense strand to SEQ ID NO: 310408
augcugagaagagaccucu

SEQ ID NO: 310410 - RNA, 19 nt, Artificial Sequence
  Description of Artificial Sequence: Synthetic oligonucleotide
  Sense strand starting at position 3184 of SEQ ID NO: 3986
gccauaaaccagugccuuu

SEQ ID NO: 310411 - RNA, 19 nt, Artificial Sequence
  Description of Artificial Sequence: Synthetic oligonucleotide
  Antisense strand to SEQ ID NO: 310410
aaaggcacugguuuauggc

SEQ ID NO: 310412 - RNA, 19 nt, Artificial Sequence
  Description of Artificial Sequence: Synthetic oligonucleotide
  Sense strand starting at position 3200 of SEQ ID NO: 3986
uuugaacucuguucugcua

SEQ ID NO: 310413 - RNA, 19 nt, Artificial Sequence
  Description of Artificial Sequence: Synthetic oligonucleotide
  Antisense strand to SEQ ID NO: 310412
uagcagaacagaguucaaa

SEQ ID NO: 310414 - RNA, 19 nt, Artificial Sequence
  Description of Artificial Sequence: Synthetic oligonucleotide
  Sense strand starting at position 3310 of SEQ ID NO: 3986
cguggaucucgcugagaaa

SEQ ID NO: 310415 - RNA, 19 nt, Artificial Sequence
  Description of Artificial Sequence: Synthetic oligonucleotide
  Antisense strand to SEQ ID NO: 310414
uuucucagcgagauccacg

SEQ ID NO: 310416 - RNA, 19 nt, Artificial Sequence
  Description of Artificial Sequence: Synthetic oligonucleotide
  Sense strand starting at position 3311 of SEQ ID NO: 3986
guggaucucgcugagaaac

SEQ ID NO: 310417 - RNA, 19 nt, Artificial Sequence
  Description of Artificial Sequence: Synthetic oligonucleotide
  Antisense strand to SEQ ID NO: 310416
guuucucagcgagauccac

SEQ ID NO: 310418 - RNA, 19 nt, Artificial Sequence
  Description of Artificial Sequence: Synthetic oligonucleotide
  Sense strand starting at position 3313 of SEQ ID NO: 3986
ggaucucgcugagaaacca

SEQ ID NO: 310419 - RNA, 19 nt, Artificial Sequence
  Description of Artificial Sequence: Synthetic oligonucleotide
  Antisense strand to SEQ ID NO: 310418
ugguuucucagcgagaucc

SEQ ID NO: 310420 - RNA, 19 nt, Artificial Sequence
  Description of Artificial Sequence: Synthetic oligonucleotide
  Sense strand starting at position 3444 of SEQ ID NO: 3986
ggcaguacguccuucucau

SEQ ID NO: 310421 - RNA, 19 nt, Artificial Sequence
  Description of Artificial Sequence: Synthetic oligonucleotide
  Antisense strand to SEQ ID NO: 310420
augagaaggacguacugcc

SEQ ID NO: 310422 - RNA, 19 nt, Artificial Sequence
  Description of Artificial Sequence: Synthetic oligonucleotide
  Sense strand starting at position 3448 of SEQ ID NO: 3986
guacguccuucucaucaca

SEQ ID NO: 310423 - RNA, 19 nt, Artificial Sequence
  Description of Artificial Sequence: Synthetic oligonucleotide
  Antisense strand to SEQ ID NO: 310422
ugugaugagaaggacguac

SEQ ID NO: 310424 - RNA, 19 nt, Artificial Sequence
  Description of Artificial Sequence: Synthetic oligonucleotide
  Sense strand starting at position 3593 of SEQ ID NO: 3986
ggagcauguuucuguucgu

SEQ ID NO: 310425 - RNA, 19 nt, Artificial Sequence
  Description of Artificial Sequence: Synthetic oligonucleotide
  Antisense strand to SEQ ID NO: 310424
acgaacagaaacaugcucc

SEQ ID NO: 310426 - RNA, 19 nt, Artificial Sequence
  Description of Artificial Sequence: Synthetic oligonucleotide
  Sense strand starting at position 3796 of SEQ ID NO: 3986
uuuguucuuuccuuauuga

SEQ ID NO: 310427 - RNA, 19 nt, Artificial Sequence
  Description of Artificial Sequence: Synthetic oligonucleotide
  Antisense strand to SEQ ID NO: 310426
ucaauaaggaaagaacaaa

SEQ ID NO: 310428 - RNA, 19 nt, Artificial Sequence
  Description of Artificial Sequence: Synthetic oligonucleotide
  Sense strand starting at position 3799 of SEQ ID NO: 3986
guucuuuccuuauugagaa

SEQ ID NO: 310429 - RNA, 19 nt, Artificial Sequence
  Description of Artificial Sequence: Synthetic oligonucleotide
  Antisense strand to SEQ ID NO: 310428
uucucaauaaggaaagaac

SEQ ID NO: 310430 - RNA, 19 nt, Artificial Sequence
  Description of Artificial Sequence: Synthetic oligonucleotide
  Sense strand starting at position 3883 of SEQ ID NO: 3986
ucgcuacucuugcauuauu

SEQ ID NO: 310431 - RNA, 19 nt, Artificial Sequence
  Description of Artificial Sequence: Synthetic oligonucleotide
  Antisense strand to SEQ ID NO: 310430
aauaaugcaagaguagcga

SEQ ID NO: 310432 - RNA, 19 nt, Artificial Sequence
  Description of Artificial Sequence: Synthetic oligonucleotide
  Sense strand starting at position 33 of SEQ ID NO: 3987
auuacauugcuauagaagu

SEQ ID NO: 310433 - RNA, 19 nt, Artificial Sequence
  Description of Artificial Sequence: Synthetic oligonucleotide
  Antisense strand to SEQ ID NO: 310432
acuucuauagcaauguaau

SEQ ID NO: 310434 - RNA, 19 nt, Artificial Sequence
  Description of Artificial Sequence: Synthetic oligonucleotide
  Sense strand starting at position 67 of SEQ ID NO: 3987
cuccuuuggagcugagaac

SEQ ID NO: 310435 - RNA, 19 nt, Artificial Sequence
  Description of Artificial Sequence: Synthetic oligonucleotide
  Antisense strand to SEQ ID NO: 310434
guucucagcuccaaaggag

SEQ ID NO: 310436 - RNA, 19 nt, Artificial Sequence
  Description of Artificial Sequence: Synthetic oligonucleotide
  Sense strand starting at position 352 of SEQ ID NO: 3987
ucaugugaucaguaacuug

SEQ ID NO: 310437 - RNA, 19 nt, Artificial Sequence
  Description of Artificial Sequence: Synthetic oligonucleotide
  Antisense strand to SEQ ID NO: 310436
caaguuacugaucacauga

SEQ ID NO: 310438 - RNA, 19 nt, Artificial Sequence
  Description of Artificial Sequence: Synthetic oligonucleotide
  Sense strand starting at position 359 of SEQ ID NO: 3987
aucaguaacuugguggaaa

SEQ ID NO: 310439 - RNA, 19 nt, Artificial Sequence
  Description of Artificial Sequence: Synthetic oligonucleotide
  Antisense strand to SEQ ID NO: 310438
uuuccaccaaguuacugau

SEQ ID NO: 310440 - RNA, 19 nt, Artificial Sequence
  Description of Artificial Sequence: Synthetic oligonucleotide
  Sense strand starting at position 470 of SEQ ID NO: 3987
aguggugaggcauaagaua

SEQ ID NO: 310441 - RNA, 19 nt, Artificial Sequence
  Description of Artificial Sequence: Synthetic oligonucleotide
  Antisense strand to SEQ ID NO: 310440
uaucuuaugccucaccacu

SEQ ID NO: 310442 - RNA, 19 nt, Artificial Sequence
  Description of Artificial Sequence: Synthetic oligonucleotide
  Sense strand starting at position 497 of SEQ ID NO: 3987
ugaagcuuagucugggaaa

SEQ ID NO: 310443 - RNA, 19 nt, Artificial Sequence
  Description of Artificial Sequence: Synthetic oligonucleotide
  Antisense strand to SEQ ID NO: 310442
uuucccagacuaagcuuca

SEQ ID NO: 310444 - RNA, 19 nt, Artificial Sequence
  Description of Artificial Sequence: Synthetic oligonucleotide
  Sense strand starting at position 556 of SEQ ID NO: 3987
uguaauucuuugucuaaag

SEQ ID NO: 310445 - RNA, 19 nt, Artificial Sequence
  Description of Artificial Sequence: Synthetic oligonucleotide
  Antisense strand to SEQ ID NO: 310444
cuuuagacaaagaauuaca

SEQ ID NO: 310446 - RNA, 19 nt, Artificial Sequence
  Description of Artificial Sequence: Synthetic oligonucleotide
  Sense strand starting at position 1002 of SEQ ID NO: 3987
ugugcuugaggcguuuauu

SEQ ID NO: 310447 - RNA, 19 nt, Artificial Sequence
  Description of Artificial Sequence: Synthetic oligonucleotide
  Antisense strand to SEQ ID NO: 310446
aauaaacgccucaagcaca

SEQ ID NO: 310448 - RNA, 19 nt, Artificial Sequence
  Description of Artificial Sequence: Synthetic oligonucleotide
  Sense strand starting at position 1005 of SEQ ID NO: 3987
gcuugaggcguuuauuuca

SEQ ID NO: 310449 - RNA, 19 nt, Artificial Sequence
  Description of Artificial Sequence: Synthetic oligonucleotide
  Antisense strand to SEQ ID NO: 310448
ugaaauaaacgccucaagc

SEQ ID NO: 310450 - RNA, 19 nt, Artificial Sequence
  Description of Artificial Sequence: Synthetic oligonucleotide
  Sense strand starting at position 1024 of SEQ ID NO: 3987
uguuuauacuaguuggaca

SEQ ID NO: 310451 - RNA, 19 nt, Artificial Sequence
  Description of Artificial Sequence: Synthetic oligonucleotide
  Antisense strand to SEQ ID NO: 310450
uguccaacuaguauaaaca

SEQ ID NO: 310452 - RNA, 19 nt, Artificial Sequence
  Description of Artificial Sequence: Synthetic oligonucleotide
  Sense strand starting at position 1130 of SEQ ID NO: 3987
ugggcuuaucaguaacaga

SEQ ID NO: 310453 - RNA, 19 nt, Artificial Sequence
  Description of Artificial Sequence: Synthetic oligonucleotide
  Antisense strand to SEQ ID NO: 310452
ucuguuacugauaagccca

SEQ ID NO: 310454 - RNA, 19 nt, Artificial Sequence
  Description of Artificial Sequence: Synthetic oligonucleotide
  Sense strand starting at position 1216 of SEQ ID NO: 3987
acugaaaucugucugaaua

SEQ ID NO: 310455 - RNA, 19 nt, Artificial Sequence
  Description of Artificial Sequence: Synthetic oligonucleotide
  Antisense strand to SEQ ID NO: 310454
uauucagacagauuucagu

SEQ ID NO: 310456 - RNA, 19 nt, Artificial Sequence
  Description of Artificial Sequence: Synthetic oligonucleotide
  Sense strand starting at position 1217 of SEQ ID NO: 3987
cugaaaucugucugaauag

SEQ ID NO: 310457 - RNA, 19 nt, Artificial Sequence
  Description of Artificial Sequence: Synthetic oligonucleotide
  Antisense strand to SEQ ID NO: 310456
cuauucagacagauuucag

SEQ ID NO: 310458 - RNA, 19 nt, Artificial Sequence
  Description of Artificial Sequence: Synthetic oligonucleotide
  Sense strand starting at position 1609 of SEQ ID NO: 3987
uugcuuacucggucaagcu

SEQ ID NO: 310459 - RNA, 19 nt, Artificial Sequence
  Description of Artificial Sequence: Synthetic oligonucleotide
  Antisense strand to SEQ ID NO: 310458
agcuugaccgaguaagcaa

SEQ ID NO: 310460 - RNA, 19 nt, Artificial Sequence
  Description of Artificial Sequence: Synthetic oligonucleotide
  Sense strand starting at position 1708 of SEQ ID NO: 3987
ucagacauaccuuguuuga

SEQ ID NO: 310461 - RNA, 19 nt, Artificial Sequence
  Description of Artificial Sequence: Synthetic oligonucleotide
  Antisense strand to SEQ ID NO: 310460
ucaaacaagguaugucuga

SEQ ID NO: 310462 - RNA, 19 nt, Artificial Sequence
  Description of Artificial Sequence: Synthetic oligonucleotide
  Sense strand starting at position 1711 of SEQ ID NO: 3987
gacauaccuuguuugaaga

SEQ ID NO: 310463 - RNA, 19 nt, Artificial Sequence
  Description of Artificial Sequence: Synthetic oligonucleotide
  Antisense strand to SEQ ID NO: 310462
ucuucaaacaagguauguc

SEQ ID NO: 310464 - RNA, 19 nt, Artificial Sequence
  Description of Artificial Sequence: Synthetic oligonucleotide
  Sense strand starting at position 1712 of SEQ ID NO: 3987
acauaccuuguuugaagaa

SEQ ID NO: 310465 - RNA, 19 nt, Artificial Sequence
  Description of Artificial Sequence: Synthetic oligonucleotide
  Antisense strand to SEQ ID NO: 310464
uucuucaaacaagguaugu

SEQ ID NO: 310466 - RNA, 19 nt, Artificial Sequence
  Description of Artificial Sequence: Synthetic oligonucleotide
  Sense strand starting at position 2413 of SEQ ID NO: 3987
acucaauuauaugcuggua

SEQ ID NO: 310467 - RNA, 19 nt, Artificial Sequence
  Description of Artificial Sequence: Synthetic oligonucleotide
  Antisense strand to SEQ ID NO: 310466
uaccagcauauaauugagu

SEQ ID NO: 310468 - RNA, 19 nt, Artificial Sequence
  Description of Artificial Sequence: Synthetic oligonucleotide
  Sense strand starting at position 2636 of SEQ ID NO: 3987
cuggcagaucuugagauuc

SEQ ID NO: 310469 - RNA, 19 nt, Artificial Sequence
  Description of Artificial Sequence: Synthetic oligonucleotide
  Antisense strand to SEQ ID NO: 310468
gaaucucaagaucugccag

SEQ ID NO: 310470 - RNA, 19 nt, Artificial Sequence
  Description of Artificial Sequence: Synthetic oligonucleotide
  Sense strand starting at position 2758 of SEQ ID NO: 3987
aggagaaccuucuuccauu

SEQ ID NO: 310471 - RNA, 19 nt, Artificial Sequence
  Description of Artificial Sequence: Synthetic oligonucleotide
  Antisense strand to SEQ ID NO: 310470
aauggaagaagguucuccu

SEQ ID NO: 310472 - RNA, 19 nt, Artificial Sequence
  Description of Artificial Sequence: Synthetic oligonucleotide
  Sense strand starting at position 2759 of SEQ ID NO: 3987
ggagaaccuucuuccauuc

SEQ ID NO: 310473 - RNA, 19 nt, Artificial Sequence
  Description of Artificial Sequence: Synthetic oligonucleotide
  Antisense strand to SEQ ID NO: 310472
gaauggaagaagguucucc

SEQ ID NO: 310474 - RNA, 19 nt, Artificial Sequence
  Description of Artificial Sequence: Synthetic oligonucleotide
  Sense strand starting at position 2825 of SEQ ID NO: 3987
uaagauaauuguuugacag

SEQ ID NO: 310475 - RNA, 19 nt, Artificial Sequence
  Description of Artificial Sequence: Synthetic oligonucleotide
  Antisense strand to SEQ ID NO: 310474
cugucaaacaauuaucuua

SEQ ID NO: 310476 - RNA, 19 nt, Artificial Sequence
  Description of Artificial Sequence: Synthetic oligonucleotide
  Sense strand starting at position 2839 of SEQ ID NO: 3987
gacagaucuugugcucuaa

SEQ ID NO: 310477 - RNA, 19 nt, Artificial Sequence
  Description of Artificial Sequence: Synthetic oligonucleotide
  Antisense strand to SEQ ID NO: 310476
uuagagcacaagaucuguc

SEQ ID NO: 310478 - RNA, 19 nt, Artificial Sequence
  Description of Artificial Sequence: Synthetic oligonucleotide
  Sense strand starting at position 2860 of SEQ ID NO: 3987
ccaaguuauacaugggaug

SEQ ID NO: 310479 - RNA, 19 nt, Artificial Sequence
  Description of Artificial Sequence: Synthetic oligonucleotide
  Antisense strand to SEQ ID NO: 310478
caucccauguauaacuugg

SEQ ID NO: 310480 - RNA, 19 nt, Artificial Sequence
  Description of Artificial Sequence: Synthetic oligonucleotide
  Sense strand starting at position 2950 of SEQ ID NO: 3987
guugauuaggaguaacuuu

SEQ ID NO: 310481 - RNA, 19 nt, Artificial Sequence
  Description of Artificial Sequence: Synthetic oligonucleotide
  Antisense strand to SEQ ID NO: 310480
aaaguuacuccuaaucaac

SEQ ID NO: 310482 - RNA, 19 nt, Artificial Sequence
  Description of Artificial Sequence: Synthetic oligonucleotide
  Sense strand starting at position 2993 of SEQ ID NO: 3987
cucaaaugugacuauguga

SEQ ID NO: 310483 - RNA, 19 nt, Artificial Sequence
  Description of Artificial Sequence: Synthetic oligonucleotide
  Antisense strand to SEQ ID NO: 310482
ucacauagucacauuugag

SEQ ID NO: 310484 - RNA, 19 nt, Artificial Sequence
  Description of Artificial Sequence: Synthetic oligonucleotide
  Sense strand starting at position 2996 of SEQ ID NO: 3987
aaaugugacuaugugaauc

SEQ ID NO: 310485 - RNA, 19 nt, Artificial Sequence
  Description of Artificial Sequence: Synthetic oligonucleotide
  Antisense strand to SEQ ID NO: 310484
gauucacauagucacauuu

SEQ ID NO: 310486 - RNA, 19 nt, Artificial Sequence
  Description of Artificial Sequence: Synthetic oligonucleotide
  Sense strand starting at position 3007 of SEQ ID NO: 3987
ugugaaucugggugggauu

SEQ ID NO: 310487 - RNA, 19 nt, Artificial Sequence
  Description of Artificial Sequence: Synthetic oligonucleotide
  Antisense strand to SEQ ID NO: 310486
aaucccacccagauucaca

SEQ ID NO: 310488 - RNA, 19 nt, Artificial Sequence
  Description of Artificial Sequence: Synthetic oligonucleotide
  Sense strand starting at position 3035 of SEQ ID NO: 3987
aaugccauugugcagagau

SEQ ID NO: 310489 - RNA, 19 nt, Artificial Sequence
  Description of Artificial Sequence: Synthetic oligonucleotide
  Antisense strand to SEQ ID NO: 310488
aucucugcacaauggcauu

SEQ ID NO: 310490 - RNA, 19 nt, Artificial Sequence
  Description of Artificial Sequence: Synthetic oligonucleotide
  Sense strand starting at position 3045 of SEQ ID NO: 3987
ugcagagaugcauaagcuu

SEQ ID NO: 310491 - RNA, 19 nt, Artificial Sequence
  Description of Artificial Sequence: Synthetic oligonucleotide
  Antisense strand to SEQ ID NO: 310490
aagcuuaugcaucucugca

SEQ ID NO: 310492 - RNA, 19 nt, Artificial Sequence
  Description of Artificial Sequence: Synthetic oligonucleotide
  Sense strand starting at position 3203 of SEQ ID NO: 3987
gcaagcuaucuagauggau

SEQ ID NO: 310493 - RNA, 19 nt, Artificial Sequence
  Description of Artificial Sequence: Synthetic oligonucleotide
  Antisense strand to SEQ ID NO: 310492
auccaucuagauagcuugc

SEQ ID NO: 310494 - RNA, 19 nt, Artificial Sequence
  Description of Artificial Sequence: Synthetic oligonucleotide
  Sense strand starting at position 3206 of SEQ ID NO: 3987
agcuaucuagauggauagu

SEQ ID NO: 310495 - RNA, 19 nt, Artificial Sequence
  Description of Artificial Sequence: Synthetic oligonucleotide
  Antisense strand to SEQ ID NO: 310494
acuauccaucuagauagcu

SEQ ID NO: 310496 - RNA, 19 nt, Artificial Sequence
  Description of Artificial Sequence: Synthetic oligonucleotide
  Sense strand starting at position 3207 of SEQ ID NO: 3987
gcuaucuagauggauagua

SEQ ID NO: 310497 - RNA, 19 nt, Artificial Sequence
  Description of Artificial Sequence: Synthetic oligonucleotide
  Antisense strand to SEQ ID NO: 310496
uacuauccaucuagauagc

SEQ ID NO: 310498 - RNA, 19 nt, Artificial Sequence
  Description of Artificial Sequence: Synthetic oligonucleotide
  Sense strand starting at position 3264 of SEQ ID NO: 3987
acuguacacugaucaggaa

SEQ ID NO: 310499 - RNA, 19 nt, Artificial Sequence
  Description of Artificial Sequence: Synthetic oligonucleotide
  Antisense strand to SEQ ID NO: 310498
uuccugaucaguguacagu

SEQ ID NO: 310500 - RNA, 19 nt, Artificial Sequence
  Description of Artificial Sequence: Synthetic oligonucleotide
  Sense strand starting at position 3368 of SEQ ID NO: 3987
uugguucugcaaugaaauu

SEQ ID NO: 310501 - RNA, 19 nt, Artificial Sequence
  Description of Artificial Sequence: Synthetic oligonucleotide
  Antisense strand to SEQ ID NO: 310500
aauuucauugcagaaccaa

SEQ ID NO: 310502 - RNA, 19 nt, Artificial Sequence
  Description of Artificial Sequence: Synthetic oligonucleotide
  Sense strand starting at position 3447 of SEQ ID NO: 3987
augauaaugcuguaacacu

SEQ ID NO: 310503 - RNA, 19 nt, Artificial Sequence
  Description of Artificial Sequence: Synthetic oligonucleotide
  Antisense strand to SEQ ID NO: 310502
aguguuacagcauuaucau

SEQ ID NO: 310504 - RNA, 19 nt, Artificial Sequence
  Description of Artificial Sequence: Synthetic oligonucleotide
  Sense strand starting at position 3879 of SEQ ID NO: 3987
cuaguugcuguuuaucaaa

SEQ ID NO: 310505 - RNA, 19 nt, Artificial Sequence
  Description of Artificial Sequence: Synthetic oligonucleotide
  Antisense strand to SEQ ID NO: 310504
uuugauaaacagcaacuag

SEQ ID NO: 310506 - RNA, 19 nt, Artificial Sequence
  Description of Artificial Sequence: Synthetic oligonucleotide
  Sense strand starting at position 3962 of SEQ ID NO: 3987
guagaaggauuaguaguau

SEQ ID NO: 310507 - RNA, 19 nt, Artificial Sequence
  Description of Artificial Sequence: Synthetic oligonucleotide
  Antisense strand to SEQ ID NO: 310506
auacuacuaauccuucuac

SEQ ID NO: 310508 - RNA, 19 nt, Artificial Sequence
  Description of Artificial Sequence: Synthetic oligonucleotide
  Sense strand starting at position 3968 of SEQ ID NO: 3987
ggauuaguaguauaaucuc

SEQ ID NO: 310509 - RNA, 19 nt, Artificial Sequence
  Description of Artificial Sequence: Synthetic oligonucleotide
  Antisense strand to SEQ ID NO: 310508
gagauuauacuacuaaucc

SEQ ID NO: 310510 - RNA, 19 nt, Artificial Sequence
  Description of Artificial Sequence: Synthetic oligonucleotide
  Sense strand starting at position 3971 of SEQ ID NO: 3987
uuaguaguauaaucuccau

SEQ ID NO: 310511 - RNA, 19 nt, Artificial Sequence
  Description of Artificial Sequence: Synthetic oligonucleotide
  Antisense strand to SEQ ID NO: 310510
auggagauuauacuacuaa

SEQ ID NO: 310512 - RNA, 19 nt, Artificial Sequence
  Description of Artificial Sequence: Synthetic oligonucleotide
  Sense strand starting at position 327 of SEQ ID NO: 3988
ugggcuauauaggaauuga

SEQ ID NO: 310513 - RNA, 19 nt, Artificial Sequence
  Description of Artificial Sequence: Synthetic oligonucleotide
  Antisense strand to SEQ ID NO: 310512
ucaauuccuauauagccca

SEQ ID NO: 310514 - RNA, 19 nt, Artificial Sequence
  Description of Artificial Sequence: Synthetic oligonucleotide
  Sense strand starting at position 483 of SEQ ID NO: 3988
agccaaaugcuguaguaac

SEQ ID NO: 310515 - RNA, 19 nt, Artificial Sequence
  Description of Artificial Sequence: Synthetic oligonucleotide
  Antisense strand to SEQ ID NO: 310514
guuacuacagcauuuggcu

SEQ ID NO: 310516 - RNA, 19 nt, Artificial Sequence
  Description of Artificial Sequence: Synthetic oligonucleotide
  Sense strand starting at position 558 of SEQ ID NO: 3988
uugguugugaugcauucuu

SEQ ID NO: 310517 - RNA, 19 nt, Artificial Sequence
  Description of Artificial Sequence: Synthetic oligonucleotide
  Antisense strand to SEQ ID NO: 310516
aagaaugcaucacaaccaa

SEQ ID NO: 310518 - RNA, 19 nt, Artificial Sequence
  Description of Artificial Sequence: Synthetic oligonucleotide
  Sense strand starting at position 563 of SEQ ID NO: 3988
ugugaugcauucuuuauuu

SEQ ID NO: 310519 - RNA, 19 nt, Artificial Sequence
  Description of Artificial Sequence: Synthetic oligonucleotide
  Antisense strand to SEQ ID NO: 310518
aaauaaagaaugcaucaca

SEQ ID NO: 310520 - RNA, 19 nt, Artificial Sequence
  Description of Artificial Sequence: Synthetic oligonucleotide
  Sense strand starting at position 633 of SEQ ID NO: 3988
ugccucuuagauugguagu

SEQ ID NO: 310521 - RNA, 19 nt, Artificial Sequence
  Description of Artificial Sequence: Synthetic oligonucleotide
  Antisense strand to SEQ ID NO: 310520
acuaccaaucuaagaggca

SEQ ID NO: 310522 - RNA, 19 nt, Artificial Sequence
  Description of Artificial Sequence: Synthetic oligonucleotide
  Sense strand starting at position 635 of SEQ ID NO: 3988
ccucuuagauugguagugu

SEQ ID NO: 310523 - RNA, 19 nt, Artificial Sequence
  Description of Artificial Sequence: Synthetic oligonucleotide
  Antisense strand to SEQ ID NO: 310522
acacuaccaaucuaagagg

SEQ ID NO: 310524 - RNA, 19 nt, Artificial Sequence
  Description of Artificial Sequence: Synthetic oligonucleotide
  Sense strand starting at position 813 of SEQ ID NO: 3988
auccgauucugacuacacu

SEQ ID NO: 310525 - RNA, 19 nt, Artificial Sequence
  Description of Artificial Sequence: Synthetic oligonucleotide
  Antisense strand to SEQ ID NO: 310524
aguguagucagaaucggau

SEQ ID NO: 310526 - RNA, 19 nt, Artificial Sequence
  Description of Artificial Sequence: Synthetic oligonucleotide
  Sense strand starting at position 814 of SEQ ID NO: 3988
uccgauucugacuacacua

SEQ ID NO: 310527 - RNA, 19 nt, Artificial Sequence
  Description of Artificial Sequence: Synthetic oligonucleotide
  Antisense strand to SEQ ID NO: 310526
uaguguagucagaaucgga

SEQ ID NO: 310528 - RNA, 19 nt, Artificial Sequence
  Description of Artificial Sequence: Synthetic oligonucleotide
  Sense strand starting at position 976 of SEQ ID NO: 3988
agguuaucgcaguaauauu

SEQ ID NO: 310529 - RNA, 19 nt, Artificial Sequence
  Description of Artificial Sequence: Synthetic oligonucleotide
  Antisense strand to SEQ ID NO: 310528
aauauuacugcgauaaccu

SEQ ID NO: 310530 - RNA, 19 nt, Artificial Sequence
  Description of Artificial Sequence: Synthetic oligonucleotide
  Sense strand starting at position 984 of SEQ ID NO: 3988
gcaguaauauuucucggua

SEQ ID NO: 310531 - RNA, 19 nt, Artificial Sequence
  Description of Artificial Sequence: Synthetic oligonucleotide
  Antisense strand to SEQ ID NO: 310530
uaccgagaaauauuacugc

SEQ ID NO: 310532 - RNA, 19 nt, Artificial Sequence
  Description of Artificial Sequence: Synthetic oligonucleotide
  Sense strand starting at position 985 of SEQ ID NO: 3988
caguaauauuucucgguau

SEQ ID NO: 310533 - RNA, 19 nt, Artificial Sequence
  Description of Artificial Sequence: Synthetic oligonucleotide
  Antisense strand to SEQ ID NO: 310532
auaccgagaaauauuacug

SEQ ID NO: 310534 - RNA, 19 nt, Artificial Sequence
  Description of Artificial Sequence: Synthetic oligonucleotide
  Sense strand starting at position 987 of SEQ ID NO: 3988
guaauauuucucgguauac

SEQ ID NO: 310535 - RNA, 19 nt, Artificial Sequence
  Description of Artificial Sequence: Synthetic oligonucleotide
  Antisense strand to SEQ ID NO: 310534
guauaccgagaaauauuac

SEQ ID NO: 310536 - RNA, 19 nt, Artificial Sequence
  Description of Artificial Sequence: Synthetic oligonucleotide
  Sense strand starting at position 996 of SEQ ID NO: 3988
cucgguauacuacaaguaa

SEQ ID NO: 310537 - RNA, 19 nt, Artificial Sequence
  Description of Artificial Sequence: Synthetic oligonucleotide
  Antisense strand to SEQ ID NO: 310536
uuacuuguaguauaccgag

SEQ ID NO: 310538 - RNA, 19 nt, Artificial Sequence
  Description of Artificial Sequence: Synthetic oligonucleotide
  Sense strand starting at position 1008 of SEQ ID NO: 3988
caaguaauuuaucacggua

SEQ ID NO: 310539 - RNA, 19 nt, Artificial Sequence
  Description of Artificial Sequence: Synthetic oligonucleotide
  Antisense strand to SEQ ID NO: 310538
uaccgugauaaauuacuug

SEQ ID NO: 310540 - RNA, 19 nt, Artificial Sequence
  Description of Artificial Sequence: Synthetic oligonucleotide
  Sense strand starting at position 1024 of SEQ ID NO: 3988
guauuacuuaaaggcguuu

SEQ ID NO: 310541 - RNA, 19 nt, Artificial Sequence
  Description of Artificial Sequence: Synthetic oligonucleotide
  Antisense strand to SEQ ID NO: 310540
aaacgccuuuaaguaauac

SEQ ID NO: 310542 - RNA, 19 nt, Artificial Sequence
  Description of Artificial Sequence: Synthetic oligonucleotide
  Sense strand starting at position 1030 of SEQ ID NO: 3988
cuuaaaggcguuuaguauu

SEQ ID NO: 310543 - RNA, 19 nt, Artificial Sequence
  Description of Artificial Sequence: Synthetic oligonucleotide
  Antisense strand to SEQ ID NO: 310542
aauacuaaacgccuuuaag

SEQ ID NO: 310544 - RNA, 19 nt, Artificial Sequence
  Description of Artificial Sequence: Synthetic oligonucleotide
  Sense strand starting at position 1054 of SEQ ID NO: 3988
cgcccuugauuugacaaau

SEQ ID NO: 310545 - RNA, 19 nt, Artificial Sequence
  Description of Artificial Sequence: Synthetic oligonucleotide
  Antisense strand to SEQ ID NO: 310544
auuugucaaaucaagggcg

SEQ ID NO: 310546 - RNA, 19 nt, Artificial Sequence
  Description of Artificial Sequence: Synthetic oligonucleotide
  Sense strand starting at position 1112 of SEQ ID NO: 3988
auuuaauucuucgaaagag

SEQ ID NO: 310547 - RNA, 19 nt, Artificial Sequence
  Description of Artificial Sequence: Synthetic oligonucleotide
  Antisense strand to SEQ ID NO: 310546
cucuuucgaagaauuaaau

SEQ ID NO: 310548 - RNA, 19 nt, Artificial Sequence
  Description of Artificial Sequence: Synthetic oligonucleotide
  Sense strand starting at position 1148 of SEQ ID NO: 3988
aaauaaagcugguuagaag

SEQ ID NO: 310549 - RNA, 19 nt, Artificial Sequence
  Description of Artificial Sequence: Synthetic oligonucleotide
  Antisense strand to SEQ ID NO: 310548
cuucuaaccagcuuuauuu

SEQ ID NO: 310550 - RNA, 19 nt, Artificial Sequence
  Description of Artificial Sequence: Synthetic oligonucleotide
  Sense strand starting at position 1151 of SEQ ID NO: 3988
uaaagcugguuagaagaaa

SEQ ID NO: 310551 - RNA, 19 nt, Artificial Sequence
  Description of Artificial Sequence: Synthetic oligonucleotide
  Antisense strand to SEQ ID NO: 310550
uuucuucuaaccagcuuua

SEQ ID NO: 310552 - RNA, 19 nt, Artificial Sequence
  Description of Artificial Sequence: Synthetic oligonucleotide
  Sense strand starting at position 1238 of SEQ ID NO: 3988
agaccaaacggcuaauuau

SEQ ID NO: 310553 - RNA, 19 nt, Artificial Sequence
  Description of Artificial Sequence: Synthetic oligonucleotide
  Antisense strand to SEQ ID NO: 310552
auaauuagccguuuggucu

SEQ ID NO: 310554 - RNA, 19 nt, Artificial Sequence
  Description of Artificial Sequence: Synthetic oligonucleotide
  Sense strand starting at position 1241 of SEQ ID NO: 3988
ccaaacggcuaauuauaau

SEQ ID NO: 310555 - RNA, 19 nt, Artificial Sequence
  Description of Artificial Sequence: Synthetic oligonucleotide
  Antisense strand to SEQ ID NO: 310554
auuauaauuagccguuugg

SEQ ID NO: 310556 - RNA, 19 nt, Artificial Sequence
  Description of Artificial Sequence: Synthetic oligonucleotide
  Sense strand starting at position 1247 of SEQ ID NO: 3988
ggcuaauuauaauuggcaa

SEQ ID NO: 310557 - RNA, 19 nt, Artificial Sequence
  Description of Artificial Sequence: Synthetic oligonucleotide
  Antisense strand to SEQ ID NO: 310556
uugccaauuauaauuagcc

SEQ ID NO: 310558 - RNA, 19 nt, Artificial Sequence
  Description of Artificial Sequence: Synthetic oligonucleotide
  Sense strand starting at position 1320 of SEQ ID NO: 3988
cuuucugucuaugcagaga

SEQ ID NO: 310559 - RNA, 19 nt, Artificial Sequence
  Description of Artificial Sequence: Synthetic oligonucleotide
  Antisense strand to SEQ ID NO: 310558
ucucugcauagacagaaag

SEQ ID NO: 310560 - RNA, 19 nt, Artificial Sequence
  Description of Artificial Sequence: Synthetic oligonucleotide
  Sense strand starting at position 1409 of SEQ ID NO: 3988
cugaguaacucuuuggguu

SEQ ID NO: 310561 - RNA, 19 nt, Artificial Sequence
  Description of Artificial Sequence: Synthetic oligonucleotide
  Antisense strand to SEQ ID NO: 310560
aacccaaagaguuacucag

SEQ ID NO: 310562 - RNA, 19 nt, Artificial Sequence
  Description of Artificial Sequence: Synthetic oligonucleotide
  Sense strand starting at position 1410 of SEQ ID NO: 3988
ugaguaacucuuuggguua

SEQ ID NO: 310563 - RNA, 19 nt, Artificial Sequence
  Description of Artificial Sequence: Synthetic oligonucleotide
  Antisense strand to SEQ ID NO: 310562
uaacccaaagaguuacuca

SEQ ID NO: 310564 - RNA, 19 nt, Artificial Sequence
  Description of Artificial Sequence: Synthetic oligonucleotide
  Sense strand starting at position 1462 of SEQ ID NO: 3988
uaacgauuccaguagaauc

SEQ ID NO: 310565 - RNA, 19 nt, Artificial Sequence
  Description of Artificial Sequence: Synthetic oligonucleotide
  Antisense strand to SEQ ID NO: 310564
gauucuacuggaaucguua

SEQ ID NO: 310566 - RNA, 19 nt, Artificial Sequence
  Description of Artificial Sequence: Synthetic oligonucleotide
  Sense strand starting at position 1723 of SEQ ID NO: 3988
gucagcugugaccgaaacu

SEQ ID NO: 310567 - RNA, 19 nt, Artificial Sequence
  Description of Artificial Sequence: Synthetic oligonucleotide
  Antisense strand to SEQ ID NO: 310566
aguuucggucacagcugac

SEQ ID NO: 310568 - RNA, 19 nt, Artificial Sequence
  Description of Artificial Sequence: Synthetic oligonucleotide
  Sense strand starting at position 2516 of SEQ ID NO: 3988
guccuacacgcagacaaau

SEQ ID NO: 310569 - RNA, 19 nt, Artificial Sequence
  Description of Artificial Sequence: Synthetic oligonucleotide
  Antisense strand to SEQ ID NO: 310568
auuugucugcguguaggac

SEQ ID NO: 310570 - RNA, 19 nt, Artificial Sequence
  Description of Artificial Sequence: Synthetic oligonucleotide
  Sense strand starting at position 2767 of SEQ ID NO: 3988
ucagcuguucccuaguaaa

SEQ ID NO: 310571 - RNA, 19 nt, Artificial Sequence
  Description of Artificial Sequence: Synthetic oligonucleotide
  Antisense strand to SEQ ID NO: 310570
uuuacuagggaacagcuga

SEQ ID NO: 310572 - RNA, 19 nt, Artificial Sequence
  Description of Artificial Sequence: Synthetic oligonucleotide
  Sense strand starting at position 2824 of SEQ ID NO: 3988
cccaguucucucuauugag

SEQ ID NO: 310573 - RNA, 19 nt, Artificial Sequence
  Description of Artificial Sequence: Synthetic oligonucleotide
  Antisense strand to SEQ ID NO: 310572
cucaauagagagaacuggg

SEQ ID NO: 310574 - RNA, 19 nt, Artificial Sequence
  Description of Artificial Sequence: Synthetic oligonucleotide
  Sense strand starting at position 2909 of SEQ ID NO: 3988
guaaucaguuauuccuguu

SEQ ID NO: 310575 - RNA, 19 nt, Artificial Sequence
  Description of Artificial Sequence: Synthetic oligonucleotide
  Antisense strand to SEQ ID NO: 310574
aacaggaauaacugauuac

SEQ ID NO: 310576 - RNA, 19 nt, Artificial Sequence
  Description of Artificial Sequence: Synthetic oligonucleotide
  Sense strand starting at position 2922 of SEQ ID NO: 3988
ccuguuacuugacugagau

SEQ ID NO: 310577 - RNA, 19 nt, Artificial Sequence
  Description of Artificial Sequence: Synthetic oligonucleotide
  Antisense strand to SEQ ID NO: 310576
aucucagucaaguaacagg

SEQ ID NO: 310578 - RNA, 19 nt, Artificial Sequence
  Description of Artificial Sequence: Synthetic oligonucleotide
  Sense strand starting at position 2923 of SEQ ID NO: 3988
cuguuacuugacugagaua

SEQ ID NO: 310579 - RNA, 19 nt, Artificial Sequence
  Description of Artificial Sequence: Synthetic oligonucleotide
  Antisense strand to SEQ ID NO: 310578
uaucucagucaaguaacag

SEQ ID NO: 310580 - RNA, 19 nt, Artificial Sequence
  Description of Artificial Sequence: Synthetic oligonucleotide
  Sense strand starting at position 2932 of SEQ ID NO: 3988
gacugagauacuuggagug

SEQ ID NO: 310581 - RNA, 19 nt, Artificial Sequence
  Description of Artificial Sequence: Synthetic oligonucleotide
  Antisense strand to SEQ ID NO: 310580
cacuccaaguaucucaguc

SEQ ID NO: 310582 - RNA, 19 nt, Artificial Sequence
  Description of Artificial Sequence: Synthetic oligonucleotide
  Sense strand starting at position 2937 of SEQ ID NO: 3988
agauacuuggaguguguau

SEQ ID NO: 310583 - RNA, 19 nt, Artificial Sequence
  Description of Artificial Sequence: Synthetic oligonucleotide
  Antisense strand to SEQ ID NO: 310582
auacacacuccaaguaucu

SEQ ID NO: 310584 - RNA, 19 nt, Artificial Sequence
  Description of Artificial Sequence: Synthetic oligonucleotide
  Sense strand starting at position 2939 of SEQ ID NO: 3988
auacuuggaguguguauga

SEQ ID NO: 310585 - RNA, 19 nt, Artificial Sequence
  Description of Artificial Sequence: Synthetic oligonucleotide
  Antisense strand to SEQ ID NO: 310584
ucauacacacuccaaguau

SEQ ID NO: 310586 - RNA, 19 nt, Artificial Sequence
  Description of Artificial Sequence: Synthetic oligonucleotide
  Sense strand starting at position 3039 of SEQ ID NO: 3988
aagggaaggucuuaguaua

SEQ ID NO: 310587 - RNA, 19 nt, Artificial Sequence
  Description of Artificial Sequence: Synthetic oligonucleotide
  Antisense strand to SEQ ID NO: 310586
uauacuaagaccuucccuu

SEQ ID NO: 310588 - RNA, 19 nt, Artificial Sequence
  Description of Artificial Sequence: Synthetic oligonucleotide
  Sense strand starting at position 3128 of SEQ ID NO: 3988
gagugcuugugacuuaauu

SEQ ID NO: 310589 - RNA, 19 nt, Artificial Sequence
  Description of Artificial Sequence: Synthetic oligonucleotide
  Antisense strand to SEQ ID NO: 310588
aauuaagucacaagcacuc

SEQ ID NO: 310590 - RNA, 19 nt, Artificial Sequence
  Description of Artificial Sequence: Synthetic oligonucleotide
  Sense strand starting at position 3693 of SEQ ID NO: 3988
gcacgaugaccacaguuaa

SEQ ID NO: 310591 - RNA, 19 nt, Artificial Sequence
  Description of Artificial Sequence: Synthetic oligonucleotide
  Antisense strand to SEQ ID NO: 310590
uuaacuguggucaucgugc

SEQ ID NO: 310592 - RNA, 19 nt, Artificial Sequence
  Description of Artificial Sequence: Synthetic oligonucleotide
  Sense strand starting at position 189 of SEQ ID NO: 3991
auacacucaggcugaauau

SEQ ID NO: 310593 - RNA, 19 nt, Artificial Sequence
  Description of Artificial Sequence: Synthetic oligonucleotide
  Antisense strand to SEQ ID NO: 310592
auauucagccugaguguau

SEQ ID NO: 310594 - RNA, 19 nt, Artificial Sequence
  Description of Artificial Sequence: Synthetic oligonucleotide
  Sense strand starting at position 224 of SEQ ID NO: 3991
ucuuuacaaguguaaauca

SEQ ID NO: 310595 - RNA, 19 nt, Artificial Sequence
  Description of Artificial Sequence: Synthetic oligonucleotide
  Antisense strand to SEQ ID NO: 310594
ugauuuacacuuguaaaga

SEQ ID NO: 310596 - RNA, 19 nt, Artificial Sequence
  Description of Artificial Sequence: Synthetic oligonucleotide
  Sense strand starting at position 232 of SEQ ID NO: 3991
aguguaaaucaucacuuau

SEQ ID NO: 310597 - RNA, 19 nt, Artificial Sequence
  Description of Artificial Sequence: Synthetic oligonucleotide
  Antisense strand to SEQ ID NO: 310596
auaagugaugauuuacacu

SEQ ID NO: 310598 - RNA, 19 nt, Artificial Sequence
  Description of Artificial Sequence: Synthetic oligonucleotide
  Sense strand starting at position 257 of SEQ ID NO: 3991
gaaagagugcaguacuuaa

SEQ ID NO: 310599 - RNA, 19 nt, Artificial Sequence
  Description of Artificial Sequence: Synthetic oligonucleotide
  Antisense strand to SEQ ID NO: 310598
uuaaguacugcacucuuuc

SEQ ID NO: 310600 - RNA, 19 nt, Artificial Sequence
  Description of Artificial Sequence: Synthetic oligonucleotide
  Sense strand starting at position 268 of SEQ ID NO: 3991
guacuuaaucuccauagug

SEQ ID NO: 310601 - RNA, 19 nt, Artificial Sequence
  Description of Artificial Sequence: Synthetic oligonucleotide
  Antisense strand to SEQ ID NO: 310600
cacuauggagauuaaguac

SEQ ID NO: 310602 - RNA, 19 nt, Artificial Sequence
  Description of Artificial Sequence: Synthetic oligonucleotide
  Sense strand starting at position 287 of SEQ ID NO: 3991
augcuaugacccugaugau

SEQ ID NO: 310603 - RNA, 19 nt, Artificial Sequence
  Description of Artificial Sequence: Synthetic oligonucleotide
  Antisense strand to SEQ ID NO: 310602
aucaucagggucauagcau

SEQ ID NO: 310604 - RNA, 19 nt, Artificial Sequence
  Description of Artificial Sequence: Synthetic oligonucleotide
  Sense strand starting at position 288 of SEQ ID NO: 3991
ugcuaugacccugaugauc

SEQ ID NO: 310605 - RNA, 19 nt, Artificial Sequence
  Description of Artificial Sequence: Synthetic oligonucleotide
  Antisense strand to SEQ ID NO: 310604
gaucaucagggucauagca

SEQ ID NO: 310606 - RNA, 19 nt, Artificial Sequence
  Description of Artificial Sequence: Synthetic oligonucleotide
  Sense strand starting at position 348 of SEQ ID NO: 3991
gugguuuauauuuguaacu

SEQ ID NO: 310607 - RNA, 19 nt, Artificial Sequence
  Description of Artificial Sequence: Synthetic oligonucleotide
  Antisense strand to SEQ ID NO: 310606
aguuacaaauauaaaccac

SEQ ID NO: 310608 - RNA, 19 nt, Artificial Sequence
  Description of Artificial Sequence: Synthetic oligonucleotide
  Sense strand starting at position 637 of SEQ ID NO: 3991
acaguugccuuauuuggua

SEQ ID NO: 310609 - RNA, 19 nt, Artificial Sequence
  Description of Artificial Sequence: Synthetic oligonucleotide
  Antisense strand to SEQ ID NO: 310608
uaccaaauaaggcaacugu

SEQ ID NO: 310610 - RNA, 19 nt, Artificial Sequence
  Description of Artificial Sequence: Synthetic oligonucleotide
  Sense strand starting at position 662 of SEQ ID NO: 3991
auuggaacgucccuaauua

SEQ ID NO: 310611 - RNA, 19 nt, Artificial Sequence
  Description of Artificial Sequence: Synthetic oligonucleotide
  Antisense strand to SEQ ID NO: 310610
uaauuagggacguuccaau

SEQ ID NO: 310612 - RNA, 19 nt, Artificial Sequence
  Description of Artificial Sequence: Synthetic oligonucleotide
  Sense strand starting at position 663 of SEQ ID NO: 3991
uuggaacgucccuaauuau

SEQ ID NO: 310613 - RNA, 19 nt, Artificial Sequence
  Description of Artificial Sequence: Synthetic oligonucleotide
  Antisense strand to SEQ ID NO: 310612
auaauuagggacguuccaa

SEQ ID NO: 310614 - RNA, 19 nt, Artificial Sequence
  Description of Artificial Sequence: Synthetic oligonucleotide
  Sense strand starting at position 808 of SEQ ID NO: 3991
acccuuaggucacuaauga

SEQ ID NO: 310615 - RNA, 19 nt, Artificial Sequence
  Description of Artificial Sequence: Synthetic oligonucleotide
  Antisense strand to SEQ ID NO: 310614
ucauuagugaccuaagggu

SEQ ID NO: 310616 - RNA, 19 nt, Artificial Sequence
  Description of Artificial Sequence: Synthetic oligonucleotide
  Sense strand starting at position 1107 of SEQ ID NO: 3991
aaugauggagcucaaguuu

SEQ ID NO: 310617 - RNA, 19 nt, Artificial Sequence
  Description of Artificial Sequence: Synthetic oligonucleotide
  Antisense strand to SEQ ID NO: 310616
aaacuugagcuccaucauu

SEQ ID NO: 310618 - RNA, 19 nt, Artificial Sequence
  Description of Artificial Sequence: Synthetic oligonucleotide
  Sense strand starting at position 1205 of SEQ ID NO: 3991
acugcaagauucuuagaga

SEQ ID NO: 310619 - RNA, 19 nt, Artificial Sequence
  Description of Artificial Sequence: Synthetic oligonucleotide
  Antisense strand to SEQ ID NO: 310618
ucucuaagaaucuugcagu

SEQ ID NO: 310620 - RNA, 19 nt, Artificial Sequence
  Description of Artificial Sequence: Synthetic oligonucleotide
  Sense strand starting at position 1528 of SEQ ID NO: 3991
uuuggauucuuccuuagau

SEQ ID NO: 310621 - RNA, 19 nt, Artificial Sequence
  Description of Artificial Sequence: Synthetic oligonucleotide
  Antisense strand to SEQ ID NO: 310620
aucuaaggaagaauccaaa

SEQ ID NO: 310622 - RNA, 19 nt, Artificial Sequence
  Description of Artificial Sequence: Synthetic oligonucleotide
  Sense strand starting at position 1529 of SEQ ID NO: 3991
uuggauucuuccuuagauu

SEQ ID NO: 310623 - RNA, 19 nt, Artificial Sequence
  Description of Artificial Sequence: Synthetic oligonucleotide
  Antisense strand to SEQ ID NO: 310622
aaucuaaggaagaauccaa

SEQ ID NO: 310624 - RNA, 19 nt, Artificial Sequence
  Description of Artificial Sequence: Synthetic oligonucleotide
  Sense strand starting at position 1665 of SEQ ID NO: 3991
gccuguauugaugaaauga

SEQ ID NO: 310625 - RNA, 19 nt, Artificial Sequence
  Description of Artificial Sequence: Synthetic oligonucleotide
  Antisense strand to SEQ ID NO: 310624
ucauuucaucaauacaggc

SEQ ID NO: 310626 - RNA, 19 nt, Artificial Sequence
  Description of Artificial Sequence: Synthetic oligonucleotide
  Sense strand starting at position 1675 of SEQ ID NO: 3991
augaaaugaucuucuguac

SEQ ID NO: 310627 - RNA, 19 nt, Artificial Sequence
  Description of Artificial Sequence: Synthetic oligonucleotide
  Antisense strand to SEQ ID NO: 310626
guacagaagaucauuucau

SEQ ID NO: 310628 - RNA, 19 nt, Artificial Sequence
  Description of Artificial Sequence: Synthetic oligonucleotide
  Sense strand starting at position 1696 of SEQ ID NO: 3991
ggauuaucauguucugacu

SEQ ID NO: 310629 - RNA, 19 nt, Artificial Sequence
  Description of Artificial Sequence: Synthetic oligonucleotide
  Antisense strand to SEQ ID NO: 310628
agucagaacaugauaaucc

SEQ ID NO: 310630 - RNA, 19 nt, Artificial Sequence
  Description of Artificial Sequence: Synthetic oligonucleotide
  Sense strand starting at position 1776 of SEQ ID NO: 3991
cgagacauucgccaggaga

SEQ ID NO: 310631 - RNA, 19 nt, Artificial Sequence
  Description of Artificial Sequence: Synthetic oligonucleotide
  Antisense strand to SEQ ID NO: 310630
ucuccuggcgaaugucucg

SEQ ID NO: 310632 - RNA, 19 nt, Artificial Sequence
  Description of Artificial Sequence: Synthetic oligonucleotide
  Sense strand starting at position 1778 of SEQ ID NO: 3991
agacauucgccaggagaug

SEQ ID NO: 310633 - RNA, 19 nt, Artificial Sequence
  Description of Artificial Sequence: Synthetic oligonucleotide
  Antisense strand to SEQ ID NO: 310632
caucuccuggcgaaugucu

SEQ ID NO: 310634 - RNA, 19 nt, Artificial Sequence
  Description of Artificial Sequence: Synthetic oligonucleotide
  Sense strand starting at position 2011 of SEQ ID NO: 3991
gggaguuuaggauguuuga

SEQ ID NO: 310635 - RNA, 19 nt, Artificial Sequence
  Description of Artificial Sequence: Synthetic oligonucleotide
  Antisense strand to SEQ ID NO: 310634
ucaaacauccuaaacuccc

SEQ ID NO: 310636 - RNA, 19 nt, Artificial Sequence
  Description of Artificial Sequence: Synthetic oligonucleotide
  Sense strand starting at position 2133 of SEQ ID NO: 3991
gugaguuggaguugagaga

SEQ ID NO: 310637 - RNA, 19 nt, Artificial Sequence
  Description of Artificial Sequence: Synthetic oligonucleotide
  Antisense strand to SEQ ID NO: 310636
ucucucaacuccaacucac

SEQ ID NO: 310638 - RNA, 19 nt, Artificial Sequence
  Description of Artificial Sequence: Synthetic oligonucleotide
  Sense strand starting at position 2162 of SEQ ID NO: 3991
uugugacagucauuggaga

SEQ ID NO: 310639 - RNA, 19 nt, Artificial Sequence
  Description of Artificial Sequence: Synthetic oligonucleotide
  Antisense strand to SEQ ID NO: 310638
ucuccaaugacugucacaa

SEQ ID NO: 310640 - RNA, 19 nt, Artificial Sequence
  Description of Artificial Sequence: Synthetic oligonucleotide
  Sense strand starting at position 2163 of SEQ ID NO: 3991
ugugacagucauuggagau

SEQ ID NO: 310641 - RNA, 19 nt, Artificial Sequence
  Description of Artificial Sequence: Synthetic oligonucleotide
  Antisense strand to SEQ ID NO: 310640
aucuccaaugacugucaca

SEQ ID NO: 310642 - RNA, 19 nt, Artificial Sequence
  Description of Artificial Sequence: Synthetic oligonucleotide
  Sense strand starting at position 2164 of SEQ ID NO: 3991
gugacagucauuggagaug

SEQ ID NO: 310643 - RNA, 19 nt, Artificial Sequence
  Description of Artificial Sequence: Synthetic oligonucleotide
  Antisense strand to SEQ ID NO: 310642
caucuccaaugacugucac

SEQ ID NO: 310644 - RNA, 19 nt, Artificial Sequence
  Description of Artificial Sequence: Synthetic oligonucleotide
  Sense strand starting at position 2209 of SEQ ID NO: 3991
gcaaauguuaagggagaau

SEQ ID NO: 310645 - RNA, 19 nt, Artificial Sequence
  Description of Artificial Sequence: Synthetic oligonucleotide
  Antisense strand to SEQ ID NO: 310644
auucucccuuaacauuugc

SEQ ID NO: 310646 - RNA, 19 nt, Artificial Sequence
  Description of Artificial Sequence: Synthetic oligonucleotide
  Sense strand starting at position 2293 of SEQ ID NO: 3991
guagaauacuaggcuauga

SEQ ID NO: 310647 - RNA, 19 nt, Artificial Sequence
  Description of Artificial Sequence: Synthetic oligonucleotide
  Antisense strand to SEQ ID NO: 310646
ucauagccuaguauucuac

SEQ ID NO: 310648 - RNA, 19 nt, Artificial Sequence
  Description of Artificial Sequence: Synthetic oligonucleotide
  Sense strand starting at position 2351 of SEQ ID NO: 3991
ugacuaucaccuuggguga

SEQ ID NO: 310649 - RNA, 19 nt, Artificial Sequence
  Description of Artificial Sequence: Synthetic oligonucleotide
  Antisense strand to SEQ ID NO: 310648
ucacccaaggugauaguca

SEQ ID NO: 310650 - RNA, 19 nt, Artificial Sequence
  Description of Artificial Sequence: Synthetic oligonucleotide
  Sense strand starting at position 2352 of SEQ ID NO: 3991
gacuaucaccuugggugaa

SEQ ID NO: 310651 - RNA, 19 nt, Artificial Sequence
  Description of Artificial Sequence: Synthetic oligonucleotide
  Antisense strand to SEQ ID NO: 310650
uucacccaaggugauaguc

SEQ ID NO: 310652 - RNA, 19 nt, Artificial Sequence
  Description of Artificial Sequence: Synthetic oligonucleotide
  Sense strand starting at position 2354 of SEQ ID NO: 3991
cuaucaccuugggugaauu

SEQ ID NO: 310653 - RNA, 19 nt, Artificial Sequence
  Description of Artificial Sequence: Synthetic oligonucleotide
  Antisense strand to SEQ ID NO: 310652
aauucacccaaggugauag

SEQ ID NO: 310654 - RNA, 19 nt, Artificial Sequence
  Description of Artificial Sequence: Synthetic oligonucleotide
  Sense strand starting at position 2355 of SEQ ID NO: 3991
uaucaccuugggugaauua

SEQ ID NO: 310655 - RNA, 19 nt, Artificial Sequence
  Description of Artificial Sequence: Synthetic oligonucleotide
  Antisense strand to SEQ ID NO: 310654
uaauucacccaaggugaua

SEQ ID NO: 310656 - RNA, 19 nt, Artificial Sequence
  Description of Artificial Sequence: Synthetic oligonucleotide
  Sense strand starting at position 2364 of SEQ ID NO: 3991
gggugaauuacuuaguucu

SEQ ID NO: 310657 - RNA, 19 nt, Artificial Sequence
  Description of Artificial Sequence: Synthetic oligonucleotide
  Antisense strand to SEQ ID NO: 310656
agaacuaaguaauucaccc

SEQ ID NO: 310658 - RNA, 19 nt, Artificial Sequence
  Description of Artificial Sequence: Synthetic oligonucleotide
  Sense strand starting at position 2366 of SEQ ID NO: 3991
gugaauuacuuaguucuaa

SEQ ID NO: 310659 - RNA, 19 nt, Artificial Sequence
  Description of Artificial Sequence: Synthetic oligonucleotide
  Antisense strand to SEQ ID NO: 310658
uuagaacuaaguaauucac

SEQ ID NO: 310660 - RNA, 19 nt, Artificial Sequence
  Description of Artificial Sequence: Synthetic oligonucleotide
  Sense strand starting at position 2855 of SEQ ID NO: 3991
gcaguuuauagacauugag

SEQ ID NO: 310661 - RNA, 19 nt, Artificial Sequence
  Description of Artificial Sequence: Synthetic oligonucleotide
  Antisense strand to SEQ ID NO: 310660
cucaaugucuauaaacugc

SEQ ID NO: 310662 - RNA, 19 nt, Artificial Sequence
  Description of Artificial Sequence: Synthetic oligonucleotide
  Sense strand starting at position 2858 of SEQ ID NO: 3991
guuuauagacauugagguu

SEQ ID NO: 310663 - RNA, 19 nt, Artificial Sequence
  Description of Artificial Sequence: Synthetic oligonucleotide
  Antisense strand to SEQ ID NO: 310662
aaccucaaugucuauaaac

SEQ ID NO: 310664 - RNA, 19 nt, Artificial Sequence
  Description of Artificial Sequence: Synthetic oligonucleotide
  Sense strand starting at position 3021 of SEQ ID NO: 3991
aaguaagagugcuuaacua

SEQ ID NO: 310665 - RNA, 19 nt, Artificial Sequence
  Description of Artificial Sequence: Synthetic oligonucleotide
  Antisense strand to SEQ ID NO: 310664
uaguuaagcacucuuacuu

SEQ ID NO: 310666 - RNA, 19 nt, Artificial Sequence
  Description of Artificial Sequence: Synthetic oligonucleotide
  Sense strand starting at position 3371 of SEQ ID NO: 3991
uuaucuuauccagggcaca

SEQ ID NO: 310667 - RNA, 19 nt, Artificial Sequence
  Description of Artificial Sequence: Synthetic oligonucleotide
  Antisense strand to SEQ ID NO: 310666
ugugcccuggauaagauaa

SEQ ID NO: 310668 - RNA, 19 nt, Artificial Sequence
  Description of Artificial Sequence: Synthetic oligonucleotide
  Sense strand starting at position 3635 of SEQ ID NO: 3991
augucucaagaauauuagu

SEQ ID NO: 310669 - RNA, 19 nt, Artificial Sequence
  Description of Artificial Sequence: Synthetic oligonucleotide
  Antisense strand to SEQ ID NO: 310668
acuaauauucuugagacau

SEQ ID NO: 310670 - RNA, 19 nt, Artificial Sequence
  Description of Artificial Sequence: Synthetic oligonucleotide
  Sense strand starting at position 3778 of SEQ ID NO: 3991
agaaucagauccugaauuu

SEQ ID NO: 310671 - RNA, 19 nt, Artificial Sequence
  Description of Artificial Sequence: Synthetic oligonucleotide
  Antisense strand to SEQ ID NO: 310670
aaauucaggaucugauucu

SEQ ID NO: 310672 - RNA, 19 nt, Artificial Sequence
  Description of Artificial Sequence: Synthetic oligonucleotide
  Sense strand starting at position 82 of SEQ ID NO: 3989
gguucuauagcacauauua

SEQ ID NO: 310673 - RNA, 19 nt, Artificial Sequence
  Description of Artificial Sequence: Synthetic oligonucleotide
  Antisense strand to SEQ ID NO: 310672
uaauaugugcuauagaacc

SEQ ID NO: 310674 - RNA, 19 nt, Artificial Sequence
  Description of Artificial Sequence: Synthetic oligonucleotide
  Sense strand starting at position 182 of SEQ ID NO: 3989
auugcugucacugagaaug

SEQ ID NO: 310675 - RNA, 19 nt, Artificial Sequence
  Description of Artificial Sequence: Synthetic oligonucleotide
  Antisense strand to SEQ ID NO: 310674
cauucucagugacagcaau

SEQ ID NO: 310676 - RNA, 19 nt, Artificial Sequence
  Description of Artificial Sequence: Synthetic oligonucleotide
  Sense strand starting at position 214 of SEQ ID NO: 3989
gugagaaggucuucaguca

SEQ ID NO: 310677 - RNA, 19 nt, Artificial Sequence
  Description of Artificial Sequence: Synthetic oligonucleotide
  Antisense strand to SEQ ID NO: 310676
ugacugaagaccuucucac

SEQ ID NO: 310678 - RNA, 19 nt, Artificial Sequence
  Description of Artificial Sequence: Synthetic oligonucleotide
  Sense strand starting at position 298 of SEQ ID NO: 3989
gauacuagguacucaguaa

SEQ ID NO: 310679 - RNA, 19 nt, Artificial Sequence
  Description of Artificial Sequence: Synthetic oligonucleotide
  Antisense strand to SEQ ID NO: 310678
uuacugaguaccuaguauc

SEQ ID NO: 310680 - RNA, 19 nt, Artificial Sequence
  Description of Artificial Sequence: Synthetic oligonucleotide
  Sense strand starting at position 302 of SEQ ID NO: 3989
cuagguacucaguaaacau

SEQ ID NO: 310681 - RNA, 19 nt, Artificial Sequence
  Description of Artificial Sequence: Synthetic oligonucleotide
  Antisense strand to SEQ ID NO: 310680
auguuuacugaguaccuag

SEQ ID NO: 310682 - RNA, 19 nt, Artificial Sequence
  Description of Artificial Sequence: Synthetic oligonucleotide
  Sense strand starting at position 349 of SEQ ID NO: 3989
auauguaacuuagcagaau

SEQ ID NO: 310683 - RNA, 19 nt, Artificial Sequence
  Description of Artificial Sequence: Synthetic oligonucleotide
  Antisense strand to SEQ ID NO: 310682
auucugcuaaguuacauau

SEQ ID NO: 310684 - RNA, 19 nt, Artificial Sequence
  Description of Artificial Sequence: Synthetic oligonucleotide
  Sense strand starting at position 352 of SEQ ID NO: 3989
uguaacuuagcagaauacu

SEQ ID NO: 310685 - RNA, 19 nt, Artificial Sequence
  Description of Artificial Sequence: Synthetic oligonucleotide
  Antisense strand to SEQ ID NO: 310684
aguauucugcuaaguuaca

SEQ ID NO: 310686 - RNA, 19 nt, Artificial Sequence
  Description of Artificial Sequence: Synthetic oligonucleotide
  Sense strand starting at position 361 of SEQ ID NO: 3989
gcagaauacuaggccauca

SEQ ID NO: 310687 - RNA, 19 nt, Artificial Sequence
  Description of Artificial Sequence: Synthetic oligonucleotide
  Antisense strand to SEQ ID NO: 310686
ugauggccuaguauucugc

SEQ ID NO: 310688 - RNA, 19 nt, Artificial Sequence
  Description of Artificial Sequence: Synthetic oligonucleotide
  Sense strand starting at position 450 of SEQ ID NO: 3989
acaguccugccuuagagau

SEQ ID NO: 310689 - RNA, 19 nt, Artificial Sequence
  Description of Artificial Sequence: Synthetic oligonucleotide
  Antisense strand to SEQ ID NO: 310688
aucucuaaggcaggacugu

SEQ ID NO: 310690 - RNA, 19 nt, Artificial Sequence
  Description of Artificial Sequence: Synthetic oligonucleotide
  Sense strand starting at position 457 of SEQ ID NO: 3989
ugccuuagagauuacaacu

SEQ ID NO: 310691 - RNA, 19 nt, Artificial Sequence
  Description of Artificial Sequence: Synthetic oligonucleotide
  Antisense strand to SEQ ID NO: 310690
aguuguaaucucuaaggca

SEQ ID NO: 310692 - RNA, 19 nt, Artificial Sequence
  Description of Artificial Sequence: Synthetic oligonucleotide
  Sense strand starting at position 691 of SEQ ID NO: 3989
aguuucugacaugaaaguu

SEQ ID NO: 310693 - RNA, 19 nt, Artificial Sequence
  Description of Artificial Sequence: Synthetic oligonucleotide
  Antisense strand to SEQ ID NO: 310692
aacuuucaugucagaaacu

SEQ ID NO: 310694 - RNA, 19 nt, Artificial Sequence
  Description of Artificial Sequence: Synthetic oligonucleotide
  Sense strand starting at position 925 of SEQ ID NO: 3989
gugaacuaugccuagagca

SEQ ID NO: 310695 - RNA, 19 nt, Artificial Sequence
  Description of Artificial Sequence: Synthetic oligonucleotide
  Antisense strand to SEQ ID NO: 310694
ugcucuaggcauaguucac

SEQ ID NO: 310696 - RNA, 19 nt, Artificial Sequence
  Description of Artificial Sequence: Synthetic oligonucleotide
  Sense strand starting at position 937 of SEQ ID NO: 3989
uagagcauugauuguauca

SEQ ID NO: 310697 - RNA, 19 nt, Artificial Sequence
  Description of Artificial Sequence: Synthetic oligonucleotide
  Antisense strand to SEQ ID NO: 310696
ugauacaaucaaugcucua

SEQ ID NO: 310698 - RNA, 19 nt, Artificial Sequence
  Description of Artificial Sequence: Synthetic oligonucleotide
  Sense strand starting at position 977 of SEQ ID NO: 3989
ggagguuucccuugaccag

SEQ ID NO: 310699 - RNA, 19 nt, Artificial Sequence
  Description of Artificial Sequence: Synthetic oligonucleotide
  Antisense strand to SEQ ID NO: 310698
cuggucaagggaaaccucc

SEQ ID NO: 310700 - RNA, 19 nt, Artificial Sequence
  Description of Artificial Sequence: Synthetic oligonucleotide
  Sense strand starting at position 978 of SEQ ID NO: 3989
gagguuucccuugaccagu

SEQ ID NO: 310701 - RNA, 19 nt, Artificial Sequence
  Description of Artificial Sequence: Synthetic oligonucleotide
  Antisense strand to SEQ ID NO: 310700
acuggucaagggaaaccuc

SEQ ID NO: 310702 - RNA, 19 nt, Artificial Sequence
  Description of Artificial Sequence: Synthetic oligonucleotide
  Sense strand starting at position 984 of SEQ ID NO: 3989
ucccuugaccaguacauua

SEQ ID NO: 310703 - RNA, 19 nt, Artificial Sequence
  Description of Artificial Sequence: Synthetic oligonucleotide
  Antisense strand to SEQ ID NO: 310702
uaauguacuggucaaggga

SEQ ID NO: 310704 - RNA, 19 nt, Artificial Sequence
  Description of Artificial Sequence: Synthetic oligonucleotide
  Sense strand starting at position 1047 of SEQ ID NO: 3989
gucuccaaaguguaaacua

SEQ ID NO: 310705 - RNA, 19 nt, Artificial Sequence
  Description of Artificial Sequence: Synthetic oligonucleotide
  Antisense strand to SEQ ID NO: 310704
uaguuuacacuuuggagac

SEQ ID NO: 310706 - RNA, 19 nt, Artificial Sequence
  Description of Artificial Sequence: Synthetic oligonucleotide
  Sense strand starting at position 1182 of SEQ ID NO: 3989
gcgagucccgaguucaucu

SEQ ID NO: 310707 - RNA, 19 nt, Artificial Sequence
  Description of Artificial Sequence: Synthetic oligonucleotide
  Antisense strand to SEQ ID NO: 310706
agaugaacucgggacucgc

SEQ ID NO: 310708 - RNA, 19 nt, Artificial Sequence
  Description of Artificial Sequence: Synthetic oligonucleotide
  Sense strand starting at position 1282 of SEQ ID NO: 3989
augaguccucaacacgagu

SEQ ID NO: 310709 - RNA, 19 nt, Artificial Sequence
  Description of Artificial Sequence: Synthetic oligonucleotide
  Antisense strand to SEQ ID NO: 310708
acucguguugaggacucau

SEQ ID NO: 310710 - RNA, 19 nt, Artificial Sequence
  Description of Artificial Sequence: Synthetic oligonucleotide
  Sense strand starting at position 2111 of SEQ ID NO: 3989
accaguuugguacgaaaua

SEQ ID NO: 310711 - RNA, 19 nt, Artificial Sequence
  Description of Artificial Sequence: Synthetic oligonucleotide
  Antisense strand to SEQ ID NO: 310710
uauuucguaccaaacuggu

SEQ ID NO: 310712 - RNA, 19 nt, Artificial Sequence
  Description of Artificial Sequence: Synthetic oligonucleotide
  Sense strand starting at position 2139 of SEQ ID NO: 3989
ugcauuuguguaggagugu

SEQ ID NO: 310713 - RNA, 19 nt, Artificial Sequence
  Description of Artificial Sequence: Synthetic oligonucleotide
  Antisense strand to SEQ ID NO: 310712
acacuccuacacaaaugca

SEQ ID NO: 310714 - RNA, 19 nt, Artificial Sequence
  Description of Artificial Sequence: Synthetic oligonucleotide
  Sense strand starting at position 2157 of SEQ ID NO: 3989
uuagaucuccuguaccaca

SEQ ID NO: 310715 - RNA, 19 nt, Artificial Sequence
  Description of Artificial Sequence: Synthetic oligonucleotide
  Antisense strand to SEQ ID NO: 310714
ugugguacaggagaucuaa

SEQ ID NO: 310716 - RNA, 19 nt, Artificial Sequence
  Description of Artificial Sequence: Synthetic oligonucleotide
  Sense strand starting at position 2238 of SEQ ID NO: 3989
auugguacuagcgaagacu

SEQ ID NO: 310717 - RNA, 19 nt, Artificial Sequence
  Description of Artificial Sequence: Synthetic oligonucleotide
  Antisense strand to SEQ ID NO: 310716
agucuucgcuaguaccaau

SEQ ID NO: 310718 - RNA, 19 nt, Artificial Sequence
  Description of Artificial Sequence: Synthetic oligonucleotide
  Sense strand starting at position 2331 of SEQ ID NO: 3989
ccauuaaucguaggauaau

SEQ ID NO: 310719 - RNA, 19 nt, Artificial Sequence
  Description of Artificial Sequence: Synthetic oligonucleotide
  Antisense strand to SEQ ID NO: 310718
auuauccuacgauuaaugg

SEQ ID NO: 310720 - RNA, 19 nt, Artificial Sequence
  Description of Artificial Sequence: Synthetic oligonucleotide
  Sense strand starting at position 2342 of SEQ ID NO: 3989
aggauaauuuaacaccgua

SEQ ID NO: 310721 - RNA, 19 nt, Artificial Sequence
  Description of Artificial Sequence: Synthetic oligonucleotide
  Antisense strand to SEQ ID NO: 310720
uacgguguuaaauuauccu

SEQ ID NO: 310722 - RNA, 19 nt, Artificial Sequence
  Description of Artificial Sequence: Synthetic oligonucleotide
  Sense strand starting at position 2395 of SEQ ID NO: 3989
ggaaauaacccuuguuguu

SEQ ID NO: 310723 - RNA, 19 nt, Artificial Sequence
  Description of Artificial Sequence: Synthetic oligonucleotide
  Antisense strand to SEQ ID NO: 310722
aacaacaaggguuauuucc

SEQ ID NO: 310724 - RNA, 19 nt, Artificial Sequence
  Description of Artificial Sequence: Synthetic oligonucleotide
  Sense strand starting at position 2420 of SEQ ID NO: 3989
uaagguuauugguuauaag

SEQ ID NO: 310725 - RNA, 19 nt, Artificial Sequence
  Description of Artificial Sequence: Synthetic oligonucleotide
  Antisense strand to SEQ ID NO: 310724
cuuauaaccaauaaccuua

SEQ ID NO: 310726 - RNA, 19 nt, Artificial Sequence
  Description of Artificial Sequence: Synthetic oligonucleotide
  Sense strand starting at position 2774 of SEQ ID NO: 3989
cucagucucgaaggaaaga

SEQ ID NO: 310727 - RNA, 19 nt, Artificial Sequence
  Description of Artificial Sequence: Synthetic oligonucleotide
  Antisense strand to SEQ ID NO: 310726
ucuuuccuucgagacugag

SEQ ID NO: 310728 - RNA, 19 nt, Artificial Sequence
  Description of Artificial Sequence: Synthetic oligonucleotide
  Sense strand starting at position 2864 of SEQ ID NO: 3989
gucagcauucuacauagua

SEQ ID NO: 310729 - RNA, 19 nt, Artificial Sequence
  Description of Artificial Sequence: Synthetic oligonucleotide
  Antisense strand to SEQ ID NO: 310728
uacuauguagaaugcugac

SEQ ID NO: 310730 - RNA, 19 nt, Artificial Sequence
  Description of Artificial Sequence: Synthetic oligonucleotide
  Sense strand starting at position 2886 of SEQ ID NO: 3989
accaauaauugguugggau

SEQ ID NO: 310731 - RNA, 19 nt, Artificial Sequence
  Description of Artificial Sequence: Synthetic oligonucleotide
  Antisense strand to SEQ ID NO: 310730
aucccaaccaauuauuggu

SEQ ID NO: 310732 - RNA, 19 nt, Artificial Sequence
  Description of Artificial Sequence: Synthetic oligonucleotide
  Sense strand starting at position 2887 of SEQ ID NO: 3989
ccaauaauugguugggaua

SEQ ID NO: 310733 - RNA, 19 nt, Artificial Sequence
  Description of Artificial Sequence: Synthetic oligonucleotide
  Antisense strand to SEQ ID NO: 310732
uaucccaaccaauuauugg

SEQ ID NO: 310734 - RNA, 19 nt, Artificial Sequence
  Description of Artificial Sequence: Synthetic oligonucleotide
  Sense strand starting at position 2888 of SEQ ID NO: 3989
caauaauugguugggauac

SEQ ID NO: 310735 - RNA, 19 nt, Artificial Sequence
  Description of Artificial Sequence: Synthetic oligonucleotide
  Antisense strand to SEQ ID NO: 310734
guaucccaaccaauuauug

SEQ ID NO: 310736 - RNA, 19 nt, Artificial Sequence
  Description of Artificial Sequence: Synthetic oligonucleotide
  Sense strand starting at position 2923 of SEQ ID NO: 3989
auuagagcccuuuaaugac

SEQ ID NO: 310737 - RNA, 19 nt, Artificial Sequence
  Description of Artificial Sequence: Synthetic oligonucleotide
  Antisense strand to SEQ ID NO: 310736
gucauuaaagggcucuaau

SEQ ID NO: 310738 - RNA, 19 nt, Artificial Sequence
  Description of Artificial Sequence: Synthetic oligonucleotide
  Sense strand starting at position 2929 of SEQ ID NO: 3989
gcccuuuaaugacuuugau

SEQ ID NO: 310739 - RNA, 19 nt, Artificial Sequence
  Description of Artificial Sequence: Synthetic oligonucleotide
  Antisense strand to SEQ ID NO: 310738
aucaaagucauuaaagggc

SEQ ID NO: 310740 - RNA, 19 nt, Artificial Sequence
  Description of Artificial Sequence: Synthetic oligonucleotide
  Sense strand starting at position 2932 of SEQ ID NO: 3989
cuuuaaugacuuugauaga

SEQ ID NO: 310741 - RNA, 19 nt, Artificial Sequence
  Description of Artificial Sequence: Synthetic oligonucleotide
  Antisense strand to SEQ ID NO: 310740
ucuaucaaagucauuaaag

SEQ ID NO: 310742 - RNA, 19 nt, Artificial Sequence
  Description of Artificial Sequence: Synthetic oligonucleotide
  Sense strand starting at position 3493 of SEQ ID NO: 3989
ccacaugauccuuaacgcu

SEQ ID NO: 310743 - RNA, 19 nt, Artificial Sequence
  Description of Artificial Sequence: Synthetic oligonucleotide
  Antisense strand to SEQ ID NO: 310742
agcguuaaggaucaugugg

SEQ ID NO: 310744 - RNA, 19 nt, Artificial Sequence
  Description of Artificial Sequence: Synthetic oligonucleotide
  Sense strand starting at position 3575 of SEQ ID NO: 3989
ucgcuaugacuuuaaacag

SEQ ID NO: 310745 - RNA, 19 nt, Artificial Sequence
  Description of Artificial Sequence: Synthetic oligonucleotide
  Antisense strand to SEQ ID NO: 310744
cuguuuaaagucauagcga

SEQ ID NO: 310746 - RNA, 19 nt, Artificial Sequence
  Description of Artificial Sequence: Synthetic oligonucleotide
  Sense strand starting at position 3617 of SEQ ID NO: 3989
gacagucagccuggauaau

SEQ ID NO: 310747 - RNA, 19 nt, Artificial Sequence
  Description of Artificial Sequence: Synthetic oligonucleotide
  Antisense strand to SEQ ID NO: 310746
auuauccaggcugacuguc

SEQ ID NO: 310748 - RNA, 19 nt, Artificial Sequence
  Description of Artificial Sequence: Synthetic oligonucleotide
  Sense strand starting at position 3618 of SEQ ID NO: 3989
acagucagccuggauaauu

SEQ ID NO: 310749 - RNA, 19 nt, Artificial Sequence
  Description of Artificial Sequence: Synthetic oligonucleotide
  Antisense strand to SEQ ID NO: 310748
aauuauccaggcugacugu

SEQ ID NO: 310750 - RNA, 19 nt, Artificial Sequence
  Description of Artificial Sequence: Synthetic oligonucleotide
  Sense strand starting at position 3876 of SEQ ID NO: 3989
ugcuguucucaagaacuuu

SEQ ID NO: 310751 - RNA, 19 nt, Artificial Sequence
  Description of Artificial Sequence: Synthetic oligonucleotide
  Antisense strand to SEQ ID NO: 310750
aaaguucuugagaacagca

SEQ ID NO: 310752 - RNA, 19 nt, Artificial Sequence
  Description of Artificial Sequence: Synthetic oligonucleotide
  Sense strand starting at position 152 of SEQ ID NO: 3990
gguucuauagcacauauua

SEQ ID NO: 310753 - RNA, 19 nt, Artificial Sequence
  Description of Artificial Sequence: Synthetic oligonucleotide
  Antisense strand to SEQ ID NO: 310752
uaauaugugcuauagaacc

SEQ ID NO: 310754 - RNA, 19 nt, Artificial Sequence
  Description of Artificial Sequence: Synthetic oligonucleotide
  Sense strand starting at position 252 of SEQ ID NO: 3990
auugcugucacugagaaug

SEQ ID NO: 310755 - RNA, 19 nt, Artificial Sequence
  Description of Artificial Sequence: Synthetic oligonucleotide
  Antisense strand to SEQ ID NO: 310754
cauucucagugacagcaau

SEQ ID NO: 310756 - RNA, 19 nt, Artificial Sequence
  Description of Artificial Sequence: Synthetic oligonucleotide
  Sense strand starting at position 284 of SEQ ID NO: 3990
gugagaaggucuucaguca

SEQ ID NO: 310757 - RNA, 19 nt, Artificial Sequence
  Description of Artificial Sequence: Synthetic oligonucleotide
  Antisense strand to SEQ ID NO: 310756
ugacugaagaccuucucac

SEQ ID NO: 310758 - RNA, 19 nt, Artificial Sequence
  Description of Artificial Sequence: Synthetic oligonucleotide
  Sense strand starting at position 368 of SEQ ID NO: 3990
gauacuagguacucaguaa

SEQ ID NO: 310759 - RNA, 19 nt, Artificial Sequence
  Description of Artificial Sequence: Synthetic oligonucleotide
  Antisense strand to SEQ ID NO: 310758
uuacugaguaccuaguauc

SEQ ID NO: 310760 - RNA, 19 nt, Artificial Sequence
  Description of Artificial Sequence: Synthetic oligonucleotide
  Sense strand starting at position 372 of SEQ ID NO: 3990
cuagguacucaguaaacau

SEQ ID NO: 310761 - RNA, 19 nt, Artificial Sequence
  Description of Artificial Sequence: Synthetic oligonucleotide
  Antisense strand to SEQ ID NO: 310760
auguuuacugaguaccuag

SEQ ID NO: 310762 - RNA, 19 nt, Artificial Sequence
  Description of Artificial Sequence: Synthetic oligonucleotide
  Sense strand starting at position 419 of SEQ ID NO: 3990
auauguaacuuagcagaau

SEQ ID NO: 310763 - RNA, 19 nt, Artificial Sequence
  Description of Artificial Sequence: Synthetic oligonucleotide
  Antisense strand to SEQ ID NO: 310762
auucugcuaaguuacauau

SEQ ID NO: 310764 - RNA, 19 nt, Artificial Sequence
  Description of Artificial Sequence: Synthetic oligonucleotide
  Sense strand starting at position 422 of SEQ ID NO: 3990
uguaacuuagcagaauacu

SEQ ID NO: 310765 - RNA, 19 nt, Artificial Sequence
  Description of Artificial Sequence: Synthetic oligonucleotide
  Antisense strand to SEQ ID NO: 310764
aguauucugcuaaguuaca

SEQ ID NO: 310766 - RNA, 19 nt, Artificial Sequence
  Description of Artificial Sequence: Synthetic oligonucleotide
  Sense strand starting at position 431 of SEQ ID NO: 3990
gcagaauacuaggccauca

SEQ ID NO: 310767 - RNA, 19 nt, Artificial Sequence
  Description of Artificial Sequence: Synthetic oligonucleotide
  Antisense strand to SEQ ID NO: 310766
ugauggccuaguauucugc

SEQ ID NO: 310768 - RNA, 19 nt, Artificial Sequence
  Description of Artificial Sequence: Synthetic oligonucleotide
  Sense strand starting at position 520 of SEQ ID NO: 3990
acaguccugccuuagagau

SEQ ID NO: 310769 - RNA, 19 nt, Artificial Sequence
  Description of Artificial Sequence: Synthetic oligonucleotide
  Antisense strand to SEQ ID NO: 310768
aucucuaaggcaggacugu

SEQ ID NO: 310770 - RNA, 19 nt, Artificial Sequence
  Description of Artificial Sequence: Synthetic oligonucleotide
  Sense strand starting at position 527 of SEQ ID NO: 3990
ugccuuagagauuacaacu

SEQ ID NO: 310771 - RNA, 19 nt, Artificial Sequence
  Description of Artificial Sequence: Synthetic oligonucleotide
  Antisense strand to SEQ ID NO: 310770
aguuguaaucucuaaggca

SEQ ID NO: 310772 - RNA, 19 nt, Artificial Sequence
  Description of Artificial Sequence: Synthetic oligonucleotide
  Sense strand starting at position 761 of SEQ ID NO: 3990
aguuucugacaugaaaguu

SEQ ID NO: 310773 - RNA, 19 nt, Artificial Sequence
  Description of Artificial Sequence: Synthetic oligonucleotide
  Antisense strand to SEQ ID NO: 310772
aacuuucaugucagaaacu

SEQ ID NO: 310774 - RNA, 19 nt, Artificial Sequence
  Description of Artificial Sequence: Synthetic oligonucleotide
  Sense strand starting at position 995 of SEQ ID NO: 3990
gugaacuaugccuagagca

SEQ ID NO: 310775 - RNA, 19 nt, Artificial Sequence
  Description of Artificial Sequence: Synthetic oligonucleotide
  Antisense strand to SEQ ID NO: 310774
ugcucuaggcauaguucac

SEQ ID NO: 310776 - RNA, 19 nt, Artificial Sequence
  Description of Artificial Sequence: Synthetic oligonucleotide
  Sense strand starting at position 1007 of SEQ ID NO: 3990
uagagcauugauuguauca

SEQ ID NO: 310777 - RNA, 19 nt, Artificial Sequence
  Description of Artificial Sequence: Synthetic oligonucleotide
  Antisense strand to SEQ ID NO: 310776
ugauacaaucaaugcucua

SEQ ID NO: 310778 - RNA, 19 nt, Artificial Sequence
  Description of Artificial Sequence: Synthetic oligonucleotide
  Sense strand starting at position 1047 of SEQ ID NO: 3990
ggagguuucccuugaccag

SEQ ID NO: 310779 - RNA, 19 nt, Artificial Sequence
  Description of Artificial Sequence: Synthetic oligonucleotide
  Antisense strand to SEQ ID NO: 310778
cuggucaagggaaaccucc

SEQ ID NO: 310780 - RNA, 19 nt, Artificial Sequence
  Description of Artificial Sequence: Synthetic oligonucleotide
  Sense strand starting at position 1048 of SEQ ID NO: 3990
gagguuucccuugaccagu

SEQ ID NO: 310781 - RNA, 19 nt, Artificial Sequence
  Description of Artificial Sequence: Synthetic oligonucleotide
  Antisense strand to SEQ ID NO: 310780
acuggucaagggaaaccuc

SEQ ID NO: 310782 - RNA, 19 nt, Artificial Sequence
  Description of Artificial Sequence: Synthetic oligonucleotide
  Sense strand starting at position 1054 of SEQ ID NO: 3990
ucccuugaccaguacauua

SEQ ID NO: 310783 - RNA, 19 nt, Artificial Sequence
  Description of Artificial Sequence: Synthetic oligonucleotide
  Antisense strand to SEQ ID NO: 310782
uaauguacuggucaaggga

SEQ ID NO: 310784 - RNA, 19 nt, Artificial Sequence
  Description of Artificial Sequence: Synthetic oligonucleotide
  Sense strand starting at position 1117 of SEQ ID NO: 3990
gucuccaaaguguaaacua

SEQ ID NO: 310785 - RNA, 19 nt, Artificial Sequence
  Description of Artificial Sequence: Synthetic oligonucleotide
  Antisense strand to SEQ ID NO: 310784
uaguuuacacuuuggagac

SEQ ID NO: 310786 - RNA, 19 nt, Artificial Sequence
  Description of Artificial Sequence: Synthetic oligonucleotide
  Sense strand starting at position 1252 of SEQ ID NO: 3990
gcgagucccgaguucaucu

SEQ ID NO: 310787 - RNA, 19 nt, Artificial Sequence
  Description of Artificial Sequence: Synthetic oligonucleotide
  Antisense strand to SEQ ID NO: 310786
agaugaacucgggacucgc

SEQ ID NO: 310788 - RNA, 19 nt, Artificial Sequence
  Description of Artificial Sequence: Synthetic oligonucleotide
  Sense strand starting at position 1352 of SEQ ID NO: 3990
augaguccucaacacgagu

SEQ ID NO: 310789 - RNA, 19 nt, Artificial Sequence
  Description of Artificial Sequence: Synthetic oligonucleotide
  Antisense strand to SEQ ID NO: 310788
acucguguugaggacucau

SEQ ID NO: 310790 - RNA, 19 nt, Artificial Sequence
  Description of Artificial Sequence: Synthetic oligonucleotide
  Sense strand starting at position 2181 of SEQ ID NO: 3990
accaguuugguacgaaaua

SEQ ID NO: 310791 - RNA, 19 nt, Artificial Sequence
  Description of Artificial Sequence: Synthetic oligonucleotide
  Antisense strand to SEQ ID NO: 310790
uauuucguaccaaacuggu

SEQ ID NO: 310792 - RNA, 19 nt, Artificial Sequence
  Description of Artificial Sequence: Synthetic oligonucleotide
  Sense strand starting at position 2209 of SEQ ID NO: 3990
ugcauuuguguaggagugu

SEQ ID NO: 310793 - RNA, 19 nt, Artificial Sequence
  Description of Artificial Sequence: Synthetic oligonucleotide
  Antisense strand to SEQ ID NO: 310792
acacuccuacacaaaugca

SEQ ID NO: 310794 - RNA, 19 nt, Artificial Sequence
  Description of Artificial Sequence: Synthetic oligonucleotide
  Sense strand starting at position 2227 of SEQ ID NO: 3990
uuagaucuccuguaccaca

SEQ ID NO: 310795 - RNA, 19 nt, Artificial Sequence
  Description of Artificial Sequence: Synthetic oligonucleotide
  Antisense strand to SEQ ID NO: 310794
ugugguacaggagaucuaa

SEQ ID NO: 310796 - RNA, 19 nt, Artificial Sequence
  Description of Artificial Sequence: Synthetic oligonucleotide
  Sense strand starting at position 2308 of SEQ ID NO: 3990
auugguacuagcgaagacu

SEQ ID NO: 310797 - RNA, 19 nt, Artificial Sequence
  Description of Artificial Sequence: Synthetic oligonucleotide
  Antisense strand to SEQ ID NO: 310796
agucuucgcuaguaccaau

SEQ ID NO: 310798 - RNA, 19 nt, Artificial Sequence
  Description of Artificial Sequence: Synthetic oligonucleotide
  Sense strand starting at position 2401 of SEQ ID NO: 3990
ccauuaaucguaggauaau

SEQ ID NO: 310799 - RNA, 19 nt, Artificial Sequence
  Description of Artificial Sequence: Synthetic oligonucleotide
  Antisense strand to SEQ ID NO: 310798
auuauccuacgauuaaugg

SEQ ID NO: 310800 - RNA, 19 nt, Artificial Sequence
  Description of Artificial Sequence: Synthetic oligonucleotide
  Sense strand starting at position 2412 of SEQ ID NO: 3990
aggauaauuuaacaccgua

SEQ ID NO: 310801 - RNA, 19 nt, Artificial Sequence
  Description of Artificial Sequence: Synthetic oligonucleotide
  Antisense strand to SEQ ID NO: 310800
uacgguguuaaauuauccu

SEQ ID NO: 310802 - RNA, 19 nt, Artificial Sequence
  Description of Artificial Sequence: Synthetic oligonucleotide
  Sense strand starting at position 2465 of SEQ ID NO: 3990
ggaaauaacccuuguuguu

SEQ ID NO: 310803 - RNA, 19 nt, Artificial Sequence
  Description of Artificial Sequence: Synthetic oligonucleotide
  Antisense strand to SEQ ID NO: 310802
aacaacaaggguuauuucc

SEQ ID NO: 310804 - RNA, 19 nt, Artificial Sequence
  Description of Artificial Sequence: Synthetic oligonucleotide
  Sense strand starting at position 2490 of SEQ ID NO: 3990
uaagguuauugguuauaag

SEQ ID NO: 310805 - RNA, 19 nt, Artificial Sequence
  Description of Artificial Sequence: Synthetic oligonucleotide
  Antisense strand to SEQ ID NO: 310804
cuuauaaccaauaaccuua

SEQ ID NO: 310806 - RNA, 19 nt, Artificial Sequence
  Description of Artificial Sequence: Synthetic oligonucleotide
  Sense strand starting at position 2844 of SEQ ID NO: 3990
cucagucucgaaggaaaga

SEQ ID NO: 310807 - RNA, 19 nt, Artificial Sequence
  Description of Artificial Sequence: Synthetic oligonucleotide
  Antisense strand to SEQ ID NO: 310806
ucuuuccuucgagacugag

SEQ ID NO: 310808 - RNA, 19 nt, Artificial Sequence
  Description of Artificial Sequence: Synthetic oligonucleotide
  Sense strand starting at position 2934 of SEQ ID NO: 3990
gucagcauucuacauagua

SEQ ID NO: 310809 - RNA, 19 nt, Artificial Sequence
  Description of Artificial Sequence: Synthetic oligonucleotide
  Antisense strand to SEQ ID NO: 310808
uacuauguagaaugcugac

SEQ ID NO: 310810 - RNA, 19 nt, Artificial Sequence
  Description of Artificial Sequence: Synthetic oligonucleotide
  Sense strand starting at position 2956 of SEQ ID NO: 3990
accaauaauugguugggau

SEQ ID NO: 310811 - RNA, 19 nt, Artificial Sequence
  Description of Artificial Sequence: Synthetic oligonucleotide
  Antisense strand to SEQ ID NO: 310810
aucccaaccaauuauuggu

SEQ ID NO: 310812 - RNA, 19 nt, Artificial Sequence
  Description of Artificial Sequence: Synthetic oligonucleotide
  Sense strand starting at position 2957 of SEQ ID NO: 3990
ccaauaauugguugggaua

SEQ ID NO: 310813 - RNA, 19 nt, Artificial Sequence
  Description of Artificial Sequence: Synthetic oligonucleotide
  Antisense strand to SEQ ID NO: 310812
uaucccaaccaauuauugg

SEQ ID NO: 310814 - RNA, 19 nt, Artificial Sequence
  Description of Artificial Sequence: Synthetic oligonucleotide
  Sense strand starting at position 2958 of SEQ ID NO: 3990
caauaauugguugggauac

SEQ ID NO: 310815 - RNA, 19 nt, Artificial Sequence
  Description of Artificial Sequence: Synthetic oligonucleotide
  Antisense strand to SEQ ID NO: 310814
guaucccaaccaauuauug

SEQ ID NO: 310816 - RNA, 19 nt, Artificial Sequence
  Description of Artificial Sequence: Synthetic oligonucleotide
  Sense strand starting at position 2993 of SEQ ID NO: 3990
auuagagcccuuuaaugac

SEQ ID NO: 310817 - RNA, 19 nt, Artificial Sequence
  Description of Artificial Sequence: Synthetic oligonucleotide
  Antisense strand to SEQ ID NO: 310816
gucauuaaagggcucuaau

SEQ ID NO: 310818 - RNA, 19 nt, Artificial Sequence
  Description of Artificial Sequence: Synthetic oligonucleotide
  Sense strand starting at position 2999 of SEQ ID NO: 3990
gcccuuuaaugacuuugau

SEQ ID NO: 310819 - RNA, 19 nt, Artificial Sequence
  Description of Artificial Sequence: Synthetic oligonucleotide
  Antisense strand to SEQ ID NO: 310818
aucaaagucauuaaagggc

SEQ ID NO: 310820 - RNA, 19 nt, Artificial Sequence
  Description of Artificial Sequence: Synthetic oligonucleotide
  Sense strand starting at position 3002 of SEQ ID NO: 3990
cuuuaaugacuuugauaga

SEQ ID NO: 310821 - RNA, 19 nt, Artificial Sequence
  Description of Artificial Sequence: Synthetic oligonucleotide
  Antisense strand to SEQ ID NO: 310820
ucuaucaaagucauuaaag

SEQ ID NO: 310822 - RNA, 19 nt, Artificial Sequence
  Description of Artificial Sequence: Synthetic oligonucleotide
  Sense strand starting at position 3563 of SEQ ID NO: 3990
ccacaugauccuuaacgcu

SEQ ID NO: 310823 - RNA, 19 nt, Artificial Sequence
  Description of Artificial Sequence: Synthetic oligonucleotide
  Antisense strand to SEQ ID NO: 310822
agcguuaaggaucaugugg

SEQ ID NO: 310824 - RNA, 19 nt, Artificial Sequence
  Description of Artificial Sequence: Synthetic oligonucleotide
  Sense strand starting at position 3645 of SEQ ID NO: 3990
ucgcuaugacuuuaaacag

SEQ ID NO: 310825 - RNA, 19 nt, Artificial Sequence
  Description of Artificial Sequence: Synthetic oligonucleotide
  Antisense strand to SEQ ID NO: 310824
cuguuuaaagucauagcga

SEQ ID NO: 310826 - RNA, 19 nt, Artificial Sequence
  Description of Artificial Sequence: Synthetic oligonucleotide
  Sense strand starting at position 3687 of SEQ ID NO: 3990
gacagucagccuggauaau

SEQ ID NO: 310827 - RNA, 19 nt, Artificial Sequence
  Description of Artificial Sequence: Synthetic oligonucleotide
  Antisense strand to SEQ ID NO: 310826
auuauccaggcugacuguc

SEQ ID NO: 310828 - RNA, 19 nt, Artificial Sequence
  Description of Artificial Sequence: Synthetic oligonucleotide
  Sense strand starting at position 3688 of SEQ ID NO: 3990
acagucagccuggauaauu

SEQ ID NO: 310829 - RNA, 19 nt, Artificial Sequence
  Description of Artificial Sequence: Synthetic oligonucleotide
  Antisense strand to SEQ ID NO: 310828
aauuauccaggcugacugu

SEQ ID NO: 310830 - RNA, 19 nt, Artificial Sequence
  Description of Artificial Sequence: Synthetic oligonucleotide
  Sense strand starting at position 3946 of SEQ ID NO: 3990
ugcuguucucaagaacuuu

SEQ ID NO: 310831 - RNA, 19 nt, Artificial Sequence
  Description of Artificial Sequence: Synthetic oligonucleotide
  Antisense strand to SEQ ID NO: 310830
aaaguucuugagaacagca

SEQ ID NO: 310832 - RNA, 19 nt, Artificial Sequence
  Description of Artificial Sequence: Synthetic oligonucleotide
  Sense strand starting at position 135 of SEQ ID NO: 3992
auuugcuuauuucguggaa

SEQ ID NO: 310833 - RNA, 19 nt, Artificial Sequence
  Description of Artificial Sequence: Synthetic oligonucleotide
  Antisense strand to SEQ ID NO: 310832
uuccacgaaauaagcaaau

SEQ ID NO: 310834 - RNA, 19 nt, Artificial Sequence
  Description of Artificial Sequence: Synthetic oligonucleotide
  Sense strand starting at position 136 of SEQ ID NO: 3992
uuugcuuauuucguggaaa

SEQ ID NO: 310835 - RNA, 19 nt, Artificial Sequence
  Description of Artificial Sequence: Synthetic oligonucleotide
  Antisense strand to SEQ ID NO: 310834
uuuccacgaaauaagcaaa

SEQ ID NO: 310836 - RNA, 19 nt, Artificial Sequence
  Description of Artificial Sequence: Synthetic oligonucleotide
  Sense strand starting at position 138 of SEQ ID NO: 3992
ugcuuauuucguggaaauc

SEQ ID NO: 310837 - RNA, 19 nt, Artificial Sequence
  Description of Artificial Sequence: Synthetic oligonucleotide
  Antisense strand to SEQ ID NO: 310836
gauuuccacgaaauaagca

SEQ ID NO: 310838 - RNA, 19 nt, Artificial Sequence
  Description of Artificial Sequence: Synthetic oligonucleotide
  Sense strand starting at position 504 of SEQ ID NO: 3992
auaguauguacuuaguguu

SEQ ID NO: 310839 - RNA, 19 nt, Artificial Sequence
  Description of Artificial Sequence: Synthetic oligonucleotide
  Antisense strand to SEQ ID NO: 310838
aacacuaaguacauacuau

SEQ ID NO: 310840 - RNA, 19 nt, Artificial Sequence
  Description of Artificial Sequence: Synthetic oligonucleotide
  Sense strand starting at position 772 of SEQ ID NO: 3992
uccaguuucugggcaagga

SEQ ID NO: 310841 - RNA, 19 nt, Artificial Sequence
  Description of Artificial Sequence: Synthetic oligonucleotide
  Antisense strand to SEQ ID NO: 310840
uccuugcccagaaacugga

SEQ ID NO: 310842 - RNA, 19 nt, Artificial Sequence
  Description of Artificial Sequence: Synthetic oligonucleotide
  Sense strand starting at position 773 of SEQ ID NO: 3992
ccaguuucugggcaaggaa

SEQ ID NO: 310843 - RNA, 19 nt, Artificial Sequence
  Description of Artificial Sequence: Synthetic oligonucleotide
  Antisense strand to SEQ ID NO: 310842
uuccuugcccagaaacugg

SEQ ID NO: 310844 - RNA, 19 nt, Artificial Sequence
  Description of Artificial Sequence: Synthetic oligonucleotide
  Sense strand starting at position 883 of SEQ ID NO: 3992
ccagauuccggauggcgaa

SEQ ID NO: 310845 - RNA, 19 nt, Artificial Sequence
  Description of Artificial Sequence: Synthetic oligonucleotide
  Antisense strand to SEQ ID NO: 310844
uucgccauccggaaucugg

SEQ ID NO: 310846 - RNA, 19 nt, Artificial Sequence
  Description of Artificial Sequence: Synthetic oligonucleotide
  Sense strand starting at position 924 of SEQ ID NO: 3992
cuaguuugggucugacagu

SEQ ID NO: 310847 - RNA, 19 nt, Artificial Sequence
  Description of Artificial Sequence: Synthetic oligonucleotide
  Antisense strand to SEQ ID NO: 310846
acugucagacccaaacuag

SEQ ID NO: 310848 - RNA, 19 nt, Artificial Sequence
  Description of Artificial Sequence: Synthetic oligonucleotide
  Sense strand starting at position 1063 of SEQ ID NO: 3992
auuucugaauacugagaga

SEQ ID NO: 310849 - RNA, 19 nt, Artificial Sequence
  Description of Artificial Sequence: Synthetic oligonucleotide
  Antisense strand to SEQ ID NO: 310848
ucucucaguauucagaaau

SEQ ID NO: 310850 - RNA, 19 nt, Artificial Sequence
  Description of Artificial Sequence: Synthetic oligonucleotide
  Sense strand starting at position 1066 of SEQ ID NO: 3992
ucugaauacugagagaaau

SEQ ID NO: 310851 - RNA, 19 nt, Artificial Sequence
  Description of Artificial Sequence: Synthetic oligonucleotide
  Antisense strand to SEQ ID NO: 310850
auuucucucaguauucaga

SEQ ID NO: 310852 - RNA, 19 nt, Artificial Sequence
  Description of Artificial Sequence: Synthetic oligonucleotide
  Sense strand starting at position 1074 of SEQ ID NO: 3992
cugagagaaaugugcucau

SEQ ID NO: 310853 - RNA, 19 nt, Artificial Sequence
  Description of Artificial Sequence: Synthetic oligonucleotide
  Antisense strand to SEQ ID NO: 310852
augagcacauuucucucag

SEQ ID NO: 310854 - RNA, 19 nt, Artificial Sequence
  Description of Artificial Sequence: Synthetic oligonucleotide
  Sense strand starting at position 1201 of SEQ ID NO: 3992
gcccuuccacagugagaaa

SEQ ID NO: 310855 - RNA, 19 nt, Artificial Sequence
  Description of Artificial Sequence: Synthetic oligonucleotide
  Antisense strand to SEQ ID NO: 310854
uuucucacuguggaagggc

SEQ ID NO: 310856 - RNA, 19 nt, Artificial Sequence
  Description of Artificial Sequence: Synthetic oligonucleotide
  Sense strand starting at position 1259 of SEQ ID NO: 3992
acuguacccgcucaauagu

SEQ ID NO: 310857 - RNA, 19 nt, Artificial Sequence
  Description of Artificial Sequence: Synthetic oligonucleotide
  Antisense strand to SEQ ID NO: 310856
acuauugagcggguacagu

SEQ ID NO: 310858 - RNA, 19 nt, Artificial Sequence
  Description of Artificial Sequence: Synthetic oligonucleotide
  Sense strand starting at position 1482 of SEQ ID NO: 3992
agcauuaagcaaggaaauu

SEQ ID NO: 310859 - RNA, 19 nt, Artificial Sequence
  Description of Artificial Sequence: Synthetic oligonucleotide
  Antisense strand to SEQ ID NO: 310858
aauuuccuugcuuaaugcu

SEQ ID NO: 310860 - RNA, 19 nt, Artificial Sequence
  Description of Artificial Sequence: Synthetic oligonucleotide
  Sense strand starting at position 1588 of SEQ ID NO: 3992
gcagaaaugcaacgaagau

SEQ ID NO: 310861 - RNA, 19 nt, Artificial Sequence
  Description of Artificial Sequence: Synthetic oligonucleotide
  Antisense strand to SEQ ID NO: 310860
aucuucguugcauuucugc

SEQ ID NO: 310862 - RNA, 19 nt, Artificial Sequence
  Description of Artificial Sequence: Synthetic oligonucleotide
  Sense strand starting at position 2049 of SEQ ID NO: 3992
gauuccacgucuccagauu

SEQ ID NO: 310863 - RNA, 19 nt, Artificial Sequence
  Description of Artificial Sequence: Synthetic oligonucleotide
  Antisense strand to SEQ ID NO: 310862
aaucuggagacguggaauc

SEQ ID NO: 310864 - RNA, 19 nt, Artificial Sequence
  Description of Artificial Sequence: Synthetic oligonucleotide
  Sense strand starting at position 2309 of SEQ ID NO: 3992
ugcagaaaucuccgaaaga

SEQ ID NO: 310865 - RNA, 19 nt, Artificial Sequence
  Description of Artificial Sequence: Synthetic oligonucleotide
  Antisense strand to SEQ ID NO: 310864
ucuuucggagauuucugca

SEQ ID NO: 310866 - RNA, 19 nt, Artificial Sequence
  Description of Artificial Sequence: Synthetic oligonucleotide
  Sense strand starting at position 2410 of SEQ ID NO: 3992
aucagagggucuucugcua

SEQ ID NO: 310867 - RNA, 19 nt, Artificial Sequence
  Description of Artificial Sequence: Synthetic oligonucleotide
  Antisense strand to SEQ ID NO: 310866
uagcagaagacccucugau

SEQ ID NO: 310868 - RNA, 19 nt, Artificial Sequence
  Description of Artificial Sequence: Synthetic oligonucleotide
  Sense strand starting at position 2527 of SEQ ID NO: 3992
aggcuucuugcccugugua

SEQ ID NO: 310869 - RNA, 19 nt, Artificial Sequence
  Description of Artificial Sequence: Synthetic oligonucleotide
  Antisense strand to SEQ ID NO: 310868
uacacagggcaagaagccu

SEQ ID NO: 310870 - RNA, 19 nt, Artificial Sequence
  Description of Artificial Sequence: Synthetic oligonucleotide
  Sense strand starting at position 2551 of SEQ ID NO: 3992
agccaagcgccuucuguau

SEQ ID NO: 310871 - RNA, 19 nt, Artificial Sequence
  Description of Artificial Sequence: Synthetic oligonucleotide
  Antisense strand to SEQ ID NO: 310870
auacagaaggcgcuuggcu

SEQ ID NO: 310872 - RNA, 19 nt, Artificial Sequence
  Description of Artificial Sequence: Synthetic oligonucleotide
  Sense strand starting at position 2657 of SEQ ID NO: 3992
guuuaagggcucugauuag

SEQ ID NO: 310873 - RNA, 19 nt, Artificial Sequence
  Description of Artificial Sequence: Synthetic oligonucleotide
  Antisense strand to SEQ ID NO: 310872
cuaaucagagcccuuaaac

SEQ ID NO: 310874 - RNA, 19 nt, Artificial Sequence
  Description of Artificial Sequence: Synthetic oligonucleotide
  Sense strand starting at position 2666 of SEQ ID NO: 3992
cucugauuaggccaucuua

SEQ ID NO: 310875 - RNA, 19 nt, Artificial Sequence
  Description of Artificial Sequence: Synthetic oligonucleotide
  Antisense strand to SEQ ID NO: 310874
uaagauggccuaaucagag

SEQ ID NO: 310876 - RNA, 19 nt, Artificial Sequence
  Description of Artificial Sequence: Synthetic oligonucleotide
  Sense strand starting at position 2692 of SEQ ID NO: 3992
cccuuuguguccuugaaca

SEQ ID NO: 310877 - RNA, 19 nt, Artificial Sequence
  Description of Artificial Sequence: Synthetic oligonucleotide
  Antisense strand to SEQ ID NO: 310876
uguucaaggacacaaaggg

SEQ ID NO: 310878 - RNA, 19 nt, Artificial Sequence
  Description of Artificial Sequence: Synthetic oligonucleotide
  Sense strand starting at position 2694 of SEQ ID NO: 3992
cuuuguguccuugaacaac

SEQ ID NO: 310879 - RNA, 19 nt, Artificial Sequence
  Description of Artificial Sequence: Synthetic oligonucleotide
  Antisense strand to SEQ ID NO: 310878
guuguucaaggacacaaag

SEQ ID NO: 310880 - RNA, 19 nt, Artificial Sequence
  Description of Artificial Sequence: Synthetic oligonucleotide
  Sense strand starting at position 2777 of SEQ ID NO: 3992
aggaguagugcccaauaaa

SEQ ID NO: 310881 - RNA, 19 nt, Artificial Sequence
  Description of Artificial Sequence: Synthetic oligonucleotide
  Antisense strand to SEQ ID NO: 310880
uuuauugggcacuacuccu

SEQ ID NO: 310882 - RNA, 19 nt, Artificial Sequence
  Description of Artificial Sequence: Synthetic oligonucleotide
  Sense strand starting at position 2874 of SEQ ID NO: 3992
guguauguuguacaugaac

SEQ ID NO: 310883 - RNA, 19 nt, Artificial Sequence
  Description of Artificial Sequence: Synthetic oligonucleotide
  Antisense strand to SEQ ID NO: 310882
guucauguacaacauacac

SEQ ID NO: 310884 - RNA, 19 nt, Artificial Sequence
  Description of Artificial Sequence: Synthetic oligonucleotide
  Sense strand starting at position 2876 of SEQ ID NO: 3992
guauguuguacaugaacuc

SEQ ID NO: 310885 - RNA, 19 nt, Artificial Sequence
  Description of Artificial Sequence: Synthetic oligonucleotide
  Antisense strand to SEQ ID NO: 310884
gaguucauguacaacauac

SEQ ID NO: 310886 - RNA, 19 nt, Artificial Sequence
  Description of Artificial Sequence: Synthetic oligonucleotide
  Sense strand starting at position 2937 of SEQ ID NO: 3992
auuccuuuaugcuuuggga

SEQ ID NO: 310887 - RNA, 19 nt, Artificial Sequence
  Description of Artificial Sequence: Synthetic oligonucleotide
  Antisense strand to SEQ ID NO: 310886
ucccaaagcauaaaggaau

SEQ ID NO: 310888 - RNA, 19 nt, Artificial Sequence
  Description of Artificial Sequence: Synthetic oligonucleotide
  Sense strand starting at position 2939 of SEQ ID NO: 3992
uccuuuaugcuuugggaau

SEQ ID NO: 310889 - RNA, 19 nt, Artificial Sequence
  Description of Artificial Sequence: Synthetic oligonucleotide
  Antisense strand to SEQ ID NO: 310888
auucccaaagcauaaagga

SEQ ID NO: 310890 - RNA, 19 nt, Artificial Sequence
  Description of Artificial Sequence: Synthetic oligonucleotide
  Sense strand starting at position 2951 of SEQ ID NO: 3992
ugggaauaagugcgguuaa

SEQ ID NO: 310891 - RNA, 19 nt, Artificial Sequence
  Description of Artificial Sequence: Synthetic oligonucleotide
  Antisense strand to SEQ ID NO: 310890
uuaaccgcacuuauuccca

SEQ ID NO: 310892 - RNA, 19 nt, Artificial Sequence
  Description of Artificial Sequence: Synthetic oligonucleotide
  Sense strand starting at position 3046 of SEQ ID NO: 3992
gaucgagguucuccuuaag

SEQ ID NO: 310893 - RNA, 19 nt, Artificial Sequence
  Description of Artificial Sequence: Synthetic oligonucleotide
  Antisense strand to SEQ ID NO: 310892
cuuaaggagaaccucgauc

SEQ ID NO: 310894 - RNA, 19 nt, Artificial Sequence
  Description of Artificial Sequence: Synthetic oligonucleotide
  Sense strand starting at position 3049 of SEQ ID NO: 3992
cgagguucuccuuaagcag

SEQ ID NO: 310895 - RNA, 19 nt, Artificial Sequence
  Description of Artificial Sequence: Synthetic oligonucleotide
  Antisense strand to SEQ ID NO: 310894
cugcuuaaggagaaccucg

SEQ ID NO: 310896 - RNA, 19 nt, Artificial Sequence
  Description of Artificial Sequence: Synthetic oligonucleotide
  Sense strand starting at position 3174 of SEQ ID NO: 3992
gcaaaugagcucuaaauug

SEQ ID NO: 310897 - RNA, 19 nt, Artificial Sequence
  Description of Artificial Sequence: Synthetic oligonucleotide
  Antisense strand to SEQ ID NO: 310896
caauuuagagcucauuugc

SEQ ID NO: 310898 - RNA, 19 nt, Artificial Sequence
  Description of Artificial Sequence: Synthetic oligonucleotide
  Sense strand starting at position 3226 of SEQ ID NO: 3992
ggaguccagcuuugaacaa

SEQ ID NO: 310899 - RNA, 19 nt, Artificial Sequence
  Description of Artificial Sequence: Synthetic oligonucleotide
  Antisense strand to SEQ ID NO: 310898
uuguucaaagcuggacucc

SEQ ID NO: 310900 - RNA, 19 nt, Artificial Sequence
  Description of Artificial Sequence: Synthetic oligonucleotide
  Sense strand starting at position 3245 of SEQ ID NO: 3992
acuugagacuacuuaagug

SEQ ID NO: 310901 - RNA, 19 nt, Artificial Sequence
  Description of Artificial Sequence: Synthetic oligonucleotide
  Antisense strand to SEQ ID NO: 310900
cacuuaaguagucucaagu

SEQ ID NO: 310902 - RNA, 19 nt, Artificial Sequence
  Description of Artificial Sequence: Synthetic oligonucleotide
  Sense strand starting at position 3686 of SEQ ID NO: 3992
gucaguccugaauaaguca

SEQ ID NO: 310903 - RNA, 19 nt, Artificial Sequence
  Description of Artificial Sequence: Synthetic oligonucleotide
  Antisense strand to SEQ ID NO: 310902
ugacuuauucaggacugac

SEQ ID NO: 310904 - RNA, 19 nt, Artificial Sequence
  Description of Artificial Sequence: Synthetic oligonucleotide
  Sense strand starting at position 3751 of SEQ ID NO: 3992
ucucgucuuuggucgauuu

SEQ ID NO: 310905 - RNA, 19 nt, Artificial Sequence
  Description of Artificial Sequence: Synthetic oligonucleotide
  Antisense strand to SEQ ID NO: 310904
aaaucgaccaaagacgaga

SEQ ID NO: 310906 - RNA, 19 nt, Artificial Sequence
  Description of Artificial Sequence: Synthetic oligonucleotide
  Sense strand starting at position 3789 of SEQ ID NO: 3992
cgcugaguucuaguuucuc

SEQ ID NO: 310907 - RNA, 19 nt, Artificial Sequence
  Description of Artificial Sequence: Synthetic oligonucleotide
  Antisense strand to SEQ ID NO: 310906
gagaaacuagaacucagcg

SEQ ID NO: 310908 - RNA, 19 nt, Artificial Sequence
  Description of Artificial Sequence: Synthetic oligonucleotide
  Sense strand starting at position 3947 of SEQ ID NO: 3992
ugcaacuuguguuuaggaa

SEQ ID NO: 310909 - RNA, 19 nt, Artificial Sequence
  Description of Artificial Sequence: Synthetic oligonucleotide
  Antisense strand to SEQ ID NO: 310908
uuccuaaacacaaguugca

SEQ ID NO: 310910 - RNA, 19 nt, Artificial Sequence
  Description of Artificial Sequence: Synthetic oligonucleotide
  Sense strand starting at position 3948 of SEQ ID NO: 3992
gcaacuuguguuuaggaaa

SEQ ID NO: 310911 - RNA, 19 nt, Artificial Sequence
  Description of Artificial Sequence: Synthetic oligonucleotide
  Antisense strand to SEQ ID NO: 310910
uuuccuaaacacaaguugc

SEQ ID NO: 310912 - RNA, 19 nt, Artificial Sequence
  Description of Artificial Sequence: Synthetic oligonucleotide
  Sense strand starting at position 3 of SEQ ID NO: 3993
uguuaauaaggcuaauauc

SEQ ID NO: 310913 - RNA, 19 nt, Artificial Sequence
  Description of Artificial Sequence: Synthetic oligonucleotide
  Antisense strand to SEQ ID NO: 310912
gauauuagccuuauuaaca

SEQ ID NO: 310914 - RNA, 19 nt, Artificial Sequence
  Description of Artificial Sequence: Synthetic oligonucleotide
  Sense strand starting at position 44 of SEQ ID NO: 3993
gggauauauuggccgggca

SEQ ID NO: 310915 - RNA, 19 nt, Artificial Sequence
  Description of Artificial Sequence: Synthetic oligonucleotide
  Antisense strand to SEQ ID NO: 310914
ugcccggccaauauauccc

SEQ ID NO: 310916 - RNA, 19 nt, Artificial Sequence
  Description of Artificial Sequence: Synthetic oligonucleotide
  Sense strand starting at position 442 of SEQ ID NO: 3993
cucagcugagguuauuaua

SEQ ID NO: 310917 - RNA, 19 nt, Artificial Sequence
  Description of Artificial Sequence: Synthetic oligonucleotide
  Antisense strand to SEQ ID NO: 310916
uauaauaaccucagcugag

SEQ ID NO: 310918 - RNA, 19 nt, Artificial Sequence
  Description of Artificial Sequence: Synthetic oligonucleotide
  Sense strand starting at position 511 of SEQ ID NO: 3993
ugagcauugcccuaaguuu

SEQ ID NO: 310919 - RNA, 19 nt, Artificial Sequence
  Description of Artificial Sequence: Synthetic oligonucleotide
  Antisense strand to SEQ ID NO: 310918
aaacuuagggcaaugcuca

SEQ ID NO: 310920 - RNA, 19 nt, Artificial Sequence
  Description of Artificial Sequence: Synthetic oligonucleotide
  Sense strand starting at position 556 of SEQ ID NO: 3993
agaguuuggauaggaaagu

SEQ ID NO: 310921 - RNA, 19 nt, Artificial Sequence
  Description of Artificial Sequence: Synthetic oligonucleotide
  Antisense strand to SEQ ID NO: 310920
acuuuccuauccaaacucu

SEQ ID NO: 310922 - RNA, 19 nt, Artificial Sequence
  Description of Artificial Sequence: Synthetic oligonucleotide
  Sense strand starting at position 572 of SEQ ID NO: 3993
aguauuuccuuagaagaag

SEQ ID NO: 310923 - RNA, 19 nt, Artificial Sequence
  Description of Artificial Sequence: Synthetic oligonucleotide
  Antisense strand to SEQ ID NO: 310922
cuucuucuaaggaaauacu

SEQ ID NO: 310924 - RNA, 19 nt, Artificial Sequence
  Description of Artificial Sequence: Synthetic oligonucleotide
  Sense strand starting at position 619 of SEQ ID NO: 3993
gugaaagucugagcugaaa

SEQ ID NO: 310925 - RNA, 19 nt, Artificial Sequence
  Description of Artificial Sequence: Synthetic oligonucleotide
  Antisense strand to SEQ ID NO: 310924
uuucagcucagacuuucac

SEQ ID NO: 310926 - RNA, 19 nt, Artificial Sequence
  Description of Artificial Sequence: Synthetic oligonucleotide
  Sense strand starting at position 753 of SEQ ID NO: 3993
ucagcaugcccucagagaa

SEQ ID NO: 310927 - RNA, 19 nt, Artificial Sequence
  Description of Artificial Sequence: Synthetic oligonucleotide
  Antisense strand to SEQ ID NO: 310926
uucucugagggcaugcuga

SEQ ID NO: 310928 - RNA, 19 nt, Artificial Sequence
  Description of Artificial Sequence: Synthetic oligonucleotide
  Sense strand starting at position 945 of SEQ ID NO: 3993
aggugaauuugugaacgau

SEQ ID NO: 310929 - RNA, 19 nt, Artificial Sequence
  Description of Artificial Sequence: Synthetic oligonucleotide
  Antisense strand to SEQ ID NO: 310928
aucguucacaaauucaccu

SEQ ID NO: 310930 - RNA, 19 nt, Artificial Sequence
  Description of Artificial Sequence: Synthetic oligonucleotide
  Sense strand starting at position 1083 of SEQ ID NO: 3993
cugugaucauuggcucaaa

SEQ ID NO: 310931 - RNA, 19 nt, Artificial Sequence
  Description of Artificial Sequence: Synthetic oligonucleotide
  Antisense strand to SEQ ID NO: 310930
uuugagccaaugaucacag

SEQ ID NO: 310932 - RNA, 19 nt, Artificial Sequence
  Description of Artificial Sequence: Synthetic oligonucleotide
  Sense strand starting at position 1135 of SEQ ID NO: 3993
cugucccaccguugagaaa

SEQ ID NO: 310933 - RNA, 19 nt, Artificial Sequence
  Description of Artificial Sequence: Synthetic oligonucleotide
  Antisense strand to SEQ ID NO: 310932
uuucucaacggugggacag

SEQ ID NO: 310934 - RNA, 19 nt, Artificial Sequence
  Description of Artificial Sequence: Synthetic oligonucleotide
  Sense strand starting at position 1177 of SEQ ID NO: 3993
gaauaauuggagugcuuua

SEQ ID NO: 310935 - RNA, 19 nt, Artificial Sequence
  Description of Artificial Sequence: Synthetic oligonucleotide
  Antisense strand to SEQ ID NO: 310934
uaaagcacuccaauuauuc

SEQ ID NO: 310936 - RNA, 19 nt, Artificial Sequence
  Description of Artificial Sequence: Synthetic oligonucleotide
  Sense strand starting at position 1196 of SEQ ID NO: 3993
ggaggaaggucauugcuga

SEQ ID NO: 310937 - RNA, 19 nt, Artificial Sequence
  Description of Artificial Sequence: Synthetic oligonucleotide
  Antisense strand to SEQ ID NO: 310936
ucagcaaugaccuuccucc

SEQ ID NO: 310938 - RNA, 19 nt, Artificial Sequence
  Description of Artificial Sequence: Synthetic oligonucleotide
  Sense strand starting at position 1326 of SEQ ID NO: 3993
ugugaaaccauguaagugu

SEQ ID NO: 310939 - RNA, 19 nt, Artificial Sequence
  Description of Artificial Sequence: Synthetic oligonucleotide
  Antisense strand to SEQ ID NO: 310938
acacuuacaugguuucaca

SEQ ID NO: 310940 - RNA, 19 nt, Artificial Sequence
  Description of Artificial Sequence: Synthetic oligonucleotide
  Sense strand starting at position 1337 of SEQ ID NO: 3993
guaaguguugcuuuggcuu

SEQ ID NO: 310941 - RNA, 19 nt, Artificial Sequence
  Description of Artificial Sequence: Synthetic oligonucleotide
  Antisense strand to SEQ ID NO: 310940
aagccaaagcaacacuuac

SEQ ID NO: 310942 - RNA, 19 nt, Artificial Sequence
  Description of Artificial Sequence: Synthetic oligonucleotide
  Sense strand starting at position 1384 of SEQ ID NO: 3993
caggaaauguguuucuucu

SEQ ID NO: 310943 - RNA, 19 nt, Artificial Sequence
  Description of Artificial Sequence: Synthetic oligonucleotide
  Antisense strand to SEQ ID NO: 310942
agaagaaacacauuuccug

SEQ ID NO: 310944 - RNA, 19 nt, Artificial Sequence
  Description of Artificial Sequence: Synthetic oligonucleotide
  Sense strand starting at position 1456 of SEQ ID NO: 3993
gccuauggcauagacagaa

SEQ ID NO: 310945 - RNA, 19 nt, Artificial Sequence
  Description of Artificial Sequence: Synthetic oligonucleotide
  Antisense strand to SEQ ID NO: 310944
uucugucuaugccauaggc

SEQ ID NO: 310946 - RNA, 19 nt, Artificial Sequence
  Description of Artificial Sequence: Synthetic oligonucleotide
  Sense strand starting at position 1521 of SEQ ID NO: 3993
gugaggugugauggaaaga

SEQ ID NO: 310947 - RNA, 19 nt, Artificial Sequence
  Description of Artificial Sequence: Synthetic oligonucleotide
  Antisense strand to SEQ ID NO: 310946
ucuuuccaucacaccucac

SEQ ID NO: 310948 - RNA, 19 nt, Artificial Sequence
  Description of Artificial Sequence: Synthetic oligonucleotide
  Sense strand starting at position 1662 of SEQ ID NO: 3993
uguaguccaccucagaaau

SEQ ID NO: 310949 - RNA, 19 nt, Artificial Sequence
  Description of Artificial Sequence: Synthetic oligonucleotide
  Antisense strand to SEQ ID NO: 310948
auuucugagguggacuaca

SEQ ID NO: 310950 - RNA, 19 nt, Artificial Sequence
  Description of Artificial Sequence: Synthetic oligonucleotide
  Sense strand starting at position 2241 of SEQ ID NO: 3993
gccuacugucaaugggaaa

SEQ ID NO: 310951 - RNA, 19 nt, Artificial Sequence
  Description of Artificial Sequence: Synthetic oligonucleotide
  Antisense strand to SEQ ID NO: 310950
uuucccauugacaguaggc

SEQ ID NO: 310952 - RNA, 19 nt, Artificial Sequence
  Description of Artificial Sequence: Synthetic oligonucleotide
  Sense strand starting at position 2633 of SEQ ID NO: 3993
ugcaguugccaagaauauu

SEQ ID NO: 310953 - RNA, 19 nt, Artificial Sequence
  Description of Artificial Sequence: Synthetic oligonucleotide
  Antisense strand to SEQ ID NO: 310952
aauauucuuggcaacugca

SEQ ID NO: 310954 - RNA, 19 nt, Artificial Sequence
  Description of Artificial Sequence: Synthetic oligonucleotide
  Sense strand starting at position 2649 of SEQ ID NO: 3993
auucuuaccuguuugacau

SEQ ID NO: 310955 - RNA, 19 nt, Artificial Sequence
  Description of Artificial Sequence: Synthetic oligonucleotide
  Antisense strand to SEQ ID NO: 310954
augucaaacagguaagaau

SEQ ID NO: 310956 - RNA, 19 nt, Artificial Sequence
  Description of Artificial Sequence: Synthetic oligonucleotide
  Sense strand starting at position 2656 of SEQ ID NO: 3993
ccuguuugacaugaauauu

SEQ ID NO: 310957 - RNA, 19 nt, Artificial Sequence
  Description of Artificial Sequence: Synthetic oligonucleotide
  Antisense strand to SEQ ID NO: 310956
aauauucaugucaaacagg

SEQ ID NO: 310958 - RNA, 19 nt, Artificial Sequence
  Description of Artificial Sequence: Synthetic oligonucleotide
  Sense strand starting at position 2724 of SEQ ID NO: 3993
aguguuaccuuaucaauua

SEQ ID NO: 310959 - RNA, 19 nt, Artificial Sequence
  Description of Artificial Sequence: Synthetic oligonucleotide
  Antisense strand to SEQ ID NO: 310958
uaauugauaagguaacacu

SEQ ID NO: 310960 - RNA, 19 nt, Artificial Sequence
  Description of Artificial Sequence: Synthetic oligonucleotide
  Sense strand starting at position 2952 of SEQ ID NO: 3993
guuagaacugaguaauucu

SEQ ID NO: 310961 - RNA, 19 nt, Artificial Sequence
  Description of Artificial Sequence: Synthetic oligonucleotide
  Antisense strand to SEQ ID NO: 310960
agaauuacucaguucuaac

SEQ ID NO: 310962 - RNA, 19 nt, Artificial Sequence
  Description of Artificial Sequence: Synthetic oligonucleotide
  Sense strand starting at position 3382 of SEQ ID NO: 3993
cuaggacacuugccacaua

SEQ ID NO: 310963 - RNA, 19 nt, Artificial Sequence
  Description of Artificial Sequence: Synthetic oligonucleotide
  Antisense strand to SEQ ID NO: 310962
uauguggcaaguguccuag

SEQ ID NO: 310964 - RNA, 19 nt, Artificial Sequence
  Description of Artificial Sequence: Synthetic oligonucleotide
  Sense strand starting at position 3404 of SEQ ID NO: 3993
gcaagucaccaagaugauc

SEQ ID NO: 310965 - RNA, 19 nt, Artificial Sequence
  Description of Artificial Sequence: Synthetic oligonucleotide
  Antisense strand to SEQ ID NO: 310964
gaucaucuuggugacuugc

SEQ ID NO: 310966 - RNA, 19 nt, Artificial Sequence
  Description of Artificial Sequence: Synthetic oligonucleotide
  Sense strand starting at position 3417 of SEQ ID NO: 3993
augaucugucccuaucuuu

SEQ ID NO: 310967 - RNA, 19 nt, Artificial Sequence
  Description of Artificial Sequence: Synthetic oligonucleotide
  Antisense strand to SEQ ID NO: 310966
aaagauagggacagaucau

SEQ ID NO: 310968 - RNA, 19 nt, Artificial Sequence
  Description of Artificial Sequence: Synthetic oligonucleotide
  Sense strand starting at position 3428 of SEQ ID NO: 3993
cuaucuuucguguuuaugu

SEQ ID NO: 310969 - RNA, 19 nt, Artificial Sequence
  Description of Artificial Sequence: Synthetic oligonucleotide
  Antisense strand to SEQ ID NO: 310968
acauaaacacgaaagauag

SEQ ID NO: 310970 - RNA, 19 nt, Artificial Sequence
  Description of Artificial Sequence: Synthetic oligonucleotide
  Sense strand starting at position 3454 of SEQ ID NO: 3993
agcauacauucuguugaaa

SEQ ID NO: 310971 - RNA, 19 nt, Artificial Sequence
  Description of Artificial Sequence: Synthetic oligonucleotide
  Antisense strand to SEQ ID NO: 310970
uuucaacagaauguaugcu

SEQ ID NO: 310972 - RNA, 19 nt, Artificial Sequence
  Description of Artificial Sequence: Synthetic oligonucleotide
  Sense strand starting at position 3498 of SEQ ID NO: 3993
guagaaugauaagugagua

SEQ ID NO: 310973 - RNA, 19 nt, Artificial Sequence
  Description of Artificial Sequence: Synthetic oligonucleotide
  Antisense strand to SEQ ID NO: 310972
uacucacuuaucauucuac

SEQ ID NO: 310974 - RNA, 19 nt, Artificial Sequence
  Description of Artificial Sequence: Synthetic oligonucleotide
  Sense strand starting at position 3511 of SEQ ID NO: 3993
ugaguagaaguuuaagguu

SEQ ID NO: 310975 - RNA, 19 nt, Artificial Sequence
  Description of Artificial Sequence: Synthetic oligonucleotide
  Antisense strand to SEQ ID NO: 310974
aaccuuaaacuucuacuca

SEQ ID NO: 310976 - RNA, 19 nt, Artificial Sequence
  Description of Artificial Sequence: Synthetic oligonucleotide
  Sense strand starting at position 3538 of SEQ ID NO: 3993
gcauuaaauaguugguaug

SEQ ID NO: 310977 - RNA, 19 nt, Artificial Sequence
  Description of Artificial Sequence: Synthetic oligonucleotide
  Antisense strand to SEQ ID NO: 310976
cauaccaacuauuuaaugc

SEQ ID NO: 310978 - RNA, 19 nt, Artificial Sequence
  Description of Artificial Sequence: Synthetic oligonucleotide
  Sense strand starting at position 3562 of SEQ ID NO: 3993
caguuuagcuaguuacaga

SEQ ID NO: 310979 - RNA, 19 nt, Artificial Sequence
  Description of Artificial Sequence: Synthetic oligonucleotide
  Antisense strand to SEQ ID NO: 310978
ucuguaacuagcuaaacug

SEQ ID NO: 310980 - RNA, 19 nt, Artificial Sequence
  Description of Artificial Sequence: Synthetic oligonucleotide
  Sense strand starting at position 3575 of SEQ ID NO: 3993
uacagaaugguuugccuca

SEQ ID NO: 310981 - RNA, 19 nt, Artificial Sequence
  Description of Artificial Sequence: Synthetic oligonucleotide
  Antisense strand to SEQ ID NO: 310980
ugaggcaaaccauucugua

SEQ ID NO: 310982 - RNA, 19 nt, Artificial Sequence
  Description of Artificial Sequence: Synthetic oligonucleotide
  Sense strand starting at position 3576 of SEQ ID NO: 3993
acagaaugguuugccucau

SEQ ID NO: 310983 - RNA, 19 nt, Artificial Sequence
  Description of Artificial Sequence: Synthetic oligonucleotide
  Antisense strand to SEQ ID NO: 310982
augaggcaaaccauucugu

SEQ ID NO: 310984 - RNA, 19 nt, Artificial Sequence
  Description of Artificial Sequence: Synthetic oligonucleotide
  Sense strand starting at position 3577 of SEQ ID NO: 3993
cagaaugguuugccucauu

SEQ ID NO: 310985 - RNA, 19 nt, Artificial Sequence
  Description of Artificial Sequence: Synthetic oligonucleotide
  Antisense strand to SEQ ID NO: 310984
aaugaggcaaaccauucug

SEQ ID NO: 310986 - RNA, 19 nt, Artificial Sequence
  Description of Artificial Sequence: Synthetic oligonucleotide
  Sense strand starting at position 3718 of SEQ ID NO: 3993
cucaguaagcgacauugau

SEQ ID NO: 310987 - RNA, 19 nt, Artificial Sequence
  Description of Artificial Sequence: Synthetic oligonucleotide
  Antisense strand to SEQ ID NO: 310986
aucaaugucgcuuacugag

SEQ ID NO: 310988 - RNA, 19 nt, Artificial Sequence
  Description of Artificial Sequence: Synthetic oligonucleotide
  Sense strand starting at position 3722 of SEQ ID NO: 3993
guaagcgacauugaucaaa

SEQ ID NO: 310989 - RNA, 19 nt, Artificial Sequence
  Description of Artificial Sequence: Synthetic oligonucleotide
  Antisense strand to SEQ ID NO: 310988
uuugaucaaugucgcuuac

SEQ ID NO: 310990 - RNA, 19 nt, Artificial Sequence
  Description of Artificial Sequence: Synthetic oligonucleotide
  Sense strand starting at position 3725 of SEQ ID NO: 3993
agcgacauugaucaaauca

SEQ ID NO: 310991 - RNA, 19 nt, Artificial Sequence
  Description of Artificial Sequence: Synthetic oligonucleotide
  Antisense strand to SEQ ID NO: 310990
ugauuugaucaaugucgcu

SEQ ID NO: 310992 - RNA, 19 nt, Artificial Sequence
  Description of Artificial Sequence: Synthetic oligonucleotide
  Sense strand starting at position 3 of SEQ ID NO: 3994
cuagucagugauggaacau

SEQ ID NO: 310993 - RNA, 19 nt, Artificial Sequence
  Description of Artificial Sequence: Synthetic oligonucleotide
  Antisense strand to SEQ ID NO: 310992
auguuccaucacugacuag

SEQ ID NO: 310994 - RNA, 19 nt, Artificial Sequence
  Description of Artificial Sequence: Synthetic oligonucleotide
  Sense strand starting at position 27 of SEQ ID NO: 3994
auaauuaucugugucaacu

SEQ ID NO: 310995 - RNA, 19 nt, Artificial Sequence
  Description of Artificial Sequence: Synthetic oligonucleotide
  Antisense strand to SEQ ID NO: 310994
aguugacacagauaauuau

SEQ ID NO: 310996 - RNA, 19 nt, Artificial Sequence
  Description of Artificial Sequence: Synthetic oligonucleotide
  Sense strand starting at position 192 of SEQ ID NO: 3994
caguuaccuguuuaaguga

SEQ ID NO: 310997 - RNA, 19 nt, Artificial Sequence
  Description of Artificial Sequence: Synthetic oligonucleotide
  Antisense strand to SEQ ID NO: 310996
ucacuuaaacagguaacug

SEQ ID NO: 310998 - RNA, 19 nt, Artificial Sequence
  Description of Artificial Sequence: Synthetic oligonucleotide
  Sense strand starting at position 261 of SEQ ID NO: 3994
auuccauagugauuaagag

SEQ ID NO: 310999 - RNA, 19 nt, Artificial Sequence
  Description of Artificial Sequence: Synthetic oligonucleotide
  Antisense strand to SEQ ID NO: 310998
cucuuaaucacuauggaau

SEQ ID NO: 311000 - RNA, 19 nt, Artificial Sequence
  Description of Artificial Sequence: Synthetic oligonucleotide
  Sense strand starting at position 265 of SEQ ID NO: 3994
cauagugauuaagagaaag

SEQ ID NO: 311001 - RNA, 19 nt, Artificial Sequence
  Description of Artificial Sequence: Synthetic oligonucleotide
  Antisense strand to SEQ ID NO: 311000
cuuucucuuaaucacuaug

SEQ ID NO: 311002 - RNA, 19 nt, Artificial Sequence
  Description of Artificial Sequence: Synthetic oligonucleotide
  Sense strand starting at position 308 of SEQ ID NO: 3994
aagagaauuccaugugcuu

SEQ ID NO: 311003 - RNA, 19 nt, Artificial Sequence
  Description of Artificial Sequence: Synthetic oligonucleotide
  Antisense strand to SEQ ID NO: 311002
aagcacauggaauucucuu

SEQ ID NO: 311004 - RNA, 19 nt, Artificial Sequence
  Description of Artificial Sequence: Synthetic oligonucleotide
  Sense strand starting at position 311 of SEQ ID NO: 3994
agaauuccaugugcuuaaa

SEQ ID NO: 311005 - RNA, 19 nt, Artificial Sequence
  Description of Artificial Sequence: Synthetic oligonucleotide
  Antisense strand to SEQ ID NO: 311004
uuuaagcacauggaauucu

SEQ ID NO: 311006 - RNA, 19 nt, Artificial Sequence
  Description of Artificial Sequence: Synthetic oligonucleotide
  Sense strand starting at position 353 of SEQ ID NO: 3994
uuuguauuauuguccacau

SEQ ID NO: 311007 - RNA, 19 nt, Artificial Sequence
  Description of Artificial Sequence: Synthetic oligonucleotide
  Antisense strand to SEQ ID NO: 311006
auguggacaauaauacaaa

SEQ ID NO: 311008 - RNA, 19 nt, Artificial Sequence
  Description of Artificial Sequence: Synthetic oligonucleotide
  Sense strand starting at position 354 of SEQ ID NO: 3994
uuguauuauuguccacauu

SEQ ID NO: 311009 - RNA, 19 nt, Artificial Sequence
  Description of Artificial Sequence: Synthetic oligonucleotide
  Antisense strand to SEQ ID NO: 311008
aauguggacaauaauacaa

SEQ ID NO: 311010 - RNA, 19 nt, Artificial Sequence
  Description of Artificial Sequence: Synthetic oligonucleotide
  Sense strand starting at position 355 of SEQ ID NO: 3994
uguauuauuguccacauua

SEQ ID NO: 311011 - RNA, 19 nt, Artificial Sequence
  Description of Artificial Sequence: Synthetic oligonucleotide
  Antisense strand to SEQ ID NO: 311010
uaauguggacaauaauaca

SEQ ID NO: 311012 - RNA, 19 nt, Artificial Sequence
  Description of Artificial Sequence: Synthetic oligonucleotide
  Sense strand starting at position 690 of SEQ ID NO: 3994
gugcuugaugugaaguguu

SEQ ID NO: 311013 - RNA, 19 nt, Artificial Sequence
  Description of Artificial Sequence: Synthetic oligonucleotide
  Antisense strand to SEQ ID NO: 311012
aacacuucacaucaagcac

SEQ ID NO: 311014 - RNA, 19 nt, Artificial Sequence
  Description of Artificial Sequence: Synthetic oligonucleotide
  Sense strand starting at position 770 of SEQ ID NO: 3994
ugugacuuuagggaguaau

SEQ ID NO: 311015 - RNA, 19 nt, Artificial Sequence
  Description of Artificial Sequence: Synthetic oligonucleotide
  Antisense strand to SEQ ID NO: 311014
auuacucccuaaagucaca

SEQ ID NO: 311016 - RNA, 19 nt, Artificial Sequence
  Description of Artificial Sequence: Synthetic oligonucleotide
  Sense strand starting at position 987 of SEQ ID NO: 3994
agaugacauuaggaaacuu

SEQ ID NO: 311017 - RNA, 19 nt, Artificial Sequence
  Description of Artificial Sequence: Synthetic oligonucleotide
  Antisense strand to SEQ ID NO: 311016
aaguuuccuaaugucaucu

SEQ ID NO: 311018 - RNA, 19 nt, Artificial Sequence
  Description of Artificial Sequence: Synthetic oligonucleotide
  Sense strand starting at position 1076 of SEQ ID NO: 3994
gcccucuuucuggagaaag

SEQ ID NO: 311019 - RNA, 19 nt, Artificial Sequence
  Description of Artificial Sequence: Synthetic oligonucleotide
  Antisense strand to SEQ ID NO: 311018
cuuucuccagaaagagggc

SEQ ID NO: 311020 - RNA, 19 nt, Artificial Sequence
  Description of Artificial Sequence: Synthetic oligonucleotide
  Sense strand starting at position 1078 of SEQ ID NO: 3994
ccucuuucuggagaaagcu

SEQ ID NO: 311021 - RNA, 19 nt, Artificial Sequence
  Description of Artificial Sequence: Synthetic oligonucleotide
  Antisense strand to SEQ ID NO: 311020
agcuuucuccagaaagagg

SEQ ID NO: 311022 - RNA, 19 nt, Artificial Sequence
  Description of Artificial Sequence: Synthetic oligonucleotide
  Sense strand starting at position 1084 of SEQ ID NO: 3994
ucuggagaaagcugauauc

SEQ ID NO: 311023 - RNA, 19 nt, Artificial Sequence
  Description of Artificial Sequence: Synthetic oligonucleotide
  Antisense strand to SEQ ID NO: 311022
gauaucagcuuucuccaga

SEQ ID NO: 311024 - RNA, 19 nt, Artificial Sequence
  Description of Artificial Sequence: Synthetic oligonucleotide
  Sense strand starting at position 1129 of SEQ ID NO: 3994
uagaauucccuuuggguag

SEQ ID NO: 311025 - RNA, 19 nt, Artificial Sequence
  Description of Artificial Sequence: Synthetic oligonucleotide
  Antisense strand to SEQ ID NO: 311024
cuacccaaagggaauucua

SEQ ID NO: 311026 - RNA, 19 nt, Artificial Sequence
  Description of Artificial Sequence: Synthetic oligonucleotide
  Sense strand starting at position 1135 of SEQ ID NO: 3994
ucccuuuggguagguaaua

SEQ ID NO: 311027 - RNA, 19 nt, Artificial Sequence
  Description of Artificial Sequence: Synthetic oligonucleotide
  Antisense strand to SEQ ID NO: 311026
uauuaccuacccaaaggga

SEQ ID NO: 311028 - RNA, 19 nt, Artificial Sequence
  Description of Artificial Sequence: Synthetic oligonucleotide
  Sense strand starting at position 1136 of SEQ ID NO: 3994
cccuuuggguagguaauaa

SEQ ID NO: 311029 - RNA, 19 nt, Artificial Sequence
  Description of Artificial Sequence: Synthetic oligonucleotide
  Antisense strand to SEQ ID NO: 311028
uuauuaccuacccaaaggg

SEQ ID NO: 311030 - RNA, 19 nt, Artificial Sequence
  Description of Artificial Sequence: Synthetic oligonucleotide
  Sense strand starting at position 1146 of SEQ ID NO: 3994
agguaauaaagccgaugau

SEQ ID NO: 311031 - RNA, 19 nt, Artificial Sequence
  Description of Artificial Sequence: Synthetic oligonucleotide
  Antisense strand to SEQ ID NO: 311030
aucaucggcuuuauuaccu

SEQ ID NO: 311032 - RNA, 19 nt, Artificial Sequence
  Description of Artificial Sequence: Synthetic oligonucleotide
  Sense strand starting at position 1147 of SEQ ID NO: 3994
gguaauaaagccgaugauu

SEQ ID NO: 311033 - RNA, 19 nt, Artificial Sequence
  Description of Artificial Sequence: Synthetic oligonucleotide
  Antisense strand to SEQ ID NO: 311032
aaucaucggcuuuauuacc

SEQ ID NO: 311034 - RNA, 19 nt, Artificial Sequence
  Description of Artificial Sequence: Synthetic oligonucleotide
  Sense strand starting at position 1242 of SEQ ID NO: 3994
ggaagcucccuuugacaaa

SEQ ID NO: 311035 - RNA, 19 nt, Artificial Sequence
  Description of Artificial Sequence: Synthetic oligonucleotide
  Antisense strand to SEQ ID NO: 311034
uuugucaaagggagcuucc

SEQ ID NO: 311036 - RNA, 19 nt, Artificial Sequence
  Description of Artificial Sequence: Synthetic oligonucleotide
  Sense strand starting at position 1368 of SEQ ID NO: 3994
uuagaaaguuuaucuugga

SEQ ID NO: 311037 - RNA, 19 nt, Artificial Sequence
  Description of Artificial Sequence: Synthetic oligonucleotide
  Antisense strand to SEQ ID NO: 311036
uccaagauaaacuuucuaa

SEQ ID NO: 311038 - RNA, 19 nt, Artificial Sequence
  Description of Artificial Sequence: Synthetic oligonucleotide
  Sense strand starting at position 1421 of SEQ ID NO: 3994
ccagcaauaucugucaaug

SEQ ID NO: 311039 - RNA, 19 nt, Artificial Sequence
  Description of Artificial Sequence: Synthetic oligonucleotide
  Antisense strand to SEQ ID NO: 311038
cauugacagauauugcugg

SEQ ID NO: 311040 - RNA, 19 nt, Artificial Sequence
  Description of Artificial Sequence: Synthetic oligonucleotide
  Sense strand starting at position 1517 of SEQ ID NO: 3994
gccacagguaggcauuaau

SEQ ID NO: 311041 - RNA, 19 nt, Artificial Sequence
  Description of Artificial Sequence: Synthetic oligonucleotide
  Antisense strand to SEQ ID NO: 311040
auuaaugccuaccuguggc

SEQ ID NO: 311042 - RNA, 19 nt, Artificial Sequence
  Description of Artificial Sequence: Synthetic oligonucleotide
  Sense strand starting at position 1542 of SEQ ID NO: 3994
gguuaugguaaauguaaac

SEQ ID NO: 311043 - RNA, 19 nt, Artificial Sequence
  Description of Artificial Sequence: Synthetic oligonucleotide
  Antisense strand to SEQ ID NO: 311042
guuuacauuuaccauaacc

SEQ ID NO: 311044 - RNA, 19 nt, Artificial Sequence
  Description of Artificial Sequence: Synthetic oligonucleotide
  Sense strand starting at position 1761 of SEQ ID NO: 3994
gaagaaacaugggauaaau

SEQ ID NO: 311045 - RNA, 19 nt, Artificial Sequence
  Description of Artificial Sequence: Synthetic oligonucleotide
  Antisense strand to SEQ ID NO: 311044
auuuaucccauguuucuuc

SEQ ID NO: 311046 - RNA, 19 nt, Artificial Sequence
  Description of Artificial Sequence: Synthetic oligonucleotide
  Sense strand starting at position 1783 of SEQ ID NO: 3994
auguaauguuuaucugaag

SEQ ID NO: 311047 - RNA, 19 nt, Artificial Sequence
  Description of Artificial Sequence: Synthetic oligonucleotide
  Antisense strand to SEQ ID NO: 311046
cuucagauaaacauuacau

SEQ ID NO: 311048 - RNA, 19 nt, Artificial Sequence
  Description of Artificial Sequence: Synthetic oligonucleotide
  Sense strand starting at position 1784 of SEQ ID NO: 3994
uguaauguuuaucugaaga

SEQ ID NO: 311049 - RNA, 19 nt, Artificial Sequence
  Description of Artificial Sequence: Synthetic oligonucleotide
  Antisense strand to SEQ ID NO: 311048
ucuucagauaaacauuaca

SEQ ID NO: 311050 - RNA, 19 nt, Artificial Sequence
  Description of Artificial Sequence: Synthetic oligonucleotide
  Sense strand starting at position 1868 of SEQ ID NO: 3994
cccauauugcuacagauga

SEQ ID NO: 311051 - RNA, 19 nt, Artificial Sequence
  Description of Artificial Sequence: Synthetic oligonucleotide
  Antisense strand to SEQ ID NO: 311050
ucaucuguagcaauauggg

SEQ ID NO: 311052 - RNA, 19 nt, Artificial Sequence
  Description of Artificial Sequence: Synthetic oligonucleotide
  Sense strand starting at position 2534 of SEQ ID NO: 3994
ggguuucugcaucaguaag

SEQ ID NO: 311053 - RNA, 19 nt, Artificial Sequence
  Description of Artificial Sequence: Synthetic oligonucleotide
  Antisense strand to SEQ ID NO: 311052
cuuacugaugcagaaaccc

SEQ ID NO: 311054 - RNA, 19 nt, Artificial Sequence
  Description of Artificial Sequence: Synthetic oligonucleotide
  Sense strand starting at position 2669 of SEQ ID NO: 3994
ugcuuuagacgaggcuaga

SEQ ID NO: 311055 - RNA, 19 nt, Artificial Sequence
  Description of Artificial Sequence: Synthetic oligonucleotide
  Antisense strand to SEQ ID NO: 311054
ucuagccucgucuaaagca

SEQ ID NO: 311056 - RNA, 19 nt, Artificial Sequence
  Description of Artificial Sequence: Synthetic oligonucleotide
  Sense strand starting at position 2748 of SEQ ID NO: 3994
uucuacgugcgagauauuu

SEQ ID NO: 311057 - RNA, 19 nt, Artificial Sequence
  Description of Artificial Sequence: Synthetic oligonucleotide
  Antisense strand to SEQ ID NO: 311056
aaauaucucgcacguagaa

SEQ ID NO: 311058 - RNA, 19 nt, Artificial Sequence
  Description of Artificial Sequence: Synthetic oligonucleotide
  Sense strand starting at position 2840 of SEQ ID NO: 3994
agaugaaaguuccagaaga

SEQ ID NO: 311059 - RNA, 19 nt, Artificial Sequence
  Description of Artificial Sequence: Synthetic oligonucleotide
  Antisense strand to SEQ ID NO: 311058
ucuucuggaacuuucaucu

SEQ ID NO: 311060 - RNA, 19 nt, Artificial Sequence
  Description of Artificial Sequence: Synthetic oligonucleotide
  Sense strand starting at position 2981 of SEQ ID NO: 3994
gaaagacuucccuggugcu

SEQ ID NO: 311061 - RNA, 19 nt, Artificial Sequence
  Description of Artificial Sequence: Synthetic oligonucleotide
  Antisense strand to SEQ ID NO: 311060
agcaccagggaagucuuuc

SEQ ID NO: 311062 - RNA, 19 nt, Artificial Sequence
  Description of Artificial Sequence: Synthetic oligonucleotide
  Sense strand starting at position 3127 of SEQ ID NO: 3994
ugucauuaggcgucauugu

SEQ ID NO: 311063 - RNA, 19 nt, Artificial Sequence
  Description of Artificial Sequence: Synthetic oligonucleotide
  Antisense strand to SEQ ID NO: 311062
acaaugacgccuaaugaca

SEQ ID NO: 311064 - RNA, 19 nt, Artificial Sequence
  Description of Artificial Sequence: Synthetic oligonucleotide
  Sense strand starting at position 3225 of SEQ ID NO: 3994
gacacaaaugggugagcau

SEQ ID NO: 311065 - RNA, 19 nt, Artificial Sequence
  Description of Artificial Sequence: Synthetic oligonucleotide
  Antisense strand to SEQ ID NO: 311064
augcucacccauuuguguc

SEQ ID NO: 311066 - RNA, 19 nt, Artificial Sequence
  Description of Artificial Sequence: Synthetic oligonucleotide
  Sense strand starting at position 3228 of SEQ ID NO: 3994
acaaaugggugagcauaaa

SEQ ID NO: 311067 - RNA, 19 nt, Artificial Sequence
  Description of Artificial Sequence: Synthetic oligonucleotide
  Antisense strand to SEQ ID NO: 311066
uuuaugcucacccauuugu

SEQ ID NO: 311068 - RNA, 19 nt, Artificial Sequence
  Description of Artificial Sequence: Synthetic oligonucleotide
  Sense strand starting at position 3661 of SEQ ID NO: 3994
guuuauaagcaaugaagca

SEQ ID NO: 311069 - RNA, 19 nt, Artificial Sequence
  Description of Artificial Sequence: Synthetic oligonucleotide
  Antisense strand to SEQ ID NO: 311068
ugcuucauugcuuauaaac

SEQ ID NO: 311070 - RNA, 19 nt, Artificial Sequence
  Description of Artificial Sequence: Synthetic oligonucleotide
  Sense strand starting at position 3735 of SEQ ID NO: 3994
agcuccuguagguauaaga

SEQ ID NO: 311071 - RNA, 19 nt, Artificial Sequence
  Description of Artificial Sequence: Synthetic oligonucleotide
  Antisense strand to SEQ ID NO: 311070
ucuuauaccuacaggagcu

SEQ ID NO: 311072 - RNA, 19 nt, Artificial Sequence
  Description of Artificial Sequence: Synthetic oligonucleotide
  Sense strand starting at position 195 of SEQ ID NO: 3995
auuggcaugauugguugaa

SEQ ID NO: 311073 - RNA, 19 nt, Artificial Sequence
  Description of Artificial Sequence: Synthetic oligonucleotide
  Antisense strand to SEQ ID NO: 311072
uucaaccaaucaugccaau

SEQ ID NO: 311074 - RNA, 19 nt, Artificial Sequence
  Description of Artificial Sequence: Synthetic oligonucleotide
  Sense strand starting at position 197 of SEQ ID NO: 3995
uggcaugauugguugaaga

SEQ ID NO: 311075 - RNA, 19 nt, Artificial Sequence
  Description of Artificial Sequence: Synthetic oligonucleotide
  Antisense strand to SEQ ID NO: 311074
ucuucaaccaaucaugcca

SEQ ID NO: 311076 - RNA, 19 nt, Artificial Sequence
  Description of Artificial Sequence: Synthetic oligonucleotide
  Sense strand starting at position 275 of SEQ ID NO: 3995
aagggaaugugagacgauu

SEQ ID NO: 311077 - RNA, 19 nt, Artificial Sequence
  Description of Artificial Sequence: Synthetic oligonucleotide
  Antisense strand to SEQ ID NO: 311076
aaucgucucacauucccuu

SEQ ID NO: 311078 - RNA, 19 nt, Artificial Sequence
  Description of Artificial Sequence: Synthetic oligonucleotide
  Sense strand starting at position 893 of SEQ ID NO: 3995
ugcugagaggaguguugaa

SEQ ID NO: 311079 - RNA, 19 nt, Artificial Sequence
  Description of Artificial Sequence: Synthetic oligonucleotide
  Antisense strand to SEQ ID NO: 311078
uucaacacuccucucagca

SEQ ID NO: 311080 - RNA, 19 nt, Artificial Sequence
  Description of Artificial Sequence: Synthetic oligonucleotide
  Sense strand starting at position 909 of SEQ ID NO: 3995
gaaauaucugaagggcugu

SEQ ID NO: 311081 - RNA, 19 nt, Artificial Sequence
  Description of Artificial Sequence: Synthetic oligonucleotide
  Antisense strand to SEQ ID NO: 311080
acagcccuucagauauuuc

SEQ ID NO: 311082 - RNA, 19 nt, Artificial Sequence
  Description of Artificial Sequence: Synthetic oligonucleotide
  Sense strand starting at position 950 of SEQ ID NO: 3995
uagcaagaaucagucuaga

SEQ ID NO: 311083 - RNA, 19 nt, Artificial Sequence
  Description of Artificial Sequence: Synthetic oligonucleotide
  Antisense strand to SEQ ID NO: 311082
ucuagacugauucuugcua

SEQ ID NO: 311084 - RNA, 19 nt, Artificial Sequence
  Description of Artificial Sequence: Synthetic oligonucleotide
  Sense strand starting at position 1116 of SEQ ID NO: 3995
agaagacagucugagauaa

SEQ ID NO: 311085 - RNA, 19 nt, Artificial Sequence
  Description of Artificial Sequence: Synthetic oligonucleotide
  Antisense strand to SEQ ID NO: 311084
uuaucucagacugucuucu

SEQ ID NO: 311086 - RNA, 19 nt, Artificial Sequence
  Description of Artificial Sequence: Synthetic oligonucleotide
  Sense strand starting at position 1118 of SEQ ID NO: 3995
aagacagucugagauaauc

SEQ ID NO: 311087 - RNA, 19 nt, Artificial Sequence
  Description of Artificial Sequence: Synthetic oligonucleotide
  Antisense strand to SEQ ID NO: 311086
gauuaucucagacugucuu

SEQ ID NO: 311088 - RNA, 19 nt, Artificial Sequence
  Description of Artificial Sequence: Synthetic oligonucleotide
  Sense strand starting at position 1128 of SEQ ID NO: 3995
gagauaaucucagucucag

SEQ ID NO: 311089 - RNA, 19 nt, Artificial Sequence
  Description of Artificial Sequence: Synthetic oligonucleotide
  Antisense strand to SEQ ID NO: 311088
cugagacugagauuaucuc

SEQ ID NO: 311090 - RNA, 19 nt, Artificial Sequence
  Description of Artificial Sequence: Synthetic oligonucleotide
  Sense strand starting at position 1156 of SEQ ID NO: 3995
agcgguaggucauuuccaa

SEQ ID NO: 311091 - RNA, 19 nt, Artificial Sequence
  Description of Artificial Sequence: Synthetic oligonucleotide
  Antisense strand to SEQ ID NO: 311090
uuggaaaugaccuaccgcu

SEQ ID NO: 311092 - RNA, 19 nt, Artificial Sequence
  Description of Artificial Sequence: Synthetic oligonucleotide
  Sense strand starting at position 1160 of SEQ ID NO: 3995
guaggucauuuccaaagca

SEQ ID NO: 311093 - RNA, 19 nt, Artificial Sequence
  Description of Artificial Sequence: Synthetic oligonucleotide
  Antisense strand to SEQ ID NO: 311092
ugcuuuggaaaugaccuac

SEQ ID NO: 311094 - RNA, 19 nt, Artificial Sequence
  Description of Artificial Sequence: Synthetic oligonucleotide
  Sense strand starting at position 1247 of SEQ ID NO: 3995
ucaggcucccuaggauaga

SEQ ID NO: 311095 - RNA, 19 nt, Artificial Sequence
  Description of Artificial Sequence: Synthetic oligonucleotide
  Antisense strand to SEQ ID NO: 311094
ucuauccuagggagccuga

SEQ ID NO: 311096 - RNA, 19 nt, Artificial Sequence
  Description of Artificial Sequence: Synthetic oligonucleotide
  Sense strand starting at position 1306 of SEQ ID NO: 3995
augggauugcuguggauga

SEQ ID NO: 311097 - RNA, 19 nt, Artificial Sequence
  Description of Artificial Sequence: Synthetic oligonucleotide
  Antisense strand to SEQ ID NO: 311096
ucauccacagcaaucccau

SEQ ID NO: 311098 - RNA, 19 nt, Artificial Sequence
  Description of Artificial Sequence: Synthetic oligonucleotide
  Sense strand starting at position 1308 of SEQ ID NO: 3995
gggauugcuguggaugaua

SEQ ID NO: 311099 - RNA, 19 nt, Artificial Sequence
  Description of Artificial Sequence: Synthetic oligonucleotide
  Antisense strand to SEQ ID NO: 311098
uaucauccacagcaauccc

SEQ ID NO: 311100 - RNA, 19 nt, Artificial Sequence
  Description of Artificial Sequence: Synthetic oligonucleotide
  Sense strand starting at position 1573 of SEQ ID NO: 3995
cguuacaaaguuuagacaa

SEQ ID NO: 311101 - RNA, 19 nt, Artificial Sequence
  Description of Artificial Sequence: Synthetic oligonucleotide
  Antisense strand to SEQ ID NO: 311100
uugucuaaacuuuguaacg

SEQ ID NO: 311102 - RNA, 19 nt, Artificial Sequence
  Description of Artificial Sequence: Synthetic oligonucleotide
  Sense strand starting at position 1595 of SEQ ID NO: 3995
guggaagagacauguuuag

SEQ ID NO: 311103 - RNA, 19 nt, Artificial Sequence
  Description of Artificial Sequence: Synthetic oligonucleotide
  Antisense strand to SEQ ID NO: 311102
cuaaacaugucucuuccac

SEQ ID NO: 311104 - RNA, 19 nt, Artificial Sequence
  Description of Artificial Sequence: Synthetic oligonucleotide
  Sense strand starting at position 1692 of SEQ ID NO: 3995
aauggcugucgugauaggu

SEQ ID NO: 311105 - RNA, 19 nt, Artificial Sequence
  Description of Artificial Sequence: Synthetic oligonucleotide
  Antisense strand to SEQ ID NO: 311104
accuaucacgacagccauu

SEQ ID NO: 311106 - RNA, 19 nt, Artificial Sequence
  Description of Artificial Sequence: Synthetic oligonucleotide
  Sense strand starting at position 2030 of SEQ ID NO: 3995
agagguuucucccugugac

SEQ ID NO: 311107 - RNA, 19 nt, Artificial Sequence
  Description of Artificial Sequence: Synthetic oligonucleotide
  Antisense strand to SEQ ID NO: 311106
gucacagggagaaaccucu

SEQ ID NO: 311108 - RNA, 19 nt, Artificial Sequence
  Description of Artificial Sequence: Synthetic oligonucleotide
  Sense strand starting at position 2031 of SEQ ID NO: 3995
gagguuucucccugugacc

SEQ ID NO: 311109 - RNA, 19 nt, Artificial Sequence
  Description of Artificial Sequence: Synthetic oligonucleotide
  Antisense strand to SEQ ID NO: 311108
ggucacagggagaaaccuc

SEQ ID NO: 311110 - RNA, 19 nt, Artificial Sequence
  Description of Artificial Sequence: Synthetic oligonucleotide
  Sense strand starting at position 2033 of SEQ ID NO: 3995
gguuucucccugugaccaa

SEQ ID NO: 311111 - RNA, 19 nt, Artificial Sequence
  Description of Artificial Sequence: Synthetic oligonucleotide
  Antisense strand to SEQ ID NO: 311110
uuggucacagggagaaacc

SEQ ID NO: 311112 - RNA, 19 nt, Artificial Sequence
  Description of Artificial Sequence: Synthetic oligonucleotide
  Sense strand starting at position 2277 of SEQ ID NO: 3995
gguaaucccggcuggaaga

SEQ ID NO: 311113 - RNA, 19 nt, Artificial Sequence
  Description of Artificial Sequence: Synthetic oligonucleotide
  Antisense strand to SEQ ID NO: 311112
ucuuccagccgggauuacc

SEQ ID NO: 311114 - RNA, 19 nt, Artificial Sequence
  Description of Artificial Sequence: Synthetic oligonucleotide
  Sense strand starting at position 3196 of SEQ ID NO: 3995
gcgggauauuaauuaauga

SEQ ID NO: 311115 - RNA, 19 nt, Artificial Sequence
  Description of Artificial Sequence: Synthetic oligonucleotide
  Antisense strand to SEQ ID NO: 311114
ucauuaauuaauaucccgc

SEQ ID NO: 311116 - RNA, 19 nt, Artificial Sequence
  Description of Artificial Sequence: Synthetic oligonucleotide
  Sense strand starting at position 3288 of SEQ ID NO: 3995
gcuuuagguccuuaucucu

SEQ ID NO: 311117 - RNA, 19 nt, Artificial Sequence
  Description of Artificial Sequence: Synthetic oligonucleotide
  Antisense strand to SEQ ID NO: 311116
agagauaaggaccuaaagc

SEQ ID NO: 311118 - RNA, 19 nt, Artificial Sequence
  Description of Artificial Sequence: Synthetic oligonucleotide
  Sense strand starting at position 3312 of SEQ ID NO: 3995
ggagaagcaucaguaaugu

SEQ ID NO: 311119 - RNA, 19 nt, Artificial Sequence
  Description of Artificial Sequence: Synthetic oligonucleotide
  Antisense strand to SEQ ID NO: 311118
acauuacugaugcuucucc

SEQ ID NO: 311120 - RNA, 19 nt, Artificial Sequence
  Description of Artificial Sequence: Synthetic oligonucleotide
  Sense strand starting at position 3361 of SEQ ID NO: 3995
ccagcuuucccagaggucu

SEQ ID NO: 311121 - RNA, 19 nt, Artificial Sequence
  Description of Artificial Sequence: Synthetic oligonucleotide
  Antisense strand to SEQ ID NO: 311120
agaccucugggaaagcugg

SEQ ID NO: 311122 - RNA, 19 nt, Artificial Sequence
  Description of Artificial Sequence: Synthetic oligonucleotide
  Sense strand starting at position 3367 of SEQ ID NO: 3995
uucccagaggucuguuguu

SEQ ID NO: 311123 - RNA, 19 nt, Artificial Sequence
  Description of Artificial Sequence: Synthetic oligonucleotide
  Antisense strand to SEQ ID NO: 311122
aacaacagaccucugggaa

SEQ ID NO: 311124 - RNA, 19 nt, Artificial Sequence
  Description of Artificial Sequence: Synthetic oligonucleotide
  Sense strand starting at position 3407 of SEQ ID NO: 3995
gagaguaucagguggauaa

SEQ ID NO: 311125 - RNA, 19 nt, Artificial Sequence
  Description of Artificial Sequence: Synthetic oligonucleotide
  Antisense strand to SEQ ID NO: 311124
uuauccaccugauacucuc

SEQ ID NO: 311126 - RNA, 19 nt, Artificial Sequence
  Description of Artificial Sequence: Synthetic oligonucleotide
  Sense strand starting at position 3419 of SEQ ID NO: 3995
uggauaacugcucaagcca

SEQ ID NO: 311127 - RNA, 19 nt, Artificial Sequence
  Description of Artificial Sequence: Synthetic oligonucleotide
  Antisense strand to SEQ ID NO: 311126
uggcuugagcaguuaucca

SEQ ID NO: 311128 - RNA, 19 nt, Artificial Sequence
  Description of Artificial Sequence: Synthetic oligonucleotide
  Sense strand starting at position 3444 of SEQ ID NO: 3995
caggcuuagccuugauaua

SEQ ID NO: 311129 - RNA, 19 nt, Artificial Sequence
  Description of Artificial Sequence: Synthetic oligonucleotide
  Antisense strand to SEQ ID NO: 311128
uauaucaaggcuaagccug

SEQ ID NO: 311130 - RNA, 19 nt, Artificial Sequence
  Description of Artificial Sequence: Synthetic oligonucleotide
  Sense strand starting at position 3445 of SEQ ID NO: 3995
aggcuuagccuugauauau

SEQ ID NO: 311131 - RNA, 19 nt, Artificial Sequence
  Description of Artificial Sequence: Synthetic oligonucleotide
  Antisense strand to SEQ ID NO: 311130
auauaucaaggcuaagccu

SEQ ID NO: 311132 - RNA, 19 nt, Artificial Sequence
  Description of Artificial Sequence: Synthetic oligonucleotide
  Sense strand starting at position 3541 of SEQ ID NO: 3995
cacuuucgucuugguuaaa

SEQ ID NO: 311133 - RNA, 19 nt, Artificial Sequence
  Description of Artificial Sequence: Synthetic oligonucleotide
  Antisense strand to SEQ ID NO: 311132
uuuaaccaagacgaaagug

SEQ ID NO: 311134 - RNA, 19 nt, Artificial Sequence
  Description of Artificial Sequence: Synthetic oligonucleotide
  Sense strand starting at position 3542 of SEQ ID NO: 3995
acuuucgucuugguuaaag

SEQ ID NO: 311135 - RNA, 19 nt, Artificial Sequence
  Description of Artificial Sequence: Synthetic oligonucleotide
  Antisense strand to SEQ ID NO: 311134
cuuuaaccaagacgaaagu

SEQ ID NO: 311136 - RNA, 19 nt, Artificial Sequence
  Description of Artificial Sequence: Synthetic oligonucleotide
  Sense strand starting at position 3544 of SEQ ID NO: 3995
uuucgucuugguuaaagca

SEQ ID NO: 311137 - RNA, 19 nt, Artificial Sequence
  Description of Artificial Sequence: Synthetic oligonucleotide
  Antisense strand to SEQ ID NO: 311136
ugcuuuaaccaagacgaaa

SEQ ID NO: 311138 - RNA, 19 nt, Artificial Sequence
  Description of Artificial Sequence: Synthetic oligonucleotide
  Sense strand starting at position 3597 of SEQ ID NO: 3995
ccuaguuguucuccauacu

SEQ ID NO: 311139 - RNA, 19 nt, Artificial Sequence
  Description of Artificial Sequence: Synthetic oligonucleotide
  Antisense strand to SEQ ID NO: 311138
aguauggagaacaacuagg

SEQ ID NO: 311140 - RNA, 19 nt, Artificial Sequence
  Description of Artificial Sequence: Synthetic oligonucleotide
  Sense strand starting at position 3598 of SEQ ID NO: 3995
cuaguuguucuccauacuu

SEQ ID NO: 311141 - RNA, 19 nt, Artificial Sequence
  Description of Artificial Sequence: Synthetic oligonucleotide
  Antisense strand to SEQ ID NO: 311140
aaguauggagaacaacuag

SEQ ID NO: 311142 - RNA, 19 nt, Artificial Sequence
  Description of Artificial Sequence: Synthetic oligonucleotide
  Sense strand starting at position 3600 of SEQ ID NO: 3995
aguuguucuccauacuucu

SEQ ID NO: 311143 - RNA, 19 nt, Artificial Sequence
  Description of Artificial Sequence: Synthetic oligonucleotide
  Antisense strand to SEQ ID NO: 311142
agaaguauggagaacaacu

SEQ ID NO: 311144 - RNA, 19 nt, Artificial Sequence
  Description of Artificial Sequence: Synthetic oligonucleotide
  Sense strand starting at position 3622 of SEQ ID NO: 3995
ucuugucuccacgaagauu

SEQ ID NO: 311145 - RNA, 19 nt, Artificial Sequence
  Description of Artificial Sequence: Synthetic oligonucleotide
  Antisense strand to SEQ ID NO: 311144
aaucuucguggagacaaga

SEQ ID NO: 311146 - RNA, 19 nt, Artificial Sequence
  Description of Artificial Sequence: Synthetic oligonucleotide
  Sense strand starting at position 3683 of SEQ ID NO: 3995
ccaaguaugucacuucucu

SEQ ID NO: 311147 - RNA, 19 nt, Artificial Sequence
  Description of Artificial Sequence: Synthetic oligonucleotide
  Antisense strand to SEQ ID NO: 311146
agagaagugacauacuugg

SEQ ID NO: 311148 - RNA, 19 nt, Artificial Sequence
  Description of Artificial Sequence: Synthetic oligonucleotide
  Sense strand starting at position 3737 of SEQ ID NO: 3995
ucuccuuugcuagacaugu

SEQ ID NO: 311149 - RNA, 19 nt, Artificial Sequence
  Description of Artificial Sequence: Synthetic oligonucleotide
  Antisense strand to SEQ ID NO: 311148
acaugucuagcaaaggaga

SEQ ID NO: 311150 - RNA, 19 nt, Artificial Sequence
  Description of Artificial Sequence: Synthetic oligonucleotide
  Sense strand starting at position 3868 of SEQ ID NO: 3995
ucauuucuaucuguuuguu

SEQ ID NO: 311151 - RNA, 19 nt, Artificial Sequence
  Description of Artificial Sequence: Synthetic oligonucleotide
  Antisense strand to SEQ ID NO: 311150
aacaaacagauagaaauga

SEQ ID NO: 311152 - RNA, 19 nt, Artificial Sequence
  Description of Artificial Sequence: Synthetic oligonucleotide
  Sense strand starting at position 208 of SEQ ID NO: 3996
gcuuuaagagaauagcagu

SEQ ID NO: 311153 - RNA, 19 nt, Artificial Sequence
  Description of Artificial Sequence: Synthetic oligonucleotide
  Antisense strand to SEQ ID NO: 311152
acugcuauucucuuaaagc

SEQ ID NO: 311154 - RNA, 19 nt, Artificial Sequence
  Description of Artificial Sequence: Synthetic oligonucleotide
  Sense strand starting at position 280 of SEQ ID NO: 3996
ggcucauugcaucaaggaa

SEQ ID NO: 311155 - RNA, 19 nt, Artificial Sequence
  Description of Artificial Sequence: Synthetic oligonucleotide
  Antisense strand to SEQ ID NO: 311154
uuccuugaugcaaugagcc

SEQ ID NO: 311156 - RNA, 19 nt, Artificial Sequence
  Description of Artificial Sequence: Synthetic oligonucleotide
  Sense strand starting at position 369 of SEQ ID NO: 3996
ccuuuaggauuugaaagac

SEQ ID NO: 311157 - RNA, 19 nt, Artificial Sequence
  Description of Artificial Sequence: Synthetic oligonucleotide
  Antisense strand to SEQ ID NO: 311156
gucuuucaaauccuaaagg

SEQ ID NO: 311158 - RNA, 19 nt, Artificial Sequence
  Description of Artificial Sequence: Synthetic oligonucleotide
  Sense strand starting at position 378 of SEQ ID NO: 3996
uuugaaagacgcuaaaguu

SEQ ID NO: 311159 - RNA, 19 nt, Artificial Sequence
  Description of Artificial Sequence: Synthetic oligonucleotide
  Antisense strand to SEQ ID NO: 311158
aacuuuagcgucuuucaaa

SEQ ID NO: 311160 - RNA, 19 nt, Artificial Sequence
  Description of Artificial Sequence: Synthetic oligonucleotide
  Sense strand starting at position 392 of SEQ ID NO: 3996
aaguuuaaagucgaaucau

SEQ ID NO: 311161 - RNA, 19 nt, Artificial Sequence
  Description of Artificial Sequence: Synthetic oligonucleotide
  Antisense strand to SEQ ID NO: 311160
augauucgacuuuaaacuu

SEQ ID NO: 311162 - RNA, 19 nt, Artificial Sequence
  Description of Artificial Sequence: Synthetic oligonucleotide
  Sense strand starting at position 449 of SEQ ID NO: 3996
gugggaguucuggauugca

SEQ ID NO: 311163 - RNA, 19 nt, Artificial Sequence
  Description of Artificial Sequence: Synthetic oligonucleotide
  Antisense strand to SEQ ID NO: 311162
ugcaauccagaacucccac

SEQ ID NO: 311164 - RNA, 19 nt, Artificial Sequence
  Description of Artificial Sequence: Synthetic oligonucleotide
  Sense strand starting at position 479 of SEQ ID NO: 3996
accaguaucucuguaacuu

SEQ ID NO: 311165 - RNA, 19 nt, Artificial Sequence
  Description of Artificial Sequence: Synthetic oligonucleotide
  Antisense strand to SEQ ID NO: 311164
aaguuacagagauacuggu

SEQ ID NO: 311166 - RNA, 19 nt, Artificial Sequence
  Description of Artificial Sequence: Synthetic oligonucleotide
  Sense strand starting at position 480 of SEQ ID NO: 3996
ccaguaucucuguaacuua

SEQ ID NO: 311167 - RNA, 19 nt, Artificial Sequence
  Description of Artificial Sequence: Synthetic oligonucleotide
  Antisense strand to SEQ ID NO: 311166
uaaguuacagagauacugg

SEQ ID NO: 311168 - RNA, 19 nt, Artificial Sequence
  Description of Artificial Sequence: Synthetic oligonucleotide
  Sense strand starting at position 491 of SEQ ID NO: 3996
guaacuuagcagcaagcua

SEQ ID NO: 311169 - RNA, 19 nt, Artificial Sequence
  Description of Artificial Sequence: Synthetic oligonucleotide
  Antisense strand to SEQ ID NO: 311168
uagcuugcugcuaaguuac

SEQ ID NO: 311170 - RNA, 19 nt, Artificial Sequence
  Description of Artificial Sequence: Synthetic oligonucleotide
  Sense strand starting at position 558 of SEQ ID NO: 3996
cccaaucaguguuucccaa

SEQ ID NO: 311171 - RNA, 19 nt, Artificial Sequence
  Description of Artificial Sequence: Synthetic oligonucleotide
  Antisense strand to SEQ ID NO: 311170
uugggaaacacugauuggg

SEQ ID NO: 311172 - RNA, 19 nt, Artificial Sequence
  Description of Artificial Sequence: Synthetic oligonucleotide
  Sense strand starting at position 589 of SEQ ID NO: 3996
cguccaaugcaagauguca

SEQ ID NO: 311173 - RNA, 19 nt, Artificial Sequence
  Description of Artificial Sequence: Synthetic oligonucleotide
  Antisense strand to SEQ ID NO: 311172
ugacaucuugcauuggacg

SEQ ID NO: 311174 - RNA, 19 nt, Artificial Sequence
  Description of Artificial Sequence: Synthetic oligonucleotide
  Sense strand starting at position 659 of SEQ ID NO: 3996
aguuuacucugucugguga

SEQ ID NO: 311175 - RNA, 19 nt, Artificial Sequence
  Description of Artificial Sequence: Synthetic oligonucleotide
  Antisense strand to SEQ ID NO: 311174
ucaccagacagaguaaacu

SEQ ID NO: 311176 - RNA, 19 nt, Artificial Sequence
  Description of Artificial Sequence: Synthetic oligonucleotide
  Sense strand starting at position 667 of SEQ ID NO: 3996
cugucuggugaguaauguu

SEQ ID NO: 311177 - RNA, 19 nt, Artificial Sequence
  Description of Artificial Sequence: Synthetic oligonucleotide
  Antisense strand to SEQ ID NO: 311176
aacauuacucaccagacag

SEQ ID NO: 311178 - RNA, 19 nt, Artificial Sequence
  Description of Artificial Sequence: Synthetic oligonucleotide
  Sense strand starting at position 837 of SEQ ID NO: 3996
gcgugaaaucccugaguac

SEQ ID NO: 311179 - RNA, 19 nt, Artificial Sequence
  Description of Artificial Sequence: Synthetic oligonucleotide
  Antisense strand to SEQ ID NO: 311178
guacucagggauuucacgc

SEQ ID NO: 311180 - RNA, 19 nt, Artificial Sequence
  Description of Artificial Sequence: Synthetic oligonucleotide
  Sense strand starting at position 838 of SEQ ID NO: 3996
cgugaaaucccugaguaca

SEQ ID NO: 311181 - RNA, 19 nt, Artificial Sequence
  Description of Artificial Sequence: Synthetic oligonucleotide
  Antisense strand to SEQ ID NO: 311180
uguacucagggauuucacg

SEQ ID NO: 311182 - RNA, 19 nt, Artificial Sequence
  Description of Artificial Sequence: Synthetic oligonucleotide
  Sense strand starting at position 1305 of SEQ ID NO: 3996
acagaagauccgggcuaga

SEQ ID NO: 311183 - RNA, 19 nt, Artificial Sequence
  Description of Artificial Sequence: Synthetic oligonucleotide
  Antisense strand to SEQ ID NO: 311182
ucuagcccggaucuucugu

SEQ ID NO: 311184 - RNA, 19 nt, Artificial Sequence
  Description of Artificial Sequence: Synthetic oligonucleotide
  Sense strand starting at position 2301 of SEQ ID NO: 3996
ugaagaagccauuguuuga

SEQ ID NO: 311185 - RNA, 19 nt, Artificial Sequence
  Description of Artificial Sequence: Synthetic oligonucleotide
  Antisense strand to SEQ ID NO: 311184
ucaaacaauggcuucuuca

SEQ ID NO: 311186 - RNA, 19 nt, Artificial Sequence
  Description of Artificial Sequence: Synthetic oligonucleotide
  Sense strand starting at position 2419 of SEQ ID NO: 3996
ggcauuaacucagugucuu

SEQ ID NO: 311187 - RNA, 19 nt, Artificial Sequence
  Description of Artificial Sequence: Synthetic oligonucleotide
  Antisense strand to SEQ ID NO: 311186
aagacacugaguuaaugcc

SEQ ID NO: 311188 - RNA, 19 nt, Artificial Sequence
  Description of Artificial Sequence: Synthetic oligonucleotide
  Sense strand starting at position 2471 of SEQ ID NO: 3996
ugaaauagaugcucuugua

SEQ ID NO: 311189 - RNA, 19 nt, Artificial Sequence
  Description of Artificial Sequence: Synthetic oligonucleotide
  Antisense strand to SEQ ID NO: 311188
uacaagagcaucuauuuca

SEQ ID NO: 311190 - RNA, 19 nt, Artificial Sequence
  Description of Artificial Sequence: Synthetic oligonucleotide
  Sense strand starting at position 2518 of SEQ ID NO: 3996
agagaaguuugaucacuac

SEQ ID NO: 311191 - RNA, 19 nt, Artificial Sequence
  Description of Artificial Sequence: Synthetic oligonucleotide
  Antisense strand to SEQ ID NO: 311190
guagugaucaaacuucucu

SEQ ID NO: 311192 - RNA, 19 nt, Artificial Sequence
  Description of Artificial Sequence: Synthetic oligonucleotide
  Sense strand starting at position 2527 of SEQ ID NO: 3996
ugaucacuaccuuaagguu

SEQ ID NO: 311193 - RNA, 19 nt, Artificial Sequence
  Description of Artificial Sequence: Synthetic oligonucleotide
  Antisense strand to SEQ ID NO: 311192
aaccuuaagguagugauca

SEQ ID NO: 311194 - RNA, 19 nt, Artificial Sequence
  Description of Artificial Sequence: Synthetic oligonucleotide
  Sense strand starting at position 2596 of SEQ ID NO: 3996
gguacuaucagcugagcuu

SEQ ID NO: 311195 - RNA, 19 nt, Artificial Sequence
  Description of Artificial Sequence: Synthetic oligonucleotide
  Antisense strand to SEQ ID NO: 311194
aagcucagcugauaguacc

SEQ ID NO: 311196 - RNA, 19 nt, Artificial Sequence
  Description of Artificial Sequence: Synthetic oligonucleotide
  Sense strand starting at position 2597 of SEQ ID NO: 3996
guacuaucagcugagcuuu

SEQ ID NO: 311197 - RNA, 19 nt, Artificial Sequence
  Description of Artificial Sequence: Synthetic oligonucleotide
  Antisense strand to SEQ ID NO: 311196
aaagcucagcugauaguac

SEQ ID NO: 311198 - RNA, 19 nt, Artificial Sequence
  Description of Artificial Sequence: Synthetic oligonucleotide
  Sense strand starting at position 2634 of SEQ ID NO: 3996
uugcuuccuguggaacaua

SEQ ID NO: 311199 - RNA, 19 nt, Artificial Sequence
  Description of Artificial Sequence: Synthetic oligonucleotide
  Antisense strand to SEQ ID NO: 311198
uauguuccacaggaagcaa

SEQ ID NO: 311200 - RNA, 19 nt, Artificial Sequence
  Description of Artificial Sequence: Synthetic oligonucleotide
  Sense strand starting at position 2697 of SEQ ID NO: 3996
aaauaugagcgauguacaa

SEQ ID NO: 311201 - RNA, 19 nt, Artificial Sequence
  Description of Artificial Sequence: Synthetic oligonucleotide
  Antisense strand to SEQ ID NO: 311200
uuguacaucgcucauauuu

SEQ ID NO: 311202 - RNA, 19 nt, Artificial Sequence
  Description of Artificial Sequence: Synthetic oligonucleotide
  Sense strand starting at position 2748 of SEQ ID NO: 3996
ggcuaauaugagugacucu

SEQ ID NO: 311203 - RNA, 19 nt, Artificial Sequence
  Description of Artificial Sequence: Synthetic oligonucleotide
  Antisense strand to SEQ ID NO: 311202
agagucacucauauuagcc

SEQ ID NO: 311204 - RNA, 19 nt, Artificial Sequence
  Description of Artificial Sequence: Synthetic oligonucleotide
  Sense strand starting at position 2755 of SEQ ID NO: 3996
augagugacucuuauuucu

SEQ ID NO: 311205 - RNA, 19 nt, Artificial Sequence
  Description of Artificial Sequence: Synthetic oligonucleotide
  Antisense strand to SEQ ID NO: 311204
agaaauaagagucacucau

SEQ ID NO: 311206 - RNA, 19 nt, Artificial Sequence
  Description of Artificial Sequence: Synthetic oligonucleotide
  Sense strand starting at position 2781 of SEQ ID NO: 3996
uuauaauguuaaccgcuau

SEQ ID NO: 311207 - RNA, 19 nt, Artificial Sequence
  Description of Artificial Sequence: Synthetic oligonucleotide
  Antisense strand to SEQ ID NO: 311206
auagcgguuaacauuauaa

SEQ ID NO: 311208 - RNA, 19 nt, Artificial Sequence
  Description of Artificial Sequence: Synthetic oligonucleotide
  Sense strand starting at position 3023 of SEQ ID NO: 3996
ccauuuguuccuggugguu

SEQ ID NO: 311209 - RNA, 19 nt, Artificial Sequence
  Description of Artificial Sequence: Synthetic oligonucleotide
  Antisense strand to SEQ ID NO: 311208
aaccaccaggaacaaaugg

SEQ ID NO: 311210 - RNA, 19 nt, Artificial Sequence
  Description of Artificial Sequence: Synthetic oligonucleotide
  Sense strand starting at position 3046 of SEQ ID NO: 3996
gcuagaggucauugacaac

SEQ ID NO: 311211 - RNA, 19 nt, Artificial Sequence
  Description of Artificial Sequence: Synthetic oligonucleotide
  Antisense strand to SEQ ID NO: 311210
guugucaaugaccucuagc

SEQ ID NO: 311212 - RNA, 19 nt, Artificial Sequence
  Description of Artificial Sequence: Synthetic oligonucleotide
  Sense strand starting at position 3150 of SEQ ID NO: 3996
gcagaauugcauuagaacc

SEQ ID NO: 311213 - RNA, 19 nt, Artificial Sequence
  Description of Artificial Sequence: Synthetic oligonucleotide
  Antisense strand to SEQ ID NO: 311212
gguucuaaugcaauucugc

SEQ ID NO: 311214 - RNA, 19 nt, Artificial Sequence
  Description of Artificial Sequence: Synthetic oligonucleotide
  Sense strand starting at position 3158 of SEQ ID NO: 3996
gcauuagaaccguacuauc

SEQ ID NO: 311215 - RNA, 19 nt, Artificial Sequence
  Description of Artificial Sequence: Synthetic oligonucleotide
  Antisense strand to SEQ ID NO: 311214
gauaguacgguucuaaugc

SEQ ID NO: 311216 - RNA, 19 nt, Artificial Sequence
  Description of Artificial Sequence: Synthetic oligonucleotide
  Sense strand starting at position 3167 of SEQ ID NO: 3996
ccguacuauccacaugacu

SEQ ID NO: 311217 - RNA, 19 nt, Artificial Sequence
  Description of Artificial Sequence: Synthetic oligonucleotide
  Antisense strand to SEQ ID NO: 311216
agucauguggauaguacgg

SEQ ID NO: 311218 - RNA, 19 nt, Artificial Sequence
  Description of Artificial Sequence: Synthetic oligonucleotide
  Sense strand starting at position 3301 of SEQ ID NO: 3996
uuguuacaaugauuacaug

SEQ ID NO: 311219 - RNA, 19 nt, Artificial Sequence
  Description of Artificial Sequence: Synthetic oligonucleotide
  Antisense strand to SEQ ID NO: 311218
cauguaaucauuguaacaa

SEQ ID NO: 311220 - RNA, 19 nt, Artificial Sequence
  Description of Artificial Sequence: Synthetic oligonucleotide
  Sense strand starting at position 3420 of SEQ ID NO: 3996
augugaaucagaugguacu

SEQ ID NO: 311221 - RNA, 19 nt, Artificial Sequence
  Description of Artificial Sequence: Synthetic oligonucleotide
  Antisense strand to SEQ ID NO: 311220
aguaccaucugauucacau

SEQ ID NO: 311222 - RNA, 19 nt, Artificial Sequence
  Description of Artificial Sequence: Synthetic oligonucleotide
  Sense strand starting at position 3421 of SEQ ID NO: 3996
ugugaaucagaugguacuu

SEQ ID NO: 311223 - RNA, 19 nt, Artificial Sequence
  Description of Artificial Sequence: Synthetic oligonucleotide
  Antisense strand to SEQ ID NO: 311222
aaguaccaucugauucaca

SEQ ID NO: 311224 - RNA, 19 nt, Artificial Sequence
  Description of Artificial Sequence: Synthetic oligonucleotide
  Sense strand starting at position 3432 of SEQ ID NO: 3996
ugguacuucuauguacagu

SEQ ID NO: 311225 - RNA, 19 nt, Artificial Sequence
  Description of Artificial Sequence: Synthetic oligonucleotide
  Antisense strand to SEQ ID NO: 311224
acuguacauagaaguacca

SEQ ID NO: 311226 - RNA, 19 nt, Artificial Sequence
  Description of Artificial Sequence: Synthetic oligonucleotide
  Sense strand starting at position 3865 of SEQ ID NO: 3996
uaugcuguugcugaugaga

SEQ ID NO: 311227 - RNA, 19 nt, Artificial Sequence
  Description of Artificial Sequence: Synthetic oligonucleotide
  Antisense strand to SEQ ID NO: 311226
ucucaucagcaacagcaua

SEQ ID NO: 311228 - RNA, 19 nt, Artificial Sequence
  Description of Artificial Sequence: Synthetic oligonucleotide
  Sense strand starting at position 3868 of SEQ ID NO: 3996
gcuguugcugaugagauua

SEQ ID NO: 311229 - RNA, 19 nt, Artificial Sequence
  Description of Artificial Sequence: Synthetic oligonucleotide
  Antisense strand to SEQ ID NO: 311228
uaaucucaucagcaacagc

SEQ ID NO: 311230 - RNA, 19 nt, Artificial Sequence
  Description of Artificial Sequence: Synthetic oligonucleotide
  Sense strand starting at position 3876 of SEQ ID NO: 3996
ugaugagauuaauaagaca

SEQ ID NO: 311231 - RNA, 19 nt, Artificial Sequence
  Description of Artificial Sequence: Synthetic oligonucleotide
  Antisense strand to SEQ ID NO: 311230
ugucuuauuaaucucauca

SEQ ID NO: 311232 - RNA, 19 nt, Artificial Sequence
  Description of Artificial Sequence: Synthetic oligonucleotide
  Sense strand starting at position 92 of SEQ ID NO: 3997
uacuuuaaaugguuugagu

SEQ ID NO: 311233 - RNA, 19 nt, Artificial Sequence
  Description of Artificial Sequence: Synthetic oligonucleotide
  Antisense strand to SEQ ID NO: 311232
acucaaaccauuuaaagua

SEQ ID NO: 311234 - RNA, 19 nt, Artificial Sequence
  Description of Artificial Sequence: Synthetic oligonucleotide
  Sense strand starting at position 94 of SEQ ID NO: 3997
cuuuaaaugguuugaguua

SEQ ID NO: 311235 - RNA, 19 nt, Artificial Sequence
  Description of Artificial Sequence: Synthetic oligonucleotide
  Antisense strand to SEQ ID NO: 311234
uaacucaaaccauuuaaag

SEQ ID NO: 311236 - RNA, 19 nt, Artificial Sequence
  Description of Artificial Sequence: Synthetic oligonucleotide
  Sense strand starting at position 327 of SEQ ID NO: 3997
acuagaugguaguuuauca

SEQ ID NO: 311237 - RNA, 19 nt, Artificial Sequence
  Description of Artificial Sequence: Synthetic oligonucleotide
  Antisense strand to SEQ ID NO: 311236
ugauaaacuaccaucuagu

SEQ ID NO: 311238 - RNA, 19 nt, Artificial Sequence
  Description of Artificial Sequence: Synthetic oligonucleotide
  Sense strand starting at position 334 of SEQ ID NO: 3997
gguaguuuaucaccacaau

SEQ ID NO: 311239 - RNA, 19 nt, Artificial Sequence
  Description of Artificial Sequence: Synthetic oligonucleotide
  Antisense strand to SEQ ID NO: 311238
auuguggugauaaacuacc

SEQ ID NO: 311240 - RNA, 19 nt, Artificial Sequence
  Description of Artificial Sequence: Synthetic oligonucleotide
  Sense strand starting at position 335 of SEQ ID NO: 3997
guaguuuaucaccacaaug

SEQ ID NO: 311241 - RNA, 19 nt, Artificial Sequence
  Description of Artificial Sequence: Synthetic oligonucleotide
  Antisense strand to SEQ ID NO: 311240
cauuguggugauaaacuac

SEQ ID NO: 311242 - RNA, 19 nt, Artificial Sequence
  Description of Artificial Sequence: Synthetic oligonucleotide
  Sense strand starting at position 607 of SEQ ID NO: 3997
gcuguauaucagcucuguu

SEQ ID NO: 311243 - RNA, 19 nt, Artificial Sequence
  Description of Artificial Sequence: Synthetic oligonucleotide
  Antisense strand to SEQ ID NO: 311242
aacagagcugauauacagc

SEQ ID NO: 311244 - RNA, 19 nt, Artificial Sequence
  Description of Artificial Sequence: Synthetic oligonucleotide
  Sense strand starting at position 656 of SEQ ID NO: 3997
caucauagagguuggauca

SEQ ID NO: 311245 - RNA, 19 nt, Artificial Sequence
  Description of Artificial Sequence: Synthetic oligonucleotide
  Antisense strand to SEQ ID NO: 311244
ugauccaaccucuaugaug

SEQ ID NO: 311246 - RNA, 19 nt, Artificial Sequence
  Description of Artificial Sequence: Synthetic oligonucleotide
  Sense strand starting at position 840 of SEQ ID NO: 3997
uguaaagcuccugauacag

SEQ ID NO: 311247 - RNA, 19 nt, Artificial Sequence
  Description of Artificial Sequence: Synthetic oligonucleotide
  Antisense strand to SEQ ID NO: 311246
cuguaucaggagcuuuaca

SEQ ID NO: 311248 - RNA, 19 nt, Artificial Sequence
  Description of Artificial Sequence: Synthetic oligonucleotide
  Sense strand starting at position 876 of SEQ ID NO: 3997
uggaauuagugaaggguga

SEQ ID NO: 311249 - RNA, 19 nt, Artificial Sequence
  Description of Artificial Sequence: Synthetic oligonucleotide
  Antisense strand to SEQ ID NO: 311248
ucacccuucacuaauucca

SEQ ID NO: 311250 - RNA, 19 nt, Artificial Sequence
  Description of Artificial Sequence: Synthetic oligonucleotide
  Sense strand starting at position 880 of SEQ ID NO: 3997
auuagugaagggugagaua

SEQ ID NO: 311251 - RNA, 19 nt, Artificial Sequence
  Description of Artificial Sequence: Synthetic oligonucleotide
  Antisense strand to SEQ ID NO: 311250
uaucucacccuucacuaau

SEQ ID NO: 311252 - RNA, 19 nt, Artificial Sequence
  Description of Artificial Sequence: Synthetic oligonucleotide
  Sense strand starting at position 1017 of SEQ ID NO: 3997
uuucuugugaaguggaaag

SEQ ID NO: 311253 - RNA, 19 nt, Artificial Sequence
  Description of Artificial Sequence: Synthetic oligonucleotide
  Antisense strand to SEQ ID NO: 311252
cuuuccacuucacaagaaa

SEQ ID NO: 311254 - RNA, 19 nt, Artificial Sequence
  Description of Artificial Sequence: Synthetic oligonucleotide
  Sense strand starting at position 1019 of SEQ ID NO: 3997
ucuugugaaguggaaagua

SEQ ID NO: 311255 - RNA, 19 nt, Artificial Sequence
  Description of Artificial Sequence: Synthetic oligonucleotide
  Antisense strand to SEQ ID NO: 311254
uacuuuccacuucacaaga

SEQ ID NO: 311256 - RNA, 19 nt, Artificial Sequence
  Description of Artificial Sequence: Synthetic oligonucleotide
  Sense strand starting at position 1052 of SEQ ID NO: 3997
gcuauccuacccuagaaag

SEQ ID NO: 311257 - RNA, 19 nt, Artificial Sequence
  Description of Artificial Sequence: Synthetic oligonucleotide
  Antisense strand to SEQ ID NO: 311256
cuuucuaggguaggauagc

SEQ ID NO: 311258 - RNA, 19 nt, Artificial Sequence
  Description of Artificial Sequence: Synthetic oligonucleotide
  Sense strand starting at position 1164 of SEQ ID NO: 3997
gucuuugaugucuauaaau

SEQ ID NO: 311259 - RNA, 19 nt, Artificial Sequence
  Description of Artificial Sequence: Synthetic oligonucleotide
  Antisense strand to SEQ ID NO: 311258
auuuauagacaucaaagac

SEQ ID NO: 311260 - RNA, 19 nt, Artificial Sequence
  Description of Artificial Sequence: Synthetic oligonucleotide
  Sense strand starting at position 1889 of SEQ ID NO: 3997
gugcuaagaguuuaauccu

SEQ ID NO: 311261 - RNA, 19 nt, Artificial Sequence
  Description of Artificial Sequence: Synthetic oligonucleotide
  Antisense strand to SEQ ID NO: 311260
aggauuaaacucuuagcac

SEQ ID NO: 311262 - RNA, 19 nt, Artificial Sequence
  Description of Artificial Sequence: Synthetic oligonucleotide
  Sense strand starting at position 1892 of SEQ ID NO: 3997
cuaagaguuuaauccuaug

SEQ ID NO: 311263 - RNA, 19 nt, Artificial Sequence
  Description of Artificial Sequence: Synthetic oligonucleotide
  Antisense strand to SEQ ID NO: 311262
cauaggauuaaacucuuag

SEQ ID NO: 311264 - RNA, 19 nt, Artificial Sequence
  Description of Artificial Sequence: Synthetic oligonucleotide
  Sense strand starting at position 1955 of SEQ ID NO: 3997
ggauacugaucaguguucu

SEQ ID NO: 311265 - RNA, 19 nt, Artificial Sequence
  Description of Artificial Sequence: Synthetic oligonucleotide
  Antisense strand to SEQ ID NO: 311264
agaacacugaucaguaucc

SEQ ID NO: 311266 - RNA, 19 nt, Artificial Sequence
  Description of Artificial Sequence: Synthetic oligonucleotide
  Sense strand starting at position 2133 of SEQ ID NO: 3997
gcacacaaguagguaaaua

SEQ ID NO: 311267 - RNA, 19 nt, Artificial Sequence
  Description of Artificial Sequence: Synthetic oligonucleotide
  Antisense strand to SEQ ID NO: 311266
uauuuaccuacuugugugc

SEQ ID NO: 311268 - RNA, 19 nt, Artificial Sequence
  Description of Artificial Sequence: Synthetic oligonucleotide
  Sense strand starting at position 2164 of SEQ ID NO: 3997
ggauuauauaaagggcuau

SEQ ID NO: 311269 - RNA, 19 nt, Artificial Sequence
  Description of Artificial Sequence: Synthetic oligonucleotide
  Antisense strand to SEQ ID NO: 311268
auagcccuuuauauaaucc

SEQ ID NO: 311270 - RNA, 19 nt, Artificial Sequence
  Description of Artificial Sequence: Synthetic oligonucleotide
  Sense strand starting at position 2383 of SEQ ID NO: 3997
ccauguucccaugagagug

SEQ ID NO: 311271 - RNA, 19 nt, Artificial Sequence
  Description of Artificial Sequence: Synthetic oligonucleotide
  Antisense strand to SEQ ID NO: 311270
cacucucaugggaacaugg

SEQ ID NO: 311272 - RNA, 19 nt, Artificial Sequence
  Description of Artificial Sequence: Synthetic oligonucleotide
  Sense strand starting at position 2388 of SEQ ID NO: 3997
uucccaugagaguguauua

SEQ ID NO: 311273 - RNA, 19 nt, Artificial Sequence
  Description of Artificial Sequence: Synthetic oligonucleotide
  Antisense strand to SEQ ID NO: 311272
uaauacacucucaugggaa

SEQ ID NO: 311274 - RNA, 19 nt, Artificial Sequence
  Description of Artificial Sequence: Synthetic oligonucleotide
  Sense strand starting at position 2722 of SEQ ID NO: 3997
augugauugugucugauuu

SEQ ID NO: 311275 - RNA, 19 nt, Artificial Sequence
  Description of Artificial Sequence: Synthetic oligonucleotide
  Antisense strand to SEQ ID NO: 311274
aaaucagacacaaucacau

SEQ ID NO: 311276 - RNA, 19 nt, Artificial Sequence
  Description of Artificial Sequence: Synthetic oligonucleotide
  Sense strand starting at position 2723 of SEQ ID NO: 3997
ugugauugugucugauuua

SEQ ID NO: 311277 - RNA, 19 nt, Artificial Sequence
  Description of Artificial Sequence: Synthetic oligonucleotide
  Antisense strand to SEQ ID NO: 311276
uaaaucagacacaaucaca

SEQ ID NO: 311278 - RNA, 19 nt, Artificial Sequence
  Description of Artificial Sequence: Synthetic oligonucleotide
  Sense strand starting at position 2799 of SEQ ID NO: 3997
uguccuuuccacuaggaca

SEQ ID NO: 311279 - RNA, 19 nt, Artificial Sequence
  Description of Artificial Sequence: Synthetic oligonucleotide
  Antisense strand to SEQ ID NO: 311278
uguccuaguggaaaggaca

SEQ ID NO: 311280 - RNA, 19 nt, Artificial Sequence
  Description of Artificial Sequence: Synthetic oligonucleotide
  Sense strand starting at position 2812 of SEQ ID NO: 3997
aggacauacuuccuuugau

SEQ ID NO: 311281 - RNA, 19 nt, Artificial Sequence
  Description of Artificial Sequence: Synthetic oligonucleotide
  Antisense strand to SEQ ID NO: 311280
aucaaaggaaguauguccu

SEQ ID NO: 311282 - RNA, 19 nt, Artificial Sequence
  Description of Artificial Sequence: Synthetic oligonucleotide
  Sense strand starting at position 2813 of SEQ ID NO: 3997
ggacauacuuccuuugauu

SEQ ID NO: 311283 - RNA, 19 nt, Artificial Sequence
  Description of Artificial Sequence: Synthetic oligonucleotide
  Antisense strand to SEQ ID NO: 311282
aaucaaaggaaguaugucc

SEQ ID NO: 311284 - RNA, 19 nt, Artificial Sequence
  Description of Artificial Sequence: Synthetic oligonucleotide
  Sense strand starting at position 3011 of SEQ ID NO: 3997
gcuauaugacucuggacau

SEQ ID NO: 311285 - RNA, 19 nt, Artificial Sequence
  Description of Artificial Sequence: Synthetic oligonucleotide
  Antisense strand to SEQ ID NO: 311284
auguccagagucauauagc

SEQ ID NO: 311286 - RNA, 19 nt, Artificial Sequence
  Description of Artificial Sequence: Synthetic oligonucleotide
  Sense strand starting at position 3023 of SEQ ID NO: 3997
uggacauguuccuuaguag

SEQ ID NO: 311287 - RNA, 19 nt, Artificial Sequence
  Description of Artificial Sequence: Synthetic oligonucleotide
  Antisense strand to SEQ ID NO: 311286
cuacuaaggaacaugucca

SEQ ID NO: 311288 - RNA, 19 nt, Artificial Sequence
  Description of Artificial Sequence: Synthetic oligonucleotide
  Sense strand starting at position 3104 of SEQ ID NO: 3997
guauuaaauagguagguua

SEQ ID NO: 311289 - RNA, 19 nt, Artificial Sequence
  Description of Artificial Sequence: Synthetic oligonucleotide
  Antisense strand to SEQ ID NO: 311288
uaaccuaccuauuuaauac

SEQ ID NO: 311290 - RNA, 19 nt, Artificial Sequence
  Description of Artificial Sequence: Synthetic oligonucleotide
  Sense strand starting at position 3249 of SEQ ID NO: 3997
ggaccugacuguccaguau

SEQ ID NO: 311291 - RNA, 19 nt, Artificial Sequence
  Description of Artificial Sequence: Synthetic oligonucleotide
  Antisense strand to SEQ ID NO: 311290
auacuggacagucaggucc

SEQ ID NO: 311292 - RNA, 19 nt, Artificial Sequence
  Description of Artificial Sequence: Synthetic oligonucleotide
  Sense strand starting at position 3253 of SEQ ID NO: 3997
cugacuguccaguauauua

SEQ ID NO: 311293 - RNA, 19 nt, Artificial Sequence
  Description of Artificial Sequence: Synthetic oligonucleotide
  Antisense strand to SEQ ID NO: 311292
uaauauacuggacagucag

SEQ ID NO: 311294 - RNA, 19 nt, Artificial Sequence
  Description of Artificial Sequence: Synthetic oligonucleotide
  Sense strand starting at position 3272 of SEQ ID NO: 3997
ggcauuggucuuuacuauu

SEQ ID NO: 311295 - RNA, 19 nt, Artificial Sequence
  Description of Artificial Sequence: Synthetic oligonucleotide
  Antisense strand to SEQ ID NO: 311294
aauaguaaagaccaaugcc

SEQ ID NO: 311296 - RNA, 19 nt, Artificial Sequence
  Description of Artificial Sequence: Synthetic oligonucleotide
  Sense strand starting at position 3333 of SEQ ID NO: 3997
agaaucuuccuaugagagc

SEQ ID NO: 311297 - RNA, 19 nt, Artificial Sequence
  Description of Artificial Sequence: Synthetic oligonucleotide
  Antisense strand to SEQ ID NO: 311296
gcucucauaggaagauucu

SEQ ID NO: 311298 - RNA, 19 nt, Artificial Sequence
  Description of Artificial Sequence: Synthetic oligonucleotide
  Sense strand starting at position 3348 of SEQ ID NO: 3997
gagccaaagcaucaauugu

SEQ ID NO: 311299 - RNA, 19 nt, Artificial Sequence
  Description of Artificial Sequence: Synthetic oligonucleotide
  Antisense strand to SEQ ID NO: 311298
acaauugaugcuuuggcuc

SEQ ID NO: 311300 - RNA, 19 nt, Artificial Sequence
  Description of Artificial Sequence: Synthetic oligonucleotide
  Sense strand starting at position 3435 of SEQ ID NO: 3997
ugaagugccaguuauagag

SEQ ID NO: 311301 - RNA, 19 nt, Artificial Sequence
  Description of Artificial Sequence: Synthetic oligonucleotide
  Antisense strand to SEQ ID NO: 311300
cucuauaacuggcacuuca

SEQ ID NO: 311302 - RNA, 19 nt, Artificial Sequence
  Description of Artificial Sequence: Synthetic oligonucleotide
  Sense strand starting at position 3439 of SEQ ID NO: 3997
gugccaguuauagagaaau

SEQ ID NO: 311303 - RNA, 19 nt, Artificial Sequence
  Description of Artificial Sequence: Synthetic oligonucleotide
  Antisense strand to SEQ ID NO: 311302
auuucucuauaacuggcac

SEQ ID NO: 311304 - RNA, 19 nt, Artificial Sequence
  Description of Artificial Sequence: Synthetic oligonucleotide
  Sense strand starting at position 3664 of SEQ ID NO: 3997
gguaauaauuagucuaccu

SEQ ID NO: 311305 - RNA, 19 nt, Artificial Sequence
  Description of Artificial Sequence: Synthetic oligonucleotide
  Antisense strand to SEQ ID NO: 311304
agguagacuaauuauuacc

SEQ ID NO: 311306 - RNA, 19 nt, Artificial Sequence
  Description of Artificial Sequence: Synthetic oligonucleotide
  Sense strand starting at position 3710 of SEQ ID NO: 3997
uguuaauguaggcaauuga

SEQ ID NO: 311307 - RNA, 19 nt, Artificial Sequence
  Description of Artificial Sequence: Synthetic oligonucleotide
  Antisense strand to SEQ ID NO: 311306
ucaauugccuacauuaaca

SEQ ID NO: 311308 - RNA, 19 nt, Artificial Sequence
  Description of Artificial Sequence: Synthetic oligonucleotide
  Sense strand starting at position 3753 of SEQ ID NO: 3997
cacugauggugucugagau

SEQ ID NO: 311309 - RNA, 19 nt, Artificial Sequence
  Description of Artificial Sequence: Synthetic oligonucleotide
  Antisense strand to SEQ ID NO: 311308
aucucagacaccaucagug

SEQ ID NO: 311310 - RNA, 19 nt, Artificial Sequence
  Description of Artificial Sequence: Synthetic oligonucleotide
  Sense strand starting at position 3754 of SEQ ID NO: 3997
acugauggugucugagaug

SEQ ID NO: 311311 - RNA, 19 nt, Artificial Sequence
  Description of Artificial Sequence: Synthetic oligonucleotide
  Antisense strand to SEQ ID NO: 311310
caucucagacaccaucagu

SEQ ID NO: 311312 - RNA, 19 nt, Artificial Sequence
  Description of Artificial Sequence: Synthetic oligonucleotide
  Sense strand starting at position 34 of SEQ ID NO: 3998
gccuucuuggaguauggga

SEQ ID NO: 311313 - RNA, 19 nt, Artificial Sequence
  Description of Artificial Sequence: Synthetic oligonucleotide
  Antisense strand to SEQ ID NO: 311312
ucccauacuccaagaaggc

SEQ ID NO: 311314 - RNA, 19 nt, Artificial Sequence
  Description of Artificial Sequence: Synthetic oligonucleotide
  Sense strand starting at position 36 of SEQ ID NO: 3998
cuucuuggaguaugggaau

SEQ ID NO: 311315 - RNA, 19 nt, Artificial Sequence
  Description of Artificial Sequence: Synthetic oligonucleotide
  Antisense strand to SEQ ID NO: 311314
auucccauacuccaagaag

SEQ ID NO: 311316 - RNA, 19 nt, Artificial Sequence
  Description of Artificial Sequence: Synthetic oligonucleotide
  Sense strand starting at position 68 of SEQ ID NO: 3998
auaggacugcagugagaau

SEQ ID NO: 311317 - RNA, 19 nt, Artificial Sequence
  Description of Artificial Sequence: Synthetic oligonucleotide
  Antisense strand to SEQ ID NO: 311316
auucucacugcaguccuau

SEQ ID NO: 311318 - RNA, 19 nt, Artificial Sequence
  Description of Artificial Sequence: Synthetic oligonucleotide
  Sense strand starting at position 80 of SEQ ID NO: 3998
ugagaauucugguuauaaa

SEQ ID NO: 311319 - RNA, 19 nt, Artificial Sequence
  Description of Artificial Sequence: Synthetic oligonucleotide
  Antisense strand to SEQ ID NO: 311318
uuuauaaccagaauucuca

SEQ ID NO: 311320 - RNA, 19 nt, Artificial Sequence
  Description of Artificial Sequence: Synthetic oligonucleotide
  Sense strand starting at position 119 of SEQ ID NO: 3998
acuguaaaucgaggacaaa

SEQ ID NO: 311321 - RNA, 19 nt, Artificial Sequence
  Description of Artificial Sequence: Synthetic oligonucleotide
  Antisense strand to SEQ ID NO: 311320
uuuguccucgauuuacagu

SEQ ID NO: 311322 - RNA, 19 nt, Artificial Sequence
  Description of Artificial Sequence: Synthetic oligonucleotide
  Sense strand starting at position 201 of SEQ ID NO: 3998
uuacauauguacguauaca

SEQ ID NO: 311323 - RNA, 19 nt, Artificial Sequence
  Description of Artificial Sequence: Synthetic oligonucleotide
  Antisense strand to SEQ ID NO: 311322
uguauacguacauauguaa

SEQ ID NO: 311324 - RNA, 19 nt, Artificial Sequence
  Description of Artificial Sequence: Synthetic oligonucleotide
  Sense strand starting at position 441 of SEQ ID NO: 3998
acacauaaauuugagaguu

SEQ ID NO: 311325 - RNA, 19 nt, Artificial Sequence
  Description of Artificial Sequence: Synthetic oligonucleotide
  Antisense strand to SEQ ID NO: 311324
aacucucaaauuuaugugu

SEQ ID NO: 311326 - RNA, 19 nt, Artificial Sequence
  Description of Artificial Sequence: Synthetic oligonucleotide
  Sense strand starting at position 577 of SEQ ID NO: 3998
uuagaaacuccgcagaacu

SEQ ID NO: 311327 - RNA, 19 nt, Artificial Sequence
  Description of Artificial Sequence: Synthetic oligonucleotide
  Antisense strand to SEQ ID NO: 311326
aguucugcggaguuucuaa

SEQ ID NO: 311328 - RNA, 19 nt, Artificial Sequence
  Description of Artificial Sequence: Synthetic oligonucleotide
  Sense strand starting at position 625 of SEQ ID NO: 3998
gaaaguauguugucugaga

SEQ ID NO: 311329 - RNA, 19 nt, Artificial Sequence
  Description of Artificial Sequence: Synthetic oligonucleotide
  Antisense strand to SEQ ID NO: 311328
ucucagacaacauacuuuc

SEQ ID NO: 311330 - RNA, 19 nt, Artificial Sequence
  Description of Artificial Sequence: Synthetic oligonucleotide
  Sense strand starting at position 626 of SEQ ID NO: 3998
aaaguauguugucugagag

SEQ ID NO: 311331 - RNA, 19 nt, Artificial Sequence
  Description of Artificial Sequence: Synthetic oligonucleotide
  Antisense strand to SEQ ID NO: 311330
cucucagacaacauacuuu

SEQ ID NO: 311332 - RNA, 19 nt, Artificial Sequence
  Description of Artificial Sequence: Synthetic oligonucleotide
  Sense strand starting at position 634 of SEQ ID NO: 3998
uugucugagagccaaauga

SEQ ID NO: 311333 - RNA, 19 nt, Artificial Sequence
  Description of Artificial Sequence: Synthetic oligonucleotide
  Antisense strand to SEQ ID NO: 311332
ucauuuggcucucagacaa

SEQ ID NO: 311334 - RNA, 19 nt, Artificial Sequence
  Description of Artificial Sequence: Synthetic oligonucleotide
  Sense strand starting at position 787 of SEQ ID NO: 3998
auuuaucagugacagagaa

SEQ ID NO: 311335 - RNA, 19 nt, Artificial Sequence
  Description of Artificial Sequence: Synthetic oligonucleotide
  Antisense strand to SEQ ID NO: 311334
uucucugucacugauaaau

SEQ ID NO: 311336 - RNA, 19 nt, Artificial Sequence
  Description of Artificial Sequence: Synthetic oligonucleotide
  Sense strand starting at position 877 of SEQ ID NO: 3998
gcuacucccgagcaucaua

SEQ ID NO: 311337 - RNA, 19 nt, Artificial Sequence
  Description of Artificial Sequence: Synthetic oligonucleotide
  Antisense strand to SEQ ID NO: 311336
uaugaugcucgggaguagc

SEQ ID NO: 311338 - RNA, 19 nt, Artificial Sequence
  Description of Artificial Sequence: Synthetic oligonucleotide
  Sense strand starting at position 944 of SEQ ID NO: 3998
uucucuuggcagcauuaau

SEQ ID NO: 311339 - RNA, 19 nt, Artificial Sequence
  Description of Artificial Sequence: Synthetic oligonucleotide
  Antisense strand to SEQ ID NO: 311338
auuaaugcugccaagagaa

SEQ ID NO: 311340 - RNA, 19 nt, Artificial Sequence
  Description of Artificial Sequence: Synthetic oligonucleotide
  Sense strand starting at position 1037 of SEQ ID NO: 3998
gccagucuuuccuuagaaa

SEQ ID NO: 311341 - RNA, 19 nt, Artificial Sequence
  Description of Artificial Sequence: Synthetic oligonucleotide
  Antisense strand to SEQ ID NO: 311340
uuucuaaggaaagacuggc

SEQ ID NO: 311342 - RNA, 19 nt, Artificial Sequence
  Description of Artificial Sequence: Synthetic oligonucleotide
  Sense strand starting at position 1063 of SEQ ID NO: 3998
uuggcauaacuuuaagacu

SEQ ID NO: 311343 - RNA, 19 nt, Artificial Sequence
  Description of Artificial Sequence: Synthetic oligonucleotide
  Antisense strand to SEQ ID NO: 311342
agucuuaaaguuaugccaa

SEQ ID NO: 311344 - RNA, 19 nt, Artificial Sequence
  Description of Artificial Sequence: Synthetic oligonucleotide
  Sense strand starting at position 1839 of SEQ ID NO: 3998
cacguuuacccucauggga

SEQ ID NO: 311345 - RNA, 19 nt, Artificial Sequence
  Description of Artificial Sequence: Synthetic oligonucleotide
  Antisense strand to SEQ ID NO: 311344
ucccaugaggguaaacgug

SEQ ID NO: 311346 - RNA, 19 nt, Artificial Sequence
  Description of Artificial Sequence: Synthetic oligonucleotide
  Sense strand starting at position 2665 of SEQ ID NO: 3998
gggaaagguuggguccuaa

SEQ ID NO: 311347 - RNA, 19 nt, Artificial Sequence
  Description of Artificial Sequence: Synthetic oligonucleotide
  Antisense strand to SEQ ID NO: 311346
uuaggacccaaccuuuccc

SEQ ID NO: 311348 - RNA, 19 nt, Artificial Sequence
  Description of Artificial Sequence: Synthetic oligonucleotide
  Sense strand starting at position 2868 of SEQ ID NO: 3998
uuuguaaugccaggauaua

SEQ ID NO: 311349 - RNA, 19 nt, Artificial Sequence
  Description of Artificial Sequence: Synthetic oligonucleotide
  Antisense strand to SEQ ID NO: 311348
uauauccuggcauuacaaa

SEQ ID NO: 311350 - RNA, 19 nt, Artificial Sequence
  Description of Artificial Sequence: Synthetic oligonucleotide
  Sense strand starting at position 2869 of SEQ ID NO: 3998
uuguaaugccaggauauau

SEQ ID NO: 311351 - RNA, 19 nt, Artificial Sequence
  Description of Artificial Sequence: Synthetic oligonucleotide
  Antisense strand to SEQ ID NO: 311350
auauauccuggcauuacaa

SEQ ID NO: 311352 - RNA, 19 nt, Artificial Sequence
  Description of Artificial Sequence: Synthetic oligonucleotide
  Sense strand starting at position 2892 of SEQ ID NO: 3998
gugacagcaucacuaacua

SEQ ID NO: 311353 - RNA, 19 nt, Artificial Sequence
  Description of Artificial Sequence: Synthetic oligonucleotide
  Antisense strand to SEQ ID NO: 311352
uaguuagugaugcugucac

SEQ ID NO: 311354 - RNA, 19 nt, Artificial Sequence
  Description of Artificial Sequence: Synthetic oligonucleotide
  Sense strand starting at position 2947 of SEQ ID NO: 3998
uugugaauuccagaagcac

SEQ ID NO: 311355 - RNA, 19 nt, Artificial Sequence
  Description of Artificial Sequence: Synthetic oligonucleotide
  Antisense strand to SEQ ID NO: 311354
gugcuucuggaauucacaa

SEQ ID NO: 311356 - RNA, 19 nt, Artificial Sequence
  Description of Artificial Sequence: Synthetic oligonucleotide
  Sense strand starting at position 3074 of SEQ ID NO: 3998
ggaacucuggcguaggaau

SEQ ID NO: 311357 - RNA, 19 nt, Artificial Sequence
  Description of Artificial Sequence: Synthetic oligonucleotide
  Antisense strand to SEQ ID NO: 311356
auuccuacgccagaguucc

SEQ ID NO: 311358 - RNA, 19 nt, Artificial Sequence
  Description of Artificial Sequence: Synthetic oligonucleotide
  Sense strand starting at position 3076 of SEQ ID NO: 3998
aacucuggcguaggaauaa

SEQ ID NO: 311359 - RNA, 19 nt, Artificial Sequence
  Description of Artificial Sequence: Synthetic oligonucleotide
  Antisense strand to SEQ ID NO: 311358
uuauuccuacgccagaguu

SEQ ID NO: 311360 - RNA, 19 nt, Artificial Sequence
  Description of Artificial Sequence: Synthetic oligonucleotide
  Sense strand starting at position 3086 of SEQ ID NO: 3998
uaggaauaaucugcguacu

SEQ ID NO: 311361 - RNA, 19 nt, Artificial Sequence
  Description of Artificial Sequence: Synthetic oligonucleotide
  Antisense strand to SEQ ID NO: 311360
aguacgcagauuauuccua

SEQ ID NO: 311362 - RNA, 19 nt, Artificial Sequence
  Description of Artificial Sequence: Synthetic oligonucleotide
  Sense strand starting at position 3087 of SEQ ID NO: 3998
aggaauaaucugcguacug

SEQ ID NO: 311363 - RNA, 19 nt, Artificial Sequence
  Description of Artificial Sequence: Synthetic oligonucleotide
  Antisense strand to SEQ ID NO: 311362
caguacgcagauuauuccu

SEQ ID NO: 311364 - RNA, 19 nt, Artificial Sequence
  Description of Artificial Sequence: Synthetic oligonucleotide
  Sense strand starting at position 3102 of SEQ ID NO: 3998
acugcuugaaggugacauu

SEQ ID NO: 311365 - RNA, 19 nt, Artificial Sequence
  Description of Artificial Sequence: Synthetic oligonucleotide
  Antisense strand to SEQ ID NO: 311364
aaugucaccuucaagcagu

SEQ ID NO: 311366 - RNA, 19 nt, Artificial Sequence
  Description of Artificial Sequence: Synthetic oligonucleotide
  Sense strand starting at position 3112 of SEQ ID NO: 3998
ggugacauuugucaucaaa

SEQ ID NO: 311367 - RNA, 19 nt, Artificial Sequence
  Description of Artificial Sequence: Synthetic oligonucleotide
  Antisense strand to SEQ ID NO: 311366
uuugaugacaaaugucacc

SEQ ID NO: 311368 - RNA, 19 nt, Artificial Sequence
  Description of Artificial Sequence: Synthetic oligonucleotide
  Sense strand starting at position 3161 of SEQ ID NO: 3998
aauggcuuguauuuauagu

SEQ ID NO: 311369 - RNA, 19 nt, Artificial Sequence
  Description of Artificial Sequence: Synthetic oligonucleotide
  Antisense strand to SEQ ID NO: 311368
acuauaaauacaagccauu

SEQ ID NO: 311370 - RNA, 19 nt, Artificial Sequence
  Description of Artificial Sequence: Synthetic oligonucleotide
  Sense strand starting at position 3168 of SEQ ID NO: 3998
uguauuuauaguugcgacu

SEQ ID NO: 311371 - RNA, 19 nt, Artificial Sequence
  Description of Artificial Sequence: Synthetic oligonucleotide
  Antisense strand to SEQ ID NO: 311370
agucgcaacuauaaauaca

SEQ ID NO: 311372 - RNA, 19 nt, Artificial Sequence
  Description of Artificial Sequence: Synthetic oligonucleotide
  Sense strand starting at position 3354 of SEQ ID NO: 3998
agguguuaaaccuagguuu

SEQ ID NO: 311373 - RNA, 19 nt, Artificial Sequence
  Description of Artificial Sequence: Synthetic oligonucleotide
  Antisense strand to SEQ ID NO: 311372
aaaccuagguuuaacaccu

SEQ ID NO: 311374 - RNA, 19 nt, Artificial Sequence
  Description of Artificial Sequence: Synthetic oligonucleotide
  Sense strand starting at position 3454 of SEQ ID NO: 3998
agguacuuauuaucugaua

SEQ ID NO: 311375 - RNA, 19 nt, Artificial Sequence
  Description of Artificial Sequence: Synthetic oligonucleotide
  Antisense strand to SEQ ID NO: 311374
uaucagauaauaaguaccu

SEQ ID NO: 311376 - RNA, 19 nt, Artificial Sequence
  Description of Artificial Sequence: Synthetic oligonucleotide
  Sense strand starting at position 3465 of SEQ ID NO: 3998
aucugauaaccuuggacuu

SEQ ID NO: 311377 - RNA, 19 nt, Artificial Sequence
  Description of Artificial Sequence: Synthetic oligonucleotide
  Antisense strand to SEQ ID NO: 311376
aaguccaagguuaucagau

SEQ ID NO: 311378 - RNA, 19 nt, Artificial Sequence
  Description of Artificial Sequence: Synthetic oligonucleotide
  Sense strand starting at position 3466 of SEQ ID NO: 3998
ucugauaaccuuggacuuu

SEQ ID NO: 311379 - RNA, 19 nt, Artificial Sequence
  Description of Artificial Sequence: Synthetic oligonucleotide
  Antisense strand to SEQ ID NO: 311378
aaaguccaagguuaucaga

SEQ ID NO: 311380 - RNA, 19 nt, Artificial Sequence
  Description of Artificial Sequence: Synthetic oligonucleotide
  Sense strand starting at position 3744 of SEQ ID NO: 3998
ugagauuccggaugaaguu

SEQ ID NO: 311381 - RNA, 19 nt, Artificial Sequence
  Description of Artificial Sequence: Synthetic oligonucleotide
  Antisense strand to SEQ ID NO: 311380
aacuucauccggaaucuca

SEQ ID NO: 311382 - RNA, 19 nt, Artificial Sequence
  Description of Artificial Sequence: Synthetic oligonucleotide
  Sense strand starting at position 3792 of SEQ ID NO: 3998
auauguuaucagcauguag

SEQ ID NO: 311383 - RNA, 19 nt, Artificial Sequence
  Description of Artificial Sequence: Synthetic oligonucleotide
  Antisense strand to SEQ ID NO: 311382
cuacaugcugauaacauau

SEQ ID NO: 311384 - RNA, 19 nt, Artificial Sequence
  Description of Artificial Sequence: Synthetic oligonucleotide
  Sense strand starting at position 3794 of SEQ ID NO: 3998
auguuaucagcauguagau

SEQ ID NO: 311385 - RNA, 19 nt, Artificial Sequence
  Description of Artificial Sequence: Synthetic oligonucleotide
  Antisense strand to SEQ ID NO: 311384
aucuacaugcugauaacau

SEQ ID NO: 311386 - RNA, 19 nt, Artificial Sequence
  Description of Artificial Sequence: Synthetic oligonucleotide
  Sense strand starting at position 3803 of SEQ ID NO: 3998
gcauguagauuacuugaua

SEQ ID NO: 311387 - RNA, 19 nt, Artificial Sequence
  Description of Artificial Sequence: Synthetic oligonucleotide
  Antisense strand to SEQ ID NO: 311386
uaucaaguaaucuacaugc

SEQ ID NO: 311388 - RNA, 19 nt, Artificial Sequence
  Description of Artificial Sequence: Synthetic oligonucleotide
  Sense strand starting at position 3804 of SEQ ID NO: 3998
cauguagauuacuugauag

SEQ ID NO: 311389 - RNA, 19 nt, Artificial Sequence
  Description of Artificial Sequence: Synthetic oligonucleotide
  Antisense strand to SEQ ID NO: 311388
cuaucaaguaaucuacaug

SEQ ID NO: 311390 - RNA, 19 nt, Artificial Sequence
  Description of Artificial Sequence: Synthetic oligonucleotide
  Sense strand starting at position 3806 of SEQ ID NO: 3998
uguagauuacuugauagcu

SEQ ID NO: 311391 - RNA, 19 nt, Artificial Sequence
  Description of Artificial Sequence: Synthetic oligonucleotide
  Antisense strand to SEQ ID NO: 311390
agcuaucaaguaaucuaca

SEQ ID NO: 311392 - RNA, 19 nt, Artificial Sequence
  Description of Artificial Sequence: Synthetic oligonucleotide
  Sense strand starting at position 201 of SEQ ID NO: 3999
gcgggaagauuguuugaac

SEQ ID NO: 311393 - RNA, 19 nt, Artificial Sequence
  Description of Artificial Sequence: Synthetic oligonucleotide
  Antisense strand to SEQ ID NO: 311392
guucaaacaaucuucccgc

SEQ ID NO: 311394 - RNA, 19 nt, Artificial Sequence
  Description of Artificial Sequence: Synthetic oligonucleotide
  Sense strand starting at position 389 of SEQ ID NO: 3999
aaacacagugguuauguua

SEQ ID NO: 311395 - RNA, 19 nt, Artificial Sequence
  Description of Artificial Sequence: Synthetic oligonucleotide
  Antisense strand to SEQ ID NO: 311394
uaacauaaccacuguguuu

SEQ ID NO: 311396 - RNA, 19 nt, Artificial Sequence
  Description of Artificial Sequence: Synthetic oligonucleotide
  Sense strand starting at position 437 of SEQ ID NO: 3999
aaggcaauguauguaagua

SEQ ID NO: 311397 - RNA, 19 nt, Artificial Sequence
  Description of Artificial Sequence: Synthetic oligonucleotide
  Antisense strand to SEQ ID NO: 311396
uacuuacauacauugccuu

SEQ ID NO: 311398 - RNA, 19 nt, Artificial Sequence
  Description of Artificial Sequence: Synthetic oligonucleotide
  Sense strand starting at position 438 of SEQ ID NO: 3999
aggcaauguauguaaguaa

SEQ ID NO: 311399 - RNA, 19 nt, Artificial Sequence
  Description of Artificial Sequence: Synthetic oligonucleotide
  Antisense strand to SEQ ID NO: 311398
uuacuuacauacauugccu

SEQ ID NO: 311400 - RNA, 19 nt, Artificial Sequence
  Description of Artificial Sequence: Synthetic oligonucleotide
  Sense strand starting at position 441 of SEQ ID NO: 3999
caauguauguaaguaagua

SEQ ID NO: 311401 - RNA, 19 nt, Artificial Sequence
  Description of Artificial Sequence: Synthetic oligonucleotide
  Antisense strand to SEQ ID NO: 311400
uacuuacuuacauacauug

SEQ ID NO: 311402 - RNA, 19 nt, Artificial Sequence
  Description of Artificial Sequence: Synthetic oligonucleotide
  Sense strand starting at position 445 of SEQ ID NO: 3999
guauguaaguaaguacaua

SEQ ID NO: 311403 - RNA, 19 nt, Artificial Sequence
  Description of Artificial Sequence: Synthetic oligonucleotide
  Antisense strand to SEQ ID NO: 311402
uauguacuuacuuacauac

SEQ ID NO: 311404 - RNA, 19 nt, Artificial Sequence
  Description of Artificial Sequence: Synthetic oligonucleotide
  Sense strand starting at position 593 of SEQ ID NO: 3999
cuaguuuauggcuaacuuu

SEQ ID NO: 311405 - RNA, 19 nt, Artificial Sequence
  Description of Artificial Sequence: Synthetic oligonucleotide
  Antisense strand to SEQ ID NO: 311404
aaaguuagccauaaacuag

SEQ ID NO: 311406 - RNA, 19 nt, Artificial Sequence
  Description of Artificial Sequence: Synthetic oligonucleotide
  Sense strand starting at position 613 of SEQ ID NO: 3999
gcuuauuaacacgacaaau

SEQ ID NO: 311407 - RNA, 19 nt, Artificial Sequence
  Description of Artificial Sequence: Synthetic oligonucleotide
  Antisense strand to SEQ ID NO: 311406
auuugucguguuaauaagc

SEQ ID NO: 311408 - RNA, 19 nt, Artificial Sequence
  Description of Artificial Sequence: Synthetic oligonucleotide
  Sense strand starting at position 826 of SEQ ID NO: 3999
ccuugagaccacugguuaa

SEQ ID NO: 311409 - RNA, 19 nt, Artificial Sequence
  Description of Artificial Sequence: Synthetic oligonucleotide
  Antisense strand to SEQ ID NO: 311408
uuaaccaguggucucaagg

SEQ ID NO: 311410 - RNA, 19 nt, Artificial Sequence
  Description of Artificial Sequence: Synthetic oligonucleotide
  Sense strand starting at position 1066 of SEQ ID NO: 3999
cuacgaagcugguuagaaa

SEQ ID NO: 311411 - RNA, 19 nt, Artificial Sequence
  Description of Artificial Sequence: Synthetic oligonucleotide
  Antisense strand to SEQ ID NO: 311410
uuucuaaccagcuucguag

SEQ ID NO: 311412 - RNA, 19 nt, Artificial Sequence
  Description of Artificial Sequence: Synthetic oligonucleotide
  Sense strand starting at position 1081 of SEQ ID NO: 3999
gaaagcagguaaucucaga

SEQ ID NO: 311413 - RNA, 19 nt, Artificial Sequence
  Description of Artificial Sequence: Synthetic oligonucleotide
  Antisense strand to SEQ ID NO: 311412
ucugagauuaccugcuuuc

SEQ ID NO: 311414 - RNA, 19 nt, Artificial Sequence
  Description of Artificial Sequence: Synthetic oligonucleotide
  Sense strand starting at position 1213 of SEQ ID NO: 3999
uuguuaucaguguagaagc

SEQ ID NO: 311415 - RNA, 19 nt, Artificial Sequence
  Description of Artificial Sequence: Synthetic oligonucleotide
  Antisense strand to SEQ ID NO: 311414
gcuucuacacugauaacaa

SEQ ID NO: 311416 - RNA, 19 nt, Artificial Sequence
  Description of Artificial Sequence: Synthetic oligonucleotide
  Sense strand starting at position 1547 of SEQ ID NO: 3999
uuagaauucuucccauacg

SEQ ID NO: 311417 - RNA, 19 nt, Artificial Sequence
  Description of Artificial Sequence: Synthetic oligonucleotide
  Antisense strand to SEQ ID NO: 311416
cguaugggaagaauucuaa

SEQ ID NO: 311418 - RNA, 19 nt, Artificial Sequence
  Description of Artificial Sequence: Synthetic oligonucleotide
  Sense strand starting at position 1550 of SEQ ID NO: 3999
gaauucuucccauacgugu

SEQ ID NO: 311419 - RNA, 19 nt, Artificial Sequence
  Description of Artificial Sequence: Synthetic oligonucleotide
  Antisense strand to SEQ ID NO: 311418
acacguaugggaagaauuc

SEQ ID NO: 311420 - RNA, 19 nt, Artificial Sequence
  Description of Artificial Sequence: Synthetic oligonucleotide
  Sense strand starting at position 1561 of SEQ ID NO: 3999
auacgugugggcccguaau

SEQ ID NO: 311421 - RNA, 19 nt, Artificial Sequence
  Description of Artificial Sequence: Synthetic oligonucleotide
  Antisense strand to SEQ ID NO: 311420
auuacgggcccacacguau

SEQ ID NO: 311422 - RNA, 19 nt, Artificial Sequence
  Description of Artificial Sequence: Synthetic oligonucleotide
  Sense strand starting at position 1572 of SEQ ID NO: 3999
cccguaaucgauuaggaaa

SEQ ID NO: 311423 - RNA, 19 nt, Artificial Sequence
  Description of Artificial Sequence: Synthetic oligonucleotide
  Antisense strand to SEQ ID NO: 311422
uuuccuaaucgauuacggg

SEQ ID NO: 311424 - RNA, 19 nt, Artificial Sequence
  Description of Artificial Sequence: Synthetic oligonucleotide
  Sense strand starting at position 1751 of SEQ ID NO: 3999
cugcccucagaguaucuua

SEQ ID NO: 311425 - RNA, 19 nt, Artificial Sequence
  Description of Artificial Sequence: Synthetic oligonucleotide
  Antisense strand to SEQ ID NO: 311424
uaagauacucugagggcag

SEQ ID NO: 311426 - RNA, 19 nt, Artificial Sequence
  Description of Artificial Sequence: Synthetic oligonucleotide
  Sense strand starting at position 1880 of SEQ ID NO: 3999
ggcucacucggcagagguu

SEQ ID NO: 311427 - RNA, 19 nt, Artificial Sequence
  Description of Artificial Sequence: Synthetic oligonucleotide
  Antisense strand to SEQ ID NO: 311426
aaccucugccgagugagcc

SEQ ID NO: 311428 - RNA, 19 nt, Artificial Sequence
  Description of Artificial Sequence: Synthetic oligonucleotide
  Sense strand starting at position 2918 of SEQ ID NO: 3999
guuuaaagauguccuacug

SEQ ID NO: 311429 - RNA, 19 nt, Artificial Sequence
  Description of Artificial Sequence: Synthetic oligonucleotide
  Antisense strand to SEQ ID NO: 311428
caguaggacaucuuuaaac

SEQ ID NO: 311430 - RNA, 19 nt, Artificial Sequence
  Description of Artificial Sequence: Synthetic oligonucleotide
  Sense strand starting at position 2925 of SEQ ID NO: 3999
gauguccuacuguaaggua

SEQ ID NO: 311431 - RNA, 19 nt, Artificial Sequence
  Description of Artificial Sequence: Synthetic oligonucleotide
  Antisense strand to SEQ ID NO: 311430
uaccuuacaguaggacauc

SEQ ID NO: 311432 - RNA, 19 nt, Artificial Sequence
  Description of Artificial Sequence: Synthetic oligonucleotide
  Sense strand starting at position 2938 of SEQ ID NO: 3999
aagguagacgccuaauguu

SEQ ID NO: 311433 - RNA, 19 nt, Artificial Sequence
  Description of Artificial Sequence: Synthetic oligonucleotide
  Antisense strand to SEQ ID NO: 311432
aacauuaggcgucuaccuu

SEQ ID NO: 311434 - RNA, 19 nt, Artificial Sequence
  Description of Artificial Sequence: Synthetic oligonucleotide
  Sense strand starting at position 2945 of SEQ ID NO: 3999
acgccuaauguuuaaauga

SEQ ID NO: 311435 - RNA, 19 nt, Artificial Sequence
  Description of Artificial Sequence: Synthetic oligonucleotide
  Antisense strand to SEQ ID NO: 311434
ucauuuaaacauuaggcgu

SEQ ID NO: 311436 - RNA, 19 nt, Artificial Sequence
  Description of Artificial Sequence: Synthetic oligonucleotide
  Sense strand starting at position 3192 of SEQ ID NO: 3999
aucggaagcacucaguaua

SEQ ID NO: 311437 - RNA, 19 nt, Artificial Sequence
  Description of Artificial Sequence: Synthetic oligonucleotide
  Antisense strand to SEQ ID NO: 311436
uauacugagugcuuccgau

SEQ ID NO: 311438 - RNA, 19 nt, Artificial Sequence
  Description of Artificial Sequence: Synthetic oligonucleotide
  Sense strand starting at position 3243 of SEQ ID NO: 3999
ccaguuuaacuagaagcuu

SEQ ID NO: 311439 - RNA, 19 nt, Artificial Sequence
  Description of Artificial Sequence: Synthetic oligonucleotide
  Antisense strand to SEQ ID NO: 311438
aagcuucuaguuaaacugg

SEQ ID NO: 311440 - RNA, 19 nt, Artificial Sequence
  Description of Artificial Sequence: Synthetic oligonucleotide
  Sense strand starting at position 3257 of SEQ ID NO: 3999
agcuuugccagcgugaaua

SEQ ID NO: 311441 - RNA, 19 nt, Artificial Sequence
  Description of Artificial Sequence: Synthetic oligonucleotide
  Antisense strand to SEQ ID NO: 311440
uauucacgcuggcaaagcu

SEQ ID NO: 311442 - RNA, 19 nt, Artificial Sequence
  Description of Artificial Sequence: Synthetic oligonucleotide
  Sense strand starting at position 3290 of SEQ ID NO: 3999
gccacauugaguggaggaa

SEQ ID NO: 311443 - RNA, 19 nt, Artificial Sequence
  Description of Artificial Sequence: Synthetic oligonucleotide
  Antisense strand to SEQ ID NO: 311442
uuccuccacucaauguggc

SEQ ID NO: 311444 - RNA, 19 nt, Artificial Sequence
  Description of Artificial Sequence: Synthetic oligonucleotide
  Sense strand starting at position 3329 of SEQ ID NO: 3999
gcugaagucccaggagauc

SEQ ID NO: 311445 - RNA, 19 nt, Artificial Sequence
  Description of Artificial Sequence: Synthetic oligonucleotide
  Antisense strand to SEQ ID NO: 311444
gaucuccugggacuucagc

SEQ ID NO: 311446 - RNA, 19 nt, Artificial Sequence
  Description of Artificial Sequence: Synthetic oligonucleotide
  Sense strand starting at position 3341 of SEQ ID NO: 3999
ggagaucacuuauuaggcu

SEQ ID NO: 311447 - RNA, 19 nt, Artificial Sequence
  Description of Artificial Sequence: Synthetic oligonucleotide
  Antisense strand to SEQ ID NO: 311446
agccuaauaagugaucucc

SEQ ID NO: 311448 - RNA, 19 nt, Artificial Sequence
  Description of Artificial Sequence: Synthetic oligonucleotide
  Sense strand starting at position 3389 of SEQ ID NO: 3999
uaaccaugugguuauugua

SEQ ID NO: 311449 - RNA, 19 nt, Artificial Sequence
  Description of Artificial Sequence: Synthetic oligonucleotide
  Antisense strand to SEQ ID NO: 311448
uacaauaaccacaugguua

SEQ ID NO: 311450 - RNA, 19 nt, Artificial Sequence
  Description of Artificial Sequence: Synthetic oligonucleotide
  Sense strand starting at position 3401 of SEQ ID NO: 3999
uauuguaguggugaggauu

SEQ ID NO: 311451 - RNA, 19 nt, Artificial Sequence
  Description of Artificial Sequence: Synthetic oligonucleotide
  Antisense strand to SEQ ID NO: 311450
aauccucaccacuacaaua

SEQ ID NO: 311452 - RNA, 19 nt, Artificial Sequence
  Description of Artificial Sequence: Synthetic oligonucleotide
  Sense strand starting at position 3430 of SEQ ID NO: 3999
auaagucuugggcaucuga

SEQ ID NO: 311453 - RNA, 19 nt, Artificial Sequence
  Description of Artificial Sequence: Synthetic oligonucleotide
  Antisense strand to SEQ ID NO: 311452
ucagaugcccaagacuuau

SEQ ID NO: 311454 - RNA, 19 nt, Artificial Sequence
  Description of Artificial Sequence: Synthetic oligonucleotide
  Sense strand starting at position 3441 of SEQ ID NO: 3999
gcaucugaagcuugaaaca

SEQ ID NO: 311455 - RNA, 19 nt, Artificial Sequence
  Description of Artificial Sequence: Synthetic oligonucleotide
  Antisense strand to SEQ ID NO: 311454
uguuucaagcuucagaugc

SEQ ID NO: 311456 - RNA, 19 nt, Artificial Sequence
  Description of Artificial Sequence: Synthetic oligonucleotide
  Sense strand starting at position 3499 of SEQ ID NO: 3999
gguaauaugucauugguua

SEQ ID NO: 311457 - RNA, 19 nt, Artificial Sequence
  Description of Artificial Sequence: Synthetic oligonucleotide
  Antisense strand to SEQ ID NO: 311456
uaaccaaugacauauuacc

SEQ ID NO: 311458 - RNA, 19 nt, Artificial Sequence
  Description of Artificial Sequence: Synthetic oligonucleotide
  Sense strand starting at position 3500 of SEQ ID NO: 3999
guaauaugucauugguuaa

SEQ ID NO: 311459 - RNA, 19 nt, Artificial Sequence
  Description of Artificial Sequence: Synthetic oligonucleotide
  Antisense strand to SEQ ID NO: 311458
uuaaccaaugacauauuac

SEQ ID NO: 311460 - RNA, 19 nt, Artificial Sequence
  Description of Artificial Sequence: Synthetic oligonucleotide
  Sense strand starting at position 3537 of SEQ ID NO: 3999
auaauugaccagcagguua

SEQ ID NO: 311461 - RNA, 19 nt, Artificial Sequence
  Description of Artificial Sequence: Synthetic oligonucleotide
  Antisense strand to SEQ ID NO: 311460
uaaccugcuggucaauuau

SEQ ID NO: 311462 - RNA, 19 nt, Artificial Sequence
  Description of Artificial Sequence: Synthetic oligonucleotide
  Sense strand starting at position 3609 of SEQ ID NO: 3999
gacaguagaguuugaucuu

SEQ ID NO: 311463 - RNA, 19 nt, Artificial Sequence
  Description of Artificial Sequence: Synthetic oligonucleotide
  Antisense strand to SEQ ID NO: 311462
aagaucaaacucuacuguc

SEQ ID NO: 311464 - RNA, 19 nt, Artificial Sequence
  Description of Artificial Sequence: Synthetic oligonucleotide
  Sense strand starting at position 3612 of SEQ ID NO: 3999
aguagaguuugaucuuaau

SEQ ID NO: 311465 - RNA, 19 nt, Artificial Sequence
  Description of Artificial Sequence: Synthetic oligonucleotide
  Antisense strand to SEQ ID NO: 311464
auuaagaucaaacucuacu

SEQ ID NO: 311466 - RNA, 19 nt, Artificial Sequence
  Description of Artificial Sequence: Synthetic oligonucleotide
  Sense strand starting at position 3615 of SEQ ID NO: 3999
agaguuugaucuuaauuug

SEQ ID NO: 311467 - RNA, 19 nt, Artificial Sequence
  Description of Artificial Sequence: Synthetic oligonucleotide
  Antisense strand to SEQ ID NO: 311466
caaauuaagaucaaacucu

SEQ ID NO: 311468 - RNA, 19 nt, Artificial Sequence
  Description of Artificial Sequence: Synthetic oligonucleotide
  Sense strand starting at position 3826 of SEQ ID NO: 3999
caaugauuuaugugucgug

SEQ ID NO: 311469 - RNA, 19 nt, Artificial Sequence
  Description of Artificial Sequence: Synthetic oligonucleotide
  Antisense strand to SEQ ID NO: 311468
cacgacacauaaaucauug

SEQ ID NO: 311470 - RNA, 19 nt, Artificial Sequence
  Description of Artificial Sequence: Synthetic oligonucleotide
  Sense strand starting at position 3965 of SEQ ID NO: 3999
acuauaugguccucaugga

SEQ ID NO: 311471 - RNA, 19 nt, Artificial Sequence
  Description of Artificial Sequence: Synthetic oligonucleotide
  Antisense strand to SEQ ID NO: 311470
uccaugaggaccauauagu

SEQ ID NO: 311472 - RNA, 19 nt, Artificial Sequence
  Description of Artificial Sequence: Synthetic oligonucleotide
  Sense strand starting at position 66 of SEQ ID NO: 4000
accuuaagugcuuaguaaa

SEQ ID NO: 311473 - RNA, 19 nt, Artificial Sequence
  Description of Artificial Sequence: Synthetic oligonucleotide
  Antisense strand to SEQ ID NO: 311472
uuuacuaagcacuuaaggu

SEQ ID NO: 311474 - RNA, 19 nt, Artificial Sequence
  Description of Artificial Sequence: Synthetic oligonucleotide
  Sense strand starting at position 206 of SEQ ID NO: 4000
ugucuaaaccauuguaaua

SEQ ID NO: 311475 - RNA, 19 nt, Artificial Sequence
  Description of Artificial Sequence: Synthetic oligonucleotide
  Antisense strand to SEQ ID NO: 311474
uauuacaaugguuuagaca

SEQ ID NO: 311476 - RNA, 19 nt, Artificial Sequence
  Description of Artificial Sequence: Synthetic oligonucleotide
  Sense strand starting at position 749 of SEQ ID NO: 4000
ugcaauuaaggcgaggaaa

SEQ ID NO: 311477 - RNA, 19 nt, Artificial Sequence
  Description of Artificial Sequence: Synthetic oligonucleotide
  Antisense strand to SEQ ID NO: 311476
uuuccucgccuuaauugca

SEQ ID NO: 311478 - RNA, 19 nt, Artificial Sequence
  Description of Artificial Sequence: Synthetic oligonucleotide
  Sense strand starting at position 751 of SEQ ID NO: 4000
caauuaaggcgaggaaaug

SEQ ID NO: 311479 - RNA, 19 nt, Artificial Sequence
  Description of Artificial Sequence: Synthetic oligonucleotide
  Antisense strand to SEQ ID NO: 311478
cauuuccucgccuuaauug

SEQ ID NO: 311480 - RNA, 19 nt, Artificial Sequence
  Description of Artificial Sequence: Synthetic oligonucleotide
  Sense strand starting at position 814 of SEQ ID NO: 4000
guuugaauuaaguagguuu

SEQ ID NO: 311481 - RNA, 19 nt, Artificial Sequence
  Description of Artificial Sequence: Synthetic oligonucleotide
  Antisense strand to SEQ ID NO: 311480
aaaccuacuuaauucaaac

SEQ ID NO: 311482 - RNA, 19 nt, Artificial Sequence
  Description of Artificial Sequence: Synthetic oligonucleotide
  Sense strand starting at position 908 of SEQ ID NO: 4000
gcauuagcucuccagagug

SEQ ID NO: 311483 - RNA, 19 nt, Artificial Sequence
  Description of Artificial Sequence: Synthetic oligonucleotide
  Antisense strand to SEQ ID NO: 311482
cacucuggagagcuaaugc

SEQ ID NO: 311484 - RNA, 19 nt, Artificial Sequence
  Description of Artificial Sequence: Synthetic oligonucleotide
  Sense strand starting at position 910 of SEQ ID NO: 4000
auuagcucuccagagugua

SEQ ID NO: 311485 - RNA, 19 nt, Artificial Sequence
  Description of Artificial Sequence: Synthetic oligonucleotide
  Antisense strand to SEQ ID NO: 311484
uacacucuggagagcuaau

SEQ ID NO: 311486 - RNA, 19 nt, Artificial Sequence
  Description of Artificial Sequence: Synthetic oligonucleotide
  Sense strand starting at position 1025 of SEQ ID NO: 4000
uuaagaucauguguguaga

SEQ ID NO: 311487 - RNA, 19 nt, Artificial Sequence
  Description of Artificial Sequence: Synthetic oligonucleotide
  Antisense strand to SEQ ID NO: 311486
ucuacacacaugaucuuaa

SEQ ID NO: 311488 - RNA, 19 nt, Artificial Sequence
  Description of Artificial Sequence: Synthetic oligonucleotide
  Sense strand starting at position 1026 of SEQ ID NO: 4000
uaagaucauguguguagaa

SEQ ID NO: 311489 - RNA, 19 nt, Artificial Sequence
  Description of Artificial Sequence: Synthetic oligonucleotide
  Antisense strand to SEQ ID NO: 311488
uucuacacacaugaucuua

SEQ ID NO: 311490 - RNA, 19 nt, Artificial Sequence
  Description of Artificial Sequence: Synthetic oligonucleotide
  Sense strand starting at position 1027 of SEQ ID NO: 4000
aagaucauguguguagaaa

SEQ ID NO: 311491 - RNA, 19 nt, Artificial Sequence
  Description of Artificial Sequence: Synthetic oligonucleotide
  Antisense strand to SEQ ID NO: 311490
uuucuacacacaugaucuu

SEQ ID NO: 311492 - RNA, 19 nt, Artificial Sequence
  Description of Artificial Sequence: Synthetic oligonucleotide
  Sense strand starting at position 1028 of SEQ ID NO: 4000
agaucauguguguagaaac

SEQ ID NO: 311493 - RNA, 19 nt, Artificial Sequence
  Description of Artificial Sequence: Synthetic oligonucleotide
  Antisense strand to SEQ ID NO: 311492
guuucuacacacaugaucu

SEQ ID NO: 311494 - RNA, 19 nt, Artificial Sequence
  Description of Artificial Sequence: Synthetic oligonucleotide
  Sense strand starting at position 1035 of SEQ ID NO: 4000
guguguagaaacuacuuua

SEQ ID NO: 311495 - RNA, 19 nt, Artificial Sequence
  Description of Artificial Sequence: Synthetic oligonucleotide
  Antisense strand to SEQ ID NO: 311494
uaaaguaguuucuacacac

SEQ ID NO: 311496 - RNA, 19 nt, Artificial Sequence
  Description of Artificial Sequence: Synthetic oligonucleotide
  Sense strand starting at position 1335 of SEQ ID NO: 4000
gggcuuugccugucaagcu

SEQ ID NO: 311497 - RNA, 19 nt, Artificial Sequence
  Description of Artificial Sequence: Synthetic oligonucleotide
  Antisense strand to SEQ ID NO: 311496
agcuugacaggcaaagccc

SEQ ID NO: 311498 - RNA, 19 nt, Artificial Sequence
  Description of Artificial Sequence: Synthetic oligonucleotide
  Sense strand starting at position 1542 of SEQ ID NO: 4000
uuaacuguggccugacuua

SEQ ID NO: 311499 - RNA, 19 nt, Artificial Sequence
  Description of Artificial Sequence: Synthetic oligonucleotide
  Antisense strand to SEQ ID NO: 311498
uaagucaggccacaguuaa

SEQ ID NO: 311500 - RNA, 19 nt, Artificial Sequence
  Description of Artificial Sequence: Synthetic oligonucleotide
  Sense strand starting at position 1859 of SEQ ID NO: 4000
cgaagcguucgccuucaga

SEQ ID NO: 311501 - RNA, 19 nt, Artificial Sequence
  Description of Artificial Sequence: Synthetic oligonucleotide
  Antisense strand to SEQ ID NO: 311500
ucugaaggcgaacgcuucg

SEQ ID NO: 311502 - RNA, 19 nt, Artificial Sequence
  Description of Artificial Sequence: Synthetic oligonucleotide
  Sense strand starting at position 1879 of SEQ ID NO: 4000
ccagaaaugucucucuugu

SEQ ID NO: 311503 - RNA, 19 nt, Artificial Sequence
  Description of Artificial Sequence: Synthetic oligonucleotide
  Antisense strand to SEQ ID NO: 311502
acaagagagacauuucugg

SEQ ID NO: 311504 - RNA, 19 nt, Artificial Sequence
  Description of Artificial Sequence: Synthetic oligonucleotide
  Sense strand starting at position 2133 of SEQ ID NO: 4000
gcgcuaccuccuggaggaa

SEQ ID NO: 311505 - RNA, 19 nt, Artificial Sequence
  Description of Artificial Sequence: Synthetic oligonucleotide
  Antisense strand to SEQ ID NO: 311504
uuccuccaggagguagcgc

SEQ ID NO: 311506 - RNA, 19 nt, Artificial Sequence
  Description of Artificial Sequence: Synthetic oligonucleotide
  Sense strand starting at position 2160 of SEQ ID NO: 4000
cugcguuucgcagugcuga

SEQ ID NO: 311507 - RNA, 19 nt, Artificial Sequence
  Description of Artificial Sequence: Synthetic oligonucleotide
  Antisense strand to SEQ ID NO: 311506
ucagcacugcgaaacgcag

SEQ ID NO: 311508 - RNA, 19 nt, Artificial Sequence
  Description of Artificial Sequence: Synthetic oligonucleotide
  Sense strand starting at position 2231 of SEQ ID NO: 4000
ccaguaugugaaugaguau

SEQ ID NO: 311509 - RNA, 19 nt, Artificial Sequence
  Description of Artificial Sequence: Synthetic oligonucleotide
  Antisense strand to SEQ ID NO: 311508
auacucauucacauacugg

SEQ ID NO: 311510 - RNA, 19 nt, Artificial Sequence
  Description of Artificial Sequence: Synthetic oligonucleotide
  Sense strand starting at position 2234 of SEQ ID NO: 4000
guaugugaaugaguauauu

SEQ ID NO: 311511 - RNA, 19 nt, Artificial Sequence
  Description of Artificial Sequence: Synthetic oligonucleotide
  Antisense strand to SEQ ID NO: 311510
aauauacucauucacauac

SEQ ID NO: 311512 - RNA, 19 nt, Artificial Sequence
  Description of Artificial Sequence: Synthetic oligonucleotide
  Sense strand starting at position 2578 of SEQ ID NO: 4000
agugcauacguccaccaaa

SEQ ID NO: 311513 - RNA, 19 nt, Artificial Sequence
  Description of Artificial Sequence: Synthetic oligonucleotide
  Antisense strand to SEQ ID NO: 311512
uuugguggacguaugcacu

SEQ ID NO: 311514 - RNA, 19 nt, Artificial Sequence
  Description of Artificial Sequence: Synthetic oligonucleotide
  Sense strand starting at position 2622 of SEQ ID NO: 4000
cguuuauucguaguaguaa

SEQ ID NO: 311515 - RNA, 19 nt, Artificial Sequence
  Description of Artificial Sequence: Synthetic oligonucleotide
  Antisense strand to SEQ ID NO: 311514
uuacuacuacgaauaaacg

SEQ ID NO: 311516 - RNA, 19 nt, Artificial Sequence
  Description of Artificial Sequence: Synthetic oligonucleotide
  Sense strand starting at position 2680 of SEQ ID NO: 4000
uaaauugugguguaucaua

SEQ ID NO: 311517 - RNA, 19 nt, Artificial Sequence
  Description of Artificial Sequence: Synthetic oligonucleotide
  Antisense strand to SEQ ID NO: 311516
uaugauacaccacaauuua

SEQ ID NO: 311518 - RNA, 19 nt, Artificial Sequence
  Description of Artificial Sequence: Synthetic oligonucleotide
  Sense strand starting at position 2687 of SEQ ID NO: 4000
ugguguaucauacagugga

SEQ ID NO: 311519 - RNA, 19 nt, Artificial Sequence
  Description of Artificial Sequence: Synthetic oligonucleotide
  Antisense strand to SEQ ID NO: 311518
uccacuguaugauacacca

SEQ ID NO: 311520 - RNA, 19 nt, Artificial Sequence
  Description of Artificial Sequence: Synthetic oligonucleotide
  Sense strand starting at position 2765 of SEQ ID NO: 4000
cuguuaacuuaggcacaaa

SEQ ID NO: 311521 - RNA, 19 nt, Artificial Sequence
  Description of Artificial Sequence: Synthetic oligonucleotide
  Antisense strand to SEQ ID NO: 311520
uuugugccuaaguuaacag

SEQ ID NO: 311522 - RNA, 19 nt, Artificial Sequence
  Description of Artificial Sequence: Synthetic oligonucleotide
  Sense strand starting at position 2838 of SEQ ID NO: 4000
caaguuguucuccaguaug

SEQ ID NO: 311523 - RNA, 19 nt, Artificial Sequence
  Description of Artificial Sequence: Synthetic oligonucleotide
  Antisense strand to SEQ ID NO: 311522
cauacuggagaacaacuug

SEQ ID NO: 311524 - RNA, 19 nt, Artificial Sequence
  Description of Artificial Sequence: Synthetic oligonucleotide
  Sense strand starting at position 2841 of SEQ ID NO: 4000
guuguucuccaguaugaau

SEQ ID NO: 311525 - RNA, 19 nt, Artificial Sequence
  Description of Artificial Sequence: Synthetic oligonucleotide
  Antisense strand to SEQ ID NO: 311524
auucauacuggagaacaac

SEQ ID NO: 311526 - RNA, 19 nt, Artificial Sequence
  Description of Artificial Sequence: Synthetic oligonucleotide
  Sense strand starting at position 3034 of SEQ ID NO: 4000
cacuuaagucuuggaagca

SEQ ID NO: 311527 - RNA, 19 nt, Artificial Sequence
  Description of Artificial Sequence: Synthetic oligonucleotide
  Antisense strand to SEQ ID NO: 311526
ugcuuccaagacuuaagug

SEQ ID NO: 311528 - RNA, 19 nt, Artificial Sequence
  Description of Artificial Sequence: Synthetic oligonucleotide
  Sense strand starting at position 3124 of SEQ ID NO: 4000
uagccucagagaugugagu

SEQ ID NO: 311529 - RNA, 19 nt, Artificial Sequence
  Description of Artificial Sequence: Synthetic oligonucleotide
  Antisense strand to SEQ ID NO: 311528
acucacaucucugaggcua

SEQ ID NO: 311530 - RNA, 19 nt, Artificial Sequence
  Description of Artificial Sequence: Synthetic oligonucleotide
  Sense strand starting at position 3126 of SEQ ID NO: 4000
gccucagagaugugaguaa

SEQ ID NO: 311531 - RNA, 19 nt, Artificial Sequence
  Description of Artificial Sequence: Synthetic oligonucleotide
  Antisense strand to SEQ ID NO: 311530
uuacucacaucucugaggc

SEQ ID NO: 311532 - RNA, 19 nt, Artificial Sequence
  Description of Artificial Sequence: Synthetic oligonucleotide
  Sense strand starting at position 3133 of SEQ ID NO: 4000
agaugugaguaagauuugu

SEQ ID NO: 311533 - RNA, 19 nt, Artificial Sequence
  Description of Artificial Sequence: Synthetic oligonucleotide
  Antisense strand to SEQ ID NO: 311532
acaaaucuuacucacaucu

SEQ ID NO: 311534 - RNA, 19 nt, Artificial Sequence
  Description of Artificial Sequence: Synthetic oligonucleotide
  Sense strand starting at position 3137 of SEQ ID NO: 4000
gugaguaagauuuguguac

SEQ ID NO: 311535 - RNA, 19 nt, Artificial Sequence
  Description of Artificial Sequence: Synthetic oligonucleotide
  Antisense strand to SEQ ID NO: 311534
guacacaaaucuuacucac

SEQ ID NO: 311536 - RNA, 19 nt, Artificial Sequence
  Description of Artificial Sequence: Synthetic oligonucleotide
  Sense strand starting at position 3144 of SEQ ID NO: 4000
agauuuguguacuaaucuu

SEQ ID NO: 311537 - RNA, 19 nt, Artificial Sequence
  Description of Artificial Sequence: Synthetic oligonucleotide
  Antisense strand to SEQ ID NO: 311536
aagauuaguacacaaaucu

SEQ ID NO: 311538 - RNA, 19 nt, Artificial Sequence
  Description of Artificial Sequence: Synthetic oligonucleotide
  Sense strand starting at position 3150 of SEQ ID NO: 4000
guguacuaaucuuugaggu

SEQ ID NO: 311539 - RNA, 19 nt, Artificial Sequence
  Description of Artificial Sequence: Synthetic oligonucleotide
  Antisense strand to SEQ ID NO: 311538
accucaaagauuaguacac

SEQ ID NO: 311540 - RNA, 19 nt, Artificial Sequence
  Description of Artificial Sequence: Synthetic oligonucleotide
  Sense strand starting at position 3151 of SEQ ID NO: 4000
uguacuaaucuuugaggua

SEQ ID NO: 311541 - RNA, 19 nt, Artificial Sequence
  Description of Artificial Sequence: Synthetic oligonucleotide
  Antisense strand to SEQ ID NO: 311540
uaccucaaagauuaguaca

SEQ ID NO: 311542 - RNA, 19 nt, Artificial Sequence
  Description of Artificial Sequence: Synthetic oligonucleotide
  Sense strand starting at position 3197 of SEQ ID NO: 4000
aguagcagacagugauuaa

SEQ ID NO: 311543 - RNA, 19 nt, Artificial Sequence
  Description of Artificial Sequence: Synthetic oligonucleotide
  Antisense strand to SEQ ID NO: 311542
uuaaucacugucugcuacu

SEQ ID NO: 311544 - RNA, 19 nt, Artificial Sequence
  Description of Artificial Sequence: Synthetic oligonucleotide
  Sense strand starting at position 3198 of SEQ ID NO: 4000
guagcagacagugauuaaa

SEQ ID NO: 311545 - RNA, 19 nt, Artificial Sequence
  Description of Artificial Sequence: Synthetic oligonucleotide
  Antisense strand to SEQ ID NO: 311544
uuuaaucacugucugcuac

SEQ ID NO: 311546 - RNA, 19 nt, Artificial Sequence
  Description of Artificial Sequence: Synthetic oligonucleotide
  Sense strand starting at position 3200 of SEQ ID NO: 4000
agcagacagugauuaaaua

SEQ ID NO: 311547 - RNA, 19 nt, Artificial Sequence
  Description of Artificial Sequence: Synthetic oligonucleotide
  Antisense strand to SEQ ID NO: 311546
uauuuaaucacugucugcu

SEQ ID NO: 311548 - RNA, 19 nt, Artificial Sequence
  Description of Artificial Sequence: Synthetic oligonucleotide
  Sense strand starting at position 3275 of SEQ ID NO: 4000
augauaacaucagaaaugu

SEQ ID NO: 311549 - RNA, 19 nt, Artificial Sequence
  Description of Artificial Sequence: Synthetic oligonucleotide
  Antisense strand to SEQ ID NO: 311548
acauuucugauguuaucau

SEQ ID NO: 311550 - RNA, 19 nt, Artificial Sequence
  Description of Artificial Sequence: Synthetic oligonucleotide
  Sense strand starting at position 3900 of SEQ ID NO: 4000
gagacaagaucugauuaug

SEQ ID NO: 311551 - RNA, 19 nt, Artificial Sequence
  Description of Artificial Sequence: Synthetic oligonucleotide
  Antisense strand to SEQ ID NO: 311550
cauaaucagaucuugucuc

SEQ ID NO: 311552 - RNA, 19 nt, Artificial Sequence
  Description of Artificial Sequence: Synthetic oligonucleotide
  Sense strand starting at position 74 of SEQ ID NO: 4001
ugcccaagauuauugugaa

SEQ ID NO: 311553 - RNA, 19 nt, Artificial Sequence
  Description of Artificial Sequence: Synthetic oligonucleotide
  Antisense strand to SEQ ID NO: 311552
uucacaauaaucuugggca

SEQ ID NO: 311554 - RNA, 19 nt, Artificial Sequence
  Description of Artificial Sequence: Synthetic oligonucleotide
  Sense strand starting at position 93 of SEQ ID NO: 4001
gucaaauaagauugugaag

SEQ ID NO: 311555 - RNA, 19 nt, Artificial Sequence
  Description of Artificial Sequence: Synthetic oligonucleotide
  Antisense strand to SEQ ID NO: 311554
cuucacaaucuuauuugac

SEQ ID NO: 311556 - RNA, 19 nt, Artificial Sequence
  Description of Artificial Sequence: Synthetic oligonucleotide
  Sense strand starting at position 99 of SEQ ID NO: 4001
uaagauugugaagguuaaa

SEQ ID NO: 311557 - RNA, 19 nt, Artificial Sequence
  Description of Artificial Sequence: Synthetic oligonucleotide
  Antisense strand to SEQ ID NO: 311556
uuuaaccuucacaaucuua

SEQ ID NO: 311558 - RNA, 19 nt, Artificial Sequence
  Description of Artificial Sequence: Synthetic oligonucleotide
  Sense strand starting at position 321 of SEQ ID NO: 4001
ccuaauacaguuugagaag

SEQ ID NO: 311559 - RNA, 19 nt, Artificial Sequence
  Description of Artificial Sequence: Synthetic oligonucleotide
  Antisense strand to SEQ ID NO: 311558
cuucucaaacuguauuagg

SEQ ID NO: 311560 - RNA, 19 nt, Artificial Sequence
  Description of Artificial Sequence: Synthetic oligonucleotide
  Sense strand starting at position 418 of SEQ ID NO: 4001
guaagauccucagcuaacu

SEQ ID NO: 311561 - RNA, 19 nt, Artificial Sequence
  Description of Artificial Sequence: Synthetic oligonucleotide
  Antisense strand to SEQ ID NO: 311560
aguuagcugaggaucuuac

SEQ ID NO: 311562 - RNA, 19 nt, Artificial Sequence
  Description of Artificial Sequence: Synthetic oligonucleotide
  Sense strand starting at position 427 of SEQ ID NO: 4001
ucagcuaacuuguugaaag

SEQ ID NO: 311563 - RNA, 19 nt, Artificial Sequence
  Description of Artificial Sequence: Synthetic oligonucleotide
  Antisense strand to SEQ ID NO: 311562
cuuucaacaaguuagcuga

SEQ ID NO: 311564 - RNA, 19 nt, Artificial Sequence
  Description of Artificial Sequence: Synthetic oligonucleotide
  Sense strand starting at position 633 of SEQ ID NO: 4001
cuuggacacuaggugaaua

SEQ ID NO: 311565 - RNA, 19 nt, Artificial Sequence
  Description of Artificial Sequence: Synthetic oligonucleotide
  Antisense strand to SEQ ID NO: 311564
uauucaccuaguguccaag

SEQ ID NO: 311566 - RNA, 19 nt, Artificial Sequence
  Description of Artificial Sequence: Synthetic oligonucleotide
  Sense strand starting at position 645 of SEQ ID NO: 4001
gugaauaaccauuaaugca

SEQ ID NO: 311567 - RNA, 19 nt, Artificial Sequence
  Description of Artificial Sequence: Synthetic oligonucleotide
  Antisense strand to SEQ ID NO: 311566
ugcauuaaugguuauucac

SEQ ID NO: 311568 - RNA, 19 nt, Artificial Sequence
  Description of Artificial Sequence: Synthetic oligonucleotide
  Sense strand starting at position 660 of SEQ ID NO: 4001
ugcaucugauaagcagaaa

SEQ ID NO: 311569 - RNA, 19 nt, Artificial Sequence
  Description of Artificial Sequence: Synthetic oligonucleotide
  Antisense strand to SEQ ID NO: 311568
uuucugcuuaucagaugca

SEQ ID NO: 311570 - RNA, 19 nt, Artificial Sequence
  Description of Artificial Sequence: Synthetic oligonucleotide
  Sense strand starting at position 693 of SEQ ID NO: 4001
uguaaacaaucugccagau

SEQ ID NO: 311571 - RNA, 19 nt, Artificial Sequence
  Description of Artificial Sequence: Synthetic oligonucleotide
  Antisense strand to SEQ ID NO: 311570
aucuggcagauuguuuaca

SEQ ID NO: 311572 - RNA, 19 nt, Artificial Sequence
  Description of Artificial Sequence: Synthetic oligonucleotide
  Sense strand starting at position 719 of SEQ ID NO: 4001
gugaaauguugacucacag

SEQ ID NO: 311573 - RNA, 19 nt, Artificial Sequence
  Description of Artificial Sequence: Synthetic oligonucleotide
  Antisense strand to SEQ ID NO: 311572
cugugagucaacauuucac

SEQ ID NO: 311574 - RNA, 19 nt, Artificial Sequence
  Description of Artificial Sequence: Synthetic oligonucleotide
  Sense strand starting at position 782 of SEQ ID NO: 4001
agcauaacacagugacuua

SEQ ID NO: 311575 - RNA, 19 nt, Artificial Sequence
  Description of Artificial Sequence: Synthetic oligonucleotide
  Antisense strand to SEQ ID NO: 311574
uaagucacuguguuaugcu

SEQ ID NO: 311576 - RNA, 19 nt, Artificial Sequence
  Description of Artificial Sequence: Synthetic oligonucleotide
  Sense strand starting at position 1041 of SEQ ID NO: 4001
ccugucugcgucucuaauu

SEQ ID NO: 311577 - RNA, 19 nt, Artificial Sequence
  Description of Artificial Sequence: Synthetic oligonucleotide
  Antisense strand to SEQ ID NO: 311576
aauuagagacgcagacagg

SEQ ID NO: 311578 - RNA, 19 nt, Artificial Sequence
  Description of Artificial Sequence: Synthetic oligonucleotide
  Sense strand starting at position 1109 of SEQ ID NO: 4001
uuccuuguuccaggauaca

SEQ ID NO: 311579 - RNA, 19 nt, Artificial Sequence
  Description of Artificial Sequence: Synthetic oligonucleotide
  Antisense strand to SEQ ID NO: 311578
uguauccuggaacaaggaa

SEQ ID NO: 311580 - RNA, 19 nt, Artificial Sequence
  Description of Artificial Sequence: Synthetic oligonucleotide
  Sense strand starting at position 1141 of SEQ ID NO: 4001
cguuauugggaauggaaau

SEQ ID NO: 311581 - RNA, 19 nt, Artificial Sequence
  Description of Artificial Sequence: Synthetic oligonucleotide
  Antisense strand to SEQ ID NO: 311580
auuuccauucccaauaacg

SEQ ID NO: 311582 - RNA, 19 nt, Artificial Sequence
  Description of Artificial Sequence: Synthetic oligonucleotide
  Sense strand starting at position 1209 of SEQ ID NO: 4001
gaaguaagucugcaggaga

SEQ ID NO: 311583 - RNA, 19 nt, Artificial Sequence
  Description of Artificial Sequence: Synthetic oligonucleotide
  Antisense strand to SEQ ID NO: 311582
ucuccugcagacuuacuuc

SEQ ID NO: 311584 - RNA, 19 nt, Artificial Sequence
  Description of Artificial Sequence: Synthetic oligonucleotide
  Sense strand starting at position 1212 of SEQ ID NO: 4001
guaagucugcaggagauga

SEQ ID NO: 311585 - RNA, 19 nt, Artificial Sequence
  Description of Artificial Sequence: Synthetic oligonucleotide
  Antisense strand to SEQ ID NO: 311584
ucaucuccugcagacuuac

SEQ ID NO: 311586 - RNA, 19 nt, Artificial Sequence
  Description of Artificial Sequence: Synthetic oligonucleotide
  Sense strand starting at position 1400 of SEQ ID NO: 4001
agagucucaccggauggau

SEQ ID NO: 311587 - RNA, 19 nt, Artificial Sequence
  Description of Artificial Sequence: Synthetic oligonucleotide
  Antisense strand to SEQ ID NO: 311586
auccauccggugagacucu

SEQ ID NO: 311588 - RNA, 19 nt, Artificial Sequence
  Description of Artificial Sequence: Synthetic oligonucleotide
  Sense strand starting at position 2384 of SEQ ID NO: 4001
guuccaacauucuugaaag

SEQ ID NO: 311589 - RNA, 19 nt, Artificial Sequence
  Description of Artificial Sequence: Synthetic oligonucleotide
  Antisense strand to SEQ ID NO: 311588
cuuucaagaauguuggaac

SEQ ID NO: 311590 - RNA, 19 nt, Artificial Sequence
  Description of Artificial Sequence: Synthetic oligonucleotide
  Sense strand starting at position 2435 of SEQ ID NO: 4001
cgccacuggccagaugaaa

SEQ ID NO: 311591 - RNA, 19 nt, Artificial Sequence
  Description of Artificial Sequence: Synthetic oligonucleotide
  Antisense strand to SEQ ID NO: 311590
uuucaucuggccaguggcg

SEQ ID NO: 311592 - RNA, 19 nt, Artificial Sequence
  Description of Artificial Sequence: Synthetic oligonucleotide
  Sense strand starting at position 2443 of SEQ ID NO: 4001
gccagaugaaagugcaaau

SEQ ID NO: 311593 - RNA, 19 nt, Artificial Sequence
  Description of Artificial Sequence: Synthetic oligonucleotide
  Antisense strand to SEQ ID NO: 311592
auuugcacuuucaucuggc

SEQ ID NO: 311594 - RNA, 19 nt, Artificial Sequence
  Description of Artificial Sequence: Synthetic oligonucleotide
  Sense strand starting at position 2518 of SEQ ID NO: 4001
agagcaauuuaggaauaga

SEQ ID NO: 311595 - RNA, 19 nt, Artificial Sequence
  Description of Artificial Sequence: Synthetic oligonucleotide
  Antisense strand to SEQ ID NO: 311594
ucuauuccuaaauugcucu

SEQ ID NO: 311596 - RNA, 19 nt, Artificial Sequence
  Description of Artificial Sequence: Synthetic oligonucleotide
  Sense strand starting at position 2542 of SEQ ID NO: 4001
uuguuuauuccgcuuguuu

SEQ ID NO: 311597 - RNA, 19 nt, Artificial Sequence
  Description of Artificial Sequence: Synthetic oligonucleotide
  Antisense strand to SEQ ID NO: 311596
aaacaagcggaauaaacaa

SEQ ID NO: 311598 - RNA, 19 nt, Artificial Sequence
  Description of Artificial Sequence: Synthetic oligonucleotide
  Sense strand starting at position 2633 of SEQ ID NO: 4001
guaauuacagcguacaauu

SEQ ID NO: 311599 - RNA, 19 nt, Artificial Sequence
  Description of Artificial Sequence: Synthetic oligonucleotide
  Antisense strand to SEQ ID NO: 311598
aauuguacgcuguaauuac

SEQ ID NO: 311600 - RNA, 19 nt, Artificial Sequence
  Description of Artificial Sequence: Synthetic oligonucleotide
  Sense strand starting at position 2706 of SEQ ID NO: 4001
cgucuagagucgacuguua

SEQ ID NO: 311601 - RNA, 19 nt, Artificial Sequence
  Description of Artificial Sequence: Synthetic oligonucleotide
  Antisense strand to SEQ ID NO: 311600
uaacagucgacucuagacg

SEQ ID NO: 311602 - RNA, 19 nt, Artificial Sequence
  Description of Artificial Sequence: Synthetic oligonucleotide
  Sense strand starting at position 2773 of SEQ ID NO: 4001
uuuggaaugcuugagaguu

SEQ ID NO: 311603 - RNA, 19 nt, Artificial Sequence
  Description of Artificial Sequence: Synthetic oligonucleotide
  Antisense strand to SEQ ID NO: 311602
aacucucaagcauuccaaa

SEQ ID NO: 311604 - RNA, 19 nt, Artificial Sequence
  Description of Artificial Sequence: Synthetic oligonucleotide
  Sense strand starting at position 2986 of SEQ ID NO: 4001
auccuuugaccugggugau

SEQ ID NO: 311605 - RNA, 19 nt, Artificial Sequence
  Description of Artificial Sequence: Synthetic oligonucleotide
  Antisense strand to SEQ ID NO: 311604
aucacccaggucaaaggau

SEQ ID NO: 311606 - RNA, 19 nt, Artificial Sequence
  Description of Artificial Sequence: Synthetic oligonucleotide
  Sense strand starting at position 2987 of SEQ ID NO: 4001
uccuuugaccugggugauu

SEQ ID NO: 311607 - RNA, 19 nt, Artificial Sequence
  Description of Artificial Sequence: Synthetic oligonucleotide
  Antisense strand to SEQ ID NO: 311606
aaucacccaggucaaagga

SEQ ID NO: 311608 - RNA, 19 nt, Artificial Sequence
  Description of Artificial Sequence: Synthetic oligonucleotide
  Sense strand starting at position 3001 of SEQ ID NO: 4001
ugauuugucucacccagca

SEQ ID NO: 311609 - RNA, 19 nt, Artificial Sequence
  Description of Artificial Sequence: Synthetic oligonucleotide
  Antisense strand to SEQ ID NO: 311608
ugcugggugagacaaauca

SEQ ID NO: 311610 - RNA, 19 nt, Artificial Sequence
  Description of Artificial Sequence: Synthetic oligonucleotide
  Sense strand starting at position 3366 of SEQ ID NO: 4001
cuauacuggacgcaugaga

SEQ ID NO: 311611 - RNA, 19 nt, Artificial Sequence
  Description of Artificial Sequence: Synthetic oligonucleotide
  Antisense strand to SEQ ID NO: 311610
ucucaugcguccaguauag

SEQ ID NO: 311612 - RNA, 19 nt, Artificial Sequence
  Description of Artificial Sequence: Synthetic oligonucleotide
  Sense strand starting at position 3391 of SEQ ID NO: 4001
aguauuaucuaacccagga

SEQ ID NO: 311613 - RNA, 19 nt, Artificial Sequence
  Description of Artificial Sequence: Synthetic oligonucleotide
  Antisense strand to SEQ ID NO: 311612
uccuggguuagauaauacu

SEQ ID NO: 311614 - RNA, 19 nt, Artificial Sequence
  Description of Artificial Sequence: Synthetic oligonucleotide
  Sense strand starting at position 3395 of SEQ ID NO: 4001
uuaucuaacccaggaguuu

SEQ ID NO: 311615 - RNA, 19 nt, Artificial Sequence
  Description of Artificial Sequence: Synthetic oligonucleotide
  Antisense strand to SEQ ID NO: 311614
aaacuccuggguuagauaa

SEQ ID NO: 311616 - RNA, 19 nt, Artificial Sequence
  Description of Artificial Sequence: Synthetic oligonucleotide
  Sense strand starting at position 3431 of SEQ ID NO: 4001
acauaauuaguugaagcua

SEQ ID NO: 311617 - RNA, 19 nt, Artificial Sequence
  Description of Artificial Sequence: Synthetic oligonucleotide
  Antisense strand to SEQ ID NO: 311616
uagcuucaacuaauuaugu

SEQ ID NO: 311618 - RNA, 19 nt, Artificial Sequence
  Description of Artificial Sequence: Synthetic oligonucleotide
  Sense strand starting at position 3440 of SEQ ID NO: 4001
guugaagcuaguuacugau

SEQ ID NO: 311619 - RNA, 19 nt, Artificial Sequence
  Description of Artificial Sequence: Synthetic oligonucleotide
  Antisense strand to SEQ ID NO: 311618
aucaguaacuagcuucaac

SEQ ID NO: 311620 - RNA, 19 nt, Artificial Sequence
  Description of Artificial Sequence: Synthetic oligonucleotide
  Sense strand starting at position 3447 of SEQ ID NO: 4001
cuaguuacugauggugaca

SEQ ID NO: 311621 - RNA, 19 nt, Artificial Sequence
  Description of Artificial Sequence: Synthetic oligonucleotide
  Antisense strand to SEQ ID NO: 311620
ugucaccaucaguaacuag

SEQ ID NO: 311622 - RNA, 19 nt, Artificial Sequence
  Description of Artificial Sequence: Synthetic oligonucleotide
  Sense strand starting at position 3531 of SEQ ID NO: 4001
ccaccauuucucuguggua

SEQ ID NO: 311623 - RNA, 19 nt, Artificial Sequence
  Description of Artificial Sequence: Synthetic oligonucleotide
  Antisense strand to SEQ ID NO: 311622
uaccacagagaaauggugg

SEQ ID NO: 311624 - RNA, 19 nt, Artificial Sequence
  Description of Artificial Sequence: Synthetic oligonucleotide
  Sense strand starting at position 3538 of SEQ ID NO: 4001
uucucugugguauauuaau

SEQ ID NO: 311625 - RNA, 19 nt, Artificial Sequence
  Description of Artificial Sequence: Synthetic oligonucleotide
  Antisense strand to SEQ ID NO: 311624
auuaauauaccacagagaa

SEQ ID NO: 311626 - RNA, 19 nt, Artificial Sequence
  Description of Artificial Sequence: Synthetic oligonucleotide
  Sense strand starting at position 3679 of SEQ ID NO: 4001
uuguuccuuccuuaaaguu

SEQ ID NO: 311627 - RNA, 19 nt, Artificial Sequence
  Description of Artificial Sequence: Synthetic oligonucleotide
  Antisense strand to SEQ ID NO: 311626
aacuuuaaggaaggaacaa

SEQ ID NO: 311628 - RNA, 19 nt, Artificial Sequence
  Description of Artificial Sequence: Synthetic oligonucleotide
  Sense strand starting at position 3709 of SEQ ID NO: 4001
uuuacaucuguaggauaua

SEQ ID NO: 311629 - RNA, 19 nt, Artificial Sequence
  Description of Artificial Sequence: Synthetic oligonucleotide
  Antisense strand to SEQ ID NO: 311628
uauauccuacagauguaaa

SEQ ID NO: 311630 - RNA, 19 nt, Artificial Sequence
  Description of Artificial Sequence: Synthetic oligonucleotide
  Sense strand starting at position 3733 of SEQ ID NO: 4001
uucucaggagcuuauauua

SEQ ID NO: 311631 - RNA, 19 nt, Artificial Sequence
  Description of Artificial Sequence: Synthetic oligonucleotide
  Antisense strand to SEQ ID NO: 311630
uaauauaagcuccugagaa

SEQ ID NO: 311632 - RNA, 19 nt, Artificial Sequence
  Description of Artificial Sequence: Synthetic oligonucleotide
  Sense strand starting at position 66 of SEQ ID NO: 4002
aguucuaauccugguucca

SEQ ID NO: 311633 - RNA, 19 nt, Artificial Sequence
  Description of Artificial Sequence: Synthetic oligonucleotide
  Antisense strand to SEQ ID NO: 311632
uggaaccaggauuagaacu

SEQ ID NO: 311634 - RNA, 19 nt, Artificial Sequence
  Description of Artificial Sequence: Synthetic oligonucleotide
  Sense strand starting at position 103 of SEQ ID NO: 4002
uugcuuaguuucccagagu

SEQ ID NO: 311635 - RNA, 19 nt, Artificial Sequence
  Description of Artificial Sequence: Synthetic oligonucleotide
  Antisense strand to SEQ ID NO: 311634
acucugggaaacuaagcaa

SEQ ID NO: 311636 - RNA, 19 nt, Artificial Sequence
  Description of Artificial Sequence: Synthetic oligonucleotide
  Sense strand starting at position 106 of SEQ ID NO: 4002
cuuaguuucccagaguuuc

SEQ ID NO: 311637 - RNA, 19 nt, Artificial Sequence
  Description of Artificial Sequence: Synthetic oligonucleotide
  Antisense strand to SEQ ID NO: 311636
gaaacucugggaaacuaag

SEQ ID NO: 311638 - RNA, 19 nt, Artificial Sequence
  Description of Artificial Sequence: Synthetic oligonucleotide
  Sense strand starting at position 114 of SEQ ID NO: 4002
cccagaguuucuguuucuu

SEQ ID NO: 311639 - RNA, 19 nt, Artificial Sequence
  Description of Artificial Sequence: Synthetic oligonucleotide
  Antisense strand to SEQ ID NO: 311638
aagaaacagaaacucuggg

SEQ ID NO: 311640 - RNA, 19 nt, Artificial Sequence
  Description of Artificial Sequence: Synthetic oligonucleotide
  Sense strand starting at position 145 of SEQ ID NO: 4002
ggcagaaaguuccuuauca

SEQ ID NO: 311641 - RNA, 19 nt, Artificial Sequence
  Description of Artificial Sequence: Synthetic oligonucleotide
  Antisense strand to SEQ ID NO: 311640
ugauaaggaacuuucugcc

SEQ ID NO: 311642 - RNA, 19 nt, Artificial Sequence
  Description of Artificial Sequence: Synthetic oligonucleotide
  Sense strand starting at position 146 of SEQ ID NO: 4002
gcagaaaguuccuuaucaa

SEQ ID NO: 311643 - RNA, 19 nt, Artificial Sequence
  Description of Artificial Sequence: Synthetic oligonucleotide
  Antisense strand to SEQ ID NO: 311642
uugauaaggaacuuucugc

SEQ ID NO: 311644 - RNA, 19 nt, Artificial Sequence
  Description of Artificial Sequence: Synthetic oligonucleotide
  Sense strand starting at position 219 of SEQ ID NO: 4002
gcacuuaccugucaagaac

SEQ ID NO: 311645 - RNA, 19 nt, Artificial Sequence
  Description of Artificial Sequence: Synthetic oligonucleotide
  Antisense strand to SEQ ID NO: 311644
guucuugacagguaagugc

SEQ ID NO: 311646 - RNA, 19 nt, Artificial Sequence
  Description of Artificial Sequence: Synthetic oligonucleotide
  Sense strand starting at position 240 of SEQ ID NO: 4002
uucuaaguguucucugcau

SEQ ID NO: 311647 - RNA, 19 nt, Artificial Sequence
  Description of Artificial Sequence: Synthetic oligonucleotide
  Antisense strand to SEQ ID NO: 311646
augcagagaacacuuagaa

SEQ ID NO: 311648 - RNA, 19 nt, Artificial Sequence
  Description of Artificial Sequence: Synthetic oligonucleotide
  Sense strand starting at position 242 of SEQ ID NO: 4002
cuaaguguucucugcauua

SEQ ID NO: 311649 - RNA, 19 nt, Artificial Sequence
  Description of Artificial Sequence: Synthetic oligonucleotide
  Antisense strand to SEQ ID NO: 311648
uaaugcagagaacacuuag

SEQ ID NO: 311650 - RNA, 19 nt, Artificial Sequence
  Description of Artificial Sequence: Synthetic oligonucleotide
  Sense strand starting at position 420 of SEQ ID NO: 4002
cuccguauuucucucagca

SEQ ID NO: 311651 - RNA, 19 nt, Artificial Sequence
  Description of Artificial Sequence: Synthetic oligonucleotide
  Antisense strand to SEQ ID NO: 311650
ugcugagagaaauacggag

SEQ ID NO: 311652 - RNA, 19 nt, Artificial Sequence
  Description of Artificial Sequence: Synthetic oligonucleotide
  Sense strand starting at position 422 of SEQ ID NO: 4002
ccguauuucucucagcauu

SEQ ID NO: 311653 - RNA, 19 nt, Artificial Sequence
  Description of Artificial Sequence: Synthetic oligonucleotide
  Antisense strand to SEQ ID NO: 311652
aaugcugagagaaauacgg

SEQ ID NO: 311654 - RNA, 19 nt, Artificial Sequence
  Description of Artificial Sequence: Synthetic oligonucleotide
  Sense strand starting at position 424 of SEQ ID NO: 4002
guauuucucucagcauuag

SEQ ID NO: 311655 - RNA, 19 nt, Artificial Sequence
  Description of Artificial Sequence: Synthetic oligonucleotide
  Antisense strand to SEQ ID NO: 311654
cuaaugcugagagaaauac

SEQ ID NO: 311656 - RNA, 19 nt, Artificial Sequence
  Description of Artificial Sequence: Synthetic oligonucleotide
  Sense strand starting at position 428 of SEQ ID NO: 4002
uucucucagcauuaguauu

SEQ ID NO: 311657 - RNA, 19 nt, Artificial Sequence
  Description of Artificial Sequence: Synthetic oligonucleotide
  Antisense strand to SEQ ID NO: 311656
aauacuaaugcugagagaa

SEQ ID NO: 311658 - RNA, 19 nt, Artificial Sequence
  Description of Artificial Sequence: Synthetic oligonucleotide
  Sense strand starting at position 453 of SEQ ID NO: 4002
acuuuacaggacuguuaaa

SEQ ID NO: 311659 - RNA, 19 nt, Artificial Sequence
  Description of Artificial Sequence: Synthetic oligonucleotide
  Antisense strand to SEQ ID NO: 311658
uuuaacaguccuguaaagu

SEQ ID NO: 311660 - RNA, 19 nt, Artificial Sequence
  Description of Artificial Sequence: Synthetic oligonucleotide
  Sense strand starting at position 504 of SEQ ID NO: 4002
uaagcagagcgcuguaauu

SEQ ID NO: 311661 - RNA, 19 nt, Artificial Sequence
  Description of Artificial Sequence: Synthetic oligonucleotide
  Antisense strand to SEQ ID NO: 311660
aauuacagcgcucugcuua

SEQ ID NO: 311662 - RNA, 19 nt, Artificial Sequence
  Description of Artificial Sequence: Synthetic oligonucleotide
  Sense strand starting at position 564 of SEQ ID NO: 4002
cuuauaagcccugauaggu

SEQ ID NO: 311663 - RNA, 19 nt, Artificial Sequence
  Description of Artificial Sequence: Synthetic oligonucleotide
  Antisense strand to SEQ ID NO: 311662
accuaucagggcuuauaag

SEQ ID NO: 311664 - RNA, 19 nt, Artificial Sequence
  Description of Artificial Sequence: Synthetic oligonucleotide
  Sense strand starting at position 723 of SEQ ID NO: 4002
agaguaagauccuaaauag

SEQ ID NO: 311665 - RNA, 19 nt, Artificial Sequence
  Description of Artificial Sequence: Synthetic oligonucleotide
  Antisense strand to SEQ ID NO: 311664
cuauuuaggaucuuacucu

SEQ ID NO: 311666 - RNA, 19 nt, Artificial Sequence
  Description of Artificial Sequence: Synthetic oligonucleotide
  Sense strand starting at position 823 of SEQ ID NO: 4002
cgguuuggcuacucuguaa

SEQ ID NO: 311667 - RNA, 19 nt, Artificial Sequence
  Description of Artificial Sequence: Synthetic oligonucleotide
  Antisense strand to SEQ ID NO: 311666
uuacagaguagccaaaccg

SEQ ID NO: 311668 - RNA, 19 nt, Artificial Sequence
  Description of Artificial Sequence: Synthetic oligonucleotide
  Sense strand starting at position 858 of SEQ ID NO: 4002
caugcugaguuagagagau

SEQ ID NO: 311669 - RNA, 19 nt, Artificial Sequence
  Description of Artificial Sequence: Synthetic oligonucleotide
  Antisense strand to SEQ ID NO: 311668
aucucucuaacucagcaug

SEQ ID NO: 311670 - RNA, 19 nt, Artificial Sequence
  Description of Artificial Sequence: Synthetic oligonucleotide
  Sense strand starting at position 860 of SEQ ID NO: 4002
ugcugaguuagagagaugu

SEQ ID NO: 311671 - RNA, 19 nt, Artificial Sequence
  Description of Artificial Sequence: Synthetic oligonucleotide
  Antisense strand to SEQ ID NO: 311670
acaucucucuaacucagca

SEQ ID NO: 311672 - RNA, 19 nt, Artificial Sequence
  Description of Artificial Sequence: Synthetic oligonucleotide
  Sense strand starting at position 864 of SEQ ID NO: 4002
gaguuagagagauguagcu

SEQ ID NO: 311673 - RNA, 19 nt, Artificial Sequence
  Description of Artificial Sequence: Synthetic oligonucleotide
  Antisense strand to SEQ ID NO: 311672
agcuacaucucucuaacuc

SEQ ID NO: 311674 - RNA, 19 nt, Artificial Sequence
  Description of Artificial Sequence: Synthetic oligonucleotide
  Sense strand starting at position 866 of SEQ ID NO: 4002
guuagagagauguagcuga

SEQ ID NO: 311675 - RNA, 19 nt, Artificial Sequence
  Description of Artificial Sequence: Synthetic oligonucleotide
  Antisense strand to SEQ ID NO: 311674
ucagcuacaucucucuaac

SEQ ID NO: 311676 - RNA, 19 nt, Artificial Sequence
  Description of Artificial Sequence: Synthetic oligonucleotide
  Sense strand starting at position 870 of SEQ ID NO: 4002
gagagauguagcugaguga

SEQ ID NO: 311677 - RNA, 19 nt, Artificial Sequence
  Description of Artificial Sequence: Synthetic oligonucleotide
  Antisense strand to SEQ ID NO: 311676
ucacucagcuacaucucuc

SEQ ID NO: 311678 - RNA, 19 nt, Artificial Sequence
  Description of Artificial Sequence: Synthetic oligonucleotide
  Sense strand starting at position 879 of SEQ ID NO: 4002
agcugagugacucaacagu

SEQ ID NO: 311679 - RNA, 19 nt, Artificial Sequence
  Description of Artificial Sequence: Synthetic oligonucleotide
  Antisense strand to SEQ ID NO: 311678
acuguugagucacucagcu

SEQ ID NO: 311680 - RNA, 19 nt, Artificial Sequence
  Description of Artificial Sequence: Synthetic oligonucleotide
  Sense strand starting at position 1066 of SEQ ID NO: 4002
ggagcagugugaucggcuu

SEQ ID NO: 311681 - RNA, 19 nt, Artificial Sequence
  Description of Artificial Sequence: Synthetic oligonucleotide
  Antisense strand to SEQ ID NO: 311680
aagccgaucacacugcucc

SEQ ID NO: 311682 - RNA, 19 nt, Artificial Sequence
  Description of Artificial Sequence: Synthetic oligonucleotide
  Sense strand starting at position 1068 of SEQ ID NO: 4002
agcagugugaucggcuuga

SEQ ID NO: 311683 - RNA, 19 nt, Artificial Sequence
  Description of Artificial Sequence: Synthetic oligonucleotide
  Antisense strand to SEQ ID NO: 311682
ucaagccgaucacacugcu

SEQ ID NO: 311684 - RNA, 19 nt, Artificial Sequence
  Description of Artificial Sequence: Synthetic oligonucleotide
  Sense strand starting at position 1072 of SEQ ID NO: 4002
gugugaucggcuugaaagc

SEQ ID NO: 311685 - RNA, 19 nt, Artificial Sequence
  Description of Artificial Sequence: Synthetic oligonucleotide
  Antisense strand to SEQ ID NO: 311684
gcuuucaagccgaucacac

SEQ ID NO: 311686 - RNA, 19 nt, Artificial Sequence
  Description of Artificial Sequence: Synthetic oligonucleotide
  Sense strand starting at position 1151 of SEQ ID NO: 4002
uguagaggugccugggaaa

SEQ ID NO: 311687 - RNA, 19 nt, Artificial Sequence
  Description of Artificial Sequence: Synthetic oligonucleotide
  Antisense strand to SEQ ID NO: 311686
uuucccaggcaccucuaca

SEQ ID NO: 311688 - RNA, 19 nt, Artificial Sequence
  Description of Artificial Sequence: Synthetic oligonucleotide
  Sense strand starting at position 1174 of SEQ ID NO: 4002
aaaguuaagaguugagagu

SEQ ID NO: 311689 - RNA, 19 nt, Artificial Sequence
  Description of Artificial Sequence: Synthetic oligonucleotide
  Antisense strand to SEQ ID NO: 311688
acucucaacucuuaacuuu

SEQ ID NO: 311690 - RNA, 19 nt, Artificial Sequence
  Description of Artificial Sequence: Synthetic oligonucleotide
  Sense strand starting at position 1308 of SEQ ID NO: 4002
acugaugagccggaucaca

SEQ ID NO: 311691 - RNA, 19 nt, Artificial Sequence
  Description of Artificial Sequence: Synthetic oligonucleotide
  Antisense strand to SEQ ID NO: 311690
ugugauccggcucaucagu

SEQ ID NO: 311692 - RNA, 19 nt, Artificial Sequence
  Description of Artificial Sequence: Synthetic oligonucleotide
  Sense strand starting at position 1338 of SEQ ID NO: 4002
guuagauagucccaagaug

SEQ ID NO: 311693 - RNA, 19 nt, Artificial Sequence
  Description of Artificial Sequence: Synthetic oligonucleotide
  Antisense strand to SEQ ID NO: 311692
caucuugggacuaucuaac

SEQ ID NO: 311694 - RNA, 19 nt, Artificial Sequence
  Description of Artificial Sequence: Synthetic oligonucleotide
  Sense strand starting at position 2786 of SEQ ID NO: 4002
gccauuauacuccgggcaa

SEQ ID NO: 311695 - RNA, 19 nt, Artificial Sequence
  Description of Artificial Sequence: Synthetic oligonucleotide
  Antisense strand to SEQ ID NO: 311694
uugcccggaguauaauggc

SEQ ID NO: 311696 - RNA, 19 nt, Artificial Sequence
  Description of Artificial Sequence: Synthetic oligonucleotide
  Sense strand starting at position 2881 of SEQ ID NO: 4002
gguagaacgaaagguuuga

SEQ ID NO: 311697 - RNA, 19 nt, Artificial Sequence
  Description of Artificial Sequence: Synthetic oligonucleotide
  Antisense strand to SEQ ID NO: 311696
ucaaaccuuucguucuacc

SEQ ID NO: 311698 - RNA, 19 nt, Artificial Sequence
  Description of Artificial Sequence: Synthetic oligonucleotide
  Sense strand starting at position 2886 of SEQ ID NO: 4002
aacgaaagguuugaaggaa

SEQ ID NO: 311699 - RNA, 19 nt, Artificial Sequence
  Description of Artificial Sequence: Synthetic oligonucleotide
  Antisense strand to SEQ ID NO: 311698
uuccuucaaaccuuucguu

SEQ ID NO: 311700 - RNA, 19 nt, Artificial Sequence
  Description of Artificial Sequence: Synthetic oligonucleotide
  Sense strand starting at position 2977 of SEQ ID NO: 4002
gucagaguucgagaccaag

SEQ ID NO: 311701 - RNA, 19 nt, Artificial Sequence
  Description of Artificial Sequence: Synthetic oligonucleotide
  Antisense strand to SEQ ID NO: 311700
cuuggucucgaacucugac

SEQ ID NO: 311702 - RNA, 19 nt, Artificial Sequence
  Description of Artificial Sequence: Synthetic oligonucleotide
  Sense strand starting at position 3228 of SEQ ID NO: 4002
ugauaaugauuguaacaac

SEQ ID NO: 311703 - RNA, 19 nt, Artificial Sequence
  Description of Artificial Sequence: Synthetic oligonucleotide
  Antisense strand to SEQ ID NO: 311702
guuguuacaaucauuauca

SEQ ID NO: 311704 - RNA, 19 nt, Artificial Sequence
  Description of Artificial Sequence: Synthetic oligonucleotide
  Sense strand starting at position 3324 of SEQ ID NO: 4002
aaguaaugaucggaacaac

SEQ ID NO: 311705 - RNA, 19 nt, Artificial Sequence
  Description of Artificial Sequence: Synthetic oligonucleotide
  Antisense strand to SEQ ID NO: 311704
guuguuccgaucauuacuu

SEQ ID NO: 311706 - RNA, 19 nt, Artificial Sequence
  Description of Artificial Sequence: Synthetic oligonucleotide
  Sense strand starting at position 3348 of SEQ ID NO: 4002
ccuccuguuucuccagauu

SEQ ID NO: 311707 - RNA, 19 nt, Artificial Sequence
  Description of Artificial Sequence: Synthetic oligonucleotide
  Antisense strand to SEQ ID NO: 311706
aaucuggagaaacaggagg

SEQ ID NO: 311708 - RNA, 19 nt, Artificial Sequence
  Description of Artificial Sequence: Synthetic oligonucleotide
  Sense strand starting at position 3360 of SEQ ID NO: 4002
ccagauuuaucucauguug

SEQ ID NO: 311709 - RNA, 19 nt, Artificial Sequence
  Description of Artificial Sequence: Synthetic oligonucleotide
  Antisense strand to SEQ ID NO: 311708
caacaugagauaaaucugg

SEQ ID NO: 311710 - RNA, 19 nt, Artificial Sequence
  Description of Artificial Sequence: Synthetic oligonucleotide
  Sense strand starting at position 3693 of SEQ ID NO: 4002
ggagcagcaugguaagauu

SEQ ID NO: 311711 - RNA, 19 nt, Artificial Sequence
  Description of Artificial Sequence: Synthetic oligonucleotide
  Antisense strand to SEQ ID NO: 311710
aaucuuaccaugcugcucc

SEQ ID NO: 311712 - RNA, 19 nt, Artificial Sequence
  Description of Artificial Sequence: Synthetic oligonucleotide
  Sense strand starting at position 43 of SEQ ID NO: 4003
ucacuagccuugucuuauc

SEQ ID NO: 311713 - RNA, 19 nt, Artificial Sequence
  Description of Artificial Sequence: Synthetic oligonucleotide
  Antisense strand to SEQ ID NO: 311712
gauaagacaaggcuaguga

SEQ ID NO: 311714 - RNA, 19 nt, Artificial Sequence
  Description of Artificial Sequence: Synthetic oligonucleotide
  Sense strand starting at position 275 of SEQ ID NO: 4003
gccuguacugaauaugaaa

SEQ ID NO: 311715 - RNA, 19 nt, Artificial Sequence
  Description of Artificial Sequence: Synthetic oligonucleotide
  Antisense strand to SEQ ID NO: 311714
uuucauauucaguacaggc

SEQ ID NO: 311716 - RNA, 19 nt, Artificial Sequence
  Description of Artificial Sequence: Synthetic oligonucleotide
  Sense strand starting at position 296 of SEQ ID NO: 4003
ggagaaugaucagaaauau

SEQ ID NO: 311717 - RNA, 19 nt, Artificial Sequence
  Description of Artificial Sequence: Synthetic oligonucleotide
  Antisense strand to SEQ ID NO: 311716
auauuucugaucauucucc

SEQ ID NO: 311718 - RNA, 19 nt, Artificial Sequence
  Description of Artificial Sequence: Synthetic oligonucleotide
  Sense strand starting at position 536 of SEQ ID NO: 4003
aaacaaaucugggauguag

SEQ ID NO: 311719 - RNA, 19 nt, Artificial Sequence
  Description of Artificial Sequence: Synthetic oligonucleotide
  Antisense strand to SEQ ID NO: 311718
cuacaucccagauuuguuu

SEQ ID NO: 311720 - RNA, 19 nt, Artificial Sequence
  Description of Artificial Sequence: Synthetic oligonucleotide
  Sense strand starting at position 544 of SEQ ID NO: 4003
cugggauguagguacuauu

SEQ ID NO: 311721 - RNA, 19 nt, Artificial Sequence
  Description of Artificial Sequence: Synthetic oligonucleotide
  Antisense strand to SEQ ID NO: 311720
aauaguaccuacaucccag

SEQ ID NO: 311722 - RNA, 19 nt, Artificial Sequence
  Description of Artificial Sequence: Synthetic oligonucleotide
  Sense strand starting at position 705 of SEQ ID NO: 4003
gagugagugggccaagcau

SEQ ID NO: 311723 - RNA, 19 nt, Artificial Sequence
  Description of Artificial Sequence: Synthetic oligonucleotide
  Antisense strand to SEQ ID NO: 311722
augcuuggcccacucacuc

SEQ ID NO: 311724 - RNA, 19 nt, Artificial Sequence
  Description of Artificial Sequence: Synthetic oligonucleotide
  Sense strand starting at position 735 of SEQ ID NO: 4003
ggaaguguuuagaggcaag

SEQ ID NO: 311725 - RNA, 19 nt, Artificial Sequence
  Description of Artificial Sequence: Synthetic oligonucleotide
  Antisense strand to SEQ ID NO: 311724
cuugccucuaaacacuucc

SEQ ID NO: 311726 - RNA, 19 nt, Artificial Sequence
  Description of Artificial Sequence: Synthetic oligonucleotide
  Sense strand starting at position 806 of SEQ ID NO: 4003
gcaggagaguccucuucuu

SEQ ID NO: 311727 - RNA, 19 nt, Artificial Sequence
  Description of Artificial Sequence: Synthetic oligonucleotide
  Antisense strand to SEQ ID NO: 311726
aagaagaggacucuccugc

SEQ ID NO: 311728 - RNA, 19 nt, Artificial Sequence
  Description of Artificial Sequence: Synthetic oligonucleotide
  Sense strand starting at position 928 of SEQ ID NO: 4003
cagggaagaugaguuuguu

SEQ ID NO: 311729 - RNA, 19 nt, Artificial Sequence
  Description of Artificial Sequence: Synthetic oligonucleotide
  Antisense strand to SEQ ID NO: 311728
aacaaacucaucuucccug

SEQ ID NO: 311730 - RNA, 19 nt, Artificial Sequence
  Description of Artificial Sequence: Synthetic oligonucleotide
  Sense strand starting at position 931 of SEQ ID NO: 4003
ggaagaugaguuuguuugu

SEQ ID NO: 311731 - RNA, 19 nt, Artificial Sequence
  Description of Artificial Sequence: Synthetic oligonucleotide
  Antisense strand to SEQ ID NO: 311730
acaaacaaacucaucuucc

SEQ ID NO: 311732 - RNA, 19 nt, Artificial Sequence
  Description of Artificial Sequence: Synthetic oligonucleotide
  Sense strand starting at position 932 of SEQ ID NO: 4003
gaagaugaguuuguuuguu

SEQ ID NO: 311733 - RNA, 19 nt, Artificial Sequence
  Description of Artificial Sequence: Synthetic oligonucleotide
  Antisense strand to SEQ ID NO: 311732
aacaaacaaacucaucuuc

SEQ ID NO: 311734 - RNA, 19 nt, Artificial Sequence
  Description of Artificial Sequence: Synthetic oligonucleotide
  Sense strand starting at position 1298 of SEQ ID NO: 4003
ggacaugccugcuccugaa

SEQ ID NO: 311735 - RNA, 19 nt, Artificial Sequence
  Description of Artificial Sequence: Synthetic oligonucleotide
  Antisense strand to SEQ ID NO: 311734
uucaggagcaggcaugucc

SEQ ID NO: 311736 - RNA, 19 nt, Artificial Sequence
  Description of Artificial Sequence: Synthetic oligonucleotide
  Sense strand starting at position 1311 of SEQ ID NO: 4003
ccugaagguuuggagagaa

SEQ ID NO: 311737 - RNA, 19 nt, Artificial Sequence
  Description of Artificial Sequence: Synthetic oligonucleotide
  Antisense strand to SEQ ID NO: 311736
uucucuccaaaccuucagg

SEQ ID NO: 311738 - RNA, 19 nt, Artificial Sequence
  Description of Artificial Sequence: Synthetic oligonucleotide
  Sense strand starting at position 1374 of SEQ ID NO: 4003
caugccucaccugagugau

SEQ ID NO: 311739 - RNA, 19 nt, Artificial Sequence
  Description of Artificial Sequence: Synthetic oligonucleotide
  Antisense strand to SEQ ID NO: 311738
aucacucaggugaggcaug

SEQ ID NO: 311740 - RNA, 19 nt, Artificial Sequence
  Description of Artificial Sequence: Synthetic oligonucleotide
  Sense strand starting at position 1376 of SEQ ID NO: 4003
ugccucaccugagugauaa

SEQ ID NO: 311741 - RNA, 19 nt, Artificial Sequence
  Description of Artificial Sequence: Synthetic oligonucleotide
  Antisense strand to SEQ ID NO: 311740
uuaucacucaggugaggca

SEQ ID NO: 311742 - RNA, 19 nt, Artificial Sequence
  Description of Artificial Sequence: Synthetic oligonucleotide
  Sense strand starting at position 1377 of SEQ ID NO: 4003
gccucaccugagugauaag

SEQ ID NO: 311743 - RNA, 19 nt, Artificial Sequence
  Description of Artificial Sequence: Synthetic oligonucleotide
  Antisense strand to SEQ ID NO: 311742
cuuaucacucaggugaggc

SEQ ID NO: 311744 - RNA, 19 nt, Artificial Sequence
  Description of Artificial Sequence: Synthetic oligonucleotide
  Sense strand starting at position 1681 of SEQ ID NO: 4003
ucgagcauuucggaagaug

SEQ ID NO: 311745 - RNA, 19 nt, Artificial Sequence
  Description of Artificial Sequence: Synthetic oligonucleotide
  Antisense strand to SEQ ID NO: 311744
caucuuccgaaaugcucga

SEQ ID NO: 311746 - RNA, 19 nt, Artificial Sequence
  Description of Artificial Sequence: Synthetic oligonucleotide
  Sense strand starting at position 1860 of SEQ ID NO: 4003
gccaaauaagugugaugaa

SEQ ID NO: 311747 - RNA, 19 nt, Artificial Sequence
  Description of Artificial Sequence: Synthetic oligonucleotide
  Antisense strand to SEQ ID NO: 311746
uucaucacacuuauuuggc

SEQ ID NO: 311748 - RNA, 19 nt, Artificial Sequence
  Description of Artificial Sequence: Synthetic oligonucleotide
  Sense strand starting at position 1861 of SEQ ID NO: 4003
ccaaauaagugugaugaag

SEQ ID NO: 311749 - RNA, 19 nt, Artificial Sequence
  Description of Artificial Sequence: Synthetic oligonucleotide
  Antisense strand to SEQ ID NO: 311748
cuucaucacacuuauuugg

SEQ ID NO: 311750 - RNA, 19 nt, Artificial Sequence
  Description of Artificial Sequence: Synthetic oligonucleotide
  Sense strand starting at position 2267 of SEQ ID NO: 4003
ggucggugucgggaacagu

SEQ ID NO: 311751 - RNA, 19 nt, Artificial Sequence
  Description of Artificial Sequence: Synthetic oligonucleotide
  Antisense strand to SEQ ID NO: 311750
acuguucccgacaccgacc

SEQ ID NO: 311752 - RNA, 19 nt, Artificial Sequence
  Description of Artificial Sequence: Synthetic oligonucleotide
  Sense strand starting at position 2403 of SEQ ID NO: 4003
acucaaacgcuuuguuaca

SEQ ID NO: 311753 - RNA, 19 nt, Artificial Sequence
  Description of Artificial Sequence: Synthetic oligonucleotide
  Antisense strand to SEQ ID NO: 311752
uguaacaaagcguuugagu

SEQ ID NO: 311754 - RNA, 19 nt, Artificial Sequence
  Description of Artificial Sequence: Synthetic oligonucleotide
  Sense strand starting at position 2487 of SEQ ID NO: 4003
acagcuaaugaauguagua

SEQ ID NO: 311755 - RNA, 19 nt, Artificial Sequence
  Description of Artificial Sequence: Synthetic oligonucleotide
  Antisense strand to SEQ ID NO: 311754
uacuacauucauuagcugu

SEQ ID NO: 311756 - RNA, 19 nt, Artificial Sequence
  Description of Artificial Sequence: Synthetic oligonucleotide
  Sense strand starting at position 2499 of SEQ ID NO: 4003
uguaguaagucucuuacau

SEQ ID NO: 311757 - RNA, 19 nt, Artificial Sequence
  Description of Artificial Sequence: Synthetic oligonucleotide
  Antisense strand to SEQ ID NO: 311756
auguaagagacuuacuaca

SEQ ID NO: 311758 - RNA, 19 nt, Artificial Sequence
  Description of Artificial Sequence: Synthetic oligonucleotide
  Sense strand starting at position 2515 of SEQ ID NO: 4003
caugguggugcguauuuaa

SEQ ID NO: 311759 - RNA, 19 nt, Artificial Sequence
  Description of Artificial Sequence: Synthetic oligonucleotide
  Antisense strand to SEQ ID NO: 311758
uuaaauacgcaccaccaug

SEQ ID NO: 311760 - RNA, 19 nt, Artificial Sequence
  Description of Artificial Sequence: Synthetic oligonucleotide
  Sense strand starting at position 2518 of SEQ ID NO: 4003
gguggugcguauuuaaaug

SEQ ID NO: 311761 - RNA, 19 nt, Artificial Sequence
  Description of Artificial Sequence: Synthetic oligonucleotide
  Antisense strand to SEQ ID NO: 311760
cauuuaaauacgcaccacc

SEQ ID NO: 311762 - RNA, 19 nt, Artificial Sequence
  Description of Artificial Sequence: Synthetic oligonucleotide
  Sense strand starting at position 2616 of SEQ ID NO: 4003
agagacugcacuugaaagu

SEQ ID NO: 311763 - RNA, 19 nt, Artificial Sequence
  Description of Artificial Sequence: Synthetic oligonucleotide
  Antisense strand to SEQ ID NO: 311762
acuuucaagugcagucucu

SEQ ID NO: 311764 - RNA, 19 nt, Artificial Sequence
  Description of Artificial Sequence: Synthetic oligonucleotide
  Sense strand starting at position 2631 of SEQ ID NO: 4003
aagucaaauuguuuaagag

SEQ ID NO: 311765 - RNA, 19 nt, Artificial Sequence
  Description of Artificial Sequence: Synthetic oligonucleotide
  Antisense strand to SEQ ID NO: 311764
cucuuaaacaauuugacuu

SEQ ID NO: 311766 - RNA, 19 nt, Artificial Sequence
  Description of Artificial Sequence: Synthetic oligonucleotide
  Sense strand starting at position 3011 of SEQ ID NO: 4003
ugaagagccuuugugcaaa

SEQ ID NO: 311767 - RNA, 19 nt, Artificial Sequence
  Description of Artificial Sequence: Synthetic oligonucleotide
  Antisense strand to SEQ ID NO: 311766
uuugcacaaaggcucuuca

SEQ ID NO: 311768 - RNA, 19 nt, Artificial Sequence
  Description of Artificial Sequence: Synthetic oligonucleotide
  Sense strand starting at position 3182 of SEQ ID NO: 4003
ggcuguucucacuggugga

SEQ ID NO: 311769 - RNA, 19 nt, Artificial Sequence
  Description of Artificial Sequence: Synthetic oligonucleotide
  Antisense strand to SEQ ID NO: 311768
uccaccagugagaacagcc

SEQ ID NO: 311770 - RNA, 19 nt, Artificial Sequence
  Description of Artificial Sequence: Synthetic oligonucleotide
  Sense strand starting at position 3183 of SEQ ID NO: 4003
gcuguucucacugguggau

SEQ ID NO: 311771 - RNA, 19 nt, Artificial Sequence
  Description of Artificial Sequence: Synthetic oligonucleotide
  Antisense strand to SEQ ID NO: 311770
auccaccagugagaacagc

SEQ ID NO: 311772 - RNA, 19 nt, Artificial Sequence
  Description of Artificial Sequence: Synthetic oligonucleotide
  Sense strand starting at position 3227 of SEQ ID NO: 4003
ugaguucugcaagacuuag

SEQ ID NO: 311773 - RNA, 19 nt, Artificial Sequence
  Description of Artificial Sequence: Synthetic oligonucleotide
  Antisense strand to SEQ ID NO: 311772
cuaagucuugcagaacuca

SEQ ID NO: 311774 - RNA, 19 nt, Artificial Sequence
  Description of Artificial Sequence: Synthetic oligonucleotide
  Sense strand starting at position 3403 of SEQ ID NO: 4003
ccaagagauuguuuguaaa

SEQ ID NO: 311775 - RNA, 19 nt, Artificial Sequence
  Description of Artificial Sequence: Synthetic oligonucleotide
  Antisense strand to SEQ ID NO: 311774
uuuacaaacaaucucuugg

SEQ ID NO: 311776 - RNA, 19 nt, Artificial Sequence
  Description of Artificial Sequence: Synthetic oligonucleotide
  Sense strand starting at position 3405 of SEQ ID NO: 4003
aagagauuguuuguaaacu

SEQ ID NO: 311777 - RNA, 19 nt, Artificial Sequence
  Description of Artificial Sequence: Synthetic oligonucleotide
  Antisense strand to SEQ ID NO: 311776
aguuuacaaacaaucucuu

SEQ ID NO: 311778 - RNA, 19 nt, Artificial Sequence
  Description of Artificial Sequence: Synthetic oligonucleotide
  Sense strand starting at position 3428 of SEQ ID NO: 4003
augucucuaaagugaguuu

SEQ ID NO: 311779 - RNA, 19 nt, Artificial Sequence
  Description of Artificial Sequence: Synthetic oligonucleotide
  Antisense strand to SEQ ID NO: 311778
aaacucacuuuagagacau

SEQ ID NO: 311780 - RNA, 19 nt, Artificial Sequence
  Description of Artificial Sequence: Synthetic oligonucleotide
  Sense strand starting at position 3490 of SEQ ID NO: 4003
acaaacucauuguagagaa

SEQ ID NO: 311781 - RNA, 19 nt, Artificial Sequence
  Description of Artificial Sequence: Synthetic oligonucleotide
  Antisense strand to SEQ ID NO: 311780
uucucuacaaugaguuugu

SEQ ID NO: 311782 - RNA, 19 nt, Artificial Sequence
  Description of Artificial Sequence: Synthetic oligonucleotide
  Sense strand starting at position 3536 of SEQ ID NO: 4003
ggaaacguauccucuguua

SEQ ID NO: 311783 - RNA, 19 nt, Artificial Sequence
  Description of Artificial Sequence: Synthetic oligonucleotide
  Antisense strand to SEQ ID NO: 311782
uaacagaggauacguuucc

SEQ ID NO: 311784 - RNA, 19 nt, Artificial Sequence
  Description of Artificial Sequence: Synthetic oligonucleotide
  Sense strand starting at position 3601 of SEQ ID NO: 4003
augagaucauaauugaugu

SEQ ID NO: 311785 - RNA, 19 nt, Artificial Sequence
  Description of Artificial Sequence: Synthetic oligonucleotide
  Antisense strand to SEQ ID NO: 311784
acaucaauuaugaucucau

SEQ ID NO: 311786 - RNA, 19 nt, Artificial Sequence
  Description of Artificial Sequence: Synthetic oligonucleotide
  Sense strand starting at position 3608 of SEQ ID NO: 4003
cauaauugauguguaaguu

SEQ ID NO: 311787 - RNA, 19 nt, Artificial Sequence
  Description of Artificial Sequence: Synthetic oligonucleotide
  Antisense strand to SEQ ID NO: 311786
aacuuacacaucaauuaug

SEQ ID NO: 311788 - RNA, 19 nt, Artificial Sequence
  Description of Artificial Sequence: Synthetic oligonucleotide
  Sense strand starting at position 3612 of SEQ ID NO: 4003
auugauguguaaguuugua

SEQ ID NO: 311789 - RNA, 19 nt, Artificial Sequence
  Description of Artificial Sequence: Synthetic oligonucleotide
  Antisense strand to SEQ ID NO: 311788
uacaaacuuacacaucaau

SEQ ID NO: 311790 - RNA, 19 nt, Artificial Sequence
  Description of Artificial Sequence: Synthetic oligonucleotide
  Sense strand starting at position 3624 of SEQ ID NO: 4003
guuuguauccugcuucuuu

SEQ ID NO: 311791 - RNA, 19 nt, Artificial Sequence
  Description of Artificial Sequence: Synthetic oligonucleotide
  Antisense strand to SEQ ID NO: 311790
aaagaagcaggauacaaac

SEQ ID NO: 311792 - RNA, 19 nt, Artificial Sequence
  Description of Artificial Sequence: Synthetic oligonucleotide
  Sense strand starting at position 177 of SEQ ID NO: 4004
gcacaaaugucauuugcuc

SEQ ID NO: 311793 - RNA, 19 nt, Artificial Sequence
  Description of Artificial Sequence: Synthetic oligonucleotide
  Antisense strand to SEQ ID NO: 311792
gagcaaaugacauuugugc

SEQ ID NO: 311794 - RNA, 19 nt, Artificial Sequence
  Description of Artificial Sequence: Synthetic oligonucleotide
  Sense strand starting at position 185 of SEQ ID NO: 4004
gucauuugcucagcaaucu

SEQ ID NO: 311795 - RNA, 19 nt, Artificial Sequence
  Description of Artificial Sequence: Synthetic oligonucleotide
  Antisense strand to SEQ ID NO: 311794
agauugcugagcaaaugac

SEQ ID NO: 311796 - RNA, 19 nt, Artificial Sequence
  Description of Artificial Sequence: Synthetic oligonucleotide
  Sense strand starting at position 317 of SEQ ID NO: 4004
ccucgaaggcaggaucaau

SEQ ID NO: 311797 - RNA, 19 nt, Artificial Sequence
  Description of Artificial Sequence: Synthetic oligonucleotide
  Antisense strand to SEQ ID NO: 311796
auugauccugccuucgagg

SEQ ID NO: 311798 - RNA, 19 nt, Artificial Sequence
  Description of Artificial Sequence: Synthetic oligonucleotide
  Sense strand starting at position 404 of SEQ ID NO: 4004
aaaugaauuguugggcuua

SEQ ID NO: 311799 - RNA, 19 nt, Artificial Sequence
  Description of Artificial Sequence: Synthetic oligonucleotide
  Antisense strand to SEQ ID NO: 311798
uaagcccaacaauucauuu

SEQ ID NO: 311800 - RNA, 19 nt, Artificial Sequence
  Description of Artificial Sequence: Synthetic oligonucleotide
  Sense strand starting at position 409 of SEQ ID NO: 4004
aauuguugggcuuagcaaa

SEQ ID NO: 311801 - RNA, 19 nt, Artificial Sequence
  Description of Artificial Sequence: Synthetic oligonucleotide
  Antisense strand to SEQ ID NO: 311800
uuugcuaagcccaacaauu

SEQ ID NO: 311802 - RNA, 19 nt, Artificial Sequence
  Description of Artificial Sequence: Synthetic oligonucleotide
  Sense strand starting at position 478 of SEQ ID NO: 4004
ugguuacauggauaugagu

SEQ ID NO: 311803 - RNA, 19 nt, Artificial Sequence
  Description of Artificial Sequence: Synthetic oligonucleotide
  Antisense strand to SEQ ID NO: 311802
acucauauccauguaacca

SEQ ID NO: 311804 - RNA, 19 nt, Artificial Sequence
  Description of Artificial Sequence: Synthetic oligonucleotide
  Sense strand starting at position 657 of SEQ ID NO: 4004
guacacucauaugcagaau

SEQ ID NO: 311805 - RNA, 19 nt, Artificial Sequence
  Description of Artificial Sequence: Synthetic oligonucleotide
  Antisense strand to SEQ ID NO: 311804
auucugcauaugaguguac

SEQ ID NO: 311806 - RNA, 19 nt, Artificial Sequence
  Description of Artificial Sequence: Synthetic oligonucleotide
  Sense strand starting at position 949 of SEQ ID NO: 4004
gagugagauucugcaucaa

SEQ ID NO: 311807 - RNA, 19 nt, Artificial Sequence
  Description of Artificial Sequence: Synthetic oligonucleotide
  Antisense strand to SEQ ID NO: 311806
uugaugcagaaucucacuc

SEQ ID NO: 311808 - RNA, 19 nt, Artificial Sequence
  Description of Artificial Sequence: Synthetic oligonucleotide
  Sense strand starting at position 992 of SEQ ID NO: 4004
gaauauuguggaggcuaca

SEQ ID NO: 311809 - RNA, 19 nt, Artificial Sequence
  Description of Artificial Sequence: Synthetic oligonucleotide
  Antisense strand to SEQ ID NO: 311808
uguagccuccacaauauuc

SEQ ID NO: 311810 - RNA, 19 nt, Artificial Sequence
  Description of Artificial Sequence: Synthetic oligonucleotide
  Sense strand starting at position 1199 of SEQ ID NO: 4004
ucccaauaaccacgugaga

SEQ ID NO: 311811 - RNA, 19 nt, Artificial Sequence
  Description of Artificial Sequence: Synthetic oligonucleotide
  Antisense strand to SEQ ID NO: 311810
ucucacgugguuauuggga

SEQ ID NO: 311812 - RNA, 19 nt, Artificial Sequence
  Description of Artificial Sequence: Synthetic oligonucleotide
  Sense strand starting at position 1201 of SEQ ID NO: 4004
ccaauaaccacgugagaug

SEQ ID NO: 311813 - RNA, 19 nt, Artificial Sequence
  Description of Artificial Sequence: Synthetic oligonucleotide
  Antisense strand to SEQ ID NO: 311812
caucucacgugguuauugg

SEQ ID NO: 311814 - RNA, 19 nt, Artificial Sequence
  Description of Artificial Sequence: Synthetic oligonucleotide
  Sense strand starting at position 1505 of SEQ ID NO: 4004
aaacaugauucuguacgaa

SEQ ID NO: 311815 - RNA, 19 nt, Artificial Sequence
  Description of Artificial Sequence: Synthetic oligonucleotide
  Antisense strand to SEQ ID NO: 311814
uucguacagaaucauguuu

SEQ ID NO: 311816 - RNA, 19 nt, Artificial Sequence
  Description of Artificial Sequence: Synthetic oligonucleotide
  Sense strand starting at position 1508 of SEQ ID NO: 4004
caugauucuguacgaaaga

SEQ ID NO: 311817 - RNA, 19 nt, Artificial Sequence
  Description of Artificial Sequence: Synthetic oligonucleotide
  Antisense strand to SEQ ID NO: 311816
ucuuucguacagaaucaug

SEQ ID NO: 311818 - RNA, 19 nt, Artificial Sequence
  Description of Artificial Sequence: Synthetic oligonucleotide
  Sense strand starting at position 1539 of SEQ ID NO: 4004
aagguaguggcauacacau

SEQ ID NO: 311819 - RNA, 19 nt, Artificial Sequence
  Description of Artificial Sequence: Synthetic oligonucleotide
  Antisense strand to SEQ ID NO: 311818
auguguaugccacuaccuu

SEQ ID NO: 311820 - RNA, 19 nt, Artificial Sequence
  Description of Artificial Sequence: Synthetic oligonucleotide
  Sense strand starting at position 1641 of SEQ ID NO: 4004
cagguaaacuguccaggaa

SEQ ID NO: 311821 - RNA, 19 nt, Artificial Sequence
  Description of Artificial Sequence: Synthetic oligonucleotide
  Antisense strand to SEQ ID NO: 311820
uuccuggacaguuuaccug

SEQ ID NO: 311822 - RNA, 19 nt, Artificial Sequence
  Description of Artificial Sequence: Synthetic oligonucleotide
  Sense strand starting at position 2307 of SEQ ID NO: 4004
ggaggcgucgcuuucuagu

SEQ ID NO: 311823 - RNA, 19 nt, Artificial Sequence
  Description of Artificial Sequence: Synthetic oligonucleotide
  Antisense strand to SEQ ID NO: 311822
acuagaaagcgacgccucc

SEQ ID NO: 311824 - RNA, 19 nt, Artificial Sequence
  Description of Artificial Sequence: Synthetic oligonucleotide
  Sense strand starting at position 2392 of SEQ ID NO: 4004
uugaguuauuggguggaaa

SEQ ID NO: 311825 - RNA, 19 nt, Artificial Sequence
  Description of Artificial Sequence: Synthetic oligonucleotide
  Antisense strand to SEQ ID NO: 311824
uuuccacccaauaacucaa

SEQ ID NO: 311826 - RNA, 19 nt, Artificial Sequence
  Description of Artificial Sequence: Synthetic oligonucleotide
  Sense strand starting at position 2393 of SEQ ID NO: 4004
ugaguuauuggguggaaag

SEQ ID NO: 311827 - RNA, 19 nt, Artificial Sequence
  Description of Artificial Sequence: Synthetic oligonucleotide
  Antisense strand to SEQ ID NO: 311826
cuuuccacccaauaacuca

SEQ ID NO: 311828 - RNA, 19 nt, Artificial Sequence
  Description of Artificial Sequence: Synthetic oligonucleotide
  Sense strand starting at position 2394 of SEQ ID NO: 4004
gaguuauuggguggaaagg

SEQ ID NO: 311829 - RNA, 19 nt, Artificial Sequence
  Description of Artificial Sequence: Synthetic oligonucleotide
  Antisense strand to SEQ ID NO: 311828
ccuuuccacccaauaacuc

SEQ ID NO: 311830 - RNA, 19 nt, Artificial Sequence
  Description of Artificial Sequence: Synthetic oligonucleotide
  Sense strand starting at position 2395 of SEQ ID NO: 4004
aguuauuggguggaaaggu

SEQ ID NO: 311831 - RNA, 19 nt, Artificial Sequence
  Description of Artificial Sequence: Synthetic oligonucleotide
  Antisense strand to SEQ ID NO: 311830
accuuuccacccaauaacu

SEQ ID NO: 311832 - RNA, 19 nt, Artificial Sequence
  Description of Artificial Sequence: Synthetic oligonucleotide
  Sense strand starting at position 2676 of SEQ ID NO: 4004
ugaauagaaucuguggguu

SEQ ID NO: 311833 - RNA, 19 nt, Artificial Sequence
  Description of Artificial Sequence: Synthetic oligonucleotide
  Antisense strand to SEQ ID NO: 311832
aacccacagauucuauuca

SEQ ID NO: 311834 - RNA, 19 nt, Artificial Sequence
  Description of Artificial Sequence: Synthetic oligonucleotide
  Sense strand starting at position 2680 of SEQ ID NO: 4004
uagaaucuguggguuagga

SEQ ID NO: 311835 - RNA, 19 nt, Artificial Sequence
  Description of Artificial Sequence: Synthetic oligonucleotide
  Antisense strand to SEQ ID NO: 311834
uccuaacccacagauucua

SEQ ID NO: 311836 - RNA, 19 nt, Artificial Sequence
  Description of Artificial Sequence: Synthetic oligonucleotide
  Sense strand starting at position 2772 of SEQ ID NO: 4004
auucuuggacccuguauau

SEQ ID NO: 311837 - RNA, 19 nt, Artificial Sequence
  Description of Artificial Sequence: Synthetic oligonucleotide
  Antisense strand to SEQ ID NO: 311836
auauacaggguccaagaau

SEQ ID NO: 311838 - RNA, 19 nt, Artificial Sequence
  Description of Artificial Sequence: Synthetic oligonucleotide
  Sense strand starting at position 2811 of SEQ ID NO: 4004
cgcuucuugauuuguggau

SEQ ID NO: 311839 - RNA, 19 nt, Artificial Sequence
  Description of Artificial Sequence: Synthetic oligonucleotide
  Antisense strand to SEQ ID NO: 311838
auccacaaaucaagaagcg

SEQ ID NO: 311840 - RNA, 19 nt, Artificial Sequence
  Description of Artificial Sequence: Synthetic oligonucleotide
  Sense strand starting at position 2812 of SEQ ID NO: 4004
gcuucuugauuuguggauu

SEQ ID NO: 311841 - RNA, 19 nt, Artificial Sequence
  Description of Artificial Sequence: Synthetic oligonucleotide
  Antisense strand to SEQ ID NO: 311840
aauccacaaaucaagaagc

SEQ ID NO: 311842 - RNA, 19 nt, Artificial Sequence
  Description of Artificial Sequence: Synthetic oligonucleotide
  Sense strand starting at position 2813 of SEQ ID NO: 4004
cuucuugauuuguggauuu

SEQ ID NO: 311843 - RNA, 19 nt, Artificial Sequence
  Description of Artificial Sequence: Synthetic oligonucleotide
  Antisense strand to SEQ ID NO: 311842
aaauccacaaaucaagaag

SEQ ID NO: 311844 - RNA, 19 nt, Artificial Sequence
  Description of Artificial Sequence: Synthetic oligonucleotide
  Sense strand starting at position 2892 of SEQ ID NO: 4004
ugcauauaacauggugauu

SEQ ID NO: 311845 - RNA, 19 nt, Artificial Sequence
  Description of Artificial Sequence: Synthetic oligonucleotide
  Antisense strand to SEQ ID NO: 311844
aaucaccauguuauaugca

SEQ ID NO: 311846 - RNA, 19 nt, Artificial Sequence
  Description of Artificial Sequence: Synthetic oligonucleotide
  Sense strand starting at position 2989 of SEQ ID NO: 4004
ugcaauauugaguacagua

SEQ ID NO: 311847 - RNA, 19 nt, Artificial Sequence
  Description of Artificial Sequence: Synthetic oligonucleotide
  Antisense strand to SEQ ID NO: 311846
uacuguacucaauauugca

SEQ ID NO: 311848 - RNA, 19 nt, Artificial Sequence
  Description of Artificial Sequence: Synthetic oligonucleotide
  Sense strand starting at position 3033 of SEQ ID NO: 4004
ggagcaaucagcuauaacg

SEQ ID NO: 311849 - RNA, 19 nt, Artificial Sequence
  Description of Artificial Sequence: Synthetic oligonucleotide
  Antisense strand to SEQ ID NO: 311848
cguuauagcugauugcucc

SEQ ID NO: 311850 - RNA, 19 nt, Artificial Sequence
  Description of Artificial Sequence: Synthetic oligonucleotide
  Sense strand starting at position 3094 of SEQ ID NO: 4004
uagguacacucugugauau

SEQ ID NO: 311851 - RNA, 19 nt, Artificial Sequence
  Description of Artificial Sequence: Synthetic oligonucleotide
  Antisense strand to SEQ ID NO: 311850
auaucacagaguguaccua

SEQ ID NO: 311852 - RNA, 19 nt, Artificial Sequence
  Description of Artificial Sequence: Synthetic oligonucleotide
  Sense strand starting at position 3285 of SEQ ID NO: 4004
uacugaggagucuagcuua

SEQ ID NO: 311853 - RNA, 19 nt, Artificial Sequence
  Description of Artificial Sequence: Synthetic oligonucleotide
  Antisense strand to SEQ ID NO: 311852
uaagcuagacuccucagua

SEQ ID NO: 311854 - RNA, 19 nt, Artificial Sequence
  Description of Artificial Sequence: Synthetic oligonucleotide
  Sense strand starting at position 3288 of SEQ ID NO: 4004
ugaggagucuagcuuauua

SEQ ID NO: 311855 - RNA, 19 nt, Artificial Sequence
  Description of Artificial Sequence: Synthetic oligonucleotide
  Antisense strand to SEQ ID NO: 311854
uaauaagcuagacuccuca

SEQ ID NO: 311856 - RNA, 19 nt, Artificial Sequence
  Description of Artificial Sequence: Synthetic oligonucleotide
  Sense strand starting at position 3290 of SEQ ID NO: 4004
aggagucuagcuuauuaaa

SEQ ID NO: 311857 - RNA, 19 nt, Artificial Sequence
  Description of Artificial Sequence: Synthetic oligonucleotide
  Antisense strand to SEQ ID NO: 311856
uuuaauaagcuagacuccu

SEQ ID NO: 311858 - RNA, 19 nt, Artificial Sequence
  Description of Artificial Sequence: Synthetic oligonucleotide
  Sense strand starting at position 3527 of SEQ ID NO: 4004
gguacuuuguaaccugaua

SEQ ID NO: 311859 - RNA, 19 nt, Artificial Sequence
  Description of Artificial Sequence: Synthetic oligonucleotide
  Antisense strand to SEQ ID NO: 311858
uaucagguuacaaaguacc

SEQ ID NO: 311860 - RNA, 19 nt, Artificial Sequence
  Description of Artificial Sequence: Synthetic oligonucleotide
  Sense strand starting at position 3624 of SEQ ID NO: 4004
acuguaugguaacuuuaga

SEQ ID NO: 311861 - RNA, 19 nt, Artificial Sequence
  Description of Artificial Sequence: Synthetic oligonucleotide
  Antisense strand to SEQ ID NO: 311860
ucuaaaguuaccauacagu

SEQ ID NO: 311862 - RNA, 19 nt, Artificial Sequence
  Description of Artificial Sequence: Synthetic oligonucleotide
  Sense strand starting at position 3823 of SEQ ID NO: 4004
auuaauagugcguugucuu

SEQ ID NO: 311863 - RNA, 19 nt, Artificial Sequence
  Description of Artificial Sequence: Synthetic oligonucleotide
  Antisense strand to SEQ ID NO: 311862
aagacaacgcacuauuaau

SEQ ID NO: 311864 - RNA, 19 nt, Artificial Sequence
  Description of Artificial Sequence: Synthetic oligonucleotide
  Sense strand starting at position 3828 of SEQ ID NO: 4004
uagugcguugucuuuauca

SEQ ID NO: 311865 - RNA, 19 nt, Artificial Sequence
  Description of Artificial Sequence: Synthetic oligonucleotide
  Antisense strand to SEQ ID NO: 311864
ugauaaagacaacgcacua

SEQ ID NO: 311866 - RNA, 19 nt, Artificial Sequence
  Description of Artificial Sequence: Synthetic oligonucleotide
  Sense strand starting at position 3858 of SEQ ID NO: 4004
ggcugagguaggcagaaua

SEQ ID NO: 311867 - RNA, 19 nt, Artificial Sequence
  Description of Artificial Sequence: Synthetic oligonucleotide
  Antisense strand to SEQ ID NO: 311866
uauucugccuaccucagcc

SEQ ID NO: 311868 - RNA, 19 nt, Artificial Sequence
  Description of Artificial Sequence: Synthetic oligonucleotide
  Sense strand starting at position 3915 of SEQ ID NO: 4004
gugcuuucucuacuuuguu

SEQ ID NO: 311869 - RNA, 19 nt, Artificial Sequence
  Description of Artificial Sequence: Synthetic oligonucleotide
  Antisense strand to SEQ ID NO: 311868
aacaaaguagagaaagcac

SEQ ID NO: 311870 - RNA, 19 nt, Artificial Sequence
  Description of Artificial Sequence: Synthetic oligonucleotide
  Sense strand starting at position 3939 of SEQ ID NO: 4004
uguuauuguccuuaaccau

SEQ ID NO: 311871 - RNA, 19 nt, Artificial Sequence
  Description of Artificial Sequence: Synthetic oligonucleotide
  Antisense strand to SEQ ID NO: 311870
augguuaaggacaauaaca

SEQ ID NO: 311872 - RNA, 19 nt, Artificial Sequence
  Description of Artificial Sequence: Synthetic oligonucleotide
  Sense strand starting at position 77 of SEQ ID NO: 4005
gagcuaugacaguagcacu

SEQ ID NO: 311873 - RNA, 19 nt, Artificial Sequence
  Description of Artificial Sequence: Synthetic oligonucleotide
  Antisense strand to SEQ ID NO: 311872
agugcuacugucauagcuc

SEQ ID NO: 311874 - RNA, 19 nt, Artificial Sequence
  Description of Artificial Sequence: Synthetic oligonucleotide
  Sense strand starting at position 182 of SEQ ID NO: 4005
uuacuuuguguagaaauca

SEQ ID NO: 311875 - RNA, 19 nt, Artificial Sequence
  Description of Artificial Sequence: Synthetic oligonucleotide
  Antisense strand to SEQ ID NO: 311874
ugauuucuacacaaaguaa

SEQ ID NO: 311876 - RNA, 19 nt, Artificial Sequence
  Description of Artificial Sequence: Synthetic oligonucleotide
  Sense strand starting at position 277 of SEQ ID NO: 4005
cuguaaucccaguauuacg

SEQ ID NO: 311877 - RNA, 19 nt, Artificial Sequence
  Description of Artificial Sequence: Synthetic oligonucleotide
  Antisense strand to SEQ ID NO: 311876
cguaauacugggauuacag

SEQ ID NO: 311878 - RNA, 19 nt, Artificial Sequence
  Description of Artificial Sequence: Synthetic oligonucleotide
  Sense strand starting at position 577 of SEQ ID NO: 4005
ccagaagcuaagugaugaa

SEQ ID NO: 311879 - RNA, 19 nt, Artificial Sequence
  Description of Artificial Sequence: Synthetic oligonucleotide
  Antisense strand to SEQ ID NO: 311878
uucaucacuuagcuucugg

SEQ ID NO: 311880 - RNA, 19 nt, Artificial Sequence
  Description of Artificial Sequence: Synthetic oligonucleotide
  Sense strand starting at position 677 of SEQ ID NO: 4005
ggucuuacauacuuucuau

SEQ ID NO: 311881 - RNA, 19 nt, Artificial Sequence
  Description of Artificial Sequence: Synthetic oligonucleotide
  Antisense strand to SEQ ID NO: 311880
auagaaaguauguaagacc

SEQ ID NO: 311882 - RNA, 19 nt, Artificial Sequence
  Description of Artificial Sequence: Synthetic oligonucleotide
  Sense strand starting at position 692 of SEQ ID NO: 4005
cuauucuaggcuuaacagu

SEQ ID NO: 311883 - RNA, 19 nt, Artificial Sequence
  Description of Artificial Sequence: Synthetic oligonucleotide
  Antisense strand to SEQ ID NO: 311882
acuguuaagccuagaauag

SEQ ID NO: 311884 - RNA, 19 nt, Artificial Sequence
  Description of Artificial Sequence: Synthetic oligonucleotide
  Sense strand starting at position 700 of SEQ ID NO: 4005
ggcuuaacaguccaaauug

SEQ ID NO: 311885 - RNA, 19 nt, Artificial Sequence
  Description of Artificial Sequence: Synthetic oligonucleotide
  Antisense strand to SEQ ID NO: 311884
caauuuggacuguuaagcc

SEQ ID NO: 311886 - RNA, 19 nt, Artificial Sequence
  Description of Artificial Sequence: Synthetic oligonucleotide
  Sense strand starting at position 761 of SEQ ID NO: 4005
gcagauucucuccauaggu

SEQ ID NO: 311887 - RNA, 19 nt, Artificial Sequence
  Description of Artificial Sequence: Synthetic oligonucleotide
  Antisense strand to SEQ ID NO: 311886
accuauggagagaaucugc

SEQ ID NO: 311888 - RNA, 19 nt, Artificial Sequence
  Description of Artificial Sequence: Synthetic oligonucleotide
  Sense strand starting at position 763 of SEQ ID NO: 4005
agauucucuccauagguuu

SEQ ID NO: 311889 - RNA, 19 nt, Artificial Sequence
  Description of Artificial Sequence: Synthetic oligonucleotide
  Antisense strand to SEQ ID NO: 311888
aaaccuauggagagaaucu

SEQ ID NO: 311890 - RNA, 19 nt, Artificial Sequence
  Description of Artificial Sequence: Synthetic oligonucleotide
  Sense strand starting at position 806 of SEQ ID NO: 4005
gcacuuguagucuauuaca

SEQ ID NO: 311891 - RNA, 19 nt, Artificial Sequence
  Description of Artificial Sequence: Synthetic oligonucleotide
  Antisense strand to SEQ ID NO: 311890
uguaauagacuacaagugc

SEQ ID NO: 311892 - RNA, 19 nt, Artificial Sequence
  Description of Artificial Sequence: Synthetic oligonucleotide
  Sense strand starting at position 832 of SEQ ID NO: 4005
ucugauaaugacugaucau

SEQ ID NO: 311893 - RNA, 19 nt, Artificial Sequence
  Description of Artificial Sequence: Synthetic oligonucleotide
  Antisense strand to SEQ ID NO: 311892
augaucagucauuaucaga

SEQ ID NO: 311894 - RNA, 19 nt, Artificial Sequence
  Description of Artificial Sequence: Synthetic oligonucleotide
  Sense strand starting at position 993 of SEQ ID NO: 4005
cuuucaguuguguccguuu

SEQ ID NO: 311895 - RNA, 19 nt, Artificial Sequence
  Description of Artificial Sequence: Synthetic oligonucleotide
  Antisense strand to SEQ ID NO: 311894
aaacggacacaacugaaag

SEQ ID NO: 311896 - RNA, 19 nt, Artificial Sequence
  Description of Artificial Sequence: Synthetic oligonucleotide
  Sense strand starting at position 1025 of SEQ ID NO: 4005
aggcauaaauccuuugaau

SEQ ID NO: 311897 - RNA, 19 nt, Artificial Sequence
  Description of Artificial Sequence: Synthetic oligonucleotide
  Antisense strand to SEQ ID NO: 311896
auucaaaggauuuaugccu

SEQ ID NO: 311898 - RNA, 19 nt, Artificial Sequence
  Description of Artificial Sequence: Synthetic oligonucleotide
  Sense strand starting at position 1027 of SEQ ID NO: 4005
gcauaaauccuuugaaugu

SEQ ID NO: 311899 - RNA, 19 nt, Artificial Sequence
  Description of Artificial Sequence: Synthetic oligonucleotide
  Antisense strand to SEQ ID NO: 311898
acauucaaaggauuuaugc

SEQ ID NO: 311900 - RNA, 19 nt, Artificial Sequence
  Description of Artificial Sequence: Synthetic oligonucleotide
  Sense strand starting at position 1080 of SEQ ID NO: 4005
cccucuaguuucuuaagga

SEQ ID NO: 311901 - RNA, 19 nt, Artificial Sequence
  Description of Artificial Sequence: Synthetic oligonucleotide
  Antisense strand to SEQ ID NO: 311900
uccuuaagaaacuagaggg

SEQ ID NO: 311902 - RNA, 19 nt, Artificial Sequence
  Description of Artificial Sequence: Synthetic oligonucleotide
  Sense strand starting at position 1143 of SEQ ID NO: 4005
cuggaaaccuuguccuuua

SEQ ID NO: 311903 - RNA, 19 nt, Artificial Sequence
  Description of Artificial Sequence: Synthetic oligonucleotide
  Antisense strand to SEQ ID NO: 311902
uaaaggacaagguuuccag

SEQ ID NO: 311904 - RNA, 19 nt, Artificial Sequence
  Description of Artificial Sequence: Synthetic oligonucleotide
  Sense strand starting at position 1273 of SEQ ID NO: 4005
ucaucucgguuuguauuua

SEQ ID NO: 311905 - RNA, 19 nt, Artificial Sequence
  Description of Artificial Sequence: Synthetic oligonucleotide
  Antisense strand to SEQ ID NO: 311904
uaaauacaaaccgagauga

SEQ ID NO: 311906 - RNA, 19 nt, Artificial Sequence
  Description of Artificial Sequence: Synthetic oligonucleotide
  Sense strand starting at position 1277 of SEQ ID NO: 4005
cucgguuuguauuuaugua

SEQ ID NO: 311907 - RNA, 19 nt, Artificial Sequence
  Description of Artificial Sequence: Synthetic oligonucleotide
  Antisense strand to SEQ ID NO: 311906
uacauaaauacaaaccgag

SEQ ID NO: 311908 - RNA, 19 nt, Artificial Sequence
  Description of Artificial Sequence: Synthetic oligonucleotide
  Sense strand starting at position 1278 of SEQ ID NO: 4005
ucgguuuguauuuauguau

SEQ ID NO: 311909 - RNA, 19 nt, Artificial Sequence
  Description of Artificial Sequence: Synthetic oligonucleotide
  Antisense strand to SEQ ID NO: 311908
auacauaaauacaaaccga

SEQ ID NO: 311910 - RNA, 19 nt, Artificial Sequence
  Description of Artificial Sequence: Synthetic oligonucleotide
  Sense strand starting at position 1287 of SEQ ID NO: 4005
auuuauguaucguugcuuu

SEQ ID NO: 311911 - RNA, 19 nt, Artificial Sequence
  Description of Artificial Sequence: Synthetic oligonucleotide
  Antisense strand to SEQ ID NO: 311910
aaagcaacgauacauaaau

SEQ ID NO: 311912 - RNA, 19 nt, Artificial Sequence
  Description of Artificial Sequence: Synthetic oligonucleotide
  Sense strand starting at position 1299 of SEQ ID NO: 4005
uugcuuugauuauugaacu

SEQ ID NO: 311913 - RNA, 19 nt, Artificial Sequence
  Description of Artificial Sequence: Synthetic oligonucleotide
  Antisense strand to SEQ ID NO: 311912
aguucaauaaucaaagcaa

SEQ ID NO: 311914 - RNA, 19 nt, Artificial Sequence
  Description of Artificial Sequence: Synthetic oligonucleotide
  Sense strand starting at position 1316 of SEQ ID NO: 4005
cugaguaucucucccacua

SEQ ID NO: 311915 - RNA, 19 nt, Artificial Sequence
  Description of Artificial Sequence: Synthetic oligonucleotide
  Antisense strand to SEQ ID NO: 311914
uagugggagagauacucag

SEQ ID NO: 311916 - RNA, 19 nt, Artificial Sequence
  Description of Artificial Sequence: Synthetic oligonucleotide
  Sense strand starting at position 1841 of SEQ ID NO: 4005
ucuggauaugggcgaugau

SEQ ID NO: 311917 - RNA, 19 nt, Artificial Sequence
  Description of Artificial Sequence: Synthetic oligonucleotide
  Antisense strand to SEQ ID NO: 311916
aucaucgcccauauccaga

SEQ ID NO: 311918 - RNA, 19 nt, Artificial Sequence
  Description of Artificial Sequence: Synthetic oligonucleotide
  Sense strand starting at position 2088 of SEQ ID NO: 4005
cgaauuuguuuaucgccuu

SEQ ID NO: 311919 - RNA, 19 nt, Artificial Sequence
  Description of Artificial Sequence: Synthetic oligonucleotide
  Antisense strand to SEQ ID NO: 311918
aaggcgauaaacaaauucg

SEQ ID NO: 311920 - RNA, 19 nt, Artificial Sequence
  Description of Artificial Sequence: Synthetic oligonucleotide
  Sense strand starting at position 2643 of SEQ ID NO: 4005
gccucuggagaauguugaa

SEQ ID NO: 311921 - RNA, 19 nt, Artificial Sequence
  Description of Artificial Sequence: Synthetic oligonucleotide
  Antisense strand to SEQ ID NO: 311920
uucaacauucuccagaggc

SEQ ID NO: 311922 - RNA, 19 nt, Artificial Sequence
  Description of Artificial Sequence: Synthetic oligonucleotide
  Sense strand starting at position 2690 of SEQ ID NO: 4005
cucagagagaagugauucu

SEQ ID NO: 311923 - RNA, 19 nt, Artificial Sequence
  Description of Artificial Sequence: Synthetic oligonucleotide
  Antisense strand to SEQ ID NO: 311922
agaaucacuucucucugag

SEQ ID NO: 311924 - RNA, 19 nt, Artificial Sequence
  Description of Artificial Sequence: Synthetic oligonucleotide
  Sense strand starting at position 2697 of SEQ ID NO: 4005
agaagugauucuuugaagu

SEQ ID NO: 311925 - RNA, 19 nt, Artificial Sequence
  Description of Artificial Sequence: Synthetic oligonucleotide
  Antisense strand to SEQ ID NO: 311924
acuucaaagaaucacuucu

SEQ ID NO: 311926 - RNA, 19 nt, Artificial Sequence
  Description of Artificial Sequence: Synthetic oligonucleotide
  Sense strand starting at position 2736 of SEQ ID NO: 4005
aggcccuuuguggaucaga

SEQ ID NO: 311927 - RNA, 19 nt, Artificial Sequence
  Description of Artificial Sequence: Synthetic oligonucleotide
  Antisense strand to SEQ ID NO: 311926
ucugauccacaaagggccu

SEQ ID NO: 311928 - RNA, 19 nt, Artificial Sequence
  Description of Artificial Sequence: Synthetic oligonucleotide
  Sense strand starting at position 3093 of SEQ ID NO: 4005
uuaccauauugaguuugaa

SEQ ID NO: 311929 - RNA, 19 nt, Artificial Sequence
  Description of Artificial Sequence: Synthetic oligonucleotide
  Antisense strand to SEQ ID NO: 311928
uucaaacucaauaugguaa

SEQ ID NO: 311930 - RNA, 19 nt, Artificial Sequence
  Description of Artificial Sequence: Synthetic oligonucleotide
  Sense strand starting at position 3096 of SEQ ID NO: 4005
ccauauugaguuugaacuu

SEQ ID NO: 311931 - RNA, 19 nt, Artificial Sequence
  Description of Artificial Sequence: Synthetic oligonucleotide
  Antisense strand to SEQ ID NO: 311930
aaguucaaacucaauaugg

SEQ ID NO: 311932 - RNA, 19 nt, Artificial Sequence
  Description of Artificial Sequence: Synthetic oligonucleotide
  Sense strand starting at position 3131 of SEQ ID NO: 4005
aucugcauucgauacaaau

SEQ ID NO: 311933 - RNA, 19 nt, Artificial Sequence
  Description of Artificial Sequence: Synthetic oligonucleotide
  Antisense strand to SEQ ID NO: 311932
auuuguaucgaaugcagau

SEQ ID NO: 311934 - RNA, 19 nt, Artificial Sequence
  Description of Artificial Sequence: Synthetic oligonucleotide
  Sense strand starting at position 3249 of SEQ ID NO: 4005
gaguaaagagauugccaua

SEQ ID NO: 311935 - RNA, 19 nt, Artificial Sequence
  Description of Artificial Sequence: Synthetic oligonucleotide
  Antisense strand to SEQ ID NO: 311934
uauggcaaucucuuuacuc

SEQ ID NO: 311936 - RNA, 19 nt, Artificial Sequence
  Description of Artificial Sequence: Synthetic oligonucleotide
  Sense strand starting at position 3302 of SEQ ID NO: 4005
gcugcuuuacaagaaguau

SEQ ID NO: 311937 - RNA, 19 nt, Artificial Sequence
  Description of Artificial Sequence: Synthetic oligonucleotide
  Antisense strand to SEQ ID NO: 311936
auacuucuuguaaagcagc

SEQ ID NO: 311938 - RNA, 19 nt, Artificial Sequence
  Description of Artificial Sequence: Synthetic oligonucleotide
  Sense strand starting at position 3326 of SEQ ID NO: 4005
gucagcgucgggaauaugu

SEQ ID NO: 311939 - RNA, 19 nt, Artificial Sequence
  Description of Artificial Sequence: Synthetic oligonucleotide
  Antisense strand to SEQ ID NO: 311938
acauauucccgacgcugac

SEQ ID NO: 311940 - RNA, 19 nt, Artificial Sequence
  Description of Artificial Sequence: Synthetic oligonucleotide
  Sense strand starting at position 3333 of SEQ ID NO: 4005
ucgggaauauguucuggga

SEQ ID NO: 311941 - RNA, 19 nt, Artificial Sequence
  Description of Artificial Sequence: Synthetic oligonucleotide
  Antisense strand to SEQ ID NO: 311940
ucccagaacauauucccga

SEQ ID NO: 311942 - RNA, 19 nt, Artificial Sequence
  Description of Artificial Sequence: Synthetic oligonucleotide
  Sense strand starting at position 3337 of SEQ ID NO: 4005
gaauauguucugggauaug

SEQ ID NO: 311943 - RNA, 19 nt, Artificial Sequence
  Description of Artificial Sequence: Synthetic oligonucleotide
  Antisense strand to SEQ ID NO: 311942
cauaucccagaacauauuc

SEQ ID NO: 311944 - RNA, 19 nt, Artificial Sequence
  Description of Artificial Sequence: Synthetic oligonucleotide
  Sense strand starting at position 3340 of SEQ ID NO: 4005
uauguucugggauauguuu

SEQ ID NO: 311945 - RNA, 19 nt, Artificial Sequence
  Description of Artificial Sequence: Synthetic oligonucleotide
  Antisense strand to SEQ ID NO: 311944
aaacauaucccagaacaua

SEQ ID NO: 311946 - RNA, 19 nt, Artificial Sequence
  Description of Artificial Sequence: Synthetic oligonucleotide
  Sense strand starting at position 3381 of SEQ ID NO: 4005
gcgaauauuauagagugua

SEQ ID NO: 311947 - RNA, 19 nt, Artificial Sequence
  Description of Artificial Sequence: Synthetic oligonucleotide
  Antisense strand to SEQ ID NO: 311946
uacacucuauaauauucgc

SEQ ID NO: 311948 - RNA, 19 nt, Artificial Sequence
  Description of Artificial Sequence: Synthetic oligonucleotide
  Sense strand starting at position 3410 of SEQ ID NO: 4005
ccuagaugguauguguaua

SEQ ID NO: 311949 - RNA, 19 nt, Artificial Sequence
  Description of Artificial Sequence: Synthetic oligonucleotide
  Antisense strand to SEQ ID NO: 311948
uauacacauaccaucuagg

SEQ ID NO: 311950 - RNA, 19 nt, Artificial Sequence
  Description of Artificial Sequence: Synthetic oligonucleotide
  Sense strand starting at position 3969 of SEQ ID NO: 4005
gcuaucaauccgggaauua

SEQ ID NO: 311951 - RNA, 19 nt, Artificial Sequence
  Description of Artificial Sequence: Synthetic oligonucleotide
  Antisense strand to SEQ ID NO: 311950
uaauucccggauugauagc

SEQ ID NO: 311952 - RNA, 19 nt, Artificial Sequence
  Description of Artificial Sequence: Synthetic oligonucleotide
  Sense strand starting at position 12 of SEQ ID NO: 4008
uugucauccugucugauaa

SEQ ID NO: 311953 - RNA, 19 nt, Artificial Sequence
  Description of Artificial Sequence: Synthetic oligonucleotide
  Antisense strand to SEQ ID NO: 311952
uuaucagacaggaugacaa

SEQ ID NO: 311954 - RNA, 19 nt, Artificial Sequence
  Description of Artificial Sequence: Synthetic oligonucleotide
  Sense strand starting at position 13 of SEQ ID NO: 4008
ugucauccugucugauaaa

SEQ ID NO: 311955 - RNA, 19 nt, Artificial Sequence
  Description of Artificial Sequence: Synthetic oligonucleotide
  Antisense strand to SEQ ID NO: 311954
uuuaucagacaggaugaca

SEQ ID NO: 311956 - RNA, 19 nt, Artificial Sequence
  Description of Artificial Sequence: Synthetic oligonucleotide
  Sense strand starting at position 293 of SEQ ID NO: 4008
gccuccuuggccuaacagu

SEQ ID NO: 311957 - RNA, 19 nt, Artificial Sequence
  Description of Artificial Sequence: Synthetic oligonucleotide
  Antisense strand to SEQ ID NO: 311956
acuguuaggccaaggaggc

SEQ ID NO: 311958 - RNA, 19 nt, Artificial Sequence
  Description of Artificial Sequence: Synthetic oligonucleotide
  Sense strand starting at position 309 of SEQ ID NO: 4008
agucuuccgucuccauaaa

SEQ ID NO: 311959 - RNA, 19 nt, Artificial Sequence
  Description of Artificial Sequence: Synthetic oligonucleotide
  Antisense strand to SEQ ID NO: 311958
uuuauggagacggaagacu

SEQ ID NO: 311960 - RNA, 19 nt, Artificial Sequence
  Description of Artificial Sequence: Synthetic oligonucleotide
  Sense strand starting at position 398 of SEQ ID NO: 4008
cagugucucuccucagaga

SEQ ID NO: 311961 - RNA, 19 nt, Artificial Sequence
  Description of Artificial Sequence: Synthetic oligonucleotide
  Antisense strand to SEQ ID NO: 311960
ucucugaggagagacacug

SEQ ID NO: 311962 - RNA, 19 nt, Artificial Sequence
  Description of Artificial Sequence: Synthetic oligonucleotide
  Sense strand starting at position 411 of SEQ ID NO: 4008
cagagacgguuucccuauu

SEQ ID NO: 311963 - RNA, 19 nt, Artificial Sequence
  Description of Artificial Sequence: Synthetic oligonucleotide
  Antisense strand to SEQ ID NO: 311962
aauagggaaaccgucucug

SEQ ID NO: 311964 - RNA, 19 nt, Artificial Sequence
  Description of Artificial Sequence: Synthetic oligonucleotide
  Sense strand starting at position 417 of SEQ ID NO: 4008
cgguuucccuauuuaaagu

SEQ ID NO: 311965 - RNA, 19 nt, Artificial Sequence
  Description of Artificial Sequence: Synthetic oligonucleotide
  Antisense strand to SEQ ID NO: 311964
acuuuaaauagggaaaccg

SEQ ID NO: 311966 - RNA, 19 nt, Artificial Sequence
  Description of Artificial Sequence: Synthetic oligonucleotide
  Sense strand starting at position 490 of SEQ ID NO: 4008
ucggauauuuguuaaauug

SEQ ID NO: 311967 - RNA, 19 nt, Artificial Sequence
  Description of Artificial Sequence: Synthetic oligonucleotide
  Antisense strand to SEQ ID NO: 311966
caauuuaacaaauauccga

SEQ ID NO: 311968 - RNA, 19 nt, Artificial Sequence
  Description of Artificial Sequence: Synthetic oligonucleotide
  Sense strand starting at position 513 of SEQ ID NO: 4008
cuccgacuaggauguaaau

SEQ ID NO: 311969 - RNA, 19 nt, Artificial Sequence
  Description of Artificial Sequence: Synthetic oligonucleotide
  Antisense strand to SEQ ID NO: 311968
auuuacauccuagucggag

SEQ ID NO: 311970 - RNA, 19 nt, Artificial Sequence
  Description of Artificial Sequence: Synthetic oligonucleotide
  Sense strand starting at position 522 of SEQ ID NO: 4008
ggauguaaaucccaaagga

SEQ ID NO: 311971 - RNA, 19 nt, Artificial Sequence
  Description of Artificial Sequence: Synthetic oligonucleotide
  Antisense strand to SEQ ID NO: 311970
uccuuugggauuuacaucc

SEQ ID NO: 311972 - RNA, 19 nt, Artificial Sequence
  Description of Artificial Sequence: Synthetic oligonucleotide
  Sense strand starting at position 790 of SEQ ID NO: 4008
cagguauaaccuugacuug

SEQ ID NO: 311973 - RNA, 19 nt, Artificial Sequence
  Description of Artificial Sequence: Synthetic oligonucleotide
  Antisense strand to SEQ ID NO: 311972
caagucaagguuauaccug

SEQ ID NO: 311974 - RNA, 19 nt, Artificial Sequence
  Description of Artificial Sequence: Synthetic oligonucleotide
  Sense strand starting at position 791 of SEQ ID NO: 4008
agguauaaccuugacuugu

SEQ ID NO: 311975 - RNA, 19 nt, Artificial Sequence
  Description of Artificial Sequence: Synthetic oligonucleotide
  Antisense strand to SEQ ID NO: 311974
acaagucaagguuauaccu

SEQ ID NO: 311976 - RNA, 19 nt, Artificial Sequence
  Description of Artificial Sequence: Synthetic oligonucleotide
  Sense strand starting at position 793 of SEQ ID NO: 4008
guauaaccuugacuuguaa

SEQ ID NO: 311977 - RNA, 19 nt, Artificial Sequence
  Description of Artificial Sequence: Synthetic oligonucleotide
  Antisense strand to SEQ ID NO: 311976
uuacaagucaagguuauac

SEQ ID NO: 311978 - RNA, 19 nt, Artificial Sequence
  Description of Artificial Sequence: Synthetic oligonucleotide
  Sense strand starting at position 815 of SEQ ID NO: 4008
ugauaauccuuuguccuag

SEQ ID NO: 311979 - RNA, 19 nt, Artificial Sequence
  Description of Artificial Sequence: Synthetic oligonucleotide
  Antisense strand to SEQ ID NO: 311978
cuaggacaaaggauuauca

SEQ ID NO: 311980 - RNA, 19 nt, Artificial Sequence
  Description of Artificial Sequence: Synthetic oligonucleotide
  Sense strand starting at position 919 of SEQ ID NO: 4008
cgagauggguggaacacuu

SEQ ID NO: 311981 - RNA, 19 nt, Artificial Sequence
  Description of Artificial Sequence: Synthetic oligonucleotide
  Antisense strand to SEQ ID NO: 311980
aaguguuccacccaucucg

SEQ ID NO: 311982 - RNA, 19 nt, Artificial Sequence
  Description of Artificial Sequence: Synthetic oligonucleotide
  Sense strand starting at position 1287 of SEQ ID NO: 4008
gguagacuaucccuguacu

SEQ ID NO: 311983 - RNA, 19 nt, Artificial Sequence
  Description of Artificial Sequence: Synthetic oligonucleotide
  Antisense strand to SEQ ID NO: 311982
aguacagggauagucuacc

SEQ ID NO: 311984 - RNA, 19 nt, Artificial Sequence
  Description of Artificial Sequence: Synthetic oligonucleotide
  Sense strand starting at position 1447 of SEQ ID NO: 4008
gggcauucagugggaagua

SEQ ID NO: 311985 - RNA, 19 nt, Artificial Sequence
  Description of Artificial Sequence: Synthetic oligonucleotide
  Antisense strand to SEQ ID NO: 311984
uacuucccacugaaugccc

SEQ ID NO: 311986 - RNA, 19 nt, Artificial Sequence
  Description of Artificial Sequence: Synthetic oligonucleotide
  Sense strand starting at position 1570 of SEQ ID NO: 4008
ggcugucacgcgaacagua

SEQ ID NO: 311987 - RNA, 19 nt, Artificial Sequence
  Description of Artificial Sequence: Synthetic oligonucleotide
  Antisense strand to SEQ ID NO: 311986
uacuguucgcgugacagcc

SEQ ID NO: 311988 - RNA, 19 nt, Artificial Sequence
  Description of Artificial Sequence: Synthetic oligonucleotide
  Sense strand starting at position 1584 of SEQ ID NO: 4008
caguaaauucccgggcaca

SEQ ID NO: 311989 - RNA, 19 nt, Artificial Sequence
  Description of Artificial Sequence: Synthetic oligonucleotide
  Antisense strand to SEQ ID NO: 311988
ugugcccgggaauuuacug

SEQ ID NO: 311990 - RNA, 19 nt, Artificial Sequence
  Description of Artificial Sequence: Synthetic oligonucleotide
  Sense strand starting at position 1607 of SEQ ID NO: 4008
gucaguuggccagcguaaa

SEQ ID NO: 311991 - RNA, 19 nt, Artificial Sequence
  Description of Artificial Sequence: Synthetic oligonucleotide
  Antisense strand to SEQ ID NO: 311990
uuuacgcuggccaacugac

SEQ ID NO: 311992 - RNA, 19 nt, Artificial Sequence
  Description of Artificial Sequence: Synthetic oligonucleotide
  Sense strand starting at position 1917 of SEQ ID NO: 4008
gcgguuagaaccgggaaau

SEQ ID NO: 311993 - RNA, 19 nt, Artificial Sequence
  Description of Artificial Sequence: Synthetic oligonucleotide
  Antisense strand to SEQ ID NO: 311992
auuucccgguucuaaccgc

SEQ ID NO: 311994 - RNA, 19 nt, Artificial Sequence
  Description of Artificial Sequence: Synthetic oligonucleotide
  Sense strand starting at position 1918 of SEQ ID NO: 4008
cgguuagaaccgggaaaug

SEQ ID NO: 311995 - RNA, 19 nt, Artificial Sequence
  Description of Artificial Sequence: Synthetic oligonucleotide
  Antisense strand to SEQ ID NO: 311994
cauuucccgguucuaaccg

SEQ ID NO: 311996 - RNA, 19 nt, Artificial Sequence
  Description of Artificial Sequence: Synthetic oligonucleotide
  Sense strand starting at position 2505 of SEQ ID NO: 4008
gccaucccugcugaaaguu

SEQ ID NO: 311997 - RNA, 19 nt, Artificial Sequence
  Description of Artificial Sequence: Synthetic oligonucleotide
  Antisense strand to SEQ ID NO: 311996
aacuuucagcagggauggc

SEQ ID NO: 311998 - RNA, 19 nt, Artificial Sequence
  Description of Artificial Sequence: Synthetic oligonucleotide
  Sense strand starting at position 2716 of SEQ ID NO: 4008
uggguauccugagcucacu

SEQ ID NO: 311999 - RNA, 19 nt, Artificial Sequence
  Description of Artificial Sequence: Synthetic oligonucleotide
  Antisense strand to SEQ ID NO: 311998
agugagcucaggauaccca

SEQ ID NO: 312000 - RNA, 19 nt, Artificial Sequence
  Description of Artificial Sequence: Synthetic oligonucleotide
  Sense strand starting at position 2803 of SEQ ID NO: 4008
acgugucauugacuacaaa

SEQ ID NO: 312001 - RNA, 19 nt, Artificial Sequence
  Description of Artificial Sequence: Synthetic oligonucleotide
  Antisense strand to SEQ ID NO: 312000
uuuguagucaaugacacgu

SEQ ID NO: 312002 - RNA, 19 nt, Artificial Sequence
  Description of Artificial Sequence: Synthetic oligonucleotide
  Sense strand starting at position 2804 of SEQ ID NO: 4008
cgugucauugacuacaaag

SEQ ID NO: 312003 - RNA, 19 nt, Artificial Sequence
  Description of Artificial Sequence: Synthetic oligonucleotide
  Antisense strand to SEQ ID NO: 312002
cuuuguagucaaugacacg

SEQ ID NO: 312004 - RNA, 19 nt, Artificial Sequence
  Description of Artificial Sequence: Synthetic oligonucleotide
  Sense strand starting at position 2916 of SEQ ID NO: 4008
gugggacuauguucagaug

SEQ ID NO: 312005 - RNA, 19 nt, Artificial Sequence
  Description of Artificial Sequence: Synthetic oligonucleotide
  Antisense strand to SEQ ID NO: 312004
caucugaacauagucccac

SEQ ID NO: 312006 - RNA, 19 nt, Artificial Sequence
  Description of Artificial Sequence: Synthetic oligonucleotide
  Sense strand starting at position 2987 of SEQ ID NO: 4008
aauauaucagccuguggag

SEQ ID NO: 312007 - RNA, 19 nt, Artificial Sequence
  Description of Artificial Sequence: Synthetic oligonucleotide
  Antisense strand to SEQ ID NO: 312006
cuccacaggcugauauauu

SEQ ID NO: 312008 - RNA, 19 nt, Artificial Sequence
  Description of Artificial Sequence: Synthetic oligonucleotide
  Sense strand starting at position 3009 of SEQ ID NO: 4008
gaaguuacauuugaagagu

SEQ ID NO: 312009 - RNA, 19 nt, Artificial Sequence
  Description of Artificial Sequence: Synthetic oligonucleotide
  Antisense strand to SEQ ID NO: 312008
acucuucaaauguaacuuc

SEQ ID NO: 312010 - RNA, 19 nt, Artificial Sequence
  Description of Artificial Sequence: Synthetic oligonucleotide
  Sense strand starting at position 3072 of SEQ ID NO: 4008
ggaaacuauuugcaaugaa

SEQ ID NO: 312011 - RNA, 19 nt, Artificial Sequence
  Description of Artificial Sequence: Synthetic oligonucleotide
  Antisense strand to SEQ ID NO: 312010
uucauugcaaauaguuucc

SEQ ID NO: 312012 - RNA, 19 nt, Artificial Sequence
  Description of Artificial Sequence: Synthetic oligonucleotide
  Sense strand starting at position 3159 of SEQ ID NO: 4008
agcggagugcaucaugauu

SEQ ID NO: 312013 - RNA, 19 nt, Artificial Sequence
  Description of Artificial Sequence: Synthetic oligonucleotide
  Antisense strand to SEQ ID NO: 312012
aaucaugaugcacuccgcu

SEQ ID NO: 312014 - RNA, 19 nt, Artificial Sequence
  Description of Artificial Sequence: Synthetic oligonucleotide
  Sense strand starting at position 3165 of SEQ ID NO: 4008
gugcaucaugauugagacu

SEQ ID NO: 312015 - RNA, 19 nt, Artificial Sequence
  Description of Artificial Sequence: Synthetic oligonucleotide
  Antisense strand to SEQ ID NO: 312014
agucucaaucaugaugcac

SEQ ID NO: 312016 - RNA, 19 nt, Artificial Sequence
  Description of Artificial Sequence: Synthetic oligonucleotide
  Sense strand starting at position 3258 of SEQ ID NO: 4008
aauagagcucucuguagga

SEQ ID NO: 312017 - RNA, 19 nt, Artificial Sequence
  Description of Artificial Sequence: Synthetic oligonucleotide
  Antisense strand to SEQ ID NO: 312016
uccuacagagagcucuauu

SEQ ID NO: 312018 - RNA, 19 nt, Artificial Sequence
  Description of Artificial Sequence: Synthetic oligonucleotide
  Sense strand starting at position 3260 of SEQ ID NO: 4008
uagagcucucuguaggaaa

SEQ ID NO: 312019 - RNA, 19 nt, Artificial Sequence
  Description of Artificial Sequence: Synthetic oligonucleotide
  Antisense strand to SEQ ID NO: 312018
uuuccuacagagagcucua

SEQ ID NO: 312020 - RNA, 19 nt, Artificial Sequence
  Description of Artificial Sequence: Synthetic oligonucleotide
  Sense strand starting at position 3262 of SEQ ID NO: 4008
gagcucucuguaggaaaca

SEQ ID NO: 312021 - RNA, 19 nt, Artificial Sequence
  Description of Artificial Sequence: Synthetic oligonucleotide
  Antisense strand to SEQ ID NO: 312020
uguuuccuacagagagcuc

SEQ ID NO: 312022 - RNA, 19 nt, Artificial Sequence
  Description of Artificial Sequence: Synthetic oligonucleotide
  Sense strand starting at position 3541 of SEQ ID NO: 4008
uugaucuuaguguagauaa

SEQ ID NO: 312023 - RNA, 19 nt, Artificial Sequence
  Description of Artificial Sequence: Synthetic oligonucleotide
  Antisense strand to SEQ ID NO: 312022
uuaucuacacuaagaucaa

SEQ ID NO: 312024 - RNA, 19 nt, Artificial Sequence
  Description of Artificial Sequence: Synthetic oligonucleotide
  Sense strand starting at position 3552 of SEQ ID NO: 4008
guagauaaugcuggauuaa

SEQ ID NO: 312025 - RNA, 19 nt, Artificial Sequence
  Description of Artificial Sequence: Synthetic oligonucleotide
  Antisense strand to SEQ ID NO: 312024
uuaauccagcauuaucuac

SEQ ID NO: 312026 - RNA, 19 nt, Artificial Sequence
  Description of Artificial Sequence: Synthetic oligonucleotide
  Sense strand starting at position 3612 of SEQ ID NO: 4008
uuaccacguuauguacaua

SEQ ID NO: 312027 - RNA, 19 nt, Artificial Sequence
  Description of Artificial Sequence: Synthetic oligonucleotide
  Antisense strand to SEQ ID NO: 312026
uauguacauaacgugguaa

SEQ ID NO: 312028 - RNA, 19 nt, Artificial Sequence
  Description of Artificial Sequence: Synthetic oligonucleotide
  Sense strand starting at position 3615 of SEQ ID NO: 4008
ccacguuauguacauaaau

SEQ ID NO: 312029 - RNA, 19 nt, Artificial Sequence
  Description of Artificial Sequence: Synthetic oligonucleotide
  Antisense strand to SEQ ID NO: 312028
auuuauguacauaacgugg

SEQ ID NO: 312030 - RNA, 19 nt, Artificial Sequence
  Description of Artificial Sequence: Synthetic oligonucleotide
  Sense strand starting at position 3648 of SEQ ID NO: 4008
augaauauguacuuaggau

SEQ ID NO: 312031 - RNA, 19 nt, Artificial Sequence
  Description of Artificial Sequence: Synthetic oligonucleotide
  Antisense strand to SEQ ID NO: 312030
auccuaaguacauauucau

SEQ ID NO: 312032 - RNA, 19 nt, Artificial Sequence
  Description of Artificial Sequence: Synthetic oligonucleotide
  Sense strand starting at position 253 of SEQ ID NO: 4007
gccuccuuggccuaacagu

SEQ ID NO: 312033 - RNA, 19 nt, Artificial Sequence
  Description of Artificial Sequence: Synthetic oligonucleotide
  Antisense strand to SEQ ID NO: 312032
acuguuaggccaaggaggc

SEQ ID NO: 312034 - RNA, 19 nt, Artificial Sequence
  Description of Artificial Sequence: Synthetic oligonucleotide
  Sense strand starting at position 269 of SEQ ID NO: 4007
agucuuccgucuccauaaa

SEQ ID NO: 312035 - RNA, 19 nt, Artificial Sequence
  Description of Artificial Sequence: Synthetic oligonucleotide
  Antisense strand to SEQ ID NO: 312034
uuuauggagacggaagacu

SEQ ID NO: 312036 - RNA, 19 nt, Artificial Sequence
  Description of Artificial Sequence: Synthetic oligonucleotide
  Sense strand starting at position 358 of SEQ ID NO: 4007
cagugucucuccucagaga

SEQ ID NO: 312037 - RNA, 19 nt, Artificial Sequence
  Description of Artificial Sequence: Synthetic oligonucleotide
  Antisense strand to SEQ ID NO: 312036
ucucugaggagagacacug

SEQ ID NO: 312038 - RNA, 19 nt, Artificial Sequence
  Description of Artificial Sequence: Synthetic oligonucleotide
  Sense strand starting at position 371 of SEQ ID NO: 4007
cagagacgguuucccuauu

SEQ ID NO: 312039 - RNA, 19 nt, Artificial Sequence
  Description of Artificial Sequence: Synthetic oligonucleotide
  Antisense strand to SEQ ID NO: 312038
aauagggaaaccgucucug

SEQ ID NO: 312040 - RNA, 19 nt, Artificial Sequence
  Description of Artificial Sequence: Synthetic oligonucleotide
  Sense strand starting at position 377 of SEQ ID NO: 4007
cgguuucccuauuuaaagu

SEQ ID NO: 312041 - RNA, 19 nt, Artificial Sequence
  Description of Artificial Sequence: Synthetic oligonucleotide
  Antisense strand to SEQ ID NO: 312040
acuuuaaauagggaaaccg

SEQ ID NO: 312042 - RNA, 19 nt, Artificial Sequence
  Description of Artificial Sequence: Synthetic oligonucleotide
  Sense strand starting at position 450 of SEQ ID NO: 4007
ucggauauuuguuaaauug

SEQ ID NO: 312043 - RNA, 19 nt, Artificial Sequence
  Description of Artificial Sequence: Synthetic oligonucleotide
  Antisense strand to SEQ ID NO: 312042
caauuuaacaaauauccga

SEQ ID NO: 312044 - RNA, 19 nt, Artificial Sequence
  Description of Artificial Sequence: Synthetic oligonucleotide
  Sense strand starting at position 473 of SEQ ID NO: 4007
cuccgacuaggauguaaau

SEQ ID NO: 312045 - RNA, 19 nt, Artificial Sequence
  Description of Artificial Sequence: Synthetic oligonucleotide
  Antisense strand to SEQ ID NO: 312044
auuuacauccuagucggag

SEQ ID NO: 312046 - RNA, 19 nt, Artificial Sequence
  Description of Artificial Sequence: Synthetic oligonucleotide
  Sense strand starting at position 482 of SEQ ID NO: 4007
ggauguaaaucccaaagga

SEQ ID NO: 312047 - RNA, 19 nt, Artificial Sequence
  Description of Artificial Sequence: Synthetic oligonucleotide
  Antisense strand to SEQ ID NO: 312046
uccuuugggauuuacaucc

SEQ ID NO: 312048 - RNA, 19 nt, Artificial Sequence
  Description of Artificial Sequence: Synthetic oligonucleotide
  Sense strand starting at position 750 of SEQ ID NO: 4007
cagguauaaccuugacuug

SEQ ID NO: 312049 - RNA, 19 nt, Artificial Sequence
  Description of Artificial Sequence: Synthetic oligonucleotide
  Antisense strand to SEQ ID NO: 312048
caagucaagguuauaccug

SEQ ID NO: 312050 - RNA, 19 nt, Artificial Sequence
  Description of Artificial Sequence: Synthetic oligonucleotide
  Sense strand starting at position 751 of SEQ ID NO: 4007
agguauaaccuugacuugu

SEQ ID NO: 312051 - RNA, 19 nt, Artificial Sequence
  Description of Artificial Sequence: Synthetic oligonucleotide
  Antisense strand to SEQ ID NO: 312050
acaagucaagguuauaccu

SEQ ID NO: 312052 - RNA, 19 nt, Artificial Sequence
  Description of Artificial Sequence: Synthetic oligonucleotide
  Sense strand starting at position 753 of SEQ ID NO: 4007
guauaaccuugacuuguaa

SEQ ID NO: 312053 - RNA, 19 nt, Artificial Sequence
  Description of Artificial Sequence: Synthetic oligonucleotide
  Antisense strand to SEQ ID NO: 312052
uuacaagucaagguuauac

SEQ ID NO: 312054 - RNA, 19 nt, Artificial Sequence
  Description of Artificial Sequence: Synthetic oligonucleotide
  Sense strand starting at position 775 of SEQ ID NO: 4007
ugauaauccuuuguccuag

SEQ ID NO: 312055 - RNA, 19 nt, Artificial Sequence
  Description of Artificial Sequence: Synthetic oligonucleotide
  Antisense strand to SEQ ID NO: 312054
cuaggacaaaggauuauca

SEQ ID NO: 312056 - RNA, 19 nt, Artificial Sequence
  Description of Artificial Sequence: Synthetic oligonucleotide
  Sense strand starting at position 879 of SEQ ID NO: 4007
cgagauggguggaacacuu

SEQ ID NO: 312057 - RNA, 19 nt, Artificial Sequence
  Description of Artificial Sequence: Synthetic oligonucleotide
  Antisense strand to SEQ ID NO: 312056
aaguguuccacccaucucg

SEQ ID NO: 312058 - RNA, 19 nt, Artificial Sequence
  Description of Artificial Sequence: Synthetic oligonucleotide
  Sense strand starting at position 1247 of SEQ ID NO: 4007
gguagacuaucccuguacu

SEQ ID NO: 312059 - RNA, 19 nt, Artificial Sequence
  Description of Artificial Sequence: Synthetic oligonucleotide
  Antisense strand to SEQ ID NO: 312058
aguacagggauagucuacc

SEQ ID NO: 312060 - RNA, 19 nt, Artificial Sequence
  Description of Artificial Sequence: Synthetic oligonucleotide
  Sense strand starting at position 1407 of SEQ ID NO: 4007
gggcauucagugggaagua

SEQ ID NO: 312061 - RNA, 19 nt, Artificial Sequence
  Description of Artificial Sequence: Synthetic oligonucleotide
  Antisense strand to SEQ ID NO: 312060
uacuucccacugaaugccc

SEQ ID NO: 312062 - RNA, 19 nt, Artificial Sequence
  Description of Artificial Sequence: Synthetic oligonucleotide
  Sense strand starting at position 1530 of SEQ ID NO: 4007
ggcugucacgcgaacagua

SEQ ID NO: 312063 - RNA, 19 nt, Artificial Sequence
  Description of Artificial Sequence: Synthetic oligonucleotide
  Antisense strand to SEQ ID NO: 312062
uacuguucgcgugacagcc

SEQ ID NO: 312064 - RNA, 19 nt, Artificial Sequence
  Description of Artificial Sequence: Synthetic oligonucleotide
  Sense strand starting at position 1544 of SEQ ID NO: 4007
caguaaauucccgggcaca

SEQ ID NO: 312065 - RNA, 19 nt, Artificial Sequence
  Description of Artificial Sequence: Synthetic oligonucleotide
  Antisense strand to SEQ ID NO: 312064
ugugcccgggaauuuacug

SEQ ID NO: 312066 - RNA, 19 nt, Artificial Sequence
  Description of Artificial Sequence: Synthetic oligonucleotide
  Sense strand starting at position 1567 of SEQ ID NO: 4007
gucaguuggccagcguaaa

SEQ ID NO: 312067 - RNA, 19 nt, Artificial Sequence
  Description of Artificial Sequence: Synthetic oligonucleotide
  Antisense strand to SEQ ID NO: 312066
uuuacgcuggccaacugac

SEQ ID NO: 312068 - RNA, 19 nt, Artificial Sequence
  Description of Artificial Sequence: Synthetic oligonucleotide
  Sense strand starting at position 1877 of SEQ ID NO: 4007
gcgguuagaaccgggaaau

SEQ ID NO: 312069 - RNA, 19 nt, Artificial Sequence
  Description of Artificial Sequence: Synthetic oligonucleotide
  Antisense strand to SEQ ID NO: 312068
auuucccgguucuaaccgc

SEQ ID NO: 312070 - RNA, 19 nt, Artificial Sequence
  Description of Artificial Sequence: Synthetic oligonucleotide
  Sense strand starting at position 1878 of SEQ ID NO: 4007
cgguuagaaccgggaaaug

SEQ ID NO: 312071 - RNA, 19 nt, Artificial Sequence
  Description of Artificial Sequence: Synthetic oligonucleotide
  Antisense strand to SEQ ID NO: 312070
cauuucccgguucuaaccg

SEQ ID NO: 312072 - RNA, 19 nt, Artificial Sequence
  Description of Artificial Sequence: Synthetic oligonucleotide
  Sense strand starting at position 2465 of SEQ ID NO: 4007
gccaucccugcugaaaguu

SEQ ID NO: 312073 - RNA, 19 nt, Artificial Sequence
  Description of Artificial Sequence: Synthetic oligonucleotide
  Antisense strand to SEQ ID NO: 312072
aacuuucagcagggauggc

SEQ ID NO: 312074 - RNA, 19 nt, Artificial Sequence
  Description of Artificial Sequence: Synthetic oligonucleotide
  Sense strand starting at position 2676 of SEQ ID NO: 4007
uggguauccugagcucacu

SEQ ID NO: 312075 - RNA, 19 nt, Artificial Sequence
  Description of Artificial Sequence: Synthetic oligonucleotide
  Antisense strand to SEQ ID NO: 312074
agugagcucaggauaccca

SEQ ID NO: 312076 - RNA, 19 nt, Artificial Sequence
  Description of Artificial Sequence: Synthetic oligonucleotide
  Sense strand starting at position 2763 of SEQ ID NO: 4007
acgugucauugacuacaaa

SEQ ID NO: 312077 - RNA, 19 nt, Artificial Sequence
  Description of Artificial Sequence: Synthetic oligonucleotide
  Antisense strand to SEQ ID NO: 312076
uuuguagucaaugacacgu

SEQ ID NO: 312078 - RNA, 19 nt, Artificial Sequence
  Description of Artificial Sequence: Synthetic oligonucleotide
  Sense strand starting at position 2764 of SEQ ID NO: 4007
cgugucauugacuacaaag

SEQ ID NO: 312079 - RNA, 19 nt, Artificial Sequence
  Description of Artificial Sequence: Synthetic oligonucleotide
  Antisense strand to SEQ ID NO: 312078
cuuuguagucaaugacacg

SEQ ID NO: 312080 - RNA, 19 nt, Artificial Sequence
  Description of Artificial Sequence: Synthetic oligonucleotide
  Sense strand starting at position 2876 of SEQ ID NO: 4007
gugggacuauguucagaug

SEQ ID NO: 312081 - RNA, 19 nt, Artificial Sequence
  Description of Artificial Sequence: Synthetic oligonucleotide
  Antisense strand to SEQ ID NO: 312080
caucugaacauagucccac

SEQ ID NO: 312082 - RNA, 19 nt, Artificial Sequence
  Description of Artificial Sequence: Synthetic oligonucleotide
  Sense strand starting at position 2947 of SEQ ID NO: 4007
aauauaucagccuguggag

SEQ ID NO: 312083 - RNA, 19 nt, Artificial Sequence
  Description of Artificial Sequence: Synthetic oligonucleotide
  Antisense strand to SEQ ID NO: 312082
cuccacaggcugauauauu

SEQ ID NO: 312084 - RNA, 19 nt, Artificial Sequence
  Description of Artificial Sequence: Synthetic oligonucleotide
  Sense strand starting at position 2969 of SEQ ID NO: 4007
gaaguuacauuugaagagu

SEQ ID NO: 312085 - RNA, 19 nt, Artificial Sequence
  Description of Artificial Sequence: Synthetic oligonucleotide
  Antisense strand to SEQ ID NO: 312084
acucuucaaauguaacuuc

SEQ ID NO: 312086 - RNA, 19 nt, Artificial Sequence
  Description of Artificial Sequence: Synthetic oligonucleotide
  Sense strand starting at position 3032 of SEQ ID NO: 4007
ggaaacuauuugcaaugaa

SEQ ID NO: 312087 - RNA, 19 nt, Artificial Sequence
  Description of Artificial Sequence: Synthetic oligonucleotide
  Antisense strand to SEQ ID NO: 312086
uucauugcaaauaguuucc

SEQ ID NO: 312088 - RNA, 19 nt, Artificial Sequence
  Description of Artificial Sequence: Synthetic oligonucleotide
  Sense strand starting at position 3119 of SEQ ID NO: 4007
agcggagugcaucaugauu

SEQ ID NO: 312089 - RNA, 19 nt, Artificial Sequence
  Description of Artificial Sequence: Synthetic oligonucleotide
  Antisense strand to SEQ ID NO: 312088
aaucaugaugcacuccgcu

SEQ ID NO: 312090 - RNA, 19 nt, Artificial Sequence
  Description of Artificial Sequence: Synthetic oligonucleotide
  Sense strand starting at position 3125 of SEQ ID NO: 4007
gugcaucaugauugagacu

SEQ ID NO: 312091 - RNA, 19 nt, Artificial Sequence
  Description of Artificial Sequence: Synthetic oligonucleotide
  Antisense strand to SEQ ID NO: 312090
agucucaaucaugaugcac

SEQ ID NO: 312092 - RNA, 19 nt, Artificial Sequence
  Description of Artificial Sequence: Synthetic oligonucleotide
  Sense strand starting at position 3218 of SEQ ID NO: 4007
aauagagcucucuguagga

SEQ ID NO: 312093 - RNA, 19 nt, Artificial Sequence
  Description of Artificial Sequence: Synthetic oligonucleotide
  Antisense strand to SEQ ID NO: 312092
uccuacagagagcucuauu

SEQ ID NO: 312094 - RNA, 19 nt, Artificial Sequence
  Description of Artificial Sequence: Synthetic oligonucleotide
  Sense strand starting at position 3220 of SEQ ID NO: 4007
uagagcucucuguaggaaa

SEQ ID NO: 312095 - RNA, 19 nt, Artificial Sequence
  Description of Artificial Sequence: Synthetic oligonucleotide
  Antisense strand to SEQ ID NO: 312094
uuuccuacagagagcucua

SEQ ID NO: 312096 - RNA, 19 nt, Artificial Sequence
  Description of Artificial Sequence: Synthetic oligonucleotide
  Sense strand starting at position 3222 of SEQ ID NO: 4007
gagcucucuguaggaaaca

SEQ ID NO: 312097 - RNA, 19 nt, Artificial Sequence
  Description of Artificial Sequence: Synthetic oligonucleotide
  Antisense strand to SEQ ID NO: 312096
uguuuccuacagagagcuc

SEQ ID NO: 312098 - RNA, 19 nt, Artificial Sequence
  Description of Artificial Sequence: Synthetic oligonucleotide
  Sense strand starting at position 3501 of SEQ ID NO: 4007
uugaucuuaguguagauaa

SEQ ID NO: 312099 - RNA, 19 nt, Artificial Sequence
  Description of Artificial Sequence: Synthetic oligonucleotide
  Antisense strand to SEQ ID NO: 312098
uuaucuacacuaagaucaa

SEQ ID NO: 312100 - RNA, 19 nt, Artificial Sequence
  Description of Artificial Sequence: Synthetic oligonucleotide
  Sense strand starting at position 3512 of SEQ ID NO: 4007
guagauaaugcuggauuaa

SEQ ID NO: 312101 - RNA, 19 nt, Artificial Sequence
  Description of Artificial Sequence: Synthetic oligonucleotide
  Antisense strand to SEQ ID NO: 312100
uuaauccagcauuaucuac

SEQ ID NO: 312102 - RNA, 19 nt, Artificial Sequence
  Description of Artificial Sequence: Synthetic oligonucleotide
  Sense strand starting at position 3572 of SEQ ID NO: 4007
uuaccacguuauguacaua

SEQ ID NO: 312103 - RNA, 19 nt, Artificial Sequence
  Description of Artificial Sequence: Synthetic oligonucleotide
  Antisense strand to SEQ ID NO: 312102
uauguacauaacgugguaa

SEQ ID NO: 312104 - RNA, 19 nt, Artificial Sequence
  Description of Artificial Sequence: Synthetic oligonucleotide
  Sense strand starting at position 3575 of SEQ ID NO: 4007
ccacguuauguacauaaau

SEQ ID NO: 312105 - RNA, 19 nt, Artificial Sequence
  Description of Artificial Sequence: Synthetic oligonucleotide
  Antisense strand to SEQ ID NO: 312104
auuuauguacauaacgugg

SEQ ID NO: 312106 - RNA, 19 nt, Artificial Sequence
  Description of Artificial Sequence: Synthetic oligonucleotide
  Sense strand starting at position 3608 of SEQ ID NO: 4007
augaauauguacuuaggau

SEQ ID NO: 312107 - RNA, 19 nt, Artificial Sequence
  Description of Artificial Sequence: Synthetic oligonucleotide
  Antisense strand to SEQ ID NO: 312106
auccuaaguacauauucau

SEQ ID NO: 312108 - RNA, 19 nt, Artificial Sequence
  Description of Artificial Sequence: Synthetic oligonucleotide
  Sense strand starting at position 3946 of SEQ ID NO: 4007
auggaaucacugggcauaa

SEQ ID NO: 312109 - RNA, 19 nt, Artificial Sequence
  Description of Artificial Sequence: Synthetic oligonucleotide
  Antisense strand to SEQ ID NO: 312108
uuaugcccagugauuccau

SEQ ID NO: 312110 - RNA, 19 nt, Artificial Sequence
  Description of Artificial Sequence: Synthetic oligonucleotide
  Sense strand starting at position 3947 of SEQ ID NO: 4007
uggaaucacugggcauaaa

SEQ ID NO: 312111 - RNA, 19 nt, Artificial Sequence
  Description of Artificial Sequence: Synthetic oligonucleotide
  Antisense strand to SEQ ID NO: 312110
uuuaugcccagugauucca

SEQ ID NO: 312112 - RNA, 19 nt, Artificial Sequence
  Description of Artificial Sequence: Synthetic oligonucleotide
  Sense strand starting at position 120 of SEQ ID NO: 4006
gccuccuuggccuaacagu

SEQ ID NO: 312113 - RNA, 19 nt, Artificial Sequence
  Description of Artificial Sequence: Synthetic oligonucleotide
  Antisense strand to SEQ ID NO: 312112
acuguuaggccaaggaggc

SEQ ID NO: 312114 - RNA, 19 nt, Artificial Sequence
  Description of Artificial Sequence: Synthetic oligonucleotide
  Sense strand starting at position 225 of SEQ ID NO: 4006
cagugucucuccucagaga

SEQ ID NO: 312115 - RNA, 19 nt, Artificial Sequence
  Description of Artificial Sequence: Synthetic oligonucleotide
  Antisense strand to SEQ ID NO: 312114
ucucugaggagagacacug

SEQ ID NO: 312116 - RNA, 19 nt, Artificial Sequence
  Description of Artificial Sequence: Synthetic oligonucleotide
  Sense strand starting at position 238 of SEQ ID NO: 4006
cagagacgguuucccuauu

SEQ ID NO: 312117 - RNA, 19 nt, Artificial Sequence
  Description of Artificial Sequence: Synthetic oligonucleotide
  Antisense strand to SEQ ID NO: 312116
aauagggaaaccgucucug

SEQ ID NO: 312118 - RNA, 19 nt, Artificial Sequence
  Description of Artificial Sequence: Synthetic oligonucleotide
  Sense strand starting at position 244 of SEQ ID NO: 4006
cgguuucccuauuuaaagu

SEQ ID NO: 312119 - RNA, 19 nt, Artificial Sequence
  Description of Artificial Sequence: Synthetic oligonucleotide
  Antisense strand to SEQ ID NO: 312118
acuuuaaauagggaaaccg

SEQ ID NO: 312120 - RNA, 19 nt, Artificial Sequence
  Description of Artificial Sequence: Synthetic oligonucleotide
  Sense strand starting at position 317 of SEQ ID NO: 4006
ucggauauuuguuaaauug

SEQ ID NO: 312121 - RNA, 19 nt, Artificial Sequence
  Description of Artificial Sequence: Synthetic oligonucleotide
  Antisense strand to SEQ ID NO: 312120
caauuuaacaaauauccga

SEQ ID NO: 312122 - RNA, 19 nt, Artificial Sequence
  Description of Artificial Sequence: Synthetic oligonucleotide
  Sense strand starting at position 340 of SEQ ID NO: 4006
cuccgacuaggauguaaau

SEQ ID NO: 312123 - RNA, 19 nt, Artificial Sequence
  Description of Artificial Sequence: Synthetic oligonucleotide
  Antisense strand to SEQ ID NO: 312122
auuuacauccuagucggag

SEQ ID NO: 312124 - RNA, 19 nt, Artificial Sequence
  Description of Artificial Sequence: Synthetic oligonucleotide
  Sense strand starting at position 617 of SEQ ID NO: 4006
cagguauaaccuugacuug

SEQ ID NO: 312125 - RNA, 19 nt, Artificial Sequence
  Description of Artificial Sequence: Synthetic oligonucleotide
  Antisense strand to SEQ ID NO: 312124
caagucaagguuauaccug

SEQ ID NO: 312126 - RNA, 19 nt, Artificial Sequence
  Description of Artificial Sequence: Synthetic oligonucleotide
  Sense strand starting at position 618 of SEQ ID NO: 4006
agguauaaccuugacuugu

SEQ ID NO: 312127 - RNA, 19 nt, Artificial Sequence
  Description of Artificial Sequence: Synthetic oligonucleotide
  Antisense strand to SEQ ID NO: 312126
acaagucaagguuauaccu

SEQ ID NO: 312128 - RNA, 19 nt, Artificial Sequence
  Description of Artificial Sequence: Synthetic oligonucleotide
  Sense strand starting at position 620 of SEQ ID NO: 4006
guauaaccuugacuuguaa

SEQ ID NO: 312129 - RNA, 19 nt, Artificial Sequence
  Description of Artificial Sequence: Synthetic oligonucleotide
  Antisense strand to SEQ ID NO: 312128
uuacaagucaagguuauac

SEQ ID NO: 312130 - RNA, 19 nt, Artificial Sequence
  Description of Artificial Sequence: Synthetic oligonucleotide
  Sense strand starting at position 642 of SEQ ID NO: 4006
ugauaauccuuuguccuag

SEQ ID NO: 312131 - RNA, 19 nt, Artificial Sequence
  Description of Artificial Sequence: Synthetic oligonucleotide
  Antisense strand to SEQ ID NO: 312130
cuaggacaaaggauuauca

SEQ ID NO: 312132 - RNA, 19 nt, Artificial Sequence
  Description of Artificial Sequence: Synthetic oligonucleotide
  Sense strand starting at position 746 of SEQ ID NO: 4006
cgagauggguggaacacuu

SEQ ID NO: 312133 - RNA, 19 nt, Artificial Sequence
  Description of Artificial Sequence: Synthetic oligonucleotide
  Antisense strand to SEQ ID NO: 312132
aaguguuccacccaucucg

SEQ ID NO: 312134 - RNA, 19 nt, Artificial Sequence
  Description of Artificial Sequence: Synthetic oligonucleotide
  Sense strand starting at position 1114 of SEQ ID NO: 4006
gguagacuaucccuguacu

SEQ ID NO: 312135 - RNA, 19 nt, Artificial Sequence
  Description of Artificial Sequence: Synthetic oligonucleotide
  Antisense strand to SEQ ID NO: 312134
aguacagggauagucuacc

SEQ ID NO: 312136 - RNA, 19 nt, Artificial Sequence
  Description of Artificial Sequence: Synthetic oligonucleotide
  Sense strand starting at position 1274 of SEQ ID NO: 4006
gggcauucagugggaagua

SEQ ID NO: 312137 - RNA, 19 nt, Artificial Sequence
  Description of Artificial Sequence: Synthetic oligonucleotide
  Antisense strand to SEQ ID NO: 312136
uacuucccacugaaugccc

SEQ ID NO: 312138 - RNA, 19 nt, Artificial Sequence
  Description of Artificial Sequence: Synthetic oligonucleotide
  Sense strand starting at position 1397 of SEQ ID NO: 4006
ggcugucacgcgaacagua

SEQ ID NO: 312139 - RNA, 19 nt, Artificial Sequence
  Description of Artificial Sequence: Synthetic oligonucleotide
  Antisense strand to SEQ ID NO: 312138
uacuguucgcgugacagcc

SEQ ID NO: 312140 - RNA, 19 nt, Artificial Sequence
  Description of Artificial Sequence: Synthetic oligonucleotide
  Sense strand starting at position 1411 of SEQ ID NO: 4006
caguaaauucccgggcaca

SEQ ID NO: 312141 - RNA, 19 nt, Artificial Sequence
  Description of Artificial Sequence: Synthetic oligonucleotide
  Antisense strand to SEQ ID NO: 312140
ugugcccgggaauuuacug

SEQ ID NO: 312142 - RNA, 19 nt, Artificial Sequence
  Description of Artificial Sequence: Synthetic oligonucleotide
  Sense strand starting at position 1434 of SEQ ID NO: 4006
gucaguuggccagcguaaa

SEQ ID NO: 312143 - RNA, 19 nt, Artificial Sequence
  Description of Artificial Sequence: Synthetic oligonucleotide
  Antisense strand to SEQ ID NO: 312142
uuuacgcuggccaacugac

SEQ ID NO: 312144 - RNA, 19 nt, Artificial Sequence
  Description of Artificial Sequence: Synthetic oligonucleotide
  Sense strand starting at position 1744 of SEQ ID NO: 4006
gcgguuagaaccgggaaau

SEQ ID NO: 312145 - RNA, 19 nt, Artificial Sequence
  Description of Artificial Sequence: Synthetic oligonucleotide
  Antisense strand to SEQ ID NO: 312144
auuucccgguucuaaccgc

SEQ ID NO: 312146 - RNA, 19 nt, Artificial Sequence
  Description of Artificial Sequence: Synthetic oligonucleotide
  Sense strand starting at position 1745 of SEQ ID NO: 4006
cgguuagaaccgggaaaug

SEQ ID NO: 312147 - RNA, 19 nt, Artificial Sequence
  Description of Artificial Sequence: Synthetic oligonucleotide
  Antisense strand to SEQ ID NO: 312146
cauuucccgguucuaaccg

SEQ ID NO: 312148 - RNA, 19 nt, Artificial Sequence
  Description of Artificial Sequence: Synthetic oligonucleotide
  Sense strand starting at position 2332 of SEQ ID NO: 4006
gccaucccugcugaaaguu

SEQ ID NO: 312149 - RNA, 19 nt, Artificial Sequence
  Description of Artificial Sequence: Synthetic oligonucleotide
  Antisense strand to SEQ ID NO: 312148
aacuuucagcagggauggc

SEQ ID NO: 312150 - RNA, 19 nt, Artificial Sequence
  Description of Artificial Sequence: Synthetic oligonucleotide
  Sense strand starting at position 2543 of SEQ ID NO: 4006
uggguauccugagcucacu

SEQ ID NO: 312151 - RNA, 19 nt, Artificial Sequence
  Description of Artificial Sequence: Synthetic oligonucleotide
  Antisense strand to SEQ ID NO: 312150
agugagcucaggauaccca

SEQ ID NO: 312152 - RNA, 19 nt, Artificial Sequence
  Description of Artificial Sequence: Synthetic oligonucleotide
  Sense strand starting at position 2630 of SEQ ID NO: 4006
acgugucauugacuacaaa

SEQ ID NO: 312153 - RNA, 19 nt, Artificial Sequence
  Description of Artificial Sequence: Synthetic oligonucleotide
  Antisense strand to SEQ ID NO: 312152
uuuguagucaaugacacgu

SEQ ID NO: 312154 - RNA, 19 nt, Artificial Sequence
  Description of Artificial Sequence: Synthetic oligonucleotide
  Sense strand starting at position 2631 of SEQ ID NO: 4006
cgugucauugacuacaaag

SEQ ID NO: 312155 - RNA, 19 nt, Artificial Sequence
  Description of Artificial Sequence: Synthetic oligonucleotide
  Antisense strand to SEQ ID NO: 312154
cuuuguagucaaugacacg

SEQ ID NO: 312156 - RNA, 19 nt, Artificial Sequence
  Description of Artificial Sequence: Synthetic oligonucleotide
  Sense strand starting at position 2743 of SEQ ID NO: 4006
gugggacuauguucagaug

SEQ ID NO: 312157 - RNA, 19 nt, Artificial Sequence
  Description of Artificial Sequence: Synthetic oligonucleotide
  Antisense strand to SEQ ID NO: 312156
caucugaacauagucccac

SEQ ID NO: 312158 - RNA, 19 nt, Artificial Sequence
  Description of Artificial Sequence: Synthetic oligonucleotide
  Sense strand starting at position 2814 of SEQ ID NO: 4006
aauauaucagccuguggag

SEQ ID NO: 312159 - RNA, 19 nt, Artificial Sequence
  Description of Artificial Sequence: Synthetic oligonucleotide
  Antisense strand to SEQ ID NO: 312158
cuccacaggcugauauauu

SEQ ID NO: 312160 - RNA, 19 nt, Artificial Sequence
  Description of Artificial Sequence: Synthetic oligonucleotide
  Sense strand starting at position 2836 of SEQ ID NO: 4006
gaaguuacauuugaagagu

SEQ ID NO: 312161 - RNA, 19 nt, Artificial Sequence
  Description of Artificial Sequence: Synthetic oligonucleotide
  Antisense strand to SEQ ID NO: 312160
acucuucaaauguaacuuc

SEQ ID NO: 312162 - RNA, 19 nt, Artificial Sequence
  Description of Artificial Sequence: Synthetic oligonucleotide
  Sense strand starting at position 2899 of SEQ ID NO: 4006
ggaaacuauuugcaaugaa

SEQ ID NO: 312163 - RNA, 19 nt, Artificial Sequence
  Description of Artificial Sequence: Synthetic oligonucleotide
  Antisense strand to SEQ ID NO: 312162
uucauugcaaauaguuucc

SEQ ID NO: 312164 - RNA, 19 nt, Artificial Sequence
  Description of Artificial Sequence: Synthetic oligonucleotide
  Sense strand starting at position 2986 of SEQ ID NO: 4006
agcggagugcaucaugauu

SEQ ID NO: 312165 - RNA, 19 nt, Artificial Sequence
  Description of Artificial Sequence: Synthetic oligonucleotide
  Antisense strand to SEQ ID NO: 312164
aaucaugaugcacuccgcu

SEQ ID NO: 312166 - RNA, 19 nt, Artificial Sequence
  Description of Artificial Sequence: Synthetic oligonucleotide
  Sense strand starting at position 2992 of SEQ ID NO: 4006
gugcaucaugauugagacu

SEQ ID NO: 312167 - RNA, 19 nt, Artificial Sequence
  Description of Artificial Sequence: Synthetic oligonucleotide
  Antisense strand to SEQ ID NO: 312166
agucucaaucaugaugcac

SEQ ID NO: 312168 - RNA, 19 nt, Artificial Sequence
  Description of Artificial Sequence: Synthetic oligonucleotide
  Sense strand starting at position 3085 of SEQ ID NO: 4006
aauagagcucucuguagga

SEQ ID NO: 312169 - RNA, 19 nt, Artificial Sequence
  Description of Artificial Sequence: Synthetic oligonucleotide
  Antisense strand to SEQ ID NO: 312168
uccuacagagagcucuauu

SEQ ID NO: 312170 - RNA, 19 nt, Artificial Sequence
  Description of Artificial Sequence: Synthetic oligonucleotide
  Sense strand starting at position 3087 of SEQ ID NO: 4006
uagagcucucuguaggaaa

SEQ ID NO: 312171 - RNA, 19 nt, Artificial Sequence
  Description of Artificial Sequence: Synthetic oligonucleotide
  Antisense strand to SEQ ID NO: 312170
uuuccuacagagagcucua

SEQ ID NO: 312172 - RNA, 19 nt, Artificial Sequence
  Description of Artificial Sequence: Synthetic oligonucleotide
  Sense strand starting at position 3089 of SEQ ID NO: 4006
gagcucucuguaggaaaca

SEQ ID NO: 312173 - RNA, 19 nt, Artificial Sequence
  Description of Artificial Sequence: Synthetic oligonucleotide
  Antisense strand to SEQ ID NO: 312172
uguuuccuacagagagcuc

SEQ ID NO: 312174 - RNA, 19 nt, Artificial Sequence
  Description of Artificial Sequence: Synthetic oligonucleotide
  Sense strand starting at position 3368 of SEQ ID NO: 4006
uugaucuuaguguagauaa

SEQ ID NO: 312175 - RNA, 19 nt, Artificial Sequence
  Description of Artificial Sequence: Synthetic oligonucleotide
  Antisense strand to SEQ ID NO: 312174
uuaucuacacuaagaucaa

SEQ ID NO: 312176 - RNA, 19 nt, Artificial Sequence
  Description of Artificial Sequence: Synthetic oligonucleotide
  Sense strand starting at position 3379 of SEQ ID NO: 4006
guagauaaugcuggauuaa

SEQ ID NO: 312177 - RNA, 19 nt, Artificial Sequence
  Description of Artificial Sequence: Synthetic oligonucleotide
  Antisense strand to SEQ ID NO: 312176
uuaauccagcauuaucuac

SEQ ID NO: 312178 - RNA, 19 nt, Artificial Sequence
  Description of Artificial Sequence: Synthetic oligonucleotide
  Sense strand starting at position 3439 of SEQ ID NO: 4006
uuaccacguuauguacaua

SEQ ID NO: 312179 - RNA, 19 nt, Artificial Sequence
  Description of Artificial Sequence: Synthetic oligonucleotide
  Antisense strand to SEQ ID NO: 312178
uauguacauaacgugguaa

SEQ ID NO: 312180 - RNA, 19 nt, Artificial Sequence
  Description of Artificial Sequence: Synthetic oligonucleotide
  Sense strand starting at position 3442 of SEQ ID NO: 4006
ccacguuauguacauaaau

SEQ ID NO: 312181 - RNA, 19 nt, Artificial Sequence
  Description of Artificial Sequence: Synthetic oligonucleotide
  Antisense strand to SEQ ID NO: 312180
auuuauguacauaacgugg

SEQ ID NO: 312182 - RNA, 19 nt, Artificial Sequence
  Description of Artificial Sequence: Synthetic oligonucleotide
  Sense strand starting at position 3475 of SEQ ID NO: 4006
augaauauguacuuaggau

SEQ ID NO: 312183 - RNA, 19 nt, Artificial Sequence
  Description of Artificial Sequence: Synthetic oligonucleotide
  Antisense strand to SEQ ID NO: 312182
auccuaaguacauauucau

SEQ ID NO: 312184 - RNA, 19 nt, Artificial Sequence
  Description of Artificial Sequence: Synthetic oligonucleotide
  Sense strand starting at position 3813 of SEQ ID NO: 4006
auggaaucacugggcauaa

SEQ ID NO: 312185 - RNA, 19 nt, Artificial Sequence
  Description of Artificial Sequence: Synthetic oligonucleotide
  Antisense strand to SEQ ID NO: 312184
uuaugcccagugauuccau

SEQ ID NO: 312186 - RNA, 19 nt, Artificial Sequence
  Description of Artificial Sequence: Synthetic oligonucleotide
  Sense strand starting at position 3814 of SEQ ID NO: 4006
uggaaucacugggcauaaa

SEQ ID NO: 312187 - RNA, 19 nt, Artificial Sequence
  Description of Artificial Sequence: Synthetic oligonucleotide
  Antisense strand to SEQ ID NO: 312186
uuuaugcccagugauucca

SEQ ID NO: 312188 - RNA, 19 nt, Artificial Sequence
  Description of Artificial Sequence: Synthetic oligonucleotide
  Sense strand starting at position 3904 of SEQ ID NO: 4006
uauguaguuguguuugucu

SEQ ID NO: 312189 - RNA, 19 nt, Artificial Sequence
  Description of Artificial Sequence: Synthetic oligonucleotide
  Antisense strand to SEQ ID NO: 312188
agacaaacacaacuacaua

SEQ ID NO: 312190 - RNA, 19 nt, Artificial Sequence
  Description of Artificial Sequence: Synthetic oligonucleotide
  Sense strand starting at position 3931 of SEQ ID NO: 4006
ucuugucaaacuugaggga

SEQ ID NO: 312191 - RNA, 19 nt, Artificial Sequence
  Description of Artificial Sequence: Synthetic oligonucleotide
  Antisense strand to SEQ ID NO: 312190
ucccucaaguuugacaaga

SEQ ID NO: 312192 - RNA, 19 nt, Artificial Sequence
  Description of Artificial Sequence: Synthetic oligonucleotide
  Sense strand starting at position 171 of SEQ ID NO: 4010
ucuggaaaguauucuaaca

SEQ ID NO: 312193 - RNA, 19 nt, Artificial Sequence
  Description of Artificial Sequence: Synthetic oligonucleotide
  Antisense strand to SEQ ID NO: 312192
uguuagaauacuuuccaga

SEQ ID NO: 312194 - RNA, 19 nt, Artificial Sequence
  Description of Artificial Sequence: Synthetic oligonucleotide
  Sense strand starting at position 438 of SEQ ID NO: 4010
ggcuccaaccagugauaaa

SEQ ID NO: 312195 - RNA, 19 nt, Artificial Sequence
  Description of Artificial Sequence: Synthetic oligonucleotide
  Antisense strand to SEQ ID NO: 312194
uuuaucacugguuggagcc

SEQ ID NO: 312196 - RNA, 19 nt, Artificial Sequence
  Description of Artificial Sequence: Synthetic oligonucleotide
  Sense strand starting at position 547 of SEQ ID NO: 4010
auauguccagcuuagaauc

SEQ ID NO: 312197 - RNA, 19 nt, Artificial Sequence
  Description of Artificial Sequence: Synthetic oligonucleotide
  Antisense strand to SEQ ID NO: 312196
gauucuaagcuggacauau

SEQ ID NO: 312198 - RNA, 19 nt, Artificial Sequence
  Description of Artificial Sequence: Synthetic oligonucleotide
  Sense strand starting at position 680 of SEQ ID NO: 4010
cuguucuaguuauuuggca

SEQ ID NO: 312199 - RNA, 19 nt, Artificial Sequence
  Description of Artificial Sequence: Synthetic oligonucleotide
  Antisense strand to SEQ ID NO: 312198
ugccaaauaacuagaacag

SEQ ID NO: 312200 - RNA, 19 nt, Artificial Sequence
  Description of Artificial Sequence: Synthetic oligonucleotide
  Sense strand starting at position 681 of SEQ ID NO: 4010
uguucuaguuauuuggcau

SEQ ID NO: 312201 - RNA, 19 nt, Artificial Sequence
  Description of Artificial Sequence: Synthetic oligonucleotide
  Antisense strand to SEQ ID NO: 312200
augccaaauaacuagaaca

SEQ ID NO: 312202 - RNA, 19 nt, Artificial Sequence
  Description of Artificial Sequence: Synthetic oligonucleotide
  Sense strand starting at position 693 of SEQ ID NO: 4010
uuggcauuacuaggauaua

SEQ ID NO: 312203 - RNA, 19 nt, Artificial Sequence
  Description of Artificial Sequence: Synthetic oligonucleotide
  Antisense strand to SEQ ID NO: 312202
uauauccuaguaaugccaa

SEQ ID NO: 312204 - RNA, 19 nt, Artificial Sequence
  Description of Artificial Sequence: Synthetic oligonucleotide
  Sense strand starting at position 770 of SEQ ID NO: 4010
acaacacuuugggcuagaa

SEQ ID NO: 312205 - RNA, 19 nt, Artificial Sequence
  Description of Artificial Sequence: Synthetic oligonucleotide
  Antisense strand to SEQ ID NO: 312204
uucuagcccaaaguguugu

SEQ ID NO: 312206 - RNA, 19 nt, Artificial Sequence
  Description of Artificial Sequence: Synthetic oligonucleotide
  Sense strand starting at position 872 of SEQ ID NO: 4010
aaagaugccgucuaguaug

SEQ ID NO: 312207 - RNA, 19 nt, Artificial Sequence
  Description of Artificial Sequence: Synthetic oligonucleotide
  Antisense strand to SEQ ID NO: 312206
cauacuagacggcaucuuu

SEQ ID NO: 312208 - RNA, 19 nt, Artificial Sequence
  Description of Artificial Sequence: Synthetic oligonucleotide
  Sense strand starting at position 949 of SEQ ID NO: 4010
ugcacagcaguccaauaau

SEQ ID NO: 312209 - RNA, 19 nt, Artificial Sequence
  Description of Artificial Sequence: Synthetic oligonucleotide
  Antisense strand to SEQ ID NO: 312208
auuauuggacugcugugca

SEQ ID NO: 312210 - RNA, 19 nt, Artificial Sequence
  Description of Artificial Sequence: Synthetic oligonucleotide
  Sense strand starting at position 952 of SEQ ID NO: 4010
acagcaguccaauaaugua

SEQ ID NO: 312211 - RNA, 19 nt, Artificial Sequence
  Description of Artificial Sequence: Synthetic oligonucleotide
  Antisense strand to SEQ ID NO: 312210
uacauuauuggacugcugu

SEQ ID NO: 312212 - RNA, 19 nt, Artificial Sequence
  Description of Artificial Sequence: Synthetic oligonucleotide
  Sense strand starting at position 981 of SEQ ID NO: 4010
ucucuuaacuuggauuuga

SEQ ID NO: 312213 - RNA, 19 nt, Artificial Sequence
  Description of Artificial Sequence: Synthetic oligonucleotide
  Antisense strand to SEQ ID NO: 312212
ucaaauccaaguuaagaga

SEQ ID NO: 312214 - RNA, 19 nt, Artificial Sequence
  Description of Artificial Sequence: Synthetic oligonucleotide
  Sense strand starting at position 1151 of SEQ ID NO: 4010
ugcagacucuucucuagga

SEQ ID NO: 312215 - RNA, 19 nt, Artificial Sequence
  Description of Artificial Sequence: Synthetic oligonucleotide
  Antisense strand to SEQ ID NO: 312214
uccuagagaagagucugca

SEQ ID NO: 312216 - RNA, 19 nt, Artificial Sequence
  Description of Artificial Sequence: Synthetic oligonucleotide
  Sense strand starting at position 1152 of SEQ ID NO: 4010
gcagacucuucucuaggaa

SEQ ID NO: 312217 - RNA, 19 nt, Artificial Sequence
  Description of Artificial Sequence: Synthetic oligonucleotide
  Antisense strand to SEQ ID NO: 312216
uuccuagagaagagucugc

SEQ ID NO: 312218 - RNA, 19 nt, Artificial Sequence
  Description of Artificial Sequence: Synthetic oligonucleotide
  Sense strand starting at position 1530 of SEQ ID NO: 4010
ugcacaguauuucuguauu

SEQ ID NO: 312219 - RNA, 19 nt, Artificial Sequence
  Description of Artificial Sequence: Synthetic oligonucleotide
  Antisense strand to SEQ ID NO: 312218
aauacagaaauacugugca

SEQ ID NO: 312220 - RNA, 19 nt, Artificial Sequence
  Description of Artificial Sequence: Synthetic oligonucleotide
  Sense strand starting at position 1646 of SEQ ID NO: 4010
agcugaauuccacgaaaua

SEQ ID NO: 312221 - RNA, 19 nt, Artificial Sequence
  Description of Artificial Sequence: Synthetic oligonucleotide
  Antisense strand to SEQ ID NO: 312220
uauuucguggaauucagcu

SEQ ID NO: 312222 - RNA, 19 nt, Artificial Sequence
  Description of Artificial Sequence: Synthetic oligonucleotide
  Sense strand starting at position 1647 of SEQ ID NO: 4010
gcugaauuccacgaaauaa

SEQ ID NO: 312223 - RNA, 19 nt, Artificial Sequence
  Description of Artificial Sequence: Synthetic oligonucleotide
  Antisense strand to SEQ ID NO: 312222
uuauuucguggaauucagc

SEQ ID NO: 312224 - RNA, 19 nt, Artificial Sequence
  Description of Artificial Sequence: Synthetic oligonucleotide
  Sense strand starting at position 1803 of SEQ ID NO: 4010
gugcgcuggcucuuacauu

SEQ ID NO: 312225 - RNA, 19 nt, Artificial Sequence
  Description of Artificial Sequence: Synthetic oligonucleotide
  Antisense strand to SEQ ID NO: 312224
aauguaagagccagcgcac

SEQ ID NO: 312226 - RNA, 19 nt, Artificial Sequence
  Description of Artificial Sequence: Synthetic oligonucleotide
  Sense strand starting at position 1876 of SEQ ID NO: 4010
gaaagagaauuagguauuu

SEQ ID NO: 312227 - RNA, 19 nt, Artificial Sequence
  Description of Artificial Sequence: Synthetic oligonucleotide
  Antisense strand to SEQ ID NO: 312226
aaauaccuaauucucuuuc

SEQ ID NO: 312228 - RNA, 19 nt, Artificial Sequence
  Description of Artificial Sequence: Synthetic oligonucleotide
  Sense strand starting at position 2022 of SEQ ID NO: 4010
gugacauuauacuuccuca

SEQ ID NO: 312229 - RNA, 19 nt, Artificial Sequence
  Description of Artificial Sequence: Synthetic oligonucleotide
  Antisense strand to SEQ ID NO: 312228
ugaggaaguauaaugucac

SEQ ID NO: 312230 - RNA, 19 nt, Artificial Sequence
  Description of Artificial Sequence: Synthetic oligonucleotide
  Sense strand starting at position 2072 of SEQ ID NO: 4010
gucagaggcaugugauaag

SEQ ID NO: 312231 - RNA, 19 nt, Artificial Sequence
  Description of Artificial Sequence: Synthetic oligonucleotide
  Antisense strand to SEQ ID NO: 312230
cuuaucacaugccucugac

SEQ ID NO: 312232 - RNA, 19 nt, Artificial Sequence
  Description of Artificial Sequence: Synthetic oligonucleotide
  Sense strand starting at position 2283 of SEQ ID NO: 4010
agggucaccuaucuugaga

SEQ ID NO: 312233 - RNA, 19 nt, Artificial Sequence
  Description of Artificial Sequence: Synthetic oligonucleotide
  Antisense strand to SEQ ID NO: 312232
ucucaagauaggugacccu

SEQ ID NO: 312234 - RNA, 19 nt, Artificial Sequence
  Description of Artificial Sequence: Synthetic oligonucleotide
  Sense strand starting at position 2291 of SEQ ID NO: 4010
cuaucuugagacuggaguu

SEQ ID NO: 312235 - RNA, 19 nt, Artificial Sequence
  Description of Artificial Sequence: Synthetic oligonucleotide
  Antisense strand to SEQ ID NO: 312234
aacuccagucucaagauag

SEQ ID NO: 312236 - RNA, 19 nt, Artificial Sequence
  Description of Artificial Sequence: Synthetic oligonucleotide
  Sense strand starting at position 2361 of SEQ ID NO: 4010
cucugcugucauuaggaca

SEQ ID NO: 312237 - RNA, 19 nt, Artificial Sequence
  Description of Artificial Sequence: Synthetic oligonucleotide
  Antisense strand to SEQ ID NO: 312236
uguccuaaugacagcagag

SEQ ID NO: 312238 - RNA, 19 nt, Artificial Sequence
  Description of Artificial Sequence: Synthetic oligonucleotide
  Sense strand starting at position 2638 of SEQ ID NO: 4010
gccuuccagggcuaaauaa

SEQ ID NO: 312239 - RNA, 19 nt, Artificial Sequence
  Description of Artificial Sequence: Synthetic oligonucleotide
  Antisense strand to SEQ ID NO: 312238
uuauuuagcccuggaaggc

SEQ ID NO: 312240 - RNA, 19 nt, Artificial Sequence
  Description of Artificial Sequence: Synthetic oligonucleotide
  Sense strand starting at position 2726 of SEQ ID NO: 4010
gcaucaucuuccuccagga

SEQ ID NO: 312241 - RNA, 19 nt, Artificial Sequence
  Description of Artificial Sequence: Synthetic oligonucleotide
  Antisense strand to SEQ ID NO: 312240
uccuggaggaagaugaugc

SEQ ID NO: 312242 - RNA, 19 nt, Artificial Sequence
  Description of Artificial Sequence: Synthetic oligonucleotide
  Sense strand starting at position 3039 of SEQ ID NO: 4010
gugugugggagucaaauga

SEQ ID NO: 312243 - RNA, 19 nt, Artificial Sequence
  Description of Artificial Sequence: Synthetic oligonucleotide
  Antisense strand to SEQ ID NO: 312242
ucauuugacucccacacac

SEQ ID NO: 312244 - RNA, 19 nt, Artificial Sequence
  Description of Artificial Sequence: Synthetic oligonucleotide
  Sense strand starting at position 3043 of SEQ ID NO: 4010
gugggagucaaaugaucuc

SEQ ID NO: 312245 - RNA, 19 nt, Artificial Sequence
  Description of Artificial Sequence: Synthetic oligonucleotide
  Antisense strand to SEQ ID NO: 312244
gagaucauuugacucccac

SEQ ID NO: 312246 - RNA, 19 nt, Artificial Sequence
  Description of Artificial Sequence: Synthetic oligonucleotide
  Sense strand starting at position 3049 of SEQ ID NO: 4010
gucaaaugaucuccuggac

SEQ ID NO: 312247 - RNA, 19 nt, Artificial Sequence
  Description of Artificial Sequence: Synthetic oligonucleotide
  Antisense strand to SEQ ID NO: 312246
guccaggagaucauuugac

SEQ ID NO: 312248 - RNA, 19 nt, Artificial Sequence
  Description of Artificial Sequence: Synthetic oligonucleotide
  Sense strand starting at position 3118 of SEQ ID NO: 4010
aguugcuucuauuuggcua

SEQ ID NO: 312249 - RNA, 19 nt, Artificial Sequence
  Description of Artificial Sequence: Synthetic oligonucleotide
  Antisense strand to SEQ ID NO: 312248
uagccaaauagaagcaacu

SEQ ID NO: 312250 - RNA, 19 nt, Artificial Sequence
  Description of Artificial Sequence: Synthetic oligonucleotide
  Sense strand starting at position 3134 of SEQ ID NO: 4010
cuacccuggcaugauuauu

SEQ ID NO: 312251 - RNA, 19 nt, Artificial Sequence
  Description of Artificial Sequence: Synthetic oligonucleotide
  Antisense strand to SEQ ID NO: 312250
aauaaucaugccaggguag

SEQ ID NO: 312252 - RNA, 19 nt, Artificial Sequence
  Description of Artificial Sequence: Synthetic oligonucleotide
  Sense strand starting at position 3326 of SEQ ID NO: 4010
ccugaagucucaccacaug

SEQ ID NO: 312253 - RNA, 19 nt, Artificial Sequence
  Description of Artificial Sequence: Synthetic oligonucleotide
  Antisense strand to SEQ ID NO: 312252
cauguggugagacuucagg

SEQ ID NO: 312254 - RNA, 19 nt, Artificial Sequence
  Description of Artificial Sequence: Synthetic oligonucleotide
  Sense strand starting at position 3424 of SEQ ID NO: 4010
acauuuagauuagacaguu

SEQ ID NO: 312255 - RNA, 19 nt, Artificial Sequence
  Description of Artificial Sequence: Synthetic oligonucleotide
  Antisense strand to SEQ ID NO: 312254
aacugucuaaucuaaaugu

SEQ ID NO: 312256 - RNA, 19 nt, Artificial Sequence
  Description of Artificial Sequence: Synthetic oligonucleotide
  Sense strand starting at position 3430 of SEQ ID NO: 4010
agauuagacaguugaguca

SEQ ID NO: 312257 - RNA, 19 nt, Artificial Sequence
  Description of Artificial Sequence: Synthetic oligonucleotide
  Antisense strand to SEQ ID NO: 312256
ugacucaacugucuaaucu

SEQ ID NO: 312258 - RNA, 19 nt, Artificial Sequence
  Description of Artificial Sequence: Synthetic oligonucleotide
  Sense strand starting at position 3455 of SEQ ID NO: 4010
cuguccaagcuauaguaga

SEQ ID NO: 312259 - RNA, 19 nt, Artificial Sequence
  Description of Artificial Sequence: Synthetic oligonucleotide
  Antisense strand to SEQ ID NO: 312258
ucuacuauagcuuggacag

SEQ ID NO: 312260 - RNA, 19 nt, Artificial Sequence
  Description of Artificial Sequence: Synthetic oligonucleotide
  Sense strand starting at position 3465 of SEQ ID NO: 4010
uauaguagacauggcauua

SEQ ID NO: 312261 - RNA, 19 nt, Artificial Sequence
  Description of Artificial Sequence: Synthetic oligonucleotide
  Antisense strand to SEQ ID NO: 312260
uaaugccaugucuacuaua

SEQ ID NO: 312262 - RNA, 19 nt, Artificial Sequence
  Description of Artificial Sequence: Synthetic oligonucleotide
  Sense strand starting at position 3581 of SEQ ID NO: 4010
augacucaauuugaaugua

SEQ ID NO: 312263 - RNA, 19 nt, Artificial Sequence
  Description of Artificial Sequence: Synthetic oligonucleotide
  Antisense strand to SEQ ID NO: 312262
uacauucaaauugagucau

SEQ ID NO: 312264 - RNA, 19 nt, Artificial Sequence
  Description of Artificial Sequence: Synthetic oligonucleotide
  Sense strand starting at position 3654 of SEQ ID NO: 4010
gcugcauauguucugcuua

SEQ ID NO: 312265 - RNA, 19 nt, Artificial Sequence
  Description of Artificial Sequence: Synthetic oligonucleotide
  Antisense strand to SEQ ID NO: 312264
uaagcagaacauaugcagc

SEQ ID NO: 312266 - RNA, 19 nt, Artificial Sequence
  Description of Artificial Sequence: Synthetic oligonucleotide
  Sense strand starting at position 3667 of SEQ ID NO: 4010
ugcuuaagccguguucugu

SEQ ID NO: 312267 - RNA, 19 nt, Artificial Sequence
  Description of Artificial Sequence: Synthetic oligonucleotide
  Antisense strand to SEQ ID NO: 312266
acagaacacggcuuaagca

SEQ ID NO: 312268 - RNA, 19 nt, Artificial Sequence
  Description of Artificial Sequence: Synthetic oligonucleotide
  Sense strand starting at position 3810 of SEQ ID NO: 4010
ucagaacaguuacagauuu

SEQ ID NO: 312269 - RNA, 19 nt, Artificial Sequence
  Description of Artificial Sequence: Synthetic oligonucleotide
  Antisense strand to SEQ ID NO: 312268
aaaucuguaacuguucuga

SEQ ID NO: 312270 - RNA, 19 nt, Artificial Sequence
  Description of Artificial Sequence: Synthetic oligonucleotide
  Sense strand starting at position 3848 of SEQ ID NO: 4010
aguacagaguucccauaaa

SEQ ID NO: 312271 - RNA, 19 nt, Artificial Sequence
  Description of Artificial Sequence: Synthetic oligonucleotide
  Antisense strand to SEQ ID NO: 312270
uuuaugggaacucuguacu

SEQ ID NO: 312272 - RNA, 19 nt, Artificial Sequence
  Description of Artificial Sequence: Synthetic oligonucleotide
  Sense strand starting at position 12 of SEQ ID NO: 4009
gcccauuucuuggaugaga

SEQ ID NO: 312273 - RNA, 19 nt, Artificial Sequence
  Description of Artificial Sequence: Synthetic oligonucleotide
  Antisense strand to SEQ ID NO: 312272
ucucauccaagaaaugggc

SEQ ID NO: 312274 - RNA, 19 nt, Artificial Sequence
  Description of Artificial Sequence: Synthetic oligonucleotide
  Sense strand starting at position 23 of SEQ ID NO: 4009
ggaugagauaagugaggcu

SEQ ID NO: 312275 - RNA, 19 nt, Artificial Sequence
  Description of Artificial Sequence: Synthetic oligonucleotide
  Antisense strand to SEQ ID NO: 312274
agccucacuuaucucaucc

SEQ ID NO: 312276 - RNA, 19 nt, Artificial Sequence
  Description of Artificial Sequence: Synthetic oligonucleotide
  Sense strand starting at position 66 of SEQ ID NO: 4009
gcaccagaaagugguugaa

SEQ ID NO: 312277 - RNA, 19 nt, Artificial Sequence
  Description of Artificial Sequence: Synthetic oligonucleotide
  Antisense strand to SEQ ID NO: 312276
uucaaccacuuucuggugc

SEQ ID NO: 312278 - RNA, 19 nt, Artificial Sequence
  Description of Artificial Sequence: Synthetic oligonucleotide
  Sense strand starting at position 68 of SEQ ID NO: 4009
accagaaagugguugaaca

SEQ ID NO: 312279 - RNA, 19 nt, Artificial Sequence
  Description of Artificial Sequence: Synthetic oligonucleotide
  Antisense strand to SEQ ID NO: 312278
uguucaaccacuuucuggu

SEQ ID NO: 312280 - RNA, 19 nt, Artificial Sequence
  Description of Artificial Sequence: Synthetic oligonucleotide
  Sense strand starting at position 311 of SEQ ID NO: 4009
ucauaacaucugcagaguu

SEQ ID NO: 312281 - RNA, 19 nt, Artificial Sequence
  Description of Artificial Sequence: Synthetic oligonucleotide
  Antisense strand to SEQ ID NO: 312280
aacucugcagauguuauga

SEQ ID NO: 312282 - RNA, 19 nt, Artificial Sequence
  Description of Artificial Sequence: Synthetic oligonucleotide
  Sense strand starting at position 313 of SEQ ID NO: 4009
auaacaucugcagaguuua

SEQ ID NO: 312283 - RNA, 19 nt, Artificial Sequence
  Description of Artificial Sequence: Synthetic oligonucleotide
  Antisense strand to SEQ ID NO: 312282
uaaacucugcagauguuau

SEQ ID NO: 312284 - RNA, 19 nt, Artificial Sequence
  Description of Artificial Sequence: Synthetic oligonucleotide
  Sense strand starting at position 321 of SEQ ID NO: 4009
ugcagaguuuagucugaac

SEQ ID NO: 312285 - RNA, 19 nt, Artificial Sequence
  Description of Artificial Sequence: Synthetic oligonucleotide
  Antisense strand to SEQ ID NO: 312284
guucagacuaaacucugca

SEQ ID NO: 312286 - RNA, 19 nt, Artificial Sequence
  Description of Artificial Sequence: Synthetic oligonucleotide
  Sense strand starting at position 323 of SEQ ID NO: 4009
cagaguuuagucugaacau

SEQ ID NO: 312287 - RNA, 19 nt, Artificial Sequence
  Description of Artificial Sequence: Synthetic oligonucleotide
  Antisense strand to SEQ ID NO: 312286
auguucagacuaaacucug

SEQ ID NO: 312288 - RNA, 19 nt, Artificial Sequence
  Description of Artificial Sequence: Synthetic oligonucleotide
  Sense strand starting at position 419 of SEQ ID NO: 4009
cagccuugugcggcugaua

SEQ ID NO: 312289 - RNA, 19 nt, Artificial Sequence
  Description of Artificial Sequence: Synthetic oligonucleotide
  Antisense strand to SEQ ID NO: 312288
uaucagccgcacaaggcug

SEQ ID NO: 312290 - RNA, 19 nt, Artificial Sequence
  Description of Artificial Sequence: Synthetic oligonucleotide
  Sense strand starting at position 490 of SEQ ID NO: 4009
agggauuaauaggcagagu

SEQ ID NO: 312291 - RNA, 19 nt, Artificial Sequence
  Description of Artificial Sequence: Synthetic oligonucleotide
  Antisense strand to SEQ ID NO: 312290
acucugccuauuaaucccu

SEQ ID NO: 312292 - RNA, 19 nt, Artificial Sequence
  Description of Artificial Sequence: Synthetic oligonucleotide
  Sense strand starting at position 493 of SEQ ID NO: 4009
gauuaauaggcagagugcu

SEQ ID NO: 312293 - RNA, 19 nt, Artificial Sequence
  Description of Artificial Sequence: Synthetic oligonucleotide
  Antisense strand to SEQ ID NO: 312292
agcacucugccuauuaauc

SEQ ID NO: 312294 - RNA, 19 nt, Artificial Sequence
  Description of Artificial Sequence: Synthetic oligonucleotide
  Sense strand starting at position 573 of SEQ ID NO: 4009
gaacauuucuuggaguuau

SEQ ID NO: 312295 - RNA, 19 nt, Artificial Sequence
  Description of Artificial Sequence: Synthetic oligonucleotide
  Antisense strand to SEQ ID NO: 312294
auaacuccaagaaauguuc

SEQ ID NO: 312296 - RNA, 19 nt, Artificial Sequence
  Description of Artificial Sequence: Synthetic oligonucleotide
  Sense strand starting at position 669 of SEQ ID NO: 4009
uugaaauugcuuugggaag

SEQ ID NO: 312297 - RNA, 19 nt, Artificial Sequence
  Description of Artificial Sequence: Synthetic oligonucleotide
  Antisense strand to SEQ ID NO: 312296
cuucccaaagcaauuucaa

SEQ ID NO: 312298 - RNA, 19 nt, Artificial Sequence
  Description of Artificial Sequence: Synthetic oligonucleotide
  Sense strand starting at position 881 of SEQ ID NO: 4009
uugagaggcuucccagaga

SEQ ID NO: 312299 - RNA, 19 nt, Artificial Sequence
  Description of Artificial Sequence: Synthetic oligonucleotide
  Antisense strand to SEQ ID NO: 312298
ucucugggaagccucucaa

SEQ ID NO: 312300 - RNA, 19 nt, Artificial Sequence
  Description of Artificial Sequence: Synthetic oligonucleotide
  Sense strand starting at position 933 of SEQ ID NO: 4009
ggaauacuccaucgggauu

SEQ ID NO: 312301 - RNA, 19 nt, Artificial Sequence
  Description of Artificial Sequence: Synthetic oligonucleotide
  Antisense strand to SEQ ID NO: 312300
aaucccgauggaguauucc

SEQ ID NO: 312302 - RNA, 19 nt, Artificial Sequence
  Description of Artificial Sequence: Synthetic oligonucleotide
  Sense strand starting at position 1059 of SEQ ID NO: 4009
gcucuuugcgauuaacaaa

SEQ ID NO: 312303 - RNA, 19 nt, Artificial Sequence
  Description of Artificial Sequence: Synthetic oligonucleotide
  Antisense strand to SEQ ID NO: 312302
uuuguuaaucgcaaagagc

SEQ ID NO: 312304 - RNA, 19 nt, Artificial Sequence
  Description of Artificial Sequence: Synthetic oligonucleotide
  Sense strand starting at position 1187 of SEQ ID NO: 4009
aagugaagcugucucugga

SEQ ID NO: 312305 - RNA, 19 nt, Artificial Sequence
  Description of Artificial Sequence: Synthetic oligonucleotide
  Antisense strand to SEQ ID NO: 312304
uccagagacagcuucacuu

SEQ ID NO: 312306 - RNA, 19 nt, Artificial Sequence
  Description of Artificial Sequence: Synthetic oligonucleotide
  Sense strand starting at position 1271 of SEQ ID NO: 4009
uggagaugucucuaagguc

SEQ ID NO: 312307 - RNA, 19 nt, Artificial Sequence
  Description of Artificial Sequence: Synthetic oligonucleotide
  Antisense strand to SEQ ID NO: 312306
gaccuuagagacaucucca

SEQ ID NO: 312308 - RNA, 19 nt, Artificial Sequence
  Description of Artificial Sequence: Synthetic oligonucleotide
  Sense strand starting at position 1511 of SEQ ID NO: 4009
gcucgagaccuacggagau

SEQ ID NO: 312309 - RNA, 19 nt, Artificial Sequence
  Description of Artificial Sequence: Synthetic oligonucleotide
  Antisense strand to SEQ ID NO: 312308
aucuccguaggucucgagc

SEQ ID NO: 312310 - RNA, 19 nt, Artificial Sequence
  Description of Artificial Sequence: Synthetic oligonucleotide
  Sense strand starting at position 2009 of SEQ ID NO: 4009
gggaacuucgccgagaugu

SEQ ID NO: 312311 - RNA, 19 nt, Artificial Sequence
  Description of Artificial Sequence: Synthetic oligonucleotide
  Antisense strand to SEQ ID NO: 312310
acaucucggcgaaguuccc

SEQ ID NO: 312312 - RNA, 19 nt, Artificial Sequence
  Description of Artificial Sequence: Synthetic oligonucleotide
  Sense strand starting at position 2575 of SEQ ID NO: 4009
ugcucuucccucggaaaga

SEQ ID NO: 312313 - RNA, 19 nt, Artificial Sequence
  Description of Artificial Sequence: Synthetic oligonucleotide
  Antisense strand to SEQ ID NO: 312312
ucuuuccgagggaagagca

SEQ ID NO: 312314 - RNA, 19 nt, Artificial Sequence
  Description of Artificial Sequence: Synthetic oligonucleotide
  Sense strand starting at position 2606 of SEQ ID NO: 4009
ucacaagucgguuggaauu

SEQ ID NO: 312315 - RNA, 19 nt, Artificial Sequence
  Description of Artificial Sequence: Synthetic oligonucleotide
  Antisense strand to SEQ ID NO: 312314
aauuccaaccgacuuguga

SEQ ID NO: 312316 - RNA, 19 nt, Artificial Sequence
  Description of Artificial Sequence: Synthetic oligonucleotide
  Sense strand starting at position 2841 of SEQ ID NO: 4009
gagugugcauuugaaagga

SEQ ID NO: 312317 - RNA, 19 nt, Artificial Sequence
  Description of Artificial Sequence: Synthetic oligonucleotide
  Antisense strand to SEQ ID NO: 312316
uccuuucaaaugcacacuc

SEQ ID NO: 312318 - RNA, 19 nt, Artificial Sequence
  Description of Artificial Sequence: Synthetic oligonucleotide
  Sense strand starting at position 2875 of SEQ ID NO: 4009
ucuugcucaguguaauaac

SEQ ID NO: 312319 - RNA, 19 nt, Artificial Sequence
  Description of Artificial Sequence: Synthetic oligonucleotide
  Antisense strand to SEQ ID NO: 312318
guuauuacacugagcaaga

SEQ ID NO: 312320 - RNA, 19 nt, Artificial Sequence
  Description of Artificial Sequence: Synthetic oligonucleotide
  Sense strand starting at position 2885 of SEQ ID NO: 4009
uguaauaaccaucggauca

SEQ ID NO: 312321 - RNA, 19 nt, Artificial Sequence
  Description of Artificial Sequence: Synthetic oligonucleotide
  Antisense strand to SEQ ID NO: 312320
ugauccgaugguuauuaca

SEQ ID NO: 312322 - RNA, 19 nt, Artificial Sequence
  Description of Artificial Sequence: Synthetic oligonucleotide
  Sense strand starting at position 2912 of SEQ ID NO: 4009
aaauaucaaggcuguguau
